United States Patent Application Publication US 2025/0171800 A1 - sequence listing, part 4

SEQ ID NO: 68800 - DNA, 20 bp, synthetic construct
  misc_feature 1..20: note = chemically synthesized
  source 1..20: mol_type = other DNA
tagtgagttctcaagaggct

SEQ ID NO: 68801 - DNA, 20 bp, synthetic construct
  misc_feature 1..20: note = chemically synthesized
  source 1..20: mol_type = other DNA
aaagtgtgtagcacctccta

SEQ ID NO: 68802 - DNA, 20 bp, synthetic construct
  misc_feature 1..20: note = chemically synthesized
  source 1..20: mol_type = other DNA
ggccatgtgaagatacttgc

SEQ ID NO: 68803 - DNA, 20 bp, synthetic construct
  misc_feature 1..20: note = chemically synthesized
  source 1..20: mol_type = other DNA
tgctcctgctttgtcttctg

SEQ ID NO: 68804 - DNA, 20 bp, synthetic construct
  misc_feature 1..20: note = chemically synthesized
  source 1..20: mol_type = other DNA
ctttgtcttctgccatgatt

SEQ ID NO: 68805 - DNA, 20 bp, synthetic construct
  misc_feature 1..20: note = chemically synthesized
  source 1..20: mol_type = other DNA
tagaagctgagcagatgctg

SEQ ID NO: 68806 - DNA, 20 bp, synthetic construct
  misc_feature 1..20: note = chemically synthesized
  source 1..20: mol_type = other DNA
tcctttgatactcaatgtga

SEQ ID NO: 68807 - DNA, 20 bp, synthetic construct
  misc_feature 1..20: note = chemically synthesized
  source 1..20: mol_type = other DNA
gtctattattgaatatctat

SEQ ID NO: 68808 - DNA, 20 bp, synthetic construct
  misc_feature 1..20: note = chemically synthesized
  source 1..20: mol_type = other DNA
atatgaaagactataggaat

SEQ ID NO: 68809 - DNA, 20 bp, synthetic construct
  misc_feature 1..20: note = chemically synthesized
  source 1..20: mol_type = other DNA
taaagctctttatgtctttt

SEQ ID NO: 68810 - DNA, 20 bp, synthetic construct
  misc_feature 1..20: note = chemically synthesized
  source 1..20: mol_type = other DNA
attctatcctatggatgttc

SEQ ID NO: 68811 - DNA, 20 bp, synthetic construct
  misc_feature 1..20: note = chemically synthesized
  source 1..20: mol_type = other DNA
atttgggtaaatacatagga

SEQ ID NO: 68812 - DNA, 20 bp, synthetic construct
  misc_feature 1..20: note = chemically synthesized
  source 1..20: mol_type = other DNA
ttgttgggtcacatgaaaag

SEQ ID NO: 68813 - DNA, 20 bp, synthetic construct
  misc_feature 1..20: note = chemically synthesized
  source 1..20: mol_type = other DNA
ctgttgctccacttcgttgc

SEQ ID NO: 68814 - DNA, 20 bp, synthetic construct
  misc_feature 1..20: note = chemically synthesized
  source 1..20: mol_type = other DNA
gtgtgtagtggttggtatct

SEQ ID NO: 68815 - DNA, 20 bp, synthetic construct
  misc_feature 1..20: note = chemically synthesized
  source 1..20: mol_type = other DNA
ggtatcttcttgttttaatg

SEQ ID NO: 68816 - DNA, 20 bp, synthetic construct
  misc_feature 1..20: note = chemically synthesized
  source 1..20: mol_type = other DNA
gtgttactgagtatattttc

SEQ ID NO: 68817 - DNA, 20 bp, synthetic construct
  misc_feature 1..20: note = chemically synthesized
  source 1..20: mol_type = other DNA
gatcttttgcccactttgca

SEQ ID NO: 68818 - DNA, 20 bp, synthetic construct
  misc_feature 1..20: note = chemically synthesized
  source 1..20: mol_type = other DNA
ttttgcccactttgcaattg

SEQ ID NO: 68819 - DNA, 20 bp, synthetic construct
  misc_feature 1..20: note = chemically synthesized
  source 1..20: mol_type = other DNA
gcccactttgcaattggatt

SEQ ID NO: 68820 - DNA, 20 bp, synthetic construct
  misc_feature 1..20: note = chemically synthesized
  source 1..20: mol_type = other DNA
tacaagtcctttatcagata

SEQ ID NO: 68821 - DNA, 20 bp, synthetic construct
  misc_feature 1..20: note = chemically synthesized
  source 1..20: mol_type = other DNA
tgttttgcaaatatgttctc

SEQ ID NO: 68822 - DNA, 20 bp, synthetic construct
  misc_feature 1..20: note = chemically synthesized
  source 1..20: mol_type = other DNA
ttgcaaatatgttctctgtg

SEQ ID NO: 68823 - DNA, 20 bp, synthetic construct
  misc_feature 1..20: note = chemically synthesized
  source 1..20: mol_type = other DNA
cactctctcctgaactccag

SEQ ID NO: 68824 - DNA, 20 bp, synthetic construct
  misc_feature 1..20: note = chemically synthesized
  source 1..20: mol_type = other DNA
cttcatctcatctctcatat

SEQ ID NO: 68825 - DNA, 20 bp, synthetic construct
  misc_feature 1..20: note = chemically synthesized
  source 1..20: mol_type = other DNA
tattatgcacctcttttatt

SEQ ID NO: 68826 - DNA, 20 bp, synthetic construct
  misc_feature 1..20: note = chemically synthesized
  source 1..20: mol_type = other DNA
ctgaataagctgtgctccaa

SEQ ID NO: 68827 - DNA, 20 bp, synthetic construct
  misc_feature 1..20: note = chemically synthesized
  source 1..20: mol_type = other DNA
aaataagttttctttattaa

SEQ ID NO: 68828 - DNA, 20 bp, synthetic construct
  misc_feature 1..20: note = chemically synthesized
  source 1..20: mol_type = other DNA
tgttcaaaggatggtgtgtc

SEQ ID NO: 68829 - DNA, 20 bp, synthetic construct
  misc_feature 1..20: note = chemically synthesized
  source 1..20: mol_type = other DNA
tttgttacttcagatgtgtc

SEQ ID NO: 68830 - DNA, 20 bp, synthetic construct
  misc_feature 1..20: note = chemically synthesized
  source 1..20: mol_type = other DNA
catgctgggttcgtggtctt

SEQ ID NO: 68831 - DNA, 20 bp, synthetic construct
  misc_feature 1..20: note = chemically synthesized
  source 1..20: mol_type = other DNA
gatccaaagagtgagcagca

SEQ ID NO: 68832 - DNA, 20 bp, synthetic construct
  misc_feature 1..20: note = chemically synthesized
  source 1..20: mol_type = other DNA
tattgtgaagaataaaagaa

SEQ ID NO: 68833 - DNA, 20 bp, synthetic construct
  misc_feature 1..20: note = chemically synthesized
  source 1..20: mol_type = other DNA
atctgaccccacccacatcc

SEQ ID NO: 68834 - DNA, 20 bp, synthetic construct
  misc_feature 1..20: note = chemically synthesized
  source 1..20: mol_type = other DNA
gattggtccattttacagag

SEQ ID NO: 68835 - DNA, 20 bp, synthetic construct
  misc_feature 1..20: note = chemically synthesized
  source 1..20: mol_type = other DNA
attttacagagagctggttg

SEQ ID NO: 68836 - DNA, 20 bp, synthetic construct
  misc_feature 1..20: note = chemically synthesized
  source 1..20: mol_type = other DNA
gttggtccgttttggcagag

SEQ ID NO: 68837 - DNA, 20 bp, synthetic construct
  misc_feature 1..20: note = chemically synthesized
  source 1..20: mol_type = other DNA
accttgagctagacacagag

SEQ ID NO: 68838 - DNA, 20 bp, synthetic construct
  misc_feature 1..20: note = chemically synthesized
  source 1..20: mol_type = other DNA
caaaagttctccaagtcccc

SEQ ID NO: 68839 - DNA, 20 bp, synthetic construct
  misc_feature 1..20: note = chemically synthesized
  source 1..20: mol_type = other DNA
tagattagctagacacagag

SEQ ID NO: 68840 - DNA, 20 bp, synthetic construct
  misc_feature 1..20: note = chemically synthesized
  source 1..20: mol_type = other DNA
tttacaaaccttgagttaga

SEQ ID NO: 68841 - DNA, 20 bp, synthetic construct
  misc_feature 1..20: note = chemically synthesized
  source 1..20: mol_type = other DNA
accttgagttagacacagat

SEQ ID NO: 68842 - DNA, 20 bp, synthetic construct
  misc_feature 1..20: note = chemically synthesized
  source 1..20: mol_type = other DNA
gagaactttcatgtctagct

SEQ ID NO: 68843 - DNA, 20 bp, synthetic construct
  misc_feature 1..20: note = chemically synthesized
  source 1..20: mol_type = other DNA
caaatgtccaacaatgatag

SEQ ID NO: 68844 - DNA, 20 bp, synthetic construct
  misc_feature 1..20: note = chemically synthesized
  source 1..20: mol_type = other DNA
taattttaaaaagagtatag

SEQ ID NO: 68845 - DNA, 20 bp, synthetic construct
  misc_feature 1..20: note = chemically synthesized
  source 1..20: mol_type = other DNA
ctattagtcctttctcttga

SEQ ID NO: 68846 - DNA, 20 bp, synthetic construct
  misc_feature 1..20: note = chemically synthesized
  source 1..20: mol_type = other DNA
tgtattcttttgcataatct

SEQ ID NO: 68847 - DNA, 20 bp, synthetic construct
  misc_feature 1..20: note = chemically synthesized
  source 1..20: mol_type = other DNA
tttcccagtgtctggatcat

SEQ ID NO: 68848 - DNA, 20 bp, synthetic construct
  misc_feature 1..20: note = chemically synthesized
  source 1..20: mol_type = other DNA
tttttagccctacccctcac

SEQ ID NO: 68849 - DNA, 20 bp, synthetic construct
  misc_feature 1..20: note = chemically synthesized
  source 1..20: mol_type = other DNA
gaatgctttataagtaattt

SEQ ID NO: 68850 - DNA, 20 bp, synthetic construct
  misc_feature 1..20: note = chemically synthesized
  source 1..20: mol_type = other DNA
cagaaaatgctctttgcaga

SEQ ID NO: 68851 - DNA, 20 bp, synthetic construct
  misc_feature 1..20: note = chemically synthesized
  source 1..20: mol_type = other DNA
ggtatccttttctgtagaca

SEQ ID NO: 68852 - DNA, 20 bp, synthetic construct
  misc_feature 1..20: note = chemically synthesized
  source 1..20: mol_type = other DNA
ttttctgtagacatatagat

SEQ ID NO: 68853 - DNA, 20 bp, synthetic construct
  misc_feature 1..20: note = chemically synthesized
  source 1..20: mol_type = other DNA
atagatttcagattatcctg

SEQ ID NO: 68854 - DNA, 20 bp, synthetic construct
  misc_feature 1..20: note = chemically synthesized
  source 1..20: mol_type = other DNA
acagtgtctctgtgtacatc

SEQ ID NO: 68855 - DNA, 20 bp, synthetic construct
  misc_feature 1..20: note = chemically synthesized
  source 1..20: mol_type = other DNA
ctgtgtacatctatagcttt

SEQ ID NO: 68856 - DNA, 20 bp, synthetic construct
  misc_feature 1..20: note = chemically synthesized
  source 1..20: mol_type = other DNA
atgaacacatattcagtctg

SEQ ID NO: 68857 - DNA, 20 bp, synthetic construct
  misc_feature 1..20: note = chemically synthesized
  source 1..20: mol_type = other DNA
gaaaaatacataaataaaag

SEQ ID NO: 68858 - DNA, 20 bp, synthetic construct
  misc_feature 1..20: note = chemically synthesized
  source 1..20: mol_type = other DNA
taaattgacacaaaattagc

SEQ ID NO: 68859 - DNA, 20 bp, synthetic construct
  misc_feature 1..20: note = chemically synthesized
  source 1..20: mol_type = other DNA
ccagcatctcaaaagctaaa

SEQ ID NO: 68860 - DNA, 20 bp, synthetic construct
  misc_feature 1..20: note = chemically synthesized
  source 1..20: mol_type = other DNA
catctcaaaagctaaacacc

SEQ ID NO: 68861 - DNA, 20 bp, synthetic construct
  misc_feature 1..20: note = chemically synthesized
  source 1..20: mol_type = other DNA
agaaaccacacttttactgg

SEQ ID NO: 68862 - DNA, 20 bp, synthetic construct
  misc_feature 1..20: note = chemically synthesized
  source 1..20: mol_type = other DNA
ggctaggttggcattaattt

SEQ ID NO: 68863 - DNA, 20 bp, synthetic construct
  misc_feature 1..20: note = chemically synthesized
  source 1..20: mol_type = other DNA
tcaagtagaacatctcttaa

SEQ ID NO: 68864 - DNA, 20 bp, synthetic construct
  misc_feature 1..20: note = chemically synthesized
  source 1..20: mol_type = other DNA
tctcttaagtctgtttaaca

SEQ ID NO: 68865 - DNA, 20 bp, synthetic construct
  misc_feature 1..20: note = chemically synthesized
  source 1..20: mol_type = other DNA
gtcacatcggcagtggcggc

SEQ ID NO: 68866 - DNA, 20 bp, synthetic construct
  misc_feature 1..20: note = chemically synthesized
  source 1..20: mol_type = other DNA
ggcatgcaagggatctaggt

SEQ ID NO: 68867 - DNA, 20 bp, synthetic construct
  misc_feature 1..20: note = chemically synthesized
  source 1..20: mol_type = other DNA
tgcctaatgctctgaggtgg

SEQ ID NO: 68868 - DNA, 20 bp, synthetic construct
  misc_feature 1..20: note = chemically synthesized
  source 1..20: mol_type = other DNA
gtgtacagtgaacatctgcc

SEQ ID NO: 68869 - DNA, 20 bp, synthetic construct
  misc_feature 1..20: note = chemically synthesized
  source 1..20: mol_type = other DNA
gtcctctcacttctaagaat

SEQ ID NO: 68870 - DNA, 20 bp, synthetic construct
  misc_feature 1..20: note = chemically synthesized
  source 1..20: mol_type = other DNA
actgatttctcccactggac

SEQ ID NO: 68871 - DNA, 20 bp, synthetic construct
  misc_feature 1..20: note = chemically synthesized
  source 1..20: mol_type = other DNA
gcaattgaatggactagact

SEQ ID NO: 68872 - DNA, 20 bp, synthetic construct
  misc_feature 1..20: note = chemically synthesized
  source 1..20: mol_type = other DNA
caccttgttctcggcaatat

SEQ ID NO: 68873 - DNA, 20 bp, synthetic construct
  misc_feature 1..20: note = chemically synthesized
  source 1..20: mol_type = other DNA
aaaaaaaaggcaaaagagaa

SEQ ID NO: 68874 - DNA, 20 bp, synthetic construct
  misc_feature 1..20: note = chemically synthesized
  source 1..20: mol_type = other DNA
tgtttccctaacatcactgt

SEQ ID NO: 68875 - DNA, 20 bp, synthetic construct
  misc_feature 1..20: note = chemically synthesized
  source 1..20: mol_type = other DNA
catcactgtggctgttttcg

SEQ ID NO: 68876 - DNA, 20 bp, synthetic construct
  misc_feature 1..20: note = chemically synthesized
  source 1..20: mol_type = other DNA
gccttacaaaggaatctgat

SEQ ID NO: 68877 - DNA, 20 bp, synthetic construct
  misc_feature 1..20: note = chemically synthesized
  source 1..20: mol_type = other DNA
ctgcaggctaccacatcaac

SEQ ID NO: 68878 - DNA, 20 bp, synthetic construct
  misc_feature 1..20: note = chemically synthesized
  source 1..20: mol_type = other DNA
tgttgcctaattcatggaaa

SEQ ID NO: 68879 - DNA, 20 bp, synthetic construct
  misc_feature 1..20: note = chemically synthesized
  source 1..20: mol_type = other DNA
gaaaacaagtttccttagaa

SEQ ID NO: 68880 - DNA, 20 bp, synthetic construct
  misc_feature 1..20: note = chemically synthesized
  source 1..20: mol_type = other DNA
atgtctccacctggctacta

SEQ ID NO: 68881 - DNA, 20 bp, synthetic construct
  misc_feature 1..20: note = chemically synthesized
  source 1..20: mol_type = other DNA
atgtagcttttcaaaacaga

SEQ ID NO: 68882 - DNA, 20 bp, synthetic construct
  misc_feature 1..20: note = chemically synthesized
  source 1..20: mol_type = other DNA
attgccttttcttcctcagg

SEQ ID NO: 68883 - DNA, 20 bp, synthetic construct
  misc_feature 1..20: note = chemically synthesized
  source 1..20: mol_type = other DNA
gtttagttatttttttaagt

SEQ ID NO: 68884 - DNA, 20 bp, synthetic construct
  misc_feature 1..20: note = chemically synthesized
  source 1..20: mol_type = other DNA
ctaaactactaatgttctaa

SEQ ID NO: 68885 - DNA, 20 bp, synthetic construct
  misc_feature 1..20: note = chemically synthesized
  source 1..20: mol_type = other DNA
tataaagcccagtaatcata

SEQ ID NO: 68886 - DNA, 20 bp, synthetic construct
  misc_feature 1..20: note = chemically synthesized
  source 1..20: mol_type = other DNA
atcatataaagtttactttc

SEQ ID NO: 68887 - DNA, 20 bp, synthetic construct
  misc_feature 1..20: note = chemically synthesized
  source 1..20: mol_type = other DNA
tggctttttttttttttttt

SEQ ID NO: 68888 - DNA, 20 bp, synthetic construct
  misc_feature 1..20: note = chemically synthesized
  source 1..20: mol_type = other DNA
tcctccctttggctgaattg

SEQ ID NO: 68889 - DNA, 20 bp, synthetic construct
  misc_feature 1..20: note = chemically synthesized
  source 1..20: mol_type = other DNA
ttatatagctctaaaataag

SEQ ID NO: 68890 - DNA, 20 bp, synthetic construct
  misc_feature 1..20: note = chemically synthesized
  source 1..20: mol_type = other DNA
actcttaggtattttttatt

SEQ ID NO: 68891 - DNA, 20 bp, synthetic construct
  misc_feature 1..20: note = chemically synthesized
  source 1..20: mol_type = other DNA
taataaatataaattcattc

SEQ ID NO: 68892 - DNA, 20 bp, synthetic construct
  misc_feature 1..20: note = chemically synthesized
  source 1..20: mol_type = other DNA
ttgtcagttgttgaagaatt

SEQ ID NO: 68893 - DNA, 20 bp, synthetic construct
  misc_feature 1..20: note = chemically synthesized
  source 1..20: mol_type = other DNA
tctccggcgtatgggagggt

SEQ ID NO: 68894 - DNA, 20 bp, synthetic construct
  misc_feature 1..20: note = chemically synthesized
  source 1..20: mol_type = other DNA
tcactttcaaagcattagaa

SEQ ID NO: 68895 - DNA, 20 bp, synthetic construct
  misc_feature 1..20: note = chemically synthesized
  source 1..20: mol_type = other DNA
tgagacattcacatgacctc

SEQ ID NO: 68896 - DNA, 20 bp, synthetic construct
  misc_feature 1..20: note = chemically synthesized
  source 1..20: mol_type = other DNA
aactggggcataggaatctt

SEQ ID NO: 68897 - DNA, 20 bp, synthetic construct
  misc_feature 1..20: note = chemically synthesized
  source 1..20: mol_type = other DNA
caccacgcctggatactttc

SEQ ID NO: 68898 - DNA, 20 bp, synthetic construct
  misc_feature 1..20: note = chemically synthesized
  source 1..20: mol_type = other DNA
ttgtgtttttttagtagaga

SEQ ID NO: 68899 - DNA, 20 bp, synthetic construct
  misc_feature 1..20: note = chemically synthesized
  source 1..20: mol_type = other DNA
tccgcccgcctcggcagcta

SEQ ID NO: 68900 - DNA, 20 bp, synthetic construct
  misc_feature 1..20: note = chemically synthesized
  source 1..20: mol_type = other DNA
ttcccctctagaacctacct

SEQ ID NO: 68901 - DNA, 20 bp, synthetic construct
  misc_feature 1..20: note = chemically synthesized
  source 1..20: mol_type = other DNA
cagaaacaatttcctcactt

SEQ ID NO: 68902 - DNA, 20 bp, synthetic construct
  misc_feature 1..20: note = chemically synthesized
  source 1..20: mol_type = other DNA
ttagaaaccaaagcctgtat

SEQ ID NO: 68903 - DNA, 20 bp, synthetic construct
  misc_feature 1..20: note = chemically synthesized
  source 1..20: mol_type = other DNA
aattacaggaagacaaatct

SEQ ID NO: 68904 - DNA, 20 bp, synthetic construct
  misc_feature 1..20: note = chemically synthesized
  source 1..20: mol_type = other DNA
atctaaaaataaaaataaat

SEQ ID NO: 68905 - DNA, 20 bp, synthetic construct
  misc_feature 1..20: note = chemically synthesized
  source 1..20: mol_type = other DNA
tagatacctaatagaatata

SEQ ID NO: 68906 - DNA, 20 bp, synthetic construct
  misc_feature 1..20: note = chemically synthesized
  source 1..20: mol_type = other DNA
ttattttcttgttatccatg

SEQ ID NO: 68907 - DNA, 20 bp, synthetic construct
  misc_feature 1..20: note = chemically synthesized
  source 1..20: mol_type = other DNA
ttatccatgcatagttttgt

SEQ ID NO: 68908 - DNA, 20 bp, synthetic construct
  misc_feature 1..20: note = chemically synthesized
  source 1..20: mol_type = other DNA
ttccttctttggaaagctgc

SEQ ID NO: 68909 - DNA, 20 bp, synthetic construct
  misc_feature 1..20: note = chemically synthesized
  source 1..20: mol_type = other DNA
cactagcttacttagaaaag

SEQ ID NO: 68910 - DNA, 20 bp, synthetic construct
  misc_feature 1..20: note = chemically synthesized
  source 1..20: mol_type = other DNA
agcaaaagatctagagcaaa

SEQ ID NO: 68911 - DNA, 20 bp, synthetic construct
  misc_feature 1..20: note = chemically synthesized
  source 1..20: mol_type = other DNA
cacatataaaatctaaaaaa

SEQ ID NO: 68912 - DNA, 20 bp, synthetic construct
  misc_feature 1..20: note = chemically synthesized
  source 1..20: mol_type = other DNA
tttgtgtcctctttatgaac

SEQ ID NO: 68913 - DNA, 20 bp, synthetic construct
  misc_feature 1..20: note = chemically synthesized
  source 1..20: mol_type = other DNA
gtattttatagaacatcgcc

SEQ ID NO: 68914 - DNA, 20 bp, synthetic construct
  misc_feature 1..20: note = chemically synthesized
  source 1..20: mol_type = other DNA
ctcagagaatgaaagaaact

SEQ ID NO: 68915 - DNA, 20 bp, synthetic construct
  misc_feature 1..20: note = chemically synthesized
  source 1..20: mol_type = other DNA
ctactttgaaacttgaaaac

SEQ ID NO: 68916 - DNA, 20 bp, synthetic construct
  misc_feature 1..20: note = chemically synthesized
  source 1..20: mol_type = other DNA
ttgaaaacctaggtttttaa

SEQ ID NO: 68917 - DNA, 20 bp, synthetic construct
  misc_feature 1..20: note = chemically synthesized
  source 1..20: mol_type = other DNA
aacctaggtttttaatccag

SEQ ID NO: 68918 - DNA, 20 bp, synthetic construct
  misc_feature 1..20: note = chemically synthesized
  source 1..20: mol_type = other DNA
gtccaggctgacacaatgga

SEQ ID NO: 68919 - DNA, 20 bp, synthetic construct
  misc_feature 1..20: note = chemically synthesized
  source 1..20: mol_type = other DNA
ctgacacaatggaacttgtt

SEQ ID NO: 68920 - DNA, 20 bp, synthetic construct
  misc_feature 1..20: note = chemically synthesized
  source 1..20: mol_type = other DNA
taattttttcttttttatgg

SEQ ID NO: 68921 - DNA, 20 bp, synthetic construct
  misc_feature 1..20: note = chemically synthesized
  source 1..20: mol_type = other DNA
ttcttttttatggcactgat

SEQ ID NO: 68922 - DNA, 20 bp, synthetic construct
  misc_feature 1..20: note = chemically synthesized
  source 1..20: mol_type = other DNA
tgatttttgtttattattgt

SEQ ID NO: 68923 - DNA, 20 bp, synthetic construct
  misc_feature 1..20: note = chemically synthesized
  source 1..20: mol_type = other DNA
gggtcttgacactgtagatg

SEQ ID NO: 68924 - DNA, 20 bp, synthetic construct
  misc_feature 1..20: note = chemically synthesized
  source 1..20: mol_type = other DNA
gaacgtgggccacgggggaa

SEQ ID NO: 68925 - DNA, 20 bp, synthetic construct
  misc_feature 1..20: note = chemically synthesized
  source 1..20: mol_type = other DNA
tcaggatggaggaataacgt

SEQ ID NO: 68926 - DNA, 20 bp, synthetic construct
  misc_feature 1..20: note = chemically synthesized
  source 1..20: mol_type = other DNA
gaagtaaaacataggctggt

SEQ ID NO: 68927 - DNA, 20 bp, synthetic construct
  misc_feature 1..20: note = chemically synthesized
  source 1..20: mol_type = other DNA
attgcccaaaagcaccatgg

SEQ ID NO: 68928 - DNA, 20 bp, synthetic construct
  misc_feature 1..20: note = chemically synthesized
  source 1..20: mol_type = other DNA
ggaagaattcgtgctggtgc

SEQ ID NO: 68929 - DNA, 20 bp, synthetic construct
  misc_feature 1..20: note = chemically synthesized
  source 1..20: mol_type = other DNA
tgagagtattttttcaaagg

SEQ ID NO: 68930 - DNA, 20 bp, synthetic construct
  misc_feature 1..20: note = chemically synthesized
  source 1..20: mol_type = other DNA
taaaaaaaacagctgagaaa

SEQ ID NO: 68931 - DNA, 20 bp, synthetic construct
  misc_feature 1..20: note = chemically synthesized
  source 1..20: mol_type = other DNA
ataagcaaaaacaaataagg

SEQ ID NO: 68932 - DNA, 20 bp, synthetic construct
  misc_feature 1..20: note = chemically synthesized
  source 1..20: mol_type = other DNA
gagattagtaaaaggagaag

SEQ ID NO: 68933 - DNA, 20 bp, synthetic construct
  misc_feature 1..20: note = chemically synthesized
  source 1..20: mol_type = other DNA
aggctagttttaaaaaaata

SEQ ID NO: 68934 - DNA, 20 bp, synthetic construct
  misc_feature 1..20: note = chemically synthesized
  source 1..20: mol_type = other DNA
ttcgaagtgaagagtaatct

SEQ ID NO: 68935 - DNA, 20 bp, synthetic construct
  misc_feature 1..20: note = chemically synthesized
  source 1..20: mol_type = other DNA
atactatttaatgaagatac

SEQ ID NO: 68936 - DNA, 20 bp, synthetic construct
  misc_feature 1..20: note = chemically synthesized
  source 1..20: mol_type = other DNA
ttatgcatgagaccttgggt

SEQ ID NO: 68937 - DNA, 20 bp, synthetic construct
  misc_feature 1..20: note = chemically synthesized
  source 1..20: mol_type = other DNA
gtgcctttgtgatgtagaga

SEQ ID NO: 68938 - DNA, 20 bp, synthetic construct
  misc_feature 1..20: note = chemically synthesized
  source 1..20: mol_type = other DNA
ctgagcctttgatagcagct

SEQ ID NO: 68939 - DNA, 20 bp, synthetic construct
  misc_feature 1..20: note = chemically synthesized
  source 1..20: mol_type = other DNA
ctttatttattcagttaatg

SEQ ID NO: 68940 - DNA, 20 bp, synthetic construct
  misc_feature 1..20: note = chemically synthesized
  source 1..20: mol_type = other DNA
ttattcaatgtattggccaa

SEQ ID NO: 68941 - DNA, 20 bp, synthetic construct
  misc_feature 1..20: note = chemically synthesized
  source 1..20: mol_type = other DNA
acaaagccaggctcaaacaa

SEQ ID NO: 68942 - DNA, 20 bp, synthetic construct
  misc_feature 1..20: note = chemically synthesized
  source 1..20: mol_type = other DNA
gcctcatggtagcagaatca

SEQ ID NO: 68943 - DNA, 20 bp, synthetic construct
  misc_feature 1..20: note = chemically synthesized
  source 1..20: mol_type = other DNA
atcaattggcttcttcttta

SEQ ID NO: 68944 - DNA, 20 bp, synthetic construct
  misc_feature 1..20: note = chemically synthesized
  source 1..20: mol_type = other DNA
gcttcttctttacattgttt

SEQ ID NO: 68945 - DNA, 20 bp, synthetic construct
  misc_feature 1..20: note = chemically synthesized
  source 1..20: mol_type = other DNA
ttccagacctgagaatcatc

SEQ ID NO: 68946 - DNA, 20 bp, synthetic construct
  misc_feature 1..20: note = chemically synthesized
  source 1..20: mol_type = other DNA
atgttcaaaagtccatactt

SEQ ID NO: 68947 - DNA, 20 bp, synthetic construct
  misc_feature 1..20: note = chemically synthesized
  source 1..20: mol_type = other DNA
tcaaaagtccatactttcat

SEQ ID NO: 68948 - DNA, 20 bp, synthetic construct
  misc_feature 1..20: note = chemically synthesized
  source 1..20: mol_type = other DNA
cttcgagatgttaaagtaac

SEQ ID NO: 68949 - DNA, 20 bp, synthetic construct
  misc_feature 1..20: note = chemically synthesized
  source 1..20: mol_type = other DNA
ctgccctttatgtcctactt

SEQ ID NO: 68950 - DNA, 20 bp, synthetic construct
  misc_feature 1..20: note = chemically synthesized
  source 1..20: mol_type = other DNA
acgtcttctagcagtctaac

SEQ ID NO: 68951 - DNA, 20 bp, synthetic construct
  misc_feature 1..20: note = chemically synthesized
  source 1..20: mol_type = other DNA
ttaatacttttttctccata

SEQ ID NO: 68952 - DNA, 20 bp, synthetic construct
  misc_feature 1..20: note = chemically synthesized
  source 1..20: mol_type = other DNA
ttttttctccatagaatgct

SEQ ID NO: 68953 - DNA, 20 bp, synthetic construct
  misc_feature 1..20: note = chemically synthesized
  source 1..20: mol_type = other DNA
ccatagaatgcttgaagttt

SEQ ID NO: 68954 - DNA, 20 bp, synthetic construct
  misc_feature 1..20: note = chemically synthesized
  source 1..20: mol_type = other DNA
gaagtttcttcgtttcttgc

SEQ ID NO: 68955 - DNA, 20 bp, synthetic construct
  misc_feature 1..20: note = chemically synthesized
  source 1..20: mol_type = other DNA
aactcaacaatcacttttca

SEQ ID NO: 68956 - DNA, 20 bp, synthetic construct
  misc_feature 1..20: note = chemically synthesized
  source 1..20: mol_type = other DNA
atatatctattattttggta

SEQ ID NO: 68957 - DNA, 20 bp, synthetic construct
  misc_feature 1..20: note = chemically synthesized
  source 1..20: mol_type = other DNA
tttgaaactaacatttgcac

SEQ ID NO: 68958 - DNA, 20 bp, synthetic construct
  misc_feature 1..20: note = chemically synthesized
  source 1..20: mol_type = other DNA
gctatttaatatattcatct

SEQ ID NO: 68959 - DNA, 20 bp, synthetic construct
  misc_feature 1..20: note = chemically synthesized
  source 1..20: mol_type = other DNA
aagaatgatgccaataaagt

SEQ ID NO: 68960 - DNA, 20 bp, synthetic construct
  misc_feature 1..20: note = chemically synthesized
  source 1..20: mol_type = other DNA
cacttttacacattgcccgt

SEQ ID NO: 68961 - DNA, 20 bp, synthetic construct
  misc_feature 1..20: note = chemically synthesized
  source 1..20: mol_type = other DNA
cccgtcttggtttataatat

SEQ ID NO: 68962 - DNA, 20 bp, synthetic construct
  misc_feature 1..20: note = chemically synthesized
  source 1..20: mol_type = other DNA
aatattattactagctaata

SEQ ID NO: 68963 - DNA, 20 bp, synthetic construct
  misc_feature 1..20: note = chemically synthesized
  source 1..20: mol_type = other DNA
actagctaatatcatgattt

SEQ ID NO: 68964 - DNA, 20 bp, synthetic construct
  misc_feature 1..20: note = chemically synthesized
  source 1..20: mol_type = other DNA
tattatctccagggaaacca

SEQ ID NO: 68965 - DNA, 20 bp, synthetic construct
  misc_feature 1..20: note = chemically synthesized
  source 1..20: mol_type = other DNA
caccattaacttttgagtta

SEQ ID NO: 68966 - DNA, 20 bp, synthetic construct
  misc_feature 1..20: note = chemically synthesized
  source 1..20: mol_type = other DNA
ttaaaatgattacttcctca

SEQ ID NO: 68967 - DNA, 20 bp, synthetic construct
  misc_feature 1..20: note = chemically synthesized
  source 1..20: mol_type = other DNA
ttttctaatactgctcccca

SEQ ID NO: 68968 - DNA, 20 bp, synthetic construct
  misc_feature 1..20: note = chemically synthesized
  source 1..20: mol_type = other DNA
acttactctcatcacagtat

SEQ ID NO: 68969 - DNA, 20 bp, synthetic construct
  misc_feature 1..20: note = chemically synthesized
  source 1..20: mol_type = other DNA
ttattatacactgaatttcc

SEQ ID NO: 68970 - DNA, 20 bp, synthetic construct
  misc_feature 1..20: note = chemically synthesized
  source 1..20: mol_type = other DNA
ttagattcattagaggctgt

SEQ ID NO: 68971 - DNA, 20 bp, synthetic construct
  misc_feature 1..20: note = chemically synthesized
  source 1..20: mol_type = other DNA
tgtagaagattaggaaccat

SEQ ID NO: 68972 - DNA, 20 bp, synthetic construct
  misc_feature 1..20: note = chemically synthesized
  source 1..20: mol_type = other DNA
accaattgagtcatcatata

SEQ ID NO: 68973 - DNA, 20 bp, synthetic construct
  misc_feature 1..20: note = chemically synthesized
  source 1..20: mol_type = other DNA
gtcatcatataccaagtttg

SEQ ID NO: 68974 - DNA, 20 bp, synthetic construct
  misc_feature 1..20: note = chemically synthesized
  source 1..20: mol_type = other DNA
atacaacactccaatttcaa

SEQ ID NO: 68975 - DNA, 20 bp, synthetic construct
  misc_feature 1..20: note = chemically synthesized
  source 1..20: mol_type = other DNA
tcagacatatcgtcaaggat

SEQ ID NO: 68976 - DNA, 20 bp, synthetic construct
  misc_feature 1..20: note = chemically synthesized
  source 1..20: mol_type = other DNA
aaggatctgggattgatcac

SEQ ID NO: 68977 - DNA, 20 bp, synthetic construct
  misc_feature 1..20: note = chemically synthesized
  source 1..20: mol_type = other DNA
ttaaaagtatctactttcag

SEQ ID NO: 68978 - DNA, 20 bp, synthetic construct
  misc_feature 1..20: note = chemically synthesized
  source 1..20: mol_type = other DNA
cactttgggaggccgaggca

SEQ ID NO: 68979 - DNA, 20 bp, synthetic construct
  misc_feature 1..20: note = chemically synthesized
  source 1..20: mol_type = other DNA
ttgggagactgaggcaggag

SEQ ID NO: 68980 - DNA, 20 bp, synthetic construct
  misc_feature 1..20: note = chemically synthesized
  source 1..20: mol_type = other DNA
aaaaaaaaatctattttcat

SEQ ID NO: 68981 - DNA, 20 bp, synthetic construct
  misc_feature 1..20: note = chemically synthesized
  source 1..20: mol_type = other DNA
ggtttcttcagactgactac

SEQ ID NO: 68982 - DNA, 20 bp, synthetic construct
  misc_feature 1..20: note = chemically synthesized
  source 1..20: mol_type = other DNA
caaaggcttcagactagcta

SEQ ID NO: 68983 - DNA, 20 bp, synthetic construct
  misc_feature 1..20: note = chemically synthesized
  source 1..20: mol_type = other DNA
gcttaaaaatctactttcat

SEQ ID NO: 68984 - DNA, 20 bp, synthetic construct
  misc_feature 1..20: note = chemically synthesized
  source 1..20: mol_type = other DNA
ccatagagactatcagcctt

SEQ ID NO: 68985 - DNA, 20 bp, synthetic construct
  misc_feature 1..20: note = chemically synthesized
  source 1..20: mol_type = other DNA
accagagcaaaatacatgtt

SEQ ID NO: 68986 - DNA, 20 bp, synthetic construct
  misc_feature 1..20: note = chemically synthesized
  source 1..20: mol_type = other DNA
atgttggaggattttttaaa

SEQ ID NO: 68987 - DNA, 20 bp, synthetic construct
  misc_feature 1..20: note = chemically synthesized
  source 1..20: mol_type = other DNA
tgaaaggtaggatgaaagag

SEQ ID NO: 68988 - DNA, 20 bp, synthetic construct
  misc_feature 1..20: note = chemically synthesized
  source 1..20: mol_type = other DNA
gttttgataaggtaaataaa

SEQ ID NO: 68989 - DNA, 20 bp, synthetic construct
  misc_feature 1..20: note = chemically synthesized
  source 1..20: mol_type = other DNA
ccacctgtatttaaaaaaca

SEQ ID NO: 68990 - DNA, 20 bp, synthetic construct
  misc_feature 1..20: note = chemically synthesized
  source 1..20: mol_type = other DNA
atttaaaaaacaaaaagatt

SEQ ID NO: 68991 - DNA, 20 bp, synthetic construct
  misc_feature 1..20: note = chemically synthesized
  source 1..20: mol_type = other DNA
atttgagtctggagaaataa

SEQ ID NO: 68992 - DNA, 20 bp, synthetic construct
  misc_feature 1..20: note = chemically synthesized
  source 1..20: mol_type = other DNA
tgttgacttggaaagcaaat

SEQ ID NO: 68993 - DNA, 20 bp, synthetic construct
  misc_feature 1..20: note = chemically synthesized
  source 1..20: mol_type = other DNA
caggagtcttttctgatgcc

SEQ ID NO: 68994 - DNA, 20 bp, synthetic construct
  misc_feature 1..20: note = chemically synthesized
  source 1..20: mol_type = other DNA
acctacatatgcagaaatct

SEQ ID NO: 68995 - DNA, 20 bp, synthetic construct
  misc_feature 1..20: note = chemically synthesized
  source 1..20: mol_type = other DNA
tcttttcagaataattccct

SEQ ID NO: 68996 - DNA, 20 bp, synthetic construct
  misc_feature 1..20: note = chemically synthesized
  source 1..20: mol_type = other DNA
gaataattccctgtgtgatt

SEQ ID NO: 68997 - DNA, 20 bp, synthetic construct
  misc_feature 1..20: note = chemically synthesized
  source 1..20: mol_type = other DNA
aaagacatagagaaagtata

SEQ ID NO: 68998 - DNA, 20 bp, synthetic construct
  misc_feature 1..20: note = chemically synthesized
  source 1..20: mol_type = other DNA
aaagtatattgtgtttaaaa

SEQ ID NO: 68999 - DNA, 20 bp, synthetic construct
  misc_feature 1..20: note = chemically synthesized
  source 1..20: mol_type = other DNA
attcctatttgccaaggcag

SEQ ID NO: 69000 - DNA, 20 bp, synthetic construct
  misc_feature 1..20: note = chemically synthesized
  source 1..20: mol_type = other DNA
ttcagtgatgcataaggcag

SEQ ID NO: 69001 - DNA, 20 bp, synthetic construct
  misc_feature 1..20: note = chemically synthesized
  source 1..20: mol_type = other DNA
taagacttgtccaaagaact

SEQ ID NO: 69002 - DNA, 20 bp, synthetic construct
  misc_feature 1..20: note = chemically synthesized
  source 1..20: mol_type = other DNA
tgtccaaagaactgactgtt

SEQ ID NO: 69003 - DNA, 20 bp, synthetic construct
  misc_feature 1..20: note = chemically synthesized
  source 1..20: mol_type = other DNA
ctatttaccacaaacctgaa

SEQ ID NO: 69004 - DNA, 20 bp, synthetic construct
  misc_feature 1..20: note = chemically synthesized
  source 1..20: mol_type = other DNA
acctgaagtaggcttaaatt

SEQ ID NO: 69005 - DNA, 20 bp, synthetic construct
  misc_feature 1..20: note = chemically synthesized
  source 1..20: mol_type = other DNA
attatataagcataaaatgt

SEQ ID NO: 69006 - DNA, 20 bp, synthetic construct
  misc_feature 1..20: note = chemically synthesized
  source 1..20: mol_type = other DNA
catatttcattatatatttt

SEQ ID NO: 69007 - DNA, 20 bp, synthetic construct
  misc_feature 1..20: note = chemically synthesized
  source 1..20: mol_type = other DNA
tgtagccatctaaccatttg

SEQ ID NO: 69008 - DNA, 20 bp, synthetic construct
  misc_feature 1..20: note = chemically synthesized
  source 1..20: mol_type = other DNA
taaccatttgagaagttttt

SEQ ID NO: 69009 - DNA, 20 bp, synthetic construct
  misc_feature 1..20: note = chemically synthesized
  source 1..20: mol_type = other DNA
gtttttataagatttatagc

SEQ ID NO: 69010 - DNA, 20 bp, synthetic construct
  misc_feature 1..20: note = chemically synthesized
  source 1..20: mol_type = other DNA
catctcatgcaagatagtgt

SEQ ID NO: 69011 - DNA, 20 bp, synthetic construct
  misc_feature 1..20: note = chemically synthesized
  source 1..20: mol_type = other DNA
caagatagtgtatttgtttt

SEQ ID NO: 69012 - DNA, 20 bp, synthetic construct
  misc_feature 1..20: note = chemically synthesized
  source 1..20: mol_type = other DNA
cttttcttcagaaaatgtga

SEQ ID NO: 69013 - DNA, 20 bp, synthetic construct
  misc_feature 1..20: note = chemically synthesized
  source 1..20: mol_type = other DNA
atatgttatgggatacaatg

SEQ ID NO: 69014 - DNA, 20 bp, synthetic construct
  misc_feature 1..20: note = chemically synthesized
  source 1..20: mol_type = other DNA
ctatggaaccatctttctat

SEQ ID NO: 69015 - DNA, 20 bp, synthetic construct
  misc_feature 1..20: note = chemically synthesized
  source 1..20: mol_type = other DNA
tttaagataaaggaaattgt

SEQ ID NO: 69016 - DNA, 20 bp, synthetic construct
  misc_feature 1..20: note = chemically synthesized
  source 1..20: mol_type = other DNA
atttttctccagggggttac

SEQ ID NO: 69017 - DNA, 20 bp, synthetic construct
  misc_feature 1..20: note = chemically synthesized
  source 1..20: mol_type = other DNA
tcaccacacagtggaataag

SEQ ID NO: 69018 - DNA, 20 bp, synthetic construct
  misc_feature 1..20: note = chemically synthesized
  source 1..20: mol_type = other DNA
acattaccataattatttat

SEQ ID NO: 69019 - DNA, 20 bp, synthetic construct
  misc_feature 1..20: note = chemically synthesized
  source 1..20: mol_type = other DNA
agtccaggatgactagcagt

SEQ ID NO: 69020 - DNA, 20 bp, synthetic construct
  misc_feature 1..20: note = chemically synthesized
  source 1..20: mol_type = other DNA
tgtgtgaacagtaatgctag

SEQ ID NO: 69021 - DNA, 20 bp, synthetic construct
  misc_feature 1..20: note = chemically synthesized
  source 1..20: mol_type = other DNA
ctagccttgattttaccatg

SEQ ID NO: 69022 - DNA, 20 bp, synthetic construct
  misc_feature 1..20: note = chemically synthesized
  source 1..20: mol_type = other DNA
ccttgattttaccatggcaa

SEQ ID NO: 69023 - DNA, 20 bp, synthetic construct
  misc_feature 1..20: note = chemically synthesized
  source 1..20: mol_type = other DNA
aagatactgtatcttaggag

SEQ ID NO: 69024 - DNA, 20 bp, synthetic construct
  misc_feature 1..20: note = chemically synthesized
  source 1..20: mol_type = other DNA
caaaagagtagacatcccca

SEQ ID NO: 69025 - DNA, 20 bp, synthetic construct
  misc_feature 1..20: note = chemically synthesized
  source 1..20: mol_type = other DNA
atcagtgactaacatgacca

SEQ ID NO: 69026 - DNA, 20 bp, synthetic construct
  misc_feature 1..20: note = chemically synthesized
  source 1..20: mol_type = other DNA
tgccaggaggttgcctttgc

SEQ ID NO: 69027 - DNA, 20 bp, synthetic construct
  misc_feature 1..20: note = chemically synthesized
  source 1..20: mol_type = other DNA
cctttgctgtggctttcgac

SEQ ID NO: 69028 - DNA, 20 bp, synthetic construct
  misc_feature 1..20: note = chemically synthesized
  source 1..20: mol_type = other DNA
tatttatgtaaataaaatgt

SEQ ID NO: 69029 - DNA, 20 bp, synthetic construct
  misc_feature 1..20: note = chemically synthesized
  source 1..20: mol_type = other DNA
tagatctaaaattgtaattt

SEQ ID NO: 69030 - DNA, 20 bp, synthetic construct
  misc_feature 1..20: note = chemically synthesized
  source 1..20: mol_type = other DNA
attcctagaatttctaaatc

SEQ ID NO: 69031 - DNA, 20 bp, synthetic construct
  misc_feature 1..20: note = chemically synthesized
  source 1..20: mol_type = other DNA
tagaattctctagaggtgac

SEQ ID NO: 69032 - DNA, 20 bp, synthetic construct
  misc_feature 1..20: note = chemically synthesized
  source 1..20: mol_type = other DNA
tcaatccttcataccctttg

SEQ ID NO: 69033 - DNA, 20 bp, synthetic construct
  misc_feature 1..20: note = chemically synthesized
  source 1..20: mol_type = other DNA
taccctttgtatcgtttttt

SEQ ID NO: 69034 - DNA, 20 bp, synthetic construct
  misc_feature 1..20: note = chemically synthesized
  source 1..20: mol_type = other DNA
gtgaagaaaaaaattataat

SEQ ID NO: 69035 - DNA, 20 bp, synthetic construct
  misc_feature 1..20: note = chemically synthesized
  source 1..20: mol_type = other DNA
taatatttactgggaactta

SEQ ID NO: 69036 - DNA, 20 bp, synthetic construct
  misc_feature 1..20: note = chemically synthesized
  source 1..20: mol_type = other DNA
tcactataagaaatttataa

SEQ ID NO: 69037 - DNA, 20 bp, synthetic construct
  misc_feature 1..20: note = chemically synthesized
  source 1..20: mol_type = other DNA
attgaagggcatgaaataat

SEQ ID NO: 69038 - DNA, 20 bp, synthetic construct
  misc_feature 1..20: note = chemically synthesized
  source 1..20: mol_type = other DNA
tgatcttctggtcagtgaga

SEQ ID NO: 69039 - DNA, 20 bp, synthetic construct
  misc_feature 1..20: note = chemically synthesized
  source 1..20: mol_type = other DNA
agtgagaactggtttcaaat

SEQ ID NO: 69040 - DNA, 20 bp, synthetic construct
  misc_feature 1..20: note = chemically synthesized
  source 1..20: mol_type = other DNA
taataattctagttgtgaga

SEQ ID NO: 69041 - DNA, 20 bp, synthetic construct
  misc_feature 1..20: note = chemically synthesized
  source 1..20: mol_type = other DNA
agagtggagagtaaaggcaa

SEQ ID NO: 69042 - DNA, 20 bp, synthetic construct
  misc_feature 1..20: note = chemically synthesized
  source 1..20: mol_type = other DNA
aaatctgagtgaaccattca

SEQ ID NO: 69043 - DNA, 20 bp, synthetic construct
  misc_feature 1..20: note = chemically synthesized
  source 1..20: mol_type = other DNA
tttactatcttttcaactcg

SEQ ID NO: 69044 - DNA, 20 bp, synthetic construct
  misc_feature 1..20: note = chemically synthesized
  source 1..20: mol_type = other DNA
agcaatgaagttctttttag

SEQ ID NO: 69045 - DNA, 20 bp, synthetic construct
  misc_feature 1..20: note = chemically synthesized
  source 1..20: mol_type = other DNA
cagagagcaccatcttttca

SEQ ID NO: 69046 - DNA, 20 bp, synthetic construct
  misc_feature 1..20: note = chemically synthesized
  source 1..20: mol_type = other DNA
catcttttcatgttgctttc

SEQ ID NO: 69047 - DNA, 20 bp, synthetic construct
  misc_feature 1..20: note = chemically synthesized
  source 1..20: mol_type = other DNA
caggaagttaagacagtcta

SEQ ID NO: 69048 - DNA, 20 bp, synthetic construct
  misc_feature 1..20: note = chemically synthesized
  source 1..20: mol_type = other DNA
gtctacctagatttagaagc

SEQ ID NO: 69049 - DNA, 20 bp, synthetic construct
  misc_feature 1..20: note = chemically synthesized
  source 1..20: mol_type = other DNA
gaaatggtctgacttttttc

SEQ ID NO: 69050 - DNA, 20 bp, synthetic construct
  misc_feature 1..20: note = chemically synthesized
  source 1..20: mol_type = other DNA
ggtctgacttttttccattg

SEQ ID NO: 69051 - DNA, 20 bp, synthetic construct
  misc_feature 1..20: note = chemically synthesized
  source 1..20: mol_type = other DNA
tccattgtttagtttctaaa

SEQ ID NO: 69052 - DNA, 20 bp, synthetic construct
  misc_feature 1..20: note = chemically synthesized
  source 1..20: mol_type = other DNA
cctgatataattcattttta

SEQ ID NO: 69053 - DNA, 20 bp, synthetic construct
  misc_feature 1..20: note = chemically synthesized
  source 1..20: mol_type = other DNA
gtatacattgaattatactg

SEQ ID NO: 69054 - DNA, 20 bp, synthetic construct
  misc_feature 1..20: note = chemically synthesized
  source 1..20: mol_type = other DNA
atgtctgactttattcaata

SEQ ID NO: 69055 - DNA, 20 bp, synthetic construct
  misc_feature 1..20: note = chemically synthesized
  source 1..20: mol_type = other DNA
tcatactagtgtatgactgt

SEQ ID NO: 69056 - DNA, 20 bp, synthetic construct
  misc_feature 1..20: note = chemically synthesized
  source 1..20: mol_type = other DNA
tgatagatatttgagtacct

SEQ ID NO: 69057 - DNA, 20 bp, synthetic construct
  misc_feature 1..20: note = chemically synthesized
  source 1..20: mol_type = other DNA
tataatataaattgctgcta

SEQ ID NO: 69058 - DNA, 20 bp, synthetic construct
  misc_feature 1..20: note = chemically synthesized
  source 1..20: mol_type = other DNA
aactttaaaatacactgcca

SEQ ID NO: 69059 - DNA, 20 bp, synthetic construct
  misc_feature 1..20: note = chemically synthesized
  source 1..20: mol_type = other DNA
tggtcaacctataatatcat

SEQ ID NO: 69060 - DNA, 20 bp, synthetic construct
  misc_feature 1..20: note = chemically synthesized
  source 1..20: mol_type = other DNA
cttatagcagcctgcatgtg

SEQ ID NO: 69061 - DNA, 20 bp, synthetic construct
  misc_feature 1..20: note = chemically synthesized
  source 1..20: mol_type = other DNA
gttgaagaaattgcactcca

SEQ ID NO: 69062 - DNA, 20 bp, synthetic construct
  misc_feature 1..20: note = chemically synthesized
  source 1..20: mol_type = other DNA
gccaagtctgacctaatgcc

SEQ ID NO: 69063 - DNA, 20 bp, synthetic construct
  misc_feature 1..20: note = chemically synthesized
  source 1..20: mol_type = other DNA
ttctcccacttgctctgcag

SEQ ID NO: 69064 - DNA, 20 bp, synthetic construct
  misc_feature 1..20: note = chemically synthesized
  source 1..20: mol_type = other DNA
tccttcactaacaaagcaaa

SEQ ID NO: 69065 - DNA, 20 bp, synthetic construct
  misc_feature 1..20: note = chemically synthesized
  source 1..20: mol_type = other DNA
atctcgttagtaccttttga

SEQ ID NO: 69066 - DNA, 20 bp, synthetic construct
  misc_feature 1..20: note = chemically synthesized
  source 1..20: mol_type = other DNA
agataggacttgagttcctc

SEQ ID NO: 69067 - DNA, 20 bp, synthetic construct
  misc_feature 1..20: note = chemically synthesized
  source 1..20: mol_type = other DNA
cacagccgaggccggaggga

SEQ ID NO: 69068 - DNA, 20 bp, synthetic construct
  misc_feature 1..20: note = chemically synthesized
  source 1..20: mol_type = other DNA
tttgagctcaggagttggag

SEQ ID NO: 69069 - DNA, 20 bp, synthetic construct
  misc_feature 1..20: note = chemically synthesized
  source 1..20: mol_type = other DNA
gatatcttgagccaaggagg

SEQ ID NO: 69070 - DNA, 20 bp, synthetic construct
  misc_feature 1..20: note = chemically synthesized
  source 1..20: mol_type = other DNA
gagggggagattgcagtgag

SEQ ID NO: 69071 - DNA, 20 bp, synthetic construct
  misc_feature 1..20: note = chemically synthesized
  source 1..20: mol_type = other DNA
ttttttacctccaacatata

SEQ ID NO: 69072 - DNA, 20 bp, synthetic construct
  misc_feature 1..20: note = chemically synthesized
  source 1..20: mol_type = other DNA
ttactatataggaacacaat

SEQ ID NO: 69073 - DNA, 20 bp, synthetic construct
  misc_feature 1..20: note = chemically synthesized
  source 1..20: mol_type = other DNA
ttttgttagacttaaaaaca

SEQ ID NO: 69074 - DNA, 20 bp, synthetic construct
  misc_feature 1..20: note = chemically synthesized
  source 1..20: mol_type = other DNA
aagaactgctaaagactcac

SEQ ID NO: 69075 - DNA, 20 bp, synthetic construct
  misc_feature 1..20: note = chemically synthesized
  source 1..20: mol_type = other DNA
tacatagctaaacacatgtc

SEQ ID NO: 69076 - DNA, 20 bp, synthetic construct
  misc_feature 1..20: note = chemically synthesized
  source 1..20: mol_type = other DNA
cacatgtcatgggtttgtcg

SEQ ID NO: 69077 - DNA, 20 bp, synthetic construct
  misc_feature 1..20: note = chemically synthesized
  source 1..20: mol_type = other DNA
cttttgttcccgttatgtgt

SEQ ID NO: 69078 - DNA, 20 bp, synthetic construct
  misc_feature 1..20: note = chemically synthesized
  source 1..20: mol_type = other DNA
gtaagtgataatatgtagta

SEQ ID NO: 69079 - DNA, 20 bp, synthetic construct
  misc_feature 1..20: note = chemically synthesized
  source 1..20: mol_type = other DNA
atttggttttctgttcttac

SEQ ID NO: 69080 - DNA, 20 bp, synthetic construct
  misc_feature 1..20: note = chemically synthesized
  source 1..20: mol_type = other DNA
ataccactaatgggccttca

SEQ ID NO: 69081 - DNA, 20 bp, synthetic construct
  misc_feature 1..20: note = chemically synthesized
  source 1..20: mol_type = other DNA
ttgattctatgtctttgcta

SEQ ID NO: 69082 - DNA, 20 bp, synthetic construct
  misc_feature 1..20: note = chemically synthesized
  source 1..20: mol_type = other DNA
tgcatgtgtctttgtgatag

SEQ ID NO: 69083 - DNA, 20 bp, synthetic construct
  misc_feature 1..20: note = chemically synthesized
  source 1..20: mol_type = other DNA
ctttaggtatatactcaata

SEQ ID NO: 69084 - DNA, 20 bp, synthetic construct
  misc_feature 1..20: note = chemically synthesized
  source 1..20: mol_type = other DNA
attgttgggttaaatggtat

SEQ ID NO: 69085 - DNA, 20 bp, synthetic construct
  misc_feature 1..20: note = chemically synthesized
  source 1..20: mol_type = other DNA
atgtgagatagtatctcatt

SEQ ID NO: 69086 - DNA, 20 bp, synthetic construct
  misc_feature 1..20: note = chemically synthesized
  source 1..20: mol_type = other DNA
gagatagtatctcattttgg

SEQ ID NO: 69087 - DNA, 20 bp, synthetic construct
  misc_feature 1..20: note = chemically synthesized
  source 1..20: mol_type = other DNA
ttctctaatgatcagtgaca

SEQ ID NO: 69088 - DNA, 20 bp, synthetic construct
  misc_feature 1..20: note = chemically synthesized
  source 1..20: mol_type = other DNA
agtgacactgagcttttttc

SEQ ID NO: 69089 - DNA, 20 bp, synthetic construct
  misc_feature 1..20: note = chemically synthesized
  source 1..20: mol_type = other DNA
cctttacccattttttgtgg

SEQ ID NO: 69090 - DNA, 20 bp, synthetic construct
  misc_feature 1..20: note = chemically synthesized
  source 1..20: mol_type = other DNA
tacccattttttgtggcatt

SEQ ID NO: 69091 - DNA, 20 bp, synthetic construct
  misc_feature 1..20: note = chemically synthesized
  source 1..20: mol_type = other DNA
ggcattgtttgttttgttct

SEQ ID NO: 69092 - DNA, 20 bp, synthetic construct
  misc_feature 1..20: note = chemically synthesized
  source 1..20: mol_type = other DNA
gtagattcatttaagttcct

SEQ ID NO: 69093 - DNA, 20 bp, synthetic construct
  misc_feature 1..20: note = chemically synthesized
  source 1..20: mol_type = other DNA
tattaggcctttgttggatg

SEQ ID NO: 69094 - DNA, 20 bp, synthetic construct
  misc_feature 1..20: note = chemically synthesized
  source 1..20: mol_type = other DNA
aaattttctcccattctata

SEQ ID NO: 69095 - DNA, 20 bp, synthetic construct
  misc_feature 1..20: note = chemically synthesized
  source 1..20: mol_type = other DNA
tataggttgtttactcagtt

SEQ ID NO: 69096 - DNA, 20 bp, synthetic construct
  misc_feature 1..20: note = chemically synthesized
  source 1..20: mol_type = other DNA
attagatcctatttgtcaat

SEQ ID NO: 69097 - DNA, 20 bp, synthetic construct
  misc_feature 1..20: note = chemically synthesized
  source 1..20: mol_type = other DNA
ctttgtcatgaaatctttgc

SEQ ID NO: 69098 - DNA, 20 bp, synthetic construct
  misc_feature 1..20: note = chemically synthesized
  source 1..20: mol_type = other DNA
gtccggaatggtattgccta

SEQ ID NO: 69099 - DNA, 20 bp, synthetic construct
  misc_feature 1..20: note = chemically synthesized
  source 1..20: mol_type = other DNA
aggttgctttcaagcatttt

SEQ ID NO: 69100 - DNA, 20 bp, synthetic construct
  misc_feature 1..20: note = chemically synthesized
  source 1..20: mol_type = other DNA
ctttcaagcatttttatagt

SEQ ID NO: 69101 - DNA, 20 bp, synthetic construct
  misc_feature 1..20: note = chemically synthesized
  source 1..20: mol_type = other DNA
atttaagtctctaatccatc

SEQ ID NO: 69102 - DNA, 20 bp, synthetic construct
  misc_feature 1..20: note = chemically synthesized
  source 1..20: mol_type = other DNA
gtatatgatatagaacgggg

SEQ ID NO: 69103 - DNA, 20 bp, synthetic construct
  misc_feature 1..20: note = chemically synthesized
  source 1..20: mol_type = other DNA
tgaatagggtgtcttttcct

SEQ ID NO: 69104 - DNA, 20 bp, synthetic construct
  misc_feature 1..20: note = chemically synthesized
  source 1..20: mol_type = other DNA
tagggtgtcttttcctcatt

SEQ ID NO: 69105 - DNA, 20 bp, synthetic construct
  misc_feature 1..20: note = chemically synthesized
  source 1..20: mol_type = other DNA
tttcctcattgcttgttttt

SEQ ID NO: 69106 - DNA, 20 bp, synthetic construct
  misc_feature 1..20: note = chemically synthesized
  source 1..20: mol_type = other DNA
tcttttctgtaacagtacca

SEQ ID NO: 69107 - DNA, 20 bp, synthetic construct
  misc_feature 1..20: note = chemically synthesized
  source 1..20: mol_type = other DNA
tggttactgtagccctgtgg

SEQ ID NO: 69108 - DNA, 20 bp, synthetic construct
  misc_feature 1..20: note = chemically synthesized
  source 1..20: mol_type = other DNA
aagttaggcaatgtattatc

SEQ ID NO: 69109 - DNA, 20 bp, synthetic construct
  misc_feature 1..20: note = chemically synthesized
  source 1..20: mol_type = other DNA
tctaagttctacggtacctg

SEQ ID NO: 69110 - DNA, 20 bp, synthetic construct
  misc_feature 1..20: note = chemically synthesized
  source 1..20: mol_type = other DNA
tcaattcccacctgtgagta

SEQ ID NO: 69111 - DNA, 20 bp, synthetic construct
  misc_feature 1..20: note = chemically synthesized
  source 1..20: mol_type = other DNA
gttctgtgaagaatgtcatt

SEQ ID NO: 69112 - DNA, 20 bp, synthetic construct
  misc_feature 1..20: note = chemically synthesized
  source 1..20: mol_type = other DNA
gtcattggtagtttgatagg

SEQ ID NO: 69113 - DNA, 20 bp, synthetic construct
  misc_feature 1..20: note = chemically synthesized
  source 1..20: mol_type = other DNA
cagtatggacattttaacaa

SEQ ID NO: 69114 - DNA, 20 bp, synthetic construct
  misc_feature 1..20: note = chemically synthesized
  source 1..20: mol_type = other DNA
tctttttatccatgagcatg

SEQ ID NO: 69115 - DNA, 20 bp, synthetic construct
  misc_feature 1..20: note = chemically synthesized
  source 1..20: mol_type = other DNA
tgagcatggaaagtttttcc

SEQ ID NO: 69116 - DNA, 20 bp, synthetic construct
  misc_feature 1..20: note = chemically synthesized
  source 1..20: mol_type = other DNA
tttccatttgtttctatcag

SEQ ID NO: 69117 - DNA, 20 bp, synthetic construct
  misc_feature 1..20: note = chemically synthesized
  source 1..20: mol_type = other DNA
tcagctctgatttctttgag

SEQ ID NO: 69118 - DNA, 20 bp, synthetic construct
  misc_feature 1..20: note = chemically synthesized
  source 1..20: mol_type = other DNA
tctcattgtagagatctttc

SEQ ID NO: 69119 - DNA, 20 bp, synthetic construct
  misc_feature 1..20: note = chemically synthesized
  source 1..20: mol_type = other DNA
tctttttgtggcaacggtaa

SEQ ID NO: 69120 - DNA, 20 bp, synthetic construct
  misc_feature 1..20: note = chemically synthesized
  source 1..20: mol_type = other DNA
aacggtaaatgggattgact

SEQ ID NO: 69121 - DNA, 20 bp, synthetic construct
  misc_feature 1..20: note = chemically synthesized
  source 1..20: mol_type = other DNA
attgacttcctgatttggct

SEQ ID NO: 69122 - DNA, 20 bp, synthetic construct
  misc_feature 1..20: note = chemically synthesized
  source 1..20: mol_type = other DNA
ttgttgatgtatgggaatgc

SEQ ID NO: 69123 - DNA, 20 bp, synthetic construct
  misc_feature 1..20: note = chemically synthesized
  source 1..20: mol_type = other DNA
gaatgctagtgatttttgta

SEQ ID NO: 69124 - DNA, 20 bp, synthetic construct
  misc_feature 1..20: note = chemically synthesized
  source 1..20: mol_type = other DNA
ttgctgaagttatcagctga

SEQ ID NO: 69125 - DNA, 20 bp, synthetic construct
  misc_feature 1..20: note = chemically synthesized
  source 1..20: mol_type = other DNA
gagcttttgggccttgacta

SEQ ID NO: 69126 - DNA, 20 bp, synthetic construct
  misc_feature 1..20: note = chemically synthesized
  source 1..20: mol_type = other DNA
gccctttattcccttctctt

SEQ ID NO: 69127 - DNA, 20 bp, synthetic construct
  misc_feature 1..20: note = chemically synthesized
  source 1..20: mol_type = other DNA
agagggcatccttgtcttgt

SEQ ID NO: 69128 - DNA, 20 bp, synthetic construct
  misc_feature 1..20: note = chemically synthesized
  source 1..20: mol_type = other DNA
cttgtgccagttttcaagaa

SEQ ID NO: 69129 - DNA, 20 bp, synthetic construct
  misc_feature 1..20: note = chemically synthesized
  source 1..20: mol_type = other DNA
agttttcaagaagaatgctt

SEQ ID NO: 69130 - DNA, 20 bp, synthetic construct
  misc_feature 1..20: note = chemically synthesized
  source 1..20: mol_type = other DNA
cattctgtatgatgttggct

SEQ ID NO: 69131 - DNA, 20 bp, synthetic construct
  misc_feature 1..20: note = chemically synthesized
  source 1..20: mol_type = other DNA
tgaggtcatgtccttaaata

SEQ ID NO: 69132 - DNA, 20 bp, synthetic construct
  misc_feature 1..20: note = chemically synthesized
  source 1..20: mol_type = other DNA
cttaaatagctagtttgttg

SEQ ID NO: 69133 - DNA, 20 bp, synthetic construct
  misc_feature 1..20: note = chemically synthesized
  source 1..20: mol_type = other DNA
tgcacatattgaaatgatca

SEQ ID NO: 69134 - DNA, 20 bp, synthetic construct
  misc_feature 1..20: note = chemically synthesized
  source 1..20: mol_type = other DNA
tattgaaatgatcatgtggt

SEQ ID NO: 69135 - DNA, 20 bp, synthetic construct
  misc_feature 1..20: note = chemically synthesized
  source 1..20: mol_type = other DNA
atttgtatatgctgaaccaa

SEQ ID NO: 69136 - DNA, 20 bp, synthetic construct
  misc_feature 1..20: note = chemically synthesized
  source 1..20: mol_type = other DNA
gcttctcagggataaagcct

SEQ ID NO: 69137 - DNA, 20 bp, synthetic construct
  misc_feature 1..20: note = chemically synthesized
  source 1..20: mol_type = other DNA
gataaagcctacttgattga

SEQ ID NO: 69138 - DNA, 20 bp, synthetic construct
  misc_feature 1..20: note = chemically synthesized
  source 1..20: mol_type = other DNA
agcctacttgattgaggtgg

SEQ ID NO: 69139 - DNA, 20 bp, synthetic construct
  misc_feature 1..20: note = chemically synthesized
  source 1..20: mol_type = other DNA
gattagctttgtgatgtgtt

SEQ ID NO: 69140 - DNA, 20 bp, synthetic construct
  misc_feature 1..20: note = chemically synthesized
  source 1..20: mol_type = other DNA
ctttgtgatgtgttgctgga

SEQ ID NO: 69141 - DNA, 20 bp, synthetic construct
  misc_feature 1..20: note = chemically synthesized
  source 1..20: mol_type = other DNA
aatgttcaaggatattggcc

SEQ ID NO: 69142 - DNA, 20 bp, synthetic construct
  misc_feature 1..20: note = chemically synthesized
  source 1..20: mol_type = other DNA
tttttgttgttgtgtgtcta

SEQ ID NO: 69143 - DNA, 20 bp, synthetic construct
  misc_feature 1..20: note = chemically synthesized
  source 1..20: mol_type = other DNA
cctccccctcaattttttgg

SEQ ID NO: 69144 - DNA, 20 bp, synthetic construct
  misc_feature 1..20: note = chemically synthesized
  source 1..20: mol_type = other DNA
tggttgtgaatcatattgtc

SEQ ID NO: 69145 - DNA, 20 bp, synthetic construct
  misc_feature 1..20: note = chemically synthesized
  source 1..20: mol_type = other DNA
atcatattgtccagggcttt

SEQ ID NO: 69146 - DNA, 20 bp, synthetic construct
  misc_feature 1..20: note = chemically synthesized
  source 1..20: mol_type = other DNA
catcatggatctcttcagga

SEQ ID NO: 69147 - DNA, 20 bp, synthetic construct
  misc_feature 1..20: note = chemically synthesized
  source 1..20: mol_type = other DNA
tcagaccacagaggaataaa

SEQ ID NO: 69148 - DNA, 20 bp, synthetic construct
  misc_feature 1..20: note = chemically synthesized
  source 1..20: mol_type = other DNA
atataccggaatctctggga

SEQ ID NO: 69149 - DNA, 20 bp, synthetic construct
  misc_feature 1..20: note = chemically synthesized
  source 1..20: mol_type = other DNA
taaaacacaaaataccattc

SEQ ID NO: 69150 - DNA, 20 bp, synthetic construct
  misc_feature 1..20: note = chemically synthesized
  source 1..20: mol_type = other DNA
aaagattaatgagtccaaga

SEQ ID NO: 69151 - DNA, 20 bp, synthetic construct
  misc_feature 1..20: note = chemically synthesized
  source 1..20: mol_type = other DNA
agccccttctgtgatgcctc

SEQ ID NO: 69152 - DNA, 20 bp, synthetic construct
  misc_feature 1..20: note = chemically synthesized
  source 1..20: mol_type = other DNA
cttctatgttcttaatatct

SEQ ID NO: 69153 - DNA, 20 bp, synthetic construct
  misc_feature 1..20: note = chemically synthesized
  source 1..20: mol_type = other DNA
tatgttcttaatatctgtgt

SEQ ID NO: 69154 - DNA, 20 bp, synthetic construct
  misc_feature 1..20: note = chemically synthesized
  source 1..20: mol_type = other DNA
ttcttaatatctgtgtgttt

SEQ ID NO: 69155 - DNA, 20 bp, synthetic construct
  misc_feature 1..20: note = chemically synthesized
  source 1..20: mol_type = other DNA
taatatctgtgtgtttgttt

SEQ ID NO: 69156 - DNA, 20 bp, synthetic construct
  misc_feature 1..20: note = chemically synthesized
  source 1..20: mol_type = other DNA
tgtgtgtttgtttgtttgtt

SEQ ID NO: 69157 - DNA, 20 bp, synthetic construct
  misc_feature 1..20: note = chemically synthesized
  source 1..20: mol_type = other DNA
tgtttgtttgtttgtttttt

SEQ ID NO: 69158 - DNA, 20 bp, synthetic construct
  misc_feature 1..20: note = chemically synthesized
  source 1..20: mol_type = other DNA
tgtttgtttgttttttgctt

SEQ ID NO: 69159 - DNA, 20 bp, synthetic construct
  misc_feature 1..20: note = chemically synthesized
  source 1..20: mol_type = other DNA
tgtttgttttttgcttgttt

SEQ ID NO: 69160 - DNA, 20 bp, synthetic construct
  misc_feature 1..20: note = chemically synthesized
  source 1..20: mol_type = other DNA
tacagatgcaagccactgtg

SEQ ID NO: 69161 - DNA, 20 bp, synthetic construct
  misc_feature 1..20: note = chemically synthesized
  source 1..20: mol_type = other DNA
ctttttattttaattggtca

SEQ ID NO: 69162 - DNA, 20 bp, synthetic construct
  misc_feature 1..20: note = chemically synthesized
  source 1..20: mol_type = other DNA
gacttaatgggagactttcc

SEQ ID NO: 69163 - DNA, 20 bp, synthetic construct
  misc_feature 1..20: note = chemically synthesized
  source 1..20: mol_type = other DNA
tgggagactttcccctagct

SEQ ID NO: 69164 - DNA, 20 bp, synthetic construct
  misc_feature 1..20: note = chemically synthesized
  source 1..20: mol_type = other DNA
tccagaaattcaactttatt

SEQ ID NO: 69165 - DNA, 20 bp, synthetic construct
  misc_feature 1..20: note = chemically synthesized
  source 1..20: mol_type = other DNA
aactttattctaggcttggc

SEQ ID NO: 69166 - DNA, 20 bp, synthetic construct
  misc_feature 1..20: note = chemically synthesized
  source 1..20: mol_type = other DNA
gcttggctcctgtttagtat

SEQ ID NO: 69167 - DNA, 20 bp, synthetic construct
  misc_feature 1..20: note = chemically synthesized
  source 1..20: mol_type = other DNA
tcctgtttagtattgctgct

SEQ ID NO: 69168 - DNA, 20 bp, synthetic construct
  misc_feature 1..20: note = chemically synthesized
  source 1..20: mol_type = other DNA
tggctctacggatgtgtgag

SEQ ID NO: 69169 - DNA, 20 bp, synthetic construct
  misc_feature 1..20: note = chemically synthesized
  source 1..20: mol_type = other DNA
cttttttttattattatact

SEQ ID NO: 69170 - DNA, 20 bp, synthetic construct
  misc_feature 1..20: note = chemically synthesized
  source 1..20: mol_type = other DNA
agggtacatgtgcacaacat

SEQ ID NO: 69171 - DNA, 20 bp, synthetic construct
  misc_feature 1..20: note = chemically synthesized
  source 1..20: mol_type = other DNA
cacctatgagtgagaacatg

SEQ ID NO: 69172 - DNA, 20 bp, synthetic construct
  misc_feature 1..20: note = chemically synthesized
  source 1..20: mol_type = other DNA
atgagtgagaacatgcggtg

SEQ ID NO: 69173 - DNA, 20 bp, synthetic construct
  misc_feature 1..20: note = chemically synthesized
  source 1..20: mol_type = other DNA
gtttggtttattctccttgt

SEQ ID NO: 69174 - DNA, 20 bp, synthetic construct
  misc_feature 1..20: note = chemically synthesized
  source 1..20: mol_type = other DNA
tgtgatagtttgctgagaat

SEQ ID NO: 69175 - DNA, 20 bp, synthetic construct
  misc_feature 1..20: note = chemically synthesized
  source 1..20: mol_type = other DNA
gtttgctgagaatgatagtt

SEQ ID NO: 69176 - DNA, 20 bp, synthetic construct
  misc_feature 1..20: note = chemically synthesized
  source 1..20: mol_type = other DNA
gtgcatgtgtctttatagca

SEQ ID NO: 69177 - DNA, 20 bp, synthetic construct
  misc_feature 1..20: note = chemically synthesized
  source 1..20: mol_type = other DNA
ggtcaaatggtatttctagt

SEQ ID NO: 69178 - DNA, 20 bp, synthetic construct
  misc_feature 1..20: note = chemically synthesized
  source 1..20: mol_type = other DNA
ctgacttccgcaatggttga

SEQ ID NO: 69179 - DNA, 20 bp, synthetic construct
  misc_feature 1..20: note = chemically synthesized
  source 1..20: mol_type = other DNA
accaacagtgtaaaagttgt

SEQ ID NO: 69180 - DNA, 20 bp, synthetic construct
  misc_feature 1..20: note = chemically synthesized
  source 1..20: mol_type = other DNA
tccacatcctctccagcacc

SEQ ID NO: 69181 - DNA, 20 bp, synthetic construct
  misc_feature 1..20: note = chemically synthesized
  source 1..20: mol_type = other DNA
ggtgtgagatggtatctcat

SEQ ID NO: 69182 - DNA, 20 bp, synthetic construct
  misc_feature 1..20: note = chemically synthesized
  source 1..20: mol_type = other DNA
gagatggtatctcattgtgg

SEQ ID NO: 69183 - DNA, 20 bp, synthetic construct
  misc_feature 1..20: note = chemically synthesized
  source 1..20: mol_type = other DNA
gtgatgatgagcattttttc

SEQ ID NO: 69184 - DNA, 20 bp, synthetic construct
  misc_feature 1..20: note = chemically synthesized
  source 1..20: mol_type = other DNA
tgagcattttttcatgtgtt

SEQ ID NO: 69185 - DNA, 20 bp, synthetic construct
  misc_feature 1..20: note = chemically synthesized
  source 1..20: mol_type = other DNA
ctttgcccactttttgatgg

SEQ ID NO: 69186 - DNA, 20 bp, synthetic construct
  misc_feature 1..20: note = chemically synthesized
  source 1..20: mol_type = other DNA
gcccactttttgatggggtt

SEQ ID NO: 69187 - DNA, 20 bp, synthetic construct
  misc_feature 1..20: note = chemically synthesized
  source 1..20: mol_type = other DNA
ttgtttgttttttcttgtaa

SEQ ID NO: 69188 - DNA, 20 bp, synthetic construct
  misc_feature 1..20: note = chemically synthesized
  source 1..20: mol_type = other DNA
gtaaatttgtttgagttcat

SEQ ID NO: 69189 - DNA, 20 bp, synthetic construct
  misc_feature 1..20: note = chemically synthesized
  source 1..20: mol_type = other DNA
tattagccctttgtcagatg

SEQ ID NO: 69190 - DNA, 20 bp, synthetic construct
  misc_feature 1..20: note = chemically synthesized
  source 1..20: mol_type = other DNA
ggttgcctgttcactctgat

SEQ ID NO: 69191 - DNA, 20 bp, synthetic construct
  misc_feature 1..20: note = chemically synthesized
  source 1..20: mol_type = other DNA
ctttagctgtgcagaagctc

SEQ ID NO: 69192 - DNA, 20 bp, synthetic construct
  misc_feature 1..20: note = chemically synthesized
  source 1..20: mol_type = other DNA
agctctttagtttaattaga

SEQ ID NO: 69193 - DNA, 20 bp, synthetic construct
  misc_feature 1..20: note = chemically synthesized
  source 1..20: mol_type = other DNA
tccattttgtcttttgttgc

SEQ ID NO: 69194 - DNA, 20 bp, synthetic construct
  misc_feature 1..20: note = chemically synthesized
  source 1..20: mol_type = other DNA
tcttttgttgccattgcttt

SEQ ID NO: 69195 - DNA, 20 bp, synthetic construct
  misc_feature 1..20: note = chemically synthesized
  source 1..20: mol_type = other DNA
tatgtcctgaatggtattgc

SEQ ID NO: 69196 - DNA, 20 bp, synthetic construct
  misc_feature 1..20: note = chemically synthesized
  source 1..20: mol_type = other DNA
gtattgcctaggtttttttc

SEQ ID NO: 69197 - DNA, 20 bp, synthetic construct
  misc_feature 1..20: note = chemically synthesized
  source 1..20: mol_type = other DNA
aggtttttttctagggtttt

SEQ ID NO: 69198 - DNA, 20 bp, synthetic construct
  misc_feature 1..20: note = chemically synthesized
  source 1..20: mol_type = other DNA
tataaggtgtaaggaaggga

SEQ ID NO: 69199 - DNA, 20 bp, synthetic construct
  misc_feature 1..20: note = chemically synthesized
  source 1..20: mol_type = other DNA
gtgtaaggaagggatccagt

SEQ ID NO: 69200 - DNA, 20 bp, synthetic construct
  misc_feature 1..20: note = chemically synthesized
  source 1..20: mol_type = other DNA
cagctttctacatatggcta

SEQ ID NO: 69201 - DNA, 20 bp, synthetic construct
  misc_feature 1..20: note = chemically synthesized
  source 1..20: mol_type = other DNA
taaatagggaatcctttccc

SEQ ID NO: 69202 - DNA, 20 bp, synthetic construct
  misc_feature 1..20: note = chemically synthesized
  source 1..20: mol_type = other DNA
tagggaatcctttccccatt

SEQ ID NO: 69203 - DNA, 20 bp, synthetic construct
  misc_feature 1..20: note = chemically synthesized
  source 1..20: mol_type = other DNA
ttccccattgcttgtttctc

SEQ ID NO: 69204 - DNA, 20 bp, synthetic construct
  misc_feature 1..20: note = chemically synthesized
  source 1..20: mol_type = other DNA
tctgttccattggtctagat

SEQ ID NO: 69205 - DNA, 20 bp, synthetic construct
  misc_feature 1..20: note = chemically synthesized
  source 1..20: mol_type = other DNA
ctgttttggtaccagtacca

SEQ ID NO: 69206 - DNA, 20 bp, synthetic construct
  misc_feature 1..20: note = chemically synthesized
  source 1..20: mol_type = other DNA
tggttaccgtagcattgtag

SEQ ID NO: 69207 - DNA, 20 bp, synthetic construct
  misc_feature 1..20: note = chemically synthesized
  source 1..20: mol_type = other DNA
aagtcaggtagcgtgatgcc

SEQ ID NO: 69208 - DNA, 20 bp, synthetic construct
  misc_feature 1..20: note = chemically synthesized
  source 1..20: mol_type = other DNA
gatgcctccagctttgttct

SEQ ID NO: 69209 - DNA, 20 bp, synthetic construct
  misc_feature 1..20: note = chemically synthesized
  source 1..20: mol_type = other DNA
tccagctttgttcttttggc

SEQ ID NO: 69210 - DNA, 20 bp, synthetic construct
  misc_feature 1..20: note = chemically synthesized
  source 1..20: mol_type = other DNA
tggttccatatgaactttaa

SEQ ID NO: 69211 - DNA, 20 bp, synthetic construct
  misc_feature 1..20: note = chemically synthesized
  source 1..20: mol_type = other DNA
gttctgtgaagaaagtcatt

SEQ ID NO: 69212 - DNA, 20 bp, synthetic construct
  misc_feature 1..20: note = chemically synthesized
  source 1..20: mol_type = other DNA
cagtatgaccattttcacga

SEQ ID NO: 69213 - DNA, 20 bp, synthetic construct
  misc_feature 1..20: note = chemically synthesized
  source 1..20: mol_type = other DNA
tgagcatggaatgttcttcc

SEQ ID NO: 69214 - DNA, 20 bp, synthetic construct
  misc_feature 1..20: note = chemically synthesized
  source 1..20: mol_type = other DNA
cctcttttatttcattgagc

SEQ ID NO: 69215 - DNA, 20 bp, synthetic construct
  misc_feature 1..20: note = chemically synthesized
  source 1..20: mol_type = other DNA
gtccttcacatcccttgtaa

SEQ ID NO: 69216 - DNA, 20 bp, synthetic construct
  misc_feature 1..20: note = chemically synthesized
  source 1..20: mol_type = other DNA
aattgtgaatgggagttcac

SEQ ID NO: 69217 - DNA, 20 bp, synthetic construct
  misc_feature 1..20: note = chemically synthesized
  source 1..20: mol_type = other DNA
agttcactcatgatttggct

SEQ ID NO: 69218 - DNA, 20 bp, synthetic construct
  misc_feature 1..20: note = chemically synthesized
  source 1..20: mol_type = other DNA
ttattggtgcataggaatac

SEQ ID NO: 69219 - DNA, 20 bp, synthetic construct
  misc_feature 1..20: note = chemically synthesized
  source 1..20: mol_type = other DNA
gaatacttgtgatttttgca

SEQ ID NO: 69220 - DNA, 20 bp, synthetic construct
  misc_feature 1..20: note = chemically synthesized
  source 1..20: mol_type = other DNA
atatcctgagactttgctga

SEQ ID NO: 69221 - DNA, 20 bp, synthetic construct
  misc_feature 1..20: note = chemically synthesized
  source 1..20: mol_type = other DNA
agactttgctgaagttgctt

SEQ ID NO: 69222 - DNA, 20 bp, synthetic construct
  misc_feature 1..20: note = chemically synthesized
  source 1..20: mol_type = other DNA
tgaagttgcttatcagctta

SEQ ID NO: 69223 - DNA, 20 bp, synthetic construct
  misc_feature 1..20: note = chemically synthesized
  source 1..20: mol_type = other DNA
gagattttgggctgagacaa

SEQ ID NO: 69224 - DNA, 20 bp, synthetic construct
  misc_feature 1..20: note = chemically synthesized
  source 1..20: mol_type = other DNA
gccctttatttccttctcct

SEQ ID NO: 69225 - DNA, 20 bp, synthetic construct
  misc_feature 1..20: note = chemically synthesized
  source 1..20: mol_type = other DNA
agagggcatccctgccttgt

SEQ ID NO: 69226 - DNA, 20 bp, synthetic construct
  misc_feature 1..20: note = chemically synthesized
  source 1..20: mol_type = other DNA
cttgtgccagttttcaaagg

SEQ ID NO: 69227 - DNA, 20 bp, synthetic construct
  misc_feature 1..20: note = chemically synthesized
  source 1..20: mol_type = other DNA
cagttttcaaagggaatgct

SEQ ID NO: 69228 - DNA, 20 bp, synthetic construct
  misc_feature 1..20: note = chemically synthesized
  source 1..20: mol_type = other DNA
cactcagtatgatattggct

SEQ ID NO: 69229 - DNA, 20 bp, synthetic construct
  misc_feature 1..20: note = chemically synthesized
  source 1..20: mol_type = other DNA
ccatcaatacctaatttatt

SEQ ID NO: 69230 - DNA, 20 bp, synthetic construct
  misc_feature 1..20: note = chemically synthesized
  source 1..20: mol_type = other DNA
tgcatctattgagataatca

SEQ ID NO: 69231 - DNA, 20 bp, synthetic construct
  misc_feature 1..20: note = chemically synthesized
  source 1..20: mol_type = other DNA
catatggtttgtgtctttgg

SEQ ID NO: 69232 - DNA, 20 bp, synthetic construct
  misc_feature 1..20: note = chemically synthesized
  source 1..20: mol_type = other DNA
gtctttggttctgtttatat

SEQ ID NO: 69233 - DNA, 20 bp, synthetic construct
  misc_feature 1..20: note = chemically synthesized
  source 1..20: mol_type = other DNA
ggttctgtttatatgctgga

SEQ ID NO: 69234 - DNA, 20 bp, synthetic construct
  misc_feature 1..20: note = chemically synthesized
  source 1..20: mol_type = other DNA
tttatatgctggattatgtt

SEQ ID NO: 69235 - DNA, 20 bp, synthetic construct
  misc_feature 1..20: note = chemically synthesized
  source 1..20: mol_type = other DNA
agcccacttgatcatggtgg

SEQ ID NO: 69236 - DNA, 20 bp, synthetic construct
  misc_feature 1..20: note = chemically synthesized
  source 1..20: mol_type = other DNA
tcagtttgccagtattttat

SEQ ID NO: 69237 - DNA, 20 bp, synthetic construct
  misc_feature 1..20: note = chemically synthesized
  source 1..20: mol_type = other DNA
ctttttttgttgtgtctctg

SEQ ID NO: 69238 - DNA, 20 bp, synthetic construct
  misc_feature 1..20: note = chemically synthesized
  source 1..20: mol_type = other DNA
ggcctcataaaatgagttag

SEQ ID NO: 69239 - DNA, 20 bp, synthetic construct
  misc_feature 1..20: note = chemically synthesized
  source 1..20: mol_type = other DNA
gggaggattccctctttttc

SEQ ID NO: 69240 - DNA, 20 bp, synthetic construct
  misc_feature 1..20: note = chemically synthesized
  source 1..20: mol_type = other DNA
cctctttttctattgattgg

SEQ ID NO: 69241 - DNA, 20 bp, synthetic construct
  misc_feature 1..20: note = chemically synthesized
  source 1..20: mol_type = other DNA
attcagagatacaacttctt

SEQ ID NO: 69242 - DNA, 20 bp, synthetic construct
  misc_feature 1..20: note = chemically synthesized
  source 1..20: mol_type = other DNA
cgaggaatttatccatttct

SEQ ID NO: 69243 - DNA, 20 bp, synthetic construct
  misc_feature 1..20: note = chemically synthesized
  source 1..20: mol_type = other DNA
tatccatttcttctagattt

SEQ ID NO: 69244 - DNA, 20 bp, synthetic construct
  misc_feature 1..20: note = chemically synthesized
  source 1..20: mol_type = other DNA
tttctagtttatttgcgtag

SEQ ID NO: 69245 - DNA, 20 bp, synthetic construct
  misc_feature 1..20: note = chemically synthesized
  source 1..20: mol_type = other DNA
tgtttatagtattctctgac

SEQ ID NO: 69246 - DNA, 20 bp, synthetic construct
  misc_feature 1..20: note = chemically synthesized
  source 1..20: mol_type = other DNA
tgtcattttttattgcgtct

SEQ ID NO: 69247 - DNA, 20 bp, synthetic construct
  misc_feature 1..20: note = chemically synthesized
  source 1..20: mol_type = other DNA
tttgttgatcttttcaaaaa

SEQ ID NO: 69248 - DNA, 20 bp, synthetic construct
  misc_feature 1..20: note = chemically synthesized
  source 1..20: mol_type = other DNA
atcttttcaaaaaaacagct

SEQ ID NO: 69249 - DNA, 20 bp, synthetic construct
  misc_feature 1..20: note = chemically synthesized
  source 1..20: mol_type = other DNA
aaaaaaacagcttctggatt

SEQ ID NO: 69250 - DNA, 20 bp, synthetic construct
  misc_feature 1..20: note = chemically synthesized
  source 1..20: mol_type = other DNA
tggattcattgatttttttg

SEQ ID NO: 69251 - DNA, 20 bp, synthetic construct
  misc_feature 1..20: note = chemically synthesized
  source 1..20: mol_type = other DNA
ttagttatttcttgtcttct

SEQ ID NO: 69252 - DNA, 20 bp, synthetic construct
  misc_feature 1..20: note = chemically synthesized
  source 1..20: mol_type = other DNA
tgtcttctgttagcttttga

SEQ ID NO: 69253 - DNA, 20 bp, synthetic construct
  misc_feature 1..20: note = chemically synthesized
  source 1..20: mol_type = other DNA
tagcttttgaatgtgtttgc

SEQ ID NO: 69254 - DNA, 20 bp, synthetic construct
  misc_feature 1..20: note = chemically synthesized
  source 1..20: mol_type = other DNA
aatgtgtttgctcctgcttc

SEQ ID NO: 69255 - DNA, 20 bp, synthetic construct
  misc_feature 1..20: note = chemically synthesized
  source 1..20: mol_type = other DNA
gggtgtcaattttagatctt

SEQ ID NO: 69256 - DNA, 20 bp, synthetic construct
  misc_feature 1..20: note = chemically synthesized
  source 1..20: mol_type = other DNA
gctataaatttccctctaca

SEQ ID NO: 69257 - DNA, 20 bp, synthetic construct
  misc_feature 1..20: note = chemically synthesized
  source 1..20: mol_type = other DNA
acactgctttgaatgtgtct

SEQ ID NO: 69258 - DNA, 20 bp, synthetic construct
  misc_feature 1..20: note = chemically synthesized
  source 1..20: mol_type = other DNA
tgtgttgtgtctttgttctc

SEQ ID NO: 69259 - DNA, 20 bp, synthetic construct
  misc_feature 1..20: note = chemically synthesized
  source 1..20: mol_type = other DNA
agtcattcaggagcaggctg

SEQ ID NO: 69260 - DNA, 20 bp, synthetic construct
  misc_feature 1..20: note = chemically synthesized
  source 1..20: mol_type = other DNA
gttcagtttccatgtagctg

SEQ ID NO: 69261 - DNA, 20 bp, synthetic construct
  misc_feature 1..20: note = chemically synthesized
  source 1..20: mol_type = other DNA
atgtagctgagtggttttga

SEQ ID NO: 69262 - DNA, 20 bp, synthetic construct
  misc_feature 1..20: note = chemically synthesized
  source 1..20: mol_type = other DNA
tgagtttcttaatcctgagt

SEQ ID NO: 69263 - DNA, 20 bp, synthetic construct
  misc_feature 1..20: note = chemically synthesized
  source 1..20: mol_type = other DNA
tttcttaatcctgagttcta

SEQ ID NO: 69264 - DNA, 20 bp, synthetic construct
  misc_feature 1..20: note = chemically synthesized
  source 1..20: mol_type = other DNA
gattgcactgtggtctgaga

SEQ ID NO: 69265 - DNA, 20 bp, synthetic construct
  misc_feature 1..20: note = chemically synthesized
  source 1..20: mol_type = other DNA
tggtctgagagacagtttgt

SEQ ID NO: 69266 - DNA, 20 bp, synthetic construct
  misc_feature 1..20: note = chemically synthesized
  source 1..20: mol_type = other DNA
gttcttttacatttgctgag

SEQ ID NO: 69267 - DNA, 20 bp, synthetic construct
  misc_feature 1..20: note = chemically synthesized
  source 1..20: mol_type = other DNA
gctttacttccaactatgtg

SEQ ID NO: 69268 - DNA, 20 bp, synthetic construct
  misc_feature 1..20: note = chemically synthesized
  source 1..20: mol_type = other DNA
gctgaaaagaatgtatattc

SEQ ID NO: 69269 - DNA, 20 bp, synthetic construct
  misc_feature 1..20: note = chemically synthesized
  source 1..20: mol_type = other DNA
gttctgtagatgtctattag

SEQ ID NO: 69270 - DNA, 20 bp, synthetic construct
  misc_feature 1..20: note = chemically synthesized
  source 1..20: mol_type = other DNA
ctctttgtaggtcactcagg

SEQ ID NO: 69271 - DNA, 20 bp, synthetic construct
  misc_feature 1..20: note = chemically synthesized
  source 1..20: mol_type = other DNA
ctttgtctcttttgatcttt

SEQ ID NO: 69272 - DNA, 20 bp, synthetic construct
  misc_feature 1..20: note = chemically synthesized
  source 1..20: mol_type = other DNA
ttgatctttgttggtttaaa

SEQ ID NO: 69273 - DNA, 20 bp, synthetic construct
  misc_feature 1..20: note = chemically synthesized
  source 1..20: mol_type = other DNA
aaaatctgttttatcagaga

SEQ ID NO: 69274 - DNA, 20 bp, synthetic construct
  misc_feature 1..20: note = chemically synthesized
  source 1..20: mol_type = other DNA
ggattgcaacccctgccttt

SEQ ID NO: 69275 - DNA, 20 bp, synthetic construct
  misc_feature 1..20: note = chemically synthesized
  source 1..20: mol_type = other DNA
cctgcctttttttgttttcc

SEQ ID NO: 69276 - DNA, 20 bp, synthetic construct
  misc_feature 1..20: note = chemically synthesized
  source 1..20: mol_type = other DNA
tgtgtgtctctgcacgtgag

SEQ ID NO: 69277 - DNA, 20 bp, synthetic construct
  misc_feature 1..20: note = chemically synthesized
  source 1..20: mol_type = other DNA
ctggttattttgctcgttga

SEQ ID NO: 69278 - DNA, 20 bp, synthetic construct
  misc_feature 1..20: note = chemically synthesized
  source 1..20: mol_type = other DNA
ttgatggtctttacaatttg

SEQ ID NO: 69279 - DNA, 20 bp, synthetic construct
  misc_feature 1..20: note = chemically synthesized
  source 1..20: mol_type = other DNA
ctgatactagttgttccttt

SEQ ID NO: 69280 - DNA, 20 bp, synthetic construct
  misc_feature 1..20: note = chemically synthesized
  source 1..20: mol_type = other DNA
tagttgttcctttccatgtt

SEQ ID NO: 69281 - DNA, 20 bp, synthetic construct
  misc_feature 1..20: note = chemically synthesized
  source 1..20: mol_type = other DNA
tggtgacaaaatctctcagc

SEQ ID NO: 69282 - DNA, 20 bp, synthetic construct
  misc_feature 1..20: note = chemically synthesized
  source 1..20: mol_type = other DNA
ctcagcatttgcttgtctgt

SEQ ID NO: 69283 - DNA, 20 bp, synthetic construct
  misc_feature 1..20: note = chemically synthesized
  source 1..20: mol_type = other DNA
ttttatttctccttcactta

SEQ ID NO: 69284 - DNA, 20 bp, synthetic construct
  misc_feature 1..20: note = chemically synthesized
  source 1..20: mol_type = other DNA
tttctccttcacttatgaag

SEQ ID NO: 69285 - DNA, 20 bp, synthetic construct
  misc_feature 1..20: note = chemically synthesized
  source 1..20: mol_type = other DNA
aatattggcccccactttct

SEQ ID NO: 69286 - DNA, 20 bp, synthetic construct
  misc_feature 1..20: note = chemically synthesized
  source 1..20: mol_type = other DNA
ccccactttcttctggcttg

SEQ ID NO: 69287 - DNA, 20 bp, synthetic construct
  misc_feature 1..20: note = chemically synthesized
  source 1..20: mol_type = other DNA
atagatcagctgttagtctg

SEQ ID NO: 69288 - DNA, 20 bp, synthetic construct
  misc_feature 1..20: note = chemically synthesized
  source 1..20: mol_type = other DNA
ctgacagttatgtgtcttgg

SEQ ID NO: 69289 - DNA, 20 bp, synthetic construct
  misc_feature 1..20: note = chemically synthesized
  source 1..20: mol_type = other DNA
tgtatttcctgaatgtgaat

SEQ ID NO: 69290 - DNA, 20 bp, synthetic construct
  misc_feature 1..20: note = chemically synthesized
  source 1..20: mol_type = other DNA
tgtgaatttgggcttgcctt

SEQ ID NO: 69291 - DNA, 20 bp, synthetic construct
  misc_feature 1..20: note = chemically synthesized
  source 1..20: mol_type = other DNA
ctcctggataatatcctgca

SEQ ID NO: 69292 - DNA, 20 bp, synthetic construct
  misc_feature 1..20: note = chemically synthesized
  source 1..20: mol_type = other DNA
tttcagctacaccaattaga

SEQ ID NO: 69293 - DNA, 20 bp, synthetic construct
  misc_feature 1..20: note = chemically synthesized
  source 1..20: mol_type = other DNA
cacatagtcccatatttctt

SEQ ID NO: 69294 - DNA, 20 bp, synthetic construct
  misc_feature 1..20: note = chemically synthesized
  source 1..20: mol_type = other DNA
ccatatttcttggaggcttt

SEQ ID NO: 69295 - DNA, 20 bp, synthetic construct
  misc_feature 1..20: note = chemically synthesized
  source 1..20: mol_type = other DNA
ttttttctctaaacttctct

SEQ ID NO: 69296 - DNA, 20 bp, synthetic construct
  misc_feature 1..20: note = chemically synthesized
  source 1..20: mol_type = other DNA
cagttgatctcatcggttac

SEQ ID NO: 69297 - DNA, 20 bp, synthetic construct
  misc_feature 1..20: note = chemically synthesized
  source 1..20: mol_type = other DNA
ttgtcacgtagttctcctgc

SEQ ID NO: 69298 - DNA, 20 bp, synthetic construct
  misc_feature 1..20: note = chemically synthesized
  source 1..20: mol_type = other DNA
ccattcatctaatttttttt

SEQ ID NO: 69299 - DNA, 20 bp, synthetic construct
  misc_feature 1..20: note = chemically synthesized
  source 1..20: mol_type = other DNA
ttcaaagttttttacttctt

SEQ ID NO: 69300 - DNA, 20 bp, synthetic construct
  misc_feature 1..20: note = chemically synthesized
  source 1..20: mol_type = other DNA
cgtttgttcgaacttcctcc

SEQ ID NO: 69301 - DNA, 20 bp, synthetic construct
  misc_feature 1..20: note = chemically synthesized
  source 1..20: mol_type = other DNA
aacttcctcctttagcttgg

SEQ ID NO: 69302 - DNA, 20 bp, synthetic construct
  misc_feature 1..20: note = chemically synthesized
  source 1..20: mol_type = other DNA
ctcgtcaaagtcattctctg

SEQ ID NO: 69303 - DNA, 20 bp, synthetic construct
  misc_feature 1..20: note = chemically synthesized
  source 1..20: mol_type = other DNA
gcactctcatttttagagtg

SEQ ID NO: 69304 - DNA, 20 bp, synthetic construct
  misc_feature 1..20: note = chemically synthesized
  source 1..20: mol_type = other DNA
tagagtgtccagtttttctg

SEQ ID NO: 69305 - DNA, 20 bp, synthetic construct
  misc_feature 1..20: note = chemically synthesized
  source 1..20: mol_type = other DNA
ctctgctttttccccatctt

SEQ ID NO: 69306 - DNA, 20 bp, synthetic construct
  misc_feature 1..20: note = chemically synthesized
  source 1..20: mol_type = other DNA
ttgatgatggcgatgtacag

SEQ ID NO: 69307 - DNA, 20 bp, synthetic construct
  misc_feature 1..20: note = chemically synthesized
  source 1..20: mol_type = other DNA
gtttttggtgtggatgtcct

SEQ ID NO: 69308 - DNA, 20 bp, synthetic construct
  misc_feature 1..20: note = chemically synthesized
  source 1..20: mol_type = other DNA
tgtggatgtcctttctgttt

SEQ ID NO: 69309 - DNA, 20 bp, synthetic construct
  misc_feature 1..20: note = chemically synthesized
  source 1..20: mol_type = other DNA
accctcagctgcaggtctgt

SEQ ID NO: 69310 - DNA, 20 bp, synthetic construct
  misc_feature 1..20: note = chemically synthesized
  source 1..20: mol_type = other DNA
tactggaggtccactccaga

SEQ ID NO: 69311 - DNA, 20 bp, synthetic construct
  misc_feature 1..20: note = chemically synthesized
  source 1..20: mol_type = other DNA
tgctgcctgatcattcctct

SEQ ID NO: 69312 - DNA, 20 bp, synthetic construct
  misc_feature 1..20: note = chemically synthesized
  source 1..20: mol_type = other DNA
ctgcagaggttcttgttgtc

SEQ ID NO: 69313 - DNA, 20 bp, synthetic construct
  misc_feature 1..20: note = chemically synthesized
  source 1..20: mol_type = other DNA
tgtggtgggctccacccagt

SEQ ID NO: 69314 - DNA, 20 bp, synthetic construct
  misc_feature 1..20: note = chemically synthesized
  source 1..20: mol_type = other DNA
ccacccagttcgagcttcca

SEQ ID NO: 69315 - DNA, 20 bp, synthetic construct
  misc_feature 1..20: note = chemically synthesized
  source 1..20: mol_type = other DNA
cagttcgagcttccaggcgg

SEQ ID NO: 69316 - DNA, 20 bp, synthetic construct
  misc_feature 1..20: note = chemically synthesized
  source 1..20: mol_type = other DNA
ccccagcctcactgccacct

SEQ ID NO: 69317 - DNA, 20 bp, synthetic construct
  misc_feature 1..20: note = chemically synthesized
  source 1..20: mol_type = other DNA
atctcctggtgtgccatttg

SEQ ID NO: 69318 - DNA, 20 bp, synthetic construct
  misc_feature 1..20: note = chemically synthesized
  source 1..20: mol_type = other DNA
gcagtattagggcgggagtg

SEQ ID NO: 69319 - DNA, 20 bp, synthetic construct
  misc_feature 1..20: note = chemically synthesized
  source 1..20: mol_type = other DNA
aaagggaattccctgacccc

SEQ ID NO: 69320 - DNA, 20 bp, synthetic construct
  misc_feature 1..20: note = chemically synthesized
  source 1..20: mol_type = other DNA
ccgggtgaggtgatgcctcg

SEQ ID NO: 69321 - DNA, 20 bp, synthetic construct
  misc_feature 1..20: note = chemically synthesized
  source 1..20: mol_type = other DNA
aacctctgcctcccaggatc

SEQ ID NO: 69322 - DNA, 20 bp, synthetic construct
  misc_feature 1..20: note = chemically synthesized
  source 1..20: mol_type = other DNA
tgcctcagcctcccaaattg

SEQ ID NO: 69323 - DNA, 20 bp, synthetic construct
  misc_feature 1..20: note = chemically synthesized
  source 1..20: mol_type = other DNA
atgcctgccaccacgccagg

SEQ ID NO: 69324 - DNA, 20 bp, synthetic construct
  misc_feature 1..20: note = chemically synthesized
  source 1..20: mol_type = other DNA
ttttatatttttagtagcga

SEQ ID NO: 69325 - DNA, 20 bp, synthetic construct
  misc_feature 1..20: note = chemically synthesized
  source 1..20: mol_type = other DNA
ccagcctagaataacttctt

SEQ ID NO: 69326 - DNA, 20 bp, synthetic construct
  misc_feature 1..20: note = chemically synthesized
  source 1..20: mol_type = other DNA
actgaatttatttctccctt

SEQ ID NO: 69327 - DNA, 20 bp, synthetic construct
  misc_feature 1..20: note = chemically synthesized
  source 1..20: mol_type = other DNA
attaaataacagtgttatct

SEQ ID NO: 69328 - DNA, 20 bp, synthetic construct
  misc_feature 1..20: note = chemically synthesized
  source 1..20: mol_type = other DNA
atgtcttcccatatttttat

SEQ ID NO: 69329 - DNA, 20 bp, synthetic construct
  misc_feature 1..20: note = chemically synthesized
  source 1..20: mol_type = other DNA
accttcacacctaattgtgt

SEQ ID NO: 69330 - DNA, 20 bp, synthetic construct
  misc_feature 1..20: note = chemically synthesized
  source 1..20: mol_type = other DNA
aaaaagtatagttgttcaat

SEQ ID NO: 69331 - DNA, 20 bp, synthetic construct
  misc_feature 1..20: note = chemically synthesized
  source 1..20: mol_type = other DNA
agtatagttgttcaattact

SEQ ID NO: 69332 - DNA, 20 bp, synthetic construct
  misc_feature 1..20: note = chemically synthesized
  source 1..20: mol_type = other DNA
tatcacattattatatttta

SEQ ID NO: 69333 - DNA, 20 bp, synthetic construct
  misc_feature 1..20: note = chemically synthesized
  source 1..20: mol_type = other DNA
attattatattttagtgaga

SEQ ID NO: 69334 - DNA, 20 bp, synthetic construct
  misc_feature 1..20: note = chemically synthesized
  source 1..20: mol_type = other DNA
tattttagtgagatttagtt

SEQ ID NO: 69335 - DNA, 20 bp, synthetic construct
  misc_feature 1..20: note = chemically synthesized
  source 1..20: mol_type = other DNA
acatgagtggtattaattta

SEQ ID NO: 69336 - DNA, 20 bp, synthetic construct
  misc_feature 1..20: note = chemically synthesized
  source 1..20: mol_type = other DNA
aaaatatatatatatataat

SEQ ID NO: 69337 - DNA, 20 bp, synthetic construct
  misc_feature 1..20: note = chemically synthesized
  source 1..20: mol_type = other DNA
taaagtgctaaaatttattg

SEQ ID NO: 69338 - DNA, 20 bp, synthetic construct
  misc_feature 1..20: note = chemically synthesized
  source 1..20: mol_type = other DNA
caagatgcatttttttattt

SEQ ID NO: 69339 - DNA, 20 bp, synthetic construct
  misc_feature 1..20: note = chemically synthesized
  source 1..20: mol_type = other DNA
tatatttaaggtgtacaaca

SEQ ID NO: 69340 - DNA, 20 bp, synthetic construct
  misc_feature 1..20: note = chemically synthesized
  source 1..20: mol_type = other DNA
taatatatgtataccttgtg

SEQ ID NO: 69341 - DNA, 20 bp, synthetic construct
  misc_feature 1..20: note = chemically synthesized
  source 1..20: mol_type = other DNA
agttacctttttcttgtggt

SEQ ID NO: 69342 - DNA, 20 bp, synthetic construct
  misc_feature 1..20: note = chemically synthesized
  source 1..20: mol_type = other DNA
gctactcgggaggctgaggc

SEQ ID NO: 69343 - DNA, 20 bp, synthetic construct
  misc_feature 1..20: note = chemically synthesized
  source 1..20: mol_type = other DNA
tcgggaggctgaggcaggag

SEQ ID NO: 69344 - DNA, 20 bp, synthetic construct
  misc_feature 1..20: note = chemically synthesized
  source 1..20: mol_type = other DNA
aaattttataccctttgagt

SEQ ID NO: 69345 - DNA, 20 bp, synthetic construct
  misc_feature 1..20: note = chemically synthesized
  source 1..20: mol_type = other DNA
ataccctttgagtaatagtt

SEQ ID NO: 69346 - DNA, 20 bp, synthetic construct
  misc_feature 1..20: note = chemically synthesized
  source 1..20: mol_type = other DNA
ctggaaaccatacctctact

SEQ ID NO: 69347 - DNA, 20 bp, synthetic construct
  misc_feature 1..20: note = chemically synthesized
  source 1..20: mol_type = other DNA
tttccatgagagtgactttt

SEQ ID NO: 69348 - DNA, 20 bp, synthetic construct
  misc_feature 1..20: note = chemically synthesized
  source 1..20: mol_type = other DNA
gtagtatttgtctttttgtg

SEQ ID NO: 69349 - DNA, 20 bp, synthetic construct
  misc_feature 1..20: note = chemically synthesized
  source 1..20: mol_type = other DNA
tttgtgtcaggcttattttt

SEQ ID NO: 69350 - DNA, 20 bp, synthetic construct
  misc_feature 1..20: note = chemically synthesized
  source 1..20: mol_type = other DNA
catcaattctgccataaatg

SEQ ID NO: 69351 - DNA, 20 bp, synthetic construct
  misc_feature 1..20: note = chemically synthesized
  source 1..20: mol_type = other DNA
ttattttcctatttttaatt

SEQ ID NO: 69352 - DNA, 20 bp, synthetic construct
  misc_feature 1..20: note = chemically synthesized
  source 1..20: mol_type = other DNA
tttgtttgttattgaatcat

SEQ ID NO: 69353 - DNA, 20 bp, synthetic construct
  misc_feature 1..20: note = chemically synthesized
  source 1..20: mol_type = other DNA
accaaaatatttaagaaata

SEQ ID NO: 69354 - DNA, 20 bp, synthetic construct
  misc_feature 1..20: note = chemically synthesized
  source 1..20: mol_type = other DNA
tggttcacctttcatttgtt

SEQ ID NO: 69355 - DNA, 20 bp, synthetic construct
  misc_feature 1..20: note = chemically synthesized
  source 1..20: mol_type = other DNA
cacctttcatttgttcattg

SEQ ID NO: 69356 - DNA, 20 bp, synthetic construct
  misc_feature 1..20: note = chemically synthesized
  source 1..20: mol_type = other DNA
tgttttttgtgtggaaattt

SEQ ID NO: 69357 - DNA, 20 bp, synthetic construct
  misc_feature 1..20: note = chemically synthesized
  source 1..20: mol_type = other DNA
tttatttttccttttgttgc

SEQ ID NO: 69358 - DNA, 20 bp, synthetic construct
  misc_feature 1..20: note = chemically synthesized
  source 1..20: mol_type = other DNA
tgaatattagaattttcttc

SEQ ID NO: 69359 - DNA, 20 bp, synthetic construct
  misc_feature 1..20: note = chemically synthesized
  source 1..20: mol_type = other DNA
ttgatttctttaaaaatttt

SEQ ID NO: 69360 - DNA, 20 bp, synthetic construct
  misc_feature 1..20: note = chemically synthesized
  source 1..20: mol_type = other DNA
aaatttttatggttttaggt

SEQ ID NO: 69361 - DNA, 20 bp, synthetic construct
  misc_feature 1..20: note = chemically synthesized
  source 1..20: mol_type = other DNA
tttaacccattcaaatttat

SEQ ID NO: 69362 - DNA, 20 bp, synthetic construct
  misc_feature 1..20: note = chemically synthesized
  source 1..20: mol_type = other DNA
gtttatggtgtaagacaagg

SEQ ID NO: 69363 - DNA, 20 bp, synthetic construct
  misc_feature 1..20: note = chemically synthesized
  source 1..20: mol_type = other DNA
gtctgatttcatttcatttt

SEQ ID NO: 69364 - DNA, 20 bp, synthetic construct
  misc_feature 1..20: note = chemically synthesized
  source 1..20: mol_type = other DNA
acccttctatcatcacttat

SEQ ID NO: 69365 - DNA, 20 bp, synthetic construct
  misc_feature 1..20: note = chemically synthesized
  source 1..20: mol_type = other DNA
cacttattactgattatatg

SEQ ID NO: 69366 - DNA, 20 bp, synthetic construct
  misc_feature 1..20: note = chemically synthesized
  source 1..20: mol_type = other DNA
ttgatttcagaatcttgcca

SEQ ID NO: 69367 - DNA, 20 bp, synthetic construct
  misc_feature 1..20: note = chemically synthesized
  source 1..20: mol_type = other DNA
tagttccgggagactagcac

SEQ ID NO: 69368 - DNA, 20 bp, synthetic construct
  misc_feature 1..20: note = chemically synthesized
  source 1..20: mol_type = other DNA
caggacagtcaaaccatgac

SEQ ID NO: 69369 - DNA, 20 bp, synthetic construct
  misc_feature 1..20: note = chemically synthesized
  source 1..20: mol_type = other DNA
ggctgttgccaatgtgcatt

SEQ ID NO: 69370 - DNA, 20 bp, synthetic construct
  misc_feature 1..20: note = chemically synthesized
  source 1..20: mol_type = other DNA
tgcagcctcaccttctttca

SEQ ID NO: 69371 - DNA, 20 bp, synthetic construct
  misc_feature 1..20: note = chemically synthesized
  source 1..20: mol_type = other DNA
taagatatagtgtattttcc

SEQ ID NO: 69372 - DNA, 20 bp, synthetic construct
  misc_feature 1..20: note = chemically synthesized
  source 1..20: mol_type = other DNA
tgaactagctcttcatttct

SEQ ID NO: 69373 - DNA, 20 bp, synthetic construct
  misc_feature 1..20: note = chemically synthesized
  source 1..20: mol_type = other DNA
tacatcattgcaatgaaaat

SEQ ID NO: 69374 - DNA, 20 bp, synthetic construct
  misc_feature 1..20: note = chemically synthesized
  source 1..20: mol_type = other DNA
caaggcccttcataatatcc

SEQ ID NO: 69375 - DNA, 20 bp, synthetic construct
  misc_feature 1..20: note = chemically synthesized
  source 1..20: mol_type = other DNA
agaaattggacagcaagaaa

SEQ ID NO: 69376 - DNA, 20 bp, synthetic construct
  misc_feature 1..20: note = chemically synthesized
  source 1..20: mol_type = other DNA
gaggaagataagaggtatga

SEQ ID NO: 69377 - DNA, 20 bp, synthetic construct
  misc_feature 1..20: note = chemically synthesized
  source 1..20: mol_type = other DNA
gaacatgattagcaaaaggg

SEQ ID NO: 69378 - DNA, 20 bp, synthetic construct
  misc_feature 1..20: note = chemically synthesized
  source 1..20: mol_type = other DNA
aaaataaaagcagaatggta

SEQ ID NO: 69379 - DNA, 20 bp, synthetic construct
  misc_feature 1..20: note = chemically synthesized
  source 1..20: mol_type = other DNA
atcattattgccctgaaaga

SEQ ID NO: 69380 - DNA, 20 bp, synthetic construct
  misc_feature 1..20: note = chemically synthesized
  source 1..20: mol_type = other DNA
aaattacaaatgcaaaatta

SEQ ID NO: 69381 - DNA, 20 bp, synthetic construct
  misc_feature 1..20: note = chemically synthesized
  source 1..20: mol_type = other DNA
ctttaacccataaatatgta

SEQ ID NO: 69382 - DNA, 20 bp, synthetic construct
  misc_feature 1..20: note = chemically synthesized
  source 1..20: mol_type = other DNA
aaataaaagaaaataaagta

SEQ ID NO: 69383 - DNA, 20 bp, synthetic construct
  misc_feature 1..20: note = chemically synthesized
  source 1..20: mol_type = other DNA
aatgtactaggcagactgtg

SEQ ID NO: 69384 - DNA, 20 bp, synthetic construct
  misc_feature 1..20: note = chemically synthesized
  source 1..20: mol_type = other DNA
ccacactgatgcaatcattc

SEQ ID NO: 69385 - DNA, 20 bp, synthetic construct
  misc_feature 1..20: note = chemically synthesized
  source 1..20: mol_type = other DNA
tgaagttctcaggatccacg

SEQ ID NO: 69386 - DNA, 20 bp, synthetic construct
  misc_feature 1..20: note = chemically synthesized
  source 1..20: mol_type = other DNA
gtcttctctgtctccacatg

SEQ ID NO: 69387 - DNA, 20 bp, synthetic construct
  misc_feature 1..20: note = chemically synthesized
  source 1..20: mol_type = other DNA
ggagtcagatgcaccatggt

SEQ ID NO: 69388 - DNA, 20 bp, synthetic construct
  misc_feature 1..20: note = chemically synthesized
  source 1..20: mol_type = other DNA
ctgccctccctgctcctggg

SEQ ID NO: 69389 - DNA, 20 bp, synthetic construct
  misc_feature 1..20: note = chemically synthesized
  source 1..20: mol_type = other DNA
ctgtccttggctcttctggc

SEQ ID NO: 69390 - DNA, 20 bp, synthetic construct
  misc_feature 1..20: note = chemically synthesized
  source 1..20: mol_type = other DNA
atttacgtaatatttggaat

SEQ ID NO: 69391 - DNA, 20 bp, synthetic construct
  misc_feature 1..20: note = chemically synthesized
  source 1..20: mol_type = other DNA
agcttggtaagcatattgaa

SEQ ID NO: 69392 - DNA, 20 bp, synthetic construct
  misc_feature 1..20: note = chemically synthesized
  source 1..20: mol_type = other DNA
agttgatgcactaaaagtgg

SEQ ID NO: 69393 - DNA, 20 bp, synthetic construct
  misc_feature 1..20: note = chemically synthesized
  source 1..20: mol_type = other DNA
aagagttttgtctaccataa

SEQ ID NO: 69394 - DNA, 20 bp, synthetic construct
  misc_feature 1..20: note = chemically synthesized
  source 1..20: mol_type = other DNA
ctaagcatatcttctcctta

SEQ ID NO: 69395 - DNA, 20 bp, synthetic construct
  misc_feature 1..20: note = chemically synthesized
  source 1..20: mol_type = other DNA
atatatatgcattcatttgt

SEQ ID NO: 69396 - DNA, 20 bp, synthetic construct
  misc_feature 1..20: note = chemically synthesized
  source 1..20: mol_type = other DNA
ctctgtgcattagttactta

SEQ ID NO: 69397 - DNA, 20 bp, synthetic construct
  misc_feature 1..20: note = chemically synthesized
  source 1..20: mol_type = other DNA
gaggttaactggggacatct

SEQ ID NO: 69398 - DNA, 20 bp, synthetic construct
  misc_feature 1..20: note = chemically synthesized
  source 1..20: mol_type = other DNA
ggaaaaggtcttctacttgg

SEQ ID NO: 69399 - DNA, 20 bp, synthetic construct
  misc_feature 1..20: note = chemically synthesized
  source 1..20: mol_type = other DNA
cctctagtccactaagaata

SEQ ID NO: 69400 - DNA, 20 bp, synthetic construct
  misc_feature 1..20: note = chemically synthesized
  source 1..20: mol_type = other DNA
actgcgttttaaaatcattt

SEQ ID NO: 69401 - DNA, 20 bp, synthetic construct
  misc_feature 1..20: note = chemically synthesized
  source 1..20: mol_type = other DNA
agttcctatttctctttata

SEQ ID NO: 69402 - DNA, 20 bp, synthetic construct
  misc_feature 1..20: note = chemically synthesized
  source 1..20: mol_type = other DNA
cctatttctctttatatttt

SEQ ID NO: 69403 - DNA, 20 bp, synthetic construct
  misc_feature 1..20: note = chemically synthesized
  source 1..20: mol_type = other DNA
aaaatttactcttctttctc

SEQ ID NO: 69404 - DNA, 20 bp, synthetic construct
  misc_feature 1..20: note = chemically synthesized
  source 1..20: mol_type = other DNA
aaaacttttgaagtgcagag

SEQ ID NO: 69405 - DNA, 20 bp, synthetic construct
  misc_feature 1..20: note = chemically synthesized
  source 1..20: mol_type = other DNA
gcccctacctggaaacccat

SEQ ID NO: 69406 - DNA, 20 bp, synthetic construct
  misc_feature 1..20: note = chemically synthesized
  source 1..20: mol_type = other DNA
aagtgttatacttttacttt

SEQ ID NO: 69407 - DNA, 20 bp, synthetic construct
  misc_feature 1..20: note = chemically synthesized
  source 1..20: mol_type = other DNA
tcagctctaacactctgaaa

SEQ ID NO: 69408 - DNA, 20 bp, synthetic construct
  misc_feature 1..20: note = chemically synthesized
  source 1..20: mol_type = other DNA
atttacaaatttcttatttc

SEQ ID NO: 69409 - DNA, 20 bp, synthetic construct
  misc_feature 1..20: note = chemically synthesized
  source 1..20: mol_type = other DNA
ttccattgctttattctctt

SEQ ID NO: 69410 - DNA, 20 bp, synthetic construct
  misc_feature 1..20: note = chemically synthesized
  source 1..20: mol_type = other DNA
gtacttgtgaaaaaatctca

SEQ ID NO: 69411 - DNA, 20 bp, synthetic construct
  misc_feature 1..20: note = chemically synthesized
  source 1..20: mol_type = other DNA
attattctcacacacgcaga

SEQ ID NO: 69412 - DNA, 20 bp, synthetic construct
  misc_feature 1..20: note = chemically synthesized
  source 1..20: mol_type = other DNA
ggttaaaaaattatgcctat

SEQ ID NO: 69413 - DNA, 20 bp, synthetic construct
  misc_feature 1..20: note = chemically synthesized
  source 1..20: mol_type = other DNA
ggcacacgtgtatccctgag

SEQ ID NO: 69414 - DNA, 20 bp, synthetic construct
  misc_feature 1..20: note = chemically synthesized
  source 1..20: mol_type = other DNA
atattttaaatgttaaaaca

SEQ ID NO: 69415 - DNA, 20 bp, synthetic construct
  misc_feature 1..20: note = chemically synthesized
  source 1..20: mol_type = other DNA
catgcagatttgacttggct

SEQ ID NO: 69416 - DNA, 20 bp, synthetic construct
  misc_feature 1..20: note = chemically synthesized
  source 1..20: mol_type = other DNA
atttgacttggctgttagat

SEQ ID NO: 69417 - DNA, 20 bp, synthetic construct
  misc_feature 1..20: note = chemically synthesized
  source 1..20: mol_type = other DNA
taaatttaaacctgcattag

SEQ ID NO: 69418 - DNA, 20 bp, synthetic construct
  misc_feature 1..20: note = chemically synthesized
  source 1..20: mol_type = other DNA
taaacctgcattagcattgt

SEQ ID NO: 69419 - DNA, 20 bp, synthetic construct
  misc_feature 1..20: note = chemically synthesized
  source 1..20: mol_type = other DNA
ttagcattgttttagattta

SEQ ID NO: 69420 - DNA, 20 bp, synthetic construct
  misc_feature 1..20: note = chemically synthesized
  source 1..20: mol_type = other DNA
gatttagacagttttcaaga

SEQ ID NO: 69421 - DNA, 20 bp, synthetic construct
  misc_feature 1..20: note = chemically synthesized
  source 1..20: mol_type = other DNA
tgtgaaataaagtgttctgc

SEQ ID NO: 69422 - DNA, 20 bp, synthetic construct
  misc_feature 1..20: note = chemically synthesized
  source 1..20: mol_type = other DNA
aagaccaaaattgtcaaagc

SEQ ID NO: 69423 - DNA, 20 bp, synthetic construct
  misc_feature 1..20: note = chemically synthesized
  source 1..20: mol_type = other DNA
tcaaagcaagagctttgaaa

SEQ ID NO: 69424 - DNA, 20 bp, synthetic construct
  misc_feature 1..20: note = chemically synthesized
  source 1..20: mol_type = other DNA
tacaacttcttatgctcaga

SEQ ID NO: 69425 - DNA, 20 bp, synthetic construct
  misc_feature 1..20: note = chemically synthesized
  source 1..20: mol_type = other DNA
aaatagttttcctttttcta

SEQ ID NO: 69426 - DNA, 20 bp, synthetic construct
  misc_feature 1..20: note = chemically synthesized
  source 1..20: mol_type = other DNA
actgctgcagataccatcat

SEQ ID NO: 69427 - DNA, 20 bp, synthetic construct
  misc_feature 1..20: note = chemically synthesized
  source 1..20: mol_type = other DNA
catcctggcttcaaggcagg

SEQ ID NO: 69428 - DNA, 20 bp, synthetic construct
  misc_feature 1..20: note = chemically synthesized
  source 1..20: mol_type = other DNA
agcccaggcataccaggcaa

SEQ ID NO: 69429 - DNA, 20 bp, synthetic construct
  misc_feature 1..20: note = chemically synthesized
  source 1..20: mol_type = other DNA
aatttggttatggtcagagc

SEQ ID NO: 69430 - DNA, 20 bp, synthetic construct
  misc_feature 1..20: note = chemically synthesized
  source 1..20: mol_type = other DNA
caaagttcctgaaaaactat

SEQ ID NO: 69431 - DNA, 20 bp, synthetic construct
  misc_feature 1..20: note = chemically synthesized
  source 1..20: mol_type = other DNA
ttactgacatcttcactatt

SEQ ID NO: 69432 - DNA, 20 bp, synthetic construct
  misc_feature 1..20: note = chemically synthesized
  source 1..20: mol_type = other DNA
tgacatcttcactattgtga

SEQ ID NO: 69433 - DNA, 20 bp, synthetic construct
  misc_feature 1..20: note = chemically synthesized
  source 1..20: mol_type = other DNA
tattaatctttcttaagtcc

SEQ ID NO: 69434 - DNA, 20 bp, synthetic construct
  misc_feature 1..20: note = chemically synthesized
  source 1..20: mol_type = other DNA
atgacactcatctatgggag

SEQ ID NO: 69435 - DNA, 20 bp, synthetic construct
  misc_feature 1..20: note = chemically synthesized
  source 1..20: mol_type = other DNA
tatgggagtgtggttttatc

SEQ ID NO: 69436 - DNA, 20 bp, synthetic construct
  misc_feature 1..20: note = chemically synthesized
  source 1..20: mol_type = other DNA
gagtatttttatacatgctc

SEQ ID NO: 69437 - DNA, 20 bp, synthetic construct
  misc_feature 1..20: note = chemically synthesized
  source 1..20: mol_type = other DNA
aacaaaccgcacacacacaa

SEQ ID NO: 69438 - DNA, 20 bp, synthetic construct
  misc_feature 1..20: note = chemically synthesized
  source 1..20: mol_type = other DNA
acaaaatagtttggaaatag

SEQ ID NO: 69439 - DNA, 20 bp, synthetic construct
  misc_feature 1..20: note = chemically synthesized
  source 1..20: mol_type = other DNA
ttaatatttcctccactggg

SEQ ID NO: 69440 - DNA, 20 bp, synthetic construct
  misc_feature 1..20: note = chemically synthesized
  source 1..20: mol_type = other DNA
ggctcagattttcattcaga

SEQ ID NO: 69441 - DNA, 20 bp, synthetic construct
  misc_feature 1..20: note = chemically synthesized
  source 1..20: mol_type = other DNA
ggtacagtcttcagataaat

SEQ ID NO: 69442 - DNA, 20 bp, synthetic construct
  misc_feature 1..20: note = chemically synthesized
  source 1..20: mol_type = other DNA
catctctttagaggtagaat

SEQ ID NO: 69443 - DNA, 20 bp, synthetic construct
  misc_feature 1..20: note = chemically synthesized
  source 1..20: mol_type = other DNA
tgctctgaagctcaagagat

SEQ ID NO: 69444 - DNA, 20 bp, synthetic construct
  misc_feature 1..20: note = chemically synthesized
  source 1..20: mol_type = other DNA
atggatgatttaggagacta

SEQ ID NO: 69445 - DNA, 20 bp, synthetic construct
  misc_feature 1..20: note = chemically synthesized
  source 1..20: mol_type = other DNA
tttcattcagacatactgaa

SEQ ID NO: 69446 - DNA, 20 bp, synthetic construct
  misc_feature 1..20: note = chemically synthesized
  source 1..20: mol_type = other DNA
gaattaattccattcctata

SEQ ID NO: 69447 - DNA, 20 bp, synthetic construct
  misc_feature 1..20: note = chemically synthesized
  source 1..20: mol_type = other DNA
catatcactgggtcttgatg

SEQ ID NO: 69448 - DNA, 20 bp, synthetic construct
  misc_feature 1..20: note = chemically synthesized
  source 1..20: mol_type = other DNA
ttctcatgaattctctggta

SEQ ID NO: 69449 - DNA, 20 bp, synthetic construct
  misc_feature 1..20: note = chemically synthesized
  source 1..20: mol_type = other DNA
ttgacttttggagaaaggaa

SEQ ID NO: 69450 - DNA, 20 bp, synthetic construct
  misc_feature 1..20: note = chemically synthesized
  source 1..20: mol_type = other DNA
cttttggagaaaggaatgta

SEQ ID NO: 69451 - DNA, 20 bp, synthetic construct
  misc_feature 1..20: note = chemically synthesized
  source 1..20: mol_type = other DNA
ccccaaaatgccctgagtag

SEQ ID NO: 69452 - DNA, 20 bp, synthetic construct
  misc_feature 1..20: note = chemically synthesized
  source 1..20: mol_type = other DNA
aggaaaacacatggatataa

SEQ ID NO: 69453 - DNA, 20 bp, synthetic construct
  misc_feature 1..20: note = chemically synthesized
  source 1..20: mol_type = other DNA
actttcaaacacaaggaaac

SEQ ID NO: 69454 - DNA, 20 bp, synthetic construct
  misc_feature 1..20: note = chemically synthesized
  source 1..20: mol_type = other DNA
aaacacaaggaaacaacaga

SEQ ID NO: 69455 - DNA, 20 bp, synthetic construct
  misc_feature 1..20: note = chemically synthesized
  source 1..20: mol_type = other DNA
gattctgtttaggtattcaa

SEQ ID NO: 69456 - DNA, 20 bp, synthetic construct
  misc_feature 1..20: note = chemically synthesized
  source 1..20: mol_type = other DNA
attaatcaacatgcatataa

SEQ ID NO: 69457 - DNA, 20 bp, synthetic construct
  misc_feature 1..20: note = chemically synthesized
  source 1..20: mol_type = other DNA
cagaaaggaaataactgttc

SEQ ID NO: 69458 - DNA, 20 bp, synthetic construct
  misc_feature 1..20: note = chemically synthesized
  source 1..20: mol_type = other DNA
taactgttcggttgtttact

SEQ ID NO: 69459 - DNA, 20 bp, synthetic construct
  misc_feature 1..20: note = chemically synthesized
  source 1..20: mol_type = other DNA
tactcattcgttcattcatt

SEQ ID NO: 69460 - DNA, 20 bp, synthetic construct
  misc_feature 1..20: note = chemically synthesized
  source 1..20: mol_type = other DNA
agaaggtagagaataggcag

SEQ ID NO: 69461 - DNA, 20 bp, synthetic construct
  misc_feature 1..20: note = chemically synthesized
  source 1..20: mol_type = other DNA
atataaaaaatggtgtgggg

SEQ ID NO: 69462 - DNA, 20 bp, synthetic construct
  misc_feature 1..20: note = chemically synthesized
  source 1..20: mol_type = other DNA
atggtgtgggggagggtttg

SEQ ID NO: 69463 - DNA, 20 bp, synthetic construct
  misc_feature 1..20: note = chemically synthesized
  source 1..20: mol_type = other DNA
agattttttgggtagtatag

SEQ ID NO: 69464 - DNA, 20 bp, synthetic construct
  misc_feature 1..20: note = chemically synthesized
  source 1..20: mol_type = other DNA
attattttctcagtaattgt

SEQ ID NO: 69465 - DNA, 20 bp, synthetic construct
  misc_feature 1..20: note = chemically synthesized
  source 1..20: mol_type = other DNA
attaatgccttgtacggttc

SEQ ID NO: 69466 - DNA, 20 bp, synthetic construct
  misc_feature 1..20: note = chemically synthesized
  source 1..20: mol_type = other DNA
tggttaacagagaaataaag

SEQ ID NO: 69467 - DNA, 20 bp, synthetic construct
  misc_feature 1..20: note = chemically synthesized
  source 1..20: mol_type = other DNA
tatatacaaattaattccaa

SEQ ID NO: 69468 - DNA, 20 bp, synthetic construct
  misc_feature 1..20: note = chemically synthesized
  source 1..20: mol_type = other DNA
tatacaaattaattactata

SEQ ID NO: 69469 - DNA, 20 bp, synthetic construct
  misc_feature 1..20: note = chemically synthesized
  source 1..20: mol_type = other DNA
cagattaatagatacaaatt

SEQ ID NO: 69470 - DNA, 20 bp, synthetic construct
  misc_feature 1..20: note = chemically synthesized
  source 1..20: mol_type = other DNA
tccaattattccttattgta

SEQ ID NO: 69471 - DNA, 20 bp, synthetic construct
  misc_feature 1..20: note = chemically synthesized
  source 1..20: mol_type = other DNA
catacccatgtggagagaca

SEQ ID NO: 69472 - DNA, 20 bp, synthetic construct
  misc_feature 1..20: note = chemically synthesized
  source 1..20: mol_type = other DNA
atattaaataatttaaaata

SEQ ID NO: 69473 - DNA, 20 bp, synthetic construct
  misc_feature 1..20: note = chemically synthesized
  source 1..20: mol_type = other DNA
gtaggtaaaagaaccaaaat

SEQ ID NO: 69474 - DNA, 20 bp, synthetic construct
  misc_feature 1..20: note = chemically synthesized
  source 1..20: mol_type = other DNA
tgaagttctcaggatccacg

SEQ ID NO: 69475 - DNA, 20 bp, synthetic construct
  misc_feature 1..20: note = chemically synthesized
  source 1..20: mol_type = other DNA
gtcttctctgtctacacatg

SEQ ID NO: 69476 - DNA, 20 bp, synthetic construct
  misc_feature 1..20: note = chemically synthesized
  source 1..20: mol_type = other DNA
ggagtcagatgcaccatggt

SEQ ID NO: 69477 - DNA, 20 bp, synthetic construct
  misc_feature 1..20: note = chemically synthesized
  source 1..20: mol_type = other DNA
ctccctgctccagtgagcag

SEQ ID NO: 69478 - DNA, 20 bp, synthetic construct
  misc_feature 1..20: note = chemically synthesized
  source 1..20: mol_type = other DNA
gcaggttggtttaagataag

SEQ ID NO: 69479 - DNA, 20 bp, synthetic construct
  misc_feature 1..20: note = chemically synthesized
  source 1..20: mol_type = other DNA
tttaagataagcagggtttc

SEQ ID NO: 69480 - DNA, 20 bp, synthetic construct
  misc_feature 1..20: note = chemically synthesized
  source 1..20: mol_type = other DNA
cactattcccttaacttgcc

SEQ ID NO: 69481 - DNA, 20 bp, synthetic construct
  misc_feature 1..20: note = chemically synthesized
  source 1..20: mol_type = other DNA
cccaccgcatctctttcagc

SEQ ID NO: 69482 - DNA, 20 bp, synthetic construct
  misc_feature 1..20: note = chemically synthesized
  source 1..20: mol_type = other DNA
gttgtttctaaaaatatcct

SEQ ID NO: 69483 - DNA, 20 bp, synthetic construct
  misc_feature 1..20: note = chemically synthesized
  source 1..20: mol_type = other DNA
tcctagtttcatttttgcag

SEQ ID NO: 69484 - DNA, 20 bp, synthetic construct
  misc_feature 1..20: note = chemically synthesized
  source 1..20: mol_type = other DNA
taatatagtggaatgtatct

SEQ ID NO: 69485 - DNA, 20 bp, synthetic construct
  misc_feature 1..20: note = chemically synthesized
  source 1..20: mol_type = other DNA
tgtatcttagagtttaactt

SEQ ID NO: 69486 - DNA, 20 bp, synthetic construct
  misc_feature 1..20: note = chemically synthesized
  source 1..20: mol_type = other DNA
aagaaaacttatctaaaagc

SEQ ID NO: 69487 - DNA, 20 bp, synthetic construct
  misc_feature 1..20: note = chemically synthesized
  source 1..20: mol_type = other DNA
ataaagttcttctttgcctc

SEQ ID NO: 69488 - DNA, 20 bp, synthetic construct
  misc_feature 1..20: note = chemically synthesized
  source 1..20: mol_type = other DNA
ggaatggacaaatctattgc

SEQ ID NO: 69489 - DNA, 20 bp, synthetic construct
  misc_feature 1..20: note = chemically synthesized
  source 1..20: mol_type = other DNA
aatctattgctgcagtttaa

SEQ ID NO: 69490 - DNA, 20 bp, synthetic construct
  misc_feature 1..20: note = chemically synthesized
  source 1..20: mol_type = other DNA
tattgctgcagtttaaactt

SEQ ID NO: 69491 - DNA, 20 bp, synthetic construct
  misc_feature 1..20: note = chemically synthesized
  source 1..20: mol_type = other DNA
aagaatatttaaaaaatgaa

SEQ ID NO: 69492 - DNA, 20 bp, synthetic construct
  misc_feature 1..20: note = chemically synthesized
  source 1..20: mol_type = other DNA
atattatatacaaatatttt

SEQ ID NO: 69493 - DNA, 20 bp, synthetic construct
  misc_feature 1..20: note = chemically synthesized
  source 1..20: mol_type = other DNA
agaaagaatgcaaagtgaaa

SEQ ID NO: 69494 - DNA, 20 bp, synthetic construct
  misc_feature 1..20: note = chemically synthesized
  source 1..20: mol_type = other DNA
aagtagatttaccatattca

SEQ ID NO: 69495 - DNA, 20 bp, synthetic construct
  misc_feature 1..20: note = chemically synthesized
  source 1..20: mol_type = other DNA
gacccaggaatgaagatccc

SEQ ID NO: 69496 - DNA, 20 bp, synthetic construct
  misc_feature 1..20: note = chemically synthesized
  source 1..20: mol_type = other DNA
cccatgagcatatccaaaag

SEQ ID NO: 69497 - DNA, 20 bp, synthetic construct
  misc_feature 1..20: note = chemically synthesized
  source 1..20: mol_type = other DNA
taatagtatccacaaatgct

SEQ ID NO: 69498 - DNA, 20 bp, synthetic construct
  misc_feature 1..20: note = chemically synthesized
  source 1..20: mol_type = other DNA
gtatccaaagacatgtatag

SEQ ID NO: 69499 - DNA, 20 bp, synthetic construct
  misc_feature 1..20: note = chemically synthesized
  source 1..20: mol_type = other DNA
cctcaaaccggtagccactt

SEQ ID NO: 69500 - DNA, 20 bp, synthetic construct
  misc_feature 1..20: note = chemically synthesized
  source 1..20: mol_type = other DNA
cagaaatgaaaagaatcaac

SEQ ID NO: 69501 - DNA, 20 bp, synthetic construct
  misc_feature 1..20: note = chemically synthesized
  source 1..20: mol_type = other DNA
aaatgcattttacagcattt

SEQ ID NO: 69502 - DNA, 20 bp, synthetic construct
  misc_feature 1..20: note = chemically synthesized
  source 1..20: mol_type = other DNA
tagaaagatggatgatgtgc

SEQ ID NO: 69503 - DNA, 20 bp, synthetic construct
  misc_feature 1..20: note = chemically synthesized
  source 1..20: mol_type = other DNA
taattcaagaaaggtggtgg

SEQ ID NO: 69504 - DNA, 20 bp, synthetic construct
  misc_feature 1..20: note = chemically synthesized
  source 1..20: mol_type = other DNA
tcaagaaaggtggtggcatg

SEQ ID NO: 69505 - DNA, 20 bp, synthetic construct
  misc_feature 1..20: note = chemically synthesized
  source 1..20: mol_type = other DNA
atggtttgatttgtgtcttt

SEQ ID NO: 69506 - DNA, 20 bp, synthetic construct
  misc_feature 1..20: note = chemically synthesized
  source 1..20: mol_type = other DNA
agaaaatgggagacaaatag

SEQ ID NO: 69507 - DNA, 20 bp, synthetic construct
  misc_feature 1..20: note = chemically synthesized
  source 1..20: mol_type = other DNA
acaagaatagggccacattt

SEQ ID NO: 69508 - DNA, 20 bp, synthetic construct
  misc_feature 1..20: note = chemically synthesized
  source 1..20: mol_type = other DNA
tatctccttaaaatcttaga

SEQ ID NO: 69509 - DNA, 20 bp, synthetic construct
  misc_feature 1..20: note = chemically synthesized
  source 1..20: mol_type = other DNA
atgtgtttgtgagggaggaa

SEQ ID NO: 69510 - DNA, 20 bp, synthetic construct
  misc_feature 1..20: note = chemically synthesized
  source 1..20: mol_type = other DNA
ttccaattcatatataagaa

SEQ ID NO: 69511 - DNA, 20 bp, synthetic construct
  misc_feature 1..20: note = chemically synthesized
  source 1..20: mol_type = other DNA
ttgtctgttaattccaaaga

SEQ ID NO: 69512 - DNA, 20 bp, synthetic construct
  misc_feature 1..20: note = chemically synthesized
  source 1..20: mol_type = other DNA
ctttaattctgttctacctg

SEQ ID NO: 69513 - DNA, 20 bp, synthetic construct
  misc_feature 1..20: note = chemically synthesized
  source 1..20: mol_type = other DNA
acacattgggagatctggtt

SEQ ID NO: 69514 - DNA, 20 bp, synthetic construct
  misc_feature 1..20: note = chemically synthesized
  source 1..20: mol_type = other DNA
ctggttacatgtttattcta

SEQ ID NO: 69515 - DNA, 20 bp, synthetic construct
  misc_feature 1..20: note = chemically synthesized
  source 1..20: mol_type = other DNA
attctatatggattgcattg

SEQ ID NO: 69516 - DNA, 20 bp, synthetic construct
  misc_feature 1..20: note = chemically synthesized
  source 1..20: mol_type = other DNA
ttttcttttctcttctgaga

SEQ ID NO: 69517 - DNA, 20 bp, synthetic construct
  misc_feature 1..20: note = chemically synthesized
  source 1..20: mol_type = other DNA
caggcatgcaccacacgccc

SEQ ID NO: 69518 - DNA, 20 bp, synthetic construct
  misc_feature 1..20: note = chemically synthesized
  source 1..20: mol_type = other DNA
ttttgtatttttagtagaga

SEQ ID NO: 69519 - DNA, 20 bp, synthetic construct
  misc_feature 1..20: note = chemically synthesized
  source 1..20: mol_type = other DNA
tgccttggcctcccaaagtg

SEQ ID NO: 69520 - DNA, 20 bp, synthetic construct
  misc_feature 1..20: note = chemically synthesized
  source 1..20: mol_type = other DNA
acctgactgggcagtaagag

SEQ ID NO: 69521 - DNA, 20 bp, synthetic construct
  misc_feature 1..20: note = chemically synthesized
  source 1..20: mol_type = other DNA
aaattgaagcagaatcgaac

SEQ ID NO: 69522 - DNA, 20 bp, synthetic construct
  misc_feature 1..20: note = chemically synthesized
  source 1..20: mol_type = other DNA
actgttgattagaggtaggg

SEQ ID NO: 69523 - DNA, 20 bp, synthetic construct
  misc_feature 1..20: note = chemically synthesized
  source 1..20: mol_type = other DNA
atggaaaacactggaagaga

SEQ ID NO: 69524 - DNA, 20 bp, synthetic construct
  misc_feature 1..20: note = chemically synthesized
  source 1..20: mol_type = other DNA
ctatataaataagcccagta

SEQ ID NO: 69525 - DNA, 20 bp, synthetic construct
  misc_feature 1..20: note = chemically synthesized
  source 1..20: mol_type = other DNA
cccagtacattgtttgatat

SEQ ID NO: 69526 - DNA, 20 bp, synthetic construct
  misc_feature 1..20: note = chemically synthesized
  source 1..20: mol_type = other DNA
ttagaaatcagagttgggaa

SEQ ID NO: 69527 - DNA, 20 bp, synthetic construct
  misc_feature 1..20: note = chemically synthesized
  source 1..20: mol_type = other DNA
ggattatacaggctgtattt

SEQ ID NO: 69528 - DNA, 20 bp, synthetic construct
  misc_feature 1..20: note = chemically synthesized
  source 1..20: mol_type = other DNA
gacatagtccccaaaatccc

SEQ ID NO: 69529 - DNA, 20 bp, synthetic construct
  misc_feature 1..20: note = chemically synthesized
  source 1..20: mol_type = other DNA
ccgatgattttagaactcag

SEQ ID NO: 69530 - DNA, 20 bp, synthetic construct
  misc_feature 1..20: note = chemically synthesized
  source 1..20: mol_type = other DNA
agaatggaagtcaacttgct

SEQ ID NO: 69531 - DNA, 20 bp, synthetic construct
  misc_feature 1..20: note = chemically synthesized
  source 1..20: mol_type = other DNA
gagcaggtaggagataaggt

SEQ ID NO: 69532 - DNA, 20 bp, synthetic construct
  misc_feature 1..20: note = chemically synthesized
  source 1..20: mol_type = other DNA
ttgggaggctgaggcaggag

SEQ ID NO: 69533 - DNA, 20 bp, synthetic construct
  misc_feature 1..20: note = chemically synthesized
  source 1..20: mol_type = other DNA
aacctgaaaaaataaattat

SEQ ID NO: 69534 - DNA, 20 bp, synthetic construct
  misc_feature 1..20: note = chemically synthesized
  source 1..20: mol_type = other DNA
caattctaatctcagttcac

SEQ ID NO: 69535 - DNA, 20 bp, synthetic construct
  misc_feature 1..20: note = chemically synthesized
  source 1..20: mol_type = other DNA
agttcactgctgtttgaatt

SEQ ID NO: 69536 - DNA, 20 bp, synthetic construct
  misc_feature 1..20: note = chemically synthesized
  source 1..20: mol_type = other DNA
tattcatttactggacacat

SEQ ID NO: 69537 - DNA, 20 bp, synthetic construct
  misc_feature 1..20: note = chemically synthesized
  source 1..20: mol_type = other DNA
ttctgtcaattaccattcat

SEQ ID NO: 69538 - DNA, 20 bp, synthetic construct
  misc_feature 1..20: note = chemically synthesized
  source 1..20: mol_type = other DNA
atttgaggaactgacatttc

SEQ ID NO: 69539 - DNA, 20 bp, synthetic construct
  misc_feature 1..20: note = chemically synthesized
  source 1..20: mol_type = other DNA
ctggctgagggaaagcataa

SEQ ID NO: 69540 - DNA, 20 bp, synthetic construct
  misc_feature 1..20: note = chemically synthesized
  source 1..20: mol_type = other DNA
ctacagcagacagtcttttt

SEQ ID NO: 69541 - DNA, 20 bp, synthetic construct
  misc_feature 1..20: note = chemically synthesized
  source 1..20: mol_type = other DNA
cttctaggcctaatggcgga

SEQ ID NO: 69542 - DNA, 20 bp, synthetic construct
  misc_feature 1..20: note = chemically synthesized
  source 1..20: mol_type = other DNA
gttttctgatgttactaaca

SEQ ID NO: 69543 - DNA, 20 bp, synthetic construct
  misc_feature 1..20: note = chemically synthesized
  source 1..20: mol_type = other DNA
ttctaggttgagtaactgat

SEQ ID NO: 69544 - DNA, 20 bp, synthetic construct
  misc_feature 1..20: note = chemically synthesized
  source 1..20: mol_type = other DNA
gatgtgaataaatgcatgac

SEQ ID NO: 69545 - DNA, 20 bp, synthetic construct
  misc_feature 1..20: note = chemically synthesized
  source 1..20: mol_type = other DNA
cattttagaaccaaaggttc

SEQ ID NO: 69546 - DNA, 20 bp, synthetic construct
  misc_feature 1..20: note = chemically synthesized
  source 1..20: mol_type = other DNA
tctccaaatactagggaaat

SEQ ID NO: 69547 - DNA, 20 bp, synthetic construct
  misc_feature 1..20: note = chemically synthesized
  source 1..20: mol_type = other DNA
agtggtaggaatatacaatg

SEQ ID NO: 69548 - DNA, 20 bp, synthetic construct
  misc_feature 1..20: note = chemically synthesized
  source 1..20: mol_type = other DNA
gaaagagcccataattgtag

SEQ ID NO: 69549 - DNA, 20 bp, synthetic construct
  misc_feature 1..20: note = chemically synthesized
  source 1..20: mol_type = other DNA
attgtagcagagtttataga

SEQ ID NO: 69550 - DNA, 20 bp, synthetic construct
  misc_feature 1..20: note = chemically synthesized
  source 1..20: mol_type = other DNA
cccagttaaaattaaaaaaa

SEQ ID NO: 69551 - DNA, 20 bp, synthetic construct
  misc_feature 1..20: note = chemically synthesized
  source 1..20: mol_type = other DNA
aaatgcagaaatccaaattc

SEQ ID NO: 69552 - DNA, 20 bp, synthetic construct
  misc_feature 1..20: note = chemically synthesized
  source 1..20: mol_type = other DNA
tgtgttcttatgtgtgcatg

SEQ ID NO: 69553 - DNA, 20 bp, synthetic construct
  misc_feature 1..20: note = chemically synthesized
  source 1..20: mol_type = other DNA
atctgtatgtgtatatcaga

SEQ ID NO: 69554 - DNA, 20 bp, synthetic construct
  misc_feature 1..20: note = chemically synthesized
  source 1..20: mol_type = other DNA
cagagaatgtttacattgct

SEQ ID NO: 69555 - DNA, 20 bp, synthetic construct
  misc_feature 1..20: note = chemically synthesized
  source 1..20: mol_type = other DNA
cacaagcattcatgctacat

SEQ ID NO: 69556 - DNA, 20 bp, synthetic construct
  misc_feature 1..20: note = chemically synthesized
  source 1..20: mol_type = other DNA
ttcctgtaagatgtgtactt

SEQ ID NO: 69557 - DNA, 20 bp, synthetic construct
  misc_feature 1..20: note = chemically synthesized
  source 1..20: mol_type = other DNA
gggcaagggatagcacaagt

SEQ ID NO: 69558 - DNA, 20 bp, synthetic construct
  misc_feature 1..20: note = chemically synthesized
  source 1..20: mol_type = other DNA
cacaagtgtgagattttaaa

SEQ ID NO: 69559 - DNA, 20 bp, synthetic construct
  misc_feature 1..20: note = chemically synthesized
  source 1..20: mol_type = other DNA
agtgtgagattttaaagtgt

SEQ ID NO: 69560 - DNA, 20 bp, synthetic construct
  misc_feature 1..20: note = chemically synthesized
  source 1..20: mol_type = other DNA
acacagtaattattcaaaga

SEQ ID NO: 69561 - DNA, 20 bp, synthetic construct
  misc_feature 1..20: note = chemically synthesized
  source 1..20: mol_type = other DNA
tatgctacaagacagcagtt

SEQ ID NO: 69562 - DNA, 20 bp, synthetic construct
  misc_feature 1..20: note = chemically synthesized
  source 1..20: mol_type = other DNA
acatgagcaactggtattta

SEQ ID NO: 69563 - DNA, 20 bp, synthetic construct
  misc_feature 1..20: note = chemically synthesized
  source 1..20: mol_type = other DNA
tagaggaaatactttgagaa

SEQ ID NO: 69564 - DNA, 20 bp, synthetic construct
  misc_feature 1..20: note = chemically synthesized
  source 1..20: mol_type = other DNA
aatactttgagaaagaggtt

SEQ ID NO: 69565 - DNA, 20 bp, synthetic construct
  misc_feature 1..20: note = chemically synthesized
  source 1..20: mol_type = other DNA
tcttctaaaacctctttctt

SEQ ID NO: 69566 - DNA, 20 bp, synthetic construct
  misc_feature 1..20: note = chemically synthesized
  source 1..20: mol_type = other DNA
aaacctctttctttgaggtt

SEQ ID NO: 69567 - DNA, 20 bp, synthetic construct
  misc_feature 1..20: note = chemically synthesized
  source 1..20: mol_type = other DNA
ttcctaagggtcttgggtac

SEQ ID NO: 69568 - DNA, 20 bp, synthetic construct
  misc_feature 1..20: note = chemically synthesized
  source 1..20: mol_type = other DNA
gtcttgggtacaggagtttg

SEQ ID NO: 69569 - DNA, 20 bp, synthetic construct
  misc_feature 1..20: note = chemically synthesized
  source 1..20: mol_type = other DNA
ttcattgccagatccaaaca

SEQ ID NO: 69570 - DNA, 20 bp, synthetic construct
  misc_feature 1..20: note = chemically synthesized
  source 1..20: mol_type = other DNA
tccttcttttcattcacaga

SEQ ID NO: 69571 - DNA, 20 bp, synthetic construct
  misc_feature 1..20: note = chemically synthesized
  source 1..20: mol_type = other DNA
tttagctgtcatctctgact

SEQ ID NO: 69572 - DNA, 20 bp, synthetic construct
  misc_feature 1..20: note = chemically synthesized
  source 1..20: mol_type = other DNA
atctctgactctctgtttca

SEQ ID NO: 69573 - DNA, 20 bp, synthetic construct
  misc_feature 1..20: note = chemically synthesized
  source 1..20: mol_type = other DNA
cactgccacaatggtctctt

SEQ ID NO: 69574 - DNA, 20 bp, synthetic construct
  misc_feature 1..20: note = chemically synthesized
  source 1..20: mol_type = other DNA
tcgattttttttcttaactt

SEQ ID NO: 69575 - DNA, 20 bp, synthetic construct
  misc_feature 1..20: note = chemically synthesized
  source 1..20: mol_type = other DNA
tatacatgtgaatcaatttt

SEQ ID NO: 69576 - DNA, 20 bp, synthetic construct
  misc_feature 1..20: note = chemically synthesized
  source 1..20: mol_type = other DNA
ctctcatatgcaagaaactt

SEQ ID NO: 69577 - DNA, 20 bp, synthetic construct
  misc_feature 1..20: note = chemically synthesized
  source 1..20: mol_type = other DNA
tacttcatctggtctctgca

SEQ ID NO: 69578 - DNA, 20 bp, synthetic construct
  misc_feature 1..20: note = chemically synthesized
  source 1..20: mol_type = other DNA
tctatcaacttgacttaacg

SEQ ID NO: 69579 - DNA, 20 bp, synthetic construct
  misc_feature 1..20: note = chemically synthesized
  source 1..20: mol_type = other DNA
taaatctcagccttttaatc

SEQ ID NO: 69580 - DNA, 20 bp, synthetic construct
  misc_feature 1..20: note = chemically synthesized
  source 1..20: mol_type = other DNA
tgctcacataaacaaaaatc

SEQ ID NO: 69581 - DNA, 20 bp, synthetic construct
  misc_feature 1..20: note = chemically synthesized
  source 1..20: mol_type = other DNA
caaaaatcagtggttttcaa

SEQ ID NO: 69582 - DNA, 20 bp, synthetic construct
  misc_feature 1..20: note = chemically synthesized
  source 1..20: mol_type = other DNA
tagaaacagagagctgaaca

SEQ ID NO: 69583 - DNA, 20 bp, synthetic construct
  misc_feature 1..20: note = chemically synthesized
  source 1..20: mol_type = other DNA
tatgataaatctatcatatg

SEQ ID NO: 69584 - DNA, 20 bp, synthetic construct
  misc_feature 1..20: note = chemically synthesized
  source 1..20: mol_type = other DNA
acagcttaatggaattataa

SEQ ID NO: 69585 - DNA, 20 bp, synthetic construct
  misc_feature 1..20: note = chemically synthesized
  source 1..20: mol_type = other DNA
gaagacgttaagagaaagtt

SEQ ID NO: 69586 - DNA, 20 bp, synthetic construct
  misc_feature 1..20: note = chemically synthesized
  source 1..20: mol_type = other DNA
gagaaagttcaaggtttggc

SEQ ID NO: 69587 - DNA, 20 bp, synthetic construct
  misc_feature 1..20: note = chemically synthesized
  source 1..20: mol_type = other DNA
attataaataataaaaaata

SEQ ID NO: 69588 - DNA, 20 bp, synthetic construct
  misc_feature 1..20: note = chemically synthesized
  source 1..20: mol_type = other DNA
gtcaccaaatgagctatatc

SEQ ID NO: 69589 - DNA, 20 bp, synthetic construct
  misc_feature 1..20: note = chemically synthesized
  source 1..20: mol_type = other DNA
aaaacattgtcttattctag

SEQ ID NO: 69590 - DNA, 20 bp, synthetic construct
  misc_feature 1..20: note = chemically synthesized
  source 1..20: mol_type = other DNA
cacgagttctctcttttctt

SEQ ID NO: 69591 - DNA, 20 bp, synthetic construct
  misc_feature 1..20: note = chemically synthesized
  source 1..20: mol_type = other DNA
acctcccccatctaaaggag

SEQ ID NO: 69592 - DNA, 20 bp, synthetic construct
  misc_feature 1..20: note = chemically synthesized
  source 1..20: mol_type = other DNA
acacttacatcctttttcac

SEQ ID NO: 69593 - DNA, 20 bp, synthetic construct
  misc_feature 1..20: note = chemically synthesized
  source 1..20: mol_type = other DNA
ctcaccattatgggctagat

SEQ ID NO: 69594 - DNA, 20 bp, synthetic construct
  misc_feature 1..20: note = chemically synthesized
  source 1..20: mol_type = other DNA
caactcactaccccaacata

SEQ ID NO: 69595 - DNA, 20 bp, synthetic construct
  misc_feature 1..20: note = chemically synthesized
  source 1..20: mol_type = other DNA
tcactaccccaacatattgt

SEQ ID NO: 69596 - DNA, 20 bp, synthetic construct
  misc_feature 1..20: note = chemically synthesized
  source 1..20: mol_type = other DNA
agggaaacaatcctcttttt

SEQ ID NO: 69597 - DNA, 20 bp, synthetic construct
  misc_feature 1..20: note = chemically synthesized
  source 1..20: mol_type = other DNA
tgttccctcatccaaaaaca

SEQ ID NO: 69598 - DNA, 20 bp, synthetic construct
  misc_feature 1..20: note = chemically synthesized
  source 1..20: mol_type = other DNA
ccctcatccaaaaacactca

SEQ ID NO: 69599 - DNA, 20 bp, synthetic construct
  misc_feature 1..20: note = chemically synthesized
  source 1..20: mol_type = other DNA
tggccagaattttttataag

SEQ ID NO: 69600 - DNA, 20 bp, synthetic construct
  misc_feature 1..20: note = chemically synthesized
  source 1..20: mol_type = other DNA
ataacacaagagaaagccac

SEQ ID NO: 69601 - DNA, 20 bp, synthetic construct
  misc_feature 1..20: note = chemically synthesized
  source 1..20: mol_type = other DNA
ggaagttctcagggtccacg

SEQ ID NO: 69602 - DNA, 20 bp, synthetic construct
  misc_feature 1..20: note = chemically synthesized
  source 1..20: mol_type = other DNA
ttgaggtcatccgtgagcat

SEQ ID NO: 69603 - DNA, 20 bp, synthetic construct
  misc_feature 1..20: note = chemically synthesized
  source 1..20: mol_type = other DNA
tctgcctttctgcaccttgt

SEQ ID NO: 69604 - DNA, 20 bp, synthetic construct
  misc_feature 1..20: note = chemically synthesized
  source 1..20: mol_type = other DNA
ctccagccttctcaccttaa

SEQ ID NO: 69605 - DNA, 20 bp, synthetic construct
  misc_feature 1..20: note = chemically synthesized
  source 1..20: mol_type = other DNA
tgcactacagtgtcagatct

SEQ ID NO: 69606 - DNA, 20 bp, synthetic construct
  misc_feature 1..20: note = chemically synthesized
  source 1..20: mol_type = other DNA
agccagaagcatgcctgcat

SEQ ID NO: 69607 - DNA, 20 bp, synthetic construct
  misc_feature 1..20: note = chemically synthesized
  source 1..20: mol_type = other DNA
gcctgcattgctgcttcatg

SEQ ID NO: 69608 - DNA, 20 bp, synthetic construct
  misc_feature 1..20: note = chemically synthesized
  source 1..20: mol_type = other DNA
gtgggttgtgactccagggg

SEQ ID NO: 69609 - DNA, 20 bp, synthetic construct
  misc_feature 1..20: note = chemically synthesized
  source 1..20: mol_type = other DNA
caggggtggggtttgggcaa

SEQ ID NO: 69610 - DNA, 20 bp, synthetic construct
  misc_feature 1..20: note = chemically synthesized
  source 1..20: mol_type = other DNA
aagttttgcaagatggacat

SEQ ID NO: 69611 - DNA, 20 bp, synthetic construct
  misc_feature 1..20: note = chemically synthesized
  source 1..20: mol_type = other DNA
tctcaggggaactttgctgt

SEQ ID NO: 69612 - DNA, 20 bp, synthetic construct
  misc_feature 1..20: note = chemically synthesized
  source 1..20: mol_type = other DNA
actacccccaccatccagtg

SEQ ID NO: 69613 - DNA, 20 bp, synthetic construct
  misc_feature 1..20: note = chemically synthesized
  source 1..20: mol_type = other DNA
cgtgttatcctgttattcat

SEQ ID NO: 69614 - DNA, 20 bp, synthetic construct
  misc_feature 1..20: note = chemically synthesized
  source 1..20: mol_type = other DNA
tggaagaagccacagccttt

SEQ ID NO: 69615 - DNA, 20 bp, synthetic construct
  misc_feature 1..20: note = chemically synthesized
  source 1..20: mol_type = other DNA
tacattgaatacacaatttc

SEQ ID NO: 69616 - DNA, 20 bp, synthetic construct
  misc_feature 1..20: note = chemically synthesized
  source 1..20: mol_type = other DNA
tttttttttttgagatggag

SEQ ID NO: 69617 - DNA, 20 bp, synthetic construct
  misc_feature 1..20: note = chemically synthesized
  source 1..20: mol_type = other DNA
ttttgtatttttagtagaga

SEQ ID NO: 69618 - DNA, 20 bp, synthetic construct
  misc_feature 1..20: note = chemically synthesized
  source 1..20: mol_type = other DNA
cacctcagcctcccaaagtg

SEQ ID NO: 69619 - DNA, 20 bp, synthetic construct
  misc_feature 1..20: note = chemically synthesized
  source 1..20: mol_type = other DNA
ctagggaagtaaggggaaaa

SEQ ID NO: 69620 - DNA, 20 bp, synthetic construct
  misc_feature 1..20: note = chemically synthesized
  source 1..20: mol_type = other DNA
gggaaaactgggttttatta

SEQ ID NO: 69621 - DNA, 20 bp, synthetic construct
  misc_feature 1..20: note = chemically synthesized
  source 1..20: mol_type = other DNA
cagtgtacttatctgaacaa

SEQ ID NO: 69622 - DNA, 20 bp, synthetic construct
  misc_feature 1..20: note = chemically synthesized
  source 1..20: mol_type = other DNA
ctctgttcaagcaagaggat

SEQ ID NO: 69623 - DNA, 20 bp, synthetic construct
  misc_feature 1..20: note = chemically synthesized
  source 1..20: mol_type = other DNA
ttaggtcatttgtgtctggc

SEQ ID NO: 69624 - DNA, 20 bp, synthetic construct
  misc_feature 1..20: note = chemically synthesized
  source 1..20: mol_type = other DNA
gcttgatctatagtctaatg

SEQ ID NO: 69625 - DNA, 20 bp, synthetic construct
  misc_feature 1..20: note = chemically synthesized
  source 1..20: mol_type = other DNA
cttccaccggcagagagaag

SEQ ID NO: 69626 - DNA, 20 bp, synthetic construct
  misc_feature 1..20: note = chemically synthesized
  source 1..20: mol_type = other DNA
aacagtttattttatattct

SEQ ID NO: 69627 - DNA, 20 bp, synthetic construct
  misc_feature 1..20: note = chemically synthesized
  source 1..20: mol_type = other DNA
catacttagaggttcaggat

SEQ ID NO: 69628 - DNA, 20 bp, synthetic construct
  misc_feature 1..20: note = chemically synthesized
  source 1..20: mol_type = other DNA
agataaatccttacaagaaa

SEQ ID NO: 69629 - DNA, 20 bp, synthetic construct
  misc_feature 1..20: note = chemically synthesized
  source 1..20: mol_type = other DNA
gatatagttgagaggcagtt

SEQ ID NO: 69630 - DNA, 20 bp, synthetic construct
  misc_feature 1..20: note = chemically synthesized
  source 1..20: mol_type = other DNA
gttttacttaggaacatggg

SEQ ID NO: 69631 - DNA, 20 bp, synthetic construct
  misc_feature 1..20: note = chemically synthesized
  source 1..20: mol_type = other DNA
ggggaaagtttgtagtgaca

SEQ ID NO: 69632 - DNA, 20 bp, synthetic construct
  misc_feature 1..20: note = chemically synthesized
  source 1..20: mol_type = other DNA
acaaacagtttgaggcaaaa

SEQ ID NO: 69633 - DNA, 20 bp, synthetic construct
  misc_feature 1..20: note = chemically synthesized
  source 1..20: mol_type = other DNA
tgcagtcactttcctggaag

SEQ ID NO: 69634 - DNA, 20 bp, synthetic construct
  misc_feature 1..20: note = chemically synthesized
  source 1..20: mol_type = other DNA
tcctggaagtattgattctt

SEQ ID NO: 69635 - DNA, 20 bp, synthetic construct
  misc_feature 1..20: note = chemically synthesized
  source 1..20: mol_type = other DNA
tgtggctgttccccatttcc

SEQ ID NO: 69636 - DNA, 20 bp, synthetic construct
  misc_feature 1..20: note = chemically synthesized
  source 1..20: mol_type = other DNA
tccccatttccaattgtttt

SEQ ID NO: 69637 - DNA, 20 bp, synthetic construct
  misc_feature 1..20: note = chemically synthesized
  source 1..20: mol_type = other DNA
ttccaattgttttccatgat

SEQ ID NO: 69638 - DNA, 20 bp, synthetic construct
  misc_feature 1..20: note = chemically synthesized
  source 1..20: mol_type = other DNA
cattaattcaacaaatacat

SEQ ID NO: 69639 - DNA, 20 bp, synthetic construct
  misc_feature 1..20: note = chemically synthesized
  source 1..20: mol_type = other DNA
tagattccatatgtcatcca

SEQ ID NO: 69640 - DNA, 20 bp, synthetic construct
  misc_feature 1..20: note = chemically synthesized
  source 1..20: mol_type = other DNA
aatcttacatgaactagaca

SEQ ID NO: 69641 - DNA, 20 bp, synthetic construct
  misc_feature 1..20: note = chemically synthesized
  source 1..20: mol_type = other DNA
actaaaagaaatgaattaat

SEQ ID NO: 69642 - DNA, 20 bp, synthetic construct
  misc_feature 1..20: note = chemically synthesized
  source 1..20: mol_type = other DNA
gacaaaagcaagcaatgggg

SEQ ID NO: 69643 - DNA, 20 bp, synthetic construct
  misc_feature 1..20: note = chemically synthesized
  source 1..20: mol_type = other DNA
cttatccaaaattaactcca

SEQ ID NO: 69644 - DNA, 20 bp, synthetic construct
  misc_feature 1..20: note = chemically synthesized
  source 1..20: mol_type = other DNA
attcatgatataaacacggg

SEQ ID NO: 69645 - DNA, 20 bp, synthetic construct
  misc_feature 1..20: note = chemically synthesized
  source 1..20: mol_type = other DNA
agacaatctacagaatggga

SEQ ID NO: 69646 - DNA, 20 bp, synthetic construct
  misc_feature 1..20: note = chemically synthesized
  source 1..20: mol_type = other DNA
gaaggcataaataatccaaa

SEQ ID NO: 69647 - DNA, 20 bp, synthetic construct
  misc_feature 1..20: note = chemically synthesized
  source 1..20: mol_type = other DNA
gctctgcctatgcagtagtc

SEQ ID NO: 69648 - DNA, 20 bp, synthetic construct
  misc_feature 1..20: note = chemically synthesized
  source 1..20: mol_type = other DNA
tttctttactctctcaagaa

SEQ ID NO: 69649 - DNA, 20 bp, synthetic construct
  misc_feature 1..20: note = chemically synthesized
  source 1..20: mol_type = other DNA
tcaaagttagagagaagggc

SEQ ID NO: 69650 - DNA, 20 bp, synthetic construct
  misc_feature 1..20: note = chemically synthesized
  source 1..20: mol_type = other DNA
actgaaacataggggacgag

SEQ ID NO: 69651 - DNA, 20 bp, synthetic construct
  misc_feature 1..20: note = chemically synthesized
  source 1..20: mol_type = other DNA
gtctgtagtccactcaaaac

SEQ ID NO: 69652 - DNA, 20 bp, synthetic construct
  misc_feature 1..20: note = chemically synthesized
  source 1..20: mol_type = other DNA
taacaaaatacaaaagactg

SEQ ID NO: 69653 - DNA, 20 bp, synthetic construct
  misc_feature 1..20: note = chemically synthesized
  source 1..20: mol_type = other DNA
agactgggtggcttcaacaa

SEQ ID NO: 69654 - DNA, 20 bp, synthetic construct
  misc_feature 1..20: note = chemically synthesized
  source 1..20: mol_type = other DNA
ctcgtggtcagggttctctt

SEQ ID NO: 69655 - DNA, 20 bp, synthetic construct
  misc_feature 1..20: note = chemically synthesized
  source 1..20: mol_type = other DNA
cctcaccgggaggaaagaga

SEQ ID NO: 69656 - DNA, 20 bp, synthetic construct
  misc_feature 1..20: note = chemically synthesized
  source 1..20: mol_type = other DNA
gaaagagaaatggcttgtct

SEQ ID NO: 69657 - DNA, 20 bp, synthetic construct
  misc_feature 1..20: note = chemically synthesized
  source 1..20: mol_type = other DNA
agataaggtcagttgggagt

SEQ ID NO: 69658 - DNA, 20 bp, synthetic construct
  misc_feature 1..20: note = chemically synthesized
  source 1..20: mol_type = other DNA
attttgatctcacagtgctg

SEQ ID NO: 69659 - DNA, 20 bp, synthetic construct
  misc_feature 1..20: note = chemically synthesized
  source 1..20: mol_type = other DNA
catgctgacttgtgagcctc

SEQ ID NO: 69660 - DNA, 20 bp, synthetic construct
  misc_feature 1..20: note = chemically synthesized
  source 1..20: mol_type = other DNA
caatctgcacacttgagggc

SEQ ID NO: 69661 - DNA, 20 bp, synthetic construct
  misc_feature 1..20: note = chemically synthesized
  source 1..20: mol_type = other DNA
ctgactaaaccttgaattcc

SEQ ID NO: 69662 - DNA, 20 bp, synthetic construct
  misc_feature 1..20: note = chemically synthesized
  source 1..20: mol_type = other DNA
tttcccatctcttccaaaac

SEQ ID NO: 69663 - DNA, 20 bp, synthetic construct
  misc_feature 1..20: note = chemically synthesized
  source 1..20: mol_type = other DNA
ctatagaggtctttcttccc

SEQ ID NO: 69664 - DNA, 20 bp, synthetic construct
  misc_feature 1..20: note = chemically synthesized
  source 1..20: mol_type = other DNA
ctcccgtgtacaagtgtctt

SEQ ID NO: 69665 - DNA, 20 bp, synthetic construct
  misc_feature 1..20: note = chemically synthesized
  source 1..20: mol_type = other DNA
catgtgtgatctctcagcag

SEQ ID NO: 69666 - DNA, 20 bp, synthetic construct
  misc_feature 1..20: note = chemically synthesized
  source 1..20: mol_type = other DNA
cagaatagatttattatttg

SEQ ID NO: 69667 - DNA, 20 bp, synthetic construct
  misc_feature 1..20: note = chemically synthesized
  source 1..20: mol_type = other DNA
aggggtgaattctttgccga

SEQ ID NO: 69668 - DNA, 20 bp, synthetic construct
  misc_feature 1..20: note = chemically synthesized
  source 1..20: mol_type = other DNA
ggcctccagataactacaca

SEQ ID NO: 69669 - DNA, 20 bp, synthetic construct
  misc_feature 1..20: note = chemically synthesized
  source 1..20: mol_type = other DNA
atgttaacttccctcaaagc

SEQ ID NO: 69670 - DNA, 20 bp, synthetic construct
  misc_feature 1..20: note = chemically synthesized
  source 1..20: mol_type = other DNA
ttcaaaatctactccagccc

SEQ ID NO: 69671 - DNA, 20 bp, synthetic construct
  misc_feature 1..20: note = chemically synthesized
  source 1..20: mol_type = other DNA
cccatctggaattaaaggat

SEQ ID NO: 69672 - DNA, 20 bp, synthetic construct
  misc_feature 1..20: note = chemically synthesized
  source 1..20: mol_type = other DNA
ataggaatagccttagcaat

SEQ ID NO: 69673 - DNA, 20 bp, synthetic construct
  misc_feature 1..20: note = chemically synthesized
  source 1..20: mol_type = other DNA
tacttgtcctgcctccagat

SEQ ID NO: 69674 - DNA, 20 bp, synthetic construct
  misc_feature 1..20: note = chemically synthesized
  source 1..20: mol_type = other DNA
ctcaaagtcaaaattgtcca

SEQ ID NO: 69675 - DNA, 20 bp, synthetic construct
  misc_feature 1..20: note = chemically synthesized
  source 1..20: mol_type = other DNA
tctcagcccagttagtcctc

SEQ ID NO: 69676 - DNA, 20 bp, synthetic construct
  misc_feature 1..20: note = chemically synthesized
  source 1..20: mol_type = other DNA
tgaagttctcaggatccaca

SEQ ID NO: 69677 - DNA, 20 bp, synthetic construct
  misc_feature 1..20: note = chemically synthesized
  source 1..20: mol_type = other DNA
aggtgcccttgagatcatcc

SEQ ID NO: 69678 - DNA, 20 bp, synthetic construct
  misc_feature 1..20: note = chemically synthesized
  source 1..20: mol_type = other DNA
gggtagacaaccaggagcct

SEQ ID NO: 69679 - DNA, 20 bp, synthetic construct
  misc_feature 1..20: note = chemically synthesized
  source 1..20: mol_type = other DNA
gagcctgtgagattgacaag

SEQ ID NO: 69680 - DNA, 20 bp, synthetic construct
  misc_feature 1..20: note = chemically synthesized
  source 1..20: mol_type = other DNA
gtcaccagagcctaccttcc

SEQ ID NO: 69681 - DNA, 20 bp, synthetic construct
  misc_feature 1..20: note = chemically synthesized
  source 1..20: mol_type = other DNA
ttccacattcaccttgcccc

SEQ ID NO: 69682 - DNA, 20 bp, synthetic construct
  misc_feature 1..20: note = chemically synthesized
  source 1..20: mol_type = other DNA
tgacccatggcgtctggact

SEQ ID NO: 69683 - DNA, 20 bp, synthetic construct
  misc_feature 1..20: note = chemically synthesized
  source 1..20: mol_type = other DNA
gagtgtgtggaactgctgaa

SEQ ID NO: 69684 - DNA, 20 bp, synthetic construct
  misc_feature 1..20: note = chemically synthesized
  source 1..20: mol_type = other DNA
ggatactctaagactattgg

SEQ ID NO: 69685 - DNA, 20 bp, synthetic construct
  misc_feature 1..20: note = chemically synthesized
  source 1..20: mol_type = other DNA
aaggctggccaacccatggg

SEQ ID NO: 69686 - DNA, 20 bp, synthetic construct
  misc_feature 1..20: note = chemically synthesized
  source 1..20: mol_type = other DNA
atgggtggagtttagccagg

SEQ ID NO: 69687 - DNA, 20 bp, synthetic construct
  misc_feature 1..20: note = chemically synthesized
  source 1..20: mol_type = other DNA
tttttatagcctttgccttg

SEQ ID NO: 69688 - DNA, 20 bp, synthetic construct
  misc_feature 1..20: note = chemically synthesized
  source 1..20: mol_type = other DNA
ccttgttccgattcagtcat

SEQ ID NO: 69689 - DNA, 20 bp, synthetic construct
  misc_feature 1..20: note = chemically synthesized
  source 1..20: mol_type = other DNA
ctaatttattcttcccttta

SEQ ID NO: 69690 - DNA, 20 bp, synthetic construct
  misc_feature 1..20: note = chemically synthesized
  source 1..20: mol_type = other DNA
ataccaggacttcttttgtc

SEQ ID NO: 69691 - DNA, 20 bp, synthetic construct
  misc_feature 1..20: note = chemically synthesized
  source 1..20: mol_type = other DNA
tctctagctccagtgaggcc

SEQ ID NO: 69692 - DNA, 20 bp, synthetic construct
  misc_feature 1..20: note = chemically synthesized
  source 1..20: mol_type = other DNA
gtaccaatttttgaaaagtt

SEQ ID NO: 69693 - DNA, 20 bp, synthetic construct
  misc_feature 1..20: note = chemically synthesized
  source 1..20: mol_type = other DNA
aaaagttcagggattgtgaa

SEQ ID NO: 69694 - DNA, 20 bp, synthetic construct
  misc_feature 1..20: note = chemically synthesized
  source 1..20: mol_type = other DNA
aatgtgttttaggcataggt

SEQ ID NO: 69695 - DNA, 20 bp, synthetic construct
  misc_feature 1..20: note = chemically synthesized
  source 1..20: mol_type = other DNA
cttagtctctttcagttagc

SEQ ID NO: 69696 - DNA, 20 bp, synthetic construct
  misc_feature 1..20: note = chemically synthesized
  source 1..20: mol_type = other DNA
gaaaacaatttctataaagc

SEQ ID NO: 69697 - DNA, 20 bp, synthetic construct
  misc_feature 1..20: note = chemically synthesized
  source 1..20: mol_type = other DNA
agccacagtttcagcgcagt

SEQ ID NO: 69698 - DNA, 20 bp, synthetic construct
  misc_feature 1..20: note = chemically synthesized
  source 1..20: mol_type = other DNA
gtgttacataatataagacc

SEQ ID NO: 69699 - DNA, 20 bp, synthetic construct
  misc_feature 1..20: note = chemically synthesized
  source 1..20: mol_type = other DNA
acctatttgaaataaatcat

SEQ ID NO: 69700 - DNA, 20 bp, synthetic construct
  misc_feature 1..20: note = chemically synthesized
  source 1..20: mol_type = other DNA
ctgtttcatcttagaaaaat

SEQ ID NO: 69701 - DNA, 20 bp, synthetic construct
  misc_feature 1..20: note = chemically synthesized
  source 1..20: mol_type = other DNA
gtgtgtgctggctgatgacc

SEQ ID NO: 69702 - DNA, 20 bp, synthetic construct
  misc_feature 1..20: note = chemically synthesized
  source 1..20: mol_type = other DNA
gaatgttctttggcaggtac

SEQ ID NO: 69703 - DNA, 20 bp, synthetic construct
  misc_feature 1..20: note = chemically synthesized
  source 1..20: mol_type = other DNA
aacaactctaaagaggcaag

SEQ ID NO: 69704 - DNA, 20 bp, synthetic construct
  misc_feature 1..20: note = chemically synthesized
  source 1..20: mol_type = other DNA
tcgaatattagtgtacttta

SEQ ID NO: 69705 - DNA, 20 bp, synthetic construct
  misc_feature 1..20: note = chemically synthesized
  source 1..20: mol_type = other DNA
cagctttatttctaacacag

SEQ ID NO: 69706 - DNA, 20 bp, synthetic construct
  misc_feature 1..20: note = chemically synthesized
  source 1..20: mol_type = other DNA
acagggtaggaagtatttat

SEQ ID NO: 69707 - DNA, 20 bp, synthetic construct
  misc_feature 1..20: note = chemically synthesized
  source 1..20: mol_type = other DNA
tatttatggtggttttttgg

SEQ ID NO: 69708 - DNA, 20 bp, synthetic construct
  misc_feature 1..20: note = chemically synthesized
  source 1..20: mol_type = other DNA
atggtggttttttggttctg

SEQ ID NO: 69709 - DNA, 20 bp, synthetic construct
  misc_feature 1..20: note = chemically synthesized
  source 1..20: mol_type = other DNA
ttggttctgttttgcttttg

SEQ ID NO: 69710 - DNA, 20 bp, synthetic construct
  misc_feature 1..20: note = chemically synthesized
  source 1..20: mol_type = other DNA
ttctgttttgcttttggtta

SEQ ID NO: 69711 - DNA, 20 bp, synthetic construct
  misc_feature 1..20: note = chemically synthesized
  source 1..20: mol_type = other DNA
tttgcttttggttagtttgt

SEQ ID NO: 69712 - DNA, 20 bp, synthetic construct
  misc_feature 1..20: note = chemically synthesized
  source 1..20: mol_type = other DNA
gatccatgatctctaacctt

SEQ ID NO: 69713 - DNA, 20 bp, synthetic construct
  misc_feature 1..20: note = chemically synthesized
  source 1..20: mol_type = other DNA
aatgccagaagctctggaat

SEQ ID NO: 69714 - DNA, 20 bp, synthetic construct
  misc_feature 1..20: note = chemically synthesized
  source 1..20: mol_type = other DNA
gaggcaagctgtatcttcaa

SEQ ID NO: 69715 - DNA, 20 bp, synthetic construct
  misc_feature 1..20: note = chemically synthesized
  source 1..20: mol_type = other DNA
gtttatcccctaagctatca

SEQ ID NO: 69716 - DNA, 20 bp, synthetic construct
  misc_feature 1..20: note = chemically synthesized
  source 1..20: mol_type = other DNA
tcatccttcatgatcctgtg

SEQ ID NO: 69717 - DNA, 20 bp, synthetic construct
  misc_feature 1..20: note = chemically synthesized
  source 1..20: mol_type = other DNA
ggcagcataaataatctacc

SEQ ID NO: 69718 - DNA, 20 bp, synthetic construct
  misc_feature 1..20: note = chemically synthesized
  source 1..20: mol_type = other DNA
attccttcaattttttataa

SEQ ID NO: 69719 - DNA, 20 bp, synthetic construct
  misc_feature 1..20: note = chemically synthesized
  source 1..20: mol_type = other DNA
tggcatttgaagtgggtcct

SEQ ID NO: 69720 - DNA, 20 bp, synthetic construct
  misc_feature 1..20: note = chemically synthesized
  source 1..20: mol_type = other DNA
atttgatggagccaggcaga

SEQ ID NO: 69721 - DNA, 20 bp, synthetic construct
  misc_feature 1..20: note = chemically synthesized
  source 1..20: mol_type = other DNA
tcaaagttagacagaagggc

SEQ ID NO: 69722 - DNA, 20 bp, synthetic construct
  misc_feature 1..20: note = chemically synthesized
  source 1..20: mol_type = other DNA
tctgaaacacagaggacaag

SEQ ID NO: 69723 - DNA, 20 bp, synthetic construct
  misc_feature 1..20: note = chemically synthesized
  source 1..20: mol_type = other DNA
atttgtaaacctgagataaa

SEQ ID NO: 69724 - DNA, 20 bp, synthetic construct
  misc_feature 1..20: note = chemically synthesized
  source 1..20: mol_type = other DNA
gtttctaatccactgaacac

SEQ ID NO: 69725 - DNA, 20 bp, synthetic construct
  misc_feature 1..20: note = chemically synthesized
  source 1..20: mol_type = other DNA
tagactgggtgacttcaaca

SEQ ID NO: 69726 - DNA, 20 bp, synthetic construct
  misc_feature 1..20: note = chemically synthesized
  source 1..20: mol_type = other DNA
ggaagagaaatggctaatct

SEQ ID NO: 69727 - DNA, 20 bp, synthetic construct
  misc_feature 1..20: note = chemically synthesized
  source 1..20: mol_type = other DNA
gctctcatgagctcctctaa

SEQ ID NO: 69728 - DNA, 20 bp, synthetic construct
  misc_feature 1..20: note = chemically synthesized
  source 1..20: mol_type = other DNA
aaatggagccaattgggagt

SEQ ID NO: 69729 - DNA, 20 bp, synthetic construct
  misc_feature 1..20: note = chemically synthesized
  source 1..20: mol_type = other DNA
accatcacattaaactaaac

SEQ ID NO: 69730 - DNA, 20 bp, synthetic construct
  misc_feature 1..20: note = chemically synthesized
  source 1..20: mol_type = other DNA
tgacacgctgatgctgactt

SEQ ID NO: 69731 - DNA, 20 bp, synthetic construct
  misc_feature 1..20: note = chemically synthesized
  source 1..20: mol_type = other DNA
acctaagtccccacctccct

SEQ ID NO: 69732 - DNA, 20 bp, synthetic construct
  misc_feature 1..20: note = chemically synthesized
  source 1..20: mol_type = other DNA
cagtctgtagacttaagggt

SEQ ID NO: 69733 - DNA, 20 bp, synthetic construct
  misc_feature 1..20: note = chemically synthesized
  source 1..20: mol_type = other DNA
tagttaccgtggaaagaaaa

SEQ ID NO: 69734 - DNA, 20 bp, synthetic construct
  misc_feature 1..20: note = chemically synthesized
  source 1..20: mol_type = other DNA
ctgcctaaaccttgacttcc

SEQ ID NO: 69735 - DNA, 20 bp, synthetic construct
  misc_feature 1..20: note = chemically synthesized
  source 1..20: mol_type = other DNA
ttccccatctcttccaaaac

SEQ ID NO: 69736 - DNA, 20 bp, synthetic construct
  misc_feature 1..20: note = chemically synthesized
  source 1..20: mol_type = other DNA
ctatagaggtctttcttcca

SEQ ID NO: 69737 - DNA, 20 bp, synthetic construct
  misc_feature 1..20: note = chemically synthesized
  source 1..20: mol_type = other DNA
cacttgcagaactcccatgt

SEQ ID NO: 69738 - DNA, 20 bp, synthetic construct
  misc_feature 1..20: note = chemically synthesized
  source 1..20: mol_type = other DNA
catgtgtgatctcttagcag

SEQ ID NO: 69739 - DNA, 20 bp, synthetic construct
  misc_feature 1..20: note = chemically synthesized
  source 1..20: mol_type = other DNA
cttagcagaatagatttatt

SEQ ID NO: 69740 - DNA, 20 bp, synthetic construct
  misc_feature 1..20: note = chemically synthesized
  source 1..20: mol_type = other DNA
gcagaatagatttattattt

SEQ ID NO: 69741 - DNA, 20 bp, synthetic construct
  misc_feature 1..20: note = chemically synthesized
  source 1..20: mol_type = other DNA
aggggtgaattctttgccga

SEQ ID NO: 69742 - DNA, 20 bp, synthetic construct
  misc_feature 1..20: note = chemically synthesized
  source 1..20: mol_type = other DNA
ggcctccagataactacaca

SEQ ID NO: 69743 - DNA, 20 bp, synthetic construct
  misc_feature 1..20: note = chemically synthesized
  source 1..20: mol_type = other DNA
atgttaacttccctcaaagc

SEQ ID NO: 69744 - DNA, 20 bp, synthetic construct
  misc_feature 1..20: note = chemically synthesized
  source 1..20: mol_type = other DNA
acttccctcaaagcctgaga

SEQ ID NO: 69745 - DNA, 20 bp, synthetic construct
  misc_feature 1..20: note = chemically synthesized
  source 1..20: mol_type = other DNA
ttcaaaatctactccagccc

SEQ ID NO: 69746 - DNA, 20 bp, synthetic construct
  misc_feature 1..20: note = chemically synthesized
  source 1..20: mol_type = other DNA
cccatctggaattaaaggat

SEQ ID NO: 69747 - DNA, 20 bp, synthetic construct
  misc_feature 1..20: note = chemically synthesized
  source 1..20: mol_type = other DNA
ataggaatagccttagcaat

SEQ ID NO: 69748 - DNA, 20 bp, synthetic construct
  misc_feature 1..20: note = chemically synthesized
  source 1..20: mol_type = other DNA
tacttgtcctgcctccagat

SEQ ID NO: 69749 - DNA, 20 bp, synthetic construct
  misc_feature 1..20: note = chemically synthesized
  source 1..20: mol_type = other DNA
ctcaaagtcaaagttgtcca

SEQ ID NO: 69750 - DNA, 20 bp, synthetic construct
  misc_feature 1..20: note = chemically synthesized
  source 1..20: mol_type = other DNA
tctcagcccagttagtcctc

SEQ ID NO: 69751 - DNA, 20 bp, synthetic construct
  misc_feature 1..20: note = chemically synthesized
  source 1..20: mol_type = other DNA
tgaagttctcaggatccaca

SEQ ID NO: 69752 - DNA, 20 bp, synthetic construct
  misc_feature 1..20: note = chemically synthesized
  source 1..20: mol_type = other DNA
aggtgcccttgagatcatcc

SEQ ID NO: 69753 - DNA, 20 bp, synthetic construct
  misc_feature 1..20: note = chemically synthesized
  source 1..20: mol_type = other DNA
gggtagacaaccaggagcct

SEQ ID NO: 69754 - DNA, 20 bp, synthetic construct
  misc_feature 1..20: note = chemically synthesized
  source 1..20: mol_type = other DNA
gagcctgtgagattgacaag

SEQ ID NO: 69755 - DNA, 20 bp, synthetic construct
  misc_feature 1..20: note = chemically synthesized
  source 1..20: mol_type = other DNA
gtcaccagagcctaccttcc

SEQ ID NO: 69756 - DNA, 20 bp, synthetic construct
  misc_feature 1..20: note = chemically synthesized
  source 1..20: mol_type = other DNA
ttccacattcaccttgcccc

SEQ ID NO: 69757 - DNA, 20 bp, synthetic construct
  misc_feature 1..20: note = chemically synthesized
  source 1..20: mol_type = other DNA
tgacccatggcgtctggact

SEQ ID NO: 69758 - DNA, 20 bp, synthetic construct
  misc_feature 1..20: note = chemically synthesized
  source 1..20: mol_type = other DNA
gagtgtgtggaactgctgaa

SEQ ID NO: 69759 - DNA, 20 bp, synthetic construct
  misc_feature 1..20: note = chemically synthesized
  source 1..20: mol_type = other DNA
ggatactctaagactattgg

SEQ ID NO: 69760 - DNA, 20 bp, synthetic construct
  misc_feature 1..20: note = chemically synthesized
  source 1..20: mol_type = other DNA
aaggctggccaacccatggg

SEQ ID NO: 69761 - DNA, 20 bp, synthetic construct
  misc_feature 1..20: note = chemically synthesized
  source 1..20: mol_type = other DNA
atgggtggagtttagccagg

SEQ ID NO: 69762 - DNA, 20 bp, synthetic construct
  misc_feature 1..20: note = chemically synthesized
  source 1..20: mol_type = other DNA
aggggcccccaagaggatac

SEQ ID NO: 69763 - DNA, 20 bp, synthetic construct
  misc_feature 1..20: note = chemically synthesized
  source 1..20: mol_type = other DNA
tttttatagcctttgccttg

SEQ ID NO: 69764 - DNA, 20 bp, synthetic construct
  misc_feature 1..20: note = chemically synthesized
  source 1..20: mol_type = other DNA
ctaatttattcttcccttta

SEQ ID NO: 69765 - DNA, 20 bp, synthetic construct
  misc_feature 1..20: note = chemically synthesized
  source 1..20: mol_type = other DNA
ataccaggacttcttttgtc

SEQ ID NO: 69766 - DNA, 20 bp, synthetic construct
  misc_feature 1..20: note = chemically synthesized
  source 1..20: mol_type = other DNA
tctgtagctccagtgaggcc

SEQ ID NO: 69767 - DNA, 20 bp, synthetic construct
  misc_feature 1..20: note = chemically synthesized
  source 1..20: mol_type = other DNA
gtaccaatttttgaaaagtt

SEQ ID NO: 69768 - DNA, 20 bp, synthetic construct
  misc_feature 1..20: note = chemically synthesized
  source 1..20: mol_type = other DNA
aaaagttcagggattgtgaa

SEQ ID NO: 69769 - DNA, 20 bp, synthetic construct
  misc_feature 1..20: note = chemically synthesized
  source 1..20: mol_type = other DNA
aatgtgttttaggcataggt

SEQ ID NO: 69770 - DNA, 20 bp, synthetic construct
  misc_feature 1..20: note = chemically synthesized
  source 1..20: mol_type = other DNA
cttagtctcatttagtaagc

SEQ ID NO: 69771 - DNA, 20 bp, synthetic construct
  misc_feature 1..20: note = chemically synthesized
  source 1..20: mol_type = other DNA
ttatctttgaatatactctc

SEQ ID NO: 69772 - DNA, 20 bp, synthetic construct
  misc_feature 1..20: note = chemically synthesized
  source 1..20: mol_type = other DNA
agtgaaaaatcctataaagc

SEQ ID NO: 69773 - DNA, 20 bp, synthetic construct
  misc_feature 1..20: note = chemically synthesized
  source 1..20: mol_type = other DNA
agcaacagtttcagtgcagg

SEQ ID NO: 69774 - DNA, 20 bp, synthetic construct
  misc_feature 1..20: note = chemically synthesized
  source 1..20: mol_type = other DNA
acctatttgaaataaatcac

SEQ ID NO: 69775 - DNA, 20 bp, synthetic construct
  misc_feature 1..20: note = chemically synthesized
  source 1..20: mol_type = other DNA
gtatgtgctggctgatgacc

SEQ ID NO: 69776 - DNA, 20 bp, synthetic construct
  misc_feature 1..20: note = chemically synthesized
  source 1..20: mol_type = other DNA
gaatgctctttaccagatac

SEQ ID NO: 69777 - DNA, 20 bp, synthetic construct
  misc_feature 1..20: note = chemically synthesized
  source 1..20: mol_type = other DNA
aacaactcttaagaggcagg

SEQ ID NO: 69778 - DNA, 20 bp, synthetic construct
  misc_feature 1..20: note = chemically synthesized
  source 1..20: mol_type = other DNA
tgtgacagctgggatgtcac

SEQ ID NO: 69779 - DNA, 20 bp, synthetic construct
  misc_feature 1..20: note = chemically synthesized
  source 1..20: mol_type = other DNA
catctttatctgtaactcag

SEQ ID NO: 69780 - DNA, 20 bp, synthetic construct
  misc_feature 1..20: note = chemically synthesized
  source 1..20: mol_type = other DNA
aacatggcaggaagtattca

SEQ ID NO: 69781 - DNA, 20 bp, synthetic construct
  misc_feature 1..20: note = chemically synthesized
  source 1..20: mol_type = other DNA
tttttttctttattttttct

SEQ ID NO: 69782 - DNA, 20 bp, synthetic construct
  misc_feature 1..20: note = chemically synthesized
  source 1..20: mol_type = other DNA
tttgggatttttattttttg

SEQ ID NO: 69783 - DNA, 20 bp, synthetic construct
  misc_feature 1..20: note = chemically synthesized
  source 1..20: mol_type = other DNA
gatttttattttttggtagg

SEQ ID NO: 69784 - DNA, 20 bp, synthetic construct
  misc_feature 1..20: note = chemically synthesized
  source 1..20: mol_type = other DNA
ttattttttggtaggtttgg

SEQ ID NO: 69785 - DNA, 20 bp, synthetic construct
  misc_feature 1..20: note = chemically synthesized
  source 1..20: mol_type = other DNA
tttggtaggtttggttttgc

SEQ ID NO: 69786 - DNA, 20 bp, synthetic construct
  misc_feature 1..20: note = chemically synthesized
  source 1..20: mol_type = other DNA
tgaactcgatccatgacctt

SEQ ID NO: 69787 - DNA, 20 bp, synthetic construct
  misc_feature 1..20: note = chemically synthesized
  source 1..20: mol_type = other DNA
gacgtcagaaactctggaaa

SEQ ID NO: 69788 - DNA, 20 bp, synthetic construct
  misc_feature 1..20: note = chemically synthesized
  source 1..20: mol_type = other DNA
tcagacttcataatcctgtg

SEQ ID NO: 69789 - DNA, 20 bp, synthetic construct
  misc_feature 1..20: note = chemically synthesized
  source 1..20: mol_type = other DNA
gttgaataagaaaggaaaga

SEQ ID NO: 69790 - DNA, 20 bp, synthetic construct
  misc_feature 1..20: note = chemically synthesized
  source 1..20: mol_type = other DNA
ctcaatctaaggatgggtga

SEQ ID NO: 69791 - DNA, 20 bp, synthetic construct
  misc_feature 1..20: note = chemically synthesized
  source 1..20: mol_type = other DNA
gatttttattggtatgctgg

SEQ ID NO: 69792 - DNA, 20 bp, synthetic construct
  misc_feature 1..20: note = chemically synthesized
  source 1..20: mol_type = other DNA
ttcctcagcctcccaagtag

SEQ ID NO: 69793 - DNA, 20 bp, synthetic construct
  misc_feature 1..20: note = chemically synthesized
  source 1..20: mol_type = other DNA
atttttgtatttttgtagag

SEQ ID NO: 69794 - DNA, 20 bp, synthetic construct
  misc_feature 1..20: note = chemically synthesized
  source 1..20: mol_type = other DNA
tgccttggcctcccaaaatt

SEQ ID NO: 69795 - DNA, 20 bp, synthetic construct
  misc_feature 1..20: note = chemically synthesized
  source 1..20: mol_type = other DNA
taaggaatatctaggatccc

SEQ ID NO: 69796 - DNA, 20 bp, synthetic construct
  misc_feature 1..20: note = chemically synthesized
  source 1..20: mol_type = other DNA
gtataaacccttatttcctc

SEQ ID NO: 69797 - DNA, 20 bp, synthetic construct
  misc_feature 1..20: note = chemically synthesized
  source 1..20: mol_type = other DNA
cttttgaggcaatatctttt

SEQ ID NO: 69798 - DNA, 20 bp, synthetic construct
  misc_feature 1..20: note = chemically synthesized
  source 1..20: mol_type = other DNA
ggcaatatcttttaagagtt

SEQ ID NO: 69799 - DNA, 20 bp, synthetic construct
  misc_feature 1..20: note = chemically synthesized
  source 1..20: mol_type = other DNA
ttatccataactgtcttatt

SEQ ID NO: 69800 - DNA, 20 bp, synthetic construct
  misc_feature 1..20: note = chemically synthesized
  source 1..20: mol_type = other DNA
ttcctcgatttttcctatat

SEQ ID NO: 69801 - DNA, 20 bp, synthetic construct
  misc_feature 1..20: note = chemically synthesized
  source 1..20: mol_type = other DNA
tcctatatcattgcttctga

SEQ ID NO: 69802 - DNA, 20 bp, synthetic construct
  misc_feature 1..20: note = chemically synthesized
  source 1..20: mol_type = other DNA
gattaaatcctaactgataa

SEQ ID NO: 69803 - DNA, 20 bp, synthetic construct
  misc_feature 1..20: note = chemically synthesized
  source 1..20: mol_type = other DNA
ttctttacacaagcaatttc

SEQ ID NO: 69804 - DNA, 20 bp, synthetic construct
  misc_feature 1..20: note = chemically synthesized
  source 1..20: mol_type = other DNA
cagagaataaaactttcctc

SEQ ID NO: 69805 - DNA, 20 bp, synthetic construct
  misc_feature 1..20: note = chemically synthesized
  source 1..20: mol_type = other DNA
catgggaaggcattgccaaa

SEQ ID NO: 69806 - DNA, 20 bp, synthetic construct
  misc_feature 1..20: note = chemically synthesized
  source 1..20: mol_type = other DNA
aagtggagaatagcaggtgg

SEQ ID NO: 69807 - DNA, 20 bp, synthetic construct
  misc_feature 1..20: note = chemically synthesized
  source 1..20: mol_type = other DNA
ctaagcaacctgtactattg

SEQ ID NO: 69808 - DNA, 20 bp, synthetic construct
  misc_feature 1..20: note = chemically synthesized
  source 1..20: mol_type = other DNA
ggattactattctaagaatg

SEQ ID NO: 69809 - DNA, 20 bp, synthetic construct
  misc_feature 1..20: note = chemically synthesized
  source 1..20: mol_type = other DNA
aagaatgacctgtttatcac

SEQ ID NO: 69810 - DNA, 20 bp, synthetic construct
  misc_feature 1..20: note = chemically synthesized
  source 1..20: mol_type = other DNA
tgacctgtttatcacaactg

SEQ ID NO: 69811 - DNA, 20 bp, synthetic construct
  misc_feature 1..20: note = chemically synthesized
  source 1..20: mol_type = other DNA
tgtgtgtgtattcattatga

SEQ ID NO: 69812 - DNA, 20 bp, synthetic construct
  misc_feature 1..20: note = chemically synthesized
  source 1..20: mol_type = other DNA
cccacccctcaacatcacgt

SEQ ID NO: 69813 - DNA, 20 bp, synthetic construct
  misc_feature 1..20: note = chemically synthesized
  source 1..20: mol_type = other DNA
tccttgatatcaaagggcag

SEQ ID NO: 69814 - DNA, 20 bp, synthetic construct
  misc_feature 1..20: note = chemically synthesized
  source 1..20: mol_type = other DNA
gaaaaagagagagagagaaa

SEQ ID NO: 69815 - DNA, 20 bp, synthetic construct
  misc_feature 1..20: note = chemically synthesized
  source 1..20: mol_type = other DNA
aagagagagagagaaaaaaa

SEQ ID NO: 69816 - DNA, 20 bp, synthetic construct
  misc_feature 1..20: note = chemically synthesized
  source 1..20: mol_type = other DNA
cgcacacaccctctgaaaga

SEQ ID NO: 69817 - DNA, 20 bp, synthetic construct
  misc_feature 1..20: note = chemically synthesized
  source 1..20: mol_type = other DNA
ctgaagatctagaccacagg

SEQ ID NO: 69818 - DNA, 20 bp, synthetic construct
  misc_feature 1..20: note = chemically synthesized
  source 1..20: mol_type = other DNA
agggaagtaggacagcccta

SEQ ID NO: 69819 - DNA, 20 bp, synthetic construct
  misc_feature 1..20: note = chemically synthesized
  source 1..20: mol_type = other DNA
ttgctcactgactgcatgga

SEQ ID NO: 69820 - DNA, 20 bp, synthetic construct
  misc_feature 1..20: note = chemically synthesized
  source 1..20: mol_type = other DNA
gggagctgggcaagtcacgt

SEQ ID NO: 69821 - DNA, 20 bp, synthetic construct
  misc_feature 1..20: note = chemically synthesized
  source 1..20: mol_type = other DNA
gctgggcaagtcacgtgact

SEQ ID NO: 69822 - DNA, 20 bp, synthetic construct
  misc_feature 1..20: note = chemically synthesized
  source 1..20: mol_type = other DNA
caccacctgactgcctctgc

SEQ ID NO: 69823 - DNA, 20 bp, synthetic construct
  misc_feature 1..20: note = chemically synthesized
  source 1..20: mol_type = other DNA
catccaaaccaagaagaaat

SEQ ID NO: 69824 - DNA, 20 bp, synthetic construct
  misc_feature 1..20: note = chemically synthesized
  source 1..20: mol_type = other DNA
gaatccaagcagaagaaatt

SEQ ID NO: 69825 - DNA, 20 bp, synthetic construct
  misc_feature 1..20: note = chemically synthesized
  source 1..20: mol_type = other DNA
agaaattcagagcttgaaga

SEQ ID NO: 69826 - DNA, 20 bp, synthetic construct
  misc_feature 1..20: note = chemically synthesized
  source 1..20: mol_type = other DNA
gaacaaagcctccaagaaat

SEQ ID NO: 69827 - DNA, 20 bp, synthetic construct
  misc_feature 1..20: note = chemically synthesized
  source 1..20: mol_type = other DNA
ctgagaaagaagagaaatct

SEQ ID NO: 69828 - DNA, 20 bp, synthetic construct
  misc_feature 1..20: note = chemically synthesized
  source 1..20: mol_type = other DNA
taacctatgaaagaaaacct

SEQ ID NO: 69829 - DNA, 20 bp, synthetic construct
  misc_feature 1..20: note = chemically synthesized
  source 1..20: mol_type = other DNA
agaaaacctatcagattaac

SEQ ID NO: 69830 - DNA, 20 bp, synthetic construct
  misc_feature 1..20: note = chemically synthesized
  source 1..20: mol_type = other DNA
gaattttatatccagtgaaa

SEQ ID NO: 69831 - DNA, 20 bp, synthetic construct
  misc_feature 1..20: note = chemically synthesized
  source 1..20: mol_type = other DNA
tcacaaatgaagaaaataca

SEQ ID NO: 69832 - DNA, 20 bp, synthetic construct
  misc_feature 1..20: note = chemically synthesized
  source 1..20: mol_type = other DNA
aagacagtctacaaagaaac

SEQ ID NO: 69833 - DNA, 20 bp, synthetic construct
  misc_feature 1..20: note = chemically synthesized
  source 1..20: mol_type = other DNA
aagatggaaatttaaaaatc

SEQ ID NO: 69834 - DNA, 20 bp, synthetic construct
  misc_feature 1..20: note = chemically synthesized
  source 1..20: mol_type = other DNA
aagagaggaagtcaaattgt

SEQ ID NO: 69835 - DNA, 20 bp, synthetic construct
  misc_feature 1..20: note = chemically synthesized
  source 1..20: mol_type = other DNA
attgtctctgtttgcagatg

SEQ ID NO: 69836 - DNA, 20 bp, synthetic construct
  misc_feature 1..20: note = chemically synthesized
  source 1..20: mol_type = other DNA
cccaaaatcttaagctgata

SEQ ID NO: 69837 - DNA, 20 bp, synthetic construct
  misc_feature 1..20: note = chemically synthesized
  source 1..20: mol_type = other DNA
ccatactgcccaaagtaatt

SEQ ID NO: 69838 - DNA, 20 bp, synthetic construct
  misc_feature 1..20: note = chemically synthesized
  source 1..20: mol_type = other DNA
ttatacaaaaattaactcaa

SEQ ID NO: 69839 - DNA, 20 bp, synthetic construct
  misc_feature 1..20: note = chemically synthesized
  source 1..20: mol_type = other DNA
tatgggatctaattaaacta

SEQ ID NO: 69840 - DNA, 20 bp, synthetic construct
  misc_feature 1..20: note = chemically synthesized
  source 1..20: mol_type = other DNA
agtggacaaaggatatgaac

SEQ ID NO: 69841 - DNA, 20 bp, synthetic construct
  misc_feature 1..20: note = chemically synthesized
  source 1..20: mol_type = other DNA
aaccattgtggaagacagtg

SEQ ID NO: 69842 - DNA, 20 bp, synthetic construct
  misc_feature 1..20: note = chemically synthesized
  source 1..20: mol_type = other DNA
caaggatctagaaccagaaa

SEQ ID NO: 69843 - DNA, 20 bp, synthetic construct
  misc_feature 1..20: note = chemically synthesized
  source 1..20: mol_type = other DNA
ctataaagacacgtgcacac

SEQ ID NO: 69844 - DNA, 20 bp, synthetic construct
  misc_feature 1..20: note = chemically synthesized
  source 1..20: mol_type = other DNA
ataaaactgatagaccatta

SEQ ID NO: 69845 - DNA, 20 bp, synthetic construct
  misc_feature 1..20: note = chemically synthesized
  source 1..20: mol_type = other DNA
tactgataccacagaaatac

SEQ ID NO: 69846 - DNA, 20 bp, synthetic construct
  misc_feature 1..20: note = chemically synthesized
  source 1..20: mol_type = other DNA
ttcctggaaagatacagggc

SEQ ID NO: 69847 - DNA, 20 bp, synthetic construct
  misc_feature 1..20: note = chemically synthesized
  source 1..20: mol_type = other DNA
aacaaaaaagtccaggacca

SEQ ID NO: 69848 - DNA, 20 bp, synthetic construct
  misc_feature 1..20: note = chemically synthesized
  source 1..20: mol_type = other DNA
atatcaaaacccatgatcaa

SEQ ID NO: 69849 - DNA, 20 bp, synthetic construct
  misc_feature 1..20: note = chemically synthesized
  source 1..20: mol_type = other DNA
tttcatgcgagggatgcacg

SEQ ID NO: 69850 - DNA, 20 bp, synthetic construct
  misc_feature 1..20: note = chemically synthesized
  source 1..20: mol_type = other DNA
gagaattggaaacaaaaatc

SEQ ID NO: 69851 - DNA, 20 bp, synthetic construct
  misc_feature 1..20: note = chemically synthesized
  source 1..20: mol_type = other DNA
tatgactaaaactcagcaaa

SEQ ID NO: 69852 - DNA, 20 bp, synthetic construct
  misc_feature 1..20: note = chemically synthesized
  source 1..20: mol_type = other DNA
taaagagaaagtcaaactgt

SEQ ID NO: 69853 - DNA, 20 bp, synthetic construct
  misc_feature 1..20: note = chemically synthesized
  source 1..20: mol_type = other DNA
actgtcactgtttgctgatg

SEQ ID NO: 69854 - DNA, 20 bp, synthetic construct
  misc_feature 1..20: note = chemically synthesized
  source 1..20: mol_type = other DNA
gaactgataaaataattcag

SEQ ID NO: 69855 - DNA, 20 bp, synthetic construct
  misc_feature 1..20: note = chemically synthesized
  source 1..20: mol_type = other DNA
aaaattaacgtacaccaatg

SEQ ID NO: 69856 - DNA, 20 bp, synthetic construct
  misc_feature 1..20: note = chemically synthesized
  source 1..20: mol_type = other DNA
tcggaaaaacccttctacac

SEQ ID NO: 69857 - DNA, 20 bp, synthetic construct
  misc_feature 1..20: note = chemically synthesized
  source 1..20: mol_type = other DNA
cttctacacattggcttagg

SEQ ID NO: 69858 - DNA, 20 bp, synthetic construct
  misc_feature 1..20: note = chemically synthesized
  source 1..20: mol_type = other DNA
tctgggactaaattaaacta

SEQ ID NO: 69859 - DNA, 20 bp, synthetic construct
  misc_feature 1..20: note = chemically synthesized
  source 1..20: mol_type = other DNA
caggctctaaaatgaacaca

SEQ ID NO: 69860 - DNA, 20 bp, synthetic construct
  misc_feature 1..20: note = chemically synthesized
  source 1..20: mol_type = other DNA
aaccattatggaaaacagta

SEQ ID NO: 69861 - DNA, 20 bp, synthetic construct
  misc_feature 1..20: note = chemically synthesized
  source 1..20: mol_type = other DNA
atccaatggacacattacac

SEQ ID NO: 69862 - DNA, 20 bp, synthetic construct
  misc_feature 1..20: note = chemically synthesized
  source 1..20: mol_type = other DNA
gaagcactattcacaatagt

SEQ ID NO: 69863 - DNA, 20 bp, synthetic construct
  misc_feature 1..20: note = chemically synthesized
  source 1..20: mol_type = other DNA
taagtgtctatcaacagatg

SEQ ID NO: 69864 - DNA, 20 bp, synthetic construct
  misc_feature 1..20: note = chemically synthesized
  source 1..20: mol_type = other DNA
gatacagaaagtcaaatatc

SEQ ID NO: 69865 - DNA, 20 bp, synthetic construct
  misc_feature 1..20: note = chemically synthesized
  source 1..20: mol_type = other DNA
aaagtgtgagtgtgtatggg

SEQ ID NO: 69866 - DNA, 20 bp, synthetic construct
  misc_feature 1..20: note = chemically synthesized
  source 1..20: mol_type = other DNA
ggtacaaacacagttggata

SEQ ID NO: 69867 - DNA, 20 bp, synthetic construct
  misc_feature 1..20: note = chemically synthesized
  source 1..20: mol_type = other DNA
tggatagaaggattaagcca

SEQ ID NO: 69868 - DNA, 20 bp, synthetic construct
  misc_feature 1..20: note = chemically synthesized
  source 1..20: mol_type = other DNA
tatttcaaaatggctagaaa

SEQ ID NO: 69869 - DNA, 20 bp, synthetic construct
  misc_feature 1..20: note = chemically synthesized
  source 1..20: mol_type = other DNA
tatttagtgccatgaataat

SEQ ID NO: 69870 - DNA, 20 bp, synthetic construct
  misc_feature 1..20: note = chemically synthesized
  source 1..20: mol_type = other DNA
ccatgaataatccctgttta

SEQ ID NO: 69871 - DNA, 20 bp, synthetic construct
  misc_feature 1..20: note = chemically synthesized
  source 1..20: mol_type = other DNA
tgagagtcaccaggtcagtg

SEQ ID NO: 69872 - DNA, 20 bp, synthetic construct
  misc_feature 1..20: note = chemically synthesized
  source 1..20: mol_type = other DNA
cctgttatcttcaccagtct

SEQ ID NO: 69873 - DNA, 20 bp, synthetic construct
  misc_feature 1..20: note = chemically synthesized
  source 1..20: mol_type = other DNA
ccacagactcactgctcctc

SEQ ID NO: 69874 - DNA, 20 bp, synthetic construct
  misc_feature 1..20: note = chemically synthesized
  source 1..20: mol_type = other DNA
gaatccattttgtgcacata

SEQ ID NO: 69875 - DNA, 20 bp, synthetic construct
  misc_feature 1..20: note = chemically synthesized
  source 1..20: mol_type = other DNA
tcctgagtcacttaacatcc

SEQ ID NO: 69876 - DNA, 20 bp, synthetic construct
  misc_feature 1..20: note = chemically synthesized
  source 1..20: mol_type = other DNA
tcacttaacatcctaatgct

SEQ ID NO: 69877 - DNA, 20 bp, synthetic construct
  misc_feature 1..20: note = chemically synthesized
  source 1..20: mol_type = other DNA
tagtattgcaatagcatagt

SEQ ID NO: 69878 - DNA, 20 bp, synthetic construct
  misc_feature 1..20: note = chemically synthesized
  source 1..20: mol_type = other DNA
ctcccttctacttccagaga

SEQ ID NO: 69879 - DNA, 20 bp, synthetic construct
  misc_feature 1..20: note = chemically synthesized
  source 1..20: mol_type = other DNA
tttcatgcaagtcacgaagc

SEQ ID NO: 69880 - DNA, 20 bp, synthetic construct
  misc_feature 1..20: note = chemically synthesized
  source 1..20: mol_type = other DNA
aagtcacgaagccctagctt

SEQ ID NO: 69881 - DNA, 20 bp, synthetic construct
  misc_feature 1..20: note = chemically synthesized
  source 1..20: mol_type = other DNA
tgcacaatgatatcatgtgt

SEQ ID NO: 69882 - DNA, 20 bp, synthetic construct
  misc_feature 1..20: note = chemically synthesized
  source 1..20: mol_type = other DNA
gcctatatcttggatatcta

SEQ ID NO: 69883 - DNA, 20 bp, synthetic construct
  misc_feature 1..20: note = chemically synthesized
  source 1..20: mol_type = other DNA
tatcttggatatctatgaag

SEQ ID NO: 69884 - DNA, 20 bp, synthetic construct
  misc_feature 1..20: note = chemically synthesized
  source 1..20: mol_type = other DNA
tggatatctatgaagttttg

SEQ ID NO: 69885 - DNA, 20 bp, synthetic construct
  misc_feature 1..20: note = chemically synthesized
  source 1..20: mol_type = other DNA
atctatgaagttttgttttg

SEQ ID NO: 69886 - DNA, 20 bp, synthetic construct
  misc_feature 1..20: note = chemically synthesized
  source 1..20: mol_type = other DNA
gaagttttgttttgttttgt

SEQ ID NO: 69887 - DNA, 20 bp, synthetic construct
  misc_feature 1..20: note = chemically synthesized
  source 1..20: mol_type = other DNA
aaaagtgacatgtaccacaa

SEQ ID NO: 69888 - DNA, 20 bp, synthetic construct
  misc_feature 1..20: note = chemically synthesized
  source 1..20: mol_type = other DNA
taaccattttcccaccccga

SEQ ID NO: 69889 - DNA, 20 bp, synthetic construct
  misc_feature 1..20: note = chemically synthesized
  source 1..20: mol_type = other DNA
aaggaagctcttggttcttc

SEQ ID NO: 69890 - DNA, 20 bp, synthetic construct
  misc_feature 1..20: note = chemically synthesized
  source 1..20: mol_type = other DNA
ggagaagataaaattgcaat

SEQ ID NO: 69891 - DNA, 20 bp, synthetic construct
  misc_feature 1..20: note = chemically synthesized
  source 1..20: mol_type = other DNA
aaaatgtactttattaaaca

SEQ ID NO: 69892 - DNA, 20 bp, synthetic construct
  misc_feature 1..20: note = chemically synthesized
  source 1..20: mol_type = other DNA
gggcaatggcgacagcagac

SEQ ID NO: 69893 - DNA, 20 bp, synthetic construct
  misc_feature 1..20: note = chemically synthesized
  source 1..20: mol_type = other DNA
aacacacaggcatgttgagt

SEQ ID NO: 69894 - DNA, 20 bp, synthetic construct
  misc_feature 1..20: note = chemically synthesized
  source 1..20: mol_type = other DNA
aaaacaaacaaacaaacaaa

SEQ ID NO: 69895 - DNA, 20 bp, synthetic construct
  misc_feature 1..20: note = chemically synthesized
  source 1..20: mol_type = other DNA
accctgacctcaaactgttc

SEQ ID NO: 69896 - DNA, 20 bp, synthetic construct
  misc_feature 1..20: note = chemically synthesized
  source 1..20: mol_type = other DNA
tgcccacccaaaaaattcag

SEQ ID NO: 69897 - DNA, 20 bp, synthetic construct
  misc_feature 1..20: note = chemically synthesized
  source 1..20: mol_type = other DNA
tattattgggttccctctct

SEQ ID NO: 69898 - DNA, 20 bp, synthetic construct
  misc_feature 1..20: note = chemically synthesized
  source 1..20: mol_type = other DNA
gtgctgcaagagttctcagc

SEQ ID NO: 69899 - DNA, 20 bp, synthetic construct
  misc_feature 1..20: note = chemically synthesized
  source 1..20: mol_type = other DNA
gataaacacatcaagttctg

SEQ ID NO: 69900 - DNA, 20 bp, synthetic construct
  misc_feature 1..20: note = chemically synthesized
  source 1..20: mol_type = other DNA
tgtcactagttctgaatcat

SEQ ID NO: 69901 - DNA, 20 bp, synthetic construct
  misc_feature 1..20: note = chemically synthesized
  source 1..20: mol_type = other DNA
gttctaacatcaagctcgac

SEQ ID NO: 69902 - DNA, 20 bp, synthetic construct
  misc_feature 1..20: note = chemically synthesized
  source 1..20: mol_type = other DNA
gatctttgttggtctttcca

SEQ ID NO: 69903 - DNA, 20 bp, synthetic construct
  misc_feature 1..20: note = chemically synthesized
  source 1..20: mol_type = other DNA
ttggtctttccaataagatt

SEQ ID NO: 69904 - DNA, 20 bp, synthetic construct
  misc_feature 1..20: note = chemically synthesized
  source 1..20: mol_type = other DNA
tgaagttctcaggatccaca

SEQ ID NO: 69905 - DNA, 20 bp, synthetic construct
  misc_feature 1..20: note = chemically synthesized
  source 1..20: mol_type = other DNA
gcttgtcacagtgcagctca

SEQ ID NO: 69906 - DNA, 20 bp, synthetic construct
  misc_feature 1..20: note = chemically synthesized
  source 1..20: mol_type = other DNA
gctcactcagcttagcaaag

SEQ ID NO: 69907 - DNA, 20 bp, synthetic construct
  misc_feature 1..20: note = chemically synthesized
  source 1..20: mol_type = other DNA
aaaggcgggcttgaggttgt

SEQ ID NO: 69908 - DNA, 20 bp, synthetic construct
  misc_feature 1..20: note = chemically synthesized
  source 1..20: mol_type = other DNA
caggatggcagagggagacg

SEQ ID NO: 69909 - DNA, 20 bp, synthetic construct
  misc_feature 1..20: note = chemically synthesized
  source 1..20: mol_type = other DNA
cattcccatgcattgagaac

SEQ ID NO: 69910 - DNA, 20 bp, synthetic construct
  misc_feature 1..20: note = chemically synthesized
  source 1..20: mol_type = other DNA
agaaccaatgcttacctgcc

SEQ ID NO: 69911 - DNA, 20 bp, synthetic construct
  misc_feature 1..20: note = chemically synthesized
  source 1..20: mol_type = other DNA
tgcaccatgatgccaggcct

SEQ ID NO: 69912 - DNA, 20 bp, synthetic construct
  misc_feature 1..20: note = chemically synthesized
  source 1..20: mol_type = other DNA
tgccaggcctgagagcttgc

SEQ ID NO: 69913 - DNA, 20 bp, synthetic construct
  misc_feature 1..20: note = chemically synthesized
  source 1..20: mol_type = other DNA
tcagcagtgatggatggaca

SEQ ID NO: 69914 - DNA, 20 bp, synthetic construct
  misc_feature 1..20: note = chemically synthesized
  source 1..20: mol_type = other DNA
gcaaatctcaaaataggaaa

SEQ ID NO: 69915 - DNA, 20 bp, synthetic construct
  misc_feature 1..20: note = chemically synthesized
  source 1..20: mol_type = other DNA
tgtaaacaaaacttctgtac

SEQ ID NO: 69916 - DNA, 20 bp, synthetic construct
  misc_feature 1..20: note = chemically synthesized
  source 1..20: mol_type = other DNA
tcccaaagtacagtaccttg

SEQ ID NO: 69917 - DNA, 20 bp, synthetic construct
  misc_feature 1..20: note = chemically synthesized
  source 1..20: mol_type = other DNA
tccctagagaggacagacag

SEQ ID NO: 69918 - DNA, 20 bp, synthetic construct
  misc_feature 1..20: note = chemically synthesized
  source 1..20: mol_type = other DNA
cagacagaaaagattacatc

SEQ ID NO: 69919 - DNA, 20 bp, synthetic construct
  misc_feature 1..20: note = chemically synthesized
  source 1..20: mol_type = other DNA
agtattgcctggggctctct

SEQ ID NO: 69920 - DNA, 20 bp, synthetic construct
  misc_feature 1..20: note = chemically synthesized
  source 1..20: mol_type = other DNA
tcttcttgcttgcctgtctg

SEQ ID NO: 69921 - DNA, 20 bp, synthetic construct
  misc_feature 1..20: note = chemically synthesized
  source 1..20: mol_type = other DNA
ggtagagctgaaactggaag

SEQ ID NO: 69922 - DNA, 20 bp, synthetic construct
  misc_feature 1..20: note = chemically synthesized
  source 1..20: mol_type = other DNA
aactatcaatgtgacagaag

SEQ ID NO: 69923 - DNA, 20 bp, synthetic construct
  misc_feature 1..20: note = chemically synthesized
  source 1..20: mol_type = other DNA
gccccagcccagttcctcct

SEQ ID NO: 69924 - DNA, 20 bp, synthetic construct
  misc_feature 1..20: note = chemically synthesized
  source 1..20: mol_type = other DNA
aaccttcgcctcctgggttc

SEQ ID NO: 69925 - DNA, 20 bp, synthetic construct
  misc_feature 1..20: note = chemically synthesized
  source 1..20: mol_type = other DNA
tttttttatttttagtagag

SEQ ID NO: 69926 - DNA, 20 bp, synthetic construct
  misc_feature 1..20: note = chemically synthesized
  source 1..20: mol_type = other DNA
ttagtagagacgggatttca

SEQ ID NO: 69927 - DNA, 20 bp, synthetic construct
  misc_feature 1..20: note = chemically synthesized
  source 1..20: mol_type = other DNA
tctcccaagtcaagtgcctt

SEQ ID NO: 69928 - DNA, 20 bp, synthetic construct
  misc_feature 1..20: note = chemically synthesized
  source 1..20: mol_type = other DNA
gcctttggggattccatatt

SEQ ID NO: 69929 - DNA, 20 bp, synthetic construct
  misc_feature 1..20: note = chemically synthesized
  source 1..20: mol_type = other DNA
ccatattccaagtttactaa

SEQ ID NO: 69930 - DNA, 20 bp, synthetic construct
  misc_feature 1..20: note = chemically synthesized
  source 1..20: mol_type = other DNA
ttgttatttattatattttc

SEQ ID NO: 69931 - DNA, 20 bp, synthetic construct
  misc_feature 1..20: note = chemically synthesized
  source 1..20: mol_type = other DNA
gtggcaagtaagaatgtctc

SEQ ID NO: 69932 - DNA, 20 bp, synthetic construct
  misc_feature 1..20: note = chemically synthesized
  source 1..20: mol_type = other DNA
atgtctcccttgcttttctc

SEQ ID NO: 69933 - DNA, 20 bp, synthetic construct
  misc_feature 1..20: note = chemically synthesized
  source 1..20: mol_type = other DNA
aaactttttttgtgtcacag

SEQ ID NO: 69934 - DNA, 20 bp, synthetic construct
  misc_feature 1..20: note = chemically synthesized
  source 1..20: mol_type = other DNA
agactgtaagtgctaaaaaa

SEQ ID NO: 69935 - DNA, 20 bp, synthetic construct
  misc_feature 1..20: note = chemically synthesized
  source 1..20: mol_type = other DNA
aaataatatacataggagtg

SEQ ID NO: 69936 - DNA, 20 bp, synthetic construct
  misc_feature 1..20: note = chemically synthesized
  source 1..20: mol_type = other DNA
tgtggtatagtatttattat

SEQ ID NO: 69937 - DNA, 20 bp, synthetic construct
  misc_feature 1..20: note = chemically synthesized
  source 1..20: mol_type = other DNA
tctttatgaaagcattagat

SEQ ID NO: 69938 - DNA, 20 bp, synthetic construct
  misc_feature 1..20: note = chemically synthesized
  source 1..20: mol_type = other DNA
tcaggaggccaaggcaggag

SEQ ID NO: 69939 - DNA, 20 bp, synthetic construct
  misc_feature 1..20: note = chemically synthesized
  source 1..20: mol_type = other DNA
tggtgtagtatgaaaatatc

SEQ ID NO: 69940 - DNA, 20 bp, synthetic construct
  misc_feature 1..20: note = chemically synthesized
  source 1..20: mol_type = other DNA
ataggtactgatgatgtcat

SEQ ID NO: 69941 - DNA, 20 bp, synthetic construct
  misc_feature 1..20: note = chemically synthesized
  source 1..20: mol_type = other DNA
cagttacatgtaagtaaaaa

SEQ ID NO: 69942 - DNA, 20 bp, synthetic construct
  misc_feature 1..20: note = chemically synthesized
  source 1..20: mol_type = other DNA
ccccctagtgttctgtggac

SEQ ID NO: 69943 - DNA, 20 bp, synthetic construct
  misc_feature 1..20: note = chemically synthesized
  source 1..20: mol_type = other DNA
tagcctaggaagacaagatc

SEQ ID NO: 69944 - DNA, 20 bp, synthetic construct
  misc_feature 1..20: note = chemically synthesized
  source 1..20: mol_type = other DNA
gactagacaaaaagcagctc

SEQ ID NO: 69945 - DNA, 20 bp, synthetic construct
  misc_feature 1..20: note = chemically synthesized
  source 1..20: mol_type = other DNA
caaaaagcagctcagctgct

SEQ ID NO: 69946 - DNA, 20 bp, synthetic construct
  misc_feature 1..20: note = chemically synthesized
  source 1..20: mol_type = other DNA
tgcttgtagcttgaaccaag

SEQ ID NO: 69947 - DNA, 20 bp, synthetic construct
  misc_feature 1..20: note = chemically synthesized
  source 1..20: mol_type = other DNA
taaccaattaagatacagct

SEQ ID NO: 69948 - DNA, 20 bp, synthetic construct
  misc_feature 1..20: note = chemically synthesized
  source 1..20: mol_type = other DNA
ggaccaggtatctcaaggcc

SEQ ID NO: 69949 - DNA, 20 bp, synthetic construct
  misc_feature 1..20: note = chemically synthesized
  source 1..20: mol_type = other DNA
caaggccaagagtttggaga

SEQ ID NO: 69950 - DNA, 20 bp, synthetic construct
  misc_feature 1..20: note = chemically synthesized
  source 1..20: mol_type = other DNA
agtatggacaccagtcttct

SEQ ID NO: 69951 - DNA, 20 bp, synthetic construct
  misc_feature 1..20: note = chemically synthesized
  source 1..20: mol_type = other DNA
ttactgcctatggttccaga

SEQ ID NO: 69952 - DNA, 20 bp, synthetic construct
  misc_feature 1..20: note = chemically synthesized
  source 1..20: mol_type = other DNA
atccagggatctgacccatt

SEQ ID NO: 69953 - DNA, 20 bp, synthetic construct
  misc_feature 1..20: note = chemically synthesized
  source 1..20: mol_type = other DNA
tatggctaaaggtggtaggg

SEQ ID NO: 69954 - DNA, 20 bp, synthetic construct
  misc_feature 1..20: note = chemically synthesized
  source 1..20: mol_type = other DNA
aggttatagcattgaaaggc

SEQ ID NO: 69955 - DNA, 20 bp, synthetic construct
  misc_feature 1..20: note = chemically synthesized
  source 1..20: mol_type = other DNA
ccaggtttgtgtctcagtaa

SEQ ID NO: 69956 - DNA, 20 bp, synthetic construct
  misc_feature 1..20: note = chemically synthesized
  source 1..20: mol_type = other DNA
taggctgcgggcagtctcat

SEQ ID NO: 69957 - DNA, 20 bp, synthetic construct
  misc_feature 1..20: note = chemically synthesized
  source 1..20: mol_type = other DNA
gggcagtctcattattgctt

SEQ ID NO: 69958 - DNA, 20 bp, synthetic construct
  misc_feature 1..20: note = chemically synthesized
  source 1..20: mol_type = other DNA
atgcttgttggttcaagata

SEQ ID NO: 69959 - DNA, 20 bp, synthetic construct
  misc_feature 1..20: note = chemically synthesized
  source 1..20: mol_type = other DNA
tgctcatttttaagcatttt

SEQ ID NO: 69960 - DNA, 20 bp, synthetic construct
  misc_feature 1..20: note = chemically synthesized
  source 1..20: mol_type = other DNA
tcatatgagataccatgaaa

SEQ ID NO: 69961 - DNA, 20 bp, synthetic construct
  misc_feature 1..20: note = chemically synthesized
  source 1..20: mol_type = other DNA
agataccatgaaaaatggat

SEQ ID NO: 69962 - DNA, 20 bp, synthetic construct
  misc_feature 1..20: note = chemically synthesized
  source 1..20: mol_type = other DNA
tggccatccaggatagatca

SEQ ID NO: 69963 - DNA, 20 bp, synthetic construct
  misc_feature 1..20: note = chemically synthesized
  source 1..20: mol_type = other DNA
aaagaaacacccaaattcga

SEQ ID NO: 69964 - DNA, 20 bp, synthetic construct
  misc_feature 1..20: note = chemically synthesized
  source 1..20: mol_type = other DNA
ttcgatgaagattaattcct

SEQ ID NO: 69965 - DNA, 20 bp, synthetic construct
  misc_feature 1..20: note = chemically synthesized
  source 1..20: mol_type = other DNA
gaagattaattcctgcctgt

SEQ ID NO: 69966 - DNA, 20 bp, synthetic construct
  misc_feature 1..20: note = chemically synthesized
  source 1..20: mol_type = other DNA
attaattcctgcctgtttgg

SEQ ID NO: 69967 - DNA, 20 bp, synthetic construct
  misc_feature 1..20: note = chemically synthesized
  source 1..20: mol_type = other DNA
tgtaatttcttaagttctat

SEQ ID NO: 69968 - DNA, 20 bp, synthetic construct
  misc_feature 1..20: note = chemically synthesized
  source 1..20: mol_type = other DNA
ctttctggctaatttatgac

SEQ ID NO: 69969 - DNA, 20 bp, synthetic construct
  misc_feature 1..20: note = chemically synthesized
  source 1..20: mol_type = other DNA
tagtatgaaaaattatataa

SEQ ID NO: 69970 - DNA, 20 bp, synthetic construct
  misc_feature 1..20: note = chemically synthesized
  source 1..20: mol_type = other DNA
agtaggcccttcacttcact

SEQ ID NO: 69971 - DNA, 20 bp, synthetic construct
  misc_feature 1..20: note = chemically synthesized
  source 1..20: mol_type = other DNA
taaaataggaaaaatataaa

SEQ ID NO: 69972 - DNA, 20 bp, synthetic construct
  misc_feature 1..20: note = chemically synthesized
  source 1..20: mol_type = other DNA
taaaccactgataggaaaag

SEQ ID NO: 69973 - DNA, 20 bp, synthetic construct
  misc_feature 1..20: note = chemically synthesized
  source 1..20: mol_type = other DNA
actgataggaaaagagctgc

SEQ ID NO: 69974 - DNA, 20 bp, synthetic construct
  misc_feature 1..20: note = chemically synthesized
  source 1..20: mol_type = other DNA
ctgcttaggattctaaatta

SEQ ID NO: 69975 - DNA, 20 bp, synthetic construct
  misc_feature 1..20: note = chemically synthesized
  source 1..20: mol_type = other DNA
attagccagattttaaatta

SEQ ID NO: 69976 - DNA, 20 bp, synthetic construct
  misc_feature 1..20: note = chemically synthesized
  source 1..20: mol_type = other DNA
gaacaaaaatagatgtaagc

SEQ ID NO: 69977 - DNA, 20 bp, synthetic construct
  misc_feature 1..20: note = chemically synthesized
  source 1..20: mol_type = other DNA
agatgtaagcaaatgattct

SEQ ID NO: 69978 - DNA, 20 bp, synthetic construct
  misc_feature 1..20: note = chemically synthesized
  source 1..20: mol_type = other DNA
atgattctactagattttgt

SEQ ID NO: 69979 - DNA, 20 bp, synthetic construct
  misc_feature 1..20: note = chemically synthesized
  source 1..20: mol_type = other DNA
accataacaagtgttcaaac

SEQ ID NO: 69980 - DNA, 20 bp, synthetic construct
  misc_feature 1..20: note = chemically synthesized
  source 1..20: mol_type = other DNA
aagtgttcaaactgttgctt

SEQ ID NO: 69981 - DNA, 20 bp, synthetic construct
  misc_feature 1..20: note = chemically synthesized
  source 1..20: mol_type = other DNA
ggggtacatgtacaggatgt

SEQ ID NO: 69982 - DNA, 20 bp, synthetic construct
  misc_feature 1..20: note = chemically synthesized
  source 1..20: mol_type = other DNA
catagataaatgaatgtcaa

SEQ ID NO: 69983 - DNA, 20 bp, synthetic construct
  misc_feature 1..20: note = chemically synthesized
  source 1..20: mol_type = other DNA
atgatctcatcactcaggta

SEQ ID NO: 69984 - DNA, 20 bp, synthetic construct
  misc_feature 1..20: note = chemically synthesized
  source 1..20: mol_type = other DNA
gtattacgcttagcatccat

SEQ ID NO: 69985 - DNA, 20 bp, synthetic construct
  misc_feature 1..20: note = chemically synthesized
  source 1..20: mol_type = other DNA
ctctgataggccccagtatg

SEQ ID NO: 69986 - DNA, 20 bp, synthetic construct
  misc_feature 1..20: note = chemically synthesized
  source 1..20: mol_type = other DNA
gagtccatgtgttctcatca

SEQ ID NO: 69987 - DNA, 20 bp, synthetic construct
  misc_feature 1..20: note = chemically synthesized
  source 1..20: mol_type = other DNA
ctcatcatttagcttctaac

SEQ ID NO: 69988 - DNA, 20 bp, synthetic construct
  misc_feature 1..20: note = chemically synthesized
  source 1..20: mol_type = other DNA
tacctctgcctcatctctca

SEQ ID NO: 69989 - DNA, 20 bp, synthetic construct
  misc_feature 1..20: note = chemically synthesized
  source 1..20: mol_type = other DNA
atctctcacgaagtttgcag

SEQ ID NO: 69990 - DNA, 20 bp, synthetic construct
  misc_feature 1..20: note = chemically synthesized
  source 1..20: mol_type = other DNA
tatcccattttccgctgaaa

SEQ ID NO: 69991 - DNA, 20 bp, synthetic construct
  misc_feature 1..20: note = chemically synthesized
  source 1..20: mol_type = other DNA
ctgaaatatagctttacttt

SEQ ID NO: 69992 - DNA, 20 bp, synthetic construct
  misc_feature 1..20: note = chemically synthesized
  source 1..20: mol_type = other DNA
aaagatgccttcatttattt

SEQ ID NO: 69993 - DNA, 20 bp, synthetic construct
  misc_feature 1..20: note = chemically synthesized
  source 1..20: mol_type = other DNA
attaaaattctaagaaattc

SEQ ID NO: 69994 - DNA, 20 bp, synthetic construct
  misc_feature 1..20: note = chemically synthesized
  source 1..20: mol_type = other DNA
atactctgaagtagttcaga

SEQ ID NO: 69995 - DNA, 20 bp, synthetic construct
  misc_feature 1..20: note = chemically synthesized
  source 1..20: mol_type = other DNA
aaatgagactattttaagtg

SEQ ID NO: 69996 - DNA, 20 bp, synthetic construct
  misc_feature 1..20: note = chemically synthesized
  source 1..20: mol_type = other DNA
gtctagaaattttgaaaaac

SEQ ID NO: 69997 - DNA, 20 bp, synthetic construct
  misc_feature 1..20: note = chemically synthesized
  source 1..20: mol_type = other DNA
gaaaaacctctgattatatg

SEQ ID NO: 69998 - DNA, 20 bp, synthetic construct
  misc_feature 1..20: note = chemically synthesized
  source 1..20: mol_type = other DNA
tatgcatgctatcttcagta

SEQ ID NO: 69999 - DNA, 20 bp, synthetic construct
  misc_feature 1..20: note = chemically synthesized
  source 1..20: mol_type = other DNA
agtattgaaactataacata

SEQ ID NO: 70000 - DNA, 20 bp, synthetic construct
  misc_feature 1..20: note = chemically synthesized
  source 1..20: mol_type = other DNA
tctctggagaaggttaaaac

SEQ ID NO: 70001 - DNA, 20 bp, synthetic construct
  misc_feature 1..20: note = chemically synthesized
  source 1..20: mol_type = other DNA
actgaggattggcaagtgag

SEQ ID NO: 70002 - DNA, 20 bp, synthetic construct
  misc_feature 1..20: note = chemically synthesized
  source 1..20: mol_type = other DNA
aatatggaaaaccaggcccc

SEQ ID NO: 70003 - DNA, 20 bp, synthetic construct
  misc_feature 1..20: note = chemically synthesized
  source 1..20: mol_type = other DNA
tcactaagggtgaggatgct

SEQ ID NO: 70004 - DNA, 20 bp, synthetic construct
  misc_feature 1..20: note = chemically synthesized
  source 1..20: mol_type = other DNA
ctgaatgatttttccctccc

SEQ ID NO: 70005 - DNA, 20 bp, synthetic construct
  misc_feature 1..20: note = chemically synthesized
  source 1..20: mol_type = other DNA
atcaataattctagccccac

SEQ ID NO: 70006 - DNA, 20 bp, synthetic construct
  misc_feature 1..20: note = chemically synthesized
  source 1..20: mol_type = other DNA
gaaagtaaacttccacaacc

SEQ ID NO: 70007 - DNA, 20 bp, synthetic construct
  misc_feature 1..20: note = chemically synthesized
  source 1..20: mol_type = other DNA
tattgtattttcttcttctt

SEQ ID NO: 70008 - DNA, 20 bp, synthetic construct
  misc_feature 1..20: note = chemically synthesized
  source 1..20: mol_type = other DNA
tcttcttcttgctggtttag

SEQ ID NO: 70009 - DNA, 20 bp, synthetic construct
  misc_feature 1..20: note = chemically synthesized
  source 1..20: mol_type = other DNA
ctggtttagtcatgttttct

SEQ ID NO: 70010 - DNA, 20 bp, synthetic construct
  misc_feature 1..20: note = chemically synthesized
  source 1..20: mol_type = other DNA
gtcatgttttctgggagctt

SEQ ID NO: 70011 - DNA, 20 bp, synthetic construct
  misc_feature 1..20: note = chemically synthesized
  source 1..20: mol_type = other DNA
gagcttaggggcttatttta

SEQ ID NO: 70012 - DNA, 20 bp, synthetic construct
  misc_feature 1..20: note = chemically synthesized
  source 1..20: mol_type = other DNA
taggggcttattttattttg

SEQ ID NO: 70013 - DNA, 20 bp, synthetic construct
  misc_feature 1..20: note = chemically synthesized
  source 1..20: mol_type = other DNA
tgctattgccttctcagtcc

SEQ ID NO: 70014 - DNA, 20 bp, synthetic construct
  misc_feature 1..20: note = chemically synthesized
  source 1..20: mol_type = other DNA
ttgccttctcagtccccacg

SEQ ID NO: 70015 - DNA, 20 bp, synthetic construct
  misc_feature 1..20: note = chemically synthesized
  source 1..20: mol_type = other DNA
acatagaaaaggctataggt

SEQ ID NO: 70016 - DNA, 20 bp, synthetic construct
  misc_feature 1..20: note = chemically synthesized
  source 1..20: mol_type = other DNA
ggttagtgtttgagagtcct

SEQ ID NO: 70017 - DNA, 20 bp, synthetic construct
  misc_feature 1..20: note = chemically synthesized
  source 1..20: mol_type = other DNA
atgcccgataaatatgttat

SEQ ID NO: 70018 - DNA, 20 bp, synthetic construct
  misc_feature 1..20: note = chemically synthesized
  source 1..20: mol_type = other DNA
ttatgtgtgtttatgtatat

SEQ ID NO: 70019 - DNA, 20 bp, synthetic construct
  misc_feature 1..20: note = chemically synthesized
  source 1..20: mol_type = other DNA
tgtgtgtgtgtgtgtgtgtg

SEQ ID NO: 70020 - DNA, 20 bp, synthetic construct
  misc_feature 1..20: note = chemically synthesized
  source 1..20: mol_type = other DNA
tgtgtgttgtgtttacaaat

SEQ ID NO: 70021 - DNA, 20 bp, synthetic construct
  misc_feature 1..20: note = chemically synthesized
  source 1..20: mol_type = other DNA
aatattctcattgaatagaa

SEQ ID NO: 70022 - DNA, 20 bp, synthetic construct
  misc_feature 1..20: note = chemically synthesized
  source 1..20: mol_type = other DNA
aatagaagtatgcttatcat

SEQ ID NO: 70023 - DNA, 20 bp, synthetic construct
  misc_feature 1..20: note = chemically synthesized
  source 1..20: mol_type = other DNA
tctgttgccttatagcctag

SEQ ID NO: 70024 - DNA, 20 bp, synthetic construct
  misc_feature 1..20: note = chemically synthesized
  source 1..20: mol_type = other DNA
catatctgacacctatgaaa

SEQ ID NO: 70025 - DNA, 20 bp, synthetic construct
  misc_feature 1..20: note = chemically synthesized
  source 1..20: mol_type = other DNA
cattaggctacctgccttgg

SEQ ID NO: 70026 - DNA, 20 bp, synthetic construct
  misc_feature 1..20: note = chemically synthesized
  source 1..20: mol_type = other DNA
acctgactgatgaaacaatt

SEQ ID NO: 70027 - DNA, 20 bp, synthetic construct
  misc_feature 1..20: note = chemically synthesized
  source 1..20: mol_type = other DNA
aattccagtgtaaaaaacac

SEQ ID NO: 70028 - DNA, 20 bp, synthetic construct
  misc_feature 1..20: note = chemically synthesized
  source 1..20: mol_type = other DNA
agccttttattttggtcaga

SEQ ID NO: 70029 - DNA, 20 bp, synthetic construct
  misc_feature 1..20: note = chemically synthesized
  source 1..20: mol_type = other DNA
ggagggctaactagctctat

SEQ ID NO: 70030 - DNA, 20 bp, synthetic construct
  misc_feature 1..20: note = chemically synthesized
  source 1..20: mol_type = other DNA
tagcacttccagctctactc

SEQ ID NO: 70031 - DNA, 20 bp, synthetic construct
  misc_feature 1..20: note = chemically synthesized
  source 1..20: mol_type = other DNA
ccttttaattatagttgtat

SEQ ID NO: 70032 - DNA, 20 bp, synthetic construct
  misc_feature 1..20: note = chemically synthesized
  source 1..20: mol_type = other DNA
acagaatagaggaataaagt

SEQ ID NO: 70033 - DNA, 20 bp, synthetic construct
  misc_feature 1..20: note = chemically synthesized
  source 1..20: mol_type = other DNA
ttcatggacttgatagtgga

SEQ ID NO: 70034 - DNA, 20 bp, synthetic construct
  misc_feature 1..20: note = chemically synthesized
  source 1..20: mol_type = other DNA
atgaaacatgttatatacca

SEQ ID NO: 70035 - DNA, 20 bp, synthetic construct
  misc_feature 1..20: note = chemically synthesized
  source 1..20: mol_type = other DNA
aaactgaaatgaaggccaga

SEQ ID NO: 70036 - DNA, 20 bp, synthetic construct
  misc_feature 1..20: note = chemically synthesized
  source 1..20: mol_type = other DNA
aggaacccatttatatgaaa

SEQ ID NO: 70037 - DNA, 20 bp, synthetic construct
  misc_feature 1..20: note = chemically synthesized
  source 1..20: mol_type = other DNA
gtaaataccctaaagatgta

SEQ ID NO: 70038 - DNA, 20 bp, synthetic construct
  misc_feature 1..20: note = chemically synthesized
  source 1..20: mol_type = other DNA
atcaataaggccaatgtagg

SEQ ID NO: 70039 - DNA, 20 bp, synthetic construct
  misc_feature 1..20: note = chemically synthesized
  source 1..20: mol_type = other DNA
acaactattgtagagaattg

SEQ ID NO: 70040 - DNA, 20 bp, synthetic construct
  misc_feature 1..20: note = chemically synthesized
  source 1..20: mol_type = other DNA
attgtagagaattgtaagga

SEQ ID NO: 70041 - DNA, 20 bp, synthetic construct
  misc_feature 1..20: note = chemically synthesized
  source 1..20: mol_type = other DNA
gtggggcagtggtagaagca

SEQ ID NO: 70042 - DNA, 20 bp, synthetic construct
  misc_feature 1..20: note = chemically synthesized
  source 1..20: mol_type = other DNA
catcctttcacgaaaaacca

SEQ ID NO: 70043 - DNA, 20 bp, synthetic construct
  misc_feature 1..20: note = chemically synthesized
  source 1..20: mol_type = other DNA
gctgtgagtatatgtcagag

SEQ ID NO: 70044 - DNA, 20 bp, synthetic construct
  misc_feature 1..20: note = chemically synthesized
  source 1..20: mol_type = other DNA
ctttgggttgaattttgtca

SEQ ID NO: 70045 - DNA, 20 bp, synthetic construct
  misc_feature 1..20: note = chemically synthesized
  source 1..20: mol_type = other DNA
atcacagtctctacctcaga

SEQ ID NO: 70046 - DNA, 20 bp, synthetic construct
  misc_feature 1..20: note = chemically synthesized
  source 1..20: mol_type = other DNA
tggaaatgagaaaccatctc

SEQ ID NO: 70047 - DNA, 20 bp, synthetic construct
  misc_feature 1..20: note = chemically synthesized
  source 1..20: mol_type = other DNA
gtatttcttggatgctgacc

SEQ ID NO: 70048 - DNA, 20 bp, synthetic construct
  misc_feature 1..20: note = chemically synthesized
  source 1..20: mol_type = other DNA
ccctctagctgaaggaagtt

SEQ ID NO: 70049 - DNA, 20 bp, synthetic construct
  misc_feature 1..20: note = chemically synthesized
  source 1..20: mol_type = other DNA
ctgttcggtcagggaatttg

SEQ ID NO: 70050 - DNA, 20 bp, synthetic construct
  misc_feature 1..20: note = chemically synthesized
  source 1..20: mol_type = other DNA
cggtcagggaatttgatggg

SEQ ID NO: 70051 - DNA, 20 bp, synthetic construct
  misc_feature 1..20: note = chemically synthesized
  source 1..20: mol_type = other DNA
cagggaatttgatgggtttt

SEQ ID NO: 70052 - DNA, 20 bp, synthetic construct
  misc_feature 1..20: note = chemically synthesized
  source 1..20: mol_type = other DNA
gaatttgatgggttttgttt

SEQ ID NO: 70053 - DNA, 20 bp, synthetic construct
  misc_feature 1..20: note = chemically synthesized
  source 1..20: mol_type = other DNA
ttgatgggttttgtttgttt

SEQ ID NO: 70054 - DNA, 20 bp, synthetic construct
  misc_feature 1..20: note = chemically synthesized
  source 1..20: mol_type = other DNA
tgggttttgtttgtttgttt

SEQ ID NO: 70055 - DNA, 20 bp, synthetic construct
  misc_feature 1..20: note = chemically synthesized
  source 1..20: mol_type = other DNA
ttttgtttgtttgtttgttt

SEQ ID NO: 70056 - DNA, 20 bp, synthetic construct
  misc_feature 1..20: note = chemically synthesized
  source 1..20: mol_type = other DNA
ttgtttgtttgtttgtttgt

SEQ ID NO: 70057 - DNA, 20 bp, synthetic construct
  misc_feature 1..20: note = chemically synthesized
  source 1..20: mol_type = other DNA
aaactccacctccccggttc

SEQ ID NO: 70058 - DNA, 20 bp, synthetic construct
  misc_feature 1..20: note = chemically synthesized
  source 1..20: mol_type = other DNA
ctgcctcagcctcccaagta

SEQ ID NO: 70059 - DNA, 20 bp, synthetic construct
  misc_feature 1..20: note = chemically synthesized
  source 1..20: mol_type = other DNA
tttatatttttaagcagaga

SEQ ID NO: 70060 - DNA, 20 bp, synthetic construct
  misc_feature 1..20: note = chemically synthesized
  source 1..20: mol_type = other DNA
caccttggcgtcccaaactg

SEQ ID NO: 70061 - DNA, 20 bp, synthetic construct
  misc_feature 1..20: note = chemically synthesized
  source 1..20: mol_type = other DNA
ccaccgcacctcaaggaatt

SEQ ID NO: 70062 - DNA, 20 bp, synthetic construct
  misc_feature 1..20: note = chemically synthesized
  source 1..20: mol_type = other DNA
gaggcgtgcctccatccctg

SEQ ID NO: 70063 - DNA, 20 bp, synthetic construct
  misc_feature 1..20: note = chemically synthesized
  source 1..20: mol_type = other DNA
gaaggatagaattcaattta

SEQ ID NO: 70064 - DNA, 20 bp, synthetic construct
  misc_feature 1..20: note = chemically synthesized
  source 1..20: mol_type = other DNA
atagcccctttgtcaaaaat

SEQ ID NO: 70065 - DNA, 20 bp, synthetic construct
  misc_feature 1..20: note = chemically synthesized
  source 1..20: mol_type = other DNA
tagttatttagccacatatt

SEQ ID NO: 70066 - DNA, 20 bp, synthetic construct
  misc_feature 1..20: note = chemically synthesized
  source 1..20: mol_type = other DNA
catccatggaattttttccc

SEQ ID NO: 70067 - DNA, 20 bp, synthetic construct
  misc_feature 1..20: note = chemically synthesized
  source 1..20: mol_type = other DNA
ctgttttttttctaattaat

SEQ ID NO: 70068 - DNA, 20 bp, synthetic construct
  misc_feature 1..20: note = chemically synthesized
  source 1..20: mol_type = other DNA
atctgtataaatactcttca

SEQ ID NO: 70069 - DNA, 20 bp, synthetic construct
  misc_feature 1..20: note = chemically synthesized
  source 1..20: mol_type = other DNA
ttcaggttgatttcctttct

SEQ ID NO: 70070 - DNA, 20 bp, synthetic construct
  misc_feature 1..20: note = chemically synthesized
  source 1..20: mol_type = other DNA
ttgatttcctttcttaatgt

SEQ ID NO: 70071 - DNA, 20 bp, synthetic construct
  misc_feature 1..20: note = chemically synthesized
  source 1..20: mol_type = other DNA
acatacacttgaaccaaaaa

SEQ ID NO: 70072 - DNA, 20 bp, synthetic construct
  misc_feature 1..20: note = chemically synthesized
  source 1..20: mol_type = other DNA
cactgtgaactcctacagaa

SEQ ID NO: 70073 - DNA, 20 bp, synthetic construct
  misc_feature 1..20: note = chemically synthesized
  source 1..20: mol_type = other DNA
ccttctctatccccttgacc

SEQ ID NO: 70074 - DNA, 20 bp, synthetic construct
  misc_feature 1..20: note = chemically synthesized
  source 1..20: mol_type = other DNA
caagcattatgtctgtctgt

SEQ ID NO: 70075 - DNA, 20 bp, synthetic construct
  misc_feature 1..20: note = chemically synthesized
  source 1..20: mol_type = other DNA
cccttttagctctcctggag

SEQ ID NO: 70076 - DNA, 20 bp, synthetic construct
  misc_feature 1..20: note = chemically synthesized
  source 1..20: mol_type = other DNA
ctgagatgtatccttaagat

SEQ ID NO: 70077 - DNA, 20 bp, synthetic construct
  misc_feature 1..20: note = chemically synthesized
  source 1..20: mol_type = other DNA
gggtgccttaaaatggcaaa

SEQ ID NO: 70078 - DNA, 20 bp, synthetic construct
  misc_feature 1..20: note = chemically synthesized
  source 1..20: mol_type = other DNA
gccttaaaatggcaaacaag

SEQ ID NO: 70079 - DNA, 20 bp, synthetic construct
  misc_feature 1..20: note = chemically synthesized
  source 1..20: mol_type = other DNA
aaacaaggtttgttttcttt

SEQ ID NO: 70080 - DNA, 20 bp, synthetic construct
  misc_feature 1..20: note = chemically synthesized
  source 1..20: mol_type = other DNA
catgccttcctcttccatat

SEQ ID NO: 70081 - DNA, 20 bp, synthetic construct
  misc_feature 1..20: note = chemically synthesized
  source 1..20: mol_type = other DNA
tatacacatgtattaataaa

SEQ ID NO: 70082 - DNA, 20 bp, synthetic construct
  misc_feature 1..20: note = chemically synthesized
  source 1..20: mol_type = other DNA
gtattaataaagcctgattc

SEQ ID NO: 70083 - DNA, 20 bp, synthetic construct
  misc_feature 1..20: note = chemically synthesized
  source 1..20: mol_type = other DNA
aggccacctgcaagataaat

SEQ ID NO: 70084 - DNA, 20 bp, synthetic construct
  misc_feature 1..20: note = chemically synthesized
  source 1..20: mol_type = other DNA
ggcatccattttctttatga

SEQ ID NO: 70085 - DNA, 20 bp, synthetic construct
  misc_feature 1..20: note = chemically synthesized
  source 1..20: mol_type = other DNA
ctttatgatgccgtttgagg

SEQ ID NO: 70086 - DNA, 20 bp, synthetic construct
  misc_feature 1..20: note = chemically synthesized
  source 1..20: mol_type = other DNA
ggtggagttttagtcaggtg

SEQ ID NO: 70087 - DNA, 20 bp, synthetic construct
  misc_feature 1..20: note = chemically synthesized
  source 1..20: mol_type = other DNA
ctcatcatgactcagcattg

SEQ ID NO: 70088 - DNA, 20 bp, synthetic construct
  misc_feature 1..20: note = chemically synthesized
  source 1..20: mol_type = other DNA
gcattgctgtgcttgagcca

SEQ ID NO: 70089 - DNA, 20 bp, synthetic construct
  misc_feature 1..20: note = chemically synthesized
  source 1..20: mol_type = other DNA
tgctgtgcttgagccagaag

SEQ ID NO: 70090 - DNA, 20 bp, synthetic construct
  misc_feature 1..20: note = chemically synthesized
  source 1..20: mol_type = other DNA
aggggcctggccagaactgc

SEQ ID NO: 70091 - DNA, 20 bp, synthetic construct
  misc_feature 1..20: note = chemically synthesized
  source 1..20: mol_type = other DNA
aacaggaactaaggaaaaac

SEQ ID NO: 70092 - DNA, 20 bp, synthetic construct
  misc_feature 1..20: note = chemically synthesized
  source 1..20: mol_type = other DNA
gctggaagggatagagggag

SEQ ID NO: 70093 - DNA, 20 bp, synthetic construct
  misc_feature 1..20: note = chemically synthesized
  source 1..20: mol_type = other DNA
agtatagtaatcattcagca

SEQ ID NO: 70094 - DNA, 20 bp, synthetic construct
  misc_feature 1..20: note = chemically synthesized
  source 1..20: mol_type = other DNA
tggatgctaaacactatttt

SEQ ID NO: 70095 - DNA, 20 bp, synthetic construct
  misc_feature 1..20: note = chemically synthesized
  source 1..20: mol_type = other DNA
tgcctcagccaccctaatag

SEQ ID NO: 70096 - DNA, 20 bp, synthetic construct
  misc_feature 1..20: note = chemically synthesized
  source 1..20: mol_type = other DNA
cacctcagcctcccaaagtg

SEQ ID NO: 70097 - DNA, 20 bp, synthetic construct
  misc_feature 1..20: note = chemically synthesized
  source 1..20: mol_type = other DNA
tacaggtgtgagacaccatg

SEQ ID NO: 70098 - DNA, 20 bp, synthetic construct
  misc_feature 1..20: note = chemically synthesized
  source 1..20: mol_type = other DNA
atttatgggatgggggaaaa

SEQ ID NO: 70099 - DNA, 20 bp, synthetic construct
  misc_feature 1..20: note = chemically synthesized
  source 1..20: mol_type = other DNA
gaaaagaatgtttctctcac

SEQ ID NO: 70100 - DNA, 20 bp, synthetic construct
  misc_feature 1..20: note = chemically synthesized
  source 1..20: mol_type = other DNA
ttttagagagtggagaatgg

SEQ ID NO: 70101 - DNA, 20 bp, synthetic construct
  misc_feature 1..20: note = chemically synthesized
  source 1..20: mol_type = other DNA
ttaggcagccatgttgccat

SEQ ID NO: 70102 - DNA, 20 bp, synthetic construct
  misc_feature 1..20: note = chemically synthesized
  source 1..20: mol_type = other DNA
ttcttagatgatcttgagca

SEQ ID NO: 70103 - DNA, 20 bp, synthetic construct
  misc_feature 1..20: note = chemically synthesized
  source 1..20: mol_type = other DNA
tagctaatagaattatgagg

SEQ ID NO: 70104 - DNA, 20 bp, synthetic construct
  misc_feature 1..20: note = chemically synthesized
  source 1..20: mol_type = other DNA
aatagaattatgaggatgag

SEQ ID NO: 70105 - DNA, 20 bp, synthetic construct
  misc_feature 1..20: note = chemically synthesized
  source 1..20: mol_type = other DNA
ggacacagtatatattcagt

SEQ ID NO: 70106 - DNA, 20 bp, synthetic construct
  misc_feature 1..20: note = chemically synthesized
  source 1..20: mol_type = other DNA
tcttgactgttaatgttggc

SEQ ID NO: 70107 - DNA, 20 bp, synthetic construct
  misc_feature 1..20: note = chemically synthesized
  source 1..20: mol_type = other DNA
ctgttaatgttggcagcaga

SEQ ID NO: 70108 - DNA, 20 bp, synthetic construct
  misc_feature 1..20: note = chemically synthesized
  source 1..20: mol_type = other DNA
cactgggcaatacaagacct

SEQ ID NO: 70109 - DNA, 20 bp, synthetic construct
  misc_feature 1..20: note = chemically synthesized
  source 1..20: mol_type = other DNA
gcaatacaagacctctgagc

SEQ ID NO: 70110 - DNA, 20 bp, synthetic construct
  misc_feature 1..20: note = chemically synthesized
  source 1..20: mol_type = other DNA
gaaagacaatgtgaagcccc

SEQ ID NO: 70111 - DNA, 20 bp, synthetic construct
  misc_feature 1..20: note = chemically synthesized
  source 1..20: mol_type = other DNA
aagtagttagcatatggaga

SEQ ID NO: 70112 - DNA, 20 bp, synthetic construct
  misc_feature 1..20: note = chemically synthesized
  source 1..20: mol_type = other DNA
aaagggagatgcagagaatc

SEQ ID NO: 70113 - DNA, 20 bp, synthetic construct
  misc_feature 1..20: note = chemically synthesized
  source 1..20: mol_type = other DNA
caccacagcactattcctag

SEQ ID NO: 70114 - DNA, 20 bp, synthetic construct
  misc_feature 1..20: note = chemically synthesized
  source 1..20: mol_type = other DNA
cttaaactagacaaacatat

SEQ ID NO: 70115 - DNA, 20 bp, synthetic construct
  misc_feature 1..20: note = chemically synthesized
  source 1..20: mol_type = other DNA
acactccctttaaccaaagt

SEQ ID NO: 70116 - DNA, 20 bp, synthetic construct
  misc_feature 1..20: note = chemically synthesized
  source 1..20: mol_type = other DNA
aatttgggcaggcatgggcc

SEQ ID NO: 70117 - DNA, 20 bp, synthetic construct
  misc_feature 1..20: note = chemically synthesized
  source 1..20: mol_type = other DNA
ggccttcagttttctcaagt

SEQ ID NO: 70118 - DNA, 20 bp, synthetic construct
  misc_feature 1..20: note = chemically synthesized
  source 1..20: mol_type = other DNA
agaaaatctctttattctga

SEQ ID NO: 70119 - DNA, 20 bp, synthetic construct
  misc_feature 1..20: note = chemically synthesized
  source 1..20: mol_type = other DNA
gaggaagtatggtctgcaac

SEQ ID NO: 70120 - DNA, 20 bp, synthetic construct
  misc_feature 1..20: note = chemically synthesized
  source 1..20: mol_type = other DNA
atttctcgcatccacaatat

SEQ ID NO: 70121 - DNA, 20 bp, synthetic construct
  misc_feature 1..20: note = chemically synthesized
  source 1..20: mol_type = other DNA
cgcatccacaatatctgagt

SEQ ID NO: 70122 - DNA, 20 bp, synthetic construct
  misc_feature 1..20: note = chemically synthesized
  source 1..20: mol_type = other DNA
ccttactacttggtggttct

SEQ ID NO: 70123 - DNA, 20 bp, synthetic construct
  misc_feature 1..20: note = chemically synthesized
  source 1..20: mol_type = other DNA
ttggacaaattatttcatgt

SEQ ID NO: 70124 - DNA, 20 bp, synthetic construct
  misc_feature 1..20: note = chemically synthesized
  source 1..20: mol_type = other DNA
taattactaattgtctactt

SEQ ID NO: 70125 - DNA, 20 bp, synthetic construct
  misc_feature 1..20: note = chemically synthesized
  source 1..20: mol_type = other DNA
ctaattgtctacttattagc

SEQ ID NO: 70126 - DNA, 20 bp, synthetic construct
  misc_feature 1..20: note = chemically synthesized
  source 1..20: mol_type = other DNA
aacctccacctcctgggttc

SEQ ID NO: 70127 - DNA, 20 bp, synthetic construct
  misc_feature 1..20: note = chemically synthesized
  source 1..20: mol_type = other DNA
tgcctcagcctcctgagtag

SEQ ID NO: 70128 - DNA, 20 bp, synthetic construct
  misc_feature 1..20: note = chemically synthesized
  source 1..20: mol_type = other DNA
agacgcgtgccaccacacct

SEQ ID NO: 70129 - DNA, 20 bp, synthetic construct
  misc_feature 1..20: note = chemically synthesized
  source 1..20: mol_type = other DNA
tttgtattttttagtagaga

SEQ ID NO: 70130 - DNA, 20 bp, synthetic construct
  misc_feature 1..20: note = chemically synthesized
  source 1..20: mol_type = other DNA
tgccttggcctcccaaagtg

SEQ ID NO: 70131 - DNA, 20 bp, synthetic construct
  misc_feature 1..20: note = chemically synthesized
  source 1..20: mol_type = other DNA
gcctcatatgataaacttaa

SEQ ID NO: 70132 - DNA, 20 bp, synthetic construct
  misc_feature 1..20: note = chemically synthesized
  source 1..20: mol_type = other DNA
tcacagaattaccatatgta

SEQ ID NO: 70133 - DNA, 20 bp, synthetic construct
  misc_feature 1..20: note = chemically synthesized
  source 1..20: mol_type = other DNA
aaaatggcacctgacatata

SEQ ID NO: 70134 - DNA, 20 bp, synthetic construct
  misc_feature 1..20: note = chemically synthesized
  source 1..20: mol_type = other DNA
ctatttcctcgtgtctctca

SEQ ID NO: 70135 - DNA, 20 bp, synthetic construct
  misc_feature 1..20: note = chemically synthesized
  source 1..20: mol_type = other DNA
ggtttctagtcccttcacca

SEQ ID NO: 70136 - DNA, 20 bp, synthetic construct
  misc_feature 1..20: note = chemically synthesized
  source 1..20: mol_type = other DNA
tgtttccctctcaactcctg

SEQ ID NO: 70137 - DNA, 20 bp, synthetic construct
  misc_feature 1..20: note = chemically synthesized
  source 1..20: mol_type = other DNA
aatttctcatgttcagaacc

SEQ ID NO: 70138 - DNA, 20 bp, synthetic construct
  misc_feature 1..20: note = chemically synthesized
  source 1..20: mol_type = other DNA
atgttcagaaccttgggctt

SEQ ID NO: 70139 - DNA, 20 bp, synthetic construct
  misc_feature 1..20: note = chemically synthesized
  source 1..20: mol_type = other DNA
gcttccatgtttccagtgaa

SEQ ID NO: 70140 - DNA, 20 bp, synthetic construct
  misc_feature 1..20: note = chemically synthesized
  source 1..20: mol_type = other DNA
gttagacaatttcatctgtg

SEQ ID NO: 70141 - DNA, 20 bp, synthetic construct
  misc_feature 1..20: note = chemically synthesized
  source 1..20: mol_type = other DNA
atttcatctgtgccctgctt

SEQ ID NO: 70142 - DNA, 20 bp, synthetic construct
  misc_feature 1..20: note = chemically synthesized
  source 1..20: mol_type = other DNA
agcttaatctttaatgaaag

SEQ ID NO: 70143 - DNA, 20 bp, synthetic construct
  misc_feature 1..20: note = chemically synthesized
  source 1..20: mol_type = other DNA
gcaaagtcaccgtgagggtc

SEQ ID NO: 70144 - DNA, 20 bp, synthetic construct
  misc_feature 1..20: note = chemically synthesized
  source 1..20: mol_type = other DNA
ggctgtctcctttatccaca

SEQ ID NO: 70145 - DNA, 20 bp, synthetic construct
  misc_feature 1..20: note = chemically synthesized
  source 1..20: mol_type = other DNA
ctttatccacagaatgattc

SEQ ID NO: 70146 - DNA, 20 bp, synthetic construct
  misc_feature 1..20: note = chemically synthesized
  source 1..20: mol_type = other DNA
tgacatgtccgaccttaggc

SEQ ID NO: 70147 - DNA, 20 bp, synthetic construct
  misc_feature 1..20: note = chemically synthesized
  source 1..20: mol_type = other DNA
tggcaaaataaagataataa

SEQ ID NO: 70148 - DNA, 20 bp, synthetic construct
  misc_feature 1..20: note = chemically synthesized
  source 1..20: mol_type = other DNA
aggatggaaaacaatagcaa

SEQ ID NO: 70149 - DNA, 20 bp, synthetic construct
  misc_feature 1..20: note = chemically synthesized
  source 1..20: mol_type = other DNA
aaaaggtctcaacaaatagt

SEQ ID NO: 70150 - DNA, 20 bp, synthetic construct
  misc_feature 1..20: note = chemically synthesized
  source 1..20: mol_type = other DNA
ctcttattatattcttctta

SEQ ID NO: 70151 - DNA, 20 bp, synthetic construct
  misc_feature 1..20: note = chemically synthesized
  source 1..20: mol_type = other DNA
gggcaggccactaacgaaga

SEQ ID NO: 70152 - DNA, 20 bp, synthetic construct
  misc_feature 1..20: note = chemically synthesized
  source 1..20: mol_type = other DNA
accatttccagatagaagtg

SEQ ID NO: 70153 - DNA, 20 bp, synthetic construct
  misc_feature 1..20: note = chemically synthesized
  source 1..20: mol_type = other DNA
tcttccctactcttatccaa

SEQ ID NO: 70154 - DNA, 20 bp, synthetic construct
  misc_feature 1..20: note = chemically synthesized
  source 1..20: mol_type = other DNA
ctactcttatccaatggggc

SEQ ID NO: 70155 - DNA, 20 bp, synthetic construct
  misc_feature 1..20: note = chemically synthesized
  source 1..20: mol_type = other DNA
taagccagtcttcacaaagc

SEQ ID NO: 70156 - DNA, 20 bp, synthetic construct
  misc_feature 1..20: note = chemically synthesized
  source 1..20: mol_type = other DNA
cctgaatgggcaggaagcat

SEQ ID NO: 70157 - DNA, 20 bp, synthetic construct
  misc_feature 1..20: note = chemically synthesized
  source 1..20: mol_type = other DNA
tcattcagagctctttcata

SEQ ID NO: 70158 - DNA, 20 bp, synthetic construct
  misc_feature 1..20: note = chemically synthesized
  source 1..20: mol_type = other DNA
tctttcataccctgcttccc

SEQ ID NO: 70159 - DNA, 20 bp, synthetic construct
  misc_feature 1..20: note = chemically synthesized
  source 1..20: mol_type = other DNA
tctcaacatttctgttgata

SEQ ID NO: 70160 - DNA, 20 bp, synthetic construct
  misc_feature 1..20: note = chemically synthesized
  source 1..20: mol_type = other DNA
atagactttctcagagctat

SEQ ID NO: 70161 - DNA, 20 bp, synthetic construct
  misc_feature 1..20: note = chemically synthesized
  source 1..20: mol_type = other DNA
ctcagggtagaaatccccta

SEQ ID NO: 70162 - DNA, 20 bp, synthetic construct
  misc_feature 1..20: note = chemically synthesized
  source 1..20: mol_type = other DNA
gatttattcaatgatgggtt

SEQ ID NO: 70163 - DNA, 20 bp, synthetic construct
  misc_feature 1..20: note = chemically synthesized
  source 1..20: mol_type = other DNA
tttctatatggtgaggagct

SEQ ID NO: 70164 - DNA, 20 bp, synthetic construct
  misc_feature 1..20: note = chemically synthesized
  source 1..20: mol_type = other DNA
agctcacagattttccaagc

SEQ ID NO: 70165 - DNA, 20 bp, synthetic construct
  misc_feature 1..20: note = chemically synthesized
  source 1..20: mol_type = other DNA
ccaagcccttgcttttgcta

SEQ ID NO: 70166 - DNA, 20 bp, synthetic construct
  misc_feature 1..20: note = chemically synthesized
  source 1..20: mol_type = other DNA
cttgcttttgctagacagct

SEQ ID NO: 70167 - DNA, 20 bp, synthetic construct
  misc_feature 1..20: note = chemically synthesized
  source 1..20: mol_type = other DNA
atcctgggttacataatata

SEQ ID NO: 70168 - DNA, 20 bp, synthetic construct
  misc_feature 1..20: note = chemically synthesized
  source 1..20: mol_type = other DNA
ctaacagtcaaccagagagc

SEQ ID NO: 70169 - DNA, 20 bp, synthetic construct
  misc_feature 1..20: note = chemically synthesized
  source 1..20: mol_type = other DNA
agtggaatgcaaagagtaaa

SEQ ID NO: 70170 - DNA, 20 bp, synthetic construct
  misc_feature 1..20: note = chemically synthesized
  source 1..20: mol_type = other DNA
aggcctttggaagcagagac

SEQ ID NO: 70171 - DNA, 20 bp, synthetic construct
  misc_feature 1..20: note = chemically synthesized
  source 1..20: mol_type = other DNA
tctcaattctactatttgct

SEQ ID NO: 70172 - DNA, 20 bp, synthetic construct
  misc_feature 1..20: note = chemically synthesized
  source 1..20: mol_type = other DNA
ttctactatttgctagtagt

SEQ ID NO: 70173 - DNA, 20 bp, synthetic construct
  misc_feature 1..20: note = chemically synthesized
  source 1..20: mol_type = other DNA
atgtttgtgtgtgtgagagt

SEQ ID NO: 70174 - DNA, 20 bp, synthetic construct
  misc_feature 1..20: note = chemically synthesized
  source 1..20: mol_type = other DNA
tatgcttgagcaagttgaga

SEQ ID NO: 70175 - DNA, 20 bp, synthetic construct
  misc_feature 1..20: note = chemically synthesized
  source 1..20: mol_type = other DNA
aaagaatccaagagtattaa

SEQ ID NO: 70176 - DNA, 20 bp, synthetic construct
  misc_feature 1..20: note = chemically synthesized
  source 1..20: mol_type = other DNA
atgggcataaagtacagaac

SEQ ID NO: 70177 - DNA, 20 bp, synthetic construct
  misc_feature 1..20: note = chemically synthesized
  source 1..20: mol_type = other DNA
ctagttttcacctgcagcaa

SEQ ID NO: 70178 - DNA, 20 bp, synthetic construct
  misc_feature 1..20: note = chemically synthesized
  source 1..20: mol_type = other DNA
agtagttagcatttataagt

SEQ ID NO: 70179 - DNA, 20 bp, synthetic construct
  misc_feature 1..20: note = chemically synthesized
  source 1..20: mol_type = other DNA
gcctgttaaaactcctgtaa

SEQ ID NO: 70180 - DNA, 20 bp, synthetic construct
  misc_feature 1..20: note = chemically synthesized
  source 1..20: mol_type = other DNA
cactttggaaggctgaggtg

SEQ ID NO: 70181 - DNA, 20 bp, synthetic construct
  misc_feature 1..20: note = chemically synthesized
  source 1..20: mol_type = other DNA
ttggaaggctgaggtgggca

SEQ ID NO: 70182 - DNA, 20 bp, synthetic construct
  misc_feature 1..20: note = chemically synthesized
  source 1..20: mol_type = other DNA
tcaggatgttgaggtgggag

SEQ ID NO: 70183 - DNA, 20 bp, synthetic construct
  misc_feature 1..20: note = chemically synthesized
  source 1..20: mol_type = other DNA
gaagtgcaagttgcagtgag

SEQ ID NO: 70184 - DNA, 20 bp, synthetic construct
  misc_feature 1..20: note = chemically synthesized
  source 1..20: mol_type = other DNA
tcagtatgacatggaaatga

SEQ ID NO: 70185 - DNA, 20 bp, synthetic construct
  misc_feature 1..20: note = chemically synthesized
  source 1..20: mol_type = other DNA
atgacatggaaatgatcagg

SEQ ID NO: 70186 - DNA, 20 bp, synthetic construct
  misc_feature 1..20: note = chemically synthesized
  source 1..20: mol_type = other DNA
atggaacccaaaatattcta

SEQ ID NO: 70187 - DNA, 20 bp, synthetic construct
  misc_feature 1..20: note = chemically synthesized
  source 1..20: mol_type = other DNA
ataaccctcctcccaggtcc

SEQ ID NO: 70188 - DNA, 20 bp, synthetic construct
  misc_feature 1..20: note = chemically synthesized
  source 1..20: mol_type = other DNA
tttcaatcttgttctgttat

SEQ ID NO: 70189 - DNA, 20 bp, synthetic construct
  misc_feature 1..20: note = chemically synthesized
  source 1..20: mol_type = other DNA
tgttctgttattcctgtttc

SEQ ID NO: 70190 - DNA, 20 bp, synthetic construct
  misc_feature 1..20: note = chemically synthesized
  source 1..20: mol_type = other DNA
gcttagtagaaaaagtacat

SEQ ID NO: 70191 - DNA, 20 bp, synthetic construct
  misc_feature 1..20: note = chemically synthesized
  source 1..20: mol_type = other DNA
atcaatgtctatatgggtcg

SEQ ID NO: 70192 - DNA, 20 bp, synthetic construct
  misc_feature 1..20: note = chemically synthesized
  source 1..20: mol_type = other DNA
tatatgggtcgttgtgtttg

SEQ ID NO: 70193 - DNA, 20 bp, synthetic construct
  misc_feature 1..20: note = chemically synthesized
  source 1..20: mol_type = other DNA
aaaagttatcatcttgaggc

SEQ ID NO: 70194 - DNA, 20 bp, synthetic construct
  misc_feature 1..20: note = chemically synthesized
  source 1..20: mol_type = other DNA
atcaaggaagcgcattgcgg

SEQ ID NO: 70195 - DNA, 20 bp, synthetic construct
  misc_feature 1..20: note = chemically synthesized
  source 1..20: mol_type = other DNA
aagcgcattgcggagcagtt

SEQ ID NO: 70196 - DNA, 20 bp, synthetic construct
  misc_feature 1..20: note = chemically synthesized
  source 1..20: mol_type = other DNA
gcattgcggagcagtttttt

SEQ ID NO: 70197 - DNA, 20 bp, synthetic construct
  misc_feature 1..20: note = chemically synthesized
  source 1..20: mol_type = other DNA
tgcggagcagttttttgttt

SEQ ID NO: 70198 - DNA, 20 bp, synthetic construct
  misc_feature 1..20: note = chemically synthesized
  source 1..20: mol_type = other DNA
tttgtttgtttgtttttgta

SEQ ID NO: 70199 - DNA, 20 bp, synthetic construct
  misc_feature 1..20: note = chemically synthesized
  source 1..20: mol_type = other DNA
ttgtattctgtttcgtgagg

SEQ ID NO: 70200 - DNA, 20 bp, synthetic construct
  misc_feature 1..20: note = chemically synthesized
  source 1..20: mol_type = other DNA
tacagacatgagccaccact

SEQ ID NO: 70201 - DNA, 20 bp, synthetic construct
  misc_feature 1..20: note = chemically synthesized
  source 1..20: mol_type = other DNA
gggtgactgtagggttgaga

SEQ ID NO: 70202 - DNA, 20 bp, synthetic construct
  misc_feature 1..20: note = chemically synthesized
  source 1..20: mol_type = other DNA
ttgagagggagattagaatt

SEQ ID NO: 70203 - DNA, 20 bp, synthetic construct
  misc_feature 1..20: note = chemically synthesized
  source 1..20: mol_type = other DNA
attcaatgttttatgaccaa

SEQ ID NO: 70204 - DNA, 20 bp, synthetic construct
  misc_feature 1..20: note = chemically synthesized
  source 1..20: mol_type = other DNA
caaaaaggcttaaatcaggc

SEQ ID NO: 70205 - DNA, 20 bp, synthetic construct
  misc_feature 1..20: note = chemically synthesized
  source 1..20: mol_type = other DNA
gcagttcaaggccctgtagt

SEQ ID NO: 70206 - DNA, 20 bp, synthetic construct
  misc_feature 1..20: note = chemically synthesized
  source 1..20: mol_type = other DNA
agttctcaaagaaatgagac

SEQ ID NO: 70207 - DNA, 20 bp, synthetic construct
  misc_feature 1..20: note = chemically synthesized
  source 1..20: mol_type = other DNA
aatgagacccttgtttacct

SEQ ID NO: 70208 - DNA, 20 bp, synthetic construct
  misc_feature 1..20: note = chemically synthesized
  source 1..20: mol_type = other DNA
tgtttacctttaagattaga

SEQ ID NO: 70209 - DNA, 20 bp, synthetic construct
  misc_feature 1..20: note = chemically synthesized
  source 1..20: mol_type = other DNA
ttaagattagagaaggcttg

SEQ ID NO: 70210 - DNA, 20 bp, synthetic construct
  misc_feature 1..20: note = chemically synthesized
  source 1..20: mol_type = other DNA
tgaccaagttcagctctcct

SEQ ID NO: 70211 - DNA, 20 bp, synthetic construct
  misc_feature 1..20: note = chemically synthesized
  source 1..20: mol_type = other DNA
atctcagatgtagggaaaag

SEQ ID NO: 70212 - DNA, 20 bp, synthetic construct
  misc_feature 1..20: note = chemically synthesized
  source 1..20: mol_type = other DNA
agcatgagttgtgggtcaga

SEQ ID NO: 70213 - DNA, 20 bp, synthetic construct
  misc_feature 1..20: note = chemically synthesized
  source 1..20: mol_type = other DNA
acatcagaatataacctagg

SEQ ID NO: 70214 - DNA, 20 bp, synthetic construct
  misc_feature 1..20: note = chemically synthesized
  source 1..20: mol_type = other DNA
agtgctcagggctgtgtgtg

SEQ ID NO: 70215 - DNA, 20 bp, synthetic construct
  misc_feature 1..20: note = chemically synthesized
  source 1..20: mol_type = other DNA
ctcagggctgtgtgtgtatg

SEQ ID NO: 70216 - DNA, 20 bp, synthetic construct
  misc_feature 1..20: note = chemically synthesized
  source 1..20: mol_type = other DNA
cactaccctgcaagactctt

SEQ ID NO: 70217 - DNA, 20 bp, synthetic construct
  misc_feature 1..20: note = chemically synthesized
  source 1..20: mol_type = other DNA
ccctgcaagactcttagctg

SEQ ID NO: 70218 - DNA, 20 bp, synthetic construct
  misc_feature 1..20: note = chemically synthesized
  source 1..20: mol_type = other DNA
gctgcttagcttaattgtga

SEQ ID NO: 70219 - DNA, 20 bp, synthetic construct
  misc_feature 1..20: note = chemically synthesized
  source 1..20: mol_type = other DNA
atatataaaattagacaagc

SEQ ID NO: 70220 - DNA, 20 bp, synthetic construct
  misc_feature 1..20: note = chemically synthesized
  source 1..20: mol_type = other DNA
aaaattagacaagccatagt

SEQ ID NO: 70221 - DNA, 20 bp, synthetic construct
  misc_feature 1..20: note = chemically synthesized
  source 1..20: mol_type = other DNA
aaggcaatttaattatcttt

SEQ ID NO: 70222 - DNA, 20 bp, synthetic construct
  misc_feature 1..20: note = chemically synthesized
  source 1..20: mol_type = other DNA
actatgaagcaggtatttat

SEQ ID NO: 70223 - DNA, 20 bp, synthetic construct
  misc_feature 1..20: note = chemically synthesized
  source 1..20: mol_type = other DNA
agttttccaagtgagttaag

SEQ ID NO: 70224 - DNA, 20 bp, synthetic construct
  misc_feature 1..20: note = chemically synthesized
  source 1..20: mol_type = other DNA
gtgatgtcttactaactagc

SEQ ID NO: 70225 - DNA, 20 bp, synthetic construct
  misc_feature 1..20: note = chemically synthesized
  source 1..20: mol_type = other DNA
aaagggctccttaacaactt

SEQ ID NO: 70226 - DNA, 20 bp, synthetic construct
  misc_feature 1..20: note = chemically synthesized
  source 1..20: mol_type = other DNA
ttccctctagtggtcataac

SEQ ID NO: 70227 - DNA, 20 bp, synthetic construct
  misc_feature 1..20: note = chemically synthesized
  source 1..20: mol_type = other DNA
aagagaaacattttgactgt

SEQ ID NO: 70228 - DNA, 20 bp, synthetic construct
  misc_feature 1..20: note = chemically synthesized
  source 1..20: mol_type = other DNA
gaaacattttgactgtagtt

SEQ ID NO: 70229 - DNA, 20 bp, synthetic construct
  misc_feature 1..20: note = chemically synthesized
  source 1..20: mol_type = other DNA
aatcagagaaggaggcatcc

SEQ ID NO: 70230 - DNA, 20 bp, synthetic construct
  misc_feature 1..20: note = chemically synthesized
  source 1..20: mol_type = other DNA
tgctatagcagagtgaacca

SEQ ID NO: 70231 - DNA, 20 bp, synthetic construct
  misc_feature 1..20: note = chemically synthesized
  source 1..20: mol_type = other DNA
gatattttccacaaagagta

SEQ ID NO: 70232 - DNA, 20 bp, synthetic construct
  misc_feature 1..20: note = chemically synthesized
  source 1..20: mol_type = other DNA
gaaaggcaagtcatattaac

SEQ ID NO: 70233 - DNA, 20 bp, synthetic construct
  misc_feature 1..20: note = chemically synthesized
  source 1..20: mol_type = other DNA
aaggacatggccatcagtac

SEQ ID NO: 70234 - DNA, 20 bp, synthetic construct
  misc_feature 1..20: note = chemically synthesized
  source 1..20: mol_type = other DNA
aagaggaagaataatttgtc

SEQ ID NO: 70235 - DNA, 20 bp, synthetic construct
  misc_feature 1..20: note = chemically synthesized
  source 1..20: mol_type = other DNA
gagccaacatagagaggaac

SEQ ID NO: 70236 - DNA, 20 bp, synthetic construct
  misc_feature 1..20: note = chemically synthesized
  source 1..20: mol_type = other DNA
caaagaggcatcaaagatag

SEQ ID NO: 70237 - DNA, 20 bp, synthetic construct
  misc_feature 1..20: note = chemically synthesized
  source 1..20: mol_type = other DNA
atgtttgtaaggatgaaata

SEQ ID NO: 70238 - DNA, 20 bp, synthetic construct
  misc_feature 1..20: note = chemically synthesized
  source 1..20: mol_type = other DNA
tgtattcatggggtacaaca

SEQ ID NO: 70239 - DNA, 20 bp, synthetic construct
  misc_feature 1..20: note = chemically synthesized
  source 1..20: mol_type = other DNA
catatgtgtcaggatgcagt

SEQ ID NO: 70240 - DNA, 20 bp, synthetic construct
  misc_feature 1..20: note = chemically synthesized
  source 1..20: mol_type = other DNA
taatagatttagaaaacatt

SEQ ID NO: 70241 - DNA, 20 bp, synthetic construct
  misc_feature 1..20: note = chemically synthesized
  source 1..20: mol_type = other DNA
tcacttttggaggtcaggaa

SEQ ID NO: 70242 - DNA, 20 bp, synthetic construct
  misc_feature 1..20: note = chemically synthesized
  source 1..20: mol_type = other DNA
atagcagaatgtaggccttg

SEQ ID NO: 70243 - DNA, 20 bp, synthetic construct
  misc_feature 1..20: note = chemically synthesized
  source 1..20: mol_type = other DNA
gacttgtgccattaatttta

SEQ ID NO: 70244 - DNA, 20 bp, synthetic construct
  misc_feature 1..20: note = chemically synthesized
  source 1..20: mol_type = other DNA
taagcagtttcatatgaaac

SEQ ID NO: 70245 - DNA, 20 bp, synthetic construct
  misc_feature 1..20: note = chemically synthesized
  source 1..20: mol_type = other DNA
ccaggagtccaggtgccttc

SEQ ID NO: 70246 - DNA, 20 bp, synthetic construct
  misc_feature 1..20: note = chemically synthesized
  source 1..20: mol_type = other DNA
ttggaaattgttgagaagta

SEQ ID NO: 70247 - DNA, 20 bp, synthetic construct
  misc_feature 1..20: note = chemically synthesized
  source 1..20: mol_type = other DNA
tatattgatttagtgactca

SEQ ID NO: 70248 - DNA, 20 bp, synthetic construct
  misc_feature 1..20: note = chemically synthesized
  source 1..20: mol_type = other DNA
gtgtccggaattggtgggtt

SEQ ID NO: 70249 - DNA, 20 bp, synthetic construct
  misc_feature 1..20: note = chemically synthesized
  source 1..20: mol_type = other DNA
gttcttaaaggctgcgtgtg

SEQ ID NO: 70250 - DNA, 20 bp, synthetic construct
  misc_feature 1..20: note = chemically synthesized
  source 1..20: mol_type = other DNA
tgtgtggagtttgttcgttc

SEQ ID NO: 70251 - DNA, 20 bp, synthetic construct
  misc_feature 1..20: note = chemically synthesized
  source 1..20: mol_type = other DNA
ttctgatgtttggatgtgtt

SEQ ID NO: 70252 - DNA, 20 bp, synthetic construct
  misc_feature 1..20: note = chemically synthesized
  source 1..20: mol_type = other DNA
cccggtgggttcgtggtctc

SEQ ID NO: 70253 - DNA, 20 bp, synthetic construct
  misc_feature 1..20: note = chemically synthesized
  source 1..20: mol_type = other DNA
gacccaaacagtgagcagca

SEQ ID NO: 70254 - DNA, 20 bp, synthetic construct
  misc_feature 1..20: note = chemically synthesized
  source 1..20: mol_type = other DNA
tattgcaaagagcgaaagaa

SEQ ID NO: 70255 - DNA, 20 bp, synthetic construct
  misc_feature 1..20: note = chemically synthesized
  source 1..20: mol_type = other DNA
tgccactgctggctcgggca

SEQ ID NO: 70256 - DNA, 20 bp, synthetic construct
  misc_feature 1..20: note = chemically synthesized
  source 1..20: mol_type = other DNA
atctggccccacccacatcc

SEQ ID NO: 70257 - DNA, 20 bp, synthetic construct
  misc_feature 1..20: note = chemically synthesized
  source 1..20: mol_type = other DNA
ctgattggtagagcccagtg

SEQ ID NO: 70258 - DNA, 20 bp, synthetic construct
  misc_feature 1..20: note = chemically synthesized
  source 1..20: mol_type = other DNA
agtggtctgttttgacaggg

SEQ ID NO: 70259 - DNA, 20 bp, synthetic construct
  misc_feature 1..20: note = chemically synthesized
  source 1..20: mol_type = other DNA
caaaggttctccacgtcccc

SEQ ID NO: 70260 - DNA, 20 bp, synthetic construct
  misc_feature 1..20: note = chemically synthesized
  source 1..20: mol_type = other DNA
cagagtagctagatacagag

SEQ ID NO: 70261 - DNA, 20 bp, synthetic construct
  misc_feature 1..20: note = chemically synthesized
  source 1..20: mol_type = other DNA
accctgagctagacacaggg

SEQ ID NO: 70262 - DNA, 20 bp, synthetic construct
  misc_feature 1..20: note = chemically synthesized
  source 1..20: mol_type = other DNA
tagacacagggtgctgattg

SEQ ID NO: 70263 - DNA, 20 bp, synthetic construct
  misc_feature 1..20: note = chemically synthesized
  source 1..20: mol_type = other DNA
cagagtagctagatacagag

SEQ ID NO: 70264 - DNA, 20 bp, synthetic construct
  misc_feature 1..20: note = chemically synthesized
  source 1..20: mol_type = other DNA
accctgagctagacacaggg

SEQ ID NO: 70265 - DNA, 20 bp, synthetic construct
  misc_feature 1..20: note = chemically synthesized
  source 1..20: mol_type = other DNA
tagacacagggtgctgattg

SEQ ID NO: 70266 - DNA, 20 bp, synthetic construct
  misc_feature 1..20: note = chemically synthesized
  source 1..20: mol_type = other DNA
accttgagctagatacagac

SEQ ID NO: 70267 - DNA, 20 bp, synthetic construct
  misc_feature 1..20: note = chemically synthesized
  source 1..20: mol_type = other DNA
accagagtagctagatagag

SEQ ID NO: 70268 - DNA, 20 bp, synthetic construct
  misc_feature 1..20: note = chemically synthesized
  source 1..20: mol_type = other DNA
accctgagctagacacaggg

SEQ ID NO: 70269 - DNA, 20 bp, synthetic construct
  misc_feature 1..20: note = chemically synthesized
  source 1..20: mol_type = other DNA
tagacacagggtgctgattg

SEQ ID NO: 70270 - DNA, 20 bp, synthetic construct
  misc_feature 1..20: note = chemically synthesized
  source 1..20: mol_type = other DNA
ccagcaaactcaggagccta

SEQ ID NO: 70271 - DNA, 20 bp, synthetic construct
  misc_feature 1..20: note = chemically synthesized
  source 1..20: mol_type = other DNA
aattagcattatcccacacc

SEQ ID NO: 70272 - DNA, 20 bp, synthetic construct
  misc_feature 1..20: note = chemically synthesized
  source 1..20: mol_type = other DNA
aatcaaaggcatactgaacc

SEQ ID NO: 70273 - DNA, 20 bp, synthetic construct
  misc_feature 1..20: note = chemically synthesized
  source 1..20: mol_type = other DNA
atactgaaccatatgtttta

SEQ ID NO: 70274 - DNA, 20 bp, synthetic construct
  misc_feature 1..20: note = chemically synthesized
  source 1..20: mol_type = other DNA
gctgtaatacttcatggaat

SEQ ID NO: 70275 - DNA, 20 bp, synthetic construct
  misc_feature 1..20: note = chemically synthesized
  source 1..20: mol_type = other DNA
cttatttcagagcaaataac

SEQ ID NO: 70276 - DNA, 20 bp, synthetic construct
  misc_feature 1..20: note = chemically synthesized
  source 1..20: mol_type = other DNA
caaataacttaggctttaaa

SEQ ID NO: 70277 - DNA, 20 bp, synthetic construct
  misc_feature 1..20: note = chemically synthesized
  source 1..20: mol_type = other DNA
cctcatgaattattattgta

SEQ ID NO: 70278 - DNA, 20 bp, synthetic construct
  misc_feature 1..20: note = chemically synthesized
  source 1..20: mol_type = other DNA
attactttagggccctgtgc

SEQ ID NO: 70279 - DNA, 20 bp, synthetic construct
  misc_feature 1..20: note = chemically synthesized
  source 1..20: mol_type = other DNA
acttttatactatcctagtg

SEQ ID NO: 70280 - DNA, 20 bp, synthetic construct
  misc_feature 1..20: note = chemically synthesized
  source 1..20: mol_type = other DNA
agtgtgtagattgaggatgt

SEQ ID NO: 70281 - DNA, 20 bp, synthetic construct
  misc_feature 1..20: note = chemically synthesized
  source 1..20: mol_type = other DNA
aatagatgagatgacattgt

SEQ ID NO: 70282 - DNA, 20 bp, synthetic construct
  misc_feature 1..20: note = chemically synthesized
  source 1..20: mol_type = other DNA
tatgtaccaattgatggaca

SEQ ID NO: 70283 - DNA, 20 bp, synthetic construct
  misc_feature 1..20: note = chemically synthesized
  source 1..20: mol_type = other DNA
agttagtctggaagtattta

SEQ ID NO: 70284 - DNA, 20 bp, synthetic construct
  misc_feature 1..20: note = chemically synthesized
  source 1..20: mol_type = other DNA
ttagaaggctttggagagga

SEQ ID NO: 70285 - DNA, 20 bp, synthetic construct
  misc_feature 1..20: note = chemically synthesized
  source 1..20: mol_type = other DNA
gtaatgcaacatttgagact

SEQ ID NO: 70286 - DNA, 20 bp, synthetic construct
  misc_feature 1..20: note = chemically synthesized
  source 1..20: mol_type = other DNA
taagtttgtgggaaacttag

SEQ ID NO: 70287 - DNA, 20 bp, synthetic construct
  misc_feature 1..20: note = chemically synthesized
  source 1..20: mol_type = other DNA
tgtgggaaacttagaactgt

SEQ ID NO: 70288 - DNA, 20 bp, synthetic construct
  misc_feature 1..20: note = chemically synthesized
  source 1..20: mol_type = other DNA
taactatttaaaatgctatg

SEQ ID NO: 70289 - DNA, 20 bp, synthetic construct
  misc_feature 1..20: note = chemically synthesized
  source 1..20: mol_type = other DNA
aaaatgctatgaaatgattt

SEQ ID NO: 70290 - DNA, 20 bp, synthetic construct
  misc_feature 1..20: note = chemically synthesized
  source 1..20: mol_type = other DNA
tgattttgcagatttttctg

SEQ ID NO: 70291 - DNA, 20 bp, synthetic construct
  misc_feature 1..20: note = chemically synthesized
  source 1..20: mol_type = other DNA
tctgttcctttgttgtataa

SEQ ID NO: 70292 - DNA, 20 bp, synthetic construct
  misc_feature 1..20: note = chemically synthesized
  source 1..20: mol_type = other DNA
atctctttgtaacttaccac

SEQ ID NO: 70293 - DNA, 20 bp, synthetic construct
  misc_feature 1..20: note = chemically synthesized
  source 1..20: mol_type = other DNA
cttattttctttatgtaaac

SEQ ID NO: 70294 - DNA, 20 bp, synthetic construct
  misc_feature 1..20: note = chemically synthesized
  source 1..20: mol_type = other DNA
tatctcttctcattttctat

SEQ ID NO: 70295 - DNA, 20 bp, synthetic construct
  misc_feature 1..20: note = chemically synthesized
  source 1..20: mol_type = other DNA
ctcattttctatcaaggatt

SEQ ID NO: 70296 - DNA, 20 bp, synthetic construct
  misc_feature 1..20: note = chemically synthesized
  source 1..20: mol_type = other DNA
aatgcattttaacactccaa

SEQ ID NO: 70297 - DNA, 20 bp, synthetic construct
  misc_feature 1..20: note = chemically synthesized
  source 1..20: mol_type = other DNA
ttttaacactccaagataga

SEQ ID NO: 70298 - DNA, 20 bp, synthetic construct
  misc_feature 1..20: note = chemically synthesized
  source 1..20: mol_type = other DNA
cattgctgtctaaatgtatt

SEQ ID NO: 70299 - DNA, 20 bp, synthetic construct
  misc_feature 1..20: note = chemically synthesized
  source 1..20: mol_type = other DNA
catttcaacctacacaaatt

SEQ ID NO: 70300 - DNA, 20 bp, synthetic construct
  misc_feature 1..20: note = chemically synthesized
  source 1..20: mol_type = other DNA
tatccctaattaggctacac

SEQ ID NO: 70301 - DNA, 20 bp, synthetic construct
  misc_feature 1..20: note = chemically synthesized
  source 1..20: mol_type = other DNA
cagctgtttaaattaggaat

SEQ ID NO: 70302 - DNA, 20 bp, synthetic construct
  misc_feature 1..20: note = chemically synthesized
  source 1..20: mol_type = other DNA
ccagataattgtatatctga

SEQ ID NO: 70303 - DNA, 20 bp, synthetic construct
  misc_feature 1..20: note = chemically synthesized
  source 1..20: mol_type = other DNA
cattgccaatgcatgcagaa

SEQ ID NO: 70304 - DNA, 20 bp, synthetic construct
  misc_feature 1..20: note = chemically synthesized
  source 1..20: mol_type = other DNA
gcatgcagaaagaagcttaa

SEQ ID NO: 70305 - DNA, 20 bp, synthetic construct
  misc_feature 1..20: note = chemically synthesized
  source 1..20: mol_type = other DNA
caacagacagaaatgtaaag

SEQ ID NO: 70306 - DNA, 20 bp, synthetic construct
  misc_feature 1..20: note = chemically synthesized
  source 1..20: mol_type = other DNA
tgtctcatttataccacata

SEQ ID NO: 70307 - DNA, 20 bp, synthetic construct
  misc_feature 1..20: note = chemically synthesized
  source 1..20: mol_type = other DNA
tattgtgtttctatggccga

SEQ ID NO: 70308 - DNA, 20 bp, synthetic construct
  misc_feature 1..20: note = chemically synthesized
  source 1..20: mol_type = other DNA
tcagcttaggttctacattg

SEQ ID NO: 70309 - DNA, 20 bp, synthetic construct
  misc_feature 1..20: note = chemically synthesized
  source 1..20: mol_type = other DNA
cactagcaacttgaatacat

SEQ ID NO: 70310 - DNA, 20 bp, synthetic construct
  misc_feature 1..20: note = chemically synthesized
  source 1..20: mol_type = other DNA
atactgaactcatgtgagga

SEQ ID NO: 70311 - DNA, 20 bp, synthetic construct
  misc_feature 1..20: note = chemically synthesized
  source 1..20: mol_type = other DNA
tgaggatccagtttctatat

SEQ ID NO: 70312 - DNA, 20 bp, synthetic construct
  misc_feature 1..20: note = chemically synthesized
  source 1..20: mol_type = other DNA
tatagagtaaaatactaact

SEQ ID NO: 70313 - DNA, 20 bp, synthetic construct
  misc_feature 1..20: note = chemically synthesized
  source 1..20: mol_type = other DNA
actaacttcaggtttagtac

SEQ ID NO: 70314 - DNA, 20 bp, synthetic construct
  misc_feature 1..20: note = chemically synthesized
  source 1..20: mol_type = other DNA
tccatattataatttacatt

SEQ ID NO: 70315 - DNA, 20 bp, synthetic construct
  misc_feature 1..20: note = chemically synthesized
  source 1..20: mol_type = other DNA
ataaagggaacggcgtggga

SEQ ID NO: 70316 - DNA, 20 bp, synthetic construct
  misc_feature 1..20: note = chemically synthesized
  source 1..20: mol_type = other DNA
atataggcatgttaatatac

SEQ ID NO: 70317 - DNA, 20 bp, synthetic construct
  misc_feature 1..20: note = chemically synthesized
  source 1..20: mol_type = other DNA
atctcaggaatggccatgtt

SEQ ID NO: 70318 - DNA, 20 bp, synthetic construct
  misc_feature 1..20: note = chemically synthesized
  source 1..20: mol_type = other DNA
atcattaggaggccagggtg

SEQ ID NO: 70319 - DNA, 20 bp, synthetic construct
  misc_feature 1..20: note = chemically synthesized
  source 1..20: mol_type = other DNA
ttaggaggccagggtgggag

SEQ ID NO: 70320 - DNA, 20 bp, synthetic construct
  misc_feature 1..20: note = chemically synthesized
  source 1..20: mol_type = other DNA
gtactcaaaaagctgaggaa

SEQ ID NO: 70321 - DNA, 20 bp, synthetic construct
  misc_feature 1..20: note = chemically synthesized
  source 1..20: mol_type = other DNA
tcaaaaagctgaggaagaag

SEQ ID NO: 70322 - DNA, 20 bp, synthetic construct
  misc_feature 1..20: note = chemically synthesized
  source 1..20: mol_type = other DNA
ggaagaaggattgcttgagc

SEQ ID NO: 70323 - DNA, 20 bp, synthetic construct
  misc_feature 1..20: note = chemically synthesized
  source 1..20: mol_type = other DNA
ataaataaataaataaataa

SEQ ID NO: 70324 - DNA, 20 bp, synthetic construct
  misc_feature 1..20: note = chemically synthesized
  source 1..20: mol_type = other DNA
aggactgcattaataaattt

SEQ ID NO: 70325 - DNA, 20 bp, synthetic construct
  misc_feature 1..20: note = chemically synthesized
  source 1..20: mol_type = other DNA
tcctcagagcagatctctaa

SEQ ID NO: 70326 - DNA, 20 bp, synthetic construct
  misc_feature 1..20: note = chemically synthesized
  source 1..20: mol_type = other DNA
agagagcttatagacacaac

SEQ ID NO: 70327 - DNA, 20 bp, synthetic construct
  misc_feature 1..20: note = chemically synthesized
  source 1..20: mol_type = other DNA
gagacttgtctggaagctgc

SEQ ID NO: 70328 - DNA, 20 bp, synthetic construct
  misc_feature 1..20: note = chemically synthesized
  source 1..20: mol_type = other DNA
gctgcacttgtttgaaagga

SEQ ID NO: 70329 - DNA, 20 bp, synthetic construct
  misc_feature 1..20: note = chemically synthesized
  source 1..20: mol_type = other DNA
ggatgctgacttaataattg

SEQ ID NO: 70330 - DNA, 20 bp, synthetic construct
  misc_feature 1..20: note = chemically synthesized
  source 1..20: mol_type = other DNA
atacatttacttaagaaaat

SEQ ID NO: 70331 - DNA, 20 bp, synthetic construct
  misc_feature 1..20: note = chemically synthesized
  source 1..20: mol_type = other DNA
ttttaaaatttatccttttt

SEQ ID NO: 70332 - DNA, 20 bp, synthetic construct
  misc_feature 1..20: note = chemically synthesized
  source 1..20: mol_type = other DNA
gatttttgactattgataca

SEQ ID NO: 70333 - DNA, 20 bp, synthetic construct
  misc_feature 1..20: note = chemically synthesized
  source 1..20: mol_type = other DNA
tcttatttataattagatac

SEQ ID NO: 70334 - DNA, 20 bp, synthetic construct
  misc_feature 1..20: note = chemically synthesized
  source 1..20: mol_type = other DNA
ttattttcagcacatcgccc

SEQ ID NO: 70335 - DNA, 20 bp, synthetic construct
  misc_feature 1..20: note = chemically synthesized
  source 1..20: mol_type = other DNA
gcctgaaaattttaataccg

SEQ ID NO: 70336 - DNA, 20 bp, synthetic construct
  misc_feature 1..20: note = chemically synthesized
  source 1..20: mol_type = other DNA
ctttcagtggtcaatagaga

SEQ ID NO: 70337 - DNA, 20 bp, synthetic construct
  misc_feature 1..20: note = chemically synthesized
  source 1..20: mol_type = other DNA
agagatgcagctttcctaaa

SEQ ID NO: 70338 - DNA, 20 bp, synthetic construct
  misc_feature 1..20: note = chemically synthesized
  source 1..20: mol_type = other DNA
caacaaaggcaaccagaaaa

SEQ ID NO: 70339 - DNA, 20 bp, synthetic construct
  misc_feature 1..20: note = chemically synthesized
  source 1..20: mol_type = other DNA
tccttcaggagtagtcattt

SEQ ID NO: 70340 - DNA, 20 bp, synthetic construct
  misc_feature 1..20: note = chemically synthesized
  source 1..20: mol_type = other DNA
tttggagaaatactgcatta

SEQ ID NO: 70341 - DNA, 20 bp, synthetic construct
  misc_feature 1..20: note = chemically synthesized
  source 1..20: mol_type = other DNA
gaaatactgcattatttagc

SEQ ID NO: 70342 - DNA, 20 bp, synthetic construct
  misc_feature 1..20: note = chemically synthesized
  source 1..20: mol_type = other DNA
tccagatgtaaaataaatat

SEQ ID NO: 70343 - DNA, 20 bp, synthetic construct
  misc_feature 1..20: note = chemically synthesized
  source 1..20: mol_type = other DNA
gagaggaatgaatgcaactt

SEQ ID NO: 70344 - DNA, 20 bp, synthetic construct
  misc_feature 1..20: note = chemically synthesized
  source 1..20: mol_type = other DNA
gaatgaatgcaacttttgag

SEQ ID NO: 70345 - DNA, 20 bp, synthetic construct
  misc_feature 1..20: note = chemically synthesized
  source 1..20: mol_type = other DNA
aagacttacaaacactttga

SEQ ID NO: 70346 - DNA, 20 bp, synthetic construct
  misc_feature 1..20: note = chemically synthesized
  source 1..20: mol_type = other DNA
aaaatataacattacctttg

SEQ ID NO: 70347 - DNA, 20 bp, synthetic construct
  misc_feature 1..20: note = chemically synthesized
  source 1..20: mol_type = other DNA
tttcatgaagtgaaaaagtc

SEQ ID NO: 70348 - DNA, 20 bp, synthetic construct
  misc_feature 1..20: note = chemically synthesized
  source 1..20: mol_type = other DNA
gaaagaagaaaaagtattaa

SEQ ID NO: 70349 - DNA, 20 bp, synthetic construct
  misc_feature 1..20: note = chemically synthesized
  source 1..20: mol_type = other DNA
aggaaaacggggctgggata

SEQ ID NO: 70350 - DNA, 20 bp, synthetic construct
  misc_feature 1..20: note = chemically synthesized
  source 1..20: mol_type = other DNA
cttccacgagatgataagaa

SEQ ID NO: 70351 - DNA, 20 bp, synthetic construct
  misc_feature 1..20: note = chemically synthesized
  source 1..20: mol_type = other DNA
agggaaattacatttcatga

SEQ ID NO: 70352 - DNA, 20 bp, synthetic construct
  misc_feature 1..20: note = chemically synthesized
  source 1..20: mol_type = other DNA
ttcctaaagttctagatatt

SEQ ID NO: 70353 - DNA, 20 bp, synthetic construct
  misc_feature 1..20: note = chemically synthesized
  source 1..20: mol_type = other DNA
tatttgctgtttagcctcac

SEQ ID NO: 70354 - DNA, 20 bp, synthetic construct
  misc_feature 1..20: note = chemically synthesized
  source 1..20: mol_type = other DNA
tgctgtttagcctcacacaa

SEQ ID NO: 70355 - DNA, 20 bp, synthetic construct
  misc_feature 1..20: note = chemically synthesized
  source 1..20: mol_type = other DNA
gcaagatccttttcagagta

SEQ ID NO: 70356 - DNA, 20 bp, synthetic construct
  misc_feature 1..20: note = chemically synthesized
  source 1..20: mol_type = other DNA
gatgaactgtatttgaccca

SEQ ID NO: 70357 - DNA, 20 bp, synthetic construct
  misc_feature 1..20: note = chemically synthesized
  source 1..20: mol_type = other DNA
gaaatcatagttactcttct

SEQ ID NO: 70358 - DNA, 20 bp, synthetic construct
  misc_feature 1..20: note = chemically synthesized
  source 1..20: mol_type = other DNA
cttttggattgttatatctc

SEQ ID NO: 70359 - DNA, 20 bp, synthetic construct
  misc_feature 1..20: note = chemically synthesized
  source 1..20: mol_type = other DNA
tataaaaatttctcgctcac

SEQ ID NO: 70360 - DNA, 20 bp, synthetic construct
  misc_feature 1..20: note = chemically synthesized
  source 1..20: mol_type = other DNA
gcccagaaatcctagagatc

SEQ ID NO: 70361 - DNA, 20 bp, synthetic construct
  misc_feature 1..20: note = chemically synthesized
  source 1..20: mol_type = other DNA
ctgcccagaaaataggcgaa

SEQ ID NO: 70362 - DNA, 20 bp, synthetic construct
  misc_feature 1..20: note = chemically synthesized
  source 1..20: mol_type = other DNA
ggcgaataatgcttctttga

SEQ ID NO: 70363 - DNA, 20 bp, synthetic construct
  misc_feature 1..20: note = chemically synthesized
  source 1..20: mol_type = other DNA
tggtcttgatgctataaatg

SEQ ID NO: 70364 - DNA, 20 bp, synthetic construct
  misc_feature 1..20: note = chemically synthesized
  source 1..20: mol_type = other DNA
taatggggaccacatgaggt

SEQ ID NO: 70365 - DNA, 20 bp, synthetic construct
  misc_feature 1..20: note = chemically synthesized
  source 1..20: mol_type = other DNA
atatgggagacacaagtgtt

SEQ ID NO: 70366 - DNA, 20 bp, synthetic construct
  misc_feature 1..20: note = chemically synthesized
  source 1..20: mol_type = other DNA
gagacacaagtgttgagaga

SEQ ID NO: 70367 - DNA, 20 bp, synthetic construct
  misc_feature 1..20: note = chemically synthesized
  source 1..20: mol_type = other DNA
cgcaatgcccatcactgtct

SEQ ID NO: 70368 - DNA, 20 bp, synthetic construct
  misc_feature 1..20: note = chemically synthesized
  source 1..20: mol_type = other DNA
gattagtatataagaaaaga

SEQ ID NO: 70369 - DNA, 20 bp, synthetic construct
  misc_feature 1..20: note = chemically synthesized
  source 1..20: mol_type = other DNA
aagtctgaataattggatat

SEQ ID NO: 70370 - DNA, 20 bp, synthetic construct
  misc_feature 1..20: note = chemically synthesized
  source 1..20: mol_type = other DNA
taaacgtgatatcagcacag

SEQ ID NO: 70371 - DNA, 20 bp, synthetic construct
  misc_feature 1..20: note = chemically synthesized
  source 1..20: mol_type = other DNA
taggccaaaacaagcaagat

SEQ ID NO: 70372 - DNA, 20 bp, synthetic construct
  misc_feature 1..20: note = chemically synthesized
  source 1..20: mol_type = other DNA
acaatggccagtgaatgaat

SEQ ID NO: 70373 - DNA, 20 bp, synthetic construct
  misc_feature 1..20: note = chemically synthesized
  source 1..20: mol_type = other DNA
cactgttgttataccacatg

SEQ ID NO: 70374 - DNA, 20 bp, synthetic construct
  misc_feature 1..20: note = chemically synthesized
  source 1..20: mol_type = other DNA
ggggtgatgacctccaaaga

SEQ ID NO: 70375 - DNA, 20 bp, synthetic construct
  misc_feature 1..20: note = chemically synthesized
  source 1..20: mol_type = other DNA
cctcaaaacttaaatatttt

SEQ ID NO: 70376 - DNA, 20 bp, synthetic construct
  misc_feature 1..20: note = chemically synthesized
  source 1..20: mol_type = other DNA
aactaatgggacagctgtat

SEQ ID NO: 70377 - DNA, 20 bp, synthetic construct
  misc_feature 1..20: note = chemically synthesized
  source 1..20: mol_type = other DNA
ttaggattaaccactgagga

SEQ ID NO: 70378 - DNA, 20 bp, synthetic construct
  misc_feature 1..20: note = chemically synthesized
  source 1..20: mol_type = other DNA
gactgtgaggctgcagggag

SEQ ID NO: 70379 - DNA, 20 bp, synthetic construct
  misc_feature 1..20: note = chemically synthesized
  source 1..20: mol_type = other DNA
aagaaaataactcatctatt

SEQ ID NO: 70380 - DNA, 20 bp, synthetic construct
  misc_feature 1..20: note = chemically synthesized
  source 1..20: mol_type = other DNA
ttccctatgctgcaaaaagt

SEQ ID NO: 70381 - DNA, 20 bp, synthetic construct
  misc_feature 1..20: note = chemically synthesized
  source 1..20: mol_type = other DNA
agcctaatacttgttagagt

SEQ ID NO: 70382 - DNA, 20 bp, synthetic construct
  misc_feature 1..20: note = chemically synthesized
  source 1..20: mol_type = other DNA
ataattacacttttacaaag

SEQ ID NO: 70383 - DNA, 20 bp, synthetic construct
  misc_feature 1..20: note = chemically synthesized
  source 1..20: mol_type = other DNA
tgataccaagaaattttgta

SEQ ID NO: 70384 - DNA, 20 bp, synthetic construct
  misc_feature 1..20: note = chemically synthesized
  source 1..20: mol_type = other DNA
aaagagaactacaagggaaa

SEQ ID NO: 70385 - DNA, 20 bp, synthetic construct
  misc_feature 1..20: note = chemically synthesized
  source 1..20: mol_type = other DNA
actcagtttctcccaaattc

SEQ ID NO: 70386 - DNA, 20 bp, synthetic construct
  misc_feature 1..20: note = chemically synthesized
  source 1..20: mol_type = other DNA
ctatagaaacaataataatt

SEQ ID NO: 70387 - DNA, 20 bp, synthetic construct
  misc_feature 1..20: note = chemically synthesized
  source 1..20: mol_type = other DNA
ccactgaattatgacctgca

SEQ ID NO: 70388 - DNA, 20 bp, synthetic construct
  misc_feature 1..20: note = chemically synthesized
  source 1..20: mol_type = other DNA
ccaatgttgccttataagag

SEQ ID NO: 70389 - DNA, 20 bp, synthetic construct
  misc_feature 1..20: note = chemically synthesized
  source 1..20: mol_type = other DNA
gatggaggaagccggaggag

SEQ ID NO: 70390 - DNA, 20 bp, synthetic construct
  misc_feature 1..20: note = chemically synthesized
  source 1..20: mol_type = other DNA
tgattattcttaaactatag

SEQ ID NO: 70391 - DNA, 20 bp, synthetic construct
  misc_feature 1..20: note = chemically synthesized
  source 1..20: mol_type = other DNA
tcgtgttttcaaaacctgag

SEQ ID NO: 70392 - DNA, 20 bp, synthetic construct
  misc_feature 1..20: note = chemically synthesized
  source 1..20: mol_type = other DNA
gtttgggacatgcggatgca

SEQ ID NO: 70393 - DNA, 20 bp, synthetic construct
  misc_feature 1..20: note = chemically synthesized
  source 1..20: mol_type = other DNA
ccagggagaatagttgccct

SEQ ID NO: 70394 - DNA, 20 bp, synthetic construct
  misc_feature 1..20: note = chemically synthesized
  source 1..20: mol_type = other DNA
cccctttctgagtgcctttg

SEQ ID NO: 70395 - DNA, 20 bp, synthetic construct
  misc_feature 1..20: note = chemically synthesized
  source 1..20: mol_type = other DNA
gcaactatcccagagtcctc

SEQ ID NO: 70396 - DNA, 20 bp, synthetic construct
  misc_feature 1..20: note = chemically synthesized
  source 1..20: mol_type = other DNA
ggtaacatagatccatcatc

SEQ ID NO: 70397 - DNA, 20 bp, synthetic construct
  misc_feature 1..20: note = chemically synthesized
  source 1..20: mol_type = other DNA
ttcaacttgccatgctgaca

SEQ ID NO: 70398 - DNA, 20 bp, synthetic construct
  misc_feature 1..20: note = chemically synthesized
  source 1..20: mol_type = other DNA
cgtgttaaaaaagaacagtc

SEQ ID NO: 70399 - DNA, 20 bp, synthetic construct
  misc_feature 1..20: note = chemically synthesized
  source 1..20: mol_type = other DNA
agacaaaatatctgaaaaat

SEQ ID NO: 70400 - DNA, 20 bp, synthetic construct
  misc_feature 1..20: note = chemically synthesized
  source 1..20: mol_type = other DNA
ctgaggtggatcacgaggtc

SEQ ID NO: 70401 - DNA, 20 bp, synthetic construct
  misc_feature 1..20: note = chemically synthesized
  source 1..20: mol_type = other DNA
tcgggaggctgaggcaggag

SEQ ID NO: 70402 - DNA, 20 bp, synthetic construct
  misc_feature 1..20: note = chemically synthesized
  source 1..20: mol_type = other DNA
gcagaggtcgtcgcagtgag

SEQ ID NO: 70403 - DNA, 20 bp, synthetic construct
  misc_feature 1..20: note = chemically synthesized
  source 1..20: mol_type = other DNA
gtctcaaaaaaaaaaaaaaa

SEQ ID NO: 70404 - DNA, 20 bp, synthetic construct
  misc_feature 1..20: note = chemically synthesized
  source 1..20: mol_type = other DNA
tacaaaaaaacaatgaaaag

SEQ ID NO: 70405 - DNA, 20 bp, synthetic construct
  misc_feature 1..20: note = chemically synthesized
  source 1..20: mol_type = other DNA
aattaatataaacatagagg

SEQ ID NO: 70406 - DNA, 20 bp, synthetic construct
  misc_feature 1..20: note = chemically synthesized
  source 1..20: mol_type = other DNA
aatataaacatagaggtgtt

SEQ ID NO: 70407 - DNA, 20 bp, synthetic construct
  misc_feature 1..20: note = chemically synthesized
  source 1..20: mol_type = other DNA
tgtcataaaggaattcaaac

SEQ ID NO: 70408 - DNA, 20 bp, synthetic construct
  misc_feature 1..20: note = chemically synthesized
  source 1..20: mol_type = other DNA
catcaaatggaaatggttaa

SEQ ID NO: 70409 - DNA, 20 bp, synthetic construct
  misc_feature 1..20: note = chemically synthesized
  source 1..20: mol_type = other DNA
ttgcttcccgtatttgaatc

SEQ ID NO: 70410 - DNA, 20 bp, synthetic construct
  misc_feature 1..20: note = chemically synthesized
  source 1..20: mol_type = other DNA
ttggcttttcttacctgagc

SEQ ID NO: 70411 - DNA, 20 bp, synthetic construct
  misc_feature 1..20: note = chemically synthesized
  source 1..20: mol_type = other DNA
ctgagccacagttttctctt

SEQ ID NO: 70412 - DNA, 20 bp, synthetic construct
  misc_feature 1..20: note = chemically synthesized
  source 1..20: mol_type = other DNA
ctgagcatgacctgaatatt

SEQ ID NO: 70413 - DNA, 20 bp, synthetic construct
  misc_feature 1..20: note = chemically synthesized
  source 1..20: mol_type = other DNA
accaccaaaccttttcgtct

SEQ ID NO: 70414 - DNA, 20 bp, synthetic construct
  misc_feature 1..20: note = chemically synthesized
  source 1..20: mol_type = other DNA
agacatttatttattctttc

SEQ ID NO: 70415 - DNA, 20 bp, synthetic construct
  misc_feature 1..20: note = chemically synthesized
  source 1..20: mol_type = other DNA
gctatctcattcatatatat

SEQ ID NO: 70416 - DNA, 20 bp, synthetic construct
  misc_feature 1..20: note = chemically synthesized
  source 1..20: mol_type = other DNA
accaatatcaacagtccttt

SEQ ID NO: 70417 - DNA, 20 bp, synthetic construct
  misc_feature 1..20: note = chemically synthesized
  source 1..20: mol_type = other DNA
tatcatgtaattattcctaa

SEQ ID NO: 70418 - DNA, 20 bp, synthetic construct
  misc_feature 1..20: note = chemically synthesized
  source 1..20: mol_type = other DNA
attctgaaatctcttttttc

SEQ ID NO: 70419 - DNA, 20 bp, synthetic construct
  misc_feature 1..20: note = chemically synthesized
  source 1..20: mol_type = other DNA
ttttttcattggattatgtg

SEQ ID NO: 70420 - DNA, 20 bp, synthetic construct
  misc_feature 1..20: note = chemically synthesized
  source 1..20: mol_type = other DNA
aaacatgtcaaattcagtct

SEQ ID NO: 70421 - DNA, 20 bp, synthetic construct
  misc_feature 1..20: note = chemically synthesized
  source 1..20: mol_type = other DNA
aagttactctatttactatc

SEQ ID NO: 70422 - DNA, 20 bp, synthetic construct
  misc_feature 1..20: note = chemically synthesized
  source 1..20: mol_type = other DNA
atatcctctcatatattcag

SEQ ID NO: 70423 - DNA, 20 bp, synthetic construct
  misc_feature 1..20: note = chemically synthesized
  source 1..20: mol_type = other DNA
tcaggtaagattttgccaaa

SEQ ID NO: 70424 - DNA, 20 bp, synthetic construct
  misc_feature 1..20: note = chemically synthesized
  source 1..20: mol_type = other DNA
agaattcattttgcagaacc

SEQ ID NO: 70425 - DNA, 20 bp, synthetic construct
  misc_feature 1..20: note = chemically synthesized
  source 1..20: mol_type = other DNA
tagacttgtagctaagaagt

SEQ ID NO: 70426 - DNA, 20 bp, synthetic construct
  misc_feature 1..20: note = chemically synthesized
  source 1..20: mol_type = other DNA
cacagtaaaacaaaacttct

SEQ ID NO: 70427 - DNA, 20 bp, synthetic construct
  misc_feature 1..20: note = chemically synthesized
  source 1..20: mol_type = other DNA
ttttaagtgagtgacatttt

SEQ ID NO: 70428 - DNA, 20 bp, synthetic construct
  misc_feature 1..20: note = chemically synthesized
  source 1..20: mol_type = other DNA
gacattttcagtgcttaaaa

SEQ ID NO: 70429 - DNA, 20 bp, synthetic construct
  misc_feature 1..20: note = chemically synthesized
  source 1..20: mol_type = other DNA
gctattcttgtgatcaagcc

SEQ ID NO: 70430 - DNA, 20 bp, synthetic construct
  misc_feature 1..20: note = chemically synthesized
  source 1..20: mol_type = other DNA
tagacctttacaacctctac

SEQ ID NO: 70431 - DNA, 20 bp, synthetic construct
  misc_feature 1..20: note = chemically synthesized
  source 1..20: mol_type = other DNA
aacctctacatctgtttgta

SEQ ID NO: 70432 - DNA, 20 bp, synthetic construct
  misc_feature 1..20: note = chemically synthesized
  source 1..20: mol_type = other DNA
caatgctatctccttttctt

SEQ ID NO: 70433 - DNA, 20 bp, synthetic construct
  misc_feature 1..20: note = chemically synthesized
  source 1..20: mol_type = other DNA
atccataacaacatcaagaa

SEQ ID NO: 70434 - DNA, 20 bp, synthetic construct
  misc_feature 1..20: note = chemically synthesized
  source 1..20: mol_type = other DNA
catcaagaagaaagattttt

SEQ ID NO: 70435 - DNA, 20 bp, synthetic construct
  misc_feature 1..20: note = chemically synthesized
  source 1..20: mol_type = other DNA
agggagtgcagtggtgagat

SEQ ID NO: 70436 - DNA, 20 bp, synthetic construct
  misc_feature 1..20: note = chemically synthesized
  source 1..20: mol_type = other DNA
gatcatagtttactgcagcc

SEQ ID NO: 70437 - DNA, 20 bp, synthetic construct
  misc_feature 1..20: note = chemically synthesized
  source 1..20: mol_type = other DNA
tttactgcagcctcaagctt

SEQ ID NO: 70438 - DNA, 20 bp, synthetic construct
  misc_feature 1..20: note = chemically synthesized
  source 1..20: mol_type = other DNA
agcctcaagcttttaggctt

SEQ ID NO: 70439 - DNA, 20 bp, synthetic construct
  misc_feature 1..20: note = chemically synthesized
  source 1..20: mol_type = other DNA
ccacatgagaagagacattt

SEQ ID NO: 70440 - DNA, 20 bp, synthetic construct
  misc_feature 1..20: note = chemically synthesized
  source 1..20: mol_type = other DNA
tgcaagtgagtctcaaggta

SEQ ID NO: 70441 - DNA, 20 bp, synthetic construct
  misc_feature 1..20: note = chemically synthesized
  source 1..20: mol_type = other DNA
caatgaaaagactactttga

SEQ ID NO: 70442 - DNA, 20 bp, synthetic construct
  misc_feature 1..20: note = chemically synthesized
  source 1..20: mol_type = other DNA
ggttgaaggtatgcagtaaa

SEQ ID NO: 70443 - DNA, 20 bp, synthetic construct
  misc_feature 1..20: note = chemically synthesized
  source 1..20: mol_type = other DNA
atgcagtaaaacttgttttc

SEQ ID NO: 70444 - DNA, 20 bp, synthetic construct
  misc_feature 1..20: note = chemically synthesized
  source 1..20: mol_type = other DNA
gcactttgggcccctgctga

SEQ ID NO: 70445 - DNA, 20 bp, synthetic construct
  misc_feature 1..20: note = chemically synthesized
  source 1..20: mol_type = other DNA
ccctctcttatacctcgtca

SEQ ID NO: 70446 - DNA, 20 bp, synthetic construct
  misc_feature 1..20: note = chemically synthesized
  source 1..20: mol_type = other DNA
tgatgctggtcatcactgaa

SEQ ID NO: 70447 - DNA, 20 bp, synthetic construct
  misc_feature 1..20: note = chemically synthesized
  source 1..20: mol_type = other DNA
ttattgaaaaaactataact

SEQ ID NO: 70448 - DNA, 20 bp, synthetic construct
  misc_feature 1..20: note = chemically synthesized
  source 1..20: mol_type = other DNA
ctaagcatgagaaaaactaa

SEQ ID NO: 70449 - DNA, 20 bp, synthetic construct
  misc_feature 1..20: note = chemically synthesized
  source 1..20: mol_type = other DNA
caaagaagccatatattttt

SEQ ID NO: 70450 - DNA, 20 bp, synthetic construct
  misc_feature 1..20: note = chemically synthesized
  source 1..20: mol_type = other DNA
agaggagtctttgggggata

SEQ ID NO: 70451 - DNA, 20 bp, synthetic construct
  misc_feature 1..20: note = chemically synthesized
  source 1..20: mol_type = other DNA
ctttgggggataaccagatt

SEQ ID NO: 70452 - DNA, 20 bp, synthetic construct
  misc_feature 1..20: note = chemically synthesized
  source 1..20: mol_type = other DNA
ggataaccagattttaagat

SEQ ID NO: 70453 - DNA, 20 bp, synthetic construct
  misc_feature 1..20: note = chemically synthesized
  source 1..20: mol_type = other DNA
ttgtgtttatactcagtatc

SEQ ID NO: 70454 - DNA, 20 bp, synthetic construct
  misc_feature 1..20: note = chemically synthesized
  source 1..20: mol_type = other DNA
ttgtactcaatagcatataa

SEQ ID NO: 70455 - DNA, 20 bp, synthetic construct
  misc_feature 1..20: note = chemically synthesized
  source 1..20: mol_type = other DNA
cagcatgcattgggtaaata

SEQ ID NO: 70456 - DNA, 20 bp, synthetic construct
  misc_feature 1..20: note = chemically synthesized
  source 1..20: mol_type = other DNA
gggtaaataatcggttttac

SEQ ID NO: 70457 - DNA, 20 bp, synthetic construct
  misc_feature 1..20: note = chemically synthesized
  source 1..20: mol_type = other DNA
ttacaattgattcagtatga

SEQ ID NO: 70458 - DNA, 20 bp, synthetic construct
  misc_feature 1..20: note = chemically synthesized
  source 1..20: mol_type = other DNA
acctatttttttaagcattc

SEQ ID NO: 70459 - DNA, 20 bp, synthetic construct
  misc_feature 1..20: note = chemically synthesized
  source 1..20: mol_type = other DNA
aatggcgtgaacccgggagg

SEQ ID NO: 70460 - DNA, 20 bp, synthetic construct
  misc_feature 1..20: note = chemically synthesized
  source 1..20: mol_type = other DNA
ttactcagtgaagtccagag

SEQ ID NO: 70461 - DNA, 20 bp, synthetic construct
  misc_feature 1..20: note = chemically synthesized
  source 1..20: mol_type = other DNA
gccacatatttttaggtctg

SEQ ID NO: 70462 - DNA, 20 bp, synthetic construct
  misc_feature 1..20: note = chemically synthesized
  source 1..20: mol_type = other DNA
ctgaaaacttcctttctcca

SEQ ID NO: 70463 - DNA, 20 bp, synthetic construct
  misc_feature 1..20: note = chemically synthesized
  source 1..20: mol_type = other DNA
gtcatacgcaaaagaacatt

SEQ ID NO: 70464 - DNA, 20 bp, synthetic construct
  misc_feature 1..20: note = chemically synthesized
  source 1..20: mol_type = other DNA
gcaaattcatagagacaaaa

SEQ ID NO: 70465 - DNA, 20 bp, synthetic construct
  misc_feature 1..20: note = chemically synthesized
  source 1..20: mol_type = other DNA
ttaccagagtgtaggaagaa

SEQ ID NO: 70466 - DNA, 20 bp, synthetic construct
  misc_feature 1..20: note = chemically synthesized
  source 1..20: mol_type = other DNA
aagaacatggattggggagt

SEQ ID NO: 70467 - DNA, 20 bp, synthetic construct
  misc_feature 1..20: note = chemically synthesized
  source 1..20: mol_type = other DNA
gagtaactgattaatcaata

SEQ ID NO: 70468 - DNA, 20 bp, synthetic construct
  misc_feature 1..20: note = chemically synthesized
  source 1..20: mol_type = other DNA
caaaattttagaaatagtgg

SEQ ID NO: 70469 - DNA, 20 bp, synthetic construct
  misc_feature 1..20: note = chemically synthesized
  source 1..20: mol_type = other DNA
aattcattaaatttattgtg

SEQ ID NO: 70470 - DNA, 20 bp, synthetic construct
  misc_feature 1..20: note = chemically synthesized
  source 1..20: mol_type = other DNA
attgtgaaaggtttaaaaac

SEQ ID NO: 70471 - DNA, 20 bp, synthetic construct
  misc_feature 1..20: note = chemically synthesized
  source 1..20: mol_type = other DNA
tatgtctaagataaaatatt

SEQ ID NO: 70472 - DNA, 20 bp, synthetic construct
  misc_feature 1..20: note = chemically synthesized
  source 1..20: mol_type = other DNA
ttatatcttaaagaccattt

SEQ ID NO: 70473 - DNA, 20 bp, synthetic construct
  misc_feature 1..20: note = chemically synthesized
  source 1..20: mol_type = other DNA
acttgagagaaagaatcaag

SEQ ID NO: 70474 - DNA, 20 bp, synthetic construct
  misc_feature 1..20: note = chemically synthesized
  source 1..20: mol_type = other DNA
atatggtcctcctcaaatat

SEQ ID NO: 70475 - DNA, 20 bp, synthetic construct
  misc_feature 1..20: note = chemically synthesized
  source 1..20: mol_type = other DNA
tagttaatccatcttcctat

SEQ ID NO: 70476 - DNA, 20 bp, synthetic construct
  misc_feature 1..20: note = chemically synthesized
  source 1..20: mol_type = other DNA
atcttcctatttatgtttgt

SEQ ID NO: 70477 - DNA, 20 bp, synthetic construct
  misc_feature 1..20: note = chemically synthesized
  source 1..20: mol_type = other DNA
catataattgatatattatc

SEQ ID NO: 70478 - DNA, 20 bp, synthetic construct
  misc_feature 1..20: note = chemically synthesized
  source 1..20: mol_type = other DNA
ccaagaaaaacccggatcta

SEQ ID NO: 70479 - DNA, 20 bp, synthetic construct
  misc_feature 1..20: note = chemically synthesized
  source 1..20: mol_type = other DNA
tttctcctaggatagtgagc

SEQ ID NO: 70480 - DNA, 20 bp, synthetic construct
  misc_feature 1..20: note = chemically synthesized
  source 1..20: mol_type = other DNA
tctgaccttctttgggtgtc

SEQ ID NO: 70481 - DNA, 20 bp, synthetic construct
  misc_feature 1..20: note = chemically synthesized
  source 1..20: mol_type = other DNA
cttctttgggtgtcatctgc

SEQ ID NO: 70482 - DNA, 20 bp, synthetic construct
  misc_feature 1..20: note = chemically synthesized
  source 1..20: mol_type = other DNA
tttgggtgtcatctgcttca

SEQ ID NO: 70483 - DNA, 20 bp, synthetic construct
  misc_feature 1..20: note = chemically synthesized
  source 1..20: mol_type = other DNA
gcaaaaagaaatacatactg

SEQ ID NO: 70484 - DNA, 20 bp, synthetic construct
  misc_feature 1..20: note = chemically synthesized
  source 1..20: mol_type = other DNA
catactgaaatgatttgaat

SEQ ID NO: 70485 - DNA, 20 bp, synthetic construct
  misc_feature 1..20: note = chemically synthesized
  source 1..20: mol_type = other DNA
ttttaattattaagctaata

SEQ ID NO: 70486 - DNA, 20 bp, synthetic construct
  misc_feature 1..20: note = chemically synthesized
  source 1..20: mol_type = other DNA
tgtttttaaaagtctagttc

SEQ ID NO: 70487 - DNA, 20 bp, synthetic construct
  misc_feature 1..20: note = chemically synthesized
  source 1..20: mol_type = other DNA
cagtttgaaatacttccttc

SEQ ID NO: 70488 - DNA, 20 bp, synthetic construct
  misc_feature 1..20: note = chemically synthesized
  source 1..20: mol_type = other DNA
ttcaattgctttcttaaatc

SEQ ID NO: 70489 - DNA, 20 bp, synthetic construct
  misc_feature 1..20: note = chemically synthesized
  source 1..20: mol_type = other DNA
tcccacaactttaaaaatta

SEQ ID NO: 70490 - DNA, 20 bp, synthetic construct
  misc_feature 1..20: note = chemically synthesized
  source 1..20: mol_type = other DNA
aagaacatgtcagaaattga

SEQ ID NO: 70491 - DNA, 20 bp, synthetic construct
  misc_feature 1..20: note = chemically synthesized
  source 1..20: mol_type = other DNA
cctttccaactctttctttc

SEQ ID NO: 70492 - DNA, 20 bp, synthetic construct
  misc_feature 1..20: note = chemically synthesized
  source 1..20: mol_type = other DNA
tttaaaacatcaatgaatta

SEQ ID NO: 70493 - DNA, 20 bp, synthetic construct
  misc_feature 1..20: note = chemically synthesized
  source 1..20: mol_type = other DNA
tgaattatgcagcttctttc

SEQ ID NO: 70494 - DNA, 20 bp, synthetic construct
  misc_feature 1..20: note = chemically synthesized
  source 1..20: mol_type = other DNA
tcttgtctgtattttcacca

SEQ ID NO: 70495 - DNA, 20 bp, synthetic construct
  misc_feature 1..20: note = chemically synthesized
  source 1..20: mol_type = other DNA
ctctccattcagtgtcttct

SEQ ID NO: 70496 - DNA, 20 bp, synthetic construct
  misc_feature 1..20: note = chemically synthesized
  source 1..20: mol_type = other DNA
ttcagtgtcttctttctgct

SEQ ID NO: 70497 - DNA, 20 bp, synthetic construct
  misc_feature 1..20: note = chemically synthesized
  source 1..20: mol_type = other DNA
gctttatgattaatcacagc

SEQ ID NO: 70498 - DNA, 20 bp, synthetic construct
  misc_feature 1..20: note = chemically synthesized
  source 1..20: mol_type = other DNA
atcacagcacttgttttaaa

SEQ ID NO: 70499 - DNA, 20 bp, synthetic construct
  misc_feature 1..20: note = chemically synthesized
  source 1..20: mol_type = other DNA
tatttgaagactttaagaag

SEQ ID NO: 70500 - DNA, 20 bp, synthetic construct
  misc_feature 1..20: note = chemically synthesized
  source 1..20: mol_type = other DNA
tatttgctctcttatatcat

SEQ ID NO: 70501 - DNA, 20 bp, synthetic construct
  misc_feature 1..20: note = chemically synthesized
  source 1..20: mol_type = other DNA
ccttaaaaaattaaccaaag

SEQ ID NO: 70502 - DNA, 20 bp, synthetic construct
  misc_feature 1..20: note = chemically synthesized
  source 1..20: mol_type = other DNA
aaggaatgattaaatattag

SEQ ID NO: 70503 - DNA, 20 bp, synthetic construct
  misc_feature 1..20: note = chemically synthesized
  source 1..20: mol_type = other DNA
cacgaaaataggcacatgag

SEQ ID NO: 70504 - DNA, 20 bp, synthetic construct
  misc_feature 1..20: note = chemically synthesized
  source 1..20: mol_type = other DNA
taaataaacctgaagtcagc

SEQ ID NO: 70505 - DNA, 20 bp, synthetic construct
  misc_feature 1..20: note = chemically synthesized
  source 1..20: mol_type = other DNA
aataataaaataatgtatat

SEQ ID NO: 70506 - DNA, 20 bp, synthetic construct
  misc_feature 1..20: note = chemically synthesized
  source 1..20: mol_type = other DNA
atatgatcaaataaatccta

SEQ ID NO: 70507 - DNA, 20 bp, synthetic construct
  misc_feature 1..20: note = chemically synthesized
  source 1..20: mol_type = other DNA
ctgcaacaaattgagatcac

SEQ ID NO: 70508 - DNA, 20 bp, synthetic construct
  misc_feature 1..20: note = chemically synthesized
  source 1..20: mol_type = other DNA
gaatatacaaaaaggaaaat

SEQ ID NO: 70509 - DNA, 20 bp, synthetic construct
  misc_feature 1..20: note = chemically synthesized
  source 1..20: mol_type = other DNA
tcatctattggacatatcag

SEQ ID NO: 70510 - DNA, 20 bp, synthetic construct
  misc_feature 1..20: note = chemically synthesized
  source 1..20: mol_type = other DNA
aatgggatctaattaaatta

SEQ ID NO: 70511 - DNA, 20 bp, synthetic construct
  misc_feature 1..20: note = chemically synthesized
  source 1..20: mol_type = other DNA
cacttctctaaagaagacat

SEQ ID NO: 70512 - DNA, 20 bp, synthetic construct
  misc_feature 1..20: note = chemically synthesized
  source 1..20: mol_type = other DNA
gttgcagagagaaaggaatg

SEQ ID NO: 70513 - DNA, 20 bp, synthetic construct
  misc_feature 1..20: note = chemically synthesized
  source 1..20: mol_type = other DNA
aatctattataaaaatacag

SEQ ID NO: 70514 - DNA, 20 bp, synthetic construct
  misc_feature 1..20: note = chemically synthesized
  source 1..20: mol_type = other DNA
ctatacagccataaaaagga

SEQ ID NO: 70515 - DNA, 20 bp, synthetic construct
  misc_feature 1..20: note = chemically synthesized
  source 1..20: mol_type = other DNA
gaaaatctaccctgaaatag

SEQ ID NO: 70516 - DNA, 20 bp, synthetic construct
  misc_feature 1..20: note = chemically synthesized
  source 1..20: mol_type = other DNA
taccctgaaatagagtagtt

SEQ ID NO: 70517 - DNA, 20 bp, synthetic construct
  misc_feature 1..20: note = chemically synthesized
  source 1..20: mol_type = other DNA
aattgcacatttttccttct

SEQ ID NO: 70518 - DNA, 20 bp, synthetic construct
  misc_feature 1..20: note = chemically synthesized
  source 1..20: mol_type = other DNA
gttatgaataaccatatttt

SEQ ID NO: 70519 - DNA, 20 bp, synthetic construct
  misc_feature 1..20: note = chemically synthesized
  source 1..20: mol_type = other DNA
gattattagggtatttatct

SEQ ID NO: 70520 - DNA, 20 bp, synthetic construct
  misc_feature 1..20: note = chemically synthesized
  source 1..20: mol_type = other DNA
tatagatatatctccctcga

SEQ ID NO: 70521 - DNA, 20 bp, synthetic construct
  misc_feature 1..20: note = chemically synthesized
  source 1..20: mol_type = other DNA
ttcattgtattattgttcca

SEQ ID NO: 70522 - DNA, 20 bp, synthetic construct
  misc_feature 1..20: note = chemically synthesized
  source 1..20: mol_type = other DNA
gtgcccagaaaataggcgaa

SEQ ID NO: 70523 - DNA, 20 bp, synthetic construct
  misc_feature 1..20: note = chemically synthesized
  source 1..20: mol_type = other DNA
ggcgaacaatgcttctttgg

SEQ ID NO: 70524 - DNA, 20 bp, synthetic construct
  misc_feature 1..20: note = chemically synthesized
  source 1..20: mol_type = other DNA
acaatgcttctttggatctg

SEQ ID NO: 70525 - DNA, 20 bp, synthetic construct
  misc_feature 1..20: note = chemically synthesized
  source 1..20: mol_type = other DNA
taatgtgcaccacatgtggt

SEQ ID NO: 70526 - DNA, 20 bp, synthetic construct
  misc_feature 1..20: note = chemically synthesized
  source 1..20: mol_type = other DNA
atatgggagacacacatgtt

SEQ ID NO: 70527 - DNA, 20 bp, synthetic construct
  misc_feature 1..20: note = chemically synthesized
  source 1..20: mol_type = other DNA
gagacacacatgttgagagc

SEQ ID NO: 70528 - DNA, 20 bp, synthetic construct
  misc_feature 1..20: note = chemically synthesized
  source 1..20: mol_type = other DNA
tttctggaggcaataccttt

SEQ ID NO: 70529 - DNA, 20 bp, synthetic construct
  misc_feature 1..20: note = chemically synthesized
  source 1..20: mol_type = other DNA
caaccagaatagctgggtat

SEQ ID NO: 70530 - DNA, 20 bp, synthetic construct
  misc_feature 1..20: note = chemically synthesized
  source 1..20: mol_type = other DNA
tgaatgtaatatcagcacag

SEQ ID NO: 70531 - DNA, 20 bp, synthetic construct
  misc_feature 1..20: note = chemically synthesized
  source 1..20: mol_type = other DNA
agccacagttctatcttcac

SEQ ID NO: 70532 - DNA, 20 bp, synthetic construct
  misc_feature 1..20: note = chemically synthesized
  source 1..20: mol_type = other DNA
taggccattgacaggagaat

SEQ ID NO: 70533 - DNA, 20 bp, synthetic construct
  misc_feature 1..20: note = chemically synthesized
  source 1..20: mol_type = other DNA
aggccccatggataacctct

SEQ ID NO: 70534 - DNA, 20 bp, synthetic construct
  misc_feature 1..20: note = chemically synthesized
  source 1..20: mol_type = other DNA
tgggttcgtgaagactgtgg

SEQ ID NO: 70535 - DNA, 20 bp, synthetic construct
  misc_feature 1..20: note = chemically synthesized
  source 1..20: mol_type = other DNA
ggtcatgcttgatgaggtag

SEQ ID NO: 70536 - DNA, 20 bp, synthetic construct
  misc_feature 1..20: note = chemically synthesized
  source 1..20: mol_type = other DNA
ttgtgtgttcacaagtggca

SEQ ID NO: 70537 - DNA, 20 bp, synthetic construct
  misc_feature 1..20: note = chemically synthesized
  source 1..20: mol_type = other DNA
tacactgaaatccctgcctt

SEQ ID NO: 70538 - DNA, 20 bp, synthetic construct
  misc_feature 1..20: note = chemically synthesized
  source 1..20: mol_type = other DNA
atgcatcatgcccctctgtg

SEQ ID NO: 70539 - DNA, 20 bp, synthetic construct
  misc_feature 1..20: note = chemically synthesized
  source 1..20: mol_type = other DNA
tctgtggtgtgcttgctgca

SEQ ID NO: 70540 - DNA, 20 bp, synthetic construct
  misc_feature 1..20: note = chemically synthesized
  source 1..20: mol_type = other DNA
ataattgtacatagttaacc

SEQ ID NO: 70541 - DNA, 20 bp, synthetic construct
  misc_feature 1..20: note = chemically synthesized
  source 1..20: mol_type = other DNA
tgtacatagttaacctgctg

SEQ ID NO: 70542 - DNA, 20 bp, synthetic construct
  misc_feature 1..20: note = chemically synthesized
  source 1..20: mol_type = other DNA
gcatatttggatacatttaa

SEQ ID NO: 70543 - DNA, 20 bp, synthetic construct
  misc_feature 1..20: note = chemically synthesized
  source 1..20: mol_type = other DNA
atttaaacttgatttttatt

SEQ ID NO: 70544 - DNA, 20 bp, synthetic construct
  misc_feature 1..20: note = chemically synthesized
  source 1..20: mol_type = other DNA
tcacaatcatgatatagaca

SEQ ID NO: 70545 - DNA, 20 bp, synthetic construct
  misc_feature 1..20: note = chemically synthesized
  source 1..20: mol_type = other DNA
tgttttgttagaaaactttt

SEQ ID NO: 70546 - DNA, 20 bp, synthetic construct
  misc_feature 1..20: note = chemically synthesized
  source 1..20: mol_type = other DNA
tgttagaaaacttttctttg

SEQ ID NO: 70547 - DNA, 20 bp, synthetic construct
  misc_feature 1..20: note = chemically synthesized
  source 1..20: mol_type = other DNA
ttagttttgaaatagaatgt

SEQ ID NO: 70548 - DNA, 20 bp, synthetic construct
  misc_feature 1..20: note = chemically synthesized
  source 1..20: mol_type = other DNA
catttagtctaaaaatattc

SEQ ID NO: 70549 - DNA, 20 bp, synthetic construct
  misc_feature 1..20: note = chemically synthesized
  source 1..20: mol_type = other DNA
atgtgttgagatgaaaaagt

SEQ ID NO: 70550 - DNA, 20 bp, synthetic construct
  misc_feature 1..20: note = chemically synthesized
  source 1..20: mol_type = other DNA
ctattcaagaggccaaatta

SEQ ID NO: 70551 - DNA, 20 bp, synthetic construct
  misc_feature 1..20: note = chemically synthesized
  source 1..20: mol_type = other DNA
gtatgtggaaatcacttccc

SEQ ID NO: 70552 - DNA, 20 bp, synthetic construct
  misc_feature 1..20: note = chemically synthesized
  source 1..20: mol_type = other DNA
ggtcacatgtgtctttgtcc

SEQ ID NO: 70553 - DNA, 20 bp, synthetic construct
  misc_feature 1..20: note = chemically synthesized
  source 1..20: mol_type = other DNA
tatattttgtcttaaaataa

SEQ ID NO: 70554 - DNA, 20 bp, synthetic construct
  misc_feature 1..20: note = chemically synthesized
  source 1..20: mol_type = other DNA
tcataccaggttcaggatag

SEQ ID NO: 70555 - DNA, 20 bp, synthetic construct
  misc_feature 1..20: note = chemically synthesized
  source 1..20: mol_type = other DNA
ggatagacttgtttttattt

SEQ ID NO: 70556 - DNA, 20 bp, synthetic construct
  misc_feature 1..20: note = chemically synthesized
  source 1..20: mol_type = other DNA
tagatacagtgggtacttgt

SEQ ID NO: 70557 - DNA, 20 bp, synthetic construct
  misc_feature 1..20: note = chemically synthesized
  source 1..20: mol_type = other DNA
cagtggtgagcatactatcc

SEQ ID NO: 70558 - DNA, 20 bp, synthetic construct
  misc_feature 1..20: note = chemically synthesized
  source 1..20: mol_type = other DNA
catctctccctgccccttgt

SEQ ID NO: 70559 - DNA, 20 bp, synthetic construct
  misc_feature 1..20: note = chemically synthesized
  source 1..20: mol_type = other DNA
gtttcaagtggctattgttc

SEQ ID NO: 70560 - DNA, 20 bp, synthetic construct
  misc_feature 1..20: note = chemically synthesized
  source 1..20: mol_type = other DNA
tgtttatatccacgtgtact

SEQ ID NO: 70561 - DNA, 20 bp, synthetic construct
  misc_feature 1..20: note = chemically synthesized
  source 1..20: mol_type = other DNA
atatccacgtgtactcaatg

SEQ ID NO: 70562 - DNA, 20 bp, synthetic construct
  misc_feature 1..20: note = chemically synthesized
  source 1..20: mol_type = other DNA
tataaatgagaatatatggt

SEQ ID NO: 70563 - DNA, 20 bp, synthetic construct
  misc_feature 1..20: note = chemically synthesized
  source 1..20: mol_type = other DNA
gcttttgtgttcttgcgtta

SEQ ID NO: 70564 - DNA, 20 bp, synthetic construct
  misc_feature 1..20: note = chemically synthesized
  source 1..20: mol_type = other DNA
gtgttcttgcgttaatttgc

SEQ ID NO: 70565 - DNA, 20 bp, synthetic construct
  misc_feature 1..20: note = chemically synthesized
  source 1..20: mol_type = other DNA
cacccatgttgctgaaaagg

SEQ ID NO: 70566 - DNA, 20 bp, synthetic construct
  misc_feature 1..20: note = chemically synthesized
  source 1..20: mol_type = other DNA
tagtggtggtgtatatgtac

SEQ ID NO: 70567 - DNA, 20 bp, synthetic construct
  misc_feature 1..20: note = chemically synthesized
  source 1..20: mol_type = other DNA
tgtgtctagttggtctaatg

SEQ ID NO: 70568 - DNA, 20 bp, synthetic construct
  misc_feature 1..20: note = chemically synthesized
  source 1..20: mol_type = other DNA
ctatggatatatacccagta

SEQ ID NO: 70569 - DNA, 20 bp, synthetic construct
  misc_feature 1..20: note = chemically synthesized
  source 1..20: mol_type = other DNA
attgctgtgtcaaattgtag

SEQ ID NO: 70570 - DNA, 20 bp, synthetic construct
  misc_feature 1..20: note = chemically synthesized
  source 1..20: mol_type = other DNA
agttctttgaagactctcca

SEQ ID NO: 70571 - DNA, 20 bp, synthetic construct
  misc_feature 1..20: note = chemically synthesized
  source 1..20: mol_type = other DNA
ttctccatagcctcatgaga

SEQ ID NO: 70572 - DNA, 20 bp, synthetic construct
  misc_feature 1..20: note = chemically synthesized
  source 1..20: mol_type = other DNA
agcctcatgagaatctgttt

SEQ ID NO: 70573 - DNA, 20 bp, synthetic construct
  misc_feature 1..20: note = chemically synthesized
  source 1..20: mol_type = other DNA
tggtatgagatagtatctct

SEQ ID NO: 70574 - DNA, 20 bp, synthetic construct
  misc_feature 1..20: note = chemically synthesized
  source 1..20: mol_type = other DNA
tgagatagtatctcttgtgg

SEQ ID NO: 70575 - DNA, 20 bp, synthetic construct
  misc_feature 1..20: note = chemically synthesized
  source 1..20: mol_type = other DNA
tctcttgagaagagtctgtt

SEQ ID NO: 70576 - DNA, 20 bp, synthetic construct
  misc_feature 1..20: note = chemically synthesized
  source 1..20: mol_type = other DNA
ttttgcccatttttaaatgg

SEQ ID NO: 70577 - DNA, 20 bp, synthetic construct
  misc_feature 1..20: note = chemically synthesized
  source 1..20: mol_type = other DNA
gcccatttttaaatggaatt

SEQ ID NO: 70578 - DNA, 20 bp, synthetic construct
  misc_feature 1..20: note = chemically synthesized
  source 1..20: mol_type = other DNA
tttaaatggaattgtttgct

SEQ ID NO: 70579 - DNA, 20 bp, synthetic construct
  misc_feature 1..20: note = chemically synthesized
  source 1..20: mol_type = other DNA
gctgatatgttcgaattcct

SEQ ID NO: 70580 - DNA, 20 bp, synthetic construct
  misc_feature 1..20: note = chemically synthesized
  source 1..20: mol_type = other DNA
tattagaccttttccagatg

SEQ ID NO: 70581 - DNA, 20 bp, synthetic construct
  misc_feature 1..20: note = chemically synthesized
  source 1..20: mol_type = other DNA
ttccagatgcacagtttgtg

SEQ ID NO: 70582 - DNA, 20 bp, synthetic construct
  misc_feature 1..20: note = chemically synthesized
  source 1..20: mol_type = other DNA
gtgaatagtttctcctatcc

SEQ ID NO: 70583 - DNA, 20 bp, synthetic construct
  misc_feature 1..20: note = chemically synthesized
  source 1..20: mol_type = other DNA
tttctcctatcctgtagatt

SEQ ID NO: 70584 - DNA, 20 bp, synthetic construct
  misc_feature 1..20: note = chemically synthesized
  source 1..20: mol_type = other DNA
gattgtcagtttactctgtt

SEQ ID NO: 70585 - DNA, 20 bp, synthetic construct
  misc_feature 1..20: note = chemically synthesized
  source 1..20: mol_type = other DNA
agggtacatgtgcgcaacgt

SEQ ID NO: 70586 - DNA, 20 bp, synthetic construct
  misc_feature 1..20: note = chemically synthesized
  source 1..20: mol_type = other DNA
ataagtgagaacatgtggta

SEQ ID NO: 70587 - DNA, 20 bp, synthetic construct
  misc_feature 1..20: note = chemically synthesized
  source 1..20: mol_type = other DNA
atttggttttttgtccttgt

SEQ ID NO: 70588 - DNA, 20 bp, synthetic construct
  misc_feature 1..20: note = chemically synthesized
  source 1..20: mol_type = other DNA
tgtgatagtttgctgagaat

SEQ ID NO: 70589 - DNA, 20 bp, synthetic construct
  misc_feature 1..20: note = chemically synthesized
  source 1..20: mol_type = other DNA
gtttgctgagaatgatggtt

SEQ ID NO: 70590 - DNA, 20 bp, synthetic construct
  misc_feature 1..20: note = chemically synthesized
  source 1..20: mol_type = other DNA
tattgtgaatagtgaagctc

SEQ ID NO: 70591 - DNA, 20 bp, synthetic construct
  misc_feature 1..20: note = chemically synthesized
  source 1..20: mol_type = other DNA
tgaatttttctttgcattgc

SEQ ID NO: 70592 - DNA, 20 bp, synthetic construct
  misc_feature 1..20: note = chemically synthesized
  source 1..20: mol_type = other DNA
tttgcattgcaattgctttt

SEQ ID NO: 70593 - DNA, 20 bp, synthetic construct
  misc_feature 1..20: note = chemically synthesized
  source 1..20: mol_type = other DNA
aaaatgcactgccagtgcag

SEQ ID NO: 70594 - DNA, 20 bp, synthetic construct
  misc_feature 1..20: note = chemically synthesized
  source 1..20: mol_type = other DNA
taagatttgagatcttacat

SEQ ID NO: 70595 - DNA, 20 bp, synthetic construct
  misc_feature 1..20: note = chemically synthesized
  source 1..20: mol_type = other DNA
taagttttgaattcattttc

SEQ ID NO: 70596 - DNA, 20 bp, synthetic construct
  misc_feature 1..20: note = chemically synthesized
  source 1..20: mol_type = other DNA
taaatggtgtaaggtaaggg

SEQ ID NO: 70597 - DNA, 20 bp, synthetic construct
  misc_feature 1..20: note = chemically synthesized
  source 1..20: mol_type = other DNA
tggctagccacgtattccag

SEQ ID NO: 70598 - DNA, 20 bp, synthetic construct
  misc_feature 1..20: note = chemically synthesized
  source 1..20: mol_type = other DNA
tggataggtagtccttttcc

SEQ ID NO: 70599 - DNA, 20 bp, synthetic construct
  misc_feature 1..20: note = chemically synthesized
  source 1..20: mol_type = other DNA
taggtagtccttttcccgct

SEQ ID NO: 70600 - DNA, 20 bp, synthetic construct
  misc_feature 1..20: note = chemically synthesized
  source 1..20: mol_type = other DNA
agatcagatggttgtaacta

SEQ ID NO: 70601 - DNA, 20 bp, synthetic construct
  misc_feature 1..20: note = chemically synthesized
  source 1..20: mol_type = other DNA
gtaactatgtagctttattt

SEQ ID NO: 70602 - DNA, 20 bp, synthetic construct
  misc_feature 1..20: note = chemically synthesized
  source 1..20: mol_type = other DNA
ctttatttttgagttttcta

SEQ ID NO: 70603 - DNA, 20 bp, synthetic construct
  misc_feature 1..20: note = chemically synthesized
  source 1..20: mol_type = other DNA
ctatttttgtaacaatatca

SEQ ID NO: 70604 - DNA, 20 bp, synthetic construct
  misc_feature 1..20: note = chemically synthesized
  source 1..20: mol_type = other DNA
ggggtactgtggccttataa

SEQ ID NO: 70605 - DNA, 20 bp, synthetic construct
  misc_feature 1..20: note = chemically synthesized
  source 1..20: mol_type = other DNA
tctttctttttttatttttt

SEQ ID NO: 70606 - DNA, 20 bp, synthetic construct
  misc_feature 1..20: note = chemically synthesized
  source 1..20: mol_type = other DNA
tgcctcagccttccgagtag

SEQ ID NO: 70607 - DNA, 20 bp, synthetic construct
  misc_feature 1..20: note = chemically synthesized
  source 1..20: mol_type = other DNA
ttttgtatttttagtagaga

SEQ ID NO: 70608 - DNA, 20 bp, synthetic construct
  misc_feature 1..20: note = chemically synthesized
  source 1..20: mol_type = other DNA
gtgagccaccgtgcctggcc

SEQ ID NO: 70609 - DNA, 20 bp, synthetic construct
  misc_feature 1..20: note = chemically synthesized
  source 1..20: mol_type = other DNA
tagtttcaagtcaggtggtg

SEQ ID NO: 70610 - DNA, 20 bp, synthetic construct
  misc_feature 1..20: note = chemically synthesized
  source 1..20: mol_type = other DNA
ggtgcttccaattttgttct

SEQ ID NO: 70611 - DNA, 20 bp, synthetic construct
  misc_feature 1..20: note = chemically synthesized
  source 1..20: mol_type = other DNA
tccaattttgttctttctgc

SEQ ID NO: 70612 - DNA, 20 bp, synthetic construct
  misc_feature 1..20: note = chemically synthesized
  source 1..20: mol_type = other DNA
attttgttctttctgcttaa

SEQ ID NO: 70613 - DNA, 20 bp, synthetic construct
  misc_feature 1..20: note = chemically synthesized
  source 1..20: mol_type = other DNA
tggttccatatgaattttaa

SEQ ID NO: 70614 - DNA, 20 bp, synthetic construct
  misc_feature 1..20: note = chemically synthesized
  source 1..20: mol_type = other DNA
gaaattgcaatgaatgtcta

SEQ ID NO: 70615 - DNA, 20 bp, synthetic construct
  misc_feature 1..20: note = chemically synthesized
  source 1..20: mol_type = other DNA
agtatggccatttaaattca

SEQ ID NO: 70616 - DNA, 20 bp, synthetic construct
  misc_feature 1..20: note = chemically synthesized
  source 1..20: mol_type = other DNA
tcttccaatccatgagcctg

SEQ ID NO: 70617 - DNA, 20 bp, synthetic construct
  misc_feature 1..20: note = chemically synthesized
  source 1..20: mol_type = other DNA
agcttttatttatttatttg

SEQ ID NO: 70618 - DNA, 20 bp, synthetic construct
  misc_feature 1..20: note = chemically synthesized
  source 1..20: mol_type = other DNA
tatttatttatttgtgttgt

SEQ ID NO: 70619 - DNA, 20 bp, synthetic construct
  misc_feature 1..20: note = chemically synthesized
  source 1..20: mol_type = other DNA
ttgtttctgatttctttcag

SEQ ID NO: 70620 - DNA, 20 bp, synthetic construct
  misc_feature 1..20: note = chemically synthesized
  source 1..20: mol_type = other DNA
cctcgaaaactgcaacaaga

SEQ ID NO: 70621 - DNA, 20 bp, synthetic construct
  misc_feature 1..20: note = chemically synthesized
  source 1..20: mol_type = other DNA
actctatacttagaaaatcc

SEQ ID NO: 70622 - DNA, 20 bp, synthetic construct
  misc_feature 1..20: note = chemically synthesized
  source 1..20: mol_type = other DNA
gaactgataaacaattttag

SEQ ID NO: 70623 - DNA, 20 bp, synthetic construct
  misc_feature 1..20: note = chemically synthesized
  source 1..20: mol_type = other DNA
aacgaaacaagtaaacaaat

SEQ ID NO: 70624 - DNA, 20 bp, synthetic construct
  misc_feature 1..20: note = chemically synthesized
  source 1..20: mol_type = other DNA
aaatgtacattggtaatggg

SEQ ID NO: 70625 - DNA, 20 bp, synthetic construct
  misc_feature 1..20: note = chemically synthesized
  source 1..20: mol_type = other DNA
ttgaacaacaatacatgaaa

SEQ ID NO: 70626 - DNA, 20 bp, synthetic construct
  misc_feature 1..20: note = chemically synthesized
  source 1..20: mol_type = other DNA
agtacttataatcaagtagt

SEQ ID NO: 70627 - DNA, 20 bp, synthetic construct
  misc_feature 1..20: note = chemically synthesized
  source 1..20: mol_type = other DNA
cacgtgtcaaattgtgttgg

SEQ ID NO: 70628 - DNA, 20 bp, synthetic construct
  misc_feature 1..20: note = chemically synthesized
  source 1..20: mol_type = other DNA
gttgttatcagtagcattag

SEQ ID NO: 70629 - DNA, 20 bp, synthetic construct
  misc_feature 1..20: note = chemically synthesized
  source 1..20: mol_type = other DNA
ttagaaaggcttgaatagaa

SEQ ID NO: 70630 - DNA, 20 bp, synthetic construct
  misc_feature 1..20: note = chemically synthesized
  source 1..20: mol_type = other DNA
ctatgacttagaatagaact

SEQ ID NO: 70631 - DNA, 20 bp, synthetic construct
  misc_feature 1..20: note = chemically synthesized
  source 1..20: mol_type = other DNA
agaactgagtgattgaaggt

SEQ ID NO: 70632 - DNA, 20 bp, synthetic construct
  misc_feature 1..20: note = chemically synthesized
  source 1..20: mol_type = other DNA
aagtaatgccacctgaattt

SEQ ID NO: 70633 - DNA, 20 bp, synthetic construct
  misc_feature 1..20: note = chemically synthesized
  source 1..20: mol_type = other DNA
ttcactaatcaacagttatt

SEQ ID NO: 70634 - DNA, 20 bp, synthetic construct
  misc_feature 1..20: note = chemically synthesized
  source 1..20: mol_type = other DNA
attggtcattgtacattaat

SEQ ID NO: 70635 - DNA, 20 bp, synthetic construct
  misc_feature 1..20: note = chemically synthesized
  source 1..20: mol_type = other DNA
ttgtagaaaagatgaagaga

SEQ ID NO: 70636 - DNA, 20 bp, synthetic construct
  misc_feature 1..20: note = chemically synthesized
  source 1..20: mol_type = other DNA
gaagagaatcagtttcaatg

SEQ ID NO: 70637 - DNA, 20 bp, synthetic construct
  misc_feature 1..20: note = chemically synthesized
  source 1..20: mol_type = other DNA
ctcatatcattttcttttct

SEQ ID NO: 70638 - DNA, 20 bp, synthetic construct
  misc_feature 1..20: note = chemically synthesized
  source 1..20: mol_type = other DNA
aaggctgaataaggatatta

SEQ ID NO: 70639 - DNA, 20 bp, synthetic construct
  misc_feature 1..20: note = chemically synthesized
  source 1..20: mol_type = other DNA
aatatgacagaagagtgata

SEQ ID NO: 70640 - DNA, 20 bp, synthetic construct
  misc_feature 1..20: note = chemically synthesized
  source 1..20: mol_type = other DNA
gacagaagagtgatagctgg

SEQ ID NO: 70641 - DNA, 20 bp, synthetic construct
  misc_feature 1..20: note = chemically synthesized
  source 1..20: mol_type = other DNA
ctggtttggtttaatgaagt

SEQ ID NO: 70642 - DNA, 20 bp, synthetic construct
  misc_feature 1..20: note = chemically synthesized
  source 1..20: mol_type = other DNA
atatttcagagcactaataa

SEQ ID NO: 70643 - DNA, 20 bp, synthetic construct
  misc_feature 1..20: note = chemically synthesized
  source 1..20: mol_type = other DNA
tctcaatgaaataaaatgct

SEQ ID NO: 70644 - DNA, 20 bp, synthetic construct
  misc_feature 1..20: note = chemically synthesized
  source 1..20: mol_type = other DNA
acagagaattcaacgtctaa

SEQ ID NO: 70645 - DNA, 20 bp, synthetic construct
  misc_feature 1..20: note = chemically synthesized
  source 1..20: mol_type = other DNA
taaacatatttcccaataat

SEQ ID NO: 70646 - DNA, 20 bp, synthetic construct
  misc_feature 1..20: note = chemically synthesized
  source 1..20: mol_type = other DNA
ttctttcatcttggaaacaa

SEQ ID NO: 70647 - DNA, 20 bp, synthetic construct
  misc_feature 1..20: note = chemically synthesized
  source 1..20: mol_type = other DNA
tgccagtgatgctgctccat

SEQ ID NO: 70648 - DNA, 20 bp, synthetic construct
  misc_feature 1..20: note = chemically synthesized
  source 1..20: mol_type = other DNA
catgtggcaggtaattaaac

SEQ ID NO: 70649 - DNA, 20 bp, synthetic construct
  misc_feature 1..20: note = chemically synthesized
  source 1..20: mol_type = other DNA
ggatataatatcgcagtaac

SEQ ID NO: 70650 - DNA, 20 bp, synthetic construct
  misc_feature 1..20: note = chemically synthesized
  source 1..20: mol_type = other DNA
cacagcaacttgtgatgtcc

SEQ ID NO: 70651 - DNA, 20 bp, synthetic construct
  misc_feature 1..20: note = chemically synthesized
  source 1..20: mol_type = other DNA
tacaaagatgggaaacaaag

SEQ ID NO: 70652 - DNA, 20 bp, synthetic construct
  misc_feature 1..20: note = chemically synthesized
  source 1..20: mol_type = other DNA
caagatgggaattatccgaa

SEQ ID NO: 70653 - DNA, 20 bp, synthetic construct
  misc_feature 1..20: note = chemically synthesized
  source 1..20: mol_type = other DNA
ctttggtagataactgactt

SEQ ID NO: 70654 - DNA, 20 bp, synthetic construct
  misc_feature 1..20: note = chemically synthesized
  source 1..20: mol_type = other DNA
agataactgacttttaggat

SEQ ID NO: 70655 - DNA, 20 bp, synthetic construct
  misc_feature 1..20: note = chemically synthesized
  source 1..20: mol_type = other DNA
cttgaacattatactctgag

SEQ ID NO: 70656 - DNA, 20 bp, synthetic construct
  misc_feature 1..20: note = chemically synthesized
  source 1..20: mol_type = other DNA
ttgaaatttgtggatgaaaa

SEQ ID NO: 70657 - DNA, 20 bp, synthetic construct
  misc_feature 1..20: note = chemically synthesized
  source 1..20: mol_type = other DNA
cacaattaaatcagtctaaa

SEQ ID NO: 70658 - DNA, 20 bp, synthetic construct
  misc_feature 1..20: note = chemically synthesized
  source 1..20: mol_type = other DNA
ttgttggtcttcctaatata

SEQ ID NO: 70659 - DNA, 20 bp, synthetic construct
  misc_feature 1..20: note = chemically synthesized
  source 1..20: mol_type = other DNA
tacttttttacgagctgaca

SEQ ID NO: 70660 - DNA, 20 bp, synthetic construct
  misc_feature 1..20: note = chemically synthesized
  source 1..20: mol_type = other DNA
cgagctgacaagaagcttgt

SEQ ID NO: 70661 - DNA, 20 bp, synthetic construct
  misc_feature 1..20: note = chemically synthesized
  source 1..20: mol_type = other DNA
gcttgtctaggtttttcctt

SEQ ID NO: 70662 - DNA, 20 bp, synthetic construct
  misc_feature 1..20: note = chemically synthesized
  source 1..20: mol_type = other DNA
tttaaaagtaaatttaaaat

SEQ ID NO: 70663 - DNA, 20 bp, synthetic construct
  misc_feature 1..20: note = chemically synthesized
  source 1..20: mol_type = other DNA
acaaatgtgcacactgaggc

SEQ ID NO: 70664 - DNA, 20 bp, synthetic construct
  misc_feature 1..20: note = chemically synthesized
  source 1..20: mol_type = other DNA
actgaggcaaaagtttttca

SEQ ID NO: 70665 - DNA, 20 bp, synthetic construct
  misc_feature 1..20: note = chemically synthesized
  source 1..20: mol_type = other DNA
ctctttgctaagaaagaact

SEQ ID NO: 70666 - DNA, 20 bp, synthetic construct
  misc_feature 1..20: note = chemically synthesized
  source 1..20: mol_type = other DNA
tccaggctttcatttttcat

SEQ ID NO: 70667 - DNA, 20 bp, synthetic construct
  misc_feature 1..20: note = chemically synthesized
  source 1..20: mol_type = other DNA
ggcttcatttttatgtctgt

SEQ ID NO: 70668 - DNA, 20 bp, synthetic construct
  misc_feature 1..20: note = chemically synthesized
  source 1..20: mol_type = other DNA
ctgtgtctgattctccagat

SEQ ID NO: 70669 - DNA, 20 bp, synthetic construct
  misc_feature 1..20: note = chemically synthesized
  source 1..20: mol_type = other DNA
tccgagtttaactactaaac

SEQ ID NO: 70670 - DNA, 20 bp, synthetic construct
  misc_feature 1..20: note = chemically synthesized
  source 1..20: mol_type = other DNA
ggcggataatgccatattgt

SEQ ID NO: 70671 - DNA, 20 bp, synthetic construct
  misc_feature 1..20: note = chemically synthesized
  source 1..20: mol_type = other DNA
ataatgccatattgtatttg

SEQ ID NO: 70672 - DNA, 20 bp, synthetic construct
  misc_feature 1..20: note = chemically synthesized
  source 1..20: mol_type = other DNA
atgtgggagatacaggtatt

SEQ ID NO: 70673 - DNA, 20 bp, synthetic construct
  misc_feature 1..20: note = chemically synthesized
  source 1..20: mol_type = other DNA
gaggatgatcagacagtcta

SEQ ID NO: 70674 - DNA, 20 bp, synthetic construct
  misc_feature 1..20: note = chemically synthesized
  source 1..20: mol_type = other DNA
tatgtcagcacaagccagtc

SEQ ID NO: 70675 - DNA, 20 bp, synthetic construct
  misc_feature 1..20: note = chemically synthesized
  source 1..20: mol_type = other DNA
cagaaagcacgtgtgataac

SEQ ID NO: 70676 - DNA, 20 bp, synthetic construct
  misc_feature 1..20: note = chemically synthesized
  source 1..20: mol_type = other DNA
tgagaatggaagcatatctc

SEQ ID NO: 70677 - DNA, 20 bp, synthetic construct
  misc_feature 1..20: note = chemically synthesized
  source 1..20: mol_type = other DNA
tatgccattgccaggaggga

SEQ ID NO: 70678 - DNA, 20 bp, synthetic construct
  misc_feature 1..20: note = chemically synthesized
  source 1..20: mol_type = other DNA
agcccacactgctaatctcc

SEQ ID NO: 70679 - DNA, 20 bp, synthetic construct
  misc_feature 1..20: note = chemically synthesized
  source 1..20: mol_type = other DNA
tgggctcatgaagactgtgg

SEQ ID NO: 70680 - DNA, 20 bp, synthetic construct
  misc_feature 1..20: note = chemically synthesized
  source 1..20: mol_type = other DNA
tagtgtatccaccggtaaag

SEQ ID NO: 70681 - DNA, 20 bp, synthetic construct
  misc_feature 1..20: note = chemically synthesized
  source 1..20: mol_type = other DNA
aaaccaggagcctccaatct

SEQ ID NO: 70682 - DNA, 20 bp, synthetic construct
  misc_feature 1..20: note = chemically synthesized
  source 1..20: mol_type = other DNA
cctccaatcttcctgcttgg

SEQ ID NO: 70683 - DNA, 20 bp, synthetic construct
  misc_feature 1..20: note = chemically synthesized
  source 1..20: mol_type = other DNA
gaagaatagcatgtacagac

SEQ ID NO: 70684 - DNA, 20 bp, synthetic construct
  misc_feature 1..20: note = chemically synthesized
  source 1..20: mol_type = other DNA
gaaaaaatactgagttaatg

SEQ ID NO: 70685 - DNA, 20 bp, synthetic construct
  misc_feature 1..20: note = chemically synthesized
  source 1..20: mol_type = other DNA
tatacataaatggataataa

SEQ ID NO: 70686 - DNA, 20 bp, synthetic construct
  misc_feature 1..20: note = chemically synthesized
  source 1..20: mol_type = other DNA
ctggcttagttgtcttcttg

SEQ ID NO: 70687 - DNA, 20 bp, synthetic construct
  misc_feature 1..20: note = chemically synthesized
  source 1..20: mol_type = other DNA
tgtgattactgaccatttgg

SEQ ID NO: 70688 - DNA, 20 bp, synthetic construct
  misc_feature 1..20: note = chemically synthesized
  source 1..20: mol_type = other DNA
gattgttgtaattttacatt

SEQ ID NO: 70689 - DNA, 20 bp, synthetic construct
  misc_feature 1..20: note = chemically synthesized
  source 1..20: mol_type = other DNA
catttcacgattatgatgaa

SEQ ID NO: 70690 - DNA, 20 bp, synthetic construct
  misc_feature 1..20: note = chemically synthesized
  source 1..20: mol_type = other DNA
aagacagttttttcagttaa

SEQ ID NO: 70691 - DNA, 20 bp, synthetic construct
  misc_feature 1..20: note = chemically synthesized
  source 1..20: mol_type = other DNA
tttttttggaaattgaatgt

SEQ ID NO: 70692 - DNA, 20 bp, synthetic construct
  misc_feature 1..20: note = chemically synthesized
  source 1..20: mol_type = other DNA
catcaccatcactaccaatg

SEQ ID NO: 70693 - DNA, 20 bp, synthetic construct
  misc_feature 1..20: note = chemically synthesized
  source 1..20: mol_type = other DNA
tttgtcactctaacagttac

SEQ ID NO: 70694 - DNA, 20 bp, synthetic construct
  misc_feature 1..20: note = chemically synthesized
  source 1..20: mol_type = other DNA
ctagacgcagctaacaagca

SEQ ID NO: 70695 - DNA, 20 bp, synthetic construct
  misc_feature 1..20: note = chemically synthesized
  source 1..20: mol_type = other DNA
gggcttgttaggcatgcagc

SEQ ID NO: 70696 - DNA, 20 bp, synthetic construct
  misc_feature 1..20: note = chemically synthesized
  source 1..20: mol_type = other DNA
cttccaacattctgaatcaa

SEQ ID NO: 70697 - DNA, 20 bp, synthetic construct
  misc_feature 1..20: note = chemically synthesized
  source 1..20: mol_type = other DNA
ttcgcttttttcaggtcctc

SEQ ID NO: 70698 - DNA, 20 bp, synthetic construct
  misc_feature 1..20: note = chemically synthesized
  source 1..20: mol_type = other DNA
ctttcgagatagaaaccttt

SEQ ID NO: 70699 - DNA, 20 bp, synthetic construct
  misc_feature 1..20: note = chemically synthesized
  source 1..20: mol_type = other DNA
accttttaatgcttccatcc

SEQ ID NO: 70700 - DNA, 20 bp, synthetic construct
  misc_feature 1..20: note = chemically synthesized
  source 1..20: mol_type = other DNA
tcttcatacaattatctttt

SEQ ID NO: 70701 - DNA, 20 bp, synthetic construct
  misc_feature 1..20: note = chemically synthesized
  source 1..20: mol_type = other DNA
ttatgtttctttcaccattt

SEQ ID NO: 70702 - DNA, 20 bp, synthetic construct
  misc_feature 1..20: note = chemically synthesized
  source 1..20: mol_type = other DNA
ttcccataattaaatactta

SEQ ID NO: 70703 - DNA, 20 bp, synthetic construct
  misc_feature 1..20: note = chemically synthesized
  source 1..20: mol_type = other DNA
tttctgtccttcttacctct

SEQ ID NO: 70704 - DNA, 20 bp, synthetic construct
  misc_feature 1..20: note = chemically synthesized
  source 1..20: mol_type = other DNA
ttctgtaacaggtaaaatta

SEQ ID NO: 70705 - DNA, 20 bp, synthetic construct
  misc_feature 1..20: note = chemically synthesized
  source 1..20: mol_type = other DNA
ctaaggatgccagccatcac

SEQ ID NO: 70706 - DNA, 20 bp, synthetic construct
  misc_feature 1..20: note = chemically synthesized
  source 1..20: mol_type = other DNA
atgccagccatcactactgt

SEQ ID NO: 70707 - DNA, 20 bp, synthetic construct
  misc_feature 1..20: note = chemically synthesized
  source 1..20: mol_type = other DNA
agaggggtatgggagaaaga

SEQ ID NO: 70708 - DNA, 20 bp, synthetic construct
  misc_feature 1..20: note = chemically synthesized
  source 1..20: mol_type = other DNA
gaggcaagtctttagcacct

SEQ ID NO: 70709 - DNA, 20 bp, synthetic construct
  misc_feature 1..20: note = chemically synthesized
  source 1..20: mol_type = other DNA
tctgtatcagctcctgtgag

SEQ ID NO: 70710 - DNA, 20 bp, synthetic construct
  misc_feature 1..20: note = chemically synthesized
  source 1..20: mol_type = other DNA
gagtcaggattactaactta

SEQ ID NO: 70711 - DNA, 20 bp, synthetic construct
  misc_feature 1..20: note = chemically synthesized
  source 1..20: mol_type = other DNA
ttctaccttcgaaagatcct

SEQ ID NO: 70712 - DNA, 20 bp, synthetic construct
  misc_feature 1..20: note = chemically synthesized
  source 1..20: mol_type = other DNA
agatccttcatgcttaaaaa

SEQ ID NO: 70713 - DNA, 20 bp, synthetic construct
  misc_feature 1..20: note = chemically synthesized
  source 1..20: mol_type = other DNA
aggtataggaggaagagaat

SEQ ID NO: 70714 - DNA, 20 bp, synthetic construct
  misc_feature 1..20: note = chemically synthesized
  source 1..20: mol_type = other DNA
acattaaaattttttttaat

SEQ ID NO: 70715 - DNA, 20 bp, synthetic construct
  misc_feature 1..20: note = chemically synthesized
  source 1..20: mol_type = other DNA
taaaaagaaagccataaaat

SEQ ID NO: 70716 - DNA, 20 bp, synthetic construct
  misc_feature 1..20: note = chemically synthesized
  source 1..20: mol_type = other DNA
aaaaattgtgtaaggatcaa

SEQ ID NO: 70717 - DNA, 20 bp, synthetic construct
  misc_feature 1..20: note = chemically synthesized
  source 1..20: mol_type = other DNA
cagagcacaagtacttttta

SEQ ID NO: 70718 - DNA, 20 bp, synthetic construct
  misc_feature 1..20: note = chemically synthesized
  source 1..20: mol_type = other DNA
aagtactttttaaaatgttt

SEQ ID NO: 70719 - DNA, 20 bp, synthetic construct
  misc_feature 1..20: note = chemically synthesized
  source 1..20: mol_type = other DNA
aaacacttgaaaccaaaaaa

SEQ ID NO: 70720 - DNA, 20 bp, synthetic construct
  misc_feature 1..20: note = chemically synthesized
  source 1..20: mol_type = other DNA
ttatatttatgagcagaaaa

SEQ ID NO: 70721 - DNA, 20 bp, synthetic construct
  misc_feature 1..20: note = chemically synthesized
  source 1..20: mol_type = other DNA
agtcatatctccctccatct

SEQ ID NO: 70722 - DNA, 20 bp, synthetic construct
  misc_feature 1..20: note = chemically synthesized
  source 1..20: mol_type = other DNA
aaatgaaaggtaaatcatgt

SEQ ID NO: 70723 - DNA, 20 bp, synthetic construct
  misc_feature 1..20: note = chemically synthesized
  source 1..20: mol_type = other DNA
tttacccagaggcaggcgtg

SEQ ID NO: 70724 - DNA, 20 bp, synthetic construct
  misc_feature 1..20: note = chemically synthesized
  source 1..20: mol_type = other DNA
atgtggcaaaattccattca

SEQ ID NO: 70725 - DNA, 20 bp, synthetic construct
  misc_feature 1..20: note = chemically synthesized
  source 1..20: mol_type = other DNA
attatactagaagcacaaga

SEQ ID NO: 70726 - DNA, 20 bp, synthetic construct
  misc_feature 1..20: note = chemically synthesized
  source 1..20: mol_type = other DNA
cagctctcaactcagaacat

SEQ ID NO: 70727 - DNA, 20 bp, synthetic construct
  misc_feature 1..20: note = chemically synthesized
  source 1..20: mol_type = other DNA
caactcagaacataaatgtt

SEQ ID NO: 70728 - DNA, 20 bp, synthetic construct
  misc_feature 1..20: note = chemically synthesized
  source 1..20: mol_type = other DNA
tggggtcctgacttgatgtg

SEQ ID NO: 70729 - DNA, 20 bp, synthetic construct
  misc_feature 1..20: note = chemically synthesized
  source 1..20: mol_type = other DNA
gcacatgccacacaactgca

SEQ ID NO: 70730 - DNA, 20 bp, synthetic construct
  misc_feature 1..20: note = chemically synthesized
  source 1..20: mol_type = other DNA
agaagctctcaatatggcct

SEQ ID NO: 70731 - DNA, 20 bp, synthetic construct
  misc_feature 1..20: note = chemically synthesized
  source 1..20: mol_type = other DNA
tatggcctatgagtttataa

SEQ ID NO: 70732 - DNA, 20 bp, synthetic construct
  misc_feature 1..20: note = chemically synthesized
  source 1..20: mol_type = other DNA
agaaaaatcatagatctaag

SEQ ID NO: 70733 - DNA, 20 bp, synthetic construct
  misc_feature 1..20: note = chemically synthesized
  source 1..20: mol_type = other DNA
agatctaagccctgcttcat

SEQ ID NO: 70734 - DNA, 20 bp, synthetic construct
  misc_feature 1..20: note = chemically synthesized
  source 1..20: mol_type = other DNA
gatgatatatttctagatga

SEQ ID NO: 70735 - DNA, 20 bp, synthetic construct
  misc_feature 1..20: note = chemically synthesized
  source 1..20: mol_type = other DNA
aacaagtgaaagaggaaaaa

SEQ ID NO: 70736 - DNA, 20 bp, synthetic construct
  misc_feature 1..20: note = chemically synthesized
  source 1..20: mol_type = other DNA
acacagacacacatgcatgt

SEQ ID NO: 70737 - DNA, 20 bp, synthetic construct
  misc_feature 1..20: note = chemically synthesized
  source 1..20: mol_type = other DNA
catgtgtgtgtttcaagggg

SEQ ID NO: 70738 - DNA, 20 bp, synthetic construct
  misc_feature 1..20: note = chemically synthesized
  source 1..20: mol_type = other DNA
tagcagagtgcagaagctca

SEQ ID NO: 70739 - DNA, 20 bp, synthetic construct
  misc_feature 1..20: note = chemically synthesized
  source 1..20: mol_type = other DNA
acagttgggactacccaact

SEQ ID NO: 70740 - DNA, 20 bp, synthetic construct
  misc_feature 1..20: note = chemically synthesized
  source 1..20: mol_type = other DNA
tatattatcatctgccatca

SEQ ID NO: 70741 - DNA, 20 bp, synthetic construct
  misc_feature 1..20: note = chemically synthesized
  source 1..20: mol_type = other DNA
atgatttcattttcaatcca

SEQ ID NO: 70742 - DNA, 20 bp, synthetic construct
  misc_feature 1..20: note = chemically synthesized
  source 1..20: mol_type = other DNA
gcccttttctaagcctttca

SEQ ID NO: 70743 - DNA, 20 bp, synthetic construct
  misc_feature 1..20: note = chemically synthesized
  source 1..20: mol_type = other DNA
ttctggataaacaaaaactg

SEQ ID NO: 70744 - DNA, 20 bp, synthetic construct
  misc_feature 1..20: note = chemically synthesized
  source 1..20: mol_type = other DNA
cattatgcatacatattcct

SEQ ID NO: 70745 - DNA, 20 bp, synthetic construct
  misc_feature 1..20: note = chemically synthesized
  source 1..20: mol_type = other DNA
aaggaggtgagtgataacaa

SEQ ID NO: 70746 - DNA, 20 bp, synthetic construct
  misc_feature 1..20: note = chemically synthesized
  source 1..20: mol_type = other DNA
acttatgccaatccaagggt

SEQ ID NO: 70747 - DNA, 20 bp, synthetic construct
  misc_feature 1..20: note = chemically synthesized
  source 1..20: mol_type = other DNA
gacctctggaaaaccttctt

SEQ ID NO: 70748 - DNA, 20 bp, synthetic construct
  misc_feature 1..20: note = chemically synthesized
  source 1..20: mol_type = other DNA
cctctcatgaggcctcattt

SEQ ID NO: 70749 - DNA, 20 bp, synthetic construct
  misc_feature 1..20: note = chemically synthesized
  source 1..20: mol_type = other DNA
gcatgtggaaatcacctccc

SEQ ID NO: 70750 - DNA, 20 bp, synthetic construct
  misc_feature 1..20: note = chemically synthesized
  source 1..20: mol_type = other DNA
gggccccacaactgatgtcc

SEQ ID NO: 70751 - DNA, 20 bp, synthetic construct
  misc_feature 1..20: note = chemically synthesized
  source 1..20: mol_type = other DNA
ctgatgtcctcgggattttc

SEQ ID NO: 70752 - DNA, 20 bp, synthetic construct
  misc_feature 1..20: note = chemically synthesized
  source 1..20: mol_type = other DNA
ctgatgtaagatagggatac

SEQ ID NO: 70753 - DNA, 20 bp, synthetic construct
  misc_feature 1..20: note = chemically synthesized
  source 1..20: mol_type = other DNA
aaggaggctcagcatcataa

SEQ ID NO: 70754 - DNA, 20 bp, synthetic construct
  misc_feature 1..20: note = chemically synthesized
  source 1..20: mol_type = other DNA
atatgtacctctacgggtcc

SEQ ID NO: 70755 - DNA, 20 bp, synthetic construct
  misc_feature 1..20: note = chemically synthesized
  source 1..20: mol_type = other DNA
ctagagcttatgaattccaa

SEQ ID NO: 70756 - DNA, 20 bp, synthetic construct
  misc_feature 1..20: note = chemically synthesized
  source 1..20: mol_type = other DNA
aatggatctgttaatagtca

SEQ ID NO: 70757 - DNA, 20 bp, synthetic construct
  misc_feature 1..20: note = chemically synthesized
  source 1..20: mol_type = other DNA
agtcatgcagattcatgaca

SEQ ID NO: 70758 - DNA, 20 bp, synthetic construct
  misc_feature 1..20: note = chemically synthesized
  source 1..20: mol_type = other DNA
aaactccacctcccaggttc

SEQ ID NO: 70759 - DNA, 20 bp, synthetic construct
  misc_feature 1..20: note = chemically synthesized
  source 1..20: mol_type = other DNA
ttttgtatttttagtagaca

SEQ ID NO: 70760 - DNA, 20 bp, synthetic construct
  misc_feature 1..20: note = chemically synthesized
  source 1..20: mol_type = other DNA
ctccttggcctcccaaagtg

SEQ ID NO: 70761 - DNA, 20 bp, synthetic construct
  misc_feature 1..20: note = chemically synthesized
  source 1..20: mol_type = other DNA
gtcactgcgcccggctgaca

SEQ ID NO: 70762 - DNA, 20 bp, synthetic construct
  misc_feature 1..20: note = chemically synthesized
  source 1..20: mol_type = other DNA
aacaaggaaggtaacaaata

SEQ ID NO: 70763 - DNA, 20 bp, synthetic construct
  misc_feature 1..20: note = chemically synthesized
  source 1..20: mol_type = other DNA
tagtgtttgtataagtgggg

SEQ ID NO: 70764 - DNA, 20 bp, synthetic construct
  misc_feature 1..20: note = chemically synthesized
  source 1..20: mol_type = other DNA
aagagaatctgtggtagcct

SEQ ID NO: 70765 - DNA, 20 bp, synthetic construct
  misc_feature 1..20: note = chemically synthesized
  source 1..20: mol_type = other DNA
attattattattattatact

SEQ ID NO: 70766 - DNA, 20 bp, synthetic construct
  misc_feature 1..20: note = chemically synthesized
  source 1..20: mol_type = other DNA
agggtacatgtgcacaatgt

SEQ ID NO: 70767 - DNA, 20 bp, synthetic construct
  misc_feature 1..20: note = chemically synthesized
  source 1..20: mol_type = other DNA
cacctatgagtgagaacatg

SEQ ID NO: 70768 - DNA, 20 bp, synthetic construct
  misc_feature 1..20: note = chemically synthesized
  source 1..20: mol_type = other DNA
atgagtgagaacatgcagtg

SEQ ID NO: 70769 - DNA, 20 bp, synthetic construct
  misc_feature 1..20: note = chemically synthesized
  source 1..20: mol_type = other DNA
gcttggttttttgtccttgc

SEQ ID NO: 70770 - DNA, 20 bp, synthetic construct
  misc_feature 1..20: note = chemically synthesized
  source 1..20: mol_type = other DNA
tgcgatagtttgctgagaat

SEQ ID NO: 70771 - DNA, 20 bp, synthetic construct
  misc_feature 1..20: note = chemically synthesized
  source 1..20: mol_type = other DNA
gtttgctgagaatgatggtt

SEQ ID NO: 70772 - DNA, 20 bp, synthetic construct
  misc_feature 1..20: note = chemically synthesized
  source 1..20: mol_type = other DNA
gtgcatgtgtctttatagca

SEQ ID NO: 70773 - DNA, 20 bp, synthetic construct
  misc_feature 1..20: note = chemically synthesized
  source 1..20: mol_type = other DNA
ctgacttccacaatggttga

SEQ ID NO: 70774 - DNA, 20 bp, synthetic construct
  misc_feature 1..20: note = chemically synthesized
  source 1..20: mol_type = other DNA
cctgttgttccctgactttt

SEQ ID NO: 70775 - DNA, 20 bp, synthetic construct
  misc_feature 1..20: note = chemically synthesized
  source 1..20: mol_type = other DNA
ggtgtgagatggtatctctt

SEQ ID NO: 70776 - DNA, 20 bp, synthetic construct
  misc_feature 1..20: note = chemically synthesized
  source 1..20: mol_type = other DNA
gagatggtatctctttgtgg

SEQ ID NO: 70777 - DNA, 20 bp, synthetic construct
  misc_feature 1..20: note = chemically synthesized
  source 1..20: mol_type = other DNA
tttgatttgcattgtgacgt

SEQ ID NO: 70778 - DNA, 20 bp, synthetic construct
  misc_feature 1..20: note = chemically synthesized
  source 1..20: mol_type = other DNA
taaaggtgatgtctgcacag

SEQ ID NO: 70779 - DNA, 20 bp, synthetic construct
  misc_feature 1..20: note = chemically synthesized
  source 1..20: mol_type = other DNA
cagaaagcatgggagaggac

SEQ ID NO: 70780 - DNA, 20 bp, synthetic construct
  misc_feature 1..20: note = chemically synthesized
  source 1..20: mol_type = other DNA
gtaggggaatccagagaggg

SEQ ID NO: 70781 - DNA, 20 bp, synthetic construct
  misc_feature 1..20: note = chemically synthesized
  source 1..20: mol_type = other DNA
tgagaatggaggtgtatctc

SEQ ID NO: 70782 - DNA, 20 bp, synthetic construct
  misc_feature 1..20: note = chemically synthesized
  source 1..20: mol_type = other DNA
ggactccacgatagagaggg

SEQ ID NO: 70783 - DNA, 20 bp, synthetic construct
  misc_feature 1..20: note = chemically synthesized
  source 1..20: mol_type = other DNA
aatcatatatgagatagttc

SEQ ID NO: 70784 - DNA, 20 bp, synthetic construct
  misc_feature 1..20: note = chemically synthesized
  source 1..20: mol_type = other DNA
ggtacaaattcttcaaaatc

SEQ ID NO: 70785 - DNA, 20 bp, synthetic construct
  misc_feature 1..20: note = chemically synthesized
  source 1..20: mol_type = other DNA
gactcaagctaaccagatgc

SEQ ID NO: 70786 - DNA, 20 bp, synthetic construct
  misc_feature 1..20: note = chemically synthesized
  source 1..20: mol_type = other DNA
ctagactatacgacttcatc

SEQ ID NO: 70787 - DNA, 20 bp, synthetic construct
  misc_feature 1..20: note = chemically synthesized
  source 1..20: mol_type = other DNA
tcatcctcagtttcgactcc

SEQ ID NO: 70788 - DNA, 20 bp, synthetic construct
  misc_feature 1..20: note = chemically synthesized
  source 1..20: mol_type = other DNA
ttctaccaccctttcagaca

SEQ ID NO: 70789 - DNA, 20 bp, synthetic construct
  misc_feature 1..20: note = chemically synthesized
  source 1..20: mol_type = other DNA
attttaaaaacctttctacc

SEQ ID NO: 70790 - DNA, 20 bp, synthetic construct
  misc_feature 1..20: note = chemically synthesized
  source 1..20: mol_type = other DNA
actgtgaatatgatacaata

SEQ ID NO: 70791 - DNA, 20 bp, synthetic construct
  misc_feature 1..20: note = chemically synthesized
  source 1..20: mol_type = other DNA
attccatgagcccctaaaag

SEQ ID NO: 70792 - DNA, 20 bp, synthetic construct
  misc_feature 1..20: note = chemically synthesized
  source 1..20: mol_type = other DNA
gaaaggttcatgggtcagtt

SEQ ID NO: 70793 - DNA, 20 bp, synthetic construct
  misc_feature 1..20: note = chemically synthesized
  source 1..20: mol_type = other DNA
ttgggaaactgaggcaggag

SEQ ID NO: 70794 - DNA, 20 bp, synthetic construct
  misc_feature 1..20: note = chemically synthesized
  source 1..20: mol_type = other DNA
aggcacaggttgcagggagc

SEQ ID NO: 70795 - DNA, 20 bp, synthetic construct
  misc_feature 1..20: note = chemically synthesized
  source 1..20: mol_type = other DNA
aatgtgatataataaactaa

SEQ ID NO: 70796 - DNA, 20 bp, synthetic construct
  misc_feature 1..20: note = chemically synthesized
  source 1..20: mol_type = other DNA
actattatccatattttatt

SEQ ID NO: 70797 - DNA, 20 bp, synthetic construct
  misc_feature 1..20: note = chemically synthesized
  source 1..20: mol_type = other DNA
ctataataaactaatattta

SEQ ID NO: 70798 - DNA, 20 bp, synthetic construct
  misc_feature 1..20: note = chemically synthesized
  source 1..20: mol_type = other DNA
catggttcaacttatttagg

SEQ ID NO: 70799 - DNA, 20 bp, synthetic construct
  misc_feature 1..20: note = chemically synthesized
  source 1..20: mol_type = other DNA
gctgtacgtcatccctatcc

SEQ ID NO: 70800 - DNA, 20 bp, synthetic construct
  misc_feature 1..20: note = chemically synthesized
  source 1..20: mol_type = other DNA
aaaacttagcacaaaatttt

SEQ ID NO: 70801 - DNA, 20 bp, synthetic construct
  misc_feature 1..20: note = chemically synthesized
  source 1..20: mol_type = other DNA
tactcccactccaacactaa

SEQ ID NO: 70802 - DNA, 20 bp, synthetic construct
  misc_feature 1..20: note = chemically synthesized
  source 1..20: mol_type = other DNA
aatggccctggaagcaatga

SEQ ID NO: 70803 - DNA, 20 bp, synthetic construct
  misc_feature 1..20: note = chemically synthesized
  source 1..20: mol_type = other DNA
agcaatgacagagtttgaca

SEQ ID NO: 70804 - DNA, 20 bp, synthetic construct
  misc_feature 1..20: note = chemically synthesized
  source 1..20: mol_type = other DNA
tttataaaattttaattact

SEQ ID NO: 70805 - DNA, 20 bp, synthetic construct
  misc_feature 1..20: note = chemically synthesized
  source 1..20: mol_type = other DNA
tgatcactaactgactggta

SEQ ID NO: 70806 - DNA, 20 bp, synthetic construct
  misc_feature 1..20: note = chemically synthesized
  source 1..20: mol_type = other DNA
aagcacccatcacataaaac

SEQ ID NO: 70807 - DNA, 20 bp, synthetic construct
  misc_feature 1..20: note = chemically synthesized
  source 1..20: mol_type = other DNA
atgtggtggaagagaatcca

SEQ ID NO: 70808 - DNA, 20 bp, synthetic construct
  misc_feature 1..20: note = chemically synthesized
  source 1..20: mol_type = other DNA
tgctgagtcctggtgtagaa

SEQ ID NO: 70809 - DNA, 20 bp, synthetic construct
  misc_feature 1..20: note = chemically synthesized
  source 1..20: mol_type = other DNA
ttgcaaaaagaaaacagaat

SEQ ID NO: 70810 - DNA, 20 bp, synthetic construct
  misc_feature 1..20: note = chemically synthesized
  source 1..20: mol_type = other DNA
tatctaactacctttgcctt

SEQ ID NO: 70811 - DNA, 20 bp, synthetic construct
  misc_feature 1..20: note = chemically synthesized
  source 1..20: mol_type = other DNA
ataagctcactcaacttaga

SEQ ID NO: 70812 - DNA, 20 bp, synthetic construct
  misc_feature 1..20: note = chemically synthesized
  source 1..20: mol_type = other DNA
tccctcacacttaatctttt

SEQ ID NO: 70813 - DNA, 20 bp, synthetic construct
  misc_feature 1..20: note = chemically synthesized
  source 1..20: mol_type = other DNA
taatcttttcttggtttcaa

SEQ ID NO: 70814 - DNA, 20 bp, synthetic construct
  misc_feature 1..20: note = chemically synthesized
  source 1..20: mol_type = other DNA
cttttcttggtttcaaataa

SEQ ID NO: 70815 - DNA, 20 bp, synthetic construct
  misc_feature 1..20: note = chemically synthesized
  source 1..20: mol_type = other DNA
ctgataagttctttcaaaca

SEQ ID NO: 70816 - DNA, 20 bp, synthetic construct
  misc_feature 1..20: note = chemically synthesized
  source 1..20: mol_type = other DNA
taagttctttcaaacagtaa

SEQ ID NO: 70817 - DNA, 20 bp, synthetic construct
  misc_feature 1..20: note = chemically synthesized
  source 1..20: mol_type = other DNA
tcttgcccaagaatcagagt

SEQ ID NO: 70818 - DNA, 20 bp, synthetic construct
  misc_feature 1..20: note = chemically synthesized
  source 1..20: mol_type = other DNA
tgcttctggagcaatataaa

SEQ ID NO: 70819 - DNA, 20 bp, synthetic construct
  misc_feature 1..20: note = chemically synthesized
  source 1..20: mol_type = other DNA
ggtggaggtattctttaatc

SEQ ID NO: 70820 - DNA, 20 bp, synthetic construct
  misc_feature 1..20: note = chemically synthesized
  source 1..20: mol_type = other DNA
tcctggaacttagcccaact

SEQ ID NO: 70821 - DNA, 20 bp, synthetic construct
  misc_feature 1..20: note = chemically synthesized
  source 1..20: mol_type = other DNA
agcagaatagtagtaggaaa

SEQ ID NO: 70822 - DNA, 20 bp, synthetic construct
  misc_feature 1..20: note = chemically synthesized
  source 1..20: mol_type = other DNA
attaaaagtcagtctctgga

SEQ ID NO: 70823 - DNA, 20 bp, synthetic construct
  misc_feature 1..20: note = chemically synthesized
  source 1..20: mol_type = other DNA
gtactaagttaaaatttagg

SEQ ID NO: 70824 - DNA, 20 bp, synthetic construct
  misc_feature 1..20: note = chemically synthesized
  source 1..20: mol_type = other DNA
taagttaaaatttaggtctg

SEQ ID NO: 70825 - DNA, 20 bp, synthetic construct
  misc_feature 1..20: note = chemically synthesized
  source 1..20: mol_type = other DNA
tctggattgatttaggggag

SEQ ID NO: 70826 - DNA, 20 bp, synthetic construct
  misc_feature 1..20: note = chemically synthesized
  source 1..20: mol_type = other DNA
aggtagtaagaccctgagat

SEQ ID NO: 70827 - DNA, 20 bp, synthetic construct
  misc_feature 1..20: note = chemically synthesized
  source 1..20: mol_type = other DNA
tcagccaacactcaaagtca

SEQ ID NO: 70828 - DNA, 20 bp, synthetic construct
  misc_feature 1..20: note = chemically synthesized
  source 1..20: mol_type = other DNA
tcatgtcacagcagcataat

SEQ ID NO: 70829 - DNA, 20 bp, synthetic construct
  misc_feature 1..20: note = chemically synthesized
  source 1..20: mol_type = other DNA
aataaaagccttctttgatg

SEQ ID NO: 70830 - DNA, 20 bp, synthetic construct
  misc_feature 1..20: note = chemically synthesized
  source 1..20: mol_type = other DNA
gaaggcaacattcaagtata

SEQ ID NO: 70831 - DNA, 20 bp, synthetic construct
  misc_feature 1..20: note = chemically synthesized
  source 1..20: mol_type = other DNA
gtataataagcttatatcgc

SEQ ID NO: 70832 - DNA, 20 bp, synthetic construct
  misc_feature 1..20: note = chemically synthesized
  source 1..20: mol_type = other DNA
gattcaggaaggtctctatc

SEQ ID NO: 70833 - DNA, 20 bp, synthetic construct
  misc_feature 1..20: note = chemically synthesized
  source 1..20: mol_type = other DNA
ggtctctatcctaggatttt

SEQ ID NO: 70834 - DNA, 20 bp, synthetic construct
  misc_feature 1..20: note = chemically synthesized
  source 1..20: mol_type = other DNA
agtaagtctgtgctgacaat

SEQ ID NO: 70835 - DNA, 20 bp, synthetic construct
  misc_feature 1..20: note = chemically synthesized
  source 1..20: mol_type = other DNA
ttcttttttttttttttctg

SEQ ID NO: 70836 - DNA, 20 bp, synthetic construct
  misc_feature 1..20: note = chemically synthesized
  source 1..20: mol_type = other DNA
tttttttttttttctgtgta

SEQ ID NO: 70837 - DNA, 20 bp, synthetic construct
  misc_feature 1..20: note = chemically synthesized
  source 1..20: mol_type = other DNA
attctattatctgtcagcct

SEQ ID NO: 70838 - DNA, 20 bp, synthetic construct
  misc_feature 1..20: note = chemically synthesized
  source 1..20: mol_type = other DNA
ctggattccacaattatctc

SEQ ID NO: 70839 - DNA, 20 bp, synthetic construct
  misc_feature 1..20: note = chemically synthesized
  source 1..20: mol_type = other DNA
tatttgtcaaacattattct

SEQ ID NO: 70840 - DNA, 20 bp, synthetic construct
  misc_feature 1..20: note = chemically synthesized
  source 1..20: mol_type = other DNA
tattctagatgtttttgtga

SEQ ID NO: 70841 - DNA, 20 bp, synthetic construct
  misc_feature 1..20: note = chemically synthesized
  source 1..20: mol_type = other DNA
ttttgtgagggtgtttttag

SEQ ID NO: 70842 - DNA, 20 bp, synthetic construct
  misc_feature 1..20: note = chemically synthesized
  source 1..20: mol_type = other DNA
agatggtccttcctattgca

SEQ ID NO: 70843 - DNA, 20 bp, synthetic construct
  misc_feature 1..20: note = chemically synthesized
  source 1..20: mol_type = other DNA
tctagacctttttttctgcc

SEQ ID NO: 70844 - DNA, 20 bp, synthetic construct
  misc_feature 1..20: note = chemically synthesized
  source 1..20: mol_type = other DNA
acttcctgggtctgaagcct

SEQ ID NO: 70845 - DNA, 20 bp, synthetic construct
  misc_feature 1..20: note = chemically synthesized
  source 1..20: mol_type = other DNA
tgcaagtacaccatcaatcc

SEQ ID NO: 70846 - DNA, 20 bp, synthetic construct
  misc_feature 1..20: note = chemically synthesized
  source 1..20: mol_type = other DNA
gactaaactaccaggctctc

SEQ ID NO: 70847 - DNA, 20 bp, synthetic construct
  misc_feature 1..20: note = chemically synthesized
  source 1..20: mol_type = other DNA
taggttggtgcaacagtaat

SEQ ID NO: 70848 - DNA, 20 bp, synthetic construct
  misc_feature 1..20: note = chemically synthesized
  source 1..20: mol_type = other DNA
gaggtacatgtgcaggatgt

SEQ ID NO: 70849 - DNA, 20 bp, synthetic construct
  misc_feature 1..20: note = chemically synthesized
  source 1..20: mol_type = other DNA
catacgtaaatgtgtgcaat

SEQ ID NO: 70850 - DNA, 20 bp, synthetic construct
  misc_feature 1..20: note = chemically synthesized
  source 1..20: mol_type = other DNA
ccagtgtgtgttcttcccct

SEQ ID NO: 70851 - DNA, 20 bp, synthetic construct
  misc_feature 1..20: note = chemically synthesized
  source 1..20: mol_type = other DNA
cacttctaagtgagaacatg

SEQ ID NO: 70852 - DNA, 20 bp, synthetic construct
  misc_feature 1..20: note = chemically synthesized
  source 1..20: mol_type = other DNA
ctaagtgagaacatgtggtg

SEQ ID NO: 70853 - DNA, 20 bp, synthetic construct
  misc_feature 1..20: note = chemically synthesized
  source 1..20: mol_type = other DNA
gtttggttttctgttcctgc

SEQ ID NO: 70854 - DNA, 20 bp, synthetic construct
  misc_feature 1..20: note = chemically synthesized
  source 1..20: mol_type = other DNA
tgcattagtttactgaagat

SEQ ID NO: 70855 - DNA, 20 bp, synthetic construct
  misc_feature 1..20: note = chemically synthesized
  source 1..20: mol_type = other DNA
tttatggttagatagtattt

SEQ ID NO: 70856 - DNA, 20 bp, synthetic construct
  misc_feature 1..20: note = chemically synthesized
  source 1..20: mol_type = other DNA
ctatcattgatggccatttg

SEQ ID NO: 70857 - DNA, 20 bp, synthetic construct
  misc_feature 1..20: note = chemically synthesized
  source 1..20: mol_type = other DNA
gtgcatgtatcttagtaata

SEQ ID NO: 70858 - DNA, 20 bp, synthetic construct
  misc_feature 1..20: note = chemically synthesized
  source 1..20: mol_type = other DNA
ctttaggtatatacccagta

SEQ ID NO: 70859 - DNA, 20 bp, synthetic construct
  misc_feature 1..20: note = chemically synthesized
  source 1..20: mol_type = other DNA
ctgtcttccacaatggttga

SEQ ID NO: 70860 - DNA, 20 bp, synthetic construct
  misc_feature 1..20: note = chemically synthesized
  source 1..20: mol_type = other DNA
tctgcaaccttgctagcatc

SEQ ID NO: 70861 - DNA, 20 bp, synthetic construct
  misc_feature 1..20: note = chemically synthesized
  source 1..20: mol_type = other DNA
ggtgtcagatggtatttcat

SEQ ID NO: 70862 - DNA, 20 bp, synthetic construct
  misc_feature 1..20: note = chemically synthesized
  source 1..20: mol_type = other DNA
cagatggtatttcattgtgg

SEQ ID NO: 70863 - DNA, 20 bp, synthetic construct
  misc_feature 1..20: note = chemically synthesized
  source 1..20: mol_type = other DNA
gtgacattgagacttttttc

SEQ ID NO: 70864 - DNA, 20 bp, synthetic construct
  misc_feature 1..20: note = chemically synthesized
  source 1..20: mol_type = other DNA
ctttgcccactttttaatgg

SEQ ID NO: 70865 - DNA, 20 bp, synthetic construct
  misc_feature 1..20: note = chemically synthesized
  source 1..20: mol_type = other DNA
actttttaatggggttgttt

SEQ ID NO: 70866 - DNA, 20 bp, synthetic construct
  misc_feature 1..20: note = chemically synthesized
  source 1..20: mol_type = other DNA
gtaaatatgtctaagttcct

SEQ ID NO: 70867 - DNA, 20 bp, synthetic construct
  misc_feature 1..20: note = chemically synthesized
  source 1..20: mol_type = other DNA
tattagacctttgtcagatg

SEQ ID NO: 70868 - DNA, 20 bp, synthetic construct
  misc_feature 1..20: note = chemically synthesized
  source 1..20: mol_type = other DNA
ggttgcctgttcgctctgat

SEQ ID NO: 70869 - DNA, 20 bp, synthetic construct
  misc_feature 1..20: note = chemically synthesized
  source 1..20: mol_type = other DNA
gctctgatgatagtttattt

SEQ ID NO: 70870 - DNA, 20 bp, synthetic construct
  misc_feature 1..20: note = chemically synthesized
  source 1..20: mol_type = other DNA
tgcctcagcctcctgagtag

SEQ ID NO: 70871 - DNA, 20 bp, synthetic construct
  misc_feature 1..20: note = chemically synthesized
  source 1..20: mol_type = other DNA
ttttgtatttttagtagaga

SEQ ID NO: 70872 - DNA, 20 bp, synthetic construct
  misc_feature 1..20: note = chemically synthesized
  source 1..20: mol_type = other DNA
caccttggcctcccaaagtg

SEQ ID NO: 70873 - DNA, 20 bp, synthetic construct
  misc_feature 1..20: note = chemically synthesized
  source 1..20: mol_type = other DNA
gagccaccatgcccgatctc

SEQ ID NO: 70874 - DNA, 20 bp, synthetic construct
  misc_feature 1..20: note = chemically synthesized
  source 1..20: mol_type = other DNA
tttaattagatctcatttga

SEQ ID NO: 70875 - DNA, 20 bp, synthetic construct
  misc_feature 1..20: note = chemically synthesized
  source 1..20: mol_type = other DNA
attagatctcatttgacagt

SEQ ID NO: 70876 - DNA, 20 bp, synthetic construct
  misc_feature 1..20: note = chemically synthesized
  source 1..20: mol_type = other DNA
acagtgtttgcttttgttgc

SEQ ID NO: 70877 - DNA, 20 bp, synthetic construct
  misc_feature 1..20: note = chemically synthesized
  source 1..20: mol_type = other DNA
tatgtccggaatggtattgc

SEQ ID NO: 70878 - DNA, 20 bp, synthetic construct
  misc_feature 1..20: note = chemically synthesized
  source 1..20: mol_type = other DNA
gtattgcctaggttttcttc

SEQ ID NO: 70879 - DNA, 20 bp, synthetic construct
  misc_feature 1..20: note = chemically synthesized
  source 1..20: mol_type = other DNA
aggttttcttctaaagtttt

SEQ ID NO: 70880 - DNA, 20 bp, synthetic construct
  misc_feature 1..20: note = chemically synthesized
  source 1..20: mol_type = other DNA
cttctaaagtttttatagtt

SEQ ID NO: 70881 - DNA, 20 bp, synthetic construct
  misc_feature 1..20: note = chemically synthesized
  source 1..20: mol_type = other DNA
tataagatgtaaggaagggg

SEQ ID NO: 70882 - DNA, 20 bp, synthetic construct
  misc_feature 1..20: note = chemically synthesized
  source 1..20: mol_type = other DNA
tagggaatcccttccccatt

SEQ ID NO: 70883 - DNA, 20 bp, synthetic construct
  misc_feature 1..20: note = chemically synthesized
  source 1..20: mol_type = other DNA
ttccccattacttgttttta

SEQ ID NO: 70884 - DNA, 20 bp, synthetic construct
  misc_feature 1..20: note = chemically synthesized
  source 1..20: mol_type = other DNA
ttttaccaggtttgttgaag

SEQ ID NO: 70885 - DNA, 20 bp, synthetic construct
  misc_feature 1..20: note = chemically synthesized
  source 1..20: mol_type = other DNA
accaggtttgttgaagatca

SEQ ID NO: 70886 - DNA, 20 bp, synthetic construct
  misc_feature 1..20: note = chemically synthesized
  source 1..20: mol_type = other DNA
tctgttccattagtcagtgt

SEQ ID NO: 70887 - DNA, 20 bp, synthetic construct
  misc_feature 1..20: note = chemically synthesized
  source 1..20: mol_type = other DNA
tctgtttggtatcagtacca

SEQ ID NO: 70888 - DNA, 20 bp, synthetic construct
  misc_feature 1..20: note = chemically synthesized
  source 1..20: mol_type = other DNA
atttgaagttgggtaaatcc

SEQ ID NO: 70889 - DNA, 20 bp, synthetic construct
  misc_feature 1..20: note = chemically synthesized
  source 1..20: mol_type = other DNA
gtgactaatcactgtcatct

SEQ ID NO: 70890 - DNA, 20 bp, synthetic construct
  misc_feature 1..20: note = chemically synthesized
  source 1..20: mol_type = other DNA
ccataaaataaattttgtct

SEQ ID NO: 70891 - DNA, 20 bp, synthetic construct
  misc_feature 1..20: note = chemically synthesized
  source 1..20: mol_type = other DNA
ttaataacaatgactgtgtc

SEQ ID NO: 70892 - DNA, 20 bp, synthetic construct
  misc_feature 1..20: note = chemically synthesized
  source 1..20: mol_type = other DNA
atttaggctataaaatcaaa

SEQ ID NO: 70893 - DNA, 20 bp, synthetic construct
  misc_feature 1..20: note = chemically synthesized
  source 1..20: mol_type = other DNA
catattttttcagtgtgtct

SEQ ID NO: 70894 - DNA, 20 bp, synthetic construct
  misc_feature 1..20: note = chemically synthesized
  source 1..20: mol_type = other DNA
ccacgtcttcttaatcattt

SEQ ID NO: 70895 - DNA, 20 bp, synthetic construct
  misc_feature 1..20: note = chemically synthesized
  source 1..20: mol_type = other DNA
tcttcttaatcatttctaag

SEQ ID NO: 70896 - DNA, 20 bp, synthetic construct
  misc_feature 1..20: note = chemically synthesized
  source 1..20: mol_type = other DNA
aagaaaggatggtatttggc

SEQ ID NO: 70897 - DNA, 20 bp, synthetic construct
  misc_feature 1..20: note = chemically synthesized
  source 1..20: mol_type = other DNA
taatgtatattcttttacac

SEQ ID NO: 70898 - DNA, 20 bp, synthetic construct
  misc_feature 1..20: note = chemically synthesized
  source 1..20: mol_type = other DNA
gaatgatgaaaagctgaatt

SEQ ID NO: 70899 - DNA, 20 bp, synthetic construct
  misc_feature 1..20: note = chemically synthesized
  source 1..20: mol_type = other DNA
ctgctgtaagaaggtggttc

SEQ ID NO: 70900 - DNA, 20 bp, synthetic construct
  misc_feature 1..20: note = chemically synthesized
  source 1..20: mol_type = other DNA
tatgaatacaaattcatgtg

SEQ ID NO: 70901 - DNA, 20 bp, synthetic construct
  misc_feature 1..20: note = chemically synthesized
  source 1..20: mol_type = other DNA
cctaggagatagtgttataa

SEQ ID NO: 70902 - DNA, 20 bp, synthetic construct
  misc_feature 1..20: note = chemically synthesized
  source 1..20: mol_type = other DNA
catatttaaacttgtgtcac

SEQ ID NO: 70903 - DNA, 20 bp, synthetic construct
  misc_feature 1..20: note = chemically synthesized
  source 1..20: mol_type = other DNA
tgtgtcacgagggtttgttg

SEQ ID NO: 70904 - DNA, 20 bp, synthetic construct
  misc_feature 1..20: note = chemically synthesized
  source 1..20: mol_type = other DNA
ataagtgagaacacgtggta

SEQ ID NO: 70905 - DNA, 20 bp, synthetic construct
  misc_feature 1..20: note = chemically synthesized
  source 1..20: mol_type = other DNA
ctgttcctgtattaatttgc

SEQ ID NO: 70906 - DNA, 20 bp, synthetic construct
  misc_feature 1..20: note = chemically synthesized
  source 1..20: mol_type = other DNA
tttatgataatactaacata

SEQ ID NO: 70907 - DNA, 20 bp, synthetic construct
  misc_feature 1..20: note = chemically synthesized
  source 1..20: mol_type = other DNA
atactaacatactgtgttta

SEQ ID NO: 70908 - DNA, 20 bp, synthetic construct
  misc_feature 1..20: note = chemically synthesized
  source 1..20: mol_type = other DNA
tgtttatgttgattgttaca

SEQ ID NO: 70909 - DNA, 20 bp, synthetic construct
  misc_feature 1..20: note = chemically synthesized
  source 1..20: mol_type = other DNA
tgaatagaaaaacatgtctg

SEQ ID NO: 70910 - DNA, 20 bp, synthetic construct
  misc_feature 1..20: note = chemically synthesized
  source 1..20: mol_type = other DNA
ccatgtagccttctgtataa

SEQ ID NO: 70911 - DNA, 20 bp, synthetic construct
  misc_feature 1..20: note = chemically synthesized
  source 1..20: mol_type = other DNA
tacagcatcttctcagtgaa

SEQ ID NO: 70912 - DNA, 20 bp, synthetic construct
  misc_feature 1..20: note = chemically synthesized
  source 1..20: mol_type = other DNA
tcttctacctaacagtattt

SEQ ID NO: 70913 - DNA, 20 bp, synthetic construct
  misc_feature 1..20: note = chemically synthesized
  source 1..20: mol_type = other DNA
cagttttaaatattagttag

SEQ ID NO: 70914 - DNA, 20 bp, synthetic construct
  misc_feature 1..20: note = chemically synthesized
  source 1..20: mol_type = other DNA
acaaaacaaattacaagaag

SEQ ID NO: 70915 - DNA, 20 bp, synthetic construct
  misc_feature 1..20: note = chemically synthesized
  source 1..20: mol_type = other DNA
attaggctgtggaatcaaaa

SEQ ID NO: 70916 - DNA, 20 bp, synthetic construct
  misc_feature 1..20: note = chemically synthesized
  source 1..20: mol_type = other DNA
gtctcaggaaaacatggaat

SEQ ID NO: 70917 - DNA, 20 bp, synthetic construct
  misc_feature 1..20: note = chemically synthesized
  source 1..20: mol_type = other DNA
aaaacatggaatcagagatt

SEQ ID NO: 70918 - DNA, 20 bp, synthetic construct
  misc_feature 1..20: note = chemically synthesized
  source 1..20: mol_type = other DNA
aatttactctaaatatttat

SEQ ID NO: 70919 - DNA, 20 bp, synthetic construct
  misc_feature 1..20: note = chemically synthesized
  source 1..20: mol_type = other DNA
aaagttcttctactgcggtt

SEQ ID NO: 70920 - DNA, 20 bp, synthetic construct
  misc_feature 1..20: note = chemically synthesized
  source 1..20: mol_type = other DNA
ttggagatacaatgcaaaat

SEQ ID NO: 70921 - DNA, 20 bp, synthetic construct
  misc_feature 1..20: note = chemically synthesized
  source 1..20: mol_type = other DNA
gtagagcataattaagggac

SEQ ID NO: 70922 - DNA, 20 bp, synthetic construct
  misc_feature 1..20: note = chemically synthesized
  source 1..20: mol_type = other DNA
gcataattaagggacacatg

SEQ ID NO: 70923 - DNA, 20 bp, synthetic construct
  misc_feature 1..20: note = chemically synthesized
  source 1..20: mol_type = other DNA
ggacacatgtttggttttat

SEQ ID NO: 70924 - DNA, 20 bp, synthetic construct
  misc_feature 1..20: note = chemically synthesized
  source 1..20: mol_type = other DNA
aaggataaaaaacatgataa

SEQ ID NO: 70925 - DNA, 20 bp, synthetic construct
  misc_feature 1..20: note = chemically synthesized
  source 1..20: mol_type = other DNA
ttaatgaaacagaatataaa

SEQ ID NO: 70926 - DNA, 20 bp, synthetic construct
  misc_feature 1..20: note = chemically synthesized
  source 1..20: mol_type = other DNA
aacagaatataaataaggat

SEQ ID NO: 70927 - DNA, 20 bp, synthetic construct
  misc_feature 1..20: note = chemically synthesized
  source 1..20: mol_type = other DNA
tctatgagcaatacctgaga

SEQ ID NO: 70928 - DNA, 20 bp, synthetic construct
  misc_feature 1..20: note = chemically synthesized
  source 1..20: mol_type = other DNA
aagcaagtgcatactgaagc

SEQ ID NO: 70929 - DNA, 20 bp, synthetic construct
  misc_feature 1..20: note = chemically synthesized
  source 1..20: mol_type = other DNA
agtgcatactgaagctggag

SEQ ID NO: 70930 - DNA, 20 bp, synthetic construct
  misc_feature 1..20: note = chemically synthesized
  source 1..20: mol_type = other DNA
tcactgaagtattatttttg

SEQ ID NO: 70931 - DNA, 20 bp, synthetic construct
  misc_feature 1..20: note = chemically synthesized
  source 1..20: mol_type = other DNA
gtctacgtcctctcatttat

SEQ ID NO: 70932 - DNA, 20 bp, synthetic construct
  misc_feature 1..20: note = chemically synthesized
  source 1..20: mol_type = other DNA
tcttctcacatttttttgtt

SEQ ID NO: 70933 - DNA, 20 bp, synthetic construct
  misc_feature 1..20: note = chemically synthesized
  source 1..20: mol_type = other DNA
tactgccttggggaataaat

SEQ ID NO: 70934 - DNA, 20 bp, synthetic construct
  misc_feature 1..20: note = chemically synthesized
  source 1..20: mol_type = other DNA
ttggggaataaatatgagtt

SEQ ID NO: 70935 - DNA, 20 bp, synthetic construct
  misc_feature 1..20: note = chemically synthesized
  source 1..20: mol_type = other DNA
gtaattaggtcactgatcaa

SEQ ID NO: 70936 - DNA, 20 bp, synthetic construct
  misc_feature 1..20: note = chemically synthesized
  source 1..20: mol_type = other DNA
tgaccaaatttataggttcc

SEQ ID NO: 70937 - DNA, 20 bp, synthetic construct
  misc_feature 1..20: note = chemically synthesized
  source 1..20: mol_type = other DNA
gaaattcataagagttggaa

SEQ ID NO: 70938 - DNA, 20 bp, synthetic construct
  misc_feature 1..20: note = chemically synthesized
  source 1..20: mol_type = other DNA
caactaataattttatattt

SEQ ID NO: 70939 - DNA, 20 bp, synthetic construct
  misc_feature 1..20: note = chemically synthesized
  source 1..20: mol_type = other DNA
gttatcacaataatttagtg

SEQ ID NO: 70940 - DNA, 20 bp, synthetic construct
  misc_feature 1..20: note = chemically synthesized
  source 1..20: mol_type = other DNA
gtggaaagcttagagaaata

SEQ ID NO: 70941 - DNA, 20 bp, synthetic construct
  misc_feature 1..20: note = chemically synthesized
  source 1..20: mol_type = other DNA
aactacatttagctaaagag

SEQ ID NO: 70942 - DNA, 20 bp, synthetic construct
  misc_feature 1..20: note = chemically synthesized
  source 1..20: mol_type = other DNA
tttgctctcctgctaaatat

SEQ ID NO: 70943 - DNA, 20 bp, synthetic construct
  misc_feature 1..20: note = chemically synthesized
  source 1..20: mol_type = other DNA
acattctgtgagagtgactg

SEQ ID NO: 70944 - DNA, 20 bp, synthetic construct
  misc_feature 1..20: note = chemically synthesized
  source 1..20: mol_type = other DNA
ggtgaagaatggcattctga

SEQ ID NO: 70945 - DNA, 20 bp, synthetic construct
  misc_feature 1..20: note = chemically synthesized
  source 1..20: mol_type = other DNA
tggtcttgacactatatgtt

SEQ ID NO: 70946 - DNA, 20 bp, synthetic construct
  misc_feature 1..20: note = chemically synthesized
  source 1..20: mol_type = other DNA
tgaggtgaacaatatgtgga

SEQ ID NO: 70947 - DNA, 20 bp, synthetic construct
  misc_feature 1..20: note = chemically synthesized
  source 1..20: mol_type = other DNA
tgaaggtggtatcagcacag

SEQ ID NO: 70948 - DNA, 20 bp, synthetic construct
  misc_feature 1..20: note = chemically synthesized
  source 1..20: mol_type = other DNA
atacagaaaaaaatagaggg

SEQ ID NO: 70949 - DNA, 20 bp, synthetic construct
  misc_feature 1..20: note = chemically synthesized
  source 1..20: mol_type = other DNA
gaaagaagtacatgggctca

SEQ ID NO: 70950 - DNA, 20 bp, synthetic construct
  misc_feature 1..20: note = chemically synthesized
  source 1..20: mol_type = other DNA
aaaaatacggaaatccagtg

SEQ ID NO: 70951 - DNA, 20 bp, synthetic construct
  misc_feature 1..20: note = chemically synthesized
  source 1..20: mol_type = other DNA
agctgccgctggacgacatc

SEQ ID NO: 70952 - DNA, 20 bp, synthetic construct
  misc_feature 1..20: note = chemically synthesized
  source 1..20: mol_type = other DNA
tttatatagaagaaatgtct

SEQ ID NO: 70953 - DNA, 20 bp, synthetic construct
  misc_feature 1..20: note = chemically synthesized
  source 1..20: mol_type = other DNA
gataataatgacatcaatat

SEQ ID NO: 70954 - DNA, 20 bp, synthetic construct
  misc_feature 1..20: note = chemically synthesized
  source 1..20: mol_type = other DNA
ataatgacatcaatataagt

SEQ ID NO: 70955 - DNA, 20 bp, synthetic construct
  misc_feature 1..20: note = chemically synthesized
  source 1..20: mol_type = other DNA
tacctacgtaatcaaattct

SEQ ID NO: 70956 - DNA, 20 bp, synthetic construct
  misc_feature 1..20: note = chemically synthesized
  source 1..20: mol_type = other DNA
aatcaaattcttggagtttc

SEQ ID NO: 70957 - DNA, 20 bp, synthetic construct
  misc_feature 1..20: note = chemically synthesized
  source 1..20: mol_type = other DNA
taaactgttacccttaacta

SEQ ID NO: 70958 - DNA, 20 bp, synthetic construct
  misc_feature 1..20: note = chemically synthesized
  source 1..20: mol_type = other DNA
cgtattctatggggcattca

SEQ ID NO: 70959 - DNA, 20 bp, synthetic construct
  misc_feature 1..20: note = chemically synthesized
  source 1..20: mol_type = other DNA
accactgtagctaaggagca

SEQ ID NO: 70960 - DNA, 20 bp, synthetic construct
  misc_feature 1..20: note = chemically synthesized
  source 1..20: mol_type = other DNA
tgagaaagagacacttggcc

SEQ ID NO: 70961 - DNA, 20 bp, synthetic construct
  misc_feature 1..20: note = chemically synthesized
  source 1..20: mol_type = other DNA
tagtgatggggaacagacat

SEQ ID NO: 70962 - DNA, 20 bp, synthetic construct
  misc_feature 1..20: note = chemically synthesized
  source 1..20: mol_type = other DNA
ttagactttggggctggaat

SEQ ID NO: 70963 - DNA, 20 bp, synthetic construct
  misc_feature 1..20: note = chemically synthesized
  source 1..20: mol_type = other DNA
acttataatagtgtatctcc

SEQ ID NO: 70964 - DNA, 20 bp, synthetic construct
  misc_feature 1..20: note = chemically synthesized
  source 1..20: mol_type = other DNA
ctccttcagtttaaacatct

SEQ ID NO: 70965 - DNA, 20 bp, synthetic construct
  misc_feature 1..20: note = chemically synthesized
  source 1..20: mol_type = other DNA
tatatttaaacatccatctt

SEQ ID NO: 70966 - DNA, 20 bp, synthetic construct
  misc_feature 1..20: note = chemically synthesized
  source 1..20: mol_type = other DNA
ccttccctttatccccagcc

SEQ ID NO: 70967 - DNA, 20 bp, synthetic construct
  misc_feature 1..20: note = chemically synthesized
  source 1..20: mol_type = other DNA
atactgagtgagagctattt

SEQ ID NO: 70968 - DNA, 20 bp, synthetic construct
  misc_feature 1..20: note = chemically synthesized
  source 1..20: mol_type = other DNA
tgctgtcttttactgaagag

SEQ ID NO: 70969 - DNA, 20 bp, synthetic construct
  misc_feature 1..20: note = chemically synthesized
  source 1..20: mol_type = other DNA
agaagagattagtcctttga

SEQ ID NO: 70970 - DNA, 20 bp, synthetic construct
  misc_feature 1..20: note = chemically synthesized
  source 1..20: mol_type = other DNA
attccttctgccactagact

SEQ ID NO: 70971 - DNA, 20 bp, synthetic construct
  misc_feature 1..20: note = chemically synthesized
  source 1..20: mol_type = other DNA
gggcttcttgcatatagaca

SEQ ID NO: 70972 - DNA, 20 bp, synthetic construct
  misc_feature 1..20: note = chemically synthesized
  source 1..20: mol_type = other DNA
tgcatatagacatggtgttt

SEQ ID NO: 70973 - DNA, 20 bp, synthetic construct
  misc_feature 1..20: note = chemically synthesized
  source 1..20: mol_type = other DNA
aattttaaacaaatataaat

SEQ ID NO: 70974 - DNA, 20 bp, synthetic construct
  misc_feature 1..20: note = chemically synthesized
  source 1..20: mol_type = other DNA
cataaaacagtactacttga

SEQ ID NO: 70975 - DNA, 20 bp, synthetic construct
  misc_feature 1..20: note = chemically synthesized
  source 1..20: mol_type = other DNA
tattgtatacaagatagtat

SEQ ID NO: 70976 - DNA, 20 bp, synthetic construct
  misc_feature 1..20: note = chemically synthesized
  source 1..20: mol_type = other DNA
cttacagaccaccacggaat

SEQ ID NO: 70977 - DNA, 20 bp, synthetic construct
  misc_feature 1..20: note = chemically synthesized
  source 1..20: mol_type = other DNA
agaccaccacggaatttttg

SEQ ID NO: 70978 - DNA, 20 bp, synthetic construct
  misc_feature 1..20: note = chemically synthesized
  source 1..20: mol_type = other DNA
accacggaatttttgttttg

SEQ ID NO: 70979 - DNA, 20 bp, synthetic construct
  misc_feature 1..20: note = chemically synthesized
  source 1..20: mol_type = other DNA
gaaaatagtgtggtgatata

SEQ ID NO: 70980 - DNA, 20 bp, synthetic construct
  misc_feature 1..20: note = chemically synthesized
  source 1..20: mol_type = other DNA
gatgcatttttgaagtagtg

SEQ ID NO: 70981 - DNA, 20 bp, synthetic construct
  misc_feature 1..20: note = chemically synthesized
  source 1..20: mol_type = other DNA
ggagtgagggaaaaatcaaa

SEQ ID NO: 70982 - DNA, 20 bp, synthetic construct
  misc_feature 1..20: note = chemically synthesized
  source 1..20: mol_type = other DNA
aaaaatcaaatgaggtttcc

SEQ ID NO: 70983 - DNA, 20 bp, synthetic construct
  misc_feature 1..20: note = chemically synthesized
  source 1..20: mol_type = other DNA
aaatgaggtttcccctagat

SEQ ID NO: 70984 - DNA, 20 bp, synthetic construct
  misc_feature 1..20: note = chemically synthesized
  source 1..20: mol_type = other DNA
tgaattagagcaaatgcatc

SEQ ID NO: 70985 - DNA, 20 bp, synthetic construct
  misc_feature 1..20: note = chemically synthesized
  source 1..20: mol_type = other DNA
atgccagaacaacttcttga

SEQ ID NO: 70986 - DNA, 20 bp, synthetic construct
  misc_feature 1..20: note = chemically synthesized
  source 1..20: mol_type = other DNA
tagagatgagatctaactgt

SEQ ID NO: 70987 - DNA, 20 bp, synthetic construct
  misc_feature 1..20: note = chemically synthesized
  source 1..20: mol_type = other DNA
gttactagacgcaaagataa

SEQ ID NO: 70988 - DNA, 20 bp, synthetic construct
  misc_feature 1..20: note = chemically synthesized
  source 1..20: mol_type = other DNA
tgtcaacactcttacttctc

SEQ ID NO: 70989 - DNA, 20 bp, synthetic construct
  misc_feature 1..20: note = chemically synthesized
  source 1..20: mol_type = other DNA
aagctaaccaaactgtaagg

SEQ ID NO: 70990 - DNA, 20 bp, synthetic construct
  misc_feature 1..20: note = chemically synthesized
  source 1..20: mol_type = other DNA
gccaataataacctgcaact

SEQ ID NO: 70991 - DNA, 20 bp, synthetic construct
  misc_feature 1..20: note = chemically synthesized
  source 1..20: mol_type = other DNA
tgatctatggaatcactcta

SEQ ID NO: 70992 - DNA, 20 bp, synthetic construct
  misc_feature 1..20: note = chemically synthesized
  source 1..20: mol_type = other DNA
gtcctcagctagtcgtggct

SEQ ID NO: 70993 - DNA, 20 bp, synthetic construct
  misc_feature 1..20: note = chemically synthesized
  source 1..20: mol_type = other DNA
aaagactgaggatagaagca

SEQ ID NO: 70994 - DNA, 20 bp, synthetic construct
  misc_feature 1..20: note = chemically synthesized
  source 1..20: mol_type = other DNA
catttacagccataattttt

SEQ ID NO: 70995 - DNA, 20 bp, synthetic construct
  misc_feature 1..20: note = chemically synthesized
  source 1..20: mol_type = other DNA
acagccataatttttctctg

SEQ ID NO: 70996 - DNA, 20 bp, synthetic construct
  misc_feature 1..20: note = chemically synthesized
  source 1..20: mol_type = other DNA
agttggttggtagcacttgg

SEQ ID NO: 70997 - DNA, 20 bp, synthetic construct
  misc_feature 1..20: note = chemically synthesized
  source 1..20: mol_type = other DNA
cttctccgtatctttctctg

SEQ ID NO: 70998 - DNA, 20 bp, synthetic construct
  misc_feature 1..20: note = chemically synthesized
  source 1..20: mol_type = other DNA
ccatactcccaggtaccata

SEQ ID NO: 70999 - DNA, 20 bp, synthetic construct
  misc_feature 1..20: note = chemically synthesized
  source 1..20: mol_type = other DNA
ggaacacttaattagtcccc

SEQ ID NO: 71000 - DNA, 20 bp, synthetic construct
  misc_feature 1..20: note = chemically synthesized
  source 1..20: mol_type = other DNA
acttcaacagtcaaatcttt

SEQ ID NO: 71001 - DNA, 20 bp, synthetic construct
  misc_feature 1..20: note = chemically synthesized
  source 1..20: mol_type = other DNA
acctgaatttctactatatt

SEQ ID NO: 71002 - DNA, 20 bp, synthetic construct
  misc_feature 1..20: note = chemically synthesized
  source 1..20: mol_type = other DNA
aatttctactatatttcctg

SEQ ID NO: 71003 - DNA, 20 bp, synthetic construct
  misc_feature 1..20: note = chemically synthesized
  source 1..20: mol_type = other DNA
cctgcttggtttagatcaga

SEQ ID NO: 71004 - DNA, 20 bp, synthetic construct
  misc_feature 1..20: note = chemically synthesized
  source 1..20: mol_type = other DNA
tatcactaactattcccttc

SEQ ID NO: 71005 - DNA, 20 bp, synthetic construct
  misc_feature 1..20: note = chemically synthesized
  source 1..20: mol_type = other DNA
cttcttgagtttagcctacc

SEQ ID NO: 71006 - DNA, 20 bp, synthetic construct
  misc_feature 1..20: note = chemically synthesized
  source 1..20: mol_type = other DNA
cagcaggcatactcatcaca

SEQ ID NO: 71007 - DNA, 20 bp, synthetic construct
  misc_feature 1..20: note = chemically synthesized
  source 1..20: mol_type = other DNA
tttgtgatggcaattattat

SEQ ID NO: 71008 - DNA, 20 bp, synthetic construct
  misc_feature 1..20: note = chemically synthesized
  source 1..20: mol_type = other DNA
atcaggaatggtctctgggg

SEQ ID NO: 71009 - DNA, 20 bp, synthetic construct
  misc_feature 1..20: note = chemically synthesized
  source 1..20: mol_type = other DNA
tcctaccagccaggctcatg

SEQ ID NO: 71010 - DNA, 20 bp, synthetic construct
  misc_feature 1..20: note = chemically synthesized
  source 1..20: mol_type = other DNA
aactgaagaatggaagggaa

SEQ ID NO: 71011 - DNA, 20 bp, synthetic construct
  misc_feature 1..20: note = chemically synthesized
  source 1..20: mol_type = other DNA
aaaaaaaacagagagatcga

SEQ ID NO: 71012 - DNA, 20 bp, synthetic construct
  misc_feature 1..20: note = chemically synthesized
  source 1..20: mol_type = other DNA
actccctgacatctctaaaa

SEQ ID NO: 71013 - DNA, 20 bp, synthetic construct
  misc_feature 1..20: note = chemically synthesized
  source 1..20: mol_type = other DNA
tcaaatataaaaaagtgaag

SEQ ID NO: 71014 - DNA, 20 bp, synthetic construct
  misc_feature 1..20: note = chemically synthesized
  source 1..20: mol_type = other DNA
gtagtaatttctctccacct

SEQ ID NO: 71015 - DNA, 20 bp, synthetic construct
  misc_feature 1..20: note = chemically synthesized
  source 1..20: mol_type = other DNA
ctgactgattctttaatctc

SEQ ID NO: 71016 - DNA, 20 bp, synthetic construct
  misc_feature 1..20: note = chemically synthesized
  source 1..20: mol_type = other DNA
actaataaaccaattcaaaa

SEQ ID NO: 71017 - DNA, 20 bp, synthetic construct
  misc_feature 1..20: note = chemically synthesized
  source 1..20: mol_type = other DNA
aattcaaaattaagcttgga

SEQ ID NO: 71018 - DNA, 20 bp, synthetic construct
  misc_feature 1..20: note = chemically synthesized
  source 1..20: mol_type = other DNA
gtgtgcctctggatcagggg

SEQ ID NO: 71019 - DNA, 20 bp, synthetic construct
  misc_feature 1..20: note = chemically synthesized
  source 1..20: mol_type = other DNA
tgtgtgactttagcacctgg

SEQ ID NO: 71020 - DNA, 20 bp, synthetic construct
  misc_feature 1..20: note = chemically synthesized
  source 1..20: mol_type = other DNA
ctactcttccatcttctttt

SEQ ID NO: 71021 - DNA, 20 bp, synthetic construct
  misc_feature 1..20: note = chemically synthesized
  source 1..20: mol_type = other DNA
tttcttctagccgccctggc

SEQ ID NO: 71022 - DNA, 20 bp, synthetic construct
  misc_feature 1..20: note = chemically synthesized
  source 1..20: mol_type = other DNA
ctttgcatccttcaatccaa

SEQ ID NO: 71023 - DNA, 20 bp, synthetic construct
  misc_feature 1..20: note = chemically synthesized
  source 1..20: mol_type = other DNA
aaaaaaaggatggagatact

SEQ ID NO: 71024 - DNA, 20 bp, synthetic construct
  misc_feature 1..20: note = chemically synthesized
  source 1..20: mol_type = other DNA
tgaggtgtctgcatagagcc

SEQ ID NO: 71025 - DNA, 20 bp, synthetic construct
  misc_feature 1..20: note = chemically synthesized
  source 1..20: mol_type = other DNA
agagccatcagtttatgcgg

SEQ ID NO: 71026 - DNA, 20 bp, synthetic construct
  misc_feature 1..20: note = chemically synthesized
  source 1..20: mol_type = other DNA
cagagtttgagactttgaga

SEQ ID NO: 71027 - DNA, 20 bp, synthetic construct
  misc_feature 1..20: note = chemically synthesized
  source 1..20: mol_type = other DNA
aatggctgcagggatgaggc

SEQ ID NO: 71028 - DNA, 20 bp, synthetic construct
  misc_feature 1..20: note = chemically synthesized
  source 1..20: mol_type = other DNA
tgcagggatgaggcaaaggt

SEQ ID NO: 71029 - DNA, 20 bp, synthetic construct
  misc_feature 1..20: note = chemically synthesized
  source 1..20: mol_type = other DNA
gagtgaatcaagtgaaagca

SEQ ID NO: 71030 - DNA, 20 bp, synthetic construct
  misc_feature 1..20: note = chemically synthesized
  source 1..20: mol_type = other DNA
gacaagacaaacagctattt

SEQ ID NO: 71031 - DNA, 20 bp, synthetic construct
  misc_feature 1..20: note = chemically synthesized
  source 1..20: mol_type = other DNA
aacaattatttgttccatac

SEQ ID NO: 71032 - DNA, 20 bp, synthetic construct
  misc_feature 1..20: note = chemically synthesized
  source 1..20: mol_type = other DNA
tttgttccatacatttgttt

SEQ ID NO: 71033 - DNA, 20 bp, synthetic construct
  misc_feature 1..20: note = chemically synthesized
  source 1..20: mol_type = other DNA
tccctatctggtattcctac

SEQ ID NO: 71034 - DNA, 20 bp, synthetic construct
  misc_feature 1..20: note = chemically synthesized
  source 1..20: mol_type = other DNA
ttttttttaatttatcaatt

SEQ ID NO: 71035 - DNA, 20 bp, synthetic construct
  misc_feature 1..20: note = chemically synthesized
  source 1..20: mol_type = other DNA
gtagtaatataacacaatta

SEQ ID NO: 71036 - DNA, 20 bp, synthetic construct
  misc_feature 1..20: note = chemically synthesized
  source 1..20: mol_type = other DNA
ttctgtattatcttttccct

SEQ ID NO: 71037 - DNA, 20 bp, synthetic construct
  misc_feature 1..20: note = chemically synthesized
  source 1..20: mol_type = other DNA
gtgaggtgatagatatatta

SEQ ID NO: 71038 - DNA, 20 bp, synthetic construct
  misc_feature 1..20: note = chemically synthesized
  source 1..20: mol_type = other DNA
ggtgatagatatattaatta

SEQ ID NO: 71039 - DNA, 20 bp, synthetic construct
  misc_feature 1..20: note = chemically synthesized
  source 1..20: mol_type = other DNA
tgtacaatttttatttgcca

SEQ ID NO: 71040 - DNA, 20 bp, synthetic construct
  misc_feature 1..20: note = chemically synthesized
  source 1..20: mol_type = other DNA
gtctgaacctctcactggca

SEQ ID NO: 71041 - DNA, 20 bp, synthetic construct
  misc_feature 1..20: note = chemically synthesized
  source 1..20: mol_type = other DNA
ttctcactttttgaggacag

SEQ ID NO: 71042 - DNA, 20 bp, synthetic construct
  misc_feature 1..20: note = chemically synthesized
  source 1..20: mol_type = other DNA
cagacatatcacattttatc

SEQ ID NO: 71043 - DNA, 20 bp, synthetic construct
  misc_feature 1..20: note = chemically synthesized
  source 1..20: mol_type = other DNA
tatctgctgattagagaaac

SEQ ID NO: 71044 - DNA, 20 bp, synthetic construct
  misc_feature 1..20: note = chemically synthesized
  source 1..20: mol_type = other DNA
catcatcttatatctgttcc

SEQ ID NO: 71045 - DNA, 20 bp, synthetic construct
  misc_feature 1..20: note = chemically synthesized
  source 1..20: mol_type = other DNA
acaggttatgtaaccaaatc

SEQ ID NO: 71046 - DNA, 20 bp, synthetic construct
  misc_feature 1..20: note = chemically synthesized
  source 1..20: mol_type = other DNA
tctcacttttgtcaaatccc

SEQ ID NO: 71047 - DNA, 20 bp, synthetic construct
  misc_feature 1..20: note = chemically synthesized
  source 1..20: mol_type = other DNA
tgtcaaatcccatcagattc

SEQ ID NO: 71048 - DNA, 20 bp, synthetic construct
  misc_feature 1..20: note = chemically synthesized
  source 1..20: mol_type = other DNA
ccaagtaggtgatatgcaac

SEQ ID NO: 71049 - DNA, 20 bp, synthetic construct
  misc_feature 1..20: note = chemically synthesized
  source 1..20: mol_type = other DNA
tattatcaattagtgccttc

SEQ ID NO: 71050 - DNA, 20 bp, synthetic construct
  misc_feature 1..20: note = chemically synthesized
  source 1..20: mol_type = other DNA
ttatcatcaaatccacattt

SEQ ID NO: 71051 - DNA, 20 bp, synthetic construct
  misc_feature 1..20: note = chemically synthesized
  source 1..20: mol_type = other DNA
gctgggcaacttagagttct

SEQ ID NO: 71052 - DNA, 20 bp, synthetic construct
  misc_feature 1..20: note = chemically synthesized
  source 1..20: mol_type = other DNA
tctaactacccaaaagtctc

SEQ ID NO: 71053 - DNA, 20 bp, synthetic construct
  misc_feature 1..20: note = chemically synthesized
  source 1..20: mol_type = other DNA
catatatttcttacttgtgt

SEQ ID NO: 71054 - DNA, 20 bp, synthetic construct
  misc_feature 1..20: note = chemically synthesized
  source 1..20: mol_type = other DNA
tttttccatataatctttat

SEQ ID NO: 71055 - DNA, 20 bp, synthetic construct
  misc_feature 1..20: note = chemically synthesized
  source 1..20: mol_type = other DNA
ctttatatctgcttttccaa

SEQ ID NO: 71056 - DNA, 20 bp, synthetic construct
  misc_feature 1..20: note = chemically synthesized
  source 1..20: mol_type = other DNA
agcaccatgaaaagtgacct

SEQ ID NO: 71057 - DNA, 20 bp, synthetic construct
  misc_feature 1..20: note = chemically synthesized
  source 1..20: mol_type = other DNA
attacagcactattcaaata

SEQ ID NO: 71058 - DNA, 20 bp, synthetic construct
  misc_feature 1..20: note = chemically synthesized
  source 1..20: mol_type = other DNA
tatagtgatttcttctttca

SEQ ID NO: 71059 - DNA, 20 bp, synthetic construct
  misc_feature 1..20: note = chemically synthesized
  source 1..20: mol_type = other DNA
ttgtttttattttctgggtt

SEQ ID NO: 71060 - DNA, 20 bp, synthetic construct
  misc_feature 1..20: note = chemically synthesized
  source 1..20: mol_type = other DNA
atgatttacaatgaattcaa

SEQ ID NO: 71061 - DNA, 20 bp, synthetic construct
  misc_feature 1..20: note = chemically synthesized
  source 1..20: mol_type = other DNA
tcaaggagcaacttttatac

SEQ ID NO: 71062 - DNA, 20 bp, synthetic construct
  misc_feature 1..20: note = chemically synthesized
  source 1..20: mol_type = other DNA
acttttatacaactgattac

SEQ ID NO: 71063 - DNA, 20 bp, synthetic construct
  misc_feature 1..20: note = chemically synthesized
  source 1..20: mol_type = other DNA
ctggcaatggggctcaataa

SEQ ID NO: 71064 - DNA, 20 bp, synthetic construct
  misc_feature 1..20: note = chemically synthesized
  source 1..20: mol_type = other DNA
caataagtctgcttccacct

SEQ ID NO: 71065 - DNA, 20 bp, synthetic construct
  misc_feature 1..20: note = chemically synthesized
  source 1..20: mol_type = other DNA
ctgcttccaccttccagctt

SEQ ID NO: 71066 - DNA, 20 bp, synthetic construct
  misc_feature 1..20: note = chemically synthesized
  source 1..20: mol_type = other DNA
tgttctgtggttagatcaca

SEQ ID NO: 71067 - DNA, 20 bp, synthetic construct
  misc_feature 1..20: note = chemically synthesized
  source 1..20: mol_type = other DNA
acagggagattggccatgga

SEQ ID NO: 71068 - DNA, 20 bp, synthetic construct
  misc_feature 1..20: note = chemically synthesized
  source 1..20: mol_type = other DNA
ttctgtcatggagtcaggtg

SEQ ID NO: 71069 - DNA, 20 bp, synthetic construct
  misc_feature 1..20: note = chemically synthesized
  source 1..20: mol_type = other DNA
gagtcaggtgtcttgcttgc

SEQ ID NO: 71070 - DNA, 20 bp, synthetic construct
  misc_feature 1..20: note = chemically synthesized
  source 1..20: mol_type = other DNA
tcttgcttgccatggcttat

SEQ ID NO: 71071 - DNA, 20 bp, synthetic construct
  misc_feature 1..20: note = chemically synthesized
  source 1..20: mol_type = other DNA
cctgaccaacacccaggtaa

SEQ ID NO: 71072 - DNA, 20 bp, synthetic construct
  misc_feature 1..20: note = chemically synthesized
  source 1..20: mol_type = other DNA
gccaatagttgttcgcctac

SEQ ID NO: 71073 - DNA, 20 bp, synthetic construct
  misc_feature 1..20: note = chemically synthesized
  source 1..20: mol_type = other DNA
tgtcgatcccatgtactctc

SEQ ID NO: 71074 - DNA, 20 bp, synthetic construct
  misc_feature 1..20: note = chemically synthesized
  source 1..20: mol_type = other DNA
ttcaaccgtctctatccagt

SEQ ID NO: 71075 - DNA, 20 bp, synthetic construct
  misc_feature 1..20: note = chemically synthesized
  source 1..20: mol_type = other DNA
catcatctttttctcctaca

SEQ ID NO: 71076 - DNA, 20 bp, synthetic construct
  misc_feature 1..20: note = chemically synthesized
  source 1..20: mol_type = other DNA
atcctggtcttctatgtcac

SEQ ID NO: 71077 - DNA, 20 bp, synthetic construct
  misc_feature 1..20: note = chemically synthesized
  source 1..20: mol_type = other DNA
agtttgtctgacatttattc

SEQ ID NO: 71078 - DNA, 20 bp, synthetic construct
  misc_feature 1..20: note = chemically synthesized
  source 1..20: mol_type = other DNA
tatctatagcattaaaacta

SEQ ID NO: 71079 - DNA, 20 bp, synthetic construct
  misc_feature 1..20: note = chemically synthesized
  source 1..20: mol_type = other DNA
agcagattcagagtggcata

SEQ ID NO: 71080 - DNA, 20 bp, synthetic construct
  misc_feature 1..20: note = chemically synthesized
  source 1..20: mol_type = other DNA
tgcctcactctagagcatga

SEQ ID NO: 71081 - DNA, 20 bp, synthetic construct
  misc_feature 1..20: note = chemically synthesized
  source 1..20: mol_type = other DNA
attttaccctgcctgtctat

SEQ ID NO: 71082 - DNA, 20 bp, synthetic construct
  misc_feature 1..20: note = chemically synthesized
  source 1..20: mol_type = other DNA
atatctcagtgctcaactga

SEQ ID NO: 71083 - DNA, 20 bp, synthetic construct
  misc_feature 1..20: note = chemically synthesized
  source 1..20: mol_type = other DNA
ttctcaggtaatttaactca

SEQ ID NO: 71084 - DNA, 20 bp, synthetic construct
  misc_feature 1..20: note = chemically synthesized
  source 1..20: mol_type = other DNA
caggtaatttaactcacatt

SEQ ID NO: 71085 - DNA, 20 bp, synthetic construct
  misc_feature 1..20: note = chemically synthesized
  source 1..20: mol_type = other DNA
aatttaactcacattgtttg

SEQ ID NO: 71086 - DNA, 20 bp, synthetic construct
  misc_feature 1..20: note = chemically synthesized
  source 1..20: mol_type = other DNA
tagtgtgtgtatgtatctgt

SEQ ID NO: 71087 - DNA, 20 bp, synthetic construct
  misc_feature 1..20: note = chemically synthesized
  source 1..20: mol_type = other DNA
tatatatataattcttgggt

SEQ ID NO: 71088 - DNA, 20 bp, synthetic construct
  misc_feature 1..20: note = chemically synthesized
  source 1..20: mol_type = other DNA
tcaatgcccattgctctcca

SEQ ID NO: 71089 - DNA, 20 bp, synthetic construct
  misc_feature 1..20: note = chemically synthesized
  source 1..20: mol_type = other DNA
atacataggaataaggcatt

SEQ ID NO: 71090 - DNA, 20 bp, synthetic construct
  misc_feature 1..20: note = chemically synthesized
  source 1..20: mol_type = other DNA
cttgcatatatggagctggc

SEQ ID NO: 71091 - DNA, 20 bp, synthetic construct
  misc_feature 1..20: note = chemically synthesized
  source 1..20: mol_type = other DNA
tcataaagtggtatgagagg

SEQ ID NO: 71092 - DNA, 20 bp, synthetic construct
  misc_feature 1..20: note = chemically synthesized
  source 1..20: mol_type = other DNA
ccttttctggctccaaatac

SEQ ID NO: 71093 - DNA, 20 bp, synthetic construct
  misc_feature 1..20: note = chemically synthesized
  source 1..20: mol_type = other DNA
agagtctaggcatgagaaga

SEQ ID NO: 71094 - DNA, 20 bp, synthetic construct
  misc_feature 1..20: note = chemically synthesized
  source 1..20: mol_type = other DNA
cagtatccatgactcaaatg

SEQ ID NO: 71095 - DNA, 20 bp, synthetic construct
  misc_feature 1..20: note = chemically synthesized
  source 1..20: mol_type = other DNA
tgaccaaaatacagggtatg

SEQ ID NO: 71096 - DNA, 20 bp, synthetic construct
  misc_feature 1..20: note = chemically synthesized
  source 1..20: mol_type = other DNA
tactcttcatcacagaaagg

SEQ ID NO: 71097 - DNA, 20 bp, synthetic construct
  misc_feature 1..20: note = chemically synthesized
  source 1..20: mol_type = other DNA
cacagaaaggtggggatttt

SEQ ID NO: 71098 - DNA, 20 bp, synthetic construct
  misc_feature 1..20: note = chemically synthesized
  source 1..20: mol_type = other DNA
aaataaaataataccttcac

SEQ ID NO: 71099 - DNA, 20 bp, synthetic construct
  misc_feature 1..20: note = chemically synthesized
  source 1..20: mol_type = other DNA
caggctagtaaatgatcttt

SEQ ID NO: 71100 - DNA, 20 bp, synthetic construct
  misc_feature 1..20: note = chemically synthesized
  source 1..20: mol_type = other DNA
gatctttatctgattagacc

SEQ ID NO: 71101 - DNA, 20 bp, synthetic construct
  misc_feature 1..20: note = chemically synthesized
  source 1..20: mol_type = other DNA
tatctgattagaccaaaaga

SEQ ID NO: 71102 - DNA, 20 bp, synthetic construct
  misc_feature 1..20: note = chemically synthesized
  source 1..20: mol_type = other DNA
tgattagaccaaaagatttt

SEQ ID NO: 71103 - DNA, 20 bp, synthetic construct
  misc_feature 1..20: note = chemically synthesized
  source 1..20: mol_type = other DNA
tgaaatttgcctttctcttt

SEQ ID NO: 71104 - DNA, 20 bp, synthetic construct
  misc_feature 1..20: note = chemically synthesized
  source 1..20: mol_type = other DNA
taatcctgttctttcttccc

SEQ ID NO: 71105 - DNA, 20 bp, synthetic construct
  misc_feature 1..20: note = chemically synthesized
  source 1..20: mol_type = other DNA
gacacatttgactgacaacc

SEQ ID NO: 71106 - DNA, 20 bp, synthetic construct
  misc_feature 1..20: note = chemically synthesized
  source 1..20: mol_type = other DNA
agctgctgagacaaaagaca

SEQ ID NO: 71107 - DNA, 20 bp, synthetic construct
  misc_feature 1..20: note = chemically synthesized
  source 1..20: mol_type = other DNA
cagacctgagagaactctga

SEQ ID NO: 71108 - DNA, 20 bp, synthetic construct
  misc_feature 1..20: note = chemically synthesized
  source 1..20: mol_type = other DNA
tcactgtgtgaagtctgtgc

SEQ ID NO: 71109 - DNA, 20 bp, synthetic construct
  misc_feature 1..20: note = chemically synthesized
  source 1..20: mol_type = other DNA
tcacatcaccaagtgcagca

SEQ ID NO: 71110 - DNA, 20 bp, synthetic construct
  misc_feature 1..20: note = chemically synthesized
  source 1..20: mol_type = other DNA
cccacctccatcgggctcaa

SEQ ID NO: 71111 - DNA, 20 bp, synthetic construct
  misc_feature 1..20: note = chemically synthesized
  source 1..20: mol_type = other DNA
agaatttcagaaagcataga

SEQ ID NO: 71112 - DNA, 20 bp, synthetic construct
  misc_feature 1..20: note = chemically synthesized
  source 1..20: mol_type = other DNA
gaaagcatagagaaagtttg

SEQ ID NO: 71113 - DNA, 20 bp, synthetic construct
  misc_feature 1..20: note = chemically synthesized
  source 1..20: mol_type = other DNA
cattattatagtcaagacga

SEQ ID NO: 71114 - DNA, 20 bp, synthetic construct
  misc_feature 1..20: note = chemically synthesized
  source 1..20: mol_type = other DNA
aaacatctccagccttgaag

SEQ ID NO: 71115 - DNA, 20 bp, synthetic construct
  misc_feature 1..20: note = chemically synthesized
  source 1..20: mol_type = other DNA
taagtttcataaggaaactg

SEQ ID NO: 71116 - DNA, 20 bp, synthetic construct
  misc_feature 1..20: note = chemically synthesized
  source 1..20: mol_type = other DNA
aacattcaaagagcaacacc

SEQ ID NO: 71117 - DNA, 20 bp, synthetic construct
  misc_feature 1..20: note = chemically synthesized
  source 1..20: mol_type = other DNA
aaagatgtcctcatggccta

SEQ ID NO: 71118 - DNA, 20 bp, synthetic construct
  misc_feature 1..20: note = chemically synthesized
  source 1..20: mol_type = other DNA
agttcaagtgaaacactagc

SEQ ID NO: 71119 - DNA, 20 bp, synthetic construct
  misc_feature 1..20: note = chemically synthesized
  source 1..20: mol_type = other DNA
ccacaaatcatctgtaaaag

SEQ ID NO: 71120 - DNA, 20 bp, synthetic construct
  misc_feature 1..20: note = chemically synthesized
  source 1..20: mol_type = other DNA
aggatcaatgtaatgccctg

SEQ ID NO: 71121 - DNA, 20 bp, synthetic construct
  misc_feature 1..20: note = chemically synthesized
  source 1..20: mol_type = other DNA
actttgacaagttgagagaa

SEQ ID NO: 71122 - DNA, 20 bp, synthetic construct
  misc_feature 1..20: note = chemically synthesized
  source 1..20: mol_type = other DNA
atgaatgcacaagactcagt

SEQ ID NO: 71123 - DNA, 20 bp, synthetic construct
  misc_feature 1..20: note = chemically synthesized
  source 1..20: mol_type = other DNA
gaatgaaatgaagcaagaag

SEQ ID NO: 71124 - DNA, 20 bp, synthetic construct
  misc_feature 1..20: note = chemically synthesized
  source 1..20: mol_type = other DNA
tgtgaaaagaccaaatctat

SEQ ID NO: 71125 - DNA, 20 bp, synthetic construct
  misc_feature 1..20: note = chemically synthesized
  source 1..20: mol_type = other DNA
caactacaaggcacataatt

SEQ ID NO: 71126 - DNA, 20 bp, synthetic construct
  misc_feature 1..20: note = chemically synthesized
  source 1..20: mol_type = other DNA
gaatttcatatccagccaaa

SEQ ID NO: 71127 - DNA, 20 bp, synthetic construct
  misc_feature 1..20: note = chemically synthesized
  source 1..20: mol_type = other DNA
tttacagacaagcaaatgct

SEQ ID NO: 71128 - DNA, 20 bp, synthetic construct
  misc_feature 1..20: note = chemically synthesized
  source 1..20: mol_type = other DNA
caatcctcatctctgataaa

SEQ ID NO: 71129 - DNA, 20 bp, synthetic construct
  misc_feature 1..20: note = chemically synthesized
  source 1..20: mol_type = other DNA
cagtgcaatcaaactagaac

SEQ ID NO: 71130 - DNA, 20 bp, synthetic construct
  misc_feature 1..20: note = chemically synthesized
  source 1..20: mol_type = other DNA
aaaaatcaatgaatccagaa

SEQ ID NO: 71131 - DNA, 20 bp, synthetic construct
  misc_feature 1..20: note = chemically synthesized
  source 1..20: mol_type = other DNA
ctgaaattgaggcaataatt

SEQ ID NO: 71132 - DNA, 20 bp, synthetic construct
  misc_feature 1..20: note = chemically synthesized
  source 1..20: mol_type = other DNA
gcaaatccagcagcacatcc

SEQ ID NO: 71133 - DNA, 20 bp, synthetic construct
  misc_feature 1..20: note = chemically synthesized
  source 1..20: mol_type = other DNA
agcttatccaccatgatcaa

SEQ ID NO: 71134 - DNA, 20 bp, synthetic construct
  misc_feature 1..20: note = chemically synthesized
  source 1..20: mol_type = other DNA
cagaaccaaagacaaaaacc

SEQ ID NO: 71135 - DNA, 20 bp, synthetic construct
  misc_feature 1..20: note = chemically synthesized
  source 1..20: mol_type = other DNA
aaaagaggaagtcaaattgt

SEQ ID NO: 71136 - DNA, 20 bp, synthetic construct
  misc_feature 1..20: note = chemically synthesized
  source 1..20: mol_type = other DNA
attgtccctgtttgcagatg

SEQ ID NO: 71137 - DNA, 20 bp, synthetic construct
  misc_feature 1..20: note = chemically synthesized
  source 1..20: mol_type = other DNA
atgagggaactcccattcac

SEQ ID NO: 71138 - DNA, 20 bp, synthetic construct
  misc_feature 1..20: note = chemically synthesized
  source 1..20: mol_type = other DNA
ccatacagcccaaggtaatt

SEQ ID NO: 71139 - DNA, 20 bp, synthetic construct
  misc_feature 1..20: note = chemically synthesized
  source 1..20: mol_type = other DNA
gacaaaaaaaacaaatgggg

SEQ ID NO: 71140 - DNA, 20 bp, synthetic construct
  misc_feature 1..20: note = chemically synthesized
  source 1..20: mol_type = other DNA
ttatacaaaaattaattcaa

SEQ ID NO: 71141 - DNA, 20 bp, synthetic construct
  misc_feature 1..20: note = chemically synthesized
  source 1..20: mol_type = other DNA
aatgggatctaattaaacta

SEQ ID NO: 71142 - DNA, 20 bp, synthetic construct
  misc_feature 1..20: note = chemically synthesized
  source 1..20: mol_type = other DNA
aaccattgtggaagtcagtg

SEQ ID NO: 71143 - DNA, 20 bp, synthetic construct
  misc_feature 1..20: note = chemically synthesized
  source 1..20: mol_type = other DNA
ccattactgggtacatactc

SEQ ID NO: 71144 - DNA, 20 bp, synthetic construct
  misc_feature 1..20: note = chemically synthesized
  source 1..20: mol_type = other DNA
ctataaagacacatgcacat

SEQ ID NO: 71145 - DNA, 20 bp, synthetic construct
  misc_feature 1..20: note = chemically synthesized
  source 1..20: mol_type = other DNA
caaatgtccaacaatgatag

SEQ ID NO: 71146 - DNA, 20 bp, synthetic construct
  misc_feature 1..20: note = chemically synthesized
  source 1..20: mol_type = other DNA
ttttcttttctacccctatg

SEQ ID NO: 71147 - DNA, 20 bp, synthetic construct
  misc_feature 1..20: note = chemically synthesized
  source 1..20: mol_type = other DNA
gagaggagtgggccgtaggg

SEQ ID NO: 71148 - DNA, 20 bp, synthetic construct
  misc_feature 1..20: note = chemically synthesized
  source 1..20: mol_type = other DNA
tttctgaaactaattttctt

SEQ ID NO: 71149 - DNA, 20 bp, synthetic construct
  misc_feature 1..20: note = chemically synthesized
  source 1..20: mol_type = other DNA
gaaactaattttctttgcag

SEQ ID NO: 71150 - DNA, 20 bp, synthetic construct
  misc_feature 1..20: note = chemically synthesized
  source 1..20: mol_type = other DNA
tgttggatccaatatcttga

SEQ ID NO: 71151 - DNA, 20 bp, synthetic construct
  misc_feature 1..20: note = chemically synthesized
  source 1..20: mol_type = other DNA
ataggaatgagcagtagacg

SEQ ID NO: 71152 - DNA, 20 bp, synthetic construct
  misc_feature 1..20: note = chemically synthesized
  source 1..20: mol_type = other DNA
gcagtagacggttggcttat

SEQ ID NO: 71153 - DNA, 20 bp, synthetic construct
  misc_feature 1..20: note = chemically synthesized
  source 1..20: mol_type = other DNA
actccctaaaatctttagaa

SEQ ID NO: 71154 - DNA, 20 bp, synthetic construct
  misc_feature 1..20: note = chemically synthesized
  source 1..20: mol_type = other DNA
tctctggtgtagttccagac

SEQ ID NO: 71155 - DNA, 20 bp, synthetic construct
  misc_feature 1..20: note = chemically synthesized
  source 1..20: mol_type = other DNA
ggtgtagttccagactctgg

SEQ ID NO: 71156 - DNA, 20 bp, synthetic construct
  misc_feature 1..20: note = chemically synthesized
  source 1..20: mol_type = other DNA
gctctcttcgggctgcataa

SEQ ID NO: 71157 - DNA, 20 bp, synthetic construct
  misc_feature 1..20: note = chemically synthesized
  source 1..20: mol_type = other DNA
acagaaagaaaaacttacca

SEQ ID NO: 71158 - DNA, 20 bp, synthetic construct
  misc_feature 1..20: note = chemically synthesized
  source 1..20: mol_type = other DNA
aacttaccaaatagattagt

SEQ ID NO: 71159 - DNA, 20 bp, synthetic construct
  misc_feature 1..20: note = chemically synthesized
  source 1..20: mol_type = other DNA
gcaaactttgacatgaggca

SEQ ID NO: 71160 - DNA, 20 bp, synthetic construct
  misc_feature 1..20: note = chemically synthesized
  source 1..20: mol_type = other DNA
ccttataaaccaaagtcaga

SEQ ID NO: 71161 - DNA, 20 bp, synthetic construct
  misc_feature 1..20: note = chemically synthesized
  source 1..20: mol_type = other DNA
ccatgctgagctatcagcac

SEQ ID NO: 71162 - DNA, 20 bp, synthetic construct
  misc_feature 1..20: note = chemically synthesized
  source 1..20: mol_type = other DNA
atagagagtgatagtggatc

SEQ ID NO: 71163 - DNA, 20 bp, synthetic construct
  misc_feature 1..20: note = chemically synthesized
  source 1..20: mol_type = other DNA
ggatgggagtagataaggaa

SEQ ID NO: 71164 - DNA, 20 bp, synthetic construct
  misc_feature 1..20: note = chemically synthesized
  source 1..20: mol_type = other DNA
acccagatgaaaatggtgct

SEQ ID NO: 71165 - DNA, 20 bp, synthetic construct
  misc_feature 1..20: note = chemically synthesized
  source 1..20: mol_type = other DNA
tgtagatcagatgatcagtc

SEQ ID NO: 71166 - DNA, 20 bp, synthetic construct
  misc_feature 1..20: note = chemically synthesized
  source 1..20: mol_type = other DNA
tgagccttataatgagaatg

SEQ ID NO: 71167 - DNA, 20 bp, synthetic construct
  misc_feature 1..20: note = chemically synthesized
  source 1..20: mol_type = other DNA
aagtcttctggtggcagagt

SEQ ID NO: 71168 - DNA, 20 bp, synthetic construct
  misc_feature 1..20: note = chemically synthesized
  source 1..20: mol_type = other DNA
caacccagctgtcttccccc

SEQ ID NO: 71169 - DNA, 20 bp, synthetic construct
  misc_feature 1..20: note = chemically synthesized
  source 1..20: mol_type = other DNA
tgtcttcccccatctgattg

SEQ ID NO: 71170 - DNA, 20 bp, synthetic construct
  misc_feature 1..20: note = chemically synthesized
  source 1..20: mol_type = other DNA
atgttcttcaccacctggtt

SEQ ID NO: 71171 - DNA, 20 bp, synthetic construct
  misc_feature 1..20: note = chemically synthesized
  source 1..20: mol_type = other DNA
ccttggtggcctcactcttc

SEQ ID NO: 71172 - DNA, 20 bp, synthetic construct
  misc_feature 1..20: note = chemically synthesized
  source 1..20: mol_type = other DNA
gtgcccaagagtaacaacca

SEQ ID NO: 71173 - DNA, 20 bp, synthetic construct
  misc_feature 1..20: note = chemically synthesized
  source 1..20: mol_type = other DNA
accaggtggcttcactgaat

SEQ ID NO: 71174 - DNA, 20 bp, synthetic construct
  misc_feature 1..20: note = chemically synthesized
  source 1..20: mol_type = other DNA
tgaatccctgcttttgtaaa

SEQ ID NO: 71175 - DNA, 20 bp, synthetic construct
  misc_feature 1..20: note = chemically synthesized
  source 1..20: mol_type = other DNA
attgctggaagtgtcccgcc

SEQ ID NO: 71176 - DNA, 20 bp, synthetic construct
  misc_feature 1..20: note = chemically synthesized
  source 1..20: mol_type = other DNA
aagaaataatagaagttagg

SEQ ID NO: 71177 - DNA, 20 bp, synthetic construct
  misc_feature 1..20: note = chemically synthesized
  source 1..20: mol_type = other DNA
agtggcattcctccatgaga

SEQ ID NO: 71178 - DNA, 20 bp, synthetic construct
  misc_feature 1..20: note = chemically synthesized
  source 1..20: mol_type = other DNA
ccctgagtgtcttcaaaact

SEQ ID NO: 71179 - DNA, 20 bp, synthetic construct
  misc_feature 1..20: note = chemically synthesized
  source 1..20: mol_type = other DNA
aactcaaagttttacgaaca

SEQ ID NO: 71180 - DNA, 20 bp, synthetic construct
  misc_feature 1..20: note = chemically synthesized
  source 1..20: mol_type = other DNA
tttcatcaatacaggatctc

SEQ ID NO: 71181 - DNA, 20 bp, synthetic construct
  misc_feature 1..20: note = chemically synthesized
  source 1..20: mol_type = other DNA
cacaccggtgagtggacaga

SEQ ID NO: 71182 - DNA, 20 bp, synthetic construct
  misc_feature 1..20: note = chemically synthesized
  source 1..20: mol_type = other DNA
tgatgcagcagtattggaat

SEQ ID NO: 71183 - DNA, 20 bp, synthetic construct
  misc_feature 1..20: note = chemically synthesized
  source 1..20: mol_type = other DNA
gtattggaattacagttttt

SEQ ID NO: 71184 - DNA, 20 bp, synthetic construct
  misc_feature 1..20: note = chemically synthesized
  source 1..20: mol_type = other DNA
gaattacagttttttttggt

SEQ ID NO: 71185 - DNA, 20 bp, synthetic construct
  misc_feature 1..20: note = chemically synthesized
  source 1..20: mol_type = other DNA
tattaaaccaagcacagata

SEQ ID NO: 71186 - DNA, 20 bp, synthetic construct
  misc_feature 1..20: note = chemically synthesized
  source 1..20: mol_type = other DNA
gcagaaagaagatatattga

SEQ ID NO: 71187 - DNA, 20 bp, synthetic construct
  misc_feature 1..20: note = chemically synthesized
  source 1..20: mol_type = other DNA
gatttttctcatagatacta

SEQ ID NO: 71188 - DNA, 20 bp, synthetic construct
  misc_feature 1..20: note = chemically synthesized
  source 1..20: mol_type = other DNA
aacaactctgccatttggcc

SEQ ID NO: 71189 - DNA, 20 bp, synthetic construct
  misc_feature 1..20: note = chemically synthesized
  source 1..20: mol_type = other DNA
tctgccatttggccatttgc

SEQ ID NO: 71190 - DNA, 20 bp, synthetic construct
  misc_feature 1..20: note = chemically synthesized
  source 1..20: mol_type = other DNA
gcgggaaagtagcattttca

SEQ ID NO: 71191 - DNA, 20 bp, synthetic construct
  misc_feature 1..20: note = chemically synthesized
  source 1..20: mol_type = other DNA
acccatttctgtaaaggagg

SEQ ID NO: 71192 - DNA, 20 bp, synthetic construct
  misc_feature 1..20: note = chemically synthesized
  source 1..20: mol_type = other DNA
agaatgcctgggctggagaa

SEQ ID NO: 71193 - DNA, 20 bp, synthetic construct
  misc_feature 1..20: note = chemically synthesized
  source 1..20: mol_type = other DNA
gggcttcacaacagtgtagt

SEQ ID NO: 71194 - DNA, 20 bp, synthetic construct
  misc_feature 1..20: note = chemically synthesized
  source 1..20: mol_type = other DNA
attctccatggttgcaataa

SEQ ID NO: 71195 - DNA, 20 bp, synthetic construct
  misc_feature 1..20: note = chemically synthesized
  source 1..20: mol_type = other DNA
atggttgcaataaggtcgat

SEQ ID NO: 71196 - DNA, 20 bp, synthetic construct
  misc_feature 1..20: note = chemically synthesized
  source 1..20: mol_type = other DNA
aaaagctcatctagctatga

SEQ ID NO: 71197 - DNA, 20 bp, synthetic construct
  misc_feature 1..20: note = chemically synthesized
  source 1..20: mol_type = other DNA
acaaagtttgacatagttag

SEQ ID NO: 71198 - DNA, 20 bp, synthetic construct
  misc_feature 1..20: note = chemically synthesized
  source 1..20: mol_type = other DNA
aggtcatggtaaggctatga

SEQ ID NO: 71199 - DNA, 20 bp, synthetic construct
  misc_feature 1..20: note = chemically synthesized
  source 1..20: mol_type = other DNA
gatatgagagctgcacatct

SEQ ID NO: 71200 - DNA, 20 bp, synthetic construct
  misc_feature 1..20: note = chemically synthesized
  source 1..20: mol_type = other DNA
gactataaattcaactacat

SEQ ID NO: 71201 - DNA, 20 bp, synthetic construct
  misc_feature 1..20: note = chemically synthesized
  source 1..20: mol_type = other DNA
ctacatgccagctttaagca

SEQ ID NO: 71202 - DNA, 20 bp, synthetic construct
  misc_feature 1..20: note = chemically synthesized
  source 1..20: mol_type = other DNA
cacagtgctttgaagagagt

SEQ ID NO: 71203 - DNA, 20 bp, synthetic construct
  misc_feature 1..20: note = chemically synthesized
  source 1..20: mol_type = other DNA
tcatgtgcatctctgaatat

SEQ ID NO: 71204 - DNA, 20 bp, synthetic construct
  misc_feature 1..20: note = chemically synthesized
  source 1..20: mol_type = other DNA
cactctaaggcagccctcta

SEQ ID NO: 71205 - DNA, 20 bp, synthetic construct
  misc_feature 1..20: note = chemically synthesized
  source 1..20: mol_type = other DNA
caaagtgaatgatcaaagtc

SEQ ID NO: 71206 - DNA, 20 bp, synthetic construct
  misc_feature 1..20: note = chemically synthesized
  source 1..20: mol_type = other DNA
acaggactttgttacctttc

SEQ ID NO: 71207 - DNA, 20 bp, synthetic construct
  misc_feature 1..20: note = chemically synthesized
  source 1..20: mol_type = other DNA
attggtgaatttccatttaa

SEQ ID NO: 71208 - DNA, 20 bp, synthetic construct
  misc_feature 1..20: note = chemically synthesized
  source 1..20: mol_type = other DNA
ccatttaatatagttttatt

SEQ ID NO: 71209 - DNA, 20 bp, synthetic construct
  misc_feature 1..20: note = chemically synthesized
  source 1..20: mol_type = other DNA
agtaaataatttttaatcat

SEQ ID NO: 71210 - DNA, 20 bp, synthetic construct
  misc_feature 1..20: note = chemically synthesized
  source 1..20: mol_type = other DNA
tgaagtaacagaaggctaca

SEQ ID NO: 71211 - DNA, 20 bp, synthetic construct
  misc_feature 1..20: note = chemically synthesized
  source 1..20: mol_type = other DNA
tacaaggggatttctcaagt

SEQ ID NO: 71212 - DNA, 20 bp, synthetic construct
  misc_feature 1..20: note = chemically synthesized
  source 1..20: mol_type = other DNA
aaaaccaaatgtgtcaataa

SEQ ID NO: 71213 - DNA, 20 bp, synthetic construct
  misc_feature 1..20: note = chemically synthesized
  source 1..20: mol_type = other DNA
taataaccttgaattcaagt

SEQ ID NO: 71214 - DNA, 20 bp, synthetic construct
  misc_feature 1..20: note = chemically synthesized
  source 1..20: mol_type = other DNA
ttagagtgtagggctggcaa

SEQ ID NO: 71215 - DNA, 20 bp, synthetic construct
  misc_feature 1..20: note = chemically synthesized
  source 1..20: mol_type = other DNA
cagtgttattagaataccac

SEQ ID NO: 71216 - DNA, 20 bp, synthetic construct
  misc_feature 1..20: note = chemically synthesized
  source 1..20: mol_type = other DNA
aggatatggctgtactacct

SEQ ID NO: 71217 - DNA, 20 bp, synthetic construct
  misc_feature 1..20: note = chemically synthesized
  source 1..20: mol_type = other DNA
attatcgagatgcacatgac

SEQ ID NO: 71218 - DNA, 20 bp, synthetic construct
  misc_feature 1..20: note = chemically synthesized
  source 1..20: mol_type = other DNA
gaggccctaatgagaaacat

SEQ ID NO: 71219 - DNA, 20 bp, synthetic construct
  misc_feature 1..20: note = chemically synthesized
  source 1..20: mol_type = other DNA
taattatttaaaaaatagat

SEQ ID NO: 71220 - DNA, 20 bp, synthetic construct
  misc_feature 1..20: note = chemically synthesized
  source 1..20: mol_type = other DNA
cacattgtctagcacattat

SEQ ID NO: 71221 - DNA, 20 bp, synthetic construct
  misc_feature 1..20: note = chemically synthesized
  source 1..20: mol_type = other DNA
attatagatgcttagtatgt

SEQ ID NO: 71222 - DNA, 20 bp, synthetic construct
  misc_feature 1..20: note = chemically synthesized
  source 1..20: mol_type = other DNA
gtgctggcttgatgacagga

SEQ ID NO: 71223 - DNA, 20 bp, synthetic construct
  misc_feature 1..20: note = chemically synthesized
  source 1..20: mol_type = other DNA
gctaaccattcttagaggaa

SEQ ID NO: 71224 - DNA, 20 bp, synthetic construct
  misc_feature 1..20: note = chemically synthesized
  source 1..20: mol_type = other DNA
atggagcagccaggtaatca

SEQ ID NO: 71225 - DNA, 20 bp, synthetic construct
  misc_feature 1..20: note = chemically synthesized
  source 1..20: mol_type = other DNA
aatggaagagttgctgaggg

SEQ ID NO: 71226 - DNA, 20 bp, synthetic construct
  misc_feature 1..20: note = chemically synthesized
  source 1..20: mol_type = other DNA
acaggaggctgaggtaggag

SEQ ID NO: 71227 - DNA, 20 bp, synthetic construct
  misc_feature 1..20: note = chemically synthesized
  source 1..20: mol_type = other DNA
aaggaaatcagggtattcac

SEQ ID NO: 71228 - DNA, 20 bp, synthetic construct
  misc_feature 1..20: note = chemically synthesized
  source 1..20: mol_type = other DNA
aaaaattaaaatttgggaaa

SEQ ID NO: 71229 - DNA, 20 bp, synthetic construct
  misc_feature 1..20: note = chemically synthesized
  source 1..20: mol_type = other DNA
tctgtgcaatgcaggactgg

SEQ ID NO: 71230 - DNA, 20 bp, synthetic construct
  misc_feature 1..20: note = chemically synthesized
  source 1..20: mol_type = other DNA
aaggtttaggcaggggtgct

SEQ ID NO: 71231 - DNA, 20 bp, synthetic construct
  misc_feature 1..20: note = chemically synthesized
  source 1..20: mol_type = other DNA
gattcatgagacaacaggca

SEQ ID NO: 71232 - DNA, 20 bp, synthetic construct
  misc_feature 1..20: note = chemically synthesized
  source 1..20: mol_type = other DNA
gtctcctaacattcccctcc

SEQ ID NO: 71233 - DNA, 20 bp, synthetic construct
  misc_feature 1..20: note = chemically synthesized
  source 1..20: mol_type = other DNA
attcccctcccaaagtttga

SEQ ID NO: 71234 - DNA, 20 bp, synthetic construct
  misc_feature 1..20: note = chemically synthesized
  source 1..20: mol_type = other DNA
tgcaaagccacttagtgaca

SEQ ID NO: 71235 - DNA, 20 bp, synthetic construct
  misc_feature 1..20: note = chemically synthesized
  source 1..20: mol_type = other DNA
tggaataaaatcattttgaa

SEQ ID NO: 71236 - DNA, 20 bp, synthetic construct
  misc_feature 1..20: note = chemically synthesized
  source 1..20: mol_type = other DNA
ccagaccctaagagagggtt

SEQ ID NO: 71237 - DNA, 20 bp, synthetic construct
  misc_feature 1..20: note = chemically synthesized
  source 1..20: mol_type = other DNA
tgatgatatgctaaacaagg

SEQ ID NO: 71238 - DNA, 20 bp, synthetic construct
  misc_feature 1..20: note = chemically synthesized
  source 1..20: mol_type = other DNA
attcatgcctccccttttca

SEQ ID NO: 71239 - DNA, 20 bp, synthetic construct
  misc_feature 1..20: note = chemically synthesized
  source 1..20: mol_type = other DNA
gaggtcactctcatcacaat

SEQ ID NO: 71240 - DNA, 20 bp, synthetic construct
  misc_feature 1..20: note = chemically synthesized
  source 1..20: mol_type = other DNA
ctcatcacaatcttggtttg

SEQ ID NO: 71241 - DNA, 20 bp, synthetic construct
  misc_feature 1..20: note = chemically synthesized
  source 1..20: mol_type = other DNA
tcttggtttggtgggtttca

SEQ ID NO: 71242 - DNA, 20 bp, synthetic construct
  misc_feature 1..20: note = chemically synthesized
  source 1..20: mol_type = other DNA
cagccagcttctttactgca

SEQ ID NO: 71243 - DNA, 20 bp, synthetic construct
  misc_feature 1..20: note = chemically synthesized
  source 1..20: mol_type = other DNA
tctgacaaaaggaacaaaaa

SEQ ID NO: 71244 - DNA, 20 bp, synthetic construct
  misc_feature 1..20: note = chemically synthesized
  source 1..20: mol_type = other DNA
aaaaatgtattttttttcac

SEQ ID NO: 71245 - DNA, 20 bp, synthetic construct
  misc_feature 1..20: note = chemically synthesized
  source 1..20: mol_type = other DNA
ctatatctatttttatgtcc

SEQ ID NO: 71246 - DNA, 20 bp, synthetic construct
  misc_feature 1..20: note = chemically synthesized
  source 1..20: mol_type = other DNA
gcattttcctatccttactc

SEQ ID NO: 71247 - DNA, 20 bp, synthetic construct
  misc_feature 1..20: note = chemically synthesized
  source 1..20: mol_type = other DNA
gtgaggaatcagacattctt

SEQ ID NO: 71248 - DNA, 20 bp, synthetic construct
  misc_feature 1..20: note = chemically synthesized
  source 1..20: mol_type = other DNA
tcttacaccccacaactaac

SEQ ID NO: 71249 - DNA, 20 bp, synthetic construct
  misc_feature 1..20: note = chemically synthesized
  source 1..20: mol_type = other DNA
gctcactcagaactctcttt

SEQ ID NO: 71250 - DNA, 20 bp, synthetic construct
  misc_feature 1..20: note = chemically synthesized
  source 1..20: mol_type = other DNA
ctttgttttttcctctgcca

SEQ ID NO: 71251 - DNA, 20 bp, synthetic construct
  misc_feature 1..20: note = chemically synthesized
  source 1..20: mol_type = other DNA
aaaatcctgttaagtgttct

SEQ ID NO: 71252 - DNA, 20 bp, synthetic construct
  misc_feature 1..20: note = chemically synthesized
  source 1..20: mol_type = other DNA
tctgtaggcttcttgaaacc

SEQ ID NO: 71253 - DNA, 20 bp, synthetic construct
  misc_feature 1..20: note = chemically synthesized
  source 1..20: mol_type = other DNA
gcttcttgaaacctattgtt

SEQ ID NO: 71254 - DNA, 20 bp, synthetic construct
  misc_feature 1..20: note = chemically synthesized
  source 1..20: mol_type = other DNA
ttcttcatacagtcttatgc

SEQ ID NO: 71255 - DNA, 20 bp, synthetic construct
  misc_feature 1..20: note = chemically synthesized
  source 1..20: mol_type = other DNA
tgcagtagttttgggaatta

SEQ ID NO: 71256 - DNA, 20 bp, synthetic construct
  misc_feature 1..20: note = chemically synthesized
  source 1..20: mol_type = other DNA
tagttttgggaattaaacag

SEQ ID NO: 71257 - DNA, 20 bp, synthetic construct
  misc_feature 1..20: note = chemically synthesized
  source 1..20: mol_type = other DNA
tagcaaagcaatttatcttt

SEQ ID NO: 71258 - DNA, 20 bp, synthetic construct
  misc_feature 1..20: note = chemically synthesized
  source 1..20: mol_type = other DNA
cccacatggttgaattattt

SEQ ID NO: 71259 - DNA, 20 bp, synthetic construct
  misc_feature 1..20: note = chemically synthesized
  source 1..20: mol_type = other DNA
gatattctaacataaagact

SEQ ID NO: 71260 - DNA, 20 bp, synthetic construct
  misc_feature 1..20: note = chemically synthesized
  source 1..20: mol_type = other DNA
gtgagaaagcagagcatagt

SEQ ID NO: 71261 - DNA, 20 bp, synthetic construct
  misc_feature 1..20: note = chemically synthesized
  source 1..20: mol_type = other DNA
aagcagagcatagtagaggt

SEQ ID NO: 71262 - DNA, 20 bp, synthetic construct
  misc_feature 1..20: note = chemically synthesized
  source 1..20: mol_type = other DNA
tatctgtcaagagcaaaatt

SEQ ID NO: 71263 - DNA, 20 bp, synthetic construct
  misc_feature 1..20: note = chemically synthesized
  source 1..20: mol_type = other DNA
acattgagttactcaaaata

SEQ ID NO: 71264 - DNA, 20 bp, synthetic construct
  misc_feature 1..20: note = chemically synthesized
  source 1..20: mol_type = other DNA
aacctcagcataggccttct

SEQ ID NO: 71265 - DNA, 20 bp, synthetic construct
  misc_feature 1..20: note = chemically synthesized
  source 1..20: mol_type = other DNA
taggccttctgaaagcttac

SEQ ID NO: 71266 - DNA, 20 bp, synthetic construct
  misc_feature 1..20: note = chemically synthesized
  source 1..20: mol_type = other DNA
tggaatttacaccattctta

SEQ ID NO: 71267 - DNA, 20 bp, synthetic construct
  misc_feature 1..20: note = chemically synthesized
  source 1..20: mol_type = other DNA
ccattcttatgtggattaag

SEQ ID NO: 71268 - DNA, 20 bp, synthetic construct
  misc_feature 1..20: note = chemically synthesized
  source 1..20: mol_type = other DNA
aggaactttttctttccgga

SEQ ID NO: 71269 - DNA, 20 bp, synthetic construct
  misc_feature 1..20: note = chemically synthesized
  source 1..20: mol_type = other DNA
tttccggatcatgcttacag

SEQ ID NO: 71270 - DNA, 20 bp, synthetic construct
  misc_feature 1..20: note = chemically synthesized
  source 1..20: mol_type = other DNA
agccaactagatgtggacaa

SEQ ID NO: 71271 - DNA, 20 bp, synthetic construct
  misc_feature 1..20: note = chemically synthesized
  source 1..20: mol_type = other DNA
acacatataacctgagtccc

SEQ ID NO: 71272 - DNA, 20 bp, synthetic construct
  misc_feature 1..20: note = chemically synthesized
  source 1..20: mol_type = other DNA
tggggtagtagaaacaaagt

SEQ ID NO: 71273 - DNA, 20 bp, synthetic construct
  misc_feature 1..20: note = chemically synthesized
  source 1..20: mol_type = other DNA
tgatgccacactaaaatcag

SEQ ID NO: 71274 - DNA, 20 bp, synthetic construct
  misc_feature 1..20: note = chemically synthesized
  source 1..20: mol_type = other DNA
ttgttaaaagtgatgacctc

SEQ ID NO: 71275 - DNA, 20 bp, synthetic construct
  misc_feature 1..20: note = chemically synthesized
  source 1..20: mol_type = other DNA
aagaaagggaagacattttc

SEQ ID NO: 71276 - DNA, 20 bp, synthetic construct
  misc_feature 1..20: note = chemically synthesized
  source 1..20: mol_type = other DNA
caaggaaaggcagtggggaa

SEQ ID NO: 71277 - DNA, 20 bp, synthetic construct
  misc_feature 1..20: note = chemically synthesized
  source 1..20: mol_type = other DNA
acaaacctctcctgccatct

SEQ ID NO: 71278 - DNA, 20 bp, synthetic construct
  misc_feature 1..20: note = chemically synthesized
  source 1..20: mol_type = other DNA
tggtttgtacagcatgtgca

SEQ ID NO: 71279 - DNA, 20 bp, synthetic construct
  misc_feature 1..20: note = chemically synthesized
  source 1..20: mol_type = other DNA
ttatagtaaatcctaaagtt

SEQ ID NO: 71280 - DNA, 20 bp, synthetic construct
  misc_feature 1..20: note = chemically synthesized
  source 1..20: mol_type = other DNA
aatcctaaagttgaaggttt

SEQ ID NO: 71281 - DNA, 20 bp, synthetic construct
  misc_feature 1..20: note = chemically synthesized
  source 1..20: mol_type = other DNA
gtatcttttatgctgactgt

SEQ ID NO: 71282 - DNA, 20 bp, synthetic construct
  misc_feature 1..20: note = chemically synthesized
  source 1..20: mol_type = other DNA
ttctccctttctcactcttt

SEQ ID NO: 71283 - DNA, 20 bp, synthetic construct
  misc_feature 1..20: note = chemically synthesized
  source 1..20: mol_type = other DNA
acatttatttaacaagcggt

SEQ ID NO: 71284 - DNA, 20 bp, synthetic construct
  misc_feature 1..20: note = chemically synthesized
  source 1..20: mol_type = other DNA
ttaacaagcggtcattgttt

SEQ ID NO: 71285 - DNA, 20 bp, synthetic construct
  misc_feature 1..20: note = chemically synthesized
  source 1..20: mol_type = other DNA
caagcggtcattgtttagtt

SEQ ID NO: 71286 - DNA, 20 bp, synthetic construct
  misc_feature 1..20: note = chemically synthesized
  source 1..20: mol_type = other DNA
agttgtttgtttatctaatg

SEQ ID NO: 71287 - DNA, 20 bp, synthetic construct
  misc_feature 1..20: note = chemically synthesized
  source 1..20: mol_type = other DNA
gcatatattctctgttccta

SEQ ID NO: 71288 - DNA, 20 bp, synthetic construct
  misc_feature 1..20: note = chemically synthesized
  source 1..20: mol_type = other DNA
acttcaggaaaaagacttac

SEQ ID NO: 71289 - DNA, 20 bp, synthetic construct
  misc_feature 1..20: note = chemically synthesized
  source 1..20: mol_type = other DNA
gattggggctacccaaaggg

SEQ ID NO: 71290 - DNA, 20 bp, synthetic construct
  misc_feature 1..20: note = chemically synthesized
  source 1..20: mol_type = other DNA
gataatttgagtgataaaaa

SEQ ID NO: 71291 - DNA, 20 bp, synthetic construct
  misc_feature 1..20: note = chemically synthesized
  source 1..20: mol_type = other DNA
accaccatggatattgaagt

SEQ ID NO: 71292 - DNA, 20 bp, synthetic construct
  misc_feature 1..20: note = chemically synthesized
  source 1..20: mol_type = other DNA
catggatattgaagtaaggg

SEQ ID NO: 71293 - DNA, 20 bp, synthetic construct
  misc_feature 1..20: note = chemically synthesized
  source 1..20: mol_type = other DNA
agaaagtccatagcacattc

SEQ ID NO: 71294 - DNA, 20 bp, synthetic construct
  misc_feature 1..20: note = chemically synthesized
  source 1..20: mol_type = other DNA
cattatatccaaagggttac

SEQ ID NO: 71295 - DNA, 20 bp, synthetic construct
  misc_feature 1..20: note = chemically synthesized
  source 1..20: mol_type = other DNA
aattaggaaacagaaatttg

SEQ ID NO: 71296 - DNA, 20 bp, synthetic construct
  misc_feature 1..20: note = chemically synthesized
  source 1..20: mol_type = other DNA
aaatttgacttgcttcagat

SEQ ID NO: 71297 - DNA, 20 bp, synthetic construct
  misc_feature 1..20: note = chemically synthesized
  source 1..20: mol_type = other DNA
aaatattttatctgaaacaa

SEQ ID NO: 71298 - DNA, 20 bp, synthetic construct
  misc_feature 1..20: note = chemically synthesized
  source 1..20: mol_type = other DNA
ggatatatgtgtacatagtg

SEQ ID NO: 71299 - DNA, 20 bp, synthetic construct
  misc_feature 1..20: note = chemically synthesized
  source 1..20: mol_type = other DNA
caacaccttccatagatacc

SEQ ID NO: 71300 - DNA, 20 bp, synthetic construct
  misc_feature 1..20: note = chemically synthesized
  source 1..20: mol_type = other DNA
ctaacatctactgtcataac

SEQ ID NO: 71301 - DNA, 20 bp, synthetic construct
  misc_feature 1..20: note = chemically synthesized
  source 1..20: mol_type = other DNA
atctactgtcataacaaatg

SEQ ID NO: 71302 - DNA, 20 bp, synthetic construct
  misc_feature 1..20: note = chemically synthesized
  source 1..20: mol_type = other DNA
cttatttatcctatacagct

SEQ ID NO: 71303 - DNA, 20 bp, synthetic construct
  misc_feature 1..20: note = chemically synthesized
  source 1..20: mol_type = other DNA
tttctttcttccccttttta

SEQ ID NO: 71304 - DNA, 20 bp, synthetic construct
  misc_feature 1..20: note = chemically synthesized
  source 1..20: mol_type = other DNA
catttgaccttatttttctt

SEQ ID NO: 71305 - DNA, 20 bp, synthetic construct
  misc_feature 1..20: note = chemically synthesized
  source 1..20: mol_type = other DNA
ataagtaatatcatgccttt

SEQ ID NO: 71306 - DNA, 20 bp, synthetic construct
  misc_feature 1..20: note = chemically synthesized
  source 1..20: mol_type = other DNA
tgcctttatttgtttctgtg

SEQ ID NO: 71307 - DNA, 20 bp, synthetic construct
  misc_feature 1..20: note = chemically synthesized
  source 1..20: mol_type = other DNA
ttcacttagcaaaatgtact

SEQ ID NO: 71308 - DNA, 20 bp, synthetic construct
  misc_feature 1..20: note = chemically synthesized
  source 1..20: mol_type = other DNA
tcatctatatatagatacca

SEQ ID NO: 71309 - DNA, 20 bp, synthetic construct
  misc_feature 1..20: note = chemically synthesized
  source 1..20: mol_type = other DNA
ctatatatagataccactta

SEQ ID NO: 71310 - DNA, 20 bp, synthetic construct
  misc_feature 1..20: note = chemically synthesized
  source 1..20: mol_type = other DNA
gtgcagatagctctagaaaa

SEQ ID NO: 71311 - DNA, 20 bp, synthetic construct
  misc_feature 1..20: note = chemically synthesized
  source 1..20: mol_type = other DNA
catacaataactctattttt

SEQ ID NO: 71312 - DNA, 20 bp, synthetic construct
  misc_feature 1..20: note = chemically synthesized
  source 1..20: mol_type = other DNA
tagttgtttgagaaacttcc

SEQ ID NO: 71313 - DNA, 20 bp, synthetic construct
  misc_feature 1..20: note = chemically synthesized
  source 1..20: mol_type = other DNA
caacaggtgtgagtgatact

SEQ ID NO: 71314 - DNA, 20 bp, synthetic construct
  misc_feature 1..20: note = chemically synthesized
  source 1..20: mol_type = other DNA
ggtgtgagtgatacttgtgg

SEQ ID NO: 71315 - DNA, 20 bp, synthetic construct
  misc_feature 1..20: note = chemically synthesized
  source 1..20: mol_type = other DNA
ggttttgatttgcattttcc

SEQ ID NO: 71316 - DNA, 20 bp, synthetic construct
  misc_feature 1..20: note = chemically synthesized
  source 1..20: mol_type = other DNA
tattatattttttcatattt

SEQ ID NO: 71317 - DNA, 20 bp, synthetic construct
  misc_feature 1..20: note = chemically synthesized
  source 1..20: mol_type = other DNA
ttctcccaaactgttccttt

SEQ ID NO: 71318 - DNA, 20 bp, synthetic construct
  misc_feature 1..20: note = chemically synthesized
  source 1..20: mol_type = other DNA
cccaaactgttccttttgat

SEQ ID NO: 71319 - DNA, 20 bp, synthetic construct
  misc_feature 1..20: note = chemically synthesized
  source 1..20: mol_type = other DNA
tctttgctgtgcagaaaata

SEQ ID NO: 71320 - DNA, 20 bp, synthetic construct
  misc_feature 1..20: note = chemically synthesized
  source 1..20: mol_type = other DNA
atttagtttgatgttgctcc

SEQ ID NO: 71321 - DNA, 20 bp, synthetic construct
  misc_feature 1..20: note = chemically synthesized
  source 1..20: mol_type = other DNA
atgttgctccacttgtttat

SEQ ID NO: 71322 - DNA, 20 bp, synthetic construct
  misc_feature 1..20: note = chemically synthesized
  source 1..20: mol_type = other DNA
caacttgatggcagcacacg

SEQ ID NO: 71323 - DNA, 20 bp, synthetic construct
  misc_feature 1..20: note = chemically synthesized
  source 1..20: mol_type = other DNA
taagccataagtcaactcaa

SEQ ID NO: 71324 - DNA, 20 bp, synthetic construct
  misc_feature 1..20: note = chemically synthesized
  source 1..20: mol_type = other DNA
ggaagaacatgtatagagat

SEQ ID NO: 71325 - DNA, 20 bp, synthetic construct
  misc_feature 1..20: note = chemically synthesized
  source 1..20: mol_type = other DNA
cggcaattttttagatattg

SEQ ID NO: 71326 - DNA, 20 bp, synthetic construct
  misc_feature 1..20: note = chemically synthesized
  source 1..20: mol_type = other DNA
tttcactggaagtctatatt

SEQ ID NO: 71327 - DNA, 20 bp, synthetic construct
  misc_feature 1..20: note = chemically synthesized
  source 1..20: mol_type = other DNA
ttttctttcacaaataaagt

SEQ ID NO: 71328 - DNA, 20 bp, synthetic construct
  misc_feature 1..20: note = chemically synthesized
  source 1..20: mol_type = other DNA
gcgtgaacaacacagaagac

SEQ ID NO: 71329 - DNA, 20 bp, synthetic construct
  misc_feature 1..20: note = chemically synthesized
  source 1..20: mol_type = other DNA
gggccactcccacccgaata

SEQ ID NO: 71330 - DNA, 20 bp, synthetic construct
  misc_feature 1..20: note = chemically synthesized
  source 1..20: mol_type = other DNA
ccgaatactgtgcttttctg

SEQ ID NO: 71331 - DNA, 20 bp, synthetic construct
  misc_feature 1..20: note = chemically synthesized
  source 1..20: mol_type = other DNA
ggcttaggaaatggcgcacc

SEQ ID NO: 71332 - DNA, 20 bp, synthetic construct
  misc_feature 1..20: note = chemically synthesized
  source 1..20: mol_type = other DNA
gtcctacgcccacggagtct

SEQ ID NO: 71333 - DNA, 20 bp, synthetic construct
  misc_feature 1..20: note = chemically synthesized
  source 1..20: mol_type = other DNA
ggaggggcagccgccattgc

SEQ ID NO: 71334 - DNA, 20 bp, synthetic construct
  misc_feature 1..20: note = chemically synthesized
  source 1..20: mol_type = other DNA
gggcagccgccattgcccag

SEQ ID NO: 71335 - DNA, 20 bp, synthetic construct
  misc_feature 1..20: note = chemically synthesized
  source 1..20: mol_type = other DNA
agacttaaatgtccctgtct

SEQ ID NO: 71336 - DNA, 20 bp, synthetic construct
  misc_feature 1..20: note = chemically synthesized
  source 1..20: mol_type = other DNA
ctagaataaccaatacagag

SEQ ID NO: 71337 - DNA, 20 bp, synthetic construct
  misc_feature 1..20: note = chemically synthesized
  source 1..20: mol_type = other DNA
aaatgaaatgaagcgagaag

SEQ ID NO: 71338 - DNA, 20 bp, synthetic construct
  misc_feature 1..20: note = chemically synthesized
  source 1..20: mol_type = other DNA
tgtgaaaagatcaaatctag

SEQ ID NO: 71339 - DNA, 20 bp, synthetic construct
  misc_feature 1..20: note = chemically synthesized
  source 1..20: mol_type = other DNA
tctagcaaggcaggccaaca

SEQ ID NO: 71340 - DNA, 20 bp, synthetic construct
  misc_feature 1..20: note = chemically synthesized
  source 1..20: mol_type = other DNA
caactccaagacacataatt

SEQ ID NO: 71341 - DNA, 20 bp, synthetic construct
  misc_feature 1..20: note = chemically synthesized
  source 1..20: mol_type = other DNA
gaatttaatatccagccaaa

SEQ ID NO: 71342 - DNA, 20 bp, synthetic construct
  misc_feature 1..20: note = chemically synthesized
  source 1..20: mol_type = other DNA
tttacagacaagcaaatgct

SEQ ID NO: 71343 - DNA, 20 bp, synthetic construct
  misc_feature 1..20: note = chemically synthesized
  source 1..20: mol_type = other DNA
caatcctagtctctgataaa

SEQ ID NO: 71344 - DNA, 20 bp, synthetic construct
  misc_feature 1..20: note = chemically synthesized
  source 1..20: mol_type = other DNA
atgcacccaatacaggagca

SEQ ID NO: 71345 - DNA, 20 bp, synthetic construct
  misc_feature 1..20: note = chemically synthesized
  source 1..20: mol_type = other DNA
cagtgcaatcaaactagaac

SEQ ID NO: 71346 - DNA, 20 bp, synthetic construct
  misc_feature 1..20: note = chemically synthesized
  source 1..20: mol_type = other DNA
aaaaattaatgaatctggga

SEQ ID NO: 71347 - DNA, 20 bp, synthetic construct
  misc_feature 1..20: note = chemically synthesized
  source 1..20: mol_type = other DNA
ctgaaattgtggcaataatc

SEQ ID NO: 71348 - DNA, 20 bp, synthetic construct
  misc_feature 1..20: note = chemically synthesized
  source 1..20: mol_type = other DNA
ccaaaaagagtccaggacca

SEQ ID NO: 71349 - DNA, 20 bp, synthetic construct
  misc_feature 1..20: note = chemically synthesized
  source 1..20: mol_type = other DNA
ccgaatccagcagcacatca

SEQ ID NO: 71350 - DNA, 20 bp, synthetic construct
  misc_feature 1..20: note = chemically synthesized
  source 1..20: mol_type = other DNA
cagaaccaaagacaaaaacc

SEQ ID NO: 71351 - DNA, 20 bp, synthetic construct
  misc_feature 1..20: note = chemically synthesized
  source 1..20: mol_type = other DNA
aaaagaggaagtcaaattgt

SEQ ID NO: 71352 - DNA, 20 bp, synthetic construct
  misc_feature 1..20: note = chemically synthesized
  source 1..20: mol_type = other DNA
attgtccctgtttgcagacg

SEQ ID NO: 71353 - DNA, 20 bp, synthetic construct
  misc_feature 1..20: note = chemically synthesized
  source 1..20: mol_type = other DNA
atgagggaactcccattcac

SEQ ID NO: 71354 - DNA, 20 bp, synthetic construct
  misc_feature 1..20: note = chemically synthesized
  source 1..20: mol_type = other DNA
caaacaaatggaagaacatt

SEQ ID NO: 71355 - DNA, 20 bp, synthetic construct
  misc_feature 1..20: note = chemically synthesized
  source 1..20: mol_type = other DNA
ccataatgcccaaggtaatt

SEQ ID NO: 71356 - DNA, 20 bp, synthetic construct
  misc_feature 1..20: note = chemically synthesized
  source 1..20: mol_type = other DNA
tgccatccccatcaagctac

SEQ ID NO: 71357 - DNA, 20 bp, synthetic construct
  misc_feature 1..20: note = chemically synthesized
  source 1..20: mol_type = other DNA
gagaaaaacaagaaatgggg

SEQ ID NO: 71358 - DNA, 20 bp, synthetic construct
  misc_feature 1..20: note = chemically synthesized
  source 1..20: mol_type = other DNA
ttatacaaaaattaattcaa

SEQ ID NO: 71359 - DNA, 20 bp, synthetic construct
  misc_feature 1..20: note = chemically synthesized
  source 1..20: mol_type = other DNA
aatgggatctaatgaaacta

SEQ ID NO: 71360 - DNA, 20 bp, synthetic construct
  misc_feature 1..20: note = chemically synthesized
  source 1..20: mol_type = other DNA
aaccattgtggaagtcagtg

SEQ ID NO: 71361 - DNA, 20 bp, synthetic construct
  misc_feature 1..20: note = chemically synthesized
  source 1..20: mol_type = other DNA
ctataaagacacatgcacac

SEQ ID NO: 71362 - DNA, 20 bp, synthetic construct
  misc_feature 1..20: note = chemically synthesized
  source 1..20: mol_type = other DNA
caaatgtccaacaatgatag

SEQ ID NO: 71363 - DNA, 20 bp, synthetic construct
  misc_feature 1..20: note = chemically synthesized
  source 1..20: mol_type = other DNA
aaaaaaataaaaaataaagt

SEQ ID NO: 71364 - DNA, 20 bp, synthetic construct
  misc_feature 1..20: note = chemically synthesized
  source 1..20: mol_type = other DNA
taaagttccagtttattttt

SEQ ID NO: 71365 - DNA, 20 bp, synthetic construct
  misc_feature 1..20: note = chemically synthesized
  source 1..20: mol_type = other DNA
agtttattttttcaggtttc

SEQ ID NO: 71366 - DNA, 20 bp, synthetic construct
  misc_feature 1..20: note = chemically synthesized
  source 1..20: mol_type = other DNA
tgcaatgtgtctttttctat

SEQ ID NO: 71367 - DNA, 20 bp, synthetic construct
  misc_feature 1..20: note = chemically synthesized
  source 1..20: mol_type = other DNA
gtctttttctatgtctgctt

SEQ ID NO: 71368 - DNA, 20 bp, synthetic construct
  misc_feature 1..20: note = chemically synthesized
  source 1..20: mol_type = other DNA
ttttaagattggcatacatt

SEQ ID NO: 71369 - DNA, 20 bp, synthetic construct
  misc_feature 1..20: note = chemically synthesized
  source 1..20: mol_type = other DNA
tttgtaagatatgcatttag

SEQ ID NO: 71370 - DNA, 20 bp, synthetic construct
  misc_feature 1..20: note = chemically synthesized
  source 1..20: mol_type = other DNA
gttagctaaagatatgaatt

SEQ ID NO: 71371 - DNA, 20 bp, synthetic construct
  misc_feature 1..20: note = chemically synthesized
  source 1..20: mol_type = other DNA
tcagtcaataattcctcaaa

SEQ ID NO: 71372 - DNA, 20 bp, synthetic construct
  misc_feature 1..20: note = chemically synthesized
  source 1..20: mol_type = other DNA
caaaaaacgtttaatccatt

SEQ ID NO: 71373 - DNA, 20 bp, synthetic construct
  misc_feature 1..20: note = chemically synthesized
  source 1..20: mol_type = other DNA
ttctaatttcacatatggtg

SEQ ID NO: 71374 - DNA, 20 bp, synthetic construct
  misc_feature 1..20: note = chemically synthesized
  source 1..20: mol_type = other DNA
gcttgatactttcccatgag

SEQ ID NO: 71375 - DNA, 20 bp, synthetic construct
  misc_feature 1..20: note = chemically synthesized
  source 1..20: mol_type = other DNA
tttcccatgagtctggcttt

SEQ ID NO: 71376 - DNA, 20 bp, synthetic construct
  misc_feature 1..20: note = chemically synthesized
  source 1..20: mol_type = other DNA
cttgcatgcacttgctcttt

SEQ ID NO: 71377 - DNA, 20 bp, synthetic construct
  misc_feature 1..20: note = chemically synthesized
  source 1..20: mol_type = other DNA
tgctctttgtctgctttctg

SEQ ID NO: 71378 - DNA, 20 bp, synthetic construct
  misc_feature 1..20: note = chemically synthesized
  source 1..20: mol_type = other DNA
aacttggagtggggagaaga

SEQ ID NO: 71379 - DNA, 20 bp, synthetic construct
  misc_feature 1..20: note = chemically synthesized
  source 1..20: mol_type = other DNA
tcccaaaaggggtctctctg

SEQ ID NO: 71380 - DNA, 20 bp, synthetic construct
  misc_feature 1..20: note = chemically synthesized
  source 1..20: mol_type = other DNA
aggtaggatgttacgaaaga

SEQ ID NO: 71381 - DNA, 20 bp, synthetic construct
  misc_feature 1..20: note = chemically synthesized
  source 1..20: mol_type = other DNA
gacattgagaaccctgtgag

SEQ ID NO: 71382 - DNA, 20 bp, synthetic construct
  misc_feature 1..20: note = chemically synthesized
  source 1..20: mol_type = other DNA
tgagtaaggattttatttag

SEQ ID NO: 71383 - DNA, 20 bp, synthetic construct
  misc_feature 1..20: note = chemically synthesized
  source 1..20: mol_type = other DNA
aggtctgtttctggtcagag

SEQ ID NO: 71384 - DNA, 20 bp, synthetic construct
  misc_feature 1..20: note = chemically synthesized
  source 1..20: mol_type = other DNA
ttctggtcagagtggggatt

SEQ ID NO: 71385 - DNA, 20 bp, synthetic construct
  misc_feature 1..20: note = chemically synthesized
  source 1..20: mol_type = other DNA
ggggatttaaggcttggtca

SEQ ID NO: 71386 - DNA, 20 bp, synthetic construct
  misc_feature 1..20: note = chemically synthesized
  source 1..20: mol_type = other DNA
ttaagactaaaggccacaca

SEQ ID NO: 71387 - DNA, 20 bp, synthetic construct
  misc_feature 1..20: note = chemically synthesized
  source 1..20: mol_type = other DNA
ggccacacacatagatttgt

SEQ ID NO: 71388 - DNA, 20 bp, synthetic construct
  misc_feature 1..20: note = chemically synthesized
  source 1..20: mol_type = other DNA
acctatctctctccatcaat

SEQ ID NO: 71389 - DNA, 20 bp, synthetic construct
  misc_feature 1..20: note = chemically synthesized
  source 1..20: mol_type = other DNA
ctccatcaattttagttttt

SEQ ID NO: 71390 - DNA, 20 bp, synthetic construct
  misc_feature 1..20: note = chemically synthesized
  source 1..20: mol_type = other DNA
aaaggaagaatgaactggtt

SEQ ID NO: 71391 - DNA, 20 bp, synthetic construct
  misc_feature 1..20: note = chemically synthesized
  source 1..20: mol_type = other DNA
cacagcatgtgtacagacct

SEQ ID NO: 71392 - DNA, 20 bp, synthetic construct
  misc_feature 1..20: note = chemically synthesized
  source 1..20: mol_type = other DNA
ttatactggccccttgaaag

SEQ ID NO: 71393 - DNA, 20 bp, synthetic construct
  misc_feature 1..20: note = chemically synthesized
  source 1..20: mol_type = other DNA
ctctctctctgtcgctcgct

SEQ ID NO: 71394 - DNA, 20 bp, synthetic construct
  misc_feature 1..20: note = chemically synthesized
  source 1..20: mol_type = other DNA
tgacacttttcacttttagt

SEQ ID NO: 71395 - DNA, 20 bp, synthetic construct
  misc_feature 1..20: note = chemically synthesized
  source 1..20: mol_type = other DNA
ttttcacttttagtaatgga

SEQ ID NO: 71396 - DNA, 20 bp, synthetic construct
  misc_feature 1..20: note = chemically synthesized
  source 1..20: mol_type = other DNA
attcacttcacctaatattc

SEQ ID NO: 71397 - DNA, 20 bp, synthetic construct
  misc_feature 1..20: note = chemically synthesized
  source 1..20: mol_type = other DNA
catcatcctcctcttggcct

SEQ ID NO: 71398 - DNA, 20 bp, synthetic construct
  misc_feature 1..20: note = chemically synthesized
  source 1..20: mol_type = other DNA
atctaacatctttactcaat

SEQ ID NO: 71399 - DNA, 20 bp, synthetic construct
  misc_feature 1..20: note = chemically synthesized
  source 1..20: mol_type = other DNA
tctatcttcaagttcttgat

SEQ ID NO: 71400 - DNA, 20 bp, synthetic construct
  misc_feature 1..20: note = chemically synthesized
  source 1..20: mol_type = other DNA
acgtcaatgaaaattgatga

SEQ ID NO: 71401 - DNA, 20 bp, synthetic construct
  misc_feature 1..20: note = chemically synthesized
  source 1..20: mol_type = other DNA
aaaaatgctgagttctttca

SEQ ID NO: 71402 - DNA, 20 bp, synthetic construct
  misc_feature 1..20: note = chemically synthesized
  source 1..20: mol_type = other DNA
atttggttttcaaataaatc

SEQ ID NO: 71403 - DNA, 20 bp, synthetic construct
  misc_feature 1..20: note = chemically synthesized
  source 1..20: mol_type = other DNA
tataaagctattatacagat

SEQ ID NO: 71404 - DNA, 20 bp, synthetic construct
  misc_feature 1..20: note = chemically synthesized
  source 1..20: mol_type = other DNA
gtaggttatccactaaacag

SEQ ID NO: 71405 - DNA, 20 bp, synthetic construct
  misc_feature 1..20: note = chemically synthesized
  source 1..20: mol_type = other DNA
gctccatacaccaaaataac

SEQ ID NO: 71406 - DNA, 20 bp, synthetic construct
  misc_feature 1..20: note = chemically synthesized
  source 1..20: mol_type = other DNA
ttaacaatgtactctggaaa

SEQ ID NO: 71407 - DNA, 20 bp, synthetic construct
  misc_feature 1..20: note = chemically synthesized
  source 1..20: mol_type = other DNA
cccaaccatcaaaatgtgta

SEQ ID NO: 71408 - DNA, 20 bp, synthetic construct
  misc_feature 1..20: note = chemically synthesized
  source 1..20: mol_type = other DNA
gtcttgcccctgcctacctc

SEQ ID NO: 71409 - DNA, 20 bp, synthetic construct
  misc_feature 1..20: note = chemically synthesized
  source 1..20: mol_type = other DNA
acttttcctcacctccatgc

SEQ ID NO: 71410 - DNA, 20 bp, synthetic construct
  misc_feature 1..20: note = chemically synthesized
  source 1..20: mol_type = other DNA
ttctataaagccctatctgt

SEQ ID NO: 71411 - DNA, 20 bp, synthetic construct
  misc_feature 1..20: note = chemically synthesized
  source 1..20: mol_type = other DNA
ctcttacattgcgctaagat

SEQ ID NO: 71412 - DNA, 20 bp, synthetic construct
  misc_feature 1..20: note = chemically synthesized
  source 1..20: mol_type = other DNA
aaatcatgttcttaataaat

SEQ ID NO: 71413 - DNA, 20 bp, synthetic construct
  misc_feature 1..20: note = chemically synthesized
  source 1..20: mol_type = other DNA
taaacttcatgggtctctgt

SEQ ID NO: 71414 - DNA, 20 bp, synthetic construct
  misc_feature 1..20: note = chemically synthesized
  source 1..20: mol_type = other DNA
cctggttttagatctgtatg

SEQ ID NO: 71415 - DNA, 20 bp, synthetic construct
  misc_feature 1..20: note = chemically synthesized
  source 1..20: mol_type = other DNA
cctatttaaaggatgtaata

SEQ ID NO: 71416 - DNA, 20 bp, synthetic construct
  misc_feature 1..20: note = chemically synthesized
  source 1..20: mol_type = other DNA
gccagtctccaagagtgtgt

SEQ ID NO: 71417 - DNA, 20 bp, synthetic construct
  misc_feature 1..20: note = chemically synthesized
  source 1..20: mol_type = other DNA
ttgtggtggagaggttgtgt

SEQ ID NO: 71418 - DNA, 20 bp, synthetic construct
  misc_feature 1..20: note = chemically synthesized
  source 1..20: mol_type = other DNA
tgctaccagaaaagaaggaa

SEQ ID NO: 71419 - DNA, 20 bp, synthetic construct
  misc_feature 1..20: note = chemically synthesized
  source 1..20: mol_type = other DNA
gtgcattcaaagatgaagta

SEQ ID NO: 71420 - DNA, 20 bp, synthetic construct
  misc_feature 1..20: note = chemically synthesized
  source 1..20: mol_type = other DNA
cctgagacactgacctggac

SEQ ID NO: 71421 - DNA, 20 bp, synthetic construct
  misc_feature 1..20: note = chemically synthesized
  source 1..20: mol_type = other DNA
gacctggacatttgtttggg

SEQ ID NO: 71422 - DNA, 20 bp, synthetic construct
  misc_feature 1..20: note = chemically synthesized
  source 1..20: mol_type = other DNA
tttggggtaggattgaatat

SEQ ID NO: 71423 - DNA, 20 bp, synthetic construct
  misc_feature 1..20: note = chemically synthesized
  source 1..20: mol_type = other DNA
gtgagagaatcttgaagtag

SEQ ID NO: 71424 - DNA, 20 bp, synthetic construct
  misc_feature 1..20: note = chemically synthesized
  source 1..20: mol_type = other DNA
tcttgaagtagtggtgattg

SEQ ID NO: 71425 - DNA, 20 bp, synthetic construct
  misc_feature 1..20: note = chemically synthesized
  source 1..20: mol_type = other DNA
atgctaaaaagttagggctc

SEQ ID NO: 71426 - DNA, 20 bp, synthetic construct
  misc_feature 1..20: note = chemically synthesized
  source 1..20: mol_type = other DNA
gagacaggggtggagataaa

SEQ ID NO: 71427 - DNA, 20 bp, synthetic construct
  misc_feature 1..20: note = chemically synthesized
  source 1..20: mol_type = other DNA
ataaagaaagtttcctgccc

SEQ ID NO: 71428 - DNA, 20 bp, synthetic construct
  misc_feature 1..20: note = chemically synthesized
  source 1..20: mol_type = other DNA
gattcccagccctggggacc

SEQ ID NO: 71429 - DNA, 20 bp, synthetic construct
  misc_feature 1..20: note = chemically synthesized
  source 1..20: mol_type = other DNA
tcttcctttggaacctactc

SEQ ID NO: 71430 - DNA, 20 bp, synthetic construct
  misc_feature 1..20: note = chemically synthesized
  source 1..20: mol_type = other DNA
gtctcactactgtcttgtgc

SEQ ID NO: 71431 - DNA, 20 bp, synthetic construct
  misc_feature 1..20: note = chemically synthesized
  source 1..20: mol_type = other DNA
gacatggtctcagttacaat

SEQ ID NO: 71432 - DNA, 20 bp, synthetic construct
  misc_feature 1..20: note = chemically synthesized
  source 1..20: mol_type = other DNA
acaattaaggcttttccccc

SEQ ID NO: 71433 - DNA, 20 bp, synthetic construct
  misc_feature 1..20: note = chemically synthesized
  source 1..20: mol_type = other DNA
tgtttgaatgtccttagcca

SEQ ID NO: 71434 - DNA, 20 bp, synthetic construct
  misc_feature 1..20: note = chemically synthesized
  source 1..20: mol_type = other DNA
cattccctgcactaagccta

SEQ ID NO: 71435 - DNA, 20 bp, synthetic construct
  misc_feature 1..20: note = chemically synthesized
  source 1..20: mol_type = other DNA
gcctaatgggattttttttt

SEQ ID NO: 71436 - DNA, 20 bp, synthetic construct
  misc_feature 1..20: note = chemically synthesized
  source 1..20: mol_type = other DNA
ttttctttgttttcttttgt

SEQ ID NO: 71437 - DNA, 20 bp, synthetic construct
  misc_feature 1..20: note = chemically synthesized
  source 1..20: mol_type = other DNA
gttttcttttgttgttgttt

SEQ ID NO: 71438 - DNA, 20 bp, synthetic construct
  misc_feature 1..20: note = chemically synthesized
  source 1..20: mol_type = other DNA
tttgttgttgtttctttgtt

SEQ ID NO: 71439 - DNA, 20 bp, synthetic construct
  misc_feature 1..20: note = chemically synthesized
  source 1..20: mol_type = other DNA
atagctcactgtaaactcaa

SEQ ID NO: 71440 - DNA, 20 bp, synthetic construct
  misc_feature 1..20: note = chemically synthesized
  source 1..20: mol_type = other DNA
caccttattcttccaagttg

SEQ ID NO: 71441 - DNA, 20 bp, synthetic construct
  misc_feature 1..20: note = chemically synthesized
  source 1..20: mol_type = other DNA
ccatatacagcagtctgggc

SEQ ID NO: 71442 - DNA, 20 bp, synthetic construct
  misc_feature 1..20: note = chemically synthesized
  source 1..20: mol_type = other DNA
tagaaaagaccccatcctca

SEQ ID NO: 71443 - DNA, 20 bp, synthetic construct
  misc_feature 1..20: note = chemically synthesized
  source 1..20: mol_type = other DNA
ctctatcctactaaaaacag

SEQ ID NO: 71444 - DNA, 20 bp, synthetic construct
  misc_feature 1..20: note = chemically synthesized
  source 1..20: mol_type = other DNA
aaaaacaggcatgtttacag

SEQ ID NO: 71445 - DNA, 20 bp, synthetic construct
  misc_feature 1..20: note = chemically synthesized
  source 1..20: mol_type = other DNA
gaataatctggttcaagtcc

SEQ ID NO: 71446 - DNA, 20 bp, synthetic construct
  misc_feature 1..20: note = chemically synthesized
  source 1..20: mol_type = other DNA
ctgctctgagtggactcctc

SEQ ID NO: 71447 - DNA, 20 bp, synthetic construct
  misc_feature 1..20: note = chemically synthesized
  source 1..20: mol_type = other DNA
tcttgctaggagaaatcccc

SEQ ID NO: 71448 - DNA, 20 bp, synthetic construct
  misc_feature 1..20: note = chemically synthesized
  source 1..20: mol_type = other DNA
tcattgtctctgtatagaca

SEQ ID NO: 71449 - DNA, 20 bp, synthetic construct
  misc_feature 1..20: note = chemically synthesized
  source 1..20: mol_type = other DNA
gtactttatttattcaccca

SEQ ID NO: 71450 - DNA, 20 bp, synthetic construct
  misc_feature 1..20: note = chemically synthesized
  source 1..20: mol_type = other DNA
taggttggtgaaaaattaat

SEQ ID NO: 71451 - DNA, 20 bp, synthetic construct
  misc_feature 1..20: note = chemically synthesized
  source 1..20: mol_type = other DNA
aatatctaatatttttgtat

SEQ ID NO: 71452 - DNA, 20 bp, synthetic construct
  misc_feature 1..20: note = chemically synthesized
  source 1..20: mol_type = other DNA
atgctacagaaggaagtcag

SEQ ID NO: 71453 - DNA, 20 bp, synthetic construct
  misc_feature 1..20: note = chemically synthesized
  source 1..20: mol_type = other DNA
ctaagtcttaaaggatccgc

SEQ ID NO: 71454 - DNA, 20 bp, synthetic construct
  misc_feature 1..20: note = chemically synthesized
  source 1..20: mol_type = other DNA
ttactggttggaaaaacagg

SEQ ID NO: 71455 - DNA, 20 bp, synthetic construct
  misc_feature 1..20: note = chemically synthesized
  source 1..20: mol_type = other DNA
ggtgtgttgactgggaaaag

SEQ ID NO: 71456 - DNA, 20 bp, synthetic construct
  misc_feature 1..20: note = chemically synthesized
  source 1..20: mol_type = other DNA
gggctaaagatggtgttaca

SEQ ID NO: 71457 - DNA, 20 bp, synthetic construct
  misc_feature 1..20: note = chemically synthesized
  source 1..20: mol_type = other DNA
agacaaaggttcatatctta

SEQ ID NO: 71458 - DNA, 20 bp, synthetic construct
  misc_feature 1..20: note = chemically synthesized
  source 1..20: mol_type = other DNA
tcgctcactaccaggccttg

SEQ ID NO: 71459 - DNA, 20 bp, synthetic construct
  misc_feature 1..20: note = chemically synthesized
  source 1..20: mol_type = other DNA
tcactaccaggccttgggat

SEQ ID NO: 71460 - DNA, 20 bp, synthetic construct
  misc_feature 1..20: note = chemically synthesized
  source 1..20: mol_type = other DNA
gggatgattgtttacctttt

SEQ ID NO: 71461 - DNA, 20 bp, synthetic construct
  misc_feature 1..20: note = chemically synthesized
  source 1..20: mol_type = other DNA
ctccttgtgaagtagtaata

SEQ ID NO: 71462 - DNA, 20 bp, synthetic construct
  misc_feature 1..20: note = chemically synthesized
  source 1..20: mol_type = other DNA
ttcatagttacatgaaatat

SEQ ID NO: 71463 - DNA, 20 bp, synthetic construct
  misc_feature 1..20: note = chemically synthesized
  source 1..20: mol_type = other DNA
atgaaatattcatgattatg

SEQ ID NO: 71464 - DNA, 20 bp, synthetic construct
  misc_feature 1..20: note = chemically synthesized
  source 1..20: mol_type = other DNA
actatcaccacagatctttt

SEQ ID NO: 71465 - DNA, 20 bp, synthetic construct
  misc_feature 1..20: note = chemically synthesized
  source 1..20: mol_type = other DNA
ctgaagtactgaaaacagtg

SEQ ID NO: 71466 - DNA, 20 bp, synthetic construct
  misc_feature 1..20: note = chemically synthesized
  source 1..20: mol_type = other DNA
tggaccaagggaaggaggag

SEQ ID NO: 71467 - DNA, 20 bp, synthetic construct
  misc_feature 1..20: note = chemically synthesized
  source 1..20: mol_type = other DNA
tggctacagagatgaagatg

SEQ ID NO: 71468 - DNA, 20 bp, synthetic construct
  misc_feature 1..20: note = chemically synthesized
  source 1..20: mol_type = other DNA
gaagatgaatagattacagg

SEQ ID NO: 71469 - DNA, 20 bp, synthetic construct
  misc_feature 1..20: note = chemically synthesized
  source 1..20: mol_type = other DNA
tgggctcaatattagacgtg

SEQ ID NO: 71470 - DNA, 20 bp, synthetic construct
  misc_feature 1..20: note = chemically synthesized
  source 1..20: mol_type = other DNA
tgtaacggagttatctggac

SEQ ID NO: 71471 - DNA, 20 bp, synthetic construct
  misc_feature 1..20: note = chemically synthesized
  source 1..20: mol_type = other DNA
aaaaaaatcaataaaagcag

SEQ ID NO: 71472 - DNA, 20 bp, synthetic construct
  misc_feature 1..20: note = chemically synthesized
  source 1..20: mol_type = other DNA
tcactggtgaatttaaggag

SEQ ID NO: 71473 - DNA, 20 bp, synthetic construct
  misc_feature 1..20: note = chemically synthesized
  source 1..20: mol_type = other DNA
aggagcattgctttagctaa

SEQ ID NO: 71474 - DNA, 20 bp, synthetic construct
  misc_feature 1..20: note = chemically synthesized
  source 1..20: mol_type = other DNA
acaagtataataaaattcaa

SEQ ID NO: 71475 - DNA, 20 bp, synthetic construct
  misc_feature 1..20: note = chemically synthesized
  source 1..20: mol_type = other DNA
agcatttagctgctacttca

SEQ ID NO: 71476 - DNA, 20 bp, synthetic construct
  misc_feature 1..20: note = chemically synthesized
  source 1..20: mol_type = other DNA
ggatttgccaccattcccca

SEQ ID NO: 71477 - DNA, 20 bp, synthetic construct
  misc_feature 1..20: note = chemically synthesized
  source 1..20: mol_type = other DNA
tttaaacttgtcaagctgct

SEQ ID NO: 71478 - DNA, 20 bp, synthetic construct
  misc_feature 1..20: note = chemically synthesized
  source 1..20: mol_type = other DNA
cttgttcttcctccttcctt

SEQ ID NO: 71479 - DNA, 20 bp, synthetic construct
  misc_feature 1..20: note = chemically synthesized
  source 1..20: mol_type = other DNA
aagatagccacacacttgcc

SEQ ID NO: 71480 - DNA, 20 bp, synthetic construct
  misc_feature 1..20: note = chemically synthesized
  source 1..20: mol_type = other DNA
gccacacacttgccctctga

SEQ ID NO: 71481 - DNA, 20 bp, synthetic construct
  misc_feature 1..20: note = chemically synthesized
  source 1..20: mol_type = other DNA
ttgcattgcagtatgtatgt

SEQ ID NO: 71482 - DNA, 20 bp, synthetic construct
  misc_feature 1..20: note = chemically synthesized
  source 1..20: mol_type = other DNA
tgtgtttatttttgtctctg

SEQ ID NO: 71483 - DNA, 20 bp, synthetic construct
  misc_feature 1..20: note = chemically synthesized
  source 1..20: mol_type = other DNA
atattgaaataattattgaa

SEQ ID NO: 71484 - DNA, 20 bp, synthetic construct
  misc_feature 1..20: note = chemically synthesized
  source 1..20: mol_type = other DNA
aatttattcaaataatattt

SEQ ID NO: 71485 - DNA, 20 bp, synthetic construct
  misc_feature 1..20: note = chemically synthesized
  source 1..20: mol_type = other DNA
aaaattaaaaaagagacagt

SEQ ID NO: 71486 - DNA, 20 bp, synthetic construct
  misc_feature 1..20: note = chemically synthesized
  source 1..20: mol_type = other DNA
attagtagaagttaactaga

SEQ ID NO: 71487 - DNA, 20 bp, synthetic construct
  misc_feature 1..20: note = chemically synthesized
  source 1..20: mol_type = other DNA
gggaaagctatttcaggaaa

SEQ ID NO: 71488 - DNA, 20 bp, synthetic construct
  misc_feature 1..20: note = chemically synthesized
  source 1..20: mol_type = other DNA
tccaggaagaatgaaaatac

SEQ ID NO: 71489 - DNA, 20 bp, synthetic construct
  misc_feature 1..20: note = chemically synthesized
  source 1..20: mol_type = other DNA
catactagataaactggaag

SEQ ID NO: 71490 - DNA, 20 bp, synthetic construct
  misc_feature 1..20: note = chemically synthesized
  source 1..20: mol_type = other DNA
ccttttttacttcattaaaa

SEQ ID NO: 71491 - DNA, 20 bp, synthetic construct
  misc_feature 1..20: note = chemically synthesized
  source 1..20: mol_type = other DNA
taaacagaaaccctaggact

SEQ ID NO: 71492 - DNA, 20 bp, synthetic construct
  misc_feature 1..20: note = chemically synthesized
  source 1..20: mol_type = other DNA
aaccctaggacttggtgatt

SEQ ID NO: 71493 - DNA, 20 bp, synthetic construct
  misc_feature 1..20: note = chemically synthesized
  source 1..20: mol_type = other DNA
aaagaaagttcaataaagta

SEQ ID NO: 71494 - DNA, 20 bp, synthetic construct
  misc_feature 1..20: note = chemically synthesized
  source 1..20: mol_type = other DNA
aaaggtgatgatgaccatgg

SEQ ID NO: 71495 - DNA, 20 bp, synthetic construct
  misc_feature 1..20: note = chemically synthesized
  source 1..20: mol_type = other DNA
catgctgctatccaacatta

SEQ ID NO: 71496 - DNA, 20 bp, synthetic construct
  misc_feature 1..20: note = chemically synthesized
  source 1..20: mol_type = other DNA
ttagccccatattctatctc

SEQ ID NO: 71497 - DNA, 20 bp, synthetic construct
  misc_feature 1..20: note = chemically synthesized
  source 1..20: mol_type = other DNA
tattctatctcaccagcttt

SEQ ID NO: 71498 - DNA, 20 bp, synthetic construct
  misc_feature 1..20: note = chemically synthesized
  source 1..20: mol_type = other DNA
tggattggaaggcatcaaac

SEQ ID NO: 71499 - DNA, 20 bp, synthetic construct
  misc_feature 1..20: note = chemically synthesized
  source 1..20: mol_type = other DNA
acatggttgccatctcaggc

SEQ ID NO: 71500 - DNA, 20 bp, synthetic construct
  misc_feature 1..20: note = chemically synthesized
  source 1..20: mol_type = other DNA
gcccaccactatggggatct

SEQ ID NO: 71501 - DNA, 20 bp, synthetic construct
  misc_feature 1..20: note = chemically synthesized
  source 1..20: mol_type = other DNA
atccctattgtcctcctcct

SEQ ID NO: 71502 - DNA, 20 bp, synthetic construct
  misc_feature 1..20: note = chemically synthesized
  source 1..20: mol_type = other DNA
aatctgtatggactgatggt

SEQ ID NO: 71503 - DNA, 20 bp, synthetic construct
  misc_feature 1..20: note = chemically synthesized
  source 1..20: mol_type = other DNA
tgatggggctgtccctggtg

SEQ ID NO: 71504 - DNA, 20 bp, synthetic construct
  misc_feature 1..20: note = chemically synthesized
  source 1..20: mol_type = other DNA
tgtctacctttttgtgcctc

SEQ ID NO: 71505 - DNA, 20 bp, synthetic construct
  misc_feature 1..20: note = chemically synthesized
  source 1..20: mol_type = other DNA
ttgagtatatagcatgctct

SEQ ID NO: 71506 - DNA, 20 bp, synthetic construct
  misc_feature 1..20: note = chemically synthesized
  source 1..20: mol_type = other DNA
ggcaaatttatgtctggagt

SEQ ID NO: 71507 - DNA, 20 bp, synthetic construct
  misc_feature 1..20: note = chemically synthesized
  source 1..20: mol_type = other DNA
gctttaaaaaactgaacttc

SEQ ID NO: 71508 - DNA, 20 bp, synthetic construct
  misc_feature 1..20: note = chemically synthesized
  source 1..20: mol_type = other DNA
aaaaaactgaacttctcttg

SEQ ID NO: 71509 - DNA, 20 bp, synthetic construct
  misc_feature 1..20: note = chemically synthesized
  source 1..20: mol_type = other DNA
ctccttccatggttccttgg

SEQ ID NO: 71510 - DNA, 20 bp, synthetic construct
  misc_feature 1..20: note = chemically synthesized
  source 1..20: mol_type = other DNA
cttccatcttatctacctgg

SEQ ID NO: 71511 - DNA, 20 bp, synthetic construct
  misc_feature 1..20: note = chemically synthesized
  source 1..20: mol_type = other DNA
ctcctgcattcttcctcaac

SEQ ID NO: 71512 - DNA, 20 bp, synthetic construct
  misc_feature 1..20: note = chemically synthesized
  source 1..20: mol_type = other DNA
ctatccttgactcctctcat

SEQ ID NO: 71513 - DNA, 20 bp, synthetic construct
  misc_feature 1..20: note = chemically synthesized
  source 1..20: mol_type = other DNA
tacagtcagtatttacttgt

SEQ ID NO: 71514 - DNA, 20 bp, synthetic construct
  misc_feature 1..20: note = chemically synthesized
  source 1..20: mol_type = other DNA
aacaatgacatgtaacgtga

SEQ ID NO: 71515 - DNA, 20 bp, synthetic construct
  misc_feature 1..20: note = chemically synthesized
  source 1..20: mol_type = other DNA
aatgcaatccttgcaggggt

SEQ ID NO: 71516 - DNA, 20 bp, synthetic construct
  misc_feature 1..20: note = chemically synthesized
  source 1..20: mol_type = other DNA
tgcaggggtctcagctttga

SEQ ID NO: 71517 - DNA, 20 bp, synthetic construct
  misc_feature 1..20: note = chemically synthesized
  source 1..20: mol_type = other DNA
ggtaaagcaccaaatgctcc

SEQ ID NO: 71518 - DNA, 20 bp, synthetic construct
  misc_feature 1..20: note = chemically synthesized
  source 1..20: mol_type = other DNA
acatttgtcacacagtaatg

SEQ ID NO: 71519 - DNA, 20 bp, synthetic construct
  misc_feature 1..20: note = chemically synthesized
  source 1..20: mol_type = other DNA
attaccatgaggccaggcac

SEQ ID NO: 71520 - DNA, 20 bp, synthetic construct
  misc_feature 1..20: note = chemically synthesized
  source 1..20: mol_type = other DNA
cactttgggagaccaaggtg

SEQ ID NO: 71521 - DNA, 20 bp, synthetic construct
  misc_feature 1..20: note = chemically synthesized
  source 1..20: mol_type = other DNA
tgggaggattgctgaaggcc

SEQ ID NO: 71522 - DNA, 20 bp, synthetic construct
  misc_feature 1..20: note = chemically synthesized
  source 1..20: mol_type = other DNA
tttgagaccaacttcaggca

SEQ ID NO: 71523 - DNA, 20 bp, synthetic construct
  misc_feature 1..20: note = chemically synthesized
  source 1..20: mol_type = other DNA
caagaagattacttgagtcc

SEQ ID NO: 71524 - DNA, 20 bp, synthetic construct
  misc_feature 1..20: note = chemically synthesized
  source 1..20: mol_type = other DNA
ctgggaggctgaggtgggaa

SEQ ID NO: 71525 - DNA, 20 bp, synthetic construct
  misc_feature 1..20: note = chemically synthesized
  source 1..20: mol_type = other DNA
gcctgggtgaccaagtgaga

SEQ ID NO: 71526 - DNA, 20 bp, synthetic construct
  misc_feature 1..20: note = chemically synthesized
  source 1..20: mol_type = other DNA
caaactctaaaaatatgtat

SEQ ID NO: 71527 - DNA, 20 bp, synthetic construct
  misc_feature 1..20: note = chemically synthesized
  source 1..20: mol_type = other DNA
aaaatatgtatgtatgtttg

SEQ ID NO: 71528 - DNA, 20 bp, synthetic construct
  misc_feature 1..20: note = chemically synthesized
  source 1..20: mol_type = other DNA
atgtttgtgcggtttcttgt

SEQ ID NO: 71529 - DNA, 20 bp, synthetic construct
  misc_feature 1..20: note = chemically synthesized
  source 1..20: mol_type = other DNA
gtgtatgtttgtgtggtatc

SEQ ID NO: 71530 - DNA, 20 bp, synthetic construct
  misc_feature 1..20: note = chemically synthesized
  source 1..20: mol_type = other DNA
gtgtgggtgttatcagactc

SEQ ID NO: 71531 - DNA, 20 bp, synthetic construct
  misc_feature 1..20: note = chemically synthesized
  source 1..20: mol_type = other DNA
tgggagcccctctggaaccc

SEQ ID NO: 71532 - DNA, 20 bp, synthetic construct
  misc_feature 1..20: note = chemically synthesized
  source 1..20: mol_type = other DNA
tagaatggggtacaaaaaat

SEQ ID NO: 71533 - DNA, 20 bp, synthetic construct
  misc_feature 1..20: note = chemically synthesized
  source 1..20: mol_type = other DNA
ggggtacaaaaaatttagga

SEQ ID NO: 71534 - DNA, 20 bp, synthetic construct
  misc_feature 1..20: note = chemically synthesized
  source 1..20: mol_type = other DNA
caaaaaatttaggatttgga

SEQ ID NO: 71535 - DNA, 20 bp, synthetic construct
  misc_feature 1..20: note = chemically synthesized
  source 1..20: mol_type = other DNA
aatggcgtgaacccaggagg

SEQ ID NO: 71536 - DNA, 20 bp, synthetic construct
  misc_feature 1..20: note = chemically synthesized
  source 1..20: mol_type = other DNA
aattaaaaatttaggatgta

SEQ ID NO: 71537 - DNA, 20 bp, synthetic construct
  misc_feature 1..20: note = chemically synthesized
  source 1..20: mol_type = other DNA
tgtttgtggcaaaatttttt

SEQ ID NO: 71538 - DNA, 20 bp, synthetic construct
  misc_feature 1..20: note = chemically synthesized
  source 1..20: mol_type = other DNA
ctattattaaaatgacattt

SEQ ID NO: 71539 - DNA, 20 bp, synthetic construct
  misc_feature 1..20: note = chemically synthesized
  source 1..20: mol_type = other DNA
atatataatcttattttcta

SEQ ID NO: 71540 - DNA, 20 bp, synthetic construct
  misc_feature 1..20: note = chemically synthesized
  source 1..20: mol_type = other DNA
aaattttctgaagaagacat

SEQ ID NO: 71541 - DNA, 20 bp, synthetic construct
  misc_feature 1..20: note = chemically synthesized
  source 1..20: mol_type = other DNA
caatgactataaaaagttat

SEQ ID NO: 71542 - DNA, 20 bp, synthetic construct
  misc_feature 1..20: note = chemically synthesized
  source 1..20: mol_type = other DNA
attatgatcatgataaatgc

SEQ ID NO: 71543 - DNA, 20 bp, synthetic construct
  misc_feature 1..20: note = chemically synthesized
  source 1..20: mol_type = other DNA
tagggaggtattattatttt

SEQ ID NO: 71544 - DNA, 20 bp, synthetic construct
  misc_feature 1..20: note = chemically synthesized
  source 1..20: mol_type = other DNA
tgaaattcaatatcaagcgc

SEQ ID NO: 71545 - DNA, 20 bp, synthetic construct
  misc_feature 1..20: note = chemically synthesized
  source 1..20: mol_type = other DNA
actcctctccaaacaggacc

SEQ ID NO: 71546 - DNA, 20 bp, synthetic construct
  misc_feature 1..20: note = chemically synthesized
  source 1..20: mol_type = other DNA
caggaccactcgtttcaggg

SEQ ID NO: 71547 - DNA, 20 bp, synthetic construct
  misc_feature 1..20: note = chemically synthesized
  source 1..20: mol_type = other DNA
atactgaaggaagtcccatc

SEQ ID NO: 71548 - DNA, 20 bp, synthetic construct
  misc_feature 1..20: note = chemically synthesized
  source 1..20: mol_type = other DNA
tattaaatactttttaatag

SEQ ID NO: 71549 - DNA, 20 bp, synthetic construct
  misc_feature 1..20: note = chemically synthesized
  source 1..20: mol_type = other DNA
atagacttgattttaagagt

SEQ ID NO: 71550 - DNA, 20 bp, synthetic construct
  misc_feature 1..20: note = chemically synthesized
  source 1..20: mol_type = other DNA
gtaccttctattttgcatat

SEQ ID NO: 71551 - DNA, 20 bp, synthetic construct
  misc_feature 1..20: note = chemically synthesized
  source 1..20: mol_type = other DNA
aaccttatgagatggatact

SEQ ID NO: 71552 - DNA, 20 bp, synthetic construct
  misc_feature 1..20: note = chemically synthesized
  source 1..20: mol_type = other DNA
atatcttgcccaatattata

SEQ ID NO: 71553 - DNA, 20 bp, synthetic construct
  misc_feature 1..20: note = chemically synthesized
  source 1..20: mol_type = other DNA
aagtttgacagttctgactg

SEQ ID NO: 71554 - DNA, 20 bp, synthetic construct
  misc_feature 1..20: note = chemically synthesized
  source 1..20: mol_type = other DNA
acagttctgactgtggtgct

SEQ ID NO: 71555 - DNA, 20 bp, synthetic construct
  misc_feature 1..20: note = chemically synthesized
  source 1..20: mol_type = other DNA
ttgtagttttaactatgctc

SEQ ID NO: 71556 - DNA, 20 bp, synthetic construct
  misc_feature 1..20: note = chemically synthesized
  source 1..20: mol_type = other DNA
atattcctgctaatgacagt

SEQ ID NO: 71557 - DNA, 20 bp, synthetic construct
  misc_feature 1..20: note = chemically synthesized
  source 1..20: mol_type = other DNA
taattgaagttcacagaatt

SEQ ID NO: 71558 - DNA, 20 bp, synthetic construct
  misc_feature 1..20: note = chemically synthesized
  source 1..20: mol_type = other DNA
gaagttcacagaattttatg

SEQ ID NO: 71559 - DNA, 20 bp, synthetic construct
  misc_feature 1..20: note = chemically synthesized
  source 1..20: mol_type = other DNA
tgacaactctgagcctttgt

SEQ ID NO: 71560 - DNA, 20 bp, synthetic construct
  misc_feature 1..20: note = chemically synthesized
  source 1..20: mol_type = other DNA
atagtgcagacattagtaag

SEQ ID NO: 71561 - DNA, 20 bp, synthetic construct
  misc_feature 1..20: note = chemically synthesized
  source 1..20: mol_type = other DNA
atatttgtatcacctgggaa

SEQ ID NO: 71562 - DNA, 20 bp, synthetic construct
  misc_feature 1..20: note = chemically synthesized
  source 1..20: mol_type = other DNA
gtatcacctgggaagcctgt

SEQ ID NO: 71563 - DNA, 20 bp, synthetic construct
  misc_feature 1..20: note = chemically synthesized
  source 1..20: mol_type = other DNA
tttttgcttcatcaggggac

SEQ ID NO: 71564 - DNA, 20 bp, synthetic construct
  misc_feature 1..20: note = chemically synthesized
  source 1..20: mol_type = other DNA
catcaacctcctgcagaaga

SEQ ID NO: 71565 - DNA, 20 bp, synthetic construct
  misc_feature 1..20: note = chemically synthesized
  source 1..20: mol_type = other DNA
agacaatgctttctgaaaga

SEQ ID NO: 71566 - DNA, 20 bp, synthetic construct
  misc_feature 1..20: note = chemically synthesized
  source 1..20: mol_type = other DNA
agacagagtttgtgtcttat

SEQ ID NO: 71567 - DNA, 20 bp, synthetic construct
  misc_feature 1..20: note = chemically synthesized
  source 1..20: mol_type = other DNA
ttgcattcaaatatctgacc

SEQ ID NO: 71568 - DNA, 20 bp, synthetic construct
  misc_feature 1..20: note = chemically synthesized
  source 1..20: mol_type = other DNA
aaagaaaagaaagacaaaaa

SEQ ID NO: 71569 - DNA, 20 bp, synthetic construct
  misc_feature 1..20: note = chemically synthesized
  source 1..20: mol_type = other DNA
ttaagataactgggcatctc

SEQ ID NO: 71570 - DNA, 20 bp, synthetic construct
  misc_feature 1..20: note = chemically synthesized
  source 1..20: mol_type = other DNA
atcaagtctgcgtccatcta

SEQ ID NO: 71571 - DNA, 20 bp, synthetic construct
  misc_feature 1..20: note = chemically synthesized
  source 1..20: mol_type = other DNA
ccaaagacccaaggaagaga

SEQ ID NO: 71572 - DNA, 20 bp, synthetic construct
  misc_feature 1..20: note = chemically synthesized
  source 1..20: mol_type = other DNA
ccagtaagttgctgaaggtc

SEQ ID NO: 71573 - DNA, 20 bp, synthetic construct
  misc_feature 1..20: note = chemically synthesized
  source 1..20: mol_type = other DNA
tatgcagggttatggaatag

SEQ ID NO: 71574 - DNA, 20 bp, synthetic construct
  misc_feature 1..20: note = chemically synthesized
  source 1..20: mol_type = other DNA
ctgttctatcatatctcccg

SEQ ID NO: 71575 - DNA, 20 bp, synthetic construct
  misc_feature 1..20: note = chemically synthesized
  source 1..20: mol_type = other DNA
tcagcaattgctccaattga

SEQ ID NO: 71576 - DNA, 20 bp, synthetic construct
  misc_feature 1..20: note = chemically synthesized
  source 1..20: mol_type = other DNA
atgaagcttctaacatttca

SEQ ID NO: 71577 - DNA, 20 bp, synthetic construct
  misc_feature 1..20: note = chemically synthesized
  source 1..20: mol_type = other DNA
tttcaacatagtaaaaaagc

SEQ ID NO: 71578 - DNA, 20 bp, synthetic construct
  misc_feature 1..20: note = chemically synthesized
  source 1..20: mol_type = other DNA
agtaaaaaagctaaggttta

SEQ ID NO: 71579 - DNA, 20 bp, synthetic construct
  misc_feature 1..20: note = chemically synthesized
  source 1..20: mol_type = other DNA
aactttgccaaagccatatg

SEQ ID NO: 71580 - DNA, 20 bp, synthetic construct
  misc_feature 1..20: note = chemically synthesized
  source 1..20: mol_type = other DNA
caaaaacctgtgcaagagct

SEQ ID NO: 71581 - DNA, 20 bp, synthetic construct
  misc_feature 1..20: note = chemically synthesized
  source 1..20: mol_type = other DNA
ggcttcccactccaaatacc

SEQ ID NO: 71582 - DNA, 20 bp, synthetic construct
  misc_feature 1..20: note = chemically synthesized
  source 1..20: mol_type = other DNA
ataccttacgcttcattgtt

SEQ ID NO: 71583 - DNA, 20 bp, synthetic construct
  misc_feature 1..20: note = chemically synthesized
  source 1..20: mol_type = other DNA
ataaaatgtgtctattgagt

SEQ ID NO: 71584 - DNA, 20 bp, synthetic construct
  misc_feature 1..20: note = chemically synthesized
  source 1..20: mol_type = other DNA
caatttttcagatgaagaaa

SEQ ID NO: 71585 - DNA, 20 bp, synthetic construct
  misc_feature 1..20: note = chemically synthesized
  source 1..20: mol_type = other DNA
agagtgaagagctattgaag

SEQ ID NO: 71586 - DNA, 20 bp, synthetic construct
  misc_feature 1..20: note = chemically synthesized
  source 1..20: mol_type = other DNA
taaagagaaagtcaaattgt

SEQ ID NO: 71587 - DNA, 20 bp, synthetic construct
  misc_feature 1..20: note = chemically synthesized
  source 1..20: mol_type = other DNA
attgtccctgtttgcagatg

SEQ ID NO: 71588 - DNA, 20 bp, synthetic construct
  misc_feature 1..20: note = chemically synthesized
  source 1..20: mol_type = other DNA
gtgagtgaactcccattcac

SEQ ID NO: 71589 - DNA, 20 bp, synthetic construct
  misc_feature 1..20: note = chemically synthesized
  source 1..20: mol_type = other DNA
ccatactgcccaaggtaatt

SEQ ID NO: 71590 - DNA, 20 bp, synthetic construct
  misc_feature 1..20: note = chemically synthesized
  source 1..20: mol_type = other DNA
aaagctggaggcatcacact

SEQ ID NO: 71591 - DNA, 20 bp, synthetic construct
  misc_feature 1..20: note = chemically synthesized
  source 1..20: mol_type = other DNA
gagaaaaacaagaaatgggg

SEQ ID NO: 71592 - DNA, 20 bp, synthetic construct
  misc_feature 1..20: note = chemically synthesized
  source 1..20: mol_type = other DNA
caagaaatggggaaaggatt

SEQ ID NO: 71593 - DNA, 20 bp, synthetic construct
  misc_feature 1..20: note = chemically synthesized
  source 1..20: mol_type = other DNA
ttatacaaaaattaactcaa

SEQ ID NO: 71594 - DNA, 20 bp, synthetic construct
  misc_feature 1..20: note = chemically synthesized
  source 1..20: mol_type = other DNA
aaacattgtggaagtcagtg

SEQ ID NO: 71595 - DNA, 20 bp, synthetic construct
  misc_feature 1..20: note = chemically synthesized
  source 1..20: mol_type = other DNA
ccattactgggtatacaccc

SEQ ID NO: 71596 - DNA, 20 bp, synthetic construct
  misc_feature 1..20: note = chemically synthesized
  source 1..20: mol_type = other DNA
ctataaagacacatgcacac

SEQ ID NO: 71597 - DNA, 20 bp, synthetic construct
  misc_feature 1..20: note = chemically synthesized
  source 1..20: mol_type = other DNA
caaatgtccaacaatgatag

SEQ ID NO: 71598 - DNA, 20 bp, synthetic construct
  misc_feature 1..20: note = chemically synthesized
  source 1..20: mol_type = other DNA
caaagatactgactctatat

SEQ ID NO: 71599 - DNA, 20 bp, synthetic construct
  misc_feature 1..20: note = chemically synthesized
  source 1..20: mol_type = other DNA
gatactgactctatatcttt

SEQ ID NO: 71600 - DNA, 20 bp, synthetic construct
  misc_feature 1..20: note = chemically synthesized
  source 1..20: mol_type = other DNA
ctctactcctagagactctg

SEQ ID NO: 71601 - DNA, 20 bp, synthetic construct
  misc_feature 1..20: note = chemically synthesized
  source 1..20: mol_type = other DNA
agtggcagggacttgctgaa

SEQ ID NO: 71602 - DNA, 20 bp, synthetic construct
  misc_feature 1..20: note = chemically synthesized
  source 1..20: mol_type = other DNA
atcccacctgaggctcagag

SEQ ID NO: 71603 - DNA, 20 bp, synthetic construct
  misc_feature 1..20: note = chemically synthesized
  source 1..20: mol_type = other DNA
cacaagcccatgatccctga

SEQ ID NO: 71604 - DNA, 20 bp, synthetic construct
  misc_feature 1..20: note = chemically synthesized
  source 1..20: mol_type = other DNA
tgtcgggggagggaccaggt

SEQ ID NO: 71605 - DNA, 20 bp, synthetic construct
  misc_feature 1..20: note = chemically synthesized
  source 1..20: mol_type = other DNA
ggagattattggatcatggg

SEQ ID NO: 71606 - DNA, 20 bp, synthetic construct
  misc_feature 1..20: note = chemically synthesized
  source 1..20: mol_type = other DNA
tgcagttctcgtgatactga

SEQ ID NO: 71607 - DNA, 20 bp, synthetic construct
  misc_feature 1..20: note = chemically synthesized
  source 1..20: mol_type = other DNA
agtgagttttcatgagatct

SEQ ID NO: 71608 - DNA, 20 bp, synthetic construct
  misc_feature 1..20: note = chemically synthesized
  source 1..20: mol_type = other DNA
gagatctgatggttttataa

SEQ ID NO: 71609 - DNA, 20 bp, synthetic construct
  misc_feature 1..20: note = chemically synthesized
  source 1..20: mol_type = other DNA
cctgccaccaagtaagatgt

SEQ ID NO: 71610 - DNA, 20 bp, synthetic construct
  misc_feature 1..20: note = chemically synthesized
  source 1..20: mol_type = other DNA
cttctccttctgccataatt

SEQ ID NO: 71611 - DNA, 20 bp, synthetic construct
  misc_feature 1..20: note = chemically synthesized
  source 1..20: mol_type = other DNA
cctaagacagtagtcacctc

SEQ ID NO: 71612 - DNA, 20 bp, synthetic construct
  misc_feature 1..20: note = chemically synthesized
  source 1..20: mol_type = other DNA
agcacatcatgaattcttga

SEQ ID NO: 71613 - DNA, 20 bp, synthetic construct
  misc_feature 1..20: note = chemically synthesized
  source 1..20: mol_type = other DNA
attatcttgggttactcaca

SEQ ID NO: 71614 - DNA, 20 bp, synthetic construct
  misc_feature 1..20: note = chemically synthesized
  source 1..20: mol_type = other DNA
ttactcacaaaatgcttatg

SEQ ID NO: 71615 - DNA, 20 bp, synthetic construct
  misc_feature 1..20: note = chemically synthesized
  source 1..20: mol_type = other DNA
taagtgggaaattcttgtct

SEQ ID NO: 71616 - DNA, 20 bp, synthetic construct
  misc_feature 1..20: note = chemically synthesized
  source 1..20: mol_type = other DNA
aaaagttggaaataagctga

SEQ ID NO: 71617 - DNA, 20 bp, synthetic construct
  misc_feature 1..20: note = chemically synthesized
  source 1..20: mol_type = other DNA
tacgtaaagttataccgaac

SEQ ID NO: 71618 - DNA, 20 bp, synthetic construct
  misc_feature 1..20: note = chemically synthesized
  source 1..20: mol_type = other DNA
tgtcccacattctacttttt

SEQ ID NO: 71619 - DNA, 20 bp, synthetic construct
  misc_feature 1..20: note = chemically synthesized
  source 1..20: mol_type = other DNA
aacaaatcctaaactcagga

SEQ ID NO: 71620 - DNA, 20 bp, synthetic construct
  misc_feature 1..20: note = chemically synthesized
  source 1..20: mol_type = other DNA
tcctaaactcaggagaatga

SEQ ID NO: 71621 - DNA, 20 bp, synthetic construct
  misc_feature 1..20: note = chemically synthesized
  source 1..20: mol_type = other DNA
gaaggcagaggaggagagac

SEQ ID NO: 71622 - DNA, 20 bp, synthetic construct
  misc_feature 1..20: note = chemically synthesized
  source 1..20: mol_type = other DNA
actctagtttcaagtatcag

SEQ ID NO: 71623 - DNA, 20 bp, synthetic construct
  misc_feature 1..20: note = chemically synthesized
  source 1..20: mol_type = other DNA
agtttcaagtatcagtcaag

SEQ ID NO: 71624 - DNA, 20 bp, synthetic construct
  misc_feature 1..20: note = chemically synthesized
  source 1..20: mol_type = other DNA
gatacagggtgcagtgggat

SEQ ID NO: 71625 - DNA, 20 bp, synthetic construct
  misc_feature 1..20: note = chemically synthesized
  source 1..20: mol_type = other DNA
ctctgcctgtctgtggtctc

SEQ ID NO: 71626 - DNA, 20 bp, synthetic construct
  misc_feature 1..20: note = chemically synthesized
  source 1..20: mol_type = other DNA
ttttttttttttgcatcctt

SEQ ID NO: 71627 - DNA, 20 bp, synthetic construct
  misc_feature 1..20: note = chemically synthesized
  source 1..20: mol_type = other DNA
cttaaaacacaatcattctc

SEQ ID NO: 71628 - DNA, 20 bp, synthetic construct
  misc_feature 1..20: note = chemically synthesized
  source 1..20: mol_type = other DNA
acacaatcattctcctgagt

SEQ ID NO: 71629 - DNA, 20 bp, synthetic construct
  misc_feature 1..20: note = chemically synthesized
  source 1..20: mol_type = other DNA
atcattctcctgagtttagg

SEQ ID NO: 71630 - DNA, 20 bp, synthetic construct
  misc_feature 1..20: note = chemically synthesized
  source 1..20: mol_type = other DNA
gatttgtttgacaagagcat

SEQ ID NO: 71631 - DNA, 20 bp, synthetic construct
  misc_feature 1..20: note = chemically synthesized
  source 1..20: mol_type = other DNA
acctttgtgcacattagtat

SEQ ID NO: 71632 - DNA, 20 bp, synthetic construct
  misc_feature 1..20: note = chemically synthesized
  source 1..20: mol_type = other DNA
attctcaggagtcaatcaca

SEQ ID NO: 71633 - DNA, 20 bp, synthetic construct
  misc_feature 1..20: note = chemically synthesized
  source 1..20: mol_type = other DNA
caagaattcatgatgtgctc

SEQ ID NO: 71634 - DNA, 20 bp, synthetic construct
  misc_feature 1..20: note = chemically synthesized
  source 1..20: mol_type = other DNA
ttcatgatgtgctctggtgt

SEQ ID NO: 71635 - DNA, 20 bp, synthetic construct
  misc_feature 1..20: note = chemically synthesized
  source 1..20: mol_type = other DNA
gatgtgctctggtgtttttg

SEQ ID NO: 71636 - DNA, 20 bp, synthetic construct
  misc_feature 1..20: note = chemically synthesized
  source 1..20: mol_type = other DNA
ccatctgccaccaatttagg

SEQ ID NO: 71637 - DNA, 20 bp, synthetic construct
  misc_feature 1..20: note = chemically synthesized
  source 1..20: mol_type = other DNA
actgtcttaggaaaaatgct

SEQ ID NO: 71638 - DNA, 20 bp, synthetic construct
  misc_feature 1..20: note = chemically synthesized
  source 1..20: mol_type = other DNA
atggggttgggagtcctgaa

SEQ ID NO: 71639 - DNA, 20 bp, synthetic construct
  misc_feature 1..20: note = chemically synthesized
  source 1..20: mol_type = other DNA
ctgaatgctgcttcagaagg

SEQ ID NO: 71640 - DNA, 20 bp, synthetic construct
  misc_feature 1..20: note = chemically synthesized
  source 1..20: mol_type = other DNA
ctgcttcagaaggcagggct

SEQ ID NO: 71641 - DNA, 20 bp, synthetic construct
  misc_feature 1..20: note = chemically synthesized
  source 1..20: mol_type = other DNA
ctgggtaatttattaacaaa

SEQ ID NO: 71642 - DNA, 20 bp, synthetic construct
  misc_feature 1..20: note = chemically synthesized
  source 1..20: mol_type = other DNA
ctggtccctcccccgacata

SEQ ID NO: 71643 - DNA, 20 bp, synthetic construct
  misc_feature 1..20: note = chemically synthesized
  source 1..20: mol_type = other DNA
cccccgacatatagggatta

SEQ ID NO: 71644 - DNA, 20 bp, synthetic construct
  misc_feature 1..20: note = chemically synthesized
  source 1..20: mol_type = other DNA
gccaagccatatcagggatc

SEQ ID NO: 71645 - DNA, 20 bp, synthetic construct
  misc_feature 1..20: note = chemically synthesized
  source 1..20: mol_type = other DNA
acttattttttgttatactt

SEQ ID NO: 71646 - DNA, 20 bp, synthetic construct
  misc_feature 1..20: note = chemically synthesized
  source 1..20: mol_type = other DNA
cacctatgagtgagaacatg

SEQ ID NO: 71647 - DNA, 20 bp, synthetic construct
  misc_feature 1..20: note = chemically synthesized
  source 1..20: mol_type = other DNA
atgagtgagaacatgtggtg

SEQ ID NO: 71648 - DNA, 20 bp, synthetic construct
  misc_feature 1..20: note = chemically synthesized
  source 1..20: mol_type = other DNA
gtttggctttttgtccttgt

SEQ ID NO: 71649 - DNA, 20 bp, synthetic construct
  misc_feature 1..20: note = chemically synthesized
  source 1..20: mol_type = other DNA
tgtgatagtttgctgagaat

SEQ ID NO: 71650 - DNA, 20 bp, synthetic construct
  misc_feature 1..20: note = chemically synthesized
  source 1..20: mol_type = other DNA
gtttgctgagaatgatggtt

SEQ ID NO: 71651 - DNA, 20 bp, synthetic construct
  misc_feature 1..20: note = chemically synthesized
  source 1..20: mol_type = other DNA
gtgcatgtgtctttatagca

SEQ ID NO: 71652 - DNA, 20 bp, synthetic construct
  misc_feature 1..20: note = chemically synthesized
  source 1..20: mol_type = other DNA
aatcaccacactgacttcca

SEQ ID NO: 71653 - DNA, 20 bp, synthetic construct
  misc_feature 1..20: note = chemically synthesized
  source 1..20: mol_type = other DNA
ctgacttccacaatgtttga

SEQ ID NO: 71654 - DNA, 20 bp, synthetic construct
  misc_feature 1..20: note = chemically synthesized
  source 1..20: mol_type = other DNA
tccacatcctctccagcacc

SEQ ID NO: 71655 - DNA, 20 bp, synthetic construct
  misc_feature 1..20: note = chemically synthesized
  source 1..20: mol_type = other DNA
cctgttgtttcctgactttt

SEQ ID NO: 71656 - DNA, 20 bp, synthetic construct
  misc_feature 1..20: note = chemically synthesized
  source 1..20: mol_type = other DNA
ggtgtgagatggtatctcat

SEQ ID NO: 71657 - DNA, 20 bp, synthetic construct
  misc_feature 1..20: note = chemically synthesized
  source 1..20: mol_type = other DNA
gagatggtatctcattgtgg

SEQ ID NO: 71658 - DNA, 20 bp, synthetic construct
  misc_feature 1..20: note = chemically synthesized
  source 1..20: mol_type = other DNA
atcctttgcccactttttga

SEQ ID NO: 71659 - DNA, 20 bp, synthetic construct
  misc_feature 1..20: note = chemically synthesized
  source 1..20: mol_type = other DNA
gggttttttttctcttgtaa

SEQ ID NO: 71660 - DNA, 20 bp, synthetic construct
  misc_feature 1..20: note = chemically synthesized
  source 1..20: mol_type = other DNA
gtaaatttgtttgagttcat

SEQ ID NO: 71661 - DNA, 20 bp, synthetic construct
  misc_feature 1..20: note = chemically synthesized
  source 1..20: mol_type = other DNA
tattagccctttgtcagatg

SEQ ID NO: 71662 - DNA, 20 bp, synthetic construct
  misc_feature 1..20: note = chemically synthesized
  source 1..20: mol_type = other DNA
ggttgcctgttcactctgat

SEQ ID NO: 71663 - DNA, 20 bp, synthetic construct
  misc_feature 1..20: note = chemically synthesized
  source 1..20: mol_type = other DNA
cttttgctgtgcagaagatc

SEQ ID NO: 71664 - DNA, 20 bp, synthetic construct
  misc_feature 1..20: note = chemically synthesized
  source 1..20: mol_type = other DNA
attagatcccattagtgaat

SEQ ID NO: 71665 - DNA, 20 bp, synthetic construct
  misc_feature 1..20: note = chemically synthesized
  source 1..20: mol_type = other DNA
tgaattttggcttttgttgc

SEQ ID NO: 71666 - DNA, 20 bp, synthetic construct
  misc_feature 1..20: note = chemically synthesized
  source 1..20: mol_type = other DNA
gcttttgttgccattgcttt

SEQ ID NO: 71667 - DNA, 20 bp, synthetic construct
  misc_feature 1..20: note = chemically synthesized
  source 1..20: mol_type = other DNA
catgcctatgtcctgaatgg

SEQ ID NO: 71668 - DNA, 20 bp, synthetic construct
  misc_feature 1..20: note = chemically synthesized
  source 1..20: mol_type = other DNA
tatgtcctgaatggtattgc

SEQ ID NO: 71669 - DNA, 20 bp, synthetic construct
  misc_feature 1..20: note = chemically synthesized
  source 1..20: mol_type = other DNA
gtattgcttaggttttcttc

SEQ ID NO: 71670 - DNA, 20 bp, synthetic construct
  misc_feature 1..20: note = chemically synthesized
  source 1..20: mol_type = other DNA
aggttttcttctagagtttt

SEQ ID NO: 71671 - DNA, 20 bp, synthetic construct
  misc_feature 1..20: note = chemically synthesized
  source 1..20: mol_type = other DNA
tataaggtgtaaggaaggga

SEQ ID NO: 71672 - DNA, 20 bp, synthetic construct
  misc_feature 1..20: note = chemically synthesized
  source 1..20: mol_type = other DNA
gtgtaaggaagggatccagt

SEQ ID NO: 71673 - DNA, 20 bp, synthetic construct
  misc_feature 1..20: note = chemically synthesized
  source 1..20: mol_type = other DNA
cagcttcctacatttggcta

SEQ ID NO: 71674 - DNA, 20 bp, synthetic construct
  misc_feature 1..20: note = chemically synthesized
  source 1..20: mol_type = other DNA
cagggaatcctttccccatt

SEQ ID NO: 71675 - DNA, 20 bp, synthetic construct
  misc_feature 1..20: note = chemically synthesized
  source 1..20: mol_type = other DNA
ttccccatttcttgtttttc

SEQ ID NO: 71676 - DNA, 20 bp, synthetic construct
  misc_feature 1..20: note = chemically synthesized
  source 1..20: mol_type = other DNA
gacagcattatttctgaggg

SEQ ID NO: 71677 - DNA, 20 bp, synthetic construct
  misc_feature 1..20: note = chemically synthesized
  source 1..20: mol_type = other DNA
tttgttccattggtctatat

SEQ ID NO: 71678 - DNA, 20 bp, synthetic construct
  misc_feature 1..20: note = chemically synthesized
  source 1..20: mol_type = other DNA
ctgttttggtaccagtacta

SEQ ID NO: 71679 - DNA, 20 bp, synthetic construct
  misc_feature 1..20: note = chemically synthesized
  source 1..20: mol_type = other DNA
tggttactgtagccttgtag

SEQ ID NO: 71680 - DNA, 20 bp, synthetic construct
  misc_feature 1..20: note = chemically synthesized
  source 1..20: mol_type = other DNA
aaatcaggtagtgtgatgcc

SEQ ID NO: 71681 - DNA, 20 bp, synthetic construct
  misc_feature 1..20: note = chemically synthesized
  source 1..20: mol_type = other DNA
gatgcctccagctttgttct

SEQ ID NO: 71682 - DNA, 20 bp, synthetic construct
  misc_feature 1..20: note = chemically synthesized
  source 1..20: mol_type = other DNA
tccagctttgttcttttggc

SEQ ID NO: 71683 - DNA, 20 bp, synthetic construct
  misc_feature 1..20: note = chemically synthesized
  source 1..20: mol_type = other DNA
tggttccatatgaactttaa

SEQ ID NO: 71684 - DNA, 20 bp, synthetic construct
  misc_feature 1..20: note = chemically synthesized
  source 1..20: mol_type = other DNA
attctgtgaagaaagtcatt

SEQ ID NO: 71685 - DNA, 20 bp, synthetic construct
  misc_feature 1..20: note = chemically synthesized
  source 1..20: mol_type = other DNA
cagtatggccattttcacga

SEQ ID NO: 71686 - DNA, 20 bp, synthetic construct
  misc_feature 1..20: note = chemically synthesized
  source 1..20: mol_type = other DNA
tgagcatggaatgttcttcc

SEQ ID NO: 71687 - DNA, 20 bp, synthetic construct
  misc_feature 1..20: note = chemically synthesized
  source 1..20: mol_type = other DNA
tgtatcttatttccttgagc

SEQ ID NO: 71688 - DNA, 20 bp, synthetic construct
  misc_feature 1..20: note = chemically synthesized
  source 1..20: mol_type = other DNA
gtccttcacatcccttgtaa

SEQ ID NO: 71689 - DNA, 20 bp, synthetic construct
  misc_feature 1..20: note = chemically synthesized
  source 1..20: mol_type = other DNA
attgtgaatgggagttcact

SEQ ID NO: 71690 - DNA, 20 bp, synthetic construct
  misc_feature 1..20: note = chemically synthesized
  source 1..20: mol_type = other DNA
tgtctgttattggtgtataa

SEQ ID NO: 71691 - DNA, 20 bp, synthetic construct
  misc_feature 1..20: note = chemically synthesized
  source 1..20: mol_type = other DNA
ttattggtgtataagaatgc

SEQ ID NO: 71692 - DNA, 20 bp, synthetic construct
  misc_feature 1..20: note = chemically synthesized
  source 1..20: mol_type = other DNA
gaatgcttgtgatttttgca

SEQ ID NO: 71693 - DNA, 20 bp, synthetic construct
  misc_feature 1..20: note = chemically synthesized
  source 1..20: mol_type = other DNA
gtatcctgagactttgctga

SEQ ID NO: 71694 - DNA, 20 bp, synthetic construct
  misc_feature 1..20: note = chemically synthesized
  source 1..20: mol_type = other DNA
agactttgctgaagttgctt

SEQ ID NO: 71695 - DNA, 20 bp, synthetic construct
  misc_feature 1..20: note = chemically synthesized
  source 1..20: mol_type = other DNA
tgaagttgcttatcagctta

SEQ ID NO: 71696 - DNA, 20 bp, synthetic construct
  misc_feature 1..20: note = chemically synthesized
  source 1..20: mol_type = other DNA
gggattttgggctgagacaa

SEQ ID NO: 71697 - DNA, 20 bp, synthetic construct
  misc_feature 1..20: note = chemically synthesized
  source 1..20: mol_type = other DNA
gccttttatttccttctcct

SEQ ID NO: 71698 - DNA, 20 bp, synthetic construct
  misc_feature 1..20: note = chemically synthesized
  source 1..20: mol_type = other DNA
aacttcaatagctcttcact

SEQ ID NO: 71699 - DNA, 20 bp, synthetic construct
  misc_feature 1..20: note = chemically synthesized
  source 1..20: mol_type = other DNA
actctatgattgtgcaaagt

SEQ ID NO: 71700 - DNA, 20 bp, synthetic construct
  misc_feature 1..20: note = chemically synthesized
  source 1..20: mol_type = other DNA
gtgcaaagtatctgattaat

SEQ ID NO: 71701 - DNA, 20 bp, synthetic construct
  misc_feature 1..20: note = chemically synthesized
  source 1..20: mol_type = other DNA
tgagacaattctacctactc

SEQ ID NO: 71702 - DNA, 20 bp, synthetic construct
  misc_feature 1..20: note = chemically synthesized
  source 1..20: mol_type = other DNA
atgttgcagtgagctctaag

SEQ ID NO: 71703 - DNA, 20 bp, synthetic construct
  misc_feature 1..20: note = chemically synthesized
  source 1..20: mol_type = other DNA
gggaagccatgagctcttgc

SEQ ID NO: 71704 - DNA, 20 bp, synthetic construct
  misc_feature 1..20: note = chemically synthesized
  source 1..20: mol_type = other DNA
gtttttggacaatccttcca

SEQ ID NO: 71705 - DNA, 20 bp, synthetic construct
  misc_feature 1..20: note = chemically synthesized
  source 1..20: mol_type = other DNA
gttactgaatctttctaaac

SEQ ID NO: 71706 - DNA, 20 bp, synthetic construct
  misc_feature 1..20: note = chemically synthesized
  source 1..20: mol_type = other DNA
cttagcttttttactatgtt

SEQ ID NO: 71707 - DNA, 20 bp, synthetic construct
  misc_feature 1..20: note = chemically synthesized
  source 1..20: mol_type = other DNA
gccctgcctcttttcgagag

SEQ ID NO: 71708 - DNA, 20 bp, synthetic construct
  misc_feature 1..20: note = chemically synthesized
  source 1..20: mol_type = other DNA
cctcttttcgagagaaatga

SEQ ID NO: 71709 - DNA, 20 bp, synthetic construct
  misc_feature 1..20: note = chemically synthesized
  source 1..20: mol_type = other DNA
ggaaagcactctgaaatgtt

SEQ ID NO: 71710 - DNA, 20 bp, synthetic construct
  misc_feature 1..20: note = chemically synthesized
  source 1..20: mol_type = other DNA
ttcatcaattggagcaattg

SEQ ID NO: 71711 - DNA, 20 bp, synthetic construct
  misc_feature 1..20: note = chemically synthesized
  source 1..20: mol_type = other DNA
aattggagcaattgctgaga

SEQ ID NO: 71712 - DNA, 20 bp, synthetic construct
  misc_feature 1..20: note = chemically synthesized
  source 1..20: mol_type = other DNA
gatagaacagcagccctaac

SEQ ID NO: 71713 - DNA, 20 bp, synthetic construct
  misc_feature 1..20: note = chemically synthesized
  source 1..20: mol_type = other DNA
cttactggtcctttcttctc

SEQ ID NO: 71714 - DNA, 20 bp, synthetic construct
  misc_feature 1..20: note = chemically synthesized
  source 1..20: mol_type = other DNA
cagacttgatgaatgtcaaa

SEQ ID NO: 71715 - DNA, 20 bp, synthetic construct
  misc_feature 1..20: note = chemically synthesized
  source 1..20: mol_type = other DNA
acttcataagaaaatttatt

SEQ ID NO: 71716 - DNA, 20 bp, synthetic construct
  misc_feature 1..20: note = chemically synthesized
  source 1..20: mol_type = other DNA
tgagcaagtatgtaaagatc

SEQ ID NO: 71717 - DNA, 20 bp, synthetic construct
  misc_feature 1..20: note = chemically synthesized
  source 1..20: mol_type = other DNA
cgtcccctgatgaagcaaaa

SEQ ID NO: 71718 - DNA, 20 bp, synthetic construct
  misc_feature 1..20: note = chemically synthesized
  source 1..20: mol_type = other DNA
ccaggtgatacaaatattta

SEQ ID NO: 71719 - DNA, 20 bp, synthetic construct
  misc_feature 1..20: note = chemically synthesized
  source 1..20: mol_type = other DNA
acttcaattacatgagccat

SEQ ID NO: 71720 - DNA, 20 bp, synthetic construct
  misc_feature 1..20: note = chemically synthesized
  source 1..20: mol_type = other DNA
acaaatacagtatcaatttc

SEQ ID NO: 71721 - DNA, 20 bp, synthetic construct
  misc_feature 1..20: note = chemically synthesized
  source 1..20: mol_type = other DNA
tatcaatttcaaaggcttag

SEQ ID NO: 71722 - DNA, 20 bp, synthetic construct
  misc_feature 1..20: note = chemically synthesized
  source 1..20: mol_type = other DNA
attaaataacgggatagttg

SEQ ID NO: 71723 - DNA, 20 bp, synthetic construct
  misc_feature 1..20: note = chemically synthesized
  source 1..20: mol_type = other DNA
agatttttgcctgcaggaat

SEQ ID NO: 71724 - DNA, 20 bp, synthetic construct
  misc_feature 1..20: note = chemically synthesized
  source 1..20: mol_type = other DNA
cttgtgctgaggaatgggcc

SEQ ID NO: 71725 - DNA, 20 bp, synthetic construct
  misc_feature 1..20: note = chemically synthesized
  source 1..20: mol_type = other DNA
ctgtcattagcaggaatatg

SEQ ID NO: 71726 - DNA, 20 bp, synthetic construct
  misc_feature 1..20: note = chemically synthesized
  source 1..20: mol_type = other DNA
gcaggaatatgtacagcttt

SEQ ID NO: 71727 - DNA, 20 bp, synthetic construct
  misc_feature 1..20: note = chemically synthesized
  source 1..20: mol_type = other DNA
atgtacagctttggctgatt

SEQ ID NO: 71728 - DNA, 20 bp, synthetic construct
  misc_feature 1..20: note = chemically synthesized
  source 1..20: mol_type = other DNA
ttggctgattttatgttttt

SEQ ID NO: 71729 - DNA, 20 bp, synthetic construct
  misc_feature 1..20: note = chemically synthesized
  source 1..20: mol_type = other DNA
aataatacctaggttataat

SEQ ID NO: 71730 - DNA, 20 bp, synthetic construct
  misc_feature 1..20: note = chemically synthesized
  source 1..20: mol_type = other DNA
aaggtactcagtaccttcta

SEQ ID NO: 71731 - DNA, 20 bp, synthetic construct
  misc_feature 1..20: note = chemically synthesized
  source 1..20: mol_type = other DNA
ttaatacaataattttatgt

SEQ ID NO: 71732 - DNA, 20 bp, synthetic construct
  misc_feature 1..20: note = chemically synthesized
  source 1..20: mol_type = other DNA
catggccctgaaacgagtgg

SEQ ID NO: 71733 - DNA, 20 bp, synthetic construct
  misc_feature 1..20: note = chemically synthesized
  source 1..20: mol_type = other DNA
tttggagaggagtccagcat

SEQ ID NO: 71734 - DNA, 20 bp, synthetic construct
  misc_feature 1..20: note = chemically synthesized
  source 1..20: mol_type = other DNA
taatggtttaagaaaatcag

SEQ ID NO: 71735 - DNA, 20 bp, synthetic construct
  misc_feature 1..20: note = chemically synthesized
  source 1..20: mol_type = other DNA
atttcagttctgacttacat

SEQ ID NO: 71736 - DNA, 20 bp, synthetic construct
  misc_feature 1..20: note = chemically synthesized
  source 1..20: mol_type = other DNA
ttaatgatttaactaaggaa

SEQ ID NO: 71737 - DNA, 20 bp, synthetic construct
  misc_feature 1..20: note = chemically synthesized
  source 1..20: mol_type = other DNA
agttgctttcctctgtgagc

SEQ ID NO: 71738 - DNA, 20 bp, synthetic construct
  misc_feature 1..20: note = chemically synthesized
  source 1..20: mol_type = other DNA
taataatacctccctacttc

SEQ ID NO: 71739 - DNA, 20 bp, synthetic construct
  misc_feature 1..20: note = chemically synthesized
  source 1..20: mol_type = other DNA
agccctctctaccgtgagtt

SEQ ID NO: 71740 - DNA, 20 bp, synthetic construct
  misc_feature 1..20: note = chemically synthesized
  source 1..20: mol_type = other DNA
agtcattgtaaaatgctctt

SEQ ID NO: 71741 - DNA, 20 bp, synthetic construct
  misc_feature 1..20: note = chemically synthesized
  source 1..20: mol_type = other DNA
tagagaaatctatatagaaa

SEQ ID NO: 71742 - DNA, 20 bp, synthetic construct
  misc_feature 1..20: note = chemically synthesized
  source 1..20: mol_type = other DNA
aaaataagattatatataac

SEQ ID NO: 71743 - DNA, 20 bp, synthetic construct
  misc_feature 1..20: note = chemically synthesized
  source 1..20: mol_type = other DNA
aatatttatagccttttaca

SEQ ID NO: 71744 - DNA, 20 bp, synthetic construct
  misc_feature 1..20: note = chemically synthesized
  source 1..20: mol_type = other DNA
agtgattgttctgtacctaa

SEQ ID NO: 71745 - DNA, 20 bp, synthetic construct
  misc_feature 1..20: note = chemically synthesized
  source 1..20: mol_type = other DNA
tttttatttaatattttgcc

SEQ ID NO: 71746 - DNA, 20 bp, synthetic construct
  misc_feature 1..20: note = chemically synthesized
  source 1..20: mol_type = other DNA
aataatagtgtatcaaatga

SEQ ID NO: 71747 - DNA, 20 bp, synthetic construct
  misc_feature 1..20: note = chemically synthesized
  source 1..20: mol_type = other DNA
tagtgtatcaaatgaatatg

SEQ ID NO: 71748 - DNA, 20 bp, synthetic construct
  misc_feature 1..20: note = chemically synthesized
  source 1..20: mol_type = other DNA
atttttattctagacatttt

SEQ ID NO: 71749 - DNA, 20 bp, synthetic construct
  misc_feature 1..20: note = chemically synthesized
  source 1..20: mol_type = other DNA
tattgatcactgacctagga

SEQ ID NO: 71750 - DNA, 20 bp, synthetic construct
  misc_feature 1..20: note = chemically synthesized
  source 1..20: mol_type = other DNA
aggaaaaaaattttgccaca

SEQ ID NO: 71751 - DNA, 20 bp, synthetic construct
  misc_feature 1..20: note = chemically synthesized
  source 1..20: mol_type = other DNA
ttaatttatcatttatttag

SEQ ID NO: 71752 - DNA, 20 bp, synthetic construct
  misc_feature 1..20: note = chemically synthesized
  source 1..20: mol_type = other DNA
ttttcaagtcttttgatgta

SEQ ID NO: 71753 - DNA, 20 bp, synthetic construct
  misc_feature 1..20: note = chemically synthesized
  source 1..20: mol_type = other DNA
tttataaaaggcaaattaaa

SEQ ID NO: 71754 - DNA, 20 bp, synthetic construct
  misc_feature 1..20: note = chemically synthesized
  source 1..20: mol_type = other DNA
atttatttatttttcttttt

SEQ ID NO: 71755 - DNA, 20 bp, synthetic construct
  misc_feature 1..20: note = chemically synthesized
  source 1..20: mol_type = other DNA
cgcctcggcctcccagagtg

SEQ ID NO: 71756 - DNA, 20 bp, synthetic construct
  misc_feature 1..20: note = chemically synthesized
  source 1..20: mol_type = other DNA
agccaccgcgcccagccaga

SEQ ID NO: 71757 - DNA, 20 bp, synthetic construct
  misc_feature 1..20: note = chemically synthesized
  source 1..20: mol_type = other DNA
tgttaactctattcttcaat

SEQ ID NO: 71758 - DNA, 20 bp, synthetic construct
  misc_feature 1..20: note = chemically synthesized
  source 1..20: mol_type = other DNA
attttaaatttgagtaaggt

SEQ ID NO: 71759 - DNA, 20 bp, synthetic construct
  misc_feature 1..20: note = chemically synthesized
  source 1..20: mol_type = other DNA
cctactatgtggatgtaaat

SEQ ID NO: 71760 - DNA, 20 bp, synthetic construct
  misc_feature 1..20: note = chemically synthesized
  source 1..20: mol_type = other DNA
attaaagtttagaatggaac

SEQ ID NO: 71761 - DNA, 20 bp, synthetic construct
  misc_feature 1..20: note = chemically synthesized
  source 1..20: mol_type = other DNA
caaacatacatacatatttt

SEQ ID NO: 71762 - DNA, 20 bp, synthetic construct
  misc_feature 1..20: note = chemically synthesized
  source 1..20: mol_type = other DNA
gagtttggttcttttttaaa

SEQ ID NO: 71763 - DNA, 20 bp, synthetic construct
  misc_feature 1..20: note = chemically synthesized
  source 1..20: mol_type = other DNA
ttttaaatttcgctttgtaa

SEQ ID NO: 71764 - DNA, 20 bp, synthetic construct
  misc_feature 1..20: note = chemically synthesized
  source 1..20: mol_type = other DNA
aaatttcgctttgtaatttt

SEQ ID NO: 71765 - DNA, 20 bp, synthetic construct
  misc_feature 1..20: note = chemically synthesized
  source 1..20: mol_type = other DNA
acttggtcacccaggcagta

SEQ ID NO: 71766 - DNA, 20 bp, synthetic construct
  misc_feature 1..20: note = chemically synthesized
  source 1..20: mol_type = other DNA
caccttggtctcccaaagtg

SEQ ID NO: 71767 - DNA, 20 bp, synthetic construct
  misc_feature 1..20: note = chemically synthesized
  source 1..20: mol_type = other DNA
gccagcagaaaggtgtcttc

SEQ ID NO: 71768 - DNA, 20 bp, synthetic construct
  misc_feature 1..20: note = chemically synthesized
  source 1..20: mol_type = other DNA
atgcctaattcctccaggga

SEQ ID NO: 71769 - DNA, 20 bp, synthetic construct
  misc_feature 1..20: note = chemically synthesized
  source 1..20: mol_type = other DNA
aaggaaaccgatggagcatt

SEQ ID NO: 71770 - DNA, 20 bp, synthetic construct
  misc_feature 1..20: note = chemically synthesized
  source 1..20: mol_type = other DNA
tttcaaagctgagacccctg

SEQ ID NO: 71771 - DNA, 20 bp, synthetic construct
  misc_feature 1..20: note = chemically synthesized
  source 1..20: mol_type = other DNA
gacaggctgatcagccaatg

SEQ ID NO: 71772 - DNA, 20 bp, synthetic construct
  misc_feature 1..20: note = chemically synthesized
  source 1..20: mol_type = other DNA
agtttatttcctcctgagca

SEQ ID NO: 71773 - DNA, 20 bp, synthetic construct
  misc_feature 1..20: note = chemically synthesized
  source 1..20: mol_type = other DNA
gcaatgggattgtgacttca

SEQ ID NO: 71774 - DNA, 20 bp, synthetic construct
  misc_feature 1..20: note = chemically synthesized
  source 1..20: mol_type = other DNA
tgtgacttcaatatgtttgt

SEQ ID NO: 71775 - DNA, 20 bp, synthetic construct
  misc_feature 1..20: note = chemically synthesized
  source 1..20: mol_type = other DNA
tttgtgtgagtttccttggc

SEQ ID NO: 71776 - DNA, 20 bp, synthetic construct
  misc_feature 1..20: note = chemically synthesized
  source 1..20: mol_type = other DNA
acctacaagtaaatactgac

SEQ ID NO: 71777 - DNA, 20 bp, synthetic construct
  misc_feature 1..20: note = chemically synthesized
  source 1..20: mol_type = other DNA
accttagaaatttggggggg

SEQ ID NO: 71778 - DNA, 20 bp, synthetic construct
  misc_feature 1..20: note = chemically synthesized
  source 1..20: mol_type = other DNA
gaggaagaatgcaggagttc

SEQ ID NO: 71779 - DNA, 20 bp, synthetic construct
  misc_feature 1..20: note = chemically synthesized
  source 1..20: mol_type = other DNA
ctctggtatttattgttctt

SEQ ID NO: 71780 - DNA, 20 bp, synthetic construct
  misc_feature 1..20: note = chemically synthesized
  source 1..20: mol_type = other DNA
attgttctttttagttttta

SEQ ID NO: 71781 - DNA, 20 bp, synthetic construct
  misc_feature 1..20: note = chemically synthesized
  source 1..20: mol_type = other DNA
tagtttttatttagtttcat

SEQ ID NO: 71782 - DNA, 20 bp, synthetic construct
  misc_feature 1..20: note = chemically synthesized
  source 1..20: mol_type = other DNA
ttcaataaagttgccttctg

SEQ ID NO: 71783 - DNA, 20 bp, synthetic construct
  misc_feature 1..20: note = chemically synthesized
  source 1..20: mol_type = other DNA
taaaatctaagcaagagaag

SEQ ID NO: 71784 - DNA, 20 bp, synthetic construct
  misc_feature 1..20: note = chemically synthesized
  source 1..20: mol_type = other DNA
ccttcttataggcctctagg

SEQ ID NO: 71785 - DNA, 20 bp, synthetic construct
  misc_feature 1..20: note = chemically synthesized
  source 1..20: mol_type = other DNA
ctccttggtcttaatgctgt

SEQ ID NO: 71786 - DNA, 20 bp, synthetic construct
  misc_feature 1..20: note = chemically synthesized
  source 1..20: mol_type = other DNA
gaagatgaatagcaggtggg

SEQ ID NO: 71787 - DNA, 20 bp, synthetic construct
  misc_feature 1..20: note = chemically synthesized
  source 1..20: mol_type = other DNA
aaactaccaccatcagtcca

SEQ ID NO: 71788 - DNA, 20 bp, synthetic construct
  misc_feature 1..20: note = chemically synthesized
  source 1..20: mol_type = other DNA
aaaagagtggatgcagaaca

SEQ ID NO: 71789 - DNA, 20 bp, synthetic construct
  misc_feature 1..20: note = chemically synthesized
  source 1..20: mol_type = other DNA
agaaaaaggggatgaaaatc

SEQ ID NO: 71790 - DNA, 20 bp, synthetic construct
  misc_feature 1..20: note = chemically synthesized
  source 1..20: mol_type = other DNA
aatattggactgacattcct

SEQ ID NO: 71791 - DNA, 20 bp, synthetic construct
  misc_feature 1..20: note = chemically synthesized
  source 1..20: mol_type = other DNA
atatttctggttattaattc

SEQ ID NO: 71792 - DNA, 20 bp, synthetic construct
  misc_feature 1..20: note = chemically synthesized
  source 1..20: mol_type = other DNA
tctttgataacctcgccctc

SEQ ID NO: 71793 - DNA, 20 bp, synthetic construct
  misc_feature 1..20: note = chemically synthesized
  source 1..20: mol_type = other DNA
cttcttaatgtcatccacta

SEQ ID NO: 71794 - DNA, 20 bp, synthetic construct
  misc_feature 1..20: note = chemically synthesized
  source 1..20: mol_type = other DNA
ccagaacttgtctttctctc

SEQ ID NO: 71795 - DNA, 20 bp, synthetic construct
  misc_feature 1..20: note = chemically synthesized
  source 1..20: mol_type = other DNA
tcagtggctcaagtcaaatg

SEQ ID NO: 71796 - DNA, 20 bp, synthetic construct
  misc_feature 1..20: note = chemically synthesized
  source 1..20: mol_type = other DNA
atcaaccaatcaccaagtcc

SEQ ID NO: 71797 - DNA, 20 bp, synthetic construct
  misc_feature 1..20: note = chemically synthesized
  source 1..20: mol_type = other DNA
caatcaccaagtcctagggt

SEQ ID NO: 71798 - DNA, 20 bp, synthetic construct
  misc_feature 1..20: note = chemically synthesized
  source 1..20: mol_type = other DNA
ctgtttactgaatacctcaa

SEQ ID NO: 71799 - DNA, 20 bp, synthetic construct
  misc_feature 1..20: note = chemically synthesized
  source 1..20: mol_type = other DNA
caagagagacgtatacataa

SEQ ID NO: 71800 - DNA, 20 bp, synthetic construct
  misc_feature 1..20: note = chemically synthesized
  source 1..20: mol_type = other DNA
caagtttttaatgaagtaaa

SEQ ID NO: 71801 - DNA, 20 bp, synthetic construct
  misc_feature 1..20: note = chemically synthesized
  source 1..20: mol_type = other DNA
taatgacactaaacaattct

SEQ ID NO: 71802 - DNA, 20 bp, synthetic construct
  misc_feature 1..20: note = chemically synthesized
  source 1..20: mol_type = other DNA
caattcttccagtttatcta

SEQ ID NO: 71803 - DNA, 20 bp, synthetic construct
  misc_feature 1..20: note = chemically synthesized
  source 1..20: mol_type = other DNA
ataaaaacattttttcctga

SEQ ID NO: 71804 - DNA, 20 bp, synthetic construct
  misc_feature 1..20: note = chemically synthesized
  source 1..20: mol_type = other DNA
cttctactaatataacccac

SEQ ID NO: 71805 - DNA, 20 bp, synthetic construct
  misc_feature 1..20: note = chemically synthesized
  source 1..20: mol_type = other DNA
agaaggccttcttaaattcc

SEQ ID NO: 71806 - DNA, 20 bp, synthetic construct
  misc_feature 1..20: note = chemically synthesized
  source 1..20: mol_type = other DNA
gccttcttaaattccccaag

SEQ ID NO: 71807 - DNA, 20 bp, synthetic construct
  misc_feature 1..20: note = chemically synthesized
  source 1..20: mol_type = other DNA
tgcagcattgtcaatttctg

SEQ ID NO: 71808 - DNA, 20 bp, synthetic construct
  misc_feature 1..20: note = chemically synthesized
  source 1..20: mol_type = other DNA
tttaattttaatattagctc

SEQ ID NO: 71809 - DNA, 20 bp, synthetic construct
  misc_feature 1..20: note = chemically synthesized
  source 1..20: mol_type = other DNA
tatttcaataattattcatt

SEQ ID NO: 71810 - DNA, 20 bp, synthetic construct
  misc_feature 1..20: note = chemically synthesized
  source 1..20: mol_type = other DNA
taggttggtgcaaaagtaat

SEQ ID NO: 71811 - DNA, 20 bp, synthetic construct
  misc_feature 1..20: note = chemically synthesized
  source 1..20: mol_type = other DNA
tgaaagttcctgaagcagag

SEQ ID NO: 71812 - DNA, 20 bp, synthetic construct
  misc_feature 1..20: note = chemically synthesized
  source 1..20: mol_type = other DNA
ctgaagcagagagcagcttg

SEQ ID NO: 71813 - DNA, 20 bp, synthetic construct
  misc_feature 1..20: note = chemically synthesized
  source 1..20: mol_type = other DNA
ctttgaattttattatactt

SEQ ID NO: 71814 - DNA, 20 bp, synthetic construct
  misc_feature 1..20: note = chemically synthesized
  source 1..20: mol_type = other DNA
gcagaggtgctgcatggata

SEQ ID NO: 71815 - DNA, 20 bp, synthetic construct
  misc_feature 1..20: note = chemically synthesized
  source 1..20: mol_type = other DNA
tcttttccatttctttactt

SEQ ID NO: 71816 - DNA, 20 bp, synthetic construct
  misc_feature 1..20: note = chemically synthesized
  source 1..20: mol_type = other DNA
ctactcaaccaaccacccta

SEQ ID NO: 71817 - DNA, 20 bp, synthetic construct
  misc_feature 1..20: note = chemically synthesized
  source 1..20: mol_type = other DNA
caatggagagtcttaatcat

SEQ ID NO: 71818 - DNA, 20 bp, synthetic construct
  misc_feature 1..20: note = chemically synthesized
  source 1..20: mol_type = other DNA
gtcttaatcatacctgcttt

SEQ ID NO: 71819 - DNA, 20 bp, synthetic construct
  misc_feature 1..20: note = chemically synthesized
  source 1..20: mol_type = other DNA
gccaagatctgctggttctc

SEQ ID NO: 71820 - DNA, 20 bp, synthetic construct
  misc_feature 1..20: note = chemically synthesized
  source 1..20: mol_type = other DNA
ggttctcttctgatttttgt

SEQ ID NO: 71821 - DNA, 20 bp, synthetic construct
  misc_feature 1..20: note = chemically synthesized
  source 1..20: mol_type = other DNA
ttgctcaaatatttatgtta

SEQ ID NO: 71822 - DNA, 20 bp, synthetic construct
  misc_feature 1..20: note = chemically synthesized
  source 1..20: mol_type = other DNA
aactccgttacatatcaggc

SEQ ID NO: 71823 - DNA, 20 bp, synthetic construct
  misc_feature 1..20: note = chemically synthesized
  source 1..20: mol_type = other DNA
tgagtttctgccttctcact

SEQ ID NO: 71824 - DNA, 20 bp, synthetic construct
  misc_feature 1..20: note = chemically synthesized
  source 1..20: mol_type = other DNA
cccagcatccatcttttcac

SEQ ID NO: 71825 - DNA, 20 bp, synthetic construct
  misc_feature 1..20: note = chemically synthesized
  source 1..20: mol_type = other DNA
ctgtagccaatgtccttgtt

SEQ ID NO: 71826 - DNA, 20 bp, synthetic construct
  misc_feature 1..20: note = chemically synthesized
  source 1..20: mol_type = other DNA
cttgttcttagcttttccac

SEQ ID NO: 71827 - DNA, 20 bp, synthetic construct
  misc_feature 1..20: note = chemically synthesized
  source 1..20: mol_type = other DNA
tccatcctctactgcagcca

SEQ ID NO: 71828 - DNA, 20 bp, synthetic construct
  misc_feature 1..20: note = chemically synthesized
  source 1..20: mol_type = other DNA
actaactctatgaatcactg

SEQ ID NO: 71829 - DNA, 20 bp, synthetic construct
  misc_feature 1..20: note = chemically synthesized
  source 1..20: mol_type = other DNA
gtccaatttattgaggccat

SEQ ID NO: 71830 - DNA, 20 bp, synthetic construct
  misc_feature 1..20: note = chemically synthesized
  source 1..20: mol_type = other DNA
tacatgatttagatgctgtg

SEQ ID NO: 71831 - DNA, 20 bp, synthetic construct
  misc_feature 1..20: note = chemically synthesized
  source 1..20: mol_type = other DNA
accatctttagcccggtcct

SEQ ID NO: 71832 - DNA, 20 bp, synthetic construct
  misc_feature 1..20: note = chemically synthesized
  source 1..20: mol_type = other DNA
caattccctacacatacttt

SEQ ID NO: 71833 - DNA, 20 bp, synthetic construct
  misc_feature 1..20: note = chemically synthesized
  source 1..20: mol_type = other DNA
tgtttttattcttctatatt

SEQ ID NO: 71834 - DNA, 20 bp, synthetic construct
  misc_feature 1..20: note = chemically synthesized
  source 1..20: mol_type = other DNA
gctttcttggcaaaaaccac

SEQ ID NO: 71835 - DNA, 20 bp, synthetic construct
  misc_feature 1..20: note = chemically synthesized
  source 1..20: mol_type = other DNA
ccatataagtacacatatgt

SEQ ID NO: 71836 - DNA, 20 bp, synthetic construct
  misc_feature 1..20: note = chemically synthesized
  source 1..20: mol_type = other DNA
gtttaaataacatataagtg

SEQ ID NO: 71837 - DNA, 20 bp, synthetic construct
  misc_feature 1..20: note = chemically synthesized
  source 1..20: mol_type = other DNA
tatatattctttatatactt

SEQ ID NO: 71838 - DNA, 20 bp, synthetic construct
  misc_feature 1..20: note = chemically synthesized
  source 1..20: mol_type = other DNA
ttatacgtattctttattat

SEQ ID NO: 71839 - DNA, 20 bp, synthetic construct
  misc_feature 1..20: note = chemically synthesized
  source 1..20: mol_type = other DNA
acctaataattcatttttta

SEQ ID NO: 71840 - DNA, 20 bp, synthetic construct
  misc_feature 1..20: note = chemically synthesized
  source 1..20: mol_type = other DNA
aataaagtactcacctctta

SEQ ID NO: 71841 - DNA, 20 bp, synthetic construct
  misc_feature 1..20: note = chemically synthesized
  source 1..20: mol_type = other DNA
atacagagacaatgacaggg

SEQ ID NO: 71842 - DNA, 20 bp, synthetic construct
  misc_feature 1..20: note = chemically synthesized
  source 1..20: mol_type = other DNA
agtatacttcctcttgggaa

SEQ ID NO: 71843 - DNA, 20 bp, synthetic construct
  misc_feature 1..20: note = chemically synthesized
  source 1..20: mol_type = other DNA
cctcttgggaagaaagcttt

SEQ ID NO: 71844 - DNA, 20 bp, synthetic construct
  misc_feature 1..20: note = chemically synthesized
  source 1..20: mol_type = other DNA
aattaaaatattcaaggcag

SEQ ID NO: 71845 - DNA, 20 bp, synthetic construct
  misc_feature 1..20: note = chemically synthesized
  source 1..20: mol_type = other DNA
cacaggagaaaattcctgaa

SEQ ID NO: 71846 - DNA, 20 bp, synthetic construct
  misc_feature 1..20: note = chemically synthesized
  source 1..20: mol_type = other DNA
tcacctgtgtctaaatattc

SEQ ID NO: 71847 - DNA, 20 bp, synthetic construct
  misc_feature 1..20: note = chemically synthesized
  source 1..20: mol_type = other DNA
tgaactacattggtggagga

SEQ ID NO: 71848 - DNA, 20 bp, synthetic construct
  misc_feature 1..20: note = chemically synthesized
  source 1..20: mol_type = other DNA
acctaaacacaaggacttga

SEQ ID NO: 71849 - DNA, 20 bp, synthetic construct
  misc_feature 1..20: note = chemically synthesized
  source 1..20: mol_type = other DNA
tcaaactcatctgtaaacat

SEQ ID NO: 71850 - DNA, 20 bp, synthetic construct
  misc_feature 1..20: note = chemically synthesized
  source 1..20: mol_type = other DNA
cctgtttttagtaggataga

SEQ ID NO: 71851 - DNA, 20 bp, synthetic construct
  misc_feature 1..20: note = chemically synthesized
  source 1..20: mol_type = other DNA
atactggggaagttacaagg

SEQ ID NO: 71852 - DNA, 20 bp, synthetic construct
  misc_feature 1..20: note = chemically synthesized
  source 1..20: mol_type = other DNA
ggggaagttacaaggtgttg

SEQ ID NO: 71853 - DNA, 20 bp, synthetic construct
  misc_feature 1..20: note = chemically synthesized
  source 1..20: mol_type = other DNA
gtgttgtttggattaaaata

SEQ ID NO: 71854 - DNA, 20 bp, synthetic construct
  misc_feature 1..20: note = chemically synthesized
  source 1..20: mol_type = other DNA
aatttgttgaataagtgaat

SEQ ID NO: 71855 - DNA, 20 bp, synthetic construct
  misc_feature 1..20: note = chemically synthesized
  source 1..20: mol_type = other DNA
aggaaagagtatagagacca

SEQ ID NO: 71856 - DNA, 20 bp, synthetic construct
  misc_feature 1..20: note = chemically synthesized
  source 1..20: mol_type = other DNA
tcttttccagcaagagaagg

SEQ ID NO: 71857 - DNA, 20 bp, synthetic construct
  misc_feature 1..20: note = chemically synthesized
  source 1..20: mol_type = other DNA
atagactctgagaatatcag

SEQ ID NO: 71858 - DNA, 20 bp, synthetic construct
  misc_feature 1..20: note = chemically synthesized
  source 1..20: mol_type = other DNA
agaagagattctgtgagaac

SEQ ID NO: 71859 - DNA, 20 bp, synthetic construct
  misc_feature 1..20: note = chemically synthesized
  source 1..20: mol_type = other DNA
caacttggaagaataaggtg

SEQ ID NO: 71860 - DNA, 20 bp, synthetic construct
  misc_feature 1..20: note = chemically synthesized
  source 1..20: mol_type = other DNA
ttggaagaataaggtgggag

SEQ ID NO: 71861 - DNA, 20 bp, synthetic construct
  misc_feature 1..20: note = chemically synthesized
  source 1..20: mol_type = other DNA
aggtgggaggattgcttgaa

SEQ ID NO: 71862 - DNA, 20 bp, synthetic construct
  misc_feature 1..20: note = chemically synthesized
  source 1..20: mol_type = other DNA
gaggattgcttgaatccggt

SEQ ID NO: 71863 - DNA, 20 bp, synthetic construct
  misc_feature 1..20: note = chemically synthesized
  source 1..20: mol_type = other DNA
cggtttgagtttacagtgag

SEQ ID NO: 71864 - DNA, 20 bp, synthetic construct
  misc_feature 1..20: note = chemically synthesized
  source 1..20: mol_type = other DNA
acaaagaaaaaaaaatccca

SEQ ID NO: 71865 - DNA, 20 bp, synthetic construct
  misc_feature 1..20: note = chemically synthesized
  source 1..20: mol_type = other DNA
agaccatgtctttttgggct

SEQ ID NO: 71866 - DNA, 20 bp, synthetic construct
  misc_feature 1..20: note = chemically synthesized
  source 1..20: mol_type = other DNA
acaaggctgtggctgtcaca

SEQ ID NO: 71867 - DNA, 20 bp, synthetic construct
  misc_feature 1..20: note = chemically synthesized
  source 1..20: mol_type = other DNA
aactttttagcattcagtcc

SEQ ID NO: 71868 - DNA, 20 bp, synthetic construct
  misc_feature 1..20: note = chemically synthesized
  source 1..20: mol_type = other DNA
aacaaaagtactactgcctt

SEQ ID NO: 71869 - DNA, 20 bp, synthetic construct
  misc_feature 1..20: note = chemically synthesized
  source 1..20: mol_type = other DNA
ttatccactagtaatggacc

SEQ ID NO: 71870 - DNA, 20 bp, synthetic construct
  misc_feature 1..20: note = chemically synthesized
  source 1..20: mol_type = other DNA
aggtcggatgtagtatatga

SEQ ID NO: 71871 - DNA, 20 bp, synthetic construct
  misc_feature 1..20: note = chemically synthesized
  source 1..20: mol_type = other DNA
attatccatgtgatgttcac

SEQ ID NO: 71872 - DNA, 20 bp, synthetic construct
  misc_feature 1..20: note = chemically synthesized
  source 1..20: mol_type = other DNA
gcaccacaatcaccactact

SEQ ID NO: 71873 - DNA, 20 bp, synthetic construct
  misc_feature 1..20: note = chemically synthesized
  source 1..20: mol_type = other DNA
caaatgtccaggtcagtgtc

SEQ ID NO: 71874 - DNA, 20 bp, synthetic construct
  misc_feature 1..20: note = chemically synthesized
  source 1..20: mol_type = other DNA
acatcctttaaatagggcat

SEQ ID NO: 71875 - DNA, 20 bp, synthetic construct
  misc_feature 1..20: note = chemically synthesized
  source 1..20: mol_type = other DNA
aaaaccaggacagagaccca

SEQ ID NO: 71876 - DNA, 20 bp, synthetic construct
  misc_feature 1..20: note = chemically synthesized
  source 1..20: mol_type = other DNA
attgtagttatgaggaaggt

SEQ ID NO: 71877 - DNA, 20 bp, synthetic construct
  misc_feature 1..20: note = chemically synthesized
  source 1..20: mol_type = other DNA
aaggagctgagcatcttcat

SEQ ID NO: 71878 - DNA, 20 bp, synthetic construct
  misc_feature 1..20: note = chemically synthesized
  source 1..20: mol_type = other DNA
aaatcctgcatttattaaga

SEQ ID NO: 71879 - DNA, 20 bp, synthetic construct
  misc_feature 1..20: note = chemically synthesized
  source 1..20: mol_type = other DNA
aattaagaatcaaccacaga

SEQ ID NO: 71880 - DNA, 20 bp, synthetic construct
  misc_feature 1..20: note = chemically synthesized
  source 1..20: mol_type = other DNA
agggcatggaggtgaggaaa

SEQ ID NO: 71881 - DNA, 20 bp, synthetic construct
  misc_feature 1..20: note = chemically synthesized
  source 1..20: mol_type = other DNA
gaggtgaggaaaagttgttt

SEQ ID NO: 71882 - DNA, 20 bp, synthetic construct
  misc_feature 1..20: note = chemically synthesized
  source 1..20: mol_type = other DNA
gtttatgtgttttgagaact

SEQ ID NO: 71883 - DNA, 20 bp, synthetic construct
  misc_feature 1..20: note = chemically synthesized
  source 1..20: mol_type = other DNA
aggcaggggcaagaccctga

SEQ ID NO: 71884 - DNA, 20 bp, synthetic construct
  misc_feature 1..20: note = chemically synthesized
  source 1..20: mol_type = other DNA
catggtacacattttgatgg

SEQ ID NO: 71885 - DNA, 20 bp, synthetic construct
  misc_feature 1..20: note = chemically synthesized
  source 1..20: mol_type = other DNA
acattgttaacaatatgcag

SEQ ID NO: 71886 - DNA, 20 bp, synthetic construct
  misc_feature 1..20: note = chemically synthesized
  source 1..20: mol_type = other DNA
ctggatgcagatatgtaatt

SEQ ID NO: 71887 - DNA, 20 bp, synthetic construct
  misc_feature 1..20: note = chemically synthesized
  source 1..20: mol_type = other DNA
ctttttacgtagataaacaa

SEQ ID NO: 71888 - DNA, 20 bp, synthetic construct
  misc_feature 1..20: note = chemically synthesized
  source 1..20: mol_type = other DNA
accatttagagatctctaat

SEQ ID NO: 71889 - DNA, 20 bp, synthetic construct
  misc_feature 1..20: note = chemically synthesized
  source 1..20: mol_type = other DNA
ttttaaactaacatctgtat

SEQ ID NO: 71890 - DNA, 20 bp, synthetic construct
  misc_feature 1..20: note = chemically synthesized
  source 1..20: mol_type = other DNA
ctgaattatataattgaagg

SEQ ID NO: 71891 - DNA, 20 bp, synthetic construct
  misc_feature 1..20: note = chemically synthesized
  source 1..20: mol_type = other DNA
tgaaggaccagtttccaagc

SEQ ID NO: 71892 - DNA, 20 bp, synthetic construct
  misc_feature 1..20: note = chemically synthesized
  source 1..20: mol_type = other DNA
caaatgaaagaactcagcat

SEQ ID NO: 71893 - DNA, 20 bp, synthetic construct
  misc_feature 1..20: note = chemically synthesized
  source 1..20: mol_type = other DNA
ctttattgctctaaatgacc

SEQ ID NO: 71894 - DNA, 20 bp, synthetic construct
  misc_feature 1..20: note = chemically synthesized
  source 1..20: mol_type = other DNA
ttgctctaaatgacctttag

SEQ ID NO: 71895 - DNA, 20 bp, synthetic construct
  misc_feature 1..20: note = chemically synthesized
  source 1..20: mol_type = other DNA
tgatcaagaacttgaagata

SEQ ID NO: 71896 - DNA, 20 bp, synthetic construct
  misc_feature 1..20: note = chemically synthesized
  source 1..20: mol_type = other DNA
agctcacattgagtaaagat

SEQ ID NO: 71897 - DNA, 20 bp, synthetic construct
  misc_feature 1..20: note = chemically synthesized
  source 1..20: mol_type = other DNA
aaagatgttagattgttcaa

SEQ ID NO: 71898 - DNA, 20 bp, synthetic construct
  misc_feature 1..20: note = chemically synthesized
  source 1..20: mol_type = other DNA
gcccaggctaggaaggcaga

SEQ ID NO: 71899 - DNA, 20 bp, synthetic construct
  misc_feature 1..20: note = chemically synthesized
  source 1..20: mol_type = other DNA
tacctatttgttaatgtgca

SEQ ID NO: 71900 - DNA, 20 bp, synthetic construct
  misc_feature 1..20: note = chemically synthesized
  source 1..20: mol_type = other DNA
atggttttcattgcatgtaa

SEQ ID NO: 71901 - DNA, 20 bp, synthetic construct
  misc_feature 1..20: note = chemically synthesized
  source 1..20: mol_type = other DNA
gggtatggtggggtggaaag

SEQ ID NO: 71902 - DNA, 20 bp, synthetic construct
  misc_feature 1..20: note = chemically synthesized
  source 1..20: mol_type = other DNA
ctggctttcaaggggccagt

SEQ ID NO: 71903 - DNA, 20 bp, synthetic construct
  misc_feature 1..20: note = chemically synthesized
  source 1..20: mol_type = other DNA
tacctagccagcccactgag

SEQ ID NO: 71904 - DNA, 20 bp, synthetic construct
  misc_feature 1..20: note = chemically synthesized
  source 1..20: mol_type = other DNA
tgagccaggcttggtgaagt

SEQ ID NO: 71905 - DNA, 20 bp, synthetic construct
  misc_feature 1..20: note = chemically synthesized
  source 1..20: mol_type = other DNA
cccaaggtctgtacacatgc

SEQ ID NO: 71906 - DNA, 20 bp, synthetic construct
  misc_feature 1..20: note = chemically synthesized
  source 1..20: mol_type = other DNA
ggggagcattcagcccaagg

SEQ ID NO: 71907 - DNA, 20 bp, synthetic construct
  misc_feature 1..20: note = chemically synthesized
  source 1..20: mol_type = other DNA
atccccagggcacaagaaaa

SEQ ID NO: 71908 - DNA, 20 bp, synthetic construct
  misc_feature 1..20: note = chemically synthesized
  source 1..20: mol_type = other DNA
actaaaattgatggagagag

SEQ ID NO: 71909 - DNA, 20 bp, synthetic construct
  misc_feature 1..20: note = chemically synthesized
  source 1..20: mol_type = other DNA
gatggagagagataggtttt

SEQ ID NO: 71910 - DNA, 20 bp, synthetic construct
  misc_feature 1..20: note = chemically synthesized
  source 1..20: mol_type = other DNA
agataggttttcttagcttt

SEQ ID NO: 71911 - DNA, 20 bp, synthetic construct
  misc_feature 1..20: note = chemically synthesized
  source 1..20: mol_type = other DNA
actggagagacccacagaag

SEQ ID NO: 71912 - DNA, 20 bp, synthetic construct
  misc_feature 1..20: note = chemically synthesized
  source 1..20: mol_type = other DNA
gtgtgtgcacagagagtctg

SEQ ID NO: 71913 - DNA, 20 bp, synthetic construct
  misc_feature 1..20: note = chemically synthesized
  source 1..20: mol_type = other DNA
cttcagtcattatgaaaggg

SEQ ID NO: 71914 - DNA, 20 bp, synthetic construct
  misc_feature 1..20: note = chemically synthesized
  source 1..20: mol_type = other DNA
ctccccactccaagttgggc

SEQ ID NO: 71915 - DNA, 20 bp, synthetic construct
  misc_feature 1..20: note = chemically synthesized
  source 1..20: mol_type = other DNA
gttttagtgtattttgcata

SEQ ID NO: 71916 - DNA, 20 bp, synthetic construct
  misc_feature 1..20: note = chemically synthesized
  source 1..20: mol_type = other DNA
taacagagtacctgagtctg

SEQ ID NO: 71917 - DNA, 20 bp, synthetic construct
  misc_feature 1..20: note = chemically synthesized
  source 1..20: mol_type = other DNA
ggtagcttattttttttttt

SEQ ID NO: 71918 - DNA, 20 bp, synthetic construct
  misc_feature 1..20: note = chemically synthesized
  source 1..20: mol_type = other DNA
cttattttttttttttaaag

SEQ ID NO: 71919 - DNA, 20 bp, synthetic construct
  misc_feature 1..20: note = chemically synthesized
  source 1..20: mol_type = other DNA
tttttaaagttttgtttggt

SEQ ID NO: 71920 - DNA, 20 bp, synthetic construct
  misc_feature 1..20: note = chemically synthesized
  source 1..20: mol_type = other DNA
aattctaaaaggaaacaaaa

SEQ ID NO: 71921 - DNA, 20 bp, synthetic construct
  misc_feature 1..20: note = chemically synthesized
  source 1..20: mol_type = other DNA
aaggaaacaaaaaatggatt

SEQ ID NO: 71922 - DNA, 20 bp, synthetic construct
  misc_feature 1..20: note = chemically synthesized
  source 1..20: mol_type = other DNA
tttttgaggaattattgact

SEQ ID NO: 71923 - DNA, 20 bp, synthetic construct
  misc_feature 1..20: note = chemically synthesized
  source 1..20: mol_type = other DNA
tttattattattattatact

SEQ ID NO: 71924 - DNA, 20 bp, synthetic construct
  misc_feature 1..20: note = chemically synthesized
  source 1..20: mol_type = other DNA
catctatgagtgagaatatg

SEQ ID NO: 71925 - DNA, 20 bp, synthetic construct
  misc_feature 1..20: note = chemically synthesized
  source 1..20: mol_type = other DNA
atgagtgagaatatgtggtg

SEQ ID NO: 71926 - DNA, 20 bp, synthetic construct
  misc_feature 1..20: note = chemically synthesized
  source 1..20: mol_type = other DNA
gtttggttttttgtccttgc

SEQ ID NO: 71927 - DNA, 20 bp, synthetic construct
  misc_feature 1..20: note = chemically synthesized
  source 1..20: mol_type = other DNA
ttgcgatagtttactgagaa

SEQ ID NO: 71928 - DNA, 20 bp, synthetic construct
  misc_feature 1..20: note = chemically synthesized
  source 1..20: mol_type = other DNA
gtgcatgtgtctttatagca

SEQ ID NO: 71929 - DNA, 20 bp, synthetic construct
  misc_feature 1..20: note = chemically synthesized
  source 1..20: mol_type = other DNA
ctgacttccacaatggttga

SEQ ID NO: 71930 - DNA, 20 bp, synthetic construct
  misc_feature 1..20: note = chemically synthesized
  source 1..20: mol_type = other DNA
tccacatcctctccagcacc

SEQ ID NO: 71931 - DNA, 20 bp, synthetic construct
  misc_feature 1..20: note = chemically synthesized
  source 1..20: mol_type = other DNA
cctgttgtttcctgactttt

SEQ ID NO: 71932 - DNA, 20 bp, synthetic construct
  misc_feature 1..20: note = chemically synthesized
  source 1..20: mol_type = other DNA
ggtatgagatggtatctcat

SEQ ID NO: 71933 - DNA, 20 bp, synthetic construct
  misc_feature 1..20: note = chemically synthesized
  source 1..20: mol_type = other DNA
gagatggtatctcattgtgg

SEQ ID NO: 71934 - DNA, 20 bp, synthetic construct
  misc_feature 1..20: note = chemically synthesized
  source 1..20: mol_type = other DNA
catgtgtcttttggttgcat

SEQ ID NO: 71935 - DNA, 20 bp, synthetic construct
  misc_feature 1..20: note = chemically synthesized
  source 1..20: mol_type = other DNA
ctttgcccacttgttgatgg

SEQ ID NO: 71936 - DNA, 20 bp, synthetic construct
  misc_feature 1..20: note = chemically synthesized
  source 1..20: mol_type = other DNA
gcccacttgttgatggggct

SEQ ID NO: 71937 - DNA, 20 bp, synthetic construct
  misc_feature 1..20: note = chemically synthesized
  source 1..20: mol_type = other DNA
tgtttgtttttttcttgtaa

SEQ ID NO: 71938 - DNA, 20 bp, synthetic construct
  misc_feature 1..20: note = chemically synthesized
  source 1..20: mol_type = other DNA
gtaaatttgtttgagttcat

SEQ ID NO: 71939 - DNA, 20 bp, synthetic construct
  misc_feature 1..20: note = chemically synthesized
  source 1..20: mol_type = other DNA
ggttgcctgttcactctgat

SEQ ID NO: 71940 - DNA, 20 bp, synthetic construct
  misc_feature 1..20: note = chemically synthesized
  source 1..20: mol_type = other DNA
ctttagctgtgcagaagctc

SEQ ID NO: 71941 - DNA, 20 bp, synthetic construct
  misc_feature 1..20: note = chemically synthesized
  source 1..20: mol_type = other DNA
attagatcccattagtgaat

SEQ ID NO: 71942 - DNA, 20 bp, synthetic construct
  misc_feature 1..20: note = chemically synthesized
  source 1..20: mol_type = other DNA
tgaattttggcttttgttgc

SEQ ID NO: 71943 - DNA, 20 bp, synthetic construct
  misc_feature 1..20: note = chemically synthesized
  source 1..20: mol_type = other DNA
gcttttgttgccatcgcttt

SEQ ID NO: 71944 - DNA, 20 bp, synthetic construct
  misc_feature 1..20: note = chemically synthesized
  source 1..20: mol_type = other DNA
tatgtcctgaatggtaatgc

SEQ ID NO: 71945 - DNA, 20 bp, synthetic construct
  misc_feature 1..20: note = chemically synthesized
  source 1..20: mol_type = other DNA
gtaatgcctgcgttttcttc

SEQ ID NO: 71946 - DNA, 20 bp, synthetic construct
  misc_feature 1..20: note = chemically synthesized
  source 1..20: mol_type = other DNA
gcgttttcttctagggtttt

SEQ ID NO: 71947 - DNA, 20 bp, synthetic construct
  misc_feature 1..20: note = chemically synthesized
  source 1..20: mol_type = other DNA
ggtttttatggttttaggtc

SEQ ID NO: 71948 - DNA, 20 bp, synthetic construct
  misc_feature 1..20: note = chemically synthesized
  source 1..20: mol_type = other DNA
tataaggtgtaaggaaggga

SEQ ID NO: 71949 - DNA, 20 bp, synthetic construct
  misc_feature 1..20: note = chemically synthesized
  source 1..20: mol_type = other DNA
tagggaatcctttccccatt

SEQ ID NO: 71950 - DNA, 20 bp, synthetic construct
  misc_feature 1..20: note = chemically synthesized
  source 1..20: mol_type = other DNA
ttccccatttcttgtttttc

SEQ ID NO: 71951 - DNA, 20 bp, synthetic construct
  misc_feature 1..20: note = chemically synthesized
  source 1..20: mol_type = other DNA
tctgttccattgatctatat

SEQ ID NO: 71952 - DNA, 20 bp, synthetic construct
  misc_feature 1..20: note = chemically synthesized
  source 1..20: mol_type = other DNA
gtgttttggtaccagtaaca

SEQ ID NO: 71953 - DNA, 20 bp, synthetic construct
  misc_feature 1..20: note = chemically synthesized
  source 1..20: mol_type = other DNA
tggttactgtagccttgtag

SEQ ID NO: 71954 - DNA, 20 bp, synthetic construct
  misc_feature 1..20: note = chemically synthesized
  source 1..20: mol_type = other DNA
aagtgaggtagcctgatgcc

SEQ ID NO: 71955 - DNA, 20 bp, synthetic construct
  misc_feature 1..20: note = chemically synthesized
  source 1..20: mol_type = other DNA
gatgcctccagctttgttct

SEQ ID NO: 71956 - DNA, 20 bp, synthetic construct
  misc_feature 1..20: note = chemically synthesized
  source 1..20: mol_type = other DNA
tccagctttgttcttttggc

SEQ ID NO: 71957 - DNA, 20 bp, synthetic construct
  misc_feature 1..20: note = chemically synthesized
  source 1..20: mol_type = other DNA
tggttccatatgaactttaa

SEQ ID NO: 71958 - DNA, 20 bp, synthetic construct
  misc_feature 1..20: note = chemically synthesized
  source 1..20: mol_type = other DNA
attctgtgaagaaaatcatt

SEQ ID NO: 71959 - DNA, 20 bp, synthetic construct
  misc_feature 1..20: note = chemically synthesized
  source 1..20: mol_type = other DNA
cattatggccattttgatga

SEQ ID NO: 71960 - DNA, 20 bp, synthetic construct
  misc_feature 1..20: note = chemically synthesized
  source 1..20: mol_type = other DNA
taagcatggaatgttcttcc

SEQ ID NO: 71961 - DNA, 20 bp, synthetic construct
  misc_feature 1..20: note = chemically synthesized
  source 1..20: mol_type = other DNA
cttcttttatttcattgagc

SEQ ID NO: 71962 - DNA, 20 bp, synthetic construct
  misc_feature 1..20: note = chemically synthesized
  source 1..20: mol_type = other DNA
gtccttcacatcccttgtaa

SEQ ID NO: 71963 - DNA, 20 bp, synthetic construct
  misc_feature 1..20: note = chemically synthesized
  source 1..20: mol_type = other DNA
aattgtgaatgggagttccc

SEQ ID NO: 71964 - DNA, 20 bp, synthetic construct
  misc_feature 1..20: note = chemically synthesized
  source 1..20: mol_type = other DNA
agttccctcatgatttggct

SEQ ID NO: 71965 - DNA, 20 bp, synthetic construct
  misc_feature 1..20: note = chemically synthesized
  source 1..20: mol_type = other DNA
tgtctgttattggtgtataa

SEQ ID NO: 71966 - DNA, 20 bp, synthetic construct
  misc_feature 1..20: note = chemically synthesized
  source 1..20: mol_type = other DNA
ttattggtgtataagaatgc

SEQ ID NO: 71967 - DNA, 20 bp, synthetic construct
  misc_feature 1..20: note = chemically synthesized
  source 1..20: mol_type = other DNA
aatgcttgtgatttttgcac

SEQ ID NO: 71968 - DNA, 20 bp, synthetic construct
  misc_feature 1..20: note = chemically synthesized
  source 1..20: mol_type = other DNA
tgcacattggttttgtatcc

SEQ ID NO: 71969 - DNA, 20 bp, synthetic construct
  misc_feature 1..20: note = chemically synthesized
  source 1..20: mol_type = other DNA
gtatcctgaggctttgctga

SEQ ID NO: 71970 - DNA, 20 bp, synthetic construct
  misc_feature 1..20: note = chemically synthesized
  source 1..20: mol_type = other DNA
aggctttgctgaagttgctt

SEQ ID NO: 71971 - DNA, 20 bp, synthetic construct
  misc_feature 1..20: note = chemically synthesized
  source 1..20: mol_type = other DNA
tgaagttgcttatcagctta

SEQ ID NO: 71972 - DNA, 20 bp, synthetic construct
  misc_feature 1..20: note = chemically synthesized
  source 1..20: mol_type = other DNA
gagattttgggctgagacaa

SEQ ID NO: 71973 - DNA, 20 bp, synthetic construct
  misc_feature 1..20: note = chemically synthesized
  source 1..20: mol_type = other DNA
agagggcatccctgtcttgt

SEQ ID NO: 71974 - DNA, 20 bp, synthetic construct
  misc_feature 1..20: note = chemically synthesized
  source 1..20: mol_type = other DNA
cttgtgccagtttacaaagg

SEQ ID NO: 71975 - DNA, 20 bp, synthetic construct
  misc_feature 1..20: note = chemically synthesized
  source 1..20: mol_type = other DNA
cagtttacaaagggaatgct

SEQ ID NO: 71976 - DNA, 20 bp, synthetic construct
  misc_feature 1..20: note = chemically synthesized
  source 1..20: mol_type = other DNA
cattcagtatgatattggct

SEQ ID NO: 71977 - DNA, 20 bp, synthetic construct
  misc_feature 1..20: note = chemically synthesized
  source 1..20: mol_type = other DNA
ccatcaatacctaatttatt

SEQ ID NO: 71978 - DNA, 20 bp, synthetic construct
  misc_feature 1..20: note = chemically synthesized
  source 1..20: mol_type = other DNA
tgcatctattgagataatca

SEQ ID NO: 71979 - DNA, 20 bp, synthetic construct
  misc_feature 1..20: note = chemically synthesized
  source 1..20: mol_type = other DNA
catgtggtttttgtctttgg

SEQ ID NO: 71980 - DNA, 20 bp, synthetic construct
  misc_feature 1..20: note = chemically synthesized
  source 1..20: mol_type = other DNA
gtctttggttctgtttatat

SEQ ID NO: 71981 - DNA, 20 bp, synthetic construct
  misc_feature 1..20: note = chemically synthesized
  source 1..20: mol_type = other DNA
tttatatgctggattacatt

SEQ ID NO: 71982 - DNA, 20 bp, synthetic construct
  misc_feature 1..20: note = chemically synthesized
  source 1..20: mol_type = other DNA
agtccacttgatcatcgtgg

SEQ ID NO: 71983 - DNA, 20 bp, synthetic construct
  misc_feature 1..20: note = chemically synthesized
  source 1..20: mol_type = other DNA
gataagctttttgatgtgct

SEQ ID NO: 71984 - DNA, 20 bp, synthetic construct
  misc_feature 1..20: note = chemically synthesized
  source 1..20: mol_type = other DNA
ctttttgatgtgctgctgga

SEQ ID NO: 71985 - DNA, 20 bp, synthetic construct
  misc_feature 1..20: note = chemically synthesized
  source 1..20: mol_type = other DNA
tcggtttgccagtattttat

SEQ ID NO: 71986 - DNA, 20 bp, synthetic construct
  misc_feature 1..20: note = chemically synthesized
  source 1..20: mol_type = other DNA
cttttttggttgtgtctctt

SEQ ID NO: 71987 - DNA, 20 bp, synthetic construct
  misc_feature 1..20: note = chemically synthesized
  source 1..20: mol_type = other DNA
ggcctcataaaatgagttag

SEQ ID NO: 71988 - DNA, 20 bp, synthetic construct
  misc_feature 1..20: note = chemically synthesized
  source 1..20: mol_type = other DNA
gggaggattccttctttttc

SEQ ID NO: 71989 - DNA, 20 bp, synthetic construct
  misc_feature 1..20: note = chemically synthesized
  source 1..20: mol_type = other DNA
cttctttttctgttgattgg

SEQ ID NO: 71990 - DNA, 20 bp, synthetic construct
  misc_feature 1..20: note = chemically synthesized
  source 1..20: mol_type = other DNA
actctttttggttggtaagc

SEQ ID NO: 71991 - DNA, 20 bp, synthetic construct
  misc_feature 1..20: note = chemically synthesized
  source 1..20: mol_type = other DNA
gatcctgttattggtctatt

SEQ ID NO: 71992 - DNA, 20 bp, synthetic construct
  misc_feature 1..20: note = chemically synthesized
  source 1..20: mol_type = other DNA
attcagagattcaacttctt

SEQ ID NO: 71993 - DNA, 20 bp, synthetic construct
  misc_feature 1..20: note = chemically synthesized
  source 1..20: mol_type = other DNA
ccaggaatttatccatttct

SEQ ID NO: 71994 - DNA, 20 bp, synthetic construct
  misc_feature 1..20: note = chemically synthesized
  source 1..20: mol_type = other DNA
tatccatttcttctagattt

SEQ ID NO: 71995 - DNA, 20 bp, synthetic construct
  misc_feature 1..20: note = chemically synthesized
  source 1..20: mol_type = other DNA
tttctagtttatttgcgtag

SEQ ID NO: 71996 - DNA, 20 bp, synthetic construct
  misc_feature 1..20: note = chemically synthesized
  source 1..20: mol_type = other DNA
tgtttgtagtattctctgat

SEQ ID NO: 71997 - DNA, 20 bp, synthetic construct
  misc_feature 1..20: note = chemically synthesized
  source 1..20: mol_type = other DNA
atcatttttttattgtgtct

SEQ ID NO: 71998 - DNA, 20 bp, synthetic construct
  misc_feature 1..20: note = chemically synthesized
  source 1..20: mol_type = other DNA
attagtcttgctagcggtct

SEQ ID NO: 71999 - DNA, 20 bp, synthetic construct
  misc_feature 1..20: note = chemically synthesized
  source 1..20: mol_type = other DNA
atcctttcaaaaaaccagct

SEQ ID NO: 72000 - DNA, 20 bp, synthetic construct
  misc_feature 1..20: note = chemically synthesized
  source 1..20: mol_type = other DNA
ccagattcattaattttttg

SEQ ID NO: 72001 - DNA, 20 bp, synthetic construct
  misc_feature 1..20: note = chemically synthesized
  source 1..20: mol_type = other DNA
ttttgaagggttttttgtgt

SEQ ID NO: 72002 - DNA, 20 bp, synthetic construct
  misc_feature 1..20: note = chemically synthesized
  source 1..20: mol_type = other DNA
ctctgtttccttcagttctg

SEQ ID NO: 72003 - DNA, 20 bp, synthetic construct
  misc_feature 1..20: note = chemically synthesized
  source 1..20: mol_type = other DNA
ttagttatttcttgacttct

SEQ ID NO: 72004 - DNA, 20 bp, synthetic construct
  misc_feature 1..20: note = chemically synthesized
  source 1..20: mol_type = other DNA
tgacttctgctagcttttga

SEQ ID NO: 72005 - DNA, 20 bp, synthetic construct
  misc_feature 1..20: note = chemically synthesized
  source 1..20: mol_type = other DNA
tagcttttgaatgtgtttgc

SEQ ID NO: 72006 - DNA, 20 bp, synthetic construct
  misc_feature 1..20: note = chemically synthesized
  source 1..20: mol_type = other DNA
gggtgtcaattttggatctt

SEQ ID NO: 72007 - DNA, 20 bp, synthetic construct
  misc_feature 1..20: note = chemically synthesized
  source 1..20: mol_type = other DNA
tctttcttgctttctcttgt

SEQ ID NO: 72008 - DNA, 20 bp, synthetic construct
  misc_feature 1..20: note = chemically synthesized
  source 1..20: mol_type = other DNA
gctataaatttccccctaca

SEQ ID NO: 72009 - DNA, 20 bp, synthetic construct
  misc_feature 1..20: note = chemically synthesized
  source 1..20: mol_type = other DNA
acactgattcgaatgtgtcc

SEQ ID NO: 72010 - DNA, 20 bp, synthetic construct
  misc_feature 1..20: note = chemically synthesized
  source 1..20: mol_type = other DNA
tatgttgtgtctttgttctc

SEQ ID NO: 72011 - DNA, 20 bp, synthetic construct
  misc_feature 1..20: note = chemically synthesized
  source 1..20: mol_type = other DNA
agtcattcaggagcaggttg

SEQ ID NO: 72012 - DNA, 20 bp, synthetic construct
  misc_feature 1..20: note = chemically synthesized
  source 1..20: mol_type = other DNA
gttcagtttccatgtagttg

SEQ ID NO: 72013 - DNA, 20 bp, synthetic construct
  misc_feature 1..20: note = chemically synthesized
  source 1..20: mol_type = other DNA
atgtagttgagtggttttga

SEQ ID NO: 72014 - DNA, 20 bp, synthetic construct
  misc_feature 1..20: note = chemically synthesized
  source 1..20: mol_type = other DNA
tgagtttcttaatcctgagt

SEQ ID NO: 72015 - DNA, 20 bp, synthetic construct
  misc_feature 1..20: note = chemically synthesized
  source 1..20: mol_type = other DNA
tttcttaatcctgagttcta

SEQ ID NO: 72016 - DNA, 20 bp, synthetic construct
  misc_feature 1..20: note = chemically synthesized
  source 1..20: mol_type = other DNA
gattgcactgtggtctgaga

SEQ ID NO: 72017 - DNA, 20 bp, synthetic construct
  misc_feature 1..20: note = chemically synthesized
  source 1..20: mol_type = other DNA
gttcttttatatttgctgag

SEQ ID NO: 72018 - DNA, 20 bp, synthetic construct
  misc_feature 1..20: note = chemically synthesized
  source 1..20: mol_type = other DNA
ctgaaaaaaaatgtatattc

SEQ ID NO: 72019 - DNA, 20 bp, synthetic construct
  misc_feature 1..20: note = chemically synthesized
  source 1..20: mol_type = other DNA
gttctgtagatgtctattag

SEQ ID NO: 72020 - DNA, 20 bp, synthetic construct
  misc_feature 1..20: note = chemically synthesized
  source 1..20: mol_type = other DNA
ctctttgtaggtctctaagg

SEQ ID NO: 72021 - DNA, 20 bp, synthetic construct
  misc_feature 1..20: note = chemically synthesized
  source 1..20: mol_type = other DNA
ctttgtctcttttgatcttt

SEQ ID NO: 72022 - DNA, 20 bp, synthetic construct
  misc_feature 1..20: note = chemically synthesized
  source 1..20: mol_type = other DNA
ttgatctttgttggtttaaa

SEQ ID NO: 72023 - DNA, 20 bp, synthetic construct
  misc_feature 1..20: note = chemically synthesized
  source 1..20: mol_type = other DNA
aaagcctgttttatcagaga

SEQ ID NO: 72024 - DNA, 20 bp, synthetic construct
  misc_feature 1..20: note = chemically synthesized
  source 1..20: mol_type = other DNA
ggattgcaacccctgccttt

SEQ ID NO: 72025 - DNA, 20 bp, synthetic construct
  misc_feature 1..20: note = chemically synthesized
  source 1..20: mol_type = other DNA
cctgcctttttttgttttcc

SEQ ID NO: 72026 - DNA, 20 bp, synthetic construct
  misc_feature 1..20: note = chemically synthesized
  source 1..20: mol_type = other DNA
tgtgtgtgtgtgcacatgag

SEQ ID NO: 72027 - DNA, 20 bp, synthetic construct
  misc_feature 1..20: note = chemically synthesized
  source 1..20: mol_type = other DNA
ttattttgctcgttagttga

SEQ ID NO: 72028 - DNA, 20 bp, synthetic construct
  misc_feature 1..20: note = chemically synthesized
  source 1..20: mol_type = other DNA
ttgatggtcttcacattttg

SEQ ID NO: 72029 - DNA, 20 bp, synthetic construct
  misc_feature 1..20: note = chemically synthesized
  source 1..20: mol_type = other DNA
ctggtaccggttgtgccttt

SEQ ID NO: 72030 - DNA, 20 bp, synthetic construct
  misc_feature 1..20: note = chemically synthesized
  source 1..20: mol_type = other DNA
cggttgtgcctttccatgtt

SEQ ID NO: 72031 - DNA, 20 bp, synthetic construct
  misc_feature 1..20: note = chemically synthesized
  source 1..20: mol_type = other DNA
tgatgacaaaatctctcagc

SEQ ID NO: 72032 - DNA, 20 bp, synthetic construct
  misc_feature 1..20: note = chemically synthesized
  source 1..20: mol_type = other DNA
ttttatttctccttcactta

SEQ ID NO: 72033 - DNA, 20 bp, synthetic construct
  misc_feature 1..20: note = chemically synthesized
  source 1..20: mol_type = other DNA
tttctccttcacttatgaag

SEQ ID NO: 72034 - DNA, 20 bp, synthetic construct
  misc_feature 1..20: note = chemically synthesized
  source 1..20: mol_type = other DNA
aatattggcccccactctct

SEQ ID NO: 72035 - DNA, 20 bp, synthetic construct
  misc_feature 1..20: note = chemically synthesized
  source 1..20: mol_type = other DNA
ccccactctcttctggcttg

SEQ ID NO: 72036 - DNA, 20 bp, synthetic construct
  misc_feature 1..20: note = chemically synthesized
  source 1..20: mol_type = other DNA
agagagctgctgttagtctg

SEQ ID NO: 72037 - DNA, 20 bp, synthetic construct
  misc_feature 1..20: note = chemically synthesized
  source 1..20: mol_type = other DNA
ggagttgctcttctcgagga

SEQ ID NO: 72038 - DNA, 20 bp, synthetic construct
  misc_feature 1..20: note = chemically synthesized
  source 1..20: mol_type = other DNA
tctgaatgttggcctgcctt

SEQ ID NO: 72039 - DNA, 20 bp, synthetic construct
  misc_feature 1..20: note = chemically synthesized
  source 1..20: mol_type = other DNA
ctcctggataatatcctgca

SEQ ID NO: 72040 - DNA, 20 bp, synthetic construct
  misc_feature 1..20: note = chemically synthesized
  source 1..20: mol_type = other DNA
gcagagtgttttccaacttg

SEQ ID NO: 72041 - DNA, 20 bp, synthetic construct
  misc_feature 1..20: note = chemically synthesized
  source 1..20: mol_type = other DNA
tttcaggtacaccaatcaga

SEQ ID NO: 72042 - DNA, 20 bp, synthetic construct
  misc_feature 1..20: note = chemically synthesized
  source 1..20: mol_type = other DNA
cacatagtcccatatttctt

SEQ ID NO: 72043 - DNA, 20 bp, synthetic construct
  misc_feature 1..20: note = chemically synthesized
  source 1..20: mol_type = other DNA
ttttttctctaaacttccct

SEQ ID NO: 72044 - DNA, 20 bp, synthetic construct
  misc_feature 1..20: note = chemically synthesized
  source 1..20: mol_type = other DNA
cagttgatcgcatcagctcc

SEQ ID NO: 72045 - DNA, 20 bp, synthetic construct
  misc_feature 1..20: note = chemically synthesized
  source 1..20: mol_type = other DNA
tcttcacgtcattctcgagc

SEQ ID NO: 72046 - DNA, 20 bp, synthetic construct
  misc_feature 1..20: note = chemically synthesized
  source 1..20: mol_type = other DNA
cattcatctaaatttttttt

SEQ ID NO: 72047 - DNA, 20 bp, synthetic construct
  misc_feature 1..20: note = chemically synthesized
  source 1..20: mol_type = other DNA
aagtttttatcttctttgcc

SEQ ID NO: 72048 - DNA, 20 bp, synthetic construct
  misc_feature 1..20: note = chemically synthesized
  source 1..20: mol_type = other DNA
aatttcctcctgtagctcgg

SEQ ID NO: 72049 - DNA, 20 bp, synthetic construct
  misc_feature 1..20: note = chemically synthesized
  source 1..20: mol_type = other DNA
ctcgtcaaagtcattctcca

SEQ ID NO: 72050 - DNA, 20 bp, synthetic construct
  misc_feature 1..20: note = chemically synthesized
  source 1..20: mol_type = other DNA
ttgttccgttgctggtgagg

SEQ ID NO: 72051 - DNA, 20 bp, synthetic construct
  misc_feature 1..20: note = chemically synthesized
  source 1..20: mol_type = other DNA
cctttggaggaggaaaggtg

SEQ ID NO: 72052 - DNA, 20 bp, synthetic construct
  misc_feature 1..20: note = chemically synthesized
  source 1..20: mol_type = other DNA
aggaaaggtgctctgctttt

SEQ ID NO: 72053 - DNA, 20 bp, synthetic construct
  misc_feature 1..20: note = chemically synthesized
  source 1..20: mol_type = other DNA
gtgctctgctttttagagtt

SEQ ID NO: 72054 - DNA, 20 bp, synthetic construct
  misc_feature 1..20: note = chemically synthesized
  source 1..20: mol_type = other DNA
tagagtttccagtttttctg

SEQ ID NO: 72055 - DNA, 20 bp, synthetic construct
  misc_feature 1..20: note = chemically synthesized
  source 1..20: mol_type = other DNA
ttgatgatagtgatgtaccg

SEQ ID NO: 72056 - DNA, 20 bp, synthetic construct
  misc_feature 1..20: note = chemically synthesized
  source 1..20: mol_type = other DNA
gtttttggtgtggatgtcct

SEQ ID NO: 72057 - DNA, 20 bp, synthetic construct
  misc_feature 1..20: note = chemically synthesized
  source 1..20: mol_type = other DNA
tgtggatgtcctttctgttt

SEQ ID NO: 72058 - DNA, 20 bp, synthetic construct
  misc_feature 1..20: note = chemically synthesized
  source 1..20: mol_type = other DNA
accctcagctgcaggtctgt

SEQ ID NO: 72059 - DNA, 20 bp, synthetic construct
  misc_feature 1..20: note = chemically synthesized
  source 1..20: mol_type = other DNA
tgctagaggtccactccaga

SEQ ID NO: 72060 - DNA, 20 bp, synthetic construct
  misc_feature 1..20: note = chemically synthesized
  source 1..20: mol_type = other DNA
agcagcggtgtctgcagaac

SEQ ID NO: 72061 - DNA, 20 bp, synthetic construct
  misc_feature 1..20: note = chemically synthesized
  source 1..20: mol_type = other DNA
tgctgtctgatcgttcctct

SEQ ID NO: 72062 - DNA, 20 bp, synthetic construct
  misc_feature 1..20: note = chemically synthesized
  source 1..20: mol_type = other DNA
tgcagaggttactgctgtct

SEQ ID NO: 72063 - DNA, 20 bp, synthetic construct
  misc_feature 1..20: note = chemically synthesized
  source 1..20: mol_type = other DNA
ttgagctgtggtggggtcca

SEQ ID NO: 72064 - DNA, 20 bp, synthetic construct
  misc_feature 1..20: note = chemically synthesized
  source 1..20: mol_type = other DNA
tgtggtggggtccacccagt

SEQ ID NO: 72065 - DNA, 20 bp, synthetic construct
  misc_feature 1..20: note = chemically synthesized
  source 1..20: mol_type = other DNA
ccacccagtttgagcttcct

SEQ ID NO: 72066 - DNA, 20 bp, synthetic construct
  misc_feature 1..20: note = chemically synthesized
  source 1..20: mol_type = other DNA
cagtttgagcttcctggctg

SEQ ID NO: 72067 - DNA, 20 bp, synthetic construct
  misc_feature 1..20: note = chemically synthesized
  source 1..20: mol_type = other DNA
ccccagcctcgctgccacct

SEQ ID NO: 72068 - DNA, 20 bp, synthetic construct
  misc_feature 1..20: note = chemically synthesized
  source 1..20: mol_type = other DNA
aaagggaactccatgacccc

SEQ ID NO: 72069 - DNA, 20 bp, synthetic construct
  misc_feature 1..20: note = chemically synthesized
  source 1..20: mol_type = other DNA
ccaagtgaggcaatgcctca

SEQ ID NO: 72070 - DNA, 20 bp, synthetic construct
  misc_feature 1..20: note = chemically synthesized
  source 1..20: mol_type = other DNA
atctctatacatgttcttcc

SEQ ID NO: 72071 - DNA, 20 bp, synthetic construct
  misc_feature 1..20: note = chemically synthesized
  source 1..20: mol_type = other DNA
tacatgttcttccaggagtt

SEQ ID NO: 72072 - DNA, 20 bp, synthetic construct
  misc_feature 1..20: note = chemically synthesized
  source 1..20: mol_type = other DNA
taatctattttgagttgact

SEQ ID NO: 72073 - DNA, 20 bp, synthetic construct
  misc_feature 1..20: note = chemically synthesized
  source 1..20: mol_type = other DNA
tattcttttgcatttggata

SEQ ID NO: 72074 - DNA, 20 bp, synthetic construct
  misc_feature 1..20: note = chemically synthesized
  source 1..20: mol_type = other DNA
taccatacttttttggttac

SEQ ID NO: 72075 - DNA, 20 bp, synthetic construct
  misc_feature 1..20: note = chemically synthesized
  source 1..20: mol_type = other DNA
agaacgtgtgctgccatcaa

SEQ ID NO: 72076 - DNA, 20 bp, synthetic construct
  misc_feature 1..20: note = chemically synthesized
  source 1..20: mol_type = other DNA
atcaagttggtttttctttc

SEQ ID NO: 72077 - DNA, 20 bp, synthetic construct
  misc_feature 1..20: note = chemically synthesized
  source 1..20: mol_type = other DNA
agttggtttttctttctcaa

SEQ ID NO: 72078 - DNA, 20 bp, synthetic construct
  misc_feature 1..20: note = chemically synthesized
  source 1..20: mol_type = other DNA
ttggccatttgggggtgttc

SEQ ID NO: 72079 - DNA, 20 bp, synthetic construct
  misc_feature 1..20: note = chemically synthesized
  source 1..20: mol_type = other DNA
tggtttcatacaaattttca

SEQ ID NO: 72080 - DNA, 20 bp, synthetic construct
  misc_feature 1..20: note = chemically synthesized
  source 1..20: mol_type = other DNA
agaaaacaatcatcaaaagg

SEQ ID NO: 72081 - DNA, 20 bp, synthetic construct
  misc_feature 1..20: note = chemically synthesized
  source 1..20: mol_type = other DNA
agccattatagaaaacgtat

SEQ ID NO: 72082 - DNA, 20 bp, synthetic construct
  misc_feature 1..20: note = chemically synthesized
  source 1..20: mol_type = other DNA
cttgcagctgtataggataa

SEQ ID NO: 72083 - DNA, 20 bp, synthetic construct
  misc_feature 1..20: note = chemically synthesized
  source 1..20: mol_type = other DNA
ttgtattgatggataggtta

SEQ ID NO: 72084 - DNA, 20 bp, synthetic construct
  misc_feature 1..20: note = chemically synthesized
  source 1..20: mol_type = other DNA
attgatggataggttaattt

SEQ ID NO: 72085 - DNA, 20 bp, synthetic construct
  misc_feature 1..20: note = chemically synthesized
  source 1..20: mol_type = other DNA
atatatcctatattttttga

SEQ ID NO: 72086 - DNA, 20 bp, synthetic construct
  misc_feature 1..20: note = chemically synthesized
  source 1..20: mol_type = other DNA
tatattttttgaacaagctt

SEQ ID NO: 72087 - DNA, 20 bp, synthetic construct
  misc_feature 1..20: note = chemically synthesized
  source 1..20: mol_type = other DNA
tgtttcagataaaatatttt

SEQ ID NO: 72088 - DNA, 20 bp, synthetic construct
  misc_feature 1..20: note = chemically synthesized
  source 1..20: mol_type = other DNA
ttatctgaagcaagtcaaat

SEQ ID NO: 72089 - DNA, 20 bp, synthetic construct
  misc_feature 1..20: note = chemically synthesized
  source 1..20: mol_type = other DNA
aagtcaaatttctgtttcct

SEQ ID NO: 72090 - DNA, 20 bp, synthetic construct
  misc_feature 1..20: note = chemically synthesized
  source 1..20: mol_type = other DNA
ccctttggatataatgagat

SEQ ID NO: 72091 - DNA, 20 bp, synthetic construct
  misc_feature 1..20: note = chemically synthesized
  source 1..20: mol_type = other DNA
tatatctccggcctacaact

SEQ ID NO: 72092 - DNA, 20 bp, synthetic construct
  misc_feature 1..20: note = chemically synthesized
  source 1..20: mol_type = other DNA
cggcctacaactcagggttt

SEQ ID NO: 72093 - DNA, 20 bp, synthetic construct
  misc_feature 1..20: note = chemically synthesized
  source 1..20: mol_type = other DNA
gtttcatcaatgtctctatt

SEQ ID NO: 72094 - DNA, 20 bp, synthetic construct
  misc_feature 1..20: note = chemically synthesized
  source 1..20: mol_type = other DNA
tgttcaatttttttgaactt

SEQ ID NO: 72095 - DNA, 20 bp, synthetic construct
  misc_feature 1..20: note = chemically synthesized
  source 1..20: mol_type = other DNA
atttttttgaacttctgtgt

SEQ ID NO: 72096 - DNA, 20 bp, synthetic construct
  misc_feature 1..20: note = chemically synthesized
  source 1..20: mol_type = other DNA
agatccggggaaaggtgctg

SEQ ID NO: 72097 - DNA, 20 bp, synthetic construct
  misc_feature 1..20: note = chemically synthesized
  source 1..20: mol_type = other DNA
tcagaacccgcatttgtcac

SEQ ID NO: 72098 - DNA, 20 bp, synthetic construct
  misc_feature 1..20: note = chemically synthesized
  source 1..20: mol_type = other DNA
tatttcctttccgttaaaat

SEQ ID NO: 72099 - DNA, 20 bp, synthetic construct
  misc_feature 1..20: note = chemically synthesized
  source 1..20: mol_type = other DNA
taaacaaacaactaaacaat

SEQ ID NO: 72100 - DNA, 20 bp, synthetic construct
  misc_feature 1..20: note = chemically synthesized
  source 1..20: mol_type = other DNA
cataccaacaaatgatcctc

SEQ ID NO: 72101 - DNA, 20 bp, synthetic construct
  misc_feature 1..20: note = chemically synthesized
  source 1..20: mol_type = other DNA
tgacctgacaacccagctat

SEQ ID NO: 72102 - DNA, 20 bp, synthetic construct
  misc_feature 1..20: note = chemically synthesized
  source 1..20: mol_type = other DNA
aaacattcaaaccttcaact

SEQ ID NO: 72103 - DNA, 20 bp, synthetic construct
  misc_feature 1..20: note = chemically synthesized
  source 1..20: mol_type = other DNA
aatgataataataaatacat

SEQ ID NO: 72104 - DNA, 20 bp, synthetic construct
  misc_feature 1..20: note = chemically synthesized
  source 1..20: mol_type = other DNA
tctatatgcatttctataga

SEQ ID NO: 72105 - DNA, 20 bp, synthetic construct
  misc_feature 1..20: note = chemically synthesized
  source 1..20: mol_type = other DNA
acaaaccataagatggcagg

SEQ ID NO: 72106 - DNA, 20 bp, synthetic construct
  misc_feature 1..20: note = chemically synthesized
  source 1..20: mol_type = other DNA
tctcctggggccatgcagag

SEQ ID NO: 72107 - DNA, 20 bp, synthetic construct
  misc_feature 1..20: note = chemically synthesized
  source 1..20: mol_type = other DNA
aggtttgaagatcttgttga

SEQ ID NO: 72108 - DNA, 20 bp, synthetic construct
  misc_feature 1..20: note = chemically synthesized
  source 1..20: mol_type = other DNA
tttaacaactgttgacttat

SEQ ID NO: 72109 - DNA, 20 bp, synthetic construct
  misc_feature 1..20: note = chemically synthesized
  source 1..20: mol_type = other DNA
acaaaaatgcagacaagcag

SEQ ID NO: 72110 - DNA, 20 bp, synthetic construct
  misc_feature 1..20: note = chemically synthesized
  source 1..20: mol_type = other DNA
aaagttgcagagaaatgtat

SEQ ID NO: 72111 - DNA, 20 bp, synthetic construct
  misc_feature 1..20: note = chemically synthesized
  source 1..20: mol_type = other DNA
ttttttaaatgtctcaaatt

SEQ ID NO: 72112 - DNA, 20 bp, synthetic construct
  misc_feature 1..20: note = chemically synthesized
  source 1..20: mol_type = other DNA
ccagaaaaaatatataaaaa

SEQ ID NO: 72113 - DNA, 20 bp, synthetic construct
  misc_feature 1..20: note = chemically synthesized
  source 1..20: mol_type = other DNA
tatataaaaagtctgtttca

SEQ ID NO: 72114 - DNA, 20 bp, synthetic construct
  misc_feature 1..20: note = chemically synthesized
  source 1..20: mol_type = other DNA
taatatttgttaagccgtga

SEQ ID NO: 72115 - DNA, 20 bp, synthetic construct
  misc_feature 1..20: note = chemically synthesized
  source 1..20: mol_type = other DNA
atcctttctgtatgtctaac

SEQ ID NO: 72116 - DNA, 20 bp, synthetic construct
  misc_feature 1..20: note = chemically synthesized
  source 1..20: mol_type = other DNA
aggtggcccaaccaccctat

SEQ ID NO: 72117 - DNA, 20 bp, synthetic construct
  misc_feature 1..20: note = chemically synthesized
  source 1..20: mol_type = other DNA
cccaaccaccctatcacaga

SEQ ID NO: 72118 - DNA, 20 bp, synthetic construct
  misc_feature 1..20: note = chemically synthesized
  source 1..20: mol_type = other DNA
ctagttggctgacacacaat

SEQ ID NO: 72119 - DNA, 20 bp, synthetic construct
  misc_feature 1..20: note = chemically synthesized
  source 1..20: mol_type = other DNA
gaaagaaaaagttcctgaac

SEQ ID NO: 72120 - DNA, 20 bp, synthetic construct
  misc_feature 1..20: note = chemically synthesized
  source 1..20: mol_type = other DNA
ggaaaaaaagaaaagccatc

SEQ ID NO: 72121 - DNA, 20 bp, synthetic construct
  misc_feature 1..20: note = chemically synthesized
  source 1..20: mol_type = other DNA
agctttcagaaggcctatgc

SEQ ID NO: 72122 - DNA, 20 bp, synthetic construct
  misc_feature 1..20: note = chemically synthesized
  source 1..20: mol_type = other DNA
tcagaaggcctatgctgagg

SEQ ID NO: 72123 - DNA, 20 bp, synthetic construct
  misc_feature 1..20: note = chemically synthesized
  source 1..20: mol_type = other DNA
tatgctgaggttttgcttcc

SEQ ID NO: 72124 - DNA, 20 bp, synthetic construct
  misc_feature 1..20: note = chemically synthesized
  source 1..20: mol_type = other DNA
gcataatattttgagtaact

SEQ ID NO: 72125 - DNA, 20 bp, synthetic construct
  misc_feature 1..20: note = chemically synthesized
  source 1..20: mol_type = other DNA
aaactgaaacctctactatg

SEQ ID NO: 72126 - DNA, 20 bp, synthetic construct
  misc_feature 1..20: note = chemically synthesized
  source 1..20: mol_type = other DNA
atcttgtgtaacttcaagta

SEQ ID NO: 72127 - DNA, 20 bp, synthetic construct
  misc_feature 1..20: note = chemically synthesized
  source 1..20: mol_type = other DNA
ttcaagtattacgattgtga

SEQ ID NO: 72128 - DNA, 20 bp, synthetic construct
  misc_feature 1..20: note = chemically synthesized
  source 1..20: mol_type = other DNA
cgattgtgagagagcttttt

SEQ ID NO: 72129 - DNA, 20 bp, synthetic construct
  misc_feature 1..20: note = chemically synthesized
  source 1..20: mol_type = other DNA
cattttcacaaaattttcaa

SEQ ID NO: 72130 - DNA, 20 bp, synthetic construct
  misc_feature 1..20: note = chemically synthesized
  source 1..20: mol_type = other DNA
gatgattatagtaataatag

SEQ ID NO: 72131 - DNA, 20 bp, synthetic construct
  misc_feature 1..20: note = chemically synthesized
  source 1..20: mol_type = other DNA
gaccaaaacacagaaagata

SEQ ID NO: 72132 - DNA, 20 bp, synthetic construct
  misc_feature 1..20: note = chemically synthesized
  source 1..20: mol_type = other DNA
acgcagccaataagtggaag

SEQ ID NO: 72133 - DNA, 20 bp, synthetic construct
  misc_feature 1..20: note = chemically synthesized
  source 1..20: mol_type = other DNA
gaaggtgggattgtaaacca

SEQ ID NO: 72134 - DNA, 20 bp, synthetic construct
  misc_feature 1..20: note = chemically synthesized
  source 1..20: mol_type = other DNA
gtatgaagaagcatgaaaca

SEQ ID NO: 72135 - DNA, 20 bp, synthetic construct
  misc_feature 1..20: note = chemically synthesized
  source 1..20: mol_type = other DNA
agaagcctacagaacactta

SEQ ID NO: 72136 - DNA, 20 bp, synthetic construct
  misc_feature 1..20: note = chemically synthesized
  source 1..20: mol_type = other DNA
cataggagcaaagaaccaag

SEQ ID NO: 72137 - DNA, 20 bp, synthetic construct
  misc_feature 1..20: note = chemically synthesized
  source 1..20: mol_type = other DNA
gaagtgaaactttgaagaat

SEQ ID NO: 72138 - DNA, 20 bp, synthetic construct
  misc_feature 1..20: note = chemically synthesized
  source 1..20: mol_type = other DNA
aggaaaatgcatagccttgg

SEQ ID NO: 72139 - DNA, 20 bp, synthetic construct
  misc_feature 1..20: note = chemically synthesized
  source 1..20: mol_type = other DNA
cataaagaccttgctgaaaa

SEQ ID NO: 72140 - DNA, 20 bp, synthetic construct
  misc_feature 1..20: note = chemically synthesized
  source 1..20: mol_type = other DNA
gctggctgaaacccaccaaa

SEQ ID NO: 72141 - DNA, 20 bp, synthetic construct
  misc_feature 1..20: note = chemically synthesized
  source 1..20: mol_type = other DNA
tactctcccaccagcactat

SEQ ID NO: 72142 - DNA, 20 bp, synthetic construct
  misc_feature 1..20: note = chemically synthesized
  source 1..20: mol_type = other DNA
ggaggcatgaataatccacc

SEQ ID NO: 72143 - DNA, 20 bp, synthetic construct
  misc_feature 1..20: note = chemically synthesized
  source 1..20: mol_type = other DNA
ctcctttactttcttaatta

SEQ ID NO: 72144 - DNA, 20 bp, synthetic construct
  misc_feature 1..20: note = chemically synthesized
  source 1..20: mol_type = other DNA
aacttgctttcacttttctg

SEQ ID NO: 72145 - DNA, 20 bp, synthetic construct
  misc_feature 1..20: note = chemically synthesized
  source 1..20: mol_type = other DNA
ccaagaaccctctcttaggg

SEQ ID NO: 72146 - DNA, 20 bp, synthetic construct
  misc_feature 1..20: note = chemically synthesized
  source 1..20: mol_type = other DNA
ggattgtgactcctttctgg

SEQ ID NO: 72147 - DNA, 20 bp, synthetic construct
  misc_feature 1..20: note = chemically synthesized
  source 1..20: mol_type = other DNA
acttcaaaaatctcctttca

SEQ ID NO: 72148 - DNA, 20 bp, synthetic construct
  misc_feature 1..20: note = chemically synthesized
  source 1..20: mol_type = other DNA
actaaaactctgtgtcacta

SEQ ID NO: 72149 - DNA, 20 bp, synthetic construct
  misc_feature 1..20: note = chemically synthesized
  source 1..20: mol_type = other DNA
ggtggcatgtgtatgtgtgg

SEQ ID NO: 72150 - DNA, 20 bp, synthetic construct
  misc_feature 1..20: note = chemically synthesized
  source 1..20: mol_type = other DNA
gtcctgcattgcacagagac

SEQ ID NO: 72151 - DNA, 20 bp, synthetic construct
  misc_feature 1..20: note = chemically synthesized
  source 1..20: mol_type = other DNA
cattgcacagagacccgtgc

SEQ ID NO: 72152 - DNA, 20 bp, synthetic construct
  misc_feature 1..20: note = chemically synthesized
  source 1..20: mol_type = other DNA
ctttgaatctcaagtgaata

SEQ ID NO: 72153 - DNA, 20 bp, synthetic construct
  misc_feature 1..20: note = chemically synthesized
  source 1..20: mol_type = other DNA
ctttctctatttctttctca

SEQ ID NO: 72154 - DNA, 20 bp, synthetic construct
  misc_feature 1..20: note = chemically synthesized
  source 1..20: mol_type = other DNA
aacctccgcctcccaggttc

SEQ ID NO: 72155 - DNA, 20 bp, synthetic construct
  misc_feature 1..20: note = chemically synthesized
  source 1..20: mol_type = other DNA
ttttgtatttttattagaga

SEQ ID NO: 72156 - DNA, 20 bp, synthetic construct
  misc_feature 1..20: note = chemically synthesized
  source 1..20: mol_type = other DNA
tgcctcagccacccaaagtg

SEQ ID NO: 72157 - DNA, 20 bp, synthetic construct
  misc_feature 1..20: note = chemically synthesized
  source 1..20: mol_type = other DNA
aaccttcccttgagctcctt

SEQ ID NO: 72158 - DNA, 20 bp, synthetic construct
  misc_feature 1..20: note = chemically synthesized
  source 1..20: mol_type = other DNA
gctccttttcagattcttcc

SEQ ID NO: 72159 - DNA, 20 bp, synthetic construct
  misc_feature 1..20: note = chemically synthesized
  source 1..20: mol_type = other DNA
ctttgtcttctatactttcc

SEQ ID NO: 72160 - DNA, 20 bp, synthetic construct
  misc_feature 1..20: note = chemically synthesized
  source 1..20: mol_type = other DNA
actttcctactgattttcct

SEQ ID NO: 72161 - DNA, 20 bp, synthetic construct
  misc_feature 1..20: note = chemically synthesized
  source 1..20: mol_type = other DNA
ctcatccttaacttcctact

SEQ ID NO: 72162 - DNA, 20 bp, synthetic construct
  misc_feature 1..20: note = chemically synthesized
  source 1..20: mol_type = other DNA
cttgctctatcctcttcaca

SEQ ID NO: 72163 - DNA, 20 bp, synthetic construct
  misc_feature 1..20: note = chemically synthesized
  source 1..20: mol_type = other DNA
ccattaacagcccccaaaca

SEQ ID NO: 72164 - DNA, 20 bp, synthetic construct
  misc_feature 1..20: note = chemically synthesized
  source 1..20: mol_type = other DNA
tagccagcacctagcagttc

SEQ ID NO: 72165 - DNA, 20 bp, synthetic construct
  misc_feature 1..20: note = chemically synthesized
  source 1..20: mol_type = other DNA
tgtgggtaatggaggtgatg

SEQ ID NO: 72166 - DNA, 20 bp, synthetic construct
  misc_feature 1..20: note = chemically synthesized
  source 1..20: mol_type = other DNA
ggattataatatctgccctc

SEQ ID NO: 72167 - DNA, 20 bp, synthetic construct
  misc_feature 1..20: note = chemically synthesized
  source 1..20: mol_type = other DNA
ttacaggacaatttaaatgt

SEQ ID NO: 72168 - DNA, 20 bp, synthetic construct
  misc_feature 1..20: note = chemically synthesized
  source 1..20: mol_type = other DNA
tttgggttgaataaaatcag

SEQ ID NO: 72169 - DNA, 20 bp, synthetic construct
  misc_feature 1..20: note = chemically synthesized
  source 1..20: mol_type = other DNA
ggaggtgtgttaagacagta

SEQ ID NO: 72170 - DNA, 20 bp, synthetic construct
  misc_feature 1..20: note = chemically synthesized
  source 1..20: mol_type = other DNA
cgatgtcatgtgcatctcga

SEQ ID NO: 72171 - DNA, 20 bp, synthetic construct
  misc_feature 1..20: note = chemically synthesized
  source 1..20: mol_type = other DNA
gataatgtttttgtgtatca

SEQ ID NO: 72172 - DNA, 20 bp, synthetic construct
  misc_feature 1..20: note = chemically synthesized
  source 1..20: mol_type = other DNA
catctaaatgcatctctcca

SEQ ID NO: 72173 - DNA, 20 bp, synthetic construct
  misc_feature 1..20: note = chemically synthesized
  source 1..20: mol_type = other DNA
tctccacagcgatttctaca

SEQ ID NO: 72174 - DNA, 20 bp, synthetic construct
  misc_feature 1..20: note = chemically synthesized
  source 1..20: mol_type = other DNA
catgccgggaccagccatgc

SEQ ID NO: 72175 - DNA, 20 bp, synthetic construct
  misc_feature 1..20: note = chemically synthesized
  source 1..20: mol_type = other DNA
catcagtgtatgctctatac

SEQ ID NO: 72176 - DNA, 20 bp, synthetic construct
  misc_feature 1..20: note = chemically synthesized
  source 1..20: mol_type = other DNA
accagcccttctggttcact

SEQ ID NO: 72177 - DNA, 20 bp, synthetic construct
  misc_feature 1..20: note = chemically synthesized
  source 1..20: mol_type = other DNA
tgaattcaaggttattacaa

SEQ ID NO: 72178 - DNA, 20 bp, synthetic construct
  misc_feature 1..20: note = chemically synthesized
  source 1..20: mol_type = other DNA
caagcatgattattgacaca

SEQ ID NO: 72179 - DNA, 20 bp, synthetic construct
  misc_feature 1..20: note = chemically synthesized
  source 1..20: mol_type = other DNA
attgagtgtcccttatttgc

SEQ ID NO: 72180 - DNA, 20 bp, synthetic construct
  misc_feature 1..20: note = chemically synthesized
  source 1..20: mol_type = other DNA
cttcatttttttccctctct

SEQ ID NO: 72181 - DNA, 20 bp, synthetic construct
  misc_feature 1..20: note = chemically synthesized
  source 1..20: mol_type = other DNA
tgtatccaccatagaagcta

SEQ ID NO: 72182 - DNA, 20 bp, synthetic construct
  misc_feature 1..20: note = chemically synthesized
  source 1..20: mol_type = other DNA
aggtaacaaagtcctgtgag

SEQ ID NO: 72183 - DNA, 20 bp, synthetic construct
  misc_feature 1..20: note = chemically synthesized
  source 1..20: mol_type = other DNA
tgtcatatgctggatgggca

SEQ ID NO: 72184 - DNA, 20 bp, synthetic construct
  misc_feature 1..20: note = chemically synthesized
  source 1..20: mol_type = other DNA
gagagacacataaatacctc

SEQ ID NO: 72185 - DNA, 20 bp, synthetic construct
  misc_feature 1..20: note = chemically synthesized
  source 1..20: mol_type = other DNA
acacataaatacctctcacg

SEQ ID NO: 72186 - DNA, 20 bp, synthetic construct
  misc_feature 1..20: note = chemically synthesized
  source 1..20: mol_type = other DNA
ctcctactctcttcaaagca

SEQ ID NO: 72187 - DNA, 20 bp, synthetic construct
  misc_feature 1..20: note = chemically synthesized
  source 1..20: mol_type = other DNA
atcatagccttaccatgacc

SEQ ID NO: 72188 - DNA, 20 bp, synthetic construct
  misc_feature 1..20: note = chemically synthesized
  source 1..20: mol_type = other DNA
catgacctcctgtttctgca

SEQ ID NO: 72189 - DNA, 20 bp, synthetic construct
  misc_feature 1..20: note = chemically synthesized
  source 1..20: mol_type = other DNA
tccatatcaccccaaattcc

SEQ ID NO: 72190 - DNA, 20 bp, synthetic construct
  misc_feature 1..20: note = chemically synthesized
  source 1..20: mol_type = other DNA
attccaatggttttgtgaag

SEQ ID NO: 72191 - DNA, 20 bp, synthetic construct
  misc_feature 1..20: note = chemically synthesized
  source 1..20: mol_type = other DNA
tcaaactttgtcatagctag

SEQ ID NO: 72192 - DNA, 20 bp, synthetic construct
  misc_feature 1..20: note = chemically synthesized
  source 1..20: mol_type = other DNA
ctagatgagctttttgaact

SEQ ID NO: 72193 - DNA, 20 bp, synthetic construct
  misc_feature 1..20: note = chemically synthesized
  source 1..20: mol_type = other DNA
aaaatattttgcccttaggt

SEQ ID NO: 72194 - DNA, 20 bp, synthetic construct
  misc_feature 1..20: note = chemically synthesized
  source 1..20: mol_type = other DNA
ggcattcttccattcctaac

SEQ ID NO: 72195 - DNA, 20 bp, synthetic construct
  misc_feature 1..20: note = chemically synthesized
  source 1..20: mol_type = other DNA
atgtcatgctgagtgggggc

SEQ ID NO: 72196 - DNA, 20 bp, synthetic construct
  misc_feature 1..20: note = chemically synthesized
  source 1..20: mol_type = other DNA
gggaacataattgctatggt

SEQ ID NO: 72197 - DNA, 20 bp, synthetic construct
  misc_feature 1..20: note = chemically synthesized
  source 1..20: mol_type = other DNA
tggatgtattgcatatggtc

SEQ ID NO: 72198 - DNA, 20 bp, synthetic construct
  misc_feature 1..20: note = chemically synthesized
  source 1..20: mol_type = other DNA
tcctcatgaaaatgctactt

SEQ ID NO: 72199 - DNA, 20 bp, synthetic construct
  misc_feature 1..20: note = chemically synthesized
  source 1..20: mol_type = other DNA
ttgttctttttctgtgtcac

SEQ ID NO: 72200 - DNA, 20 bp, synthetic construct
  misc_feature 1..20: note = chemically synthesized
  source 1..20: mol_type = other DNA
cacactcaaaaacttggtat

SEQ ID NO: 72201 - DNA, 20 bp, synthetic construct
  misc_feature 1..20: note = chemically synthesized
  source 1..20: mol_type = other DNA
tcaaaaacttggtatctgtg

SEQ ID NO: 72202 - DNA, 20 bp, synthetic construct
  misc_feature 1..20: note = chemically synthesized
  source 1..20: mol_type = other DNA
tggagctgagtggtggtgat

SEQ ID NO: 72203 - DNA, 20 bp, synthetic construct
  misc_feature 1..20: note = chemically synthesized
  source 1..20: mol_type = other DNA
tgagtggtggtgatgtgtgt

SEQ ID NO: 72204 - DNA, 20 bp, synthetic construct
  misc_feature 1..20: note = chemically synthesized
  source 1..20: mol_type = other DNA
tgtgtttatgattgtgtgtg

SEQ ID NO: 72205 - DNA, 20 bp, synthetic construct
  misc_feature 1..20: note = chemically synthesized
  source 1..20: mol_type = other DNA
tgtatgtgtgtcaagaggtt

SEQ ID NO: 72206 - DNA, 20 bp, synthetic construct
  misc_feature 1..20: note = chemically synthesized
  source 1..20: mol_type = other DNA
ggcttaaaggaacaattaat

SEQ ID NO: 72207 - DNA, 20 bp, synthetic construct
  misc_feature 1..20: note = chemically synthesized
  source 1..20: mol_type = other DNA
taggatcatgtactcaacac

SEQ ID NO: 72208 - DNA, 20 bp, synthetic construct
  misc_feature 1..20: note = chemically synthesized
  source 1..20: mol_type = other DNA
tgagatcctgtattgatgaa

SEQ ID NO: 72209 - DNA, 20 bp, synthetic construct
  misc_feature 1..20: note = chemically synthesized
  source 1..20: mol_type = other DNA
atcattctgttcgtaaaact

SEQ ID NO: 72210 - DNA, 20 bp, synthetic construct
  misc_feature 1..20: note = chemically synthesized
  source 1..20: mol_type = other DNA
ctcagggtctctttcttccc

SEQ ID NO: 72211 - DNA, 20 bp, synthetic construct
  misc_feature 1..20: note = chemically synthesized
  source 1..20: mol_type = other DNA
catttccttgggctcctttt

SEQ ID NO: 72212 - DNA, 20 bp, synthetic construct
  misc_feature 1..20: note = chemically synthesized
  source 1..20: mol_type = other DNA
gaaaacttaatttacaaaag

SEQ ID NO: 72213 - DNA, 20 bp, synthetic construct
  misc_feature 1..20: note = chemically synthesized
  source 1..20: mol_type = other DNA
gacttctgttatttcttatc

SEQ ID NO: 72214 - DNA, 20 bp, synthetic construct
  misc_feature 1..20: note = chemically synthesized
  source 1..20: mol_type = other DNA
atatctaacaatgttatcta

SEQ ID NO: 72215 - DNA, 20 bp, synthetic construct
  misc_feature 1..20: note = chemically synthesized
  source 1..20: mol_type = other DNA
tgattcatagtatccagtag

SEQ ID NO: 72216 - DNA, 20 bp, synthetic construct
  misc_feature 1..20: note = chemically synthesized
  source 1..20: mol_type = other DNA
aaattcctgaccatcttcgt

SEQ ID NO: 72217 - DNA, 20 bp, synthetic construct
  misc_feature 1..20: note = chemically synthesized
  source 1..20: mol_type = other DNA
cgtagttgattatggctctg

SEQ ID NO: 72218 - DNA, 20 bp, synthetic construct
  misc_feature 1..20: note = chemically synthesized
  source 1..20: mol_type = other DNA
tccagcaccattttcatctg

SEQ ID NO: 72219 - DNA, 20 bp, synthetic construct
  misc_feature 1..20: note = chemically synthesized
  source 1..20: mol_type = other DNA
accaacaagctctctctgac

SEQ ID NO: 72220 - DNA, 20 bp, synthetic construct
  misc_feature 1..20: note = chemically synthesized
  source 1..20: mol_type = other DNA
ctctctctgactttggttta

SEQ ID NO: 72221 - DNA, 20 bp, synthetic construct
  misc_feature 1..20: note = chemically synthesized
  source 1..20: mol_type = other DNA
taaagcattgtgcctcatgt

SEQ ID NO: 72222 - DNA, 20 bp, synthetic construct
  misc_feature 1..20: note = chemically synthesized
  source 1..20: mol_type = other DNA
gcattgtgcctcatgtcaaa

SEQ ID NO: 72223 - DNA, 20 bp, synthetic construct
  misc_feature 1..20: note = chemically synthesized
  source 1..20: mol_type = other DNA
atctgacactaatctatttg

SEQ ID NO: 72224 - DNA, 20 bp, synthetic construct
  misc_feature 1..20: note = chemically synthesized
  source 1..20: mol_type = other DNA
cacatagaggcaaagaggaa

SEQ ID NO: 72225 - DNA, 20 bp, synthetic construct
  misc_feature 1..20: note = chemically synthesized
  source 1..20: mol_type = other DNA
gagatatcattctgtattcc

SEQ ID NO: 72226 - DNA, 20 bp, synthetic construct
  misc_feature 1..20: note = chemically synthesized
  source 1..20: mol_type = other DNA
tgtattcccgtggattttca

SEQ ID NO: 72227 - DNA, 20 bp, synthetic construct
  misc_feature 1..20: note = chemically synthesized
  source 1..20: mol_type = other DNA
tagggaatgaaaaaggagat

SEQ ID NO: 72228 - DNA, 20 bp, synthetic construct
  misc_feature 1..20: note = chemically synthesized
  source 1..20: mol_type = other DNA
cctcttctaggaatttgcaa

SEQ ID NO: 72229 - DNA, 20 bp, synthetic construct
  misc_feature 1..20: note = chemically synthesized
  source 1..20: mol_type = other DNA
attattcagaagccaagttc

SEQ ID NO: 72230 - DNA, 20 bp, synthetic construct
  misc_feature 1..20: note = chemically synthesized
  source 1..20: mol_type = other DNA
ttttagggagtctttgggat

SEQ ID NO: 72231 - DNA, 20 bp, synthetic construct
  misc_feature 1..20: note = chemically synthesized
  source 1..20: mol_type = other DNA
gaagccaagctgcaaagaaa

SEQ ID NO: 72232 - DNA, 20 bp, synthetic construct
  misc_feature 1..20: note = chemically synthesized
  source 1..20: mol_type = other DNA
cttctttattctcccagcct

SEQ ID NO: 72233 - DNA, 20 bp, synthetic construct
  misc_feature 1..20: note = chemically synthesized
  source 1..20: mol_type = other DNA
aactttggaacaggagtcgc

SEQ ID NO: 72234 - DNA, 20 bp, synthetic construct
  misc_feature 1..20: note = chemically synthesized
  source 1..20: mol_type = other DNA
aattagccacatctccagaa

SEQ ID NO: 72235 - DNA, 20 bp, synthetic construct
  misc_feature 1..20: note = chemically synthesized
  source 1..20: mol_type = other DNA
agggaggatggcctttttgc

SEQ ID NO: 72236 - DNA, 20 bp, synthetic construct
  misc_feature 1..20: note = chemically synthesized
  source 1..20: mol_type = other DNA
ctttcttttattattatact

SEQ ID NO: 72237 - DNA, 20 bp, synthetic construct
  misc_feature 1..20: note = chemically synthesized
  source 1..20: mol_type = other DNA
agggtacatttgcacaacgt

SEQ ID NO: 72238 - DNA, 20 bp, synthetic construct
  misc_feature 1..20: note = chemically synthesized
  source 1..20: mol_type = other DNA
cacctatgagtgagaacatg

SEQ ID NO: 72239 - DNA, 20 bp, synthetic construct
  misc_feature 1..20: note = chemically synthesized
  source 1..20: mol_type = other DNA
atgagtgagaacatgcagtg

SEQ ID NO: 72240 - DNA, 20 bp, synthetic construct
  misc_feature 1..20: note = chemically synthesized
  source 1..20: mol_type = other DNA
tgtttggtttttgtccttgc

SEQ ID NO: 72241 - DNA, 20 bp, synthetic construct
  misc_feature 1..20: note = chemically synthesized
  source 1..20: mol_type = other DNA
tgcgatagtttgctgagaat

SEQ ID NO: 72242 - DNA, 20 bp, synthetic construct
  misc_feature 1..20: note = chemically synthesized
  source 1..20: mol_type = other DNA
gtttgctgagaatgatggtt

SEQ ID NO: 72243 - DNA, 20 bp, synthetic construct
  misc_feature 1..20: note = chemically synthesized
  source 1..20: mol_type = other DNA
tattccatggtgtatatgtg

SEQ ID NO: 72244 - DNA, 20 bp, synthetic construct
  misc_feature 1..20: note = chemically synthesized
  source 1..20: mol_type = other DNA
gtgcatgtgtctttatagca

SEQ ID NO: 72245 - DNA, 20 bp, synthetic construct
  misc_feature 1..20: note = chemically synthesized
  source 1..20: mol_type = other DNA
ctgacttccacaatggttga

SEQ ID NO: 72246 - DNA, 20 bp, synthetic construct
  misc_feature 1..20: note = chemically synthesized
  source 1..20: mol_type = other DNA
ttcacatcctctccagcacc

SEQ ID NO: 72247 - DNA, 20 bp, synthetic construct
  misc_feature 1..20: note = chemically synthesized
  source 1..20: mol_type = other DNA
ggtgtgagatggtatctcac

SEQ ID NO: 72248 - DNA, 20 bp, synthetic construct
  misc_feature 1..20: note = chemically synthesized
  source 1..20: mol_type = other DNA
gagatggtatctcactgtgg

SEQ ID NO: 72249 - DNA, 20 bp, synthetic construct
  misc_feature 1..20: note = chemically synthesized
  source 1..20: mol_type = other DNA
ctttgcccactttttgatgg

SEQ ID NO: 72250 - DNA, 20 bp, synthetic construct
  misc_feature 1..20: note = chemically synthesized
  source 1..20: mol_type = other DNA
gggttgtttttttcttgtaa

SEQ ID NO: 72251 - DNA, 20 bp, synthetic construct
  misc_feature 1..20: note = chemically synthesized
  source 1..20: mol_type = other DNA
gtaaatttgtttgagttcat

SEQ ID NO: 72252 - DNA, 20 bp, synthetic construct
  misc_feature 1..20: note = chemically synthesized
  source 1..20: mol_type = other DNA
tattagccctttgtcggatg

SEQ ID NO: 72253 - DNA, 20 bp, synthetic construct
  misc_feature 1..20: note = chemically synthesized
  source 1..20: mol_type = other DNA
tgttgcctgttcactctgat

SEQ ID NO: 72254 - DNA, 20 bp, synthetic construct
  misc_feature 1..20: note = chemically synthesized
  source 1..20: mol_type = other DNA
cttttgctgtgcagaagctc

SEQ ID NO: 72255 - DNA, 20 bp, synthetic construct
  misc_feature 1..20: note = chemically synthesized
  source 1..20: mol_type = other DNA
attagatcccatttgtccat

SEQ ID NO: 72256 - DNA, 20 bp, synthetic construct
  misc_feature 1..20: note = chemically synthesized
  source 1..20: mol_type = other DNA
tccattttggcttttgttgc

SEQ ID NO: 72257 - DNA, 20 bp, synthetic construct
  misc_feature 1..20: note = chemically synthesized
  source 1..20: mol_type = other DNA
gcttttgttgccattgcttt

SEQ ID NO: 72258 - DNA, 20 bp, synthetic construct
  misc_feature 1..20: note = chemically synthesized
  source 1..20: mol_type = other DNA
tatgtcctgaatggtattgc

SEQ ID NO: 72259 - DNA, 20 bp, synthetic construct
  misc_feature 1..20: note = chemically synthesized
  source 1..20: mol_type = other DNA
gtattgcctaggttttcttc

SEQ ID NO: 72260 - DNA, 20 bp, synthetic construct
  misc_feature 1..20: note = chemically synthesized
  source 1..20: mol_type = other DNA
aggttttcttccagagtttt

SEQ ID NO: 72261 - DNA, 20 bp, synthetic construct
  misc_feature 1..20: note = chemically synthesized
  source 1..20: mol_type = other DNA
tataaggtgtaagaaaggga

SEQ ID NO: 72262 - DNA, 20 bp, synthetic construct
  misc_feature 1..20: note = chemically synthesized
  source 1..20: mol_type = other DNA
gtgtaagaaagggatccagt

SEQ ID NO: 72263 - DNA, 20 bp, synthetic construct
  misc_feature 1..20: note = chemically synthesized
  source 1..20: mol_type = other DNA
cagctttctgcgtatggtta

SEQ ID NO: 72264 - DNA, 20 bp, synthetic construct
  misc_feature 1..20: note = chemically synthesized
  source 1..20: mol_type = other DNA
aaatagggaatcctttcccc

SEQ ID NO: 72265 - DNA, 20 bp, synthetic construct
  misc_feature 1..20: note = chemically synthesized
  source 1..20: mol_type = other DNA
ttccccatttgttttttttg

SEQ ID NO: 72266 - DNA, 20 bp, synthetic construct
  misc_feature 1..20: note = chemically synthesized
  source 1..20: mol_type = other DNA
tctgttccattggtctatat

SEQ ID NO: 72267 - DNA, 20 bp, synthetic construct
  misc_feature 1..20: note = chemically synthesized
  source 1..20: mol_type = other DNA
ctgttttggtaccagtacca

SEQ ID NO: 72268 - DNA, 20 bp, synthetic construct
  misc_feature 1..20: note = chemically synthesized
  source 1..20: mol_type = other DNA
tggttactgtagccttgtag

SEQ ID NO: 72269 - DNA, 20 bp, synthetic construct
  misc_feature 1..20: note = chemically synthesized
  source 1..20: mol_type = other DNA
aagtcaggtagcgtgatgcc

SEQ ID NO: 72270 - DNA, 20 bp, synthetic construct
  misc_feature 1..20: note = chemically synthesized
  source 1..20: mol_type = other DNA
gatgcctccagctttgttct

SEQ ID NO: 72271 - DNA, 20 bp, synthetic construct
  misc_feature 1..20: note = chemically synthesized
  source 1..20: mol_type = other DNA
tccagctttgttcttttggc

SEQ ID NO: 72272 - DNA, 20 bp, synthetic construct
  misc_feature 1..20: note = chemically synthesized
  source 1..20: mol_type = other DNA
tggttccatatgaactttaa

SEQ ID NO: 72273 - DNA, 20 bp, synthetic construct
  misc_feature 1..20: note = chemically synthesized
  source 1..20: mol_type = other DNA
attctgtgaagaaagtcatt

SEQ ID NO: 72274 - DNA, 20 bp, synthetic construct
  misc_feature 1..20: note = chemically synthesized
  source 1..20: mol_type = other DNA
ctgtatggccattttcatga

SEQ ID NO: 72275 - DNA, 20 bp, synthetic construct
  misc_feature 1..20: note = chemically synthesized
  source 1..20: mol_type = other DNA
tgagcatggaatgttcttcc

SEQ ID NO: 72276 - DNA, 20 bp, synthetic construct
  misc_feature 1..20: note = chemically synthesized
  source 1..20: mol_type = other DNA
cttcttttatttcattcagc

SEQ ID NO: 72277 - DNA, 20 bp, synthetic construct
  misc_feature 1..20: note = chemically synthesized
  source 1..20: mol_type = other DNA
gtccttcacctctcttgtaa

SEQ ID NO: 72278 - DNA, 20 bp, synthetic construct
  misc_feature 1..20: note = chemically synthesized
  source 1..20: mol_type = other DNA
aattgtgaatgggagttccc

SEQ ID NO: 72279 - DNA, 20 bp, synthetic construct
  misc_feature 1..20: note = chemically synthesized
  source 1..20: mol_type = other DNA
agttccctcatgatttggct

SEQ ID NO: 72280 - DNA, 20 bp, synthetic construct
  misc_feature 1..20: note = chemically synthesized
  source 1..20: mol_type = other DNA
tgtctgttattggtgtataa

SEQ ID NO: 72281 - DNA, 20 bp, synthetic construct
  misc_feature 1..20: note = chemically synthesized
  source 1..20: mol_type = other DNA
ttattggtgtataagaatgc

SEQ ID NO: 72282 - DNA, 20 bp, synthetic construct
  misc_feature 1..20: note = chemically synthesized
  source 1..20: mol_type = other DNA
gaatgcttgtgatttttgca

SEQ ID NO: 72283 - DNA, 20 bp, synthetic construct
  misc_feature 1..20: note = chemically synthesized
  source 1..20: mol_type = other DNA
agactttgctgaagttgcct

SEQ ID NO: 72284 - DNA, 20 bp, synthetic construct
  misc_feature 1..20: note = chemically synthesized
  source 1..20: mol_type = other DNA
gacattttgggctgagacag

SEQ ID NO: 72285 - DNA, 20 bp, synthetic construct
  misc_feature 1..20: note = chemically synthesized
  source 1..20: mol_type = other DNA
agagggcatccctgtcttgt

SEQ ID NO: 72286 - DNA, 20 bp, synthetic construct
  misc_feature 1..20: note = chemically synthesized
  source 1..20: mol_type = other DNA
cttgtgccagttttcaaagg

SEQ ID NO: 72287 - DNA, 20 bp, synthetic construct
  misc_feature 1..20: note = chemically synthesized
  source 1..20: mol_type = other DNA
cagttttcaaagggaatgct

SEQ ID NO: 72288 - DNA, 20 bp, synthetic construct
  misc_feature 1..20: note = chemically synthesized
  source 1..20: mol_type = other DNA
cattcagtatgatattggct

SEQ ID NO: 72289 - DNA, 20 bp, synthetic construct
  misc_feature 1..20: note = chemically synthesized
  source 1..20: mol_type = other DNA
ccatcaatacctaatttatt

SEQ ID NO: 72290 - DNA, 20 bp, synthetic construct
  misc_feature 1..20: note = chemically synthesized
  source 1..20: mol_type = other DNA
tgcatctattgagataatca

SEQ ID NO: 72291 - DNA, 20 bp, synthetic construct
  misc_feature 1..20: note = chemically synthesized
  source 1..20: mol_type = other DNA
catgtggtttttgtctttgg

SEQ ID NO: 72292 - DNA, 20 bp, synthetic construct
  misc_feature 1..20: note = chemically synthesized
  source 1..20: mol_type = other DNA
gtctttggttctgtttatat

SEQ ID NO: 72293 - DNA, 20 bp, synthetic construct
  misc_feature 1..20: note = chemically synthesized
  source 1..20: mol_type = other DNA
tttatatgctggattacatt

SEQ ID NO: 72294 - DNA, 20 bp, synthetic construct
  misc_feature 1..20: note = chemically synthesized
  source 1..20: mol_type = other DNA
agcccacttgatcatggtgg

SEQ ID NO: 72295 - DNA, 20 bp, synthetic construct
  misc_feature 1..20: note = chemically synthesized
  source 1..20: mol_type = other DNA
gataagcttttggatgtgct

SEQ ID NO: 72296 - DNA, 20 bp, synthetic construct
  misc_feature 1..20: note = chemically synthesized
  source 1..20: mol_type = other DNA
gcttttggatgtgctgctgg

SEQ ID NO: 72297 - DNA, 20 bp, synthetic construct
  misc_feature 1..20: note = chemically synthesized
  source 1..20: mol_type = other DNA
ttgctttgccagtattttat

SEQ ID NO: 72298 - DNA, 20 bp, synthetic construct
  misc_feature 1..20: note = chemically synthesized
  source 1..20: mol_type = other DNA
ctttttttgttgtgtctctg

SEQ ID NO: 72299 - DNA, 20 bp, synthetic construct
  misc_feature 1..20: note = chemically synthesized
  source 1..20: mol_type = other DNA
ggcctcataaaatgagttag

SEQ ID NO: 72300 - DNA, 20 bp, synthetic construct
  misc_feature 1..20: note = chemically synthesized
  source 1..20: mol_type = other DNA
gggaggattccctcttttac

SEQ ID NO: 72301 - DNA, 20 bp, synthetic construct
  misc_feature 1..20: note = chemically synthesized
  source 1..20: mol_type = other DNA
cctcttttactattgattcg

SEQ ID NO: 72302 - DNA, 20 bp, synthetic construct
  misc_feature 1..20: note = chemically synthesized
  source 1..20: mol_type = other DNA
tgtgactccatctggtcctg

SEQ ID NO: 72303 - DNA, 20 bp, synthetic construct
  misc_feature 1..20: note = chemically synthesized
  source 1..20: mol_type = other DNA
gatcctgttattggtctatt

SEQ ID NO: 72304 - DNA, 20 bp, synthetic construct
  misc_feature 1..20: note = chemically synthesized
  source 1..20: mol_type = other DNA
attcagagattcaacttctt

SEQ ID NO: 72305 - DNA, 20 bp, synthetic construct
  misc_feature 1..20: note = chemically synthesized
  source 1..20: mol_type = other DNA
caaggaatttatccatttct

SEQ ID NO: 72306 - DNA, 20 bp, synthetic construct
  misc_feature 1..20: note = chemically synthesized
  source 1..20: mol_type = other DNA
tatccatttcttctagattt

SEQ ID NO: 72307 - DNA, 20 bp, synthetic construct
  misc_feature 1..20: note = chemically synthesized
  source 1..20: mol_type = other DNA
tttctagtttatttgtgtag

SEQ ID NO: 72308 - DNA, 20 bp, synthetic construct
  misc_feature 1..20: note = chemically synthesized
  source 1..20: mol_type = other DNA
tgtttatagtattctctgat

SEQ ID NO: 72309 - DNA, 20 bp, synthetic construct
  misc_feature 1..20: note = chemically synthesized
  source 1..20: mol_type = other DNA
tatcattttttattgcatct

SEQ ID NO: 72310 - DNA, 20 bp, synthetic construct
  misc_feature 1..20: note = chemically synthesized
  source 1..20: mol_type = other DNA
tttgttgatctttttgaaaa

SEQ ID NO: 72311 - DNA, 20 bp, synthetic construct
  misc_feature 1..20: note = chemically synthesized
  source 1..20: mol_type = other DNA
atctttttgaaaaaccagct

SEQ ID NO: 72312 - DNA, 20 bp, synthetic construct
  misc_feature 1..20: note = chemically synthesized
  source 1..20: mol_type = other DNA
gaaaaaccagcttctggatt

SEQ ID NO: 72313 - DNA, 20 bp, synthetic construct
  misc_feature 1..20: note = chemically synthesized
  source 1..20: mol_type = other DNA
ctggattcattgattttttg

SEQ ID NO: 72314 - DNA, 20 bp, synthetic construct
  misc_feature 1..20: note = chemically synthesized
  source 1..20: mol_type = other DNA
ctctatttccttcagttctg

SEQ ID NO: 72315 - DNA, 20 bp, synthetic construct
  misc_feature 1..20: note = chemically synthesized
  source 1..20: mol_type = other DNA
tgccttctgctagcatttga

SEQ ID NO: 72316 - DNA, 20 bp, synthetic construct
  misc_feature 1..20: note = chemically synthesized
  source 1..20: mol_type = other DNA
tagcatttgaatgtgtttgc

SEQ ID NO: 72317 - DNA, 20 bp, synthetic construct
  misc_feature 1..20: note = chemically synthesized
  source 1..20: mol_type = other DNA
gggtgtcaattttagatctt

SEQ ID NO: 72318 - DNA, 20 bp, synthetic construct
  misc_feature 1..20: note = chemically synthesized
  source 1..20: mol_type = other DNA
tctttcctgctttctcttct

SEQ ID NO: 72319 - DNA, 20 bp, synthetic construct
  misc_feature 1..20: note = chemically synthesized
  source 1..20: mol_type = other DNA
gctataaatttccctctaca

SEQ ID NO: 72320 - DNA, 20 bp, synthetic construct
  misc_feature 1..20: note = chemically synthesized
  source 1..20: mol_type = other DNA
acactgctttgaatgtgtcc

SEQ ID NO: 72321 - DNA, 20 bp, synthetic construct
  misc_feature 1..20: note = chemically synthesized
  source 1..20: mol_type = other DNA
agtcattcaggagcaatttg

SEQ ID NO: 72322 - DNA, 20 bp, synthetic construct
  misc_feature 1..20: note = chemically synthesized
  source 1..20: mol_type = other DNA
gttcggtttccatgtagttg

SEQ ID NO: 72323 - DNA, 20 bp, synthetic construct
  misc_feature 1..20: note = chemically synthesized
  source 1..20: mol_type = other DNA
atgtagttgagcggttttga

SEQ ID NO: 72324 - DNA, 20 bp, synthetic construct
  misc_feature 1..20: note = chemically synthesized
  source 1..20: mol_type = other DNA
tgagtttcttaatcctgagt

SEQ ID NO: 72325 - DNA, 20 bp, synthetic construct
  misc_feature 1..20: note = chemically synthesized
  source 1..20: mol_type = other DNA
tttcttaatcctgagttcta

SEQ ID NO: 72326 - DNA, 20 bp, synthetic construct
  misc_feature 1..20: note = chemically synthesized
  source 1..20: mol_type = other DNA
gattgcactgtggtctgaga

SEQ ID NO: 72327 - DNA, 20 bp, synthetic construct
  misc_feature 1..20: note = chemically synthesized
  source 1..20: mol_type = other DNA
gttcttttacatttgctgag

SEQ ID NO: 72328 - DNA, 20 bp, synthetic construct
  misc_feature 1..20: note = chemically synthesized
  source 1..20: mol_type = other DNA
gctgaaaagaatgtatattc

SEQ ID NO: 72329 - DNA, 20 bp, synthetic construct
  misc_feature 1..20: note = chemically synthesized
  source 1..20: mol_type = other DNA
gttctgtagatgtctattag

SEQ ID NO: 72330 - DNA, 20 bp, synthetic construct
  misc_feature 1..20: note = chemically synthesized
  source 1..20: mol_type = other DNA
ctctttgtaggtctctaagg

SEQ ID NO: 72331 - DNA, 20 bp, synthetic construct
  misc_feature 1..20: note = chemically synthesized
  source 1..20: mol_type = other DNA
tgttcctgtattgggtgcat

SEQ ID NO: 72332 - DNA, 20 bp, synthetic construct
  misc_feature 1..20: note = chemically synthesized
  source 1..20: mol_type = other DNA
ctttgtctcttttgatcttt

SEQ ID NO: 72333 - DNA, 20 bp, synthetic construct
  misc_feature 1..20: note = chemically synthesized
  source 1..20: mol_type = other DNA
ttgatctttgttggtttaaa

SEQ ID NO: 72334 - DNA, 20 bp, synthetic construct
  misc_feature 1..20: note = chemically synthesized
  source 1..20: mol_type = other DNA
aaagcctgttttatcagaga

SEQ ID NO: 72335 - DNA, 20 bp, synthetic construct
  misc_feature 1..20: note = chemically synthesized
  source 1..20: mol_type = other DNA
ggattgcaacccctgccttt

SEQ ID NO: 72336 - DNA, 20 bp, synthetic construct
  misc_feature 1..20: note = chemically synthesized
  source 1..20: mol_type = other DNA
tgtgtgtgtgtgcacatgag

SEQ ID NO: 72337 - DNA, 20 bp, synthetic construct
  misc_feature 1..20: note = chemically synthesized
  source 1..20: mol_type = other DNA
ttattttgctcattagttga

SEQ ID NO: 72338 - DNA, 20 bp, synthetic construct
  misc_feature 1..20: note = chemically synthesized
  source 1..20: mol_type = other DNA
tcaatggtctttacaatttg

SEQ ID NO: 72339 - DNA, 20 bp, synthetic construct
  misc_feature 1..20: note = chemically synthesized
  source 1..20: mol_type = other DNA
cggttgtgcctttccatatt

SEQ ID NO: 72340 - DNA, 20 bp, synthetic construct
  misc_feature 1..20: note = chemically synthesized
  source 1..20: mol_type = other DNA
tgatgacaaaatctctcagc

SEQ ID NO: 72341 - DNA, 20 bp, synthetic construct
  misc_feature 1..20: note = chemically synthesized
  source 1..20: mol_type = other DNA
ttttatttctccttcactta

SEQ ID NO: 72342 - DNA, 20 bp, synthetic construct
  misc_feature 1..20: note = chemically synthesized
  source 1..20: mol_type = other DNA
tttctccttcacttatgaag

SEQ ID NO: 72343 - DNA, 20 bp, synthetic construct
  misc_feature 1..20: note = chemically synthesized
  source 1..20: mol_type = other DNA
aatattggcccccactctct

SEQ ID NO: 72344 - DNA, 20 bp, synthetic construct
  misc_feature 1..20: note = chemically synthesized
  source 1..20: mol_type = other DNA
ccccactctcttctggcttg

SEQ ID NO: 72345 - DNA, 20 bp, synthetic construct
  misc_feature 1..20: note = chemically synthesized
  source 1..20: mol_type = other DNA
agagatctgctgttattctg

SEQ ID NO: 72346 - DNA, 20 bp, synthetic construct
  misc_feature 1..20: note = chemically synthesized
  source 1..20: mol_type = other DNA
tttgaatgttgacctgcctt

SEQ ID NO: 72347 - DNA, 20 bp, synthetic construct
  misc_feature 1..20: note = chemically synthesized
  source 1..20: mol_type = other DNA
ctcctggataatatcctgca

SEQ ID NO: 72348 - DNA, 20 bp, synthetic construct
  misc_feature 1..20: note = chemically synthesized
  source 1..20: mol_type = other DNA
tttcaggtacaccaatcaga

SEQ ID NO: 72349 - DNA, 20 bp, synthetic construct
  misc_feature 1..20: note = chemically synthesized
  source 1..20: mol_type = other DNA
cacatagtcccatatttctt

SEQ ID NO: 72350 - DNA, 20 bp, synthetic construct
  misc_feature 1..20: note = chemically synthesized
  source 1..20: mol_type = other DNA
ttttttctctaaacttctct

SEQ ID NO: 72351 - DNA, 20 bp, synthetic construct
  misc_feature 1..20: note = chemically synthesized
  source 1..20: mol_type = other DNA
tcatcatgtagttctcatgc

SEQ ID NO: 72352 - DNA, 20 bp, synthetic construct
  misc_feature 1..20: note = chemically synthesized
  source 1..20: mol_type = other DNA
ccattagtctaatttatttt

SEQ ID NO: 72353 - DNA, 20 bp, synthetic construct
  misc_feature 1..20: note = chemically synthesized
  source 1..20: mol_type = other DNA
ttaacttttttgccatgggt

SEQ ID NO: 72354 - DNA, 20 bp, synthetic construct
  misc_feature 1..20: note = chemically synthesized
  source 1..20: mol_type = other DNA
agcttcctcctttagctcgg

SEQ ID NO: 72355 - DNA, 20 bp, synthetic construct
  misc_feature 1..20: note = chemically synthesized
  source 1..20: mol_type = other DNA
cttgtcaaagtcattctctg

SEQ ID NO: 72356 - DNA, 20 bp, synthetic construct
  misc_feature 1..20: note = chemically synthesized
  source 1..20: mol_type = other DNA
cctttggaggaggagaggca

SEQ ID NO: 72357 - DNA, 20 bp, synthetic construct
  misc_feature 1..20: note = chemically synthesized
  source 1..20: mol_type = other DNA
aggagaggcactctgatttt

SEQ ID NO: 72358 - DNA, 20 bp, synthetic construct
  misc_feature 1..20: note = chemically synthesized
  source 1..20: mol_type = other DNA
gcactctgatttttagagtt

SEQ ID NO: 72359 - DNA, 20 bp, synthetic construct
  misc_feature 1..20: note = chemically synthesized
  source 1..20: mol_type = other DNA
tagagtttccagtttttctg

SEQ ID NO: 72360 - DNA, 20 bp, synthetic construct
  misc_feature 1..20: note = chemically synthesized
  source 1..20: mol_type = other DNA
gctctgtttttccccatctt

SEQ ID NO: 72361 - DNA, 20 bp, synthetic construct
  misc_feature 1..20: note = chemically synthesized
  source 1..20: mol_type = other DNA
ttgatgatggtgacgtacag

SEQ ID NO: 72362 - DNA, 20 bp, synthetic construct
  misc_feature 1..20: note = chemically synthesized
  source 1..20: mol_type = other DNA
gtttttggtgtggatgtcct

SEQ ID NO: 72363 - DNA, 20 bp, synthetic construct
  misc_feature 1..20: note = chemically synthesized
  source 1..20: mol_type = other DNA
tgtggatgtcctttctgttt

SEQ ID NO: 72364 - DNA, 20 bp, synthetic construct
  misc_feature 1..20: note = chemically synthesized
  source 1..20: mol_type = other DNA
gttttccttctaacaggacc

SEQ ID NO: 72365 - DNA, 20 bp, synthetic construct
  misc_feature 1..20: note = chemically synthesized
  source 1..20: mol_type = other DNA
taacaggaccctcagcttgc

SEQ ID NO: 72366 - DNA, 20 bp, synthetic construct
  misc_feature 1..20: note = chemically synthesized
  source 1..20: mol_type = other DNA
ggtaattgttagaaatttcc

SEQ ID NO: 72367 - DNA, 20 bp, synthetic construct
  misc_feature 1..20: note = chemically synthesized
  source 1..20: mol_type = other DNA
actgaaaacataacttttac

SEQ ID NO: 72368 - DNA, 20 bp, synthetic construct
  misc_feature 1..20: note = chemically synthesized
  source 1..20: mol_type = other DNA
ggcataggagaagcaggtgc

SEQ ID NO: 72369 - DNA, 20 bp, synthetic construct
  misc_feature 1..20: note = chemically synthesized
  source 1..20: mol_type = other DNA
ccttgtcagcatactggtca

SEQ ID NO: 72370 - DNA, 20 bp, synthetic construct
  misc_feature 1..20: note = chemically synthesized
  source 1..20: mol_type = other DNA
ccagtttcatcatcacttca

SEQ ID NO: 72371 - DNA, 20 bp, synthetic construct
  misc_feature 1..20: note = chemically synthesized
  source 1..20: mol_type = other DNA
tactgtttgtaccaaagcac

SEQ ID NO: 72372 - DNA, 20 bp, synthetic construct
  misc_feature 1..20: note = chemically synthesized
  source 1..20: mol_type = other DNA
accacagtttccttatgaaa

SEQ ID NO: 72373 - DNA, 20 bp, synthetic construct
  misc_feature 1..20: note = chemically synthesized
  source 1..20: mol_type = other DNA
aaacttagcttcaaggctgg

SEQ ID NO: 72374 - DNA, 20 bp, synthetic construct
  misc_feature 1..20: note = chemically synthesized
  source 1..20: mol_type = other DNA
ttaaactcttcaaactttct

SEQ ID NO: 72375 - DNA, 20 bp, synthetic construct
  misc_feature 1..20: note = chemically synthesized
  source 1..20: mol_type = other DNA
ggcaggcactgtcatagtcc

SEQ ID NO: 72376 - DNA, 20 bp, synthetic construct
  misc_feature 1..20: note = chemically synthesized
  source 1..20: mol_type = other DNA
gcttcctgctgcacttggtg

SEQ ID NO: 72377 - DNA, 20 bp, synthetic construct
  misc_feature 1..20: note = chemically synthesized
  source 1..20: mol_type = other DNA
caagtcaggaaattggtcca

SEQ ID NO: 72378 - DNA, 20 bp, synthetic construct
  misc_feature 1..20: note = chemically synthesized
  source 1..20: mol_type = other DNA
gtgttagcaaggatgcatcc

SEQ ID NO: 72379 - DNA, 20 bp, synthetic construct
  misc_feature 1..20: note = chemically synthesized
  source 1..20: mol_type = other DNA
gcacagacttcacacagtga

SEQ ID NO: 72380 - DNA, 20 bp, synthetic construct
  misc_feature 1..20: note = chemically synthesized
  source 1..20: mol_type = other DNA
cgtcaaggtctcttgaatgc

SEQ ID NO: 72381 - DNA, 20 bp, synthetic construct
  misc_feature 1..20: note = chemically synthesized
  source 1..20: mol_type = other DNA
aaggtctcttgaatgccttt

SEQ ID NO: 72382 - DNA, 20 bp, synthetic construct
  misc_feature 1..20: note = chemically synthesized
  source 1..20: mol_type = other DNA
gttctctcaggtctggtacc

SEQ ID NO: 72383 - DNA, 20 bp, synthetic construct
  misc_feature 1..20: note = chemically synthesized
  source 1..20: mol_type = other DNA
gtctggtaccctctgcttct

SEQ ID NO: 72384 - DNA, 20 bp, synthetic construct
  misc_feature 1..20: note = chemically synthesized
  source 1..20: mol_type = other DNA
agttctggacatattcttca

SEQ ID NO: 72385 - DNA, 20 bp, synthetic construct
  misc_feature 1..20: note = chemically synthesized
  source 1..20: mol_type = other DNA
aactgtttgtcttttgtctc

SEQ ID NO: 72386 - DNA, 20 bp, synthetic construct
  misc_feature 1..20: note = chemically synthesized
  source 1..20: mol_type = other DNA
cttttgtctcagcagctttc

SEQ ID NO: 72387 - DNA, 20 bp, synthetic construct
  misc_feature 1..20: note = chemically synthesized
  source 1..20: mol_type = other DNA
agctttccctggcttctgga

SEQ ID NO: 72388 - DNA, 20 bp, synthetic construct
  misc_feature 1..20: note = chemically synthesized
  source 1..20: mol_type = other DNA
atcgggagcccagagctctg

SEQ ID NO: 72389 - DNA, 20 bp, synthetic construct
  misc_feature 1..20: note = chemically synthesized
  source 1..20: mol_type = other DNA
ctttatactagcctgctatg

SEQ ID NO: 72390 - DNA, 20 bp, synthetic construct
  misc_feature 1..20: note = chemically synthesized
  source 1..20: mol_type = other DNA
ggacctagagggtgagtcaa

SEQ ID NO: 72391 - DNA, 20 bp, synthetic construct
  misc_feature 1..20: note = chemically synthesized
  source 1..20: mol_type = other DNA
tcaagaaagattttctttga

SEQ ID NO: 72392 - DNA, 20 bp, synthetic construct
  misc_feature 1..20: note = chemically synthesized
  source 1..20: mol_type = other DNA
aaagcccaagggaagaaaga

SEQ ID NO: 72393 - DNA, 20 bp, synthetic construct
  misc_feature 1..20: note = chemically synthesized
  source 1..20: mol_type = other DNA
ttgtgaaggtattattttat

SEQ ID NO: 72394 - DNA, 20 bp, synthetic construct
  misc_feature 1..20: note = chemically synthesized
  source 1..20: mol_type = other DNA
cccactctccacatatgacc

SEQ ID NO: 72395 - DNA, 20 bp, synthetic construct
  misc_feature 1..20: note = chemically synthesized
  source 1..20: mol_type = other DNA
ctctccacatatgaccaact

SEQ ID NO: 72396 - DNA, 20 bp, synthetic construct
  misc_feature 1..20: note = chemically synthesized
  source 1..20: mol_type = other DNA
atctgaattagaaattatat

SEQ ID NO: 72397 - DNA, 20 bp, synthetic construct
  misc_feature 1..20: note = chemically synthesized
  source 1..20: mol_type = other DNA
attatttgataaatgttaac

SEQ ID NO: 72398 - DNA, 20 bp, synthetic construct
  misc_feature 1..20: note = chemically synthesized
  source 1..20: mol_type = other DNA
catcattttgaattgaggga

SEQ ID NO: 72399 - DNA, 20 bp, synthetic construct
  misc_feature 1..20: note = chemically synthesized
  source 1..20: mol_type = other DNA
tgaagaaagtaattgaggga

SEQ ID NO: 72400 - DNA, 20 bp, synthetic construct
  misc_feature 1..20: note = chemically synthesized
  source 1..20: mol_type = other DNA
aaataatgttctaagtagca

SEQ ID NO: 72401 - DNA, 20 bp, synthetic construct
  misc_feature 1..20: note = chemically synthesized
  source 1..20: mol_type = other DNA
ttctaagtagcagagggatt

SEQ ID NO: 72402 - DNA, 20 bp, synthetic construct
  misc_feature 1..20: note = chemically synthesized
  source 1..20: mol_type = other DNA
ctgatttccactgaaatgct

SEQ ID NO: 72403 - DNA, 20 bp, synthetic construct
  misc_feature 1..20: note = chemically synthesized
  source 1..20: mol_type = other DNA
tttccactgaaatgctcagg

SEQ ID NO: 72404 - DNA, 20 bp, synthetic construct
  misc_feature 1..20: note = chemically synthesized
  source 1..20: mol_type = other DNA
aacgaagtatgccactctga

SEQ ID NO: 72405 - DNA, 20 bp, synthetic construct
  misc_feature 1..20: note = chemically synthesized
  source 1..20: mol_type = other DNA
agtatgccactctgaatctg

SEQ ID NO: 72406 - DNA, 20 bp, synthetic construct
  misc_feature 1..20: note = chemically synthesized
  source 1..20: mol_type = other DNA
tgatgtgaacgacatgagga

SEQ ID NO: 72407 - DNA, 20 bp, synthetic construct
  misc_feature 1..20: note = chemically synthesized
  source 1..20: mol_type = other DNA
tgaaggtgatgtcagcacag

SEQ ID NO: 72408 - DNA, 20 bp, synthetic construct
  misc_feature 1..20: note = chemically synthesized
  source 1..20: mol_type = other DNA
cagacttattgagccccatt

SEQ ID NO: 72409 - DNA, 20 bp, synthetic construct
  misc_feature 1..20: note = chemically synthesized
  source 1..20: mol_type = other DNA
tgtataaagaagatattatt

SEQ ID NO: 72410 - DNA, 20 bp, synthetic construct
  misc_feature 1..20: note = chemically synthesized
  source 1..20: mol_type = other DNA
ttatttagggtttactctat

SEQ ID NO: 72411 - DNA, 20 bp, synthetic construct
  misc_feature 1..20: note = chemically synthesized
  source 1..20: mol_type = other DNA
tggtattatagggtggatgt

SEQ ID NO: 72412 - DNA, 20 bp, synthetic construct
  misc_feature 1..20: note = chemically synthesized
  source 1..20: mol_type = other DNA
cactattggaaaagcagata

SEQ ID NO: 72413 - DNA, 20 bp, synthetic construct
  misc_feature 1..20: note = chemically synthesized
  source 1..20: mol_type = other DNA
tacaataaaatagtaaattt

SEQ ID NO: 72414 - DNA, 20 bp, synthetic construct
  misc_feature 1..20: note = chemically synthesized
  source 1..20: mol_type = other DNA
cgtaagagtgacttacctgt

SEQ ID NO: 72415 - DNA, 20 bp, synthetic construct
  misc_feature 1..20: note = chemically synthesized
  source 1..20: mol_type = other DNA
gcacatagaactctaagttg

SEQ ID NO: 72416 - DNA, 20 bp, synthetic construct
  misc_feature 1..20: note = chemically synthesized
  source 1..20: mol_type = other DNA
tataaccctagttattgata

SEQ ID NO: 72417 - DNA, 20 bp, synthetic construct
  misc_feature 1..20: note = chemically synthesized
  source 1..20: mol_type = other DNA
ttgaagaataaacagtaaaa

SEQ ID NO: 72418 - DNA, 20 bp, synthetic construct
  misc_feature 1..20: note = chemically synthesized
  source 1..20: mol_type = other DNA
agtaaaatgtggatttgatg

SEQ ID NO: 72419 - DNA, 20 bp, synthetic construct
  misc_feature 1..20: note = chemically synthesized
  source 1..20: mol_type = other DNA
ttttaaaactatggaatctg

SEQ ID NO: 72420 - DNA, 20 bp, synthetic construct
  misc_feature 1..20: note = chemically synthesized
  source 1..20: mol_type = other DNA
ctctgtgactcattagaatt

SEQ ID NO: 72421 - DNA, 20 bp, synthetic construct
  misc_feature 1..20: note = chemically synthesized
  source 1..20: mol_type = other DNA
taggcccaccttctcttatg

SEQ ID NO: 72422 - DNA, 20 bp, synthetic construct
  misc_feature 1..20: note = chemically synthesized
  source 1..20: mol_type = other DNA
gcatattgatgtaaatttat

SEQ ID NO: 72423 - DNA, 20 bp, synthetic construct
  misc_feature 1..20: note = chemically synthesized
  source 1..20: mol_type = other DNA
tgtccatgaaaagaatgcat

SEQ ID NO: 72424 - DNA, 20 bp, synthetic construct
  misc_feature 1..20: note = chemically synthesized
  source 1..20: mol_type = other DNA
tcattttcagaagaatttgt

SEQ ID NO: 72425 - DNA, 20 bp, synthetic construct
  misc_feature 1..20: note = chemically synthesized
  source 1..20: mol_type = other DNA
cttgggaaagtaatttaatc

SEQ ID NO: 72426 - DNA, 20 bp, synthetic construct
  misc_feature 1..20: note = chemically synthesized
  source 1..20: mol_type = other DNA
acataacctgtaaagactac

SEQ ID NO: 72427 - DNA, 20 bp, synthetic construct
  misc_feature 1..20: note = chemically synthesized
  source 1..20: mol_type = other DNA
tcttgacacaaagtaagggg

SEQ ID NO: 72428 - DNA, 20 bp, synthetic construct
  misc_feature 1..20: note = chemically synthesized
  source 1..20: mol_type = other DNA
agtggataatttttttattt

SEQ ID NO: 72429 - DNA, 20 bp, synthetic construct
  misc_feature 1..20: note = chemically synthesized
  source 1..20: mol_type = other DNA
ttttatttttgtgtttttgt

SEQ ID NO: 72430 - DNA, 20 bp, synthetic construct
  misc_feature 1..20: note = chemically synthesized
  source 1..20: mol_type = other DNA
ctttctctagtgagtacatg

SEQ ID NO: 72431 - DNA, 20 bp, synthetic construct
  misc_feature 1..20: note = chemically synthesized
  source 1..20: mol_type = other DNA
tattcacccagaggtgtgtc

SEQ ID NO: 72432 - DNA, 20 bp, synthetic construct
  misc_feature 1..20: note = chemically synthesized
  source 1..20: mol_type = other DNA
gaacagatataagatgatga

SEQ ID NO: 72433 - DNA, 20 bp, synthetic construct
  misc_feature 1..20: note = chemically synthesized
  source 1..20: mol_type = other DNA
atgatggggtttttaggagc

SEQ ID NO: 72434 - DNA, 20 bp, synthetic construct
  misc_feature 1..20: note = chemically synthesized
  source 1..20: mol_type = other DNA
tttaaataaagatattaaac

SEQ ID NO: 72435 - DNA, 20 bp, synthetic construct
  misc_feature 1..20: note = chemically synthesized
  source 1..20: mol_type = other DNA
gggtgggaaagggaaaggag

SEQ ID NO: 72436 - DNA, 20 bp, synthetic construct
  misc_feature 1..20: note = chemically synthesized
  source 1..20: mol_type = other DNA
agtgagaggttcagacaata

SEQ ID NO: 72437 - DNA, 20 bp, synthetic construct
  misc_feature 1..20: note = chemically synthesized
  source 1..20: mol_type = other DNA
tcagacaatactcagcttat

SEQ ID NO: 72438 - DNA, 20 bp, synthetic construct
  misc_feature 1..20: note = chemically synthesized
  source 1..20: mol_type = other DNA
ttgtacataggtatataact

SEQ ID NO: 72439 - DNA, 20 bp, synthetic construct
  misc_feature 1..20: note = chemically synthesized
  source 1..20: mol_type = other DNA
tattataggtattcattgtt

SEQ ID NO: 72440 - DNA, 20 bp, synthetic construct
  misc_feature 1..20: note = chemically synthesized
  source 1..20: mol_type = other DNA
tggtagtaaaaatatgtgag

SEQ ID NO: 72441 - DNA, 20 bp, synthetic construct
  misc_feature 1..20: note = chemically synthesized
  source 1..20: mol_type = other DNA
ttgggaagaatccttaaaat

SEQ ID NO: 72442 - DNA, 20 bp, synthetic construct
  misc_feature 1..20: note = chemically synthesized
  source 1..20: mol_type = other DNA
ttaaaatagctgtttgtctt

SEQ ID NO: 72443 - DNA, 20 bp, synthetic construct
  misc_feature 1..20: note = chemically synthesized
  source 1..20: mol_type = other DNA
ctgttttcatattgaaaact

SEQ ID NO: 72444 - DNA, 20 bp, synthetic construct
  misc_feature 1..20: note = chemically synthesized
  source 1..20: mol_type = other DNA
attgaaaactgagtgctttc

SEQ ID NO: 72445 - DNA, 20 bp, synthetic construct
  misc_feature 1..20: note = chemically synthesized
  source 1..20: mol_type = other DNA
tgctttcacttgattcactc

SEQ ID NO: 72446 - DNA, 20 bp, synthetic construct
  misc_feature 1..20: note = chemically synthesized
  source 1..20: mol_type = other DNA
tgtggtatatgagatgatct

SEQ ID NO: 72447 - DNA, 20 bp, synthetic construct
  misc_feature 1..20: note = chemically synthesized
  source 1..20: mol_type = other DNA
gtctctgtcatagaatagac

SEQ ID NO: 72448 - DNA, 20 bp, synthetic construct
  misc_feature 1..20: note = chemically synthesized
  source 1..20: mol_type = other DNA
atatattctctcaccttccc

SEQ ID NO: 72449 - DNA, 20 bp, synthetic construct
  misc_feature 1..20: note = chemically synthesized
  source 1..20: mol_type = other DNA
atggttaatattgagtgcaa

SEQ ID NO: 72450 - DNA, 20 bp, synthetic construct
  misc_feature 1..20: note = chemically synthesized
  source 1..20: mol_type = other DNA
taatattgagtgcaaacttg

SEQ ID NO: 72451 - DNA, 20 bp, synthetic construct
  misc_feature 1..20: note = chemically synthesized
  source 1..20: mol_type = other DNA
tgctgtaagggtgttgccaa

SEQ ID NO: 72452 - DNA, 20 bp, synthetic construct
  misc_feature 1..20: note = chemically synthesized
  source 1..20: mol_type = other DNA
acacataacccaagctccgt

SEQ ID NO: 72453 - DNA, 20 bp, synthetic construct
  misc_feature 1..20: note = chemically synthesized
  source 1..20: mol_type = other DNA
ccgtccaagcttaattttga

SEQ ID NO: 72454 - DNA, 20 bp, synthetic construct
  misc_feature 1..20: note = chemically synthesized
  source 1..20: mol_type = other DNA
ctagaaagtatttgaacctc

SEQ ID NO: 72455 - DNA, 20 bp, synthetic construct
  misc_feature 1..20: note = chemically synthesized
  source 1..20: mol_type = other DNA
cctcctcaagaatttggaag

SEQ ID NO: 72456 - DNA, 20 bp, synthetic construct
  misc_feature 1..20: note = chemically synthesized
  source 1..20: mol_type = other DNA
cagggttagaatggaagcca

SEQ ID NO: 72457 - DNA, 20 bp, synthetic construct
  misc_feature 1..20: note = chemically synthesized
  source 1..20: mol_type = other DNA
gcctgagtcaacacccatgc

SEQ ID NO: 72458 - DNA, 20 bp, synthetic construct
  misc_feature 1..20: note = chemically synthesized
  source 1..20: mol_type = other DNA
atgctctggtttgttcgtag

SEQ ID NO: 72459 - DNA, 20 bp, synthetic construct
  misc_feature 1..20: note = chemically synthesized
  source 1..20: mol_type = other DNA
agaggtaactctcaaagaaa

SEQ ID NO: 72460 - DNA, 20 bp, synthetic construct
  misc_feature 1..20: note = chemically synthesized
  source 1..20: mol_type = other DNA
tacttttctcttgctaagaa

SEQ ID NO: 72461 - DNA, 20 bp, synthetic construct
  misc_feature 1..20: note = chemically synthesized
  source 1..20: mol_type = other DNA
taagaaatcagcttcgatct

SEQ ID NO: 72462 - DNA, 20 bp, synthetic construct
  misc_feature 1..20: note = chemically synthesized
  source 1..20: mol_type = other DNA
cctgcaatgagatcttacag

SEQ ID NO: 72463 - DNA, 20 bp, synthetic construct
  misc_feature 1..20: note = chemically synthesized
  source 1..20: mol_type = other DNA
tctcacatctttagccgtat

SEQ ID NO: 72464 - DNA, 20 bp, synthetic construct
  misc_feature 1..20: note = chemically synthesized
  source 1..20: mol_type = other DNA
agctcctccccagagaccat

SEQ ID NO: 72465 - DNA, 20 bp, synthetic construct
  misc_feature 1..20: note = chemically synthesized
  source 1..20: mol_type = other DNA
tgccctcagccttgtgggta

SEQ ID NO: 72466 - DNA, 20 bp, synthetic construct
  misc_feature 1..20: note = chemically synthesized
  source 1..20: mol_type = other DNA
ctcaagatctctgtctctgt

SEQ ID NO: 72467 - DNA, 20 bp, synthetic construct
  misc_feature 1..20: note = chemically synthesized
  source 1..20: mol_type = other DNA
tctctgtcctggcttttact

SEQ ID NO: 72468 - DNA, 20 bp, synthetic construct
  misc_feature 1..20: note = chemically synthesized
  source 1..20: mol_type = other DNA
gttgaatattttgtctacat

SEQ ID NO: 72469 - DNA, 20 bp, synthetic construct
  misc_feature 1..20: note = chemically synthesized
  source 1..20: mol_type = other DNA
tgccatcacaaagtgatgtg

SEQ ID NO: 72470 - DNA, 20 bp, synthetic construct
  misc_feature 1..20: note = chemically synthesized
  source 1..20: mol_type = other DNA
tgactctagtctatctagct

SEQ ID NO: 72471 - DNA, 20 bp, synthetic construct
  misc_feature 1..20: note = chemically synthesized
  source 1..20: mol_type = other DNA
gtctatctagctctctgctt

SEQ ID NO: 72472 - DNA, 20 bp, synthetic construct
  misc_feature 1..20: note = chemically synthesized
  source 1..20: mol_type = other DNA
tacataggccaagaagatat

SEQ ID NO: 72473 - DNA, 20 bp, synthetic construct
  misc_feature 1..20: note = chemically synthesized
  source 1..20: mol_type = other DNA
tttctcttgagataaactgg

SEQ ID NO: 72474 - DNA, 20 bp, synthetic construct
  misc_feature 1..20: note = chemically synthesized
  source 1..20: mol_type = other DNA
tggggctatgaagacaggct

SEQ ID NO: 72475 - DNA, 20 bp, synthetic construct
  misc_feature 1..20: note = chemically synthesized
  source 1..20: mol_type = other DNA
ccacacataaaggtcctacc

SEQ ID NO: 72476 - DNA, 20 bp, synthetic construct
  misc_feature 1..20: note = chemically synthesized
  source 1..20: mol_type = other DNA
acataaaggtcctaccagtg

SEQ ID NO: 72477 - DNA, 20 bp, synthetic construct
  misc_feature 1..20: note = chemically synthesized
  source 1..20: mol_type = other DNA
cagtaacttatttgaaaaaa

SEQ ID NO: 72478 - DNA, 20 bp, synthetic construct
  misc_feature 1..20: note = chemically synthesized
  source 1..20: mol_type = other DNA
tgaaaaaagaaagattattt

SEQ ID NO: 72479 - DNA, 20 bp, synthetic construct
  misc_feature 1..20: note = chemically synthesized
  source 1..20: mol_type = other DNA
tctttattaataaccacagt

SEQ ID NO: 72480 - DNA, 20 bp, synthetic construct
  misc_feature 1..20: note = chemically synthesized
  source 1..20: mol_type = other DNA
agtgaaggatctcaatagtc

SEQ ID NO: 72481 - DNA, 20 bp, synthetic construct
  misc_feature 1..20: note = chemically synthesized
  source 1..20: mol_type = other DNA
tccacagctttggatgtgtg

SEQ ID NO: 72482 - DNA, 20 bp, synthetic construct
  misc_feature 1..20: note = chemically synthesized
  source 1..20: mol_type = other DNA
ttctgtactcagtgatgtga

SEQ ID NO: 72483 - DNA, 20 bp, synthetic construct
  misc_feature 1..20: note = chemically synthesized
  source 1..20: mol_type = other DNA
aaattatggctgtaaatgtt

SEQ ID NO: 72484 - DNA, 20 bp, synthetic construct
  misc_feature 1..20: note = chemically synthesized
  source 1..20: mol_type = other DNA
gctgtaaatgttagaagttt

SEQ ID NO: 72485 - DNA, 20 bp, synthetic construct
  misc_feature 1..20: note = chemically synthesized
  source 1..20: mol_type = other DNA
ggtgttccattatagaatct

SEQ ID NO: 72486 - DNA, 20 bp, synthetic construct
  misc_feature 1..20: note = chemically synthesized
  source 1..20: mol_type = other DNA
ccttccctatattttttttc

SEQ ID NO: 72487 - DNA, 20 bp, synthetic construct
  misc_feature 1..20: note = chemically synthesized
  source 1..20: mol_type = other DNA
aattttcacaaaacaaagta

SEQ ID NO: 72488 - DNA, 20 bp, synthetic construct
  misc_feature 1..20: note = chemically synthesized
  source 1..20: mol_type = other DNA
gcaaaatacaatcattgcct

SEQ ID NO: 72489 - DNA, 20 bp, synthetic construct
  misc_feature 1..20: note = chemically synthesized
  source 1..20: mol_type = other DNA
aatcattgccttacagtttg

SEQ ID NO: 72490 - DNA, 20 bp, synthetic construct
  misc_feature 1..20: note = chemically synthesized
  source 1..20: mol_type = other DNA
agtttggttagctttccctg

SEQ ID NO: 72491 - DNA, 20 bp, synthetic construct
  misc_feature 1..20: note = chemically synthesized
  source 1..20: mol_type = other DNA
tcacaaagttgagatacagt

SEQ ID NO: 72492 - DNA, 20 bp, synthetic construct
  misc_feature 1..20: note = chemically synthesized
  source 1..20: mol_type = other DNA
acagtgaaagattaggttaa

SEQ ID NO: 72493 - DNA, 20 bp, synthetic construct
  misc_feature 1..20: note = chemically synthesized
  source 1..20: mol_type = other DNA
cacagaaggggaggagctaa

SEQ ID NO: 72494 - DNA, 20 bp, synthetic construct
  misc_feature 1..20: note = chemically synthesized
  source 1..20: mol_type = other DNA
atgttcagtaggcactgaat

SEQ ID NO: 72495 - DNA, 20 bp, synthetic construct
  misc_feature 1..20: note = chemically synthesized
  source 1..20: mol_type = other DNA
gacagaatatggatgctgaa

SEQ ID NO: 72496 - DNA, 20 bp, synthetic construct
  misc_feature 1..20: note = chemically synthesized
  source 1..20: mol_type = other DNA
ctatgggtggaaggtaagag

SEQ ID NO: 72497 - DNA, 20 bp, synthetic construct
  misc_feature 1..20: note = chemically synthesized
  source 1..20: mol_type = other DNA
cagctatatttactaatgac

SEQ ID NO: 72498 - DNA, 20 bp, synthetic construct
  misc_feature 1..20: note = chemically synthesized
  source 1..20: mol_type = other DNA
tcagacttccattttgagta

SEQ ID NO: 72499 - DNA, 20 bp, synthetic construct
  misc_feature 1..20: note = chemically synthesized
  source 1..20: mol_type = other DNA
agaaatctaggggaaacctc

SEQ ID NO: 72500 - DNA, 20 bp, synthetic construct
  misc_feature 1..20: note = chemically synthesized
  source 1..20: mol_type = other DNA
tacttcaaaaatgcatctgt

SEQ ID NO: 72501 - DNA, 20 bp, synthetic construct
  misc_feature 1..20: note = chemically synthesized
  source 1..20: mol_type = other DNA
aaaaatgcatctgtctctgt

SEQ ID NO: 72502 - DNA, 20 bp, synthetic construct
  misc_feature 1..20: note = chemically synthesized
  source 1..20: mol_type = other DNA
ttttctctttttttcatttc

SEQ ID NO: 72503 - DNA, 20 bp, synthetic construct
  misc_feature 1..20: note = chemically synthesized
  source 1..20: mol_type = other DNA
aaggtcaccatgactcttca

SEQ ID NO: 72504 - DNA, 20 bp, synthetic construct
  misc_feature 1..20: note = chemically synthesized
  source 1..20: mol_type = other DNA
ctcttcatatggatttttaa

SEQ ID NO: 72505 - DNA, 20 bp, synthetic construct
  misc_feature 1..20: note = chemically synthesized
  source 1..20: mol_type = other DNA
aactcatctcttttcttgtc

SEQ ID NO: 72506 - DNA, 20 bp, synthetic construct
  misc_feature 1..20: note = chemically synthesized
  source 1..20: mol_type = other DNA
tatcaccacactattttcca

SEQ ID NO: 72507 - DNA, 20 bp, synthetic construct
  misc_feature 1..20: note = chemically synthesized
  source 1..20: mol_type = other DNA
ggtctgtaaggccctatgac

SEQ ID NO: 72508 - DNA, 20 bp, synthetic construct
  misc_feature 1..20: note = chemically synthesized
  source 1..20: mol_type = other DNA
ccctatgacacttgattact

SEQ ID NO: 72509 - DNA, 20 bp, synthetic construct
  misc_feature 1..20: note = chemically synthesized
  source 1..20: mol_type = other DNA
gacatcatctattgtccctc

SEQ ID NO: 72510 - DNA, 20 bp, synthetic construct
  misc_feature 1..20: note = chemically synthesized
  source 1..20: mol_type = other DNA
ttcttatcaaatgccagtca

SEQ ID NO: 72511 - DNA, 20 bp, synthetic construct
  misc_feature 1..20: note = chemically synthesized
  source 1..20: mol_type = other DNA
catgctgattttccctctgg

SEQ ID NO: 72512 - DNA, 20 bp, synthetic construct
  misc_feature 1..20: note = chemically synthesized
  source 1..20: mol_type = other DNA
tcctctaggtctgtatacgg

SEQ ID NO: 72513 - DNA, 20 bp, synthetic construct
  misc_feature 1..20: note = chemically synthesized
  source 1..20: mol_type = other DNA
aattaatctacatcaagtag

SEQ ID NO: 72514 - DNA, 20 bp, synthetic construct
  misc_feature 1..20: note = chemically synthesized
  source 1..20: mol_type = other DNA
tatgttaaacttgcatttat

SEQ ID NO: 72515 - DNA, 20 bp, synthetic construct
  misc_feature 1..20: note = chemically synthesized
  source 1..20: mol_type = other DNA
atttatttttcaacttaatt

SEQ ID NO: 72516 - DNA, 20 bp, synthetic construct
  misc_feature 1..20: note = chemically synthesized
  source 1..20: mol_type = other DNA
ttcaacttaatttatggttt

SEQ ID NO: 72517 - DNA, 20 bp, synthetic construct
  misc_feature 1..20: note = chemically synthesized
  source 1..20: mol_type = other DNA
cttattaccatttaattcca

SEQ ID NO: 72518 - DNA, 20 bp, synthetic construct
  misc_feature 1..20: note = chemically synthesized
  source 1..20: mol_type = other DNA
caaatattaggtgaactaag

SEQ ID NO: 72519 - DNA, 20 bp, synthetic construct
  misc_feature 1..20: note = chemically synthesized
  source 1..20: mol_type = other DNA
ctcttcagtaaaagacagca

SEQ ID NO: 72520 - DNA, 20 bp, synthetic construct
  misc_feature 1..20: note = chemically synthesized
  source 1..20: mol_type = other DNA
tctcactcagtattggggag

SEQ ID NO: 72521 - DNA, 20 bp, synthetic construct
  misc_feature 1..20: note = chemically synthesized
  source 1..20: mol_type = other DNA
gggaaggaaaccaggaagat

SEQ ID NO: 72522 - DNA, 20 bp, synthetic construct
  misc_feature 1..20: note = chemically synthesized
  source 1..20: mol_type = other DNA
gagaacttgaaatgagagag

SEQ ID NO: 72523 - DNA, 20 bp, synthetic construct
  misc_feature 1..20: note = chemically synthesized
  source 1..20: mol_type = other DNA
cttgtaaataagaaacagta

SEQ ID NO: 72524 - DNA, 20 bp, synthetic construct
  misc_feature 1..20: note = chemically synthesized
  source 1..20: mol_type = other DNA
cacaagtagtgagtagtact

SEQ ID NO: 72525 - DNA, 20 bp, synthetic construct
  misc_feature 1..20: note = chemically synthesized
  source 1..20: mol_type = other DNA
cttagctacagtggtagtgg

SEQ ID NO: 72526 - DNA, 20 bp, synthetic construct
  misc_feature 1..20: note = chemically synthesized
  source 1..20: mol_type = other DNA
agtctttacatgcaggaaaa

SEQ ID NO: 72527 - DNA, 20 bp, synthetic construct
  misc_feature 1..20: note = chemically synthesized
  source 1..20: mol_type = other DNA
tcactactgtgaaggcaatt

SEQ ID NO: 72528 - DNA, 20 bp, synthetic construct
  misc_feature 1..20: note = chemically synthesized
  source 1..20: mol_type = other DNA
tagaccagaaaaaaattagt

SEQ ID NO: 72529 - DNA, 20 bp, synthetic construct
  misc_feature 1..20: note = chemically synthesized
  source 1..20: mol_type = other DNA
aaatctgcatagttaagggt

SEQ ID NO: 72530 - DNA, 20 bp, synthetic construct
  misc_feature 1..20: note = chemically synthesized
  source 1..20: mol_type = other DNA
aagggtaacagtttagaagt

SEQ ID NO: 72531 - DNA, 20 bp, synthetic construct
  misc_feature 1..20: note = chemically synthesized
  source 1..20: mol_type = other DNA
cataattttttttctgaaga

SEQ ID NO: 72532 - DNA, 20 bp, synthetic construct
  misc_feature 1..20: note = chemically synthesized
  source 1..20: mol_type = other DNA
aaacagttgaaactccaaga

SEQ ID NO: 72533 - DNA, 20 bp, synthetic construct
  misc_feature 1..20: note = chemically synthesized
  source 1..20: mol_type = other DNA
gctcccatcccttcctattg

SEQ ID NO: 72534 - DNA, 20 bp, synthetic construct
  misc_feature 1..20: note = chemically synthesized
  source 1..20: mol_type = other DNA
ccttcctattgactggtttt

SEQ ID NO: 72535 - DNA, 20 bp, synthetic construct
  misc_feature 1..20: note = chemically synthesized
  source 1..20: mol_type = other DNA
aggcttggaggaagctcatc

SEQ ID NO: 72536 - DNA, 20 bp, synthetic construct
  misc_feature 1..20: note = chemically synthesized
  source 1..20: mol_type = other DNA
agtcctctggctggatcaca

SEQ ID NO: 72537 - DNA, 20 bp, synthetic construct
  misc_feature 1..20: note = chemically synthesized
  source 1..20: mol_type = other DNA
acagggagattggaagtgcg

SEQ ID NO: 72538 - DNA, 20 bp, synthetic construct
  misc_feature 1..20: note = chemically synthesized
  source 1..20: mol_type = other DNA
ttcctttctcgagtctggca

SEQ ID NO: 72539 - DNA, 20 bp, synthetic construct
  misc_feature 1..20: note = chemically synthesized
  source 1..20: mol_type = other DNA
ttctgcttgccatggcctat

SEQ ID NO: 72540 - DNA, 20 bp, synthetic construct
  misc_feature 1..20: note = chemically synthesized
  source 1..20: mol_type = other DNA
acttactaatactcgagtag

SEQ ID NO: 72541 - DNA, 20 bp, synthetic construct
  misc_feature 1..20: note = chemically synthesized
  source 1..20: mol_type = other DNA
ttgggctgggagttctgatg

SEQ ID NO: 72542 - DNA, 20 bp, synthetic construct
  misc_feature 1..20: note = chemically synthesized
  source 1..20: mol_type = other DNA
cttcaaccgactgtacccag

SEQ ID NO: 72543 - DNA, 20 bp, synthetic construct
  misc_feature 1..20: note = chemically synthesized
  source 1..20: mol_type = other DNA
cttgtagtctttatatttgt

SEQ ID NO: 72544 - DNA, 20 bp, synthetic construct
  misc_feature 1..20: note = chemically synthesized
  source 1..20: mol_type = other DNA
ctttatatttgtgctggatt

SEQ ID NO: 72545 - DNA, 20 bp, synthetic construct
  misc_feature 1..20: note = chemically synthesized
  source 1..20: mol_type = other DNA
gtctcccatatctgctgtgt

SEQ ID NO: 72546 - DNA, 20 bp, synthetic construct
  misc_feature 1..20: note = chemically synthesized
  source 1..20: mol_type = other DNA
tgtcctggttttttatgtca

SEQ ID NO: 72547 - DNA, 20 bp, synthetic construct
  misc_feature 1..20: note = chemically synthesized
  source 1..20: mol_type = other DNA
tggttttttatgtcacagtg

SEQ ID NO: 72548 - DNA, 20 bp, synthetic construct
  misc_feature 1..20: note = chemically synthesized
  source 1..20: mol_type = other DNA
tgtcacagtgattggattgt

SEQ ID NO: 72549 - DNA, 20 bp, synthetic construct
  misc_feature 1..20: note = chemically synthesized
  source 1..20: mol_type = other DNA
tgattggattgtctctgatt

SEQ ID NO: 72550 - DNA, 20 bp, synthetic construct
  misc_feature 1..20: note = chemically synthesized
  source 1..20: mol_type = other DNA
aacatatagtgtcaagacca

SEQ ID NO: 72551 - DNA, 20 bp, synthetic construct
  misc_feature 1..20: note = chemically synthesized
  source 1..20: mol_type = other DNA
tggtaaaataggtgttaaaa

SEQ ID NO: 72552 - DNA, 20 bp, synthetic construct
  misc_feature 1..20: note = chemically synthesized
  source 1..20: mol_type = other DNA
ataggtgttaaaatacagct

SEQ ID NO: 72553 - DNA, 20 bp, synthetic construct
  misc_feature 1..20: note = chemically synthesized
  source 1..20: mol_type = other DNA
agcccaactctttagctaaa

SEQ ID NO: 72554 - DNA, 20 bp, synthetic construct
  misc_feature 1..20: note = chemically synthesized
  source 1..20: mol_type = other DNA
cctgtaaacggaatatttct

SEQ ID NO: 72555 - DNA, 20 bp, synthetic construct
  misc_feature 1..20: note = chemically synthesized
  source 1..20: mol_type = other DNA
atgtctataatgtaactaac

SEQ ID NO: 72556 - DNA, 20 bp, synthetic construct
  misc_feature 1..20: note = chemically synthesized
  source 1..20: mol_type = other DNA
ttggttcgagtgaaatggaa

SEQ ID NO: 72557 - DNA, 20 bp, synthetic construct
  misc_feature 1..20: note = chemically synthesized
  source 1..20: mol_type = other DNA
tcgagtgaaatggaatagag

SEQ ID NO: 72558 - DNA, 20 bp, synthetic construct
  misc_feature 1..20: note = chemically synthesized
  source 1..20: mol_type = other DNA
gtctgaaggaacaaaaaaaa

SEQ ID NO: 72559 - DNA, 20 bp, synthetic construct
  misc_feature 1..20: note = chemically synthesized
  source 1..20: mol_type = other DNA
ggtttctgcatttttttgaa

SEQ ID NO: 72560 - DNA, 20 bp, synthetic construct
  misc_feature 1..20: note = chemically synthesized
  source 1..20: mol_type = other DNA
tctgcatttttttgaagaat

SEQ ID NO: 72561 - DNA, 20 bp, synthetic construct
  misc_feature 1..20: note = chemically synthesized
  source 1..20: mol_type = other DNA
gattgctttctgtacataca

SEQ ID NO: 72562 - DNA, 20 bp, synthetic construct
  misc_feature 1..20: note = chemically synthesized
  source 1..20: mol_type = other DNA
aatacaacaatgtcattctc

SEQ ID NO: 72563 - DNA, 20 bp, synthetic construct
  misc_feature 1..20: note = chemically synthesized
  source 1..20: mol_type = other DNA
agaggggactatatagaaga

SEQ ID NO: 72564 - DNA, 20 bp, synthetic construct
  misc_feature 1..20: note = chemically synthesized
  source 1..20: mol_type = other DNA
gaagatattgtttatgtctt

SEQ ID NO: 72565 - DNA, 20 bp, synthetic construct
  misc_feature 1..20: note = chemically synthesized
  source 1..20: mol_type = other DNA
gaatgttggctgctcattgt

SEQ ID NO: 72566 - DNA, 20 bp, synthetic construct
  misc_feature 1..20: note = chemically synthesized
  source 1..20: mol_type = other DNA
tggctgctcattgttcatgt

SEQ ID NO: 72567 - DNA, 20 bp, synthetic construct
  misc_feature 1..20: note = chemically synthesized
  source 1..20: mol_type = other DNA
cttgccttctgaagctaagc

SEQ ID NO: 72568 - DNA, 20 bp, synthetic construct
  misc_feature 1..20: note = chemically synthesized
  source 1..20: mol_type = other DNA
aagctccagcttcagtatgc

SEQ ID NO: 72569 - DNA, 20 bp, synthetic construct
  misc_feature 1..20: note = chemically synthesized
  source 1..20: mol_type = other DNA
ttacctccttcccctgtcca

SEQ ID NO: 72570 - DNA, 20 bp, synthetic construct
  misc_feature 1..20: note = chemically synthesized
  source 1..20: mol_type = other DNA
aactgcaatccttatttata

SEQ ID NO: 72571 - DNA, 20 bp, synthetic construct
  misc_feature 1..20: note = chemically synthesized
  source 1..20: mol_type = other DNA
agaactgaacatataaaaaa

SEQ ID NO: 72572 - DNA, 20 bp, synthetic construct
  misc_feature 1..20: note = chemically synthesized
  source 1..20: mol_type = other DNA
atataaaaaaatcagcttta

SEQ ID NO: 72573 - DNA, 20 bp, synthetic construct
  misc_feature 1..20: note = chemically synthesized
  source 1..20: mol_type = other DNA
gtgagtgcatatatgtgatg

SEQ ID NO: 72574 - DNA, 20 bp, synthetic construct
  misc_feature 1..20: note = chemically synthesized
  source 1..20: mol_type = other DNA
tatgtgatggtaggtttttg

SEQ ID NO: 72575 - DNA, 20 bp, synthetic construct
  misc_feature 1..20: note = chemically synthesized
  source 1..20: mol_type = other DNA
tattgtggggtagatattat

SEQ ID NO: 72576 - DNA, 20 bp, synthetic construct
  misc_feature 1..20: note = chemically synthesized
  source 1..20: mol_type = other DNA
aacatttttaattggtatag

SEQ ID NO: 72577 - DNA, 20 bp, synthetic construct
  misc_feature 1..20: note = chemically synthesized
  source 1..20: mol_type = other DNA
cactacagtagactatcctt

SEQ ID NO: 72578 - DNA, 20 bp, synthetic construct
  misc_feature 1..20: note = chemically synthesized
  source 1..20: mol_type = other DNA
actttttgccttgtattccg

SEQ ID NO: 72579 - DNA, 20 bp, synthetic construct
  misc_feature 1..20: note = chemically synthesized
  source 1..20: mol_type = other DNA
cattgcaaaaaaaaaaagag

SEQ ID NO: 72580 - DNA, 20 bp, synthetic construct
  misc_feature 1..20: note = chemically synthesized
  source 1..20: mol_type = other DNA
gttgtagaattactaaaatg

SEQ ID NO: 72581 - DNA, 20 bp, synthetic construct
  misc_feature 1..20: note = chemically synthesized
  source 1..20: mol_type = other DNA
atgcttagaattgttaatga

SEQ ID NO: 72582 - DNA, 20 bp, synthetic construct
  misc_feature 1..20: note = chemically synthesized
  source 1..20: mol_type = other DNA
aataaaaagaatcttcaaat

SEQ ID NO: 72583 - DNA, 20 bp, synthetic construct
  misc_feature 1..20: note = chemically synthesized
  source 1..20: mol_type = other DNA
gaatcttcaaatctctgatt

SEQ ID NO: 72584 - DNA, 20 bp, synthetic construct
  misc_feature 1..20: note = chemically synthesized
  source 1..20: mol_type = other DNA
tgagactcagtgacaaggag

SEQ ID NO: 72585 - DNA, 20 bp, synthetic construct
  misc_feature 1..20: note = chemically synthesized
  source 1..20: mol_type = other DNA
gaggacagtttgaatctttt

SEQ ID NO: 72586 - DNA, 20 bp, synthetic construct
  misc_feature 1..20: note = chemically synthesized
  source 1..20: mol_type = other DNA
aataaactcctcttcttgta

SEQ ID NO: 72587 - DNA, 20 bp, synthetic construct
  misc_feature 1..20: note = chemically synthesized
  source 1..20: mol_type = other DNA
ttgtaatttgttttgttcag

SEQ ID NO: 72588 - DNA, 20 bp, synthetic construct
  misc_feature 1..20: note = chemically synthesized
  source 1..20: mol_type = other DNA
tttgttcagcctagtttcag

SEQ ID NO: 72589 - DNA, 20 bp, synthetic construct
  misc_feature 1..20: note = chemically synthesized
  source 1..20: mol_type = other DNA
aggaaagttgaccatttggt

SEQ ID NO: 72590 - DNA, 20 bp, synthetic construct
  misc_feature 1..20: note = chemically synthesized
  source 1..20: mol_type = other DNA
atgatttatgaagttatttc

SEQ ID NO: 72591 - DNA, 20 bp, synthetic construct
  misc_feature 1..20: note = chemically synthesized
  source 1..20: mol_type = other DNA
catggtggaaatccactcag

SEQ ID NO: 72592 - DNA, 20 bp, synthetic construct
  misc_feature 1..20: note = chemically synthesized
  source 1..20: mol_type = other DNA
ggaaaagtaacaaaagggta

SEQ ID NO: 72593 - DNA, 20 bp, synthetic construct
  misc_feature 1..20: note = chemically synthesized
  source 1..20: mol_type = other DNA
gtacaacaaaccctcgtgac

SEQ ID NO: 72594 - DNA, 20 bp, synthetic construct
  misc_feature 1..20: note = chemically synthesized
  source 1..20: mol_type = other DNA
acagcaggtgaagcctgtaa

SEQ ID NO: 72595 - DNA, 20 bp, synthetic construct
  misc_feature 1..20: note = chemically synthesized
  source 1..20: mol_type = other DNA
taataatatacttgtgtagt

SEQ ID NO: 72596 - DNA, 20 bp, synthetic construct
  misc_feature 1..20: note = chemically synthesized
  source 1..20: mol_type = other DNA
gtagactaagccaatcttag

SEQ ID NO: 72597 - DNA, 20 bp, synthetic construct
  misc_feature 1..20: note = chemically synthesized
  source 1..20: mol_type = other DNA
gaaaaaatatgtatggtcta

SEQ ID NO: 72598 - DNA, 20 bp, synthetic construct
  misc_feature 1..20: note = chemically synthesized
  source 1..20: mol_type = other DNA
ctgggttccttcaccagaga

SEQ ID NO: 72599 - DNA, 20 bp, synthetic construct
  misc_feature 1..20: note = chemically synthesized
  source 1..20: mol_type = other DNA
tgatatatttaaagatactt

SEQ ID NO: 72600 - DNA, 20 bp, synthetic construct
  misc_feature 1..20: note = chemically synthesized
  source 1..20: mol_type = other DNA
agtattaaattgggcagcaa

SEQ ID NO: 72601 - DNA, 20 bp, synthetic construct
  misc_feature 1..20: note = chemically synthesized
  source 1..20: mol_type = other DNA
tgggcagcaaggatgattag

SEQ ID NO: 72602 - DNA, 20 bp, synthetic construct
  misc_feature 1..20: note = chemically synthesized
  source 1..20: mol_type = other DNA
tgtccaattaaagaatgtaa

SEQ ID NO: 72603 - DNA, 20 bp, synthetic construct
  misc_feature 1..20: note = chemically synthesized
  source 1..20: mol_type = other DNA
attaaagaatgtaaatctgt

SEQ ID NO: 72604 - DNA, 20 bp, synthetic construct
  misc_feature 1..20: note = chemically synthesized
  source 1..20: mol_type = other DNA
atttattttatgggaaattt

SEQ ID NO: 72605 - DNA, 20 bp, synthetic construct
  misc_feature 1..20: note = chemically synthesized
  source 1..20: mol_type = other DNA
gaaatttaggagtttatgtc

SEQ ID NO: 72606 - DNA, 20 bp, synthetic construct
  misc_feature 1..20: note = chemically synthesized
  source 1..20: mol_type = other DNA
gccaccaaactgacagatga

SEQ ID NO: 72607 - DNA, 20 bp, synthetic construct
  misc_feature 1..20: note = chemically synthesized
  source 1..20: mol_type = other DNA
tctccagaaaaatagaatca

SEQ ID NO: 72608 - DNA, 20 bp, synthetic construct
  misc_feature 1..20: note = chemically synthesized
  source 1..20: mol_type = other DNA
ggtaaaaacaagtaatgggg

SEQ ID NO: 72609 - DNA, 20 bp, synthetic construct
  misc_feature 1..20: note = chemically synthesized
  source 1..20: mol_type = other DNA
attccggacatagacacagg

SEQ ID NO: 72610 - DNA, 20 bp, synthetic construct
  misc_feature 1..20: note = chemically synthesized
  source 1..20: mol_type = other DNA
tcaggaggctgaggcaggag

SEQ ID NO: 72611 - DNA, 20 bp, synthetic construct
  misc_feature 1..20: note = chemically synthesized
  source 1..20: mol_type = other DNA
aagaaaaatacaattaaata

SEQ ID NO: 72612 - DNA, 20 bp, synthetic construct
  misc_feature 1..20: note = chemically synthesized
  source 1..20: mol_type = other DNA
catctgacaccagtcagaat

SEQ ID NO: 72613 - DNA, 20 bp, synthetic construct
  misc_feature 1..20: note = chemically synthesized
  source 1..20: mol_type = other DNA
aagacagtgtggcaattcct

SEQ ID NO: 72614 - DNA, 20 bp, synthetic construct
  misc_feature 1..20: note = chemically synthesized
  source 1..20: mol_type = other DNA
gaaaaaatagctaatgcatg

SEQ ID NO: 72615 - DNA, 20 bp, synthetic construct
  misc_feature 1..20: note = chemically synthesized
  source 1..20: mol_type = other DNA
ctaatataaggaaatagcag

SEQ ID NO: 72616 - DNA, 20 bp, synthetic construct
  misc_feature 1..20: note = chemically synthesized
  source 1..20: mol_type = other DNA
ttgaaaactcaagagagcct

SEQ ID NO: 72617 - DNA, 20 bp, synthetic construct
  misc_feature 1..20: note = chemically synthesized
  source 1..20: mol_type = other DNA
gtctgaaggcctgggaaaca

SEQ ID NO: 72618 - DNA, 20 bp, synthetic construct
  misc_feature 1..20: note = chemically synthesized
  source 1..20: mol_type = other DNA
tacttgcaacccaaaagcca

SEQ ID NO: 72619 - DNA, 20 bp, synthetic construct
  misc_feature 1..20: note = chemically synthesized
  source 1..20: mol_type = other DNA
gccatcaggcttcagaccca

SEQ ID NO: 72620 - DNA, 20 bp, synthetic construct
  misc_feature 1..20: note = chemically synthesized
  source 1..20: mol_type = other DNA
gcttcagacccaggaagttt

SEQ ID NO: 72621 - DNA, 20 bp, synthetic construct
  misc_feature 1..20: note = chemically synthesized
  source 1..20: mol_type = other DNA
tctaaaggcagaaaaaaagg

SEQ ID NO: 72622 - DNA, 20 bp, synthetic construct
  misc_feature 1..20: note = chemically synthesized
  source 1..20: mol_type = other DNA
gcagaaaaaaaggtctagat

SEQ ID NO: 72623 - DNA, 20 bp, synthetic construct
  misc_feature 1..20: note = chemically synthesized
  source 1..20: mol_type = other DNA
catcaataaggaataattct

SEQ ID NO: 72624 - DNA, 20 bp, synthetic construct
  misc_feature 1..20: note = chemically synthesized
  source 1..20: mol_type = other DNA
ggtcagactttttgttctat

SEQ ID NO: 72625 - DNA, 20 bp, synthetic construct
  misc_feature 1..20: note = chemically synthesized
  source 1..20: mol_type = other DNA
tttgttctattcaggttttc

SEQ ID NO: 72626 - DNA, 20 bp, synthetic construct
  misc_feature 1..20: note = chemically synthesized
  source 1..20: mol_type = other DNA
accatctgctctacttggtc

SEQ ID NO: 72627 - DNA, 20 bp, synthetic construct
  misc_feature 1..20: note = chemically synthesized
  source 1..20: mol_type = other DNA
cctcacaaaaacatctagaa

SEQ ID NO: 72628 - DNA, 20 bp, synthetic construct
  misc_feature 1..20: note = chemically synthesized
  source 1..20: mol_type = other DNA
cttcctgaatcgttagcgat

SEQ ID NO: 72629 - DNA, 20 bp, synthetic construct
  misc_feature 1..20: note = chemically synthesized
  source 1..20: mol_type = other DNA
attctaataaatattgtgtt

SEQ ID NO: 72630 - DNA, 20 bp, synthetic construct
  misc_feature 1..20: note = chemically synthesized
  source 1..20: mol_type = other DNA
tcaggaaacactgcatcaaa

SEQ ID NO: 72631 - DNA, 20 bp, synthetic construct
  misc_feature 1..20: note = chemically synthesized
  source 1..20: mol_type = other DNA
agatggaggtccttcccaat

SEQ ID NO: 72632 - DNA, 20 bp, synthetic construct
  misc_feature 1..20: note = chemically synthesized
  source 1..20: mol_type = other DNA
cctacttcctcccagtgccc

SEQ ID NO: 72633 - DNA, 20 bp, synthetic construct
  misc_feature 1..20: note = chemically synthesized
  source 1..20: mol_type = other DNA
aatagttgttcccattctct

SEQ ID NO: 72634 - DNA, 20 bp, synthetic construct
  misc_feature 1..20: note = chemically synthesized
  source 1..20: mol_type = other DNA
caccaacagtgtcacttcac

SEQ ID NO: 72635 - DNA, 20 bp, synthetic construct
  misc_feature 1..20: note = chemically synthesized
  source 1..20: mol_type = other DNA
tatatctgttctaagataag

SEQ ID NO: 72636 - DNA, 20 bp, synthetic construct
  misc_feature 1..20: note = chemically synthesized
  source 1..20: mol_type = other DNA
tagagtcatatttatggggc

SEQ ID NO: 72637 - DNA, 20 bp, synthetic construct
  misc_feature 1..20: note = chemically synthesized
  source 1..20: mol_type = other DNA
ttccagagactgacttttaa

SEQ ID NO: 72638 - DNA, 20 bp, synthetic construct
  misc_feature 1..20: note = chemically synthesized
  source 1..20: mol_type = other DNA
atcatgatttcctactacta

SEQ ID NO: 72639 - DNA, 20 bp, synthetic construct
  misc_feature 1..20: note = chemically synthesized
  source 1..20: mol_type = other DNA
ggctaagttccaggataaat

SEQ ID NO: 72640 - DNA, 20 bp, synthetic construct
  misc_feature 1..20: note = chemically synthesized
  source 1..20: mol_type = other DNA
tatttctctgacagactatg

SEQ ID NO: 72641 - DNA, 20 bp, synthetic construct
  misc_feature 1..20: note = chemically synthesized
  source 1..20: mol_type = other DNA
tacaaattgtcagacaaagc

SEQ ID NO: 72642 - DNA, 20 bp, synthetic construct
  misc_feature 1..20: note = chemically synthesized
  source 1..20: mol_type = other DNA
acttaaataaaattttttaa

SEQ ID NO: 72643 - DNA, 20 bp, synthetic construct
  misc_feature 1..20: note = chemically synthesized
  source 1..20: mol_type = other DNA
tattgctccagaagcagtaa

SEQ ID NO: 72644 - DNA, 20 bp, synthetic construct
  misc_feature 1..20: note = chemically synthesized
  source 1..20: mol_type = other DNA
gacttaccaagagacagaaa

SEQ ID NO: 72645 - DNA, 20 bp, synthetic construct
  misc_feature 1..20: note = chemically synthesized
  source 1..20: mol_type = other DNA
caagagacagaaaacaagct

SEQ ID NO: 72646 - DNA, 20 bp, synthetic construct
  misc_feature 1..20: note = chemically synthesized
  source 1..20: mol_type = other DNA
caatcttatttgaaaccaag

SEQ ID NO: 72647 - DNA, 20 bp, synthetic construct
  misc_feature 1..20: note = chemically synthesized
  source 1..20: mol_type = other DNA
accaagaaaagattaagtgt

SEQ ID NO: 72648 - DNA, 20 bp, synthetic construct
  misc_feature 1..20: note = chemically synthesized
  source 1..20: mol_type = other DNA
agattaagtgtgagggatta

SEQ ID NO: 72649 - DNA, 20 bp, synthetic construct
  misc_feature 1..20: note = chemically synthesized
  source 1..20: mol_type = other DNA
ttaagctttgtctaagttga

SEQ ID NO: 72650 - DNA, 20 bp, synthetic construct
  misc_feature 1..20: note = chemically synthesized
  source 1..20: mol_type = other DNA
agggttaaggaataacaaaa

SEQ ID NO: 72651 - DNA, 20 bp, synthetic construct
  misc_feature 1..20: note = chemically synthesized
  source 1..20: mol_type = other DNA
tgtgctggatgaagctacaa

SEQ ID NO: 72652 - DNA, 20 bp, synthetic construct
  misc_feature 1..20: note = chemically synthesized
  source 1..20: mol_type = other DNA
ttctttttgcaaagaaaata

SEQ ID NO: 72653 - DNA, 20 bp, synthetic construct
  misc_feature 1..20: note = chemically synthesized
  source 1..20: mol_type = other DNA
agcccacttccttctccaaa

SEQ ID NO: 72654 - DNA, 20 bp, synthetic construct
  misc_feature 1..20: note = chemically synthesized
  source 1..20: mol_type = other DNA
ggaaaataaagactaatctt

SEQ ID NO: 72655 - DNA, 20 bp, synthetic construct
  misc_feature 1..20: note = chemically synthesized
  source 1..20: mol_type = other DNA
agaggcaagatatctgtatc

SEQ ID NO: 72656 - DNA, 20 bp, synthetic construct
  misc_feature 1..20: note = chemically synthesized
  source 1..20: mol_type = other DNA
gttaactctgaaataaaaac

SEQ ID NO: 72657 - DNA, 20 bp, synthetic construct
  misc_feature 1..20: note = chemically synthesized
  source 1..20: mol_type = other DNA
aaacagtagttttatgtgat

SEQ ID NO: 72658 - DNA, 20 bp, synthetic construct
  misc_feature 1..20: note = chemically synthesized
  source 1..20: mol_type = other DNA
tcttgatgcagttctctagg

SEQ ID NO: 72659 - DNA, 20 bp, synthetic construct
  misc_feature 1..20: note = chemically synthesized
  source 1..20: mol_type = other DNA
tactttgtagctcccacatt

SEQ ID NO: 72660 - DNA, 20 bp, synthetic construct
  misc_feature 1..20: note = chemically synthesized
  source 1..20: mol_type = other DNA
aagtcactgttcttacctaa

SEQ ID NO: 72661 - DNA, 20 bp, synthetic construct
  misc_feature 1..20: note = chemically synthesized
  source 1..20: mol_type = other DNA
atcaatatgtcaaactctgt

SEQ ID NO: 72662 - DNA, 20 bp, synthetic construct
  misc_feature 1..20: note = chemically synthesized
  source 1..20: mol_type = other DNA
gtgttggagtgggagtagaa

SEQ ID NO: 72663 - DNA, 20 bp, synthetic construct
  misc_feature 1..20: note = chemically synthesized
  source 1..20: mol_type = other DNA
taaacagtaaaaattttgtg

SEQ ID NO: 72664 - DNA, 20 bp, synthetic construct
  misc_feature 1..20: note = chemically synthesized
  source 1..20: mol_type = other DNA
ggtgatgcaaaagagacatc

SEQ ID NO: 72665 - DNA, 20 bp, synthetic construct
  misc_feature 1..20: note = chemically synthesized
  source 1..20: mol_type = other DNA
catgcattagagtgaaaaat

SEQ ID NO: 72666 - DNA, 20 bp, synthetic construct
  misc_feature 1..20: note = chemically synthesized
  source 1..20: mol_type = other DNA
tgtcagccactgatgctata

SEQ ID NO: 72667 - DNA, 20 bp, synthetic construct
  misc_feature 1..20: note = chemically synthesized
  source 1..20: mol_type = other DNA
tttacataaaccctgtaaat

SEQ ID NO: 72668 - DNA, 20 bp, synthetic construct
  misc_feature 1..20: note = chemically synthesized
  source 1..20: mol_type = other DNA
ggataatagtaatactttgc

SEQ ID NO: 72669 - DNA, 20 bp, synthetic construct
  misc_feature 1..20: note = chemically synthesized
  source 1..20: mol_type = other DNA
acataaattactgcaacttg

SEQ ID NO: 72670 - DNA, 20 bp, synthetic construct
  misc_feature 1..20: note = chemically synthesized
  source 1..20: mol_type = other DNA
cttgagctgcttcaaacatt

SEQ ID NO: 72671 - DNA, 20 bp, synthetic construct
  misc_feature 1..20: note = chemically synthesized
  source 1..20: mol_type = other DNA
ttctataggtctgcactctc

SEQ ID NO: 72672 - DNA, 20 bp, synthetic construct
  misc_feature 1..20: note = chemically synthesized
  source 1..20: mol_type = other DNA
ctcataggcttaactgagtt

SEQ ID NO: 72673 - DNA, 20 bp, synthetic construct
  misc_feature 1..20: note = chemically synthesized
  source 1..20: mol_type = other DNA
tccaaaggctctggggaaga

SEQ ID NO: 72674 - DNA, 20 bp, synthetic construct
  misc_feature 1..20: note = chemically synthesized
  source 1..20: mol_type = other DNA
agaattcgcttccacgttca

SEQ ID NO: 72675 - DNA, 20 bp, synthetic construct
  misc_feature 1..20: note = chemically synthesized
  source 1..20: mol_type = other DNA
cattcagattgtagtcagag

SEQ ID NO: 72676 - DNA, 20 bp, synthetic construct
  misc_feature 1..20: note = chemically synthesized
  source 1..20: mol_type = other DNA
ggttcaagcaattctcctgc

SEQ ID NO: 72677 - DNA, 20 bp, synthetic construct
  misc_feature 1..20: note = chemically synthesized
  source 1..20: mol_type = other DNA
cgccttggcctcccaaagtg

SEQ ID NO: 72678 - DNA, 20 bp, synthetic construct
  misc_feature 1..20: note = chemically synthesized
  source 1..20: mol_type = other DNA
cctcccaaagtgctgggatt

SEQ ID NO: 72679 - DNA, 20 bp, synthetic construct
  misc_feature 1..20: note = chemically synthesized
  source 1..20: mol_type = other DNA
attgcacccggctgtcagag

SEQ ID NO: 72680 - DNA, 20 bp, synthetic construct
  misc_feature 1..20: note = chemically synthesized
  source 1..20: mol_type = other DNA
ctactgctgaactctgaagt

SEQ ID NO: 72681 - DNA, 20 bp, synthetic construct
  misc_feature 1..20: note = chemically synthesized
  source 1..20: mol_type = other DNA
tgctgaactctgaagtccct

SEQ ID NO: 72682 - DNA, 20 bp, synthetic construct
  misc_feature 1..20: note = chemically synthesized
  source 1..20: mol_type = other DNA
actctgaagtccctgtttgt

SEQ ID NO: 72683 - DNA, 20 bp, synthetic construct
  misc_feature 1..20: note = chemically synthesized
  source 1..20: mol_type = other DNA
aagtccctgtttgtttttgt

SEQ ID NO: 72684 - DNA, 20 bp, synthetic construct
  misc_feature 1..20: note = chemically synthesized
  source 1..20: mol_type = other DNA
tgtttgtttttgtttttgtt

SEQ ID NO: 72685 - DNA, 20 bp, synthetic construct
  misc_feature 1..20: note = chemically synthesized
  source 1..20: mol_type = other DNA
tgtttttgtttttgtttttt

SEQ ID NO: 72686 - DNA, 20 bp, synthetic construct
  misc_feature 1..20: note = chemically synthesized
  source 1..20: mol_type = other DNA
tttgtttttgttttttgttt

SEQ ID NO: 72687 - DNA, 20 bp, synthetic construct
  misc_feature 1..20: note = chemically synthesized
  source 1..20: mol_type = other DNA
aggatgcccgttctgtacct

SEQ ID NO: 72688 - DNA, 20 bp, synthetic construct
  misc_feature 1..20: note = chemically synthesized
  source 1..20: mol_type = other DNA
tttctcaaattttgaatatg

SEQ ID NO: 72689 - DNA, 20 bp, synthetic construct
  misc_feature 1..20: note = chemically synthesized
  source 1..20: mol_type = other DNA
ctcctactacttggtgaaaa

SEQ ID NO: 72690 - DNA, 20 bp, synthetic construct
  misc_feature 1..20: note = chemically synthesized
  source 1..20: mol_type = other DNA
gataggaaatcttgtggtag

SEQ ID NO: 72691 - DNA, 20 bp, synthetic construct
  misc_feature 1..20: note = chemically synthesized
  source 1..20: mol_type = other DNA
ctttcttttccaatatatgt

SEQ ID NO: 72692 - DNA, 20 bp, synthetic construct
  misc_feature 1..20: note = chemically synthesized
  source 1..20: mol_type = other DNA
gtccaaaacagtagcatctg

SEQ ID NO: 72693 - DNA, 20 bp, synthetic construct
  misc_feature 1..20: note = chemically synthesized
  source 1..20: mol_type = other DNA
aattttctgtaagtgtaaac

SEQ ID NO: 72694 - DNA, 20 bp, synthetic construct
  misc_feature 1..20: note = chemically synthesized
  source 1..20: mol_type = other DNA
aatcgtgggaactatctcat

SEQ ID NO: 72695 - DNA, 20 bp, synthetic construct
  misc_feature 1..20: note = chemically synthesized
  source 1..20: mol_type = other DNA
tatctcatatatgattttta

SEQ ID NO: 72696 - DNA, 20 bp, synthetic construct
  misc_feature 1..20: note = chemically synthesized
  source 1..20: mol_type = other DNA
aatgataatatttttgatat

SEQ ID NO: 72697 - DNA, 20 bp, synthetic construct
  misc_feature 1..20: note = chemically synthesized
  source 1..20: mol_type = other DNA
cacatagtgctggtctagag

SEQ ID NO: 72698 - DNA, 20 bp, synthetic construct
  misc_feature 1..20: note = chemically synthesized
  source 1..20: mol_type = other DNA
agtgctggtctagagagctg

SEQ ID NO: 72699 - DNA, 20 bp, synthetic construct
  misc_feature 1..20: note = chemically synthesized
  source 1..20: mol_type = other DNA
ctggtctagagagctgtttt

SEQ ID NO: 72700 - DNA, 20 bp, synthetic construct
  misc_feature 1..20: note = chemically synthesized
  source 1..20: mol_type = other DNA
tctagagagctgttttgttt

SEQ ID NO: 72701 - DNA, 20 bp, synthetic construct
  misc_feature 1..20: note = chemically synthesized
  source 1..20: mol_type = other DNA
ctgctgccccttttctcctc

SEQ ID NO: 72702 - DNA, 20 bp, synthetic construct
  misc_feature 1..20: note = chemically synthesized
  source 1..20: mol_type = other DNA
tcactggctttccaggtctg

SEQ ID NO: 72703 - DNA, 20 bp, synthetic construct
  misc_feature 1..20: note = chemically synthesized
  source 1..20: mol_type = other DNA
acaggaaaatgagccatgga

SEQ ID NO: 72704 - DNA, 20 bp, synthetic construct
  misc_feature 1..20: note = chemically synthesized
  source 1..20: mol_type = other DNA
tgttgctcatcatggcccat

SEQ ID NO: 72705 - DNA, 20 bp, synthetic construct
  misc_feature 1..20: note = chemically synthesized
  source 1..20: mol_type = other DNA
tagatctgggggttcaaatg

SEQ ID NO: 72706 - DNA, 20 bp, synthetic construct
  misc_feature 1..20: note = chemically synthesized
  source 1..20: mol_type = other DNA
tgcccataatcatcaccctc

SEQ ID NO: 72707 - DNA, 20 bp, synthetic construct
  misc_feature 1..20: note = chemically synthesized
  source 1..20: mol_type = other DNA
tgtcaatcccatgtcctctc

SEQ ID NO: 72708 - DNA, 20 bp, synthetic construct
  misc_feature 1..20: note = chemically synthesized
  source 1..20: mol_type = other DNA
ctatagtcctggtctcatca

SEQ ID NO: 72709 - DNA, 20 bp, synthetic construct
  misc_feature 1..20: note = chemically synthesized
  source 1..20: mol_type = other DNA
atcaactggtttcttggact

SEQ ID NO: 72710 - DNA, 20 bp, synthetic construct
  misc_feature 1..20: note = chemically synthesized
  source 1..20: mol_type = other DNA
atttctcacattagctgtgt

SEQ ID NO: 72711 - DNA, 20 bp, synthetic construct
  misc_feature 1..20: note = chemically synthesized
  source 1..20: mol_type = other DNA
gtgttctggtttttaatgtc

SEQ ID NO: 72712 - DNA, 20 bp, synthetic construct
  misc_feature 1..20: note = chemically synthesized
  source 1..20: mol_type = other DNA
ggctaccaccctttcagaca

SEQ ID NO: 72713 - DNA, 20 bp, synthetic construct
  misc_feature 1..20: note = chemically synthesized
  source 1..20: mol_type = other DNA
aaccattgtggaagtcagtg

SEQ ID NO: 72714 - DNA, 20 bp, synthetic construct
  misc_feature 1..20: note = chemically synthesized
  source 1..20: mol_type = other DNA
ccattactgggtatataccc

SEQ ID NO: 72715 - DNA, 20 bp, synthetic construct
  misc_feature 1..20: note = chemically synthesized
  source 1..20: mol_type = other DNA
ctataaagacacatgcacac

SEQ ID NO: 72716 - DNA, 20 bp, synthetic construct
  misc_feature 1..20: note = chemically synthesized
  source 1..20: mol_type = other DNA
taataataaaaatacattat

SEQ ID NO: 72717 - DNA, 20 bp, synthetic construct
  misc_feature 1..20: note = chemically synthesized
  source 1..20: mol_type = other DNA
aacaaaaaccaacaggctac

SEQ ID NO: 72718 - DNA, 20 bp, synthetic construct
  misc_feature 1..20: note = chemically synthesized
  source 1..20: mol_type = other DNA
tctttgtgttcaattttctc

SEQ ID NO: 72719 - DNA, 20 bp, synthetic construct
  misc_feature 1..20: note = chemically synthesized
  source 1..20: mol_type = other DNA
ttctggctctgctagaattc

SEQ ID NO: 72720 - DNA, 20 bp, synthetic construct
  misc_feature 1..20: note = chemically synthesized
  source 1..20: mol_type = other DNA
tctgctagaattctcttgat

SEQ ID NO: 72721 - DNA, 20 bp, synthetic construct
  misc_feature 1..20: note = chemically synthesized
  source 1..20: mol_type = other DNA
aacactatatttgttacctt

SEQ ID NO: 72722 - DNA, 20 bp, synthetic construct
  misc_feature 1..20: note = chemically synthesized
  source 1..20: mol_type = other DNA
accttccttgtttttcaatt

SEQ ID NO: 72723 - DNA, 20 bp, synthetic construct
  misc_feature 1..20: note = chemically synthesized
  source 1..20: mol_type = other DNA
gaaattttcccctgccccaa

SEQ ID NO: 72724 - DNA, 20 bp, synthetic construct
  misc_feature 1..20: note = chemically synthesized
  source 1..20: mol_type = other DNA
tggtgacgcgctactgtagt

SEQ ID NO: 72725 - DNA, 20 bp, synthetic construct
  misc_feature 1..20: note = chemically synthesized
  source 1..20: mol_type = other DNA
aatcacttgaacctgggagg

SEQ ID NO: 72726 - DNA, 20 bp, synthetic construct
  misc_feature 1..20: note = chemically synthesized
  source 1..20: mol_type = other DNA
gaggtggagtttgcagtgag

SEQ ID NO: 72727 - DNA, 20 bp, synthetic construct
  misc_feature 1..20: note = chemically synthesized
  source 1..20: mol_type = other DNA
ggtatccctatcttacatca

SEQ ID NO: 72728 - DNA, 20 bp, synthetic construct
  misc_feature 1..20: note = chemically synthesized
  source 1..20: mol_type = other DNA
agaaagatgaaactcagggg

SEQ ID NO: 72729 - DNA, 20 bp, synthetic construct
  misc_feature 1..20: note = chemically synthesized
  source 1..20: mol_type = other DNA
gggaggtgatttccacatgc

SEQ ID NO: 72730 - DNA, 20 bp, synthetic construct
  misc_feature 1..20: note = chemically synthesized
  source 1..20: mol_type = other DNA
gtgccaggaacttgaatatg

SEQ ID NO: 72731 - DNA, 20 bp, synthetic construct
  misc_feature 1..20: note = chemically synthesized
  source 1..20: mol_type = other DNA
cactcaaggaaagcatataa

SEQ ID NO: 72732 - DNA, 20 bp, synthetic construct
  misc_feature 1..20: note = chemically synthesized
  source 1..20: mol_type = other DNA
tgaggtgggatatcctacag

SEQ ID NO: 72733 - DNA, 20 bp, synthetic construct
  misc_feature 1..20: note = chemically synthesized
  source 1..20: mol_type = other DNA
aagagtatttaaggaactgt

SEQ ID NO: 72734 - DNA, 20 bp, synthetic construct
  misc_feature 1..20: note = chemically synthesized
  source 1..20: mol_type = other DNA
tttaaggaactgtgatagat

SEQ ID NO: 72735 - DNA, 20 bp, synthetic construct
  misc_feature 1..20: note = chemically synthesized
  source 1..20: mol_type = other DNA
aggttttctaatctgggacc

SEQ ID NO: 72736 - DNA, 20 bp, synthetic construct
  misc_feature 1..20: note = chemically synthesized
  source 1..20: mol_type = other DNA
tcttactcatttttctatgt

SEQ ID NO: 72737 - DNA, 20 bp, synthetic construct
  misc_feature 1..20: note = chemically synthesized
  source 1..20: mol_type = other DNA
catttttctatgtagatgtt

SEQ ID NO: 72738 - DNA, 20 bp, synthetic construct
  misc_feature 1..20: note = chemically synthesized
  source 1..20: mol_type = other DNA
agaatatttcttcattccaa

SEQ ID NO: 72739 - DNA, 20 bp, synthetic construct
  misc_feature 1..20: note = chemically synthesized
  source 1..20: mol_type = other DNA
aatgacatgactatctttac

SEQ ID NO: 72740 - DNA, 20 bp, synthetic construct
  misc_feature 1..20: note = chemically synthesized
  source 1..20: mol_type = other DNA
ctggtgcttttgtcatttta

SEQ ID NO: 72741 - DNA, 20 bp, synthetic construct
  misc_feature 1..20: note = chemically synthesized
  source 1..20: mol_type = other DNA
caaatgatcatctttggtca

SEQ ID NO: 72742 - DNA, 20 bp, synthetic construct
  misc_feature 1..20: note = chemically synthesized
  source 1..20: mol_type = other DNA
ttcaacttagttgaaatcaa

SEQ ID NO: 72743 - DNA, 20 bp, synthetic construct
  misc_feature 1..20: note = chemically synthesized
  source 1..20: mol_type = other DNA
ttagttgaaatcaactcagt

SEQ ID NO: 72744 - DNA, 20 bp, synthetic construct
  misc_feature 1..20: note = chemically synthesized
  source 1..20: mol_type = other DNA
tcagtttttgtttatccaga

SEQ ID NO: 72745 - DNA, 20 bp, synthetic construct
  misc_feature 1..20: note = chemically synthesized
  source 1..20: mol_type = other DNA
ttatccagaaagggcttatt

SEQ ID NO: 72746 - DNA, 20 bp, synthetic construct
  misc_feature 1..20: note = chemically synthesized
  source 1..20: mol_type = other DNA
tattgataactttcctgttc

SEQ ID NO: 72747 - DNA, 20 bp, synthetic construct
  misc_feature 1..20: note = chemically synthesized
  source 1..20: mol_type = other DNA
tgttcagaggattttttgtt

SEQ ID NO: 72748 - DNA, 20 bp, synthetic construct
  misc_feature 1..20: note = chemically synthesized
  source 1..20: mol_type = other DNA
aaaaattctgaatcgagttg

SEQ ID NO: 72749 - DNA, 20 bp, synthetic construct
  misc_feature 1..20: note = chemically synthesized
  source 1..20: mol_type = other DNA
attaagatctaagaaagcaa

SEQ ID NO: 72750 - DNA, 20 bp, synthetic construct
  misc_feature 1..20: note = chemically synthesized
  source 1..20: mol_type = other DNA
aaatggaggactcacttttt

SEQ ID NO: 72751 - DNA, 20 bp, synthetic construct
  misc_feature 1..20: note = chemically synthesized
  source 1..20: mol_type = other DNA
gagttctgaacctaaacagg

SEQ ID NO: 72752 - DNA, 20 bp, synthetic construct
  misc_feature 1..20: note = chemically synthesized
  source 1..20: mol_type = other DNA
acacacatgcatgtgtgtct

SEQ ID NO: 72753 - DNA, 20 bp, synthetic construct
  misc_feature 1..20: note = chemically synthesized
  source 1..20: mol_type = other DNA
acatgcatgtgtgtctgtgt

SEQ ID NO: 72754 - DNA, 20 bp, synthetic construct
  misc_feature 1..20: note = chemically synthesized
  source 1..20: mol_type = other DNA
atcatattttttcctctttc

SEQ ID NO: 72755 - DNA, 20 bp, synthetic construct
  misc_feature 1..20: note = chemically synthesized
  source 1..20: mol_type = other DNA
cttgtttatgtagactgtat

SEQ ID NO: 72756 - DNA, 20 bp, synthetic construct
  misc_feature 1..20: note = chemically synthesized
  source 1..20: mol_type = other DNA
agaatgaagctagaatgaag

SEQ ID NO: 72757 - DNA, 20 bp, synthetic construct
  misc_feature 1..20: note = chemically synthesized
  source 1..20: mol_type = other DNA
gaatgaagcagggcttagat

SEQ ID NO: 72758 - DNA, 20 bp, synthetic construct
  misc_feature 1..20: note = chemically synthesized
  source 1..20: mol_type = other DNA
gcttagatctatgatttttc

SEQ ID NO: 72759 - DNA, 20 bp, synthetic construct
  misc_feature 1..20: note = chemically synthesized
  source 1..20: mol_type = other DNA
ataaactcataggccatatt

SEQ ID NO: 72760 - DNA, 20 bp, synthetic construct
  misc_feature 1..20: note = chemically synthesized
  source 1..20: mol_type = other DNA
gagagcttcttaagagcaga

SEQ ID NO: 72761 - DNA, 20 bp, synthetic construct
  misc_feature 1..20: note = chemically synthesized
  source 1..20: mol_type = other DNA
tggtgaatggagctcctaca

SEQ ID NO: 72762 - DNA, 20 bp, synthetic construct
  misc_feature 1..20: note = chemically synthesized
  source 1..20: mol_type = other DNA
ttatccagaaaaactagttc

SEQ ID NO: 72763 - DNA, 20 bp, synthetic construct
  misc_feature 1..20: note = chemically synthesized
  source 1..20: mol_type = other DNA
ccttgggagcatgcatacag

SEQ ID NO: 72764 - DNA, 20 bp, synthetic construct
  misc_feature 1..20: note = chemically synthesized
  source 1..20: mol_type = other DNA
tatggcttcatctctggtga

SEQ ID NO: 72765 - DNA, 20 bp, synthetic construct
  misc_feature 1..20: note = chemically synthesized
  source 1..20: mol_type = other DNA
tgacactgcttatagtgggc

SEQ ID NO: 72766 - DNA, 20 bp, synthetic construct
  misc_feature 1..20: note = chemically synthesized
  source 1..20: mol_type = other DNA
cctgcctctgggtaaatatc

SEQ ID NO: 72767 - DNA, 20 bp, synthetic construct
  misc_feature 1..20: note = chemically synthesized
  source 1..20: mol_type = other DNA
caacggcttcccagtgttgg

SEQ ID NO: 72768 - DNA, 20 bp, synthetic construct
  misc_feature 1..20: note = chemically synthesized
  source 1..20: mol_type = other DNA
cagtgttgggcaggcttctt

SEQ ID NO: 72769 - DNA, 20 bp, synthetic construct
  misc_feature 1..20: note = chemically synthesized
  source 1..20: mol_type = other DNA
ttttattcccaaaatctcag

SEQ ID NO: 72770 - DNA, 20 bp, synthetic construct
  misc_feature 1..20: note = chemically synthesized
  source 1..20: mol_type = other DNA
cctgtcttacttttaatgac

SEQ ID NO: 72771 - DNA, 20 bp, synthetic construct
  misc_feature 1..20: note = chemically synthesized
  source 1..20: mol_type = other DNA
tataataaaaaactttcttt

SEQ ID NO: 72772 - DNA, 20 bp, synthetic construct
  misc_feature 1..20: note = chemically synthesized
  source 1..20: mol_type = other DNA
aaactttcttttttggtttc

SEQ ID NO: 72773 - DNA, 20 bp, synthetic construct
  misc_feature 1..20: note = chemically synthesized
  source 1..20: mol_type = other DNA
gccaatttctctaaagacgt

SEQ ID NO: 72774 - DNA, 20 bp, synthetic construct
  misc_feature 1..20: note = chemically synthesized
  source 1..20: mol_type = other DNA
aagtacttgtgctctggaaa

SEQ ID NO: 72775 - DNA, 20 bp, synthetic construct
  misc_feature 1..20: note = chemically synthesized
  source 1..20: mol_type = other DNA
acaattttttttaaaggaat

SEQ ID NO: 72776 - DNA, 20 bp, synthetic construct
  misc_feature 1..20: note = chemically synthesized
  source 1..20: mol_type = other DNA
tttaaaggaatcccagattt

SEQ ID NO: 72777 - DNA, 20 bp, synthetic construct
  misc_feature 1..20: note = chemically synthesized
  source 1..20: mol_type = other DNA
aattttaatgtgactttctt

SEQ ID NO: 72778 - DNA, 20 bp, synthetic construct
  misc_feature 1..20: note = chemically synthesized
  source 1..20: mol_type = other DNA
acatcctcttattcctcaat

SEQ ID NO: 72779 - DNA, 20 bp, synthetic construct
  misc_feature 1..20: note = chemically synthesized
  source 1..20: mol_type = other DNA
cagtcttctatatgaattca

SEQ ID NO: 72780 - DNA, 20 bp, synthetic construct
  misc_feature 1..20: note = chemically synthesized
  source 1..20: mol_type = other DNA
aattcaatgtgatttaattt

SEQ ID NO: 72781 - DNA, 20 bp, synthetic construct
  misc_feature 1..20: note = chemically synthesized
  source 1..20: mol_type = other DNA
ttttagggattccctagtgt

SEQ ID NO: 72782 - DNA, 20 bp, synthetic construct
  misc_feature 1..20: note = chemically synthesized
  source 1..20: mol_type = other DNA
acatttccttatacaatatg

SEQ ID NO: 72783 - DNA, 20 bp, synthetic construct
  misc_feature 1..20: note = chemically synthesized
  source 1..20: mol_type = other DNA
cttatacaatatgaaatgct

SEQ ID NO: 72784 - DNA, 20 bp, synthetic construct
  misc_feature 1..20: note = chemically synthesized
  source 1..20: mol_type = other DNA
atgaaatgctttgtgatttc

SEQ ID NO: 72785 - DNA, 20 bp, synthetic construct
  misc_feature 1..20: note = chemically synthesized
  source 1..20: mol_type = other DNA
tgctttgtgatttcttctga

SEQ ID NO: 72786 - DNA, 20 bp, synthetic construct
  misc_feature 1..20: note = chemically synthesized
  source 1..20: mol_type = other DNA
taggtgctaaagacttgcct

SEQ ID NO: 72787 - DNA, 20 bp, synthetic construct
  misc_feature 1..20: note = chemically synthesized
  source 1..20: mol_type = other DNA
agactgcagcagagctggta

SEQ ID NO: 72788 - DNA, 20 bp, synthetic construct
  misc_feature 1..20: note = chemically synthesized
  source 1..20: mol_type = other DNA
cagaactgcaacagttcctc

SEQ ID NO: 72789 - DNA, 20 bp, synthetic construct
  misc_feature 1..20: note = chemically synthesized
  source 1..20: mol_type = other DNA
tcaactggatggaagcatta

SEQ ID NO: 72790 - DNA, 20 bp, synthetic construct
  misc_feature 1..20: note = chemically synthesized
  source 1..20: mol_type = other DNA
aaaaggtttctatctcgaaa

SEQ ID NO: 72791 - DNA, 20 bp, synthetic construct
  misc_feature 1..20: note = chemically synthesized
  source 1..20: mol_type = other DNA
cgaaagatggattaggtatg

SEQ ID NO: 72792 - DNA, 20 bp, synthetic construct
  misc_feature 1..20: note = chemically synthesized
  source 1..20: mol_type = other DNA
ttatagcagtgatgcccaga

SEQ ID NO: 72793 - DNA, 20 bp, synthetic construct
  misc_feature 1..20: note = chemically synthesized
  source 1..20: mol_type = other DNA
tgaggacctgaaaaaagcga

SEQ ID NO: 72794 - DNA, 20 bp, synthetic construct
  misc_feature 1..20: note = chemically synthesized
  source 1..20: mol_type = other DNA
ggctgcatgcctaacaagcc

SEQ ID NO: 72795 - DNA, 20 bp, synthetic construct
  misc_feature 1..20: note = chemically synthesized
  source 1..20: mol_type = other DNA
cacagcaagaagacaactaa

SEQ ID NO: 72796 - DNA, 20 bp, synthetic construct
  misc_feature 1..20: note = chemically synthesized
  source 1..20: mol_type = other DNA
catttatgtatatttatgtt

SEQ ID NO: 72797 - DNA, 20 bp, synthetic construct
  misc_feature 1..20: note = chemically synthesized
  source 1..20: mol_type = other DNA
cagttaatcatctccaagca

SEQ ID NO: 72798 - DNA, 20 bp, synthetic construct
  misc_feature 1..20: note = chemically synthesized
  source 1..20: mol_type = other DNA
aagcaggaagattggaggct

SEQ ID NO: 72799 - DNA, 20 bp, synthetic construct
  misc_feature 1..20: note = chemically synthesized
  source 1..20: mol_type = other DNA
agattggaggctcctggttt

SEQ ID NO: 72800 - DNA, 20 bp, synthetic construct
  misc_feature 1..20: note = chemically synthesized
  source 1..20: mol_type = other DNA
ctgcagccccttttttgctg

SEQ ID NO: 72801 - DNA, 20 bp, synthetic construct
  misc_feature 1..20: note = chemically synthesized
  source 1..20: mol_type = other DNA
tggatctccatccccttctt

SEQ ID NO: 72802 - DNA, 20 bp, synthetic construct
  misc_feature 1..20: note = chemically synthesized
  source 1..20: mol_type = other DNA
catcctatgggtgaatcaca

SEQ ID NO: 72803 - DNA, 20 bp, synthetic construct
  misc_feature 1..20: note = chemically synthesized
  source 1..20: mol_type = other DNA
acagggagattagcagtgtg

SEQ ID NO: 72804 - DNA, 20 bp, synthetic construct
  misc_feature 1..20: note = chemically synthesized
  source 1..20: mol_type = other DNA
agcagtgtgggctgcttcct

SEQ ID NO: 72805 - DNA, 20 bp, synthetic construct
  misc_feature 1..20: note = chemically synthesized
  source 1..20: mol_type = other DNA
ggttccctcctggcaatggc

SEQ ID NO: 72806 - DNA, 20 bp, synthetic construct
  misc_feature 1..20: note = chemically synthesized
  source 1..20: mol_type = other DNA
ccctcctggcaatggcatat

SEQ ID NO: 72807 - DNA, 20 bp, synthetic construct
  misc_feature 1..20: note = chemically synthesized
  source 1..20: mol_type = other DNA
gccatccgcaatcctttgag

SEQ ID NO: 72808 - DNA, 20 bp, synthetic construct
  misc_feature 1..20: note = chemically synthesized
  source 1..20: mol_type = other DNA
agtcatagcgttaggagtgg

SEQ ID NO: 72809 - DNA, 20 bp, synthetic construct
  misc_feature 1..20: note = chemically synthesized
  source 1..20: mol_type = other DNA
taggagtgggagtgtttcta

SEQ ID NO: 72810 - DNA, 20 bp, synthetic construct
  misc_feature 1..20: note = chemically synthesized
  source 1..20: mol_type = other DNA
tgcaaatctcatgttatcac

SEQ ID NO: 72811 - DNA, 20 bp, synthetic construct
  misc_feature 1..20: note = chemically synthesized
  source 1..20: mol_type = other DNA
ctccaccaagaaatcatgag

SEQ ID NO: 72812 - DNA, 20 bp, synthetic construct
  misc_feature 1..20: note = chemically synthesized
  source 1..20: mol_type = other DNA
attcttaatactgtcatagg

SEQ ID NO: 72813 - DNA, 20 bp, synthetic construct
  misc_feature 1..20: note = chemically synthesized
  source 1..20: mol_type = other DNA
ttatcttctatgttacagtg

SEQ ID NO: 72814 - DNA, 20 bp, synthetic construct
  misc_feature 1..20: note = chemically synthesized
  source 1..20: mol_type = other DNA
tgatgggtttgacattcatt

SEQ ID NO: 72815 - DNA, 20 bp, synthetic construct
  misc_feature 1..20: note = chemically synthesized
  source 1..20: mol_type = other DNA
tatccgccttttatctaaac

SEQ ID NO: 72816 - DNA, 20 bp, synthetic construct
  misc_feature 1..20: note = chemically synthesized
  source 1..20: mol_type = other DNA
cagtgtgcacatttgtgcat

SEQ ID NO: 72817 - DNA, 20 bp, synthetic construct
  misc_feature 1..20: note = chemically synthesized
  source 1..20: mol_type = other DNA
acatttgtgcatacatgttt

SEQ ID NO: 72818 - DNA, 20 bp, synthetic construct
  misc_feature 1..20: note = chemically synthesized
  source 1..20: mol_type = other DNA
agttagggtactctctaggg

SEQ ID NO: 72819 - DNA, 20 bp, synthetic construct
  misc_feature 1..20: note = chemically synthesized
  source 1..20: mol_type = other DNA
cacttacagagtatttcaat

SEQ ID NO: 72820 - DNA, 20 bp, synthetic construct
  misc_feature 1..20: note = chemically synthesized
  source 1..20: mol_type = other DNA
aatacattccttgcaggatg

SEQ ID NO: 72821 - DNA, 20 bp, synthetic construct
  misc_feature 1..20: note = chemically synthesized
  source 1..20: mol_type = other DNA
tcttagaaggaaaaacctag

SEQ ID NO: 72822 - DNA, 20 bp, synthetic construct
  misc_feature 1..20: note = chemically synthesized
  source 1..20: mol_type = other DNA
agctcgtaaaaaagtaaaaa

SEQ ID NO: 72823 - DNA, 20 bp, synthetic construct
  misc_feature 1..20: note = chemically synthesized
  source 1..20: mol_type = other DNA
taaaaagtgagtttttaaga

SEQ ID NO: 72824 - DNA, 20 bp, synthetic construct
  misc_feature 1..20: note = chemically synthesized
  source 1..20: mol_type = other DNA
taagagtatgtttgctcttc

SEQ ID NO: 72825 - DNA, 20 bp, synthetic construct
  misc_feature 1..20: note = chemically synthesized
  source 1..20: mol_type = other DNA
tcagagggaaaaattagaaa

SEQ ID NO: 72826 - DNA, 20 bp, synthetic construct
  misc_feature 1..20: note = chemically synthesized
  source 1..20: mol_type = other DNA
agaccaacaatgttgagaga

SEQ ID NO: 72827 - DNA, 20 bp, synthetic construct
  misc_feature 1..20: note = chemically synthesized
  source 1..20: mol_type = other DNA
gactaaaaaattgtggtggg

SEQ ID NO: 72828 - DNA, 20 bp, synthetic construct
  misc_feature 1..20: note = chemically synthesized
  source 1..20: mol_type = other DNA
tttttgtgtgactgtgtact

SEQ ID NO: 72829 - DNA, 20 bp, synthetic construct
  misc_feature 1..20: note = chemically synthesized
  source 1..20: mol_type = other DNA
tgtactaaaagcttctttta

SEQ ID NO: 72830 - DNA, 20 bp, synthetic construct
  misc_feature 1..20: note = chemically synthesized
  source 1..20: mol_type = other DNA
tagactgatttaattgtgaa

SEQ ID NO: 72831 - DNA, 20 bp, synthetic construct
  misc_feature 1..20: note = chemically synthesized
  source 1..20: mol_type = other DNA
ctcatttcggataattccca

SEQ ID NO: 72832 - DNA, 20 bp, synthetic construct
  misc_feature 1..20: note = chemically synthesized
  source 1..20: mol_type = other DNA
tgtagctgaggaaagcctgc

SEQ ID NO: 72833 - DNA, 20 bp, synthetic construct
  misc_feature 1..20: note = chemically synthesized
  source 1..20: mol_type = other DNA
ctaaattttgaggataggct

SEQ ID NO: 72834 - DNA, 20 bp, synthetic construct
  misc_feature 1..20: note = chemically synthesized
  source 1..20: mol_type = other DNA
atacatttgatggaaggact

SEQ ID NO: 72835 - DNA, 20 bp, synthetic construct
  misc_feature 1..20: note = chemically synthesized
  source 1..20: mol_type = other DNA
ccaaggccaggacttcaagc

SEQ ID NO: 72836 - DNA, 20 bp, synthetic construct
  misc_feature 1..20: note = chemically synthesized
  source 1..20: mol_type = other DNA
gccacatgtgtgagaaataa

SEQ ID NO: 72837 - DNA, 20 bp, synthetic construct
  misc_feature 1..20: note = chemically synthesized
  source 1..20: mol_type = other DNA
ctcactgaataggtataagg

SEQ ID NO: 72838 - DNA, 20 bp, synthetic construct
  misc_feature 1..20: note = chemically synthesized
  source 1..20: mol_type = other DNA
tgcttactttggataagcag

SEQ ID NO: 72839 - DNA, 20 bp, synthetic construct
  misc_feature 1..20: note = chemically synthesized
  source 1..20: mol_type = other DNA
gaagcccaaattattgggaa

SEQ ID NO: 72840 - DNA, 20 bp, synthetic construct
  misc_feature 1..20: note = chemically synthesized
  source 1..20: mol_type = other DNA
attaatgacgttgtccttaa

SEQ ID NO: 72841 - DNA, 20 bp, synthetic construct
  misc_feature 1..20: note = chemically synthesized
  source 1..20: mol_type = other DNA
tctgttcttggtgccttcat

SEQ ID NO: 72842 - DNA, 20 bp, synthetic construct
  misc_feature 1..20: note = chemically synthesized
  source 1..20: mol_type = other DNA
tttaaagaaaatatttttca

SEQ ID NO: 72843 - DNA, 20 bp, synthetic construct
  misc_feature 1..20: note = chemically synthesized
  source 1..20: mol_type = other DNA
gtcatatttttaataaggag

SEQ ID NO: 72844 - DNA, 20 bp, synthetic construct
  misc_feature 1..20: note = chemically synthesized
  source 1..20: mol_type = other DNA
ccttcccactttaccacatg

SEQ ID NO: 72845 - DNA, 20 bp, synthetic construct
  misc_feature 1..20: note = chemically synthesized
  source 1..20: mol_type = other DNA
tgtgcaaagcacttcattga

SEQ ID NO: 72846 - DNA, 20 bp, synthetic construct
  misc_feature 1..20: note = chemically synthesized
  source 1..20: mol_type = other DNA
atgaccaatcaataaataac

SEQ ID NO: 72847 - DNA, 20 bp, synthetic construct
  misc_feature 1..20: note = chemically synthesized
  source 1..20: mol_type = other DNA
agaaattcaggtggcattac

SEQ ID NO: 72848 - DNA, 20 bp, synthetic construct
  misc_feature 1..20: note = chemically synthesized
  source 1..20: mol_type = other DNA
cctgttctcccccttttcca

SEQ ID NO: 72849 - DNA, 20 bp, synthetic construct
  misc_feature 1..20: note = chemically synthesized
  source 1..20: mol_type = other DNA
agtaactttaaacaataact

SEQ ID NO: 72850 - DNA, 20 bp, synthetic construct
  misc_feature 1..20: note = chemically synthesized
  source 1..20: mol_type = other DNA
ttataagtactcatcatacc

SEQ ID NO: 72851 - DNA, 20 bp, synthetic construct
  misc_feature 1..20: note = chemically synthesized
  source 1..20: mol_type = other DNA
attcccttatggtaatgtca

SEQ ID NO: 72852 - DNA, 20 bp, synthetic construct
  misc_feature 1..20: note = chemically synthesized
  source 1..20: mol_type = other DNA
tggtaatgtcaaaatgtttt

SEQ ID NO: 72853 - DNA, 20 bp, synthetic construct
  misc_feature 1..20: note = chemically synthesized
  source 1..20: mol_type = other DNA
tgatcagaacctgctactac

SEQ ID NO: 72854 - DNA, 20 bp, synthetic construct
  misc_feature 1..20: note = chemically synthesized
  source 1..20: mol_type = other DNA
tactacagattcattttctc

SEQ ID NO: 72855 - DNA, 20 bp, synthetic construct
  misc_feature 1..20: note = chemically synthesized
  source 1..20: mol_type = other DNA
tgtacattttacaaacttta

SEQ ID NO: 72856 - DNA, 20 bp, synthetic construct
  misc_feature 1..20: note = chemically synthesized
  source 1..20: mol_type = other DNA
ttacaaactttaatttgttt

SEQ ID NO: 72857 - DNA, 20 bp, synthetic construct
  misc_feature 1..20: note = chemically synthesized
  source 1..20: mol_type = other DNA
aactttaatttgtttacttg

SEQ ID NO: 72858 - DNA, 20 bp, synthetic construct
  misc_feature 1..20: note = chemically synthesized
  source 1..20: mol_type = other DNA
atttgtttacttgtttcgtt

SEQ ID NO: 72859 - DNA, 20 bp, synthetic construct
  misc_feature 1..20: note = chemically synthesized
  source 1..20: mol_type = other DNA
ttgttcttttcacctgtacg

SEQ ID NO: 72860 - DNA, 20 bp, synthetic construct
  misc_feature 1..20: note = chemically synthesized
  source 1..20: mol_type = other DNA
taatatagtagcatttaatt

SEQ ID NO: 72861 - DNA, 20 bp, synthetic construct
  misc_feature 1..20: note = chemically synthesized
  source 1..20: mol_type = other DNA
gtaaatattttctttctagt

SEQ ID NO: 72862 - DNA, 20 bp, synthetic construct
  misc_feature 1..20: note = chemically synthesized
  source 1..20: mol_type = other DNA
attttctttctagtgcctgc

SEQ ID NO: 72863 - DNA, 20 bp, synthetic construct
  misc_feature 1..20: note = chemically synthesized
  source 1..20: mol_type = other DNA
tttctttgtggctgttctta

SEQ ID NO: 72864 - DNA, 20 bp, synthetic construct
  misc_feature 1..20: note = chemically synthesized
  source 1..20: mol_type = other DNA
tgttcttaatgggattgtgt

SEQ ID NO: 72865 - DNA, 20 bp, synthetic construct
  misc_feature 1..20: note = chemically synthesized
  source 1..20: mol_type = other DNA
ttattggtgtatggaaatgc

SEQ ID NO: 72866 - DNA, 20 bp, synthetic construct
  misc_feature 1..20: note = chemically synthesized
  source 1..20: mol_type = other DNA
gaaatgctactgatttttgt

SEQ ID NO: 72867 - DNA, 20 bp, synthetic construct
  misc_feature 1..20: note = chemically synthesized
  source 1..20: mol_type = other DNA
gtatcctgaaaccttgctaa

SEQ ID NO: 72868 - DNA, 20 bp, synthetic construct
  misc_feature 1..20: note = chemically synthesized
  source 1..20: mol_type = other DNA
gcagccttttggaagaatct

SEQ ID NO: 72869 - DNA, 20 bp, synthetic construct
  misc_feature 1..20: note = chemically synthesized
  source 1..20: mol_type = other DNA
tcatatcatcagcaaagaga

SEQ ID NO: 72870 - DNA, 20 bp, synthetic construct
  misc_feature 1..20: note = chemically synthesized
  source 1..20: mol_type = other DNA
tcatcagcaaagagagatag

SEQ ID NO: 72871 - DNA, 20 bp, synthetic construct
  misc_feature 1..20: note = chemically synthesized
  source 1..20: mol_type = other DNA
gccatttctttctttctctc

SEQ ID NO: 72872 - DNA, 20 bp, synthetic construct
  misc_feature 1..20: note = chemically synthesized
  source 1..20: mol_type = other DNA
aatgggaatccttgtcttgt

SEQ ID NO: 72873 - DNA, 20 bp, synthetic construct
  misc_feature 1..20: note = chemically synthesized
  source 1..20: mol_type = other DNA
cagttttcgaggagaatagt

SEQ ID NO: 72874 - DNA, 20 bp, synthetic construct
  misc_feature 1..20: note = chemically synthesized
  source 1..20: mol_type = other DNA
tccagcttttgcccattcag

SEQ ID NO: 72875 - DNA, 20 bp, synthetic construct
  misc_feature 1..20: note = chemically synthesized
  source 1..20: mol_type = other DNA
cattcagtatggttttggtt

SEQ ID NO: 72876 - DNA, 20 bp, synthetic construct
  misc_feature 1..20: note = chemically synthesized
  source 1..20: mol_type = other DNA
ttggttatgggtttttcata

SEQ ID NO: 72877 - DNA, 20 bp, synthetic construct
  misc_feature 1..20: note = chemically synthesized
  source 1..20: mol_type = other DNA
cctttgatgcctagtctgtt

SEQ ID NO: 72878 - DNA, 20 bp, synthetic construct
  misc_feature 1..20: note = chemically synthesized
  source 1..20: mol_type = other DNA
agggatgttgaattttattg

SEQ ID NO: 72879 - DNA, 20 bp, synthetic construct
  misc_feature 1..20: note = chemically synthesized
  source 1..20: mol_type = other DNA
tcagtctattgagatgatca

SEQ ID NO: 72880 - DNA, 20 bp, synthetic construct
  misc_feature 1..20: note = chemically synthesized
  source 1..20: mol_type = other DNA
aacaacacaaataaataaat

SEQ ID NO: 72881 - DNA, 20 bp, synthetic construct
  misc_feature 1..20: note = chemically synthesized
  source 1..20: mol_type = other DNA
aaataaaagctttccaggct

SEQ ID NO: 72882 - DNA, 20 bp, synthetic construct
  misc_feature 1..20: note = chemically synthesized
  source 1..20: mol_type = other DNA
ttcttcacagtattagaaaa

SEQ ID NO: 72883 - DNA, 20 bp, synthetic construct
  misc_feature 1..20: note = chemically synthesized
  source 1..20: mol_type = other DNA
tcggaaggctgaggcaggag

SEQ ID NO: 72884 - DNA, 20 bp, synthetic construct
  misc_feature 1..20: note = chemically synthesized
  source 1..20: mol_type = other DNA
agtggaacctaattaaacta

SEQ ID NO: 72885 - DNA, 20 bp, synthetic construct
  misc_feature 1..20: note = chemically synthesized
  source 1..20: mol_type = other DNA
caaatgtccaacaatgatag

SEQ ID NO: 72886 - DNA, 20 bp, synthetic construct
  misc_feature 1..20: note = chemically synthesized
  source 1..20: mol_type = other DNA
agtataataataataataaa

SEQ ID NO: 72887 - DNA, 20 bp, synthetic construct
  misc_feature 1..20: note = chemically synthesized
  source 1..20: mol_type = other DNA
ctatttttaaaaagccaaaa

SEQ ID NO: 72888 - DNA, 20 bp, synthetic construct
  misc_feature 1..20: note = chemically synthesized
  source 1..20: mol_type = other DNA
ttagttcaaccactgcagaa

SEQ ID NO: 72889 - DNA, 20 bp, synthetic construct
  misc_feature 1..20: note = chemically synthesized
  source 1..20: mol_type = other DNA
cacttgcatgttcactgtaa

SEQ ID NO: 72890 - DNA, 20 bp, synthetic construct
  misc_feature 1..20: note = chemically synthesized
  source 1..20: mol_type = other DNA
tgaacctggtatgaaatggg

SEQ ID NO: 72891 - DNA, 20 bp, synthetic construct
  misc_feature 1..20: note = chemically synthesized
  source 1..20: mol_type = other DNA
ttgaggttcctgtggatcag

SEQ ID NO: 72892 - DNA, 20 bp, synthetic construct
  misc_feature 1..20: note = chemically synthesized
  source 1..20: mol_type = other DNA
cacatggatatactgtgtac

SEQ ID NO: 72893 - DNA, 20 bp, synthetic construct
  misc_feature 1..20: note = chemically synthesized
  source 1..20: mol_type = other DNA
gtagaggtggcattggagta

SEQ ID NO: 72894 - DNA, 20 bp, synthetic construct
  misc_feature 1..20: note = chemically synthesized
  source 1..20: mol_type = other DNA
cgaggacattggttgagcgt

SEQ ID NO: 72895 - DNA, 20 bp, synthetic construct
  misc_feature 1..20: note = chemically synthesized
  source 1..20: mol_type = other DNA
ggaaagaggaaactctgggg

SEQ ID NO: 72896 - DNA, 20 bp, synthetic construct
  misc_feature 1..20: note = chemically synthesized
  source 1..20: mol_type = other DNA
gtgccaggaacaggaataag

SEQ ID NO: 72897 - DNA, 20 bp, synthetic construct
  misc_feature 1..20: note = chemically synthesized
  source 1..20: mol_type = other DNA
gatgcagcgaagagaagata

SEQ ID NO: 72898 - DNA, 20 bp, synthetic construct
  misc_feature 1..20: note = chemically synthesized
  source 1..20: mol_type = other DNA
acagactttttcatctcaac

SEQ ID NO: 72899 - DNA, 20 bp, synthetic construct
  misc_feature 1..20: note = chemically synthesized
  source 1..20: mol_type = other DNA
atctcaacacatgtttcaag

SEQ ID NO: 72900 - DNA, 20 bp, synthetic construct
  misc_feature 1..20: note = chemically synthesized
  source 1..20: mol_type = other DNA
cacatgtttcaaggcaggct

SEQ ID NO: 72901 - DNA, 20 bp, synthetic construct
  misc_feature 1..20: note = chemically synthesized
  source 1..20: mol_type = other DNA
gaagtttcaaatgtggtgct

SEQ ID NO: 72902 - DNA, 20 bp, synthetic construct
  misc_feature 1..20: note = chemically synthesized
  source 1..20: mol_type = other DNA
ttcaaatgtggtgctcatgg

SEQ ID NO: 72903 - DNA, 20 bp, synthetic construct
  misc_feature 1..20: note = chemically synthesized
  source 1..20: mol_type = other DNA
tttagactaaatgtgacgtc

SEQ ID NO: 72904 - DNA, 20 bp, synthetic construct
  misc_feature 1..20: note = chemically synthesized
  source 1..20: mol_type = other DNA
atttttctccacagagggct

SEQ ID NO: 72905 - DNA, 20 bp, synthetic construct
  misc_feature 1..20: note = chemically synthesized
  source 1..20: mol_type = other DNA
tatttcaaaactaaacaaag

SEQ ID NO: 72906 - DNA, 20 bp, synthetic construct
  misc_feature 1..20: note = chemically synthesized
  source 1..20: mol_type = other DNA
aacaaaacactatgtctata

SEQ ID NO: 72907 - DNA, 20 bp, synthetic construct
  misc_feature 1..20: note = chemically synthesized
  source 1..20: mol_type = other DNA
tgtgaaacataaaataaaaa

SEQ ID NO: 72908 - DNA, 20 bp, synthetic construct
  misc_feature 1..20: note = chemically synthesized
  source 1..20: mol_type = other DNA
ggcatgatgcattttttaaa

SEQ ID NO: 72909 - DNA, 20 bp, synthetic construct
  misc_feature 1..20: note = chemically synthesized
  source 1..20: mol_type = other DNA
gcattttttaaaatgtgttt

SEQ ID NO: 72910 - DNA, 20 bp, synthetic construct
  misc_feature 1..20: note = chemically synthesized
  source 1..20: mol_type = other DNA
aaatgtgttttttagattaa

SEQ ID NO: 72911 - DNA, 20 bp, synthetic construct
  misc_feature 1..20: note = chemically synthesized
  source 1..20: mol_type = other DNA
attattgctaaatatgaata

SEQ ID NO: 72912 - DNA, 20 bp, synthetic construct
  misc_feature 1..20: note = chemically synthesized
  source 1..20: mol_type = other DNA
taggattgaggctgcagaaa

SEQ ID NO: 72913 - DNA, 20 bp, synthetic construct
  misc_feature 1..20: note = chemically synthesized
  source 1..20: mol_type = other DNA
ggtagtaaaaactgataagg

SEQ ID NO: 72914 - DNA, 20 bp, synthetic construct
  misc_feature 1..20: note = chemically synthesized
  source 1..20: mol_type = other DNA
taaggcagggatttcagtgt

SEQ ID NO: 72915 - DNA, 20 bp, synthetic construct
  misc_feature 1..20: note = chemically synthesized
  source 1..20: mol_type = other DNA
atgcggctccttttttgctg

SEQ ID NO: 72916 - DNA, 20 bp, synthetic construct
  misc_feature 1..20: note = chemically synthesized
  source 1..20: mol_type = other DNA
tcgatctccatccccttctt

SEQ ID NO: 72917 - DNA, 20 bp, synthetic construct
  misc_feature 1..20: note = chemically synthesized
  source 1..20: mol_type = other DNA
acagtcttcacgaacccatg

SEQ ID NO: 72918 - DNA, 20 bp, synthetic construct
  misc_feature 1..20: note = chemically synthesized
  source 1..20: mol_type = other DNA
acaaagaggttatccatggg

SEQ ID NO: 72919 - DNA, 20 bp, synthetic construct
  misc_feature 1..20: note = chemically synthesized
  source 1..20: mol_type = other DNA
atccatggggcctgcttctt

SEQ ID NO: 72920 - DNA, 20 bp, synthetic construct
  misc_feature 1..20: note = chemically synthesized
  source 1..20: mol_type = other DNA
ttctcctgtcaatggcctat

SEQ ID NO: 72921 - DNA, 20 bp, synthetic construct
  misc_feature 1..20: note = chemically synthesized
  source 1..20: mol_type = other DNA
tgaccgtttcattatcatcc

SEQ ID NO: 72922 - DNA, 20 bp, synthetic construct
  misc_feature 1..20: note = chemically synthesized
  source 1..20: mol_type = other DNA
tgcctccaattctgccactc

SEQ ID NO: 72923 - DNA, 20 bp, synthetic construct
  misc_feature 1..20: note = chemically synthesized
  source 1..20: mol_type = other DNA
cacttatacccagctattct

SEQ ID NO: 72924 - DNA, 20 bp, synthetic construct
  misc_feature 1..20: note = chemically synthesized
  source 1..20: mol_type = other DNA
atacccagctattctggttg

SEQ ID NO: 72925 - DNA, 20 bp, synthetic construct
  misc_feature 1..20: note = chemically synthesized
  source 1..20: mol_type = other DNA
gatcagtgagactttcattc

SEQ ID NO: 72926 - DNA, 20 bp, synthetic construct
  misc_feature 1..20: note = chemically synthesized
  source 1..20: mol_type = other DNA
cgcctattttctgggcacag

SEQ ID NO: 72927 - DNA, 20 bp, synthetic construct
  misc_feature 1..20: note = chemically synthesized
  source 1..20: mol_type = other DNA
ttttcagaattttgtgatct

SEQ ID NO: 72928 - DNA, 20 bp, synthetic construct
  misc_feature 1..20: note = chemically synthesized
  source 1..20: mol_type = other DNA
ggccttttgagtaattggaa

SEQ ID NO: 72929 - DNA, 20 bp, synthetic construct
  misc_feature 1..20: note = chemically synthesized
  source 1..20: mol_type = other DNA
atctcttgtatcagtgttag

SEQ ID NO: 72930 - DNA, 20 bp, synthetic construct
  misc_feature 1..20: note = chemically synthesized
  source 1..20: mol_type = other DNA
aatgtattcatatgtagatg

SEQ ID NO: 72931 - DNA, 20 bp, synthetic construct
  misc_feature 1..20: note = chemically synthesized
  source 1..20: mol_type = other DNA
gaaaaatgtgcaattgcaga

SEQ ID NO: 72932 - DNA, 20 bp, synthetic construct
  misc_feature 1..20: note = chemically synthesized
  source 1..20: mol_type = other DNA
tcaaaactactctatttcag

SEQ ID NO: 72933 - DNA, 20 bp, synthetic construct
  misc_feature 1..20: note = chemically synthesized
  source 1..20: mol_type = other DNA
ttttttttttttttttttaa

SEQ ID NO: 72934 - DNA, 20 bp, synthetic construct
  misc_feature 1..20: note = chemically synthesized
  source 1..20: mol_type = other DNA
agggcacatgtgcaggatgt

SEQ ID NO: 72935 - DNA, 20 bp, synthetic construct
  misc_feature 1..20: note = chemically synthesized
  source 1..20: mol_type = other DNA
cataggtaaatgtgtgccat

SEQ ID NO: 72936 - DNA, 20 bp, synthetic construct
  misc_feature 1..20: note = chemically synthesized
  source 1..20: mol_type = other DNA
ccatttctgtgtgagaacat

SEQ ID NO: 72937 - DNA, 20 bp, synthetic construct
  misc_feature 1..20: note = chemically synthesized
  source 1..20: mol_type = other DNA
tctgtgtgagaacatgtgtg

SEQ ID NO: 72938 - DNA, 20 bp, synthetic construct
  misc_feature 1..20: note = chemically synthesized
  source 1..20: mol_type = other DNA
gtttggttttctgttcctgt

SEQ ID NO: 72939 - DNA, 20 bp, synthetic construct
  misc_feature 1..20: note = chemically synthesized
  source 1..20: mol_type = other DNA
tgtgttagtttgatgaggat

SEQ ID NO: 72940 - DNA, 20 bp, synthetic construct
  misc_feature 1..20: note = chemically synthesized
  source 1..20: mol_type = other DNA
tattccatggtatatatgta

SEQ ID NO: 72941 - DNA, 20 bp, synthetic construct
  misc_feature 1..20: note = chemically synthesized
  source 1..20: mol_type = other DNA
ctatcattgatggacatttg

SEQ ID NO: 72942 - DNA, 20 bp, synthetic construct
  misc_feature 1..20: note = chemically synthesized
  source 1..20: mol_type = other DNA
aagcatgcctgtatttttat

SEQ ID NO: 72943 - DNA, 20 bp, synthetic construct
  misc_feature 1..20: note = chemically synthesized
  source 1..20: mol_type = other DNA
atgcctgtatttttataata

SEQ ID NO: 72944 - DNA, 20 bp, synthetic construct
  misc_feature 1..20: note = chemically synthesized
  source 1..20: mol_type = other DNA
ctttgggtatatacccagta

SEQ ID NO: 72945 - DNA, 20 bp, synthetic construct
  misc_feature 1..20: note = chemically synthesized
  source 1..20: mol_type = other DNA
attgctgagtcaagtggtat

SEQ ID NO: 72946 - DNA, 20 bp, synthetic construct
  misc_feature 1..20: note = chemically synthesized
  source 1..20: mol_type = other DNA
aaaggctacactctcttcca

SEQ ID NO: 72947 - DNA, 20 bp, synthetic construct
  misc_feature 1..20: note = chemically synthesized
  source 1..20: mol_type = other DNA
tctgcaaccttgccagcaac

SEQ ID NO: 72948 - DNA, 20 bp, synthetic construct
  misc_feature 1..20: note = chemically synthesized
  source 1..20: mol_type = other DNA
ggtgtgagatggtatcccat

SEQ ID NO: 72949 - DNA, 20 bp, synthetic construct
  misc_feature 1..20: note = chemically synthesized
  source 1..20: mol_type = other DNA
gagatggtatcccattgtgg

SEQ ID NO: 72950 - DNA, 20 bp, synthetic construct
  misc_feature 1..20: note = chemically synthesized
  source 1..20: mol_type = other DNA
ttttctaatgaccagtaagg

SEQ ID NO: 72951 - DNA, 20 bp, synthetic construct
  misc_feature 1..20: note = chemically synthesized
  source 1..20: mol_type = other DNA
ggttgagctttttttttttc

SEQ ID NO: 72952 - DNA, 20 bp, synthetic construct
  misc_feature 1..20: note = chemically synthesized
  source 1..20: mol_type = other DNA
cattccccactttttaatgg

SEQ ID NO: 72953 - DNA, 20 bp, synthetic construct
  misc_feature 1..20: note = chemically synthesized
  source 1..20: mol_type = other DNA
gggttgtttttttcttgtaa

SEQ ID NO: 72954 - DNA, 20 bp, synthetic construct
  misc_feature 1..20: note = chemically synthesized
  source 1..20: mol_type = other DNA
ggttgtctgttatctctgat

SEQ ID NO: 72955 - DNA, 20 bp, synthetic construct
  misc_feature 1..20: note = chemically synthesized
  source 1..20: mol_type = other DNA
atttgtcaatttttttttgc

SEQ ID NO: 72956 - DNA, 20 bp, synthetic construct
  misc_feature 1..20: note = chemically synthesized
  source 1..20: mol_type = other DNA
ttgcagttgcttttggtgtc

SEQ ID NO: 72957 - DNA, 20 bp, synthetic construct
  misc_feature 1..20: note = chemically synthesized
  source 1..20: mol_type = other DNA
aaatgatacaatgtcatcta

SEQ ID NO: 72958 - DNA, 20 bp, synthetic construct
  misc_feature 1..20: note = chemically synthesized
  source 1..20: mol_type = other DNA
gcagcaacttggaaatctca

SEQ ID NO: 72959 - DNA, 20 bp, synthetic construct
  misc_feature 1..20: note = chemically synthesized
  source 1..20: mol_type = other DNA
gctaattttcatccttttat

SEQ ID NO: 72960 - DNA, 20 bp, synthetic construct
  misc_feature 1..20: note = chemically synthesized
  source 1..20: mol_type = other DNA
tccttttataattgatttta

SEQ ID NO: 72961 - DNA, 20 bp, synthetic construct
  misc_feature 1..20: note = chemically synthesized
  source 1..20: mol_type = other DNA
agtttattatgtattatctc

SEQ ID NO: 72962 - DNA, 20 bp, synthetic construct
  misc_feature 1..20: note = chemically synthesized
  source 1..20: mol_type = other DNA
atttttagtgtacgtatttt

SEQ ID NO: 72963 - DNA, 20 bp, synthetic construct
  misc_feature 1..20: note = chemically synthesized
  source 1..20: mol_type = other DNA
gtgtacgtattttcccagtt

SEQ ID NO: 72964 - DNA, 20 bp, synthetic construct
  misc_feature 1..20: note = chemically synthesized
  source 1..20: mol_type = other DNA
tcttgctatatacacaattt

SEQ ID NO: 72965 - DNA, 20 bp, synthetic construct
  misc_feature 1..20: note = chemically synthesized
  source 1..20: mol_type = other DNA
tatcaaagcccttgctgact

SEQ ID NO: 72966 - DNA, 20 bp, synthetic construct
  misc_feature 1..20: note = chemically synthesized
  source 1..20: mol_type = other DNA
ctaatttatttgtacatatc

SEQ ID NO: 72967 - DNA, 20 bp, synthetic construct
  misc_feature 1..20: note = chemically synthesized
  source 1..20: mol_type = other DNA
tgtacatatcctatgtttaa

SEQ ID NO: 72968 - DNA, 20 bp, synthetic construct
  misc_feature 1..20: note = chemically synthesized
  source 1..20: mol_type = other DNA
tatcctatgtttaaaagggt

SEQ ID NO: 72969 - DNA, 20 bp, synthetic construct
  misc_feature 1..20: note = chemically synthesized
  source 1..20: mol_type = other DNA
atccaaatttaaaacaagtg

SEQ ID NO: 72970 - DNA, 20 bp, synthetic construct
  misc_feature 1..20: note = chemically synthesized
  source 1..20: mol_type = other DNA
tggagagtgtgggtctcaaa

SEQ ID NO: 72971 - DNA, 20 bp, synthetic construct
  misc_feature 1..20: note = chemically synthesized
  source 1..20: mol_type = other DNA
tctcaaaaaaggcttgaggt

SEQ ID NO: 72972 - DNA, 20 bp, synthetic construct
  misc_feature 1..20: note = chemically synthesized
  source 1..20: mol_type = other DNA
ggttatggcttgaaataagg

SEQ ID NO: 72973 - DNA, 20 bp, synthetic construct
  misc_feature 1..20: note = chemically synthesized
  source 1..20: mol_type = other DNA
cccttcagctgagacctgaa

SEQ ID NO: 72974 - DNA, 20 bp, synthetic construct
  misc_feature 1..20: note = chemically synthesized
  source 1..20: mol_type = other DNA
tgtgtggagacctcagctag

SEQ ID NO: 72975 - DNA, 20 bp, synthetic construct
  misc_feature 1..20: note = chemically synthesized
  source 1..20: mol_type = other DNA
ggaaggtggctactggaaga

SEQ ID NO: 72976 - DNA, 20 bp, synthetic construct
  misc_feature 1..20: note = chemically synthesized
  source 1..20: mol_type = other DNA
ggtggctactggaagagggt

SEQ ID NO: 72977 - DNA, 20 bp, synthetic construct
  misc_feature 1..20: note = chemically synthesized
  source 1..20: mol_type = other DNA
atggccttattggtcatcat

SEQ ID NO: 72978 - DNA, 20 bp, synthetic construct
  misc_feature 1..20: note = chemically synthesized
  source 1..20: mol_type = other DNA
aaagaagctgcataattcat

SEQ ID NO: 72979 - DNA, 20 bp, synthetic construct
  misc_feature 1..20: note = chemically synthesized
  source 1..20: mol_type = other DNA
tatttaaggtctaaatataa

SEQ ID NO: 72980 - DNA, 20 bp, synthetic construct
  misc_feature 1..20: note = chemically synthesized
  source 1..20: mol_type = other DNA
agtgccaaaagaaaggcagt

SEQ ID NO: 72981 - DNA, 20 bp, synthetic construct
  misc_feature 1..20: note = chemically synthesized
  source 1..20: mol_type = other DNA
aatgagtcaaaataataaac

SEQ ID NO: 72982 - DNA, 20 bp, synthetic construct
  misc_feature 1..20: note = chemically synthesized
  source 1..20: mol_type = other DNA
tagacttttaaaaacaaaat

SEQ ID NO: 72983 - DNA, 20 bp, synthetic construct
  misc_feature 1..20: note = chemically synthesized
  source 1..20: mol_type = other DNA
taggagaaagcaggatagat

SEQ ID NO: 72984 - DNA, 20 bp, synthetic construct
  misc_feature 1..20: note = chemically synthesized
  source 1..20: mol_type = other DNA
gtgtcattcactgaagtaga

SEQ ID NO: 72985 - DNA, 20 bp, synthetic construct
  misc_feature 1..20: note = chemically synthesized
  source 1..20: mol_type = other DNA
gatacaaacataaataggaa

SEQ ID NO: 72986 - DNA, 20 bp, synthetic construct
  misc_feature 1..20: note = chemically synthesized
  source 1..20: mol_type = other DNA
aacaagaatttattgaaaaa

SEQ ID NO: 72987 - DNA, 20 bp, synthetic construct
  misc_feature 1..20: note = chemically synthesized
  source 1..20: mol_type = other DNA
gaaaaatgaagttttttcat

SEQ ID NO: 72988 - DNA, 20 bp, synthetic construct
  misc_feature 1..20: note = chemically synthesized
  source 1..20: mol_type = other DNA
tgagtgcttatgttagttac

SEQ ID NO: 72989 - DNA, 20 bp, synthetic construct
  misc_feature 1..20: note = chemically synthesized
  source 1..20: mol_type = other DNA
catatggaactgaaaataat

SEQ ID NO: 72990 - DNA, 20 bp, synthetic construct
  misc_feature 1..20: note = chemically synthesized
  source 1..20: mol_type = other DNA
tggaactgaaaataatctat

SEQ ID NO: 72991 - DNA, 20 bp, synthetic construct
  misc_feature 1..20: note = chemically synthesized
  source 1..20: mol_type = other DNA
cctagtatgtatatatatag

SEQ ID NO: 72992 - DNA, 20 bp, synthetic construct
  misc_feature 1..20: note = chemically synthesized
  source 1..20: mol_type = other DNA
cataatttttaacctcaaac

SEQ ID NO: 72993 - DNA, 20 bp, synthetic construct
  misc_feature 1..20: note = chemically synthesized
  source 1..20: mol_type = other DNA
ttaatgaattgaaatacatt

SEQ ID NO: 72994 - DNA, 20 bp, synthetic construct
  misc_feature 1..20: note = chemically synthesized
  source 1..20: mol_type = other DNA
tacaccaaataaaaactcta

SEQ ID NO: 72995 - DNA, 20 bp, synthetic construct
  misc_feature 1..20: note = chemically synthesized
  source 1..20: mol_type = other DNA
gtatgacttattgcacttag

SEQ ID NO: 72996 - DNA, 20 bp, synthetic construct
  misc_feature 1..20: note = chemically synthesized
  source 1..20: mol_type = other DNA
ttgcacttaggatagttttt

SEQ ID NO: 72997 - DNA, 20 bp, synthetic construct
  misc_feature 1..20: note = chemically synthesized
  source 1..20: mol_type = other DNA
catctgttgatagatacttg

SEQ ID NO: 72998 - DNA, 20 bp, synthetic construct
  misc_feature 1..20: note = chemically synthesized
  source 1..20: mol_type = other DNA
gatgtcttcccttcaatatg

SEQ ID NO: 72999 - DNA, 20 bp, synthetic construct
  misc_feature 1..20: note = chemically synthesized
  source 1..20: mol_type = other DNA
acttcctctcactctgaata

SEQ ID NO: 73000 - DNA, 20 bp, synthetic construct
  misc_feature 1..20: note = chemically synthesized
  source 1..20: mol_type = other DNA
ccatggaagaagaaaatgag

SEQ ID NO: 73001 - DNA, 20 bp, synthetic construct
  misc_feature 1..20: note = chemically synthesized
  source 1..20: mol_type = other DNA
agacaagctttctggagaaa

SEQ ID NO: 73002 - DNA, 20 bp, synthetic construct
  misc_feature 1..20: note = chemically synthesized
  source 1..20: mol_type = other DNA
tgcaacctctgcctcctggg

SEQ ID NO: 73003 - DNA, 20 bp, synthetic construct
  misc_feature 1..20: note = chemically synthesized
  source 1..20: mol_type = other DNA
ggttcagttttcagttaaag

SEQ ID NO: 73004 - DNA, 20 bp, synthetic construct
  misc_feature 1..20: note = chemically synthesized
  source 1..20: mol_type = other DNA
aacaaattttttcactcaac

SEQ ID NO: 73005 - DNA, 20 bp, synthetic construct
  misc_feature 1..20: note = chemically synthesized
  source 1..20: mol_type = other DNA
tcacggagaaagataagaac

SEQ ID NO: 73006 - DNA, 20 bp, synthetic construct
  misc_feature 1..20: note = chemically synthesized
  source 1..20: mol_type = other DNA
gagaaagataagaactggtg

SEQ ID NO: 73007 - DNA, 20 bp, synthetic construct
  misc_feature 1..20: note = chemically synthesized
  source 1..20: mol_type = other DNA
ttgctctggacttcactgag

SEQ ID NO: 73008 - DNA, 20 bp, synthetic construct
  misc_feature 1..20: note = chemically synthesized
  source 1..20: mol_type = other DNA
acttcactgagtaaagtttt

SEQ ID NO: 73009 - DNA, 20 bp, synthetic construct
  misc_feature 1..20: note = chemically synthesized
  source 1..20: mol_type = other DNA
actgagtaaagttttttttg

SEQ ID NO: 73010 - DNA, 20 bp, synthetic construct
  misc_feature 1..20: note = chemically synthesized
  source 1..20: mol_type = other DNA
gtaaagttttttttgctttg

SEQ ID NO: 73011 - DNA, 20 bp, synthetic construct
  misc_feature 1..20: note = chemically synthesized
  source 1..20: mol_type = other DNA
gttttttttgctttgttttg

SEQ ID NO: 73012 - DNA, 20 bp, synthetic construct
  misc_feature 1..20: note = chemically synthesized
  source 1..20: mol_type = other DNA
ttttgtctttttagtagaga

SEQ ID NO: 73013 - DNA, 20 bp, synthetic construct
  misc_feature 1..20: note = chemically synthesized
  source 1..20: mol_type = other DNA
cgcctcggcctcccaaagtg

SEQ ID NO: 73014 - DNA, 20 bp, synthetic construct
  misc_feature 1..20: note = chemically synthesized
  source 1..20: mol_type = other DNA
gccaccgcgcccggcctgag

SEQ ID NO: 73015 - DNA, 20 bp, synthetic construct
  misc_feature 1..20: note = chemically synthesized
  source 1..20: mol_type = other DNA
gaaatgagatccaatctatg

SEQ ID NO: 73016 - DNA, 20 bp, synthetic construct
  misc_feature 1..20: note = chemically synthesized
  source 1..20: mol_type = other DNA
ttaaaaaaataggtgtaggc

SEQ ID NO: 73017 - DNA, 20 bp, synthetic construct
  misc_feature 1..20: note = chemically synthesized
  source 1..20: mol_type = other DNA
tcatactgaatcaattgtaa

SEQ ID NO: 73018 - DNA, 20 bp, synthetic construct
  misc_feature 1..20: note = chemically synthesized
  source 1..20: mol_type = other DNA
aaattatatgctattgagta

SEQ ID NO: 73019 - DNA, 20 bp, synthetic construct
  misc_feature 1..20: note = chemically synthesized
  source 1..20: mol_type = other DNA
tggttatcccccaaagactc

SEQ ID NO: 73020 - DNA, 20 bp, synthetic construct
  misc_feature 1..20: note = chemically synthesized
  source 1..20: mol_type = other DNA
taatgtgcccagtaagttcc

SEQ ID NO: 73021 - DNA, 20 bp, synthetic construct
  misc_feature 1..20: note = chemically synthesized
  source 1..20: mol_type = other DNA
ttcaaccccgatcatttcca

SEQ ID NO: 73022 - DNA, 20 bp, synthetic construct
  misc_feature 1..20: note = chemically synthesized
  source 1..20: mol_type = other DNA
aatagaaactgtgaaaaata

SEQ ID NO: 73023 - DNA, 20 bp, synthetic construct
  misc_feature 1..20: note = chemically synthesized
  source 1..20: mol_type = other DNA
ttatacatctgctcctcttt

SEQ ID NO: 73024 - DNA, 20 bp, synthetic construct
  misc_feature 1..20: note = chemically synthesized
  source 1..20: mol_type = other DNA
gcccttcaaattaaaactct

SEQ ID NO: 73025 - DNA, 20 bp, synthetic construct
  misc_feature 1..20: note = chemically synthesized
  source 1..20: mol_type = other DNA
taaaactctgttagtttttc

SEQ ID NO: 73026 - DNA, 20 bp, synthetic construct
  misc_feature 1..20: note = chemically synthesized
  source 1..20: mol_type = other DNA
tctgctatgaaacttcaagt

SEQ ID NO: 73027 - DNA, 20 bp, synthetic construct
  misc_feature 1..20: note = chemically synthesized
  source 1..20: mol_type = other DNA
aatttacgtccaagaagaaa

SEQ ID NO: 73028 - DNA, 20 bp, synthetic construct
  misc_feature 1..20: note = chemically synthesized
  source 1..20: mol_type = other DNA
gaacggttatctgggcctgt

SEQ ID NO: 73029 - DNA, 20 bp, synthetic construct
  misc_feature 1..20: note = chemically synthesized
  source 1..20: mol_type = other DNA
actcacttttgaatatgcag

SEQ ID NO: 73030 - DNA, 20 bp, synthetic construct
  misc_feature 1..20: note = chemically synthesized
  source 1..20: mol_type = other DNA
gctgtttccatgatggagga

SEQ ID NO: 73031 - DNA, 20 bp, synthetic construct
  misc_feature 1..20: note = chemically synthesized
  source 1..20: mol_type = other DNA
gaggaaagagattggaggaa

SEQ ID NO: 73032 - DNA, 20 bp, synthetic construct
  misc_feature 1..20: note = chemically synthesized
  source 1..20: mol_type = other DNA
gaatgtagatttatgggtga

SEQ ID NO: 73033 - DNA, 20 bp, synthetic construct
  misc_feature 1..20: note = chemically synthesized
  source 1..20: mol_type = other DNA
tagatttatgggtgaagttg

SEQ ID NO: 73034 - DNA, 20 bp, synthetic construct
  misc_feature 1..20: note = chemically synthesized
  source 1..20: mol_type = other DNA
ctaccattggtgctgaagga

SEQ ID NO: 73035 - DNA, 20 bp, synthetic construct
  misc_feature 1..20: note = chemically synthesized
  source 1..20: mol_type = other DNA
tttggggaaatacaatttcc

SEQ ID NO: 73036 - DNA, 20 bp, synthetic construct
  misc_feature 1..20: note = chemically synthesized
  source 1..20: mol_type = other DNA
ggaaatacaatttcctatcg

SEQ ID NO: 73037 - DNA, 20 bp, synthetic construct
  misc_feature 1..20: note = chemically synthesized
  source 1..20: mol_type = other DNA
atcaagtcattaccaggagc

SEQ ID NO: 73038 - DNA, 20 bp, synthetic construct
  misc_feature 1..20: note = chemically synthesized
  source 1..20: mol_type = other DNA
attaccaggagcaccagctt

SEQ ID NO: 73039 - DNA, 20 bp, synthetic construct
  misc_feature 1..20: note = chemically synthesized
  source 1..20: mol_type = other DNA
gtttcatcttctacaacctc

SEQ ID NO: 73040 - DNA, 20 bp, synthetic construct
  misc_feature 1..20: note = chemically synthesized
  source 1..20: mol_type = other DNA
ttcaacgtaatctccagaaa

SEQ ID NO: 73041 - DNA, 20 bp, synthetic construct
  misc_feature 1..20: note = chemically synthesized
  source 1..20: mol_type = other DNA
catagatgtgagatggtaca

SEQ ID NO: 73042 - DNA, 20 bp, synthetic construct
  misc_feature 1..20: note = chemically synthesized
  source 1..20: mol_type = other DNA
tacagttctttattgagaat

SEQ ID NO: 73043 - DNA, 20 bp, synthetic construct
  misc_feature 1..20: note = chemically synthesized
  source 1..20: mol_type = other DNA
tgtaaaaatcacttaagcct

SEQ ID NO: 73044 - DNA, 20 bp, synthetic construct
  misc_feature 1..20: note = chemically synthesized
  source 1..20: mol_type = other DNA
atctttcttcttgatgttgt

SEQ ID NO: 73045 - DNA, 20 bp, synthetic construct
  misc_feature 1..20: note = chemically synthesized
  source 1..20: mol_type = other DNA
gttatggatttttctctgaa

SEQ ID NO: 73046 - DNA, 20 bp, synthetic construct
  misc_feature 1..20: note = chemically synthesized
  source 1..20: mol_type = other DNA
caataaagaaaaggagatag

SEQ ID NO: 73047 - DNA, 20 bp, synthetic construct
  misc_feature 1..20: note = chemically synthesized
  source 1..20: mol_type = other DNA
aaaggagatagcattgtttg

SEQ ID NO: 73048 - DNA, 20 bp, synthetic construct
  misc_feature 1..20: note = chemically synthesized
  source 1..20: mol_type = other DNA
tacaatttggctacaaaacc

SEQ ID NO: 73049 - DNA, 20 bp, synthetic construct
  misc_feature 1..20: note = chemically synthesized
  source 1..20: mol_type = other DNA
tgatcacaagaatagcattc

SEQ ID NO: 73050 - DNA, 20 bp, synthetic construct
  misc_feature 1..20: note = chemically synthesized
  source 1..20: mol_type = other DNA
tcactcacttaaaatctttc

SEQ ID NO: 73051 - DNA, 20 bp, synthetic construct
  misc_feature 1..20: note = chemically synthesized
  source 1..20: mol_type = other DNA
cacttaaaatctttcagaag

SEQ ID NO: 73052 - DNA, 20 bp, synthetic construct
  misc_feature 1..20: note = chemically synthesized
  source 1..20: mol_type = other DNA
tattgctgtatgacctaaaa

SEQ ID NO: 73053 - DNA, 20 bp, synthetic construct
  misc_feature 1..20: note = chemically synthesized
  source 1..20: mol_type = other DNA
ctgaatatatgagaggatat

SEQ ID NO: 73054 - DNA, 20 bp, synthetic construct
  misc_feature 1..20: note = chemically synthesized
  source 1..20: mol_type = other DNA
aatctgaaagactgaatttg

SEQ ID NO: 73055 - DNA, 20 bp, synthetic construct
  misc_feature 1..20: note = chemically synthesized
  source 1..20: mol_type = other DNA
aatttgacatgttttgagat

SEQ ID NO: 73056 - DNA, 20 bp, synthetic construct
  misc_feature 1..20: note = chemically synthesized
  source 1..20: mol_type = other DNA
agcacataatccaatgaaaa

SEQ ID NO: 73057 - DNA, 20 bp, synthetic construct
  misc_feature 1..20: note = chemically synthesized
  source 1..20: mol_type = other DNA
atgggactaatatgacaaca

SEQ ID NO: 73058 - DNA, 20 bp, synthetic construct
  misc_feature 1..20: note = chemically synthesized
  source 1..20: mol_type = other DNA
ggagcatcataggaaataaa

SEQ ID NO: 73059 - DNA, 20 bp, synthetic construct
  misc_feature 1..20: note = chemically synthesized
  source 1..20: mol_type = other DNA
acccatcaggaaagaagtct

SEQ ID NO: 73060 - DNA, 20 bp, synthetic construct
  misc_feature 1..20: note = chemically synthesized
  source 1..20: mol_type = other DNA
aaatataaggagtagatatt

SEQ ID NO: 73061 - DNA, 20 bp, synthetic construct
  misc_feature 1..20: note = chemically synthesized
  source 1..20: mol_type = other DNA
agatagctcagggtagggta

SEQ ID NO: 73062 - DNA, 20 bp, synthetic construct
  misc_feature 1..20: note = chemically synthesized
  source 1..20: mol_type = other DNA
atgaataatcatcaagacga

SEQ ID NO: 73063 - DNA, 20 bp, synthetic construct
  misc_feature 1..20: note = chemically synthesized
  source 1..20: mol_type = other DNA
gaaaaggtttggtggtggct

SEQ ID NO: 73064 - DNA, 20 bp, synthetic construct
  misc_feature 1..20: note = chemically synthesized
  source 1..20: mol_type = other DNA
ggttgaattagagaatataa

SEQ ID NO: 73065 - DNA, 20 bp, synthetic construct
  misc_feature 1..20: note = chemically synthesized
  source 1..20: mol_type = other DNA
aaaaaataaaggccatgggg

SEQ ID NO: 73066 - DNA, 20 bp, synthetic construct
  misc_feature 1..20: note = chemically synthesized
  source 1..20: mol_type = other DNA
agctagaataaccccttgag

SEQ ID NO: 73067 - DNA, 20 bp, synthetic construct
  misc_feature 1..20: note = chemically synthesized
  source 1..20: mol_type = other DNA
gtggctcaggtaagaaaagc

SEQ ID NO: 73068 - DNA, 20 bp, synthetic construct
  misc_feature 1..20: note = chemically synthesized
  source 1..20: mol_type = other DNA
caaggattcaaatacgggaa

SEQ ID NO: 73069 - DNA, 20 bp, synthetic construct
  misc_feature 1..20: note = chemically synthesized
  source 1..20: mol_type = other DNA
gatggacattggttgagaat

SEQ ID NO: 73070 - DNA, 20 bp, synthetic construct
  misc_feature 1..20: note = chemically synthesized
  source 1..20: mol_type = other DNA
cattggttgagaatatgagc

SEQ ID NO: 73071 - DNA, 20 bp, synthetic construct
  misc_feature 1..20: note = chemically synthesized
  source 1..20: mol_type = other DNA
gggttttgggttagataaac

SEQ ID NO: 73072 - DNA, 20 bp, synthetic construct
  misc_feature 1..20: note = chemically synthesized
  source 1..20: mol_type = other DNA
tagttgcgtgatcttaggct

SEQ ID NO: 73073 - DNA, 20 bp, synthetic construct
  misc_feature 1..20: note = chemically synthesized
  source 1..20: mol_type = other DNA
ataatatattgtctttactt

SEQ ID NO: 73074 - DNA, 20 bp, synthetic construct
  misc_feature 1..20: note = chemically synthesized
  source 1..20: mol_type = other DNA
tcttttctctctctctcttt

SEQ ID NO: 73075 - DNA, 20 bp, synthetic construct
  misc_feature 1..20: note = chemically synthesized
  source 1..20: mol_type = other DNA
gacctcctccaccagggttc

SEQ ID NO: 73076 - DNA, 20 bp, synthetic construct
  misc_feature 1..20: note = chemically synthesized
  source 1..20: mol_type = other DNA
tgcctcagcctccagagtag

SEQ ID NO: 73077 - DNA, 20 bp, synthetic construct
  misc_feature 1..20: note = chemically synthesized
  source 1..20: mol_type = other DNA
tatgatcatgtgccaccaca

SEQ ID NO: 73078 - DNA, 20 bp, synthetic construct
  misc_feature 1..20: note = chemically synthesized
  source 1..20: mol_type = other DNA
ttttgtaattatagtagtga

SEQ ID NO: 73079 - DNA, 20 bp, synthetic construct
  misc_feature 1..20: note = chemically synthesized
  source 1..20: mol_type = other DNA
ctcctcggcctcccaaagtg

SEQ ID NO: 73080 - DNA, 20 bp, synthetic construct
  misc_feature 1..20: note = chemically synthesized
  source 1..20: mol_type = other DNA
aggcatgagccaccgtgccc

SEQ ID NO: 73081 - DNA, 20 bp, synthetic construct
  misc_feature 1..20: note = chemically synthesized
  source 1..20: mol_type = other DNA
gccccaaacaatcaacacct

SEQ ID NO: 73082 - DNA, 20 bp, synthetic construct
  misc_feature 1..20: note = chemically synthesized
  source 1..20: mol_type = other DNA
ctcctataaacttccctttt

SEQ ID NO: 73083 - DNA, 20 bp, synthetic construct
  misc_feature 1..20: note = chemically synthesized
  source 1..20: mol_type = other DNA
tgctatcctcttacatctgt

SEQ ID NO: 73084 - DNA, 20 bp, synthetic construct
  misc_feature 1..20: note = chemically synthesized
  source 1..20: mol_type = other DNA
ttactgagagcaaaatttgt

SEQ ID NO: 73085 - DNA, 20 bp, synthetic construct
  misc_feature 1..20: note = chemically synthesized
  source 1..20: mol_type = other DNA
caaaatttgtcctagtttcc

SEQ ID NO: 73086 - DNA, 20 bp, synthetic construct
  misc_feature 1..20: note = chemically synthesized
  source 1..20: mol_type = other DNA
tttttttttttgagacagag

SEQ ID NO: 73087 - DNA, 20 bp, synthetic construct
  misc_feature 1..20: note = chemically synthesized
  source 1..20: mol_type = other DNA
cactgcgacgacctctgctc

SEQ ID NO: 73088 - DNA, 20 bp, synthetic construct
  misc_feature 1..20: note = chemically synthesized
  source 1..20: mol_type = other DNA
tgcctcagcctcccgagtag

SEQ ID NO: 73089 - DNA, 20 bp, synthetic construct
  misc_feature 1..20: note = chemically synthesized
  source 1..20: mol_type = other DNA
ttttgtatttttagtagaga

SEQ ID NO: 73090 - DNA, 20 bp, synthetic construct
  misc_feature 1..20: note = chemically synthesized
  source 1..20: mol_type = other DNA
cacctcagccttccaaagtg

SEQ ID NO: 73091 - DNA, 20 bp, synthetic construct
  misc_feature 1..20: note = chemically synthesized
  source 1..20: mol_type = other DNA
ataaaaaagtcacttaaaag

SEQ ID NO: 73092 - DNA, 20 bp, synthetic construct
  misc_feature 1..20: note = chemically synthesized
  source 1..20: mol_type = other DNA
cagatattttgtcttcatct

SEQ ID NO: 73093 - DNA, 20 bp, synthetic construct
  misc_feature 1..20: note = chemically synthesized
  source 1..20: mol_type = other DNA
gcaatatgtggagatgaaaa

SEQ ID NO: 73094 - DNA, 20 bp, synthetic construct
  misc_feature 1..20: note = chemically synthesized
  source 1..20: mol_type = other DNA
gaaaaagtggattcagggga

SEQ ID NO: 73095 - DNA, 20 bp, synthetic construct
  misc_feature 1..20: note = chemically synthesized
  source 1..20: mol_type = other DNA
cactgattgtacagggcact

SEQ ID NO: 73096 - DNA, 20 bp, synthetic construct
  misc_feature 1..20: note = chemically synthesized
  source 1..20: mol_type = other DNA
ttctctttttgtcttctcat

SEQ ID NO: 73097 - DNA, 20 bp, synthetic construct
  misc_feature 1..20: note = chemically synthesized
  source 1..20: mol_type = other DNA
ttttagtttatgtctttata

SEQ ID NO: 73098 - DNA, 20 bp, synthetic construct
  misc_feature 1..20: note = chemically synthesized
  source 1..20: mol_type = other DNA
aatggtttcctgaacagttc

SEQ ID NO: 73099 - DNA, 20 bp, synthetic construct
  misc_feature 1..20: note = chemically synthesized
  source 1..20: mol_type = other DNA
ttgcatccctcagggggcct

SEQ ID NO: 73100 - DNA, 20 bp, synthetic construct
  misc_feature 1..20: note = chemically synthesized
  source 1..20: mol_type = other DNA
ctggaatatttgggtatgtg

SEQ ID NO: 73101 - DNA, 20 bp, synthetic construct
  misc_feature 1..20: note = chemically synthesized
  source 1..20: mol_type = other DNA
ccacaattaaatgccagcgt

SEQ ID NO: 73102 - DNA, 20 bp, synthetic construct
  misc_feature 1..20: note = chemically synthesized
  source 1..20: mol_type = other DNA
tatttccccagtaattacca

SEQ ID NO: 73103 - DNA, 20 bp, synthetic construct
  misc_feature 1..20: note = chemically synthesized
  source 1..20: mol_type = other DNA
ccgcatgtcccaaacgcagc

SEQ ID NO: 73104 - DNA, 20 bp, synthetic construct
  misc_feature 1..20: note = chemically synthesized
  source 1..20: mol_type = other DNA
tcaggttttgaaaacacgac

SEQ ID NO: 73105 - DNA, 20 bp, synthetic construct
  misc_feature 1..20: note = chemically synthesized
  source 1..20: mol_type = other DNA
ttaagaataatcaggcctcc

SEQ ID NO: 73106 - DNA, 20 bp, synthetic construct
  misc_feature 1..20: note = chemically synthesized
  source 1..20: mol_type = other DNA
cagtggatcaagttagttag

SEQ ID NO: 73107 - DNA, 20 bp, synthetic construct
  misc_feature 1..20: note = chemically synthesized
  source 1..20: mol_type = other DNA
gtccatctctctccaccaat

SEQ ID NO: 73108 - DNA, 20 bp, synthetic construct
  misc_feature 1..20: note = chemically synthesized
  source 1..20: mol_type = other DNA
attctgaaacatataattat

SEQ ID NO: 73109 - DNA, 20 bp, synthetic construct
  misc_feature 1..20: note = chemically synthesized
  source 1..20: mol_type = other DNA
atataattattattgtttct

SEQ ID NO: 73110 - DNA, 20 bp, synthetic construct
  misc_feature 1..20: note = chemically synthesized
  source 1..20: mol_type = other DNA
tttataaaataaaaaaggtg

SEQ ID NO: 73111 - DNA, 20 bp, synthetic construct
  misc_feature 1..20: note = chemically synthesized
  source 1..20: mol_type = other DNA
tcaattgaatttgggagaaa

SEQ ID NO: 73112 - DNA, 20 bp, synthetic construct
  misc_feature 1..20: note = chemically synthesized
  source 1..20: mol_type = other DNA
tgagtttcccttgtagttct

SEQ ID NO: 73113 - DNA, 20 bp, synthetic construct
  misc_feature 1..20: note = chemically synthesized
  source 1..20: mol_type = other DNA
atttttctcaatacgagtct

SEQ ID NO: 73114 - DNA, 20 bp, synthetic construct
  misc_feature 1..20: note = chemically synthesized
  source 1..20: mol_type = other DNA
atacgagtcttacagattca

SEQ ID NO: 73115 - DNA, 20 bp, synthetic construct
  misc_feature 1..20: note = chemically synthesized
  source 1..20: mol_type = other DNA
tcataatgattagagggtct

SEQ ID NO: 73116 - DNA, 20 bp, synthetic construct
  misc_feature 1..20: note = chemically synthesized
  source 1..20: mol_type = other DNA
ttgccgtattttctctctgg

SEQ ID NO: 73117 - DNA, 20 bp, synthetic construct
  misc_feature 1..20: note = chemically synthesized
  source 1..20: mol_type = other DNA
tttccctagaactggttgtg

SEQ ID NO: 73118 - DNA, 20 bp, synthetic construct
  misc_feature 1..20: note = chemically synthesized
  source 1..20: mol_type = other DNA
atctatgactctaacaagta

SEQ ID NO: 73119 - DNA, 20 bp, synthetic construct
  misc_feature 1..20: note = chemically synthesized
  source 1..20: mol_type = other DNA
gtccttaaaatatttccgtt

SEQ ID NO: 73120 - DNA, 20 bp, synthetic construct
  misc_feature 1..20: note = chemically synthesized
  source 1..20: mol_type = other DNA
ccaacatgagtctcctattt

SEQ ID NO: 73121 - DNA, 20 bp, synthetic construct
  misc_feature 1..20: note = chemically synthesized
  source 1..20: mol_type = other DNA
agtaattacacctttctaaa

SEQ ID NO: 73122 - DNA, 20 bp, synthetic construct
  misc_feature 1..20: note = chemically synthesized
  source 1..20: mol_type = other DNA
tttacccacttgttcaggtg

SEQ ID NO: 73123 - DNA, 20 bp, synthetic construct
  misc_feature 1..20: note = chemically synthesized
  source 1..20: mol_type = other DNA
acaatagatgagttattttc

SEQ ID NO: 73124 - DNA, 20 bp, synthetic construct
  misc_feature 1..20: note = chemically synthesized
  source 1..20: mol_type = other DNA
atcctaaatacagctgtccc

SEQ ID NO: 73125 - DNA, 20 bp, synthetic construct
  misc_feature 1..20: note = chemically synthesized
  source 1..20: mol_type = other DNA
gtgttgaaaaaataaaggtt

SEQ ID NO: 73126 - DNA, 20 bp, synthetic construct
  misc_feature 1..20: note = chemically synthesized
  source 1..20: mol_type = other DNA
aattggaattattattctga

SEQ ID NO: 73127 - DNA, 20 bp, synthetic construct
  misc_feature 1..20: note = chemically synthesized
  source 1..20: mol_type = other DNA
tagggaaaggccttgtgagt

SEQ ID NO: 73128 - DNA, 20 bp, synthetic construct
  misc_feature 1..20: note = chemically synthesized
  source 1..20: mol_type = other DNA
gagacaatccagaaaaatat

SEQ ID NO: 73129 - DNA, 20 bp, synthetic construct
  misc_feature 1..20: note = chemically synthesized
  source 1..20: mol_type = other DNA
tggcctgatgatgtgctaca

SEQ ID NO: 73130 - DNA, 20 bp, synthetic construct
  misc_feature 1..20: note = chemically synthesized
  source 1..20: mol_type = other DNA
gtgctggccccttcttgctg

SEQ ID NO: 73131 - DNA, 20 bp, synthetic construct
  misc_feature 1..20: note = chemically synthesized
  source 1..20: mol_type = other DNA
tgtcctgctgctagaccaga

SEQ ID NO: 73132 - DNA, 20 bp, synthetic construct
  misc_feature 1..20: note = chemically synthesized
  source 1..20: mol_type = other DNA
agagggagattgcccatgct

SEQ ID NO: 73133 - DNA, 20 bp, synthetic construct
  misc_feature 1..20: note = chemically synthesized
  source 1..20: mol_type = other DNA
ggccattgtagaatcaggta

SEQ ID NO: 73134 - DNA, 20 bp, synthetic construct
  misc_feature 1..20: note = chemically synthesized
  source 1..20: mol_type = other DNA
attgtagaatcaggtatctt

SEQ ID NO: 73135 - DNA, 20 bp, synthetic construct
  misc_feature 1..20: note = chemically synthesized
  source 1..20: mol_type = other DNA
tcttgcttgttttggcctat

SEQ ID NO: 73136 - DNA, 20 bp, synthetic construct
  misc_feature 1..20: note = chemically synthesized
  source 1..20: mol_type = other DNA
taggactgggggtactgatg

SEQ ID NO: 73137 - DNA, 20 bp, synthetic construct
  misc_feature 1..20: note = chemically synthesized
  source 1..20: mol_type = other DNA
aaaactcgcctgtgctgata

SEQ ID NO: 73138 - DNA, 20 bp, synthetic construct
  misc_feature 1..20: note = chemically synthesized
  source 1..20: mol_type = other DNA
gatgggactgtcattcattc

SEQ ID NO: 73139 - DNA, 20 bp, synthetic construct
  misc_feature 1..20: note = chemically synthesized
  source 1..20: mol_type = other DNA
catttatagcatcaagacca

SEQ ID NO: 73140 - DNA, 20 bp, synthetic construct
  misc_feature 1..20: note = chemically synthesized
  source 1..20: mol_type = other DNA
cgcctattttctgggcagag

SEQ ID NO: 73141 - DNA, 20 bp, synthetic construct
  misc_feature 1..20: note = chemically synthesized
  source 1..20: mol_type = other DNA
atttcagaatctcaagatct

SEQ ID NO: 73142 - DNA, 20 bp, synthetic construct
  misc_feature 1..20: note = chemically synthesized
  source 1..20: mol_type = other DNA
tcccattactgaaaaggaac

SEQ ID NO: 73143 - DNA, 20 bp, synthetic construct
  misc_feature 1..20: note = chemically synthesized
  source 1..20: mol_type = other DNA
cacacttttttttcctcaga

SEQ ID NO: 73144 - DNA, 20 bp, synthetic construct
  misc_feature 1..20: note = chemically synthesized
  source 1..20: mol_type = other DNA
acaatccaaaagaagagtaa

SEQ ID NO: 73145 - DNA, 20 bp, synthetic construct
  misc_feature 1..20: note = chemically synthesized
  source 1..20: mol_type = other DNA
agtcaagataagtggactaa

SEQ ID NO: 73146 - DNA, 20 bp, synthetic construct
  misc_feature 1..20: note = chemically synthesized
  source 1..20: mol_type = other DNA
actagttactctgaaaagga

SEQ ID NO: 73147 - DNA, 20 bp, synthetic construct
  misc_feature 1..20: note = chemically synthesized
  source 1..20: mol_type = other DNA
gttactctgaaaaggatctt

SEQ ID NO: 73148 - DNA, 20 bp, synthetic construct
  misc_feature 1..20: note = chemically synthesized
  source 1..20: mol_type = other DNA
agcaaatatctagaacttta

SEQ ID NO: 73149 - DNA, 20 bp, synthetic construct
  misc_feature 1..20: note = chemically synthesized
  source 1..20: mol_type = other DNA
gtggaagccagatatcccag

SEQ ID NO: 73150 - DNA, 20 bp, synthetic construct
  misc_feature 1..20: note = chemically synthesized
  source 1..20: mol_type = other DNA
acttaatactttttcttctt

SEQ ID NO: 73151 - DNA, 20 bp, synthetic construct
  misc_feature 1..20: note = chemically synthesized
  source 1..20: mol_type = other DNA
ccacccatttctatttcccc

SEQ ID NO: 73152 - DNA, 20 bp, synthetic construct
  misc_feature 1..20: note = chemically synthesized
  source 1..20: mol_type = other DNA
gagactttttcacttcatga

SEQ ID NO: 73153 - DNA, 20 bp, synthetic construct
  misc_feature 1..20: note = chemically synthesized
  source 1..20: mol_type = other DNA
tagaaatttttcactgatgg

SEQ ID NO: 73154 - DNA, 20 bp, synthetic construct
  misc_feature 1..20: note = chemically synthesized
  source 1..20: mol_type = other DNA
tcttccttcaatcttcttca

SEQ ID NO: 73155 - DNA, 20 bp, synthetic construct
  misc_feature 1..20: note = chemically synthesized
  source 1..20: mol_type = other DNA
attcattcctctctgaagac

SEQ ID NO: 73156 - DNA, 20 bp, synthetic construct
  misc_feature 1..20: note = chemically synthesized
  source 1..20: mol_type = other DNA
ttccaatttttaagttctcg

SEQ ID NO: 73157 - DNA, 20 bp, synthetic construct
  misc_feature 1..20: note = chemically synthesized
  source 1..20: mol_type = other DNA
aatttttaagttctcgttga

SEQ ID NO: 73158 - DNA, 20 bp, synthetic construct
  misc_feature 1..20: note = chemically synthesized
  source 1..20: mol_type = other DNA
cttgcttctaatattttctt

SEQ ID NO: 73159 - DNA, 20 bp, synthetic construct
  misc_feature 1..20: note = chemically synthesized
  source 1..20: mol_type = other DNA
attattccattctaaattct

SEQ ID NO: 73160 - DNA, 20 bp, synthetic construct
  misc_feature 1..20: note = chemically synthesized
  source 1..20: mol_type = other DNA
tgagcactctgaaaatattc

SEQ ID NO: 73161 - DNA, 20 bp, synthetic construct
  misc_feature 1..20: note = chemically synthesized
  source 1..20: mol_type = other DNA
actaataaatgactactcct

SEQ ID NO: 73162 - DNA, 20 bp, synthetic construct
  misc_feature 1..20: note = chemically synthesized
  source 1..20: mol_type = other DNA
aaggattcagttattgtgcg

SEQ ID NO: 73163 - DNA, 20 bp, synthetic construct
  misc_feature 1..20: note = chemically synthesized
  source 1..20: mol_type = other DNA
ttctttgaaagtaggacgtg

SEQ ID NO: 73164 - DNA, 20 bp, synthetic construct
  misc_feature 1..20: note = chemically synthesized
  source 1..20: mol_type = other DNA
tctctgtgtaaaatttattt

SEQ ID NO: 73165 - DNA, 20 bp, synthetic construct
  misc_feature 1..20: note = chemically synthesized
  source 1..20: mol_type = other DNA
gtttttccaaagttggcata

SEQ ID NO: 73166 - DNA, 20 bp, synthetic construct
  misc_feature 1..20: note = chemically synthesized
  source 1..20: mol_type = other DNA
gagtttattctatttagaaa

SEQ ID NO: 73167 - DNA, 20 bp, synthetic construct
  misc_feature 1..20: note = chemically synthesized
  source 1..20: mol_type = other DNA
cgtcgttttctggttgcctt

SEQ ID NO: 73168 - DNA, 20 bp, synthetic construct
  misc_feature 1..20: note = chemically synthesized
  source 1..20: mol_type = other DNA
attaaaattttcaggcgaat

SEQ ID NO: 73169 - DNA, 20 bp, synthetic construct
  misc_feature 1..20: note = chemically synthesized
  source 1..20: mol_type = other DNA
tggcaaatgtatttgtcagt

SEQ ID NO: 73170 - DNA, 20 bp, synthetic construct
  misc_feature 1..20: note = chemically synthesized
  source 1..20: mol_type = other DNA
ttgtcagtaggggattgcga

SEQ ID NO: 73171 - DNA, 20 bp, synthetic construct
  misc_feature 1..20: note = chemically synthesized
  source 1..20: mol_type = other DNA
aggggattgcgatgctgttt

SEQ ID NO: 73172 - DNA, 20 bp, synthetic construct
  misc_feature 1..20: note = chemically synthesized
  source 1..20: mol_type = other DNA
gggaagatcaagttgagagc

SEQ ID NO: 73173 - DNA, 20 bp, synthetic construct
  misc_feature 1..20: note = chemically synthesized
  source 1..20: mol_type = other DNA
tcttaagtaaatgtatattt

SEQ ID NO: 73174 - DNA, 20 bp, synthetic construct
  misc_feature 1..20: note = chemically synthesized
  source 1..20: mol_type = other DNA
tatattatattttacaactt

SEQ ID NO: 73175 - DNA, 20 bp, synthetic construct
  misc_feature 1..20: note = chemically synthesized
  source 1..20: mol_type = other DNA
tcagtgtcctttcaaacaag

SEQ ID NO: 73176 - DNA, 20 bp, synthetic construct
  misc_feature 1..20: note = chemically synthesized
  source 1..20: mol_type = other DNA
cctcagtctcaccctgactg

SEQ ID NO: 73177 - DNA, 20 bp, synthetic construct
  misc_feature 1..20: note = chemically synthesized
  source 1..20: mol_type = other DNA
agttaattctctgtcatact

SEQ ID NO: 73178 - DNA, 20 bp, synthetic construct
  misc_feature 1..20: note = chemically synthesized
  source 1..20: mol_type = other DNA
tgttacttgtctggtgtggc

SEQ ID NO: 73179 - DNA, 20 bp, synthetic construct
  misc_feature 1..20: note = chemically synthesized
  source 1..20: mol_type = other DNA
ggctcaagcaatccttcttc

SEQ ID NO: 73180 - DNA, 20 bp, synthetic construct
  misc_feature 1..20: note = chemically synthesized
  source 1..20: mol_type = other DNA
ctttttgagtacctaggact

SEQ ID NO: 73181 - DNA, 20 bp, synthetic construct
  misc_feature 1..20: note = chemically synthesized
  source 1..20: mol_type = other DNA
tttatgccactgcacctagc

SEQ ID NO: 73182 - DNA, 20 bp, synthetic construct
  misc_feature 1..20: note = chemically synthesized
  source 1..20: mol_type = other DNA
gagatatttctctcagccag

SEQ ID NO: 73183 - DNA, 20 bp, synthetic construct
  misc_feature 1..20: note = chemically synthesized
  source 1..20: mol_type = other DNA
attcccttcatttctttatt

SEQ ID NO: 73184 - DNA, 20 bp, synthetic construct
  misc_feature 1..20: note = chemically synthesized
  source 1..20: mol_type = other DNA
ctcccacgccgttcccttta

SEQ ID NO: 73185 - DNA, 20 bp, synthetic construct
  misc_feature 1..20: note = chemically synthesized
  source 1..20: mol_type = other DNA
cttattcattcctcttgctg

SEQ ID NO: 73186 - DNA, 20 bp, synthetic construct
  misc_feature 1..20: note = chemically synthesized
  source 1..20: mol_type = other DNA
atatacaagtatttctctaa

SEQ ID NO: 73187 - DNA, 20 bp, synthetic construct
  misc_feature 1..20: note = chemically synthesized
  source 1..20: mol_type = other DNA
agaggttcacatttttatct

SEQ ID NO: 73188 - DNA, 20 bp, synthetic construct
  misc_feature 1..20: note = chemically synthesized
  source 1..20: mol_type = other DNA
accacacaatgtagaaccta

SEQ ID NO: 73189 - DNA, 20 bp, synthetic construct
  misc_feature 1..20: note = chemically synthesized
  source 1..20: mol_type = other DNA
tatgtggtataaatgagaca

SEQ ID NO: 73190 - DNA, 20 bp, synthetic construct
  misc_feature 1..20: note = chemically synthesized
  source 1..20: mol_type = other DNA
gactttacatttctgtctgt

SEQ ID NO: 73191 - DNA, 20 bp, synthetic construct
  misc_feature 1..20: note = chemically synthesized
  source 1..20: mol_type = other DNA
aagtatatgtaaaatccaca

SEQ ID NO: 73192 - DNA, 20 bp, synthetic construct
  misc_feature 1..20: note = chemically synthesized
  source 1..20: mol_type = other DNA
cttctttctgcatgcattgg

SEQ ID NO: 73193 - DNA, 20 bp, synthetic construct
  misc_feature 1..20: note = chemically synthesized
  source 1..20: mol_type = other DNA
aaagtgtgctgtatattcaa

SEQ ID NO: 73194 - DNA, 20 bp, synthetic construct
  misc_feature 1..20: note = chemically synthesized
  source 1..20: mol_type = other DNA
gcctaggggtgtcaaatact

SEQ ID NO: 73195 - DNA, 20 bp, synthetic construct
  misc_feature 1..20: note = chemically synthesized
  source 1..20: mol_type = other DNA
gtgtctgaatatctctattt

SEQ ID NO: 73196 - DNA, 20 bp, synthetic construct
  misc_feature 1..20: note = chemically synthesized
  source 1..20: mol_type = other DNA
tatcatagtgaacatctgac

SEQ ID NO: 73197 - DNA, 20 bp, synthetic construct
  misc_feature 1..20: note = chemically synthesized
  source 1..20: mol_type = other DNA
caaatgtttgaggaacaatt

SEQ ID NO: 73198 - DNA, 20 bp, synthetic construct
  misc_feature 1..20: note = chemically synthesized
  source 1..20: mol_type = other DNA
actttaaaggagaaattagc

SEQ ID NO: 73199 - DNA, 20 bp, synthetic construct
  misc_feature 1..20: note = chemically synthesized
  source 1..20: mol_type = other DNA
tcatcatgttacaataacgg

SEQ ID NO: 73200 - DNA, 20 bp, synthetic construct
  misc_feature 1..20: note = chemically synthesized
  source 1..20: mol_type = other DNA
caacaaatacatttagacag

SEQ ID NO: 73201 - DNA, 20 bp, synthetic construct
  misc_feature 1..20: note = chemically synthesized
  source 1..20: mol_type = other DNA
cagcaatgtttatcctggtt

SEQ ID NO: 73202 - DNA, 20 bp, synthetic construct
  misc_feature 1..20: note = chemically synthesized
  source 1..20: mol_type = other DNA
aaaatgagaagagataaaac

SEQ ID NO: 73203 - DNA, 20 bp, synthetic construct
  misc_feature 1..20: note = chemically synthesized
  source 1..20: mol_type = other DNA
gaaaaaaaatactccatatt

SEQ ID NO: 73204 - DNA, 20 bp, synthetic construct
  misc_feature 1..20: note = chemically synthesized
  source 1..20: mol_type = other DNA
gctgtggtaagttacaaaga

SEQ ID NO: 73205 - DNA, 20 bp, synthetic construct
  misc_feature 1..20: note = chemically synthesized
  source 1..20: mol_type = other DNA
tgtagaaaactgaaacagtt

SEQ ID NO: 73206 - DNA, 20 bp, synthetic construct
  misc_feature 1..20: note = chemically synthesized
  source 1..20: mol_type = other DNA
tctgtgtgtaacttggttct

SEQ ID NO: 73207 - DNA, 20 bp, synthetic construct
  misc_feature 1..20: note = chemically synthesized
  source 1..20: mol_type = other DNA
ctttcagaaatagcctctat

SEQ ID NO: 73208 - DNA, 20 bp, synthetic construct
  misc_feature 1..20: note = chemically synthesized
  source 1..20: mol_type = other DNA
tttagtacatctaagaagaa

SEQ ID NO: 73209 - DNA, 20 bp, synthetic construct
  misc_feature 1..20: note = chemically synthesized
  source 1..20: mol_type = other DNA
ttcccacagccccacttagc

SEQ ID NO: 73210 - DNA, 20 bp, synthetic construct
  misc_feature 1..20: note = chemically synthesized
  source 1..20: mol_type = other DNA
tggattggagttctacttgg

SEQ ID NO: 73211 - DNA, 20 bp, synthetic construct
  misc_feature 1..20: note = chemically synthesized
  source 1..20: mol_type = other DNA
aactacatggacgtaaaatg

SEQ ID NO: 73212 - DNA, 20 bp, synthetic construct
  misc_feature 1..20: note = chemically synthesized
  source 1..20: mol_type = other DNA
atgcatggattctcttgaaa

SEQ ID NO: 73213 - DNA, 20 bp, synthetic construct
  misc_feature 1..20: note = chemically synthesized
  source 1..20: mol_type = other DNA
tctgaaagagactaaccttc

SEQ ID NO: 73214 - DNA, 20 bp, synthetic construct
  misc_feature 1..20: note = chemically synthesized
  source 1..20: mol_type = other DNA
tagtaatagtaataacaata

SEQ ID NO: 73215 - DNA, 20 bp, synthetic construct
  misc_feature 1..20: note = chemically synthesized
  source 1..20: mol_type = other DNA
agtaataacaatacaatgat

SEQ ID NO: 73216 - DNA, 20 bp, synthetic construct
  misc_feature 1..20: note = chemically synthesized
  source 1..20: mol_type = other DNA
taagacataatttggggtga

SEQ ID NO: 73217 - DNA, 20 bp, synthetic construct
  misc_feature 1..20: note = chemically synthesized
  source 1..20: mol_type = other DNA
cataatttggggtgagaaag

SEQ ID NO: 73218 - DNA, 20 bp, synthetic construct
  misc_feature 1..20: note = chemically synthesized
  source 1..20: mol_type = other DNA
tgcactccaggtcttatttt

SEQ ID NO: 73219 - DNA, 20 bp, synthetic construct
  misc_feature 1..20: note = chemically synthesized
  source 1..20: mol_type = other DNA
aaacatatggttcagtatgc

SEQ ID NO: 73220 - DNA, 20 bp, synthetic construct
  misc_feature 1..20: note = chemically synthesized
  source 1..20: mol_type = other DNA
tgtgggataatgctaattac

SEQ ID NO: 73221 - DNA, 20 bp, synthetic construct
  misc_feature 1..20: note = chemically synthesized
  source 1..20: mol_type = other DNA
ccaaggccagagccggctcc

SEQ ID NO: 73222 - DNA, 20 bp, synthetic construct
  misc_feature 1..20: note = chemically synthesized
  source 1..20: mol_type = other DNA
ggcaggaaccgggctgtgcg

SEQ ID NO: 73223 - DNA, 20 bp, synthetic construct
  misc_feature 1..20: note = chemically synthesized
  source 1..20: mol_type = other DNA
cccaccggccgcgggcagtg

SEQ ID NO: 73224 - DNA, 20 bp, synthetic construct
  misc_feature 1..20: note = chemically synthesized
  source 1..20: mol_type = other DNA
gggtgaagccggctaggctc

SEQ ID NO: 73225 - DNA, 20 bp, synthetic construct
  misc_feature 1..20: note = chemically synthesized
  source 1..20: mol_type = other DNA
aagaacccttatgtctagat

SEQ ID NO: 73226 - DNA, 20 bp, synthetic construct
  misc_feature 1..20: note = chemically synthesized
  source 1..20: mol_type = other DNA
ttggcactctgtatctagct

SEQ ID NO: 73227 - DNA, 20 bp, synthetic construct
  misc_feature 1..20: note = chemically synthesized
  source 1..20: mol_type = other DNA
tcagcaccctgtgtctagct

SEQ ID NO: 73228 - DNA, 20 bp, synthetic construct
  misc_feature 1..20: note = chemically synthesized
  source 1..20: mol_type = other DNA
gagaacctttatgtctagct

SEQ ID NO: 73229 - DNA, 20 bp, synthetic construct
  misc_feature 1..20: note = chemically synthesized
  source 1..20: mol_type = other DNA
tcggcagtctgtatctagct

SEQ ID NO: 73230 - DNA, 20 bp, synthetic construct
  misc_feature 1..20: note = chemically synthesized
  source 1..20: mol_type = other DNA
tcagcaccctgtgtctagct

SEQ ID NO: 73231 - DNA, 20 bp, synthetic construct
  misc_feature 1..20: note = chemically synthesized
  source 1..20: mol_type = other DNA
gagaacctttatgtctagct

SEQ ID NO: 73232 - DNA, 20 bp, synthetic construct
  misc_feature 1..20: note = chemically synthesized
  source 1..20: mol_type = other DNA
tcggcagtctgtatctagct

SEQ ID NO: 73233 - DNA, 20 bp, synthetic construct
  misc_feature 1..20: note = chemically synthesized
  source 1..20: mol_type = other DNA
tcagcaccctgtgtctagct

SEQ ID NO: 73234 - DNA, 20 bp, synthetic construct
  misc_feature 1..20: note = chemically synthesized
  source 1..20: mol_type = other DNA
gagaacctttgtgtctagct

SEQ ID NO: 73235 - DNA, 20 bp, synthetic construct
  misc_feature 1..20: note = chemically synthesized
  source 1..20: mol_type = other DNA
cgggtccccttccacactgt

SEQ ID NO: 73236 - DNA, 20 bp, synthetic construct
  misc_feature 1..20: note = chemically synthesized
  source 1..20: mol_type = other DNA
caataaatcttgctgctgct

SEQ ID NO: 73237 - DNA, 20 bp, synthetic construct
  misc_feature 1..20: note = chemically synthesized
  source 1..20: mol_type = other DNA
taacgctcaccgcgaaggtc

SEQ ID NO: 73238 - DNA, 20 bp, synthetic construct
  misc_feature 1..20: note = chemically synthesized
  source 1..20: mol_type = other DNA
gaacgttcactgtgaaggtc

SEQ ID NO: 73239 - DNA, 20 bp, synthetic construct
  misc_feature 1..20: note = chemically synthesized
  source 1..20: mol_type = other DNA
taacactcaccacgagggtc

SEQ ID NO: 73240 - DNA, 20 bp, synthetic construct
  misc_feature 1..20: note = chemically synthesized
  source 1..20: mol_type = other DNA
tcctctatgtggcagaaagt

SEQ ID NO: 73241 - DNA, 20 bp, synthetic construct
  misc_feature 1..20: note = chemically synthesized
  source 1..20: mol_type = other DNA
aggcacctggactcctggcc

SEQ ID NO: 73242 - DNA, 20 bp, synthetic construct
  misc_feature 1..20: note = chemically synthesized
  source 1..20: mol_type = other DNA
tgacgtagcaataaagaaac

SEQ ID NO: 73243 - DNA, 20 bp, synthetic construct
  misc_feature 1..20: note = chemically synthesized
  source 1..20: mol_type = other DNA
gaaacccacgtttcatatga

SEQ ID NO: 73244 - DNA, 20 bp, synthetic construct
  misc_feature 1..20: note = chemically synthesized
  source 1..20: mol_type = other DNA
cttaaaattaatggcacaag

SEQ ID NO: 73245 - DNA, 20 bp, synthetic construct
  misc_feature 1..20: note = chemically synthesized
  source 1..20: mol_type = other DNA
gttgcacatttgtctttatt

SEQ ID NO: 73246 - DNA, 20 bp, synthetic construct
  misc_feature 1..20: note = chemically synthesized
  source 1..20: mol_type = other DNA
cacatttgtctttatttgtg

SEQ ID NO: 73247 - DNA, 20 bp, synthetic construct
  misc_feature 1..20: note = chemically synthesized
  source 1..20: mol_type = other DNA
ttgtctttatttgtggcttg

SEQ ID NO: 73248 - DNA, 20 bp, synthetic construct
  misc_feature 1..20: note = chemically synthesized
  source 1..20: mol_type = other DNA
tccaaaattttctcattttc

SEQ ID NO: 73249 - DNA, 20 bp, synthetic construct
  misc_feature 1..20: note = chemically synthesized
  source 1..20: mol_type = other DNA
ttctcattttcataggtttt

SEQ ID NO: 73250 - DNA, 20 bp, synthetic construct
  misc_feature 1..20: note = chemically synthesized
  source 1..20: mol_type = other DNA
tttcctcgattgatcattat

SEQ ID NO: 73251 - DNA, 20 bp, synthetic construct
  misc_feature 1..20: note = chemically synthesized
  source 1..20: mol_type = other DNA
atgatttgcaaggaatcatt

SEQ ID NO: 73252 - DNA, 20 bp, synthetic construct
  misc_feature 1..20: note = chemically synthesized
  source 1..20: mol_type = other DNA
atatgacattttaactatgt

SEQ ID NO: 73253 - DNA, 20 bp, synthetic construct
  misc_feature 1..20: note = chemically synthesized
  source 1..20: mol_type = other DNA
gaatgaagagtgtaaatttt

SEQ ID NO: 73254 - DNA, 20 bp, synthetic construct
  misc_feature 1..20: note = chemically synthesized
  source 1..20: mol_type = other DNA
aaaaaataagtatgtgaagt

SEQ ID NO: 73255 - DNA, 20 bp, synthetic construct
  misc_feature 1..20: note = chemically synthesized
  source 1..20: mol_type = other DNA
ttgtctagatctctatcccc

SEQ ID NO: 73256 - DNA, 20 bp, synthetic construct
  misc_feature 1..20: note = chemically synthesized
  source 1..20: mol_type = other DNA
ttccacagtcaaaaggatat

SEQ ID NO: 73257 - DNA, 20 bp, synthetic construct
  misc_feature 1..20: note = chemically synthesized
  source 1..20: mol_type = other DNA
tgtagtttaatgcctcagag

SEQ ID NO: 73258 - DNA, 20 bp, synthetic construct
  misc_feature 1..20: note = chemically synthesized
  source 1..20: mol_type = other DNA
aatgcctcagagttcagctt

SEQ ID NO: 73259 - DNA, 20 bp, synthetic construct
  misc_feature 1..20: note = chemically synthesized
  source 1..20: mol_type = other DNA
tttctcctgccttcacttgg

SEQ ID NO: 73260 - DNA, 20 bp, synthetic construct
  misc_feature 1..20: note = chemically synthesized
  source 1..20: mol_type = other DNA
ttggacgtgcttcacgtagt

SEQ ID NO: 73261 - DNA, 20 bp, synthetic construct
  misc_feature 1..20: note = chemically synthesized
  source 1..20: mol_type = other DNA
tcacgtagtctgtgcttatg

SEQ ID NO: 73262 - DNA, 20 bp, synthetic construct
  misc_feature 1..20: note = chemically synthesized
  source 1..20: mol_type = other DNA
ctaatgttgttcgtcataat

SEQ ID NO: 73263 - DNA, 20 bp, synthetic construct
  misc_feature 1..20: note = chemically synthesized
  source 1..20: mol_type = other DNA
ttcctatgcattgatctgga

SEQ ID NO: 73264 - DNA, 20 bp, synthetic construct
  misc_feature 1..20: note = chemically synthesized
  source 1..20: mol_type = other DNA
gttcactctgctatagcaat

SEQ ID NO: 73265 - DNA, 20 bp, synthetic construct
  misc_feature 1..20: note = chemically synthesized
  source 1..20: mol_type = other DNA
aagcatgaggatgcctcctt

SEQ ID NO: 73266 - DNA, 20 bp, synthetic construct
  misc_feature 1..20: note = chemically synthesized
  source 1..20: mol_type = other DNA
tgttggtcacagaataacct

SEQ ID NO: 73267 - DNA, 20 bp, synthetic construct
  misc_feature 1..20: note = chemically synthesized
  source 1..20: mol_type = other DNA
aaaacaaacaactacagtca

SEQ ID NO: 73268 - DNA, 20 bp, synthetic construct
  misc_feature 1..20: note = chemically synthesized
  source 1..20: mol_type = other DNA
aaaatgtttctctttttatt

SEQ ID NO: 73269 - DNA, 20 bp, synthetic construct
  misc_feature 1..20: note = chemically synthesized
  source 1..20: mol_type = other DNA
aggaagttgttaaggagccc

SEQ ID NO: 73270 - DNA, 20 bp, synthetic construct
  misc_feature 1..20: note = chemically synthesized
  source 1..20: mol_type = other DNA
caggacatctggatactcct

SEQ ID NO: 73271 - DNA, 20 bp, synthetic construct
  misc_feature 1..20: note = chemically synthesized
  source 1..20: mol_type = other DNA
tggatactcctcccagtttc

SEQ ID NO: 73272 - DNA, 20 bp, synthetic construct
  misc_feature 1..20: note = chemically synthesized
  source 1..20: mol_type = other DNA
tccagaaatggcaacattac

SEQ ID NO: 73273 - DNA, 20 bp, synthetic construct
  misc_feature 1..20: note = chemically synthesized
  source 1..20: mol_type = other DNA
tttctcagaagtatattttg

SEQ ID NO: 73274 - DNA, 20 bp, synthetic construct
  misc_feature 1..20: note = chemically synthesized
  source 1..20: mol_type = other DNA
attcatagcagacagctaag

SEQ ID NO: 73275 - DNA, 20 bp, synthetic construct
  misc_feature 1..20: note = chemically synthesized
  source 1..20: mol_type = other DNA
ggtagggttgcatgagccct

SEQ ID NO: 73276 - DNA, 20 bp, synthetic construct
  misc_feature 1..20: note = chemically synthesized
  source 1..20: mol_type = other DNA
tgcatgagccctttcagttt

SEQ ID NO: 73277 - DNA, 20 bp, synthetic construct
  misc_feature 1..20: note = chemically synthesized
  source 1..20: mol_type = other DNA
tatatacatctgtattgtta

SEQ ID NO: 73278 - DNA, 20 bp, synthetic construct
  misc_feature 1..20: note = chemically synthesized
  source 1..20: mol_type = other DNA
cttggaaaactcaaataaat

SEQ ID NO: 73279 - DNA, 20 bp, synthetic construct
  misc_feature 1..20: note = chemically synthesized
  source 1..20: mol_type = other DNA
acctgcttcatagttattaa

SEQ ID NO: 73280 - DNA, 20 bp, synthetic construct
  misc_feature 1..20: note = chemically synthesized
  source 1..20: mol_type = other DNA
gattaagtgagataatgccc

SEQ ID NO: 73281 - DNA, 20 bp, synthetic construct
  misc_feature 1..20: note = chemically synthesized
  source 1..20: mol_type = other DNA
atacacacacacacacattg

SEQ ID NO: 73282 - DNA, 20 bp, synthetic construct
  misc_feature 1..20: note = chemically synthesized
  source 1..20: mol_type = other DNA
tcaaaagggtaaactcaaac

SEQ ID NO: 73283 - DNA, 20 bp, synthetic construct
  misc_feature 1..20: note = chemically synthesized
  source 1..20: mol_type = other DNA
cagtagaattatactcccac

SEQ ID NO: 73284 - DNA, 20 bp, synthetic construct
  misc_feature 1..20: note = chemically synthesized
  source 1..20: mol_type = other DNA
attatactacgctctatact

SEQ ID NO: 73285 - DNA, 20 bp, synthetic construct
  misc_feature 1..20: note = chemically synthesized
  source 1..20: mol_type = other DNA
agatagatgatagatagaat

SEQ ID NO: 73286 - DNA, 20 bp, synthetic construct
  misc_feature 1..20: note = chemically synthesized
  source 1..20: mol_type = other DNA
aacaatttctgacccacaac

SEQ ID NO: 73287 - DNA, 20 bp, synthetic construct
  misc_feature 1..20: note = chemically synthesized
  source 1..20: mol_type = other DNA
cttttccctacatctgagat

SEQ ID NO: 73288 - DNA, 20 bp, synthetic construct
  misc_feature 1..20: note = chemically synthesized
  source 1..20: mol_type = other DNA
gaacttggtcaacaaaggag

SEQ ID NO: 73289 - DNA, 20 bp, synthetic construct
  misc_feature 1..20: note = chemically synthesized
  source 1..20: mol_type = other DNA
aaaatagacaaggacttgcc

SEQ ID NO: 73290 - DNA, 20 bp, synthetic construct
  misc_feature 1..20: note = chemically synthesized
  source 1..20: mol_type = other DNA
ttgcctggtgcttttggtag

SEQ ID NO: 73291 - DNA, 20 bp, synthetic construct
  misc_feature 1..20: note = chemically synthesized
  source 1..20: mol_type = other DNA
gtcctcacagttgaaaagac

SEQ ID NO: 73292 - DNA, 20 bp, synthetic construct
  misc_feature 1..20: note = chemically synthesized
  source 1..20: mol_type = other DNA
ttgaaaagacctaagcttgt

SEQ ID NO: 73293 - DNA, 20 bp, synthetic construct
  misc_feature 1..20: note = chemically synthesized
  source 1..20: mol_type = other DNA
ttgagaggtagaagtgggag

SEQ ID NO: 73294 - DNA, 20 bp, synthetic construct
  misc_feature 1..20: note = chemically synthesized
  source 1..20: mol_type = other DNA
tgggaggactgcttgagctc

SEQ ID NO: 73295 - DNA, 20 bp, synthetic construct
  misc_feature 1..20: note = chemically synthesized
  source 1..20: mol_type = other DNA
aaacaaaaaactgctccgca

SEQ ID NO: 73296 - DNA, 20 bp, synthetic construct
  misc_feature 1..20: note = chemically synthesized
  source 1..20: mol_type = other DNA
tctcattgctgttcataatt

SEQ ID NO: 73297 - DNA, 20 bp, synthetic construct
  misc_feature 1..20: note = chemically synthesized
  source 1..20: mol_type = other DNA
cttttattttctggacttgt

SEQ ID NO: 73298 - DNA, 20 bp, synthetic construct
  misc_feature 1..20: note = chemically synthesized
  source 1..20: mol_type = other DNA
agtaacaatataaagttatt

SEQ ID NO: 73299 - DNA, 20 bp, synthetic construct
  misc_feature 1..20: note = chemically synthesized
  source 1..20: mol_type = other DNA
attgaaacaggaataacaga

SEQ ID NO: 73300 - DNA, 20 bp, synthetic construct
  misc_feature 1..20: note = chemically synthesized
  source 1..20: mol_type = other DNA
actggtgtgtggagacaaat

SEQ ID NO: 73301 - DNA, 20 bp, synthetic construct
  misc_feature 1..20: note = chemically synthesized
  source 1..20: mol_type = other DNA
agaataagaatagccatgac

SEQ ID NO: 73302 - DNA, 20 bp, synthetic construct
  misc_feature 1..20: note = chemically synthesized
  source 1..20: mol_type = other DNA
ctcccactcagcagctatga

SEQ ID NO: 73303 - DNA, 20 bp, synthetic construct
  misc_feature 1..20: note = chemically synthesized
  source 1..20: mol_type = other DNA
agcaatgggcagggctctgt

SEQ ID NO: 73304 - DNA, 20 bp, synthetic construct
  misc_feature 1..20: note = chemically synthesized
  source 1..20: mol_type = other DNA
ctctccctcccattcccgag

SEQ ID NO: 73305 - DNA, 20 bp, synthetic construct
  misc_feature 1..20: note = chemically synthesized
  source 1..20: mol_type = other DNA
ccctcccattcccgagcagg

SEQ ID NO: 73306 - DNA, 20 bp, synthetic construct
  misc_feature 1..20: note = chemically synthesized
  source 1..20: mol_type = other DNA
catacactagacagaaagtc

SEQ ID NO: 73307 - DNA, 20 bp, synthetic construct
  misc_feature 1..20: note = chemically synthesized
  source 1..20: mol_type = other DNA
gtccccacccttctctgagc

SEQ ID NO: 73308 - DNA, 20 bp, synthetic construct
  misc_feature 1..20: note = chemically synthesized
  source 1..20: mol_type = other DNA
tataagtaggagtctggagt

SEQ ID NO: 73309 - DNA, 20 bp, synthetic construct
  misc_feature 1..20: note = chemically synthesized
  source 1..20: mol_type = other DNA
ctctcatttcaatacaaaat

SEQ ID NO: 73310 - DNA, 20 bp, synthetic construct
  misc_feature 1..20: note = chemically synthesized
  source 1..20: mol_type = other DNA
aatttccgtttattaaatgc

SEQ ID NO: 73311 - DNA, 20 bp, synthetic construct
  misc_feature 1..20: note = chemically synthesized
  source 1..20: mol_type = other DNA
ttcacccaggcccactgagt

SEQ ID NO: 73312 - DNA, 20 bp, synthetic construct
  misc_feature 1..20: note = chemically synthesized
  source 1..20: mol_type = other DNA
gttcacgtgtgtaaaaagga

SEQ ID NO: 73313 - DNA, 20 bp, synthetic construct
  misc_feature 1..20: note = chemically synthesized
  source 1..20: mol_type = other DNA
aagtcttgggcagtatagag

SEQ ID NO: 73314 - DNA, 20 bp, synthetic construct
  misc_feature 1..20: note = chemically synthesized
  source 1..20: mol_type = other DNA
atgctggagccagaccacct

SEQ ID NO: 73315 - DNA, 20 bp, synthetic construct
  misc_feature 1..20: note = chemically synthesized
  source 1..20: mol_type = other DNA
accacctgagtgattagtga

SEQ ID NO: 73316 - DNA, 20 bp, synthetic construct
  misc_feature 1..20: note = chemically synthesized
  source 1..20: mol_type = other DNA
ttctcttagtagttgtatga

SEQ ID NO: 73317 - DNA, 20 bp, synthetic construct
  misc_feature 1..20: note = chemically synthesized
  source 1..20: mol_type = other DNA
gtttcttcatctgtaaaatg

SEQ ID NO: 73318 - DNA, 20 bp, synthetic construct
  misc_feature 1..20: note = chemically synthesized
  source 1..20: mol_type = other DNA
gtaaaatggagggtttttta

SEQ ID NO: 73319 - DNA, 20 bp, synthetic construct
  misc_feature 1..20: note = chemically synthesized
  source 1..20: mol_type = other DNA
aatggagggttttttaatta

SEQ ID NO: 73320 - DNA, 20 bp, synthetic construct
  misc_feature 1..20: note = chemically synthesized
  source 1..20: mol_type = other DNA
ttttgtatttttggtagaga

SEQ ID NO: 73321 - DNA, 20 bp, synthetic construct
  misc_feature 1..20: note = chemically synthesized
  source 1..20: mol_type = other DNA
cacctcagccttccaaagtg

SEQ ID NO: 73322 - DNA, 20 bp, synthetic construct
  misc_feature 1..20: note = chemically synthesized
  source 1..20: mol_type = other DNA
ccaaagtgctgggattataa

SEQ ID NO: 73323 - DNA, 20 bp, synthetic construct
  misc_feature 1..20: note = chemically synthesized
  source 1..20: mol_type = other DNA
gggattataagcatgattac

SEQ ID NO: 73324 - DNA, 20 bp, synthetic construct
  misc_feature 1..20: note = chemically synthesized
  source 1..20: mol_type = other DNA
acaggagttttaacaggctc

SEQ ID NO: 73325 - DNA, 20 bp, synthetic construct
  misc_feature 1..20: note = chemically synthesized
  source 1..20: mol_type = other DNA
cgagtgagttaatacatgca

SEQ ID NO: 73326 - DNA, 20 bp, synthetic construct
  misc_feature 1..20: note = chemically synthesized
  source 1..20: mol_type = other DNA
ataaatgctaactactctag

SEQ ID NO: 73327 - DNA, 20 bp, synthetic construct
  misc_feature 1..20: note = chemically synthesized
  source 1..20: mol_type = other DNA
tagaaatgtttgctagtatt

SEQ ID NO: 73328 - DNA, 20 bp, synthetic construct
  misc_feature 1..20: note = chemically synthesized
  source 1..20: mol_type = other DNA
aggctatcagagactgtaat

SEQ ID NO: 73329 - DNA, 20 bp, synthetic construct
  misc_feature 1..20: note = chemically synthesized
  source 1..20: mol_type = other DNA
aattaatcatatttaatact

SEQ ID NO: 73330 - DNA, 20 bp, synthetic construct
  misc_feature 1..20: note = chemically synthesized
  source 1..20: mol_type = other DNA
actactagcaaatagtagaa

SEQ ID NO: 73331 - DNA, 20 bp, synthetic construct
  misc_feature 1..20: note = chemically synthesized
  source 1..20: mol_type = other DNA
gctggatgctggggatacaa

SEQ ID NO: 73332 - DNA, 20 bp, synthetic construct
  misc_feature 1..20: note = chemically synthesized
  source 1..20: mol_type = other DNA
gtttaaatttaagctccagt

SEQ ID NO: 73333 - DNA, 20 bp, synthetic construct
  misc_feature 1..20: note = chemically synthesized
  source 1..20: mol_type = other DNA
attttttactctttgcattc

SEQ ID NO: 73334 - DNA, 20 bp, synthetic construct
  misc_feature 1..20: note = chemically synthesized
  source 1..20: mol_type = other DNA
acaccatgtggagaaggggt

SEQ ID NO: 73335 - DNA, 20 bp, synthetic construct
  misc_feature 1..20: note = chemically synthesized
  source 1..20: mol_type = other DNA
atgtggagaaggggtggtgg

SEQ ID NO: 73336 - DNA, 20 bp, synthetic construct
  misc_feature 1..20: note = chemically synthesized
  source 1..20: mol_type = other DNA
ctattatttaacaaatgcat

SEQ ID NO: 73337 - DNA, 20 bp, synthetic construct
  misc_feature 1..20: note = chemically synthesized
  source 1..20: mol_type = other DNA
atcaagttatattatgtaac

SEQ ID NO: 73338 - DNA, 20 bp, synthetic construct
  misc_feature 1..20: note = chemically synthesized
  source 1..20: mol_type = other DNA
atattatgtaacccaggatt

SEQ ID NO: 73339 - DNA, 20 bp, synthetic construct
  misc_feature 1..20: note = chemically synthesized
  source 1..20: mol_type = other DNA
ttaagctgtctagcaaaagc

SEQ ID NO: 73340 - DNA, 20 bp, synthetic construct
  misc_feature 1..20: note = chemically synthesized
  source 1..20: mol_type = other DNA
tgtgagctcctcaccatata

SEQ ID NO: 73341 - DNA, 20 bp, synthetic construct
  misc_feature 1..20: note = chemically synthesized
  source 1..20: mol_type = other DNA
atcattgaataaatccctat

SEQ ID NO: 73342 - DNA, 20 bp, synthetic construct
  misc_feature 1..20: note = chemically synthesized
  source 1..20: mol_type = other DNA
taccctgagcaaaaggctgg

SEQ ID NO: 73343 - DNA, 20 bp, synthetic construct
  misc_feature 1..20: note = chemically synthesized
  source 1..20: mol_type = other DNA
tctgagaaagtctatgctgt

SEQ ID NO: 73344 - DNA, 20 bp, synthetic construct
  misc_feature 1..20: note = chemically synthesized
  source 1..20: mol_type = other DNA
cataattcttggttgcatga

SEQ ID NO: 73345 - DNA, 20 bp, synthetic construct
  misc_feature 1..20: note = chemically synthesized
  source 1..20: mol_type = other DNA
tctgaatgaaatggaaaccg

SEQ ID NO: 73346 - DNA, 20 bp, synthetic construct
  misc_feature 1..20: note = chemically synthesized
  source 1..20: mol_type = other DNA
ggctccagcatgtagaaatc

SEQ ID NO: 73347 - DNA, 20 bp, synthetic construct
  misc_feature 1..20: note = chemically synthesized
  source 1..20: mol_type = other DNA
aaatctggggctttgtgaag

SEQ ID NO: 73348 - DNA, 20 bp, synthetic construct
  misc_feature 1..20: note = chemically synthesized
  source 1..20: mol_type = other DNA
gaacctagagcctacgctga

SEQ ID NO: 73349 - DNA, 20 bp, synthetic construct
  misc_feature 1..20: note = chemically synthesized
  source 1..20: mol_type = other DNA
acttccagggatcctctctt

SEQ ID NO: 73350 - DNA, 20 bp, synthetic construct
  misc_feature 1..20: note = chemically synthesized
  source 1..20: mol_type = other DNA
tctcctcacttctatctgga

SEQ ID NO: 73351 - DNA, 20 bp, synthetic construct
  misc_feature 1..20: note = chemically synthesized
  source 1..20: mol_type = other DNA
ccctcctagcatccagagac

SEQ ID NO: 73352 - DNA, 20 bp, synthetic construct
  misc_feature 1..20: note = chemically synthesized
  source 1..20: mol_type = other DNA
ctagcatccagagactagtg

SEQ ID NO: 73353 - DNA, 20 bp, synthetic construct
  misc_feature 1..20: note = chemically synthesized
  source 1..20: mol_type = other DNA
gagatgatctatgtggggag

SEQ ID NO: 73354 - DNA, 20 bp, synthetic construct
  misc_feature 1..20: note = chemically synthesized
  source 1..20: mol_type = other DNA
gatgagtaagagaggagagg

SEQ ID NO: 73355 - DNA, 20 bp, synthetic construct
  misc_feature 1..20: note = chemically synthesized
  source 1..20: mol_type = other DNA
tatagtctaatcaattttgc

SEQ ID NO: 73356 - DNA, 20 bp, synthetic construct
  misc_feature 1..20: note = chemically synthesized
  source 1..20: mol_type = other DNA
ggagcaggagtctctaagga

SEQ ID NO: 73357 - DNA, 20 bp, synthetic construct
  misc_feature 1..20: note = chemically synthesized
  source 1..20: mol_type = other DNA
aggggcaagtgccttgactc

SEQ ID NO: 73358 - DNA, 20 bp, synthetic construct
  misc_feature 1..20: note = chemically synthesized
  source 1..20: mol_type = other DNA
taacagttcaggacagagct

SEQ ID NO: 73359 - DNA, 20 bp, synthetic construct
  misc_feature 1..20: note = chemically synthesized
  source 1..20: mol_type = other DNA
ctggttagactttttttaat

SEQ ID NO: 73360 - DNA, 20 bp, synthetic construct
  misc_feature 1..20: note = chemically synthesized
  source 1..20: mol_type = other DNA
tagactttttttaatgaaag

SEQ ID NO: 73361 - DNA, 20 bp, synthetic construct
  misc_feature 1..20: note = chemically synthesized
  source 1..20: mol_type = other DNA
aatgaaagcttagctttcat

SEQ ID NO: 73362 - DNA, 20 bp, synthetic construct
  misc_feature 1..20: note = chemically synthesized
  source 1..20: mol_type = other DNA
tgagagacacgaggaaatag

SEQ ID NO: 73363 - DNA, 20 bp, synthetic construct
  misc_feature 1..20: note = chemically synthesized
  source 1..20: mol_type = other DNA
agtatatgctagaatcaaat

SEQ ID NO: 73364 - DNA, 20 bp, synthetic construct
  misc_feature 1..20: note = chemically synthesized
  source 1..20: mol_type = other DNA
ccgggcacggtggctcatat

SEQ ID NO: 73365 - DNA, 20 bp, synthetic construct
  misc_feature 1..20: note = chemically synthesized
  source 1..20: mol_type = other DNA
gaggtggaggttgcagtgag

SEQ ID NO: 73366 - DNA, 20 bp, synthetic construct
  misc_feature 1..20: note = chemically synthesized
  source 1..20: mol_type = other DNA
tccatctcaaaaaaaaaaaa

SEQ ID NO: 73367 - DNA, 20 bp, synthetic construct
  misc_feature 1..20: note = chemically synthesized
  source 1..20: mol_type = other DNA
aagtttattatatgaattaa

SEQ ID NO: 73368 - DNA, 20 bp, synthetic construct
  misc_feature 1..20: note = chemically synthesized
  source 1..20: mol_type = other DNA
tactcacaccaatactcaga

SEQ ID NO: 73369 - DNA, 20 bp, synthetic construct
  misc_feature 1..20: note = chemically synthesized
  source 1..20: mol_type = other DNA
aaagacatgaaataatttgt

SEQ ID NO: 73370 - DNA, 20 bp, synthetic construct
  misc_feature 1..20: note = chemically synthesized
  source 1..20: mol_type = other DNA
agttctgctacctctgaaga

SEQ ID NO: 73371 - DNA, 20 bp, synthetic construct
  misc_feature 1..20: note = chemically synthesized
  source 1..20: mol_type = other DNA
agatattcctgccctgtggc

SEQ ID NO: 73372 - DNA, 20 bp, synthetic construct
  misc_feature 1..20: note = chemically synthesized
  source 1..20: mol_type = other DNA
tgcttcttacttttacttct

SEQ ID NO: 73373 - DNA, 20 bp, synthetic construct
  misc_feature 1..20: note = chemically synthesized
  source 1..20: mol_type = other DNA
ccataattgcatttcttcag

SEQ ID NO: 73374 - DNA, 20 bp, synthetic construct
  misc_feature 1..20: note = chemically synthesized
  source 1..20: mol_type = other DNA
ttagaaacaacttcagaata

SEQ ID NO: 73375 - DNA, 20 bp, synthetic construct
  misc_feature 1..20: note = chemically synthesized
  source 1..20: mol_type = other DNA
agagattttctcttgggtta

SEQ ID NO: 73376 - DNA, 20 bp, synthetic construct
  misc_feature 1..20: note = chemically synthesized
  source 1..20: mol_type = other DNA
gctgcaactttggttaaagg

SEQ ID NO: 73377 - DNA, 20 bp, synthetic construct
  misc_feature 1..20: note = chemically synthesized
  source 1..20: mol_type = other DNA
tcagtgcctcagaaacatac

SEQ ID NO: 73378 - DNA, 20 bp, synthetic construct
  misc_feature 1..20: note = chemically synthesized
  source 1..20: mol_type = other DNA
cagaaacatacatatgtttg

SEQ ID NO: 73379 - DNA, 20 bp, synthetic construct
  misc_feature 1..20: note = chemically synthesized
  source 1..20: mol_type = other DNA
catacatatgtttgtctagt

SEQ ID NO: 73380 - DNA, 20 bp, synthetic construct
  misc_feature 1..20: note = chemically synthesized
  source 1..20: mol_type = other DNA
cacaagaaatgagaagaaac

SEQ ID NO: 73381 - DNA, 20 bp, synthetic construct
  misc_feature 1..20: note = chemically synthesized
  source 1..20: mol_type = other DNA
ccctttgccgggtctgacaa

SEQ ID NO: 73382 - DNA, 20 bp, synthetic construct
  misc_feature 1..20: note = chemically synthesized
  source 1..20: mol_type = other DNA
ctaactactttaaaatcatt

SEQ ID NO: 73383 - DNA, 20 bp, synthetic construct
  misc_feature 1..20: note = chemically synthesized
  source 1..20: mol_type = other DNA
caaatgagaagttacaacat

SEQ ID NO: 73384 - DNA, 20 bp, synthetic construct
  misc_feature 1..20: note = chemically synthesized
  source 1..20: mol_type = other DNA
ggcaacatggctgcctaaag

SEQ ID NO: 73385 - DNA, 20 bp, synthetic construct
  misc_feature 1..20: note = chemically synthesized
  source 1..20: mol_type = other DNA
ctgtgtcttagccagttcct

SEQ ID NO: 73386 - DNA, 20 bp, synthetic construct
  misc_feature 1..20: note = chemically synthesized
  source 1..20: mol_type = other DNA
ttcatttctcaaggtccaac

SEQ ID NO: 73387 - DNA, 20 bp, synthetic construct
  misc_feature 1..20: note = chemically synthesized
  source 1..20: mol_type = other DNA
ttgggaggctgaggtgggtg

SEQ ID NO: 73388 - DNA, 20 bp, synthetic construct
  misc_feature 1..20: note = chemically synthesized
  source 1..20: mol_type = other DNA
tagggtggctgaggcaggag

SEQ ID NO: 73389 - DNA, 20 bp, synthetic construct
  misc_feature 1..20: note = chemically synthesized
  source 1..20: mol_type = other DNA
actcttgtggggaataagat

SEQ ID NO: 73390 - DNA, 20 bp, synthetic construct
  misc_feature 1..20: note = chemically synthesized
  source 1..20: mol_type = other DNA
gatacatgttttattcttat

SEQ ID NO: 73391 - DNA, 20 bp, synthetic construct
  misc_feature 1..20: note = chemically synthesized
  source 1..20: mol_type = other DNA
tatgattcaagcactgaaaa

SEQ ID NO: 73392 - DNA, 20 bp, synthetic construct
  misc_feature 1..20: note = chemically synthesized
  source 1..20: mol_type = other DNA
aatagtgtttagcatccagc

SEQ ID NO: 73393 - DNA, 20 bp, synthetic construct
  misc_feature 1..20: note = chemically synthesized
  source 1..20: mol_type = other DNA
gtgcttcaaaaccatttgct

SEQ ID NO: 73394 - DNA, 20 bp, synthetic construct
  misc_feature 1..20: note = chemically synthesized
  source 1..20: mol_type = other DNA
atcccttccagcatcctcat

SEQ ID NO: 73395 - DNA, 20 bp, synthetic construct
  misc_feature 1..20: note = chemically synthesized
  source 1..20: mol_type = other DNA
gcatcctcatctctgattaa

SEQ ID NO: 73396 - DNA, 20 bp, synthetic construct
  misc_feature 1..20: note = chemically synthesized
  source 1..20: mol_type = other DNA
tcatctctgattaaataagc

SEQ ID NO: 73397 - DNA, 20 bp, synthetic construct
  misc_feature 1..20: note = chemically synthesized
  source 1..20: mol_type = other DNA
tgagtcatgatgagtcatgc

SEQ ID NO: 73398 - DNA, 20 bp, synthetic construct
  misc_feature 1..20: note = chemically synthesized
  source 1..20: mol_type = other DNA
tcctatctgggtccccagca

SEQ ID NO: 73399 - DNA, 20 bp, synthetic construct
  misc_feature 1..20: note = chemically synthesized
  source 1..20: mol_type = other DNA
tgttgttatcaattgccata

SEQ ID NO: 73400 - DNA, 20 bp, synthetic construct
  misc_feature 1..20: note = chemically synthesized
  source 1..20: mol_type = other DNA
tatacctagaagcggcagaa

SEQ ID NO: 73401 - DNA, 20 bp, synthetic construct
  misc_feature 1..20: note = chemically synthesized
  source 1..20: mol_type = other DNA
aggctttattaatacatgtg

SEQ ID NO: 73402 - DNA, 20 bp, synthetic construct
  misc_feature 1..20: note = chemically synthesized
  source 1..20: mol_type = other DNA
aaacaggaaaagaaaacaaa

SEQ ID NO: 73403 - DNA, 20 bp, synthetic construct
  misc_feature 1..20: note = chemically synthesized
  source 1..20: mol_type = other DNA
aaaacaatgacagacagaca

SEQ ID NO: 73404 - DNA, 20 bp, synthetic construct
  misc_feature 1..20: note = chemically synthesized
  source 1..20: mol_type = other DNA
caggaggtcaaggggataga

SEQ ID NO: 73405 - DNA, 20 bp, synthetic construct
  misc_feature 1..20: note = chemically synthesized
  source 1..20: mol_type = other DNA
atagagaaggcttccagaag

SEQ ID NO: 73406 - DNA, 20 bp, synthetic construct
  misc_feature 1..20: note = chemically synthesized
  source 1..20: mol_type = other DNA
tccagaagaatggctttgaa

SEQ ID NO: 73407 - DNA, 20 bp, synthetic construct
  misc_feature 1..20: note = chemically synthesized
  source 1..20: mol_type = other DNA
gtaggagttcacagtggcaa

SEQ ID NO: 73408 - DNA, 20 bp, synthetic construct
  misc_feature 1..20: note = chemically synthesized
  source 1..20: mol_type = other DNA
agatgaatgttatgtctcca

SEQ ID NO: 73409 - DNA, 20 bp, synthetic construct
  misc_feature 1..20: note = chemically synthesized
  source 1..20: mol_type = other DNA
ttcttgaggttagcagctgt

SEQ ID NO: 73410 - DNA, 20 bp, synthetic construct
  misc_feature 1..20: note = chemically synthesized
  source 1..20: mol_type = other DNA
aggacctcacgtatacttga

SEQ ID NO: 73411 - DNA, 20 bp, synthetic construct
  misc_feature 1..20: note = chemically synthesized
  source 1..20: mol_type = other DNA
aatgacctcttgtcagtcta

SEQ ID NO: 73412 - DNA, 20 bp, synthetic construct
  misc_feature 1..20: note = chemically synthesized
  source 1..20: mol_type = other DNA
aatgatgtcttgtcagccta

SEQ ID NO: 73413 - DNA, 20 bp, synthetic construct
  misc_feature 1..20: note = chemically synthesized
  source 1..20: mol_type = other DNA
gtttcgctaagagcacagag

SEQ ID NO: 73414 - DNA, 20 bp, synthetic construct
  misc_feature 1..20: note = chemically synthesized
  source 1..20: mol_type = other DNA
acttcctttttggttcaagt

SEQ ID NO: 73415 - DNA, 20 bp, synthetic construct
  misc_feature 1..20: note = chemically synthesized
  source 1..20: mol_type = other DNA
gatgggtctagaaagactag

SEQ ID NO: 73416 - DNA, 20 bp, synthetic construct
  misc_feature 1..20: note = chemically synthesized
  source 1..20: mol_type = other DNA
cattgttttaggttgagtgg

SEQ ID NO: 73417 - DNA, 20 bp, synthetic construct
  misc_feature 1..20: note = chemically synthesized
  source 1..20: mol_type = other DNA
ttcgtatcatgaatagcaga

SEQ ID NO: 73418 - DNA, 20 bp, synthetic construct
  misc_feature 1..20: note = chemically synthesized
  source 1..20: mol_type = other DNA
gcagatatagcttgatggcc

SEQ ID NO: 73419 - DNA, 20 bp, synthetic construct
  misc_feature 1..20: note = chemically synthesized
  source 1..20: mol_type = other DNA
tatagcttgatggccccatg

SEQ ID NO: 73420 - DNA, 20 bp, synthetic construct
  misc_feature 1..20: note = chemically synthesized
  source 1..20: mol_type = other DNA
ttatgtagatggtcctgagg

SEQ ID NO: 73421 - DNA, 20 bp, synthetic construct
  misc_feature 1..20: note = chemically synthesized
  source 1..20: mol_type = other DNA
gatggtcctgaggaaaagtt

SEQ ID NO: 73422 - DNA, 20 bp, synthetic construct
  misc_feature 1..20: note = chemically synthesized
  source 1..20: mol_type = other DNA
cctaggctataggaagtact

SEQ ID NO: 73423 - DNA, 20 bp, synthetic construct
  misc_feature 1..20: note = chemically synthesized
  source 1..20: mol_type = other DNA
aaggcaggtgtggctctgca

SEQ ID NO: 73424 - DNA, 20 bp, synthetic construct
  misc_feature 1..20: note = chemically synthesized
  source 1..20: mol_type = other DNA
tggctcactcctgtaatcac

SEQ ID NO: 73425 - DNA, 20 bp, synthetic construct
  misc_feature 1..20: note = chemically synthesized
  source 1..20: mol_type = other DNA
ccaacatagtgaaacctggt

SEQ ID NO: 73426 - DNA, 20 bp, synthetic construct
  misc_feature 1..20: note = chemically synthesized
  source 1..20: mol_type = other DNA
ttgggaggctgaggcaggag

SEQ ID NO: 73427 - DNA, 20 bp, synthetic construct
  misc_feature 1..20: note = chemically synthesized
  source 1..20: mol_type = other DNA
aatcgcttgaaccggggagg

SEQ ID NO: 73428 - DNA, 20 bp, synthetic construct
  misc_feature 1..20: note = chemically synthesized
  source 1..20: mol_type = other DNA
ccctgaccgaacagaattct

SEQ ID NO: 73429 - DNA, 20 bp, synthetic construct
  misc_feature 1..20: note = chemically synthesized
  source 1..20: mol_type = other DNA
atgtgtagacaagctccaga

SEQ ID NO: 73430 - DNA, 20 bp, synthetic construct
  misc_feature 1..20: note = chemically synthesized
  source 1..20: mol_type = other DNA
ctcatttccatatccaccca

SEQ ID NO: 73431 - DNA, 20 bp, synthetic construct
  misc_feature 1..20: note = chemically synthesized
  source 1..20: mol_type = other DNA
caacccaaagactcactttg

SEQ ID NO: 73432 - DNA, 20 bp, synthetic construct
  misc_feature 1..20: note = chemically synthesized
  source 1..20: mol_type = other DNA
attctctgtcagaaaatcct

SEQ ID NO: 73433 - DNA, 20 bp, synthetic construct
  misc_feature 1..20: note = chemically synthesized
  source 1..20: mol_type = other DNA
cctgttggtttttcgtgaaa

SEQ ID NO: 73434 - DNA, 20 bp, synthetic construct
  misc_feature 1..20: note = chemically synthesized
  source 1..20: mol_type = other DNA
ctgttgactcataacaatct

SEQ ID NO: 73435 - DNA, 20 bp, synthetic construct
  misc_feature 1..20: note = chemically synthesized
  source 1..20: mol_type = other DNA
ctctttgttcaaagtcttct

SEQ ID NO: 73436 - DNA, 20 bp, synthetic construct
  misc_feature 1..20: note = chemically synthesized
  source 1..20: mol_type = other DNA
aatagttgttcatgcatata

SEQ ID NO: 73437 - DNA, 20 bp, synthetic construct
  misc_feature 1..20: note = chemically synthesized
  source 1..20: mol_type = other DNA
tatttatgtgtatgtgtgta

SEQ ID NO: 73438 - DNA, 20 bp, synthetic construct
  misc_feature 1..20: note = chemically synthesized
  source 1..20: mol_type = other DNA
ctatgccctaaatatttaat

SEQ ID NO: 73439 - DNA, 20 bp, synthetic construct
  misc_feature 1..20: note = chemically synthesized
  source 1..20: mol_type = other DNA
aatcacactctggccttcat

SEQ ID NO: 73440 - DNA, 20 bp, synthetic construct
  misc_feature 1..20: note = chemically synthesized
  source 1..20: mol_type = other DNA
cctaatctcattggtatata

SEQ ID NO: 73441 - DNA, 20 bp, synthetic construct
  misc_feature 1..20: note = chemically synthesized
  source 1..20: mol_type = other DNA
attggtatataacatgtttc

SEQ ID NO: 73442 - DNA, 20 bp, synthetic construct
  misc_feature 1..20: note = chemically synthesized
  source 1..20: mol_type = other DNA
acaggaactttattcctcta

SEQ ID NO: 73443 - DNA, 20 bp, synthetic construct
  misc_feature 1..20: note = chemically synthesized
  source 1..20: mol_type = other DNA
cctccgcaggcagagccttg

SEQ ID NO: 73444 - DNA, 20 bp, synthetic construct
  misc_feature 1..20: note = chemically synthesized
  source 1..20: mol_type = other DNA
tgagttctagaattggactc

SEQ ID NO: 73445 - DNA, 20 bp, synthetic construct
  misc_feature 1..20: note = chemically synthesized
  source 1..20: mol_type = other DNA
ggactcatttgttttgtagg

SEQ ID NO: 73446 - DNA, 20 bp, synthetic construct
  misc_feature 1..20: note = chemically synthesized
  source 1..20: mol_type = other DNA
aaagatgaatatcgaaacca

SEQ ID NO: 73447 - DNA, 20 bp, synthetic construct
  misc_feature 1..20: note = chemically synthesized
  source 1..20: mol_type = other DNA
ggaatttataactagagcac

SEQ ID NO: 73448 - DNA, 20 bp, synthetic construct
  misc_feature 1..20: note = chemically synthesized
  source 1..20: mol_type = other DNA
tcatgtttatgtaagcaatt

SEQ ID NO: 73449 - DNA, 20 bp, synthetic construct
  misc_feature 1..20: note = chemically synthesized
  source 1..20: mol_type = other DNA
attatttcataggtgtcaga

SEQ ID NO: 73450 - DNA, 20 bp, synthetic construct
  misc_feature 1..20: note = chemically synthesized
  source 1..20: mol_type = other DNA
agagctcctttttttttttt

SEQ ID NO: 73451 - DNA, 20 bp, synthetic construct
  misc_feature 1..20: note = chemically synthesized
  source 1..20: mol_type = other DNA
ctattcaatgagaatattct

SEQ ID NO: 73452 - DNA, 20 bp, synthetic construct
  misc_feature 1..20: note = chemically synthesized
  source 1..20: mol_type = other DNA
tccgtctcttatagttaaat

SEQ ID NO: 73453 - DNA, 20 bp, synthetic construct
  misc_feature 1..20: note = chemically synthesized
  source 1..20: mol_type = other DNA
atttgagcttcttttatgat

SEQ ID NO: 73454 - DNA, 20 bp, synthetic construct
  misc_feature 1..20: note = chemically synthesized
  source 1..20: mol_type = other DNA
ttatgatcactgttttttta

SEQ ID NO: 73455 - DNA, 20 bp, synthetic construct
  misc_feature 1..20: note = chemically synthesized
  source 1..20: mol_type = other DNA
ttctggggtacatgtgccat

SEQ ID NO: 73456 - DNA, 20 bp, synthetic construct
  misc_feature 1..20: note = chemically synthesized
  source 1..20: mol_type = other DNA
cctccctgtgtccatggatc

SEQ ID NO: 73457 - DNA, 20 bp, synthetic construct
  misc_feature 1..20: note = chemically synthesized
  source 1..20: mol_type = other DNA
tccatggatcactggttttt

SEQ ID NO: 73458 - DNA, 20 bp, synthetic construct
  misc_feature 1..20: note = chemically synthesized
  source 1..20: mol_type = other DNA
ttatctggtcactttagccc

SEQ ID NO: 73459 - DNA, 20 bp, synthetic construct
  misc_feature 1..20: note = chemically synthesized
  source 1..20: mol_type = other DNA
agctcttatctatatccaca

SEQ ID NO: 73460 - DNA, 20 bp, synthetic construct
  misc_feature 1..20: note = chemically synthesized
  source 1..20: mol_type = other DNA
caagtctaaagaaaaaaata

SEQ ID NO: 73461 - DNA, 20 bp, synthetic construct
  misc_feature 1..20: note = chemically synthesized
  source 1..20: mol_type = other DNA
ataatgggtttgcccatctc

SEQ ID NO: 73462 - DNA, 20 bp, synthetic construct
  misc_feature 1..20: note = chemically synthesized
  source 1..20: mol_type = other DNA
tggtgacactagtgtctgaa

SEQ ID NO: 73463 - DNA, 20 bp, synthetic construct
  misc_feature 1..20: note = chemically synthesized
  source 1..20: mol_type = other DNA
aaaagaggctctagcagcat

SEQ ID NO: 73464 - DNA, 20 bp, synthetic construct
  misc_feature 1..20: note = chemically synthesized
  source 1..20: mol_type = other DNA
gcagcatagtggtttagagg

SEQ ID NO: 73465 - DNA, 20 bp, synthetic construct
  misc_feature 1..20: note = chemically synthesized
  source 1..20: mol_type = other DNA
tcacagatgccttagcctca

SEQ ID NO: 73466 - DNA, 20 bp, synthetic construct
  misc_feature 1..20: note = chemically synthesized
  source 1..20: mol_type = other DNA
ctcaataagcttgcggttgt

SEQ ID NO: 73467 - DNA, 20 bp, synthetic construct
  misc_feature 1..20: note = chemically synthesized
  source 1..20: mol_type = other DNA
gtgacacaaaacagaggggg

SEQ ID NO: 73468 - DNA, 20 bp, synthetic construct
  misc_feature 1..20: note = chemically synthesized
  source 1..20: mol_type = other DNA
tgaaggtggtctgacgagat

SEQ ID NO: 73469 - DNA, 20 bp, synthetic construct
  misc_feature 1..20: note = chemically synthesized
  source 1..20: mol_type = other DNA
gccttgctcacttgccaatc

SEQ ID NO: 73470 - DNA, 20 bp, synthetic construct
  misc_feature 1..20: note = chemically synthesized
  source 1..20: mol_type = other DNA
attcaggaaacatactatgt

SEQ ID NO: 73471 - DNA, 20 bp, synthetic construct
  misc_feature 1..20: note = chemically synthesized
  source 1..20: mol_type = other DNA
tgcataggcaagaaaaagtc

SEQ ID NO: 73472 - DNA, 20 bp, synthetic construct
  misc_feature 1..20: note = chemically synthesized
  source 1..20: mol_type = other DNA
agtccttagctttatgttgc

SEQ ID NO: 73473 - DNA, 20 bp, synthetic construct
  misc_feature 1..20: note = chemically synthesized
  source 1..20: mol_type = other DNA
tggaatcttagcatataatc

SEQ ID NO: 73474 - DNA, 20 bp, synthetic construct
  misc_feature 1..20: note = chemically synthesized
  source 1..20: mol_type = other DNA
gtttttcaaaatttctagac

SEQ ID NO: 73475 - DNA, 20 bp, synthetic construct
  misc_feature 1..20: note = chemically synthesized
  source 1..20: mol_type = other DNA
cattctgaactacttcagag

SEQ ID NO: 73476 - DNA, 20 bp, synthetic construct
  misc_feature 1..20: note = chemically synthesized
  source 1..20: mol_type = other DNA
cagcggaaaatgggatattt

SEQ ID NO: 73477 - DNA, 20 bp, synthetic construct
  misc_feature 1..20: note = chemically synthesized
  source 1..20: mol_type = other DNA
agttttctaagttgacagac

SEQ ID NO: 73478 - DNA, 20 bp, synthetic construct
  misc_feature 1..20: note = chemically synthesized
  source 1..20: mol_type = other DNA
taggaaagtgtggcataact

SEQ ID NO: 73479 - DNA, 20 bp, synthetic construct
  misc_feature 1..20: note = chemically synthesized
  source 1..20: mol_type = other DNA
gtgtggcataactggctgat

SEQ ID NO: 73480 - DNA, 20 bp, synthetic construct
  misc_feature 1..20: note = chemically synthesized
  source 1..20: mol_type = other DNA
tttttcccattaaagatccc

SEQ ID NO: 73481 - DNA, 20 bp, synthetic construct
  misc_feature 1..20: note = chemically synthesized
  source 1..20: mol_type = other DNA
gtgctccaagttgccagaga

SEQ ID NO: 73482 - DNA, 20 bp, synthetic construct
  misc_feature 1..20: note = chemically synthesized
  source 1..20: mol_type = other DNA
aaagttgaaaacaagaaagc

SEQ ID NO: 73483 - DNA, 20 bp, synthetic construct
  misc_feature 1..20: note = chemically synthesized
  source 1..20: mol_type = other DNA
aattacactagaaaatagcc

SEQ ID NO: 73484 - DNA, 20 bp, synthetic construct
  misc_feature 1..20: note = chemically synthesized
  source 1..20: mol_type = other DNA
acacaaaatctagtagaatc

SEQ ID NO: 73485 - DNA, 20 bp, synthetic construct
  misc_feature 1..20: note = chemically synthesized
  source 1..20: mol_type = other DNA
atctatttttgttctgagaa

SEQ ID NO: 73486 - DNA, 20 bp, synthetic construct
  misc_feature 1..20: note = chemically synthesized
  source 1..20: mol_type = other DNA
taagcagctcttttcctatc

SEQ ID NO: 73487 - DNA, 20 bp, synthetic construct
  misc_feature 1..20: note = chemically synthesized
  source 1..20: mol_type = other DNA
tcctatcagtggtttacaag

SEQ ID NO: 73488 - DNA, 20 bp, synthetic construct
  misc_feature 1..20: note = chemically synthesized
  source 1..20: mol_type = other DNA
catatgtcataaattagcca

SEQ ID NO: 73489 - DNA, 20 bp, synthetic construct
  misc_feature 1..20: note = chemically synthesized
  source 1..20: mol_type = other DNA
gaaagatttaagaaaatatt

SEQ ID NO: 73490 - DNA, 20 bp, synthetic construct
  misc_feature 1..20: note = chemically synthesized
  source 1..20: mol_type = other DNA
taagaaaatattggatgttt

SEQ ID NO: 73491 - DNA, 20 bp, synthetic construct
  misc_feature 1..20: note = chemically synthesized
  source 1..20: mol_type = other DNA
cttgtttaaattaggcatct

SEQ ID NO: 73492 - DNA, 20 bp, synthetic construct
  misc_feature 1..20: note = chemically synthesized
  source 1..20: mol_type = other DNA
aattaatcttcatcgaattt

SEQ ID NO: 73493 - DNA, 20 bp, synthetic construct
  misc_feature 1..20: note = chemically synthesized
  source 1..20: mol_type = other DNA
cttaaatgtcttaagacata

SEQ ID NO: 73494 - DNA, 20 bp, synthetic construct
  misc_feature 1..20: note = chemically synthesized
  source 1..20: mol_type = other DNA
agacaataaatgaatattct

SEQ ID NO: 73495 - DNA, 20 bp, synthetic construct
  misc_feature 1..20: note = chemically synthesized
  source 1..20: mol_type = other DNA
aacacttatctctctgaact

SEQ ID NO: 73496 - DNA, 20 bp, synthetic construct
  misc_feature 1..20: note = chemically synthesized
  source 1..20: mol_type = other DNA
tctcatatgataaacaaata

SEQ ID NO: 73497 - DNA, 20 bp, synthetic construct
  misc_feature 1..20: note = chemically synthesized
  source 1..20: mol_type = other DNA
cagcctacctgacttctgag

SEQ ID NO: 73498 - DNA, 20 bp, synthetic construct
  misc_feature 1..20: note = chemically synthesized
  source 1..20: mol_type = other DNA
tactctgaatgggaagaatg

SEQ ID NO: 73499 - DNA, 20 bp, synthetic construct
  misc_feature 1..20: note = chemically synthesized
  source 1..20: mol_type = other DNA
aagaatgatgggattaccca

SEQ ID NO: 73500 - DNA, 20 bp, synthetic construct
  misc_feature 1..20: note = chemically synthesized
  source 1..20: mol_type = other DNA
atgatgggattacccatagg

SEQ ID NO: 73501 - DNA, 20 bp, synthetic construct
  misc_feature 1..20: note = chemically synthesized
  source 1..20: mol_type = other DNA
ttcttctctgagtagccaag

SEQ ID NO: 73502 - DNA, 20 bp, synthetic construct
  misc_feature 1..20: note = chemically synthesized
  source 1..20: mol_type = other DNA
gttcaagctacaagcagctg

SEQ ID NO: 73503 - DNA, 20 bp, synthetic construct
  misc_feature 1..20: note = chemically synthesized
  source 1..20: mol_type = other DNA
acagaacactagggggctgg

SEQ ID NO: 73504 - DNA, 20 bp, synthetic construct
  misc_feature 1..20: note = chemically synthesized
  source 1..20: mol_type = other DNA
accataggtattgcagatct

SEQ ID NO: 73505 - DNA, 20 bp, synthetic construct
  misc_feature 1..20: note = chemically synthesized
  source 1..20: mol_type = other DNA
ggtattgcagatctttttgt

SEQ ID NO: 73506 - DNA, 20 bp, synthetic construct
  misc_feature 1..20: note = chemically synthesized
  source 1..20: mol_type = other DNA
gcagatctttttgtttttgt

SEQ ID NO: 73507 - DNA, 20 bp, synthetic construct
  misc_feature 1..20: note = chemically synthesized
  source 1..20: mol_type = other DNA
gtttttgtttttgtttgaga

SEQ ID NO: 73508 - DNA, 20 bp, synthetic construct
  misc_feature 1..20: note = chemically synthesized
  source 1..20: mol_type = other DNA
gcccaggctggagtgcagtg

SEQ ID NO: 73509 - DNA, 20 bp, synthetic construct
  misc_feature 1..20: note = chemically synthesized
  source 1..20: mol_type = other DNA
gccttggcctcctgagtagc

SEQ ID NO: 73510 - DNA, 20 bp, synthetic construct
  misc_feature 1..20: note = chemically synthesized
  source 1..20: mol_type = other DNA
ttttgtatttttagtagaga

SEQ ID NO: 73511 - DNA, 20 bp, synthetic construct
  misc_feature 1..20: note = chemically synthesized
  source 1..20: mol_type = other DNA
cgccttggcctcctgaagtg

SEQ ID NO: 73512 - DNA, 20 bp, synthetic construct
  misc_feature 1..20: note = chemically synthesized
  source 1..20: mol_type = other DNA
tgtagacccaatcctagatc

SEQ ID NO: 73513 - DNA, 20 bp, synthetic construct
  misc_feature 1..20: note = chemically synthesized
  source 1..20: mol_type = other DNA
taaatactataccacaaatg

SEQ ID NO: 73514 - DNA, 20 bp, synthetic construct
  misc_feature 1..20: note = chemically synthesized
  source 1..20: mol_type = other DNA
aaactggcctgtgacacaaa

SEQ ID NO: 73515 - DNA, 20 bp, synthetic construct
  misc_feature 1..20: note = chemically synthesized
  source 1..20: mol_type = other DNA
acaaaaaaagtttaggaatt

SEQ ID NO: 73516 - DNA, 20 bp, synthetic construct
  misc_feature 1..20: note = chemically synthesized
  source 1..20: mol_type = other DNA
gagacattcttacttgccac

SEQ ID NO: 73517 - DNA, 20 bp, synthetic construct
  misc_feature 1..20: note = chemically synthesized
  source 1..20: mol_type = other DNA
tcgggaggctgaggcaggag

SEQ ID NO: 73518 - DNA, 20 bp, synthetic construct
  misc_feature 1..20: note = chemically synthesized
  source 1..20: mol_type = other DNA
ggaggaactgggctggggca

SEQ ID NO: 73519 - DNA, 20 bp, synthetic construct
  misc_feature 1..20: note = chemically synthesized
  source 1..20: mol_type = other DNA
caatgctggaatttgtggaa

SEQ ID NO: 73520 - DNA, 20 bp, synthetic construct
  misc_feature 1..20: note = chemically synthesized
  source 1..20: mol_type = other DNA
ataatttctgtgaatttatt

SEQ ID NO: 73521 - DNA, 20 bp, synthetic construct
  misc_feature 1..20: note = chemically synthesized
  source 1..20: mol_type = other DNA
aatgacaatggtattataag

SEQ ID NO: 73522 - DNA, 20 bp, synthetic construct
  misc_feature 1..20: note = chemically synthesized
  source 1..20: mol_type = other DNA
atacactgtaaatcccaact

SEQ ID NO: 73523 - DNA, 20 bp, synthetic construct
  misc_feature 1..20: note = chemically synthesized
  source 1..20: mol_type = other DNA
ataatataccctgactccta

SEQ ID NO: 73524 - DNA, 20 bp, synthetic construct
  misc_feature 1..20: note = chemically synthesized
  source 1..20: mol_type = other DNA
gactcctagcctgattaata

SEQ ID NO: 73525 - DNA, 20 bp, synthetic construct
  misc_feature 1..20: note = chemically synthesized
  source 1..20: mol_type = other DNA
atatatcgattcactttttt

SEQ ID NO: 73526 - DNA, 20 bp, synthetic construct
  misc_feature 1..20: note = chemically synthesized
  source 1..20: mol_type = other DNA
ttctctgtttgatgacaaat

SEQ ID NO: 73527 - DNA, 20 bp, synthetic construct
  misc_feature 1..20: note = chemically synthesized
  source 1..20: mol_type = other DNA
aattctggctttaaataatt

SEQ ID NO: 73528 - DNA, 20 bp, synthetic construct
  misc_feature 1..20: note = chemically synthesized
  source 1..20: mol_type = other DNA
ctttaaataattttaggatt

SEQ ID NO: 73529 - DNA, 20 bp, synthetic construct
  misc_feature 1..20: note = chemically synthesized
  source 1..20: mol_type = other DNA
tcatagagaaatgaaaagag

SEQ ID NO: 73530 - DNA, 20 bp, synthetic construct
  misc_feature 1..20: note = chemically synthesized
  source 1..20: mol_type = other DNA
tcaccccaaggtactgtact

SEQ ID NO: 73531 - DNA, 20 bp, synthetic construct
  misc_feature 1..20: note = chemically synthesized
  source 1..20: mol_type = other DNA
aaggtactgtactttgggat

SEQ ID NO: 73532 - DNA, 20 bp, synthetic construct
  misc_feature 1..20: note = chemically synthesized
  source 1..20: mol_type = other DNA
gtggactacttgctattctg

SEQ ID NO: 73533 - DNA, 20 bp, synthetic construct
  misc_feature 1..20: note = chemically synthesized
  source 1..20: mol_type = other DNA
agtttctagaaggaactatg

SEQ ID NO: 73534 - DNA, 20 bp, synthetic construct
  misc_feature 1..20: note = chemically synthesized
  source 1..20: mol_type = other DNA
ccctagagaaactaaggtac

SEQ ID NO: 73535 - DNA, 20 bp, synthetic construct
  misc_feature 1..20: note = chemically synthesized
  source 1..20: mol_type = other DNA
gagaaactaaggtacagaag

SEQ ID NO: 73536 - DNA, 20 bp, synthetic construct
  misc_feature 1..20: note = chemically synthesized
  source 1..20: mol_type = other DNA
cttaagagagctagaactgg

SEQ ID NO: 73537 - DNA, 20 bp, synthetic construct
  misc_feature 1..20: note = chemically synthesized
  source 1..20: mol_type = other DNA
agagctagaactgggtgaga

SEQ ID NO: 73538 - DNA, 20 bp, synthetic construct
  misc_feature 1..20: note = chemically synthesized
  source 1..20: mol_type = other DNA
actgggtgagattctgtttt

SEQ ID NO: 73539 - DNA, 20 bp, synthetic construct
  misc_feature 1..20: note = chemically synthesized
  source 1..20: mol_type = other DNA
ctttattttcttttccttgg

SEQ ID NO: 73540 - DNA, 20 bp, synthetic construct
  misc_feature 1..20: note = chemically synthesized
  source 1..20: mol_type = other DNA
acctttaaggcaaatgttaa

SEQ ID NO: 73541 - DNA, 20 bp, synthetic construct
  misc_feature 1..20: note = chemically synthesized
  source 1..20: mol_type = other DNA
ctgaaactttttttcctatt

SEQ ID NO: 73542 - DNA, 20 bp, synthetic construct
  misc_feature 1..20: note = chemically synthesized
  source 1..20: mol_type = other DNA
ttgagatttgctcctttata

SEQ ID NO: 73543 - DNA, 20 bp, synthetic construct
  misc_feature 1..20: note = chemically synthesized
  source 1..20: mol_type = other DNA
acagagaggcagcagcacat

SEQ ID NO: 73544 - DNA, 20 bp, synthetic construct
  misc_feature 1..20: note = chemically synthesized
  source 1..20: mol_type = other DNA
gggtgaatattaccctagca

SEQ ID NO: 73545 - DNA, 20 bp, synthetic construct
  misc_feature 1..20: note = chemically synthesized
  source 1..20: mol_type = other DNA
caagttgattgggaaagtcc

SEQ ID NO: 73546 - DNA, 20 bp, synthetic construct
  misc_feature 1..20: note = chemically synthesized
  source 1..20: mol_type = other DNA
gtgtcatttcatagactcct

SEQ ID NO: 73547 - DNA, 20 bp, synthetic construct
  misc_feature 1..20: note = chemically synthesized
  source 1..20: mol_type = other DNA
tcgttgtttacccctggacc

SEQ ID NO: 73548 - DNA, 20 bp, synthetic construct
  misc_feature 1..20: note = chemically synthesized
  source 1..20: mol_type = other DNA
cctggacccagagatttttt

SEQ ID NO: 73549 - DNA, 20 bp, synthetic construct
  misc_feature 1..20: note = chemically synthesized
  source 1..20: mol_type = other DNA
ggtgagttcaggtgctggtg

SEQ ID NO: 73550 - DNA, 20 bp, synthetic construct
  misc_feature 1..20: note = chemically synthesized
  source 1..20: mol_type = other DNA
aggtgctggtgatgtgattt

SEQ ID NO: 73551 - DNA, 20 bp, synthetic construct
  misc_feature 1..20: note = chemically synthesized
  source 1..20: mol_type = other DNA
aagatctcagaaatcatggg

SEQ ID NO: 73552 - DNA, 20 bp, synthetic construct
  misc_feature 1..20: note = chemically synthesized
  source 1..20: mol_type = other DNA
agtgagcataaccaaaactt

SEQ ID NO: 73553 - DNA, 20 bp, synthetic construct
  misc_feature 1..20: note = chemically synthesized
  source 1..20: mol_type = other DNA
aaggactactaacagcctga

SEQ ID NO: 73554 - DNA, 20 bp, synthetic construct
  misc_feature 1..20: note = chemically synthesized
  source 1..20: mol_type = other DNA
ggaaatcttgccagaacttg

SEQ ID NO: 73555 - DNA, 20 bp, synthetic construct
  misc_feature 1..20: note = chemically synthesized
  source 1..20: mol_type = other DNA
cttgtgaaagaagaatgaaa

SEQ ID NO: 73556 - DNA, 20 bp, synthetic construct
  misc_feature 1..20: note = chemically synthesized
  source 1..20: mol_type = other DNA
tttatgtgggtcatgataat

SEQ ID NO: 73557 - DNA, 20 bp, synthetic construct
  misc_feature 1..20: note = chemically synthesized
  source 1..20: mol_type = other DNA
catgataattgaggtttaga

SEQ ID NO: 73558 - DNA, 20 bp, synthetic construct
  misc_feature 1..20: note = chemically synthesized
  source 1..20: mol_type = other DNA
gagatttttgcaaaaaaaat

SEQ ID NO: 73559 - DNA, 20 bp, synthetic construct
  misc_feature 1..20: note = chemically synthesized
  source 1..20: mol_type = other DNA
catcagtattgtgaccaagt

SEQ ID NO: 73560 - DNA, 20 bp, synthetic construct
  misc_feature 1..20: note = chemically synthesized
  source 1..20: mol_type = other DNA
agtattgtgaccaagtgaag

SEQ ID NO: 73561 - DNA, 20 bp, synthetic construct
  misc_feature 1..20: note = chemically synthesized
  source 1..20: mol_type = other DNA
aggcttgtttccgaatttgt

SEQ ID NO: 73562 - DNA, 20 bp, synthetic construct
  misc_feature 1..20: note = chemically synthesized
  source 1..20: mol_type = other DNA
tacatttacaaaaattagac

SEQ ID NO: 73563 - DNA, 20 bp, synthetic construct
  misc_feature 1..20: note = chemically synthesized
  source 1..20: mol_type = other DNA
tgggtgggcacaaaccttgg

SEQ ID NO: 73564 - DNA, 20 bp, synthetic construct
  misc_feature 1..20: note = chemically synthesized
  source 1..20: mol_type = other DNA
gtctaggaatgtaggtataa

SEQ ID NO: 73565 - DNA, 20 bp, synthetic construct
  misc_feature 1..20: note = chemically synthesized
  source 1..20: mol_type = other DNA
gaatgtaggtataaagccgt

SEQ ID NO: 73566 - DNA, 20 bp, synthetic construct
  misc_feature 1..20: note = chemically synthesized
  source 1..20: mol_type = other DNA
gtaggtataaagccgttttt

SEQ ID NO: 73567 - DNA, 20 bp, synthetic construct
  misc_feature 1..20: note = chemically synthesized
  source 1..20: mol_type = other DNA
gtataaagccgtttttgttt

SEQ ID NO: 73568 - DNA, 20 bp, synthetic construct
  misc_feature 1..20: note = chemically synthesized
  source 1..20: mol_type = other DNA
aaagccgtttttgtttgttt

SEQ ID NO: 73569 - DNA, 20 bp, synthetic construct
  misc_feature 1..20: note = chemically synthesized
  source 1..20: mol_type = other DNA
gtttgtttgttttttcatca

SEQ ID NO: 73570 - DNA, 20 bp, synthetic construct
  misc_feature 1..20: note = chemically synthesized
  source 1..20: mol_type = other DNA
acagctcctgggtaacgtga

SEQ ID NO: 73571 - DNA, 20 bp, synthetic construct
  misc_feature 1..20: note = chemically synthesized
  source 1..20: mol_type = other DNA
taagtaccactgagttctct

SEQ ID NO: 73572 - DNA, 20 bp, synthetic construct
  misc_feature 1..20: note = chemically synthesized
  source 1..20: mol_type = other DNA
cctccttctgcacatgggga

SEQ ID NO: 73573 - DNA, 20 bp, synthetic construct
  misc_feature 1..20: note = chemically synthesized
  source 1..20: mol_type = other DNA
cttggccttgagagaaagcc

SEQ ID NO: 73574 - DNA, 20 bp, synthetic construct
  misc_feature 1..20: note = chemically synthesized
  source 1..20: mol_type = other DNA
agagaaacataggaagaacc

SEQ ID NO: 73575 - DNA, 20 bp, synthetic construct
  misc_feature 1..20: note = chemically synthesized
  source 1..20: mol_type = other DNA
agcttccttaagaaatgtat

SEQ ID NO: 73576 - DNA, 20 bp, synthetic construct
  misc_feature 1..20: note = chemically synthesized
  source 1..20: mol_type = other DNA
gtggatgttatgggagaatt

SEQ ID NO: 73577 - DNA, 20 bp, synthetic construct
  misc_feature 1..20: note = chemically synthesized
  source 1..20: mol_type = other DNA
taagtggacagagactccta

SEQ ID NO: 73578 - DNA, 20 bp, synthetic construct
  misc_feature 1..20: note = chemically synthesized
  source 1..20: mol_type = other DNA
ctgttagtggtacctgagaa

SEQ ID NO: 73579 - DNA, 20 bp, synthetic construct
  misc_feature 1..20: note = chemically synthesized
  source 1..20: mol_type = other DNA
cttatttacattttgaagta

SEQ ID NO: 73580 - DNA, 20 bp, synthetic construct
  misc_feature 1..20: note = chemically synthesized
  source 1..20: mol_type = other DNA
tttgaagtagctagcttgtc

SEQ ID NO: 73581 - DNA, 20 bp, synthetic construct
  misc_feature 1..20: note = chemically synthesized
  source 1..20: mol_type = other DNA
gcttgtcacatgttttatga

SEQ ID NO: 73582 - DNA, 20 bp, synthetic construct
  misc_feature 1..20: note = chemically synthesized
  source 1..20: mol_type = other DNA
caatagcctgctctttccat

SEQ ID NO: 73583 - DNA, 20 bp, synthetic construct
  misc_feature 1..20: note = chemically synthesized
  source 1..20: mol_type = other DNA
tagagttaggacctgagtgg

SEQ ID NO: 73584 - DNA, 20 bp, synthetic construct
  misc_feature 1..20: note = chemically synthesized
  source 1..20: mol_type = other DNA
gtgggagatagaatactaat

SEQ ID NO: 73585 - DNA, 20 bp, synthetic construct
  misc_feature 1..20: note = chemically synthesized
  source 1..20: mol_type = other DNA
aaattctaaaaccagcaagc

SEQ ID NO: 73586 - DNA, 20 bp, synthetic construct
  misc_feature 1..20: note = chemically synthesized
  source 1..20: mol_type = other DNA
cagggcctggctacaaaaat

SEQ ID NO: 73587 - DNA, 20 bp, synthetic construct
  misc_feature 1..20: note = chemically synthesized
  source 1..20: mol_type = other DNA
gatgttaagtgactcaggaa

SEQ ID NO: 73588 - DNA, 20 bp, synthetic construct
  misc_feature 1..20: note = chemically synthesized
  source 1..20: mol_type = other DNA
taagattttgggaaaaagta

SEQ ID NO: 73589 - DNA, 20 bp, synthetic construct
  misc_feature 1..20: note = chemically synthesized
  source 1..20: mol_type = other DNA
taatctgcttatgtgcacaa

SEQ ID NO: 73590 - DNA, 20 bp, synthetic construct
  misc_feature 1..20: note = chemically synthesized
  source 1..20: mol_type = other DNA
cttatgtgcacaaaatggat

SEQ ID NO: 73591 - DNA, 20 bp, synthetic construct
  misc_feature 1..20: note = chemically synthesized
  source 1..20: mol_type = other DNA
cagataaaataaaatatgga

SEQ ID NO: 73592 - DNA, 20 bp, synthetic construct
  misc_feature 1..20: note = chemically synthesized
  source 1..20: mol_type = other DNA
gtgaagggtagagggatatt

SEQ ID NO: 73593 - DNA, 20 bp, synthetic construct
  misc_feature 1..20: note = chemically synthesized
  source 1..20: mol_type = other DNA
agatttactttttaggaagt

SEQ ID NO: 73594 - DNA, 20 bp, synthetic construct
  misc_feature 1..20: note = chemically synthesized
  source 1..20: mol_type = other DNA
aggaagtgctagattggtca

SEQ ID NO: 73595 - DNA, 20 bp, synthetic construct
  misc_feature 1..20: note = chemically synthesized
  source 1..20: mol_type = other DNA
atgcccataaacagagtaaa

SEQ ID NO: 73596 - DNA, 20 bp, synthetic construct
  misc_feature 1..20: note = chemically synthesized
  source 1..20: mol_type = other DNA
acttacatgcctagaacatg

SEQ ID NO: 73597 - DNA, 20 bp, synthetic construct
  misc_feature 1..20: note = chemically synthesized
  source 1..20: mol_type = other DNA
gtctagatatttaggatatc

SEQ ID NO: 73598 - DNA, 20 bp, synthetic construct
  misc_feature 1..20: note = chemically synthesized
  source 1..20: mol_type = other DNA
cctactcaaatatcaaacat

SEQ ID NO: 73599 - DNA, 20 bp, synthetic construct
  misc_feature 1..20: note = chemically synthesized
  source 1..20: mol_type = other DNA
ggcttaatccttctatccaa

SEQ ID NO: 73600 - DNA, 20 bp, synthetic construct
  misc_feature 1..20: note = chemically synthesized
  source 1..20: mol_type = other DNA
gtgatatttgactttctgta

SEQ ID NO: 73601 - DNA, 20 bp, synthetic construct
  misc_feature 1..20: note = chemically synthesized
  source 1..20: mol_type = other DNA
atctatctctttggcatacc

SEQ ID NO: 73602 - DNA, 20 bp, synthetic construct
  misc_feature 1..20: note = chemically synthesized
  source 1..20: mol_type = other DNA
atctctttggcataccaaga

SEQ ID NO: 73603 - DNA, 20 bp, synthetic construct
  misc_feature 1..20: note = chemically synthesized
  source 1..20: mol_type = other DNA
ataccaagagtttgtttttg

SEQ ID NO: 73604 - DNA, 20 bp, synthetic construct
  misc_feature 1..20: note = chemically synthesized
  source 1..20: mol_type = other DNA
agtttgtttttgttctgctt

SEQ ID NO: 73605 - DNA, 20 bp, synthetic construct
  misc_feature 1..20: note = chemically synthesized
  source 1..20: mol_type = other DNA
catccatgttgctacaaatg

SEQ ID NO: 73606 - DNA, 20 bp, synthetic construct
  misc_feature 1..20: note = chemically synthesized
  source 1..20: mol_type = other DNA
caaaccttaactattgtgaa

SEQ ID NO: 73607 - DNA, 20 bp, synthetic construct
  misc_feature 1..20: note = chemically synthesized
  source 1..20: mol_type = other DNA
tgtaatgtgtccattggata

SEQ ID NO: 73608 - DNA, 20 bp, synthetic construct
  misc_feature 1..20: note = chemically synthesized
  source 1..20: mol_type = other DNA
ttttggataaataaccacta

SEQ ID NO: 73609 - DNA, 20 bp, synthetic construct
  misc_feature 1..20: note = chemically synthesized
  source 1..20: mol_type = other DNA
aaataaccactagtgagatt

SEQ ID NO: 73610 - DNA, 20 bp, synthetic construct
  misc_feature 1..20: note = chemically synthesized
  source 1..20: mol_type = other DNA
attgctggattgtatgatag

SEQ ID NO: 73611 - DNA, 20 bp, synthetic construct
  misc_feature 1..20: note = chemically synthesized
  source 1..20: mol_type = other DNA
gattgtatgatagttctgtt

SEQ ID NO: 73612 - DNA, 20 bp, synthetic construct
  misc_feature 1..20: note = chemically synthesized
  source 1..20: mol_type = other DNA
agtttactgagaaatcttca

SEQ ID NO: 73613 - DNA, 20 bp, synthetic construct
  misc_feature 1..20: note = chemically synthesized
  source 1..20: mol_type = other DNA
tttttgtcttttttgttaat

SEQ ID NO: 73614 - DNA, 20 bp, synthetic construct
  misc_feature 1..20: note = chemically synthesized
  source 1..20: mol_type = other DNA
agagtaagtagatatctcat

SEQ ID NO: 73615 - DNA, 20 bp, synthetic construct
  misc_feature 1..20: note = chemically synthesized
  source 1..20: mol_type = other DNA
aagtagatatctcattgtag

SEQ ID NO: 73616 - DNA, 20 bp, synthetic construct
  misc_feature 1..20: note = chemically synthesized
  source 1..20: mol_type = other DNA
gtgatgttgagaattttttc

SEQ ID NO: 73617 - DNA, 20 bp, synthetic construct
  misc_feature 1..20: note = chemically synthesized
  source 1..20: mol_type = other DNA
tgtccttagcctacttttta

SEQ ID NO: 73618 - DNA, 20 bp, synthetic construct
  misc_feature 1..20: note = chemically synthesized
  source 1..20: mol_type = other DNA
cttagcctactttttattgg

SEQ ID NO: 73619 - DNA, 20 bp, synthetic construct
  misc_feature 1..20: note = chemically synthesized
  source 1..20: mol_type = other DNA
tattattcttttgtcagatg

SEQ ID NO: 73620 - DNA, 20 bp, synthetic construct
  misc_feature 1..20: note = chemically synthesized
  source 1..20: mol_type = other DNA
tttgtcagatgtatagattg

SEQ ID NO: 73621 - DNA, 20 bp, synthetic construct
  misc_feature 1..20: note = chemically synthesized
  source 1..20: mol_type = other DNA
tttctcccactctgtgggtt

SEQ ID NO: 73622 - DNA, 20 bp, synthetic construct
  misc_feature 1..20: note = chemically synthesized
  source 1..20: mol_type = other DNA
cttttgccatgcaaaagctc

SEQ ID NO: 73623 - DNA, 20 bp, synthetic construct
  misc_feature 1..20: note = chemically synthesized
  source 1..20: mol_type = other DNA
aatttagtcccagatatttt

SEQ ID NO: 73624 - DNA, 20 bp, synthetic construct
  misc_feature 1..20: note = chemically synthesized
  source 1..20: mol_type = other DNA
tttcctaagccaatgtgtag

SEQ ID NO: 73625 - DNA, 20 bp, synthetic construct
  misc_feature 1..20: note = chemically synthesized
  source 1..20: mol_type = other DNA
atgttattttctagaattgt

SEQ ID NO: 73626 - DNA, 20 bp, synthetic construct
  misc_feature 1..20: note = chemically synthesized
  source 1..20: mol_type = other DNA
ttctagaattgttacagttt

SEQ ID NO: 73627 - DNA, 20 bp, synthetic construct
  misc_feature 1..20: note = chemically synthesized
  source 1..20: mol_type = other DNA
gaattgttacagtttcaggg

SEQ ID NO: 73628 - DNA, 20 bp, synthetic construct
  misc_feature 1..20: note = chemically synthesized
  source 1..20: mol_type = other DNA
taagtccttgatccatcttg

SEQ ID NO: 73629 - DNA, 20 bp, synthetic construct
  misc_feature 1..20: note = chemically synthesized
  source 1..20: mol_type = other DNA
tataaggtgagagatgaaga

SEQ ID NO: 73630 - DNA, 20 bp, synthetic construct
  misc_feature 1..20: note = chemically synthesized
  source 1..20: mol_type = other DNA
tccagtttcattctcctaca

SEQ ID NO: 73631 - DNA, 20 bp, synthetic construct
  misc_feature 1..20: note = chemically synthesized
  source 1..20: mol_type = other DNA
tagggtgccctttccccact

SEQ ID NO: 73632 - DNA, 20 bp, synthetic construct
  misc_feature 1..20: note = chemically synthesized
  source 1..20: mol_type = other DNA
gccctttccccactttatgt

SEQ ID NO: 73633 - DNA, 20 bp, synthetic construct
  misc_feature 1..20: note = chemically synthesized
  source 1..20: mol_type = other DNA
tttccccactttatgttttt

SEQ ID NO: 73634 - DNA, 20 bp, synthetic construct
  misc_feature 1..20: note = chemically synthesized
  source 1..20: mol_type = other DNA
gatcagttggatgtaagtat

SEQ ID NO: 73635 - DNA, 20 bp, synthetic construct
  misc_feature 1..20: note = chemically synthesized
  source 1..20: mol_type = other DNA
ctatttgtacaccagcatca

SEQ ID NO: 73636 - DNA, 20 bp, synthetic construct
  misc_feature 1..20: note = chemically synthesized
  source 1..20: mol_type = other DNA
tggtgactatggccttattg

SEQ ID NO: 73637 - DNA, 20 bp, synthetic construct
  misc_feature 1..20: note = chemically synthesized
  source 1..20: mol_type = other DNA
aaatgaggtaatgtaatgcc

SEQ ID NO: 73638 - DNA, 20 bp, synthetic construct
  misc_feature 1..20: note = chemically synthesized
  source 1..20: mol_type = other DNA
agatttgttcttttttttag

SEQ ID NO: 73639 - DNA, 20 bp, synthetic construct
  misc_feature 1..20: note = chemically synthesized
  source 1..20: mol_type = other DNA
ttgttcttttttttagactt

SEQ ID NO: 73640 - DNA, 20 bp, synthetic construct
  misc_feature 1..20: note = chemically synthesized
  source 1..20: mol_type = other DNA
tttttggttccataagaatt

SEQ ID NO: 73641 - DNA, 20 bp, synthetic construct
  misc_feature 1..20: note = chemically synthesized
  source 1..20: mol_type = other DNA
tggttccataagaattttag

SEQ ID NO: 73642 - DNA, 20 bp, synthetic construct
  misc_feature 1..20: note = chemically synthesized
  source 1..20: mol_type = other DNA
ggaattgcaatgaatttgta

SEQ ID NO: 73643 - DNA, 20 bp, synthetic construct
  misc_feature 1..20: note = chemically synthesized
  source 1..20: mol_type = other DNA
cattatggccattttcacaa

SEQ ID NO: 73644 - DNA, 20 bp, synthetic construct
  misc_feature 1..20: note = chemically synthesized
  source 1..20: mol_type = other DNA
tacccatctatgagaatggc

SEQ ID NO: 73645 - DNA, 20 bp, synthetic construct
  misc_feature 1..20: note = chemically synthesized
  source 1..20: mol_type = other DNA
tgagaatggcatgtgtttcc

SEQ ID NO: 73646 - DNA, 20 bp, synthetic construct
  misc_feature 1..20: note = chemically synthesized
  source 1..20: mol_type = other DNA
tttccatttgtttgtgtctt

SEQ ID NO: 73647 - DNA, 20 bp, synthetic construct
  misc_feature 1..20: note = chemically synthesized
  source 1..20: mol_type = other DNA
tcttatatgattactttcag

SEQ ID NO: 73648 - DNA, 20 bp, synthetic construct
  misc_feature 1..20: note = chemically synthesized
  source 1..20: mol_type = other DNA
gattactttcagccgtgttt

SEQ ID NO: 73649 - DNA, 20 bp, synthetic construct
  misc_feature 1..20: note = chemically synthesized
  source 1..20: mol_type = other DNA
ccttggttaggtatatattc

SEQ ID NO: 73650 - DNA, 20 bp, synthetic construct
  misc_feature 1..20: note = chemically synthesized
  source 1..20: mol_type = other DNA
ttaggtatatattcctaagt

SEQ ID NO: 73651 - DNA, 20 bp, synthetic construct
  misc_feature 1..20: note = chemically synthesized
  source 1..20: mol_type = other DNA
tatatattcctaagtttttg

SEQ ID NO: 73652 - DNA, 20 bp, synthetic construct
  misc_feature 1..20: note = chemically synthesized
  source 1..20: mol_type = other DNA
attcctaagtttttgttttg

SEQ ID NO: 73653 - DNA, 20 bp, synthetic construct
  misc_feature 1..20: note = chemically synthesized
  source 1..20: mol_type = other DNA
taagtttttgttttgttttg

SEQ ID NO: 73654 - DNA, 20 bp, synthetic construct
  misc_feature 1..20: note = chemically synthesized
  source 1..20: mol_type = other DNA
tattgtaaaaggggttgagt

SEQ ID NO: 73655 - DNA, 20 bp, synthetic construct
  misc_feature 1..20: note = chemically synthesized
  source 1..20: mol_type = other DNA
gttgagttcttgattttatt

SEQ ID NO: 73656 - DNA, 20 bp, synthetic construct
  misc_feature 1..20: note = chemically synthesized
  source 1..20: mol_type = other DNA
gaattattttatcagttcta

SEQ ID NO: 73657 - DNA, 20 bp, synthetic construct
  misc_feature 1..20: note = chemically synthesized
  source 1..20: mol_type = other DNA
gggggttttggaggagtctt

SEQ ID NO: 73658 - DNA, 20 bp, synthetic construct
  misc_feature 1..20: note = chemically synthesized
  source 1..20: mol_type = other DNA
tcatatcatcagcaaacagt

SEQ ID NO: 73659 - DNA, 20 bp, synthetic construct
  misc_feature 1..20: note = chemically synthesized
  source 1..20: mol_type = other DNA
ctttctctttaacaatttgg

SEQ ID NO: 73660 - DNA, 20 bp, synthetic construct
  misc_feature 1..20: note = chemically synthesized
  source 1..20: mol_type = other DNA
taacaatttggatgtgcttt

SEQ ID NO: 73661 - DNA, 20 bp, synthetic construct
  misc_feature 1..20: note = chemically synthesized
  source 1..20: mol_type = other DNA
gtgctttacttgtttctctt

SEQ ID NO: 73662 - DNA, 20 bp, synthetic construct
  misc_feature 1..20: note = chemically synthesized
  source 1..20: mol_type = other DNA
agtgggtatccttgtctcat

SEQ ID NO: 73663 - DNA, 20 bp, synthetic construct
  misc_feature 1..20: note = chemically synthesized
  source 1..20: mol_type = other DNA
ctcattccagttttcagaca

SEQ ID NO: 73664 - DNA, 20 bp, synthetic construct
  misc_feature 1..20: note = chemically synthesized
  source 1..20: mol_type = other DNA
cattcaatataatgttggct

SEQ ID NO: 73665 - DNA, 20 bp, synthetic construct
  misc_feature 1..20: note = chemically synthesized
  source 1..20: mol_type = other DNA
ttggctgtgtgtttaccata

SEQ ID NO: 73666 - DNA, 20 bp, synthetic construct
  misc_feature 1..20: note = chemically synthesized
  source 1..20: mol_type = other DNA
attgaggtatgtcctttgta

SEQ ID NO: 73667 - DNA, 20 bp, synthetic construct
  misc_feature 1..20: note = chemically synthesized
  source 1..20: mol_type = other DNA
tcctttgtaaaccgattttg

SEQ ID NO: 73668 - DNA, 20 bp, synthetic construct
  misc_feature 1..20: note = chemically synthesized
  source 1..20: mol_type = other DNA
tgatgttgaattttgttgaa

SEQ ID NO: 73669 - DNA, 20 bp, synthetic construct
  misc_feature 1..20: note = chemically synthesized
  source 1..20: mol_type = other DNA
ctgtggctattgagataatc

SEQ ID NO: 73670 - DNA, 20 bp, synthetic construct
  misc_feature 1..20: note = chemically synthesized
  source 1..20: mol_type = other DNA
tattgagataatcacatgat

SEQ ID NO: 73671 - DNA, 20 bp, synthetic construct
  misc_feature 1..20: note = chemically synthesized
  source 1..20: mol_type = other DNA
cgcatgaaacccacttgatc

SEQ ID NO: 73672 - DNA, 20 bp, synthetic construct
  misc_feature 1..20: note = chemically synthesized
  source 1..20: mol_type = other DNA
tcatcagggatattgatctg

SEQ ID NO: 73673 - DNA, 20 bp, synthetic construct
  misc_feature 1..20: note = chemically synthesized
  source 1..20: mol_type = other DNA
tttttttggttatgttcttt

SEQ ID NO: 73674 - DNA, 20 bp, synthetic construct
  misc_feature 1..20: note = chemically synthesized
  source 1..20: mol_type = other DNA
agttttggtattaaggtgat

SEQ ID NO: 73675 - DNA, 20 bp, synthetic construct
  misc_feature 1..20: note = chemically synthesized
  source 1..20: mol_type = other DNA
aaggtgatactggcttcata

SEQ ID NO: 73676 - DNA, 20 bp, synthetic construct
  misc_feature 1..20: note = chemically synthesized
  source 1..20: mol_type = other DNA
ggcttcatagaatgatttag

SEQ ID NO: 73677 - DNA, 20 bp, synthetic construct
  misc_feature 1..20: note = chemically synthesized
  source 1..20: mol_type = other DNA
tatcttgtagaatactgtca

SEQ ID NO: 73678 - DNA, 20 bp, synthetic construct
  misc_feature 1..20: note = chemically synthesized
  source 1..20: mol_type = other DNA
ttttattatcatttcagtct

SEQ ID NO: 73679 - DNA, 20 bp, synthetic construct
  misc_feature 1..20: note = chemically synthesized
  source 1..20: mol_type = other DNA
caggaattcgaacgtctcct

SEQ ID NO: 73680 - DNA, 20 bp, synthetic construct
  misc_feature 1..20: note = chemically synthesized
  source 1..20: mol_type = other DNA
cgaacgtctcctttaggttt

SEQ ID NO: 73681 - DNA, 20 bp, synthetic construct
  misc_feature 1..20: note = chemically synthesized
  source 1..20: mol_type = other DNA
gtggtatcagtaatagtatc

SEQ ID NO: 73682 - DNA, 20 bp, synthetic construct
  misc_feature 1..20: note = chemically synthesized
  source 1..20: mol_type = other DNA
atcagtaatagtatctcctg

SEQ ID NO: 73683 - DNA, 20 bp, synthetic construct
  misc_feature 1..20: note = chemically synthesized
  source 1..20: mol_type = other DNA
atctcctgttttgtttctaa

SEQ ID NO: 73684 - DNA, 20 bp, synthetic construct
  misc_feature 1..20: note = chemically synthesized
  source 1..20: mol_type = other DNA
gttaatcttgctaatggtct

SEQ ID NO: 73685 - DNA, 20 bp, synthetic construct
  misc_feature 1..20: note = chemically synthesized
  source 1..20: mol_type = other DNA
tttatttatcttttcaaaga

SEQ ID NO: 73686 - DNA, 20 bp, synthetic construct
  misc_feature 1..20: note = chemically synthesized
  source 1..20: mol_type = other DNA
agaaccagctttttatttca

SEQ ID NO: 73687 - DNA, 20 bp, synthetic construct
  misc_feature 1..20: note = chemically synthesized
  source 1..20: mol_type = other DNA
tagcttttgtatttttttgc

SEQ ID NO: 73688 - DNA, 20 bp, synthetic construct
  misc_feature 1..20: note = chemically synthesized
  source 1..20: mol_type = other DNA
tagttattccctttcttttg

SEQ ID NO: 73689 - DNA, 20 bp, synthetic construct
  misc_feature 1..20: note = chemically synthesized
  source 1..20: mol_type = other DNA
tttcttttgctgggttttgg

SEQ ID NO: 73690 - DNA, 20 bp, synthetic construct
  misc_feature 1..20: note = chemically synthesized
  source 1..20: mol_type = other DNA
ttttgctgggttttggttct

SEQ ID NO: 73691 - DNA, 20 bp, synthetic construct
  misc_feature 1..20: note = chemically synthesized
  source 1..20: mol_type = other DNA
tgggttttggttctgtttgt

SEQ ID NO: 73692 - DNA, 20 bp, synthetic construct
  misc_feature 1..20: note = chemically synthesized
  source 1..20: mol_type = other DNA
gttctgtttgtttttgtttc

SEQ ID NO: 73693 - DNA, 20 bp, synthetic construct
  misc_feature 1..20: note = chemically synthesized
  source 1..20: mol_type = other DNA
caccatctttgctgtatcct

SEQ ID NO: 73694 - DNA, 20 bp, synthetic construct
  misc_feature 1..20: note = chemically synthesized
  source 1..20: mol_type = other DNA
gggatacatgtgcagaatgt

SEQ ID NO: 73695 - DNA, 20 bp, synthetic construct
  misc_feature 1..20: note = chemically synthesized
  source 1..20: mol_type = other DNA
cataggtatagatgtgccat

SEQ ID NO: 73696 - DNA, 20 bp, synthetic construct
  misc_feature 1..20: note = chemically synthesized
  source 1..20: mol_type = other DNA
cacttatgagtgagaacgtg

SEQ ID NO: 73697 - DNA, 20 bp, synthetic construct
  misc_feature 1..20: note = chemically synthesized
  source 1..20: mol_type = other DNA
atgagtgagaacgtgtggtg

SEQ ID NO: 73698 - DNA, 20 bp, synthetic construct
  misc_feature 1..20: note = chemically synthesized
  source 1..20: mol_type = other DNA
tttggtttctctgttcctgt

SEQ ID NO: 73699 - DNA, 20 bp, synthetic construct
  misc_feature 1..20: note = chemically synthesized
  source 1..20: mol_type = other DNA
tgtgttagtttgctcagaat

SEQ ID NO: 73700 - DNA, 20 bp, synthetic construct
  misc_feature 1..20: note = chemically synthesized
  source 1..20: mol_type = other DNA
gtgcacgtgtctttatagta

SEQ ID NO: 73701 - DNA, 20 bp, synthetic construct
  misc_feature 1..20: note = chemically synthesized
  source 1..20: mol_type = other DNA
ctttgggtatatacccagta

SEQ ID NO: 73702 - DNA, 20 bp, synthetic construct
  misc_feature 1..20: note = chemically synthesized
  source 1..20: mol_type = other DNA
tccacatcctctccagcacc

SEQ ID NO: 73703 - DNA, 20 bp, synthetic construct
  misc_feature 1..20: note = chemically synthesized
  source 1..20: mol_type = other DNA
ggcatgagatggtatctcat

SEQ ID NO: 73704 - DNA, 20 bp, synthetic construct
  misc_feature 1..20: note = chemically synthesized
  source 1..20: mol_type = other DNA
gagatggtatctcattgtgg

SEQ ID NO: 73705 - DNA, 20 bp, synthetic construct
  misc_feature 1..20: note = chemically synthesized
  source 1..20: mol_type = other DNA
ttctctaatgaccagtgatg

SEQ ID NO: 73706 - DNA, 20 bp, synthetic construct
  misc_feature 1..20: note = chemically synthesized
  source 1..20: mol_type = other DNA
gtgatgatgagcttcttttc

SEQ ID NO: 73707 - DNA, 20 bp, synthetic construct
  misc_feature 1..20: note = chemically synthesized
  source 1..20: mol_type = other DNA
tccactttttgatggggtcg

SEQ ID NO: 73708 - DNA, 20 bp, synthetic construct
  misc_feature 1..20: note = chemically synthesized
  source 1..20: mol_type = other DNA
gtaaatttgttgaagttctt

SEQ ID NO: 73709 - DNA, 20 bp, synthetic construct
  misc_feature 1..20: note = chemically synthesized
  source 1..20: mol_type = other DNA
tgttagccctttgtcagatg

SEQ ID NO: 73710 - DNA, 20 bp, synthetic construct
  misc_feature 1..20: note = chemically synthesized
  source 1..20: mol_type = other DNA
cttttgctgtgcagaagctc

SEQ ID NO: 73711 - DNA, 20 bp, synthetic construct
  misc_feature 1..20: note = chemically synthesized
  source 1..20: mol_type = other DNA
tcaattttggcctttgttgt

SEQ ID NO: 73712 - DNA, 20 bp, synthetic construct
  misc_feature 1..20: note = chemically synthesized
  source 1..20: mol_type = other DNA
gcctttgttgtcattgcttt

SEQ ID NO: 73713 - DNA, 20 bp, synthetic construct
  misc_feature 1..20: note = chemically synthesized
  source 1..20: mol_type = other DNA
ggtattgcctaggttatctt

SEQ ID NO: 73714 - DNA, 20 bp, synthetic construct
  misc_feature 1..20: note = chemically synthesized
  source 1..20: mol_type = other DNA
aggttatcttctaggatttt

SEQ ID NO: 73715 - DNA, 20 bp, synthetic construct
  misc_feature 1..20: note = chemically synthesized
  source 1..20: mol_type = other DNA
tataaggtgtaaggaagggg

SEQ ID NO: 73716 - DNA, 20 bp, synthetic construct
  misc_feature 1..20: note = chemically synthesized
  source 1..20: mol_type = other DNA
gtgtaaggaaggggtacagt

SEQ ID NO: 73717 - DNA, 20 bp, synthetic construct
  misc_feature 1..20: note = chemically synthesized
  source 1..20: mol_type = other DNA
cagttttatgcatattgcta

SEQ ID NO: 73718 - DNA, 20 bp, synthetic construct
  misc_feature 1..20: note = chemically synthesized
  source 1..20: mol_type = other DNA
taaatagggaattctttctc

SEQ ID NO: 73719 - DNA, 20 bp, synthetic construct
  misc_feature 1..20: note = chemically synthesized
  source 1..20: mol_type = other DNA
ttctttctccattgcttttg

SEQ ID NO: 73720 - DNA, 20 bp, synthetic construct
  misc_feature 1..20: note = chemically synthesized
  source 1..20: mol_type = other DNA
tagatgtgtggcattatttc

SEQ ID NO: 73721 - DNA, 20 bp, synthetic construct
  misc_feature 1..20: note = chemically synthesized
  source 1..20: mol_type = other DNA
tctgttccactggtctatat

SEQ ID NO: 73722 - DNA, 20 bp, synthetic construct
  misc_feature 1..20: note = chemically synthesized
  source 1..20: mol_type = other DNA
ctgttttggtaccagtacca

SEQ ID NO: 73723 - DNA, 20 bp, synthetic construct
  misc_feature 1..20: note = chemically synthesized
  source 1..20: mol_type = other DNA
ttgttactgtagccttgtag

SEQ ID NO: 73724 - DNA, 20 bp, synthetic construct
  misc_feature 1..20: note = chemically synthesized
  source 1..20: mol_type = other DNA
aagtcaggtagcatcatgcc

SEQ ID NO: 73725 - DNA, 20 bp, synthetic construct
  misc_feature 1..20: note = chemically synthesized
  source 1..20: mol_type = other DNA
catgcctccagctttgttct

SEQ ID NO: 73726 - DNA, 20 bp, synthetic construct
  misc_feature 1..20: note = chemically synthesized
  source 1..20: mol_type = other DNA
tccagctttgttctttttgt

SEQ ID NO: 73727 - DNA, 20 bp, synthetic construct
  misc_feature 1..20: note = chemically synthesized
  source 1..20: mol_type = other DNA
tcttggctatatgggctctt

SEQ ID NO: 73728 - DNA, 20 bp, synthetic construct
  misc_feature 1..20: note = chemically synthesized
  source 1..20: mol_type = other DNA
tgattccatatgacatttaa

SEQ ID NO: 73729 - DNA, 20 bp, synthetic construct
  misc_feature 1..20: note = chemically synthesized
  source 1..20: mol_type = other DNA
attctttgaaaaaagtcagt

SEQ ID NO: 73730 - DNA, 20 bp, synthetic construct
  misc_feature 1..20: note = chemically synthesized
  source 1..20: mol_type = other DNA
cagtatggccattttaaaga

SEQ ID NO: 73731 - DNA, 20 bp, synthetic construct
  misc_feature 1..20: note = chemically synthesized
  source 1..20: mol_type = other DNA
tctttctatctatgagcatg

SEQ ID NO: 73732 - DNA, 20 bp, synthetic construct
  misc_feature 1..20: note = chemically synthesized
  source 1..20: mol_type = other DNA
tgagcatggaatgtttttcc

SEQ ID NO: 73733 - DNA, 20 bp, synthetic construct
  misc_feature 1..20: note = chemically synthesized
  source 1..20: mol_type = other DNA
tcttatttccttgagcagtg

SEQ ID NO: 73734 - DNA, 20 bp, synthetic construct
  misc_feature 1..20: note = chemically synthesized
  source 1..20: mol_type = other DNA
aattgtgaatgggagttcac

SEQ ID NO: 73735 - DNA, 20 bp, synthetic construct
  misc_feature 1..20: note = chemically synthesized
  source 1..20: mol_type = other DNA
agttcacccatgatttggct

SEQ ID NO: 73736 - DNA, 20 bp, synthetic construct
  misc_feature 1..20: note = chemically synthesized
  source 1..20: mol_type = other DNA
tgtctattattggtgtatag

SEQ ID NO: 73737 - DNA, 20 bp, synthetic construct
  misc_feature 1..20: note = chemically synthesized
  source 1..20: mol_type = other DNA
ttattggtgtataggaacgc

SEQ ID NO: 73738 - DNA, 20 bp, synthetic construct
  misc_feature 1..20: note = chemically synthesized
  source 1..20: mol_type = other DNA
gaacgcttgtgatttctgca

SEQ ID NO: 73739 - DNA, 20 bp, synthetic construct
  misc_feature 1..20: note = chemically synthesized
  source 1..20: mol_type = other DNA
gtatcttgagactttgctga

SEQ ID NO: 73740 - DNA, 20 bp, synthetic construct
  misc_feature 1..20: note = chemically synthesized
  source 1..20: mol_type = other DNA
agactttgctgaagctgttt

SEQ ID NO: 73741 - DNA, 20 bp, synthetic construct
  misc_feature 1..20: note = chemically synthesized
  source 1..20: mol_type = other DNA
tgctgaagctgtttatcagc

SEQ ID NO: 73742 - DNA, 20 bp, synthetic construct
  misc_feature 1..20: note = chemically synthesized
  source 1..20: mol_type = other DNA
cttcctctcttcctatttga

SEQ ID NO: 73743 - DNA, 20 bp, synthetic construct
  misc_feature 1..20: note = chemically synthesized
  source 1..20: mol_type = other DNA
atgctttatttctttctctt

SEQ ID NO: 73744 - DNA, 20 bp, synthetic construct
  misc_feature 1..20: note = chemically synthesized
  source 1..20: mol_type = other DNA
agagggcatccttgtcttgt

SEQ ID NO: 73745 - DNA, 20 bp, synthetic construct
  misc_feature 1..20: note = chemically synthesized
  source 1..20: mol_type = other DNA
cttgtgccggttttcaaagc

SEQ ID NO: 73746 - DNA, 20 bp, synthetic construct
  misc_feature 1..20: note = chemically synthesized
  source 1..20: mol_type = other DNA
aaatgatttttaaatttcca

SEQ ID NO: 73747 - DNA, 20 bp, synthetic construct
  misc_feature 1..20: note = chemically synthesized
  source 1..20: mol_type = other DNA
atttaatttccctgtatttg

SEQ ID NO: 73748 - DNA, 20 bp, synthetic construct
  misc_feature 1..20: note = chemically synthesized
  source 1..20: mol_type = other DNA
gttttgaaggttccttttgt

SEQ ID NO: 73749 - DNA, 20 bp, synthetic construct
  misc_feature 1..20: note = chemically synthesized
  source 1..20: mol_type = other DNA
tattctactgtggtctgaga

SEQ ID NO: 73750 - DNA, 20 bp, synthetic construct
  misc_feature 1..20: note = chemically synthesized
  source 1..20: mol_type = other DNA
ttcaatttttaaaaatttat

SEQ ID NO: 73751 - DNA, 20 bp, synthetic construct
  misc_feature 1..20: note = chemically synthesized
  source 1..20: mol_type = other DNA
atttttaaaaatttattgag

SEQ ID NO: 73752 - DNA, 20 bp, synthetic construct
  misc_feature 1..20: note = chemically synthesized
  source 1..20: mol_type = other DNA
gtccatttgttctttaaatc

SEQ ID NO: 73753 - DNA, 20 bp, synthetic construct
  misc_feature 1..20: note = chemically synthesized
  source 1..20: mol_type = other DNA
ttgctgtctagtctagtagt

SEQ ID NO: 73754 - DNA, 20 bp, synthetic construct
  misc_feature 1..20: note = chemically synthesized
  source 1..20: mol_type = other DNA
gtaatattctcccattggac

SEQ ID NO: 73755 - DNA, 20 bp, synthetic construct
  misc_feature 1..20: note = chemically synthesized
  source 1..20: mol_type = other DNA
ccctctttgtcttttttaac

SEQ ID NO: 73756 - DNA, 20 bp, synthetic construct
  misc_feature 1..20: note = chemically synthesized
  source 1..20: mol_type = other DNA
ttttttaactgctgtttctt

SEQ ID NO: 73757 - DNA, 20 bp, synthetic construct
  misc_feature 1..20: note = chemically synthesized
  source 1..20: mol_type = other DNA
ttaactgctgtttctttaaa

SEQ ID NO: 73758 - DNA, 20 bp, synthetic construct
  misc_feature 1..20: note = chemically synthesized
  source 1..20: mol_type = other DNA
gttttgtctgacataagaat

SEQ ID NO: 73759 - DNA, 20 bp, synthetic construct
  misc_feature 1..20: note = chemically synthesized
  source 1..20: mol_type = other DNA
acataagaatagctgctttg

SEQ ID NO: 73760 - DNA, 20 bp, synthetic construct
  misc_feature 1..20: note = chemically synthesized
  source 1..20: mol_type = other DNA
tcattttccacccctttacc

SEQ ID NO: 73761 - DNA, 20 bp, synthetic construct
  misc_feature 1..20: note = chemically synthesized
  source 1..20: mol_type = other DNA
atttttgttgtatatgtcct

SEQ ID NO: 73762 - DNA, 20 bp, synthetic construct
  misc_feature 1..20: note = chemically synthesized
  source 1..20: mol_type = other DNA
ttgtatatgtcctatgggat

SEQ ID NO: 73763 - DNA, 20 bp, synthetic construct
  misc_feature 1..20: note = chemically synthesized
  source 1..20: mol_type = other DNA
ggatttatgctttaaagagg

SEQ ID NO: 73764 - DNA, 20 bp, synthetic construct
  misc_feature 1..20: note = chemically synthesized
  source 1..20: mol_type = other DNA
tttaaagaggttctgttttg

SEQ ID NO: 73765 - DNA, 20 bp, synthetic construct
  misc_feature 1..20: note = chemically synthesized
  source 1..20: mol_type = other DNA
gttctgttttgatgtgcttc

SEQ ID NO: 73766 - DNA, 20 bp, synthetic construct
  misc_feature 1..20: note = chemically synthesized
  source 1..20: mol_type = other DNA
atgtgcttccagggtttatt

SEQ ID NO: 73767 - DNA, 20 bp, synthetic construct
  misc_feature 1..20: note = chemically synthesized
  source 1..20: mol_type = other DNA
cttttatcagttcttgtagt

SEQ ID NO: 73768 - DNA, 20 bp, synthetic construct
  misc_feature 1..20: note = chemically synthesized
  source 1..20: mol_type = other DNA
tagtgccgaattctctcagc

SEQ ID NO: 73769 - DNA, 20 bp, synthetic construct
  misc_feature 1..20: note = chemically synthesized
  source 1..20: mol_type = other DNA
ctgtgtattttcttcatttg

SEQ ID NO: 73770 - DNA, 20 bp, synthetic construct
  misc_feature 1..20: note = chemically synthesized
  source 1..20: mol_type = other DNA
tattttcttcatttgtgaag

SEQ ID NO: 73771 - DNA, 20 bp, synthetic construct
  misc_feature 1..20: note = chemically synthesized
  source 1..20: mol_type = other DNA
atataaaattcttggctgat

SEQ ID NO: 73772 - DNA, 20 bp, synthetic construct
  misc_feature 1..20: note = chemically synthesized
  source 1..20: mol_type = other DNA
aaattcttggctgataattg

SEQ ID NO: 73773 - DNA, 20 bp, synthetic construct
  misc_feature 1..20: note = chemically synthesized
  source 1..20: mol_type = other DNA
aagatagggccatattcact

SEQ ID NO: 73774 - DNA, 20 bp, synthetic construct
  misc_feature 1..20: note = chemically synthesized
  source 1..20: mol_type = other DNA
ccatattcacttctagcttt

SEQ ID NO: 73775 - DNA, 20 bp, synthetic construct
  misc_feature 1..20: note = chemically synthesized
  source 1..20: mol_type = other DNA
agaaatctgctgttaatctg

SEQ ID NO: 73776 - DNA, 20 bp, synthetic construct
  misc_feature 1..20: note = chemically synthesized
  source 1..20: mol_type = other DNA
ttttctttcataggttacct

SEQ ID NO: 73777 - DNA, 20 bp, synthetic construct
  misc_feature 1..20: note = chemically synthesized
  source 1..20: mol_type = other DNA
gtagtttcacctcacagctc

SEQ ID NO: 73778 - DNA, 20 bp, synthetic construct
  misc_feature 1..20: note = chemically synthesized
  source 1..20: mol_type = other DNA
atttttgcaatgaatttccc

SEQ ID NO: 73779 - DNA, 20 bp, synthetic construct
  misc_feature 1..20: note = chemically synthesized
  source 1..20: mol_type = other DNA
atgaatttcccaggtgttta

SEQ ID NO: 73780 - DNA, 20 bp, synthetic construct
  misc_feature 1..20: note = chemically synthesized
  source 1..20: mol_type = other DNA
taggtctctagcaaggtggg

SEQ ID NO: 73781 - DNA, 20 bp, synthetic construct
  misc_feature 1..20: note = chemically synthesized
  source 1..20: mol_type = other DNA
agcaaggtgggggaagtttt

SEQ ID NO: 73782 - DNA, 20 bp, synthetic construct
  misc_feature 1..20: note = chemically synthesized
  source 1..20: mol_type = other DNA
ttccttgattatttccctgg

SEQ ID NO: 73783 - DNA, 20 bp, synthetic construct
  misc_feature 1..20: note = chemically synthesized
  source 1..20: mol_type = other DNA
ctggataagttttccaaact

SEQ ID NO: 73784 - DNA, 20 bp, synthetic construct
  misc_feature 1..20: note = chemically synthesized
  source 1..20: mol_type = other DNA
tttctcttctttctcaggaa

SEQ ID NO: 73785 - DNA, 20 bp, synthetic construct
  misc_feature 1..20: note = chemically synthesized
  source 1..20: mol_type = other DNA
ctcaggaatgctgattattc

SEQ ID NO: 73786 - DNA, 20 bp, synthetic construct
  misc_feature 1..20: note = chemically synthesized
  source 1..20: mol_type = other DNA
ggaatgctgattattcttag

SEQ ID NO: 73787 - DNA, 20 bp, synthetic construct
  misc_feature 1..20: note = chemically synthesized
  source 1..20: mol_type = other DNA
tgctgattattcttaggttt

SEQ ID NO: 73788 - DNA, 20 bp, synthetic construct
  misc_feature 1..20: note = chemically synthesized
  source 1..20: mol_type = other DNA
gtttgattgtttaacataat

SEQ ID NO: 73789 - DNA, 20 bp, synthetic construct
  misc_feature 1..20: note = chemically synthesized
  source 1..20: mol_type = other DNA
aacataatcccagatttctt

SEQ ID NO: 73790 - DNA, 20 bp, synthetic construct
  misc_feature 1..20: note = chemically synthesized
  source 1..20: mol_type = other DNA
attcttttttctttgtcttt

SEQ ID NO: 73791 - DNA, 20 bp, synthetic construct
  misc_feature 1..20: note = chemically synthesized
  source 1..20: mol_type = other DNA
gtcttcaagctctgaatttc

SEQ ID NO: 73792 - DNA, 20 bp, synthetic construct
  misc_feature 1..20: note = chemically synthesized
  source 1..20: mol_type = other DNA
caagctctgaatttcttctg

SEQ ID NO: 73793 - DNA, 20 bp, synthetic construct
  misc_feature 1..20: note = chemically synthesized
  source 1..20: mol_type = other DNA
tataagtgcatccattcatc

SEQ ID NO: 73794 - DNA, 20 bp, synthetic construct
  misc_feature 1..20: note = chemically synthesized
  source 1..20: mol_type = other DNA
tccattcatccattgtttcc

SEQ ID NO: 73795 - DNA, 20 bp, synthetic construct
  misc_feature 1..20: note = chemically synthesized
  source 1..20: mol_type = other DNA
ccattgtttcctgaagtttt

SEQ ID NO: 73796 - DNA, 20 bp, synthetic construct
  misc_feature 1..20: note = chemically synthesized
  source 1..20: mol_type = other DNA
atttatgctatctctttaac

SEQ ID NO: 73797 - DNA, 20 bp, synthetic construct
  misc_feature 1..20: note = chemically synthesized
  source 1..20: mol_type = other DNA
ctcatttcttgtatcatatt

SEQ ID NO: 73798 - DNA, 20 bp, synthetic construct
  misc_feature 1..20: note = chemically synthesized
  source 1..20: mol_type = other DNA
ttcaccttcctcggatgcct

SEQ ID NO: 73799 - DNA, 20 bp, synthetic construct
  misc_feature 1..20: note = chemically synthesized
  source 1..20: mol_type = other DNA
cttcctcggatgcctccttg

SEQ ID NO: 73800 - DNA, 20 bp, synthetic construct
  misc_feature 1..20: note = chemically synthesized
  source 1..20: mol_type = other DNA
gaattatttttcaggtaaat

SEQ ID NO: 73801 - DNA, 20 bp, synthetic construct
  misc_feature 1..20: note = chemically synthesized
  source 1..20: mol_type = other DNA
aggtaaatcagggatttctt

SEQ ID NO: 73802 - DNA, 20 bp, synthetic construct
  misc_feature 1..20: note = chemically synthesized
  source 1..20: mol_type = other DNA
gatgcattgctggtgagcta

SEQ ID NO: 73803 - DNA, 20 bp, synthetic construct
  misc_feature 1..20: note = chemically synthesized
  source 1..20: mol_type = other DNA
ttttggggggtgttaaagaa

SEQ ID NO: 73804 - DNA, 20 bp, synthetic construct
  misc_feature 1..20: note = chemically synthesized
  source 1..20: mol_type = other DNA
ttgtttttcatattaccaga

SEQ ID NO: 73805 - DNA, 20 bp, synthetic construct
  misc_feature 1..20: note = chemically synthesized
  source 1..20: mol_type = other DNA
agtcccccttttcctaggcg

SEQ ID NO: 73806 - DNA, 20 bp, synthetic construct
  misc_feature 1..20: note = chemically synthesized
  source 1..20: mol_type = other DNA
gcttcctgagagccgaactg

SEQ ID NO: 73807 - DNA, 20 bp, synthetic construct
  misc_feature 1..20: note = chemically synthesized
  source 1..20: mol_type = other DNA
accagactccaggctggtac

SEQ ID NO: 73808 - DNA, 20 bp, synthetic construct
  misc_feature 1..20: note = chemically synthesized
  source 1..20: mol_type = other DNA
ctactgtgggaggatggggg

SEQ ID NO: 73809 - DNA, 20 bp, synthetic construct
  misc_feature 1..20: note = chemically synthesized
  source 1..20: mol_type = other DNA
gggggtgtagtttccaggtc

SEQ ID NO: 73810 - DNA, 20 bp, synthetic construct
  misc_feature 1..20: note = chemically synthesized
  source 1..20: mol_type = other DNA
ctcccccgcaacagcaccga

SEQ ID NO: 73811 - DNA, 20 bp, synthetic construct
  misc_feature 1..20: note = chemically synthesized
  source 1..20: mol_type = other DNA
agcccctagatctggccagg

SEQ ID NO: 73812 - DNA, 20 bp, synthetic construct
  misc_feature 1..20: note = chemically synthesized
  source 1..20: mol_type = other DNA
cccctgtgaggcaaggcaga

SEQ ID NO: 73813 - DNA, 20 bp, synthetic construct
  misc_feature 1..20: note = chemically synthesized
  source 1..20: mol_type = other DNA
taggggacccagagagccca

SEQ ID NO: 73814 - DNA, 20 bp, synthetic construct
  misc_feature 1..20: note = chemically synthesized
  source 1..20: mol_type = other DNA
agagcccacagggcttttcc

SEQ ID NO: 73815 - DNA, 20 bp, synthetic construct
  misc_feature 1..20: note = chemically synthesized
  source 1..20: mol_type = other DNA
ctgcttcctctacccctgta

SEQ ID NO: 73816 - DNA, 20 bp, synthetic construct
  misc_feature 1..20: note = chemically synthesized
  source 1..20: mol_type = other DNA
tcaggttccccagtgaggat

SEQ ID NO: 73817 - DNA, 20 bp, synthetic construct
  misc_feature 1..20: note = chemically synthesized
  source 1..20: mol_type = other DNA
cggtcccccttttccacttc

SEQ ID NO: 73818 - DNA, 20 bp, synthetic construct
  misc_feature 1..20: note = chemically synthesized
  source 1..20: mol_type = other DNA
ttgggcactcacaatatttg

SEQ ID NO: 73819 - DNA, 20 bp, synthetic construct
  misc_feature 1..20: note = chemically synthesized
  source 1..20: mol_type = other DNA
tcccgggtcctgcaggagca

SEQ ID NO: 73820 - DNA, 20 bp, synthetic construct
  misc_feature 1..20: note = chemically synthesized
  source 1..20: mol_type = other DNA
tcagagggtgtgtgcgttct

SEQ ID NO: 73821 - DNA, 20 bp, synthetic construct
  misc_feature 1..20: note = chemically synthesized
  source 1..20: mol_type = other DNA
tgtgtgcgttctctcagctt

SEQ ID NO: 73822 - DNA, 20 bp, synthetic construct
  misc_feature 1..20: note = chemically synthesized
  source 1..20: mol_type = other DNA
ttaccccttagggagctata

SEQ ID NO: 73823 - DNA, 20 bp, synthetic construct
  misc_feature 1..20: note = chemically synthesized
  source 1..20: mol_type = other DNA
cacacacacacatctgcatg

SEQ ID NO: 73824 - DNA, 20 bp, synthetic construct
  misc_feature 1..20: note = chemically synthesized
  source 1..20: mol_type = other DNA
aataattgtccacaggcaat

SEQ ID NO: 73825 - DNA, 20 bp, synthetic construct
  misc_feature 1..20: note = chemically synthesized
  source 1..20: mol_type = other DNA
gtaatccagccaatagtaca

SEQ ID NO: 73826 - DNA, 20 bp, synthetic construct
  misc_feature 1..20: note = chemically synthesized
  source 1..20: mol_type = other DNA
agccaatagtacaggttgct

SEQ ID NO: 73827 - DNA, 20 bp, synthetic construct
  misc_feature 1..20: note = chemically synthesized
  source 1..20: mol_type = other DNA
taccagagttaaaattctat

SEQ ID NO: 73828 - DNA, 20 bp, synthetic construct
  misc_feature 1..20: note = chemically synthesized
  source 1..20: mol_type = other DNA
ctcactccctaccactgagg

SEQ ID NO: 73829 - DNA, 20 bp, synthetic construct
  misc_feature 1..20: note = chemically synthesized
  source 1..20: mol_type = other DNA
ctgaggacaagtttatgtcc

SEQ ID NO: 73830 - DNA, 20 bp, synthetic construct
  misc_feature 1..20: note = chemically synthesized
  source 1..20: mol_type = other DNA
acaagtttatgtccttaggt

SEQ ID NO: 73831 - DNA, 20 bp, synthetic construct
  misc_feature 1..20: note = chemically synthesized
  source 1..20: mol_type = other DNA
atctaactctctggcacagc

SEQ ID NO: 73832 - DNA, 20 bp, synthetic construct
  misc_feature 1..20: note = chemically synthesized
  source 1..20: mol_type = other DNA
aactctctggcacagcagga

SEQ ID NO: 73833 - DNA, 20 bp, synthetic construct
  misc_feature 1..20: note = chemically synthesized
  source 1..20: mol_type = other DNA
cacagcaggagtttgttttc

SEQ ID NO: 73834 - DNA, 20 bp, synthetic construct
  misc_feature 1..20: note = chemically synthesized
  source 1..20: mol_type = other DNA
gagtttgttttcttctgctt

SEQ ID NO: 73835 - DNA, 20 bp, synthetic construct
  misc_feature 1..20: note = chemically synthesized
  source 1..20: mol_type = other DNA
cagagctttgaatttactat

SEQ ID NO: 73836 - DNA, 20 bp, synthetic construct
  misc_feature 1..20: note = chemically synthesized
  source 1..20: mol_type = other DNA
atttggcaatgccttcccat

SEQ ID NO: 73837 - DNA, 20 bp, synthetic construct
  misc_feature 1..20: note = chemically synthesized
  source 1..20: mol_type = other DNA
aataatatctgaaattattt

SEQ ID NO: 73838 - DNA, 20 bp, synthetic construct
  misc_feature 1..20: note = chemically synthesized
  source 1..20: mol_type = other DNA
ttaattttatgtatgttcta

SEQ ID NO: 73839 - DNA, 20 bp, synthetic construct
  misc_feature 1..20: note = chemically synthesized
  source 1..20: mol_type = other DNA
ctagattataatcttcagag

SEQ ID NO: 73840 - DNA, 20 bp, synthetic construct
  misc_feature 1..20: note = chemically synthesized
  source 1..20: mol_type = other DNA
ttaacagatatttgctgaac

SEQ ID NO: 73841 - DNA, 20 bp, synthetic construct
  misc_feature 1..20: note = chemically synthesized
  source 1..20: mol_type = other DNA
gtttgaaaatacatgggaaa

SEQ ID NO: 73842 - DNA, 20 bp, synthetic construct
  misc_feature 1..20: note = chemically synthesized
  source 1..20: mol_type = other DNA
gaatgcttgaaaacacttga

SEQ ID NO: 73843 - DNA, 20 bp, synthetic construct
  misc_feature 1..20: note = chemically synthesized
  source 1..20: mol_type = other DNA
tgaaattgcttgtgtaaaga

SEQ ID NO: 73844 - DNA, 20 bp, synthetic construct
  misc_feature 1..20: note = chemically synthesized
  source 1..20: mol_type = other DNA
taaagaaacagttttatcag

SEQ ID NO: 73845 - DNA, 20 bp, synthetic construct
  misc_feature 1..20: note = chemically synthesized
  source 1..20: mol_type = other DNA
tcaaaagcataagaggaaat

SEQ ID NO: 73846 - DNA, 20 bp, synthetic construct
  misc_feature 1..20: note = chemically synthesized
  source 1..20: mol_type = other DNA
catgacttttagaacactgc

SEQ ID NO: 73847 - DNA, 20 bp, synthetic construct
  misc_feature 1..20: note = chemically synthesized
  source 1..20: mol_type = other DNA
ggtttttggataaatgggga

SEQ ID NO: 73848 - DNA, 20 bp, synthetic construct
  misc_feature 1..20: note = chemically synthesized
  source 1..20: mol_type = other DNA
cttagtctgaggaggagcaa

SEQ ID NO: 73849 - DNA, 20 bp, synthetic construct
  misc_feature 1..20: note = chemically synthesized
  source 1..20: mol_type = other DNA
aggaggagcaattaagattc

SEQ ID NO: 73850 - DNA, 20 bp, synthetic construct
  misc_feature 1..20: note = chemically synthesized
  source 1..20: mol_type = other DNA
ttgggaggctgaggaaggag

SEQ ID NO: 73851 - DNA, 20 bp, synthetic construct
  misc_feature 1..20: note = chemically synthesized
  source 1..20: mol_type = other DNA
tctgtctcaaaaaaaaaaaa

SEQ ID NO: 73852 - DNA, 20 bp, synthetic construct
  misc_feature 1..20: note = chemically synthesized
  source 1..20: mol_type = other DNA
aaaaaaaaaaagagagattc

SEQ ID NO: 73853 - DNA, 20 bp, synthetic construct
  misc_feature 1..20: note = chemically synthesized
  source 1..20: mol_type = other DNA
aagagagattcaaaagattc

SEQ ID NO: 73854 - DNA, 20 bp, synthetic construct
  misc_feature 1..20: note = chemically synthesized
  source 1..20: mol_type = other DNA
attcacttgtttaggcctta

SEQ ID NO: 73855 - DNA, 20 bp, synthetic construct
  misc_feature 1..20: note = chemically synthesized
  source 1..20: mol_type = other DNA
aaaaatctttctcacccatc

SEQ ID NO: 73856 - DNA, 20 bp, synthetic construct
  misc_feature 1..20: note = chemically synthesized
  source 1..20: mol_type = other DNA
caaagaacaagtgcaatatg

SEQ ID NO: 73857 - DNA, 20 bp, synthetic construct
  misc_feature 1..20: note = chemically synthesized
  source 1..20: mol_type = other DNA
tgagcagatataagccttac

SEQ ID NO: 73858 - DNA, 20 bp, synthetic construct
  misc_feature 1..20: note = chemically synthesized
  source 1..20: mol_type = other DNA
acacaggattatgaagtctg

SEQ ID NO: 73859 - DNA, 20 bp, synthetic construct
  misc_feature 1..20: note = chemically synthesized
  source 1..20: mol_type = other DNA
gtagagctctcctccaataa

SEQ ID NO: 73860 - DNA, 20 bp, synthetic construct
  misc_feature 1..20: note = chemically synthesized
  source 1..20: mol_type = other DNA
cctccaataagccagatttc

SEQ ID NO: 73861 - DNA, 20 bp, synthetic construct
  misc_feature 1..20: note = chemically synthesized
  source 1..20: mol_type = other DNA
aacagtccctgcctcttaag

SEQ ID NO: 73862 - DNA, 20 bp, synthetic construct
  misc_feature 1..20: note = chemically synthesized
  source 1..20: mol_type = other DNA
tacatgtcttatgtcttaga

SEQ ID NO: 73863 - DNA, 20 bp, synthetic construct
  misc_feature 1..20: note = chemically synthesized
  source 1..20: mol_type = other DNA
cttttgctgagatgaaacag

SEQ ID NO: 73864 - DNA, 20 bp, synthetic construct
  misc_feature 1..20: note = chemically synthesized
  source 1..20: mol_type = other DNA
cggataagtagatattgaag

SEQ ID NO: 73865 - DNA, 20 bp, synthetic construct
  misc_feature 1..20: note = chemically synthesized
  source 1..20: mol_type = other DNA
atctattcctgcactgaaac

SEQ ID NO: 73866 - DNA, 20 bp, synthetic construct
  misc_feature 1..20: note = chemically synthesized
  source 1..20: mol_type = other DNA
tgcactgaaactgttgcttt

SEQ ID NO: 73867 - DNA, 20 bp, synthetic construct
  misc_feature 1..20: note = chemically synthesized
  source 1..20: mol_type = other DNA
agcacttcttatttggaaac

SEQ ID NO: 73868 - DNA, 20 bp, synthetic construct
  misc_feature 1..20: note = chemically synthesized
  source 1..20: mol_type = other DNA
tgaacttttcaaaaattggt

SEQ ID NO: 73869 - DNA, 20 bp, synthetic construct
  misc_feature 1..20: note = chemically synthesized
  source 1..20: mol_type = other DNA
acccttcagcagttccacac

SEQ ID NO: 73870 - DNA, 20 bp, synthetic construct
  misc_feature 1..20: note = chemically synthesized
  source 1..20: mol_type = other DNA
ctgtgcctggcaaaagtcca

SEQ ID NO: 73871 - DNA, 20 bp, synthetic construct
  misc_feature 1..20: note = chemically synthesized
  source 1..20: mol_type = other DNA
gcaaaagtccaggtcgcttc

SEQ ID NO: 73872 - DNA, 20 bp, synthetic construct
  misc_feature 1..20: note = chemically synthesized
  source 1..20: mol_type = other DNA
catggacccagaggttcttt

SEQ ID NO: 73873 - DNA, 20 bp, synthetic construct
  misc_feature 1..20: note = chemically synthesized
  source 1..20: mol_type = other DNA
aacttcaaggtgagtccagg

SEQ ID NO: 73874 - DNA, 20 bp, synthetic construct
  misc_feature 1..20: note = chemically synthesized
  source 1..20: mol_type = other DNA
tctgagcacagcagggtgtg

SEQ ID NO: 73875 - DNA, 20 bp, synthetic construct
  misc_feature 1..20: note = chemically synthesized
  source 1..20: mol_type = other DNA
actgggctgagacccagtgg

SEQ ID NO: 73876 - DNA, 20 bp, synthetic construct
  misc_feature 1..20: note = chemically synthesized
  source 1..20: mol_type = other DNA
gaggaaaatgacttttcttt

SEQ ID NO: 73877 - DNA, 20 bp, synthetic construct
  misc_feature 1..20: note = chemically synthesized
  source 1..20: mol_type = other DNA
acctttcccctatttttgtt

SEQ ID NO: 73878 - DNA, 20 bp, synthetic construct
  misc_feature 1..20: note = chemically synthesized
  source 1..20: mol_type = other DNA
ggacacatataaaatgctgc

SEQ ID NO: 73879 - DNA, 20 bp, synthetic construct
  misc_feature 1..20: note = chemically synthesized
  source 1..20: mol_type = other DNA
aattgaaacatttgggctgg

SEQ ID NO: 73880 - DNA, 20 bp, synthetic construct
  misc_feature 1..20: note = chemically synthesized
  source 1..20: mol_type = other DNA
gtgtgtgtgtgtgtgcgcgc

SEQ ID NO: 73881 - DNA, 20 bp, synthetic construct
  misc_feature 1..20: note = chemically synthesized
  source 1..20: mol_type = other DNA
gtttgtgtgtgtgtgagagc

SEQ ID NO: 73882 - DNA, 20 bp, synthetic construct
  misc_feature 1..20: note = chemically synthesized
  source 1..20: mol_type = other DNA
gtgagagcgtgtgtttcttt

SEQ ID NO: 73883 - DNA, 20 bp, synthetic construct
  misc_feature 1..20: note = chemically synthesized
  source 1..20: mol_type = other DNA
ttcatggtggcaagaagata

SEQ ID NO: 73884 - DNA, 20 bp, synthetic construct
  misc_feature 1..20: note = chemically synthesized
  source 1..20: mol_type = other DNA
tttaatgggaaagcaaaatc

SEQ ID NO: 73885 - DNA, 20 bp, synthetic construct
  misc_feature 1..20: note = chemically synthesized
  source 1..20: mol_type = other DNA
aggctttgagggaagttaac

SEQ ID NO: 73886 - DNA, 20 bp, synthetic construct
  misc_feature 1..20: note = chemically synthesized
  source 1..20: mol_type = other DNA
tttgagggaagttaacatag

SEQ ID NO: 73887 - DNA, 20 bp, synthetic construct
  misc_feature 1..20: note = chemically synthesized
  source 1..20: mol_type = other DNA
acataggcttgattctgggt

SEQ ID NO: 73888 - DNA, 20 bp, synthetic construct
  misc_feature 1..20: note = chemically synthesized
  source 1..20: mol_type = other DNA
ctcctgggaaatgtgctggt

SEQ ID NO: 73889 - DNA, 20 bp, synthetic construct
  misc_feature 1..20: note = chemically synthesized
  source 1..20: mol_type = other DNA
aaagaattcacccctgaggt

SEQ ID NO: 73890 - DNA, 20 bp, synthetic construct
  misc_feature 1..20: note = chemically synthesized
  source 1..20: mol_type = other DNA
tgagctcactgcccatgatg

SEQ ID NO: 73891 - DNA, 20 bp, synthetic construct
  misc_feature 1..20: note = chemically synthesized
  source 1..20: mol_type = other DNA
atgatgcagagctttcaagg

SEQ ID NO: 73892 - DNA, 20 bp, synthetic construct
  misc_feature 1..20: note = chemically synthesized
  source 1..20: mol_type = other DNA
ttttaaatatatgagccaca

SEQ ID NO: 73893 - DNA, 20 bp, synthetic construct
  misc_feature 1..20: note = chemically synthesized
  source 1..20: mol_type = other DNA
aaagggttttatgttgaggg

SEQ ID NO: 73894 - DNA, 20 bp, synthetic construct
  misc_feature 1..20: note = chemically synthesized
  source 1..20: mol_type = other DNA
gtgtatttatacatggctat

SEQ ID NO: 73895 - DNA, 20 bp, synthetic construct
  misc_feature 1..20: note = chemically synthesized
  source 1..20: mol_type = other DNA
catgtgcacactccacactt

SEQ ID NO: 73896 - DNA, 20 bp, synthetic construct
  misc_feature 1..20: note = chemically synthesized
  source 1..20: mol_type = other DNA
cttttttgtttacgttagat

SEQ ID NO: 73897 - DNA, 20 bp, synthetic construct
  misc_feature 1..20: note = chemically synthesized
  source 1..20: mol_type = other DNA
ggacaggactcctcagaaac

SEQ ID NO: 73898 - DNA, 20 bp, synthetic construct
  misc_feature 1..20: note = chemically synthesized
  source 1..20: mol_type = other DNA
aagggggctgaacccccttc

SEQ ID NO: 73899 - DNA, 20 bp, synthetic construct
  misc_feature 1..20: note = chemically synthesized
  source 1..20: mol_type = other DNA
ctcaacgaagaaaaagtgtt

SEQ ID NO: 73900 - DNA, 20 bp, synthetic construct
  misc_feature 1..20: note = chemically synthesized
  source 1..20: mol_type = other DNA
tgttccaagctttaggaagt

SEQ ID NO: 73901 - DNA, 20 bp, synthetic construct
  misc_feature 1..20: note = chemically synthesized
  source 1..20: mol_type = other DNA
caatactatttccaacggca

SEQ ID NO: 73902 - DNA, 20 bp, synthetic construct
  misc_feature 1..20: note = chemically synthesized
  source 1..20: mol_type = other DNA
gttagagatcagagcaggaa

SEQ ID NO: 73903 - DNA, 20 bp, synthetic construct
  misc_feature 1..20: note = chemically synthesized
  source 1..20: mol_type = other DNA
ttcaaggaggagacctcatt

SEQ ID NO: 73904 - DNA, 20 bp, synthetic construct
  misc_feature 1..20: note = chemically synthesized
  source 1..20: mol_type = other DNA
tgtataacattaattgagaa

SEQ ID NO: 73905 - DNA, 20 bp, synthetic construct
  misc_feature 1..20: note = chemically synthesized
  source 1..20: mol_type = other DNA
gttaatgcacgttaataagc

SEQ ID NO: 73906 - DNA, 20 bp, synthetic construct
  misc_feature 1..20: note = chemically synthesized
  source 1..20: mol_type = other DNA
tgcacgttaataagcaagag

SEQ ID NO: 73907 - DNA, 20 bp, synthetic construct
  misc_feature 1..20: note = chemically synthesized
  source 1..20: mol_type = other DNA
atgtgatggtgttatgaact

SEQ ID NO: 73908 - DNA, 20 bp, synthetic construct
  misc_feature 1..20: note = chemically synthesized
  source 1..20: mol_type = other DNA
caattggctccatttgtggg

SEQ ID NO: 73909 - DNA, 20 bp, synthetic construct
  misc_feature 1..20: note = chemically synthesized
  source 1..20: mol_type = other DNA
gggaggctttggaaaagtaa

SEQ ID NO: 73910 - DNA, 20 bp, synthetic construct
  misc_feature 1..20: note = chemically synthesized
  source 1..20: mol_type = other DNA
tattttcctcatcagaagca

SEQ ID NO: 73911 - DNA, 20 bp, synthetic construct
  misc_feature 1..20: note = chemically synthesized
  source 1..20: mol_type = other DNA
agatgaagaaagagaaaaaa

SEQ ID NO: 73912 - DNA, 20 bp, synthetic construct
  misc_feature 1..20: note = chemically synthesized
  source 1..20: mol_type = other DNA
aaaaataagcttcggtgttc

SEQ ID NO: 73913 - DNA, 20 bp, synthetic construct
  misc_feature 1..20: note = chemically synthesized
  source 1..20: mol_type = other DNA
ggtgttcagtggattagaaa

SEQ ID NO: 73914 - DNA, 20 bp, synthetic construct
  misc_feature 1..20: note = chemically synthesized
  source 1..20: mol_type = other DNA
gattagaaaccatgtttatc

SEQ ID NO: 73915 - DNA, 20 bp, synthetic construct
  misc_feature 1..20: note = chemically synthesized
  source 1..20: mol_type = other DNA
tacaaatctccacttgtcct

SEQ ID NO: 73916 - DNA, 20 bp, synthetic construct
  misc_feature 1..20: note = chemically synthesized
  source 1..20: mol_type = other DNA
tattttttcttcaacgtact

SEQ ID NO: 73917 - DNA, 20 bp, synthetic construct
  misc_feature 1..20: note = chemically synthesized
  source 1..20: mol_type = other DNA
caacgtactttaggcttgta

SEQ ID NO: 73918 - DNA, 20 bp, synthetic construct
  misc_feature 1..20: note = chemically synthesized
  source 1..20: mol_type = other DNA
ttcttttttttcctcagcct

SEQ ID NO: 73919 - DNA, 20 bp, synthetic construct
  misc_feature 1..20: note = chemically synthesized
  source 1..20: mol_type = other DNA
tcctttttttttttagtaaa

SEQ ID NO: 73920 - DNA, 20 bp, synthetic construct
  misc_feature 1..20: note = chemically synthesized
  source 1..20: mol_type = other DNA
tagacgcaagggctactggt

SEQ ID NO: 73921 - DNA, 20 bp, synthetic construct
  misc_feature 1..20: note = chemically synthesized
  source 1..20: mol_type = other DNA
caatagtatgctaaacaagg

SEQ ID NO: 73922 - DNA, 20 bp, synthetic construct
  misc_feature 1..20: note = chemically synthesized
  source 1..20: mol_type = other DNA
aaggtacatgtgcaggatgt

SEQ ID NO: 73923 - DNA, 20 bp, synthetic construct
  misc_feature 1..20: note = chemically synthesized
  source 1..20: mol_type = other DNA
atctgtatcaatgagcagat

SEQ ID NO: 73924 - DNA, 20 bp, synthetic construct
  misc_feature 1..20: note = chemically synthesized
  source 1..20: mol_type = other DNA
ataataatttcaatcaacct

SEQ ID NO: 73925 - DNA, 20 bp, synthetic construct
  misc_feature 1..20: note = chemically synthesized
  source 1..20: mol_type = other DNA
gggataaactaatttgaaga

SEQ ID NO: 73926 - DNA, 20 bp, synthetic construct
  misc_feature 1..20: note = chemically synthesized
  source 1..20: mol_type = other DNA
cctccgataagccagaattc

SEQ ID NO: 73927 - DNA, 20 bp, synthetic construct
  misc_feature 1..20: note = chemically synthesized
  source 1..20: mol_type = other DNA
aacaacccttgcctctttag

SEQ ID NO: 73928 - DNA, 20 bp, synthetic construct
  misc_feature 1..20: note = chemically synthesized
  source 1..20: mol_type = other DNA
cgcacatcttatgtcttaga

SEQ ID NO: 73929 - DNA, 20 bp, synthetic construct
  misc_feature 1..20: note = chemically synthesized
  source 1..20: mol_type = other DNA
atttttctaagatgaaacag

SEQ ID NO: 73930 - DNA, 20 bp, synthetic construct
  misc_feature 1..20: note = chemically synthesized
  source 1..20: mol_type = other DNA
atctattactgcgctgaaac

SEQ ID NO: 73931 - DNA, 20 bp, synthetic construct
  misc_feature 1..20: note = chemically synthesized
  source 1..20: mol_type = other DNA
tgaaactgtggctttataga

SEQ ID NO: 73932 - DNA, 20 bp, synthetic construct
  misc_feature 1..20: note = chemically synthesized
  source 1..20: mol_type = other DNA
ccactgctaactgaaagaga

SEQ ID NO: 73933 - DNA, 20 bp, synthetic construct
  misc_feature 1..20: note = chemically synthesized
  source 1..20: mol_type = other DNA
tgaacttttcaaaaattggt

SEQ ID NO: 73934 - DNA, 20 bp, synthetic construct
  misc_feature 1..20: note = chemically synthesized
  source 1..20: mol_type = other DNA
tttcaaaaattggtacatgc

SEQ ID NO: 73935 - DNA, 20 bp, synthetic construct
  misc_feature 1..20: note = chemically synthesized
  source 1..20: mol_type = other DNA
acccttcagcagttccacac

SEQ ID NO: 73936 - DNA, 20 bp, synthetic construct
  misc_feature 1..20: note = chemically synthesized
  source 1..20: mol_type = other DNA
ctgtgcctggcaaaagtcca

SEQ ID NO: 73937 - DNA, 20 bp, synthetic construct
  misc_feature 1..20: note = chemically synthesized
  source 1..20: mol_type = other DNA
gcaaaagtccaggtcgcttc

SEQ ID NO: 73938 - DNA, 20 bp, synthetic construct
  misc_feature 1..20: note = chemically synthesized
  source 1..20: mol_type = other DNA
catggacccagaggttcttt

SEQ ID NO: 73939 - DNA, 20 bp, synthetic construct
  misc_feature 1..20: note = chemically synthesized
  source 1..20: mol_type = other DNA
aacttcaaggtgagtccagg

SEQ ID NO: 73940 - DNA, 20 bp, synthetic construct
  misc_feature 1..20: note = chemically synthesized
  source 1..20: mol_type = other DNA
tctgagcacagcagggtgtg

SEQ ID NO: 73941 - DNA, 20 bp, synthetic construct
  misc_feature 1..20: note = chemically synthesized
  source 1..20: mol_type = other DNA
actgggctgagacccagtgg

SEQ ID NO: 73942 - DNA, 20 bp, synthetic construct
  misc_feature 1..20: note = chemically synthesized
  source 1..20: mol_type = other DNA
gaggaaaatgacttttcttt

SEQ ID NO: 73943 - DNA, 20 bp, synthetic construct
  misc_feature 1..20: note = chemically synthesized
  source 1..20: mol_type = other DNA
tttcatctttccctcatttt

SEQ ID NO: 73944 - DNA, 20 bp, synthetic construct
  misc_feature 1..20: note = chemically synthesized
  source 1..20: mol_type = other DNA
ggacacatataaaatgctgc

SEQ ID NO: 73945 - DNA, 20 bp, synthetic construct
  misc_feature 1..20: note = chemically synthesized
  source 1..20: mol_type = other DNA
aattgaaacatttgggctgg

SEQ ID NO: 73946 - DNA, 20 bp, synthetic construct
  misc_feature 1..20: note = chemically synthesized
  source 1..20: mol_type = other DNA
gtgtgtgtgtgtgtgtcagc

SEQ ID NO: 73947 - DNA, 20 bp, synthetic construct
  misc_feature 1..20: note = chemically synthesized
  source 1..20: mol_type = other DNA
ttcatggtggcaagaagata

SEQ ID NO: 73948 - DNA, 20 bp, synthetic construct
  misc_feature 1..20: note = chemically synthesized
  source 1..20: mol_type = other DNA
tttaaattatggccagtgac

SEQ ID NO: 73949 - DNA, 20 bp, synthetic construct
  misc_feature 1..20: note = chemically synthesized
  source 1..20: mol_type = other DNA
tttaatgggaaggcaaaatc

SEQ ID NO: 73950 - DNA, 20 bp, synthetic construct
  misc_feature 1..20: note = chemically synthesized
  source 1..20: mol_type = other DNA
aggctttgagggaagttaac

SEQ ID NO: 73951 - DNA, 20 bp, synthetic construct
  misc_feature 1..20: note = chemically synthesized
  source 1..20: mol_type = other DNA
tttgagggaagttaacatag

SEQ ID NO: 73952 - DNA, 20 bp, synthetic construct
  misc_feature 1..20: note = chemically synthesized
  source 1..20: mol_type = other DNA
acataggcttgattctgggt

SEQ ID NO: 73953 - DNA, 20 bp, synthetic construct
  misc_feature 1..20: note = chemically synthesized
  source 1..20: mol_type = other DNA
ctcctgggaaatgtgctggt

SEQ ID NO: 73954 - DNA, 20 bp, synthetic construct
  misc_feature 1..20: note = chemically synthesized
  source 1..20: mol_type = other DNA
aaagaattcacccctgaggt

SEQ ID NO: 73955 - DNA, 20 bp, synthetic construct
  misc_feature 1..20: note = chemically synthesized
  source 1..20: mol_type = other DNA
gataccactgagctcactgc

SEQ ID NO: 73956 - DNA, 20 bp, synthetic construct
  misc_feature 1..20: note = chemically synthesized
  source 1..20: mol_type = other DNA
tgagctcactgcccatgatt

SEQ ID NO: 73957 - DNA, 20 bp, synthetic construct
  misc_feature 1..20: note = chemically synthesized
  source 1..20: mol_type = other DNA
atgattcagagctttcaagg

SEQ ID NO: 73958 - DNA, 20 bp, synthetic construct
  misc_feature 1..20: note = chemically synthesized
  source 1..20: mol_type = other DNA
ctattctgctgagagatcac

SEQ ID NO: 73959 - DNA, 20 bp, synthetic construct
  misc_feature 1..20: note = chemically synthesized
  source 1..20: mol_type = other DNA
ttttaaatatatgagccaca

SEQ ID NO: 73960 - DNA, 20 bp, synthetic construct
  misc_feature 1..20: note = chemically synthesized
  source 1..20: mol_type = other DNA
gtgtatgtgtatttctgcat

SEQ ID NO: 73961 - DNA, 20 bp, synthetic construct
  misc_feature 1..20: note = chemically synthesized
  source 1..20: mol_type = other DNA
gtgtatttctgcatgcctgt

SEQ ID NO: 73962 - DNA, 20 bp, synthetic construct
  misc_feature 1..20: note = chemically synthesized
  source 1..20: mol_type = other DNA
ggacaggacttctcagaaac

SEQ ID NO: 73963 - DNA, 20 bp, synthetic construct
  misc_feature 1..20: note = chemically synthesized
  source 1..20: mol_type = other DNA
ggttcagtgaagacctgggg

SEQ ID NO: 73964 - DNA, 20 bp, synthetic construct
  misc_feature 1..20: note = chemically synthesized
  source 1..20: mol_type = other DNA
cagtgaagacctgggggctg

SEQ ID NO: 73965 - DNA, 20 bp, synthetic construct
  misc_feature 1..20: note = chemically synthesized
  source 1..20: mol_type = other DNA
cttaaggaagggaaagtgtt

SEQ ID NO: 73966 - DNA, 20 bp, synthetic construct
  misc_feature 1..20: note = chemically synthesized
  source 1..20: mol_type = other DNA
tgttccaagctttaggaatt

SEQ ID NO: 73967 - DNA, 20 bp, synthetic construct
  misc_feature 1..20: note = chemically synthesized
  source 1..20: mol_type = other DNA
gaatactatttctaatggca

SEQ ID NO: 73968 - DNA, 20 bp, synthetic construct
  misc_feature 1..20: note = chemically synthesized
  source 1..20: mol_type = other DNA
taatcccatgccctcaagtg

SEQ ID NO: 73969 - DNA, 20 bp, synthetic construct
  misc_feature 1..20: note = chemically synthesized
  source 1..20: mol_type = other DNA
aatttgtacaacattaattg

SEQ ID NO: 73970 - DNA, 20 bp, synthetic construct
  misc_feature 1..20: note = chemically synthesized
  source 1..20: mol_type = other DNA
gttagtgcatctctataagt

SEQ ID NO: 73971 - DNA, 20 bp, synthetic construct
  misc_feature 1..20: note = chemically synthesized
  source 1..20: mol_type = other DNA
atatgatggtgttacggacc

SEQ ID NO: 73972 - DNA, 20 bp, synthetic construct
  misc_feature 1..20: note = chemically synthesized
  source 1..20: mol_type = other DNA
caactgaccttatctgtggg

SEQ ID NO: 73973 - DNA, 20 bp, synthetic construct
  misc_feature 1..20: note = chemically synthesized
  source 1..20: mol_type = other DNA
gggaggcttttgaaaagtaa

SEQ ID NO: 73974 - DNA, 20 bp, synthetic construct
  misc_feature 1..20: note = chemically synthesized
  source 1..20: mol_type = other DNA
agatgaagaaggagaaaaaa

SEQ ID NO: 73975 - DNA, 20 bp, synthetic construct
  misc_feature 1..20: note = chemically synthesized
  source 1..20: mol_type = other DNA
agaaggagaaaaaaataagc

SEQ ID NO: 73976 - DNA, 20 bp, synthetic construct
  misc_feature 1..20: note = chemically synthesized
  source 1..20: mol_type = other DNA
ggttttgagtggactacaga

SEQ ID NO: 73977 - DNA, 20 bp, synthetic construct
  misc_feature 1..20: note = chemically synthesized
  source 1..20: mol_type = other DNA
gactacagaccatgtttatc

SEQ ID NO: 73978 - DNA, 20 bp, synthetic construct
  misc_feature 1..20: note = chemically synthesized
  source 1..20: mol_type = other DNA
tgcaaagctcccctcgtccc

SEQ ID NO: 73979 - DNA, 20 bp, synthetic construct
  misc_feature 1..20: note = chemically synthesized
  source 1..20: mol_type = other DNA
gcctgcgcccttctctctaa

SEQ ID NO: 73980 - DNA, 20 bp, synthetic construct
  misc_feature 1..20: note = chemically synthesized
  source 1..20: mol_type = other DNA
tttctcctatttttacttca

SEQ ID NO: 73981 - DNA, 20 bp, synthetic construct
  misc_feature 1..20: note = chemically synthesized
  source 1..20: mol_type = other DNA
cccacttcaaatgcagtcac

SEQ ID NO: 73982 - DNA, 20 bp, synthetic construct
  misc_feature 1..20: note = chemically synthesized
  source 1..20: mol_type = other DNA
gaatatgcactttctttctt

SEQ ID NO: 73983 - DNA, 20 bp, synthetic construct
  misc_feature 1..20: note = chemically synthesized
  source 1..20: mol_type = other DNA
cactttctttcttttttgtt

SEQ ID NO: 73984 - DNA, 20 bp, synthetic construct
  misc_feature 1..20: note = chemically synthesized
  source 1..20: mol_type = other DNA
atttcttgatgatatgttaa

SEQ ID NO: 73985 - DNA, 20 bp, synthetic construct
  misc_feature 1..20: note = chemically synthesized
  source 1..20: mol_type = other DNA
tgatgatatgttaaacaagt

SEQ ID NO: 73986 - DNA, 20 bp, synthetic construct
  misc_feature 1..20: note = chemically synthesized
  source 1..20: mol_type = other DNA
ggggtacacgtacaggatat

SEQ ID NO: 73987 - DNA, 20 bp, synthetic construct
  misc_feature 1..20: note = chemically synthesized
  source 1..20: mol_type = other DNA
tacacgtacaggatatgcag

SEQ ID NO: 73988 - DNA, 20 bp, synthetic construct
  misc_feature 1..20: note = chemically synthesized
  source 1..20: mol_type = other DNA
ttttataggtaaaagtgtgc

SEQ ID NO: 73989 - DNA, 20 bp, synthetic construct
  misc_feature 1..20: note = chemically synthesized
  source 1..20: mol_type = other DNA
aaaagtgtgccatggtttta

SEQ ID NO: 73990 - DNA, 20 bp, synthetic construct
  misc_feature 1..20: note = chemically synthesized
  source 1..20: mol_type = other DNA
gggttttttttttcttgtaa

SEQ ID NO: 73991 - DNA, 20 bp, synthetic construct
  misc_feature 1..20: note = chemically synthesized
  source 1..20: mol_type = other DNA
tttttttcttgtaaagttgt

SEQ ID NO: 73992 - DNA, 20 bp, synthetic construct
  misc_feature 1..20: note = chemically synthesized
  source 1..20: mol_type = other DNA
cttgtaaagttgtttaagtt

SEQ ID NO: 73993 - DNA, 20 bp, synthetic construct
  misc_feature 1..20: note = chemically synthesized
  source 1..20: mol_type = other DNA
tattaggcctttgtcagaag

SEQ ID NO: 73994 - DNA, 20 bp, synthetic construct
  misc_feature 1..20: note = chemically synthesized
  source 1..20: mol_type = other DNA
ggaaaatctttttcccattc

SEQ ID NO: 73995 - DNA, 20 bp, synthetic construct
  misc_feature 1..20: note = chemically synthesized
  source 1..20: mol_type = other DNA
agattgtctttcgctctgat

SEQ ID NO: 73996 - DNA, 20 bp, synthetic construct
  misc_feature 1..20: note = chemically synthesized
  source 1..20: mol_type = other DNA
cttttgctgagcaggagctc

SEQ ID NO: 73997 - DNA, 20 bp, synthetic construct
  misc_feature 1..20: note = chemically synthesized
  source 1..20: mol_type = other DNA
agcaggagctctttagttta

SEQ ID NO: 73998 - DNA, 20 bp, synthetic construct
  misc_feature 1..20: note = chemically synthesized
  source 1..20: mol_type = other DNA
attagattccattggtcaat

SEQ ID NO: 73999 - DNA, 20 bp, synthetic construct
  misc_feature 1..20: note = chemically synthesized
  source 1..20: mol_type = other DNA
tcaatttttgcttttgctgc

SEQ ID NO: 74000 - DNA, 20 bp, synthetic construct
  misc_feature 1..20: note = chemically synthesized
  source 1..20: mol_type = other DNA
gcttttgctgcaattgcttt

SEQ ID NO: 74001 - DNA, 20 bp, synthetic construct
  misc_feature 1..20: note = chemically synthesized
  source 1..20: mol_type = other DNA
tttcatcatgaaatctgtgc

SEQ ID NO: 74002 - DNA, 20 bp, synthetic construct
  misc_feature 1..20: note = chemically synthesized
  source 1..20: mol_type = other DNA
ttatatcatgaatagtattg

SEQ ID NO: 74003 - DNA, 20 bp, synthetic construct
  misc_feature 1..20: note = chemically synthesized
  source 1..20: mol_type = other DNA
agtattgccttgattttttt

SEQ ID NO: 74004 - DNA, 20 bp, synthetic construct
  misc_feature 1..20: note = chemically synthesized
  source 1..20: mol_type = other DNA
tgatttttttctaggctttt

SEQ ID NO: 74005 - DNA, 20 bp, synthetic construct
  misc_feature 1..20: note = chemically synthesized
  source 1..20: mol_type = other DNA
tttctaggctttttatagtt

SEQ ID NO: 74006 - DNA, 20 bp, synthetic construct
  misc_feature 1..20: note = chemically synthesized
  source 1..20: mol_type = other DNA
gataaggtataaggaaggag

SEQ ID NO: 74007 - DNA, 20 bp, synthetic construct
  misc_feature 1..20: note = chemically synthesized
  source 1..20: mol_type = other DNA
taaattgaaaatcctttccc

SEQ ID NO: 74008 - DNA, 20 bp, synthetic construct
  misc_feature 1..20: note = chemically synthesized
  source 1..20: mol_type = other DNA
ttgaaaatcctttccccatt

SEQ ID NO: 74009 - DNA, 20 bp, synthetic construct
  misc_feature 1..20: note = chemically synthesized
  source 1..20: mol_type = other DNA
ttccccattgcttgcttttg

SEQ ID NO: 74010 - DNA, 20 bp, synthetic construct
  misc_feature 1..20: note = chemically synthesized
  source 1..20: mol_type = other DNA
agatggttgtaggtacaata

SEQ ID NO: 74011 - DNA, 20 bp, synthetic construct
  misc_feature 1..20: note = chemically synthesized
  source 1..20: mol_type = other DNA
aatctgtctgtctagttcat

SEQ ID NO: 74012 - DNA, 20 bp, synthetic construct
  misc_feature 1..20: note = chemically synthesized
  source 1..20: mol_type = other DNA
ggcagctgttcactggtacg

SEQ ID NO: 74013 - DNA, 20 bp, synthetic construct
  misc_feature 1..20: note = chemically synthesized
  source 1..20: mol_type = other DNA
gaacagaaattcttttggga

SEQ ID NO: 74014 - DNA, 20 bp, synthetic construct
  misc_feature 1..20: note = chemically synthesized
  source 1..20: mol_type = other DNA
ggccattaaaggacatgacc

SEQ ID NO: 74015 - DNA, 20 bp, synthetic construct
  misc_feature 1..20: note = chemically synthesized
  source 1..20: mol_type = other DNA
gtccccacaactcaatataa

SEQ ID NO: 74016 - DNA, 20 bp, synthetic construct
  misc_feature 1..20: note = chemically synthesized
  source 1..20: mol_type = other DNA
tctctgctcttaaagataat

SEQ ID NO: 74017 - DNA, 20 bp, synthetic construct
  misc_feature 1..20: note = chemically synthesized
  source 1..20: mol_type = other DNA
ataatcttggttttgcctca

SEQ ID NO: 74018 - DNA, 20 bp, synthetic construct
  misc_feature 1..20: note = chemically synthesized
  source 1..20: mol_type = other DNA
tgtgtctctaatatcagaaa

SEQ ID NO: 74019 - DNA, 20 bp, synthetic construct
  misc_feature 1..20: note = chemically synthesized
  source 1..20: mol_type = other DNA
agaaattcagctttaatata

SEQ ID NO: 74020 - DNA, 20 bp, synthetic construct
  misc_feature 1..20: note = chemically synthesized
  source 1..20: mol_type = other DNA
tctccttgaaatacacatgg

SEQ ID NO: 74021 - DNA, 20 bp, synthetic construct
  misc_feature 1..20: note = chemically synthesized
  source 1..20: mol_type = other DNA
ttcctaaactttatttcttg

SEQ ID NO: 74022 - DNA, 20 bp, synthetic construct
  misc_feature 1..20: note = chemically synthesized
  source 1..20: mol_type = other DNA
tgtgccctgtctattcctga

SEQ ID NO: 74023 - DNA, 20 bp, synthetic construct
  misc_feature 1..20: note = chemically synthesized
  source 1..20: mol_type = other DNA
ccctgtctattcctgaaatt

SEQ ID NO: 74024 - DNA, 20 bp, synthetic construct
  misc_feature 1..20: note = chemically synthesized
  source 1..20: mol_type = other DNA
tgtcagtgaagaatgtcttt

SEQ ID NO: 74025 - DNA, 20 bp, synthetic construct
  misc_feature 1..20: note = chemically synthesized
  source 1..20: mol_type = other DNA
ggccacggaatctcctatcc

SEQ ID NO: 74026 - DNA, 20 bp, synthetic construct
  misc_feature 1..20: note = chemically synthesized
  source 1..20: mol_type = other DNA
tggcataattttgtagatat

SEQ ID NO: 74027 - DNA, 20 bp, synthetic construct
  misc_feature 1..20: note = chemically synthesized
  source 1..20: mol_type = other DNA
atttgacatggactattgtt

SEQ ID NO: 74028 - DNA, 20 bp, synthetic construct
  misc_feature 1..20: note = chemically synthesized
  source 1..20: mol_type = other DNA
gataagtacactgactacta

SEQ ID NO: 74029 - DNA, 20 bp, synthetic construct
  misc_feature 1..20: note = chemically synthesized
  source 1..20: mol_type = other DNA
taaaaaacacagtaataaaa

SEQ ID NO: 74030 - DNA, 20 bp, synthetic construct
  misc_feature 1..20: note = chemically synthesized
  source 1..20: mol_type = other DNA
cccagttttccccttacttc

SEQ ID NO: 74031 - DNA, 20 bp, synthetic construct
  misc_feature 1..20: note = chemically synthesized
  source 1..20: mol_type = other DNA
gttttccccttacttcccta

SEQ ID NO: 74032 - DNA, 20 bp, synthetic construct
  misc_feature 1..20: note = chemically synthesized
  source 1..20: mol_type = other DNA
cttccctagtttgtttctta

SEQ ID NO: 74033 - DNA, 20 bp, synthetic construct
  misc_feature 1..20: note = chemically synthesized
  source 1..20: mol_type = other DNA
tccaagttgatgctggatag

SEQ ID NO: 74034 - DNA, 20 bp, synthetic construct
  misc_feature 1..20: note = chemically synthesized
  source 1..20: mol_type = other DNA
aatggcgtgaacctgggagg

SEQ ID NO: 74035 - DNA, 20 bp, synthetic construct
  misc_feature 1..20: note = chemically synthesized
  source 1..20: mol_type = other DNA
aattgaaaaccaagaaaggc

SEQ ID NO: 74036 - DNA, 20 bp, synthetic construct
  misc_feature 1..20: note = chemically synthesized
  source 1..20: mol_type = other DNA
gaaaatggaggggaaggaag

SEQ ID NO: 74037 - DNA, 20 bp, synthetic construct
  misc_feature 1..20: note = chemically synthesized
  source 1..20: mol_type = other DNA
aagttcccctgagaaggcca

SEQ ID NO: 74038 - DNA, 20 bp, synthetic construct
  misc_feature 1..20: note = chemically synthesized
  source 1..20: mol_type = other DNA
gtcacaacccacccttgacc

SEQ ID NO: 74039 - DNA, 20 bp, synthetic construct
  misc_feature 1..20: note = chemically synthesized
  source 1..20: mol_type = other DNA
agggaggcaaagggctggtc

SEQ ID NO: 74040 - DNA, 20 bp, synthetic construct
  misc_feature 1..20: note = chemically synthesized
  source 1..20: mol_type = other DNA
cacatgaagcagcaatgcag

SEQ ID NO: 74041 - DNA, 20 bp, synthetic construct
  misc_feature 1..20: note = chemically synthesized
  source 1..20: mol_type = other DNA
ttaaggtgagaaggctggag

SEQ ID NO: 74042 - DNA, 20 bp, synthetic construct
  misc_feature 1..20: note = chemically synthesized
  source 1..20: mol_type = other DNA
acaaggtgcagaaaggcaga

SEQ ID NO: 74043 - DNA, 20 bp, synthetic construct
  misc_feature 1..20: note = chemically synthesized
  source 1..20: mol_type = other DNA
ggcagaaagtgtttctgaaa

SEQ ID NO: 74044 - DNA, 20 bp, synthetic construct
  misc_feature 1..20: note = chemically synthesized
  source 1..20: mol_type = other DNA
agtctgactttgcacctgct

SEQ ID NO: 74045 - DNA, 20 bp, synthetic construct
  misc_feature 1..20: note = chemically synthesized
  source 1..20: mol_type = other DNA
catggacctagaggtacttt

SEQ ID NO: 74046 - DNA, 20 bp, synthetic construct
  misc_feature 1..20: note = chemically synthesized
  source 1..20: mol_type = other DNA
ctggtgagtagtaagtacac

SEQ ID NO: 74047 - DNA, 20 bp, synthetic construct
  misc_feature 1..20: note = chemically synthesized
  source 1..20: mol_type = other DNA
tgggtacttttgaaagcaga

SEQ ID NO: 74048 - DNA, 20 bp, synthetic construct
  misc_feature 1..20: note = chemically synthesized
  source 1..20: mol_type = other DNA
tgggatatgatatttcagca

SEQ ID NO: 74049 - DNA, 20 bp, synthetic construct
  misc_feature 1..20: note = chemically synthesized
  source 1..20: mol_type = other DNA
attctggccaaaatcaaact

SEQ ID NO: 74050 - DNA, 20 bp, synthetic construct
  misc_feature 1..20: note = chemically synthesized
  source 1..20: mol_type = other DNA
gtagtgggaagctgttaaaa

SEQ ID NO: 74051 - DNA, 20 bp, synthetic construct
  misc_feature 1..20: note = chemically synthesized
  source 1..20: mol_type = other DNA
tgggaagctgttaaaaagag

SEQ ID NO: 74052 - DNA, 20 bp, synthetic construct
  misc_feature 1..20: note = chemically synthesized
  source 1..20: mol_type = other DNA
tatacttttgtacgcatggt

SEQ ID NO: 74053 - DNA, 20 bp, synthetic construct
  misc_feature 1..20: note = chemically synthesized
  source 1..20: mol_type = other DNA
ggtacaggattctttgttat

SEQ ID NO: 74054 - DNA, 20 bp, synthetic construct
  misc_feature 1..20: note = chemically synthesized
  source 1..20: mol_type = other DNA
ttatatctatttactgcaag

SEQ ID NO: 74055 - DNA, 20 bp, synthetic construct
  misc_feature 1..20: note = chemically synthesized
  source 1..20: mol_type = other DNA
ccagctcttaggcaacgtga

SEQ ID NO: 74056 - DNA, 20 bp, synthetic construct
  misc_feature 1..20: note = chemically synthesized
  source 1..20: mol_type = other DNA
ctcttaggcaacgtgatatt

SEQ ID NO: 74057 - DNA, 20 bp, synthetic construct
  misc_feature 1..20: note = chemically synthesized
  source 1..20: mol_type = other DNA
gttttggcaacccacttcag

SEQ ID NO: 74058 - DNA, 20 bp, synthetic construct
  misc_feature 1..20: note = chemically synthesized
  source 1..20: mol_type = other DNA
gaggattttaccctacagat

SEQ ID NO: 74059 - DNA, 20 bp, synthetic construct
  misc_feature 1..20: note = chemically synthesized
  source 1..20: mol_type = other DNA
accactgagttccctgtcca

SEQ ID NO: 74060 - DNA, 20 bp, synthetic construct
  misc_feature 1..20: note = chemically synthesized
  source 1..20: mol_type = other DNA
atgtttgtacctatggtcca

SEQ ID NO: 74061 - DNA, 20 bp, synthetic construct
  misc_feature 1..20: note = chemically synthesized
  source 1..20: mol_type = other DNA
gagaagagcagtatcctgcc

SEQ ID NO: 74062 - DNA, 20 bp, synthetic construct
  misc_feature 1..20: note = chemically synthesized
  source 1..20: mol_type = other DNA
ttttctgtctttatatttta

SEQ ID NO: 74063 - DNA, 20 bp, synthetic construct
  misc_feature 1..20: note = chemically synthesized
  source 1..20: mol_type = other DNA
aaatgagaatgttggagaat

SEQ ID NO: 74064 - DNA, 20 bp, synthetic construct
  misc_feature 1..20: note = chemically synthesized
  source 1..20: mol_type = other DNA
aagaaaagagagaactcgtg

SEQ ID NO: 74065 - DNA, 20 bp, synthetic construct
  misc_feature 1..20: note = chemically synthesized
  source 1..20: mol_type = other DNA
aaatcgtctctagaataaga

SEQ ID NO: 74066 - DNA, 20 bp, synthetic construct
  misc_feature 1..20: note = chemically synthesized
  source 1..20: mol_type = other DNA
aggtactctttggaggtgta

SEQ ID NO: 74067 - DNA, 20 bp, synthetic construct
  misc_feature 1..20: note = chemically synthesized
  source 1..20: mol_type = other DNA
tatttataatgaagtgggga

SEQ ID NO: 74068 - DNA, 20 bp, synthetic construct
  misc_feature 1..20: note = chemically synthesized
  source 1..20: mol_type = other DNA
aaggcatgtgaactggctgt

SEQ ID NO: 74069 - DNA, 20 bp, synthetic construct
  misc_feature 1..20: note = chemically synthesized
  source 1..20: mol_type = other DNA
ttccattaagctgtgcatat

SEQ ID NO: 74070 - DNA, 20 bp, synthetic construct
  misc_feature 1..20: note = chemically synthesized
  source 1..20: mol_type = other DNA
ttatcatatgtattttcctt

SEQ ID NO: 74071 - DNA, 20 bp, synthetic construct
  misc_feature 1..20: note = chemically synthesized
  source 1..20: mol_type = other DNA
ataaatctctttgttcagct

SEQ ID NO: 74072 - DNA, 20 bp, synthetic construct
  misc_feature 1..20: note = chemically synthesized
  source 1..20: mol_type = other DNA
ctctgtttctataaatatgt

SEQ ID NO: 74073 - DNA, 20 bp, synthetic construct
  misc_feature 1..20: note = chemically synthesized
  source 1..20: mol_type = other DNA
ctataaatatgtacaagttt

SEQ ID NO: 74074 - DNA, 20 bp, synthetic construct
  misc_feature 1..20: note = chemically synthesized
  source 1..20: mol_type = other DNA
agttttattgtttttagtgg

SEQ ID NO: 74075 - DNA, 20 bp, synthetic construct
  misc_feature 1..20: note = chemically synthesized
  source 1..20: mol_type = other DNA
tagcaatcaatattgaaaac

SEQ ID NO: 74076 - DNA, 20 bp, synthetic construct
  misc_feature 1..20: note = chemically synthesized
  source 1..20: mol_type = other DNA
caatattgaaaaccactgat

SEQ ID NO: 74077 - DNA, 20 bp, synthetic construct
  misc_feature 1..20: note = chemically synthesized
  source 1..20: mol_type = other DNA
ttttgtttatgtgagcaaac

SEQ ID NO: 74078 - DNA, 20 bp, synthetic construct
  misc_feature 1..20: note = chemically synthesized
  source 1..20: mol_type = other DNA
gcaaacagcagattaaaagg

SEQ ID NO: 74079 - DNA, 20 bp, synthetic construct
  misc_feature 1..20: note = chemically synthesized
  source 1..20: mol_type = other DNA
gatgaagtaagaaaaatagc

SEQ ID NO: 74080 - DNA, 20 bp, synthetic construct
  misc_feature 1..20: note = chemically synthesized
  source 1..20: mol_type = other DNA
tcgttttgagcaaaaatcac

SEQ ID NO: 74081 - DNA, 20 bp, synthetic construct
  misc_feature 1..20: note = chemically synthesized
  source 1..20: mol_type = other DNA
ataaatagggaaacgtagaa

SEQ ID NO: 74082 - DNA, 20 bp, synthetic construct
  misc_feature 1..20: note = chemically synthesized
  source 1..20: mol_type = other DNA
acatgtatatatatatatag

SEQ ID NO: 74083 - DNA, 20 bp, synthetic construct
  misc_feature 1..20: note = chemically synthesized
  source 1..20: mol_type = other DNA
tctaacttgggtatagtcag

SEQ ID NO: 74084 - DNA, 20 bp, synthetic construct
  misc_feature 1..20: note = chemically synthesized
  source 1..20: mol_type = other DNA
cgagtaagagaccattgtgg

SEQ ID NO: 74085 - DNA, 20 bp, synthetic construct
  misc_feature 1..20: note = chemically synthesized
  source 1..20: mol_type = other DNA
acagcaaatgcctacaagcc

SEQ ID NO: 74086 - DNA, 20 bp, synthetic construct
  misc_feature 1..20: note = chemically synthesized
  source 1..20: mol_type = other DNA
aaacctaaaacctcaaagaa

SEQ ID NO: 74087 - DNA, 20 bp, synthetic construct
  misc_feature 1..20: note = chemically synthesized
  source 1..20: mol_type = other DNA
agatataataccctttcttc

SEQ ID NO: 74088 - DNA, 20 bp, synthetic construct
  misc_feature 1..20: note = chemically synthesized
  source 1..20: mol_type = other DNA
gataggcggtgctaccatct

SEQ ID NO: 74089 - DNA, 20 bp, synthetic construct
  misc_feature 1..20: note = chemically synthesized
  source 1..20: mol_type = other DNA
ttattgttcatttctcgatg

SEQ ID NO: 74090 - DNA, 20 bp, synthetic construct
  misc_feature 1..20: note = chemically synthesized
  source 1..20: mol_type = other DNA
accaaactgacatgtagcat

SEQ ID NO: 74091 - DNA, 20 bp, synthetic construct
  misc_feature 1..20: note = chemically synthesized
  source 1..20: mol_type = other DNA
accccagtcaatctagagaa

SEQ ID NO: 74092 - DNA, 20 bp, synthetic construct
  misc_feature 1..20: note = chemically synthesized
  source 1..20: mol_type = other DNA
ggatttctgcatttgactct

SEQ ID NO: 74093 - DNA, 20 bp, synthetic construct
  misc_feature 1..20: note = chemically synthesized
  source 1..20: mol_type = other DNA
ctatttttttttaattttaa

SEQ ID NO: 74094 - DNA, 20 bp, synthetic construct
  misc_feature 1..20: note = chemically synthesized
  source 1..20: mol_type = other DNA
gggctctttcttataatatt

SEQ ID NO: 74095 - DNA, 20 bp, synthetic construct
  misc_feature 1..20: note = chemically synthesized
  source 1..20: mol_type = other DNA
ctagtatttggagatgaaaa

SEQ ID NO: 74096 - DNA, 20 bp, synthetic construct
  misc_feature 1..20: note = chemically synthesized
  source 1..20: mol_type = other DNA
gagtattacactatccatag

SEQ ID NO: 74097 - DNA, 20 bp, synthetic construct
  misc_feature 1..20: note = chemically synthesized
  source 1..20: mol_type = other DNA
attacactatccatagagaa

SEQ ID NO: 74098 - DNA, 20 bp, synthetic construct
  misc_feature 1..20: note = chemically synthesized
  source 1..20: mol_type = other DNA
gttccttcctctgcctctgc

SEQ ID NO: 74099 - DNA, 20 bp, synthetic construct
  misc_feature 1..20: note = chemically synthesized
  source 1..20: mol_type = other DNA
cttcctctgcctctgctata

SEQ ID NO: 74100 - DNA, 20 bp, synthetic construct
  misc_feature 1..20: note = chemically synthesized
  source 1..20: mol_type = other DNA
aataagacatagtatcagaa

SEQ ID NO: 74101 - DNA, 20 bp, synthetic construct
  misc_feature 1..20: note = chemically synthesized
  source 1..20: mol_type = other DNA
cctagaagggcagaaggaga

SEQ ID NO: 74102 - DNA, 20 bp, synthetic construct
  misc_feature 1..20: note = chemically synthesized
  source 1..20: mol_type = other DNA
gagcccataaccagaggtcc

SEQ ID NO: 74103 - DNA, 20 bp, synthetic construct
  misc_feature 1..20: note = chemically synthesized
  source 1..20: mol_type = other DNA
gagagagagaccagaaataa

SEQ ID NO: 74104 - DNA, 20 bp, synthetic construct
  misc_feature 1..20: note = chemically synthesized
  source 1..20: mol_type = other DNA
gagaccagaaataatcttgc

SEQ ID NO: 74105 - DNA, 20 bp, synthetic construct
  misc_feature 1..20: note = chemically synthesized
  source 1..20: mol_type = other DNA
tgcttatgctttccctcagc

SEQ ID NO: 74106 - DNA, 20 bp, synthetic construct
  misc_feature 1..20: note = chemically synthesized
  source 1..20: mol_type = other DNA
aaatgaataattacagtgtg

SEQ ID NO: 74107 - DNA, 20 bp, synthetic construct
  misc_feature 1..20: note = chemically synthesized
  source 1..20: mol_type = other DNA
acagtgtgcagtgattattg

SEQ ID NO: 74108 - DNA, 20 bp, synthetic construct
  misc_feature 1..20: note = chemically synthesized
  source 1..20: mol_type = other DNA
agaattcaaacagcagtgaa

SEQ ID NO: 74109 - DNA, 20 bp, synthetic construct
  misc_feature 1..20: note = chemically synthesized
  source 1..20: mol_type = other DNA
aacatctgcctcccaggttc

SEQ ID NO: 74110 - DNA, 20 bp, synthetic construct
  misc_feature 1..20: note = chemically synthesized
  source 1..20: mol_type = other DNA
ttttctatttttagtagata

SEQ ID NO: 74111 - DNA, 20 bp, synthetic construct
  misc_feature 1..20: note = chemically synthesized
  source 1..20: mol_type = other DNA
ctttcaccctaccttttcct

SEQ ID NO: 74112 - DNA, 20 bp, synthetic construct
  misc_feature 1..20: note = chemically synthesized
  source 1..20: mol_type = other DNA
ccctaccttttcctttttgt

SEQ ID NO: 74113 - DNA, 20 bp, synthetic construct
  misc_feature 1..20: note = chemically synthesized
  source 1..20: mol_type = other DNA
atactgagttctaaaatcat

SEQ ID NO: 74114 - DNA, 20 bp, synthetic construct
  misc_feature 1..20: note = chemically synthesized
  source 1..20: mol_type = other DNA
atgtcttacttcatacttcc

SEQ ID NO: 74115 - DNA, 20 bp, synthetic construct
  misc_feature 1..20: note = chemically synthesized
  source 1..20: mol_type = other DNA
aactttgtattcatcacact

SEQ ID NO: 74116 - DNA, 20 bp, synthetic construct
  misc_feature 1..20: note = chemically synthesized
  source 1..20: mol_type = other DNA
tgtataatcccaattcccaa

SEQ ID NO: 74117 - DNA, 20 bp, synthetic construct
  misc_feature 1..20: note = chemically synthesized
  source 1..20: mol_type = other DNA
cccatatatcaaacaatgta

SEQ ID NO: 74118 - DNA, 20 bp, synthetic construct
  misc_feature 1..20: note = chemically synthesized
  source 1..20: mol_type = other DNA
tatttcacttgttatactaa

SEQ ID NO: 74119 - DNA, 20 bp, synthetic construct
  misc_feature 1..20: note = chemically synthesized
  source 1..20: mol_type = other DNA
tactaaaactgtttctcttc

SEQ ID NO: 74120 - DNA, 20 bp, synthetic construct
  misc_feature 1..20: note = chemically synthesized
  source 1..20: mol_type = other DNA
acttgcccattcaccaaggt

SEQ ID NO: 74121 - DNA, 20 bp, synthetic construct
  misc_feature 1..20: note = chemically synthesized
  source 1..20: mol_type = other DNA
ttccctacctctaatcaaca

SEQ ID NO: 74122 - DNA, 20 bp, synthetic construct
  misc_feature 1..20: note = chemically synthesized
  source 1..20: mol_type = other DNA
acctctaatcaacagttcga

SEQ ID NO: 74123 - DNA, 20 bp, synthetic construct
  misc_feature 1..20: note = chemically synthesized
  source 1..20: mol_type = other DNA
ttactgcccagtcaggtcct

SEQ ID NO: 74124 - DNA, 20 bp, synthetic construct
  misc_feature 1..20: note = chemically synthesized
  source 1..20: mol_type = other DNA
tcctggctggatgcggtggc

SEQ ID NO: 74125 - DNA, 20 bp, synthetic construct
  misc_feature 1..20: note = chemically synthesized
  source 1..20: mol_type = other DNA
tcaggtggctgaggcaggag

SEQ ID NO: 74126 - DNA, 20 bp, synthetic construct
  misc_feature 1..20: note = chemically synthesized
  source 1..20: mol_type = other DNA
gaggcagaggttgcggtgag

SEQ ID NO: 74127 - DNA, 20 bp, synthetic construct
  misc_feature 1..20: note = chemically synthesized
  source 1..20: mol_type = other DNA
cctagattgcaccattgcac

SEQ ID NO: 74128 - DNA, 20 bp, synthetic construct
  misc_feature 1..20: note = chemically synthesized
  source 1..20: mol_type = other DNA
tcctccctcacaaacacatt

SEQ ID NO: 74129 - DNA, 20 bp, synthetic construct
  misc_feature 1..20: note = chemically synthesized
  source 1..20: mol_type = other DNA
tcatttttaacaggtagtgg

SEQ ID NO: 74130 - DNA, 20 bp, synthetic construct
  misc_feature 1..20: note = chemically synthesized
  source 1..20: mol_type = other DNA
caatgtatccaagactgtat

SEQ ID NO: 74131 - DNA, 20 bp, synthetic construct
  misc_feature 1..20: note = chemically synthesized
  source 1..20: mol_type = other DNA
tgaattattcaatatctttc

SEQ ID NO: 74132 - DNA, 20 bp, synthetic construct
  misc_feature 1..20: note = chemically synthesized
  source 1..20: mol_type = other DNA
tacagaaaaataacttgtaa

SEQ ID NO: 74133 - DNA, 20 bp, synthetic construct
  misc_feature 1..20: note = chemically synthesized
  source 1..20: mol_type = other DNA
tctatatacaaataaagtca

SEQ ID NO: 74134 - DNA, 20 bp, synthetic construct
  misc_feature 1..20: note = chemically synthesized
  source 1..20: mol_type = other DNA
atcgctacgtgttaagcagt

SEQ ID NO: 74135 - DNA, 20 bp, synthetic construct
  misc_feature 1..20: note = chemically synthesized
  source 1..20: mol_type = other DNA
tggtaagcatttaagtggct

SEQ ID NO: 74136 - DNA, 20 bp, synthetic construct
  misc_feature 1..20: note = chemically synthesized
  source 1..20: mol_type = other DNA
catttaagtggctaccggtt

SEQ ID NO: 74137 - DNA, 20 bp, synthetic construct
  misc_feature 1..20: note = chemically synthesized
  source 1..20: mol_type = other DNA
tggctaccggtttgaggttt

SEQ ID NO: 74138 - DNA, 20 bp, synthetic construct
  misc_feature 1..20: note = chemically synthesized
  source 1..20: mol_type = other DNA
gtctttggatacacacatgc

SEQ ID NO: 74139 - DNA, 20 bp, synthetic construct
  misc_feature 1..20: note = chemically synthesized
  source 1..20: mol_type = other DNA
cagcatttgtggatactatt

SEQ ID NO: 74140 - DNA, 20 bp, synthetic construct
  misc_feature 1..20: note = chemically synthesized
  source 1..20: mol_type = other DNA
ctattgtacagtgtcaccaa

SEQ ID NO: 74141 - DNA, 20 bp, synthetic construct
  misc_feature 1..20: note = chemically synthesized
  source 1..20: mol_type = other DNA
tacagtgtcaccaacagagt

SEQ ID NO: 74142 - DNA, 20 bp, synthetic construct
  misc_feature 1..20: note = chemically synthesized
  source 1..20: mol_type = other DNA
ttttccttcccttcccctct

SEQ ID NO: 74143 - DNA, 20 bp, synthetic construct
  misc_feature 1..20: note = chemically synthesized
  source 1..20: mol_type = other DNA
tcaaaatatttgtatataat

SEQ ID NO: 74144 - DNA, 20 bp, synthetic construct
  misc_feature 1..20: note = chemically synthesized
  source 1..20: mol_type = other DNA
taaaatgttaaccttaaaat

SEQ ID NO: 74145 - DNA, 20 bp, synthetic construct
  misc_feature 1..20: note = chemically synthesized
  source 1..20: mol_type = other DNA
atttcaatataataaaaaat

SEQ ID NO: 74146 - DNA, 20 bp, synthetic construct
  misc_feature 1..20: note = chemically synthesized
  source 1..20: mol_type = other DNA
ccaaaagaaggaggaagcaa

SEQ ID NO: 74147 - DNA, 20 bp, synthetic construct
  misc_feature 1..20: note = chemically synthesized
  source 1..20: mol_type = other DNA
aagcaagtttaaactgcagc

SEQ ID NO: 74148 - DNA, 20 bp, synthetic construct
  misc_feature 1..20: note = chemically synthesized
  source 1..20: mol_type = other DNA
ttgagtcaacttgttaaaac

SEQ ID NO: 74149 - DNA, 20 bp, synthetic construct
  misc_feature 1..20: note = chemically synthesized
  source 1..20: mol_type = other DNA
gttaaaacatctgcttttag

SEQ ID NO: 74150 - DNA, 20 bp, synthetic construct
  misc_feature 1..20: note = chemically synthesized
  source 1..20: mol_type = other DNA
gggagatatgtagaggagaa

SEQ ID NO: 74151 - DNA, 20 bp, synthetic construct
  misc_feature 1..20: note = chemically synthesized
  source 1..20: mol_type = other DNA
attctcacaaactaatgaaa

SEQ ID NO: 74152 - DNA, 20 bp, synthetic construct
  misc_feature 1..20: note = chemically synthesized
  source 1..20: mol_type = other DNA
aaaggcagggcagagtcgac

SEQ ID NO: 74153 - DNA, 20 bp, synthetic construct
  misc_feature 1..20: note = chemically synthesized
  source 1..20: mol_type = other DNA
tgtgtagacagagaagactc

SEQ ID NO: 74154 - DNA, 20 bp, synthetic construct
  misc_feature 1..20: note = chemically synthesized
  source 1..20: mol_type = other DNA
cactgactctctgtcccttg

SEQ ID NO: 74155 - DNA, 20 bp, synthetic construct
  misc_feature 1..20: note = chemically synthesized
  source 1..20: mol_type = other DNA
ccttgggctgttttcctacc

SEQ ID NO: 74156 - DNA, 20 bp, synthetic construct
  misc_feature 1..20: note = chemically synthesized
  source 1..20: mol_type = other DNA
aacttcagggtgagtccagg

SEQ ID NO: 74157 - DNA, 20 bp, synthetic construct
  misc_feature 1..20: note = chemically synthesized
  source 1..20: mol_type = other DNA
ttttactatattttatcatt

SEQ ID NO: 74158 - DNA, 20 bp, synthetic construct
  misc_feature 1..20: note = chemically synthesized
  source 1..20: mol_type = other DNA
caaagatgagaggcatagaa

SEQ ID NO: 74159 - DNA, 20 bp, synthetic construct
  misc_feature 1..20: note = chemically synthesized
  source 1..20: mol_type = other DNA
gaatggaaaggaaagtgaat

SEQ ID NO: 74160 - DNA, 20 bp, synthetic construct
  misc_feature 1..20: note = chemically synthesized
  source 1..20: mol_type = other DNA
taggagacagcccatcatca

SEQ ID NO: 74161 - DNA, 20 bp, synthetic construct
  misc_feature 1..20: note = chemically synthesized
  source 1..20: mol_type = other DNA
caattaatttgtatctatta

SEQ ID NO: 74162 - DNA, 20 bp, synthetic construct
  misc_feature 1..20: note = chemically synthesized
  source 1..20: mol_type = other DNA
ctgatgggaataacctgggg

SEQ ID NO: 74163 - DNA, 20 bp, synthetic construct
  misc_feature 1..20: note = chemically synthesized
  source 1..20: mol_type = other DNA
aacctggggatcagttttgt

SEQ ID NO: 74164 - DNA, 20 bp, synthetic construct
  misc_feature 1..20: note = chemically synthesized
  source 1..20: mol_type = other DNA
cagaaaaaaatgggtgttgg

SEQ ID NO: 74165 - DNA, 20 bp, synthetic construct
  misc_feature 1..20: note = chemically synthesized
  source 1..20: mol_type = other DNA
caagtaccattgagatcctg

SEQ ID NO: 74166 - DNA, 20 bp, synthetic construct
  misc_feature 1..20: note = chemically synthesized
  source 1..20: mol_type = other DNA
ccataagaagaccctatttc

SEQ ID NO: 74167 - DNA, 20 bp, synthetic construct
  misc_feature 1..20: note = chemically synthesized
  source 1..20: mol_type = other DNA
cacaatgcctacttcaaggg

SEQ ID NO: 74168 - DNA, 20 bp, synthetic construct
  misc_feature 1..20: note = chemically synthesized
  source 1..20: mol_type = other DNA
aaagaatgttcagctcaact

SEQ ID NO: 74169 - DNA, 20 bp, synthetic construct
  misc_feature 1..20: note = chemically synthesized
  source 1..20: mol_type = other DNA
aggctctacagatagggagc

SEQ ID NO: 74170 - DNA, 20 bp, synthetic construct
  misc_feature 1..20: note = chemically synthesized
  source 1..20: mol_type = other DNA
acatagcctcaagggtaatg

SEQ ID NO: 74171 - DNA, 20 bp, synthetic construct
  misc_feature 1..20: note = chemically synthesized
  source 1..20: mol_type = other DNA
aatgtgctcaattaaaggca

SEQ ID NO: 74172 - DNA, 20 bp, synthetic construct
  misc_feature 1..20: note = chemically synthesized
  source 1..20: mol_type = other DNA
caagtgttcctgctccaaga

SEQ ID NO: 74173 - DNA, 20 bp, synthetic construct
  misc_feature 1..20: note = chemically synthesized
  source 1..20: mol_type = other DNA
cttatcttcccatatttcag

SEQ ID NO: 74174 - DNA, 20 bp, synthetic construct
  misc_feature 1..20: note = chemically synthesized
  source 1..20: mol_type = other DNA
ttcatgcacacacacacact

SEQ ID NO: 74175 - DNA, 20 bp, synthetic construct
  misc_feature 1..20: note = chemically synthesized
  source 1..20: mol_type = other DNA
gagtaaatgagtaaatgaag

SEQ ID NO: 74176 - DNA, 20 bp, synthetic construct
  misc_feature 1..20: note = chemically synthesized
  source 1..20: mol_type = other DNA
taaatgaaggaatgattatt

SEQ ID NO: 74177 - DNA, 20 bp, synthetic construct
  misc_feature 1..20: note = chemically synthesized
  source 1..20: mol_type = other DNA
atattaataataccatcgca

SEQ ID NO: 74178 - DNA, 20 bp, synthetic construct
  misc_feature 1..20: note = chemically synthesized
  source 1..20: mol_type = other DNA
ttttgccataggtaaaatta

SEQ ID NO: 74179 - DNA, 20 bp, synthetic construct
  misc_feature 1..20: note = chemically synthesized
  source 1..20: mol_type = other DNA
aaaaatctgtattatatgca

SEQ ID NO: 74180 - DNA, 20 bp, synthetic construct
  misc_feature 1..20: note = chemically synthesized
  source 1..20: mol_type = other DNA
ttgaatacctaaacagaatc

SEQ ID NO: 74181 - DNA, 20 bp, synthetic construct
  misc_feature 1..20: note = chemically synthesized
  source 1..20: mol_type = other DNA
aaacagaatctgttgtttcc

SEQ ID NO: 74182 - DNA, 20 bp, synthetic construct
  misc_feature 1..20: note = chemically synthesized
  source 1..20: mol_type = other DNA
tgttgtttccttgtgtttga

SEQ ID NO: 74183 - DNA, 20 bp, synthetic construct
  misc_feature 1..20: note = chemically synthesized
  source 1..20: mol_type = other DNA
actgacaatgtgttatagtt

SEQ ID NO: 74184 - DNA, 20 bp, synthetic construct
  misc_feature 1..20: note = chemically synthesized
  source 1..20: mol_type = other DNA
gcagaagctcttttatatcc

SEQ ID NO: 74185 - DNA, 20 bp, synthetic construct
  misc_feature 1..20: note = chemically synthesized
  source 1..20: mol_type = other DNA
gaataagatatttaggaacc

SEQ ID NO: 74186 - DNA, 20 bp, synthetic construct
  misc_feature 1..20: note = chemically synthesized
  source 1..20: mol_type = other DNA
tggtattcgaaagacagtaa

SEQ ID NO: 74187 - DNA, 20 bp, synthetic construct
  misc_feature 1..20: note = chemically synthesized
  source 1..20: mol_type = other DNA
agtcaaaaaaaaagagcaaa

SEQ ID NO: 74188 - DNA, 20 bp, synthetic construct
  misc_feature 1..20: note = chemically synthesized
  source 1..20: mol_type = other DNA
attaaaattatttgttagag

SEQ ID NO: 74189 - DNA, 20 bp, synthetic construct
  misc_feature 1..20: note = chemically synthesized
  source 1..20: mol_type = other DNA
ataggaatggaattaattcc

SEQ ID NO: 74190 - DNA, 20 bp, synthetic construct
  misc_feature 1..20: note = chemically synthesized
  source 1..20: mol_type = other DNA
atggaattaattcctcaaga

SEQ ID NO: 74191 - DNA, 20 bp, synthetic construct
  misc_feature 1..20: note = chemically synthesized
  source 1..20: mol_type = other DNA
tatttgataatttatcaaat

SEQ ID NO: 74192 - DNA, 20 bp, synthetic construct
  misc_feature 1..20: note = chemically synthesized
  source 1..20: mol_type = other DNA
tttttcttttctcactatgg

SEQ ID NO: 74193 - DNA, 20 bp, synthetic construct
  misc_feature 1..20: note = chemically synthesized
  source 1..20: mol_type = other DNA
tctcctaaatcatccatctc

SEQ ID NO: 74194 - DNA, 20 bp, synthetic construct
  misc_feature 1..20: note = chemically synthesized
  source 1..20: mol_type = other DNA
agtcctctgaattaatgcct

SEQ ID NO: 74195 - DNA, 20 bp, synthetic construct
  misc_feature 1..20: note = chemically synthesized
  source 1..20: mol_type = other DNA
aaagggtgttcagactgaag

SEQ ID NO: 74196 - DNA, 20 bp, synthetic construct
  misc_feature 1..20: note = chemically synthesized
  source 1..20: mol_type = other DNA
agttctgtctatgttgactt

SEQ ID NO: 74197 - DNA, 20 bp, synthetic construct
  misc_feature 1..20: note = chemically synthesized
  source 1..20: mol_type = other DNA
tccaaactattttgtgtgtg

SEQ ID NO: 74198 - DNA, 20 bp, synthetic construct
  misc_feature 1..20: note = chemically synthesized
  source 1..20: mol_type = other DNA
aactattttgtgtgtgtgcg

SEQ ID NO: 74199 - DNA, 20 bp, synthetic construct
  misc_feature 1..20: note = chemically synthesized
  source 1..20: mol_type = other DNA
tgcggtttgtttctatgggt

SEQ ID NO: 74200 - DNA, 20 bp, synthetic construct
  misc_feature 1..20: note = chemically synthesized
  source 1..20: mol_type = other DNA
taattctgagagctgctgag

SEQ ID NO: 74201 - DNA, 20 bp, synthetic construct
  misc_feature 1..20: note = chemically synthesized
  source 1..20: mol_type = other DNA
gctgctgagttgtgtttact

SEQ ID NO: 74202 - DNA, 20 bp, synthetic construct
  misc_feature 1..20: note = chemically synthesized
  source 1..20: mol_type = other DNA
gtctgtagcaagtagctaga

SEQ ID NO: 74203 - DNA, 20 bp, synthetic construct
  misc_feature 1..20: note = chemically synthesized
  source 1..20: mol_type = other DNA
cttgacctaggaacatatac

SEQ ID NO: 74204 - DNA, 20 bp, synthetic construct
  misc_feature 1..20: note = chemically synthesized
  source 1..20: mol_type = other DNA
ataaaaatactctagtcaag

SEQ ID NO: 74205 - DNA, 20 bp, synthetic construct
  misc_feature 1..20: note = chemically synthesized
  source 1..20: mol_type = other DNA
cacactcccatagatgagtg

SEQ ID NO: 74206 - DNA, 20 bp, synthetic construct
  misc_feature 1..20: note = chemically synthesized
  source 1..20: mol_type = other DNA
tataaaacattaggacttaa

SEQ ID NO: 74207 - DNA, 20 bp, synthetic construct
  misc_feature 1..20: note = chemically synthesized
  source 1..20: mol_type = other DNA
tcacaatagtgaagatgtca

SEQ ID NO: 74208 - DNA, 20 bp, synthetic construct
  misc_feature 1..20: note = chemically synthesized
  source 1..20: mol_type = other DNA
tgaagatgtcagtaagcttg

SEQ ID NO: 74209 - DNA, 20 bp, synthetic construct
  misc_feature 1..20: note = chemically synthesized
  source 1..20: mol_type = other DNA
agtttttcaggaactttgaa

SEQ ID NO: 74210 - DNA, 20 bp, synthetic construct
  misc_feature 1..20: note = chemically synthesized
  source 1..20: mol_type = other DNA
tcaggaactttgaatgctga

SEQ ID NO: 74211 - DNA, 20 bp, synthetic construct
  misc_feature 1..20: note = chemically synthesized
  source 1..20: mol_type = other DNA
ataaccaaatttgcactatt

SEQ ID NO: 74212 - DNA, 20 bp, synthetic construct
  misc_feature 1..20: note = chemically synthesized
  source 1..20: mol_type = other DNA
aacttatttgcctggtatgc

SEQ ID NO: 74213 - DNA, 20 bp, synthetic construct
  misc_feature 1..20: note = chemically synthesized
  source 1..20: mol_type = other DNA
tgggcttttgatggtcttag

SEQ ID NO: 74214 - DNA, 20 bp, synthetic construct
  misc_feature 1..20: note = chemically synthesized
  source 1..20: mol_type = other DNA
aaggtgacaatttctgccaa

SEQ ID NO: 74215 - DNA, 20 bp, synthetic construct
  misc_feature 1..20: note = chemically synthesized
  source 1..20: mol_type = other DNA
gccaatcaggatttcaaagc

SEQ ID NO: 74216 - DNA, 20 bp, synthetic construct
  misc_feature 1..20: note = chemically synthesized
  source 1..20: mol_type = other DNA
aaatctaaaacaatgctaat

SEQ ID NO: 74217 - DNA, 20 bp, synthetic construct
  misc_feature 1..20: note = chemically synthesized
  source 1..20: mol_type = other DNA
ctaacagccaagtcaaatct

SEQ ID NO: 74218 - DNA, 20 bp, synthetic construct
  misc_feature 1..20: note = chemically synthesized
  source 1..20: mol_type = other DNA
tattttaaagacgtcttttc

SEQ ID NO: 74219 - DNA, 20 bp, synthetic construct
  misc_feature 1..20: note = chemically synthesized
  source 1..20: mol_type = other DNA
tacacgtgtgcctagatcct

SEQ ID NO: 74220 - DNA, 20 bp, synthetic construct
  misc_feature 1..20: note = chemically synthesized
  source 1..20: mol_type = other DNA
tgtgcctagatcctcattgc

SEQ ID NO: 74221 - DNA, 20 bp, synthetic construct
  misc_feature 1..20: note = chemically synthesized
  source 1..20: mol_type = other DNA
cgtgtgtgagaataatcaga

SEQ ID NO: 74222 - DNA, 20 bp, synthetic construct
  misc_feature 1..20: note = chemically synthesized
  source 1..20: mol_type = other DNA
tgataactagaaatagagga

SEQ ID NO: 74223 - DNA, 20 bp, synthetic construct
  misc_feature 1..20: note = chemically synthesized
  source 1..20: mol_type = other DNA
acctaaattttatttcattt

SEQ ID NO: 74224 - DNA, 20 bp, synthetic construct
  misc_feature 1..20: note = chemically synthesized
  source 1..20: mol_type = other DNA
tttattttattttgtgtaat

SEQ ID NO: 74225 - DNA, 20 bp, synthetic construct
  misc_feature 1..20: note = chemically synthesized
  source 1..20: mol_type = other DNA
actttccttactaaaccgac

SEQ ID NO: 74226 - DNA, 20 bp, synthetic construct
  misc_feature 1..20: note = chemically synthesized
  source 1..20: mol_type = other DNA
acatgggtttccaggtaggg

SEQ ID NO: 74227 - DNA, 20 bp, synthetic construct
  misc_feature 1..20: note = chemically synthesized
  source 1..20: mol_type = other DNA
agaccctacgctgacctcat

SEQ ID NO: 74228 - DNA, 20 bp, synthetic construct
  misc_feature 1..20: note = chemically synthesized
  source 1..20: mol_type = other DNA
tcataaatgcttgctacctt

SEQ ID NO: 74229 - DNA, 20 bp, synthetic construct
  misc_feature 1..20: note = chemically synthesized
  source 1..20: mol_type = other DNA
gaagcagaactctgcacttc

SEQ ID NO: 74230 - DNA, 20 bp, synthetic construct
  misc_feature 1..20: note = chemically synthesized
  source 1..20: mol_type = other DNA
gaagagtaaattttagtaaa

SEQ ID NO: 74231 - DNA, 20 bp, synthetic construct
  misc_feature 1..20: note = chemically synthesized
  source 1..20: mol_type = other DNA
aataggaacttgaatcaagg

SEQ ID NO: 74232 - DNA, 20 bp, synthetic construct
  misc_feature 1..20: note = chemically synthesized
  source 1..20: mol_type = other DNA
acccctactttctaagtcac

SEQ ID NO: 74233 - DNA, 20 bp, synthetic construct
  misc_feature 1..20: note = chemically synthesized
  source 1..20: mol_type = other DNA
tttgttcccccagacactct

SEQ ID NO: 74234 - DNA, 20 bp, synthetic construct
  misc_feature 1..20: note = chemically synthesized
  source 1..20: mol_type = other DNA
gttaacctcctatttgacac

SEQ ID NO: 74235 - DNA, 20 bp, synthetic construct
  misc_feature 1..20: note = chemically synthesized
  source 1..20: mol_type = other DNA
tttgactgcattaagaggtc

SEQ ID NO: 74236 - DNA, 20 bp, synthetic construct
  misc_feature 1..20: note = chemically synthesized
  source 1..20: mol_type = other DNA
gaggtctctagttttttatc

SEQ ID NO: 74237 - DNA, 20 bp, synthetic construct
  misc_feature 1..20: note = chemically synthesized
  source 1..20: mol_type = other DNA
agtaactaatgcacagagca

SEQ ID NO: 74238 - DNA, 20 bp, synthetic construct
  misc_feature 1..20: note = chemically synthesized
  source 1..20: mol_type = other DNA
tattttttcttttcttacca

SEQ ID NO: 74239 - DNA, 20 bp, synthetic construct
  misc_feature 1..20: note = chemically synthesized
  source 1..20: mol_type = other DNA
ttaatccaaataaggagaag

SEQ ID NO: 74240 - DNA, 20 bp, synthetic construct
  misc_feature 1..20: note = chemically synthesized
  source 1..20: mol_type = other DNA
agatatgcttagaaccgagg

SEQ ID NO: 74241 - DNA, 20 bp, synthetic construct
  misc_feature 1..20: note = chemically synthesized
  source 1..20: mol_type = other DNA
aattgggaaaacgatcttca

SEQ ID NO: 74242 - DNA, 20 bp, synthetic construct
  misc_feature 1..20: note = chemically synthesized
  source 1..20: mol_type = other DNA
tcttcaatatgcttaccaag

SEQ ID NO: 74243 - DNA, 20 bp, synthetic construct
  misc_feature 1..20: note = chemically synthesized
  source 1..20: mol_type = other DNA
gtaaatacacttgcaaagga

SEQ ID NO: 74244 - DNA, 20 bp, synthetic construct
  misc_feature 1..20: note = chemically synthesized
  source 1..20: mol_type = other DNA
tatatcttagagggagggct

SEQ ID NO: 74245 - DNA, 20 bp, synthetic construct
  misc_feature 1..20: note = chemically synthesized
  source 1..20: mol_type = other DNA
aaagtcagggcagagccatc

SEQ ID NO: 74246 - DNA, 20 bp, synthetic construct
  misc_feature 1..20: note = chemically synthesized
  source 1..20: mol_type = other DNA
cagagccatctattgcttac

SEQ ID NO: 74247 - DNA, 20 bp, synthetic construct
  misc_feature 1..20: note = chemically synthesized
  source 1..20: mol_type = other DNA
gttggtatcaaggttacaag

SEQ ID NO: 74248 - DNA, 20 bp, synthetic construct
  misc_feature 1..20: note = chemically synthesized
  source 1..20: mol_type = other DNA
tgtggagacagagaagactc

SEQ ID NO: 74249 - DNA, 20 bp, synthetic construct
  misc_feature 1..20: note = chemically synthesized
  source 1..20: mol_type = other DNA
aacttcagggtgagtctatg

SEQ ID NO: 74250 - DNA, 20 bp, synthetic construct
  misc_feature 1..20: note = chemically synthesized
  source 1..20: mol_type = other DNA
gggtgagtctatgggacgct

SEQ ID NO: 74251 - DNA, 20 bp, synthetic construct
  misc_feature 1..20: note = chemically synthesized
  source 1..20: mol_type = other DNA
gaaggggataagtaacaggg

SEQ ID NO: 74252 - DNA, 20 bp, synthetic construct
  misc_feature 1..20: note = chemically synthesized
  source 1..20: mol_type = other DNA
gtttagaatgggaaacagac

SEQ ID NO: 74253 - DNA, 20 bp, synthetic construct
  misc_feature 1..20: note = chemically synthesized
  source 1..20: mol_type = other DNA
catcagtgtggaagtctcag

SEQ ID NO: 74254 - DNA, 20 bp, synthetic construct
  misc_feature 1..20: note = chemically synthesized
  source 1..20: mol_type = other DNA
tgtggaagtctcaggatcgt

SEQ ID NO: 74255 - DNA, 20 bp, synthetic construct
  misc_feature 1..20: note = chemically synthesized
  source 1..20: mol_type = other DNA
ttttatttgctgttcataac

SEQ ID NO: 74256 - DNA, 20 bp, synthetic construct
  misc_feature 1..20: note = chemically synthesized
  source 1..20: mol_type = other DNA
tgttcataacaattgttttc

SEQ ID NO: 74257 - DNA, 20 bp, synthetic construct
  misc_feature 1..20: note = chemically synthesized
  source 1..20: mol_type = other DNA
attgttttcttttgtttaat

SEQ ID NO: 74258 - DNA, 20 bp, synthetic construct
  misc_feature 1..20: note = chemically synthesized
  source 1..20: mol_type = other DNA
cattactatttggaatatat

SEQ ID NO: 74259 - DNA, 20 bp, synthetic construct
  misc_feature 1..20: note = chemically synthesized
  source 1..20: mol_type = other DNA
catatttatgggttaaagtg

SEQ ID NO: 74260 - DNA, 20 bp, synthetic construct
  misc_feature 1..20: note = chemically synthesized
  source 1..20: mol_type = other DNA
tttgcatttgtaattttaaa

SEQ ID NO: 74261 - DNA, 20 bp, synthetic construct
  misc_feature 1..20: note = chemically synthesized
  source 1..20: mol_type = other DNA
tttcttcttttaatatactt

SEQ ID NO: 74262 - DNA, 20 bp, synthetic construct
  misc_feature 1..20: note = chemically synthesized
  source 1..20: mol_type = other DNA
tataaattgtaactgatgta

SEQ ID NO: 74263 - DNA, 20 bp, synthetic construct
  misc_feature 1..20: note = chemically synthesized
  source 1..20: mol_type = other DNA
cagctacaatccagctacca

SEQ ID NO: 74264 - DNA, 20 bp, synthetic construct
  misc_feature 1..20: note = chemically synthesized
  source 1..20: mol_type = other DNA
tattttatggttgggataag

SEQ ID NO: 74265 - DNA, 20 bp, synthetic construct
  misc_feature 1..20: note = chemically synthesized
  source 1..20: mol_type = other DNA
tggcccacaagtatcactaa

SEQ ID NO: 74266 - DNA, 20 bp, synthetic construct
  misc_feature 1..20: note = chemically synthesized
  source 1..20: mol_type = other DNA
attatgaagggccttgagca

SEQ ID NO: 74267 - DNA, 20 bp, synthetic construct
  misc_feature 1..20: note = chemically synthesized
  source 1..20: mol_type = other DNA
tgccttattcatccctcaga

SEQ ID NO: 74268 - DNA, 20 bp, synthetic construct
  misc_feature 1..20: note = chemically synthesized
  source 1..20: mol_type = other DNA
cctcagaaaaggattcaagt

SEQ ID NO: 74269 - DNA, 20 bp, synthetic construct
  misc_feature 1..20: note = chemically synthesized
  source 1..20: mol_type = other DNA
agaaaaggattcaagtagag

SEQ ID NO: 74270 - DNA, 20 bp, synthetic construct
  misc_feature 1..20: note = chemically synthesized
  source 1..20: mol_type = other DNA
tagaggcttgatttggaggt

SEQ ID NO: 74271 - DNA, 20 bp, synthetic construct
  misc_feature 1..20: note = chemically synthesized
  source 1..20: mol_type = other DNA
atgctgtattttacattact

SEQ ID NO: 74272 - DNA, 20 bp, synthetic construct
  misc_feature 1..20: note = chemically synthesized
  source 1..20: mol_type = other DNA
tgaatgtcttttcactaccc

SEQ ID NO: 74273 - DNA, 20 bp, synthetic construct
  misc_feature 1..20: note = chemically synthesized
  source 1..20: mol_type = other DNA
gccttgactccactcagttc

SEQ ID NO: 74274 - DNA, 20 bp, synthetic construct
  misc_feature 1..20: note = chemically synthesized
  source 1..20: mol_type = other DNA
tttcccctgaagtgttcctt

SEQ ID NO: 74275 - DNA, 20 bp, synthetic construct
  misc_feature 1..20: note = chemically synthesized
  source 1..20: mol_type = other DNA
ccttccatgttttacggcga

SEQ ID NO: 74276 - DNA, 20 bp, synthetic construct
  misc_feature 1..20: note = chemically synthesized
  source 1..20: mol_type = other DNA
gaagaaggaaaaacaggggt

SEQ ID NO: 74277 - DNA, 20 bp, synthetic construct
  misc_feature 1..20: note = chemically synthesized
  source 1..20: mol_type = other DNA
ggaactatcactctttcaca

SEQ ID NO: 74278 - DNA, 20 bp, synthetic construct
  misc_feature 1..20: note = chemically synthesized
  source 1..20: mol_type = other DNA
cacagtctgctttggaagga

SEQ ID NO: 74279 - DNA, 20 bp, synthetic construct
  misc_feature 1..20: note = chemically synthesized
  source 1..20: mol_type = other DNA
ggactgagaagaatttgaaa

SEQ ID NO: 74280 - DNA, 20 bp, synthetic construct
  misc_feature 1..20: note = chemically synthesized
  source 1..20: mol_type = other DNA
gaatttgaaaggcggctttt

SEQ ID NO: 74281 - DNA, 20 bp, synthetic construct
  misc_feature 1..20: note = chemically synthesized
  source 1..20: mol_type = other DNA
ggaagtcccattcttcctca

SEQ ID NO: 74282 - DNA, 20 bp, synthetic construct
  misc_feature 1..20: note = chemically synthesized
  source 1..20: mol_type = other DNA
cccattcttcctcaggatgt

SEQ ID NO: 74283 - DNA, 20 bp, synthetic construct
  misc_feature 1..20: note = chemically synthesized
  source 1..20: mol_type = other DNA
ctcccttatcatgtccctta

SEQ ID NO: 74284 - DNA, 20 bp, synthetic construct
  misc_feature 1..20: note = chemically synthesized
  source 1..20: mol_type = other DNA
caatacctaggtaggtagat

SEQ ID NO: 74285 - DNA, 20 bp, synthetic construct
  misc_feature 1..20: note = chemically synthesized
  source 1..20: mol_type = other DNA
tcaaattctgaatctagttg

SEQ ID NO: 74286 - DNA, 20 bp, synthetic construct
  misc_feature 1..20: note = chemically synthesized
  source 1..20: mol_type = other DNA
aattctaatattcacgttgc

SEQ ID NO: 74287 - DNA, 20 bp, synthetic construct
  misc_feature 1..20: note = chemically synthesized
  source 1..20: mol_type = other DNA
ccaaaatatataagaaacac

SEQ ID NO: 74288 - DNA, 20 bp, synthetic construct
  misc_feature 1..20: note = chemically synthesized
  source 1..20: mol_type = other DNA
atggaaacagacagtagagg

SEQ ID NO: 74289 - DNA, 20 bp, synthetic construct
  misc_feature 1..20: note = chemically synthesized
  source 1..20: mol_type = other DNA
tatttaaaatttgcaaagag

SEQ ID NO: 74290 - DNA, 20 bp, synthetic construct
  misc_feature 1..20: note = chemically synthesized
  source 1..20: mol_type = other DNA
gatttttttttttttttaga

SEQ ID NO: 74291 - DNA, 20 bp, synthetic construct
  misc_feature 1..20: note = chemically synthesized
  source 1..20: mol_type = other DNA
tgcctcagcctcccgagtag

SEQ ID NO: 74292 - DNA, 20 bp, synthetic construct
  misc_feature 1..20: note = chemically synthesized
  source 1..20: mol_type = other DNA
ttttgtatttttagtagaga

SEQ ID NO: 74293 - DNA, 20 bp, synthetic construct
  misc_feature 1..20: note = chemically synthesized
  source 1..20: mol_type = other DNA
tgcctcggccacccaaaggg

SEQ ID NO: 74294 - DNA, 20 bp, synthetic construct
  misc_feature 1..20: note = chemically synthesized
  source 1..20: mol_type = other DNA
gtgagataatgggtatgtta

SEQ ID NO: 74295 - DNA, 20 bp, synthetic construct
  misc_feature 1..20: note = chemically synthesized
  source 1..20: mol_type = other DNA
gataatgggtatgttaatta

SEQ ID NO: 74296 - DNA, 20 bp, synthetic construct
  misc_feature 1..20: note = chemically synthesized
  source 1..20: mol_type = other DNA
aaaaataaaaaaatgcatct

SEQ ID NO: 74297 - DNA, 20 bp, synthetic construct
  misc_feature 1..20: note = chemically synthesized
  source 1..20: mol_type = other DNA
cttgatgattagaattgcat

SEQ ID NO: 74298 - DNA, 20 bp, synthetic construct
  misc_feature 1..20: note = chemically synthesized
  source 1..20: mol_type = other DNA
tcagatacaaatatccattt

SEQ ID NO: 74299 - DNA, 20 bp, synthetic construct
  misc_feature 1..20: note = chemically synthesized
  source 1..20: mol_type = other DNA
tatatattttagatattttg

SEQ ID NO: 74300 - DNA, 20 bp, synthetic construct
  misc_feature 1..20: note = chemically synthesized
  source 1..20: mol_type = other DNA
tattttgtatagttttactc

SEQ ID NO: 74301 - DNA, 20 bp, synthetic construct
  misc_feature 1..20: note = chemically synthesized
  source 1..20: mol_type = other DNA
gttattattaaatagtgaag

SEQ ID NO: 74302 - DNA, 20 bp, synthetic construct
  misc_feature 1..20: note = chemically synthesized
  source 1..20: mol_type = other DNA
aatgtttacacttatgtaca

SEQ ID NO: 74303 - DNA, 20 bp, synthetic construct
  misc_feature 1..20: note = chemically synthesized
  source 1..20: mol_type = other DNA
acttatgtacaaaatgtttt

SEQ ID NO: 74304 - DNA, 20 bp, synthetic construct
  misc_feature 1..20: note = chemically synthesized
  source 1..20: mol_type = other DNA
cttcatttctaacattctct

SEQ ID NO: 74305 - DNA, 20 bp, synthetic construct
  misc_feature 1..20: note = chemically synthesized
  source 1..20: mol_type = other DNA
tctaagtttattctattttt

SEQ ID NO: 74306 - DNA, 20 bp, synthetic construct
  misc_feature 1..20: note = chemically synthesized
  source 1..20: mol_type = other DNA
gctggaaatacattgttact

SEQ ID NO: 74307 - DNA, 20 bp, synthetic construct
  misc_feature 1..20: note = chemically synthesized
  source 1..20: mol_type = other DNA
ttacttttggtttatctaaa

SEQ ID NO: 74308 - DNA, 20 bp, synthetic construct
  misc_feature 1..20: note = chemically synthesized
  source 1..20: mol_type = other DNA
aataatgtgatatataaaaa

SEQ ID NO: 74309 - DNA, 20 bp, synthetic construct
  misc_feature 1..20: note = chemically synthesized
  source 1..20: mol_type = other DNA
ataaaaatatagcttttaaa

SEQ ID NO: 74310 - DNA, 20 bp, synthetic construct
  misc_feature 1..20: note = chemically synthesized
  source 1..20: mol_type = other DNA
tttttgaaaagagtaaagtg

SEQ ID NO: 74311 - DNA, 20 bp, synthetic construct
  misc_feature 1..20: note = chemically synthesized
  source 1..20: mol_type = other DNA
tgcttaactgcatataccac

SEQ ID NO: 74312 - DNA, 20 bp, synthetic construct
  misc_feature 1..20: note = chemically synthesized
  source 1..20: mol_type = other DNA
ttgggaggctgaggcaggag

SEQ ID NO: 74313 - DNA, 20 bp, synthetic construct
  misc_feature 1..20: note = chemically synthesized
  source 1..20: mol_type = other DNA
gaggcagaggttgcagtgag

SEQ ID NO: 74314 - DNA, 20 bp, synthetic construct
  misc_feature 1..20: note = chemically synthesized
  source 1..20: mol_type = other DNA
tcgtgagtgacgcagaagac

SEQ ID NO: 74315 - DNA, 20 bp, synthetic construct
  misc_feature 1..20: note = chemically synthesized
  source 1..20: mol_type = other DNA
cctaatactgcgctcttcca

SEQ ID NO: 74316 - DNA, 20 bp, synthetic construct
  misc_feature 1..20: note = chemically synthesized
  source 1..20: mol_type = other DNA
agcttaacaaatggcacacc

SEQ ID NO: 74317 - DNA, 20 bp, synthetic construct
  misc_feature 1..20: note = chemically synthesized
  source 1..20: mol_type = other DNA
ggaggggtgcccaccattgt

SEQ ID NO: 74318 - DNA, 20 bp, synthetic construct
  misc_feature 1..20: note = chemically synthesized
  source 1..20: mol_type = other DNA
agacttaaatgtccctgtct

SEQ ID NO: 74319 - DNA, 20 bp, synthetic construct
  misc_feature 1..20: note = chemically synthesized
  source 1..20: mol_type = other DNA
gagtagtggttctcccagca

SEQ ID NO: 74320 - DNA, 20 bp, synthetic construct
  misc_feature 1..20: note = chemically synthesized
  source 1..20: mol_type = other DNA
ccgctgttgatacccaggaa

SEQ ID NO: 74321 - DNA, 20 bp, synthetic construct
  misc_feature 1..20: note = chemically synthesized
  source 1..20: mol_type = other DNA
actttgacgagttgagagag

SEQ ID NO: 74322 - DNA, 20 bp, synthetic construct
  misc_feature 1..20: note = chemically synthesized
  source 1..20: mol_type = other DNA
gaatgaaatgaagcatgaag

SEQ ID NO: 74323 - DNA, 20 bp, synthetic construct
  misc_feature 1..20: note = chemically synthesized
  source 1..20: mol_type = other DNA
caactccaagacacataact

SEQ ID NO: 74324 - DNA, 20 bp, synthetic construct
  misc_feature 1..20: note = chemically synthesized
  source 1..20: mol_type = other DNA
gaatttcatatccagccaaa

SEQ ID NO: 74325 - DNA, 20 bp, synthetic construct
  misc_feature 1..20: note = chemically synthesized
  source 1..20: mol_type = other DNA
tttacagacaagcaaatgct

SEQ ID NO: 74326 - DNA, 20 bp, synthetic construct
  misc_feature 1..20: note = chemically synthesized
  source 1..20: mol_type = other DNA
gcaatcctagtctctgataa

SEQ ID NO: 74327 - DNA, 20 bp, synthetic construct
  misc_feature 1..20: note = chemically synthesized
  source 1..20: mol_type = other DNA
atgcacccaatacaggagca

SEQ ID NO: 74328 - DNA, 20 bp, synthetic construct
  misc_feature 1..20: note = chemically synthesized
  source 1..20: mol_type = other DNA
cagtgcaatcaaactagaac

SEQ ID NO: 74329 - DNA, 20 bp, synthetic construct
  misc_feature 1..20: note = chemically synthesized
  source 1..20: mol_type = other DNA
aaaaaatcaatgaatccaga

SEQ ID NO: 74330 - DNA, 20 bp, synthetic construct
  misc_feature 1..20: note = chemically synthesized
  source 1..20: mol_type = other DNA
ctgaaattgaggcaataatt

SEQ ID NO: 74331 - DNA, 20 bp, synthetic construct
  misc_feature 1..20: note = chemically synthesized
  source 1..20: mol_type = other DNA
ccaaaaaaagtccgggacca

SEQ ID NO: 74332 - DNA, 20 bp, synthetic construct
  misc_feature 1..20: note = chemically synthesized
  source 1..20: mol_type = other DNA
aactgatccaccatgatcaa

SEQ ID NO: 74333 - DNA, 20 bp, synthetic construct
  misc_feature 1..20: note = chemically synthesized
  source 1..20: mol_type = other DNA
cagaaccaaagacacaaacc

SEQ ID NO: 74334 - DNA, 20 bp, synthetic construct
  misc_feature 1..20: note = chemically synthesized
  source 1..20: mol_type = other DNA
aggcctttgacaaaattcaa

SEQ ID NO: 74335 - DNA, 20 bp, synthetic construct
  misc_feature 1..20: note = chemically synthesized
  source 1..20: mol_type = other DNA
aaaagaggaagtgaaattgt

SEQ ID NO: 74336 - DNA, 20 bp, synthetic construct
  misc_feature 1..20: note = chemically synthesized
  source 1..20: mol_type = other DNA
attgtccctgtttgcagatg

SEQ ID NO: 74337 - DNA, 20 bp, synthetic construct
  misc_feature 1..20: note = chemically synthesized
  source 1..20: mol_type = other DNA
atgagtgaactcccattcac

SEQ ID NO: 74338 - DNA, 20 bp, synthetic construct
  misc_feature 1..20: note = chemically synthesized
  source 1..20: mol_type = other DNA
tcatactgcccaaggtaatt

SEQ ID NO: 74339 - DNA, 20 bp, synthetic construct
  misc_feature 1..20: note = chemically synthesized
  source 1..20: mol_type = other DNA
gagagaaacaagcaatgggg

SEQ ID NO: 74340 - DNA, 20 bp, synthetic construct
  misc_feature 1..20: note = chemically synthesized
  source 1..20: mol_type = other DNA
ttatacaaaaattaattcaa

SEQ ID NO: 74341 - DNA, 20 bp, synthetic construct
  misc_feature 1..20: note = chemically synthesized
  source 1..20: mol_type = other DNA
aacgggatctaattaaacta

SEQ ID NO: 74342 - DNA, 20 bp, synthetic construct
  misc_feature 1..20: note = chemically synthesized
  source 1..20: mol_type = other DNA
ccattactgggtacataccc

SEQ ID NO: 74343 - DNA, 20 bp, synthetic construct
  misc_feature 1..20: note = chemically synthesized
  source 1..20: mol_type = other DNA
ctataaagacacatgcacac

SEQ ID NO: 74344 - DNA, 20 bp, synthetic construct
  misc_feature 1..20: note = chemically synthesized
  source 1..20: mol_type = other DNA
caaatgtccaacaacgatag

SEQ ID NO: 74345 - DNA, 20 bp, synthetic construct
  misc_feature 1..20: note = chemically synthesized
  source 1..20: mol_type = other DNA
ctttgaaatagacagaaatt

SEQ ID NO: 74346 - DNA, 20 bp, synthetic construct
  misc_feature 1..20: note = chemically synthesized
  source 1..20: mol_type = other DNA
agtcagttaacattccttca

SEQ ID NO: 74347 - DNA, 20 bp, synthetic construct
  misc_feature 1..20: note = chemically synthesized
  source 1..20: mol_type = other DNA
ttctgagagtcttccttctt

SEQ ID NO: 74348 - DNA, 20 bp, synthetic construct
  misc_feature 1..20: note = chemically synthesized
  source 1..20: mol_type = other DNA
agaagtagaaaattttggag

SEQ ID NO: 74349 - DNA, 20 bp, synthetic construct
  misc_feature 1..20: note = chemically synthesized
  source 1..20: mol_type = other DNA
gaggtcaagtcagaggtgaa

SEQ ID NO: 74350 - DNA, 20 bp, synthetic construct
  misc_feature 1..20: note = chemically synthesized
  source 1..20: mol_type = other DNA
gaaagagccaagctgggcac

SEQ ID NO: 74351 - DNA, 20 bp, synthetic construct
  misc_feature 1..20: note = chemically synthesized
  source 1..20: mol_type = other DNA
agtgataggatcacttgagc

SEQ ID NO: 74352 - DNA, 20 bp, synthetic construct
  misc_feature 1..20: note = chemically synthesized
  source 1..20: mol_type = other DNA
cacacagatattaagaacat

SEQ ID NO: 74353 - DNA, 20 bp, synthetic construct
  misc_feature 1..20: note = chemically synthesized
  source 1..20: mol_type = other DNA
aaccccttgcagtgcctcgg

SEQ ID NO: 74354 - DNA, 20 bp, synthetic construct
  misc_feature 1..20: note = chemically synthesized
  source 1..20: mol_type = other DNA
tgcctcggggctgtttctcc

SEQ ID NO: 74355 - DNA, 20 bp, synthetic construct
  misc_feature 1..20: note = chemically synthesized
  source 1..20: mol_type = other DNA
aaggtctcacctgtcttatt

SEQ ID NO: 74356 - DNA, 20 bp, synthetic construct
  misc_feature 1..20: note = chemically synthesized
  source 1..20: mol_type = other DNA
ctcacctgtcttattcagag

SEQ ID NO: 74357 - DNA, 20 bp, synthetic construct
  misc_feature 1..20: note = chemically synthesized
  source 1..20: mol_type = other DNA
attcagagcttggattttgg

SEQ ID NO: 74358 - DNA, 20 bp, synthetic construct
  misc_feature 1..20: note = chemically synthesized
  source 1..20: mol_type = other DNA
ggactagctttttctatttc

SEQ ID NO: 74359 - DNA, 20 bp, synthetic construct
  misc_feature 1..20: note = chemically synthesized
  source 1..20: mol_type = other DNA
agcaaaggaggcatcacaga

SEQ ID NO: 74360 - DNA, 20 bp, synthetic construct
  misc_feature 1..20: note = chemically synthesized
  source 1..20: mol_type = other DNA
ccaggaagttatccatttct

SEQ ID NO: 74361 - DNA, 20 bp, synthetic construct
  misc_feature 1..20: note = chemically synthesized
  source 1..20: mol_type = other DNA
tatccatttcttttagattt

SEQ ID NO: 74362 - DNA, 20 bp, synthetic construct
  misc_feature 1..20: note = chemically synthesized
  source 1..20: mol_type = other DNA
atgtacatagagatgttcat

SEQ ID NO: 74363 - DNA, 20 bp, synthetic construct
  misc_feature 1..20: note = chemically synthesized
  source 1..20: mol_type = other DNA
gagatgttcatagtagtttt

SEQ ID NO: 74364 - DNA, 20 bp, synthetic construct
  misc_feature 1..20: note = chemically synthesized
  source 1..20: mol_type = other DNA
attccctttttcatttctaa

SEQ ID NO: 74365 - DNA, 20 bp, synthetic construct
  misc_feature 1..20: note = chemically synthesized
  source 1..20: mol_type = other DNA
ttaatcttttgaatggtatt

SEQ ID NO: 74366 - DNA, 20 bp, synthetic construct
  misc_feature 1..20: note = chemically synthesized
  source 1..20: mol_type = other DNA
ttgtgttttaatatccttca

SEQ ID NO: 74367 - DNA, 20 bp, synthetic construct
  misc_feature 1..20: note = chemically synthesized
  source 1..20: mol_type = other DNA
tatccttcagttagctttga

SEQ ID NO: 74368 - DNA, 20 bp, synthetic construct
  misc_feature 1..20: note = chemically synthesized
  source 1..20: mol_type = other DNA
ttgtttatttcttgtcttct

SEQ ID NO: 74369 - DNA, 20 bp, synthetic construct
  misc_feature 1..20: note = chemically synthesized
  source 1..20: mol_type = other DNA
tgtcttctgctagatttagg

SEQ ID NO: 74370 - DNA, 20 bp, synthetic construct
  misc_feature 1..20: note = chemically synthesized
  source 1..20: mol_type = other DNA
tgacattaggttgttaattt

SEQ ID NO: 74371 - DNA, 20 bp, synthetic construct
  misc_feature 1..20: note = chemically synthesized
  source 1..20: mol_type = other DNA
acactgtctaagctgtgtcc

SEQ ID NO: 74372 - DNA, 20 bp, synthetic construct
  misc_feature 1..20: note = chemically synthesized
  source 1..20: mol_type = other DNA
tatattgtatctttgttctc

SEQ ID NO: 74373 - DNA, 20 bp, synthetic construct
  misc_feature 1..20: note = chemically synthesized
  source 1..20: mol_type = other DNA
aagaactattttatttttgc

SEQ ID NO: 74374 - DNA, 20 bp, synthetic construct
  misc_feature 1..20: note = chemically synthesized
  source 1..20: mol_type = other DNA
ccaaaattcattcaggagca

SEQ ID NO: 74375 - DNA, 20 bp, synthetic construct
  misc_feature 1..20: note = chemically synthesized
  source 1..20: mol_type = other DNA
gtttaatttccatgtaattg

SEQ ID NO: 74376 - DNA, 20 bp, synthetic construct
  misc_feature 1..20: note = chemically synthesized
  source 1..20: mol_type = other DNA
tttattcctctgtggtctga

SEQ ID NO: 74377 - DNA, 20 bp, synthetic construct
  misc_feature 1..20: note = chemically synthesized
  source 1..20: mol_type = other DNA
ctgtggtctgagagtgattg

SEQ ID NO: 74378 - DNA, 20 bp, synthetic construct
  misc_feature 1..20: note = chemically synthesized
  source 1..20: mol_type = other DNA
gattttttttttgcatttgc

SEQ ID NO: 74379 - DNA, 20 bp, synthetic construct
  misc_feature 1..20: note = chemically synthesized
  source 1..20: mol_type = other DNA
ttttttttgcatttgctgag

SEQ ID NO: 74380 - DNA, 20 bp, synthetic construct
  misc_feature 1..20: note = chemically synthesized
  source 1..20: mol_type = other DNA
agatccatgatgagctctga

SEQ ID NO: 74381 - DNA, 20 bp, synthetic construct
  misc_feature 1..20: note = chemically synthesized
  source 1..20: mol_type = other DNA
aacaaaaaaagccctggaca

SEQ ID NO: 74382 - DNA, 20 bp, synthetic construct
  misc_feature 1..20: note = chemically synthesized
  source 1..20: mol_type = other DNA
tactccaaaaaattgagggg

SEQ ID NO: 74383 - DNA, 20 bp, synthetic construct
  misc_feature 1..20: note = chemically synthesized
  source 1..20: mol_type = other DNA
agctaatccacctcaatcaa

SEQ ID NO: 74384 - DNA, 20 bp, synthetic construct
  misc_feature 1..20: note = chemically synthesized
  source 1..20: mol_type = other DNA
gtaggctttatccctgagaa

SEQ ID NO: 74385 - DNA, 20 bp, synthetic construct
  misc_feature 1..20: note = chemically synthesized
  source 1..20: mol_type = other DNA
cagcatatacaaattgataa

SEQ ID NO: 74386 - DNA, 20 bp, synthetic construct
  misc_feature 1..20: note = chemically synthesized
  source 1..20: mol_type = other DNA
atcatttcaatatgtgcaaa

SEQ ID NO: 74387 - DNA, 20 bp, synthetic construct
  misc_feature 1..20: note = chemically synthesized
  source 1..20: mol_type = other DNA
aagagagaaagtcaaagtat

SEQ ID NO: 74388 - DNA, 20 bp, synthetic construct
  misc_feature 1..20: note = chemically synthesized
  source 1..20: mol_type = other DNA
ccttcagctgataacttcag

SEQ ID NO: 74389 - DNA, 20 bp, synthetic construct
  misc_feature 1..20: note = chemically synthesized
  source 1..20: mol_type = other DNA
gcagttgaaagatctctaca

SEQ ID NO: 74390 - DNA, 20 bp, synthetic construct
  misc_feature 1..20: note = chemically synthesized
  source 1..20: mol_type = other DNA
ccatactgcctagagcaatt

SEQ ID NO: 74391 - DNA, 20 bp, synthetic construct
  misc_feature 1..20: note = chemically synthesized
  source 1..20: mol_type = other DNA
ataactgactaaccgtatgt

SEQ ID NO: 74392 - DNA, 20 bp, synthetic construct
  misc_feature 1..20: note = chemically synthesized
  source 1..20: mol_type = other DNA
atatacacaaataaactcaa

SEQ ID NO: 74393 - DNA, 20 bp, synthetic construct
  misc_feature 1..20: note = chemically synthesized
  source 1..20: mol_type = other DNA
atgcaaaacccaaactataa

SEQ ID NO: 74394 - DNA, 20 bp, synthetic construct
  misc_feature 1..20: note = chemically synthesized
  source 1..20: mol_type = other DNA
attccggacataagcagggg

SEQ ID NO: 74395 - DNA, 20 bp, synthetic construct
  misc_feature 1..20: note = chemically synthesized
  source 1..20: mol_type = other DNA
caaataggatctaattaaaa

SEQ ID NO: 74396 - DNA, 20 bp, synthetic construct
  misc_feature 1..20: note = chemically synthesized
  source 1..20: mol_type = other DNA
gtaaggttgtggagaaaagg

SEQ ID NO: 74397 - DNA, 20 bp, synthetic construct
  misc_feature 1..20: note = chemically synthesized
  source 1..20: mol_type = other DNA
caaaagacactgcagcctaa

SEQ ID NO: 74398 - DNA, 20 bp, synthetic construct
  misc_feature 1..20: note = chemically synthesized
  source 1..20: mol_type = other DNA
ctgtacgacaaacccatgac

SEQ ID NO: 74399 - DNA, 20 bp, synthetic construct
  misc_feature 1..20: note = chemically synthesized
  source 1..20: mol_type = other DNA
catatctttttatagttata

SEQ ID NO: 74400 - DNA, 20 bp, synthetic construct
  misc_feature 1..20: note = chemically synthesized
  source 1..20: mol_type = other DNA
tctttttatagttataatca

SEQ ID NO: 74401 - DNA, 20 bp, synthetic construct
  misc_feature 1..20: note = chemically synthesized
  source 1..20: mol_type = other DNA
tgtttttaagtctaacaaaa

SEQ ID NO: 74402 - DNA, 20 bp, synthetic construct
  misc_feature 1..20: note = chemically synthesized
  source 1..20: mol_type = other DNA
tgcgcattatgaaagtaatt

SEQ ID NO: 74403 - DNA, 20 bp, synthetic construct
  misc_feature 1..20: note = chemically synthesized
  source 1..20: mol_type = other DNA
attctctgtccttctttgta

SEQ ID NO: 74404 - DNA, 20 bp, synthetic construct
  misc_feature 1..20: note = chemically synthesized
  source 1..20: mol_type = other DNA
ttttaaaattttttgtagag

SEQ ID NO: 74405 - DNA, 20 bp, synthetic construct
  misc_feature 1..20: note = chemically synthesized
  source 1..20: mol_type = other DNA
cgttctccctccggcctcgg

SEQ ID NO: 74406 - DNA, 20 bp, synthetic construct
  misc_feature 1..20: note = chemically synthesized
  source 1..20: mol_type = other DNA
gtgattacaggtgtgagcca

SEQ ID NO: 74407 - DNA, 20 bp, synthetic construct
  misc_feature 1..20: note = chemically synthesized
  source 1..20: mol_type = other DNA
aactaattcaaaaggtacta

SEQ ID NO: 74408 - DNA, 20 bp, synthetic construct
  misc_feature 1..20: note = chemically synthesized
  source 1..20: mol_type = other DNA
aggagagggtagaagtaaag

SEQ ID NO: 74409 - DNA, 20 bp, synthetic construct
  misc_feature 1..20: note = chemically synthesized
  source 1..20: mol_type = other DNA
gagggtagaagtaaagctgg

SEQ ID NO: 74410 - DNA, 20 bp, synthetic construct
  misc_feature 1..20: note = chemically synthesized
  source 1..20: mol_type = other DNA
gagggcattaggtcagactt

SEQ ID NO: 74411 - DNA, 20 bp, synthetic construct
  misc_feature 1..20: note = chemically synthesized
  source 1..20: mol_type = other DNA
ccacttgctcattctggatg

SEQ ID NO: 74412 - DNA, 20 bp, synthetic construct
  misc_feature 1..20: note = chemically synthesized
  source 1..20: mol_type = other DNA
gctcattctggatggcagga

SEQ ID NO: 74413 - DNA, 20 bp, synthetic construct
  misc_feature 1..20: note = chemically synthesized
  source 1..20: mol_type = other DNA
gctttatatttccctaccat

SEQ ID NO: 74414 - DNA, 20 bp, synthetic construct
  misc_feature 1..20: note = chemically synthesized
  source 1..20: mol_type = other DNA
tattagcttgtgcacttaaa

SEQ ID NO: 74415 - DNA, 20 bp, synthetic construct
  misc_feature 1..20: note = chemically synthesized
  source 1..20: mol_type = other DNA
atttagtggggtgtgggact

SEQ ID NO: 74416 - DNA, 20 bp, synthetic construct
  misc_feature 1..20: note = chemically synthesized
  source 1..20: mol_type = other DNA
ctcattctgttccagttgag

SEQ ID NO: 74417 - DNA, 20 bp, synthetic construct
  misc_feature 1..20: note = chemically synthesized
  source 1..20: mol_type = other DNA
ttctgttccagttgaggcca

SEQ ID NO: 74418 - DNA, 20 bp, synthetic construct
  misc_feature 1..20: note = chemically synthesized
  source 1..20: mol_type = other DNA
caaaaagtattttcatttat

SEQ ID NO: 74419 - DNA, 20 bp, synthetic construct
  misc_feature 1..20: note = chemically synthesized
  source 1..20: mol_type = other DNA
tggaatgataaagagtgagc

SEQ ID NO: 74420 - DNA, 20 bp, synthetic construct
  misc_feature 1..20: note = chemically synthesized
  source 1..20: mol_type = other DNA
actgagatattacattctta

SEQ ID NO: 74421 - DNA, 20 bp, synthetic construct
  misc_feature 1..20: note = chemically synthesized
  source 1..20: mol_type = other DNA
tcttaaatggctttagtcaa

SEQ ID NO: 74422 - DNA, 20 bp, synthetic construct
  misc_feature 1..20: note = chemically synthesized
  source 1..20: mol_type = other DNA
aatttcaccactatataaac

SEQ ID NO: 74423 - DNA, 20 bp, synthetic construct
  misc_feature 1..20: note = chemically synthesized
  source 1..20: mol_type = other DNA
atggtgctctctggtacatc

SEQ ID NO: 74424 - DNA, 20 bp, synthetic construct
  misc_feature 1..20: note = chemically synthesized
  source 1..20: mol_type = other DNA
tcagctagtaagtagctgag

SEQ ID NO: 74425 - DNA, 20 bp, synthetic construct
  misc_feature 1..20: note = chemically synthesized
  source 1..20: mol_type = other DNA
acatgaaaaaaaaatgttac

SEQ ID NO: 74426 - DNA, 20 bp, synthetic construct
  misc_feature 1..20: note = chemically synthesized
  source 1..20: mol_type = other DNA
gtaaattatcctccacttct

SEQ ID NO: 74427 - DNA, 20 bp, synthetic construct
  misc_feature 1..20: note = chemically synthesized
  source 1..20: mol_type = other DNA
ccacttctttcagtttcctc

SEQ ID NO: 74428 - DNA, 20 bp, synthetic construct
  misc_feature 1..20: note = chemically synthesized
  source 1..20: mol_type = other DNA
caaacttgatgaatggttca

SEQ ID NO: 74429 - DNA, 20 bp, synthetic construct
  misc_feature 1..20: note = chemically synthesized
  source 1..20: mol_type = other DNA
gaattattatcataaatact

SEQ ID NO: 74430 - DNA, 20 bp, synthetic construct
  misc_feature 1..20: note = chemically synthesized
  source 1..20: mol_type = other DNA
cttttgagtggcagataatg

SEQ ID NO: 74431 - DNA, 20 bp, synthetic construct
  misc_feature 1..20: note = chemically synthesized
  source 1..20: mol_type = other DNA
atacctaagaaatgacaaaa

SEQ ID NO: 74432 - DNA, 20 bp, synthetic construct
  misc_feature 1..20: note = chemically synthesized
  source 1..20: mol_type = other DNA
agctaattactgcgttcctt

SEQ ID NO: 74433 - DNA, 20 bp, synthetic construct
  misc_feature 1..20: note = chemically synthesized
  source 1..20: mol_type = other DNA
tactctcaggtccataagtt

SEQ ID NO: 74434 - DNA, 20 bp, synthetic construct
  misc_feature 1..20: note = chemically synthesized
  source 1..20: mol_type = other DNA
tcaggtccataagttaatag

SEQ ID NO: 74435 - DNA, 20 bp, synthetic construct
  misc_feature 1..20: note = chemically synthesized
  source 1..20: mol_type = other DNA
tttcttcacctatagccaca

SEQ ID NO: 74436 - DNA, 20 bp, synthetic construct
  misc_feature 1..20: note = chemically synthesized
  source 1..20: mol_type = other DNA
agtcagcttctcaaagacaa

SEQ ID NO: 74437 - DNA, 20 bp, synthetic construct
  misc_feature 1..20: note = chemically synthesized
  source 1..20: mol_type = other DNA
agctactaatttctccacgc

SEQ ID NO: 74438 - DNA, 20 bp, synthetic construct
  misc_feature 1..20: note = chemically synthesized
  source 1..20: mol_type = other DNA
aaaaacgatacaaagggtat

SEQ ID NO: 74439 - DNA, 20 bp, synthetic construct
  misc_feature 1..20: note = chemically synthesized
  source 1..20: mol_type = other DNA
cattctaggacaatggttcc

SEQ ID NO: 74440 - DNA, 20 bp, synthetic construct
  misc_feature 1..20: note = chemically synthesized
  source 1..20: mol_type = other DNA
gagagacatgcctggctcac

SEQ ID NO: 74441 - DNA, 20 bp, synthetic construct
  misc_feature 1..20: note = chemically synthesized
  source 1..20: mol_type = other DNA
atccaaaagtacatagctcc

SEQ ID NO: 74442 - DNA, 20 bp, synthetic construct
  misc_feature 1..20: note = chemically synthesized
  source 1..20: mol_type = other DNA
tctagagaattctaaaaatc

SEQ ID NO: 74443 - DNA, 20 bp, synthetic construct
  misc_feature 1..20: note = chemically synthesized
  source 1..20: mol_type = other DNA
tttatttacataaataaaag

SEQ ID NO: 74444 - DNA, 20 bp, synthetic construct
  misc_feature 1..20: note = chemically synthesized
  source 1..20: mol_type = other DNA
agcaaagtggtcatgttagt

SEQ ID NO: 74445 - DNA, 20 bp, synthetic construct
  misc_feature 1..20: note = chemically synthesized
  source 1..20: mol_type = other DNA
tgtctactcttttgtattcc

SEQ ID NO: 74446 - DNA, 20 bp, synthetic construct
  misc_feature 1..20: note = chemically synthesized
  source 1..20: mol_type = other DNA
atcctagcaataatatcctg

SEQ ID NO: 74447 - DNA, 20 bp, synthetic construct
  misc_feature 1..20: note = chemically synthesized
  source 1..20: mol_type = other DNA
ttgggtctctccggttgtat

SEQ ID NO: 74448 - DNA, 20 bp, synthetic construct
  misc_feature 1..20: note = chemically synthesized
  source 1..20: mol_type = other DNA
gtagtatataaattcaaaat

SEQ ID NO: 74449 - DNA, 20 bp, synthetic construct
  misc_feature 1..20: note = chemically synthesized
  source 1..20: mol_type = other DNA
gtaatattcatactttttct

SEQ ID NO: 74450 - DNA, 20 bp, synthetic construct
  misc_feature 1..20: note = chemically synthesized
  source 1..20: mol_type = other DNA
agtgagagatgttctggaga

SEQ ID NO: 74451 - DNA, 20 bp, synthetic construct
  misc_feature 1..20: note = chemically synthesized
  source 1..20: mol_type = other DNA
ttctggagatggtgattata

SEQ ID NO: 74452 - DNA, 20 bp, synthetic construct
  misc_feature 1..20: note = chemically synthesized
  source 1..20: mol_type = other DNA
ctagcagcctaggtatgggt

SEQ ID NO: 74453 - DNA, 20 bp, synthetic construct
  misc_feature 1..20: note = chemically synthesized
  source 1..20: mol_type = other DNA
ggacaacttaaaatatgtgt

SEQ ID NO: 74454 - DNA, 20 bp, synthetic construct
  misc_feature 1..20: note = chemically synthesized
  source 1..20: mol_type = other DNA
taaggatgaattttttaaaa

SEQ ID NO: 74455 - DNA, 20 bp, synthetic construct
  misc_feature 1..20: note = chemically synthesized
  source 1..20: mol_type = other DNA
tcttcagttagactagagga

SEQ ID NO: 74456 - DNA, 20 bp, synthetic construct
  misc_feature 1..20: note = chemically synthesized
  source 1..20: mol_type = other DNA
tcaccacaaaaaaagttgga

SEQ ID NO: 74457 - DNA, 20 bp, synthetic construct
  misc_feature 1..20: note = chemically synthesized
  source 1..20: mol_type = other DNA
ggaaggtgattcatatgcta

SEQ ID NO: 74458 - DNA, 20 bp, synthetic construct
  misc_feature 1..20: note = chemically synthesized
  source 1..20: mol_type = other DNA
ttatttgccaggcaaataaa

SEQ ID NO: 74459 - DNA, 20 bp, synthetic construct
  misc_feature 1..20: note = chemically synthesized
  source 1..20: mol_type = other DNA
tttgtaacctccttttactt

SEQ ID NO: 74460 - DNA, 20 bp, synthetic construct
  misc_feature 1..20: note = chemically synthesized
  source 1..20: mol_type = other DNA
aacctccttttacttttctg

SEQ ID NO: 74461 - DNA, 20 bp, synthetic construct
  misc_feature 1..20: note = chemically synthesized
  source 1..20: mol_type = other DNA
cttggttttcttctttcatt

SEQ ID NO: 74462 - DNA, 20 bp, synthetic construct
  misc_feature 1..20: note = chemically synthesized
  source 1..20: mol_type = other DNA
tcttctttcattcagtgttt

SEQ ID NO: 74463 - DNA, 20 bp, synthetic construct
  misc_feature 1..20: note = chemically synthesized
  source 1..20: mol_type = other DNA
caaatacactatcttgcatg

SEQ ID NO: 74464 - DNA, 20 bp, synthetic construct
  misc_feature 1..20: note = chemically synthesized
  source 1..20: mol_type = other DNA
accatgtcatatatttttta

SEQ ID NO: 74465 - DNA, 20 bp, synthetic construct
  misc_feature 1..20: note = chemically synthesized
  source 1..20: mol_type = other DNA
atacaataatctattacatt

SEQ ID NO: 74466 - DNA, 20 bp, synthetic construct
  misc_feature 1..20: note = chemically synthesized
  source 1..20: mol_type = other DNA
cactatatatttgtatctat

SEQ ID NO: 74467 - DNA, 20 bp, synthetic construct
  misc_feature 1..20: note = chemically synthesized
  source 1..20: mol_type = other DNA
actggaaatttaagcctact

SEQ ID NO: 74468 - DNA, 20 bp, synthetic construct
  misc_feature 1..20: note = chemically synthesized
  source 1..20: mol_type = other DNA
cctacttcaggtttgtggta

SEQ ID NO: 74469 - DNA, 20 bp, synthetic construct
  misc_feature 1..20: note = chemically synthesized
  source 1..20: mol_type = other DNA
caagactcttgagggcctga

SEQ ID NO: 74470 - DNA, 20 bp, synthetic construct
  misc_feature 1..20: note = chemically synthesized
  source 1..20: mol_type = other DNA
tcactgaagtagggagggaa

SEQ ID NO: 74471 - DNA, 20 bp, synthetic construct
  misc_feature 1..20: note = chemically synthesized
  source 1..20: mol_type = other DNA
tccactgccttggcaaatag

SEQ ID NO: 74472 - DNA, 20 bp, synthetic construct
  misc_feature 1..20: note = chemically synthesized
  source 1..20: mol_type = other DNA
acagaaaaaaaaaaaaaacc

SEQ ID NO: 74473 - DNA, 20 bp, synthetic construct
  misc_feature 1..20: note = chemically synthesized
  source 1..20: mol_type = other DNA
agagatttctgcatatgtag

SEQ ID NO: 74474 - DNA, 20 bp, synthetic construct
  misc_feature 1..20: note = chemically synthesized
  source 1..20: mol_type = other DNA
aatgacctggttattataat

SEQ ID NO: 74475 - DNA, 20 bp, synthetic construct
  misc_feature 1..20: note = chemically synthesized
  source 1..20: mol_type = other DNA
cctggttattataatcacag

SEQ ID NO: 74476 - DNA, 20 bp, synthetic construct
  misc_feature 1..20: note = chemically synthesized
  source 1..20: mol_type = other DNA
tcttggaaaactgtaaatct

SEQ ID NO: 74477 - DNA, 20 bp, synthetic construct
  misc_feature 1..20: note = chemically synthesized
  source 1..20: mol_type = other DNA
tggcacacctgacatattga

SEQ ID NO: 74478 - DNA, 20 bp, synthetic construct
  misc_feature 1..20: note = chemically synthesized
  source 1..20: mol_type = other DNA
tctgaagaagcctgaatgaa

SEQ ID NO: 74479 - DNA, 20 bp, synthetic construct
  misc_feature 1..20: note = chemically synthesized
  source 1..20: mol_type = other DNA
gcctgaatgaaagtagattt

SEQ ID NO: 74480 - DNA, 20 bp, synthetic construct
  misc_feature 1..20: note = chemically synthesized
  source 1..20: mol_type = other DNA
tctgaagaaacctgcatgaa

SEQ ID NO: 74481 - DNA, 20 bp, synthetic construct
  misc_feature 1..20: note = chemically synthesized
  source 1..20: mol_type = other DNA
tgcctcagtctcccaagtaa

SEQ ID NO: 74482 - DNA, 20 bp, synthetic construct
  misc_feature 1..20: note = chemically synthesized
  source 1..20: mol_type = other DNA
ccatgcccagctaattattt

SEQ ID NO: 74483 - DNA, 20 bp, synthetic construct
  misc_feature 1..20: note = chemically synthesized
  source 1..20: mol_type = other DNA
tttttgtgttttagtagaga

SEQ ID NO: 74484 - DNA, 20 bp, synthetic construct
  misc_feature 1..20: note = chemically synthesized
  source 1..20: mol_type = other DNA
tgcctcggcctcccaaagtg

SEQ ID NO: 74485 - DNA, 20 bp, synthetic construct
  misc_feature 1..20: note = chemically synthesized
  source 1..20: mol_type = other DNA
caggctggaaatgagagaaa

SEQ ID NO: 74486 - DNA, 20 bp, synthetic construct
  misc_feature 1..20: note = chemically synthesized
  source 1..20: mol_type = other DNA
agcaagatccctggagcagc

SEQ ID NO: 74487 - DNA, 20 bp, synthetic construct
  misc_feature 1..20: note = chemically synthesized
  source 1..20: mol_type = other DNA
agaaaagactaagtgtacac

SEQ ID NO: 74488 - DNA, 20 bp, synthetic construct
  misc_feature 1..20: note = chemically synthesized
  source 1..20: mol_type = other DNA
ttcatattatctttatatct

SEQ ID NO: 74489 - DNA, 20 bp, synthetic construct
  misc_feature 1..20: note = chemically synthesized
  source 1..20: mol_type = other DNA
gatcctgagacatgcatgta

SEQ ID NO: 74490 - DNA, 20 bp, synthetic construct
  misc_feature 1..20: note = chemically synthesized
  source 1..20: mol_type = other DNA
ctgagacatgcatgtactta

SEQ ID NO: 74491 - DNA, 20 bp, synthetic construct
  misc_feature 1..20: note = chemically synthesized
  source 1..20: mol_type = other DNA
ggcaggtgagccacgttata

SEQ ID NO: 74492 - DNA, 20 bp, synthetic construct
  misc_feature 1..20: note = chemically synthesized
  source 1..20: mol_type = other DNA
caatgggtaagtgaccatca

SEQ ID NO: 74493 - DNA, 20 bp, synthetic construct
  misc_feature 1..20: note = chemically synthesized
  source 1..20: mol_type = other DNA
catcaaagagttttttcaac

SEQ ID NO: 74494 - DNA, 20 bp, synthetic construct
  misc_feature 1..20: note = chemically synthesized
  source 1..20: mol_type = other DNA
agttttttcaacaaaggttt

SEQ ID NO: 74495 - DNA, 20 bp, synthetic construct
  misc_feature 1..20: note = chemically synthesized
  source 1..20: mol_type = other DNA
aaaggtttgtgtgatttagt

SEQ ID NO: 74496 - DNA, 20 bp, synthetic construct
  misc_feature 1..20: note = chemically synthesized
  source 1..20: mol_type = other DNA
agatgtttgtagaaaagcaa

SEQ ID NO: 74497 - DNA, 20 bp, synthetic construct
  misc_feature 1..20: note = chemically synthesized
  source 1..20: mol_type = other DNA
taaaagtgggcctatctggg

SEQ ID NO: 74498 - DNA, 20 bp, synthetic construct
  misc_feature 1..20: note = chemically synthesized
  source 1..20: mol_type = other DNA
tagaaatggtagaaattgat

SEQ ID NO: 74499 - DNA, 20 bp, synthetic construct
  misc_feature 1..20: note = chemically synthesized
  source 1..20: mol_type = other DNA
ttaggagaaaagggacagaa

SEQ ID NO: 74500 - DNA, 20 bp, synthetic construct
  misc_feature 1..20: note = chemically synthesized
  source 1..20: mol_type = other DNA
ttattggcatcattcttatt

SEQ ID NO: 74501 - DNA, 20 bp, synthetic construct
  misc_feature 1..20: note = chemically synthesized
  source 1..20: mol_type = other DNA
caggaatcagaggtgcaaat

SEQ ID NO: 74502 - DNA, 20 bp, synthetic construct
  misc_feature 1..20: note = chemically synthesized
  source 1..20: mol_type = other DNA
gcacattaaggaactgagaa

SEQ ID NO: 74503 - DNA, 20 bp, synthetic construct
  misc_feature 1..20: note = chemically synthesized
  source 1..20: mol_type = other DNA
acagagatattagttaaata

SEQ ID NO: 74504 - DNA, 20 bp, synthetic construct
  misc_feature 1..20: note = chemically synthesized
  source 1..20: mol_type = other DNA
tagctaataaatacaaaatt

SEQ ID NO: 74505 - DNA, 20 bp, synthetic construct
  misc_feature 1..20: note = chemically synthesized
  source 1..20: mol_type = other DNA
gtcttaagaaacttcttgaa

SEQ ID NO: 74506 - DNA, 20 bp, synthetic construct
  misc_feature 1..20: note = chemically synthesized
  source 1..20: mol_type = other DNA
aagtgattgttgagttgcaa

SEQ ID NO: 74507 - DNA, 20 bp, synthetic construct
  misc_feature 1..20: note = chemically synthesized
  source 1..20: mol_type = other DNA
aattttacgaaagaagagaa

SEQ ID NO: 74508 - DNA, 20 bp, synthetic construct
  misc_feature 1..20: note = chemically synthesized
  source 1..20: mol_type = other DNA
gaaagtatggacttttgaac

SEQ ID NO: 74509 - DNA, 20 bp, synthetic construct
  misc_feature 1..20: note = chemically synthesized
  source 1..20: mol_type = other DNA
tgaacatctgtttacattat

SEQ ID NO: 74510 - DNA, 20 bp, synthetic construct
  misc_feature 1..20: note = chemically synthesized
  source 1..20: mol_type = other DNA
tagagctttaaaaaaactta

SEQ ID NO: 74511 - DNA, 20 bp, synthetic construct
  misc_feature 1..20: note = chemically synthesized
  source 1..20: mol_type = other DNA
aacaatgtaaagaagaagcc

SEQ ID NO: 74512 - DNA, 20 bp, synthetic construct
  misc_feature 1..20: note = chemically synthesized
  source 1..20: mol_type = other DNA
gccaattgattctgctacca

SEQ ID NO: 74513 - DNA, 20 bp, synthetic construct
  misc_feature 1..20: note = chemically synthesized
  source 1..20: mol_type = other DNA
accatgaggcttttgaaatt

SEQ ID NO: 74514 - DNA, 20 bp, synthetic construct
  misc_feature 1..20: note = chemically synthesized
  source 1..20: mol_type = other DNA
tgaggcttttgaaattataa

SEQ ID NO: 74515 - DNA, 20 bp, synthetic construct
  misc_feature 1..20: note = chemically synthesized
  source 1..20: mol_type = other DNA
gcttttgaaattataagctt

SEQ ID NO: 74516 - DNA, 20 bp, synthetic construct
  misc_feature 1..20: note = chemically synthesized
  source 1..20: mol_type = other DNA
tataagcttgcttgtttgag

SEQ ID NO: 74517 - DNA, 20 bp, synthetic construct
  misc_feature 1..20: note = chemically synthesized
  source 1..20: mol_type = other DNA
tctcatgcataaatattcct

SEQ ID NO: 74518 - DNA, 20 bp, synthetic construct
  misc_feature 1..20: note = chemically synthesized
  source 1..20: mol_type = other DNA
gacttatgatatttaaagcc

SEQ ID NO: 74519 - DNA, 20 bp, synthetic construct
  misc_feature 1..20: note = chemically synthesized
  source 1..20: mol_type = other DNA
caaagattactcttcacttc

SEQ ID NO: 74520 - DNA, 20 bp, synthetic construct
  misc_feature 1..20: note = chemically synthesized
  source 1..20: mol_type = other DNA
cttttactaatctcttcctt

SEQ ID NO: 74521 - DNA, 20 bp, synthetic construct
  misc_feature 1..20: note = chemically synthesized
  source 1..20: mol_type = other DNA
ctaatctcttccttatttgt

SEQ ID NO: 74522 - DNA, 20 bp, synthetic construct
  misc_feature 1..20: note = chemically synthesized
  source 1..20: mol_type = other DNA
cttccttatttgtttttgct

SEQ ID NO: 74523 - DNA, 20 bp, synthetic construct
  misc_feature 1..20: note = chemically synthesized
  source 1..20: mol_type = other DNA
tcaaagaaacagaatttctc

SEQ ID NO: 74524 - DNA, 20 bp, synthetic construct
  misc_feature 1..20: note = chemically synthesized
  source 1..20: mol_type = other DNA
cagctgttttttttaagtca

SEQ ID NO: 74525 - DNA, 20 bp, synthetic construct
  misc_feature 1..20: note = chemically synthesized
  source 1..20: mol_type = other DNA
tcctttgaaaaaatactctc

SEQ ID NO: 74526 - DNA, 20 bp, synthetic construct
  misc_feature 1..20: note = chemically synthesized
  source 1..20: mol_type = other DNA
tcacatgtttctcagttcca

SEQ ID NO: 74527 - DNA, 20 bp, synthetic construct
  misc_feature 1..20: note = chemically synthesized
  source 1..20: mol_type = other DNA
cgaattcttcctttcttctc

SEQ ID NO: 74528 - DNA, 20 bp, synthetic construct
  misc_feature 1..20: note = chemically synthesized
  source 1..20: mol_type = other DNA
tggcatggagcagcaatacc

SEQ ID NO: 74529 - DNA, 20 bp, synthetic construct
  misc_feature 1..20: note = chemically synthesized
  source 1..20: mol_type = other DNA
cttctcctcaatctatgcca

SEQ ID NO: 74530 - DNA, 20 bp, synthetic construct
  misc_feature 1..20: note = chemically synthesized
  source 1..20: mol_type = other DNA
tgagccaagcctgcaccagc

SEQ ID NO: 74531 - DNA, 20 bp, synthetic construct
  misc_feature 1..20: note = chemically synthesized
  source 1..20: mol_type = other DNA
tgtgggggatcattcgagag

SEQ ID NO: 74532 - DNA, 20 bp, synthetic construct
  misc_feature 1..20: note = chemically synthesized
  source 1..20: mol_type = other DNA
gggatcattcgagagatcag

SEQ ID NO: 74533 - DNA, 20 bp, synthetic construct
  misc_feature 1..20: note = chemically synthesized
  source 1..20: mol_type = other DNA
ttgggctcactataataggt

SEQ ID NO: 74534 - DNA, 20 bp, synthetic construct
  misc_feature 1..20: note = chemically synthesized
  source 1..20: mol_type = other DNA
tctgcctgcaccaggatctt

SEQ ID NO: 74535 - DNA, 20 bp, synthetic construct
  misc_feature 1..20: note = chemically synthesized
  source 1..20: mol_type = other DNA
tccgcttagcctgttcagac

SEQ ID NO: 74536 - DNA, 20 bp, synthetic construct
  misc_feature 1..20: note = chemically synthesized
  source 1..20: mol_type = other DNA
actcatccttttctcctaca

SEQ ID NO: 74537 - DNA, 20 bp, synthetic construct
  misc_feature 1..20: note = chemically synthesized
  source 1..20: mol_type = other DNA
tcattagcctcacaatggtg

SEQ ID NO: 74538 - DNA, 20 bp, synthetic construct
  misc_feature 1..20: note = chemically synthesized
  source 1..20: mol_type = other DNA
catctacagtgtcaagaccc

SEQ ID NO: 74539 - DNA, 20 bp, synthetic construct
  misc_feature 1..20: note = chemically synthesized
  source 1..20: mol_type = other DNA
gacccaacagattcatacca

SEQ ID NO: 74540 - DNA, 20 bp, synthetic construct
  misc_feature 1..20: note = chemically synthesized
  source 1..20: mol_type = other DNA
aaagaaaaaattattaaaat

SEQ ID NO: 74541 - DNA, 20 bp, synthetic construct
  misc_feature 1..20: note = chemically synthesized
  source 1..20: mol_type = other DNA
atatttaagaaagaggaaaa

SEQ ID NO: 74542 - DNA, 20 bp, synthetic construct
  misc_feature 1..20: note = chemically synthesized
  source 1..20: mol_type = other DNA
ttcctttgctgtaaaacaaa

SEQ ID NO: 74543 - DNA, 20 bp, synthetic construct
  misc_feature 1..20: note = chemically synthesized
  source 1..20: mol_type = other DNA
aacaaagctggattaaaaac

SEQ ID NO: 74544 - DNA, 20 bp, synthetic construct
  misc_feature 1..20: note = chemically synthesized
  source 1..20: mol_type = other DNA
tggattaaaaacctaggttt

SEQ ID NO: 74545 - DNA, 20 bp, synthetic construct
  misc_feature 1..20: note = chemically synthesized
  source 1..20: mol_type = other DNA
aagtttcaaagtagaaaact

SEQ ID NO: 74546 - DNA, 20 bp, synthetic construct
  misc_feature 1..20: note = chemically synthesized
  source 1..20: mol_type = other DNA
ttgaagtttctttcattctc

SEQ ID NO: 74547 - DNA, 20 bp, synthetic construct
  misc_feature 1..20: note = chemically synthesized
  source 1..20: mol_type = other DNA
aagtggaatatatggctcct

SEQ ID NO: 74548 - DNA, 20 bp, synthetic construct
  misc_feature 1..20: note = chemically synthesized
  source 1..20: mol_type = other DNA
ctttaagttaatttatattt

SEQ ID NO: 74549 - DNA, 20 bp, synthetic construct
  misc_feature 1..20: note = chemically synthesized
  source 1..20: mol_type = other DNA
aggacacaaagaaatatgac

SEQ ID NO: 74550 - DNA, 20 bp, synthetic construct
  misc_feature 1..20: note = chemically synthesized
  source 1..20: mol_type = other DNA
ttaaattagaatccttattt

SEQ ID NO: 74551 - DNA, 20 bp, synthetic construct
  misc_feature 1..20: note = chemically synthesized
  source 1..20: mol_type = other DNA
tccactgctacaaggctgga

SEQ ID NO: 74552 - DNA, 20 bp, synthetic construct
  misc_feature 1..20: note = chemically synthesized
  source 1..20: mol_type = other DNA
agcagattttgctctagatc

SEQ ID NO: 74553 - DNA, 20 bp, synthetic construct
  misc_feature 1..20: note = chemically synthesized
  source 1..20: mol_type = other DNA
ctgtccgctaccgacttatt

SEQ ID NO: 74554 - DNA, 20 bp, synthetic construct
  misc_feature 1..20: note = chemically synthesized
  source 1..20: mol_type = other DNA
ttcttttctaagtaagctag

SEQ ID NO: 74555 - DNA, 20 bp, synthetic construct
  misc_feature 1..20: note = chemically synthesized
  source 1..20: mol_type = other DNA
tgcatggataacaagaaaat

SEQ ID NO: 74556 - DNA, 20 bp, synthetic construct
  misc_feature 1..20: note = chemically synthesized
  source 1..20: mol_type = other DNA
tttagatatcaactaaaaca

SEQ ID NO: 74557 - DNA, 20 bp, synthetic construct
  misc_feature 1..20: note = chemically synthesized
  source 1..20: mol_type = other DNA
actcagagggaaacaaaaat

SEQ ID NO: 74558 - DNA, 20 bp, synthetic construct
  misc_feature 1..20: note = chemically synthesized
  source 1..20: mol_type = other DNA
agggaaacaaaaatacaggc

SEQ ID NO: 74559 - DNA, 20 bp, synthetic construct
  misc_feature 1..20: note = chemically synthesized
  source 1..20: mol_type = other DNA
aaatacaggctttggtttct

SEQ ID NO: 74560 - DNA, 20 bp, synthetic construct
  misc_feature 1..20: note = chemically synthesized
  source 1..20: mol_type = other DNA
cttaagcctcaaagtgagga

SEQ ID NO: 74561 - DNA, 20 bp, synthetic construct
  misc_feature 1..20: note = chemically synthesized
  source 1..20: mol_type = other DNA
aatggcgtgaacccgggagg

SEQ ID NO: 74562 - DNA, 20 bp, synthetic construct
  misc_feature 1..20: note = chemically synthesized
  source 1..20: mol_type = other DNA
actggaatgtggccaatctg

SEQ ID NO: 74563 - DNA, 20 bp, synthetic construct
  misc_feature 1..20: note = chemically synthesized
  source 1..20: mol_type = other DNA
atctgacaagattcctatgc

SEQ ID NO: 74564 - DNA, 20 bp, synthetic construct
  misc_feature 1..20: note = chemically synthesized
  source 1..20: mol_type = other DNA
tagaggtcatgtgaatgtct

SEQ ID NO: 74565 - DNA, 20 bp, synthetic construct
  misc_feature 1..20: note = chemically synthesized
  source 1..20: mol_type = other DNA
atagatttctcaatggccaa

SEQ ID NO: 74566 - DNA, 20 bp, synthetic construct
  misc_feature 1..20: note = chemically synthesized
  source 1..20: mol_type = other DNA
tggccaaagaagcttccttc

SEQ ID NO: 74567 - DNA, 20 bp, synthetic construct
  misc_feature 1..20: note = chemically synthesized
  source 1..20: mol_type = other DNA
gaattcttcaacaactgaca

SEQ ID NO: 74568 - DNA, 20 bp, synthetic construct
  misc_feature 1..20: note = chemically synthesized
  source 1..20: mol_type = other DNA
atgtctgacacaactgagtt

SEQ ID NO: 74569 - DNA, 20 bp, synthetic construct
  misc_feature 1..20: note = chemically synthesized
  source 1..20: mol_type = other DNA
ctgagttgttggtttgagag

SEQ ID NO: 74570 - DNA, 20 bp, synthetic construct
  misc_feature 1..20: note = chemically synthesized
  source 1..20: mol_type = other DNA
atctgaagacttcatactat

SEQ ID NO: 74571 - DNA, 20 bp, synthetic construct
  misc_feature 1..20: note = chemically synthesized
  source 1..20: mol_type = other DNA
agacttcatactatgagtgt

SEQ ID NO: 74572 - DNA, 20 bp, synthetic construct
  misc_feature 1..20: note = chemically synthesized
  source 1..20: mol_type = other DNA
catactatgagtgtttgtgc

SEQ ID NO: 74573 - DNA, 20 bp, synthetic construct
  misc_feature 1..20: note = chemically synthesized
  source 1..20: mol_type = other DNA
acctatagaatgtgaaccaa

SEQ ID NO: 74574 - DNA, 20 bp, synthetic construct
  misc_feature 1..20: note = chemically synthesized
  source 1..20: mol_type = other DNA
ctaagagtatcctcagaaat

SEQ ID NO: 74575 - DNA, 20 bp, synthetic construct
  misc_feature 1..20: note = chemically synthesized
  source 1..20: mol_type = other DNA
tatataattgtactatgatg

SEQ ID NO: 74576 - DNA, 20 bp, synthetic construct
  misc_feature 1..20: note = chemically synthesized
  source 1..20: mol_type = other DNA
agccaatgaaagtaaacttt

SEQ ID NO: 74577 - DNA, 20 bp, synthetic construct
  misc_feature 1..20: note = chemically synthesized
  source 1..20: mol_type = other DNA
aagtaaactttatatgatta

SEQ ID NO: 74578 - DNA, 20 bp, synthetic construct
  misc_feature 1..20: note = chemically synthesized
  source 1..20: mol_type = other DNA
tgggctttatacagaaagaa

SEQ ID NO: 74579 - DNA, 20 bp, synthetic construct
  misc_feature 1..20: note = chemically synthesized
  source 1..20: mol_type = other DNA
agaaacaggtttagaacatt

SEQ ID NO: 74580 - DNA, 20 bp, synthetic construct
  misc_feature 1..20: note = chemically synthesized
  source 1..20: mol_type = other DNA
caggtttagaacattagtag

SEQ ID NO: 74581 - DNA, 20 bp, synthetic construct
  misc_feature 1..20: note = chemically synthesized
  source 1..20: mol_type = other DNA
tttagaacattagtagttta

SEQ ID NO: 74582 - DNA, 20 bp, synthetic construct
  misc_feature 1..20: note = chemically synthesized
  source 1..20: mol_type = other DNA
gaacattagtagtttagatt

SEQ ID NO: 74583 - DNA, 20 bp, synthetic construct
  misc_feature 1..20: note = chemically synthesized
  source 1..20: mol_type = other DNA
agagcagatggagacatcac

SEQ ID NO: 74584 - DNA, 20 bp, synthetic construct
  misc_feature 1..20: note = chemically synthesized
  source 1..20: mol_type = other DNA
tcacaggtgtttaaaacact

SEQ ID NO: 74585 - DNA, 20 bp, synthetic construct
  misc_feature 1..20: note = chemically synthesized
  source 1..20: mol_type = other DNA
ttttccatatatctcaaaaa

SEQ ID NO: 74586 - DNA, 20 bp, synthetic construct
  misc_feature 1..20: note = chemically synthesized
  source 1..20: mol_type = other DNA
aaaagccagcttctaaggaa

SEQ ID NO: 74587 - DNA, 20 bp, synthetic construct
  misc_feature 1..20: note = chemically synthesized
  source 1..20: mol_type = other DNA
agagccagtgagaagcagtt

SEQ ID NO: 74588 - DNA, 20 bp, synthetic construct
  misc_feature 1..20: note = chemically synthesized
  source 1..20: mol_type = other DNA
ccgagaacaaggtgacaaaa

SEQ ID NO: 74589 - DNA, 20 bp, synthetic construct
  misc_feature 1..20: note = chemically synthesized
  source 1..20: mol_type = other DNA
taaggtccagtgggagaaat

SEQ ID NO: 74590 - DNA, 20 bp, synthetic construct
  misc_feature 1..20: note = chemically synthesized
  source 1..20: mol_type = other DNA
tgattcttagaagtgagagg

SEQ ID NO: 74591 - DNA, 20 bp, synthetic construct
  misc_feature 1..20: note = chemically synthesized
  source 1..20: mol_type = other DNA
tagaagtgagaggacatgat

SEQ ID NO: 74592 - DNA, 20 bp, synthetic construct
  misc_feature 1..20: note = chemically synthesized
  source 1..20: mol_type = other DNA
gacatgattcaggattagaa

SEQ ID NO: 74593 - DNA, 20 bp, synthetic construct
  misc_feature 1..20: note = chemically synthesized
  source 1..20: mol_type = other DNA
cactgtacaccagcagtctt

SEQ ID NO: 74594 - DNA, 20 bp, synthetic construct
  misc_feature 1..20: note = chemically synthesized
  source 1..20: mol_type = other DNA
tcaatgtttttggtaccagg

SEQ ID NO: 74595 - DNA, 20 bp, synthetic construct
  misc_feature 1..20: note = chemically synthesized
  source 1..20: mol_type = other DNA
gaagacaaggtgcaggaggg

SEQ ID NO: 74596 - DNA, 20 bp, synthetic construct
  misc_feature 1..20: note = chemically synthesized
  source 1..20: mol_type = other DNA
tccacctcagagcattaggc

SEQ ID NO: 74597 - DNA, 20 bp, synthetic construct
  misc_feature 1..20: note = chemically synthesized
  source 1..20: mol_type = other DNA
aggaggaggagctcaggcag

SEQ ID NO: 74598 - DNA, 20 bp, synthetic construct
  misc_feature 1..20: note = chemically synthesized
  source 1..20: mol_type = other DNA
cactatacctccctattttc

SEQ ID NO: 74599 - DNA, 20 bp, synthetic construct
  misc_feature 1..20: note = chemically synthesized
  source 1..20: mol_type = other DNA
tgcagtaggagtcgatgtcc

SEQ ID NO: 74600 - DNA, 20 bp, synthetic construct
  misc_feature 1..20: note = chemically synthesized
  source 1..20: mol_type = other DNA
taaagcttttccagtaaaag

SEQ ID NO: 74601 - DNA, 20 bp, synthetic construct
  misc_feature 1..20: note = chemically synthesized
  source 1..20: mol_type = other DNA
tgtaatggcacatagaaaat

SEQ ID NO: 74602 - DNA, 20 bp, synthetic construct
  misc_feature 1..20: note = chemically synthesized
  source 1..20: mol_type = other DNA
gccagaactgaggaatcaat

SEQ ID NO: 74603 - DNA, 20 bp, synthetic construct
  misc_feature 1..20: note = chemically synthesized
  source 1..20: mol_type = other DNA
aactgaggaatcaatcggtg

SEQ ID NO: 74604 - DNA, 20 bp, synthetic construct
  misc_feature 1..20: note = chemically synthesized
  source 1..20: mol_type = other DNA
aatgttctctttcttggtct

SEQ ID NO: 74605 - DNA, 20 bp, synthetic construct
  misc_feature 1..20: note = chemically synthesized
  source 1..20: mol_type = other DNA
tcttggtctgagtgtttgtt

SEQ ID NO: 74606 - DNA, 20 bp, synthetic construct
  misc_feature 1..20: note = chemically synthesized
  source 1..20: mol_type = other DNA
tgataagtatatacatttaa

SEQ ID NO: 74607 - DNA, 20 bp, synthetic construct
  misc_feature 1..20: note = chemically synthesized
  source 1..20: mol_type = other DNA
aaatggtagaaaaggtgaat

SEQ ID NO: 74608 - DNA, 20 bp, synthetic construct
  misc_feature 1..20: note = chemically synthesized
  source 1..20: mol_type = other DNA
atttctctttagttctggca

SEQ ID NO: 74609 - DNA, 20 bp, synthetic construct
  misc_feature 1..20: note = chemically synthesized
  source 1..20: mol_type = other DNA
aaggtgtaatatatgaaaca

SEQ ID NO: 74610 - DNA, 20 bp, synthetic construct
  misc_feature 1..20: note = chemically synthesized
  source 1..20: mol_type = other DNA
atagatattggcatttgagt

SEQ ID NO: 74611 - DNA, 20 bp, synthetic construct
  misc_feature 1..20: note = chemically synthesized
  source 1..20: mol_type = other DNA
tggcatttgagtattcgctt

SEQ ID NO: 74612 - DNA, 20 bp, synthetic construct
  misc_feature 1..20: note = chemically synthesized
  source 1..20: mol_type = other DNA
gtattcgcttactggattag

SEQ ID NO: 74613 - DNA, 20 bp, synthetic construct
  misc_feature 1..20: note = chemically synthesized
  source 1..20: mol_type = other DNA
tattttattattattatact

SEQ ID NO: 74614 - DNA, 20 bp, synthetic construct
  misc_feature 1..20: note = chemically synthesized
  source 1..20: mol_type = other DNA
tgtatacatgtgccatgctg

SEQ ID NO: 74615 - DNA, 20 bp, synthetic construct
  misc_feature 1..20: note = chemically synthesized
  source 1..20: mol_type = other DNA
cacctatgagtgagaacatg

SEQ ID NO: 74616 - DNA, 20 bp, synthetic construct
  misc_feature 1..20: note = chemically synthesized
  source 1..20: mol_type = other DNA
atgagtgagaacatgcagtg

SEQ ID NO: 74617 - DNA, 20 bp, synthetic construct
  misc_feature 1..20: note = chemically synthesized
  source 1..20: mol_type = other DNA
gtttggtttttcgtccttgc

SEQ ID NO: 74618 - DNA, 20 bp, synthetic construct
  misc_feature 1..20: note = chemically synthesized
  source 1..20: mol_type = other DNA
ttgcgatagtttactgagaa

SEQ ID NO: 74619 - DNA, 20 bp, synthetic construct
  misc_feature 1..20: note = chemically synthesized
  source 1..20: mol_type = other DNA
gagaactttcatgtctagct

SEQ ID NO: 74620 - DNA, 20 bp, synthetic construct
  misc_feature 1..20: note = chemically synthesized
  source 1..20: mol_type = other DNA
tcagcaatctgtgtctaact

SEQ ID NO: 74621 - DNA, 20 bp, synthetic construct
  misc_feature 1..20: note = chemically synthesized
  source 1..20: mol_type = other DNA
gagaacttttgtgtctagct

SEQ ID NO: 74622 - DNA, 20 bp, synthetic construct
  misc_feature 1..20: note = chemically synthesized
  source 1..20: mol_type = other DNA
tcagcactctgtgtctagct

SEQ ID NO: 74623 - DNA, 20 bp, synthetic construct
  misc_feature 1..20: note = chemically synthesized
  source 1..20: mol_type = other DNA
tgggttccctaccatgctgt

SEQ ID NO: 74624 - DNA, 20 bp, synthetic construct
  misc_feature 1..20: note = chemically synthesized
  source 1..20: mol_type = other DNA
taacactcactgcgaaggtc

SEQ ID NO: 74625 - DNA, 20 bp, synthetic construct
  misc_feature 1..20: note = chemically synthesized
  source 1..20: mol_type = other DNA
taacactccccgtgggggtc

SEQ ID NO: 74626 - DNA, 20 bp, synthetic construct
  misc_feature 1..20: note = chemically synthesized
  source 1..20: mol_type = other DNA
taacactcaccacgagggtt

SEQ ID NO: 74627 - DNA, 20 bp, synthetic construct
  misc_feature 1..20: note = chemically synthesized
  source 1..20: mol_type = other DNA
tccggacacagaaggatgga

SEQ ID NO: 74628 - DNA, 20 bp, synthetic construct
  misc_feature 1..20: note = chemically synthesized
  source 1..20: mol_type = other DNA
taaagaaaacttatttggag

SEQ ID NO: 74629 - DNA, 20 bp, synthetic construct
  misc_feature 1..20: note = chemically synthesized
  source 1..20: mol_type = other DNA
agccaataagggggacagga

SEQ ID NO: 74630 - DNA, 20 bp, synthetic construct
  misc_feature 1..20: note = chemically synthesized
  source 1..20: mol_type = other DNA
acactttaccaaagaagata

SEQ ID NO: 74631 - DNA, 20 bp, synthetic construct
  misc_feature 1..20: note = chemically synthesized
  source 1..20: mol_type = other DNA
gagcaacagtaactctcact

SEQ ID NO: 74632 - DNA, 20 bp, synthetic construct
  misc_feature 1..20: note = chemically synthesized
  source 1..20: mol_type = other DNA
atagtgcagccaaattggaa

SEQ ID NO: 74633 - DNA, 20 bp, synthetic construct
  misc_feature 1..20: note = chemically synthesized
  source 1..20: mol_type = other DNA
agccaaattggaagacagtt

SEQ ID NO: 74634 - DNA, 20 bp, synthetic construct
  misc_feature 1..20: note = chemically synthesized
  source 1..20: mol_type = other DNA
acacacagacatgaactaac

SEQ ID NO: 74635 - DNA, 20 bp, synthetic construct
  misc_feature 1..20: note = chemically synthesized
  source 1..20: mol_type = other DNA
tcaagctgtgaaaagacata

SEQ ID NO: 74636 - DNA, 20 bp, synthetic construct
  misc_feature 1..20: note = chemically synthesized
  source 1..20: mol_type = other DNA
cataaagagctttaattgta

SEQ ID NO: 74637 - DNA, 20 bp, synthetic construct
  misc_feature 1..20: note = chemically synthesized
  source 1..20: mol_type = other DNA
tagtctttcatatccttctg

SEQ ID NO: 74638 - DNA, 20 bp, synthetic construct
  misc_feature 1..20: note = chemically synthesized
  source 1..20: mol_type = other DNA
aagtatggtacattctttga

SEQ ID NO: 74639 - DNA, 20 bp, synthetic construct
  misc_feature 1..20: note = chemically synthesized
  source 1..20: mol_type = other DNA
acagctattgcatagaatga

SEQ ID NO: 74640 - DNA, 20 bp, synthetic construct
  misc_feature 1..20: note = chemically synthesized
  source 1..20: mol_type = other DNA
atatttaataacaggtaatg

SEQ ID NO: 74641 - DNA, 20 bp, synthetic construct
  misc_feature 1..20: note = chemically synthesized
  source 1..20: mol_type = other DNA
ttaaaaataagatgataaat

SEQ ID NO: 74642 - DNA, 20 bp, synthetic construct
  misc_feature 1..20: note = chemically synthesized
  source 1..20: mol_type = other DNA
tggagataacacacttagat

SEQ ID NO: 74643 - DNA, 20 bp, synthetic construct
  misc_feature 1..20: note = chemically synthesized
  source 1..20: mol_type = other DNA
gacatgagtaaagaggagta

SEQ ID NO: 74644 - DNA, 20 bp, synthetic construct
  misc_feature 1..20: note = chemically synthesized
  source 1..20: mol_type = other DNA
gtgttattggcattgtattg

SEQ ID NO: 74645 - DNA, 20 bp, synthetic construct
  misc_feature 1..20: note = chemically synthesized
  source 1..20: mol_type = other DNA
ctgggtaatttataaagaac

SEQ ID NO: 74646 - DNA, 20 bp, synthetic construct
  misc_feature 1..20: note = chemically synthesized
  source 1..20: mol_type = other DNA
aagaagcatggcagcatctg

SEQ ID NO: 74647 - DNA, 20 bp, synthetic construct
  misc_feature 1..20: note = chemically synthesized
  source 1..20: mol_type = other DNA
cgctgatgagaactctgcca

SEQ ID NO: 74648 - DNA, 20 bp, synthetic construct
  misc_feature 1..20: note = chemically synthesized
  source 1..20: mol_type = other DNA
caaggccccacctccaacgc

SEQ ID NO: 74649 - DNA, 20 bp, synthetic construct
  misc_feature 1..20: note = chemically synthesized
  source 1..20: mol_type = other DNA
gggcagtcattacaccttga

SEQ ID NO: 74650 - DNA, 20 bp, synthetic construct
  misc_feature 1..20: note = chemically synthesized
  source 1..20: mol_type = other DNA
attacaccttgatatggttt

SEQ ID NO: 74651 - DNA, 20 bp, synthetic construct
  misc_feature 1..20: note = chemically synthesized
  source 1..20: mol_type = other DNA
gatgtaattgaatcatgggg

SEQ ID NO: 74652 - DNA, 20 bp, synthetic construct
  misc_feature 1..20: note = chemically synthesized
  source 1..20: mol_type = other DNA
gagtaagtctcacaagatct

SEQ ID NO: 74653 - DNA, 20 bp, synthetic construct
  misc_feature 1..20: note = chemically synthesized
  source 1..20: mol_type = other DNA
tgctcctccttcaccttcca

SEQ ID NO: 74654 - DNA, 20 bp, synthetic construct
  misc_feature 1..20: note = chemically synthesized
  source 1..20: mol_type = other DNA
agtctcgggtatttcttcat

SEQ ID NO: 74655 - DNA, 20 bp, synthetic construct
  misc_feature 1..20: note = chemically synthesized
  source 1..20: mol_type = other DNA
gccttgggcagttccacccc

SEQ ID NO: 74656 - DNA, 20 bp, synthetic construct
  misc_feature 1..20: note = chemically synthesized
  source 1..20: mol_type = other DNA
gttccacccctattgctttg

SEQ ID NO: 74657 - DNA, 20 bp, synthetic construct
  misc_feature 1..20: note = chemically synthesized
  source 1..20: mol_type = other DNA
tagcccctgctgctgctctt

SEQ ID NO: 74658 - DNA, 20 bp, synthetic construct
  misc_feature 1..20: note = chemically synthesized
  source 1..20: mol_type = other DNA
tgctcttaagagattgtatt

SEQ ID NO: 74659 - DNA, 20 bp, synthetic construct
  misc_feature 1..20: note = chemically synthesized
  source 1..20: mol_type = other DNA
aagagattgtattgagtgtt

SEQ ID NO: 74660 - DNA, 20 bp, synthetic construct
  misc_feature 1..20: note = chemically synthesized
  source 1..20: mol_type = other DNA
atgagggttctgcccctgca

SEQ ID NO: 74661 - DNA, 20 bp, synthetic construct
  misc_feature 1..20: note = chemically synthesized
  source 1..20: mol_type = other DNA
ggaggcttctgcctgaacac

SEQ ID NO: 74662 - DNA, 20 bp, synthetic construct
  misc_feature 1..20: note = chemically synthesized
  source 1..20: mol_type = other DNA
acatcctctgaaatctaggt

SEQ ID NO: 74663 - DNA, 20 bp, synthetic construct
  misc_feature 1..20: note = chemically synthesized
  source 1..20: mol_type = other DNA
ctttttgacctttgcacact

SEQ ID NO: 74664 - DNA, 20 bp, synthetic construct
  misc_feature 1..20: note = chemically synthesized
  source 1..20: mol_type = other DNA
tatcaccatgtggaagcctc

SEQ ID NO: 74665 - DNA, 20 bp, synthetic construct
  misc_feature 1..20: note = chemically synthesized
  source 1..20: mol_type = other DNA
catttatgcaaatttctaca

SEQ ID NO: 74666 - DNA, 20 bp, synthetic construct
  misc_feature 1..20: note = chemically synthesized
  source 1..20: mol_type = other DNA
cttgaattgctcctttgaaa

SEQ ID NO: 74667 - DNA, 20 bp, synthetic construct
  misc_feature 1..20: note = chemically synthesized
  source 1..20: mol_type = other DNA
ttgctcctttgaaaatgagc

SEQ ID NO: 74668 - DNA, 20 bp, synthetic construct
  misc_feature 1..20: note = chemically synthesized
  source 1..20: mol_type = other DNA
taattttccaaacttttatg

SEQ ID NO: 74669 - DNA, 20 bp, synthetic construct
  misc_feature 1..20: note = chemically synthesized
  source 1..20: mol_type = other DNA
gcttcccttttaaatataag

SEQ ID NO: 74670 - DNA, 20 bp, synthetic construct
  misc_feature 1..20: note = chemically synthesized
  source 1..20: mol_type = other DNA
aggacacatcttgaacacct

SEQ ID NO: 74671 - DNA, 20 bp, synthetic construct
  misc_feature 1..20: note = chemically synthesized
  source 1..20: mol_type = other DNA
tattatcaacttcgaatttc

SEQ ID NO: 74672 - DNA, 20 bp, synthetic construct
  misc_feature 1..20: note = chemically synthesized
  source 1..20: mol_type = other DNA
ataacaaaagtgacctttgc

SEQ ID NO: 74673 - DNA, 20 bp, synthetic construct
  misc_feature 1..20: note = chemically synthesized
  source 1..20: mol_type = other DNA
tgcctgttatccaatgccaa

SEQ ID NO: 74674 - DNA, 20 bp, synthetic construct
  misc_feature 1..20: note = chemically synthesized
  source 1..20: mol_type = other DNA
actgggtaaatggtgaagaa

SEQ ID NO: 74675 - DNA, 20 bp, synthetic construct
  misc_feature 1..20: note = chemically synthesized
  source 1..20: mol_type = other DNA
aggaagcatggcaacgtctg

SEQ ID NO: 74676 - DNA, 20 bp, synthetic construct
  misc_feature 1..20: note = chemically synthesized
  source 1..20: mol_type = other DNA
aacgtctgctcagcttctag

SEQ ID NO: 74677 - DNA, 20 bp, synthetic construct
  misc_feature 1..20: note = chemically synthesized
  source 1..20: mol_type = other DNA
ccaggccccatcttcaacac

SEQ ID NO: 74678 - DNA, 20 bp, synthetic construct
  misc_feature 1..20: note = chemically synthesized
  source 1..20: mol_type = other DNA
actggggattacagctgaac

SEQ ID NO: 74679 - DNA, 20 bp, synthetic construct
  misc_feature 1..20: note = chemically synthesized
  source 1..20: mol_type = other DNA
atatcaggcatgcattactc

SEQ ID NO: 74680 - DNA, 20 bp, synthetic construct
  misc_feature 1..20: note = chemically synthesized
  source 1..20: mol_type = other DNA
caacaaaacgatgaattaaa

SEQ ID NO: 74681 - DNA, 20 bp, synthetic construct
  misc_feature 1..20: note = chemically synthesized
  source 1..20: mol_type = other DNA
tctttaatacaagcagtcgt

SEQ ID NO: 74682 - DNA, 20 bp, synthetic construct
  misc_feature 1..20: note = chemically synthesized
  source 1..20: mol_type = other DNA
gcagtcgtattggcttctat

SEQ ID NO: 74683 - DNA, 20 bp, synthetic construct
  misc_feature 1..20: note = chemically synthesized
  source 1..20: mol_type = other DNA
aagctacaagactctgcaaa

SEQ ID NO: 74684 - DNA, 20 bp, synthetic construct
  misc_feature 1..20: note = chemically synthesized
  source 1..20: mol_type = other DNA
acagcagggatgtccaatct

SEQ ID NO: 74685 - DNA, 20 bp, synthetic construct
  misc_feature 1..20: note = chemically synthesized
  source 1..20: mol_type = other DNA
aaatgtcccataaaatctca

SEQ ID NO: 74686 - DNA, 20 bp, synthetic construct
  misc_feature 1..20: note = chemically synthesized
  source 1..20: mol_type = other DNA
gcccacgggccacaggttgg

SEQ ID NO: 74687 - DNA, 20 bp, synthetic construct
  misc_feature 1..20: note = chemically synthesized
  source 1..20: mol_type = other DNA
tctcttttctggcaccaact

SEQ ID NO: 74688 - DNA, 20 bp, synthetic construct
  misc_feature 1..20: note = chemically synthesized
  source 1..20: mol_type = other DNA
cagctttactagcaccaact

SEQ ID NO: 74689 - DNA, 20 bp, synthetic construct
  misc_feature 1..20: note = chemically synthesized
  source 1..20: mol_type = other DNA
ggatcatctggaattctttt

SEQ ID NO: 74690 - DNA, 20 bp, synthetic construct
  misc_feature 1..20: note = chemically synthesized
  source 1..20: mol_type = other DNA
ctcaagtcccatagtaagat

SEQ ID NO: 74691 - DNA, 20 bp, synthetic construct
  misc_feature 1..20: note = chemically synthesized
  source 1..20: mol_type = other DNA
tattagataatcatatagat

SEQ ID NO: 74692 - DNA, 20 bp, synthetic construct
  misc_feature 1..20: note = chemically synthesized
  source 1..20: mol_type = other DNA
atatgattattaagggcata

SEQ ID NO: 74693 - DNA, 20 bp, synthetic construct
  misc_feature 1..20: note = chemically synthesized
  source 1..20: mol_type = other DNA
tgcatagaatattgctgaag

SEQ ID NO: 74694 - DNA, 20 bp, synthetic construct
  misc_feature 1..20: note = chemically synthesized
  source 1..20: mol_type = other DNA
ggtacttgtatcacagcagc

SEQ ID NO: 74695 - DNA, 20 bp, synthetic construct
  misc_feature 1..20: note = chemically synthesized
  source 1..20: mol_type = other DNA
tttgctcaaaaaaaaattct

SEQ ID NO: 74696 - DNA, 20 bp, synthetic construct
  misc_feature 1..20: note = chemically synthesized
  source 1..20: mol_type = other DNA
attcttcaagttttagagtc

SEQ ID NO: 74697 - DNA, 20 bp, synthetic construct
  misc_feature 1..20: note = chemically synthesized
  source 1..20: mol_type = other DNA
gttatcagcagagtatacct

SEQ ID NO: 74698 - DNA, 20 bp, synthetic construct
  misc_feature 1..20: note = chemically synthesized
  source 1..20: mol_type = other DNA
atctctttttctataatatc

SEQ ID NO: 74699 - DNA, 20 bp, synthetic construct
  misc_feature 1..20: note = chemically synthesized
  source 1..20: mol_type = other DNA
gccatccaatttaccctcac

SEQ ID NO: 74700 - DNA, 20 bp, synthetic construct
  misc_feature 1..20: note = chemically synthesized
  source 1..20: mol_type = other DNA
gagaactaagatgcctagat

SEQ ID NO: 74701 - DNA, 20 bp, synthetic construct
  misc_feature 1..20: note = chemically synthesized
  source 1..20: mol_type = other DNA
gtcaaacatcatatttatag

SEQ ID NO: 74702 - DNA, 20 bp, synthetic construct
  misc_feature 1..20: note = chemically synthesized
  source 1..20: mol_type = other DNA
agttttactattttttttta

SEQ ID NO: 74703 - DNA, 20 bp, synthetic construct
  misc_feature 1..20: note = chemically synthesized
  source 1..20: mol_type = other DNA
gttttactactataggtgaa

SEQ ID NO: 74704 - DNA, 20 bp, synthetic construct
  misc_feature 1..20: note = chemically synthesized
  source 1..20: mol_type = other DNA
ctataggtgaaaaaagcttc

SEQ ID NO: 74705 - DNA, 20 bp, synthetic construct
  misc_feature 1..20: note = chemically synthesized
  source 1..20: mol_type = other DNA
gaaacatctctctccataaa

SEQ ID NO: 74706 - DNA, 20 bp, synthetic construct
  misc_feature 1..20: note = chemically synthesized
  source 1..20: mol_type = other DNA
atctggcttatcagtgtgaa

SEQ ID NO: 74707 - DNA, 20 bp, synthetic construct
  misc_feature 1..20: note = chemically synthesized
  source 1..20: mol_type = other DNA
aattccatgaatatcatggt

SEQ ID NO: 74708 - DNA, 20 bp, synthetic construct
  misc_feature 1..20: note = chemically synthesized
  source 1..20: mol_type = other DNA
ctaatataatttcttggccc

SEQ ID NO: 74709 - DNA, 20 bp, synthetic construct
  misc_feature 1..20: note = chemically synthesized
  source 1..20: mol_type = other DNA
ttataatgaaagagaatgca

SEQ ID NO: 74710 - DNA, 20 bp, synthetic construct
  misc_feature 1..20: note = chemically synthesized
  source 1..20: mol_type = other DNA
ctgaaaaccttgggcccaag

SEQ ID NO: 74711 - DNA, 20 bp, synthetic construct
  misc_feature 1..20: note = chemically synthesized
  source 1..20: mol_type = other DNA
ttaaaagaagtataaatagt

SEQ ID NO: 74712 - DNA, 20 bp, synthetic construct
  misc_feature 1..20: note = chemically synthesized
  source 1..20: mol_type = other DNA
tctcaacctgctaaatatct

SEQ ID NO: 74713 - DNA, 20 bp, synthetic construct
  misc_feature 1..20: note = chemically synthesized
  source 1..20: mol_type = other DNA
acttaatcatctaacatttt

SEQ ID NO: 74714 - DNA, 20 bp, synthetic construct
  misc_feature 1..20: note = chemically synthesized
  source 1..20: mol_type = other DNA
ttgacccatggaatactaga

SEQ ID NO: 74715 - DNA, 20 bp, synthetic construct
  misc_feature 1..20: note = chemically synthesized
  source 1..20: mol_type = other DNA
ctagacttggctttagctgg

SEQ ID NO: 74716 - DNA, 20 bp, synthetic construct
  misc_feature 1..20: note = chemically synthesized
  source 1..20: mol_type = other DNA
gtcattttcaaaaagaatat

SEQ ID NO: 74717 - DNA, 20 bp, synthetic construct
  misc_feature 1..20: note = chemically synthesized
  source 1..20: mol_type = other DNA
tattttagttttctcttaga

SEQ ID NO: 74718 - DNA, 20 bp, synthetic construct
  misc_feature 1..20: note = chemically synthesized
  source 1..20: mol_type = other DNA
aatgctcattttctttgata

SEQ ID NO: 74719 - DNA, 20 bp, synthetic construct
  misc_feature 1..20: note = chemically synthesized
  source 1..20: mol_type = other DNA
atgcagatttgaatgttgta

SEQ ID NO: 74720 - DNA, 20 bp, synthetic construct
  misc_feature 1..20: note = chemically synthesized
  source 1..20: mol_type = other DNA
gctcagtaataaaaaatttt

SEQ ID NO: 74721 - DNA, 20 bp, synthetic construct
  misc_feature 1..20: note = chemically synthesized
  source 1..20: mol_type = other DNA
tgtgtgtgtgtgcatcgttc

SEQ ID NO: 74722 - DNA, 20 bp, synthetic construct
  misc_feature 1..20: note = chemically synthesized
  source 1..20: mol_type = other DNA
tcatcaggtaatagtctagg

SEQ ID NO: 74723 - DNA, 20 bp, synthetic construct
  misc_feature 1..20: note = chemically synthesized
  source 1..20: mol_type = other DNA
agtaaatgacagatacaggg

SEQ ID NO: 74724 - DNA, 20 bp, synthetic construct
  misc_feature 1..20: note = chemically synthesized
  source 1..20: mol_type = other DNA
atactctaaatcaattcaat

SEQ ID NO: 74725 - DNA, 20 bp, synthetic construct
  misc_feature 1..20: note = chemically synthesized
  source 1..20: mol_type = other DNA
aaaagactcacattttaaat

SEQ ID NO: 74726 - DNA, 20 bp, synthetic construct
  misc_feature 1..20: note = chemically synthesized
  source 1..20: mol_type = other DNA
tattttacaagcaagagaac

SEQ ID NO: 74727 - DNA, 20 bp, synthetic construct
  misc_feature 1..20: note = chemically synthesized
  source 1..20: mol_type = other DNA
tccagggtcatagagtcaga

SEQ ID NO: 74728 - DNA, 20 bp, synthetic construct
  misc_feature 1..20: note = chemically synthesized
  source 1..20: mol_type = other DNA
tatatatgtccttagagcta

SEQ ID NO: 74729 - DNA, 20 bp, synthetic construct
  misc_feature 1..20: note = chemically synthesized
  source 1..20: mol_type = other DNA
tctttgctccgtggatacat

SEQ ID NO: 74730 - DNA, 20 bp, synthetic construct
  misc_feature 1..20: note = chemically synthesized
  source 1..20: mol_type = other DNA
atttgggtcatcacatatga

SEQ ID NO: 74731 - DNA, 20 bp, synthetic construct
  misc_feature 1..20: note = chemically synthesized
  source 1..20: mol_type = other DNA
aaaaatttaaaggccagaaa

SEQ ID NO: 74732 - DNA, 20 bp, synthetic construct
  misc_feature 1..20: note = chemically synthesized
  source 1..20: mol_type = other DNA
attcctgtatttttttttca

SEQ ID NO: 74733 - DNA, 20 bp, synthetic construct
  misc_feature 1..20: note = chemically synthesized
  source 1..20: mol_type = other DNA
tgtaaccctcacttctataa

SEQ ID NO: 74734 - DNA, 20 bp, synthetic construct
  misc_feature 1..20: note = chemically synthesized
  source 1..20: mol_type = other DNA
ctggcctagaactgtgtcag

SEQ ID NO: 74735 - DNA, 20 bp, synthetic construct
  misc_feature 1..20: note = chemically synthesized
  source 1..20: mol_type = other DNA
tttcctttctctgaaacatc

SEQ ID NO: 74736 - DNA, 20 bp, synthetic construct
  misc_feature 1..20: note = chemically synthesized
  source 1..20: mol_type = other DNA
atatattaaatagtaaaaca

SEQ ID NO: 74737 - DNA, 20 bp, synthetic construct
  misc_feature 1..20: note = chemically synthesized
  source 1..20: mol_type = other DNA
ctcaaaaaacaagaacttta

SEQ ID NO: 74738 - DNA, 20 bp, synthetic construct
  misc_feature 1..20: note = chemically synthesized
  source 1..20: mol_type = other DNA
tgtcattcacatattattat

SEQ ID NO: 74739 - DNA, 20 bp, synthetic construct
  misc_feature 1..20: note = chemically synthesized
  source 1..20: mol_type = other DNA
tattttccactcaatattaa

SEQ ID NO: 74740 - DNA, 20 bp, synthetic construct
  misc_feature 1..20: note = chemically synthesized
  source 1..20: mol_type = other DNA
tatattgaagtaatatagac

SEQ ID NO: 74741 - DNA, 20 bp, synthetic construct
  misc_feature 1..20: note = chemically synthesized
  source 1..20: mol_type = other DNA
gagcctattatttgtctatt

SEQ ID NO: 74742 - DNA, 20 bp, synthetic construct
  misc_feature 1..20: note = chemically synthesized
  source 1..20: mol_type = other DNA
attaagagattcaatttctc

SEQ ID NO: 74743 - DNA, 20 bp, synthetic construct
  misc_feature 1..20: note = chemically synthesized
  source 1..20: mol_type = other DNA
cgaggaatttatccatttct

SEQ ID NO: 74744 - DNA, 20 bp, synthetic construct
  misc_feature 1..20: note = chemically synthesized
  source 1..20: mol_type = other DNA
tatccatttctactagattt

SEQ ID NO: 74745 - DNA, 20 bp, synthetic construct
  misc_feature 1..20: note = chemically synthesized
  source 1..20: mol_type = other DNA
tttctagtttatttgcgtag

SEQ ID NO: 74746 - DNA, 20 bp, synthetic construct
  misc_feature 1..20: note = chemically synthesized
  source 1..20: mol_type = other DNA
tgtttatagtattctctgat

SEQ ID NO: 74747 - DNA, 20 bp, synthetic construct
  misc_feature 1..20: note = chemically synthesized
  source 1..20: mol_type = other DNA
tgatggtagtttgtatgtct

SEQ ID NO: 74748 - DNA, 20 bp, synthetic construct
  misc_feature 1..20: note = chemically synthesized
  source 1..20: mol_type = other DNA
atcttttcaaaaaaccagct

SEQ ID NO: 74749 - DNA, 20 bp, synthetic construct
  misc_feature 1..20: note = chemically synthesized
  source 1..20: mol_type = other DNA
aaaaaaccagctcctggatt

SEQ ID NO: 74750 - DNA, 20 bp, synthetic construct
  misc_feature 1..20: note = chemically synthesized
  source 1..20: mol_type = other DNA
ctggattcattgattttttt

SEQ ID NO: 74751 - DNA, 20 bp, synthetic construct
  misc_feature 1..20: note = chemically synthesized
  source 1..20: mol_type = other DNA
ttacttatttcttgccttcc

SEQ ID NO: 74752 - DNA, 20 bp, synthetic construct
  misc_feature 1..20: note = chemically synthesized
  source 1..20: mol_type = other DNA
tgccttccgctagcttttga

SEQ ID NO: 74753 - DNA, 20 bp, synthetic construct
  misc_feature 1..20: note = chemically synthesized
  source 1..20: mol_type = other DNA
tagcttttgaaagtgtttgc

SEQ ID NO: 74754 - DNA, 20 bp, synthetic construct
  misc_feature 1..20: note = chemically synthesized
  source 1..20: mol_type = other DNA
gggtgtcaattttagatctt

SEQ ID NO: 74755 - DNA, 20 bp, synthetic construct
  misc_feature 1..20: note = chemically synthesized
  source 1..20: mol_type = other DNA
gctataaatttccctctaca

SEQ ID NO: 74756 - DNA, 20 bp, synthetic construct
  misc_feature 1..20: note = chemically synthesized
  source 1..20: mol_type = other DNA
acactgctttaaatgtgtcc

SEQ ID NO: 74757 - DNA, 20 bp, synthetic construct
  misc_feature 1..20: note = chemically synthesized
  source 1..20: mol_type = other DNA
ctttaaatgtgtcccagaga

SEQ ID NO: 74758 - DNA, 20 bp, synthetic construct
  misc_feature 1..20: note = chemically synthesized
  source 1..20: mol_type = other DNA
tttgttgtatctttattctc

SEQ ID NO: 74759 - DNA, 20 bp, synthetic construct
  misc_feature 1..20: note = chemically synthesized
  source 1..20: mol_type = other DNA
agtcattcaggagcaggctg

SEQ ID NO: 74760 - DNA, 20 bp, synthetic construct
  misc_feature 1..20: note = chemically synthesized
  source 1..20: mol_type = other DNA
gttcagtttccatgtagttg

SEQ ID NO: 74761 - DNA, 20 bp, synthetic construct
  misc_feature 1..20: note = chemically synthesized
  source 1..20: mol_type = other DNA
atgtagttgagtggttttga

SEQ ID NO: 74762 - DNA, 20 bp, synthetic construct
  misc_feature 1..20: note = chemically synthesized
  source 1..20: mol_type = other DNA
tgagtttcttaatcctgagt

SEQ ID NO: 74763 - DNA, 20 bp, synthetic construct
  misc_feature 1..20: note = chemically synthesized
  source 1..20: mol_type = other DNA
tttcttaatcctgagttcta

SEQ ID NO: 74764 - DNA, 20 bp, synthetic construct
  misc_feature 1..20: note = chemically synthesized
  source 1..20: mol_type = other DNA
gattgcactgtggtctgaga

SEQ ID NO: 74765 - DNA, 20 bp, synthetic construct
  misc_feature 1..20: note = chemically synthesized
  source 1..20: mol_type = other DNA
tggtctgagagacagtttgt

SEQ ID NO: 74766 - DNA, 20 bp, synthetic construct
  misc_feature 1..20: note = chemically synthesized
  source 1..20: mol_type = other DNA
ttgttattgtttctgttctt

SEQ ID NO: 74767 - DNA, 20 bp, synthetic construct
  misc_feature 1..20: note = chemically synthesized
  source 1..20: mol_type = other DNA
gttcttttacgtttgctgag

SEQ ID NO: 74768 - DNA, 20 bp, synthetic construct
  misc_feature 1..20: note = chemically synthesized
  source 1..20: mol_type = other DNA
gctgagaagaatgtatattc

SEQ ID NO: 74769 - DNA, 20 bp, synthetic construct
  misc_feature 1..20: note = chemically synthesized
  source 1..20: mol_type = other DNA
gttctgtagatgtctattag

SEQ ID NO: 74770 - DNA, 20 bp, synthetic construct
  misc_feature 1..20: note = chemically synthesized
  source 1..20: mol_type = other DNA
ctctttgtaggtctctaagg

SEQ ID NO: 74771 - DNA, 20 bp, synthetic construct
  misc_feature 1..20: note = chemically synthesized
  source 1..20: mol_type = other DNA
ctttgtctcttttgatcttt

SEQ ID NO: 74772 - DNA, 20 bp, synthetic construct
  misc_feature 1..20: note = chemically synthesized
  source 1..20: mol_type = other DNA
ttgatctttgttggtttaaa

SEQ ID NO: 74773 - DNA, 20 bp, synthetic construct
  misc_feature 1..20: note = chemically synthesized
  source 1..20: mol_type = other DNA
aaagtctgttttatcagaga

SEQ ID NO: 74774 - DNA, 20 bp, synthetic construct
  misc_feature 1..20: note = chemically synthesized
  source 1..20: mol_type = other DNA
gattgcaaaccctgcctttt

SEQ ID NO: 74775 - DNA, 20 bp, synthetic construct
  misc_feature 1..20: note = chemically synthesized
  source 1..20: mol_type = other DNA
ctgccttttttttgttttcc

SEQ ID NO: 74776 - DNA, 20 bp, synthetic construct
  misc_feature 1..20: note = chemically synthesized
  source 1..20: mol_type = other DNA
gcctatgtgtgtctctccac

SEQ ID NO: 74777 - DNA, 20 bp, synthetic construct
  misc_feature 1..20: note = chemically synthesized
  source 1..20: mol_type = other DNA
tgtgtgtctctccacatgag

SEQ ID NO: 74778 - DNA, 20 bp, synthetic construct
  misc_feature 1..20: note = chemically synthesized
  source 1..20: mol_type = other DNA
attatgatgttagctggtta

SEQ ID NO: 74779 - DNA, 20 bp, synthetic construct
  misc_feature 1..20: note = chemically synthesized
  source 1..20: mol_type = other DNA
ttattttgcttgctagttga

SEQ ID NO: 74780 - DNA, 20 bp, synthetic construct
  misc_feature 1..20: note = chemically synthesized
  source 1..20: mol_type = other DNA
ttgatggtctttacaatttg

SEQ ID NO: 74781 - DNA, 20 bp, synthetic construct
  misc_feature 1..20: note = chemically synthesized
  source 1..20: mol_type = other DNA
tttttgcagtggctggtact

SEQ ID NO: 74782 - DNA, 20 bp, synthetic construct
  misc_feature 1..20: note = chemically synthesized
  source 1..20: mol_type = other DNA
ctggtactggttgtttcttt

SEQ ID NO: 74783 - DNA, 20 bp, synthetic construct
  misc_feature 1..20: note = chemically synthesized
  source 1..20: mol_type = other DNA
tggttgtttctttccatgtt

SEQ ID NO: 74784 - DNA, 20 bp, synthetic construct
  misc_feature 1..20: note = chemically synthesized
  source 1..20: mol_type = other DNA
ctggtggtgacaaaatcagc

SEQ ID NO: 74785 - DNA, 20 bp, synthetic construct
  misc_feature 1..20: note = chemically synthesized
  source 1..20: mol_type = other DNA
ttttatttctccttcactta

SEQ ID NO: 74786 - DNA, 20 bp, synthetic construct
  misc_feature 1..20: note = chemically synthesized
  source 1..20: mol_type = other DNA
ccaaaaaaagtccaggacca

SEQ ID NO: 74787 - DNA, 20 bp, synthetic construct
  misc_feature 1..20: note = chemically synthesized
  source 1..20: mol_type = other DNA
ccaaatccaggagcacatca

SEQ ID NO: 74788 - DNA, 20 bp, synthetic construct
  misc_feature 1..20: note = chemically synthesized
  source 1..20: mol_type = other DNA
agcttatccaccatgatcaa

SEQ ID NO: 74789 - DNA, 20 bp, synthetic construct
  misc_feature 1..20: note = chemically synthesized
  source 1..20: mol_type = other DNA
cagaaccaaagacacaaacc

SEQ ID NO: 74790 - DNA, 20 bp, synthetic construct
  misc_feature 1..20: note = chemically synthesized
  source 1..20: mol_type = other DNA
aggcctttgacaaaattcaa

SEQ ID NO: 74791 - DNA, 20 bp, synthetic construct
  misc_feature 1..20: note = chemically synthesized
  source 1..20: mol_type = other DNA
aaaagaggaagtgaaattgt

SEQ ID NO: 74792 - DNA, 20 bp, synthetic construct
  misc_feature 1..20: note = chemically synthesized
  source 1..20: mol_type = other DNA
attgtccctgtttgcagatg

SEQ ID NO: 74793 - DNA, 20 bp, synthetic construct
  misc_feature 1..20: note = chemically synthesized
  source 1..20: mol_type = other DNA
ccttactgcccaaggtaatt

SEQ ID NO: 74794 - DNA, 20 bp, synthetic construct
  misc_feature 1..20: note = chemically synthesized
  source 1..20: mol_type = other DNA
gacaaaaacaagcaatgggg

SEQ ID NO: 74795 - DNA, 20 bp, synthetic construct
  misc_feature 1..20: note = chemically synthesized
  source 1..20: mol_type = other DNA
ttatacaaaaattatttcaa

SEQ ID NO: 74796 - DNA, 20 bp, synthetic construct
  misc_feature 1..20: note = chemically synthesized
  source 1..20: mol_type = other DNA
aatgggatctaattaaacta

SEQ ID NO: 74797 - DNA, 20 bp, synthetic construct
  misc_feature 1..20: note = chemically synthesized
  source 1..20: mol_type = other DNA
ctataaagacacatgcacac

SEQ ID NO: 74798 - DNA, 20 bp, synthetic construct
  misc_feature 1..20: note = chemically synthesized
  source 1..20: mol_type = other DNA
caaatgtccaacaatgatag

SEQ ID NO: 74799 - DNA, 20 bp, synthetic construct
  misc_feature 1..20: note = chemically synthesized
  source 1..20: mol_type = other DNA
aacttctgcctcccaggttc

SEQ ID NO: 74800 - DNA, 20 bp, synthetic construct
  misc_feature 1..20: note = chemically synthesized
  source 1..20: mol_type = other DNA
tgcctcagcctcttgagtag

SEQ ID NO: 74801 - DNA, 20 bp, synthetic construct
  misc_feature 1..20: note = chemically synthesized
  source 1..20: mol_type = other DNA
ttttgtatttttagtagaga

SEQ ID NO: 74802 - DNA, 20 bp, synthetic construct
  misc_feature 1..20: note = chemically synthesized
  source 1..20: mol_type = other DNA
ttttagtagagacggggttt

SEQ ID NO: 74803 - DNA, 20 bp, synthetic construct
  misc_feature 1..20: note = chemically synthesized
  source 1..20: mol_type = other DNA
cgcctcagcctctcaaagtg

SEQ ID NO: 74804 - DNA, 20 bp, synthetic construct
  misc_feature 1..20: note = chemically synthesized
  source 1..20: mol_type = other DNA
gccaccgtgccaggctggca

SEQ ID NO: 74805 - DNA, 20 bp, synthetic construct
  misc_feature 1..20: note = chemically synthesized
  source 1..20: mol_type = other DNA
cgtctgccattgcaaatatc

SEQ ID NO: 74806 - DNA, 20 bp, synthetic construct
  misc_feature 1..20: note = chemically synthesized
  source 1..20: mol_type = other DNA
ttgcaaatatctaaagttta

SEQ ID NO: 74807 - DNA, 20 bp, synthetic construct
  misc_feature 1..20: note = chemically synthesized
  source 1..20: mol_type = other DNA
tttatcctatatttttgaga

SEQ ID NO: 74808 - DNA, 20 bp, synthetic construct
  misc_feature 1..20: note = chemically synthesized
  source 1..20: mol_type = other DNA
tatgtcttcaatggctagca

SEQ ID NO: 74809 - DNA, 20 bp, synthetic construct
  misc_feature 1..20: note = chemically synthesized
  source 1..20: mol_type = other DNA
ggaagaaggcatacatgcta

SEQ ID NO: 74810 - DNA, 20 bp, synthetic construct
  misc_feature 1..20: note = chemically synthesized
  source 1..20: mol_type = other DNA
gatcagtaaaaaatttgatg

SEQ ID NO: 74811 - DNA, 20 bp, synthetic construct
  misc_feature 1..20: note = chemically synthesized
  source 1..20: mol_type = other DNA
atttgatgctgcgttttata

SEQ ID NO: 74812 - DNA, 20 bp, synthetic construct
  misc_feature 1..20: note = chemically synthesized
  source 1..20: mol_type = other DNA
cattggatggtagtaaagat

SEQ ID NO: 74813 - DNA, 20 bp, synthetic construct
  misc_feature 1..20: note = chemically synthesized
  source 1..20: mol_type = other DNA
tggtagtaaagatcaaagct

SEQ ID NO: 74814 - DNA, 20 bp, synthetic construct
  misc_feature 1..20: note = chemically synthesized
  source 1..20: mol_type = other DNA
gggtaagaggctgaaagtct

SEQ ID NO: 74815 - DNA, 20 bp, synthetic construct
  misc_feature 1..20: note = chemically synthesized
  source 1..20: mol_type = other DNA
atttatataatggttattta

SEQ ID NO: 74816 - DNA, 20 bp, synthetic construct
  misc_feature 1..20: note = chemically synthesized
  source 1..20: mol_type = other DNA
ggcttttcaataggttattg

SEQ ID NO: 74817 - DNA, 20 bp, synthetic construct
  misc_feature 1..20: note = chemically synthesized
  source 1..20: mol_type = other DNA
agacctcattcagcctaagg

SEQ ID NO: 74818 - DNA, 20 bp, synthetic construct
  misc_feature 1..20: note = chemically synthesized
  source 1..20: mol_type = other DNA
tgatgggaatcccagggctg

SEQ ID NO: 74819 - DNA, 20 bp, synthetic construct
  misc_feature 1..20: note = chemically synthesized
  source 1..20: mol_type = other DNA
tttaacctcatcagccgtca

SEQ ID NO: 74820 - DNA, 20 bp, synthetic construct
  misc_feature 1..20: note = chemically synthesized
  source 1..20: mol_type = other DNA
ttggcatagcagctgtggtc

SEQ ID NO: 74821 - DNA, 20 bp, synthetic construct
  misc_feature 1..20: note = chemically synthesized
  source 1..20: mol_type = other DNA
attcctactgtgagcacatt

SEQ ID NO: 74822 - DNA, 20 bp, synthetic construct
  misc_feature 1..20: note = chemically synthesized
  source 1..20: mol_type = other DNA
tactgtgagcacattgccag

SEQ ID NO: 74823 - DNA, 20 bp, synthetic construct
  misc_feature 1..20: note = chemically synthesized
  source 1..20: mol_type = other DNA
actctctacaggactggata

SEQ ID NO: 74824 - DNA, 20 bp, synthetic construct
  misc_feature 1..20: note = chemically synthesized
  source 1..20: mol_type = other DNA
ctacacaatgatccttcact

SEQ ID NO: 74825 - DNA, 20 bp, synthetic construct
  misc_feature 1..20: note = chemically synthesized
  source 1..20: mol_type = other DNA
cattcttttcatttcttgcc

SEQ ID NO: 74826 - DNA, 20 bp, synthetic construct
  misc_feature 1..20: note = chemically synthesized
  source 1..20: mol_type = other DNA
gaccaaacaaattaaagatc

SEQ ID NO: 74827 - DNA, 20 bp, synthetic construct
  misc_feature 1..20: note = chemically synthesized
  source 1..20: mol_type = other DNA
acaaattaaagatcgagtga

SEQ ID NO: 74828 - DNA, 20 bp, synthetic construct
  misc_feature 1..20: note = chemically synthesized
  source 1..20: mol_type = other DNA
tctcctatcagtgtatgctg

SEQ ID NO: 74829 - DNA, 20 bp, synthetic construct
  misc_feature 1..20: note = chemically synthesized
  source 1..20: mol_type = other DNA
tatgctgttaagattaaaaa

SEQ ID NO: 74830 - DNA, 20 bp, synthetic construct
  misc_feature 1..20: note = chemically synthesized
  source 1..20: mol_type = other DNA
tgctaaggcactcaaagatc

SEQ ID NO: 74831 - DNA, 20 bp, synthetic construct
  misc_feature 1..20: note = chemically synthesized
  source 1..20: mol_type = other DNA
gagaaaagagaaatatattt

SEQ ID NO: 74832 - DNA, 20 bp, synthetic construct
  misc_feature 1..20: note = chemically synthesized
  source 1..20: mol_type = other DNA
aaatatattttagggtttaa

SEQ ID NO: 74833 - DNA, 20 bp, synthetic construct
  misc_feature 1..20: note = chemically synthesized
  source 1..20: mol_type = other DNA
tcctacgtagagctaggaag

SEQ ID NO: 74834 - DNA, 20 bp, synthetic construct
  misc_feature 1..20: note = chemically synthesized
  source 1..20: mol_type = other DNA
gtggggttttgagtcagtca

SEQ ID NO: 74835 - DNA, 20 bp, synthetic construct
  misc_feature 1..20: note = chemically synthesized
  source 1..20: mol_type = other DNA
ccaatattaaattaacaaat

SEQ ID NO: 74836 - DNA, 20 bp, synthetic construct
  misc_feature 1..20: note = chemically synthesized
  source 1..20: mol_type = other DNA
atacacatttccccctatag

SEQ ID NO: 74837 - DNA, 20 bp, synthetic construct
  misc_feature 1..20: note = chemically synthesized
  source 1..20: mol_type = other DNA
gaaacatcactgaagaagta

SEQ ID NO: 74838 - DNA, 20 bp, synthetic construct
  misc_feature 1..20: note = chemically synthesized
  source 1..20: mol_type = other DNA
aacattttttaaaaagctag

SEQ ID NO: 74839 - DNA, 20 bp, synthetic construct
  misc_feature 1..20: note = chemically synthesized
  source 1..20: mol_type = other DNA
agcctagaacaatgccatga

SEQ ID NO: 74840 - DNA, 20 bp, synthetic construct
  misc_feature 1..20: note = chemically synthesized
  source 1..20: mol_type = other DNA
cttaaacacttgaaatctac

SEQ ID NO: 74841 - DNA, 20 bp, synthetic construct
  misc_feature 1..20: note = chemically synthesized
  source 1..20: mol_type = other DNA
acacttgaaatctactcatg

SEQ ID NO: 74842 - DNA, 20 bp, synthetic construct
  misc_feature 1..20: note = chemically synthesized
  source 1..20: mol_type = other DNA
gaaatctactcatgcttggc

SEQ ID NO: 74843 - DNA, 20 bp, synthetic construct
  misc_feature 1..20: note = chemically synthesized
  source 1..20: mol_type = other DNA
ctactcatgcttggcttatg

SEQ ID NO: 74844 - DNA, 20 bp, synthetic construct
  misc_feature 1..20: note = chemically synthesized
  source 1..20: mol_type = other DNA
tggcttatgcttagcttttt

SEQ ID NO: 74845 - DNA, 20 bp, synthetic construct
  misc_feature 1..20: note = chemically synthesized
  source 1..20: mol_type = other DNA
aatttatacatgtattaaca

SEQ ID NO: 74846 - DNA, 20 bp, synthetic construct
  misc_feature 1..20: note = chemically synthesized
  source 1..20: mol_type = other DNA
gcatgcacacacacacacac

SEQ ID NO: 74847 - DNA, 20 bp, synthetic construct
  misc_feature 1..20: note = chemically synthesized
  source 1..20: mol_type = other DNA
cattctaaaaaatctaatta

SEQ ID NO: 74848 - DNA, 20 bp, synthetic construct
  misc_feature 1..20: note = chemically synthesized
  source 1..20: mol_type = other DNA
agtacatctgttaaacttca

SEQ ID NO: 74849 - DNA, 20 bp, synthetic construct
  misc_feature 1..20: note = chemically synthesized
  source 1..20: mol_type = other DNA
gtttttttttctactctaca

SEQ ID NO: 74850 - DNA, 20 bp, synthetic construct
  misc_feature 1..20: note = chemically synthesized
  source 1..20: mol_type = other DNA
tgatggaaaatgagggaata

SEQ ID NO: 74851 - DNA, 20 bp, synthetic construct
  misc_feature 1..20: note = chemically synthesized
  source 1..20: mol_type = other DNA
atagattgcagtatgatgac

SEQ ID NO: 74852 - DNA, 20 bp, synthetic construct
  misc_feature 1..20: note = chemically synthesized
  source 1..20: mol_type = other DNA
gaggatttgactgaaaggta

SEQ ID NO: 74853 - DNA, 20 bp, synthetic construct
  misc_feature 1..20: note = chemically synthesized
  source 1..20: mol_type = other DNA
aaggtaggaagattttgtat

SEQ ID NO: 74854 - DNA, 20 bp, synthetic construct
  misc_feature 1..20: note = chemically synthesized
  source 1..20: mol_type = other DNA
agttaaaatggtagaagtaa

SEQ ID NO: 74855 - DNA, 20 bp, synthetic construct
  misc_feature 1..20: note = chemically synthesized
  source 1..20: mol_type = other DNA
aataaactttcagttgagca

SEQ ID NO: 74856 - DNA, 20 bp, synthetic construct
  misc_feature 1..20: note = chemically synthesized
  source 1..20: mol_type = other DNA
agttgagcactcagattctg

SEQ ID NO: 74857 - DNA, 20 bp, synthetic construct
  misc_feature 1..20: note = chemically synthesized
  source 1..20: mol_type = other DNA
ccattgccctggacatgaga

SEQ ID NO: 74858 - DNA, 20 bp, synthetic construct
  misc_feature 1..20: note = chemically synthesized
  source 1..20: mol_type = other DNA
aaccaaacaattttaaagca

SEQ ID NO: 74859 - DNA, 20 bp, synthetic construct
  misc_feature 1..20: note = chemically synthesized
  source 1..20: mol_type = other DNA
aacaaaaggtacagggtgct

SEQ ID NO: 74860 - DNA, 20 bp, synthetic construct
  misc_feature 1..20: note = chemically synthesized
  source 1..20: mol_type = other DNA
agaccagtaccactacagac

SEQ ID NO: 74861 - DNA, 20 bp, synthetic construct
  misc_feature 1..20: note = chemically synthesized
  source 1..20: mol_type = other DNA
ttaatatcaatcaagcaaaa

SEQ ID NO: 74862 - DNA, 20 bp, synthetic construct
  misc_feature 1..20: note = chemically synthesized
  source 1..20: mol_type = other DNA
aaggacaacataaaaatcaa

SEQ ID NO: 74863 - DNA, 20 bp, synthetic construct
  misc_feature 1..20: note = chemically synthesized
  source 1..20: mol_type = other DNA
catgggaggctgaggcagga

SEQ ID NO: 74864 - DNA, 20 bp, synthetic construct
  misc_feature 1..20: note = chemically synthesized
  source 1..20: mol_type = other DNA
gtgcctaaaataaatgaaat

SEQ ID NO: 74865 - DNA, 20 bp, synthetic construct
  misc_feature 1..20: note = chemically synthesized
  source 1..20: mol_type = other DNA
tgaaataattgtttattata

SEQ ID NO: 74866 - DNA, 20 bp, synthetic construct
  misc_feature 1..20: note = chemically synthesized
  source 1..20: mol_type = other DNA
ctaatcaaaataaaaatttg

SEQ ID NO: 74867 - DNA, 20 bp, synthetic construct
  misc_feature 1..20: note = chemically synthesized
  source 1..20: mol_type = other DNA
tctttccatttttattgtga

SEQ ID NO: 74868 - DNA, 20 bp, synthetic construct
  misc_feature 1..20: note = chemically synthesized
  source 1..20: mol_type = other DNA
atagtaacctctaatctact

SEQ ID NO: 74869 - DNA, 20 bp, synthetic construct
  misc_feature 1..20: note = chemically synthesized
  source 1..20: mol_type = other DNA
tattttagataattcatata

SEQ ID NO: 74870 - DNA, 20 bp, synthetic construct
  misc_feature 1..20: note = chemically synthesized
  source 1..20: mol_type = other DNA
aaatagattcatacaatatt

SEQ ID NO: 74871 - DNA, 20 bp, synthetic construct
  misc_feature 1..20: note = chemically synthesized
  source 1..20: mol_type = other DNA
acaatatttgttgttttgtg

SEQ ID NO: 74872 - DNA, 20 bp, synthetic construct
  misc_feature 1..20: note = chemically synthesized
  source 1..20: mol_type = other DNA
ctggcttattttacccaaca

SEQ ID NO: 74873 - DNA, 20 bp, synthetic construct
  misc_feature 1..20: note = chemically synthesized
  source 1..20: mol_type = other DNA
taacatgtatagtggtaagt

SEQ ID NO: 74874 - DNA, 20 bp, synthetic construct
  misc_feature 1..20: note = chemically synthesized
  source 1..20: mol_type = other DNA
tttgcttaatgttgtccatt

SEQ ID NO: 74875 - DNA, 20 bp, synthetic construct
  misc_feature 1..20: note = chemically synthesized
  source 1..20: mol_type = other DNA
taaaacagtgttatttgagg

SEQ ID NO: 74876 - DNA, 20 bp, synthetic construct
  misc_feature 1..20: note = chemically synthesized
  source 1..20: mol_type = other DNA
ccattgtgtgtatatatcac

SEQ ID NO: 74877 - DNA, 20 bp, synthetic construct
  misc_feature 1..20: note = chemically synthesized
  source 1..20: mol_type = other DNA
tcacatttgtttattcattc

SEQ ID NO: 74878 - DNA, 20 bp, synthetic construct
  misc_feature 1..20: note = chemically synthesized
  source 1..20: mol_type = other DNA
catctgtttatgtacattct

SEQ ID NO: 74879 - DNA, 20 bp, synthetic construct
  misc_feature 1..20: note = chemically synthesized
  source 1..20: mol_type = other DNA
atgaacatttcagtacaagt

SEQ ID NO: 74880 - DNA, 20 bp, synthetic construct
  misc_feature 1..20: note = chemically synthesized
  source 1..20: mol_type = other DNA
ggtcatatgttattcagtgc

SEQ ID NO: 74881 - DNA, 20 bp, synthetic construct
  misc_feature 1..20: note = chemically synthesized
  source 1..20: mol_type = other DNA
acatttttagcagcaatata

SEQ ID NO: 74882 - DNA, 20 bp, synthetic construct
  misc_feature 1..20: note = chemically synthesized
  source 1..20: mol_type = other DNA
gtcaacacttgttacttttc

SEQ ID NO: 74883 - DNA, 20 bp, synthetic construct
  misc_feature 1..20: note = chemically synthesized
  source 1..20: mol_type = other DNA
cacttgttacttttcatttg

SEQ ID NO: 74884 - DNA, 20 bp, synthetic construct
  misc_feature 1..20: note = chemically synthesized
  source 1..20: mol_type = other DNA
cttaaagtatagacattcta

SEQ ID NO: 74885 - DNA, 20 bp, synthetic construct
  misc_feature 1..20: note = chemically synthesized
  source 1..20: mol_type = other DNA
agtttgaagtagtgtcttat

SEQ ID NO: 74886 - DNA, 20 bp, synthetic construct
  misc_feature 1..20: note = chemically synthesized
  source 1..20: mol_type = other DNA
aagtagtgtcttattgtggt

SEQ ID NO: 74887 - DNA, 20 bp, synthetic construct
  misc_feature 1..20: note = chemically synthesized
  source 1..20: mol_type = other DNA
atttgcatatttttaaattg

SEQ ID NO: 74888 - DNA, 20 bp, synthetic construct
  misc_feature 1..20: note = chemically synthesized
  source 1..20: mol_type = other DNA
ttaaattgagttgtttgtct

SEQ ID NO: 74889 - DNA, 20 bp, synthetic construct
  misc_feature 1..20: note = chemically synthesized
  source 1..20: mol_type = other DNA
ttgtctttttactttcttaa

SEQ ID NO: 74890 - DNA, 20 bp, synthetic construct
  misc_feature 1..20: note = chemically synthesized
  source 1..20: mol_type = other DNA
tattgtaaaatcaaagttca

SEQ ID NO: 74891 - DNA, 20 bp, synthetic construct
  misc_feature 1..20: note = chemically synthesized
  source 1..20: mol_type = other DNA
caaagttcatgaagatttac

SEQ ID NO: 74892 - DNA, 20 bp, synthetic construct
  misc_feature 1..20: note = chemically synthesized
  source 1..20: mol_type = other DNA
atgcttccttccgagggtgt

SEQ ID NO: 74893 - DNA, 20 bp, synthetic construct
  misc_feature 1..20: note = chemically synthesized
  source 1..20: mol_type = other DNA
attacacaatttttatgcat

SEQ ID NO: 74894 - DNA, 20 bp, synthetic construct
  misc_feature 1..20: note = chemically synthesized
  source 1..20: mol_type = other DNA
agttagcatgacaacaaaaa

SEQ ID NO: 74895 - DNA, 20 bp, synthetic construct
  misc_feature 1..20: note = chemically synthesized
  source 1..20: mol_type = other DNA
aaaatgtatgtaatccctca

SEQ ID NO: 74896 - DNA, 20 bp, synthetic construct
  misc_feature 1..20: note = chemically synthesized
  source 1..20: mol_type = other DNA
cttatacttggtattagaaa

SEQ ID NO: 74897 - DNA, 20 bp, synthetic construct
  misc_feature 1..20: note = chemically synthesized
  source 1..20: mol_type = other DNA
tggtattagaaaaattgttt

SEQ ID NO: 74898 - DNA, 20 bp, synthetic construct
  misc_feature 1..20: note = chemically synthesized
  source 1..20: mol_type = other DNA
actattattacctgtcttta

SEQ ID NO: 74899 - DNA, 20 bp, synthetic construct
  misc_feature 1..20: note = chemically synthesized
  source 1..20: mol_type = other DNA
actttttactttgtatatgg

SEQ ID NO: 74900 - DNA, 20 bp, synthetic construct
  misc_feature 1..20: note = chemically synthesized
  source 1..20: mol_type = other DNA
gtatgttaacctgactacat

SEQ ID NO: 74901 - DNA, 20 bp, synthetic construct
  misc_feature 1..20: note = chemically synthesized
  source 1..20: mol_type = other DNA
tgactacataaaagttttgt

SEQ ID NO: 74902 - DNA, 20 bp, synthetic construct
  misc_feature 1..20: note = chemically synthesized
  source 1..20: mol_type = other DNA
aatgatattgtgtaactatt

SEQ ID NO: 74903 - DNA, 20 bp, synthetic construct
  misc_feature 1..20: note = chemically synthesized
  source 1..20: mol_type = other DNA
tgtaactattttatgtttat

SEQ ID NO: 74904 - DNA, 20 bp, synthetic construct
  misc_feature 1..20: note = chemically synthesized
  source 1..20: mol_type = other DNA
tcttatgtatactctctcca

SEQ ID NO: 74905 - DNA, 20 bp, synthetic construct
  misc_feature 1..20: note = chemically synthesized
  source 1..20: mol_type = other DNA
ccctttctctctaatacacc

SEQ ID NO: 74906 - DNA, 20 bp, synthetic construct
  misc_feature 1..20: note = chemically synthesized
  source 1..20: mol_type = other DNA
gggaataattattcttggtt

SEQ ID NO: 74907 - DNA, 20 bp, synthetic construct
  misc_feature 1..20: note = chemically synthesized
  source 1..20: mol_type = other DNA
aaacagtaacaaatagtatg

SEQ ID NO: 74908 - DNA, 20 bp, synthetic construct
  misc_feature 1..20: note = chemically synthesized
  source 1..20: mol_type = other DNA
tatgcctaatggtataatgt

SEQ ID NO: 74909 - DNA, 20 bp, synthetic construct
  misc_feature 1..20: note = chemically synthesized
  source 1..20: mol_type = other DNA
ggtataatgtgctggcttgc

SEQ ID NO: 74910 - DNA, 20 bp, synthetic construct
  misc_feature 1..20: note = chemically synthesized
  source 1..20: mol_type = other DNA
ggcttgcaccagcttaggaa

SEQ ID NO: 74911 - DNA, 20 bp, synthetic construct
  misc_feature 1..20: note = chemically synthesized
  source 1..20: mol_type = other DNA
ggaaatatttattactatcc

SEQ ID NO: 74912 - DNA, 20 bp, synthetic construct
  misc_feature 1..20: note = chemically synthesized
  source 1..20: mol_type = other DNA
acatgtgacttgtgagatac

SEQ ID NO: 74913 - DNA, 20 bp, synthetic construct
  misc_feature 1..20: note = chemically synthesized
  source 1..20: mol_type = other DNA
gacccttctgcaaaatacag

SEQ ID NO: 74914 - DNA, 20 bp, synthetic construct
  misc_feature 1..20: note = chemically synthesized
  source 1..20: mol_type = other DNA
aaatcaactttaatataatc

SEQ ID NO: 74915 - DNA, 20 bp, synthetic construct
  misc_feature 1..20: note = chemically synthesized
  source 1..20: mol_type = other DNA
ctttataaacactacaagtt

SEQ ID NO: 74916 - DNA, 20 bp, synthetic construct
  misc_feature 1..20: note = chemically synthesized
  source 1..20: mol_type = other DNA
tccatgtgaatctgtcatct

SEQ ID NO: 74917 - DNA, 20 bp, synthetic construct
  misc_feature 1..20: note = chemically synthesized
  source 1..20: mol_type = other DNA
gtcatctctatgcttatttt

SEQ ID NO: 74918 - DNA, 20 bp, synthetic construct
  misc_feature 1..20: note = chemically synthesized
  source 1..20: mol_type = other DNA
actgccatagatgacccaac

SEQ ID NO: 74919 - DNA, 20 bp, synthetic construct
  misc_feature 1..20: note = chemically synthesized
  source 1..20: mol_type = other DNA
atacttttctgcatgaccca

SEQ ID NO: 74920 - DNA, 20 bp, synthetic construct
  misc_feature 1..20: note = chemically synthesized
  source 1..20: mol_type = other DNA
taggtttctcttccactcac

SEQ ID NO: 74921 - DNA, 20 bp, synthetic construct
  misc_feature 1..20: note = chemically synthesized
  source 1..20: mol_type = other DNA
tcactgtggcttacctgtgc

SEQ ID NO: 74922 - DNA, 20 bp, synthetic construct
  misc_feature 1..20: note = chemically synthesized
  source 1..20: mol_type = other DNA
acttatatattccagtctcc

SEQ ID NO: 74923 - DNA, 20 bp, synthetic construct
  misc_feature 1..20: note = chemically synthesized
  source 1..20: mol_type = other DNA
cttcagaggaagtatcacca

SEQ ID NO: 74924 - DNA, 20 bp, synthetic construct
  misc_feature 1..20: note = chemically synthesized
  source 1..20: mol_type = other DNA
gcctttgttgaacttggtgt

SEQ ID NO: 74925 - DNA, 20 bp, synthetic construct
  misc_feature 1..20: note = chemically synthesized
  source 1..20: mol_type = other DNA
tcctctttggcattaacgat

SEQ ID NO: 74926 - DNA, 20 bp, synthetic construct
  misc_feature 1..20: note = chemically synthesized
  source 1..20: mol_type = other DNA
ttttggtggttgcctgctcc

SEQ ID NO: 74927 - DNA, 20 bp, synthetic construct
  misc_feature 1..20: note = chemically synthesized
  source 1..20: mol_type = other DNA
tccttctggcaatgtcagtg

SEQ ID NO: 74928 - DNA, 20 bp, synthetic construct
  misc_feature 1..20: note = chemically synthesized
  source 1..20: mol_type = other DNA
cgccattgccttgcgcagtg

SEQ ID NO: 74929 - DNA, 20 bp, synthetic construct
  misc_feature 1..20: note = chemically synthesized
  source 1..20: mol_type = other DNA
ggactggacttattgttcat

SEQ ID NO: 74930 - DNA, 20 bp, synthetic construct
  misc_feature 1..20: note = chemically synthesized
  source 1..20: mol_type = other DNA
gttcattgtggtttcttatg

SEQ ID NO: 74931 - DNA, 20 bp, synthetic construct
  misc_feature 1..20: note = chemically synthesized
  source 1..20: mol_type = other DNA
attcttcatacagtactgga

SEQ ID NO: 74932 - DNA, 20 bp, synthetic construct
  misc_feature 1..20: note = chemically synthesized
  source 1..20: mol_type = other DNA
atgtgtgtcgcacatatgtg

SEQ ID NO: 74933 - DNA, 20 bp, synthetic construct
  misc_feature 1..20: note = chemically synthesized
  source 1..20: mol_type = other DNA
tgatcagcctctccctgatg

SEQ ID NO: 74934 - DNA, 20 bp, synthetic construct
  misc_feature 1..20: note = chemically synthesized
  source 1..20: mol_type = other DNA
cttttccagactgtcacggc

SEQ ID NO: 74935 - DNA, 20 bp, synthetic construct
  misc_feature 1..20: note = chemically synthesized
  source 1..20: mol_type = other DNA
tgacagcacaggcacttaga

SEQ ID NO: 74936 - DNA, 20 bp, synthetic construct
  misc_feature 1..20: note = chemically synthesized
  source 1..20: mol_type = other DNA
tcaggctttattacctgaat

SEQ ID NO: 74937 - DNA, 20 bp, synthetic construct
  misc_feature 1..20: note = chemically synthesized
  source 1..20: mol_type = other DNA
tttgcaaatatgaaaaattc

SEQ ID NO: 74938 - DNA, 20 bp, synthetic construct
  misc_feature 1..20: note = chemically synthesized
  source 1..20: mol_type = other DNA
tgaaaaattccatggcttat

SEQ ID NO: 74939 - DNA, 20 bp, synthetic construct
  misc_feature 1..20: note = chemically synthesized
  source 1..20: mol_type = other DNA
tggcttattattgcttgtta

SEQ ID NO: 74940 - DNA, 20 bp, synthetic construct
  misc_feature 1..20: note = chemically synthesized
  source 1..20: mol_type = other DNA
ttttgtagatgaagaaaaaa

SEQ ID NO: 74941 - DNA, 20 bp, synthetic construct
  misc_feature 1..20: note = chemically synthesized
  source 1..20: mol_type = other DNA
tgtgggaggaggcatagaac

SEQ ID NO: 74942 - DNA, 20 bp, synthetic construct
  misc_feature 1..20: note = chemically synthesized
  source 1..20: mol_type = other DNA
atatgtagaaagagtcttgg

SEQ ID NO: 74943 - DNA, 20 bp, synthetic construct
  misc_feature 1..20: note = chemically synthesized
  source 1..20: mol_type = other DNA
agaaagagtcttggggaggt

SEQ ID NO: 74944 - DNA, 20 bp, synthetic construct
  misc_feature 1..20: note = chemically synthesized
  source 1..20: mol_type = other DNA
aaagagtacatattgtatta

SEQ ID NO: 74945 - DNA, 20 bp, synthetic construct
  misc_feature 1..20: note = chemically synthesized
  source 1..20: mol_type = other DNA
atattgtattattttgtttg

SEQ ID NO: 74946 - DNA, 20 bp, synthetic construct
  misc_feature 1..20: note = chemically synthesized
  source 1..20: mol_type = other DNA
ttaatgtcaaaaaatcagaa

SEQ ID NO: 74947 - DNA, 20 bp, synthetic construct
  misc_feature 1..20: note = chemically synthesized
  source 1..20: mol_type = other DNA
ttgtgttagggatgtggtga

SEQ ID NO: 74948 - DNA, 20 bp, synthetic construct
  misc_feature 1..20: note = chemically synthesized
  source 1..20: mol_type = other DNA
aatttgtcaaaacggtacag

SEQ ID NO: 74949 - DNA, 20 bp, synthetic construct
  misc_feature 1..20: note = chemically synthesized
  source 1..20: mol_type = other DNA
gaaaatagtaataataatac

SEQ ID NO: 74950 - DNA, 20 bp, synthetic construct
  misc_feature 1..20: note = chemically synthesized
  source 1..20: mol_type = other DNA
tagtaataataatacagatg

SEQ ID NO: 74951 - DNA, 20 bp, synthetic construct
  misc_feature 1..20: note = chemically synthesized
  source 1..20: mol_type = other DNA
cctggaaattaattataata

SEQ ID NO: 74952 - DNA, 20 bp, synthetic construct
  misc_feature 1..20: note = chemically synthesized
  source 1..20: mol_type = other DNA
ataatattctgtttactttg

SEQ ID NO: 74953 - DNA, 20 bp, synthetic construct
  misc_feature 1..20: note = chemically synthesized
  source 1..20: mol_type = other DNA
agtttacaatttctgtaata

SEQ ID NO: 74954 - DNA, 20 bp, synthetic construct
  misc_feature 1..20: note = chemically synthesized
  source 1..20: mol_type = other DNA
cttttaactggtcaggagga

SEQ ID NO: 74955 - DNA, 20 bp, synthetic construct
  misc_feature 1..20: note = chemically synthesized
  source 1..20: mol_type = other DNA
aactggtcaggaggaaactg

SEQ ID NO: 74956 - DNA, 20 bp, synthetic construct
  misc_feature 1..20: note = chemically synthesized
  source 1..20: mol_type = other DNA
aaaccacaactacttgaaaa

SEQ ID NO: 74957 - DNA, 20 bp, synthetic construct
  misc_feature 1..20: note = chemically synthesized
  source 1..20: mol_type = other DNA
catcaatcactcggtagtag

SEQ ID NO: 74958 - DNA, 20 bp, synthetic construct
  misc_feature 1..20: note = chemically synthesized
  source 1..20: mol_type = other DNA
attctagaaaatccctcaga

SEQ ID NO: 74959 - DNA, 20 bp, synthetic construct
  misc_feature 1..20: note = chemically synthesized
  source 1..20: mol_type = other DNA
agggattgcagagcccaact

SEQ ID NO: 74960 - DNA, 20 bp, synthetic construct
  misc_feature 1..20: note = chemically synthesized
  source 1..20: mol_type = other DNA
ctattaaaccacacagtctt

SEQ ID NO: 74961 - DNA, 20 bp, synthetic construct
  misc_feature 1..20: note = chemically synthesized
  source 1..20: mol_type = other DNA
agccaaccaagtaactaata

SEQ ID NO: 74962 - DNA, 20 bp, synthetic construct
  misc_feature 1..20: note = chemically synthesized
  source 1..20: mol_type = other DNA
gtggcaaaatttatattttt

SEQ ID NO: 74963 - DNA, 20 bp, synthetic construct
  misc_feature 1..20: note = chemically synthesized
  source 1..20: mol_type = other DNA
agtgaagtcataaaaacaac

SEQ ID NO: 74964 - DNA, 20 bp, synthetic construct
  misc_feature 1..20: note = chemically synthesized
  source 1..20: mol_type = other DNA
gggatcttgctagtagtatg

SEQ ID NO: 74965 - DNA, 20 bp, synthetic construct
  misc_feature 1..20: note = chemically synthesized
  source 1..20: mol_type = other DNA
aaatgaataagaaaataaaa

SEQ ID NO: 74966 - DNA, 20 bp, synthetic construct
  misc_feature 1..20: note = chemically synthesized
  source 1..20: mol_type = other DNA
aaatccagcttttatgatct

SEQ ID NO: 74967 - DNA, 20 bp, synthetic construct
  misc_feature 1..20: note = chemically synthesized
  source 1..20: mol_type = other DNA
gagctatagtgtaccatact

SEQ ID NO: 74968 - DNA, 20 bp, synthetic construct
  misc_feature 1..20: note = chemically synthesized
  source 1..20: mol_type = other DNA
gtaccatactaagtgattta

SEQ ID NO: 74969 - DNA, 20 bp, synthetic construct
  misc_feature 1..20: note = chemically synthesized
  source 1..20: mol_type = other DNA
aacaaatatatgaagaaatt

SEQ ID NO: 74970 - DNA, 20 bp, synthetic construct
  misc_feature 1..20: note = chemically synthesized
  source 1..20: mol_type = other DNA
accagacaatccaactaaaa

SEQ ID NO: 74971 - DNA, 20 bp, synthetic construct
  misc_feature 1..20: note = chemically synthesized
  source 1..20: mol_type = other DNA
agtggtcccataacttaaaa

SEQ ID NO: 74972 - DNA, 20 bp, synthetic construct
  misc_feature 1..20: note = chemically synthesized
  source 1..20: mol_type = other DNA
tctgtaaaccattttctcct

SEQ ID NO: 74973 - DNA, 20 bp, synthetic construct
  misc_feature 1..20: note = chemically synthesized
  source 1..20: mol_type = other DNA
tgaggacaaaattcactcac

SEQ ID NO: 74974 - DNA, 20 bp, synthetic construct
  misc_feature 1..20: note = chemically synthesized
  source 1..20: mol_type = other DNA
gtcatatattaataatgtat

SEQ ID NO: 74975 - DNA, 20 bp, synthetic construct
  misc_feature 1..20: note = chemically synthesized
  source 1..20: mol_type = other DNA
tataaaaggggccttcccac

SEQ ID NO: 74976 - DNA, 20 bp, synthetic construct
  misc_feature 1..20: note = chemically synthesized
  source 1..20: mol_type = other DNA
gggccttcccacattagttt

SEQ ID NO: 74977 - DNA, 20 bp, synthetic construct
  misc_feature 1..20: note = chemically synthesized
  source 1..20: mol_type = other DNA
cattagtttaactgcttagg

SEQ ID NO: 74978 - DNA, 20 bp, synthetic construct
  misc_feature 1..20: note = chemically synthesized
  source 1..20: mol_type = other DNA
aacacttttagaactatcat

SEQ ID NO: 74979 - DNA, 20 bp, synthetic construct
  misc_feature 1..20: note = chemically synthesized
  source 1..20: mol_type = other DNA
attacatcggtcaaattttc

SEQ ID NO: 74980 - DNA, 20 bp, synthetic construct
  misc_feature 1..20: note = chemically synthesized
  source 1..20: mol_type = other DNA
cagcaacttcacttcactta

SEQ ID NO: 74981 - DNA, 20 bp, synthetic construct
  misc_feature 1..20: note = chemically synthesized
  source 1..20: mol_type = other DNA
ttaaagtgtagaattttttt

SEQ ID NO: 74982 - DNA, 20 bp, synthetic construct
  misc_feature 1..20: note = chemically synthesized
  source 1..20: mol_type = other DNA
atttttttgcctgtttttgc

SEQ ID NO: 74983 - DNA, 20 bp, synthetic construct
  misc_feature 1..20: note = chemically synthesized
  source 1..20: mol_type = other DNA
aataacttgctatatttata

SEQ ID NO: 74984 - DNA, 20 bp, synthetic construct
  misc_feature 1..20: note = chemically synthesized
  source 1..20: mol_type = other DNA
accacagcacaaaaatctat

SEQ ID NO: 74985 - DNA, 20 bp, synthetic construct
  misc_feature 1..20: note = chemically synthesized
  source 1..20: mol_type = other DNA
gccatatgttaggccacaag

SEQ ID NO: 74986 - DNA, 20 bp, synthetic construct
  misc_feature 1..20: note = chemically synthesized
  source 1..20: mol_type = other DNA
tgcatatacacatacagatg

SEQ ID NO: 74987 - DNA, 20 bp, synthetic construct
  misc_feature 1..20: note = chemically synthesized
  source 1..20: mol_type = other DNA
ccaggtgaaataaacagcct

SEQ ID NO: 74988 - DNA, 20 bp, synthetic construct
  misc_feature 1..20: note = chemically synthesized
  source 1..20: mol_type = other DNA
agccttgttgcttacacaaa

SEQ ID NO: 74989 - DNA, 20 bp, synthetic construct
  misc_feature 1..20: note = chemically synthesized
  source 1..20: mol_type = other DNA
catgaaatttggtgccgtga

SEQ ID NO: 74990 - DNA, 20 bp, synthetic construct
  misc_feature 1..20: note = chemically synthesized
  source 1..20: mol_type = other DNA
ttccagtagagacaaaggag

SEQ ID NO: 74991 - DNA, 20 bp, synthetic construct
  misc_feature 1..20: note = chemically synthesized
  source 1..20: mol_type = other DNA
ctgggaaggcagccttccct

SEQ ID NO: 74992 - DNA, 20 bp, synthetic construct
  misc_feature 1..20: note = chemically synthesized
  source 1..20: mol_type = other DNA
taatcattgcagggacacct

SEQ ID NO: 74993 - DNA, 20 bp, synthetic construct
  misc_feature 1..20: note = chemically synthesized
  source 1..20: mol_type = other DNA
acacctctctgattattaaa

SEQ ID NO: 74994 - DNA, 20 bp, synthetic construct
  misc_feature 1..20: note = chemically synthesized
  source 1..20: mol_type = other DNA
tctccatgtctctgcccctt

SEQ ID NO: 74995 - DNA, 20 bp, synthetic construct
  misc_feature 1..20: note = chemically synthesized
  source 1..20: mol_type = other DNA
gtctgtactctttcttttct

SEQ ID NO: 74996 - DNA, 20 bp, synthetic construct
  misc_feature 1..20: note = chemically synthesized
  source 1..20: mol_type = other DNA
tgccttattttcttctgcaa

SEQ ID NO: 74997 - DNA, 20 bp, synthetic construct
  misc_feature 1..20: note = chemically synthesized
  source 1..20: mol_type = other DNA
cctcccctcctcacacccgg

SEQ ID NO: 74998 - DNA, 20 bp, synthetic construct
  misc_feature 1..20: note = chemically synthesized
  source 1..20: mol_type = other DNA
tcctcacacccggtccggtt

SEQ ID NO: 74999 - DNA, 20 bp, synthetic construct
  misc_feature 1..20: note = chemically synthesized
  source 1..20: mol_type = other DNA
atccgacctctcccgaatca

SEQ ID NO: 75000 - DNA, 20 bp, synthetic construct
  misc_feature 1..20: note = chemically synthesized
  source 1..20: mol_type = other DNA
ctcgttcggcagcaaccctg

SEQ ID NO: 75001 - DNA, 20 bp, synthetic construct
  misc_feature 1..20: note = chemically synthesized
  source 1..20: mol_type = other DNA
cctccggaaccacctccccc

SEQ ID NO: 75002 - DNA, 20 bp, synthetic construct
  misc_feature 1..20: note = chemically synthesized
  source 1..20: mol_type = other DNA
ggccaaggaatgcccgcagc

SEQ ID NO: 75003 - DNA, 20 bp, synthetic construct
  misc_feature 1..20: note = chemically synthesized
  source 1..20: mol_type = other DNA
ctgactccttcccagatctt

SEQ ID NO: 75004 - DNA, 20 bp, synthetic construct
  misc_feature 1..20: note = chemically synthesized
  source 1..20: mol_type = other DNA
cctgtagaccatcacagaca

SEQ ID NO: 75005 - DNA, 20 bp, synthetic construct
  misc_feature 1..20: note = chemically synthesized
  source 1..20: mol_type = other DNA
acattaccttcttttcaaag

SEQ ID NO: 75006 - DNA, 20 bp, synthetic construct
  misc_feature 1..20: note = chemically synthesized
  source 1..20: mol_type = other DNA
actgttgtaggtattgatgg

SEQ ID NO: 75007 - DNA, 20 bp, synthetic construct
  misc_feature 1..20: note = chemically synthesized
  source 1..20: mol_type = other DNA
cgagacactttaactaaatt

SEQ ID NO: 75008 - DNA, 20 bp, synthetic construct
  misc_feature 1..20: note = chemically synthesized
  source 1..20: mol_type = other DNA
gctacagccatacctcattg

SEQ ID NO: 75009 - DNA, 20 bp, synthetic construct
  misc_feature 1..20: note = chemically synthesized
  source 1..20: mol_type = other DNA
tgccagtatcccatcccaca

SEQ ID NO: 75010 - DNA, 20 bp, synthetic construct
  misc_feature 1..20: note = chemically synthesized
  source 1..20: mol_type = other DNA
ccatcccacagcatgctttg

SEQ ID NO: 75011 - DNA, 20 bp, synthetic construct
  misc_feature 1..20: note = chemically synthesized
  source 1..20: mol_type = other DNA
aatctgcatcttatcaacca

SEQ ID NO: 75012 - DNA, 20 bp, synthetic construct
  misc_feature 1..20: note = chemically synthesized
  source 1..20: mol_type = other DNA
tattctgttctggatctcaa

SEQ ID NO: 75013 - DNA, 20 bp, synthetic construct
  misc_feature 1..20: note = chemically synthesized
  source 1..20: mol_type = other DNA
cacccttcattccagcctct

SEQ ID NO: 75014 - DNA, 20 bp, synthetic construct
  misc_feature 1..20: note = chemically synthesized
  source 1..20: mol_type = other DNA
ttacctgggctgtactgctg

SEQ ID NO: 75015 - DNA, 20 bp, synthetic construct
  misc_feature 1..20: note = chemically synthesized
  source 1..20: mol_type = other DNA
aaaaacacacgtgctctccc

SEQ ID NO: 75016 - DNA, 20 bp, synthetic construct
  misc_feature 1..20: note = chemically synthesized
  source 1..20: mol_type = other DNA
gtgctctccctgctgattgt

SEQ ID NO: 75017 - DNA, 20 bp, synthetic construct
  misc_feature 1..20: note = chemically synthesized
  source 1..20: mol_type = other DNA
ctgtccaaataacttgacct

SEQ ID NO: 75018 - DNA, 20 bp, synthetic construct
  misc_feature 1..20: note = chemically synthesized
  source 1..20: mol_type = other DNA
ggtctgcatgcagtggctgc

SEQ ID NO: 75019 - DNA, 20 bp, synthetic construct
  misc_feature 1..20: note = chemically synthesized
  source 1..20: mol_type = other DNA
gaggccctaaaaatcacaaa

SEQ ID NO: 75020 - DNA, 20 bp, synthetic construct
  misc_feature 1..20: note = chemically synthesized
  source 1..20: mol_type = other DNA
cctgataccacacctgaccc

SEQ ID NO: 75021 - DNA, 20 bp, synthetic construct
  misc_feature 1..20: note = chemically synthesized
  source 1..20: mol_type = other DNA
ctgttcctcaccctgatcac

SEQ ID NO: 75022 - DNA, 20 bp, synthetic construct
  misc_feature 1..20: note = chemically synthesized
  source 1..20: mol_type = other DNA
tctgctattctgctactcct

SEQ ID NO: 75023 - DNA, 20 bp, synthetic construct
  misc_feature 1..20: note = chemically synthesized
  source 1..20: mol_type = other DNA
ccttccctacacatcaagct

SEQ ID NO: 75024 - DNA, 20 bp, synthetic construct
  misc_feature 1..20: note = chemically synthesized
  source 1..20: mol_type = other DNA
cccccacccaggactggcaa

SEQ ID NO: 75025 - DNA, 20 bp, synthetic construct
  misc_feature 1..20: note = chemically synthesized
  source 1..20: mol_type = other DNA
ccttctgtcagacataattc

SEQ ID NO: 75026 - DNA, 20 bp, synthetic construct
  misc_feature 1..20: note = chemically synthesized
  source 1..20: mol_type = other DNA
tttattagtcaaatcagcca

SEQ ID NO: 75027 - DNA, 20 bp, synthetic construct
  misc_feature 1..20: note = chemically synthesized
  source 1..20: mol_type = other DNA
acagcccatttgagctcctg

SEQ ID NO: 75028 - DNA, 20 bp, synthetic construct
  misc_feature 1..20: note = chemically synthesized
  source 1..20: mol_type = other DNA
actactcatacatgccctgc

SEQ ID NO: 75029 - DNA, 20 bp, synthetic construct
  misc_feature 1..20: note = chemically synthesized
  source 1..20: mol_type = other DNA
gccctgctcttgtttacact

SEQ ID NO: 75030 - DNA, 20 bp, synthetic construct
  misc_feature 1..20: note = chemically synthesized
  source 1..20: mol_type = other DNA
ttgtttacactgccggttta

SEQ ID NO: 75031 - DNA, 20 bp, synthetic construct
  misc_feature 1..20: note = chemically synthesized
  source 1..20: mol_type = other DNA
ccacttcttagtcctttaat

SEQ ID NO: 75032 - DNA, 20 bp, synthetic construct
  misc_feature 1..20: note = chemically synthesized
  source 1..20: mol_type = other DNA
tttctccttctcttattcca

SEQ ID NO: 75033 - DNA, 20 bp, synthetic construct
  misc_feature 1..20: note = chemically synthesized
  source 1..20: mol_type = other DNA
caccaataattctacatgac

SEQ ID NO: 75034 - DNA, 20 bp, synthetic construct
  misc_feature 1..20: note = chemically synthesized
  source 1..20: mol_type = other DNA
cccttaccacaaaatcttcc

SEQ ID NO: 75035 - DNA, 20 bp, synthetic construct
  misc_feature 1..20: note = chemically synthesized
  source 1..20: mol_type = other DNA
gccccaacacttcaacacta

SEQ ID NO: 75036 - DNA, 20 bp, synthetic construct
  misc_feature 1..20: note = chemically synthesized
  source 1..20: mol_type = other DNA
ccgcctgcacccaggtgata

SEQ ID NO: 75037 - DNA, 20 bp, synthetic construct
  misc_feature 1..20: note = chemically synthesized
  source 1..20: mol_type = other DNA
agctttattgctcacacaaa

SEQ ID NO: 75038 - DNA, 20 bp, synthetic construct
  misc_feature 1..20: note = chemically synthesized
  source 1..20: mol_type = other DNA
acctatatccaaaaaagtag

SEQ ID NO: 75039 - DNA, 20 bp, synthetic construct
  misc_feature 1..20: note = chemically synthesized
  source 1..20: mol_type = other DNA
gaaaatcattaaaaacaaac

SEQ ID NO: 75040 - DNA, 20 bp, synthetic construct
  misc_feature 1..20: note = chemically synthesized
  source 1..20: mol_type = other DNA
caatagaacaataatgaata

SEQ ID NO: 75041 - DNA, 20 bp, synthetic construct
  misc_feature 1..20: note = chemically synthesized
  source 1..20: mol_type = other DNA
acaagattaaagttgtaata

SEQ ID NO: 75042 - DNA, 20 bp, synthetic construct
  misc_feature 1..20: note = chemically synthesized
  source 1..20: mol_type = other DNA
aaaggaagaagttaaattag

SEQ ID NO: 75043 - DNA, 20 bp, synthetic construct
  misc_feature 1..20: note = chemically synthesized
  source 1..20: mol_type = other DNA
aacttcactaaatactatta

SEQ ID NO: 75044 - DNA, 20 bp, synthetic construct
  misc_feature 1..20: note = chemically synthesized
  source 1..20: mol_type = other DNA
caatactacccaaagcaatg

SEQ ID NO: 75045 - DNA, 20 bp, synthetic construct
  misc_feature 1..20: note = chemically synthesized
  source 1..20: mol_type = other DNA
tcaggaggctgaggcaggag

SEQ ID NO: 75046 - DNA, 20 bp, synthetic construct
  misc_feature 1..20: note = chemically synthesized
  source 1..20: mol_type = other DNA
gaggcagaagttgcagtgat

SEQ ID NO: 75047 - DNA, 20 bp, synthetic construct
  misc_feature 1..20: note = chemically synthesized
  source 1..20: mol_type = other DNA
atatacaaaaatcaaatcaa

SEQ ID NO: 75048 - DNA, 20 bp, synthetic construct
  misc_feature 1..20: note = chemically synthesized
  source 1..20: mol_type = other DNA
gggaaaccctccagggcatt

SEQ ID NO: 75049 - DNA, 20 bp, synthetic construct
  misc_feature 1..20: note = chemically synthesized
  source 1..20: mol_type = other DNA
accaaaacaaaaatagacaa

SEQ ID NO: 75050 - DNA, 20 bp, synthetic construct
  misc_feature 1..20: note = chemically synthesized
  source 1..20: mol_type = other DNA
aaacaaaaatagacaattgg

SEQ ID NO: 75051 - DNA, 20 bp, synthetic construct
  misc_feature 1..20: note = chemically synthesized
  source 1..20: mol_type = other DNA
tatcatctcaccttagttaa

SEQ ID NO: 75052 - DNA, 20 bp, synthetic construct
  misc_feature 1..20: note = chemically synthesized
  source 1..20: mol_type = other DNA
acaaaacaaaaggaaataac

SEQ ID NO: 75053 - DNA, 20 bp, synthetic construct
  misc_feature 1..20: note = chemically synthesized
  source 1..20: mol_type = other DNA
agcaattatgaaggacagta

SEQ ID NO: 75054 - DNA, 20 bp, synthetic construct
  misc_feature 1..20: note = chemically synthesized
  source 1..20: mol_type = other DNA
tatagcactattcacaaacg

SEQ ID NO: 75055 - DNA, 20 bp, synthetic construct
  misc_feature 1..20: note = chemically synthesized
  source 1..20: mol_type = other DNA
tggatcttatgaagacagag

SEQ ID NO: 75056 - DNA, 20 bp, synthetic construct
  misc_feature 1..20: note = chemically synthesized
  source 1..20: mol_type = other DNA
cctgtaatcccacctacttg

SEQ ID NO: 75057 - DNA, 20 bp, synthetic construct
  misc_feature 1..20: note = chemically synthesized
  source 1..20: mol_type = other DNA
ttgggaggcttgggcaggag

SEQ ID NO: 75058 - DNA, 20 bp, synthetic construct
  misc_feature 1..20: note = chemically synthesized
  source 1..20: mol_type = other DNA
aaaaaaatacaaaaaattag

SEQ ID NO: 75059 - DNA, 20 bp, synthetic construct
  misc_feature 1..20: note = chemically synthesized
  source 1..20: mol_type = other DNA
aatggcgtgaacgcgggggg

SEQ ID NO: 75060 - DNA, 20 bp, synthetic construct
  misc_feature 1..20: note = chemically synthesized
  source 1..20: mol_type = other DNA
ttaagtgtagaactcattga

SEQ ID NO: 75061 - DNA, 20 bp, synthetic construct
  misc_feature 1..20: note = chemically synthesized
  source 1..20: mol_type = other DNA
tggagtcaccagcacatgtg

SEQ ID NO: 75062 - DNA, 20 bp, synthetic construct
  misc_feature 1..20: note = chemically synthesized
  source 1..20: mol_type = other DNA
ccaaatggtatactagtcta

SEQ ID NO: 75063 - DNA, 20 bp, synthetic construct
  misc_feature 1..20: note = chemically synthesized
  source 1..20: mol_type = other DNA
gacaaaagaataacctgaat

SEQ ID NO: 75064 - DNA, 20 bp, synthetic construct
  misc_feature 1..20: note = chemically synthesized
  source 1..20: mol_type = other DNA
cattcaacatgcaacagtac

SEQ ID NO: 75065 - DNA, 20 bp, synthetic construct
  misc_feature 1..20: note = chemically synthesized
  source 1..20: mol_type = other DNA
ataaatattctccaccatta

SEQ ID NO: 75066 - DNA, 20 bp, synthetic construct
  misc_feature 1..20: note = chemically synthesized
  source 1..20: mol_type = other DNA
aatagtgtcatatgcataag

SEQ ID NO: 75067 - DNA, 20 bp, synthetic construct
  misc_feature 1..20: note = chemically synthesized
  source 1..20: mol_type = other DNA
ataaatagtaggaatataat

SEQ ID NO: 75068 - DNA, 20 bp, synthetic construct
  misc_feature 1..20: note = chemically synthesized
  source 1..20: mol_type = other DNA
agagaaaagaggaaatggat

SEQ ID NO: 75069 - DNA, 20 bp, synthetic construct
  misc_feature 1..20: note = chemically synthesized
  source 1..20: mol_type = other DNA
gtttactcaaatgttcaaca

SEQ ID NO: 75070 - DNA, 20 bp, synthetic construct
  misc_feature 1..20: note = chemically synthesized
  source 1..20: mol_type = other DNA
caaatgttcaacaacttgct

SEQ ID NO: 75071 - DNA, 20 bp, synthetic construct
  misc_feature 1..20: note = chemically synthesized
  source 1..20: mol_type = other DNA
tggtaaaaagtagttatgaa

SEQ ID NO: 75072 - DNA, 20 bp, synthetic construct
  misc_feature 1..20: note = chemically synthesized
  source 1..20: mol_type = other DNA
aaataggaattggcatagaa

SEQ ID NO: 75073 - DNA, 20 bp, synthetic construct
  misc_feature 1..20: note = chemically synthesized
  source 1..20: mol_type = other DNA
tagaaacatgtttgcattaa

SEQ ID NO: 75074 - DNA, 20 bp, synthetic construct
  misc_feature 1..20: note = chemically synthesized
  source 1..20: mol_type = other DNA
tagaaatggcagaaaaggaa

SEQ ID NO: 75075 - DNA, 20 bp, synthetic construct
  misc_feature 1..20: note = chemically synthesized
  source 1..20: mol_type = other DNA
gaaaagagaaaaagagagaa

SEQ ID NO: 75076 - DNA, 20 bp, synthetic construct
  misc_feature 1..20: note = chemically synthesized
  source 1..20: mol_type = other DNA
ttaaaatttgctgggtccct

SEQ ID NO: 75077 - DNA, 20 bp, synthetic construct
  misc_feature 1..20: note = chemically synthesized
  source 1..20: mol_type = other DNA
ttgagctcaataaattcatc

SEQ ID NO: 75078 - DNA, 20 bp, synthetic construct
  misc_feature 1..20: note = chemically synthesized
  source 1..20: mol_type = other DNA
agaatgctacagacctcact

SEQ ID NO: 75079 - DNA, 20 bp, synthetic construct
  misc_feature 1..20: note = chemically synthesized
  source 1..20: mol_type = other DNA
taataattgaggagtaagtc

SEQ ID NO: 75080 - DNA, 20 bp, synthetic construct
  misc_feature 1..20: note = chemically synthesized
  source 1..20: mol_type = other DNA
gaggagtaagtctcacgatt

SEQ ID NO: 75081 - DNA, 20 bp, synthetic construct
  misc_feature 1..20: note = chemically synthesized
  source 1..20: mol_type = other DNA
ttcctctccataatttaatt

SEQ ID NO: 75082 - DNA, 20 bp, synthetic construct
  misc_feature 1..20: note = chemically synthesized
  source 1..20: mol_type = other DNA
ggtcttgaataagtcagaca

SEQ ID NO: 75083 - DNA, 20 bp, synthetic construct
  misc_feature 1..20: note = chemically synthesized
  source 1..20: mol_type = other DNA
cagacattgtgattgccatt

SEQ ID NO: 75084 - DNA, 20 bp, synthetic construct
  misc_feature 1..20: note = chemically synthesized
  source 1..20: mol_type = other DNA
ttaaaggattcttattctaa

SEQ ID NO: 75085 - DNA, 20 bp, synthetic construct
  misc_feature 1..20: note = chemically synthesized
  source 1..20: mol_type = other DNA
tcaaagtatttaattgacct

SEQ ID NO: 75086 - DNA, 20 bp, synthetic construct
  misc_feature 1..20: note = chemically synthesized
  source 1..20: mol_type = other DNA
ccctgtcatgaaatgtcctc

SEQ ID NO: 75087 - DNA, 20 bp, synthetic construct
  misc_feature 1..20: note = chemically synthesized
  source 1..20: mol_type = other DNA
gctgatttggttctttcatt

SEQ ID NO: 75088 - DNA, 20 bp, synthetic construct
  misc_feature 1..20: note = chemically synthesized
  source 1..20: mol_type = other DNA
aaaaaaaaaaaaaaaaaaaa

SEQ ID NO: 75089 - DNA, 20 bp, synthetic construct
  misc_feature 1..20: note = chemically synthesized
  source 1..20: mol_type = other DNA
gtgacatgaagcatacggtt

SEQ ID NO: 75090 - DNA, 20 bp, synthetic construct
  misc_feature 1..20: note = chemically synthesized
  source 1..20: mol_type = other DNA
agcatacggttagctgattc

SEQ ID NO: 75091 - DNA, 20 bp, synthetic construct
  misc_feature 1..20: note = chemically synthesized
  source 1..20: mol_type = other DNA
tcacaaacatttctctaatg

SEQ ID NO: 75092 - DNA, 20 bp, synthetic construct
  misc_feature 1..20: note = chemically synthesized
  source 1..20: mol_type = other DNA
ctaatgtatagcttaaaatg

SEQ ID NO: 75093 - DNA, 20 bp, synthetic construct
  misc_feature 1..20: note = chemically synthesized
  source 1..20: mol_type = other DNA
tttatataaagcataagagc

SEQ ID NO: 75094 - DNA, 20 bp, synthetic construct
  misc_feature 1..20: note = chemically synthesized
  source 1..20: mol_type = other DNA
aaattttctttggttattca

SEQ ID NO: 75095 - DNA, 20 bp, synthetic construct
  misc_feature 1..20: note = chemically synthesized
  source 1..20: mol_type = other DNA
tttcctcaattttagtctcc

SEQ ID NO: 75096 - DNA, 20 bp, synthetic construct
  misc_feature 1..20: note = chemically synthesized
  source 1..20: mol_type = other DNA
ttcttctaagaaatctgtcc

SEQ ID NO: 75097 - DNA, 20 bp, synthetic construct
  misc_feature 1..20: note = chemically synthesized
  source 1..20: mol_type = other DNA
aactggactctattctggct

SEQ ID NO: 75098 - DNA, 20 bp, synthetic construct
  misc_feature 1..20: note = chemically synthesized
  source 1..20: mol_type = other DNA
tttgcccattattcagtatc

SEQ ID NO: 75099 - DNA, 20 bp, synthetic construct
  misc_feature 1..20: note = chemically synthesized
  source 1..20: mol_type = other DNA
ttttaaactcacaacatttc

SEQ ID NO: 75100 - DNA, 20 bp, synthetic construct
  misc_feature 1..20: note = chemically synthesized
  source 1..20: mol_type = other DNA
cacaacatttcaagagtttc

SEQ ID NO: 75101 - DNA, 20 bp, synthetic construct
  misc_feature 1..20: note = chemically synthesized
  source 1..20: mol_type = other DNA
aagaaatataaaaagcaacc

SEQ ID NO: 75102 - DNA, 20 bp, synthetic construct
  misc_feature 1..20: note = chemically synthesized
  source 1..20: mol_type = other DNA
aaagcaaccaggagctttgg

SEQ ID NO: 75103 - DNA, 20 bp, synthetic construct
  misc_feature 1..20: note = chemically synthesized
  source 1..20: mol_type = other DNA
gctcagatttgtcaaaagta

SEQ ID NO: 75104 - DNA, 20 bp, synthetic construct
  misc_feature 1..20: note = chemically synthesized
  source 1..20: mol_type = other DNA
gtactggtcagagtctgtta

SEQ ID NO: 75105 - DNA, 20 bp, synthetic construct
  misc_feature 1..20: note = chemically synthesized
  source 1..20: mol_type = other DNA
agctgaaatgtgaaatatgg

SEQ ID NO: 75106 - DNA, 20 bp, synthetic construct
  misc_feature 1..20: note = chemically synthesized
  source 1..20: mol_type = other DNA
agtagtccaatcccctgtcc

SEQ ID NO: 75107 - DNA, 20 bp, synthetic construct
  misc_feature 1..20: note = chemically synthesized
  source 1..20: mol_type = other DNA
attttgctggttctaatgta

SEQ ID NO: 75108 - DNA, 20 bp, synthetic construct
  misc_feature 1..20: note = chemically synthesized
  source 1..20: mol_type = other DNA
ttcaaaactgtgaataagat

SEQ ID NO: 75109 - DNA, 20 bp, synthetic construct
  misc_feature 1..20: note = chemically synthesized
  source 1..20: mol_type = other DNA
aatcagacagactcaatata

SEQ ID NO: 75110 - DNA, 20 bp, synthetic construct
  misc_feature 1..20: note = chemically synthesized
  source 1..20: mol_type = other DNA
aacactgactgagaaacttc

SEQ ID NO: 75111 - DNA, 20 bp, synthetic construct
  misc_feature 1..20: note = chemically synthesized
  source 1..20: mol_type = other DNA
aggcctagaatctgtgcagt

SEQ ID NO: 75112 - DNA, 20 bp, synthetic construct
  misc_feature 1..20: note = chemically synthesized
  source 1..20: mol_type = other DNA
agaatctgtgcagtgctgga

SEQ ID NO: 75113 - DNA, 20 bp, synthetic construct
  misc_feature 1..20: note = chemically synthesized
  source 1..20: mol_type = other DNA
ctgtgccatttatctcattg

SEQ ID NO: 75114 - DNA, 20 bp, synthetic construct
  misc_feature 1..20: note = chemically synthesized
  source 1..20: mol_type = other DNA
cattgctatgattggaaatt

SEQ ID NO: 75115 - DNA, 20 bp, synthetic construct
  misc_feature 1..20: note = chemically synthesized
  source 1..20: mol_type = other DNA
tgctagcagcattatgccaa

SEQ ID NO: 75116 - DNA, 20 bp, synthetic construct
  misc_feature 1..20: note = chemically synthesized
  source 1..20: mol_type = other DNA
gccaaagatgcttggaatat

SEQ ID NO: 75117 - DNA, 20 bp, synthetic construct
  misc_feature 1..20: note = chemically synthesized
  source 1..20: mol_type = other DNA
tttaatgtgcctgaaatcta

SEQ ID NO: 75118 - DNA, 20 bp, synthetic construct
  misc_feature 1..20: note = chemically synthesized
  source 1..20: mol_type = other DNA
tgcctgaaatctattttgat

SEQ ID NO: 75119 - DNA, 20 bp, synthetic construct
  misc_feature 1..20: note = chemically synthesized
  source 1..20: mol_type = other DNA
tgaaatctattttgattcct

SEQ ID NO: 75120 - DNA, 20 bp, synthetic construct
  misc_feature 1..20: note = chemically synthesized
  source 1..20: mol_type = other DNA
acatgccaacatcttcaccc

SEQ ID NO: 75121 - DNA, 20 bp, synthetic construct
  misc_feature 1..20: note = chemically synthesized
  source 1..20: mol_type = other DNA
atgcctagtactgataaagt

SEQ ID NO: 75122 - DNA, 20 bp, synthetic construct
  misc_feature 1..20: note = chemically synthesized
  source 1..20: mol_type = other DNA
atgttcaagtcaacaaaatc

SEQ ID NO: 75123 - DNA, 20 bp, synthetic construct
  misc_feature 1..20: note = chemically synthesized
  source 1..20: mol_type = other DNA
tcaagtcaacaaaatctatg

SEQ ID NO: 75124 - DNA, 20 bp, synthetic construct
  misc_feature 1..20: note = chemically synthesized
  source 1..20: mol_type = other DNA
tgtttgtggccttcactgta

SEQ ID NO: 75125 - DNA, 20 bp, synthetic construct
  misc_feature 1..20: note = chemically synthesized
  source 1..20: mol_type = other DNA
tcctacatccagatatttat

SEQ ID NO: 75126 - DNA, 20 bp, synthetic construct
  misc_feature 1..20: note = chemically synthesized
  source 1..20: mol_type = other DNA
tccagatatttatcacagtt

SEQ ID NO: 75127 - DNA, 20 bp, synthetic construct
  misc_feature 1..20: note = chemically synthesized
  source 1..20: mol_type = other DNA
tcgtttgccccagaaggagg

SEQ ID NO: 75128 - DNA, 20 bp, synthetic construct
  misc_feature 1..20: note = chemically synthesized
  source 1..20: mol_type = other DNA
cttcttctccttcttcacac

SEQ ID NO: 75129 - DNA, 20 bp, synthetic construct
  misc_feature 1..20: note = chemically synthesized
  source 1..20: mol_type = other DNA
tgtctatggtgcaaagacca

SEQ ID NO: 75130 - DNA, 20 bp, synthetic construct
  misc_feature 1..20: note = chemically synthesized
  source 1..20: mol_type = other DNA
atccaccttaattaatgcct

SEQ ID NO: 75131 - DNA, 20 bp, synthetic construct
  misc_feature 1..20: note = chemically synthesized
  source 1..20: mol_type = other DNA
aaaacatattatttgagatg

SEQ ID NO: 75132 - DNA, 20 bp, synthetic construct
  misc_feature 1..20: note = chemically synthesized
  source 1..20: mol_type = other DNA
tgaaatctgccagcacaata

SEQ ID NO: 75133 - DNA, 20 bp, synthetic construct
  misc_feature 1..20: note = chemically synthesized
  source 1..20: mol_type = other DNA
atcatggctcatatcaatca

SEQ ID NO: 75134 - DNA, 20 bp, synthetic construct
  misc_feature 1..20: note = chemically synthesized
  source 1..20: mol_type = other DNA
cttctaagaatatttctcca

SEQ ID NO: 75135 - DNA, 20 bp, synthetic construct
  misc_feature 1..20: note = chemically synthesized
  source 1..20: mol_type = other DNA
tgcatttgacacatcaatgt

SEQ ID NO: 75136 - DNA, 20 bp, synthetic construct
  misc_feature 1..20: note = chemically synthesized
  source 1..20: mol_type = other DNA
tggcacagtgaataattctc

SEQ ID NO: 75137 - DNA, 20 bp, synthetic construct
  misc_feature 1..20: note = chemically synthesized
  source 1..20: mol_type = other DNA
ggggagttgcatttattgta

SEQ ID NO: 75138 - DNA, 20 bp, synthetic construct
  misc_feature 1..20: note = chemically synthesized
  source 1..20: mol_type = other DNA
ttttttggttaggtagttac

SEQ ID NO: 75139 - DNA, 20 bp, synthetic construct
  misc_feature 1..20: note = chemically synthesized
  source 1..20: mol_type = other DNA
tcatgccaggtagatagtag

SEQ ID NO: 75140 - DNA, 20 bp, synthetic construct
  misc_feature 1..20: note = chemically synthesized
  source 1..20: mol_type = other DNA
aggagatttaaactagataa

SEQ ID NO: 75141 - DNA, 20 bp, synthetic construct
  misc_feature 1..20: note = chemically synthesized
  source 1..20: mol_type = other DNA
ataatgtagtttaaggtaac

SEQ ID NO: 75142 - DNA, 20 bp, synthetic construct
  misc_feature 1..20: note = chemically synthesized
  source 1..20: mol_type = other DNA
tgtgccattggagagtattc

SEQ ID NO: 75143 - DNA, 20 bp, synthetic construct
  misc_feature 1..20: note = chemically synthesized
  source 1..20: mol_type = other DNA
ccattggagagtattcattt

SEQ ID NO: 75144 - DNA, 20 bp, synthetic construct
  misc_feature 1..20: note = chemically synthesized
  source 1..20: mol_type = other DNA
gtgtgtgtgtgtgtgtgtgt

SEQ ID NO: 75145 - DNA, 20 bp, synthetic construct
  misc_feature 1..20: note = chemically synthesized
  source 1..20: mol_type = other DNA
catatgggcagatgtccata

SEQ ID NO: 75146 - DNA, 22 bp, synthetic construct
  misc_feature 1..22: note = chemically synthesized
  source 1..22: mol_type = other DNA
gtaaatcaaagtatggacatct

SEQ ID NO: 75147 - DNA, 22 bp, synthetic construct
  misc_feature 1..22: note = chemically synthesized
  source 1..22: mol_type = other DNA
cccatatgtgaatattttccat

SEQ ID NO: 75148 - DNA, 22 bp, synthetic construct
  misc_feature 1..22: note = chemically synthesized
  source 1..22: mol_type = other DNA
tccataaccttgaaaaaaatga

SEQ ID NO: 75149 - DNA, 22 bp, synthetic construct
  misc_feature 1..22: note = chemically synthesized
  source 1..22: mol_type = other DNA
ccataaccttgaaaaaaatgat

SEQ ID NO: 75150 - DNA, 22 bp, synthetic construct
  misc_feature 1..22: note = chemically synthesized
  source 1..22: mol_type = other DNA
cataaccttgaaaaaaatgatc

SEQ ID NO: 75151 - DNA, 22 bp, synthetic construct
  misc_feature 1..22: note = chemically synthesized
  source 1..22: mol_type = other DNA
gaaaaaaatgatctatgacctg

SEQ ID NO: 75152 - DNA, 22 bp, synthetic construct
  misc_feature 1..22: note = chemically synthesized
  source 1..22: mol_type = other DNA
aaaaaaatgatctatgacctga

SEQ ID NO: 75153 - DNA, 22 bp, synthetic construct
  misc_feature 1..22: note = chemically synthesized
  source 1..22: mol_type = other DNA
tgacctgaggtttttcaagaac

SEQ ID NO: 75154 - DNA, 22 bp, synthetic construct
  misc_feature 1..22: note = chemically synthesized
  source 1..22: mol_type = other DNA
aggtttttcaagaacaattgac

SEQ ID NO: 75155 - DNA, 22 bp, synthetic construct
  misc_feature 1..22: note = chemically synthesized
  source 1..22: mol_type = other DNA
ttcaagaacaattgactagccg

SEQ ID NO: 75156 - DNA, 22 bp, synthetic construct
  misc_feature 1..22: note = chemically synthesized
  source 1..22: mol_type = other DNA
tcaagaacaattgactagccgt

SEQ ID NO: 75157 - DNA, 22 bp, synthetic construct
  misc_feature 1..22: note = chemically synthesized
  source 1..22: mol_type = other DNA
caagaacaattgactagccgta

SEQ ID NO: 75158 - DNA, 22 bp, synthetic construct
  misc_feature 1..22: note = chemically synthesized
  source 1..22: mol_type = other DNA
aagaacaattgactagccgtaa

SEQ ID NO: 75159 - DNA, 22 bp, synthetic construct
  misc_feature 1..22: note = chemically synthesized
  source 1..22: mol_type = other DNA
actagccgtaaattcttatgcc

SEQ ID NO: 75160 - DNA, 22 bp, synthetic construct
  misc_feature 1..22: note = chemically synthesized
  source 1..22: mol_type = other DNA
gccgtaaattcttatgccacta

SEQ ID NO: 75161 - DNA, 22 bp, synthetic construct
  misc_feature 1..22: note = chemically synthesized
  source 1..22: mol_type = other DNA
ttatgccactaattttagacaa

SEQ ID NO: 75162 - DNA, 22 bp, synthetic construct
  misc_feature 1..22: note = chemically synthesized
  source 1..22: mol_type = other DNA
atgccactaattttagacaata

SEQ ID NO: 75163 - DNA, 22 bp, synthetic construct
  misc_feature 1..22: note = chemically synthesized
  source 1..22: mol_type = other DNA
tgccactaattttagacaatat

SEQ ID NO: 75164 - DNA, 22 bp, synthetic construct
  misc_feature 1..22: note = chemically synthesized
  source 1..22: mol_type = other DNA
attttagacaatatagtcctcc

SEQ ID NO: 75165 - DNA, 22 bp, synthetic construct
  misc_feature 1..22: note = chemically synthesized
  source 1..22: mol_type = other DNA
tagacaatatagtcctcctctt

SEQ ID NO: 75166 - DNA, 22 bp, synthetic construct
  misc_feature 1..22: note = chemically synthesized
  source 1..22: mol_type = other DNA
agacaatatagtcctcctcttc

SEQ ID NO: 75167 - DNA, 22 bp, synthetic construct
  misc_feature 1..22: note = chemically synthesized
  source 1..22: mol_type = other DNA
gacaatatagtcctcctcttca

SEQ ID NO: 75168 - DNA, 22 bp, synthetic construct
  misc_feature 1..22: note = chemically synthesized
  source 1..22: mol_type = other DNA
ctcttcactaacacaatagccc

SEQ ID NO: 75169 - DNA, 22 bp, synthetic construct
  misc_feature 1..22: note = chemically synthesized
  source 1..22: mol_type = other DNA
ttcactaacacaatagccctag

SEQ ID NO: 75170 - DNA, 22 bp, synthetic construct
  misc_feature 1..22: note = chemically synthesized
  source 1..22: mol_type = other DNA
cactaacacaatagccctagac

SEQ ID NO: 75171 - DNA, 22 bp, synthetic construct
  misc_feature 1..22: note = chemically synthesized
  source 1..22: mol_type = other DNA
actaacacaatagccctagact

SEQ ID NO: 75172 - DNA, 22 bp, synthetic construct
  misc_feature 1..22: note = chemically synthesized
  source 1..22: mol_type = other DNA
acacaatagccctagacttatt

SEQ ID NO: 75173 - DNA, 22 bp, synthetic construct
  misc_feature 1..22: note = chemically synthesized
  source 1..22: mol_type = other DNA
gacttatttatatttgctgtgt

SEQ ID NO: 75174 - DNA, 22 bp, synthetic construct
  misc_feature 1..22: note = chemically synthesized
  source 1..22: mol_type = other DNA
atttatatttgctgtgtggtat

SEQ ID NO: 75175 - DNA, 22 bp, synthetic construct
  misc_feature 1..22: note = chemically synthesized
  source 1..22: mol_type = other DNA
tttatatttgctgtgtggtatg

SEQ ID NO: 75176 - DNA, 22 bp, synthetic construct
  misc_feature 1..22: note = chemically synthesized
  source 1..22: mol_type = other DNA
atatttgctgtgtggtatgctg

SEQ ID NO: 75177 - DNA, 22 bp, synthetic construct
  misc_feature 1..22: note = chemically synthesized
  source 1..22: mol_type = other DNA
tatttgctgtgtggtatgctgc

SEQ ID NO: 75178 - DNA, 22 bp, synthetic construct
  misc_feature 1..22: note = chemically synthesized
  source 1..22: mol_type = other DNA
gctgtgtggtatgctgccacat

SEQ ID NO: 75179 - DNA, 22 bp, synthetic construct
  misc_feature 1..22: note = chemically synthesized
  source 1..22: mol_type = other DNA
ctgtgtggtatgctgccacatg

SEQ ID NO: 75180 - DNA, 22 bp, synthetic construct
  misc_feature 1..22: note = chemically synthesized
  source 1..22: mol_type = other DNA
tgtggtatgctgccacatgccc

SEQ ID NO: 75181 - DNA, 22 bp, synthetic construct
  misc_feature 1..22: note = chemically synthesized
  source 1..22: mol_type = other DNA
ccacatgcccaagcagacacac

SEQ ID NO: 75182 - DNA, 22 bp, synthetic construct
  misc_feature 1..22: note = chemically synthesized
  source 1..22: mol_type = other DNA
acttgtagaacacaagcaaaca

SEQ ID NO: 75183 - DNA, 22 bp, synthetic construct
  misc_feature 1..22: note = chemically synthesized
  source 1..22: mol_type = other DNA
cttgtagaacacaagcaaacaa

SEQ ID NO: 75184 - DNA, 22 bp, synthetic construct
  misc_feature 1..22: note = chemically synthesized
  source 1..22: mol_type = other DNA
gtagaacacaagcaaacaaatg

SEQ ID NO: 75185 - DNA, 22 bp, synthetic construct
  misc_feature 1..22: note = chemically synthesized
  source 1..22: mol_type = other DNA
tagaacacaagcaaacaaatga

SEQ ID NO: 75186 - DNA, 22 bp, synthetic construct
  misc_feature 1..22: note = chemically synthesized
  source 1..22: mol_type = other DNA
tccaatggcacattatagcttt

SEQ ID NO: 75187 - DNA, 22 bp, synthetic construct
  misc_feature 1..22: note = chemically synthesized
  source 1..22: mol_type = other DNA
caatggcacattatagcttttg

SEQ ID NO: 75188 - DNA, 22 bp, synthetic construct
  misc_feature 1..22: note = chemically synthesized
  source 1..22: mol_type = other DNA
tagcttttggaataaagtccag

SEQ ID NO: 75189 - DNA, 22 bp, synthetic construct
  misc_feature 1..22: note = chemically synthesized
  source 1..22: mol_type = other DNA
ttggaataaagtccagcaactc

SEQ ID NO: 75190 - DNA, 22 bp, synthetic construct
  misc_feature 1..22: note = chemically synthesized
  source 1..22: mol_type = other DNA
tggaataaagtccagcaactct

SEQ ID NO: 75191 - DNA, 22 bp, synthetic construct
  misc_feature 1..22: note = chemically synthesized
  source 1..22: mol_type = other DNA
ggaataaagtccagcaactctg

SEQ ID NO: 75192 - DNA, 22 bp, synthetic construct
  misc_feature 1..22: note = chemically synthesized
  source 1..22: mol_type = other DNA
gaataaagtccagcaactctgc

SEQ ID NO: 75193 - DNA, 22 bp, synthetic construct
  misc_feature 1..22: note = chemically synthesized
  source 1..22: mol_type = other DNA
tgcacaacattaatagccattt

SEQ ID NO: 75194 - DNA, 22 bp, synthetic construct
  misc_feature 1..22: note = chemically synthesized
  source 1..22: mol_type = other DNA
cacaacattaatagccattttt

SEQ ID NO: 75195 - DNA, 22 bp, synthetic construct
  misc_feature 1..22: note = chemically synthesized
  source 1..22: mol_type = other DNA
atagccatttttgatattcata

SEQ ID NO: 75196 - DNA, 22 bp, synthetic construct
  misc_feature 1..22: note = chemically synthesized
  source 1..22: mol_type = other DNA
ttgatattcatattttccttgt

SEQ ID NO: 75197 - DNA, 22 bp, synthetic construct
  misc_feature 1..22: note = chemically synthesized
  source 1..22: mol_type = other DNA
tgatattcatattttccttgtc

SEQ ID NO: 75198 - DNA, 22 bp, synthetic construct
  misc_feature 1..22: note = chemically synthesized
  source 1..22: mol_type = other DNA
gatattcatattttccttgtct

SEQ ID NO: 75199 - DNA, 22 bp, synthetic construct
  misc_feature 1..22: note = chemically synthesized
  source 1..22: mol_type = other DNA
atattcatattttccttgtctc

SEQ ID NO: 75200 - DNA, 22 bp, synthetic construct
  misc_feature 1..22: note = chemically synthesized
  source 1..22: mol_type = other DNA
atattttccttgtctccccaag

SEQ ID NO: 75201 - DNA, 22 bp, synthetic construct
  misc_feature 1..22: note = chemically synthesized
  source 1..22: mol_type = other DNA
tccttgtctccccaagttctac

SEQ ID NO: 75202 - DNA, 22 bp, synthetic construct
  misc_feature 1..22: note = chemically synthesized
  source 1..22: mol_type = other DNA
ccttgtctccccaagttctacc

SEQ ID NO: 75203 - DNA, 22 bp, synthetic construct
  misc_feature 1..22: note = chemically synthesized
  source 1..22: mol_type = other DNA
cttgtctccccaagttctacct

SEQ ID NO: 75204 - DNA, 22 bp, synthetic construct
  misc_feature 1..22: note = chemically synthesized
  source 1..22: mol_type = other DNA
gtctccccaagttctaccttgc

SEQ ID NO: 75205 - DNA, 22 bp, synthetic construct
  misc_feature 1..22: note = chemically synthesized
  source 1..22: mol_type = other DNA
tctccccaagttctaccttgca

SEQ ID NO: 75206 - DNA, 22 bp, synthetic construct
  misc_feature 1..22: note = chemically synthesized
  source 1..22: mol_type = other DNA
cccaagttctaccttgcactca

SEQ ID NO: 75207 - DNA, 22 bp, synthetic construct
  misc_feature 1..22: note = chemically synthesized
  source 1..22: mol_type = other DNA
taccttgcactcataccatatt

SEQ ID NO: 75208 - DNA, 22 bp, synthetic construct
  misc_feature 1..22: note = chemically synthesized
  source 1..22: mol_type = other DNA
ccttgcactcataccatattga

SEQ ID NO: 75209 - DNA, 22 bp, synthetic construct
  misc_feature 1..22: note = chemically synthesized
  source 1..22: mol_type = other DNA
gcactcataccatattgaaaaa

SEQ ID NO: 75210 - DNA, 22 bp, synthetic construct
  misc_feature 1..22: note = chemically synthesized
  source 1..22: mol_type = other DNA
cactcataccatattgaaaaaa

SEQ ID NO: 75211 - DNA, 22 bp, synthetic construct
  misc_feature 1..22: note = chemically synthesized
  source 1..22: mol_type = other DNA
ataccatattgaaaaaactaga

SEQ ID NO: 75212 - DNA, 22 bp, synthetic construct
  misc_feature 1..22: note = chemically synthesized
  source 1..22: mol_type = other DNA
aaaaaactagagttaccttaaa

SEQ ID NO: 75213 - DNA, 22 bp, synthetic construct
  misc_feature 1..22: note = chemically synthesized
  source 1..22: mol_type = other DNA
gagttaccttaaactacattat

SEQ ID NO: 75214 - DNA, 22 bp, synthetic construct
  misc_feature 1..22: note = chemically synthesized
  source 1..22: mol_type = other DNA
ccttaaactacattatctagtt

SEQ ID NO: 75215 - DNA, 22 bp, synthetic construct
  misc_feature 1..22: note = chemically synthesized
  source 1..22: mol_type = other DNA
aaactacattatctagtttaaa

SEQ ID NO: 75216 - DNA, 22 bp, synthetic construct
  misc_feature 1..22: note = chemically synthesized
  source 1..22: mol_type = other DNA
aactacattatctagtttaaat

SEQ ID NO: 75217 - DNA, 22 bp, synthetic construct
  misc_feature 1..22: note = chemically synthesized
  source 1..22: mol_type = other DNA
cattatctagtttaaatctcct

SEQ ID NO: 75218 - DNA, 22 bp, synthetic construct
  misc_feature 1..22: note = chemically synthesized
  source 1..22: mol_type = other DNA
tctagtttaaatctcctctact

SEQ ID NO: 75219 - DNA, 22 bp, synthetic construct
  misc_feature 1..22: note = chemically synthesized
  source 1..22: mol_type = other DNA
gtttaaatctcctctactatct

SEQ ID NO: 75220 - DNA, 22 bp, synthetic construct
  misc_feature 1..22: note = chemically synthesized
  source 1..22: mol_type = other DNA
aaatctcctctactatctacct

SEQ ID NO: 75221 - DNA, 22 bp, synthetic construct
  misc_feature 1..22: note = chemically synthesized
  source 1..22: mol_type = other DNA
aatctcctctactatctacctg

SEQ ID NO: 75222 - DNA, 22 bp, synthetic construct
  misc_feature 1..22: note = chemically synthesized
  source 1..22: mol_type = other DNA
ctctactatctacctggcatga

SEQ ID NO: 75223 - DNA, 22 bp, synthetic construct
  misc_feature 1..22: note = chemically synthesized
  source 1..22: mol_type = other DNA
tactatctacctggcatgatgt

SEQ ID NO: 75224 - DNA, 22 bp, synthetic construct
  misc_feature 1..22: note = chemically synthesized
  source 1..22: mol_type = other DNA
ctatctacctggcatgatgtgt

SEQ ID NO: 75225 - DNA, 22 bp, synthetic construct
  misc_feature 1..22: note = chemically synthesized
  source 1..22: mol_type = other DNA
tctacctggcatgatgtgttct

SEQ ID NO: 75226 - DNA, 22 bp, synthetic construct
  misc_feature 1..22: note = chemically synthesized
  source 1..22: mol_type = other DNA
cctggcatgatgtgttcttact

SEQ ID NO: 75227 - DNA, 22 bp, synthetic construct
  misc_feature 1..22: note = chemically synthesized
  source 1..22: mol_type = other DNA
gcatgatgtgttcttacttcct

SEQ ID NO: 75228 - DNA, 22 bp, synthetic construct
  misc_feature 1..22: note = chemically synthesized
  source 1..22: mol_type = other DNA
ttacttccttggctactcatcc

SEQ ID NO: 75229 - DNA, 22 bp, synthetic construct
  misc_feature 1..22: note = chemically synthesized
  source 1..22: mol_type = other DNA
acttccttggctactcatccat

SEQ ID NO: 75230 - DNA, 22 bp, synthetic construct
  misc_feature 1..22: note = chemically synthesized
  source 1..22: mol_type = other DNA
cttccttggctactcatccatc

SEQ ID NO: 75231 - DNA, 22 bp, synthetic construct
  misc_feature 1..22: note = chemically synthesized
  source 1..22: mol_type = other DNA
ccttggctactcatccatcatt

SEQ ID NO: 75232 - DNA, 22 bp, synthetic construct
  misc_feature 1..22: note = chemically synthesized
  source 1..22: mol_type = other DNA
cttggctactcatccatcattc

SEQ ID NO: 75233 - DNA, 22 bp, synthetic construct
  misc_feature 1..22: note = chemically synthesized
  source 1..22: mol_type = other DNA
ggctactcatccatcattcctc

SEQ ID NO: 75234 - DNA, 22 bp, synthetic construct
  misc_feature 1..22: note = chemically synthesized
  source 1..22: mol_type = other DNA
gctactcatccatcattcctca

SEQ ID NO: 75235 - DNA, 22 bp, synthetic construct
  misc_feature 1..22: note = chemically synthesized
  source 1..22: mol_type = other DNA
ctcatccatcattcctcaagaa

SEQ ID NO: 75236 - DNA, 22 bp, synthetic construct
  misc_feature 1..22: note = chemically synthesized
  source 1..22: mol_type = other DNA
atccatcattcctcaagaatca

SEQ ID NO: 75237 - DNA, 22 bp, synthetic construct
  misc_feature 1..22: note = chemically synthesized
  source 1..22: mol_type = other DNA
ctcaagaatcagaggtaactac

SEQ ID NO: 75238 - DNA, 22 bp, synthetic construct
  misc_feature 1..22: note = chemically synthesized
  source 1..22: mol_type = other DNA
aagaatcagaggtaactaccta

SEQ ID NO: 75239 - DNA, 22 bp, synthetic construct
  misc_feature 1..22: note = chemically synthesized
  source 1..22: mol_type = other DNA
cctaaccaaaaaacaaaataca

SEQ ID NO: 75240 - DNA, 22 bp, synthetic construct
  misc_feature 1..22: note = chemically synthesized
  source 1..22: mol_type = other DNA
accaaaaaacaaaatacaataa

SEQ ID NO: 75241 - DNA, 22 bp, synthetic construct
  misc_feature 1..22: note = chemically synthesized
  source 1..22: mol_type = other DNA
ccctgctttggttagatttcaa

SEQ ID NO: 75242 - DNA, 22 bp, synthetic construct
  misc_feature 1..22: note = chemically synthesized
  source 1..22: mol_type = other DNA
ctttggttagatttcaatgctt

SEQ ID NO: 75243 - DNA, 22 bp, synthetic construct
  misc_feature 1..22: note = chemically synthesized
  source 1..22: mol_type = other DNA
tggttagatttcaatgcttcat

SEQ ID NO: 75244 - DNA, 22 bp, synthetic construct
  misc_feature 1..22: note = chemically synthesized
  source 1..22: mol_type = other DNA
ggttagatttcaatgcttcatt

SEQ ID NO: 75245 - DNA, 22 bp, synthetic construct
  misc_feature 1..22: note = chemically synthesized
  source 1..22: mol_type = other DNA
gttagatttcaatgcttcattc

SEQ ID NO: 75246 - DNA, 22 bp, synthetic construct
  misc_feature 1..22: note = chemically synthesized
  source 1..22: mol_type = other DNA
gatttcaatgcttcattctctc

SEQ ID NO: 75247 - DNA, 22 bp, synthetic construct
  misc_feature 1..22: note = chemically synthesized
  source 1..22: mol_type = other DNA
caatgcttcattctctctgaac

SEQ ID NO: 75248 - DNA, 22 bp, synthetic construct
  misc_feature 1..22: note = chemically synthesized
  source 1..22: mol_type = other DNA
aatgcttcattctctctgaact

SEQ ID NO: 75249 - DNA, 22 bp, synthetic construct
  misc_feature 1..22: note = chemically synthesized
  source 1..22: mol_type = other DNA
cattctctctgaactccacatc

SEQ ID NO: 75250 - DNA, 22 bp, synthetic construct
  misc_feature 1..22: note = chemically synthesized
  source 1..22: mol_type = other DNA
attctctctgaactccacatcc

SEQ ID NO: 75251 - DNA, 22 bp, synthetic construct
  misc_feature 1..22: note = chemically synthesized
  source 1..22: mol_type = other DNA
tctctgaactccacatcctatg

SEQ ID NO: 75252 - DNA, 22 bp, synthetic construct
  misc_feature 1..22: note = chemically synthesized
  source 1..22: mol_type = other DNA
tctgaactccacatcctatgtg

SEQ ID NO: 75253 - DNA, 22 bp, synthetic construct
  misc_feature 1..22: note = chemically synthesized
  source 1..22: mol_type = other DNA
tgaactccacatcctatgtgta

SEQ ID NO: 75254 - DNA, 22 bp, synthetic construct
  misc_feature 1..22: note = chemically synthesized
  source 1..22: mol_type = other DNA
aactccacatcctatgtgtaca

SEQ ID NO: 75255 - DNA, 22 bp, synthetic construct
  misc_feature 1..22: note = chemically synthesized
  source 1..22: mol_type = other DNA
cacatcctatgtgtacacttgt

SEQ ID NO: 75256 - DNA, 22 bp, synthetic construct
  misc_feature 1..22: note = chemically synthesized
  source 1..22: mol_type = other DNA
tgtgtacacttgttatttctct

SEQ ID NO: 75257 - DNA, 22 bp, synthetic construct
  misc_feature 1..22: note = chemically synthesized
  source 1..22: mol_type = other DNA
gttatttctctcttctttccct

SEQ ID NO: 75258 - DNA, 22 bp, synthetic construct
  misc_feature 1..22: note = chemically synthesized
  source 1..22: mol_type = other DNA
ttatttctctcttctttccctt

SEQ ID NO: 75259 - DNA, 22 bp, synthetic construct
  misc_feature 1..22: note = chemically synthesized
  source 1..22: mol_type = other DNA
tttctctcttctttcccttgcc

SEQ ID NO: 75260 - DNA, 22 bp, synthetic construct
  misc_feature 1..22: note = chemically synthesized
  source 1..22: mol_type = other DNA
ctctcttctttcccttgcctgc

SEQ ID NO: 75261 - DNA, 22 bp, synthetic construct
  misc_feature 1..22: note = chemically synthesized
  source 1..22: mol_type = other DNA
tctcttctttcccttgcctgcc

SEQ ID NO: 75262 - DNA, 22 bp, synthetic construct
  misc_feature 1..22: note = chemically synthesized
  source 1..22: mol_type = other DNA
tcttctttcccttgcctgccca

SEQ ID NO: 75263 - DNA, 22 bp, synthetic construct
  misc_feature 1..22: note = chemically synthesized
  source 1..22: mol_type = other DNA
ttctttcccttgcctgcccatt

SEQ ID NO: 75264 - DNA, 22 bp, synthetic construct
  misc_feature 1..22: note = chemically synthesized
  source 1..22: mol_type = other DNA
ctttcccttgcctgcccattcc

SEQ ID NO: 75265 - DNA, 22 bp, synthetic construct
  misc_feature 1..22: note = chemically synthesized
  source 1..22: mol_type = other DNA
tttcccttgcctgcccattccc

SEQ ID NO: 75266 - DNA, 22 bp, synthetic construct
  misc_feature 1..22: note = chemically synthesized
  source 1..22: mol_type = other DNA
tcccttgcctgcccattcccca

SEQ ID NO: 75267 - DNA, 22 bp, synthetic construct
  misc_feature 1..22: note = chemically synthesized
  source 1..22: mol_type = other DNA
cccttgcctgcccattccccac

SEQ ID NO: 75268 - DNA, 22 bp, synthetic construct
  misc_feature 1..22: note = chemically synthesized
  source 1..22: mol_type = other DNA
ccttgcctgcccattccccacc

SEQ ID NO: 75269 - DNA, 22 bp, synthetic construct
  misc_feature 1..22: note = chemically synthesized
  source 1..22: mol_type = other DNA
gcctgcccattccccacctctc

SEQ ID NO: 75270 - DNA, 22 bp, synthetic construct
  misc_feature 1..22: note = chemically synthesized
  source 1..22: mol_type = other DNA
cctgcccattccccacctctct

SEQ ID NO: 75271 - DNA, 22 bp, synthetic construct
  misc_feature 1..22: note = chemically synthesized
  source 1..22: mol_type = other DNA
cccattccccacctctcttcct

SEQ ID NO: 75272 - DNA, 22 bp, synthetic construct
  misc_feature 1..22: note = chemically synthesized
  source 1..22: mol_type = other DNA
cccacctctcttcctttcagtc

SEQ ID NO: 75273 - DNA, 22 bp, synthetic construct
  misc_feature 1..22: note = chemically synthesized
  source 1..22: mol_type = other DNA
tcttcctttcagtctctctttt

SEQ ID NO: 75274 - DNA, 22 bp, synthetic construct
  misc_feature 1..22: note = chemically synthesized
  source 1..22: mol_type = other DNA
ttcctttcagtctctcttttcc

SEQ ID NO: 75275 - DNA, 22 bp, synthetic construct
  misc_feature 1..22: note = chemically synthesized
  source 1..22: mol_type = other DNA
cctttcagtctctcttttccag

SEQ ID NO: 75276 - DNA, 22 bp, synthetic construct
  misc_feature 1..22: note = chemically synthesized
  source 1..22: mol_type = other DNA
ctttcagtctctcttttccaga

SEQ ID NO: 75277 - DNA, 22 bp, synthetic construct
  misc_feature 1..22: note = chemically synthesized
  source 1..22: mol_type = other DNA
tcagtctctcttttccagaatt

SEQ ID NO: 75278 - DNA, 22 bp, synthetic construct
  misc_feature 1..22: note = chemically synthesized
  source 1..22: mol_type = other DNA
cagtctctcttttccagaatta

SEQ ID NO: 75279 - DNA, 22 bp, synthetic construct
  misc_feature 1..22: note = chemically synthesized
  source 1..22: mol_type = other DNA
agtctctcttttccagaattac

SEQ ID NO: 75280 - DNA, 22 bp, synthetic construct
  misc_feature 1..22: note = chemically synthesized
  source 1..22: mol_type = other DNA
tcttttccagaattacataggt

SEQ ID NO: 75281 - DNA, 22 bp, synthetic construct
  misc_feature 1..22: note = chemically synthesized
  source 1..22: mol_type = other DNA
ttttccagaattacataggtac

SEQ ID NO: 75282 - DNA, 22 bp, synthetic construct
  misc_feature 1..22: note = chemically synthesized
  source 1..22: mol_type = other DNA
ttccagaattacataggtacaa

SEQ ID NO: 75283 - DNA, 22 bp, synthetic construct
  misc_feature 1..22: note = chemically synthesized
  source 1..22: mol_type = other DNA
tccagaattacataggtacaaa

SEQ ID NO: 75284 - DNA, 22 bp, synthetic construct
  misc_feature 1..22: note = chemically synthesized
  source 1..22: mol_type = other DNA
ccagaattacataggtacaaac

SEQ ID NO: 75285 - DNA, 22 bp, synthetic construct
  misc_feature 1..22: note = chemically synthesized
  source 1..22: mol_type = other DNA
cagaattacataggtacaaact

SEQ ID NO: 75286 - DNA, 22 bp, synthetic construct
  misc_feature 1..22: note = chemically synthesized
  source 1..22: mol_type = other DNA
cataggtacaaactcatgagaa

SEQ ID NO: 75287 - DNA, 22 bp, synthetic construct
  misc_feature 1..22: note = chemically synthesized
  source 1..22: mol_type = other DNA
atgagaattattcactgtgcca

SEQ ID NO: 75288 - DNA, 22 bp, synthetic construct
  misc_feature 1..22: note = chemically synthesized
  source 1..22: mol_type = other DNA
ttcactgtgccagatttactat

SEQ ID NO: 75289 - DNA, 22 bp, synthetic construct
  misc_feature 1..22: note = chemically synthesized
  source 1..22: mol_type = other DNA
actgtgccagatttactattat

SEQ ID NO: 75290 - DNA, 22 bp, synthetic construct
  misc_feature 1..22: note = chemically synthesized
  source 1..22: mol_type = other DNA
tgccagatttactattatgtca

SEQ ID NO: 75291 - DNA, 22 bp, synthetic construct
  misc_feature 1..22: note = chemically synthesized
  source 1..22: mol_type = other DNA
actattatgtcacgattctgta

SEQ ID NO: 75292 - DNA, 22 bp, synthetic construct
  misc_feature 1..22: note = chemically synthesized
  source 1..22: mol_type = other DNA
ctattatgtcacgattctgtag

SEQ ID NO: 75293 - DNA, 22 bp, synthetic construct
  misc_feature 1..22: note = chemically synthesized
  source 1..22: mol_type = other DNA
ttatgtcacgattctgtagtat

SEQ ID NO: 75294 - DNA, 22 bp, synthetic construct
  misc_feature 1..22: note = chemically synthesized
  source 1..22: mol_type = other DNA
tgtcacgattctgtagtatagt

SEQ ID NO: 75295 - DNA, 22 bp, synthetic construct
  misc_feature 1..22: note = chemically synthesized
  source 1..22: mol_type = other DNA
tgtagtatagtatttttaatat

SEQ ID NO: 75296 - DNA, 22 bp, synthetic construct
  misc_feature 1..22: note = chemically synthesized
  source 1..22: mol_type = other DNA
tagtatagtatttttaatattg

SEQ ID NO: 75297 - DNA, 22 bp, synthetic construct
  misc_feature 1..22: note = chemically synthesized
  source 1..22: mol_type = other DNA
ttaatattgcaggtttttgata

SEQ ID NO: 75298 - DNA, 22 bp, synthetic construct
  misc_feature 1..22: note = chemically synthesized
  source 1..22: mol_type = other DNA
taatattgcaggtttttgataa

SEQ ID NO: 75299 - DNA, 22 bp, synthetic construct
  misc_feature 1..22: note = chemically synthesized
  source 1..22: mol_type = other DNA
aatattgcaggtttttgataaa

SEQ ID NO: 75300 - DNA, 22 bp, synthetic construct
  misc_feature 1..22: note = chemically synthesized
  source 1..22: mol_type = other DNA
atattgcaggtttttgataaaa

SEQ ID NO: 75301 - DNA, 22 bp, synthetic construct
  misc_feature 1..22: note = chemically synthesized
  source 1..22: mol_type = other DNA
caggtttttgataaaatgatga

SEQ ID NO: 75302 - DNA, 22 bp, synthetic construct
  misc_feature 1..22: note = chemically synthesized
  source 1..22: mol_type = other DNA
ttgataaaatgatgaattaata

SEQ ID NO: 75303 - DNA, 22 bp, synthetic construct
  misc_feature 1..22: note = chemically synthesized
  source 1..22: mol_type = other DNA
tgataaaatgatgaattaataa

SEQ ID NO: 75304 - DNA, 22 bp, synthetic construct
  misc_feature 1..22: note = chemically synthesized
  source 1..22: mol_type = other DNA
gataaaatgatgaattaataaa

SEQ ID NO: 75305 - DNA, 22 bp, synthetic construct
  misc_feature 1..22: note = chemically synthesized
  source 1..22: mol_type = other DNA
ataaaatgatgaattaataaag

SEQ ID NO: 75306 - DNA, 22 bp, synthetic construct
  misc_feature 1..22: note = chemically synthesized
  source 1..22: mol_type = other DNA
ataaagaagtaaattttgaggt

SEQ ID NO: 75307 - DNA, 22 bp, synthetic construct
  misc_feature 1..22: note = chemically synthesized
  source 1..22: mol_type = other DNA
tgaggttagcaaaaaaaaaaac

SEQ ID NO: 75308 - DNA, 22 bp, synthetic construct
  misc_feature 1..22: note = chemically synthesized
  source 1..22: mol_type = other DNA
gaggttagcaaaaaaaaaaaca

SEQ ID NO: 75309 - DNA, 22 bp, synthetic construct
  misc_feature 1..22: note = chemically synthesized
  source 1..22: mol_type = other DNA
aggttagcaaaaaaaaaaacaa

SEQ ID NO: 75310 - DNA, 22 bp, synthetic construct
  misc_feature 1..22: note = chemically synthesized
  source 1..22: mol_type = other DNA
gcaaaaaaaaaaacaacaacat

SEQ ID NO: 75311 - DNA, 22 bp, synthetic construct
  misc_feature 1..22: note = chemically synthesized
  source 1..22: mol_type = other DNA
atgtgtcaaatgcaacacctgg

SEQ ID NO: 75312 - DNA, 22 bp, synthetic construct
  misc_feature 1..22: note = chemically synthesized
  source 1..22: mol_type = other DNA
gttctaatttttgtgcctgtaa

SEQ ID NO: 75313 - DNA, 22 bp, synthetic construct
  misc_feature 1..22: note = chemically synthesized
  source 1..22: mol_type = other DNA
taatttttgtgcctgtaattcc

SEQ ID NO: 75314 - DNA, 22 bp, synthetic construct
  misc_feature 1..22: note = chemically synthesized
  source 1..22: mol_type = other DNA
atttttgtgcctgtaattcctt

SEQ ID NO: 75315 - DNA, 22 bp, synthetic construct
  misc_feature 1..22: note = chemically synthesized
  source 1..22: mol_type = other DNA
ttgtgcctgtaattccttgtat

SEQ ID NO: 75316 - DNA, 22 bp, synthetic construct
  misc_feature 1..22: note = chemically synthesized
  source 1..22: mol_type = other DNA
tgtgcctgtaattccttgtatg

SEQ ID NO: 75317 - DNA, 22 bp, synthetic construct
  misc_feature 1..22: note = chemically synthesized
  source 1..22: mol_type = other DNA
gtgcctgtaattccttgtatga

SEQ ID NO: 75318 - DNA, 22 bp, synthetic construct
  misc_feature 1..22: note = chemically synthesized
  source 1..22: mol_type = other DNA
tgcctgtaattccttgtatgac

SEQ ID NO: 75319 - DNA, 22 bp, synthetic construct
  misc_feature 1..22: note = chemically synthesized
  source 1..22: mol_type = other DNA
taattccttgtatgactctgaa

SEQ ID NO: 75320 - DNA, 22 bp, synthetic construct
  misc_feature 1..22: note = chemically synthesized
  source 1..22: mol_type = other DNA
cttgtatgactctgaaaatgta

SEQ ID NO: 75321 - DNA, 22 bp, synthetic construct
  misc_feature 1..22: note = chemically synthesized
  source 1..22: mol_type = other DNA
gtatgactctgaaaatgtattt

SEQ ID NO: 75322 - DNA, 22 bp, synthetic construct
  misc_feature 1..22: note = chemically synthesized
  source 1..22: mol_type = other DNA
tatgactctgaaaatgtattta

SEQ ID NO: 75323 - DNA, 22 bp, synthetic construct
  misc_feature 1..22: note = chemically synthesized
  source 1..22: mol_type = other DNA
tgaaaatgtatttaaattttta

SEQ ID NO: 75324 - DNA, 22 bp, synthetic construct
  misc_feature 1..22: note = chemically synthesized
  source 1..22: mol_type = other DNA
aaaatgtatttaaatttttagg

SEQ ID NO: 75325 - DNA, 22 bp, synthetic construct
  misc_feature 1..22: note = chemically synthesized
  source 1..22: mol_type = other DNA
aaatttttaggctttattgtct

SEQ ID NO: 75326 - DNA, 22 bp, synthetic construct
  misc_feature 1..22: note = chemically synthesized
  source 1..22: mol_type = other DNA
aatttttaggctttattgtctc

SEQ ID NO: 75327 - DNA, 22 bp, synthetic construct
  misc_feature 1..22: note = chemically synthesized
  source 1..22: mol_type = other DNA
ttaggctttattgtctcttgat

SEQ ID NO: 75328 - DNA, 22 bp, synthetic construct
  misc_feature 1..22: note = chemically synthesized
  source 1..22: mol_type = other DNA
taggctttattgtctcttgata

SEQ ID NO: 75329 - DNA, 22 bp, synthetic construct
  misc_feature 1..22: note = chemically synthesized
  source 1..22: mol_type = other DNA
aggctttattgtctcttgatat

SEQ ID NO: 75330 - DNA, 22 bp, synthetic construct
  misc_feature 1..22: note = chemically synthesized
  source 1..22: mol_type = other DNA
ggctttattgtctcttgatatt

SEQ ID NO: 75331 - DNA, 22 bp, synthetic construct
  misc_feature 1..22: note = chemically synthesized
  source 1..22: mol_type = other DNA
tattgtctcttgatattcataa

SEQ ID NO: 75332 - DNA, 22 bp, synthetic construct
  misc_feature 1..22: note = chemically synthesized
  source 1..22: mol_type = other DNA
attgtctcttgatattcataag

SEQ ID NO: 75333 - DNA, 22 bp, synthetic construct
  misc_feature 1..22: note = chemically synthesized
  source 1..22: mol_type = other DNA
ttgtctcttgatattcataaga

SEQ ID NO: 75334 - DNA, 22 bp, synthetic construct
  misc_feature 1..22: note = chemically synthesized
  source 1..22: mol_type = other DNA
tctcttgatattcataagattt

SEQ ID NO: 75335 - DNA, 22 bp, synthetic construct
  misc_feature 1..22: note = chemically synthesized
  source 1..22: mol_type = other DNA
ttgatattcataagattttctt

SEQ ID NO: 75336 - DNA, 22 bp, synthetic construct
  misc_feature 1..22: note = chemically synthesized
  source 1..22: mol_type = other DNA
gatattcataagattttctttg

SEQ ID NO: 75337 - DNA, 22 bp, synthetic construct
  misc_feature 1..22: note = chemically synthesized
  source 1..22: mol_type = other DNA
atattcataagattttctttga

SEQ ID NO: 75338 - DNA, 22 bp, synthetic construct
  misc_feature 1..22: note = chemically synthesized
  source 1..22: mol_type = other DNA
ataagattttctttgacaagaa

SEQ ID NO: 75339 - DNA, 22 bp, synthetic construct
  misc_feature 1..22: note = chemically synthesized
  source 1..22: mol_type = other DNA
tctttgacaagaacacagttaa

SEQ ID NO: 75340 - DNA, 22 bp, synthetic construct
  misc_feature 1..22: note = chemically synthesized
  source 1..22: mol_type = other DNA
ctttgacaagaacacagttaac

SEQ ID NO: 75341 - DNA, 22 bp, synthetic construct
  misc_feature 1..22: note = chemically synthesized
  source 1..22: mol_type = other DNA
tttgacaagaacacagttaaca

SEQ ID NO: 75342 - DNA, 22 bp, synthetic construct
  misc_feature 1..22: note = chemically synthesized
  source 1..22: mol_type = other DNA
tgacaagaacacagttaacatg

SEQ ID NO: 75343 - DNA, 22 bp, synthetic construct
  misc_feature 1..22: note = chemically synthesized
  source 1..22: mol_type = other DNA
gacaagaacacagttaacatgt

SEQ ID NO: 75344 - DNA, 22 bp, synthetic construct
  misc_feature 1..22: note = chemically synthesized
  source 1..22: mol_type = other DNA
acaagaacacagttaacatgta

SEQ ID NO: 75345 - DNA, 22 bp, synthetic construct
  misc_feature 1..22: note = chemically synthesized
  source 1..22: mol_type = other DNA
acatgtacttcctttgattttt

SEQ ID NO: 75346 - DNA, 22 bp, synthetic construct
  misc_feature 1..22: note = chemically synthesized
  source 1..22: mol_type = other DNA
cctttgatttttttttttaagg

SEQ ID NO: 75347 - DNA, 22 bp, synthetic construct
  misc_feature 1..22: note = chemically synthesized
  source 1..22: mol_type = other DNA
ctttgatttttttttttaaggc

SEQ ID NO: 75348 - DNA, 22 bp, synthetic construct
  misc_feature 1..22: note = chemically synthesized
  source 1..22: mol_type = other DNA
tgatttttttttttaaggcagg

SEQ ID NO: 75349 - DNA, 22 bp, synthetic construct
  misc_feature 1..22: note = chemically synthesized
  source 1..22: mol_type = other DNA
gatttttttttttaaggcaggg

SEQ ID NO: 75350 - DNA, 22 bp, synthetic construct
  misc_feature 1..22: note = chemically synthesized
  source 1..22: mol_type = other DNA
atttttttttttaaggcaggga

SEQ ID NO: 75351 - DNA, 22 bp, synthetic construct
  misc_feature 1..22: note = chemically synthesized
  source 1..22: mol_type = other DNA
ttttttttaaggcagggatgat

SEQ ID NO: 75352 - DNA, 22 bp, synthetic construct
  misc_feature 1..22: note = chemically synthesized
  source 1..22: mol_type = other DNA
tttttttaaggcagggatgatc

SEQ ID NO: 75353 - DNA, 22 bp, synthetic construct
  misc_feature 1..22: note = chemically synthesized
  source 1..22: mol_type = other DNA
ttttttaaggcagggatgatca

SEQ ID NO: 75354 - DNA, 22 bp, synthetic construct
  misc_feature 1..22: note = chemically synthesized
  source 1..22: mol_type = other DNA
tttttaaggcagggatgatcaa

SEQ ID NO: 75355 - DNA, 22 bp, synthetic construct
  misc_feature 1..22: note = chemically synthesized
  source 1..22: mol_type = other DNA
ttttaaggcagggatgatcaag

SEQ ID NO: 75356 - DNA, 22 bp, synthetic construct
  misc_feature 1..22: note = chemically synthesized
  source 1..22: mol_type = other DNA
tttaaggcagggatgatcaaga

SEQ ID NO: 75357 - DNA, 22 bp, synthetic construct
  misc_feature 1..22: note = chemically synthesized
  source 1..22: mol_type = other DNA
ttaaggcagggatgatcaagaa

SEQ ID NO: 75358 - DNA, 22 bp, synthetic construct
  misc_feature 1..22: note = chemically synthesized
  source 1..22: mol_type = other DNA
taaggcagggatgatcaagaaa

SEQ ID NO: 75359 - DNA, 22 bp, synthetic construct
  misc_feature 1..22: note = chemically synthesized
  source 1..22: mol_type = other DNA
aaggcagggatgatcaagaaaa

SEQ ID NO: 75360 - DNA, 22 bp, synthetic construct
  misc_feature 1..22: note = chemically synthesized
  source 1..22: mol_type = other DNA
aggcagggatgatcaagaaaat

SEQ ID NO: 75361 - DNA, 22 bp, synthetic construct
  misc_feature 1..22: note = chemically synthesized
  source 1..22: mol_type = other DNA
gttttcattgagtccctggatg

SEQ ID NO: 75362 - DNA, 22 bp, synthetic construct
  misc_feature 1..22: note = chemically synthesized
  source 1..22: mol_type = other DNA
ttttcattgagtccctggatgt

SEQ ID NO: 75363 - DNA, 22 bp, synthetic construct
  misc_feature 1..22: note = chemically synthesized
  source 1..22: mol_type = other DNA
tcattgagtccctggatgtttc

SEQ ID NO: 75364 - DNA, 22 bp, synthetic construct
  misc_feature 1..22: note = chemically synthesized
  source 1..22: mol_type = other DNA
cattgagtccctggatgtttca

SEQ ID NO: 75365 - DNA, 22 bp, synthetic construct
  misc_feature 1..22: note = chemically synthesized
  source 1..22: mol_type = other DNA
attgagtccctggatgtttcag

SEQ ID NO: 75366 - DNA, 22 bp, synthetic construct
  misc_feature 1..22: note = chemically synthesized
  source 1..22: mol_type = other DNA
agtccctggatgtttcagaaca

SEQ ID NO: 75367 - DNA, 22 bp, synthetic construct
  misc_feature 1..22: note = chemically synthesized
  source 1..22: mol_type = other DNA
gatgtttcagaacaacgagcct

SEQ ID NO: 75368 - DNA, 22 bp, synthetic construct
  misc_feature 1..22: note = chemically synthesized
  source 1..22: mol_type = other DNA
cagaacaacgagccttaggtgc

SEQ ID NO: 75369 - DNA, 22 bp, synthetic construct
  misc_feature 1..22: note = chemically synthesized
  source 1..22: mol_type = other DNA
agaacaacgagccttaggtgca

SEQ ID NO: 75370 - DNA, 22 bp, synthetic construct
  misc_feature 1..22: note = chemically synthesized
  source 1..22: mol_type = other DNA
aggtgcatttaaattcagtgac

SEQ ID NO: 75371 - DNA, 22 bp, synthetic construct
  misc_feature 1..22: note = chemically synthesized
  source 1..22: mol_type = other DNA
ggtgcatttaaattcagtgaca

SEQ ID NO: 75372 - DNA, 22 bp, synthetic construct
  misc_feature 1..22: note = chemically synthesized
  source 1..22: mol_type = other DNA
aaattcagtgacaaaggcataa

SEQ ID NO: 75373 - DNA, 22 bp, synthetic construct
  misc_feature 1..22: note = chemically synthesized
  source 1..22: mol_type = other DNA
aattcagtgacaaaggcataat

SEQ ID NO: 75374 - DNA, 22 bp, synthetic construct
  misc_feature 1..22: note = chemically synthesized
  source 1..22: mol_type = other DNA
agtgacaaaggcataatttata

SEQ ID NO: 75375 - DNA, 22 bp, synthetic construct
  misc_feature 1..22: note = chemically synthesized
  source 1..22: mol_type = other DNA
ataaatcctcctggagaaatat

SEQ ID NO: 75376 - DNA, 22 bp, synthetic construct
  misc_feature 1..22: note = chemically synthesized
  source 1..22: mol_type = other DNA
taaatcctcctggagaaatatt

SEQ ID NO: 75377 - DNA, 22 bp, synthetic construct
  misc_feature 1..22: note = chemically synthesized
  source 1..22: mol_type = other DNA
ctggagaaatattcttagaaga

SEQ ID NO: 75378 - DNA, 22 bp, synthetic construct
  misc_feature 1..22: note = chemically synthesized
  source 1..22: mol_type = other DNA
gagaaatattcttagaagaata

SEQ ID NO: 75379 - DNA, 22 bp, synthetic construct
  misc_feature 1..22: note = chemically synthesized
  source 1..22: mol_type = other DNA
ttagaagaataactcaaccagg

SEQ ID NO: 75380 - DNA, 22 bp, synthetic construct
  misc_feature 1..22: note = chemically synthesized
  source 1..22: mol_type = other DNA
agaagaataactcaaccagggg

SEQ ID NO: 75381 - DNA, 22 bp, synthetic construct
  misc_feature 1..22: note = chemically synthesized
  source 1..22: mol_type = other DNA
gaagaataactcaaccaggggc

SEQ ID NO: 75382 - DNA, 22 bp, synthetic construct
  misc_feature 1..22: note = chemically synthesized
  source 1..22: mol_type = other DNA
aaccaggggctaaagaataaaa

SEQ ID NO: 75383 - DNA, 22 bp, synthetic construct
  misc_feature 1..22: note = chemically synthesized
  source 1..22: mol_type = other DNA
aagaataaaagagaaaaaataa

SEQ ID NO: 75384 - DNA, 22 bp, synthetic construct
  misc_feature 1..22: note = chemically synthesized
  source 1..22: mol_type = other DNA
actacttcactcatttcacact

SEQ ID NO: 75385 - DNA, 22 bp, synthetic construct
  misc_feature 1..22: note = chemically synthesized
  source 1..22: mol_type = other DNA
cttcactcatttcacacttctc

SEQ ID NO: 75386 - DNA, 22 bp, synthetic construct
  misc_feature 1..22: note = chemically synthesized
  source 1..22: mol_type = other DNA
cactcatttcacacttctcact

SEQ ID NO: 75387 - DNA, 22 bp, synthetic construct
  misc_feature 1..22: note = chemically synthesized
  source 1..22: mol_type = other DNA
actcatttcacacttctcactt

SEQ ID NO: 75388 - DNA, 22 bp, synthetic construct
  misc_feature 1..22: note = chemically synthesized
  source 1..22: mol_type = other DNA
atttcacacttctcactttcat

SEQ ID NO: 75389 - DNA, 22 bp, synthetic construct
  misc_feature 1..22: note = chemically synthesized
  source 1..22: mol_type = other DNA
cacacttctcactttcattagt

SEQ ID NO: 75390 - DNA, 22 bp, synthetic construct
  misc_feature 1..22: note = chemically synthesized
  source 1..22: mol_type = other DNA
acacttctcactttcattagtc

SEQ ID NO: 75391 - DNA, 22 bp, synthetic construct
  misc_feature 1..22: note = chemically synthesized
  source 1..22: mol_type = other DNA
ctcactttcattagtcacgtag

SEQ ID NO: 75392 - DNA, 22 bp, synthetic construct
  misc_feature 1..22: note = chemically synthesized
  source 1..22: mol_type = other DNA
tcactttcattagtcacgtaga

SEQ ID NO: 75393 - DNA, 22 bp, synthetic construct
  misc_feature 1..22: note = chemically synthesized
  source 1..22: mol_type = other DNA
actttcattagtcacgtagaat

SEQ ID NO: 75394 - DNA, 22 bp, synthetic construct
  misc_feature 1..22: note = chemically synthesized
  source 1..22: mol_type = other DNA
tcattagtcacgtagaattcac

SEQ ID NO: 75395 - DNA, 22 bp, synthetic construct
  misc_feature 1..22: note = chemically synthesized
  source 1..22: mol_type = other DNA
cattagtcacgtagaattcaca

SEQ ID NO: 75396 - DNA, 22 bp, synthetic construct
  misc_feature 1..22: note = chemically synthesized
  source 1..22: mol_type = other DNA
attagtcacgtagaattcacaa

SEQ ID NO: 75397 - DNA, 22 bp, synthetic construct
  misc_feature 1..22: note = chemically synthesized
  source 1..22: mol_type = other DNA
gtcacgtagaattcacaatccc

SEQ ID NO: 75398 - DNA, 22 bp, synthetic construct
  misc_feature 1..22: note = chemically synthesized
  source 1..22: mol_type = other DNA
acaatcccactgattgatatga

SEQ ID NO: 75399 - DNA, 22 bp, synthetic construct
  misc_feature 1..22: note = chemically synthesized
  source 1..22: mol_type = other DNA
attgatatgagccatgatgatc

SEQ ID NO: 75400 - DNA, 22 bp, synthetic construct
  misc_feature 1..22: note = chemically synthesized
  source 1..22: mol_type = other DNA
atatgagccatgatgatctaaa

SEQ ID NO: 75401 - DNA, 22 bp, synthetic construct
  misc_feature 1..22: note = chemically synthesized
  source 1..22: mol_type = other DNA
aaaccagctattgtgctggcag

SEQ ID NO: 75402 - DNA, 22 bp, synthetic construct
  misc_feature 1..22: note = chemically synthesized
  source 1..22: mol_type = other DNA
ttgtgctggcagatttcacaaa

SEQ ID NO: 75403 - DNA, 22 bp, synthetic construct
  misc_feature 1..22: note = chemically synthesized
  source 1..22: mol_type = other DNA
tgctggcagatttcacaaaccc

SEQ ID NO: 75404 - DNA, 22 bp, synthetic construct
  misc_feature 1..22: note = chemically synthesized
  source 1..22: mol_type = other DNA
gcagatttcacaaacccagcat

SEQ ID NO: 75405 - DNA, 22 bp, synthetic construct
  misc_feature 1..22: note = chemically synthesized
  source 1..22: mol_type = other DNA
cacaaacccagcatctcaaata

SEQ ID NO: 75406 - DNA, 22 bp, synthetic construct
  misc_feature 1..22: note = chemically synthesized
  source 1..22: mol_type = other DNA
acaaacccagcatctcaaataa

SEQ ID NO: 75407 - DNA, 22 bp, synthetic construct
  misc_feature 1..22: note = chemically synthesized
  source 1..22: mol_type = other DNA
aaataatatgttttttgttttg

SEQ ID NO: 75408 - DNA, 22 bp, synthetic construct
  misc_feature 1..22: note = chemically synthesized
  source 1..22: mol_type = other DNA
tttgttttgttttgatatggtt

SEQ ID NO: 75409 - DNA, 22 bp, synthetic construct
  misc_feature 1..22: note = chemically synthesized
  source 1..22: mol_type = other DNA
ttgttttgttttgatatggtta

SEQ ID NO: 75410 - DNA, 22 bp, synthetic construct
  misc_feature 1..22: note = chemically synthesized
  source 1..22: mol_type = other DNA
tgttttgttttgatatggttac

SEQ ID NO: 75411 - DNA, 22 bp, synthetic construct
  misc_feature 1..22: note = chemically synthesized
  source 1..22: mol_type = other DNA
gttttgttttgatatggttact

SEQ ID NO: 75412 - DNA, 22 bp, synthetic construct
  misc_feature 1..22: note = chemically synthesized
  source 1..22: mol_type = other DNA
ttttgttttgatatggttacta

SEQ ID NO: 75413 - DNA, 22 bp, synthetic construct
  misc_feature 1..22: note = chemically synthesized
  source 1..22: mol_type = other DNA
tgttttgatatggttactactg

SEQ ID NO: 75414 - DNA, 22 bp, synthetic construct
  misc_feature 1..22: note = chemically synthesized
  source 1..22: mol_type = other DNA
gttttgatatggttactactgc

SEQ ID NO: 75415 - DNA, 22 bp, synthetic construct
  misc_feature 1..22: note = chemically synthesized
  source 1..22: mol_type = other DNA
ttttgatatggttactactgca

SEQ ID NO: 75416 - DNA, 22 bp, synthetic construct
  misc_feature 1..22: note = chemically synthesized
  source 1..22: mol_type = other DNA
tgatatggttactactgcaaaa

SEQ ID NO: 75417 - DNA, 22 bp, synthetic construct
  misc_feature 1..22: note = chemically synthesized
  source 1..22: mol_type = other DNA
gatatggttactactgcaaaag

SEQ ID NO: 75418 - DNA, 22 bp, synthetic construct
  misc_feature 1..22: note = chemically synthesized
  source 1..22: mol_type = other DNA
atatggttactactgcaaaaga

SEQ ID NO: 75419 - DNA, 22 bp, synthetic construct
  misc_feature 1..22: note = chemically synthesized
  source 1..22: mol_type = other DNA
ctactgcaaaagaaaaaagcat

SEQ ID NO: 75420 - DNA, 22 bp, synthetic construct
  misc_feature 1..22: note = chemically synthesized
  source 1..22: mol_type = other DNA
ctgcaaaagaaaaaagcatgta

SEQ ID NO: 75421 - DNA, 22 bp, synthetic construct
  misc_feature 1..22: note = chemically synthesized
  source 1..22: mol_type = other DNA
caaaagaaaaaagcatgtaggc

SEQ ID NO: 75422 - DNA, 22 bp, synthetic construct
  misc_feature 1..22: note = chemically synthesized
  source 1..22: mol_type = other DNA
attaaggtggattttatgaaca

SEQ ID NO: 75423 - DNA, 22 bp, synthetic construct
  misc_feature 1..22: note = chemically synthesized
  source 1..22: mol_type = other DNA
aggtggattttatgaacagaac

SEQ ID NO: 75424 - DNA, 22 bp, synthetic construct
  misc_feature 1..22: note = chemically synthesized
  source 1..22: mol_type = other DNA
tatgaacagaacatttttacca

SEQ ID NO: 75425 - DNA, 22 bp, synthetic construct
  misc_feature 1..22: note = chemically synthesized
  source 1..22: mol_type = other DNA
atgaacagaacatttttaccac

SEQ ID NO: 75426 - DNA, 22 bp, synthetic construct
  misc_feature 1..22: note = chemically synthesized
  source 1..22: mol_type = other DNA
tgaacagaacatttttaccaca

SEQ ID NO: 75427 - DNA, 22 bp, synthetic construct
  misc_feature 1..22: note = chemically synthesized
  source 1..22: mol_type = other DNA
ttaccacatgaatgcgaatctg

SEQ ID NO: 75428 - DNA, 22 bp, synthetic construct
  misc_feature 1..22: note = chemically synthesized
  source 1..22: mol_type = other DNA
taccacatgaatgcgaatctgt

SEQ ID NO: 75429 - DNA, 22 bp, synthetic construct
  misc_feature 1..22: note = chemically synthesized
  source 1..22: mol_type = other DNA
accacatgaatgcgaatctgtg

SEQ ID NO: 75430 - DNA, 22 bp, synthetic construct
  misc_feature 1..22: note = chemically synthesized
  source 1..22: mol_type = other DNA
ccacatgaatgcgaatctgtgt

SEQ ID NO: 75431 - DNA, 22 bp, synthetic construct
  misc_feature 1..22: note = chemically synthesized
  source 1..22: mol_type = other DNA
tgtggtctttgcaccatagaca

SEQ ID NO: 75432 - DNA, 22 bp, synthetic construct
  misc_feature 1..22: note = chemically synthesized
  source 1..22: mol_type = other DNA
tgcaccatagacaagtggattg

SEQ ID NO: 75433 - DNA, 22 bp, synthetic construct
  misc_feature 1..22: note = chemically synthesized
  source 1..22: mol_type = other DNA
gcaccatagacaagtggattga

SEQ ID NO: 75434 - DNA, 22 bp, synthetic construct
  misc_feature 1..22: note = chemically synthesized
  source 1..22: mol_type = other DNA
caccatagacaagtggattgag

SEQ ID NO: 75435 - DNA, 22 bp, synthetic construct
  misc_feature 1..22: note = chemically synthesized
  source 1..22: mol_type = other DNA
agaaatggagggaccagcaagt

SEQ ID NO: 75436 - DNA, 22 bp, synthetic construct
  misc_feature 1..22: note = chemically synthesized
  source 1..22: mol_type = other DNA
gaaaagagaatatggatataag

SEQ ID NO: 75437 - DNA, 22 bp, synthetic construct
  misc_feature 1..22: note = chemically synthesized
  source 1..22: mol_type = other DNA
tgtgtgaagaaggagaagaagg

SEQ ID NO: 75438 - DNA, 22 bp, synthetic construct
  misc_feature 1..22: note = chemically synthesized
  source 1..22: mol_type = other DNA
gaggaagacacagatgtgagca

SEQ ID NO: 75439 - DNA, 22 bp, synthetic construct
  misc_feature 1..22: note = chemically synthesized
  source 1..22: mol_type = other DNA
aatgctttaaacctagcctcct

SEQ ID NO: 75440 - DNA, 22 bp, synthetic construct
  misc_feature 1..22: note = chemically synthesized
  source 1..22: mol_type = other DNA
taaacctagcctccttctgggg

SEQ ID NO: 75441 - DNA, 22 bp, synthetic construct
  misc_feature 1..22: note = chemically synthesized
  source 1..22: mol_type = other DNA
aaacctagcctccttctggggc

SEQ ID NO: 75442 - DNA, 22 bp, synthetic construct
  misc_feature 1..22: note = chemically synthesized
  source 1..22: mol_type = other DNA
aacctagcctccttctggggca

SEQ ID NO: 75443 - DNA, 22 bp, synthetic construct
  misc_feature 1..22: note = chemically synthesized
  source 1..22: mol_type = other DNA
gcctccttctggggcaaacgaa

SEQ ID NO: 75444 - DNA, 22 bp, synthetic construct
  misc_feature 1..22: note = chemically synthesized
  source 1..22: mol_type = other DNA
cttctggggcaaacgaaaaact

SEQ ID NO: 75445 - DNA, 22 bp, synthetic construct
  misc_feature 1..22: note = chemically synthesized
  source 1..22: mol_type = other DNA
ctggggcaaacgaaaaactgtg

SEQ ID NO: 75446 - DNA, 22 bp, synthetic construct
  misc_feature 1..22: note = chemically synthesized
  source 1..22: mol_type = other DNA
tggggcaaacgaaaaactgtga

SEQ ID NO: 75447 - DNA, 22 bp, synthetic construct
  misc_feature 1..22: note = chemically synthesized
  source 1..22: mol_type = other DNA
gggcaaacgaaaaactgtgata

SEQ ID NO: 75448 - DNA, 22 bp, synthetic construct
  misc_feature 1..22: note = chemically synthesized
  source 1..22: mol_type = other DNA
tgataaatatctggatgtagga

SEQ ID NO: 75449 - DNA, 22 bp, synthetic construct
  misc_feature 1..22: note = chemically synthesized
  source 1..22: mol_type = other DNA
gatgtaggacaatgtgatgaat

SEQ ID NO: 75450 - DNA, 22 bp, synthetic construct
  misc_feature 1..22: note = chemically synthesized
  source 1..22: mol_type = other DNA
ctacagtgaaggccacaaacaa

SEQ ID NO: 75451 - DNA, 22 bp, synthetic construct
  misc_feature 1..22: note = chemically synthesized
  source 1..22: mol_type = other DNA
cagtgaaggccacaaacaaacc

SEQ ID NO: 75452 - DNA, 22 bp, synthetic construct
  misc_feature 1..22: note = chemically synthesized
  source 1..22: mol_type = other DNA
tgttgacttgaacatttgctgc

SEQ ID NO: 75453 - DNA, 22 bp, synthetic construct
  misc_feature 1..22: note = chemically synthesized
  source 1..22: mol_type = other DNA
gttgacttgaacatttgctgct

SEQ ID NO: 75454 - DNA, 22 bp, synthetic construct
  misc_feature 1..22: note = chemically synthesized
  source 1..22: mol_type = other DNA
ttgacttgaacatttgctgctg

SEQ ID NO: 75455 - DNA, 22 bp, synthetic construct
  misc_feature 1..22: note = chemically synthesized
  source 1..22: mol_type = other DNA
acttgaacatttgctgctgcta

SEQ ID NO: 75456 - DNA, 22 bp, synthetic construct
  misc_feature 1..22: note = chemically synthesized
  source 1..22: mol_type = other DNA
gaacatttgctgctgctagttt

SEQ ID NO: 75457 - DNA, 22 bp, synthetic construct
  misc_feature 1..22: note = chemically synthesized
  source 1..22: mol_type = other DNA
aacatttgctgctgctagtttc

SEQ ID NO: 75458 - DNA, 22 bp, synthetic construct
  misc_feature 1..22: note = chemically synthesized
  source 1..22: mol_type = other DNA
gctgctgctagtttcacaatgg

SEQ ID NO: 75459 - DNA, 22 bp, synthetic construct
  misc_feature 1..22: note = chemically synthesized
  source 1..22: mol_type = other DNA
ctgctgctagtttcacaatggc

SEQ ID NO: 75460 - DNA, 22 bp, synthetic construct
  misc_feature 1..22: note = chemically synthesized
  source 1..22: mol_type = other DNA
ctgctagtttcacaatggccat

SEQ ID NO: 75461 - DNA, 22 bp, synthetic construct
  misc_feature 1..22: note = chemically synthesized
  source 1..22: mol_type = other DNA
ctagtttcacaatggccatatg

SEQ ID NO: 75462 - DNA, 22 bp, synthetic construct
  misc_feature 1..22: note = chemically synthesized
  source 1..22: mol_type = other DNA
gtttcacaatggccatatgctc

SEQ ID NO: 75463 - DNA, 22 bp, synthetic construct
  misc_feature 1..22: note = chemically synthesized
  source 1..22: mol_type = other DNA
cacaatggccatatgctcacag

SEQ ID NO: 75464 - DNA, 22 bp, synthetic construct
  misc_feature 1..22: note = chemically synthesized
  source 1..22: mol_type = other DNA
acaatggccatatgctcacagt

SEQ ID NO: 75465 - DNA, 22 bp, synthetic construct
  misc_feature 1..22: note = chemically synthesized
  source 1..22: mol_type = other DNA
acagtaggagtgggagatgact

SEQ ID NO: 75466 - DNA, 22 bp, synthetic construct
  misc_feature 1..22: note = chemically synthesized
  source 1..22: mol_type = other DNA
ttgtgtgataaaattgaaaccg

SEQ ID NO: 75467 - DNA, 22 bp, synthetic construct
  misc_feature 1..22: note = chemically synthesized
  source 1..22: mol_type = other DNA
tgtgataaaattgaaaccggca

SEQ ID NO: 75468 - DNA, 22 bp, synthetic construct
  misc_feature 1..22: note = chemically synthesized
  source 1..22: mol_type = other DNA
aaaccggcactttatcagtact

SEQ ID NO: 75469 - DNA, 22 bp, synthetic construct
  misc_feature 1..22: note = chemically synthesized
  source 1..22: mol_type = other DNA
tatcagtactaggcatggggct

SEQ ID NO: 75470 - DNA, 22 bp, synthetic construct
  misc_feature 1..22: note = chemically synthesized
  source 1..22: mol_type = other DNA
atcagtactaggcatggggcta

SEQ ID NO: 75471 - DNA, 22 bp, synthetic construct
  misc_feature 1..22: note = chemically synthesized
  source 1..22: mol_type = other DNA
tcagtactaggcatggggctac

SEQ ID NO: 75472 - DNA, 22 bp, synthetic construct
  misc_feature 1..22: note = chemically synthesized
  source 1..22: mol_type = other DNA
ggcatggggctacaagaatagc

SEQ ID NO: 75473 - DNA, 22 bp, synthetic construct
  misc_feature 1..22: note = chemically synthesized
  source 1..22: mol_type = other DNA
caagaatagcagccctgagtac

SEQ ID NO: 75474 - DNA, 22 bp, synthetic construct
  misc_feature 1..22: note = chemically synthesized
  source 1..22: mol_type = other DNA
agtacgaccatagttcctatct

SEQ ID NO: 75475 - DNA, 22 bp, synthetic construct
  misc_feature 1..22: note = chemically synthesized
  source 1..22: mol_type = other DNA
ctatctgaatgacaagctggtg

SEQ ID NO: 75476 - DNA, 22 bp, synthetic construct
  misc_feature 1..22: note = chemically synthesized
  source 1..22: mol_type = other DNA
tctgaatgacaagctggtgggt

SEQ ID NO: 75477 - DNA, 22 bp, synthetic construct
  misc_feature 1..22: note = chemically synthesized
  source 1..22: mol_type = other DNA
aatgacaagctggtgggtgaag

SEQ ID NO: 75478 - DNA, 22 bp, synthetic construct
  misc_feature 1..22: note = chemically synthesized
  source 1..22: mol_type = other DNA
gtgggtgaagatgttggcatgt

SEQ ID NO: 75479 - DNA, 22 bp, synthetic construct
  misc_feature 1..22: note = chemically synthesized
  source 1..22: mol_type = other DNA
gcatgtcttagtggataacaga

SEQ ID NO: 75480 - DNA, 22 bp, synthetic construct
  misc_feature 1..22: note = chemically synthesized
  source 1..22: mol_type = other DNA
agtggataacagatggccacat

SEQ ID NO: 75481 - DNA, 22 bp, synthetic construct
  misc_feature 1..22: note = chemically synthesized
  source 1..22: mol_type = other DNA
gtggataacagatggccacata

SEQ ID NO: 75482 - DNA, 22 bp, synthetic construct
  misc_feature 1..22: note = chemically synthesized
  source 1..22: mol_type = other DNA
actctataccctgcaatgtgtg

SEQ ID NO: 75483 - DNA, 22 bp, synthetic construct
  misc_feature 1..22: note = chemically synthesized
  source 1..22: mol_type = other DNA
tataccctgcaatgtgtggatg

SEQ ID NO: 75484 - DNA, 22 bp, synthetic construct
  misc_feature 1..22: note = chemically synthesized
  source 1..22: mol_type = other DNA
taccctgcaatgtgtggatgaa

SEQ ID NO: 75485 - DNA, 22 bp, synthetic construct
  misc_feature 1..22: note = chemically synthesized
  source 1..22: mol_type = other DNA
caatgtgtggatgaaccacatt

SEQ ID NO: 75486 - DNA, 22 bp, synthetic construct
  misc_feature 1..22: note = chemically synthesized
  source 1..22: mol_type = other DNA
gaagcaagcaggaatcaaaata

SEQ ID NO: 75487 - DNA, 22 bp, synthetic construct
  misc_feature 1..22: note = chemically synthesized
  source 1..22: mol_type = other DNA
aagcaagcaggaatcaaaatag

SEQ ID NO: 75488 - DNA, 22 bp, synthetic construct
  misc_feature 1..22: note = chemically synthesized
  source 1..22: mol_type = other DNA
caggcacattaaaccagaatat

SEQ ID NO: 75489 - DNA, 22 bp, synthetic construct
  misc_feature 1..22: note = chemically synthesized
  source 1..22: mol_type = other DNA
aggcacattaaaccagaatatt

SEQ ID NO: 75490 - DNA, 22 bp, synthetic construct
  misc_feature 1..22: note = chemically synthesized
  source 1..22: mol_type = other DNA
aaccagaatattccaagcatct

SEQ ID NO: 75491 - DNA, 22 bp, synthetic construct
  misc_feature 1..22: note = chemically synthesized
  source 1..22: mol_type = other DNA
caagcatctttggcataatgct

SEQ ID NO: 75492 - DNA, 22 bp, synthetic construct
  misc_feature 1..22: note = chemically synthesized
  source 1..22: mol_type = other DNA
tggcataatgctgctagcaagt

SEQ ID NO: 75493 - DNA, 22 bp, synthetic construct
  misc_feature 1..22: note = chemically synthesized
  source 1..22: mol_type = other DNA
ggcataatgctgctagcaagtg

SEQ ID NO: 75494 - DNA, 22 bp, synthetic construct
  misc_feature 1..22: note = chemically synthesized
  source 1..22: mol_type = other DNA
gcataatgctgctagcaagtgc

SEQ ID NO: 75495 - DNA, 22 bp, synthetic construct
  misc_feature 1..22: note = chemically synthesized
  source 1..22: mol_type = other DNA
ctagcaagtgcaatgtctgtgg

SEQ ID NO: 75496 - DNA, 22 bp, synthetic construct
  misc_feature 1..22: note = chemically synthesized
  source 1..22: mol_type = other DNA
gcaagtgcaatgtctgtggctc

SEQ ID NO: 75497 - DNA, 22 bp, synthetic construct
  misc_feature 1..22: note = chemically synthesized
  source 1..22: mol_type = other DNA
tggctcctagcatgcctaagaa

SEQ ID NO: 75498 - DNA, 22 bp, synthetic construct
  misc_feature 1..22: note = chemically synthesized
  source 1..22: mol_type = other DNA
ctagcatgcctaagaaaatgta

SEQ ID NO: 75499 - DNA, 22 bp, synthetic construct
  misc_feature 1..22: note = chemically synthesized
  source 1..22: mol_type = other DNA
gcatgcctaagaaaatgtacaa

SEQ ID NO: 75500 - DNA, 22 bp, synthetic construct
  misc_feature 1..22: note = chemically synthesized
  source 1..22: mol_type = other DNA
agaaaatgtacaagggctcatg

SEQ ID NO: 75501 - DNA, 22 bp, synthetic construct
  misc_feature 1..22: note = chemically synthesized
  source 1..22: mol_type = other DNA
atggagactgcgctcagatttg

SEQ ID NO: 75502 - DNA, 22 bp, synthetic construct
  misc_feature 1..22: note = chemically synthesized
  source 1..22: mol_type = other DNA
cgctcagatttgatgatgctca

SEQ ID NO: 75503 - DNA, 22 bp, synthetic construct
  misc_feature 1..22: note = chemically synthesized
  source 1..22: mol_type = other DNA
agatttgatgatgctcagaagc

SEQ ID NO: 75504 - DNA, 22 bp, synthetic construct
  misc_feature 1..22: note = chemically synthesized
  source 1..22: mol_type = other DNA
gatgatgctcagaagcaaggaa

SEQ ID NO: 75505 - DNA, 22 bp, synthetic construct
  misc_feature 1..22: note = chemically synthesized
  source 1..22: mol_type = other DNA
atgatgctcagaagcaaggaat

SEQ ID NO: 75506 - DNA, 22 bp, synthetic construct
  misc_feature 1..22: note = chemically synthesized
  source 1..22: mol_type = other DNA
agaagcaaggaatttccaatca

SEQ ID NO: 75507 - DNA, 22 bp, synthetic construct
  misc_feature 1..22: note = chemically synthesized
  source 1..22: mol_type = other DNA
ccaatcatagcaatgagataaa

SEQ ID NO: 75508 - DNA, 22 bp, synthetic construct
  misc_feature 1..22: note = chemically synthesized
  source 1..22: mol_type = other DNA
caatcatagcaatgagataaat

SEQ ID NO: 75509 - DNA, 22 bp, synthetic construct
  misc_feature 1..22: note = chemically synthesized
  source 1..22: mol_type = other DNA
cacagattctaggcctgggatc

SEQ ID NO: 75510 - DNA, 22 bp, synthetic construct
  misc_feature 1..22: note = chemically synthesized
  source 1..22: mol_type = other DNA
taggcctgggatccctactagt

SEQ ID NO: 75511 - DNA, 22 bp, synthetic construct
  misc_feature 1..22: note = chemically synthesized
  source 1..22: mol_type = other DNA
ggcctgggatccctactagtgt

SEQ ID NO: 75512 - DNA, 22 bp, synthetic construct
  misc_feature 1..22: note = chemically synthesized
  source 1..22: mol_type = other DNA
ggatccctactagtgtcaacac

SEQ ID NO: 75513 - DNA, 22 bp, synthetic construct
  misc_feature 1..22: note = chemically synthesized
  source 1..22: mol_type = other DNA
ctagtgtcaacacagagggcat

SEQ ID NO: 75514 - DNA, 22 bp, synthetic construct
  misc_feature 1..22: note = chemically synthesized
  source 1..22: mol_type = other DNA
gtgtcaacacagagggcatgta

SEQ ID NO: 75515 - DNA, 22 bp, synthetic construct
  misc_feature 1..22: note = chemically synthesized
  source 1..22: mol_type = other DNA
tgatgttggaaatggacatagt

SEQ ID NO: 75516 - DNA, 22 bp, synthetic construct
  misc_feature 1..22: note = chemically synthesized
  source 1..22: mol_type = other DNA
gaaatggacatagtgtcgttgg

SEQ ID NO: 75517 - DNA, 22 bp, synthetic construct
  misc_feature 1..22: note = chemically synthesized
  source 1..22: mol_type = other DNA
ggtctcctgatgcaaacaaaag

SEQ ID NO: 75518 - DNA, 22 bp, synthetic construct
  misc_feature 1..22: note = chemically synthesized
  source 1..22: mol_type = other DNA
ctgatgcaaacaaaagaagttt

SEQ ID NO: 75519 - DNA, 22 bp, synthetic construct
  misc_feature 1..22: note = chemically synthesized
  source 1..22: mol_type = other DNA
atgcaaacaaaagaagtttctc

SEQ ID NO: 75520 - DNA, 22 bp, synthetic construct
  misc_feature 1..22: note = chemically synthesized
  source 1..22: mol_type = other DNA
ctcagtcagtgttactgttcct

SEQ ID NO: 75521 - DNA, 22 bp, synthetic construct
  misc_feature 1..22: note = chemically synthesized
  source 1..22: mol_type = other DNA
tcagtcagtgttactgttcctc

SEQ ID NO: 75522 - DNA, 22 bp, synthetic construct
  misc_feature 1..22: note = chemically synthesized
  source 1..22: mol_type = other DNA
agtcagtgttactgttcctctt

SEQ ID NO: 75523 - DNA, 22 bp, synthetic construct
  misc_feature 1..22: note = chemically synthesized
  source 1..22: mol_type = other DNA
ctgttcctcttctgctttctga

SEQ ID NO: 75524 - DNA, 22 bp, synthetic construct
  misc_feature 1..22: note = chemically synthesized
  source 1..22: mol_type = other DNA
ttcctcttctgctttctgattt

SEQ ID NO: 75525 - DNA, 22 bp, synthetic construct
  misc_feature 1..22: note = chemically synthesized
  source 1..22: mol_type = other DNA
ctcttctgctttctgattttct

SEQ ID NO: 75526 - DNA, 22 bp, synthetic construct
  misc_feature 1..22: note = chemically synthesized
  source 1..22: mol_type = other DNA
ttctgctttctgattttctcca

SEQ ID NO: 75527 - DNA, 22 bp, synthetic construct
  misc_feature 1..22: note = chemically synthesized
  source 1..22: mol_type = other DNA
ctgctttctgattttctccaaa

SEQ ID NO: 75528 - DNA, 22 bp, synthetic construct
  misc_feature 1..22: note = chemically synthesized
  source 1..22: mol_type = other DNA
tgctttctgattttctccaaac

SEQ ID NO: 75529 - DNA, 22 bp, synthetic construct
  misc_feature 1..22: note = chemically synthesized
  source 1..22: mol_type = other DNA
ctttctgattttctccaaactc

SEQ ID NO: 75530 - DNA, 22 bp, synthetic construct
  misc_feature 1..22: note = chemically synthesized
  source 1..22: mol_type = other DNA
tctgattttctccaaactcatt

SEQ ID NO: 75531 - DNA, 22 bp, synthetic construct
  misc_feature 1..22: note = chemically synthesized
  source 1..22: mol_type = other DNA
ctgattttctccaaactcatta

SEQ ID NO: 75532 - DNA, 22 bp, synthetic construct
  misc_feature 1..22: note = chemically synthesized
  source 1..22: mol_type = other DNA
tgattttctccaaactcattat

SEQ ID NO: 75533 - DNA, 22 bp, synthetic construct
  misc_feature 1..22: note = chemically synthesized
  source 1..22: mol_type = other DNA
attttctccaaactcattatat

SEQ ID NO: 75534 - DNA, 22 bp, synthetic construct
  misc_feature 1..22: note = chemically synthesized
  source 1..22: mol_type = other DNA
tctccaaactcattatattgag

SEQ ID NO: 75535 - DNA, 22 bp, synthetic construct
  misc_feature 1..22: note = chemically synthesized
  source 1..22: mol_type = other DNA
ctccaaactcattatattgagt

SEQ ID NO: 75536 - DNA, 22 bp, synthetic construct
  misc_feature 1..22: note = chemically synthesized
  source 1..22: mol_type = other DNA
tccaaactcattatattgagtc

SEQ ID NO: 75537 - DNA, 22 bp, synthetic construct
  misc_feature 1..22: note = chemically synthesized
  source 1..22: mol_type = other DNA
caaactcattatattgagtctg

SEQ ID NO: 75538 - DNA, 22 bp, synthetic construct
  misc_feature 1..22: note = chemically synthesized
  source 1..22: mol_type = other DNA
attatattgagtctgtctgatt

SEQ ID NO: 75539 - DNA, 22 bp, synthetic construct
  misc_feature 1..22: note = chemically synthesized
  source 1..22: mol_type = other DNA
tattgagtctgtctgatttggg

SEQ ID NO: 75540 - DNA, 22 bp, synthetic construct
  misc_feature 1..22: note = chemically synthesized
  source 1..22: mol_type = other DNA
agtctgtctgatttgggtataa

SEQ ID NO: 75541 - DNA, 22 bp, synthetic construct
  misc_feature 1..22: note = chemically synthesized
  source 1..22: mol_type = other DNA
tctgatttgggtataactctaa

SEQ ID NO: 75542 - DNA, 22 bp, synthetic construct
  misc_feature 1..22: note = chemically synthesized
  source 1..22: mol_type = other DNA
atttgggtataactctaaaatc

SEQ ID NO: 75543 - DNA, 22 bp, synthetic construct
  misc_feature 1..22: note = chemically synthesized
  source 1..22: mol_type = other DNA
gggtataactctaaaatcatcc

SEQ ID NO: 75544 - DNA, 22 bp, synthetic construct
  misc_feature 1..22: note = chemically synthesized
  source 1..22: mol_type = other DNA
ggtataactctaaaatcatcca

SEQ ID NO: 75545 - DNA, 22 bp, synthetic construct
  misc_feature 1..22: note = chemically synthesized
  source 1..22: mol_type = other DNA
taaaatcatccatcttattcac

SEQ ID NO: 75546 - DNA, 22 bp, synthetic construct
  misc_feature 1..22: note = chemically synthesized
  source 1..22: mol_type = other DNA
aaatcatccatcttattcacag

SEQ ID NO: 75547 - DNA, 22 bp, synthetic construct
  misc_feature 1..22: note = chemically synthesized
  source 1..22: mol_type = other DNA
attcacagttttgaaaggaaaa

SEQ ID NO: 75548 - DNA, 22 bp, synthetic construct
  misc_feature 1..22: note = chemically synthesized
  source 1..22: mol_type = other DNA
ttcacagttttgaaaggaaaag

SEQ ID NO: 75549 - DNA, 22 bp, synthetic construct
  misc_feature 1..22: note = chemically synthesized
  source 1..22: mol_type = other DNA
acagttttgaaaggaaaagatg

SEQ ID NO: 75550 - DNA, 22 bp, synthetic construct
  misc_feature 1..22: note = chemically synthesized
  source 1..22: mol_type = other DNA
tgaaaggaaaagatggattcat

SEQ ID NO: 75551 - DNA, 22 bp, synthetic construct
  misc_feature 1..22: note = chemically synthesized
  source 1..22: mol_type = other DNA
gaaaggaaaagatggattcatg

SEQ ID NO: 75552 - DNA, 22 bp, synthetic construct
  misc_feature 1..22: note = chemically synthesized
  source 1..22: mol_type = other DNA
aaaggaaaagatggattcatgg

SEQ ID NO: 75553 - DNA, 22 bp, synthetic construct
  misc_feature 1..22: note = chemically synthesized
  source 1..22: mol_type = other DNA
atggagatacatcactgttttc

SEQ ID NO: 75554 - DNA, 22 bp, synthetic construct
  misc_feature 1..22: note = chemically synthesized
  source 1..22: mol_type = other DNA
ttttcaggtggggcattcacag

SEQ ID NO: 75555 - DNA, 22 bp, synthetic construct
  misc_feature 1..22: note = chemically synthesized
  source 1..22: mol_type = other DNA
tcaggtggggcattcacaggca

SEQ ID NO: 75556 - DNA, 22 bp, synthetic construct
  misc_feature 1..22: note = chemically synthesized
  source 1..22: mol_type = other DNA
caggtggggcattcacaggcac

SEQ ID NO: 75557 - DNA, 22 bp, synthetic construct
  misc_feature 1..22: note = chemically synthesized
  source 1..22: mol_type = other DNA
aggtggggcattcacaggcact

SEQ ID NO: 75558 - DNA, 22 bp, synthetic construct
  misc_feature 1..22: note = chemically synthesized
  source 1..22: mol_type = other DNA
acaggcactgtgccataatagg

SEQ ID NO: 75559 - DNA, 22 bp, synthetic construct
  misc_feature 1..22: note = chemically synthesized
  source 1..22: mol_type = other DNA
tgccataataggatgttatgtg

SEQ ID NO: 75560 - DNA, 22 bp, synthetic construct
  misc_feature 1..22: note = chemically synthesized
  source 1..22: mol_type = other DNA
tgtgcatggcaatccaaataca

SEQ ID NO: 75561 - DNA, 22 bp, synthetic construct
  misc_feature 1..22: note = chemically synthesized
  source 1..22: mol_type = other DNA
gaaccagcaaaatcacctggac

SEQ ID NO: 75562 - DNA, 22 bp, synthetic construct
  misc_feature 1..22: note = chemically synthesized
  source 1..22: mol_type = other DNA
gacaggggattggactactggc

SEQ ID NO: 75563 - DNA, 22 bp, synthetic construct
  misc_feature 1..22: note = chemically synthesized
  source 1..22: mol_type = other DNA
gactactggccagtctgttatt

SEQ ID NO: 75564 - DNA, 22 bp, synthetic construct
  misc_feature 1..22: note = chemically synthesized
  source 1..22: mol_type = other DNA
ctggccagtctgttatttcttt

SEQ ID NO: 75565 - DNA, 22 bp, synthetic construct
  misc_feature 1..22: note = chemically synthesized
  source 1..22: mol_type = other DNA
gccagtctgttatttctttcca

SEQ ID NO: 75566 - DNA, 22 bp, synthetic construct
  misc_feature 1..22: note = chemically synthesized
  source 1..22: mol_type = other DNA
ttatttctttccagacctgtgg

SEQ ID NO: 75567 - DNA, 22 bp, synthetic construct
  misc_feature 1..22: note = chemically synthesized
  source 1..22: mol_type = other DNA
tttctttccagacctgtggaca

SEQ ID NO: 75568 - DNA, 22 bp, synthetic construct
  misc_feature 1..22: note = chemically synthesized
  source 1..22: mol_type = other DNA
ctttccagacctgtggacaaaa

SEQ ID NO: 75569 - DNA, 22 bp, synthetic construct
  misc_feature 1..22: note = chemically synthesized
  source 1..22: mol_type = other DNA
tttccagacctgtggacaaaaa

SEQ ID NO: 75570 - DNA, 22 bp, synthetic construct
  misc_feature 1..22: note = chemically synthesized
  source 1..22: mol_type = other DNA
tccagacctgtggacaaaaaaa

SEQ ID NO: 75571 - DNA, 22 bp, synthetic construct
  misc_feature 1..22: note = chemically synthesized
  source 1..22: mol_type = other DNA
ccagacctgtggacaaaaaaaa

SEQ ID NO: 75572 - DNA, 22 bp, synthetic construct
  misc_feature 1..22: note = chemically synthesized
  source 1..22: mol_type = other DNA
cagacctgtggacaaaaaaaaa

SEQ ID NO: 75573 - DNA, 22 bp, synthetic construct
  misc_feature 1..22: note = chemically synthesized
  source 1..22: mol_type = other DNA
tggacaaaaaaaaaaagaagtt

SEQ ID NO: 75574 - DNA, 22 bp, synthetic construct
  misc_feature 1..22: note = chemically synthesized
  source 1..22: mol_type = other DNA
atttttattggacattgcattt

SEQ ID NO: 75575 - DNA, 22 bp, synthetic construct
  misc_feature 1..22: note = chemically synthesized
  source 1..22: mol_type = other DNA
tttttattggacattgcatttt

SEQ ID NO: 75576 - DNA, 22 bp, synthetic construct
  misc_feature 1..22: note = chemically synthesized
  source 1..22: mol_type = other DNA
ttattggacattgcattttaat

SEQ ID NO: 75577 - DNA, 22 bp, synthetic construct
  misc_feature 1..22: note = chemically synthesized
  source 1..22: mol_type = other DNA
tattggacattgcattttaatt

SEQ ID NO: 75578 - DNA, 22 bp, synthetic construct
  misc_feature 1..22: note = chemically synthesized
  source 1..22: mol_type = other DNA
attggacattgcattttaattt

SEQ ID NO: 75579 - DNA, 22 bp, synthetic construct
  misc_feature 1..22: note = chemically synthesized
  source 1..22: mol_type = other DNA
ttggacattgcattttaatttg

SEQ ID NO: 75580 - DNA, 22 bp, synthetic construct
  misc_feature 1..22: note = chemically synthesized
  source 1..22: mol_type = other DNA
gacattgcattttaatttggtt

SEQ ID NO: 75581 - DNA, 22 bp, synthetic construct
  misc_feature 1..22: note = chemically synthesized
  source 1..22: mol_type = other DNA
cattttaatttggttaataaac

SEQ ID NO: 75582 - DNA, 22 bp, synthetic construct
  misc_feature 1..22: note = chemically synthesized
  source 1..22: mol_type = other DNA
taatttggttaataaacctctc

SEQ ID NO: 75583 - DNA, 22 bp, synthetic construct
  misc_feature 1..22: note = chemically synthesized
  source 1..22: mol_type = other DNA
aatttggttaataaacctctcc

SEQ ID NO: 75584 - DNA, 22 bp, synthetic construct
  misc_feature 1..22: note = chemically synthesized
  source 1..22: mol_type = other DNA
atttggttaataaacctctcca

SEQ ID NO: 75585 - DNA, 22 bp, synthetic construct
  misc_feature 1..22: note = chemically synthesized
  source 1..22: mol_type = other DNA
ggttaataaacctctccatatt

SEQ ID NO: 75586 - DNA, 22 bp, synthetic construct
  misc_feature 1..22: note = chemically synthesized
  source 1..22: mol_type = other DNA
gttaataaacctctccatattt

SEQ ID NO: 75587 - DNA, 22 bp, synthetic construct
  misc_feature 1..22: note = chemically synthesized
  source 1..22: mol_type = other DNA
ataaacctctccatatttcaca

SEQ ID NO: 75588 - DNA, 22 bp, synthetic construct
  misc_feature 1..22: note = chemically synthesized
  source 1..22: mol_type = other DNA
tccatatttcacatttcagcta

SEQ ID NO: 75589 - DNA, 22 bp, synthetic construct
  misc_feature 1..22: note = chemically synthesized
  source 1..22: mol_type = other DNA
catatttcacatttcagctatt

SEQ ID NO: 75590 - DNA, 22 bp, synthetic construct
  misc_feature 1..22: note = chemically synthesized
  source 1..22: mol_type = other DNA
cacatttcagctattcctctag

SEQ ID NO: 75591 - DNA, 22 bp, synthetic construct
  misc_feature 1..22: note = chemically synthesized
  source 1..22: mol_type = other DNA
acatttcagctattcctctagt

SEQ ID NO: 75592 - DNA, 22 bp, synthetic construct
  misc_feature 1..22: note = chemically synthesized
  source 1..22: mol_type = other DNA
cagctattcctctagtatttaa

SEQ ID NO: 75593 - DNA, 22 bp, synthetic construct
  misc_feature 1..22: note = chemically synthesized
  source 1..22: mol_type = other DNA
agctattcctctagtatttaac

SEQ ID NO: 75594 - DNA, 22 bp, synthetic construct
  misc_feature 1..22: note = chemically synthesized
  source 1..22: mol_type = other DNA
ttcctctagtatttaactattt

SEQ ID NO: 75595 - DNA, 22 bp, synthetic construct
  misc_feature 1..22: note = chemically synthesized
  source 1..22: mol_type = other DNA
ctctagtatttaactatttcca

SEQ ID NO: 75596 - DNA, 22 bp, synthetic construct
  misc_feature 1..22: note = chemically synthesized
  source 1..22: mol_type = other DNA
tagtatttaactatttccaatt

SEQ ID NO: 75597 - DNA, 22 bp, synthetic construct
  misc_feature 1..22: note = chemically synthesized
  source 1..22: mol_type = other DNA
gtatttaactatttccaatttt

SEQ ID NO: 75598 - DNA, 22 bp, synthetic construct
  misc_feature 1..22: note = chemically synthesized
  source 1..22: mol_type = other DNA
aactatttccaattttctttaa

SEQ ID NO: 75599 - DNA, 22 bp, synthetic construct
  misc_feature 1..22: note = chemically synthesized
  source 1..22: mol_type = other DNA
actatttccaattttctttaag

SEQ ID NO: 75600 - DNA, 22 bp, synthetic construct
  misc_feature 1..22: note = chemically synthesized
  source 1..22: mol_type = other DNA
tttccaattttctttaagaaca

SEQ ID NO: 75601 - DNA, 22 bp, synthetic construct
  misc_feature 1..22: note = chemically synthesized
  source 1..22: mol_type = other DNA
ccaattttctttaagaacattt

SEQ ID NO: 75602 - DNA, 22 bp, synthetic construct
  misc_feature 1..22: note = chemically synthesized
  source 1..22: mol_type = other DNA
caattttctttaagaacatttt

SEQ ID NO: 75603 - DNA, 22 bp, synthetic construct
  misc_feature 1..22: note = chemically synthesized
  source 1..22: mol_type = other DNA
tctttaagaacattttagacaa

SEQ ID NO: 75604 - DNA, 22 bp, synthetic construct
  misc_feature 1..22: note = chemically synthesized
  source 1..22: mol_type = other DNA
ctttaagaacattttagacaag

SEQ ID NO: 75605 - DNA, 22 bp, synthetic construct
  misc_feature 1..22: note = chemically synthesized
  source 1..22: mol_type = other DNA
tttaagaacattttagacaagc

SEQ ID NO: 75606 - DNA, 22 bp, synthetic construct
  misc_feature 1..22: note = chemically synthesized
  source 1..22: mol_type = other DNA
taagaacattttagacaagcaa

SEQ ID NO: 75607 - DNA, 22 bp, synthetic construct
  misc_feature 1..22: note = chemically synthesized
  source 1..22: mol_type = other DNA
aagaacattttagacaagcaaa

SEQ ID NO: 75608 - DNA, 22 bp, synthetic construct
  misc_feature 1..22: note = chemically synthesized
  source 1..22: mol_type = other DNA
agaacattttagacaagcaaat

SEQ ID NO: 75609 - DNA, 22 bp, synthetic construct
  misc_feature 1..22: note = chemically synthesized
  source 1..22: mol_type = other DNA
tagacaagcaaattaacagact

SEQ ID NO: 75610 - DNA, 22 bp, synthetic construct
  misc_feature 1..22: note = chemically synthesized
  source 1..22: mol_type = other DNA
agacaagcaaattaacagactc

SEQ ID NO: 75611 - DNA, 22 bp, synthetic construct
  misc_feature 1..22: note = chemically synthesized
  source 1..22: mol_type = other DNA
gacaagcaaattaacagactct

SEQ ID NO: 75612 - DNA, 22 bp, synthetic construct
  misc_feature 1..22: note = chemically synthesized
  source 1..22: mol_type = other DNA
acagactctgaccagtacattg

SEQ ID NO: 75613 - DNA, 22 bp, synthetic construct
  misc_feature 1..22: note = chemically synthesized
  source 1..22: mol_type = other DNA
tgaccagtacattggtgtaaaa

SEQ ID NO: 75614 - DNA, 22 bp, synthetic construct
  misc_feature 1..22: note = chemically synthesized
  source 1..22: mol_type = other DNA
accagtacattggtgtaaaaga

SEQ ID NO: 75615 - DNA, 22 bp, synthetic construct
  misc_feature 1..22: note = chemically synthesized
  source 1..22: mol_type = other DNA
gtgtaaaagattcccaatgaaa

SEQ ID NO: 75616 - DNA, 22 bp, synthetic construct
  misc_feature 1..22: note = chemically synthesized
  source 1..22: mol_type = other DNA
ccaatgaaagagaatagaggta

SEQ ID NO: 75617 - DNA, 22 bp, synthetic construct
  misc_feature 1..22: note = chemically synthesized
  source 1..22: mol_type = other DNA
acacccaagaacataatatatt

SEQ ID NO: 75618 - DNA, 22 bp, synthetic construct
  misc_feature 1..22: note = chemically synthesized
  source 1..22: mol_type = other DNA
ctttttatattcagaataatgt

SEQ ID NO: 75619 - DNA, 22 bp, synthetic construct
  misc_feature 1..22: note = chemically synthesized
  source 1..22: mol_type = other DNA
tttttatattcagaataatgta

SEQ ID NO: 75620 - DNA, 22 bp, synthetic construct
  misc_feature 1..22: note = chemically synthesized
  source 1..22: mol_type = other DNA
tttatattcagaataatgtaaa

SEQ ID NO: 75621 - DNA, 22 bp, synthetic construct
  misc_feature 1..22: note = chemically synthesized
  source 1..22: mol_type = other DNA
ttatattcagaataatgtaaag

SEQ ID NO: 75622 - DNA, 22 bp, synthetic construct
  misc_feature 1..22: note = chemically synthesized
  source 1..22: mol_type = other DNA
tatattcagaataatgtaaaga

SEQ ID NO: 75623 - DNA, 22 bp, synthetic construct
  misc_feature 1..22: note = chemically synthesized
  source 1..22: mol_type = other DNA
atattcagaataatgtaaagag

SEQ ID NO: 75624 - DNA, 22 bp, synthetic construct
  misc_feature 1..22: note = chemically synthesized
  source 1..22: mol_type = other DNA
tattcagaataatgtaaagaga

SEQ ID NO: 75625 - DNA, 22 bp, synthetic construct
  misc_feature 1..22: note = chemically synthesized
  source 1..22: mol_type = other DNA
agaataatgtaaagagaatgct

SEQ ID NO: 75626 - DNA, 22 bp, synthetic construct
  misc_feature 1..22: note = chemically synthesized
  source 1..22: mol_type = other DNA
tagaaataattgaaatctttat

SEQ ID NO: 75627 - DNA, 22 bp, synthetic construct
  misc_feature 1..22: note = chemically synthesized
  source 1..22: mol_type = other DNA
agaaataattgaaatctttata

SEQ ID NO: 75628 - DNA, 22 bp, synthetic construct
  misc_feature 1..22: note = chemically synthesized
  source 1..22: mol_type = other DNA
gaaataattgaaatctttatac

SEQ ID NO: 75629 - DNA, 22 bp, synthetic construct
  misc_feature 1..22: note = chemically synthesized
  source 1..22: mol_type = other DNA
aaatctttatacttttgacaaa

SEQ ID NO: 75630 - DNA, 22 bp, synthetic construct
  misc_feature 1..22: note = chemically synthesized
  source 1..22: mol_type = other DNA
tatacttttgacaaatctgagc

SEQ ID NO: 75631 - DNA, 22 bp, synthetic construct
  misc_feature 1..22: note = chemically synthesized
  source 1..22: mol_type = other DNA
atacttttgacaaatctgagcc

SEQ ID NO: 75632 - DNA, 22 bp, synthetic construct
  misc_feature 1..22: note = chemically synthesized
  source 1..22: mol_type = other DNA
tacttttgacaaatctgagcca

SEQ ID NO: 75633 - DNA, 22 bp, synthetic construct
  misc_feature 1..22: note = chemically synthesized
  source 1..22: mol_type = other DNA
ttgacaaatctgagccaaagct

SEQ ID NO: 75634 - DNA, 22 bp, synthetic construct
  misc_feature 1..22: note = chemically synthesized
  source 1..22: mol_type = other DNA
tgacaaatctgagccaaagctc

SEQ ID NO: 75635 - DNA, 22 bp, synthetic construct
  misc_feature 1..22: note = chemically synthesized
  source 1..22: mol_type = other DNA
gacaaatctgagccaaagctcc

SEQ ID NO: 75636 - DNA, 22 bp, synthetic construct
  misc_feature 1..22: note = chemically synthesized
  source 1..22: mol_type = other DNA
acaaatctgagccaaagctcct

SEQ ID NO: 75637 - DNA, 22 bp, synthetic construct
  misc_feature 1..22: note = chemically synthesized
  source 1..22: mol_type = other DNA
agccaaagctcctggttgcttt

SEQ ID NO: 75638 - DNA, 22 bp, synthetic construct
  misc_feature 1..22: note = chemically synthesized
  source 1..22: mol_type = other DNA
ctggttgctttttatatttctt

SEQ ID NO: 75639 - DNA, 22 bp, synthetic construct
  misc_feature 1..22: note = chemically synthesized
  source 1..22: mol_type = other DNA
gttgctttttatatttctttaa

SEQ ID NO: 75640 - DNA, 22 bp, synthetic construct
  misc_feature 1..22: note = chemically synthesized
  source 1..22: mol_type = other DNA
ctttttatatttctttaaagtt

SEQ ID NO: 75641 - DNA, 22 bp, synthetic construct
  misc_feature 1..22: note = chemically synthesized
  source 1..22: mol_type = other DNA
tttatatttctttaaagttaaa

SEQ ID NO: 75642 - DNA, 22 bp, synthetic construct
  misc_feature 1..22: note = chemically synthesized
  source 1..22: mol_type = other DNA
ttatatttctttaaagttaaag

SEQ ID NO: 75643 - DNA, 22 bp, synthetic construct
  misc_feature 1..22: note = chemically synthesized
  source 1..22: mol_type = other DNA
tatatttctttaaagttaaagg

SEQ ID NO: 75644 - DNA, 22 bp, synthetic construct
  misc_feature 1..22: note = chemically synthesized
  source 1..22: mol_type = other DNA
atatttctttaaagttaaaggg

SEQ ID NO: 75645 - DNA, 22 bp, synthetic construct
  misc_feature 1..22: note = chemically synthesized
  source 1..22: mol_type = other DNA
tatttctttaaagttaaaggga

SEQ ID NO: 75646 - DNA, 22 bp, synthetic construct
  misc_feature 1..22: note = chemically synthesized
  source 1..22: mol_type = other DNA
ctttaaagttaaagggaattat

SEQ ID NO: 75647 - DNA, 22 bp, synthetic construct
  misc_feature 1..22: note = chemically synthesized
  source 1..22: mol_type = other DNA
tttaaagttaaagggaattata

SEQ ID NO: 75648 - DNA, 22 bp, synthetic construct
  misc_feature 1..22: note = chemically synthesized
  source 1..22: mol_type = other DNA
taaagttaaagggaattatatt

SEQ ID NO: 75649 - DNA, 22 bp, synthetic construct
  misc_feature 1..22: note = chemically synthesized
  source 1..22: mol_type = other DNA
aaagttaaagggaattatattt

SEQ ID NO: 75650 - DNA, 22 bp, synthetic construct
  misc_feature 1..22: note = chemically synthesized
  source 1..22: mol_type = other DNA
aagttaaagggaattatatttt

SEQ ID NO: 75651 - DNA, 22 bp, synthetic construct
  misc_feature 1..22: note = chemically synthesized
  source 1..22: mol_type = other DNA
aagggaattatattttttccta

SEQ ID NO: 75652 - DNA, 22 bp, synthetic construct
  misc_feature 1..22: note = chemically synthesized
  source 1..22: mol_type = other DNA
tattttttcctatatattttaa

SEQ ID NO: 75653 - DNA, 22 bp, synthetic construct
  misc_feature 1..22: note = chemically synthesized
  source 1..22: mol_type = other DNA
tttcctatatattttaaacagc

SEQ ID NO: 75654 - DNA, 22 bp, synthetic construct
  misc_feature 1..22: note = chemically synthesized
  source 1..22: mol_type = other DNA
ttcctatatattttaaacagct

SEQ ID NO: 75655 - DNA, 22 bp, synthetic construct
  misc_feature 1..22: note = chemically synthesized
  source 1..22: mol_type = other DNA
tcctatatattttaaacagctg

SEQ ID NO: 75656 - DNA, 22 bp, synthetic construct
  misc_feature 1..22: note = chemically synthesized
  source 1..22: mol_type = other DNA
cctatatattttaaacagctga

SEQ ID NO: 75657 - DNA, 22 bp, synthetic construct
  misc_feature 1..22: note = chemically synthesized
  source 1..22: mol_type = other DNA
ctatatattttaaacagctgaa

SEQ ID NO: 75658 - DNA, 22 bp, synthetic construct
  misc_feature 1..22: note = chemically synthesized
  source 1..22: mol_type = other DNA
tatattttaaacagctgaaact

SEQ ID NO: 75659 - DNA, 22 bp, synthetic construct
  misc_feature 1..22: note = chemically synthesized
  source 1..22: mol_type = other DNA
taaacagctgaaactcttgaaa

SEQ ID NO: 75660 - DNA, 22 bp, synthetic construct
  misc_feature 1..22: note = chemically synthesized
  source 1..22: mol_type = other DNA
aaacagctgaaactcttgaaat

SEQ ID NO: 75661 - DNA, 22 bp, synthetic construct
  misc_feature 1..22: note = chemically synthesized
  source 1..22: mol_type = other DNA
aacagctgaaactcttgaaatg

SEQ ID NO: 75662 - DNA, 22 bp, synthetic construct
  misc_feature 1..22: note = chemically synthesized
  source 1..22: mol_type = other DNA
aaactcttgaaatgttgtgagt

SEQ ID NO: 75663 - DNA, 22 bp, synthetic construct
  misc_feature 1..22: note = chemically synthesized
  source 1..22: mol_type = other DNA
ttgaaatgttgtgagtttaaaa

SEQ ID NO: 75664 - DNA, 22 bp, synthetic construct
  misc_feature 1..22: note = chemically synthesized
  source 1..22: mol_type = other DNA
gaaatgttgtgagtttaaaatt

SEQ ID NO: 75665 - DNA, 22 bp, synthetic construct
  misc_feature 1..22: note = chemically synthesized
  source 1..22: mol_type = other DNA
aaatgttgtgagtttaaaattt

SEQ ID NO: 75666 - DNA, 22 bp, synthetic construct
  misc_feature 1..22: note = chemically synthesized
  source 1..22: mol_type = other DNA
tgagtttaaaattttaatacac

SEQ ID NO: 75667 - DNA, 22 bp, synthetic construct
  misc_feature 1..22: note = chemically synthesized
  source 1..22: mol_type = other DNA
aaaattttaatacactttatgg

SEQ ID NO: 75668 - DNA, 22 bp, synthetic construct
  misc_feature 1..22: note = chemically synthesized
  source 1..22: mol_type = other DNA
aaattttaatacactttatgga

SEQ ID NO: 75669 - DNA, 22 bp, synthetic construct
  misc_feature 1..22: note = chemically synthesized
  source 1..22: mol_type = other DNA
taatacactttatggaatatct

SEQ ID NO: 75670 - DNA, 22 bp, synthetic construct
  misc_feature 1..22: note = chemically synthesized
  source 1..22: mol_type = other DNA
aatacactttatggaatatcta

SEQ ID NO: 75671 - DNA, 22 bp, synthetic construct
  misc_feature 1..22: note = chemically synthesized
  source 1..22: mol_type = other DNA
atacactttatggaatatctag

SEQ ID NO: 75672 - DNA, 22 bp, synthetic construct
  misc_feature 1..22: note = chemically synthesized
  source 1..22: mol_type = other DNA
tatggaatatctagagagaagg

SEQ ID NO: 75673 - DNA, 22 bp, synthetic construct
  misc_feature 1..22: note = chemically synthesized
  source 1..22: mol_type = other DNA
atggaatatctagagagaagga

SEQ ID NO: 75674 - DNA, 22 bp, synthetic construct
  misc_feature 1..22: note = chemically synthesized
  source 1..22: mol_type = other DNA
tggaatatctagagagaaggaa

SEQ ID NO: 75675 - DNA, 22 bp, synthetic construct
  misc_feature 1..22: note = chemically synthesized
  source 1..22: mol_type = other DNA
gagagaaggaactgctaaggga

SEQ ID NO: 75676 - DNA, 22 bp, synthetic construct
  misc_feature 1..22: note = chemically synthesized
  source 1..22: mol_type = other DNA
ctaagggacaagatgagcagca

SEQ ID NO: 75677 - DNA, 22 bp, synthetic construct
  misc_feature 1..22: note = chemically synthesized
  source 1..22: mol_type = other DNA
agggacaagatgagcagcagca

SEQ ID NO: 75678 - DNA, 22 bp, synthetic construct
  misc_feature 1..22: note = chemically synthesized
  source 1..22: mol_type = other DNA
cggcaagagaacttgctcctga

SEQ ID NO: 75679 - DNA, 22 bp, synthetic construct
  misc_feature 1..22: note = chemically synthesized
  source 1..22: mol_type = other DNA
gctcctgataaaccacagatac

SEQ ID NO: 75680 - DNA, 22 bp, synthetic construct
  misc_feature 1..22: note = chemically synthesized
  source 1..22: mol_type = other DNA
ctcctgataaaccacagatact

SEQ ID NO: 75681 - DNA, 22 bp, synthetic construct
  misc_feature 1..22: note = chemically synthesized
  source 1..22: mol_type = other DNA
ctgataaaccacagatactgaa

SEQ ID NO: 75682 - DNA, 22 bp, synthetic construct
  misc_feature 1..22: note = chemically synthesized
  source 1..22: mol_type = other DNA
ataaaccacagatactgaataa

SEQ ID NO: 75683 - DNA, 22 bp, synthetic construct
  misc_feature 1..22: note = chemically synthesized
  source 1..22: mol_type = other DNA
aataatgggcaaatgaatcatt

SEQ ID NO: 75684 - DNA, 22 bp, synthetic construct
  misc_feature 1..22: note = chemically synthesized
  source 1..22: mol_type = other DNA
agccagaatagagtccagtttc

SEQ ID NO: 75685 - DNA, 22 bp, synthetic construct
  misc_feature 1..22: note = chemically synthesized
  source 1..22: mol_type = other DNA
gccagaatagagtccagtttcc

SEQ ID NO: 75686 - DNA, 22 bp, synthetic construct
  misc_feature 1..22: note = chemically synthesized
  source 1..22: mol_type = other DNA
cctggttttaaaatgttcagag

SEQ ID NO: 75687 - DNA, 22 bp, synthetic construct
  misc_feature 1..22: note = chemically synthesized
  source 1..22: mol_type = other DNA
ctggttttaaaatgttcagagt

SEQ ID NO: 75688 - DNA, 22 bp, synthetic construct
  misc_feature 1..22: note = chemically synthesized
  source 1..22: mol_type = other DNA
gttttaaaatgttcagagttat

SEQ ID NO: 75689 - DNA, 22 bp, synthetic construct
  misc_feature 1..22: note = chemically synthesized
  source 1..22: mol_type = other DNA
taaaatgttcagagttataatt

SEQ ID NO: 75690 - DNA, 22 bp, synthetic construct
  misc_feature 1..22: note = chemically synthesized
  source 1..22: mol_type = other DNA
aaaatgttcagagttataatta

SEQ ID NO: 75691 - DNA, 22 bp, synthetic construct
  misc_feature 1..22: note = chemically synthesized
  source 1..22: mol_type = other DNA
aaatgttcagagttataattag

SEQ ID NO: 75692 - DNA, 22 bp, synthetic construct
  misc_feature 1..22: note = chemically synthesized
  source 1..22: mol_type = other DNA
agagttataattagcataatat

SEQ ID NO: 75693 - DNA, 22 bp, synthetic construct
  misc_feature 1..22: note = chemically synthesized
  source 1..22: mol_type = other DNA
taattagcataatatagcccaa

SEQ ID NO: 75694 - DNA, 22 bp, synthetic construct
  misc_feature 1..22: note = chemically synthesized
  source 1..22: mol_type = other DNA
gcataatatagcccaataaagg

SEQ ID NO: 75695 - DNA, 22 bp, synthetic construct
  misc_feature 1..22: note = chemically synthesized
  source 1..22: mol_type = other DNA
attagttcttaatgaaatatag

SEQ ID NO: 75696 - DNA, 22 bp, synthetic construct
  misc_feature 1..22: note = chemically synthesized
  source 1..22: mol_type = other DNA
gttcttaatgaaatataggtga

SEQ ID NO: 75697 - DNA, 22 bp, synthetic construct
  misc_feature 1..22: note = chemically synthesized
  source 1..22: mol_type = other DNA
ttaatgaaatataggtgagatg

SEQ ID NO: 75698 - DNA, 22 bp, synthetic construct
  misc_feature 1..22: note = chemically synthesized
  source 1..22: mol_type = other DNA
aatgaaatataggtgagatgct

SEQ ID NO: 75699 - DNA, 22 bp, synthetic construct
  misc_feature 1..22: note = chemically synthesized
  source 1..22: mol_type = other DNA
atgaaatataggtgagatgctt

SEQ ID NO: 75700 - DNA, 22 bp, synthetic construct
  misc_feature 1..22: note = chemically synthesized
  source 1..22: mol_type = other DNA
atataattttgtgagctctgac

SEQ ID NO: 75701 - DNA, 22 bp, synthetic construct
  misc_feature 1..22: note = chemically synthesized
  source 1..22: mol_type = other DNA
tataattttgtgagctctgaca

SEQ ID NO: 75702 - DNA, 22 bp, synthetic construct
  misc_feature 1..22: note = chemically synthesized
  source 1..22: mol_type = other DNA
tgtgagctctgacataagaaat

SEQ ID NO: 75703 - DNA, 22 bp, synthetic construct
  misc_feature 1..22: note = chemically synthesized
  source 1..22: mol_type = other DNA
gtgagctctgacataagaaatt

SEQ ID NO: 75704 - DNA, 22 bp, synthetic construct
  misc_feature 1..22: note = chemically synthesized
  source 1..22: mol_type = other DNA
tgagctctgacataagaaatta

SEQ ID NO: 75705 - DNA, 22 bp, synthetic construct
  misc_feature 1..22: note = chemically synthesized
  source 1..22: mol_type = other DNA
tgacataagaaattagtaaaaa

SEQ ID NO: 75706 - DNA, 22 bp, synthetic construct
  misc_feature 1..22: note = chemically synthesized
  source 1..22: mol_type = other DNA
acataagaaattagtaaaaata

SEQ ID NO: 75707 - DNA, 22 bp, synthetic construct
  misc_feature 1..22: note = chemically synthesized
  source 1..22: mol_type = other DNA
gtaaaaataaaaaagctaaagg

SEQ ID NO: 75708 - DNA, 22 bp, synthetic construct
  misc_feature 1..22: note = chemically synthesized
  source 1..22: mol_type = other DNA
aaggacagatttcttagaagaa

SEQ ID NO: 75709 - DNA, 22 bp, synthetic construct
  misc_feature 1..22: note = chemically synthesized
  source 1..22: mol_type = other DNA
cttagaagaagtcaaatgtaga

SEQ ID NO: 75710 - DNA, 22 bp, synthetic construct
  misc_feature 1..22: note = chemically synthesized
  source 1..22: mol_type = other DNA
ttagaagaagtcaaatgtagaa

SEQ ID NO: 75711 - DNA, 22 bp, synthetic construct
  misc_feature 1..22: note = chemically synthesized
  source 1..22: mol_type = other DNA
agaagaagtcaaatgtagaact

SEQ ID NO: 75712 - DNA, 22 bp, synthetic construct
  misc_feature 1..22: note = chemically synthesized
  source 1..22: mol_type = other DNA
gaagaagtcaaatgtagaacta

SEQ ID NO: 75713 - DNA, 22 bp, synthetic construct
  misc_feature 1..22: note = chemically synthesized
  source 1..22: mol_type = other DNA
gacagggaagacaggacaaact

SEQ ID NO: 75714 - DNA, 22 bp, synthetic construct
  misc_feature 1..22: note = chemically synthesized
  source 1..22: mol_type = other DNA
ggggagactaaaattgaggaaa

SEQ ID NO: 75715 - DNA, 22 bp, synthetic construct
  misc_feature 1..22: note = chemically synthesized
  source 1..22: mol_type = other DNA
gggagactaaaattgaggaaag

SEQ ID NO: 75716 - DNA, 22 bp, synthetic construct
  misc_feature 1..22: note = chemically synthesized
  source 1..22: mol_type = other DNA
aaattgaggaaagcactatgaa

SEQ ID NO: 75717 - DNA, 22 bp, synthetic construct
  misc_feature 1..22: note = chemically synthesized
  source 1..22: mol_type = other DNA
aggaaagcactatgaataacca

SEQ ID NO: 75718 - DNA, 22 bp, synthetic construct
  misc_feature 1..22: note = chemically synthesized
  source 1..22: mol_type = other DNA
tgaataaccaaagaaaatttag

SEQ ID NO: 75719 - DNA, 22 bp, synthetic construct
  misc_feature 1..22: note = chemically synthesized
  source 1..22: mol_type = other DNA
agtcacttttcaatttcactga

SEQ ID NO: 75720 - DNA, 22 bp, synthetic construct
  misc_feature 1..22: note = chemically synthesized
  source 1..22: mol_type = other DNA
gtcacttttcaatttcactgat

SEQ ID NO: 75721 - DNA, 22 bp, synthetic construct
  misc_feature 1..22: note = chemically synthesized
  source 1..22: mol_type = other DNA
ttcaatttcactgatgattgaa

SEQ ID NO: 75722 - DNA, 22 bp, synthetic construct
  misc_feature 1..22: note = chemically synthesized
  source 1..22: mol_type = other DNA
tcaatttcactgatgattgaat

SEQ ID NO: 75723 - DNA, 22 bp, synthetic construct
  misc_feature 1..22: note = chemically synthesized
  source 1..22: mol_type = other DNA
caatttcactgatgattgaatt

SEQ ID NO: 75724 - DNA, 22 bp, synthetic construct
  misc_feature 1..22: note = chemically synthesized
  source 1..22: mol_type = other DNA
aatttcactgatgattgaattt

SEQ ID NO: 75725 - DNA, 22 bp, synthetic construct
  misc_feature 1..22: note = chemically synthesized
  source 1..22: mol_type = other DNA
cactgatgattgaattttctga

SEQ ID NO: 75726 - DNA, 22 bp, synthetic construct
  misc_feature 1..22: note = chemically synthesized
  source 1..22: mol_type = other DNA
actgatgattgaattttctgaa

SEQ ID NO: 75727 - DNA, 22 bp, synthetic construct
  misc_feature 1..22: note = chemically synthesized
  source 1..22: mol_type = other DNA
atgattgaattttctgaaaaac

SEQ ID NO: 75728 - DNA, 22 bp, synthetic construct
  misc_feature 1..22: note = chemically synthesized
  source 1..22: mol_type = other DNA
aattttctgaaaaacctgggct

SEQ ID NO: 75729 - DNA, 22 bp, synthetic construct
  misc_feature 1..22: note = chemically synthesized
  source 1..22: mol_type = other DNA
tctgaaaaacctgggctcttat

SEQ ID NO: 75730 - DNA, 22 bp, synthetic construct
  misc_feature 1..22: note = chemically synthesized
  source 1..22: mol_type = other DNA
ctgaaaaacctgggctcttatg

SEQ ID NO: 75731 - DNA, 22 bp, synthetic construct
  misc_feature 1..22: note = chemically synthesized
  source 1..22: mol_type = other DNA
tgaaaaacctgggctcttatgc

SEQ ID NO: 75732 - DNA, 22 bp, synthetic construct
  misc_feature 1..22: note = chemically synthesized
  source 1..22: mol_type = other DNA
aaaaacctgggctcttatgctt

SEQ ID NO: 75733 - DNA, 22 bp, synthetic construct
  misc_feature 1..22: note = chemically synthesized
  source 1..22: mol_type = other DNA
ggctcttatgctttatataaaa

SEQ ID NO: 75734 - DNA, 22 bp, synthetic construct
  misc_feature 1..22: note = chemically synthesized
  source 1..22: mol_type = other DNA
ttatgctttatataaaagttct

SEQ ID NO: 75735 - DNA, 22 bp, synthetic construct
  misc_feature 1..22: note = chemically synthesized
  source 1..22: mol_type = other DNA
atgctttatataaaagttctct

SEQ ID NO: 75736 - DNA, 22 bp, synthetic construct
  misc_feature 1..22: note = chemically synthesized
  source 1..22: mol_type = other DNA
tgctttatataaaagttctctg

SEQ ID NO: 75737 - DNA, 22 bp, synthetic construct
  misc_feature 1..22: note = chemically synthesized
  source 1..22: mol_type = other DNA
tatataaaagttctctgatcaa

SEQ ID NO: 75738 - DNA, 22 bp, synthetic construct
  misc_feature 1..22: note = chemically synthesized
  source 1..22: mol_type = other DNA
atataaaagttctctgatcaaa

SEQ ID NO: 75739 - DNA, 22 bp, synthetic construct
  misc_feature 1..22: note = chemically synthesized
  source 1..22: mol_type = other DNA
tataaaagttctctgatcaaaa

SEQ ID NO: 75740 - DNA, 22 bp, synthetic construct
  misc_feature 1..22: note = chemically synthesized
  source 1..22: mol_type = other DNA
tctgatcaaaatagttattttc

SEQ ID NO: 75741 - DNA, 22 bp, synthetic construct
  misc_feature 1..22: note = chemically synthesized
  source 1..22: mol_type = other DNA
tgatcaaaatagttattttcta

SEQ ID NO: 75742 - DNA, 22 bp, synthetic construct
  misc_feature 1..22: note = chemically synthesized
  source 1..22: mol_type = other DNA
atcaaaatagttattttctaaa

SEQ ID NO: 75743 - DNA, 22 bp, synthetic construct
  misc_feature 1..22: note = chemically synthesized
  source 1..22: mol_type = other DNA
ttttctaaaaattacatatttt

SEQ ID NO: 75744 - DNA, 22 bp, synthetic construct
  misc_feature 1..22: note = chemically synthesized
  source 1..22: mol_type = other DNA
tctaaaaattacatattttgaa

SEQ ID NO: 75745 - DNA, 22 bp, synthetic construct
  misc_feature 1..22: note = chemically synthesized
  source 1..22: mol_type = other DNA
ctaaaaattacatattttgaat

SEQ ID NO: 75746 - DNA, 22 bp, synthetic construct
  misc_feature 1..22: note = chemically synthesized
  source 1..22: mol_type = other DNA
taaaaattacatattttgaatc

SEQ ID NO: 75747 - DNA, 22 bp, synthetic construct
  misc_feature 1..22: note = chemically synthesized
  source 1..22: mol_type = other DNA
aaaattacatattttgaatcag

SEQ ID NO: 75748 - DNA, 22 bp, synthetic construct
  misc_feature 1..22: note = chemically synthesized
  source 1..22: mol_type = other DNA
catattttgaatcagtacattt

SEQ ID NO: 75749 - DNA, 22 bp, synthetic construct
  misc_feature 1..22: note = chemically synthesized
  source 1..22: mol_type = other DNA
tgaatcagtacattttaagcta

SEQ ID NO: 75750 - DNA, 22 bp, synthetic construct
  misc_feature 1..22: note = chemically synthesized
  source 1..22: mol_type = other DNA
gaatcagtacattttaagctat

SEQ ID NO: 75751 - DNA, 22 bp, synthetic construct
  misc_feature 1..22: note = chemically synthesized
  source 1..22: mol_type = other DNA
aatcagtacattttaagctata

SEQ ID NO: 75752 - DNA, 22 bp, synthetic construct
  misc_feature 1..22: note = chemically synthesized
  source 1..22: mol_type = other DNA
taagctatacattagagaaatg

SEQ ID NO: 75753 - DNA, 22 bp, synthetic construct
  misc_feature 1..22: note = chemically synthesized
  source 1..22: mol_type = other DNA
aagctatacattagagaaatgt

SEQ ID NO: 75754 - DNA, 22 bp, synthetic construct
  misc_feature 1..22: note = chemically synthesized
  source 1..22: mol_type = other DNA
agctatacattagagaaatgtt

SEQ ID NO: 75755 - DNA, 22 bp, synthetic construct
  misc_feature 1..22: note = chemically synthesized
  source 1..22: mol_type = other DNA
tacattagagaaatgtttgtga

SEQ ID NO: 75756 - DNA, 22 bp, synthetic construct
  misc_feature 1..22: note = chemically synthesized
  source 1..22: mol_type = other DNA
gagaaatgtttgtgatacagtg

SEQ ID NO: 75757 - DNA, 22 bp, synthetic construct
  misc_feature 1..22: note = chemically synthesized
  source 1..22: mol_type = other DNA
gtgatacagtgaaaagtaaagt

SEQ ID NO: 75758 - DNA, 22 bp, synthetic construct
  misc_feature 1..22: note = chemically synthesized
  source 1..22: mol_type = other DNA
tgatacagtgaaaagtaaagtt

SEQ ID NO: 75759 - DNA, 22 bp, synthetic construct
  misc_feature 1..22: note = chemically synthesized
  source 1..22: mol_type = other DNA
cttcattctttcctagacactt

SEQ ID NO: 75760 - DNA, 22 bp, synthetic construct
  misc_feature 1..22: note = chemically synthesized
  source 1..22: mol_type = other DNA
cattctttcctagacacttcaa

SEQ ID NO: 75761 - DNA, 22 bp, synthetic construct
  misc_feature 1..22: note = chemically synthesized
  source 1..22: mol_type = other DNA
attctttcctagacacttcaat

SEQ ID NO: 75762 - DNA, 22 bp, synthetic construct
  misc_feature 1..22: note = chemically synthesized
  source 1..22: mol_type = other DNA
tttcctagacacttcaataaag

SEQ ID NO: 75763 - DNA, 22 bp, synthetic construct
  misc_feature 1..22: note = chemically synthesized
  source 1..22: mol_type = other DNA
tcctagacacttcaataaagtt

SEQ ID NO: 75764 - DNA, 22 bp, synthetic construct
  misc_feature 1..22: note = chemically synthesized
  source 1..22: mol_type = other DNA
cctagacacttcaataaagttg

SEQ ID NO: 75765 - DNA, 22 bp, synthetic construct
  misc_feature 1..22: note = chemically synthesized
  source 1..22: mol_type = other DNA
ctagacacttcaataaagttgt

SEQ ID NO: 75766 - DNA, 22 bp, synthetic construct
  misc_feature 1..22: note = chemically synthesized
  source 1..22: mol_type = other DNA
gacacttcaataaagttgtttt

SEQ ID NO: 75767 - DNA, 22 bp, synthetic construct
  misc_feature 1..22: note = chemically synthesized
  source 1..22: mol_type = other DNA
caataaagttgttttatctcag

SEQ ID NO: 75768 - DNA, 22 bp, synthetic construct
  misc_feature 1..22: note = chemically synthesized
  source 1..22: mol_type = other DNA
aataaagttgttttatctcagt

SEQ ID NO: 75769 - DNA, 22 bp, synthetic construct
  misc_feature 1..22: note = chemically synthesized
  source 1..22: mol_type = other DNA
ttttatctcagtaagctcatga

SEQ ID NO: 75770 - DNA, 22 bp, synthetic construct
  misc_feature 1..22: note = chemically synthesized
  source 1..22: mol_type = other DNA
tatctcagtaagctcatgaatc

SEQ ID NO: 75771 - DNA, 22 bp, synthetic construct
  misc_feature 1..22: note = chemically synthesized
  source 1..22: mol_type = other DNA
atctcagtaagctcatgaatca

SEQ ID NO: 75772 - DNA, 22 bp, synthetic construct
  misc_feature 1..22: note = chemically synthesized
  source 1..22: mol_type = other DNA
tctcagtaagctcatgaatcag

SEQ ID NO: 75773 - DNA, 22 bp, synthetic construct
  misc_feature 1..22: note = chemically synthesized
  source 1..22: mol_type = other DNA
agtaagctcatgaatcagctaa

SEQ ID NO: 75774 - DNA, 22 bp, synthetic construct
  misc_feature 1..22: note = chemically synthesized
  source 1..22: mol_type = other DNA
atgaatcagctaaccgtatgct

SEQ ID NO: 75775 - DNA, 22 bp, synthetic construct
  misc_feature 1..22: note = chemically synthesized
  source 1..22: mol_type = other DNA
accgtatgcttcatgtcaccaa

SEQ ID NO: 75776 - DNA, 22 bp, synthetic construct
  misc_feature 1..22: note = chemically synthesized
  source 1..22: mol_type = other DNA
catgtcaccaatatgctggaaa

SEQ ID NO: 75777 - DNA, 22 bp, synthetic construct
  misc_feature 1..22: note = chemically synthesized
  source 1..22: mol_type = other DNA
atgtcaccaatatgctggaaat

SEQ ID NO: 75778 - DNA, 22 bp, synthetic construct
  misc_feature 1..22: note = chemically synthesized
  source 1..22: mol_type = other DNA
gaaattcaggaagtagctgttc

SEQ ID NO: 75779 - DNA, 22 bp, synthetic construct
  misc_feature 1..22: note = chemically synthesized
  source 1..22: mol_type = other DNA
aggaagtagctgttctttgaaa

SEQ ID NO: 75780 - DNA, 22 bp, synthetic construct
  misc_feature 1..22: note = chemically synthesized
  source 1..22: mol_type = other DNA
ttctttgaaagaaaaagcagct

SEQ ID NO: 75781 - DNA, 22 bp, synthetic construct
  misc_feature 1..22: note = chemically synthesized
  source 1..22: mol_type = other DNA
tttgaaagaaaaagcagctttt

SEQ ID NO: 75782 - DNA, 22 bp, synthetic construct
  misc_feature 1..22: note = chemically synthesized
  source 1..22: mol_type = other DNA
tgaaagaaaaagcagctttttt

SEQ ID NO: 75783 - DNA, 22 bp, synthetic construct
  misc_feature 1..22: note = chemically synthesized
  source 1..22: mol_type = other DNA
gaaagaaaaagcagcttttttt

SEQ ID NO: 75784 - DNA, 22 bp, synthetic construct
  misc_feature 1..22: note = chemically synthesized
  source 1..22: mol_type = other DNA
aaagaaaaagcagctttttttt

SEQ ID NO: 75785 - DNA, 22 bp, synthetic construct
  misc_feature 1..22: note = chemically synthesized
  source 1..22: mol_type = other DNA
tttttttttttttttttttgaa

SEQ ID NO: 75786 - DNA, 22 bp, synthetic construct
  misc_feature 1..22: note = chemically synthesized
  source 1..22: mol_type = other DNA
ttttttttttttttttttgaaa

SEQ ID NO: 75787 - DNA, 22 bp, synthetic construct
  misc_feature 1..22: note = chemically synthesized
  source 1..22: mol_type = other DNA
tttttttttttttttttgaaag

SEQ ID NO: 75788 - DNA, 22 bp, synthetic construct
  misc_feature 1..22: note = chemically synthesized
  source 1..22: mol_type = other DNA
ttttttttttttttttgaaaga

SEQ ID NO: 75789 - DNA, 22 bp, synthetic construct
  misc_feature 1..22: note = chemically synthesized
  source 1..22: mol_type = other DNA
tttttttttttttttgaaagaa

SEQ ID NO: 75790 - DNA, 22 bp, synthetic construct
  misc_feature 1..22: note = chemically synthesized
  source 1..22: mol_type = other DNA
ttttttttttttttgaaagaaa

SEQ ID NO: 75791 - DNA, 22 bp, synthetic construct
  misc_feature 1..22: note = chemically synthesized
  source 1..22: mol_type = other DNA
tttttttttttttgaaagaaaa

SEQ ID NO: 75792 - DNA, 22 bp, synthetic construct
  misc_feature 1..22: note = chemically synthesized
  source 1..22: mol_type = other DNA
ttttttttttttgaaagaaaag

SEQ ID NO: 75793 - DNA, 22 bp, synthetic construct
  misc_feature 1..22: note = chemically synthesized
  source 1..22: mol_type = other DNA
tttttttttttgaaagaaaagg

SEQ ID NO: 75794 - DNA, 22 bp, synthetic construct
  misc_feature 1..22: note = chemically synthesized
  source 1..22: mol_type = other DNA
ttttttttttgaaagaaaagga

SEQ ID NO: 75795 - DNA, 22 bp, synthetic construct
  misc_feature 1..22: note = chemically synthesized
  source 1..22: mol_type = other DNA
tttttttttgaaagaaaaggaa

SEQ ID NO: 75796 - DNA, 22 bp, synthetic construct
  misc_feature 1..22: note = chemically synthesized
  source 1..22: mol_type = other DNA
ttttttttgaaagaaaaggaag

SEQ ID NO: 75797 - DNA, 22 bp, synthetic construct
  misc_feature 1..22: note = chemically synthesized
  source 1..22: mol_type = other DNA
tttttttgaaagaaaaggaagg

SEQ ID NO: 75798 - DNA, 22 bp, synthetic construct
  misc_feature 1..22: note = chemically synthesized
  source 1..22: mol_type = other DNA
ttttttgaaagaaaaggaaggt

SEQ ID NO: 75799 - DNA, 22 bp, synthetic construct
  misc_feature 1..22: note = chemically synthesized
  source 1..22: mol_type = other DNA
tttttgaaagaaaaggaaggta

SEQ ID NO: 75800 - DNA, 22 bp, synthetic construct
  misc_feature 1..22: note = chemically synthesized
  source 1..22: mol_type = other DNA
ttttgaaagaaaaggaaggtaa

SEQ ID NO: 75801 - DNA, 22 bp, synthetic construct
  misc_feature 1..22: note = chemically synthesized
  source 1..22: mol_type = other DNA
tttgaaagaaaaggaaggtaag

SEQ ID NO: 75802 - DNA, 22 bp, synthetic construct
  misc_feature 1..22: note = chemically synthesized
  source 1..22: mol_type = other DNA
ttgaaagaaaaggaaggtaagt

SEQ ID NO: 75803 - DNA, 22 bp, synthetic construct
  misc_feature 1..22: note = chemically synthesized
  source 1..22: mol_type = other DNA
tgaaagaaaaggaaggtaagta

SEQ ID NO: 75804 - DNA, 22 bp, synthetic construct
  misc_feature 1..22: note = chemically synthesized
  source 1..22: mol_type = other DNA
gaaagaaaaggaaggtaagtaa

SEQ ID NO: 75805 - DNA, 22 bp, synthetic construct
  misc_feature 1..22: note = chemically synthesized
  source 1..22: mol_type = other DNA
aaagaaaaggaaggtaagtaac

SEQ ID NO: 75806 - DNA, 22 bp, synthetic construct
  misc_feature 1..22: note = chemically synthesized
  source 1..22: mol_type = other DNA
actcaaatattcaacaacaaat

SEQ ID NO: 75807 - DNA, 22 bp, synthetic construct
  misc_feature 1..22: note = chemically synthesized
  source 1..22: mol_type = other DNA
ctcaaatattcaacaacaaatg

SEQ ID NO: 75808 - DNA, 22 bp, synthetic construct
  misc_feature 1..22: note = chemically synthesized
  source 1..22: mol_type = other DNA
aaatattcaacaacaaatgttc

SEQ ID NO: 75809 - DNA, 22 bp, synthetic construct
  misc_feature 1..22: note = chemically synthesized
  source 1..22: mol_type = other DNA
aacaacaaatgttcaactgctg

SEQ ID NO: 75810 - DNA, 22 bp, synthetic construct
  misc_feature 1..22: note = chemically synthesized
  source 1..22: mol_type = other DNA
aactgctgctaaacttcaaatg

SEQ ID NO: 75811 - DNA, 22 bp, synthetic construct
  misc_feature 1..22: note = chemically synthesized
  source 1..22: mol_type = other DNA
ctgctaaacttcaaatgaaaga

SEQ ID NO: 75812 - DNA, 22 bp, synthetic construct
  misc_feature 1..22: note = chemically synthesized
  source 1..22: mol_type = other DNA
ctaaacttcaaatgaaagaacc

SEQ ID NO: 75813 - DNA, 22 bp, synthetic construct
  misc_feature 1..22: note = chemically synthesized
  source 1..22: mol_type = other DNA
aacttcaaatgaaagaaccaaa

SEQ ID NO: 75814 - DNA, 22 bp, synthetic construct
  misc_feature 1..22: note = chemically synthesized
  source 1..22: mol_type = other DNA
caaatgaaagaaccaaatcagc

SEQ ID NO: 75815 - DNA, 22 bp, synthetic construct
  misc_feature 1..22: note = chemically synthesized
  source 1..22: mol_type = other DNA
aaatgaaagaaccaaatcagca

SEQ ID NO: 75816 - DNA, 22 bp, synthetic construct
  misc_feature 1..22: note = chemically synthesized
  source 1..22: mol_type = other DNA
catgacagggaggctgtatcag

SEQ ID NO: 75817 - DNA, 22 bp, synthetic construct
  misc_feature 1..22: note = chemically synthesized
  source 1..22: mol_type = other DNA
atgacagggaggctgtatcagc

SEQ ID NO: 75818 - DNA, 22 bp, synthetic construct
  misc_feature 1..22: note = chemically synthesized
  source 1..22: mol_type = other DNA
tatcagctaacatacatttacc

SEQ ID NO: 75819 - DNA, 22 bp, synthetic construct
  misc_feature 1..22: note = chemically synthesized
  source 1..22: mol_type = other DNA
acatacatttaccgtaaactag

SEQ ID NO: 75820 - DNA, 22 bp, synthetic construct
  misc_feature 1..22: note = chemically synthesized
  source 1..22: mol_type = other DNA
accgtaaactagtaggtcaatt

SEQ ID NO: 75821 - DNA, 22 bp, synthetic construct
  misc_feature 1..22: note = chemically synthesized
  source 1..22: mol_type = other DNA
ccgtaaactagtaggtcaatta

SEQ ID NO: 75822 - DNA, 22 bp, synthetic construct
  misc_feature 1..22: note = chemically synthesized
  source 1..22: mol_type = other DNA
gtaggtcaattaaatactttga

SEQ ID NO: 75823 - DNA, 22 bp, synthetic construct
  misc_feature 1..22: note = chemically synthesized
  source 1..22: mol_type = other DNA
aatactttgatttccacagatt

SEQ ID NO: 75824 - DNA, 22 bp, synthetic construct
  misc_feature 1..22: note = chemically synthesized
  source 1..22: mol_type = other DNA
tgatttccacagatttgatccc

SEQ ID NO: 75825 - DNA, 22 bp, synthetic construct
  misc_feature 1..22: note = chemically synthesized
  source 1..22: mol_type = other DNA
gatttccacagatttgatcccc

SEQ ID NO: 75826 - DNA, 22 bp, synthetic construct
  misc_feature 1..22: note = chemically synthesized
  source 1..22: mol_type = other DNA
atttccacagatttgatcccca

SEQ ID NO: 75827 - DNA, 22 bp, synthetic construct
  misc_feature 1..22: note = chemically synthesized
  source 1..22: mol_type = other DNA
ccacagatttgatccccaatgc

SEQ ID NO: 75828 - DNA, 22 bp, synthetic construct
  misc_feature 1..22: note = chemically synthesized
  source 1..22: mol_type = other DNA
cacagatttgatccccaatgct

SEQ ID NO: 75829 - DNA, 22 bp, synthetic construct
  misc_feature 1..22: note = chemically synthesized
  source 1..22: mol_type = other DNA
gatccccaatgcttagttttat

SEQ ID NO: 75830 - DNA, 22 bp, synthetic construct
  misc_feature 1..22: note = chemically synthesized
  source 1..22: mol_type = other DNA
atccccaatgcttagttttatg

SEQ ID NO: 75831 - DNA, 22 bp, synthetic construct
  misc_feature 1..22: note = chemically synthesized
  source 1..22: mol_type = other DNA
agttttatgacactcccatcca

SEQ ID NO: 75832 - DNA, 22 bp, synthetic construct
  misc_feature 1..22: note = chemically synthesized
  source 1..22: mol_type = other DNA
gttttatgacactcccatccat

SEQ ID NO: 75833 - DNA, 22 bp, synthetic construct
  misc_feature 1..22: note = chemically synthesized
  source 1..22: mol_type = other DNA
tatgacactcccatccataagt

SEQ ID NO: 75834 - DNA, 22 bp, synthetic construct
  misc_feature 1..22: note = chemically synthesized
  source 1..22: mol_type = other DNA
atgacactcccatccataagtc

SEQ ID NO: 75835 - DNA, 22 bp, synthetic construct
  misc_feature 1..22: note = chemically synthesized
  source 1..22: mol_type = other DNA
tgacactcccatccataagtca

SEQ ID NO: 75836 - DNA, 22 bp, synthetic construct
  misc_feature 1..22: note = chemically synthesized
  source 1..22: mol_type = other DNA
ccatccataagtcactggcttt

SEQ ID NO: 75837 - DNA, 22 bp, synthetic construct
  misc_feature 1..22: note = chemically synthesized
  source 1..22: mol_type = other DNA
gctttttctaataggggcaaat

SEQ ID NO: 75838 - DNA, 22 bp, synthetic construct
  misc_feature 1..22: note = chemically synthesized
  source 1..22: mol_type = other DNA
tttctaataggggcaaattttt

SEQ ID NO: 75839 - DNA, 22 bp, synthetic construct
  misc_feature 1..22: note = chemically synthesized
  source 1..22: mol_type = other DNA
ttctaataggggcaaatttttt

SEQ ID NO: 75840 - DNA, 22 bp, synthetic construct
  misc_feature 1..22: note = chemically synthesized
  source 1..22: mol_type = other DNA
tctaataggggcaaattttttc

SEQ ID NO: 75841 - DNA, 22 bp, synthetic construct
  misc_feature 1..22: note = chemically synthesized
  source 1..22: mol_type = other DNA
ctaataggggcaaattttttct

SEQ ID NO: 75842 - DNA, 22 bp, synthetic construct
  misc_feature 1..22: note = chemically synthesized
  source 1..22: mol_type = other DNA
taataggggcaaattttttctt

SEQ ID NO: 75843 - DNA, 22 bp, synthetic construct
  misc_feature 1..22: note = chemically synthesized
  source 1..22: mol_type = other DNA
ataggggcaaattttttcttct

SEQ ID NO: 75844 - DNA, 22 bp, synthetic construct
  misc_feature 1..22: note = chemically synthesized
  source 1..22: mol_type = other DNA
tttcttctccaaagataatcac

SEQ ID NO: 75845 - DNA, 22 bp, synthetic construct
  misc_feature 1..22: note = chemically synthesized
  source 1..22: mol_type = other DNA
ttcttctccaaagataatcaca

SEQ ID NO: 75846 - DNA, 22 bp, synthetic construct
  misc_feature 1..22: note = chemically synthesized
  source 1..22: mol_type = other DNA
tcttctccaaagataatcacaa

SEQ ID NO: 75847 - DNA, 22 bp, synthetic construct
  misc_feature 1..22: note = chemically synthesized
  source 1..22: mol_type = other DNA
cttctccaaagataatcacaat

SEQ ID NO: 75848 - DNA, 22 bp, synthetic construct
  misc_feature 1..22: note = chemically synthesized
  source 1..22: mol_type = other DNA
ttctccaaagataatcacaatt

SEQ ID NO: 75849 - DNA, 22 bp, synthetic construct
  misc_feature 1..22: note = chemically synthesized
  source 1..22: mol_type = other DNA
ctccaaagataatcacaattag

SEQ ID NO: 75850 - DNA, 22 bp, synthetic construct
  misc_feature 1..22: note = chemically synthesized
  source 1..22: mol_type = other DNA
tccaaagataatcacaattaga

SEQ ID NO: 75851 - DNA, 22 bp, synthetic construct
  misc_feature 1..22: note = chemically synthesized
  source 1..22: mol_type = other DNA
caaagataatcacaattagaat

SEQ ID NO: 75852 - DNA, 22 bp, synthetic construct
  misc_feature 1..22: note = chemically synthesized
  source 1..22: mol_type = other DNA
gaataagaatcctttaatggca

SEQ ID NO: 75853 - DNA, 22 bp, synthetic construct
  misc_feature 1..22: note = chemically synthesized
  source 1..22: mol_type = other DNA
taatggcaatcacaatgtctga

SEQ ID NO: 75854 - DNA, 22 bp, synthetic construct
  misc_feature 1..22: note = chemically synthesized
  source 1..22: mol_type = other DNA
aatggcaatcacaatgtctgac

SEQ ID NO: 75855 - DNA, 22 bp, synthetic construct
  misc_feature 1..22: note = chemically synthesized
  source 1..22: mol_type = other DNA
atggcaatcacaatgtctgact

SEQ ID NO: 75856 - DNA, 22 bp, synthetic construct
  misc_feature 1..22: note = chemically synthesized
  source 1..22: mol_type = other DNA
acttattcaagaccaaagagct

SEQ ID NO: 75857 - DNA, 22 bp, synthetic construct
  misc_feature 1..22: note = chemically synthesized
  source 1..22: mol_type = other DNA
attcaagaccaaagagctgaca

SEQ ID NO: 75858 - DNA, 22 bp, synthetic construct
  misc_feature 1..22: note = chemically synthesized
  source 1..22: mol_type = other DNA
ttcaagaccaaagagctgacat

SEQ ID NO: 75859 - DNA, 22 bp, synthetic construct
  misc_feature 1..22: note = chemically synthesized
  source 1..22: mol_type = other DNA
aagaccaaagagctgacatgtg

SEQ ID NO: 75860 - DNA, 22 bp, synthetic construct
  misc_feature 1..22: note = chemically synthesized
  source 1..22: mol_type = other DNA
acatgtgagtactacctgacag

SEQ ID NO: 75861 - DNA, 22 bp, synthetic construct
  misc_feature 1..22: note = chemically synthesized
  source 1..22: mol_type = other DNA
cctgacaggcacagatagcagg

SEQ ID NO: 75862 - DNA, 22 bp, synthetic construct
  misc_feature 1..22: note = chemically synthesized
  source 1..22: mol_type = other DNA
acaggcacagatagcagggttg

SEQ ID NO: 75863 - DNA, 22 bp, synthetic construct
  misc_feature 1..22: note = chemically synthesized
  source 1..22: mol_type = other DNA
caggtggtggtgtatgtaagtt

SEQ ID NO: 75864 - DNA, 22 bp, synthetic construct
  misc_feature 1..22: note = chemically synthesized
  source 1..22: mol_type = other DNA
ctggttagttggatagagtgat

SEQ ID NO: 75865 - DNA, 22 bp, synthetic construct
  misc_feature 1..22: note = chemically synthesized
  source 1..22: mol_type = other DNA
gttagttggatagagtgattgt

SEQ ID NO: 75866 - DNA, 22 bp, synthetic construct
  misc_feature 1..22: note = chemically synthesized
  source 1..22: mol_type = other DNA
gttggatagagtgattgttatt

SEQ ID NO: 75867 - DNA, 22 bp, synthetic construct
  misc_feature 1..22: note = chemically synthesized
  source 1..22: mol_type = other DNA
gatagagtgattgttattggag

SEQ ID NO: 75868 - DNA, 22 bp, synthetic construct
  misc_feature 1..22: note = chemically synthesized
  source 1..22: mol_type = other DNA
ttattggagaagctggtaatta

SEQ ID NO: 75869 - DNA, 22 bp, synthetic construct
  misc_feature 1..22: note = chemically synthesized
  source 1..22: mol_type = other DNA
ttggagaagctggtaattaaat

SEQ ID NO: 75870 - DNA, 22 bp, synthetic construct
  misc_feature 1..22: note = chemically synthesized
  source 1..22: mol_type = other DNA
gagaagctggtaattaaattat

SEQ ID NO: 75871 - DNA, 22 bp, synthetic construct
  misc_feature 1..22: note = chemically synthesized
  source 1..22: mol_type = other DNA
gtaattaaattatggagaggaa

SEQ ID NO: 75872 - DNA, 22 bp, synthetic construct
  misc_feature 1..22: note = chemically synthesized
  source 1..22: mol_type = other DNA
aattatggagaggaaacttgga

SEQ ID NO: 75873 - DNA, 22 bp, synthetic construct
  misc_feature 1..22: note = chemically synthesized
  source 1..22: mol_type = other DNA
tggagaggaaacttggaatcgt

SEQ ID NO: 75874 - DNA, 22 bp, synthetic construct
  misc_feature 1..22: note = chemically synthesized
  source 1..22: mol_type = other DNA
ggaatcgtgagacttactcctc

SEQ ID NO: 75875 - DNA, 22 bp, synthetic construct
  misc_feature 1..22: note = chemically synthesized
  source 1..22: mol_type = other DNA
gaatcgtgagacttactcctca

SEQ ID NO: 75876 - DNA, 22 bp, synthetic construct
  misc_feature 1..22: note = chemically synthesized
  source 1..22: mol_type = other DNA
actcctcaattattattgagag

SEQ ID NO: 75877 - DNA, 22 bp, synthetic construct
  misc_feature 1..22: note = chemically synthesized
  source 1..22: mol_type = other DNA
ctcctcaattattattgagagc

SEQ ID NO: 75878 - DNA, 22 bp, synthetic construct
  misc_feature 1..22: note = chemically synthesized
  source 1..22: mol_type = other DNA
ctcaattattattgagagctgg

SEQ ID NO: 75879 - DNA, 22 bp, synthetic construct
  misc_feature 1..22: note = chemically synthesized
  source 1..22: mol_type = other DNA
aattattattgagagctggttt

SEQ ID NO: 75880 - DNA, 22 bp, synthetic construct
  misc_feature 1..22: note = chemically synthesized
  source 1..22: mol_type = other DNA
ttattgagagctggttttgctc

SEQ ID NO: 75881 - DNA, 22 bp, synthetic construct
  misc_feature 1..22: note = chemically synthesized
  source 1..22: mol_type = other DNA
ttgagagctggttttgctctta

SEQ ID NO: 75882 - DNA, 22 bp, synthetic construct
  misc_feature 1..22: note = chemically synthesized
  source 1..22: mol_type = other DNA
agagctggttttgctcttacca

SEQ ID NO: 75883 - DNA, 22 bp, synthetic construct
  misc_feature 1..22: note = chemically synthesized
  source 1..22: mol_type = other DNA
gttttgctcttaccagatacct

SEQ ID NO: 75884 - DNA, 22 bp, synthetic construct
  misc_feature 1..22: note = chemically synthesized
  source 1..22: mol_type = other DNA
tgctcttaccagatacctgaag

SEQ ID NO: 75885 - DNA, 22 bp, synthetic construct
  misc_feature 1..22: note = chemically synthesized
  source 1..22: mol_type = other DNA
gctcttaccagatacctgaaga

SEQ ID NO: 75886 - DNA, 22 bp, synthetic construct
  misc_feature 1..22: note = chemically synthesized
  source 1..22: mol_type = other DNA
ctcttaccagatacctgaagaa

SEQ ID NO: 75887 - DNA, 22 bp, synthetic construct
  misc_feature 1..22: note = chemically synthesized
  source 1..22: mol_type = other DNA
ttaccagatacctgaagaatat

SEQ ID NO: 75888 - DNA, 22 bp, synthetic construct
  misc_feature 1..22: note = chemically synthesized
  source 1..22: mol_type = other DNA
accagatacctgaagaatattg

SEQ ID NO: 75889 - DNA, 22 bp, synthetic construct
  misc_feature 1..22: note = chemically synthesized
  source 1..22: mol_type = other DNA
ccagatacctgaagaatattgt

SEQ ID NO: 75890 - DNA, 22 bp, synthetic construct
  misc_feature 1..22: note = chemically synthesized
  source 1..22: mol_type = other DNA
aagaatattgtccatttttcat

SEQ ID NO: 75891 - DNA, 22 bp, synthetic construct
  misc_feature 1..22: note = chemically synthesized
  source 1..22: mol_type = other DNA
tccatttttcataacactttca

SEQ ID NO: 75892 - DNA, 22 bp, synthetic construct
  misc_feature 1..22: note = chemically synthesized
  source 1..22: mol_type = other DNA
ttcataacactttcattcatca

SEQ ID NO: 75893 - DNA, 22 bp, synthetic construct
  misc_feature 1..22: note = chemically synthesized
  source 1..22: mol_type = other DNA
tcataacactttcattcatcac

SEQ ID NO: 75894 - DNA, 22 bp, synthetic construct
  misc_feature 1..22: note = chemically synthesized
  source 1..22: mol_type = other DNA
cataacactttcattcatcact

SEQ ID NO: 75895 - DNA, 22 bp, synthetic construct
  misc_feature 1..22: note = chemically synthesized
  source 1..22: mol_type = other DNA
ataacactttcattcatcactc

SEQ ID NO: 75896 - DNA, 22 bp, synthetic construct
  misc_feature 1..22: note = chemically synthesized
  source 1..22: mol_type = other DNA
tcattcatcactcaccaatttt

SEQ ID NO: 75897 - DNA, 22 bp, synthetic construct
  misc_feature 1..22: note = chemically synthesized
  source 1..22: mol_type = other DNA
cattcatcactcaccaattttt

SEQ ID NO: 75898 - DNA, 22 bp, synthetic construct
  misc_feature 1..22: note = chemically synthesized
  source 1..22: mol_type = other DNA
attcatcactcaccaatttttc

SEQ ID NO: 75899 - DNA, 22 bp, synthetic construct
  misc_feature 1..22: note = chemically synthesized
  source 1..22: mol_type = other DNA
atcactcaccaatttttcttct

SEQ ID NO: 75900 - DNA, 22 bp, synthetic construct
  misc_feature 1..22: note = chemically synthesized
  source 1..22: mol_type = other DNA
accaatttttcttctccaagga

SEQ ID NO: 75901 - DNA, 22 bp, synthetic construct
  misc_feature 1..22: note = chemically synthesized
  source 1..22: mol_type = other DNA
ttcttctccaaggattccagct

SEQ ID NO: 75902 - DNA, 22 bp, synthetic construct
  misc_feature 1..22: note = chemically synthesized
  source 1..22: mol_type = other DNA
tcttctccaaggattccagctt

SEQ ID NO: 75903 - DNA, 22 bp, synthetic construct
  misc_feature 1..22: note = chemically synthesized
  source 1..22: mol_type = other DNA
cttctccaaggattccagcttc

SEQ ID NO: 75904 - DNA, 22 bp, synthetic construct
  misc_feature 1..22: note = chemically synthesized
  source 1..22: mol_type = other DNA
ttctccaaggattccagcttca

SEQ ID NO: 75905 - DNA, 22 bp, synthetic construct
  misc_feature 1..22: note = chemically synthesized
  source 1..22: mol_type = other DNA
ctccaaggattccagcttcatt

SEQ ID NO: 75906 - DNA, 22 bp, synthetic construct
  misc_feature 1..22: note = chemically synthesized
  source 1..22: mol_type = other DNA
tccaaggattccagcttcattc

SEQ ID NO: 75907 - DNA, 22 bp, synthetic construct
  misc_feature 1..22: note = chemically synthesized
  source 1..22: mol_type = other DNA
caaggattccagcttcattccc

SEQ ID NO: 75908 - DNA, 22 bp, synthetic construct
  misc_feature 1..22: note = chemically synthesized
  source 1..22: mol_type = other DNA
cagcttcattcccttaagttgt

SEQ ID NO: 75909 - DNA, 22 bp, synthetic construct
  misc_feature 1..22: note = chemically synthesized
  source 1..22: mol_type = other DNA
cattcccttaagttgtgggttc

SEQ ID NO: 75910 - DNA, 22 bp, synthetic construct
  misc_feature 1..22: note = chemically synthesized
  source 1..22: mol_type = other DNA
attcccttaagttgtgggttct

SEQ ID NO: 75911 - DNA, 22 bp, synthetic construct
  misc_feature 1..22: note = chemically synthesized
  source 1..22: mol_type = other DNA
ccttaagttgtgggttctgtga

SEQ ID NO: 75912 - DNA, 22 bp, synthetic construct
  misc_feature 1..22: note = chemically synthesized
  source 1..22: mol_type = other DNA
aagttgtgggttctgtgatggc

SEQ ID NO: 75913 - DNA, 22 bp, synthetic construct
  misc_feature 1..22: note = chemically synthesized
  source 1..22: mol_type = other DNA
agttgtgggttctgtgatggct

SEQ ID NO: 75914 - DNA, 22 bp, synthetic construct
  misc_feature 1..22: note = chemically synthesized
  source 1..22: mol_type = other DNA
tgggttctgtgatggctctact

SEQ ID NO: 75915 - DNA, 22 bp, synthetic construct
  misc_feature 1..22: note = chemically synthesized
  source 1..22: mol_type = other DNA
tgtgatggctctactttctgtc

SEQ ID NO: 75916 - DNA, 22 bp, synthetic construct
  misc_feature 1..22: note = chemically synthesized
  source 1..22: mol_type = other DNA
tgatggctctactttctgtctg

SEQ ID NO: 75917 - DNA, 22 bp, synthetic construct
  misc_feature 1..22: note = chemically synthesized
  source 1..22: mol_type = other DNA
tactttctgtctgcactctgtg

SEQ ID NO: 75918 - DNA, 22 bp, synthetic construct
  misc_feature 1..22: note = chemically synthesized
  source 1..22: mol_type = other DNA
ctttctgtctgcactctgtgta

SEQ ID NO: 75919 - DNA, 22 bp, synthetic construct
  misc_feature 1..22: note = chemically synthesized
  source 1..22: mol_type = other DNA
tctgtctgcactctgtgtaaca

SEQ ID NO: 75920 - DNA, 22 bp, synthetic construct
  misc_feature 1..22: note = chemically synthesized
  source 1..22: mol_type = other DNA
ctgtctgcactctgtgtaacag

SEQ ID NO: 75921 - DNA, 22 bp, synthetic construct
  misc_feature 1..22: note = chemically synthesized
  source 1..22: mol_type = other DNA
tgtctgcactctgtgtaacagc

SEQ ID NO: 75922 - DNA, 22 bp, synthetic construct
  misc_feature 1..22: note = chemically synthesized
  source 1..22: mol_type = other DNA
tctgcactctgtgtaacagcat

SEQ ID NO: 75923 - DNA, 22 bp, synthetic construct
  misc_feature 1..22: note = chemically synthesized
  source 1..22: mol_type = other DNA
cactctgtgtaacagcatccag

SEQ ID NO: 75924 - DNA, 22 bp, synthetic construct
  misc_feature 1..22: note = chemically synthesized
  source 1..22: mol_type = other DNA
tgtgtaacagcatccagctaat

SEQ ID NO: 75925 - DNA, 22 bp, synthetic construct
  misc_feature 1..22: note = chemically synthesized
  source 1..22: mol_type = other DNA
tgtaacagcatccagctaatgt

SEQ ID NO: 75926 - DNA, 22 bp, synthetic construct
  misc_feature 1..22: note = chemically synthesized
  source 1..22: mol_type = other DNA
atgtcataaattttactctgtt

SEQ ID NO: 75927 - DNA, 22 bp, synthetic construct
  misc_feature 1..22: note = chemically synthesized
  source 1..22: mol_type = other DNA
tactctgtttggtgccaggata

SEQ ID NO: 75928 - DNA, 22 bp, synthetic construct
  misc_feature 1..22: note = chemically synthesized
  source 1..22: mol_type = other DNA
actctgtttggtgccaggatat

SEQ ID NO: 75929 - DNA, 22 bp, synthetic construct
  misc_feature 1..22: note = chemically synthesized
  source 1..22: mol_type = other DNA
ctctgtttggtgccaggatatg

SEQ ID NO: 75930 - DNA, 22 bp, synthetic construct
  misc_feature 1..22: note = chemically synthesized
  source 1..22: mol_type = other DNA
tgtttggtgccaggatatgtgc

SEQ ID NO: 75931 - DNA, 22 bp, synthetic construct
  misc_feature 1..22: note = chemically synthesized
  source 1..22: mol_type = other DNA
tttggtgccaggatatgtgcca

SEQ ID NO: 75932 - DNA, 22 bp, synthetic construct
  misc_feature 1..22: note = chemically synthesized
  source 1..22: mol_type = other DNA
ggtgccaggatatgtgccaata

SEQ ID NO: 75933 - DNA, 22 bp, synthetic construct
  misc_feature 1..22: note = chemically synthesized
  source 1..22: mol_type = other DNA
gtgccaggatatgtgccaatat

SEQ ID NO: 75934 - DNA, 22 bp, synthetic construct
  misc_feature 1..22: note = chemically synthesized
  source 1..22: mol_type = other DNA
tggacattttgcagatgacttt

SEQ ID NO: 75935 - DNA, 22 bp, synthetic construct
  misc_feature 1..22: note = chemically synthesized
  source 1..22: mol_type = other DNA
tgcagatgactttttacacttt

SEQ ID NO: 75936 - DNA, 22 bp, synthetic construct
  misc_feature 1..22: note = chemically synthesized
  source 1..22: mol_type = other DNA
gcagatgactttttacactttt

SEQ ID NO: 75937 - DNA, 22 bp, synthetic construct
  misc_feature 1..22: note = chemically synthesized
  source 1..22: mol_type = other DNA
cagatgactttttacacttttc

SEQ ID NO: 75938 - DNA, 22 bp, synthetic construct
  misc_feature 1..22: note = chemically synthesized
  source 1..22: mol_type = other DNA
tttacacttttcatttatctct

SEQ ID NO: 75939 - DNA, 22 bp, synthetic construct
  misc_feature 1..22: note = chemically synthesized
  source 1..22: mol_type = other DNA
ttacacttttcatttatctcta

SEQ ID NO: 75940 - DNA, 22 bp, synthetic construct
  misc_feature 1..22: note = chemically synthesized
  source 1..22: mol_type = other DNA
tacacttttcatttatctctaa

SEQ ID NO: 75941 - DNA, 22 bp, synthetic construct
  misc_feature 1..22: note = chemically synthesized
  source 1..22: mol_type = other DNA
acacttttcatttatctctaac

SEQ ID NO: 75942 - DNA, 22 bp, synthetic construct
  misc_feature 1..22: note = chemically synthesized
  source 1..22: mol_type = other DNA
cacttttcatttatctctaaca

SEQ ID NO: 75943 - DNA, 22 bp, synthetic construct
  misc_feature 1..22: note = chemically synthesized
  source 1..22: mol_type = other DNA
ttcatttatctctaacacggac

SEQ ID NO: 75944 - DNA, 22 bp, synthetic construct
  misc_feature 1..22: note = chemically synthesized
  source 1..22: mol_type = other DNA
tcatttatctctaacacggaca

SEQ ID NO: 75945 - DNA, 22 bp, synthetic construct
  misc_feature 1..22: note = chemically synthesized
  source 1..22: mol_type = other DNA
catttatctctaacacggacat

SEQ ID NO: 75946 - DNA, 22 bp, synthetic construct
  misc_feature 1..22: note = chemically synthesized
  source 1..22: mol_type = other DNA
atttatctctaacacggacatc

SEQ ID NO: 75947 - DNA, 22 bp, synthetic construct
  misc_feature 1..22: note = chemically synthesized
  source 1..22: mol_type = other DNA
atctctaacacggacatcttct

SEQ ID NO: 75948 - DNA, 22 bp, synthetic construct
  misc_feature 1..22: note = chemically synthesized
  source 1..22: mol_type = other DNA
tctctaacacggacatcttctt

SEQ ID NO: 75949 - DNA, 22 bp, synthetic construct
  misc_feature 1..22: note = chemically synthesized
  source 1..22: mol_type = other DNA
taacacggacatcttcttcttc

SEQ ID NO: 75950 - DNA, 22 bp, synthetic construct
  misc_feature 1..22: note = chemically synthesized
  source 1..22: mol_type = other DNA
acacggacatcttcttcttctt

SEQ ID NO: 75951 - DNA, 22 bp, synthetic construct
  misc_feature 1..22: note = chemically synthesized
  source 1..22: mol_type = other DNA
cttcttcttctggaagtctgtc

SEQ ID NO: 75952 - DNA, 22 bp, synthetic construct
  misc_feature 1..22: note = chemically synthesized
  source 1..22: mol_type = other DNA
ttcttcttctggaagtctgtct

SEQ ID NO: 75953 - DNA, 22 bp, synthetic construct
  misc_feature 1..22: note = chemically synthesized
  source 1..22: mol_type = other DNA
cttcttctggaagtctgtctca

SEQ ID NO: 75954 - DNA, 22 bp, synthetic construct
  misc_feature 1..22: note = chemically synthesized
  source 1..22: mol_type = other DNA
ttcttctggaagtctgtctcag

SEQ ID NO: 75955 - DNA, 22 bp, synthetic construct
  misc_feature 1..22: note = chemically synthesized
  source 1..22: mol_type = other DNA
cttctggaagtctgtctcagac

SEQ ID NO: 75956 - DNA, 22 bp, synthetic construct
  misc_feature 1..22: note = chemically synthesized
  source 1..22: mol_type = other DNA
ttctggaagtctgtctcagacc

SEQ ID NO: 75957 - DNA, 22 bp, synthetic construct
  misc_feature 1..22: note = chemically synthesized
  source 1..22: mol_type = other DNA
ctggaagtctgtctcagaccat

SEQ ID NO: 75958 - DNA, 22 bp, synthetic construct
  misc_feature 1..22: note = chemically synthesized
  source 1..22: mol_type = other DNA
tggaagtctgtctcagaccatc

SEQ ID NO: 75959 - DNA, 22 bp, synthetic construct
  misc_feature 1..22: note = chemically synthesized
  source 1..22: mol_type = other DNA
gaagtctgtctcagaccatctt

SEQ ID NO: 75960 - DNA, 22 bp, synthetic construct
  misc_feature 1..22: note = chemically synthesized
  source 1..22: mol_type = other DNA
tctcagaccatctttgtgtgct

SEQ ID NO: 75961 - DNA, 22 bp, synthetic construct
  misc_feature 1..22: note = chemically synthesized
  source 1..22: mol_type = other DNA
agaccatctttgtgtgctcatc

SEQ ID NO: 75962 - DNA, 22 bp, synthetic construct
  misc_feature 1..22: note = chemically synthesized
  source 1..22: mol_type = other DNA
tgtgtgctcatcccccagtaaa

SEQ ID NO: 75963 - DNA, 22 bp, synthetic construct
  misc_feature 1..22: note = chemically synthesized
  source 1..22: mol_type = other DNA
gtgtgctcatcccccagtaaaa

SEQ ID NO: 75964 - DNA, 22 bp, synthetic construct
  misc_feature 1..22: note = chemically synthesized
  source 1..22: mol_type = other DNA
tgtgctcatcccccagtaaaac

SEQ ID NO: 75965 - DNA, 22 bp, synthetic construct
  misc_feature 1..22: note = chemically synthesized
  source 1..22: mol_type = other DNA
atcccccagtaaaactcatagt

SEQ ID NO: 75966 - DNA, 22 bp, synthetic construct
  misc_feature 1..22: note = chemically synthesized
  source 1..22: mol_type = other DNA
atagtgaggtctgtagcattct

SEQ ID NO: 75967 - DNA, 22 bp, synthetic construct
  misc_feature 1..22: note = chemically synthesized
  source 1..22: mol_type = other DNA
tagcattctgaaacacgggatg

SEQ ID NO: 75968 - DNA, 22 bp, synthetic construct
  misc_feature 1..22: note = chemically synthesized
  source 1..22: mol_type = other DNA
tgaaacacgggatgaatttatt

SEQ ID NO: 75969 - DNA, 22 bp, synthetic construct
  misc_feature 1..22: note = chemically synthesized
  source 1..22: mol_type = other DNA
aaacacgggatgaatttattga

SEQ ID NO: 75970 - DNA, 22 bp, synthetic construct
  misc_feature 1..22: note = chemically synthesized
  source 1..22: mol_type = other DNA
attgagctcaaattggagaaaa

SEQ ID NO: 75971 - DNA, 22 bp, synthetic construct
  misc_feature 1..22: note = chemically synthesized
  source 1..22: mol_type = other DNA
ttgagctcaaattggagaaaaa

SEQ ID NO: 75972 - DNA, 22 bp, synthetic construct
  misc_feature 1..22: note = chemically synthesized
  source 1..22: mol_type = other DNA
agctcaaattggagaaaaaagt

SEQ ID NO: 75973 - DNA, 22 bp, synthetic construct
  misc_feature 1..22: note = chemically synthesized
  source 1..22: mol_type = other DNA
aaattggagaaaaaagtggcta

SEQ ID NO: 75974 - DNA, 22 bp, synthetic construct
  misc_feature 1..22: note = chemically synthesized
  source 1..22: mol_type = other DNA
gagaaaaaagtggctatccacc

SEQ ID NO: 75975 - DNA, 22 bp, synthetic construct
  misc_feature 1..22: note = chemically synthesized
  source 1..22: mol_type = other DNA
tccaccaatttaatattccttt

SEQ ID NO: 75976 - DNA, 22 bp, synthetic construct
  misc_feature 1..22: note = chemically synthesized
  source 1..22: mol_type = other DNA
aatattcctttatgaatgtgtg

SEQ ID NO: 75977 - DNA, 22 bp, synthetic construct
  misc_feature 1..22: note = chemically synthesized
  source 1..22: mol_type = other DNA
atattcctttatgaatgtgtgg

SEQ ID NO: 75978 - DNA, 22 bp, synthetic construct
  misc_feature 1..22: note = chemically synthesized
  source 1..22: mol_type = other DNA
ctttatgaatgtgtggagaagt

SEQ ID NO: 75979 - DNA, 22 bp, synthetic construct
  misc_feature 1..22: note = chemically synthesized
  source 1..22: mol_type = other DNA
tatgaatgtgtggagaagtagg

SEQ ID NO: 75980 - DNA, 22 bp, synthetic construct
  misc_feature 1..22: note = chemically synthesized
  source 1..22: mol_type = other DNA
atgaatgtgtggagaagtagga

SEQ ID NO: 75981 - DNA, 22 bp, synthetic construct
  misc_feature 1..22: note = chemically synthesized
  source 1..22: mol_type = other DNA
tgaatgtgtggagaagtaggag

SEQ ID NO: 75982 - DNA, 22 bp, synthetic construct
  misc_feature 1..22: note = chemically synthesized
  source 1..22: mol_type = other DNA
tgagcatgaaatgagggatttc

SEQ ID NO: 75983 - DNA, 22 bp, synthetic construct
  misc_feature 1..22: note = chemically synthesized
  source 1..22: mol_type = other DNA
cctagttgatagccaaaaccac

SEQ ID NO: 75984 - DNA, 22 bp, synthetic construct
  misc_feature 1..22: note = chemically synthesized
  source 1..22: mol_type = other DNA
ctagttgatagccaaaaccacg

SEQ ID NO: 75985 - DNA, 22 bp, synthetic construct
  misc_feature 1..22: note = chemically synthesized
  source 1..22: mol_type = other DNA
gttgatagccaaaaccacgagg

SEQ ID NO: 75986 - DNA, 22 bp, synthetic construct
  misc_feature 1..22: note = chemically synthesized
  source 1..22: mol_type = other DNA
atagccaaaaccacgagggacc

SEQ ID NO: 75987 - DNA, 22 bp, synthetic construct
  misc_feature 1..22: note = chemically synthesized
  source 1..22: mol_type = other DNA
taagtcagccctcttgggttca

SEQ ID NO: 75988 - DNA, 22 bp, synthetic construct
  misc_feature 1..22: note = chemically synthesized
  source 1..22: mol_type = other DNA
aagtcagccctcttgggttcac

SEQ ID NO: 75989 - DNA, 22 bp, synthetic construct
  misc_feature 1..22: note = chemically synthesized
  source 1..22: mol_type = other DNA
agtcagccctcttgggttcact

SEQ ID NO: 75990 - DNA, 22 bp, synthetic construct
  misc_feature 1..22: note = chemically synthesized
  source 1..22: mol_type = other DNA
ttgggttcactggcacctaata

SEQ ID NO: 75991 - DNA, 22 bp, synthetic construct
  misc_feature 1..22: note = chemically synthesized
  source 1..22: mol_type = other DNA
gggttcactggcacctaatatc

SEQ ID NO: 75992 - DNA, 22 bp, synthetic construct
  misc_feature 1..22: note = chemically synthesized
  source 1..22: mol_type = other DNA
ggttcactggcacctaatatcc

SEQ ID NO: 75993 - DNA, 22 bp, synthetic construct
  misc_feature 1..22: note = chemically synthesized
  source 1..22: mol_type = other DNA
actggcacctaatatccccgta

SEQ ID NO: 75994 - DNA, 22 bp, synthetic construct
  misc_feature 1..22: note = chemically synthesized
  source 1..22: mol_type = other DNA
gcacctaatatccccgtaatta

SEQ ID NO: 75995 - DNA, 22 bp, synthetic construct
  misc_feature 1..22: note = chemically synthesized
  source 1..22: mol_type = other DNA
atatccccgtaattatttctac

SEQ ID NO: 75996 - DNA, 22 bp, synthetic construct
  misc_feature 1..22: note = chemically synthesized
  source 1..22: mol_type = other DNA
tttctacacttgcagaaatctc

SEQ ID NO: 75997 - DNA, 22 bp, synthetic construct
  misc_feature 1..22: note = chemically synthesized
  source 1..22: mol_type = other DNA
ctacacttgcagaaatctcctt

SEQ ID NO: 75998 - DNA, 22 bp, synthetic construct
  misc_feature 1..22: note = chemically synthesized
  source 1..22: mol_type = other DNA
tacacttgcagaaatctccttt

SEQ ID NO: 75999 - DNA, 22 bp, synthetic construct
  misc_feature 1..22: note = chemically synthesized
  source 1..22: mol_type = other DNA
cacttgcagaaatctcctttct

SEQ ID NO: 76000 - DNA, 22 bp, synthetic construct
  misc_feature 1..22: note = chemically synthesized
  source 1..22: mol_type = other DNA
gcagaaatctcctttctctctt

SEQ ID NO: 76001 - DNA, 22 bp, synthetic construct
  misc_feature 1..22: note = chemically synthesized
  source 1..22: mol_type = other DNA
cagaaatctcctttctctcttt

SEQ ID NO: 76002 - DNA, 22 bp, synthetic construct
  misc_feature 1..22: note = chemically synthesized
  source 1..22: mol_type = other DNA
ctttctctctttttctcttttc

SEQ ID NO: 76003 - DNA, 22 bp, synthetic construct
  misc_feature 1..22: note = chemically synthesized
  source 1..22: mol_type = other DNA
tctctctttttctcttttccca

SEQ ID NO: 76004 - DNA, 22 bp, synthetic construct
  misc_feature 1..22: note = chemically synthesized
  source 1..22: mol_type = other DNA
ctctctttttctcttttcccac

SEQ ID NO: 76005 - DNA, 22 bp, synthetic construct
  misc_feature 1..22: note = chemically synthesized
  source 1..22: mol_type = other DNA
tctctttttctcttttcccaca

SEQ ID NO: 76006 - DNA, 22 bp, synthetic construct
  misc_feature 1..22: note = chemically synthesized
  source 1..22: mol_type = other DNA
tctttttctcttttcccacagg

SEQ ID NO: 76007 - DNA, 22 bp, synthetic construct
  misc_feature 1..22: note = chemically synthesized
  source 1..22: mol_type = other DNA
tttttctcttttcccacaggct

SEQ ID NO: 76008 - DNA, 22 bp, synthetic construct
  misc_feature 1..22: note = chemically synthesized
  source 1..22: mol_type = other DNA
tttctcttttcccacaggctaa

SEQ ID NO: 76009 - DNA, 22 bp, synthetic construct
  misc_feature 1..22: note = chemically synthesized
  source 1..22: mol_type = other DNA
ttctcttttcccacaggctaaa

SEQ ID NO: 76010 - DNA, 22 bp, synthetic construct
  misc_feature 1..22: note = chemically synthesized
  source 1..22: mol_type = other DNA
tctcttttcccacaggctaaat

SEQ ID NO: 76011 - DNA, 22 bp, synthetic construct
  misc_feature 1..22: note = chemically synthesized
  source 1..22: mol_type = other DNA
ctcttttcccacaggctaaatg

SEQ ID NO: 76012 - DNA, 22 bp, synthetic construct
  misc_feature 1..22: note = chemically synthesized
  source 1..22: mol_type = other DNA
tcttttcccacaggctaaatgc

SEQ ID NO: 76013 - DNA, 22 bp, synthetic construct
  misc_feature 1..22: note = chemically synthesized
  source 1..22: mol_type = other DNA
ttttcccacaggctaaatgcag

SEQ ID NO: 76014 - DNA, 22 bp, synthetic construct
  misc_feature 1..22: note = chemically synthesized
  source 1..22: mol_type = other DNA
ttcccacaggctaaatgcagaa

SEQ ID NO: 76015 - DNA, 22 bp, synthetic construct
  misc_feature 1..22: note = chemically synthesized
  source 1..22: mol_type = other DNA
tcccacaggctaaatgcagaat

SEQ ID NO: 76016 - DNA, 22 bp, synthetic construct
  misc_feature 1..22: note = chemically synthesized
  source 1..22: mol_type = other DNA
cccacaggctaaatgcagaata

SEQ ID NO: 76017 - DNA, 22 bp, synthetic construct
  misc_feature 1..22: note = chemically synthesized
  source 1..22: mol_type = other DNA
ccacaggctaaatgcagaataa

SEQ ID NO: 76018 - DNA, 22 bp, synthetic construct
  misc_feature 1..22: note = chemically synthesized
  source 1..22: mol_type = other DNA
aatgcagaataattcatatgca

SEQ ID NO: 76019 - DNA, 22 bp, synthetic construct
  misc_feature 1..22: note = chemically synthesized
  source 1..22: mol_type = other DNA
atatgcaaaaaatttttttaca

SEQ ID NO: 76020 - DNA, 22 bp, synthetic construct
  misc_feature 1..22: note = chemically synthesized
  source 1..22: mol_type = other DNA
ttttacaagctatgttcctttt

SEQ ID NO: 76021 - DNA, 22 bp, synthetic construct
  misc_feature 1..22: note = chemically synthesized
  source 1..22: mol_type = other DNA
tttacaagctatgttccttttc

SEQ ID NO: 76022 - DNA, 22 bp, synthetic construct
  misc_feature 1..22: note = chemically synthesized
  source 1..22: mol_type = other DNA
ttacaagctatgttccttttct

SEQ ID NO: 76023 - DNA, 22 bp, synthetic construct
  misc_feature 1..22: note = chemically synthesized
  source 1..22: mol_type = other DNA
tacaagctatgttccttttctg

SEQ ID NO: 76024 - DNA, 22 bp, synthetic construct
  misc_feature 1..22: note = chemically synthesized
  source 1..22: mol_type = other DNA
acaagctatgttccttttctgc

SEQ ID NO: 76025 - DNA, 22 bp, synthetic construct
  misc_feature 1..22: note = chemically synthesized
  source 1..22: mol_type = other DNA
caagctatgttccttttctgcc

SEQ ID NO: 76026 - DNA, 22 bp, synthetic construct
  misc_feature 1..22: note = chemically synthesized
  source 1..22: mol_type = other DNA
tgttccttttctgccatttcta

SEQ ID NO: 76027 - DNA, 22 bp, synthetic construct
  misc_feature 1..22: note = chemically synthesized
  source 1..22: mol_type = other DNA
cttttctgccatttctatttgc

SEQ ID NO: 76028 - DNA, 22 bp, synthetic construct
  misc_feature 1..22: note = chemically synthesized
  source 1..22: mol_type = other DNA
ttctgccatttctatttgcaaa

SEQ ID NO: 76029 - DNA, 22 bp, synthetic construct
  misc_feature 1..22: note = chemically synthesized
  source 1..22: mol_type = other DNA
tctgccatttctatttgcaaaa

SEQ ID NO: 76030 - DNA, 22 bp, synthetic construct
  misc_feature 1..22: note = chemically synthesized
  source 1..22: mol_type = other DNA
ctgccatttctatttgcaaaat

SEQ ID NO: 76031 - DNA, 22 bp, synthetic construct
  misc_feature 1..22: note = chemically synthesized
  source 1..22: mol_type = other DNA
tgccatttctatttgcaaaatt

SEQ ID NO: 76032 - DNA, 22 bp, synthetic construct
  misc_feature 1..22: note = chemically synthesized
  source 1..22: mol_type = other DNA
ccatttctatttgcaaaattct

SEQ ID NO: 76033 - DNA, 22 bp, synthetic construct
  misc_feature 1..22: note = chemically synthesized
  source 1..22: mol_type = other DNA
ctatttgcaaaattctaaagcc

SEQ ID NO: 76034 - DNA, 22 bp, synthetic construct
  misc_feature 1..22: note = chemically synthesized
  source 1..22: mol_type = other DNA
tatttgcaaaattctaaagccc

SEQ ID NO: 76035 - DNA, 22 bp, synthetic construct
  misc_feature 1..22: note = chemically synthesized
  source 1..22: mol_type = other DNA
tttgcaaaattctaaagcccat

SEQ ID NO: 76036 - DNA, 22 bp, synthetic construct
  misc_feature 1..22: note = chemically synthesized
  source 1..22: mol_type = other DNA
gcaaaattctaaagcccattta

SEQ ID NO: 76037 - DNA, 22 bp, synthetic construct
  misc_feature 1..22: note = chemically synthesized
  source 1..22: mol_type = other DNA
caaaattctaaagcccatttaa

SEQ ID NO: 76038 - DNA, 22 bp, synthetic construct
  misc_feature 1..22: note = chemically synthesized
  source 1..22: mol_type = other DNA
taaagcccatttaatgcaaaca

SEQ ID NO: 76039 - DNA, 22 bp, synthetic construct
  misc_feature 1..22: note = chemically synthesized
  source 1..22: mol_type = other DNA
aagcccatttaatgcaaacatg

SEQ ID NO: 76040 - DNA, 22 bp, synthetic construct
  misc_feature 1..22: note = chemically synthesized
  source 1..22: mol_type = other DNA
aatgcaaacatgtttctatgcc

SEQ ID NO: 76041 - DNA, 22 bp, synthetic construct
  misc_feature 1..22: note = chemically synthesized
  source 1..22: mol_type = other DNA
atgcaaacatgtttctatgcca

SEQ ID NO: 76042 - DNA, 22 bp, synthetic construct
  misc_feature 1..22: note = chemically synthesized
  source 1..22: mol_type = other DNA
ctatgccaattcctatttaaat

SEQ ID NO: 76043 - DNA, 22 bp, synthetic construct
  misc_feature 1..22: note = chemically synthesized
  source 1..22: mol_type = other DNA
tatgccaattcctatttaaata

SEQ ID NO: 76044 - DNA, 22 bp, synthetic construct
  misc_feature 1..22: note = chemically synthesized
  source 1..22: mol_type = other DNA
tgccaattcctatttaaataaa

SEQ ID NO: 76045 - DNA, 22 bp, synthetic construct
  misc_feature 1..22: note = chemically synthesized
  source 1..22: mol_type = other DNA
ctatttaaataaatatcttggt

SEQ ID NO: 76046 - DNA, 22 bp, synthetic construct
  misc_feature 1..22: note = chemically synthesized
  source 1..22: mol_type = other DNA
tttaaataaatatcttggtgac

SEQ ID NO: 76047 - DNA, 22 bp, synthetic construct
  misc_feature 1..22: note = chemically synthesized
  source 1..22: mol_type = other DNA
aaataaatatcttggtgacatt

SEQ ID NO: 76048 - DNA, 22 bp, synthetic construct
  misc_feature 1..22: note = chemically synthesized
  source 1..22: mol_type = other DNA
aataaatatcttggtgacattt

SEQ ID NO: 76049 - DNA, 22 bp, synthetic construct
  misc_feature 1..22: note = chemically synthesized
  source 1..22: mol_type = other DNA
ggtgacattttcactgaggcaa

SEQ ID NO: 76050 - DNA, 22 bp, synthetic construct
  misc_feature 1..22: note = chemically synthesized
  source 1..22: mol_type = other DNA
gtgacattttcactgaggcaag

SEQ ID NO: 76051 - DNA, 22 bp, synthetic construct
  misc_feature 1..22: note = chemically synthesized
  source 1..22: mol_type = other DNA
tcactgaggcaaggtttttctc

SEQ ID NO: 76052 - DNA, 22 bp, synthetic construct
  misc_feature 1..22: note = chemically synthesized
  source 1..22: mol_type = other DNA
cactgaggcaaggtttttctct

SEQ ID NO: 76053 - DNA, 22 bp, synthetic construct
  misc_feature 1..22: note = chemically synthesized
  source 1..22: mol_type = other DNA
actgaggcaaggtttttctctt

SEQ ID NO: 76054 - DNA, 22 bp, synthetic construct
  misc_feature 1..22: note = chemically synthesized
  source 1..22: mol_type = other DNA
aggcaaggtttttctcttttta

SEQ ID NO: 76055 - DNA, 22 bp, synthetic construct
  misc_feature 1..22: note = chemically synthesized
  source 1..22: mol_type = other DNA
ttctctttttattcagaaaaga

SEQ ID NO: 76056 - DNA, 22 bp, synthetic construct
  misc_feature 1..22: note = chemically synthesized
  source 1..22: mol_type = other DNA
tctctttttattcagaaaagaa

SEQ ID NO: 76057 - DNA, 22 bp, synthetic construct
  misc_feature 1..22: note = chemically synthesized
  source 1..22: mol_type = other DNA
ctctttttattcagaaaagaaa

SEQ ID NO: 76058 - DNA, 22 bp, synthetic construct
  misc_feature 1..22: note = chemically synthesized
  source 1..22: mol_type = other DNA
tctttttattcagaaaagaaaa

SEQ ID NO: 76059 - DNA, 22 bp, synthetic construct
  misc_feature 1..22: note = chemically synthesized
  source 1..22: mol_type = other DNA
tttttattcagaaaagaaaaat

SEQ ID NO: 76060 - DNA, 22 bp, synthetic construct
  misc_feature 1..22: note = chemically synthesized
  source 1..22: mol_type = other DNA
tttattcagaaaagaaaaatct

SEQ ID NO: 76061 - DNA, 22 bp, synthetic construct
  misc_feature 1..22: note = chemically synthesized
  source 1..22: mol_type = other DNA
ttattcagaaaagaaaaatctg

SEQ ID NO: 76062 - DNA, 22 bp, synthetic construct
  misc_feature 1..22: note = chemically synthesized
  source 1..22: mol_type = other DNA
tattcagaaaagaaaaatctgt

SEQ ID NO: 76063 - DNA, 22 bp, synthetic construct
  misc_feature 1..22: note = chemically synthesized
  source 1..22: mol_type = other DNA
attcagaaaagaaaaatctgta

SEQ ID NO: 76064 - DNA, 22 bp, synthetic construct
  misc_feature 1..22: note = chemically synthesized
  source 1..22: mol_type = other DNA
ttcagaaaagaaaaatctgtat

SEQ ID NO: 76065 - DNA, 22 bp, synthetic construct
  misc_feature 1..22: note = chemically synthesized
  source 1..22: mol_type = other DNA
agaaaagaaaaatctgtattca

SEQ ID NO: 76066 - DNA, 22 bp, synthetic construct
  misc_feature 1..22: note = chemically synthesized
  source 1..22: mol_type = other DNA
tattcataactactttttacca

SEQ ID NO: 76067 - DNA, 22 bp, synthetic construct
  misc_feature 1..22: note = chemically synthesized
  source 1..22: mol_type = other DNA
ataactactttttaccacacaa

SEQ ID NO: 76068 - DNA, 22 bp, synthetic construct
  misc_feature 1..22: note = chemically synthesized
  source 1..22: mol_type = other DNA
ctttttaccacacaattacttc

SEQ ID NO: 76069 - DNA, 22 bp, synthetic construct
  misc_feature 1..22: note = chemically synthesized
  source 1..22: mol_type = other DNA
tttaccacacaattacttcctc

SEQ ID NO: 76070 - DNA, 22 bp, synthetic construct
  misc_feature 1..22: note = chemically synthesized
  source 1..22: mol_type = other DNA
ttaccacacaattacttcctca

SEQ ID NO: 76071 - DNA, 22 bp, synthetic construct
  misc_feature 1..22: note = chemically synthesized
  source 1..22: mol_type = other DNA
taccacacaattacttcctcag

SEQ ID NO: 76072 - DNA, 22 bp, synthetic construct
  misc_feature 1..22: note = chemically synthesized
  source 1..22: mol_type = other DNA
accacacaattacttcctcagt

SEQ ID NO: 76073 - DNA, 22 bp, synthetic construct
  misc_feature 1..22: note = chemically synthesized
  source 1..22: mol_type = other DNA
ccacacaattacttcctcagtc

SEQ ID NO: 76074 - DNA, 22 bp, synthetic construct
  misc_feature 1..22: note = chemically synthesized
  source 1..22: mol_type = other DNA
cttcctcagtcttcttcagtct

SEQ ID NO: 76075 - DNA, 22 bp, synthetic construct
  misc_feature 1..22: note = chemically synthesized
  source 1..22: mol_type = other DNA
cctcagtcttcttcagtctcat

SEQ ID NO: 76076 - DNA, 22 bp, synthetic construct
  misc_feature 1..22: note = chemically synthesized
  source 1..22: mol_type = other DNA
ctcagtcttcttcagtctcatt

SEQ ID NO: 76077 - DNA, 22 bp, synthetic construct
  misc_feature 1..22: note = chemically synthesized
  source 1..22: mol_type = other DNA
agtcttcttcagtctcattctt

SEQ ID NO: 76078 - DNA, 22 bp, synthetic construct
  misc_feature 1..22: note = chemically synthesized
  source 1..22: mol_type = other DNA
cttcagtctcattcttcccatt

SEQ ID NO: 76079 - DNA, 22 bp, synthetic construct
  misc_feature 1..22: note = chemically synthesized
  source 1..22: mol_type = other DNA
ttcagtctcattcttcccattt

SEQ ID NO: 76080 - DNA, 22 bp, synthetic construct
  misc_feature 1..22: note = chemically synthesized
  source 1..22: mol_type = other DNA
cagtctcattcttcccatttta

SEQ ID NO: 76081 - DNA, 22 bp, synthetic construct
  misc_feature 1..22: note = chemically synthesized
  source 1..22: mol_type = other DNA
agtctcattcttcccattttat

SEQ ID NO: 76082 - DNA, 22 bp, synthetic construct
  misc_feature 1..22: note = chemically synthesized
  source 1..22: mol_type = other DNA
attcttcccattttattttatt

SEQ ID NO: 76083 - DNA, 22 bp, synthetic construct
  misc_feature 1..22: note = chemically synthesized
  source 1..22: mol_type = other DNA
ttcccattttattttattgaag

SEQ ID NO: 76084 - DNA, 22 bp, synthetic construct
  misc_feature 1..22: note = chemically synthesized
  source 1..22: mol_type = other DNA
cccattttattttattgaagtt

SEQ ID NO: 76085 - DNA, 22 bp, synthetic construct
  misc_feature 1..22: note = chemically synthesized
  source 1..22: mol_type = other DNA
ccattttattttattgaagttt

SEQ ID NO: 76086 - DNA, 22 bp, synthetic construct
  misc_feature 1..22: note = chemically synthesized
  source 1..22: mol_type = other DNA
tattttattgaagtttttttta

SEQ ID NO: 76087 - DNA, 22 bp, synthetic construct
  misc_feature 1..22: note = chemically synthesized
  source 1..22: mol_type = other DNA
attttattgaagttttttttat

SEQ ID NO: 76088 - DNA, 22 bp, synthetic construct
  misc_feature 1..22: note = chemically synthesized
  source 1..22: mol_type = other DNA
ttttattgaagttttttttatc

SEQ ID NO: 76089 - DNA, 22 bp, synthetic construct
  misc_feature 1..22: note = chemically synthesized
  source 1..22: mol_type = other DNA
tattgaagttttttttatcttt

SEQ ID NO: 76090 - DNA, 22 bp, synthetic construct
  misc_feature 1..22: note = chemically synthesized
  source 1..22: mol_type = other DNA
attgaagttttttttatctttt

SEQ ID NO: 76091 - DNA, 22 bp, synthetic construct
  misc_feature 1..22: note = chemically synthesized
  source 1..22: mol_type = other DNA
ttgaagttttttttatctttta

SEQ ID NO: 76092 - DNA, 22 bp, synthetic construct
  misc_feature 1..22: note = chemically synthesized
  source 1..22: mol_type = other DNA
aagttttttttatcttttagta

SEQ ID NO: 76093 - DNA, 22 bp, synthetic construct
  misc_feature 1..22: note = chemically synthesized
  source 1..22: mol_type = other DNA
tttttatcttttagtaaattaa

SEQ ID NO: 76094 - DNA, 22 bp, synthetic construct
  misc_feature 1..22: note = chemically synthesized
  source 1..22: mol_type = other DNA
ttttatcttttagtaaattaag

SEQ ID NO: 76095 - DNA, 22 bp, synthetic construct
  misc_feature 1..22: note = chemically synthesized
  source 1..22: mol_type = other DNA
tttatcttttagtaaattaagt

SEQ ID NO: 76096 - DNA, 22 bp, synthetic construct
  misc_feature 1..22: note = chemically synthesized
  source 1..22: mol_type = other DNA
ttatcttttagtaaattaagta

SEQ ID NO: 76097 - DNA, 22 bp, synthetic construct
  misc_feature 1..22: note = chemically synthesized
  source 1..22: mol_type = other DNA
tatcttttagtaaattaagtaa

SEQ ID NO: 76098 - DNA, 22 bp, synthetic construct
  misc_feature 1..22: note = chemically synthesized
  source 1..22: mol_type = other DNA
atcttttagtaaattaagtaac

SEQ ID NO: 76099 - DNA, 22 bp, synthetic construct
  misc_feature 1..22: note = chemically synthesized
  source 1..22: mol_type = other DNA
tcttttagtaaattaagtaaca

SEQ ID NO: 76100 - DNA, 22 bp, synthetic construct
  misc_feature 1..22: note = chemically synthesized
  source 1..22: mol_type = other DNA
ttagtaaattaagtaacattct

SEQ ID NO: 76101 - DNA, 22 bp, synthetic construct
  misc_feature 1..22: note = chemically synthesized
  source 1..22: mol_type = other DNA
tagtaaattaagtaacattctt

SEQ ID NO: 76102 - DNA, 22 bp, synthetic construct
  misc_feature 1..22: note = chemically synthesized
  source 1..22: mol_type = other DNA
agtaaattaagtaacattctta

SEQ ID NO: 76103 - DNA, 22 bp, synthetic construct
  misc_feature 1..22: note = chemically synthesized
  source 1..22: mol_type = other DNA
gtaaattaagtaacattcttat

SEQ ID NO: 76104 - DNA, 22 bp, synthetic construct
  misc_feature 1..22: note = chemically synthesized
  source 1..22: mol_type = other DNA
agtaacattcttatagtgacaa

SEQ ID NO: 76105 - DNA, 22 bp, synthetic construct
  misc_feature 1..22: note = chemically synthesized
  source 1..22: mol_type = other DNA
ttatagtgacaaattataatgg

SEQ ID NO: 76106 - DNA, 22 bp, synthetic construct
  misc_feature 1..22: note = chemically synthesized
  source 1..22: mol_type = other DNA
atagtgacaaattataatggac

SEQ ID NO: 76107 - DNA, 22 bp, synthetic construct
  misc_feature 1..22: note = chemically synthesized
  source 1..22: mol_type = other DNA
tagtgacaaattataatggaca

SEQ ID NO: 76108 - DNA, 22 bp, synthetic construct
  misc_feature 1..22: note = chemically synthesized
  source 1..22: mol_type = other DNA
taatggacatttctaagtccta

SEQ ID NO: 76109 - DNA, 22 bp, synthetic construct
  misc_feature 1..22: note = chemically synthesized
  source 1..22: mol_type = other DNA
ctaagtcctacaaatgtaaagc

SEQ ID NO: 76110 - DNA, 22 bp, synthetic construct
  misc_feature 1..22: note = chemically synthesized
  source 1..22: mol_type = other DNA
taagtcctacaaatgtaaagct

SEQ ID NO: 76111 - DNA, 22 bp, synthetic construct
  misc_feature 1..22: note = chemically synthesized
  source 1..22: mol_type = other DNA
agtcctacaaatgtaaagctgg

SEQ ID NO: 76112 - DNA, 22 bp, synthetic construct
  misc_feature 1..22: note = chemically synthesized
  source 1..22: mol_type = other DNA
caaatgtaaagctggaagcaag

SEQ ID NO: 76113 - DNA, 22 bp, synthetic construct
  misc_feature 1..22: note = chemically synthesized
  source 1..22: mol_type = other DNA
gaagcaagttgttgaacatttg

SEQ ID NO: 76114 - DNA, 22 bp, synthetic construct
  misc_feature 1..22: note = chemically synthesized
  source 1..22: mol_type = other DNA
ttgaacatttgagtaaactggt

SEQ ID NO: 76115 - DNA, 22 bp, synthetic construct
  misc_feature 1..22: note = chemically synthesized
  source 1..22: mol_type = other DNA
aacatttgagtaaactggtatc

SEQ ID NO: 76116 - DNA, 22 bp, synthetic construct
  misc_feature 1..22: note = chemically synthesized
  source 1..22: mol_type = other DNA
gagtaaactggtatccatttcc

SEQ ID NO: 76117 - DNA, 22 bp, synthetic construct
  misc_feature 1..22: note = chemically synthesized
  source 1..22: mol_type = other DNA
agtaaactggtatccatttcct

SEQ ID NO: 76118 - DNA, 22 bp, synthetic construct
  misc_feature 1..22: note = chemically synthesized
  source 1..22: mol_type = other DNA
gtatccatttcctcttttctct

SEQ ID NO: 76119 - DNA, 22 bp, synthetic construct
  misc_feature 1..22: note = chemically synthesized
  source 1..22: mol_type = other DNA
cctcttttctctctttcttcct

SEQ ID NO: 76120 - DNA, 22 bp, synthetic construct
  misc_feature 1..22: note = chemically synthesized
  source 1..22: mol_type = other DNA
ctcttttctctctttcttcctt

SEQ ID NO: 76121 - DNA, 22 bp, synthetic construct
  misc_feature 1..22: note = chemically synthesized
  source 1..22: mol_type = other DNA
ttttctctctttcttccttgtt

SEQ ID NO: 76122 - DNA, 22 bp, synthetic construct
  misc_feature 1..22: note = chemically synthesized
  source 1..22: mol_type = other DNA
ttctctctttcttccttgttac

SEQ ID NO: 76123 - DNA, 22 bp, synthetic construct
  misc_feature 1..22: note = chemically synthesized
  source 1..22: mol_type = other DNA
tctctctttcttccttgttact

SEQ ID NO: 76124 - DNA, 22 bp, synthetic construct
  misc_feature 1..22: note = chemically synthesized
  source 1..22: mol_type = other DNA
ctctctttcttccttgttactt

SEQ ID NO: 76125 - DNA, 22 bp, synthetic construct
  misc_feature 1..22: note = chemically synthesized
  source 1..22: mol_type = other DNA
tctctttcttccttgttacttt

SEQ ID NO: 76126 - DNA, 22 bp, synthetic construct
  misc_feature 1..22: note = chemically synthesized
  source 1..22: mol_type = other DNA
tctttcttccttgttactttcc

SEQ ID NO: 76127 - DNA, 22 bp, synthetic construct
  misc_feature 1..22: note = chemically synthesized
  source 1..22: mol_type = other DNA
tttcttccttgttactttcctt

SEQ ID NO: 76128 - DNA, 22 bp, synthetic construct
  misc_feature 1..22: note = chemically synthesized
  source 1..22: mol_type = other DNA
tcttccttgttactttccttcc

SEQ ID NO: 76129 - DNA, 22 bp, synthetic construct
  misc_feature 1..22: note = chemically synthesized
  source 1..22: mol_type = other DNA
cttccttgttactttccttcct

SEQ ID NO: 76130 - DNA, 22 bp, synthetic construct
  misc_feature 1..22: note = chemically synthesized
  source 1..22: mol_type = other DNA
ttccttgttactttccttcctt

SEQ ID NO: 76131 - DNA, 22 bp, synthetic construct
  misc_feature 1..22: note = chemically synthesized
  source 1..22: mol_type = other DNA
ccttgttactttccttccttct

SEQ ID NO: 76132 - DNA, 22 bp, synthetic construct
  misc_feature 1..22: note = chemically synthesized
  source 1..22: mol_type = other DNA
cttgttactttccttccttctt

SEQ ID NO: 76133 - DNA, 22 bp, synthetic construct
  misc_feature 1..22: note = chemically synthesized
  source 1..22: mol_type = other DNA
gttactttccttccttcttttt

SEQ ID NO: 76134 - DNA, 22 bp, synthetic construct
  misc_feature 1..22: note = chemically synthesized
  source 1..22: mol_type = other DNA
ttactttccttccttctttttc

SEQ ID NO: 76135 - DNA, 22 bp, synthetic construct
  misc_feature 1..22: note = chemically synthesized
  source 1..22: mol_type = other DNA
ctttccttccttctttttcttt

SEQ ID NO: 76136 - DNA, 22 bp, synthetic construct
  misc_feature 1..22: note = chemically synthesized
  source 1..22: mol_type = other DNA
tccttccttctttttctttcaa

SEQ ID NO: 76137 - DNA, 22 bp, synthetic construct
  misc_feature 1..22: note = chemically synthesized
  source 1..22: mol_type = other DNA
ccttccttctttttctttcaaa

SEQ ID NO: 76138 - DNA, 22 bp, synthetic construct
  misc_feature 1..22: note = chemically synthesized
  source 1..22: mol_type = other DNA
cttccttctttttctttcaaaa

SEQ ID NO: 76139 - DNA, 22 bp, synthetic construct
  misc_feature 1..22: note = chemically synthesized
  source 1..22: mol_type = other DNA
ccttctttttctttcaaaaaac

SEQ ID NO: 76140 - DNA, 22 bp, synthetic construct
  misc_feature 1..22: note = chemically synthesized
  source 1..22: mol_type = other DNA
cttctttttctttcaaaaaaca

SEQ ID NO: 76141 - DNA, 22 bp, synthetic construct
  misc_feature 1..22: note = chemically synthesized
  source 1..22: mol_type = other DNA
ctttttctttcaaaaaacagtc

SEQ ID NO: 76142 - DNA, 22 bp, synthetic construct
  misc_feature 1..22: note = chemically synthesized
  source 1..22: mol_type = other DNA
tttttctttcaaaaaacagtca

SEQ ID NO: 76143 - DNA, 22 bp, synthetic construct
  misc_feature 1..22: note = chemically synthesized
  source 1..22: mol_type = other DNA
tttctttcaaaaaacagtcatt

SEQ ID NO: 76144 - DNA, 22 bp, synthetic construct
  misc_feature 1..22: note = chemically synthesized
  source 1..22: mol_type = other DNA
ttctttcaaaaaacagtcatta

SEQ ID NO: 76145 - DNA, 22 bp, synthetic construct
  misc_feature 1..22: note = chemically synthesized
  source 1..22: mol_type = other DNA
tctttcaaaaaacagtcattat

SEQ ID NO: 76146 - DNA, 22 bp, synthetic construct
  misc_feature 1..22: note = chemically synthesized
  source 1..22: mol_type = other DNA
ctttcaaaaaacagtcattata

SEQ ID NO: 76147 - DNA, 22 bp, synthetic construct
  misc_feature 1..22: note = chemically synthesized
  source 1..22: mol_type = other DNA
tttcaaaaaacagtcattatat

SEQ ID NO: 76148 - DNA, 22 bp, synthetic construct
  misc_feature 1..22: note = chemically synthesized
  source 1..22: mol_type = other DNA
tcaaaaaacagtcattatattc

SEQ ID NO: 76149 - DNA, 22 bp, synthetic construct
  misc_feature 1..22: note = chemically synthesized
  source 1..22: mol_type = other DNA
caaaaaacagtcattatattcc

SEQ ID NO: 76150 - DNA, 22 bp, synthetic construct
  misc_feature 1..22: note = chemically synthesized
  source 1..22: mol_type = other DNA
aaaaaacagtcattatattcct

SEQ ID NO: 76151 - DNA, 22 bp, synthetic construct
  misc_feature 1..22: note = chemically synthesized
  source 1..22: mol_type = other DNA
tattcctactatttatgagtga

SEQ ID NO: 76152 - DNA, 22 bp, synthetic construct
  misc_feature 1..22: note = chemically synthesized
  source 1..22: mol_type = other DNA
ctactatttatgagtgagatgt

SEQ ID NO: 76153 - DNA, 22 bp, synthetic construct
  misc_feature 1..22: note = chemically synthesized
  source 1..22: mol_type = other DNA
ctatttatgagtgagatgttat

SEQ ID NO: 76154 - DNA, 22 bp, synthetic construct
  misc_feature 1..22: note = chemically synthesized
  source 1..22: mol_type = other DNA
tttatgagtgagatgttatata

SEQ ID NO: 76155 - DNA, 22 bp, synthetic construct
  misc_feature 1..22: note = chemically synthesized
  source 1..22: mol_type = other DNA
atgagtgagatgttatatattc

SEQ ID NO: 76156 - DNA, 22 bp, synthetic construct
  misc_feature 1..22: note = chemically synthesized
  source 1..22: mol_type = other DNA
tgagtgagatgttatatattct

SEQ ID NO: 76157 - DNA, 22 bp, synthetic construct
  misc_feature 1..22: note = chemically synthesized
  source 1..22: mol_type = other DNA
tatattctaaatgaaatgaaaa

SEQ ID NO: 76158 - DNA, 22 bp, synthetic construct
  misc_feature 1..22: note = chemically synthesized
  source 1..22: mol_type = other DNA
taaatgaaatgaaaaaaattat

SEQ ID NO: 76159 - DNA, 22 bp, synthetic construct
  misc_feature 1..22: note = chemically synthesized
  source 1..22: mol_type = other DNA
aatgaaatgaaaaaaattatag

SEQ ID NO: 76160 - DNA, 22 bp, synthetic construct
  misc_feature 1..22: note = chemically synthesized
  source 1..22: mol_type = other DNA
tagtcttacctttaaattatta

SEQ ID NO: 76161 - DNA, 22 bp, synthetic construct
  misc_feature 1..22: note = chemically synthesized
  source 1..22: mol_type = other DNA
acctttaaattattagtaaaat

SEQ ID NO: 76162 - DNA, 22 bp, synthetic construct
  misc_feature 1..22: note = chemically synthesized
  source 1..22: mol_type = other DNA
cctttaaattattagtaaaatg

SEQ ID NO: 76163 - DNA, 22 bp, synthetic construct
  misc_feature 1..22: note = chemically synthesized
  source 1..22: mol_type = other DNA
taaattattagtaaaatgggat

SEQ ID NO: 76164 - DNA, 22 bp, synthetic construct
  misc_feature 1..22: note = chemically synthesized
  source 1..22: mol_type = other DNA
aaattattagtaaaatgggatt

SEQ ID NO: 76165 - DNA, 22 bp, synthetic construct
  misc_feature 1..22: note = chemically synthesized
  source 1..22: mol_type = other DNA
aattattagtaaaatgggatta

SEQ ID NO: 76166 - DNA, 22 bp, synthetic construct
  misc_feature 1..22: note = chemically synthesized
  source 1..22: mol_type = other DNA
ttagtaaaatgggattatgcat

SEQ ID NO: 76167 - DNA, 22 bp, synthetic construct
  misc_feature 1..22: note = chemically synthesized
  source 1..22: mol_type = other DNA
gtaaaatgggattatgcattac

SEQ ID NO: 76168 - DNA, 22 bp, synthetic construct
  misc_feature 1..22: note = chemically synthesized
  source 1..22: mol_type = other DNA
tgcattacaatttcatttatca

SEQ ID NO: 76169 - DNA, 22 bp, synthetic construct
  misc_feature 1..22: note = chemically synthesized
  source 1..22: mol_type = other DNA
caatttcatttatcacgtaagt

SEQ ID NO: 76170 - DNA, 22 bp, synthetic construct
  misc_feature 1..22: note = chemically synthesized
  source 1..22: mol_type = other DNA
catttatcacgtaagtatctga

SEQ ID NO: 76171 - DNA, 22 bp, synthetic construct
  misc_feature 1..22: note = chemically synthesized
  source 1..22: mol_type = other DNA
atttatcacgtaagtatctgat

SEQ ID NO: 76172 - DNA, 22 bp, synthetic construct
  misc_feature 1..22: note = chemically synthesized
  source 1..22: mol_type = other DNA
atcacgtaagtatctgataaat

SEQ ID NO: 76173 - DNA, 22 bp, synthetic construct
  misc_feature 1..22: note = chemically synthesized
  source 1..22: mol_type = other DNA
tcacgtaagtatctgataaatt

SEQ ID NO: 76174 - DNA, 22 bp, synthetic construct
  misc_feature 1..22: note = chemically synthesized
  source 1..22: mol_type = other DNA
ataaattctaagcaagacttat

SEQ ID NO: 76175 - DNA, 22 bp, synthetic construct
  misc_feature 1..22: note = chemically synthesized
  source 1..22: mol_type = other DNA
taagcaagacttatgcatatga

SEQ ID NO: 76176 - DNA, 22 bp, synthetic construct
  misc_feature 1..22: note = chemically synthesized
  source 1..22: mol_type = other DNA
agcaagacttatgcatatgaca

SEQ ID NO: 76177 - DNA, 22 bp, synthetic construct
  misc_feature 1..22: note = chemically synthesized
  source 1..22: mol_type = other DNA
atgcatatgacactattctcct

SEQ ID NO: 76178 - DNA, 22 bp, synthetic construct
  misc_feature 1..22: note = chemically synthesized
  source 1..22: mol_type = other DNA
tgcatatgacactattctcctt

SEQ ID NO: 76179 - DNA, 22 bp, synthetic construct
  misc_feature 1..22: note = chemically synthesized
  source 1..22: mol_type = other DNA
ttctccttgacattttacagct

SEQ ID NO: 76180 - DNA, 22 bp, synthetic construct
  misc_feature 1..22: note = chemically synthesized
  source 1..22: mol_type = other DNA
tccttgacattttacagctggt

SEQ ID NO: 76181 - DNA, 22 bp, synthetic construct
  misc_feature 1..22: note = chemically synthesized
  source 1..22: mol_type = other DNA
cttgacattttacagctggttt

SEQ ID NO: 76182 - DNA, 22 bp, synthetic construct
  misc_feature 1..22: note = chemically synthesized
  source 1..22: mol_type = other DNA
gacattttacagctggtttcta

SEQ ID NO: 76183 - DNA, 22 bp, synthetic construct
  misc_feature 1..22: note = chemically synthesized
  source 1..22: mol_type = other DNA
acattttacagctggtttctag

SEQ ID NO: 76184 - DNA, 22 bp, synthetic construct
  misc_feature 1..22: note = chemically synthesized
  source 1..22: mol_type = other DNA
tacagctggtttctaggctttc

SEQ ID NO: 76185 - DNA, 22 bp, synthetic construct
  misc_feature 1..22: note = chemically synthesized
  source 1..22: mol_type = other DNA
acagctggtttctaggctttct

SEQ ID NO: 76186 - DNA, 22 bp, synthetic construct
  misc_feature 1..22: note = chemically synthesized
  source 1..22: mol_type = other DNA
cagctggtttctaggctttctt

SEQ ID NO: 76187 - DNA, 22 bp, synthetic construct
  misc_feature 1..22: note = chemically synthesized
  source 1..22: mol_type = other DNA
gtttctaggctttcttgaatgt

SEQ ID NO: 76188 - DNA, 22 bp, synthetic construct
  misc_feature 1..22: note = chemically synthesized
  source 1..22: mol_type = other DNA
ctaggctttcttgaatgtagct

SEQ ID NO: 76189 - DNA, 22 bp, synthetic construct
  misc_feature 1..22: note = chemically synthesized
  source 1..22: mol_type = other DNA
taggctttcttgaatgtagcta

SEQ ID NO: 76190 - DNA, 22 bp, synthetic construct
  misc_feature 1..22: note = chemically synthesized
  source 1..22: mol_type = other DNA
ggctttcttgaatgtagctaag

SEQ ID NO: 76191 - DNA, 22 bp, synthetic construct
  misc_feature 1..22: note = chemically synthesized
  source 1..22: mol_type = other DNA
tcttgaatgtagctaagagaca

SEQ ID NO: 76192 - DNA, 22 bp, synthetic construct
  misc_feature 1..22: note = chemically synthesized
  source 1..22: mol_type = other DNA
cttgaatgtagctaagagacac

SEQ ID NO: 76193 - DNA, 22 bp, synthetic construct
  misc_feature 1..22: note = chemically synthesized
  source 1..22: mol_type = other DNA
ttgaatgtagctaagagacact

SEQ ID NO: 76194 - DNA, 22 bp, synthetic construct
  misc_feature 1..22: note = chemically synthesized
  source 1..22: mol_type = other DNA
gaatgtagctaagagacacttg

SEQ ID NO: 76195 - DNA, 22 bp, synthetic construct
  misc_feature 1..22: note = chemically synthesized
  source 1..22: mol_type = other DNA
aatgtagctaagagacacttga

SEQ ID NO: 76196 - DNA, 22 bp, synthetic construct
  misc_feature 1..22: note = chemically synthesized
  source 1..22: mol_type = other DNA
agagacacttgatataatgttt

SEQ ID NO: 76197 - DNA, 22 bp, synthetic construct
  misc_feature 1..22: note = chemically synthesized
  source 1..22: mol_type = other DNA
gatataatgtttagacattggc

SEQ ID NO: 76198 - DNA, 22 bp, synthetic construct
  misc_feature 1..22: note = chemically synthesized
  source 1..22: mol_type = other DNA
atataatgtttagacattggca

SEQ ID NO: 76199 - DNA, 22 bp, synthetic construct
  misc_feature 1..22: note = chemically synthesized
  source 1..22: mol_type = other DNA
agacattggcaaatttaggaag

SEQ ID NO: 76200 - DNA, 22 bp, synthetic construct
  misc_feature 1..22: note = chemically synthesized
  source 1..22: mol_type = other DNA
gacattggcaaatttaggaagc

SEQ ID NO: 76201 - DNA, 22 bp, synthetic construct
  misc_feature 1..22: note = chemically synthesized
  source 1..22: mol_type = other DNA
gcaaatttaggaagcatactaa

SEQ ID NO: 76202 - DNA, 22 bp, synthetic construct
  misc_feature 1..22: note = chemically synthesized
  source 1..22: mol_type = other DNA
aggaagcatactaatggtggag

SEQ ID NO: 76203 - DNA, 22 bp, synthetic construct
  misc_feature 1..22: note = chemically synthesized
  source 1..22: mol_type = other DNA
ggaagcatactaatggtggaga

SEQ ID NO: 76204 - DNA, 22 bp, synthetic construct
  misc_feature 1..22: note = chemically synthesized
  source 1..22: mol_type = other DNA
atggtggagaatatttataatg

SEQ ID NO: 76205 - DNA, 22 bp, synthetic construct
  misc_feature 1..22: note = chemically synthesized
  source 1..22: mol_type = other DNA
ataatggatttccaggagaaca

SEQ ID NO: 76206 - DNA, 22 bp, synthetic construct
  misc_feature 1..22: note = chemically synthesized
  source 1..22: mol_type = other DNA
taatggatttccaggagaacaa

SEQ ID NO: 76207 - DNA, 22 bp, synthetic construct
  misc_feature 1..22: note = chemically synthesized
  source 1..22: mol_type = other DNA
ccaggagaacaaggaatacaga

SEQ ID NO: 76208 - DNA, 22 bp, synthetic construct
  misc_feature 1..22: note = chemically synthesized
  source 1..22: mol_type = other DNA
caggagaacaaggaatacagat

SEQ ID NO: 76209 - DNA, 22 bp, synthetic construct
  misc_feature 1..22: note = chemically synthesized
  source 1..22: mol_type = other DNA
tttccagaatttcctctgtgaa

SEQ ID NO: 76210 - DNA, 22 bp, synthetic construct
  misc_feature 1..22: note = chemically synthesized
  source 1..22: mol_type = other DNA
tccagaatttcctctgtgaagg

SEQ ID NO: 76211 - DNA, 22 bp, synthetic construct
  misc_feature 1..22: note = chemically synthesized
  source 1..22: mol_type = other DNA
ccagaatttcctctgtgaagga

SEQ ID NO: 76212 - DNA, 22 bp, synthetic construct
  misc_feature 1..22: note = chemically synthesized
  source 1..22: mol_type = other DNA
cagaatttcctctgtgaaggag

SEQ ID NO: 76213 - DNA, 22 bp, synthetic construct
  misc_feature 1..22: note = chemically synthesized
  source 1..22: mol_type = other DNA
cctctgtgaaggagcataaaac

SEQ ID NO: 76214 - DNA, 22 bp, synthetic construct
  misc_feature 1..22: note = chemically synthesized
  source 1..22: mol_type = other DNA
ctctgtgaaggagcataaaaca

SEQ ID NO: 76215 - DNA, 22 bp, synthetic construct
  misc_feature 1..22: note = chemically synthesized
  source 1..22: mol_type = other DNA
tgtgaaggagcataaaacaata

SEQ ID NO: 76216 - DNA, 22 bp, synthetic construct
  misc_feature 1..22: note = chemically synthesized
  source 1..22: mol_type = other DNA
tgaaggagcataaaacaatagt

SEQ ID NO: 76217 - DNA, 22 bp, synthetic construct
  misc_feature 1..22: note = chemically synthesized
  source 1..22: mol_type = other DNA
ttgcatgttgaatgaaattgat

SEQ ID NO: 76218 - DNA, 22 bp, synthetic construct
  misc_feature 1..22: note = chemically synthesized
  source 1..22: mol_type = other DNA
catgttgaatgaaattgattca

SEQ ID NO: 76219 - DNA, 22 bp, synthetic construct
  misc_feature 1..22: note = chemically synthesized
  source 1..22: mol_type = other DNA
aatgaaattgattcagagagca

SEQ ID NO: 76220 - DNA, 22 bp, synthetic construct
  misc_feature 1..22: note = chemically synthesized
  source 1..22: mol_type = other DNA
attcagagagcatataggcagc

SEQ ID NO: 76221 - DNA, 22 bp, synthetic construct
  misc_feature 1..22: note = chemically synthesized
  source 1..22: mol_type = other DNA
agagagcatataggcagctaat

SEQ ID NO: 76222 - DNA, 22 bp, synthetic construct
  misc_feature 1..22: note = chemically synthesized
  source 1..22: mol_type = other DNA
atctaatattcaggttattctt

SEQ ID NO: 76223 - DNA, 22 bp, synthetic construct
  misc_feature 1..22: note = chemically synthesized
  source 1..22: mol_type = other DNA
atattcaggttattcttttgtc

SEQ ID NO: 76224 - DNA, 22 bp, synthetic construct
  misc_feature 1..22: note = chemically synthesized
  source 1..22: mol_type = other DNA
aggttattcttttgtcactaag

SEQ ID NO: 76225 - DNA, 22 bp, synthetic construct
  misc_feature 1..22: note = chemically synthesized
  source 1..22: mol_type = other DNA
ttcttttgtcactaagaaacaa

SEQ ID NO: 76226 - DNA, 22 bp, synthetic construct
  misc_feature 1..22: note = chemically synthesized
  source 1..22: mol_type = other DNA
ttttgtcactaagaaacaattt

SEQ ID NO: 76227 - DNA, 22 bp, synthetic construct
  misc_feature 1..22: note = chemically synthesized
  source 1..22: mol_type = other DNA
ttgtcactaagaaacaatttag

SEQ ID NO: 76228 - DNA, 22 bp, synthetic construct
  misc_feature 1..22: note = chemically synthesized
  source 1..22: mol_type = other DNA
tgtcactaagaaacaatttaga

SEQ ID NO: 76229 - DNA, 22 bp, synthetic construct
  misc_feature 1..22: note = chemically synthesized
  source 1..22: mol_type = other DNA
gtcactaagaaacaatttagac

SEQ ID NO: 76230 - DNA, 22 bp, synthetic construct
  misc_feature 1..22: note = chemically synthesized
  source 1..22: mol_type = other DNA
tcactaagaaacaatttagact

SEQ ID NO: 76231 - DNA, 22 bp, synthetic construct
  misc_feature 1..22: note = chemically synthesized
  source 1..22: mol_type = other DNA
agaaacaatttagactagtata

SEQ ID NO: 76232 - DNA, 22 bp, synthetic construct
  misc_feature 1..22: note = chemically synthesized
  source 1..22: mol_type = other DNA
agactagtataccatttggttt

SEQ ID NO: 76233 - DNA, 22 bp, synthetic construct
  misc_feature 1..22: note = chemically synthesized
  source 1..22: mol_type = other DNA
gactagtataccatttggtttc

SEQ ID NO: 76234 - DNA, 22 bp, synthetic construct
  misc_feature 1..22: note = chemically synthesized
  source 1..22: mol_type = other DNA
gtataccatttggtttcttcct

SEQ ID NO: 76235 - DNA, 22 bp, synthetic construct
  misc_feature 1..22: note = chemically synthesized
  source 1..22: mol_type = other DNA
ggtttcttcctcttctcttata

SEQ ID NO: 76236 - DNA, 22 bp, synthetic construct
  misc_feature 1..22: note = chemically synthesized
  source 1..22: mol_type = other DNA
gtttcttcctcttctcttatac

SEQ ID NO: 76237 - DNA, 22 bp, synthetic construct
  misc_feature 1..22: note = chemically synthesized
  source 1..22: mol_type = other DNA
cttcctcttctcttatactgat

SEQ ID NO: 76238 - DNA, 22 bp, synthetic construct
  misc_feature 1..22: note = chemically synthesized
  source 1..22: mol_type = other DNA
ttcctcttctcttatactgatt

SEQ ID NO: 76239 - DNA, 22 bp, synthetic construct
  misc_feature 1..22: note = chemically synthesized
  source 1..22: mol_type = other DNA
cctcttctcttatactgatttt

SEQ ID NO: 76240 - DNA, 22 bp, synthetic construct
  misc_feature 1..22: note = chemically synthesized
  source 1..22: mol_type = other DNA
ctcttctcttatactgatttta

SEQ ID NO: 76241 - DNA, 22 bp, synthetic construct
  misc_feature 1..22: note = chemically synthesized
  source 1..22: mol_type = other DNA
ttctcttatactgattttattt

SEQ ID NO: 76242 - DNA, 22 bp, synthetic construct
  misc_feature 1..22: note = chemically synthesized
  source 1..22: mol_type = other DNA
ctcttatactgattttatttaa

SEQ ID NO: 76243 - DNA, 22 bp, synthetic construct
  misc_feature 1..22: note = chemically synthesized
  source 1..22: mol_type = other DNA
tcttatactgattttatttaaa

SEQ ID NO: 76244 - DNA, 22 bp, synthetic construct
  misc_feature 1..22: note = chemically synthesized
  source 1..22: mol_type = other DNA
ttatactgattttatttaaatt

SEQ ID NO: 76245 - DNA, 22 bp, synthetic construct
  misc_feature 1..22: note = chemically synthesized
  source 1..22: mol_type = other DNA
atactgattttatttaaatttg

SEQ ID NO: 76246 - DNA, 22 bp, synthetic construct
  misc_feature 1..22: note = chemically synthesized
  source 1..22: mol_type = other DNA
tactgattttatttaaatttgg

SEQ ID NO: 76247 - DNA, 22 bp, synthetic construct
  misc_feature 1..22: note = chemically synthesized
  source 1..22: mol_type = other DNA
attttatttaaatttgggggct

SEQ ID NO: 76248 - DNA, 22 bp, synthetic construct
  misc_feature 1..22: note = chemically synthesized
  source 1..22: mol_type = other DNA
tatttaaatttgggggctctcc

SEQ ID NO: 76249 - DNA, 22 bp, synthetic construct
  misc_feature 1..22: note = chemically synthesized
  source 1..22: mol_type = other DNA
atttaaatttgggggctctcca

SEQ ID NO: 76250 - DNA, 22 bp, synthetic construct
  misc_feature 1..22: note = chemically synthesized
  source 1..22: mol_type = other DNA
tttaaatttgggggctctccaa

SEQ ID NO: 76251 - DNA, 22 bp, synthetic construct
  misc_feature 1..22: note = chemically synthesized
  source 1..22: mol_type = other DNA
aaatttgggggctctccaaagt

SEQ ID NO: 76252 - DNA, 22 bp, synthetic construct
  misc_feature 1..22: note = chemically synthesized
  source 1..22: mol_type = other DNA
aatttgggggctctccaaagtt

SEQ ID NO: 76253 - DNA, 22 bp, synthetic construct
  misc_feature 1..22: note = chemically synthesized
  source 1..22: mol_type = other DNA
gggggctctccaaagttctatc

SEQ ID NO: 76254 - DNA, 22 bp, synthetic construct
  misc_feature 1..22: note = chemically synthesized
  source 1..22: mol_type = other DNA
ggggctctccaaagttctatct

SEQ ID NO: 76255 - DNA, 22 bp, synthetic construct
  misc_feature 1..22: note = chemically synthesized
  source 1..22: mol_type = other DNA
tccaaagttctatcttgggtca

SEQ ID NO: 76256 - DNA, 22 bp, synthetic construct
  misc_feature 1..22: note = chemically synthesized
  source 1..22: mol_type = other DNA
caaagttctatcttgggtcatt

SEQ ID NO: 76257 - DNA, 22 bp, synthetic construct
  misc_feature 1..22: note = chemically synthesized
  source 1..22: mol_type = other DNA
tatcttgggtcatttcattcta

SEQ ID NO: 76258 - DNA, 22 bp, synthetic construct
  misc_feature 1..22: note = chemically synthesized
  source 1..22: mol_type = other DNA
tcttgggtcatttcattctaaa

SEQ ID NO: 76259 - DNA, 22 bp, synthetic construct
  misc_feature 1..22: note = chemically synthesized
  source 1..22: mol_type = other DNA
gggtcatttcattctaaaacta

SEQ ID NO: 76260 - DNA, 22 bp, synthetic construct
  misc_feature 1..22: note = chemically synthesized
  source 1..22: mol_type = other DNA
ggtcatttcattctaaaactat

SEQ ID NO: 76261 - DNA, 22 bp, synthetic construct
  misc_feature 1..22: note = chemically synthesized
  source 1..22: mol_type = other DNA
cattctaaaactattcacatgt

SEQ ID NO: 76262 - DNA, 22 bp, synthetic construct
  misc_feature 1..22: note = chemically synthesized
  source 1..22: mol_type = other DNA
attctaaaactattcacatgtg

SEQ ID NO: 76263 - DNA, 22 bp, synthetic construct
  misc_feature 1..22: note = chemically synthesized
  source 1..22: mol_type = other DNA
taaaactattcacatgtgctgg

SEQ ID NO: 76264 - DNA, 22 bp, synthetic construct
  misc_feature 1..22: note = chemically synthesized
  source 1..22: mol_type = other DNA
aaactattcacatgtgctggtg

SEQ ID NO: 76265 - DNA, 22 bp, synthetic construct
  misc_feature 1..22: note = chemically synthesized
  source 1..22: mol_type = other DNA
ttcacatgtgctggtgactcca

SEQ ID NO: 76266 - DNA, 22 bp, synthetic construct
  misc_feature 1..22: note = chemically synthesized
  source 1..22: mol_type = other DNA
acatgtgctggtgactccatct

SEQ ID NO: 76267 - DNA, 22 bp, synthetic construct
  misc_feature 1..22: note = chemically synthesized
  source 1..22: mol_type = other DNA
gtgactccatctactccaaata

SEQ ID NO: 76268 - DNA, 22 bp, synthetic construct
  misc_feature 1..22: note = chemically synthesized
  source 1..22: mol_type = other DNA
catctactccaaataatttagt

SEQ ID NO: 76269 - DNA, 22 bp, synthetic construct
  misc_feature 1..22: note = chemically synthesized
  source 1..22: mol_type = other DNA
ctccaaataatttagttgtcac

SEQ ID NO: 76270 - DNA, 22 bp, synthetic construct
  misc_feature 1..22: note = chemically synthesized
  source 1..22: mol_type = other DNA
caaataatttagttgtcacctt

SEQ ID NO: 76271 - DNA, 22 bp, synthetic construct
  misc_feature 1..22: note = chemically synthesized
  source 1..22: mol_type = other DNA
agttgtcaccttcatgtgctaa

SEQ ID NO: 76272 - DNA, 22 bp, synthetic construct
  misc_feature 1..22: note = chemically synthesized
  source 1..22: mol_type = other DNA
gttgtcaccttcatgtgctaac

SEQ ID NO: 76273 - DNA, 22 bp, synthetic construct
  misc_feature 1..22: note = chemically synthesized
  source 1..22: mol_type = other DNA
tcaccttcatgtgctaactcct

SEQ ID NO: 76274 - DNA, 22 bp, synthetic construct
  misc_feature 1..22: note = chemically synthesized
  source 1..22: mol_type = other DNA
catgtgctaactcctataacaa

SEQ ID NO: 76275 - DNA, 22 bp, synthetic construct
  misc_feature 1..22: note = chemically synthesized
  source 1..22: mol_type = other DNA
atgtgctaactcctataacaat

SEQ ID NO: 76276 - DNA, 22 bp, synthetic construct
  misc_feature 1..22: note = chemically synthesized
  source 1..22: mol_type = other DNA
actcctataacaatatttccag

SEQ ID NO: 76277 - DNA, 22 bp, synthetic construct
  misc_feature 1..22: note = chemically synthesized
  source 1..22: mol_type = other DNA
ctataacaatatttccagccca

SEQ ID NO: 76278 - DNA, 22 bp, synthetic construct
  misc_feature 1..22: note = chemically synthesized
  source 1..22: mol_type = other DNA
taacaatatttccagcccagat

SEQ ID NO: 76279 - DNA, 22 bp, synthetic construct
  misc_feature 1..22: note = chemically synthesized
  source 1..22: mol_type = other DNA
ccagcccagattttctccctct

SEQ ID NO: 76280 - DNA, 22 bp, synthetic construct
  misc_feature 1..22: note = chemically synthesized
  source 1..22: mol_type = other DNA
cagcccagattttctccctctg

SEQ ID NO: 76281 - DNA, 22 bp, synthetic construct
  misc_feature 1..22: note = chemically synthesized
  source 1..22: mol_type = other DNA
tctccctctgttccaagtacac

SEQ ID NO: 76282 - DNA, 22 bp, synthetic construct
  misc_feature 1..22: note = chemically synthesized
  source 1..22: mol_type = other DNA
ctccctctgttccaagtacaca

SEQ ID NO: 76283 - DNA, 22 bp, synthetic construct
  misc_feature 1..22: note = chemically synthesized
  source 1..22: mol_type = other DNA
tccctctgttccaagtacacag

SEQ ID NO: 76284 - DNA, 22 bp, synthetic construct
  misc_feature 1..22: note = chemically synthesized
  source 1..22: mol_type = other DNA
cctctgttccaagtacacagga

SEQ ID NO: 76285 - DNA, 22 bp, synthetic construct
  misc_feature 1..22: note = chemically synthesized
  source 1..22: mol_type = other DNA
tgttccaagtacacaggaacag

SEQ ID NO: 76286 - DNA, 22 bp, synthetic construct
  misc_feature 1..22: note = chemically synthesized
  source 1..22: mol_type = other DNA
ttccaagtacacaggaacagca

SEQ ID NO: 76287 - DNA, 22 bp, synthetic construct
  misc_feature 1..22: note = chemically synthesized
  source 1..22: mol_type = other DNA
caagtacacaggaacagcatgt

SEQ ID NO: 76288 - DNA, 22 bp, synthetic construct
  misc_feature 1..22: note = chemically synthesized
  source 1..22: mol_type = other DNA
cccaaattttagtttatccctc

SEQ ID NO: 76289 - DNA, 22 bp, synthetic construct
  misc_feature 1..22: note = chemically synthesized
  source 1..22: mol_type = other DNA
tagtttatccctcacatccttt

SEQ ID NO: 76290 - DNA, 22 bp, synthetic construct
  misc_feature 1..22: note = chemically synthesized
  source 1..22: mol_type = other DNA
agtttatccctcacatcctttg

SEQ ID NO: 76291 - DNA, 22 bp, synthetic construct
  misc_feature 1..22: note = chemically synthesized
  source 1..22: mol_type = other DNA
gtttatccctcacatcctttga

SEQ ID NO: 76292 - DNA, 22 bp, synthetic construct
  misc_feature 1..22: note = chemically synthesized
  source 1..22: mol_type = other DNA
atccctcacatcctttgaaaca

SEQ ID NO: 76293 - DNA, 22 bp, synthetic construct
  misc_feature 1..22: note = chemically synthesized
  source 1..22: mol_type = other DNA
tccctcacatcctttgaaacat

SEQ ID NO: 76294 - DNA, 22 bp, synthetic construct
  misc_feature 1..22: note = chemically synthesized
  source 1..22: mol_type = other DNA
acatcctttgaaacattgtcaa

SEQ ID NO: 76295 - DNA, 22 bp, synthetic construct
  misc_feature 1..22: note = chemically synthesized
  source 1..22: mol_type = other DNA
tgaaacattgtcaatgagttct

SEQ ID NO: 76296 - DNA, 22 bp, synthetic construct
  misc_feature 1..22: note = chemically synthesized
  source 1..22: mol_type = other DNA
gaaacattgtcaatgagttcta

SEQ ID NO: 76297 - DNA, 22 bp, synthetic construct
  misc_feature 1..22: note = chemically synthesized
  source 1..22: mol_type = other DNA
aaacattgtcaatgagttctac

SEQ ID NO: 76298 - DNA, 22 bp, synthetic construct
  misc_feature 1..22: note = chemically synthesized
  source 1..22: mol_type = other DNA
tcaatgagttctacacttaatt

SEQ ID NO: 76299 - DNA, 22 bp, synthetic construct
  misc_feature 1..22: note = chemically synthesized
  source 1..22: mol_type = other DNA
tacacttaattcaaggttattt

SEQ ID NO: 76300 - DNA, 22 bp, synthetic construct
  misc_feature 1..22: note = chemically synthesized
  source 1..22: mol_type = other DNA
cacttaattcaaggttattttt

SEQ ID NO: 76301 - DNA, 22 bp, synthetic construct
  misc_feature 1..22: note = chemically synthesized
  source 1..22: mol_type = other DNA
aattcaaggttatttttttttc

SEQ ID NO: 76302 - DNA, 22 bp, synthetic construct
  misc_feature 1..22: note = chemically synthesized
  source 1..22: mol_type = other DNA
attcaaggttatttttttttca

SEQ ID NO: 76303 - DNA, 22 bp, synthetic construct
  misc_feature 1..22: note = chemically synthesized
  source 1..22: mol_type = other DNA
aaggttatttttttttcattgt

SEQ ID NO: 76304 - DNA, 22 bp, synthetic construct
  misc_feature 1..22: note = chemically synthesized
  source 1..22: mol_type = other DNA
tttttttttcattgtacttgta

SEQ ID NO: 76305 - DNA, 22 bp, synthetic construct
  misc_feature 1..22: note = chemically synthesized
  source 1..22: mol_type = other DNA
ttttttcattgtacttgtaaat

SEQ ID NO: 76306 - DNA, 22 bp, synthetic construct
  misc_feature 1..22: note = chemically synthesized
  source 1..22: mol_type = other DNA
tttttcattgtacttgtaaata

SEQ ID NO: 76307 - DNA, 22 bp, synthetic construct
  misc_feature 1..22: note = chemically synthesized
  source 1..22: mol_type = other DNA
ttttcattgtacttgtaaatat

SEQ ID NO: 76308 - DNA, 22 bp, synthetic construct
  misc_feature 1..22: note = chemically synthesized
  source 1..22: mol_type = other DNA
tttcattgtacttgtaaatatt

SEQ ID NO: 76309 - DNA, 22 bp, synthetic construct
  misc_feature 1..22: note = chemically synthesized
  source 1..22: mol_type = other DNA
ttcattgtacttgtaaatattg

SEQ ID NO: 76310 - DNA, 22 bp, synthetic construct
  misc_feature 1..22: note = chemically synthesized
  source 1..22: mol_type = other DNA
tcattgtacttgtaaatattgg

SEQ ID NO: 76311 - DNA, 22 bp, synthetic construct
  misc_feature 1..22: note = chemically synthesized
  source 1..22: mol_type = other DNA
cattgtacttgtaaatattgga

SEQ ID NO: 76312 - DNA, 22 bp, synthetic construct
  misc_feature 1..22: note = chemically synthesized
  source 1..22: mol_type = other DNA
attgtacttgtaaatattggaa

SEQ ID NO: 76313 - DNA, 22 bp, synthetic construct
  misc_feature 1..22: note = chemically synthesized
  source 1..22: mol_type = other DNA
tacttgtaaatattggaagact

SEQ ID NO: 76314 - DNA, 22 bp, synthetic construct
  misc_feature 1..22: note = chemically synthesized
  source 1..22: mol_type = other DNA
gtaaatattggaagacttttac

SEQ ID NO: 76315 - DNA, 22 bp, synthetic construct
  misc_feature 1..22: note = chemically synthesized
  source 1..22: mol_type = other DNA
taaatattggaagacttttaca

SEQ ID NO: 76316 - DNA, 22 bp, synthetic construct
  misc_feature 1..22: note = chemically synthesized
  source 1..22: mol_type = other DNA
gaagacttttacatatgcatca

SEQ ID NO: 76317 - DNA, 22 bp, synthetic construct
  misc_feature 1..22: note = chemically synthesized
  source 1..22: mol_type = other DNA
ttacatatgcatcaataactat

SEQ ID NO: 76318 - DNA, 22 bp, synthetic construct
  misc_feature 1..22: note = chemically synthesized
  source 1..22: mol_type = other DNA
tacatatgcatcaataactatc

SEQ ID NO: 76319 - DNA, 22 bp, synthetic construct
  misc_feature 1..22: note = chemically synthesized
  source 1..22: mol_type = other DNA
acatatgcatcaataactatct

SEQ ID NO: 76320 - DNA, 22 bp, synthetic construct
  misc_feature 1..22: note = chemically synthesized
  source 1..22: mol_type = other DNA
catatgcatcaataactatctc

SEQ ID NO: 76321 - DNA, 22 bp, synthetic construct
  misc_feature 1..22: note = chemically synthesized
  source 1..22: mol_type = other DNA
tctctggatttttttagctagt

SEQ ID NO: 76322 - DNA, 22 bp, synthetic construct
  misc_feature 1..22: note = chemically synthesized
  source 1..22: mol_type = other DNA
tggatttttttagctagtctac

SEQ ID NO: 76323 - DNA, 22 bp, synthetic construct
  misc_feature 1..22: note = chemically synthesized
  source 1..22: mol_type = other DNA
gatttttttagctagtctacta

SEQ ID NO: 76324 - DNA, 22 bp, synthetic construct
  misc_feature 1..22: note = chemically synthesized
  source 1..22: mol_type = other DNA
ttttagctagtctactaaattt

SEQ ID NO: 76325 - DNA, 22 bp, synthetic construct
  misc_feature 1..22: note = chemically synthesized
  source 1..22: mol_type = other DNA
tttagctagtctactaaatttt

SEQ ID NO: 76326 - DNA, 22 bp, synthetic construct
  misc_feature 1..22: note = chemically synthesized
  source 1..22: mol_type = other DNA
ttagctagtctactaaattttt

SEQ ID NO: 76327 - DNA, 22 bp, synthetic construct
  misc_feature 1..22: note = chemically synthesized
  source 1..22: mol_type = other DNA
tagctagtctactaaatttttt

SEQ ID NO: 76328 - DNA, 22 bp, synthetic construct
  misc_feature 1..22: note = chemically synthesized
  source 1..22: mol_type = other DNA
agctagtctactaaattttttt

SEQ ID NO: 76329 - DNA, 22 bp, synthetic construct
  misc_feature 1..22: note = chemically synthesized
  source 1..22: mol_type = other DNA
gctagtctactaaatttttttt

SEQ ID NO: 76330 - DNA, 22 bp, synthetic construct
  misc_feature 1..22: note = chemically synthesized
  source 1..22: mol_type = other DNA
gtctactaaattttttttttct

SEQ ID NO: 76331 - DNA, 22 bp, synthetic construct
  misc_feature 1..22: note = chemically synthesized
  source 1..22: mol_type = other DNA
ctaaattttttttttctttttt

SEQ ID NO: 76332 - DNA, 22 bp, synthetic construct
  misc_feature 1..22: note = chemically synthesized
  source 1..22: mol_type = other DNA
aattttttttttcttttttttg

SEQ ID NO: 76333 - DNA, 22 bp, synthetic construct
  misc_feature 1..22: note = chemically synthesized
  source 1..22: mol_type = other DNA
tttttttcttttttttgagaca

SEQ ID NO: 76334 - DNA, 22 bp, synthetic construct
  misc_feature 1..22: note = chemically synthesized
  source 1..22: mol_type = other DNA
ttttttcttttttttgagacag

SEQ ID NO: 76335 - DNA, 22 bp, synthetic construct
  misc_feature 1..22: note = chemically synthesized
  source 1..22: mol_type = other DNA
tttttcttttttttgagacaga

SEQ ID NO: 76336 - DNA, 22 bp, synthetic construct
  misc_feature 1..22: note = chemically synthesized
  source 1..22: mol_type = other DNA
ttttcttttttttgagacagag

SEQ ID NO: 76337 - DNA, 22 bp, synthetic construct
  misc_feature 1..22: note = chemically synthesized
  source 1..22: mol_type = other DNA
tttcttttttttgagacagagt

SEQ ID NO: 76338 - DNA, 22 bp, synthetic construct
  misc_feature 1..22: note = chemically synthesized
  source 1..22: mol_type = other DNA
ttcttttttttgagacagagtc

SEQ ID NO: 76339 - DNA, 22 bp, synthetic construct
  misc_feature 1..22: note = chemically synthesized
  source 1..22: mol_type = other DNA
tcttttttttgagacagagtct

SEQ ID NO: 76340 - DNA, 22 bp, synthetic construct
  misc_feature 1..22: note = chemically synthesized
  source 1..22: mol_type = other DNA
cttttttttgagacagagtctc

SEQ ID NO: 76341 - DNA, 22 bp, synthetic construct
  misc_feature 1..22: note = chemically synthesized
  source 1..22: mol_type = other DNA
ttttttttgagacagagtctct

SEQ ID NO: 76342 - DNA, 22 bp, synthetic construct
  misc_feature 1..22: note = chemically synthesized
  source 1..22: mol_type = other DNA
ttttttgagacagagtctctct

SEQ ID NO: 76343 - DNA, 22 bp, synthetic construct
  misc_feature 1..22: note = chemically synthesized
  source 1..22: mol_type = other DNA
tttttgagacagagtctctctc

SEQ ID NO: 76344 - DNA, 22 bp, synthetic construct
  misc_feature 1..22: note = chemically synthesized
  source 1..22: mol_type = other DNA
ttttgagacagagtctctctct

SEQ ID NO: 76345 - DNA, 22 bp, synthetic construct
  misc_feature 1..22: note = chemically synthesized
  source 1..22: mol_type = other DNA
tttgagacagagtctctctctg

SEQ ID NO: 76346 - DNA, 22 bp, synthetic construct
  misc_feature 1..22: note = chemically synthesized
  source 1..22: mol_type = other DNA
ttgagacagagtctctctctgt

SEQ ID NO: 76347 - DNA, 22 bp, synthetic construct
  misc_feature 1..22: note = chemically synthesized
  source 1..22: mol_type = other DNA
tgagacagagtctctctctgtc

SEQ ID NO: 76348 - DNA, 22 bp, synthetic construct
  misc_feature 1..22: note = chemically synthesized
  source 1..22: mol_type = other DNA
gagacagagtctctctctgtcg

SEQ ID NO: 76349 - DNA, 22 bp, synthetic construct
  misc_feature 1..22: note = chemically synthesized
  source 1..22: mol_type = other DNA
agacagagtctctctctgtcgc

SEQ ID NO: 76350 - DNA, 22 bp, synthetic construct
  misc_feature 1..22: note = chemically synthesized
  source 1..22: mol_type = other DNA
tctctgtcgcccaggctggagt

SEQ ID NO: 76351 - DNA, 22 bp, synthetic construct
  misc_feature 1..22: note = chemically synthesized
  source 1..22: mol_type = other DNA
tctgtcgcccaggctggagtgc

SEQ ID NO: 76352 - DNA, 22 bp, synthetic construct
  misc_feature 1..22: note = chemically synthesized
  source 1..22: mol_type = other DNA
tgtcgcccaggctggagtgcag

SEQ ID NO: 76353 - DNA, 22 bp, synthetic construct
  misc_feature 1..22: note = chemically synthesized
  source 1..22: mol_type = other DNA
tcgcccaggctggagtgcagtg

SEQ ID NO: 76354 - DNA, 22 bp, synthetic construct
  misc_feature 1..22: note = chemically synthesized
  source 1..22: mol_type = other DNA
gagtgcagtggcccctgatctc

SEQ ID NO: 76355 - DNA, 22 bp, synthetic construct
  misc_feature 1..22: note = chemically synthesized
  source 1..22: mol_type = other DNA
atctctgctcactgcaagctcc

SEQ ID NO: 76356 - DNA, 22 bp, synthetic construct
  misc_feature 1..22: note = chemically synthesized
  source 1..22: mol_type = other DNA
tgctcactgcaagctccgcccc

SEQ ID NO: 76357 - DNA, 22 bp, synthetic construct
  misc_feature 1..22: note = chemically synthesized
  source 1..22: mol_type = other DNA
ctcactgcaagctccgcccccc

SEQ ID NO: 76358 - DNA, 22 bp, synthetic construct
  misc_feature 1..22: note = chemically synthesized
  source 1..22: mol_type = other DNA
actgcaagctccgccccccgcg

SEQ ID NO: 76359 - DNA, 22 bp, synthetic construct
  misc_feature 1..22: note = chemically synthesized
  source 1..22: mol_type = other DNA
caagctccgccccccgcgttca

SEQ ID NO: 76360 - DNA, 22 bp, synthetic construct
  misc_feature 1..22: note = chemically synthesized
  source 1..22: mol_type = other DNA
cgccccccgcgttcacgccatt

SEQ ID NO: 76361 - DNA, 22 bp, synthetic construct
  misc_feature 1..22: note = chemically synthesized
  source 1..22: mol_type = other DNA
acgccattctcccgcctcagcc

SEQ ID NO: 76362 - DNA, 22 bp, synthetic construct
  misc_feature 1..22: note = chemically synthesized
  source 1..22: mol_type = other DNA
tcccgcctcagcctccatagta

SEQ ID NO: 76363 - DNA, 22 bp, synthetic construct
  misc_feature 1..22: note = chemically synthesized
  source 1..22: mol_type = other DNA
ccgcctcagcctccatagtagc

SEQ ID NO: 76364 - DNA, 22 bp, synthetic construct
  misc_feature 1..22: note = chemically synthesized
  source 1..22: mol_type = other DNA
agcctccatagtagctgggact

SEQ ID NO: 76365 - DNA, 22 bp, synthetic construct
  misc_feature 1..22: note = chemically synthesized
  source 1..22: mol_type = other DNA
catagtagctgggactacaggc

SEQ ID NO: 76366 - DNA, 22 bp, synthetic construct
  misc_feature 1..22: note = chemically synthesized
  source 1..22: mol_type = other DNA
ggactacaggcacccgccacca

SEQ ID NO: 76367 - DNA, 22 bp, synthetic construct
  misc_feature 1..22: note = chemically synthesized
  source 1..22: mol_type = other DNA
caggcacccgccaccaagcccg

SEQ ID NO: 76368 - DNA, 22 bp, synthetic construct
  misc_feature 1..22: note = chemically synthesized
  source 1..22: mol_type = other DNA
attttttgtatttttttagtag

SEQ ID NO: 76369 - DNA, 22 bp, synthetic construct
  misc_feature 1..22: note = chemically synthesized
  source 1..22: mol_type = other DNA
tttgtatttttttagtagagac

SEQ ID NO: 76370 - DNA, 22 bp, synthetic construct
  misc_feature 1..22: note = chemically synthesized
  source 1..22: mol_type = other DNA
ttgtatttttttagtagagacg

SEQ ID NO: 76371 - DNA, 22 bp, synthetic construct
  misc_feature 1..22: note = chemically synthesized
  source 1..22: mol_type = other DNA
tgtatttttttagtagagacgg

SEQ ID NO: 76372 - DNA, 22 bp, synthetic construct
  misc_feature 1..22: note = chemically synthesized
  source 1..22: mol_type = other DNA
gtatttttttagtagagacggg

SEQ ID NO: 76373 - DNA, 22 bp, synthetic construct
  misc_feature 1..22: note = chemically synthesized
  source 1..22: mol_type = other DNA
tatttttttagtagagacgggg

SEQ ID NO: 76374 - DNA, 22 bp, synthetic construct
  misc_feature 1..22: note = chemically synthesized
  source 1..22: mol_type = other DNA
ttttagtagagacggggtttca

SEQ ID NO: 76375 - DNA, 22 bp, synthetic construct
  misc_feature 1..22: note = chemically synthesized
  source 1..22: mol_type = other DNA
tttagtagagacggggtttcac

SEQ ID NO: 76376 - DNA, 22 bp, synthetic construct
  misc_feature 1..22: note = chemically synthesized
  source 1..22: mol_type = other DNA
ttagtagagacggggtttcact

SEQ ID NO: 76377 - DNA, 22 bp, synthetic construct
  misc_feature 1..22: note = chemically synthesized
  source 1..22: mol_type = other DNA
tagtagagacggggtttcactg

SEQ ID NO: 76378 - DNA, 22 bp, synthetic construct
  misc_feature 1..22: note = chemically synthesized
  source 1..22: mol_type = other DNA
agtagagacggggtttcactgt

SEQ ID NO: 76379 - DNA, 22 bp, synthetic construct
  misc_feature 1..22: note = chemically synthesized
  source 1..22: mol_type = other DNA
gtagagacggggtttcactgtg

SEQ ID NO: 76380 - DNA, 22 bp, synthetic construct
  misc_feature 1..22: note = chemically synthesized
  source 1..22: mol_type = other DNA
cactgtgttagccaggatggtc

SEQ ID NO: 76381 - DNA, 22 bp, synthetic construct
  misc_feature 1..22: note = chemically synthesized
  source 1..22: mol_type = other DNA
actgtgttagccaggatggtct

SEQ ID NO: 76382 - DNA, 22 bp, synthetic construct
  misc_feature 1..22: note = chemically synthesized
  source 1..22: mol_type = other DNA
tgttagccaggatggtctcgat

SEQ ID NO: 76383 - DNA, 22 bp, synthetic construct
  misc_feature 1..22: note = chemically synthesized
  source 1..22: mol_type = other DNA
gccaggatggtctcgatctcgc

SEQ ID NO: 76384 - DNA, 22 bp, synthetic construct
  misc_feature 1..22: note = chemically synthesized
  source 1..22: mol_type = other DNA
gatctcgcgacctcgtgatcca

SEQ ID NO: 76385 - DNA, 22 bp, synthetic construct
  misc_feature 1..22: note = chemically synthesized
  source 1..22: mol_type = other DNA
gcgacctcgtgatccacccgcc

SEQ ID NO: 76386 - DNA, 22 bp, synthetic construct
  misc_feature 1..22: note = chemically synthesized
  source 1..22: mol_type = other DNA
gtgatccacccgcctccgcctc

SEQ ID NO: 76387 - DNA, 22 bp, synthetic construct
  misc_feature 1..22: note = chemically synthesized
  source 1..22: mol_type = other DNA
cgcctcccaaagtgctgggatc

SEQ ID NO: 76388 - DNA, 22 bp, synthetic construct
  misc_feature 1..22: note = chemically synthesized
  source 1..22: mol_type = other DNA
ccaaagtgctgggatcacaggc

SEQ ID NO: 76389 - DNA, 22 bp, synthetic construct
  misc_feature 1..22: note = chemically synthesized
  source 1..22: mol_type = other DNA
ggatcacaggcgtgagccactg

SEQ ID NO: 76390 - DNA, 22 bp, synthetic construct
  misc_feature 1..22: note = chemically synthesized
  source 1..22: mol_type = other DNA
cacccggcctactgaatatttt

SEQ ID NO: 76391 - DNA, 22 bp, synthetic construct
  misc_feature 1..22: note = chemically synthesized
  source 1..22: mol_type = other DNA
ctgaatattttttaaatttatt

SEQ ID NO: 76392 - DNA, 22 bp, synthetic construct
  misc_feature 1..22: note = chemically synthesized
  source 1..22: mol_type = other DNA
aatattttttaaatttattttt

SEQ ID NO: 76393 - DNA, 22 bp, synthetic construct
  misc_feature 1..22: note = chemically synthesized
  source 1..22: mol_type = other DNA
tttaaatttatttttattaagg

SEQ ID NO: 76394 - DNA, 22 bp, synthetic construct
  misc_feature 1..22: note = chemically synthesized
  source 1..22: mol_type = other DNA
ttaaatttatttttattaaggt

SEQ ID NO: 76395 - DNA, 22 bp, synthetic construct
  misc_feature 1..22: note = chemically synthesized
  source 1..22: mol_type = other DNA
taaatttatttttattaaggta

SEQ ID NO: 76396 - DNA, 22 bp, synthetic construct
  misc_feature 1..22: note = chemically synthesized
  source 1..22: mol_type = other DNA
aaatttatttttattaaggtaa

SEQ ID NO: 76397 - DNA, 22 bp, synthetic construct
  misc_feature 1..22: note = chemically synthesized
  source 1..22: mol_type = other DNA
aatttatttttattaaggtaaa

SEQ ID NO: 76398 - DNA, 22 bp, synthetic construct
  misc_feature 1..22: note = chemically synthesized
  source 1..22: mol_type = other DNA
atttttattaaggtaaaatata

SEQ ID NO: 76399 - DNA, 22 bp, synthetic construct
  misc_feature 1..22: note = chemically synthesized
  source 1..22: mol_type = other DNA
tttttattaaggtaaaatatac

SEQ ID NO: 76400 - DNA, 22 bp, synthetic construct
  misc_feature 1..22: note = chemically synthesized
  source 1..22: mol_type = other DNA
ttattaaggtaaaatatacata

SEQ ID NO: 76401 - DNA, 22 bp, synthetic construct
  misc_feature 1..22: note = chemically synthesized
  source 1..22: mol_type = other DNA
tattaaggtaaaatatacatac

SEQ ID NO: 76402 - DNA, 22 bp, synthetic construct
  misc_feature 1..22: note = chemically synthesized
  source 1..22: mol_type = other DNA
attaaggtaaaatatacatacg

SEQ ID NO: 76403 - DNA, 22 bp, synthetic construct
  misc_feature 1..22: note = chemically synthesized
  source 1..22: mol_type = other DNA
ttaaggtaaaatatacatacgt

SEQ ID NO: 76404 - DNA, 22 bp, synthetic construct
  misc_feature 1..22: note = chemically synthesized
  source 1..22: mol_type = other DNA
aggtaaaatatacatacgtaat

SEQ ID NO: 76405 - DNA, 22 bp, synthetic construct
  misc_feature 1..22: note = chemically synthesized
  source 1..22: mol_type = other DNA
accgtctttacttttttttttt

SEQ ID NO: 76406 - DNA, 22 bp, synthetic construct
  misc_feature 1..22: note = chemically synthesized
  source 1..22: mol_type = other DNA
ccgtctttactttttttttttc

SEQ ID NO: 76407 - DNA, 22 bp, synthetic construct
  misc_feature 1..22: note = chemically synthesized
  source 1..22: mol_type = other DNA
tactttttttttttccttgaga

SEQ ID NO: 76408 - DNA, 22 bp, synthetic construct
  misc_feature 1..22: note = chemically synthesized
  source 1..22: mol_type = other DNA
actttttttttttccttgagac

SEQ ID NO: 76409 - DNA, 22 bp, synthetic construct
  misc_feature 1..22: note = chemically synthesized
  source 1..22: mol_type = other DNA
ctttttttttttccttgagacg

SEQ ID NO: 76410 - DNA, 22 bp, synthetic construct
  misc_feature 1..22: note = chemically synthesized
  source 1..22: mol_type = other DNA
tttttttttccttgagacggag

SEQ ID NO: 76411 - DNA, 22 bp, synthetic construct
  misc_feature 1..22: note = chemically synthesized
  source 1..22: mol_type = other DNA
ttttttttccttgagacggagt

SEQ ID NO: 76412 - DNA, 22 bp, synthetic construct
  misc_feature 1..22: note = chemically synthesized
  source 1..22: mol_type = other DNA
tttttttccttgagacggagtc

SEQ ID NO: 76413 - DNA, 22 bp, synthetic construct
  misc_feature 1..22: note = chemically synthesized
  source 1..22: mol_type = other DNA
ttttttccttgagacggagtct

SEQ ID NO: 76414 - DNA, 22 bp, synthetic construct
  misc_feature 1..22: note = chemically synthesized
  source 1..22: mol_type = other DNA
tttttccttgagacggagtctc

SEQ ID NO: 76415 - DNA, 22 bp, synthetic construct
  misc_feature 1..22: note = chemically synthesized
  source 1..22: mol_type = other DNA
ttttccttgagacggagtctcg

SEQ ID NO: 76416 - DNA, 22 bp, synthetic construct
  misc_feature 1..22: note = chemically synthesized
  source 1..22: mol_type = other DNA
tttccttgagacggagtctcgc

SEQ ID NO: 76417 - DNA, 22 bp, synthetic construct
  misc_feature 1..22: note = chemically synthesized
  source 1..22: mol_type = other DNA
ttccttgagacggagtctcgct

SEQ ID NO: 76418 - DNA, 22 bp, synthetic construct
  misc_feature 1..22: note = chemically synthesized
  source 1..22: mol_type = other DNA
tccttgagacggagtctcgctc

SEQ ID NO: 76419 - DNA, 22 bp, synthetic construct
  misc_feature 1..22: note = chemically synthesized
  source 1..22: mol_type = other DNA
ccttgagacggagtctcgctcc

SEQ ID NO: 76420 - DNA, 22 bp, synthetic construct
  misc_feature 1..22: note = chemically synthesized
  source 1..22: mol_type = other DNA
cttgagacggagtctcgctccg

SEQ ID NO: 76421 - DNA, 22 bp, synthetic construct
  misc_feature 1..22: note = chemically synthesized
  source 1..22: mol_type = other DNA
gagacggagtctcgctccgtca

SEQ ID NO: 76422 - DNA, 22 bp, synthetic construct
  misc_feature 1..22: note = chemically synthesized
  source 1..22: mol_type = other DNA
agacggagtctcgctccgtcat

SEQ ID NO: 76423 - DNA, 22 bp, synthetic construct
  misc_feature 1..22: note = chemically synthesized
  source 1..22: mol_type = other DNA
gctccgtcatccaggctggagt

SEQ ID NO: 76424 - DNA, 22 bp, synthetic construct
  misc_feature 1..22: note = chemically synthesized
  source 1..22: mol_type = other DNA
cgtcatccaggctggagtgcag

SEQ ID NO: 76425 - DNA, 22 bp, synthetic construct
  misc_feature 1..22: note = chemically synthesized
  source 1..22: mol_type = other DNA
gagtgcagtggtaggatcttgg

SEQ ID NO: 76426 - DNA, 22 bp, synthetic construct
  misc_feature 1..22: note = chemically synthesized
  source 1..22: mol_type = other DNA
ggctcactgcaacctccgcccc

SEQ ID NO: 76427 - DNA, 22 bp, synthetic construct
  misc_feature 1..22: note = chemically synthesized
  source 1..22: mol_type = other DNA
gctcactgcaacctccgccccc

SEQ ID NO: 76428 - DNA, 22 bp, synthetic construct
  misc_feature 1..22: note = chemically synthesized
  source 1..22: mol_type = other DNA
actgcaacctccgcccccacca

SEQ ID NO: 76429 - DNA, 22 bp, synthetic construct
  misc_feature 1..22: note = chemically synthesized
  source 1..22: mol_type = other DNA
caacctccgcccccaccaggtt

SEQ ID NO: 76430 - DNA, 22 bp, synthetic construct
  misc_feature 1..22: note = chemically synthesized
  source 1..22: mol_type = other DNA
cgcccccaccaggttcaagcga

SEQ ID NO: 76431 - DNA, 22 bp, synthetic construct
  misc_feature 1..22: note = chemically synthesized
  source 1..22: mol_type = other DNA
aagcgattctcctgcccaagcc

SEQ ID NO: 76432 - DNA, 22 bp, synthetic construct
  misc_feature 1..22: note = chemically synthesized
  source 1..22: mol_type = other DNA
tcctgcccaagcctcccaagta

SEQ ID NO: 76433 - DNA, 22 bp, synthetic construct
  misc_feature 1..22: note = chemically synthesized
  source 1..22: mol_type = other DNA
ctgcccaagcctcccaagtagg

SEQ ID NO: 76434 - DNA, 22 bp, synthetic construct
  misc_feature 1..22: note = chemically synthesized
  source 1..22: mol_type = other DNA
cccaagcctcccaagtaggtgg

SEQ ID NO: 76435 - DNA, 22 bp, synthetic construct
  misc_feature 1..22: note = chemically synthesized
  source 1..22: mol_type = other DNA
ccaagtaggtgggattacaggc

SEQ ID NO: 76436 - DNA, 22 bp, synthetic construct
  misc_feature 1..22: note = chemically synthesized
  source 1..22: mol_type = other DNA
caggcgcctgccaccacgcctg

SEQ ID NO: 76437 - DNA, 22 bp, synthetic construct
  misc_feature 1..22: note = chemically synthesized
  source 1..22: mol_type = other DNA
ccaccacgcctggctaattttt

SEQ ID NO: 76438 - DNA, 22 bp, synthetic construct
  misc_feature 1..22: note = chemically synthesized
  source 1..22: mol_type = other DNA
gctaattttttgtatttttagt

SEQ ID NO: 76439 - DNA, 22 bp, synthetic construct
  misc_feature 1..22: note = chemically synthesized
  source 1..22: mol_type = other DNA
attttttgtatttttagtagag

SEQ ID NO: 76440 - DNA, 22 bp, synthetic construct
  misc_feature 1..22: note = chemically synthesized
  source 1..22: mol_type = other DNA
tttgtatttttagtagagacag

SEQ ID NO: 76441 - DNA, 22 bp, synthetic construct
  misc_feature 1..22: note = chemically synthesized
  source 1..22: mol_type = other DNA
ttgtatttttagtagagacagg

SEQ ID NO: 76442 - DNA, 22 bp, synthetic construct
  misc_feature 1..22: note = chemically synthesized
  source 1..22: mol_type = other DNA
tgtatttttagtagagacaggg

SEQ ID NO: 76443 - DNA, 22 bp, synthetic construct
  misc_feature 1..22: note = chemically synthesized
  source 1..22: mol_type = other DNA
gtatttttagtagagacagggt

SEQ ID NO: 76444 - DNA, 22 bp, synthetic construct
  misc_feature 1..22: note = chemically synthesized
  source 1..22: mol_type = other DNA
tatttttagtagagacagggtt

SEQ ID NO: 76445 - DNA, 22 bp, synthetic construct
  misc_feature 1..22: note = chemically synthesized
  source 1..22: mol_type = other DNA
ttagtagagacagggtttcacc

SEQ ID NO: 76446 - DNA, 22 bp, synthetic construct
  misc_feature 1..22: note = chemically synthesized
  source 1..22: mol_type = other DNA
tagtagagacagggtttcacca

SEQ ID NO: 76447 - DNA, 22 bp, synthetic construct
  misc_feature 1..22: note = chemically synthesized
  source 1..22: mol_type = other DNA
agtagagacagggtttcaccat

SEQ ID NO: 76448 - DNA, 22 bp, synthetic construct
  misc_feature 1..22: note = chemically synthesized
  source 1..22: mol_type = other DNA
gtagagacagggtttcaccatg

SEQ ID NO: 76449 - DNA, 22 bp, synthetic construct
  misc_feature 1..22: note = chemically synthesized
  source 1..22: mol_type = other DNA
caccatgttggtcaggctggtc

SEQ ID NO: 76450 - DNA, 22 bp, synthetic construct
  misc_feature 1..22: note = chemically synthesized
  source 1..22: mol_type = other DNA
accatgttggtcaggctggtct

SEQ ID NO: 76451 - DNA, 22 bp, synthetic construct
  misc_feature 1..22: note = chemically synthesized
  source 1..22: mol_type = other DNA
gtcaggctggtcttggactcct

SEQ ID NO: 76452 - DNA, 22 bp, synthetic construct
  misc_feature 1..22: note = chemically synthesized
  source 1..22: mol_type = other DNA
gtcttggactcctgacctcatg

SEQ ID NO: 76453 - DNA, 22 bp, synthetic construct
  misc_feature 1..22: note = chemically synthesized
  source 1..22: mol_type = other DNA
ggactcctgacctcatgatcca

SEQ ID NO: 76454 - DNA, 22 bp, synthetic construct
  misc_feature 1..22: note = chemically synthesized
  source 1..22: mol_type = other DNA
gactcctgacctcatgatccac

SEQ ID NO: 76455 - DNA, 22 bp, synthetic construct
  misc_feature 1..22: note = chemically synthesized
  source 1..22: mol_type = other DNA
ctgacctcatgatccacctgcc

SEQ ID NO: 76456 - DNA, 22 bp, synthetic construct
  misc_feature 1..22: note = chemically synthesized
  source 1..22: mol_type = other DNA
acctcatgatccacctgccttg

SEQ ID NO: 76457 - DNA, 22 bp, synthetic construct
  misc_feature 1..22: note = chemically synthesized
  source 1..22: mol_type = other DNA
atgatccacctgccttggcctc

SEQ ID NO: 76458 - DNA, 22 bp, synthetic construct
  misc_feature 1..22: note = chemically synthesized
  source 1..22: mol_type = other DNA
ccttggcctcccaaagtgctga

SEQ ID NO: 76459 - DNA, 22 bp, synthetic construct
  misc_feature 1..22: note = chemically synthesized
  source 1..22: mol_type = other DNA
ggcctcccaaagtgctgagatt

SEQ ID NO: 76460 - DNA, 22 bp, synthetic construct
  misc_feature 1..22: note = chemically synthesized
  source 1..22: mol_type = other DNA
gcctcccaaagtgctgagatta

SEQ ID NO: 76461 - DNA, 22 bp, synthetic construct
  misc_feature 1..22: note = chemically synthesized
  source 1..22: mol_type = other DNA
ccaaagtgctgagattacaggc

SEQ ID NO: 76462 - DNA, 22 bp, synthetic construct
  misc_feature 1..22: note = chemically synthesized
  source 1..22: mol_type = other DNA
agattacaggcattggccaccg

SEQ ID NO: 76463 - DNA, 22 bp, synthetic construct
  misc_feature 1..22: note = chemically synthesized
  source 1..22: mol_type = other DNA
caggcattggccaccgcaccca

SEQ ID NO: 76464 - DNA, 22 bp, synthetic construct
  misc_feature 1..22: note = chemically synthesized
  source 1..22: mol_type = other DNA
gccaccgcacccagcccatctt

SEQ ID NO: 76465 - DNA, 22 bp, synthetic construct
  misc_feature 1..22: note = chemically synthesized
  source 1..22: mol_type = other DNA
taccatttttgagtgtacggtt

SEQ ID NO: 76466 - DNA, 22 bp, synthetic construct
  misc_feature 1..22: note = chemically synthesized
  source 1..22: mol_type = other DNA
accatttttgagtgtacggttc

SEQ ID NO: 76467 - DNA, 22 bp, synthetic construct
  misc_feature 1..22: note = chemically synthesized
  source 1..22: mol_type = other DNA
ccatttttgagtgtacggttca

SEQ ID NO: 76468 - DNA, 22 bp, synthetic construct
  misc_feature 1..22: note = chemically synthesized
  source 1..22: mol_type = other DNA
ttgagtgtacggttcagtggta

SEQ ID NO: 76469 - DNA, 22 bp, synthetic construct
  misc_feature 1..22: note = chemically synthesized
  source 1..22: mol_type = other DNA
tgagtgtacggttcagtggtaa

SEQ ID NO: 76470 - DNA, 22 bp, synthetic construct
  misc_feature 1..22: note = chemically synthesized
  source 1..22: mol_type = other DNA
gagtgtacggttcagtggtaat

SEQ ID NO: 76471 - DNA, 22 bp, synthetic construct
  misc_feature 1..22: note = chemically synthesized
  source 1..22: mol_type = other DNA
agtgtacggttcagtggtaata

SEQ ID NO: 76472 - DNA, 22 bp, synthetic construct
  misc_feature 1..22: note = chemically synthesized
  source 1..22: mol_type = other DNA
agtggtaatacatacatacata

SEQ ID NO: 76473 - DNA, 22 bp, synthetic construct
  misc_feature 1..22: note = chemically synthesized
  source 1..22: mol_type = other DNA
atatgtatacatacatattcac

SEQ ID NO: 76474 - DNA, 22 bp, synthetic construct
  misc_feature 1..22: note = chemically synthesized
  source 1..22: mol_type = other DNA
tatgtatacatacatattcaca

SEQ ID NO: 76475 - DNA, 22 bp, synthetic construct
  misc_feature 1..22: note = chemically synthesized
  source 1..22: mol_type = other DNA
acatttttatatatatatacac

SEQ ID NO: 76476 - DNA, 22 bp, synthetic construct
  misc_feature 1..22: note = chemically synthesized
  source 1..22: mol_type = other DNA
ttatatatatatacacatacat

SEQ ID NO: 76477 - DNA, 22 bp, synthetic construct
  misc_feature 1..22: note = chemically synthesized
  source 1..22: mol_type = other DNA
tatatatatatacacatacata

SEQ ID NO: 76478 - DNA, 22 bp, synthetic construct
  misc_feature 1..22: note = chemically synthesized
  source 1..22: mol_type = other DNA
atatatatatacacatacatac

SEQ ID NO: 76479 - DNA, 22 bp, synthetic construct
  misc_feature 1..22: note = chemically synthesized
  source 1..22: mol_type = other DNA
tatatatatacacatacataca

SEQ ID NO: 76480 - DNA, 22 bp, synthetic construct
  misc_feature 1..22: note = chemically synthesized
  source 1..22: mol_type = other DNA
ttttgcttgatttctcattcct

SEQ ID NO: 76481 - DNA, 22 bp, synthetic construct
  misc_feature 1..22: note = chemically synthesized
  source 1..22: mol_type = other DNA
tttgcttgatttctcattcctt

SEQ ID NO: 76482 - DNA, 22 bp, synthetic construct
  misc_feature 1..22: note = chemically synthesized
  source 1..22: mol_type = other DNA
ttgcttgatttctcattccttt

SEQ ID NO: 76483 - DNA, 22 bp, synthetic construct
  misc_feature 1..22: note = chemically synthesized
  source 1..22: mol_type = other DNA
tgcttgatttctcattcctttc

SEQ ID NO: 76484 - DNA, 22 bp, synthetic construct
  misc_feature 1..22: note = chemically synthesized
  source 1..22: mol_type = other DNA
gcttgatttctcattcctttct

SEQ ID NO: 76485 - DNA, 22 bp, synthetic construct
  misc_feature 1..22: note = chemically synthesized
  source 1..22: mol_type = other DNA
cttgatttctcattcctttctt

SEQ ID NO: 76486 - DNA, 22 bp, synthetic construct
  misc_feature 1..22: note = chemically synthesized
  source 1..22: mol_type = other DNA
gatttctcattcctttcttccc

SEQ ID NO: 76487 - DNA, 22 bp, synthetic construct
  misc_feature 1..22: note = chemically synthesized
  source 1..22: mol_type = other DNA
atttctcattcctttcttccct

SEQ ID NO: 76488 - DNA, 22 bp, synthetic construct
  misc_feature 1..22: note = chemically synthesized
  source 1..22: mol_type = other DNA
ctcattcctttcttccctcccg

SEQ ID NO: 76489 - DNA, 22 bp, synthetic construct
  misc_feature 1..22: note = chemically synthesized
  source 1..22: mol_type = other DNA
tcattcctttcttccctcccgc

SEQ ID NO: 76490 - DNA, 22 bp, synthetic construct
  misc_feature 1..22: note = chemically synthesized
  source 1..22: mol_type = other DNA
attcctttcttccctcccgccg

SEQ ID NO: 76491 - DNA, 22 bp, synthetic construct
  misc_feature 1..22: note = chemically synthesized
  source 1..22: mol_type = other DNA
ctttcttccctcccgccgccgg

SEQ ID NO: 76492 - DNA, 22 bp, synthetic construct
  misc_feature 1..22: note = chemically synthesized
  source 1..22: mol_type = other DNA
tcttccctcccgccgccggtaa

SEQ ID NO: 76493 - DNA, 22 bp, synthetic construct
  misc_feature 1..22: note = chemically synthesized
  source 1..22: mol_type = other DNA
cttccctcccgccgccggtaac

SEQ ID NO: 76494 - DNA, 22 bp, synthetic construct
  misc_feature 1..22: note = chemically synthesized
  source 1..22: mol_type = other DNA
ttccctcccgccgccggtaact

SEQ ID NO: 76495 - DNA, 22 bp, synthetic construct
  misc_feature 1..22: note = chemically synthesized
  source 1..22: mol_type = other DNA
ccctcccgccgccggtaactac

SEQ ID NO: 76496 - DNA, 22 bp, synthetic construct
  misc_feature 1..22: note = chemically synthesized
  source 1..22: mol_type = other DNA
cctcccgccgccggtaactacc

SEQ ID NO: 76497 - DNA, 22 bp, synthetic construct
  misc_feature 1..22: note = chemically synthesized
  source 1..22: mol_type = other DNA
ccgccgccggtaactaccaatc

SEQ ID NO: 76498 - DNA, 22 bp, synthetic construct
  misc_feature 1..22: note = chemically synthesized
  source 1..22: mol_type = other DNA
ccaatctactctctgtcttcat

SEQ ID NO: 76499 - DNA, 22 bp, synthetic construct
  misc_feature 1..22: note = chemically synthesized
  source 1..22: mol_type = other DNA
ctctctgtcttcataagatcca

SEQ ID NO: 76500 - DNA, 22 bp, synthetic construct
  misc_feature 1..22: note = chemically synthesized
  source 1..22: mol_type = other DNA
tctgtcttcataagatccacgt

SEQ ID NO: 76501 - DNA, 22 bp, synthetic construct
  misc_feature 1..22: note = chemically synthesized
  source 1..22: mol_type = other DNA
tgtcttcataagatccacgttt

SEQ ID NO: 76502 - DNA, 22 bp, synthetic construct
  misc_feature 1..22: note = chemically synthesized
  source 1..22: mol_type = other DNA
tcttcataagatccacgttttt

SEQ ID NO: 76503 - DNA, 22 bp, synthetic construct
  misc_feature 1..22: note = chemically synthesized
  source 1..22: mol_type = other DNA
cataagatccacgtttttaact

SEQ ID NO: 76504 - DNA, 22 bp, synthetic construct
  misc_feature 1..22: note = chemically synthesized
  source 1..22: mol_type = other DNA
ataagatccacgtttttaactt

SEQ ID NO: 76505 - DNA, 22 bp, synthetic construct
  misc_feature 1..22: note = chemically synthesized
  source 1..22: mol_type = other DNA
ttaacttccacacgagttagaa

SEQ ID NO: 76506 - DNA, 22 bp, synthetic construct
  misc_feature 1..22: note = chemically synthesized
  source 1..22: mol_type = other DNA
taacttccacacgagttagaac

SEQ ID NO: 76507 - DNA, 22 bp, synthetic construct
  misc_feature 1..22: note = chemically synthesized
  source 1..22: mol_type = other DNA
aacttccacacgagttagaaca

SEQ ID NO: 76508 - DNA, 22 bp, synthetic construct
  misc_feature 1..22: note = chemically synthesized
  source 1..22: mol_type = other DNA
acttccacacgagttagaacat

SEQ ID NO: 76509 - DNA, 22 bp, synthetic construct
  misc_feature 1..22: note = chemically synthesized
  source 1..22: mol_type = other DNA
ccacacgagttagaacatgtga

SEQ ID NO: 76510 - DNA, 22 bp, synthetic construct
  misc_feature 1..22: note = chemically synthesized
  source 1..22: mol_type = other DNA
cacacgagttagaacatgtgat

SEQ ID NO: 76511 - DNA, 22 bp, synthetic construct
  misc_feature 1..22: note = chemically synthesized
  source 1..22: mol_type = other DNA
gaacatgtgatatttttctttc

SEQ ID NO: 76512 - DNA, 22 bp, synthetic construct
  misc_feature 1..22: note = chemically synthesized
  source 1..22: mol_type = other DNA
ttctttctgtgcttggcttatt

SEQ ID NO: 76513 - DNA, 22 bp, synthetic construct
  misc_feature 1..22: note = chemically synthesized
  source 1..22: mol_type = other DNA
tctttctgtgcttggcttattt

SEQ ID NO: 76514 - DNA, 22 bp, synthetic construct
  misc_feature 1..22: note = chemically synthesized
  source 1..22: mol_type = other DNA
ctttctgtgcttggcttatttc

SEQ ID NO: 76515 - DNA, 22 bp, synthetic construct
  misc_feature 1..22: note = chemically synthesized
  source 1..22: mol_type = other DNA
tttctgtgcttggcttatttca

SEQ ID NO: 76516 - DNA, 22 bp, synthetic construct
  misc_feature 1..22: note = chemically synthesized
  source 1..22: mol_type = other DNA
tctgtgcttggcttatttcact

SEQ ID NO: 76517 - DNA, 22 bp, synthetic construct
  misc_feature 1..22: note = chemically synthesized
  source 1..22: mol_type = other DNA
ctgtgcttggcttatttcactt

SEQ ID NO: 76518 - DNA, 22 bp, synthetic construct
  misc_feature 1..22: note = chemically synthesized
  source 1..22: mol_type = other DNA
tgtgcttggcttatttcactta

SEQ ID NO: 76519 - DNA, 22 bp, synthetic construct
  misc_feature 1..22: note = chemically synthesized
  source 1..22: mol_type = other DNA
tgcttggcttatttcacttaac

SEQ ID NO: 76520 - DNA, 22 bp, synthetic construct
  misc_feature 1..22: note = chemically synthesized
  source 1..22: mol_type = other DNA
ggcttatttcacttaacgtaat

SEQ ID NO: 76521 - DNA, 22 bp, synthetic construct
  misc_feature 1..22: note = chemically synthesized
  source 1..22: mol_type = other DNA
gcttatttcacttaacgtaatt

SEQ ID NO: 76522 - DNA, 22 bp, synthetic construct
  misc_feature 1..22: note = chemically synthesized
  source 1..22: mol_type = other DNA
atttcacttaacgtaattgctt

SEQ ID NO: 76523 - DNA, 22 bp, synthetic construct
  misc_feature 1..22: note = chemically synthesized
  source 1..22: mol_type = other DNA
tttcacttaacgtaattgcttt

SEQ ID NO: 76524 - DNA, 22 bp, synthetic construct
  misc_feature 1..22: note = chemically synthesized
  source 1..22: mol_type = other DNA
cacttaacgtaattgctttcag

SEQ ID NO: 76525 - DNA, 22 bp, synthetic construct
  misc_feature 1..22: note = chemically synthesized
  source 1..22: mol_type = other DNA
acttaacgtaattgctttcagt

SEQ ID NO: 76526 - DNA, 22 bp, synthetic construct
  misc_feature 1..22: note = chemically synthesized
  source 1..22: mol_type = other DNA
aacgtaattgctttcagtacca

SEQ ID NO: 76527 - DNA, 22 bp, synthetic construct
  misc_feature 1..22: note = chemically synthesized
  source 1..22: mol_type = other DNA
acgtaattgctttcagtaccat

SEQ ID NO: 76528 - DNA, 22 bp, synthetic construct
  misc_feature 1..22: note = chemically synthesized
  source 1..22: mol_type = other DNA
ctttcagtaccatttatgttac

SEQ ID NO: 76529 - DNA, 22 bp, synthetic construct
  misc_feature 1..22: note = chemically synthesized
  source 1..22: mol_type = other DNA
tcagtaccatttatgttactgt

SEQ ID NO: 76530 - DNA, 22 bp, synthetic construct
  misc_feature 1..22: note = chemically synthesized
  source 1..22: mol_type = other DNA
cagtaccatttatgttactgta

SEQ ID NO: 76531 - DNA, 22 bp, synthetic construct
  misc_feature 1..22: note = chemically synthesized
  source 1..22: mol_type = other DNA
agtaccatttatgttactgtaa

SEQ ID NO: 76532 - DNA, 22 bp, synthetic construct
  misc_feature 1..22: note = chemically synthesized
  source 1..22: mol_type = other DNA
atgttactgtaattgataatat

SEQ ID NO: 76533 - DNA, 22 bp, synthetic construct
  misc_feature 1..22: note = chemically synthesized
  source 1..22: mol_type = other DNA
tgttactgtaattgataatatt

SEQ ID NO: 76534 - DNA, 22 bp, synthetic construct
  misc_feature 1..22: note = chemically synthesized
  source 1..22: mol_type = other DNA
ctgtaattgataatatttcatt

SEQ ID NO: 76535 - DNA, 22 bp, synthetic construct
  misc_feature 1..22: note = chemically synthesized
  source 1..22: mol_type = other DNA
taattgataatatttcattctt

SEQ ID NO: 76536 - DNA, 22 bp, synthetic construct
  misc_feature 1..22: note = chemically synthesized
  source 1..22: mol_type = other DNA
ataatatttcattcttttttat

SEQ ID NO: 76537 - DNA, 22 bp, synthetic construct
  misc_feature 1..22: note = chemically synthesized
  source 1..22: mol_type = other DNA
cattcttttttatggttgaata

SEQ ID NO: 76538 - DNA, 22 bp, synthetic construct
  misc_feature 1..22: note = chemically synthesized
  source 1..22: mol_type = other DNA
attcttttttatggttgaataa

SEQ ID NO: 76539 - DNA, 22 bp, synthetic construct
  misc_feature 1..22: note = chemically synthesized
  source 1..22: mol_type = other DNA
ttttttatggttgaataatatt

SEQ ID NO: 76540 - DNA, 22 bp, synthetic construct
  misc_feature 1..22: note = chemically synthesized
  source 1..22: mol_type = other DNA
ttttatggttgaataatattcc

SEQ ID NO: 76541 - DNA, 22 bp, synthetic construct
  misc_feature 1..22: note = chemically synthesized
  source 1..22: mol_type = other DNA
tttatggttgaataatattcca

SEQ ID NO: 76542 - DNA, 22 bp, synthetic construct
  misc_feature 1..22: note = chemically synthesized
  source 1..22: mol_type = other DNA
ttatggttgaataatattccat

SEQ ID NO: 76543 - DNA, 22 bp, synthetic construct
  misc_feature 1..22: note = chemically synthesized
  source 1..22: mol_type = other DNA
tatggttgaataatattccatt

SEQ ID NO: 76544 - DNA, 22 bp, synthetic construct
  misc_feature 1..22: note = chemically synthesized
  source 1..22: mol_type = other DNA
atggttgaataatattccattg

SEQ ID NO: 76545 - DNA, 22 bp, synthetic construct
  misc_feature 1..22: note = chemically synthesized
  source 1..22: mol_type = other DNA
tggttgaataatattccattgt

SEQ ID NO: 76546 - DNA, 22 bp, synthetic construct
  misc_feature 1..22: note = chemically synthesized
  source 1..22: mol_type = other DNA
aataatattccattgtgtgtgt

SEQ ID NO: 76547 - DNA, 22 bp, synthetic construct
  misc_feature 1..22: note = chemically synthesized
  source 1..22: mol_type = other DNA
cattgtgtgtgtgtgtgtgtgt

SEQ ID NO: 76548 - DNA, 22 bp, synthetic construct
  misc_feature 1..22: note = chemically synthesized
  source 1..22: mol_type = other DNA
tgtgtgtgtgtgtgtgtgtgtg

SEQ ID NO: 76549 - DNA, 22 bp, synthetic construct
  misc_feature 1..22: note = chemically synthesized
  source 1..22: mol_type = other DNA
ttttctttatccatttatctgt

SEQ ID NO: 76550 - DNA, 22 bp, synthetic construct
  misc_feature 1..22: note = chemically synthesized
  source 1..22: mol_type = other DNA
tctttatccatttatctgttga

SEQ ID NO: 76551 - DNA, 22 bp, synthetic construct
  misc_feature 1..22: note = chemically synthesized
  source 1..22: mol_type = other DNA
ctttatccatttatctgttgac

SEQ ID NO: 76552 - DNA, 22 bp, synthetic construct
  misc_feature 1..22: note = chemically synthesized
  source 1..22: mol_type = other DNA
tttatccatttatctgttgacg

SEQ ID NO: 76553 - DNA, 22 bp, synthetic construct
  misc_feature 1..22: note = chemically synthesized
  source 1..22: mol_type = other DNA
tatccatttatctgttgacgaa

SEQ ID NO: 76554 - DNA, 22 bp, synthetic construct
  misc_feature 1..22: note = chemically synthesized
  source 1..22: mol_type = other DNA
atccatttatctgttgacgaat

SEQ ID NO: 76555 - DNA, 22 bp, synthetic construct
  misc_feature 1..22: note = chemically synthesized
  source 1..22: mol_type = other DNA
tccatttatctgttgacgaata

SEQ ID NO: 76556 - DNA, 22 bp, synthetic construct
  misc_feature 1..22: note = chemically synthesized
  source 1..22: mol_type = other DNA
atctgttgacgaatacatcagt

SEQ ID NO: 76557 - DNA, 22 bp, synthetic construct
  misc_feature 1..22: note = chemically synthesized
  source 1..22: mol_type = other DNA
tctgttgacgaatacatcagtt

SEQ ID NO: 76558 - DNA, 22 bp, synthetic construct
  misc_feature 1..22: note = chemically synthesized
  source 1..22: mol_type = other DNA
ttgacgaatacatcagttgatt

SEQ ID NO: 76559 - DNA, 22 bp, synthetic construct
  misc_feature 1..22: note = chemically synthesized
  source 1..22: mol_type = other DNA
acgaatacatcagttgatttca

SEQ ID NO: 76560 - DNA, 22 bp, synthetic construct
  misc_feature 1..22: note = chemically synthesized
  source 1..22: mol_type = other DNA
atttcaaatcttggcgtttgtg

SEQ ID NO: 76561 - DNA, 22 bp, synthetic construct
  misc_feature 1..22: note = chemically synthesized
  source 1..22: mol_type = other DNA
caaatcttggcgtttgtgaata

SEQ ID NO: 76562 - DNA, 22 bp, synthetic construct
  misc_feature 1..22: note = chemically synthesized
  source 1..22: mol_type = other DNA
aaatcttggcgtttgtgaatag

SEQ ID NO: 76563 - DNA, 22 bp, synthetic construct
  misc_feature 1..22: note = chemically synthesized
  source 1..22: mol_type = other DNA
ggcgtttgtgaatagtgctata

SEQ ID NO: 76564 - DNA, 22 bp, synthetic construct
  misc_feature 1..22: note = chemically synthesized
  source 1..22: mol_type = other DNA
gcgtttgtgaatagtgctataa

SEQ ID NO: 76565 - DNA, 22 bp, synthetic construct
  misc_feature 1..22: note = chemically synthesized
  source 1..22: mol_type = other DNA
gtgaatagtgctataataaaga

SEQ ID NO: 76566 - DNA, 22 bp, synthetic construct
  misc_feature 1..22: note = chemically synthesized
  source 1..22: mol_type = other DNA
tgaatagtgctataataaagat

SEQ ID NO: 76567 - DNA, 22 bp, synthetic construct
  misc_feature 1..22: note = chemically synthesized
  source 1..22: mol_type = other DNA
taataaagatgggagtactgat

SEQ ID NO: 76568 - DNA, 22 bp, synthetic construct
  misc_feature 1..22: note = chemically synthesized
  source 1..22: mol_type = other DNA
atatatcttcgacatactaatt

SEQ ID NO: 76569 - DNA, 22 bp, synthetic construct
  misc_feature 1..22: note = chemically synthesized
  source 1..22: mol_type = other DNA
cgacatactaatttattctttt

SEQ ID NO: 76570 - DNA, 22 bp, synthetic construct
  misc_feature 1..22: note = chemically synthesized
  source 1..22: mol_type = other DNA
gacatactaatttattctttta

SEQ ID NO: 76571 - DNA, 22 bp, synthetic construct
  misc_feature 1..22: note = chemically synthesized
  source 1..22: mol_type = other DNA
atttattcttttaagggtatat

SEQ ID NO: 76572 - DNA, 22 bp, synthetic construct
  misc_feature 1..22: note = chemically synthesized
  source 1..22: mol_type = other DNA
attcttttaagggtatatacct

SEQ ID NO: 76573 - DNA, 22 bp, synthetic construct
  misc_feature 1..22: note = chemically synthesized
  source 1..22: mol_type = other DNA
ttcttttaagggtatataccta

SEQ ID NO: 76574 - DNA, 22 bp, synthetic construct
  misc_feature 1..22: note = chemically synthesized
  source 1..22: mol_type = other DNA
ttttaagggtatatacctagga

SEQ ID NO: 76575 - DNA, 22 bp, synthetic construct
  misc_feature 1..22: note = chemically synthesized
  source 1..22: mol_type = other DNA
ttaagggtatatacctaggagt

SEQ ID NO: 76576 - DNA, 22 bp, synthetic construct
  misc_feature 1..22: note = chemically synthesized
  source 1..22: mol_type = other DNA
taagggtatatacctaggagtg

SEQ ID NO: 76577 - DNA, 22 bp, synthetic construct
  misc_feature 1..22: note = chemically synthesized
  source 1..22: mol_type = other DNA
aagggtatatacctaggagtga

SEQ ID NO: 76578 - DNA, 22 bp, synthetic construct
  misc_feature 1..22: note = chemically synthesized
  source 1..22: mol_type = other DNA
agggtatatacctaggagtgat

SEQ ID NO: 76579 - DNA, 22 bp, synthetic construct
  misc_feature 1..22: note = chemically synthesized
  source 1..22: mol_type = other DNA
ggagtgatattgctggatcata

SEQ ID NO: 76580 - DNA, 22 bp, synthetic construct
  misc_feature 1..22: note = chemically synthesized
  source 1..22: mol_type = other DNA
ctggatcatatggtagttctac

SEQ ID NO: 76581 - DNA, 22 bp, synthetic construct
  misc_feature 1..22: note = chemically synthesized
  source 1..22: mol_type = other DNA
gatcatatggtagttctacttt

SEQ ID NO: 76582 - DNA, 22 bp, synthetic construct
  misc_feature 1..22: note = chemically synthesized
  source 1..22: mol_type = other DNA
tactttacatttttgacaaatc

SEQ ID NO: 76583 - DNA, 22 bp, synthetic construct
  misc_feature 1..22: note = chemically synthesized
  source 1..22: mol_type = other DNA
ctttacatttttgacaaatctc

SEQ ID NO: 76584 - DNA, 22 bp, synthetic construct
  misc_feature 1..22: note = chemically synthesized
  source 1..22: mol_type = other DNA
tacatttttgacaaatctccat

SEQ ID NO: 76585 - DNA, 22 bp, synthetic construct
  misc_feature 1..22: note = chemically synthesized
  source 1..22: mol_type = other DNA
acatttttgacaaatctccata

SEQ ID NO: 76586 - DNA, 22 bp, synthetic construct
  misc_feature 1..22: note = chemically synthesized
  source 1..22: mol_type = other DNA
catttttgacaaatctccatac

SEQ ID NO: 76587 - DNA, 22 bp, synthetic construct
  misc_feature 1..22: note = chemically synthesized
  source 1..22: mol_type = other DNA
ttgacaaatctccatactgtcc

SEQ ID NO: 76588 - DNA, 22 bp, synthetic construct
  misc_feature 1..22: note = chemically synthesized
  source 1..22: mol_type = other DNA
tgacaaatctccatactgtcct

SEQ ID NO: 76589 - DNA, 22 bp, synthetic construct
  misc_feature 1..22: note = chemically synthesized
  source 1..22: mol_type = other DNA
gacaaatctccatactgtcctt

SEQ ID NO: 76590 - DNA, 22 bp, synthetic construct
  misc_feature 1..22: note = chemically synthesized
  source 1..22: mol_type = other DNA
acaaatctccatactgtccttc

SEQ ID NO: 76591 - DNA, 22 bp, synthetic construct
  misc_feature 1..22: note = chemically synthesized
  source 1..22: mol_type = other DNA
catactgtccttcataattgct

SEQ ID NO: 76592 - DNA, 22 bp, synthetic construct
  misc_feature 1..22: note = chemically synthesized
  source 1..22: mol_type = other DNA
tccttcataattgctgtaccaa

SEQ ID NO: 76593 - DNA, 22 bp, synthetic construct
  misc_feature 1..22: note = chemically synthesized
  source 1..22: mol_type = other DNA
cataattgctgtaccaatttgt

SEQ ID NO: 76594 - DNA, 22 bp, synthetic construct
  misc_feature 1..22: note = chemically synthesized
  source 1..22: mol_type = other DNA
ataattgctgtaccaatttgta

SEQ ID NO: 76595 - DNA, 22 bp, synthetic construct
  misc_feature 1..22: note = chemically synthesized
  source 1..22: mol_type = other DNA
ctgtaccaatttgtactcccac

SEQ ID NO: 76596 - DNA, 22 bp, synthetic construct
  misc_feature 1..22: note = chemically synthesized
  source 1..22: mol_type = other DNA
taccaatttgtactcccaccaa

SEQ ID NO: 76597 - DNA, 22 bp, synthetic construct
  misc_feature 1..22: note = chemically synthesized
  source 1..22: mol_type = other DNA
gtactcccaccaacagtgtaag

SEQ ID NO: 76598 - DNA, 22 bp, synthetic construct
  misc_feature 1..22: note = chemically synthesized
  source 1..22: mol_type = other DNA
tactcccaccaacagtgtaaga

SEQ ID NO: 76599 - DNA, 22 bp, synthetic construct
  misc_feature 1..22: note = chemically synthesized
  source 1..22: mol_type = other DNA
ccaccaacagtgtaagagggtt

SEQ ID NO: 76600 - DNA, 22 bp, synthetic construct
  misc_feature 1..22: note = chemically synthesized
  source 1..22: mol_type = other DNA
ccctttgtccacatccacacaa

SEQ ID NO: 76601 - DNA, 22 bp, synthetic construct
  misc_feature 1..22: note = chemically synthesized
  source 1..22: mol_type = other DNA
cctttgtccacatccacacaag

SEQ ID NO: 76602 - DNA, 22 bp, synthetic construct
  misc_feature 1..22: note = chemically synthesized
  source 1..22: mol_type = other DNA
tgtccacatccacacaagcatc

SEQ ID NO: 76603 - DNA, 22 bp, synthetic construct
  misc_feature 1..22: note = chemically synthesized
  source 1..22: mol_type = other DNA
gtccacatccacacaagcatct

SEQ ID NO: 76604 - DNA, 22 bp, synthetic construct
  misc_feature 1..22: note = chemically synthesized
  source 1..22: mol_type = other DNA
tccacatccacacaagcatctg

SEQ ID NO: 76605 - DNA, 22 bp, synthetic construct
  misc_feature 1..22: note = chemically synthesized
  source 1..22: mol_type = other DNA
ttatttccttttgttttgttat

SEQ ID NO: 76606 - DNA, 22 bp, synthetic construct
  misc_feature 1..22: note = chemically synthesized
  source 1..22: mol_type = other DNA
tttccttttgttttgttataag

SEQ ID NO: 76607 - DNA, 22 bp, synthetic construct
  misc_feature 1..22: note = chemically synthesized
  source 1..22: mol_type = other DNA
ccttttgttttgttataagcta

SEQ ID NO: 76608 - DNA, 22 bp, synthetic construct
  misc_feature 1..22: note = chemically synthesized
  source 1..22: mol_type = other DNA
cttttgttttgttataagctat

SEQ ID NO: 76609 - DNA, 22 bp, synthetic construct
  misc_feature 1..22: note = chemically synthesized
  source 1..22: mol_type = other DNA
ttgttttgttataagctatttt

SEQ ID NO: 76610 - DNA, 22 bp, synthetic construct
  misc_feature 1..22: note = chemically synthesized
  source 1..22: mol_type = other DNA
tgttttgttataagctatttta

SEQ ID NO: 76611 - DNA, 22 bp, synthetic construct
  misc_feature 1..22: note = chemically synthesized
  source 1..22: mol_type = other DNA
gttttgttataagctattttaa

SEQ ID NO: 76612 - DNA, 22 bp, synthetic construct
  misc_feature 1..22: note = chemically synthesized
  source 1..22: mol_type = other DNA
ttttgttataagctattttaac

SEQ ID NO: 76613 - DNA, 22 bp, synthetic construct
  misc_feature 1..22: note = chemically synthesized
  source 1..22: mol_type = other DNA
tgttataagctattttaactaa

SEQ ID NO: 76614 - DNA, 22 bp, synthetic construct
  misc_feature 1..22: note = chemically synthesized
  source 1..22: mol_type = other DNA
gttataagctattttaactaag

SEQ ID NO: 76615 - DNA, 22 bp, synthetic construct
  misc_feature 1..22: note = chemically synthesized
  source 1..22: mol_type = other DNA
ttataagctattttaactaagg

SEQ ID NO: 76616 - DNA, 22 bp, synthetic construct
  misc_feature 1..22: note = chemically synthesized
  source 1..22: mol_type = other DNA
taagctattttaactaaggtga

SEQ ID NO: 76617 - DNA, 22 bp, synthetic construct
  misc_feature 1..22: note = chemically synthesized
  source 1..22: mol_type = other DNA
ttttaactaaggtgagatgata

SEQ ID NO: 76618 - DNA, 22 bp, synthetic construct
  misc_feature 1..22: note = chemically synthesized
  source 1..22: mol_type = other DNA
taactaaggtgagatgatatca

SEQ ID NO: 76619 - DNA, 22 bp, synthetic construct
  misc_feature 1..22: note = chemically synthesized
  source 1..22: mol_type = other DNA
aactaaggtgagatgatatcac

SEQ ID NO: 76620 - DNA, 22 bp, synthetic construct
  misc_feature 1..22: note = chemically synthesized
  source 1..22: mol_type = other DNA
actaaggtgagatgatatcaca

SEQ ID NO: 76621 - DNA, 22 bp, synthetic construct
  misc_feature 1..22: note = chemically synthesized
  source 1..22: mol_type = other DNA
aggtgagatgatatcacattgt

SEQ ID NO: 76622 - DNA, 22 bp, synthetic construct
  misc_feature 1..22: note = chemically synthesized
  source 1..22: mol_type = other DNA
tggttttgatttatctggtgat

SEQ ID NO: 76623 - DNA, 22 bp, synthetic construct
  misc_feature 1..22: note = chemically synthesized
  source 1..22: mol_type = other DNA
tgatttatctggtgattagtga

SEQ ID NO: 76624 - DNA, 22 bp, synthetic construct
  misc_feature 1..22: note = chemically synthesized
  source 1..22: mol_type = other DNA
gatttatctggtgattagtgat

SEQ ID NO: 76625 - DNA, 22 bp, synthetic construct
  misc_feature 1..22: note = chemically synthesized
  source 1..22: mol_type = other DNA
atttatctggtgattagtgata

SEQ ID NO: 76626 - DNA, 22 bp, synthetic construct
  misc_feature 1..22: note = chemically synthesized
  source 1..22: mol_type = other DNA
atctggtgattagtgatattga

SEQ ID NO: 76627 - DNA, 22 bp, synthetic construct
  misc_feature 1..22: note = chemically synthesized
  source 1..22: mol_type = other DNA
tctggtgattagtgatattgaa

SEQ ID NO: 76628 - DNA, 22 bp, synthetic construct
  misc_feature 1..22: note = chemically synthesized
  source 1..22: mol_type = other DNA
gtgattagtgatattgaacatt

SEQ ID NO: 76629 - DNA, 22 bp, synthetic construct
  misc_feature 1..22: note = chemically synthesized
  source 1..22: mol_type = other DNA
gtgatattgaacattttttcaa

SEQ ID NO: 76630 - DNA, 22 bp, synthetic construct
  misc_feature 1..22: note = chemically synthesized
  source 1..22: mol_type = other DNA
aacattttttcaaatacctctg

SEQ ID NO: 76631 - DNA, 22 bp, synthetic construct
  misc_feature 1..22: note = chemically synthesized
  source 1..22: mol_type = other DNA
tttcaaatacctctgggccatt

SEQ ID NO: 76632 - DNA, 22 bp, synthetic construct
  misc_feature 1..22: note = chemically synthesized
  source 1..22: mol_type = other DNA
ttcaaatacctctgggccattt

SEQ ID NO: 76633 - DNA, 22 bp, synthetic construct
  misc_feature 1..22: note = chemically synthesized
  source 1..22: mol_type = other DNA
tcaaatacctctgggccatttg

SEQ ID NO: 76634 - DNA, 22 bp, synthetic construct
  misc_feature 1..22: note = chemically synthesized
  source 1..22: mol_type = other DNA
caaatacctctgggccatttgt

SEQ ID NO: 76635 - DNA, 22 bp, synthetic construct
  misc_feature 1..22: note = chemically synthesized
  source 1..22: mol_type = other DNA
aaatacctctgggccatttgta

SEQ ID NO: 76636 - DNA, 22 bp, synthetic construct
  misc_feature 1..22: note = chemically synthesized
  source 1..22: mol_type = other DNA
tgggccatttgtatggcttctt

SEQ ID NO: 76637 - DNA, 22 bp, synthetic construct
  misc_feature 1..22: note = chemically synthesized
  source 1..22: mol_type = other DNA
ggccatttgtatggcttctttt

SEQ ID NO: 76638 - DNA, 22 bp, synthetic construct
  misc_feature 1..22: note = chemically synthesized
  source 1..22: mol_type = other DNA
gtatggcttcttttgagaaata

SEQ ID NO: 76639 - DNA, 22 bp, synthetic construct
  misc_feature 1..22: note = chemically synthesized
  source 1..22: mol_type = other DNA
tatggcttcttttgagaaatat

SEQ ID NO: 76640 - DNA, 22 bp, synthetic construct
  misc_feature 1..22: note = chemically synthesized
  source 1..22: mol_type = other DNA
cttttgagaaatatctattcag

SEQ ID NO: 76641 - DNA, 22 bp, synthetic construct
  misc_feature 1..22: note = chemically synthesized
  source 1..22: mol_type = other DNA
ttttgagaaatatctattcagg

SEQ ID NO: 76642 - DNA, 22 bp, synthetic construct
  misc_feature 1..22: note = chemically synthesized
  source 1..22: mol_type = other DNA
ttgagaaatatctattcaggtc

SEQ ID NO: 76643 - DNA, 22 bp, synthetic construct
  misc_feature 1..22: note = chemically synthesized
  source 1..22: mol_type = other DNA
tgagaaatatctattcaggtct

SEQ ID NO: 76644 - DNA, 22 bp, synthetic construct
  misc_feature 1..22: note = chemically synthesized
  source 1..22: mol_type = other DNA
gagaaatatctattcaggtctt

SEQ ID NO: 76645 - DNA, 22 bp, synthetic construct
  misc_feature 1..22: note = chemically synthesized
  source 1..22: mol_type = other DNA
agaaatatctattcaggtcttt

SEQ ID NO: 76646 - DNA, 22 bp, synthetic construct
  misc_feature 1..22: note = chemically synthesized
  source 1..22: mol_type = other DNA
ttcaggtcttttggccattatt

SEQ ID NO: 76647 - DNA, 22 bp, synthetic construct
  misc_feature 1..22: note = chemically synthesized
  source 1..22: mol_type = other DNA
aggtcttttggccattatttat

SEQ ID NO: 76648 - DNA, 22 bp, synthetic construct
  misc_feature 1..22: note = chemically synthesized
  source 1..22: mol_type = other DNA
ttggccattatttatttattta

SEQ ID NO: 76649 - DNA, 22 bp, synthetic construct
  misc_feature 1..22: note = chemically synthesized
  source 1..22: mol_type = other DNA
tggccattatttatttatttat

SEQ ID NO: 76650 - DNA, 22 bp, synthetic construct
  misc_feature 1..22: note = chemically synthesized
  source 1..22: mol_type = other DNA
ggccattatttatttatttatt

SEQ ID NO: 76651 - DNA, 22 bp, synthetic construct
  misc_feature 1..22: note = chemically synthesized
  source 1..22: mol_type = other DNA
gccattatttatttatttattt

SEQ ID NO: 76652 - DNA, 22 bp, synthetic construct
  misc_feature 1..22: note = chemically synthesized
  source 1..22: mol_type = other DNA
tttatttatttatttattttct

SEQ ID NO: 76653 - DNA, 22 bp, synthetic construct
  misc_feature 1..22: note = chemically synthesized
  source 1..22: mol_type = other DNA
atttatttatttattttctgtt

SEQ ID NO: 76654 - DNA, 22 bp, synthetic construct
  misc_feature 1..22: note = chemically synthesized
  source 1..22: mol_type = other DNA
tttatttatttattttctgttg

SEQ ID NO: 76655 - DNA, 22 bp, synthetic construct
  misc_feature 1..22: note = chemically synthesized
  source 1..22: mol_type = other DNA
atttatttattttctgttgagt

SEQ ID NO: 76656 - DNA, 22 bp, synthetic construct
  misc_feature 1..22: note = chemically synthesized
  source 1..22: mol_type = other DNA
tttatttattttctgttgagtt

SEQ ID NO: 76657 - DNA, 22 bp, synthetic construct
  misc_feature 1..22: note = chemically synthesized
  source 1..22: mol_type = other DNA
atttattttctgttgagttgct

SEQ ID NO: 76658 - DNA, 22 bp, synthetic construct
  misc_feature 1..22: note = chemically synthesized
  source 1..22: mol_type = other DNA
tttattttctgttgagttgctt

SEQ ID NO: 76659 - DNA, 22 bp, synthetic construct
  misc_feature 1..22: note = chemically synthesized
  source 1..22: mol_type = other DNA
attttctgttgagttgcttgag

SEQ ID NO: 76660 - DNA, 22 bp, synthetic construct
  misc_feature 1..22: note = chemically synthesized
  source 1..22: mol_type = other DNA
ttttctgttgagttgcttgagt

SEQ ID NO: 76661 - DNA, 22 bp, synthetic construct
  misc_feature 1..22: note = chemically synthesized
  source 1..22: mol_type = other DNA
tctgttgagttgcttgagtttc

SEQ ID NO: 76662 - DNA, 22 bp, synthetic construct
  misc_feature 1..22: note = chemically synthesized
  source 1..22: mol_type = other DNA
ctgttgagttgcttgagtttct

SEQ ID NO: 76663 - DNA, 22 bp, synthetic construct
  misc_feature 1..22: note = chemically synthesized
  source 1..22: mol_type = other DNA
tgttgagttgcttgagtttctt

SEQ ID NO: 76664 - DNA, 22 bp, synthetic construct
  misc_feature 1..22: note = chemically synthesized
  source 1..22: mol_type = other DNA
ttgagttgcttgagtttcttgc

SEQ ID NO: 76665 - DNA, 22 bp, synthetic construct
  misc_feature 1..22: note = chemically synthesized
  source 1..22: mol_type = other DNA
agttgcttgagtttcttgcata

SEQ ID NO: 76666 - DNA, 22 bp, synthetic construct
  misc_feature 1..22: note = chemically synthesized
  source 1..22: mol_type = other DNA
cttgagtttcttgcatattctg

SEQ ID NO: 76667 - DNA, 22 bp, synthetic construct
  misc_feature 1..22: note = chemically synthesized
  source 1..22: mol_type = other DNA
gagtttcttgcatattctggtt

SEQ ID NO: 76668 - DNA, 22 bp, synthetic construct
  misc_feature 1..22: note = chemically synthesized
  source 1..22: mol_type = other DNA
agtttcttgcatattctggtta

SEQ ID NO: 76669 - DNA, 22 bp, synthetic construct
  misc_feature 1..22: note = chemically synthesized
  source 1..22: mol_type = other DNA
cttgcatattctggttatcaat

SEQ ID NO: 76670 - DNA, 22 bp, synthetic construct
  misc_feature 1..22: note = chemically synthesized
  source 1..22: mol_type = other DNA
ttgcatattctggttatcaatt

SEQ ID NO: 76671 - DNA, 22 bp, synthetic construct
  misc_feature 1..22: note = chemically synthesized
  source 1..22: mol_type = other DNA
gcatattctggttatcaattcc

SEQ ID NO: 76672 - DNA, 22 bp, synthetic construct
  misc_feature 1..22: note = chemically synthesized
  source 1..22: mol_type = other DNA
catattctggttatcaattcct

SEQ ID NO: 76673 - DNA, 22 bp, synthetic construct
  misc_feature 1..22: note = chemically synthesized
  source 1..22: mol_type = other DNA
tggttatcaattccttgtaaaa

SEQ ID NO: 76674 - DNA, 22 bp, synthetic construct
  misc_feature 1..22: note = chemically synthesized
  source 1..22: mol_type = other DNA
gttatcaattccttgtaaaata

SEQ ID NO: 76675 - DNA, 22 bp, synthetic construct
  misc_feature 1..22: note = chemically synthesized
  source 1..22: mol_type = other DNA
tcaattccttgtaaaatatata

SEQ ID NO: 76676 - DNA, 22 bp, synthetic construct
  misc_feature 1..22: note = chemically synthesized
  source 1..22: mol_type = other DNA
cttgtaaaatatatagtttgca

SEQ ID NO: 76677 - DNA, 22 bp, synthetic construct
  misc_feature 1..22: note = chemically synthesized
  source 1..22: mol_type = other DNA
gtaaaatatatagtttgcaaat

SEQ ID NO: 76678 - DNA, 22 bp, synthetic construct
  misc_feature 1..22: note = chemically synthesized
  source 1..22: mol_type = other DNA
taaaatatatagtttgcaaata

SEQ ID NO: 76679 - DNA, 22 bp, synthetic construct
  misc_feature 1..22: note = chemically synthesized
  source 1..22: mol_type = other DNA
gcaaatattttctcccattctt

SEQ ID NO: 76680 - DNA, 22 bp, synthetic construct
  misc_feature 1..22: note = chemically synthesized
  source 1..22: mol_type = other DNA
caaatattttctcccattcttt

SEQ ID NO: 76681 - DNA, 22 bp, synthetic construct
  misc_feature 1..22: note = chemically synthesized
  source 1..22: mol_type = other DNA
tctcccattctttgggttgtct

SEQ ID NO: 76682 - DNA, 22 bp, synthetic construct
  misc_feature 1..22: note = chemically synthesized
  source 1..22: mol_type = other DNA
ctcccattctttgggttgtctc

SEQ ID NO: 76683 - DNA, 22 bp, synthetic construct
  misc_feature 1..22: note = chemically synthesized
  source 1..22: mol_type = other DNA
tcccattctttgggttgtctct

SEQ ID NO: 76684 - DNA, 22 bp, synthetic construct
  misc_feature 1..22: note = chemically synthesized
  source 1..22: mol_type = other DNA
ccattctttgggttgtctcttc

SEQ ID NO: 76685 - DNA, 22 bp, synthetic construct
  misc_feature 1..22: note = chemically synthesized
  source 1..22: mol_type = other DNA
tttgggttgtctcttcacttta

SEQ ID NO: 76686 - DNA, 22 bp, synthetic construct
  misc_feature 1..22: note = chemically synthesized
  source 1..22: mol_type = other DNA
tgggttgtctcttcactttatt

SEQ ID NO: 76687 - DNA, 22 bp, synthetic construct
  misc_feature 1..22: note = chemically synthesized
  source 1..22: mol_type = other DNA
gggttgtctcttcactttatta

SEQ ID NO: 76688 - DNA, 22 bp, synthetic construct
  misc_feature 1..22: note = chemically synthesized
  source 1..22: mol_type = other DNA
ggttgtctcttcactttattat

SEQ ID NO: 76689 - DNA, 22 bp, synthetic construct
  misc_feature 1..22: note = chemically synthesized
  source 1..22: mol_type = other DNA
tctcttcactttattattttct

SEQ ID NO: 76690 - DNA, 22 bp, synthetic construct
  misc_feature 1..22: note = chemically synthesized
  source 1..22: mol_type = other DNA
ttcactttattattttctttgc

SEQ ID NO: 76691 - DNA, 22 bp, synthetic construct
  misc_feature 1..22: note = chemically synthesized
  source 1..22: mol_type = other DNA
cactttattattttctttgctg

SEQ ID NO: 76692 - DNA, 22 bp, synthetic construct
  misc_feature 1..22: note = chemically synthesized
  source 1..22: mol_type = other DNA
actttattattttctttgctgt

SEQ ID NO: 76693 - DNA, 22 bp, synthetic construct
  misc_feature 1..22: note = chemically synthesized
  source 1..22: mol_type = other DNA
tattattttctttgctgtgcag

SEQ ID NO: 76694 - DNA, 22 bp, synthetic construct
  misc_feature 1..22: note = chemically synthesized
  source 1..22: mol_type = other DNA
attattttctttgctgtgcaga

SEQ ID NO: 76695 - DNA, 22 bp, synthetic construct
  misc_feature 1..22: note = chemically synthesized
  source 1..22: mol_type = other DNA
ttattttctttgctgtgcagag

SEQ ID NO: 76696 - DNA, 22 bp, synthetic construct
  misc_feature 1..22: note = chemically synthesized
  source 1..22: mol_type = other DNA
ttttctttgctgtgcagagctt

SEQ ID NO: 76697 - DNA, 22 bp, synthetic construct
  misc_feature 1..22: note = chemically synthesized
  source 1..22: mol_type = other DNA
tctttgctgtgcagagcttcaa

SEQ ID NO: 76698 - DNA, 22 bp, synthetic construct
  misc_feature 1..22: note = chemically synthesized
  source 1..22: mol_type = other DNA
ctttgctgtgcagagcttcaaa

SEQ ID NO: 76699 - DNA, 22 bp, synthetic construct
  misc_feature 1..22: note = chemically synthesized
  source 1..22: mol_type = other DNA
tttgctgtgcagagcttcaaac

SEQ ID NO: 76700 - DNA, 22 bp, synthetic construct
  misc_feature 1..22: note = chemically synthesized
  source 1..22: mol_type = other DNA
tgctgtgcagagcttcaaacaa

SEQ ID NO: 76701 - DNA, 22 bp, synthetic construct
  misc_feature 1..22: note = chemically synthesized
  source 1..22: mol_type = other DNA
gctgtgcagagcttcaaacaat

SEQ ID NO: 76702 - DNA, 22 bp, synthetic construct
  misc_feature 1..22: note = chemically synthesized
  source 1..22: mol_type = other DNA
ctgtgcagagcttcaaacaatc

SEQ ID NO: 76703 - DNA, 22 bp, synthetic construct
  misc_feature 1..22: note = chemically synthesized
  source 1..22: mol_type = other DNA
tgcagagcttcaaacaatccca

SEQ ID NO: 76704 - DNA, 22 bp, synthetic construct
  misc_feature 1..22: note = chemically synthesized
  source 1..22: mol_type = other DNA
caaacaatcccaattgtctatt

SEQ ID NO: 76705 - DNA, 22 bp, synthetic construct
  misc_feature 1..22: note = chemically synthesized
  source 1..22: mol_type = other DNA
aaacaatcccaattgtctattt

SEQ ID NO: 76706 - DNA, 22 bp, synthetic construct
  misc_feature 1..22: note = chemically synthesized
  source 1..22: mol_type = other DNA
tctatttttgttttggttattt

SEQ ID NO: 76707 - DNA, 22 bp, synthetic construct
  misc_feature 1..22: note = chemically synthesized
  source 1..22: mol_type = other DNA
tttttgttttggttatttgtgc

SEQ ID NO: 76708 - DNA, 22 bp, synthetic construct
  misc_feature 1..22: note = chemically synthesized
  source 1..22: mol_type = other DNA
ttgttttggttatttgtgcttt

SEQ ID NO: 76709 - DNA, 22 bp, synthetic construct
  misc_feature 1..22: note = chemically synthesized
  source 1..22: mol_type = other DNA
tgttttggttatttgtgctttt

SEQ ID NO: 76710 - DNA, 22 bp, synthetic construct
  misc_feature 1..22: note = chemically synthesized
  source 1..22: mol_type = other DNA
gttttggttatttgtgcttttg

SEQ ID NO: 76711 - DNA, 22 bp, synthetic construct
  misc_feature 1..22: note = chemically synthesized
  source 1..22: mol_type = other DNA
ttttggttatttgtgcttttga

SEQ ID NO: 76712 - DNA, 22 bp, synthetic construct
  misc_feature 1..22: note = chemically synthesized
  source 1..22: mol_type = other DNA
tggttatttgtgcttttgaagt

SEQ ID NO: 76713 - DNA, 22 bp, synthetic construct
  misc_feature 1..22: note = chemically synthesized
  source 1..22: mol_type = other DNA
ggttatttgtgcttttgaagtc

SEQ ID NO: 76714 - DNA, 22 bp, synthetic construct
  misc_feature 1..22: note = chemically synthesized
  source 1..22: mol_type = other DNA
gttatttgtgcttttgaagtct

SEQ ID NO: 76715 - DNA, 22 bp, synthetic construct
  misc_feature 1..22: note = chemically synthesized
  source 1..22: mol_type = other DNA
tttgtgcttttgaagtctcata

SEQ ID NO: 76716 - DNA, 22 bp, synthetic construct
  misc_feature 1..22: note = chemically synthesized
  source 1..22: mol_type = other DNA
gtgcttttgaagtctcatagac

SEQ ID NO: 76717 - DNA, 22 bp, synthetic construct
  misc_feature 1..22: note = chemically synthesized
  source 1..22: mol_type = other DNA
tgcttttgaagtctcatagaca

SEQ ID NO: 76718 - DNA, 22 bp, synthetic construct
  misc_feature 1..22: note = chemically synthesized
  source 1..22: mol_type = other DNA
ttgaagtctcatagacagtatt

SEQ ID NO: 76719 - DNA, 22 bp, synthetic construct
  misc_feature 1..22: note = chemically synthesized
  source 1..22: mol_type = other DNA
tgaagtctcatagacagtattt

SEQ ID NO: 76720 - DNA, 22 bp, synthetic construct
  misc_feature 1..22: note = chemically synthesized
  source 1..22: mol_type = other DNA
gaagtctcatagacagtatttg

SEQ ID NO: 76721 - DNA, 22 bp, synthetic construct
  misc_feature 1..22: note = chemically synthesized
  source 1..22: mol_type = other DNA
aagtctcatagacagtatttgc

SEQ ID NO: 76722 - DNA, 22 bp, synthetic construct
  misc_feature 1..22: note = chemically synthesized
  source 1..22: mol_type = other DNA
atagacagtatttgcccaaatc

SEQ ID NO: 76723 - DNA, 22 bp, synthetic construct
  misc_feature 1..22: note = chemically synthesized
  source 1..22: mol_type = other DNA
gcccaaatcaatgaatgccctg

SEQ ID NO: 76724 - DNA, 22 bp, synthetic construct
  misc_feature 1..22: note = chemically synthesized
  source 1..22: mol_type = other DNA
cccaaatcaatgaatgccctgg

SEQ ID NO: 76725 - DNA, 22 bp, synthetic construct
  misc_feature 1..22: note = chemically synthesized
  source 1..22: mol_type = other DNA
gagggtttccccactgttttct

SEQ ID NO: 76726 - DNA, 22 bp, synthetic construct
  misc_feature 1..22: note = chemically synthesized
  source 1..22: mol_type = other DNA
ccccactgttttcttccagtag

SEQ ID NO: 76727 - DNA, 22 bp, synthetic construct
  misc_feature 1..22: note = chemically synthesized
  source 1..22: mol_type = other DNA
cccactgttttcttccagtagt

SEQ ID NO: 76728 - DNA, 22 bp, synthetic construct
  misc_feature 1..22: note = chemically synthesized
  source 1..22: mol_type = other DNA
ttttcttccagtagtttcataa

SEQ ID NO: 76729 - DNA, 22 bp, synthetic construct
  misc_feature 1..22: note = chemically synthesized
  source 1..22: mol_type = other DNA
tcttccagtagtttcataattt

SEQ ID NO: 76730 - DNA, 22 bp, synthetic construct
  misc_feature 1..22: note = chemically synthesized
  source 1..22: mol_type = other DNA
cttccagtagtttcataatttc

SEQ ID NO: 76731 - DNA, 22 bp, synthetic construct
  misc_feature 1..22: note = chemically synthesized
  source 1..22: mol_type = other DNA
ttccagtagtttcataatttca

SEQ ID NO: 76732 - DNA, 22 bp, synthetic construct
  misc_feature 1..22: note = chemically synthesized
  source 1..22: mol_type = other DNA
ccagtagtttcataatttcagg

SEQ ID NO: 76733 - DNA, 22 bp, synthetic construct
  misc_feature 1..22: note = chemically synthesized
  source 1..22: mol_type = other DNA
cagtagtttcataatttcaggt

SEQ ID NO: 76734 - DNA, 22 bp, synthetic construct
  misc_feature 1..22: note = chemically synthesized
  source 1..22: mol_type = other DNA
cataatttcaggtattggattc

SEQ ID NO: 76735 - DNA, 22 bp, synthetic construct
  misc_feature 1..22: note = chemically synthesized
  source 1..22: mol_type = other DNA
ataatttcaggtattggattca

SEQ ID NO: 76736 - DNA, 22 bp, synthetic construct
  misc_feature 1..22: note = chemically synthesized
  source 1..22: mol_type = other DNA
caggtattggattcaagtcttt

SEQ ID NO: 76737 - DNA, 22 bp, synthetic construct
  misc_feature 1..22: note = chemically synthesized
  source 1..22: mol_type = other DNA
aggtattggattcaagtcttta

SEQ ID NO: 76738 - DNA, 22 bp, synthetic construct
  misc_feature 1..22: note = chemically synthesized
  source 1..22: mol_type = other DNA
gattcaagtctttaatccatct

SEQ ID NO: 76739 - DNA, 22 bp, synthetic construct
  misc_feature 1..22: note = chemically synthesized
  source 1..22: mol_type = other DNA
aagtctttaatccatcttgatt

SEQ ID NO: 76740 - DNA, 22 bp, synthetic construct
  misc_feature 1..22: note = chemically synthesized
  source 1..22: mol_type = other DNA
taatccatcttgatttgatttt

SEQ ID NO: 76741 - DNA, 22 bp, synthetic construct
  misc_feature 1..22: note = chemically synthesized
  source 1..22: mol_type = other DNA
aatccatcttgatttgattttt

SEQ ID NO: 76742 - DNA, 22 bp, synthetic construct
  misc_feature 1..22: note = chemically synthesized
  source 1..22: mol_type = other DNA
atccatcttgatttgatttttg

SEQ ID NO: 76743 - DNA, 22 bp, synthetic construct
  misc_feature 1..22: note = chemically synthesized
  source 1..22: mol_type = other DNA
gatttgatttttgtatatagtg

SEQ ID NO: 76744 - DNA, 22 bp, synthetic construct
  misc_feature 1..22: note = chemically synthesized
  source 1..22: mol_type = other DNA
atttgatttttgtatatagtga

SEQ ID NO: 76745 - DNA, 22 bp, synthetic construct
  misc_feature 1..22: note = chemically synthesized
  source 1..22: mol_type = other DNA
gatttttgtatatagtgagaga

SEQ ID NO: 76746 - DNA, 22 bp, synthetic construct
  misc_feature 1..22: note = chemically synthesized
  source 1..22: mol_type = other DNA
atttttgtatatagtgagagat

SEQ ID NO: 76747 - DNA, 22 bp, synthetic construct
  misc_feature 1..22: note = chemically synthesized
  source 1..22: mol_type = other DNA
ttgtatatagtgagagataggg

SEQ ID NO: 76748 - DNA, 22 bp, synthetic construct
  misc_feature 1..22: note = chemically synthesized
  source 1..22: mol_type = other DNA
tgtatatagtgagagatagggg

SEQ ID NO: 76749 - DNA, 22 bp, synthetic construct
  misc_feature 1..22: note = chemically synthesized
  source 1..22: mol_type = other DNA
gtatatagtgagagataggggt

SEQ ID NO: 76750 - DNA, 22 bp, synthetic construct
  misc_feature 1..22: note = chemically synthesized
  source 1..22: mol_type = other DNA
tatatagtgagagataggggtc

SEQ ID NO: 76751 - DNA, 22 bp, synthetic construct
  misc_feature 1..22: note = chemically synthesized
  source 1..22: mol_type = other DNA
tactcttttgcaaatggatatc

SEQ ID NO: 76752 - DNA, 22 bp, synthetic construct
  misc_feature 1..22: note = chemically synthesized
  source 1..22: mol_type = other DNA
actcttttgcaaatggatatcc

SEQ ID NO: 76753 - DNA, 22 bp, synthetic construct
  misc_feature 1..22: note = chemically synthesized
  source 1..22: mol_type = other DNA
ctcttttgcaaatggatatcca

SEQ ID NO: 76754 - DNA, 22 bp, synthetic construct
  misc_feature 1..22: note = chemically synthesized
  source 1..22: mol_type = other DNA
ttttgcaaatggatatccagtt

SEQ ID NO: 76755 - DNA, 22 bp, synthetic construct
  misc_feature 1..22: note = chemically synthesized
  source 1..22: mol_type = other DNA
ttgcaaatggatatccagtttt

SEQ ID NO: 76756 - DNA, 22 bp, synthetic construct
  misc_feature 1..22: note = chemically synthesized
  source 1..22: mol_type = other DNA
tgcaaatggatatccagttttc

SEQ ID NO: 76757 - DNA, 22 bp, synthetic construct
  misc_feature 1..22: note = chemically synthesized
  source 1..22: mol_type = other DNA
gcaaatggatatccagttttcc

SEQ ID NO: 76758 - DNA, 22 bp, synthetic construct
  misc_feature 1..22: note = chemically synthesized
  source 1..22: mol_type = other DNA
caaatggatatccagttttcct

SEQ ID NO: 76759 - DNA, 22 bp, synthetic construct
  misc_feature 1..22: note = chemically synthesized
  source 1..22: mol_type = other DNA
tcctagcactgtttcttgaaaa

SEQ ID NO: 76760 - DNA, 22 bp, synthetic construct
  misc_feature 1..22: note = chemically synthesized
  source 1..22: mol_type = other DNA
cctagcactgtttcttgaaaag

SEQ ID NO: 76761 - DNA, 22 bp, synthetic construct
  misc_feature 1..22: note = chemically synthesized
  source 1..22: mol_type = other DNA
ctagcactgtttcttgaaaaga

SEQ ID NO: 76762 - DNA, 22 bp, synthetic construct
  misc_feature 1..22: note = chemically synthesized
  source 1..22: mol_type = other DNA
gcactgtttcttgaaaagactg

SEQ ID NO: 76763 - DNA, 22 bp, synthetic construct
  misc_feature 1..22: note = chemically synthesized
  source 1..22: mol_type = other DNA
tttcttgaaaagactgtttgta

SEQ ID NO: 76764 - DNA, 22 bp, synthetic construct
  misc_feature 1..22: note = chemically synthesized
  source 1..22: mol_type = other DNA
cttgaaaagactgtttgtacct

SEQ ID NO: 76765 - DNA, 22 bp, synthetic construct
  misc_feature 1..22: note = chemically synthesized
  source 1..22: mol_type = other DNA
ttgaaaagactgtttgtacctt

SEQ ID NO: 76766 - DNA, 22 bp, synthetic construct
  misc_feature 1..22: note = chemically synthesized
  source 1..22: mol_type = other DNA
gaaaagactgtttgtacctttt

SEQ ID NO: 76767 - DNA, 22 bp, synthetic construct
  misc_feature 1..22: note = chemically synthesized
  source 1..22: mol_type = other DNA
aaaagactgtttgtaccttttt

SEQ ID NO: 76768 - DNA, 22 bp, synthetic construct
  misc_feature 1..22: note = chemically synthesized
  source 1..22: mol_type = other DNA
tttgtacctttttttttttttt

SEQ ID NO: 76769 - DNA, 22 bp, synthetic construct
  misc_feature 1..22: note = chemically synthesized
  source 1..22: mol_type = other DNA
gtaccttttttttttttttttt

SEQ ID NO: 76770 - DNA, 22 bp, synthetic construct
  misc_feature 1..22: note = chemically synthesized
  source 1..22: mol_type = other DNA
tacctttttttttttttttttt

SEQ ID NO: 76771 - DNA, 22 bp, synthetic construct
  misc_feature 1..22: note = chemically synthesized
  source 1..22: mol_type = other DNA
ttttttttttttttttgagatg

SEQ ID NO: 76772 - DNA, 22 bp, synthetic construct
  misc_feature 1..22: note = chemically synthesized
  source 1..22: mol_type = other DNA
tttttttttttttttgagatgg

SEQ ID NO: 76773 - DNA, 22 bp, synthetic construct
  misc_feature 1..22: note = chemically synthesized
  source 1..22: mol_type = other DNA
ttttttttttttttgagatgga

SEQ ID NO: 76774 - DNA, 22 bp, synthetic construct
  misc_feature 1..22: note = chemically synthesized
  source 1..22: mol_type = other DNA
tttttttttttttgagatggag

SEQ ID NO: 76775 - DNA, 22 bp, synthetic construct
  misc_feature 1..22: note = chemically synthesized
  source 1..22: mol_type = other DNA
ttttttttttttgagatggagt

SEQ ID NO: 76776 - DNA, 22 bp, synthetic construct
  misc_feature 1..22: note = chemically synthesized
  source 1..22: mol_type = other DNA
tttttttttttgagatggagtc

SEQ ID NO: 76777 - DNA, 22 bp, synthetic construct
  misc_feature 1..22: note = chemically synthesized
  source 1..22: mol_type = other DNA
ttttttttttgagatggagtct

SEQ ID NO: 76778 - DNA, 22 bp, synthetic construct
  misc_feature 1..22: note = chemically synthesized
  source 1..22: mol_type = other DNA
tttttttttgagatggagtctc

SEQ ID NO: 76779 - DNA, 22 bp, synthetic construct
  misc_feature 1..22: note = chemically synthesized
  source 1..22: mol_type = other DNA
ttttttttgagatggagtctca

SEQ ID NO: 76780 - DNA, 22 bp, synthetic construct
  misc_feature 1..22: note = chemically synthesized
  source 1..22: mol_type = other DNA
tttttttgagatggagtctcac

SEQ ID NO: 76781 - DNA, 22 bp, synthetic construct
  misc_feature 1..22: note = chemically synthesized
  source 1..22: mol_type = other DNA
ttttttgagatggagtctcact

SEQ ID NO: 76782 - DNA, 22 bp, synthetic construct
  misc_feature 1..22: note = chemically synthesized
  source 1..22: mol_type = other DNA
tttttgagatggagtctcactg

SEQ ID NO: 76783 - DNA, 22 bp, synthetic construct
  misc_feature 1..22: note = chemically synthesized
  source 1..22: mol_type = other DNA
ttttgagatggagtctcactgt

SEQ ID NO: 76784 - DNA, 22 bp, synthetic construct
  misc_feature 1..22: note = chemically synthesized
  source 1..22: mol_type = other DNA
tttgagatggagtctcactgtt

SEQ ID NO: 76785 - DNA, 22 bp, synthetic construct
  misc_feature 1..22: note = chemically synthesized
  source 1..22: mol_type = other DNA
ttgagatggagtctcactgttg

SEQ ID NO: 76786 - DNA, 22 bp, synthetic construct
  misc_feature 1..22: note = chemically synthesized
  source 1..22: mol_type = other DNA
tgagatggagtctcactgttgc

SEQ ID NO: 76787 - DNA, 22 bp, synthetic construct
  misc_feature 1..22: note = chemically synthesized
  source 1..22: mol_type = other DNA
gagatggagtctcactgttgcc

SEQ ID NO: 76788 - DNA, 22 bp, synthetic construct
  misc_feature 1..22: note = chemically synthesized
  source 1..22: mol_type = other DNA
agatggagtctcactgttgccc

SEQ ID NO: 76789 - DNA, 22 bp, synthetic construct
  misc_feature 1..22: note = chemically synthesized
  source 1..22: mol_type = other DNA
actgttgcccaggctggagtgc

SEQ ID NO: 76790 - DNA, 22 bp, synthetic construct
  misc_feature 1..22: note = chemically synthesized
  source 1..22: mol_type = other DNA
ttgcccaggctggagtgcagtg

SEQ ID NO: 76791 - DNA, 22 bp, synthetic construct
  misc_feature 1..22: note = chemically synthesized
  source 1..22: mol_type = other DNA
cccaggctggagtgcagtggca

SEQ ID NO: 76792 - DNA, 22 bp, synthetic construct
  misc_feature 1..22: note = chemically synthesized
  source 1..22: mol_type = other DNA
gagtgcagtggcagcacaatct

SEQ ID NO: 76793 - DNA, 22 bp, synthetic construct
  misc_feature 1..22: note = chemically synthesized
  source 1..22: mol_type = other DNA
ggatcactgcaacttctgcctc

SEQ ID NO: 76794 - DNA, 22 bp, synthetic construct
  misc_feature 1..22: note = chemically synthesized
  source 1..22: mol_type = other DNA
gatcactgcaacttctgcctcc

SEQ ID NO: 76795 - DNA, 22 bp, synthetic construct
  misc_feature 1..22: note = chemically synthesized
  source 1..22: mol_type = other DNA
caacttctgcctcccaggttca

SEQ ID NO: 76796 - DNA, 22 bp, synthetic construct
  misc_feature 1..22: note = chemically synthesized
  source 1..22: mol_type = other DNA
ctgcctcccaggttcaagcgat

SEQ ID NO: 76797 - DNA, 22 bp, synthetic construct
  misc_feature 1..22: note = chemically synthesized
  source 1..22: mol_type = other DNA
tgcctcccaggttcaagcgatt

SEQ ID NO: 76798 - DNA, 22 bp, synthetic construct
  misc_feature 1..22: note = chemically synthesized
  source 1..22: mol_type = other DNA
cctcccaggttcaagcgattct

SEQ ID NO: 76799 - DNA, 22 bp, synthetic construct
  misc_feature 1..22: note = chemically synthesized
  source 1..22: mol_type = other DNA
ccaggttcaagcgattctcctg

SEQ ID NO: 76800 - DNA, 22 bp, synthetic construct
  misc_feature 1..22: note = chemically synthesized
  source 1..22: mol_type = other DNA
aagcgattctcctgcctcagcc

SEQ ID NO: 76801 - DNA, 22 bp, synthetic construct
  misc_feature 1..22: note = chemically synthesized
  source 1..22: mol_type = other DNA
tcctgcctcagcctcctgagta

SEQ ID NO: 76802 - DNA, 22 bp, synthetic construct
  misc_feature 1..22: note = chemically synthesized
  source 1..22: mol_type = other DNA
ctgcctcagcctcctgagtatc

SEQ ID NO: 76803 - DNA, 22 bp, synthetic construct
  misc_feature 1..22: note = chemically synthesized
  source 1..22: mol_type = other DNA
cctcagcctcctgagtatctgg

SEQ ID NO: 76804 - DNA, 22 bp, synthetic construct
  misc_feature 1..22: note = chemically synthesized
  source 1..22: mol_type = other DNA
agcctcctgagtatctgggatt

SEQ ID NO: 76805 - DNA, 22 bp, synthetic construct
  misc_feature 1..22: note = chemically synthesized
  source 1..22: mol_type = other DNA
ctgagtatctgggattacagga

SEQ ID NO: 76806 - DNA, 22 bp, synthetic construct
  misc_feature 1..22: note = chemically synthesized
  source 1..22: mol_type = other DNA
agtatctgggattacaggagcg

SEQ ID NO: 76807 - DNA, 22 bp, synthetic construct
  misc_feature 1..22: note = chemically synthesized
  source 1..22: mol_type = other DNA
ggattacaggagcgccccacca

SEQ ID NO: 76808 - DNA, 22 bp, synthetic construct
  misc_feature 1..22: note = chemically synthesized
  source 1..22: mol_type = other DNA
caggagcgccccaccatgcctg

SEQ ID NO: 76809 - DNA, 22 bp, synthetic construct
  misc_feature 1..22: note = chemically synthesized
  source 1..22: mol_type = other DNA
gctaatttttgtatttttagta

SEQ ID NO: 76810 - DNA, 22 bp, synthetic construct
  misc_feature 1..22: note = chemically synthesized
  source 1..22: mol_type = other DNA
atttttgtatttttagtagaga

SEQ ID NO: 76811 - DNA, 22 bp, synthetic construct
  misc_feature 1..22: note = chemically synthesized
  source 1..22: mol_type = other DNA
ttgtatttttagtagagacgga

SEQ ID NO: 76812 - DNA, 22 bp, synthetic construct
  misc_feature 1..22: note = chemically synthesized
  source 1..22: mol_type = other DNA
tgtatttttagtagagacggag

SEQ ID NO: 76813 - DNA, 22 bp, synthetic construct
  misc_feature 1..22: note = chemically synthesized
  source 1..22: mol_type = other DNA
gtatttttagtagagacggagt

SEQ ID NO: 76814 - DNA, 22 bp, synthetic construct
  misc_feature 1..22: note = chemically synthesized
  source 1..22: mol_type = other DNA
tatttttagtagagacggagtg

SEQ ID NO: 76815 - DNA, 22 bp, synthetic construct
  misc_feature 1..22: note = chemically synthesized
  source 1..22: mol_type = other DNA
ttagtagagacggagtgtcacc

SEQ ID NO: 76816 - DNA, 22 bp, synthetic construct
  misc_feature 1..22: note = chemically synthesized
  source 1..22: mol_type = other DNA
tagtagagacggagtgtcacca

SEQ ID NO: 76817 - DNA, 22 bp, synthetic construct
  misc_feature 1..22: note = chemically synthesized
  source 1..22: mol_type = other DNA
agtagagacggagtgtcaccac

SEQ ID NO: 76818 - DNA, 22 bp, synthetic construct
  misc_feature 1..22: note = chemically synthesized
  source 1..22: mol_type = other DNA
gtagagacggagtgtcaccacg

SEQ ID NO: 76819 - DNA, 22 bp, synthetic construct
  misc_feature 1..22: note = chemically synthesized
  source 1..22: mol_type = other DNA
gtcaggctggtcttgaactcct

SEQ ID NO: 76820 - DNA, 22 bp, synthetic construct
  misc_feature 1..22: note = chemically synthesized
  source 1..22: mol_type = other DNA
gtcttgaactcctgacctcgtg

SEQ ID NO: 76821 - DNA, 22 bp, synthetic construct
  misc_feature 1..22: note = chemically synthesized
  source 1..22: mol_type = other DNA
gaactcctgacctcgtgatccc

SEQ ID NO: 76822 - DNA, 22 bp, synthetic construct
  misc_feature 1..22: note = chemically synthesized
  source 1..22: mol_type = other DNA
aactcctgacctcgtgatcccc

SEQ ID NO: 76823 - DNA, 22 bp, synthetic construct
  misc_feature 1..22: note = chemically synthesized
  source 1..22: mol_type = other DNA
ctgacctcgtgatccccccacc

SEQ ID NO: 76824 - DNA, 22 bp, synthetic construct
  misc_feature 1..22: note = chemically synthesized
  source 1..22: mol_type = other DNA
acctcgtgatccccccacctca

SEQ ID NO: 76825 - DNA, 22 bp, synthetic construct
  misc_feature 1..22: note = chemically synthesized
  source 1..22: mol_type = other DNA
gtgatccccccacctcagcctc

SEQ ID NO: 76826 - DNA, 22 bp, synthetic construct
  misc_feature 1..22: note = chemically synthesized
  source 1..22: mol_type = other DNA
agcctcacaaagtgctgggatt

SEQ ID NO: 76827 - DNA, 22 bp, synthetic construct
  misc_feature 1..22: note = chemically synthesized
  source 1..22: mol_type = other DNA
acaaagtgctgggattacaggt

SEQ ID NO: 76828 - DNA, 22 bp, synthetic construct
  misc_feature 1..22: note = chemically synthesized
  source 1..22: mol_type = other DNA
ggattacaggtgtgagccactg

SEQ ID NO: 76829 - DNA, 22 bp, synthetic construct
  misc_feature 1..22: note = chemically synthesized
  source 1..22: mol_type = other DNA
caggtgtgagccactgcacctg

SEQ ID NO: 76830 - DNA, 22 bp, synthetic construct
  misc_feature 1..22: note = chemically synthesized
  source 1..22: mol_type = other DNA
cacctggcccatttgttcctat

SEQ ID NO: 76831 - DNA, 22 bp, synthetic construct
  misc_feature 1..22: note = chemically synthesized
  source 1..22: mol_type = other DNA
gcccatttgttcctatttttat

SEQ ID NO: 76832 - DNA, 22 bp, synthetic construct
  misc_feature 1..22: note = chemically synthesized
  source 1..22: mol_type = other DNA
gttcctatttttatgttcttga

SEQ ID NO: 76833 - DNA, 22 bp, synthetic construct
  misc_feature 1..22: note = chemically synthesized
  source 1..22: mol_type = other DNA
ttcctatttttatgttcttgat

SEQ ID NO: 76834 - DNA, 22 bp, synthetic construct
  misc_feature 1..22: note = chemically synthesized
  source 1..22: mol_type = other DNA
ctatttttatgttcttgatgcc

SEQ ID NO: 76835 - DNA, 22 bp, synthetic construct
  misc_feature 1..22: note = chemically synthesized
  source 1..22: mol_type = other DNA
tttttatgttcttgatgccttt

SEQ ID NO: 76836 - DNA, 22 bp, synthetic construct
  misc_feature 1..22: note = chemically synthesized
  source 1..22: mol_type = other DNA
ttatgttcttgatgcctttgtt

SEQ ID NO: 76837 - DNA, 22 bp, synthetic construct
  misc_feature 1..22: note = chemically synthesized
  source 1..22: mol_type = other DNA
tatgttcttgatgcctttgtta

SEQ ID NO: 76838 - DNA, 22 bp, synthetic construct
  misc_feature 1..22: note = chemically synthesized
  source 1..22: mol_type = other DNA
atgttcttgatgcctttgttaa

SEQ ID NO: 76839 - DNA, 22 bp, synthetic construct
  misc_feature 1..22: note = chemically synthesized
  source 1..22: mol_type = other DNA
tgttcttgatgcctttgttaaa

SEQ ID NO: 76840 - DNA, 22 bp, synthetic construct
  misc_feature 1..22: note = chemically synthesized
  source 1..22: mol_type = other DNA
ttgatgcctttgttaaagatga

SEQ ID NO: 76841 - DNA, 22 bp, synthetic construct
  misc_feature 1..22: note = chemically synthesized
  source 1..22: mol_type = other DNA
gatgcctttgttaaagatgact

SEQ ID NO: 76842 - DNA, 22 bp, synthetic construct
  misc_feature 1..22: note = chemically synthesized
  source 1..22: mol_type = other DNA
atgcctttgttaaagatgactt

SEQ ID NO: 76843 - DNA, 22 bp, synthetic construct
  misc_feature 1..22: note = chemically synthesized
  source 1..22: mol_type = other DNA
tgttaaagatgacttggttgtt

SEQ ID NO: 76844 - DNA, 22 bp, synthetic construct
  misc_feature 1..22: note = chemically synthesized
  source 1..22: mol_type = other DNA
gttaaagatgacttggttgtta

SEQ ID NO: 76845 - DNA, 22 bp, synthetic construct
  misc_feature 1..22: note = chemically synthesized
  source 1..22: mol_type = other DNA
ttaaagatgacttggttgttaa

SEQ ID NO: 76846 - DNA, 22 bp, synthetic construct
  misc_feature 1..22: note = chemically synthesized
  source 1..22: mol_type = other DNA
aagatgacttggttgttaagtg

SEQ ID NO: 76847 - DNA, 22 bp, synthetic construct
  misc_feature 1..22: note = chemically synthesized
  source 1..22: mol_type = other DNA
ggttgttaagtgcctggatttg

SEQ ID NO: 76848 - DNA, 22 bp, synthetic construct
  misc_feature 1..22: note = chemically synthesized
  source 1..22: mol_type = other DNA
gttgttaagtgcctggatttgc

SEQ ID NO: 76849 - DNA, 22 bp, synthetic construct
  misc_feature 1..22: note = chemically synthesized
  source 1..22: mol_type = other DNA
ttaagtgcctggatttgcatct

SEQ ID NO: 76850 - DNA, 22 bp, synthetic construct
  misc_feature 1..22: note = chemically synthesized
  source 1..22: mol_type = other DNA
agtgcctggatttgcatctggg

SEQ ID NO: 76851 - DNA, 22 bp, synthetic construct
  misc_feature 1..22: note = chemically synthesized
  source 1..22: mol_type = other DNA
gatttgcatctgggttctctat

SEQ ID NO: 76852 - DNA, 22 bp, synthetic construct
  misc_feature 1..22: note = chemically synthesized
  source 1..22: mol_type = other DNA
gcatctgggttctctatgctgt

SEQ ID NO: 76853 - DNA, 22 bp, synthetic construct
  misc_feature 1..22: note = chemically synthesized
  source 1..22: mol_type = other DNA
catctgggttctctatgctgtt

SEQ ID NO: 76854 - DNA, 22 bp, synthetic construct
  misc_feature 1..22: note = chemically synthesized
  source 1..22: mol_type = other DNA
ggttctctatgctgttccattg

SEQ ID NO: 76855 - DNA, 22 bp, synthetic construct
  misc_feature 1..22: note = chemically synthesized
  source 1..22: mol_type = other DNA
tctatgctgttccattgggctg

SEQ ID NO: 76856 - DNA, 22 bp, synthetic construct
  misc_feature 1..22: note = chemically synthesized
  source 1..22: mol_type = other DNA
tatgctgttccattgggctgta

SEQ ID NO: 76857 - DNA, 22 bp, synthetic construct
  misc_feature 1..22: note = chemically synthesized
  source 1..22: mol_type = other DNA
tgctgttccattgggctgtatg

SEQ ID NO: 76858 - DNA, 22 bp, synthetic construct
  misc_feature 1..22: note = chemically synthesized
  source 1..22: mol_type = other DNA
ttccattgggctgtatgtctgt

SEQ ID NO: 76859 - DNA, 22 bp, synthetic construct
  misc_feature 1..22: note = chemically synthesized
  source 1..22: mol_type = other DNA
cattgggctgtatgtctgtctt

SEQ ID NO: 76860 - DNA, 22 bp, synthetic construct
  misc_feature 1..22: note = chemically synthesized
  source 1..22: mol_type = other DNA
ggctgtatgtctgtctttatgc

SEQ ID NO: 76861 - DNA, 22 bp, synthetic construct
  misc_feature 1..22: note = chemically synthesized
  source 1..22: mol_type = other DNA
tatgtctgtctttatgcagtac

SEQ ID NO: 76862 - DNA, 22 bp, synthetic construct
  misc_feature 1..22: note = chemically synthesized
  source 1..22: mol_type = other DNA
tctttatgcagtactgtgctgt

SEQ ID NO: 76863 - DNA, 22 bp, synthetic construct
  misc_feature 1..22: note = chemically synthesized
  source 1..22: mol_type = other DNA
tatgcagtactgtgctgtttgg

SEQ ID NO: 76864 - DNA, 22 bp, synthetic construct
  misc_feature 1..22: note = chemically synthesized
  source 1..22: mol_type = other DNA
atgcagtactgtgctgtttggc

SEQ ID NO: 76865 - DNA, 22 bp, synthetic construct
  misc_feature 1..22: note = chemically synthesized
  source 1..22: mol_type = other DNA
tgcagtactgtgctgtttggct

SEQ ID NO: 76866 - DNA, 22 bp, synthetic construct
  misc_feature 1..22: note = chemically synthesized
  source 1..22: mol_type = other DNA
tgctgtttggctactgtagctt

SEQ ID NO: 76867 - DNA, 22 bp, synthetic construct
  misc_feature 1..22: note = chemically synthesized
  source 1..22: mol_type = other DNA
tttggctactgtagctttgtag

SEQ ID NO: 76868 - DNA, 22 bp, synthetic construct
  misc_feature 1..22: note = chemically synthesized
  source 1..22: mol_type = other DNA
ggctactgtagctttgtagtag

SEQ ID NO: 76869 - DNA, 22 bp, synthetic construct
  misc_feature 1..22: note = chemically synthesized
  source 1..22: mol_type = other DNA
gctactgtagctttgtagtaga

SEQ ID NO: 76870 - DNA, 22 bp, synthetic construct
  misc_feature 1..22: note = chemically synthesized
  source 1..22: mol_type = other DNA
ctgtagctttgtagtagatttt

SEQ ID NO: 76871 - DNA, 22 bp, synthetic construct
  misc_feature 1..22: note = chemically synthesized
  source 1..22: mol_type = other DNA
tagctttgtagtagattttgaa

SEQ ID NO: 76872 - DNA, 22 bp, synthetic construct
  misc_feature 1..22: note = chemically synthesized
  source 1..22: mol_type = other DNA
tgtagtagattttgaagtcata

SEQ ID NO: 76873 - DNA, 22 bp, synthetic construct
  misc_feature 1..22: note = chemically synthesized
  source 1..22: mol_type = other DNA
gtagtagattttgaagtcatat

SEQ ID NO: 76874 - DNA, 22 bp, synthetic construct
  misc_feature 1..22: note = chemically synthesized
  source 1..22: mol_type = other DNA
tagtagattttgaagtcatata

SEQ ID NO: 76875 - DNA, 22 bp, synthetic construct
  misc_feature 1..22: note = chemically synthesized
  source 1..22: mol_type = other DNA
tgaagtcatatagtgtgatagc

SEQ ID NO: 76876 - DNA, 22 bp, synthetic construct
  misc_feature 1..22: note = chemically synthesized
  source 1..22: mol_type = other DNA
gaagtcatatagtgtgatagct

SEQ ID NO: 76877 - DNA, 22 bp, synthetic construct
  misc_feature 1..22: note = chemically synthesized
  source 1..22: mol_type = other DNA
aagtcatatagtgtgatagctt

SEQ ID NO: 76878 - DNA, 22 bp, synthetic construct
  misc_feature 1..22: note = chemically synthesized
  source 1..22: mol_type = other DNA
tggttttgttctttttgctcag

SEQ ID NO: 76879 - DNA, 22 bp, synthetic construct
  misc_feature 1..22: note = chemically synthesized
  source 1..22: mol_type = other DNA
ggttttgttctttttgctcagg

SEQ ID NO: 76880 - DNA, 22 bp, synthetic construct
  misc_feature 1..22: note = chemically synthesized
  source 1..22: mol_type = other DNA
gttttgttctttttgctcagga

SEQ ID NO: 76881 - DNA, 22 bp, synthetic construct
  misc_feature 1..22: note = chemically synthesized
  source 1..22: mol_type = other DNA
tgttctttttgctcaggattgc

SEQ ID NO: 76882 - DNA, 22 bp, synthetic construct
  misc_feature 1..22: note = chemically synthesized
  source 1..22: mol_type = other DNA
gttctttttgctcaggattgct

SEQ ID NO: 76883 - DNA, 22 bp, synthetic construct
  misc_feature 1..22: note = chemically synthesized
  source 1..22: mol_type = other DNA
ttctttttgctcaggattgctt

SEQ ID NO: 76884 - DNA, 22 bp, synthetic construct
  misc_feature 1..22: note = chemically synthesized
  source 1..22: mol_type = other DNA
tttttgctcaggattgctttag

SEQ ID NO: 76885 - DNA, 22 bp, synthetic construct
  misc_feature 1..22: note = chemically synthesized
  source 1..22: mol_type = other DNA
tttgctcaggattgctttagct

SEQ ID NO: 76886 - DNA, 22 bp, synthetic construct
  misc_feature 1..22: note = chemically synthesized
  source 1..22: mol_type = other DNA
ttgctcaggattgctttagcta

SEQ ID NO: 76887 - DNA, 22 bp, synthetic construct
  misc_feature 1..22: note = chemically synthesized
  source 1..22: mol_type = other DNA
tgctcaggattgctttagctat

SEQ ID NO: 76888 - DNA, 22 bp, synthetic construct
  misc_feature 1..22: note = chemically synthesized
  source 1..22: mol_type = other DNA
gctcaggattgctttagctatt

SEQ ID NO: 76889 - DNA, 22 bp, synthetic construct
  misc_feature 1..22: note = chemically synthesized
  source 1..22: mol_type = other DNA
ctcaggattgctttagctattg

SEQ ID NO: 76890 - DNA, 22 bp, synthetic construct
  misc_feature 1..22: note = chemically synthesized
  source 1..22: mol_type = other DNA
aggattgctttagctattgggg

SEQ ID NO: 76891 - DNA, 22 bp, synthetic construct
  misc_feature 1..22: note = chemically synthesized
  source 1..22: mol_type = other DNA
ctttagctattggggatctttt

SEQ ID NO: 76892 - DNA, 22 bp, synthetic construct
  misc_feature 1..22: note = chemically synthesized
  source 1..22: mol_type = other DNA
tagctattggggatcttttgtg

SEQ ID NO: 76893 - DNA, 22 bp, synthetic construct
  misc_feature 1..22: note = chemically synthesized
  source 1..22: mol_type = other DNA
agctattggggatcttttgtgg

SEQ ID NO: 76894 - DNA, 22 bp, synthetic construct
  misc_feature 1..22: note = chemically synthesized
  source 1..22: mol_type = other DNA
gctattggggatcttttgtggt

SEQ ID NO: 76895 - DNA, 22 bp, synthetic construct
  misc_feature 1..22: note = chemically synthesized
  source 1..22: mol_type = other DNA
ttggggatcttttgtggttcca

SEQ ID NO: 76896 - DNA, 22 bp, synthetic construct
  misc_feature 1..22: note = chemically synthesized
  source 1..22: mol_type = other DNA
gggatcttttgtggttccatat

SEQ ID NO: 76897 - DNA, 22 bp, synthetic construct
  misc_feature 1..22: note = chemically synthesized
  source 1..22: mol_type = other DNA
ttgtggttccatataaatatta

SEQ ID NO: 76898 - DNA, 22 bp, synthetic construct
  misc_feature 1..22: note = chemically synthesized
  source 1..22: mol_type = other DNA
tgtggttccatataaatattag

SEQ ID NO: 76899 - DNA, 22 bp, synthetic construct
  misc_feature 1..22: note = chemically synthesized
  source 1..22: mol_type = other DNA
gtggttccatataaatattagg

SEQ ID NO: 76900 - DNA, 22 bp, synthetic construct
  misc_feature 1..22: note = chemically synthesized
  source 1..22: mol_type = other DNA
tggttccatataaatattagga

SEQ ID NO: 76901 - DNA, 22 bp, synthetic construct
  misc_feature 1..22: note = chemically synthesized
  source 1..22: mol_type = other DNA
catataaatattaggattgttt

SEQ ID NO: 76902 - DNA, 22 bp, synthetic construct
  misc_feature 1..22: note = chemically synthesized
  source 1..22: mol_type = other DNA
ggattgtttttctatttctgtg

SEQ ID NO: 76903 - DNA, 22 bp, synthetic construct
  misc_feature 1..22: note = chemically synthesized
  source 1..22: mol_type = other DNA
tttttctatttctgtgaatgcc

SEQ ID NO: 76904 - DNA, 22 bp, synthetic construct
  misc_feature 1..22: note = chemically synthesized
  source 1..22: mol_type = other DNA
ttctatttctgtgaatgccatt

SEQ ID NO: 76905 - DNA, 22 bp, synthetic construct
  misc_feature 1..22: note = chemically synthesized
  source 1..22: mol_type = other DNA
tctatttctgtgaatgccattg

SEQ ID NO: 76906 - DNA, 22 bp, synthetic construct
  misc_feature 1..22: note = chemically synthesized
  source 1..22: mol_type = other DNA
ctatttctgtgaatgccattgg

SEQ ID NO: 76907 - DNA, 22 bp, synthetic construct
  misc_feature 1..22: note = chemically synthesized
  source 1..22: mol_type = other DNA
tatttctgtgaatgccattggt

SEQ ID NO: 76908 - DNA, 22 bp, synthetic construct
  misc_feature 1..22: note = chemically synthesized
  source 1..22: mol_type = other DNA
tttctgtgaatgccattggtat

SEQ ID NO: 76909 - DNA, 22 bp, synthetic construct
  misc_feature 1..22: note = chemically synthesized
  source 1..22: mol_type = other DNA
ctgtgaatgccattggtatttt

SEQ ID NO: 76910 - DNA, 22 bp, synthetic construct
  misc_feature 1..22: note = chemically synthesized
  source 1..22: mol_type = other DNA
tgtgaatgccattggtattttg

SEQ ID NO: 76911 - DNA, 22 bp, synthetic construct
  misc_feature 1..22: note = chemically synthesized
  source 1..22: mol_type = other DNA
tgaatgccattggtattttgac

SEQ ID NO: 76912 - DNA, 22 bp, synthetic construct
  misc_feature 1..22: note = chemically synthesized
  source 1..22: mol_type = other DNA
gtattttgacagaaattgcact

SEQ ID NO: 76913 - DNA, 22 bp, synthetic construct
  misc_feature 1..22: note = chemically synthesized
  source 1..22: mol_type = other DNA
tgacagaaattgcactgaatct

SEQ ID NO: 76914 - DNA, 22 bp, synthetic construct
  misc_feature 1..22: note = chemically synthesized
  source 1..22: mol_type = other DNA
gacagaaattgcactgaatctg

SEQ ID NO: 76915 - DNA, 22 bp, synthetic construct
  misc_feature 1..22: note = chemically synthesized
  source 1..22: mol_type = other DNA
acagaaattgcactgaatctgt

SEQ ID NO: 76916 - DNA, 22 bp, synthetic construct
  misc_feature 1..22: note = chemically synthesized
  source 1..22: mol_type = other DNA
cactgaatctgtacattgcttt

SEQ ID NO: 76917 - DNA, 22 bp, synthetic construct
  misc_feature 1..22: note = chemically synthesized
  source 1..22: mol_type = other DNA
aatctgtacattgctttgggta

SEQ ID NO: 76918 - DNA, 22 bp, synthetic construct
  misc_feature 1..22: note = chemically synthesized
  source 1..22: mol_type = other DNA
tacattgctttgggtagtattg

SEQ ID NO: 76919 - DNA, 22 bp, synthetic construct
  misc_feature 1..22: note = chemically synthesized
  source 1..22: mol_type = other DNA
ctttgggtagtattgtcatttt

SEQ ID NO: 76920 - DNA, 22 bp, synthetic construct
  misc_feature 1..22: note = chemically synthesized
  source 1..22: mol_type = other DNA
tgggtagtattgtcattttaat

SEQ ID NO: 76921 - DNA, 22 bp, synthetic construct
  misc_feature 1..22: note = chemically synthesized
  source 1..22: mol_type = other DNA
gggtagtattgtcattttaata

SEQ ID NO: 76922 - DNA, 22 bp, synthetic construct
  misc_feature 1..22: note = chemically synthesized
  source 1..22: mol_type = other DNA
ggtagtattgtcattttaatat

SEQ ID NO: 76923 - DNA, 22 bp, synthetic construct
  misc_feature 1..22: note = chemically synthesized
  source 1..22: mol_type = other DNA
tcattttaatattaattcttct

SEQ ID NO: 76924 - DNA, 22 bp, synthetic construct
  misc_feature 1..22: note = chemically synthesized
  source 1..22: mol_type = other DNA
taatattaattcttctagttca

SEQ ID NO: 76925 - DNA, 22 bp, synthetic construct
  misc_feature 1..22: note = chemically synthesized
  source 1..22: mol_type = other DNA
aatattaattcttctagttcat

SEQ ID NO: 76926 - DNA, 22 bp, synthetic construct
  misc_feature 1..22: note = chemically synthesized
  source 1..22: mol_type = other DNA
atattaattcttctagttcatg

SEQ ID NO: 76927 - DNA, 22 bp, synthetic construct
  misc_feature 1..22: note = chemically synthesized
  source 1..22: mol_type = other DNA
attcttctagttcatgagcatg

SEQ ID NO: 76928 - DNA, 22 bp, synthetic construct
  misc_feature 1..22: note = chemically synthesized
  source 1..22: mol_type = other DNA
ttctagttcatgagcatggaat

SEQ ID NO: 76929 - DNA, 22 bp, synthetic construct
  misc_feature 1..22: note = chemically synthesized
  source 1..22: mol_type = other DNA
ctagttcatgagcatggaatat

SEQ ID NO: 76930 - DNA, 22 bp, synthetic construct
  misc_feature 1..22: note = chemically synthesized
  source 1..22: mol_type = other DNA
tagttcatgagcatggaatatc

SEQ ID NO: 76931 - DNA, 22 bp, synthetic construct
  misc_feature 1..22: note = chemically synthesized
  source 1..22: mol_type = other DNA
gttcatgagcatggaatatcgt

SEQ ID NO: 76932 - DNA, 22 bp, synthetic construct
  misc_feature 1..22: note = chemically synthesized
  source 1..22: mol_type = other DNA
atgagcatggaatatcgttcca

SEQ ID NO: 76933 - DNA, 22 bp, synthetic construct
  misc_feature 1..22: note = chemically synthesized
  source 1..22: mol_type = other DNA
cattttatttgtgtgccctctt

SEQ ID NO: 76934 - DNA, 22 bp, synthetic construct
  misc_feature 1..22: note = chemically synthesized
  source 1..22: mol_type = other DNA
tatttgtgtgccctcttctatt

SEQ ID NO: 76935 - DNA, 22 bp, synthetic construct
  misc_feature 1..22: note = chemically synthesized
  source 1..22: mol_type = other DNA
atttgtgtgccctcttctattt

SEQ ID NO: 76936 - DNA, 22 bp, synthetic construct
  misc_feature 1..22: note = chemically synthesized
  source 1..22: mol_type = other DNA
tttgtgtgccctcttctatttc

SEQ ID NO: 76937 - DNA, 22 bp, synthetic construct
  misc_feature 1..22: note = chemically synthesized
  source 1..22: mol_type = other DNA
gtgtgccctcttctatttcttt

SEQ ID NO: 76938 - DNA, 22 bp, synthetic construct
  misc_feature 1..22: note = chemically synthesized
  source 1..22: mol_type = other DNA
tgtgccctcttctatttctttc

SEQ ID NO: 76939 - DNA, 22 bp, synthetic construct
  misc_feature 1..22: note = chemically synthesized
  source 1..22: mol_type = other DNA
ttctatttctttcaccagagtt

SEQ ID NO: 76940 - DNA, 22 bp, synthetic construct
  misc_feature 1..22: note = chemically synthesized
  source 1..22: mol_type = other DNA
ctatttctttcaccagagtttt

SEQ ID NO: 76941 - DNA, 22 bp, synthetic construct
  misc_feature 1..22: note = chemically synthesized
  source 1..22: mol_type = other DNA
tatttctttcaccagagtttta

SEQ ID NO: 76942 - DNA, 22 bp, synthetic construct
  misc_feature 1..22: note = chemically synthesized
  source 1..22: mol_type = other DNA
tttctttcaccagagttttata

SEQ ID NO: 76943 - DNA, 22 bp, synthetic construct
  misc_feature 1..22: note = chemically synthesized
  source 1..22: mol_type = other DNA
ctttcaccagagttttataatt

SEQ ID NO: 76944 - DNA, 22 bp, synthetic construct
  misc_feature 1..22: note = chemically synthesized
  source 1..22: mol_type = other DNA
tttcaccagagttttataattt

SEQ ID NO: 76945 - DNA, 22 bp, synthetic construct
  misc_feature 1..22: note = chemically synthesized
  source 1..22: mol_type = other DNA
tcaccagagttttataattttt

SEQ ID NO: 76946 - DNA, 22 bp, synthetic construct
  misc_feature 1..22: note = chemically synthesized
  source 1..22: mol_type = other DNA
caccagagttttataatttttc

SEQ ID NO: 76947 - DNA, 22 bp, synthetic construct
  misc_feature 1..22: note = chemically synthesized
  source 1..22: mol_type = other DNA
accagagttttataatttttct

SEQ ID NO: 76948 - DNA, 22 bp, synthetic construct
  misc_feature 1..22: note = chemically synthesized
  source 1..22: mol_type = other DNA
tataatttttcttatagagatc

SEQ ID NO: 76949 - DNA, 22 bp, synthetic construct
  misc_feature 1..22: note = chemically synthesized
  source 1..22: mol_type = other DNA
ataatttttcttatagagatct

SEQ ID NO: 76950 - DNA, 22 bp, synthetic construct
  misc_feature 1..22: note = chemically synthesized
  source 1..22: mol_type = other DNA
taatttttcttatagagatctt

SEQ ID NO: 76951 - DNA, 22 bp, synthetic construct
  misc_feature 1..22: note = chemically synthesized
  source 1..22: mol_type = other DNA
ttcttatagagatcttttactt

SEQ ID NO: 76952 - DNA, 22 bp, synthetic construct
  misc_feature 1..22: note = chemically synthesized
  source 1..22: mol_type = other DNA
tcttatagagatcttttacttc

SEQ ID NO: 76953 - DNA, 22 bp, synthetic construct
  misc_feature 1..22: note = chemically synthesized
  source 1..22: mol_type = other DNA
cttatagagatcttttacttct

SEQ ID NO: 76954 - DNA, 22 bp, synthetic construct
  misc_feature 1..22: note = chemically synthesized
  source 1..22: mol_type = other DNA
ttatagagatcttttacttctt

SEQ ID NO: 76955 - DNA, 22 bp, synthetic construct
  misc_feature 1..22: note = chemically synthesized
  source 1..22: mol_type = other DNA
atagagatcttttacttcttgg

SEQ ID NO: 76956 - DNA, 22 bp, synthetic construct
  misc_feature 1..22: note = chemically synthesized
  source 1..22: mol_type = other DNA
tagagatcttttacttcttggg

SEQ ID NO: 76957 - DNA, 22 bp, synthetic construct
  misc_feature 1..22: note = chemically synthesized
  source 1..22: mol_type = other DNA
ttacttcttgggttagattgac

SEQ ID NO: 76958 - DNA, 22 bp, synthetic construct
  misc_feature 1..22: note = chemically synthesized
  source 1..22: mol_type = other DNA
tacttcttgggttagattgact

SEQ ID NO: 76959 - DNA, 22 bp, synthetic construct
  misc_feature 1..22: note = chemically synthesized
  source 1..22: mol_type = other DNA
acttcttgggttagattgactc

SEQ ID NO: 76960 - DNA, 22 bp, synthetic construct
  misc_feature 1..22: note = chemically synthesized
  source 1..22: mol_type = other DNA
cttcttgggttagattgactcc

SEQ ID NO: 76961 - DNA, 22 bp, synthetic construct
  misc_feature 1..22: note = chemically synthesized
  source 1..22: mol_type = other DNA
cttgggttagattgactcctgg

SEQ ID NO: 76962 - DNA, 22 bp, synthetic construct
  misc_feature 1..22: note = chemically synthesized
  source 1..22: mol_type = other DNA
ttgggttagattgactcctggg

SEQ ID NO: 76963 - DNA, 22 bp, synthetic construct
  misc_feature 1..22: note = chemically synthesized
  source 1..22: mol_type = other DNA
gggttagattgactcctgggta

SEQ ID NO: 76964 - DNA, 22 bp, synthetic construct
  misc_feature 1..22: note = chemically synthesized
  source 1..22: mol_type = other DNA
ggttagattgactcctgggtat

SEQ ID NO: 76965 - DNA, 22 bp, synthetic construct
  misc_feature 1..22: note = chemically synthesized
  source 1..22: mol_type = other DNA
gattgactcctgggtattttat

SEQ ID NO: 76966 - DNA, 22 bp, synthetic construct
  misc_feature 1..22: note = chemically synthesized
  source 1..22: mol_type = other DNA
actcctgggtattttatatttt

SEQ ID NO: 76967 - DNA, 22 bp, synthetic construct
  misc_feature 1..22: note = chemically synthesized
  source 1..22: mol_type = other DNA
ctgggtattttatatttttatt

SEQ ID NO: 76968 - DNA, 22 bp, synthetic construct
  misc_feature 1..22: note = chemically synthesized
  source 1..22: mol_type = other DNA
ggtattttatatttttattgct

SEQ ID NO: 76969 - DNA, 22 bp, synthetic construct
  misc_feature 1..22: note = chemically synthesized
  source 1..22: mol_type = other DNA
tatatttttattgctattgtaa

SEQ ID NO: 76970 - DNA, 22 bp, synthetic construct
  misc_feature 1..22: note = chemically synthesized
  source 1..22: mol_type = other DNA
atatttttattgctattgtaaa

SEQ ID NO: 76971 - DNA, 22 bp, synthetic construct
  misc_feature 1..22: note = chemically synthesized
  source 1..22: mol_type = other DNA
tatttttattgctattgtaaat

SEQ ID NO: 76972 - DNA, 22 bp, synthetic construct
  misc_feature 1..22: note = chemically synthesized
  source 1..22: mol_type = other DNA
ttattgctattgtaaataagat

SEQ ID NO: 76973 - DNA, 22 bp, synthetic construct
  misc_feature 1..22: note = chemically synthesized
  source 1..22: mol_type = other DNA
tattgctattgtaaataagatt

SEQ ID NO: 76974 - DNA, 22 bp, synthetic construct
  misc_feature 1..22: note = chemically synthesized
  source 1..22: mol_type = other DNA
attgctattgtaaataagattg

SEQ ID NO: 76975 - DNA, 22 bp, synthetic construct
  misc_feature 1..22: note = chemically synthesized
  source 1..22: mol_type = other DNA
ttgctattgtaaataagattgt

SEQ ID NO: 76976 - DNA, 22 bp, synthetic construct
  misc_feature 1..22: note = chemically synthesized
  source 1..22: mol_type = other DNA
ctattgtaaataagattgtttt

SEQ ID NO: 76977 - DNA, 22 bp, synthetic construct
  misc_feature 1..22: note = chemically synthesized
  source 1..22: mol_type = other DNA
ttgtaaataagattgttttatt

SEQ ID NO: 76978 - DNA, 22 bp, synthetic construct
  misc_feature 1..22: note = chemically synthesized
  source 1..22: mol_type = other DNA
taaataagattgttttattgat

SEQ ID NO: 76979 - DNA, 22 bp, synthetic construct
  misc_feature 1..22: note = chemically synthesized
  source 1..22: mol_type = other DNA
ttttattgattttttttgcaga

SEQ ID NO: 76980 - DNA, 22 bp, synthetic construct
  misc_feature 1..22: note = chemically synthesized
  source 1..22: mol_type = other DNA
tattgattttttttgcagattg

SEQ ID NO: 76981 - DNA, 22 bp, synthetic construct
  misc_feature 1..22: note = chemically synthesized
  source 1..22: mol_type = other DNA
attgattttttttgcagattga

SEQ ID NO: 76982 - DNA, 22 bp, synthetic construct
  misc_feature 1..22: note = chemically synthesized
  source 1..22: mol_type = other DNA
ttgattttttttgcagattgat

SEQ ID NO: 76983 - DNA, 22 bp, synthetic construct
  misc_feature 1..22: note = chemically synthesized
  source 1..22: mol_type = other DNA
attttttttgcagattgataac

SEQ ID NO: 76984 - DNA, 22 bp, synthetic construct
  misc_feature 1..22: note = chemically synthesized
  source 1..22: mol_type = other DNA
tttttgcagattgataactttt

SEQ ID NO: 76985 - DNA, 22 bp, synthetic construct
  misc_feature 1..22: note = chemically synthesized
  source 1..22: mol_type = other DNA
ttttgcagattgataacttttt

SEQ ID NO: 76986 - DNA, 22 bp, synthetic construct
  misc_feature 1..22: note = chemically synthesized
  source 1..22: mol_type = other DNA
tttgcagattgataacttttta

SEQ ID NO: 76987 - DNA, 22 bp, synthetic construct
  misc_feature 1..22: note = chemically synthesized
  source 1..22: mol_type = other DNA
ttgcagattgataactttttat

SEQ ID NO: 76988 - DNA, 22 bp, synthetic construct
  misc_feature 1..22: note = chemically synthesized
  source 1..22: mol_type = other DNA
tgcagattgataactttttata

SEQ ID NO: 76989 - DNA, 22 bp, synthetic construct
  misc_feature 1..22: note = chemically synthesized
  source 1..22: mol_type = other DNA
gcagattgataactttttatat

SEQ ID NO: 76990 - DNA, 22 bp, synthetic construct
  misc_feature 1..22: note = chemically synthesized
  source 1..22: mol_type = other DNA
cagattgataactttttatata

SEQ ID NO: 76991 - DNA, 22 bp, synthetic construct
  misc_feature 1..22: note = chemically synthesized
  source 1..22: mol_type = other DNA
ataactttttatatatgaaatg

SEQ ID NO: 76992 - DNA, 22 bp, synthetic construct
  misc_feature 1..22: note = chemically synthesized
  source 1..22: mol_type = other DNA
tttatatatgaaatgctactga

SEQ ID NO: 76993 - DNA, 22 bp, synthetic construct
  misc_feature 1..22: note = chemically synthesized
  source 1..22: mol_type = other DNA
ttatatatgaaatgctactgat

SEQ ID NO: 76994 - DNA, 22 bp, synthetic construct
  misc_feature 1..22: note = chemically synthesized
  source 1..22: mol_type = other DNA
tatatatgaaatgctactgatt

SEQ ID NO: 76995 - DNA, 22 bp, synthetic construct
  misc_feature 1..22: note = chemically synthesized
  source 1..22: mol_type = other DNA
atatatgaaatgctactgattt

SEQ ID NO: 76996 - DNA, 22 bp, synthetic construct
  misc_feature 1..22: note = chemically synthesized
  source 1..22: mol_type = other DNA
tatatgaaatgctactgatttt

SEQ ID NO: 76997 - DNA, 22 bp, synthetic construct
  misc_feature 1..22: note = chemically synthesized
  source 1..22: mol_type = other DNA
ctgattttgtatttttatttca

SEQ ID NO: 76998 - DNA, 22 bp, synthetic construct
  misc_feature 1..22: note = chemically synthesized
  source 1..22: mol_type = other DNA
attttgtatttttatttcatat

SEQ ID NO: 76999 - DNA, 22 bp, synthetic construct
  misc_feature 1..22: note = chemically synthesized
  source 1..22: mol_type = other DNA
tgtatttttatttcatatcctg

SEQ ID NO: 77000 - DNA, 22 bp, synthetic construct
  misc_feature 1..22: note = chemically synthesized
  source 1..22: mol_type = other DNA
gtatttttatttcatatcctgt

SEQ ID NO: 77001 - DNA, 22 bp, synthetic construct
  misc_feature 1..22: note = chemically synthesized
  source 1..22: mol_type = other DNA
tatttttatttcatatcctgta

SEQ ID NO: 77002 - DNA, 22 bp, synthetic construct
  misc_feature 1..22: note = chemically synthesized
  source 1..22: mol_type = other DNA
ttatttcatatcctgtaacttt

SEQ ID NO: 77003 - DNA, 22 bp, synthetic construct
  misc_feature 1..22: note = chemically synthesized
  source 1..22: mol_type = other DNA
tatttcatatcctgtaacttta

SEQ ID NO: 77004 - DNA, 22 bp, synthetic construct
  misc_feature 1..22: note = chemically synthesized
  source 1..22: mol_type = other DNA
atttcatatcctgtaactttat

SEQ ID NO: 77005 - DNA, 22 bp, synthetic construct
  misc_feature 1..22: note = chemically synthesized
  source 1..22: mol_type = other DNA
tttcatatcctgtaactttatt

SEQ ID NO: 77006 - DNA, 22 bp, synthetic construct
  misc_feature 1..22: note = chemically synthesized
  source 1..22: mol_type = other DNA
catatcctgtaactttattgat

SEQ ID NO: 77007 - DNA, 22 bp, synthetic construct
  misc_feature 1..22: note = chemically synthesized
  source 1..22: mol_type = other DNA
atatcctgtaactttattgatt

SEQ ID NO: 77008 - DNA, 22 bp, synthetic construct
  misc_feature 1..22: note = chemically synthesized
  source 1..22: mol_type = other DNA
taactttattgatttttttaaa

SEQ ID NO: 77009 - DNA, 22 bp, synthetic construct
  misc_feature 1..22: note = chemically synthesized
  source 1..22: mol_type = other DNA
tattgatttttttaaatcgttt

SEQ ID NO: 77010 - DNA, 22 bp, synthetic construct
  misc_feature 1..22: note = chemically synthesized
  source 1..22: mol_type = other DNA
attgatttttttaaatcgtttt

SEQ ID NO: 77011 - DNA, 22 bp, synthetic construct
  misc_feature 1..22: note = chemically synthesized
  source 1..22: mol_type = other DNA
ttgatttttttaaatcgtttta

SEQ ID NO: 77012 - DNA, 22 bp, synthetic construct
  misc_feature 1..22: note = chemically synthesized
  source 1..22: mol_type = other DNA
atttttttaaatcgttttaata

SEQ ID NO: 77013 - DNA, 22 bp, synthetic construct
  misc_feature 1..22: note = chemically synthesized
  source 1..22: mol_type = other DNA
ttttaaatcgttttaatagtat

SEQ ID NO: 77014 - DNA, 22 bp, synthetic construct
  misc_feature 1..22: note = chemically synthesized
  source 1..22: mol_type = other DNA
tttaaatcgttttaatagtatt

SEQ ID NO: 77015 - DNA, 22 bp, synthetic construct
  misc_feature 1..22: note = chemically synthesized
  source 1..22: mol_type = other DNA
ttaaatcgttttaatagtattt

SEQ ID NO: 77016 - DNA, 22 bp, synthetic construct
  misc_feature 1..22: note = chemically synthesized
  source 1..22: mol_type = other DNA
taaatcgttttaatagtattta

SEQ ID NO: 77017 - DNA, 22 bp, synthetic construct
  misc_feature 1..22: note = chemically synthesized
  source 1..22: mol_type = other DNA
aaatcgttttaatagtatttag

SEQ ID NO: 77018 - DNA, 22 bp, synthetic construct
  misc_feature 1..22: note = chemically synthesized
  source 1..22: mol_type = other DNA
aatcgttttaatagtatttagt

SEQ ID NO: 77019 - DNA, 22 bp, synthetic construct
  misc_feature 1..22: note = chemically synthesized
  source 1..22: mol_type = other DNA
taatagtatttagtgaagtttt

SEQ ID NO: 77020 - DNA, 22 bp, synthetic construct
  misc_feature 1..22: note = chemically synthesized
  source 1..22: mol_type = other DNA
aatagtatttagtgaagttttt

SEQ ID NO: 77021 - DNA, 22 bp, synthetic construct
  misc_feature 1..22: note = chemically synthesized
  source 1..22: mol_type = other DNA
atagtatttagtgaagttttta

SEQ ID NO: 77022 - DNA, 22 bp, synthetic construct
  misc_feature 1..22: note = chemically synthesized
  source 1..22: mol_type = other DNA
agtgaagtttttaggttttttc

SEQ ID NO: 77023 - DNA, 22 bp, synthetic construct
  misc_feature 1..22: note = chemically synthesized
  source 1..22: mol_type = other DNA
gtgaagtttttaggttttttct

SEQ ID NO: 77024 - DNA, 22 bp, synthetic construct
  misc_feature 1..22: note = chemically synthesized
  source 1..22: mol_type = other DNA
ttaggttttttctaagtataag

SEQ ID NO: 77025 - DNA, 22 bp, synthetic construct
  misc_feature 1..22: note = chemically synthesized
  source 1..22: mol_type = other DNA
taggttttttctaagtataaga

SEQ ID NO: 77026 - DNA, 22 bp, synthetic construct
  misc_feature 1..22: note = chemically synthesized
  source 1..22: mol_type = other DNA
aggttttttctaagtataagat

SEQ ID NO: 77027 - DNA, 22 bp, synthetic construct
  misc_feature 1..22: note = chemically synthesized
  source 1..22: mol_type = other DNA
ggttttttctaagtataagatc

SEQ ID NO: 77028 - DNA, 22 bp, synthetic construct
  misc_feature 1..22: note = chemically synthesized
  source 1..22: mol_type = other DNA
tttctaagtataagatcatgtc

SEQ ID NO: 77029 - DNA, 22 bp, synthetic construct
  misc_feature 1..22: note = chemically synthesized
  source 1..22: mol_type = other DNA
ttctaagtataagatcatgtca

SEQ ID NO: 77030 - DNA, 22 bp, synthetic construct
  misc_feature 1..22: note = chemically synthesized
  source 1..22: mol_type = other DNA
tctaagtataagatcatgtcat

SEQ ID NO: 77031 - DNA, 22 bp, synthetic construct
  misc_feature 1..22: note = chemically synthesized
  source 1..22: mol_type = other DNA
ctaagtataagatcatgtcatc

SEQ ID NO: 77032 - DNA, 22 bp, synthetic construct
  misc_feature 1..22: note = chemically synthesized
  source 1..22: mol_type = other DNA
taagtataagatcatgtcatct

SEQ ID NO: 77033 - DNA, 22 bp, synthetic construct
  misc_feature 1..22: note = chemically synthesized
  source 1..22: mol_type = other DNA
agtataagatcatgtcatctac

SEQ ID NO: 77034 - DNA, 22 bp, synthetic construct
  misc_feature 1..22: note = chemically synthesized
  source 1..22: mol_type = other DNA
caaactaggctaatttaacttc

SEQ ID NO: 77035 - DNA, 22 bp, synthetic construct
  misc_feature 1..22: note = chemically synthesized
  source 1..22: mol_type = other DNA
ggctaatttaacttcttccttt

SEQ ID NO: 77036 - DNA, 22 bp, synthetic construct
  misc_feature 1..22: note = chemically synthesized
  source 1..22: mol_type = other DNA
atttaacttcttcctttccaat

SEQ ID NO: 77037 - DNA, 22 bp, synthetic construct
  misc_feature 1..22: note = chemically synthesized
  source 1..22: mol_type = other DNA
aacttcttcctttccaatttgg

SEQ ID NO: 77038 - DNA, 22 bp, synthetic construct
  misc_feature 1..22: note = chemically synthesized
  source 1..22: mol_type = other DNA
acttcttcctttccaatttgga

SEQ ID NO: 77039 - DNA, 22 bp, synthetic construct
  misc_feature 1..22: note = chemically synthesized
  source 1..22: mol_type = other DNA
cttcctttccaatttggatgca

SEQ ID NO: 77040 - DNA, 22 bp, synthetic construct
  misc_feature 1..22: note = chemically synthesized
  source 1..22: mol_type = other DNA
ttcctttccaatttggatgcac

SEQ ID NO: 77041 - DNA, 22 bp, synthetic construct
  misc_feature 1..22: note = chemically synthesized
  source 1..22: mol_type = other DNA
cctttccaatttggatgcactt

SEQ ID NO: 77042 - DNA, 22 bp, synthetic construct
  misc_feature 1..22: note = chemically synthesized
  source 1..22: mol_type = other DNA
ctttccaatttggatgcacttt

SEQ ID NO: 77043 - DNA, 22 bp, synthetic construct
  misc_feature 1..22: note = chemically synthesized
  source 1..22: mol_type = other DNA
tccaatttggatgcactttctt

SEQ ID NO: 77044 - DNA, 22 bp, synthetic construct
  misc_feature 1..22: note = chemically synthesized
  source 1..22: mol_type = other DNA
ccaatttggatgcactttcttt

SEQ ID NO: 77045 - DNA, 22 bp, synthetic construct
  misc_feature 1..22: note = chemically synthesized
  source 1..22: mol_type = other DNA
caatttggatgcactttctttc

SEQ ID NO: 77046 - DNA, 22 bp, synthetic construct
  misc_feature 1..22: note = chemically synthesized
  source 1..22: mol_type = other DNA
ggatgcactttctttctcttcc

SEQ ID NO: 77047 - DNA, 22 bp, synthetic construct
  misc_feature 1..22: note = chemically synthesized
  source 1..22: mol_type = other DNA
gatgcactttctttctcttcct

SEQ ID NO: 77048 - DNA, 22 bp, synthetic construct
  misc_feature 1..22: note = chemically synthesized
  source 1..22: mol_type = other DNA
tctttctcttcctgaatttctc

SEQ ID NO: 77049 - DNA, 22 bp, synthetic construct
  misc_feature 1..22: note = chemically synthesized
  source 1..22: mol_type = other DNA
ctttctcttcctgaatttctct

SEQ ID NO: 77050 - DNA, 22 bp, synthetic construct
  misc_feature 1..22: note = chemically synthesized
  source 1..22: mol_type = other DNA
tttctcttcctgaatttctctt

SEQ ID NO: 77051 - DNA, 22 bp, synthetic construct
  misc_feature 1..22: note = chemically synthesized
  source 1..22: mol_type = other DNA
tctcttcctgaatttctctttc

SEQ ID NO: 77052 - DNA, 22 bp, synthetic construct
  misc_feature 1..22: note = chemically synthesized
  source 1..22: mol_type = other DNA
ctcttcctgaatttctctttcc

SEQ ID NO: 77053 - DNA, 22 bp, synthetic construct
  misc_feature 1..22: note = chemically synthesized
  source 1..22: mol_type = other DNA
tcttcctgaatttctctttcca

SEQ ID NO: 77054 - DNA, 22 bp, synthetic construct
  misc_feature 1..22: note = chemically synthesized
  source 1..22: mol_type = other DNA
ttcctgaatttctctttccaag

SEQ ID NO: 77055 - DNA, 22 bp, synthetic construct
  misc_feature 1..22: note = chemically synthesized
  source 1..22: mol_type = other DNA
cctgaatttctctttccaagac

SEQ ID NO: 77056 - DNA, 22 bp, synthetic construct
  misc_feature 1..22: note = chemically synthesized
  source 1..22: mol_type = other DNA
ctgaatttctctttccaagact

SEQ ID NO: 77057 - DNA, 22 bp, synthetic construct
  misc_feature 1..22: note = chemically synthesized
  source 1..22: mol_type = other DNA
aatttctctttccaagacttcc

SEQ ID NO: 77058 - DNA, 22 bp, synthetic construct
  misc_feature 1..22: note = chemically synthesized
  source 1..22: mol_type = other DNA
ctctttccaagacttccaatat

SEQ ID NO: 77059 - DNA, 22 bp, synthetic construct
  misc_feature 1..22: note = chemically synthesized
  source 1..22: mol_type = other DNA
tctttccaagacttccaatatt

SEQ ID NO: 77060 - DNA, 22 bp, synthetic construct
  misc_feature 1..22: note = chemically synthesized
  source 1..22: mol_type = other DNA
tttccaagacttccaatattat

SEQ ID NO: 77061 - DNA, 22 bp, synthetic construct
  misc_feature 1..22: note = chemically synthesized
  source 1..22: mol_type = other DNA
tccaagacttccaatattatgt

SEQ ID NO: 77062 - DNA, 22 bp, synthetic construct
  misc_feature 1..22: note = chemically synthesized
  source 1..22: mol_type = other DNA
ccaagacttccaatattatgtt

SEQ ID NO: 77063 - DNA, 22 bp, synthetic construct
  misc_feature 1..22: note = chemically synthesized
  source 1..22: mol_type = other DNA
caagacttccaatattatgtta

SEQ ID NO: 77064 - DNA, 22 bp, synthetic construct
  misc_feature 1..22: note = chemically synthesized
  source 1..22: mol_type = other DNA
ccaatattatgttaaataatgg

SEQ ID NO: 77065 - DNA, 22 bp, synthetic construct
  misc_feature 1..22: note = chemically synthesized
  source 1..22: mol_type = other DNA
caatattatgttaaataatggc

SEQ ID NO: 77066 - DNA, 22 bp, synthetic construct
  misc_feature 1..22: note = chemically synthesized
  source 1..22: mol_type = other DNA
tgttaaataatggcaatgaaag

SEQ ID NO: 77067 - DNA, 22 bp, synthetic construct
  misc_feature 1..22: note = chemically synthesized
  source 1..22: mol_type = other DNA
aataatggcaatgaaagtgagc

SEQ ID NO: 77068 - DNA, 22 bp, synthetic construct
  misc_feature 1..22: note = chemically synthesized
  source 1..22: mol_type = other DNA
ttgccttatttcagtccttaga

SEQ ID NO: 77069 - DNA, 22 bp, synthetic construct
  misc_feature 1..22: note = chemically synthesized
  source 1..22: mol_type = other DNA
gccttatttcagtccttagagg

SEQ ID NO: 77070 - DNA, 22 bp, synthetic construct
  misc_feature 1..22: note = chemically synthesized
  source 1..22: mol_type = other DNA
ccttatttcagtccttagagga

SEQ ID NO: 77071 - DNA, 22 bp, synthetic construct
  misc_feature 1..22: note = chemically synthesized
  source 1..22: mol_type = other DNA
atttcagtccttagaggaaagg

SEQ ID NO: 77072 - DNA, 22 bp, synthetic construct
  misc_feature 1..22: note = chemically synthesized
  source 1..22: mol_type = other DNA
tttcagtccttagaggaaaggc

SEQ ID NO: 77073 - DNA, 22 bp, synthetic construct
  misc_feature 1..22: note = chemically synthesized
  source 1..22: mol_type = other DNA
cagtccttagaggaaaggcctt

SEQ ID NO: 77074 - DNA, 22 bp, synthetic construct
  misc_feature 1..22: note = chemically synthesized
  source 1..22: mol_type = other DNA
agtccttagaggaaaggccttc

SEQ ID NO: 77075 - DNA, 22 bp, synthetic construct
  misc_feature 1..22: note = chemically synthesized
  source 1..22: mol_type = other DNA
agaggaaaggccttcaatgttt

SEQ ID NO: 77076 - DNA, 22 bp, synthetic construct
  misc_feature 1..22: note = chemically synthesized
  source 1..22: mol_type = other DNA
gaggaaaggccttcaatgtttc

SEQ ID NO: 77077 - DNA, 22 bp, synthetic construct
  misc_feature 1..22: note = chemically synthesized
  source 1..22: mol_type = other DNA
caatgtttctctgttcagcata

SEQ ID NO: 77078 - DNA, 22 bp, synthetic construct
  misc_feature 1..22: note = chemically synthesized
  source 1..22: mol_type = other DNA
aatgtttctctgttcagcataa

SEQ ID NO: 77079 - DNA, 22 bp, synthetic construct
  misc_feature 1..22: note = chemically synthesized
  source 1..22: mol_type = other DNA
ctctgttcagcataatgttagc

SEQ ID NO: 77080 - DNA, 22 bp, synthetic construct
  misc_feature 1..22: note = chemically synthesized
  source 1..22: mol_type = other DNA
tctgttcagcataatgttagca

SEQ ID NO: 77081 - DNA, 22 bp, synthetic construct
  misc_feature 1..22: note = chemically synthesized
  source 1..22: mol_type = other DNA
tgttcagcataatgttagcact

SEQ ID NO: 77082 - DNA, 22 bp, synthetic construct
  misc_feature 1..22: note = chemically synthesized
  source 1..22: mol_type = other DNA
ttcagcataatgttagcacttg

SEQ ID NO: 77083 - DNA, 22 bp, synthetic construct
  misc_feature 1..22: note = chemically synthesized
  source 1..22: mol_type = other DNA
agcataatgttagcacttggtt

SEQ ID NO: 77084 - DNA, 22 bp, synthetic construct
  misc_feature 1..22: note = chemically synthesized
  source 1..22: mol_type = other DNA
gcacttggtttgtcctatatgg

SEQ ID NO: 77085 - DNA, 22 bp, synthetic construct
  misc_feature 1..22: note = chemically synthesized
  source 1..22: mol_type = other DNA
ggtttgtcctatatggttttta

SEQ ID NO: 77086 - DNA, 22 bp, synthetic construct
  misc_feature 1..22: note = chemically synthesized
  source 1..22: mol_type = other DNA
gtttgtcctatatggtttttat

SEQ ID NO: 77087 - DNA, 22 bp, synthetic construct
  misc_feature 1..22: note = chemically synthesized
  source 1..22: mol_type = other DNA
gtcctatatggtttttattatt

SEQ ID NO: 77088 - DNA, 22 bp, synthetic construct
  misc_feature 1..22: note = chemically synthesized
  source 1..22: mol_type = other DNA
tcctatatggtttttattattt

SEQ ID NO: 77089 - DNA, 22 bp, synthetic construct
  misc_feature 1..22: note = chemically synthesized
  source 1..22: mol_type = other DNA
tatggtttttattattttgagg

SEQ ID NO: 77090 - DNA, 22 bp, synthetic construct
  misc_feature 1..22: note = chemically synthesized
  source 1..22: mol_type = other DNA
ttattattttgaggtatgttcc

SEQ ID NO: 77091 - DNA, 22 bp, synthetic construct
  misc_feature 1..22: note = chemically synthesized
  source 1..22: mol_type = other DNA
tattattttgaggtatgttcct

SEQ ID NO: 77092 - DNA, 22 bp, synthetic construct
  misc_feature 1..22: note = chemically synthesized
  source 1..22: mol_type = other DNA
attattttgaggtatgttccta

SEQ ID NO: 77093 - DNA, 22 bp, synthetic construct
  misc_feature 1..22: note = chemically synthesized
  source 1..22: mol_type = other DNA
ttattttgaggtatgttcctac

SEQ ID NO: 77094 - DNA, 22 bp, synthetic construct
  misc_feature 1..22: note = chemically synthesized
  source 1..22: mol_type = other DNA
ttttgaggtatgttcctactgt

SEQ ID NO: 77095 - DNA, 22 bp, synthetic construct
  misc_feature 1..22: note = chemically synthesized
  source 1..22: mol_type = other DNA
tgaggtatgttcctactgtacc

SEQ ID NO: 77096 - DNA, 22 bp, synthetic construct
  misc_feature 1..22: note = chemically synthesized
  source 1..22: mol_type = other DNA
gaggtatgttcctactgtacct

SEQ ID NO: 77097 - DNA, 22 bp, synthetic construct
  misc_feature 1..22: note = chemically synthesized
  source 1..22: mol_type = other DNA
aggtatgttcctactgtacctc

SEQ ID NO: 77098 - DNA, 22 bp, synthetic construct
  misc_feature 1..22: note = chemically synthesized
  source 1..22: mol_type = other DNA
ctactgtacctcctttgaggtg

SEQ ID NO: 77099 - DNA, 22 bp, synthetic construct
  misc_feature 1..22: note = chemically synthesized
  source 1..22: mol_type = other DNA
ctgtacctcctttgaggtgcat

SEQ ID NO: 77100 - DNA, 22 bp, synthetic construct
  misc_feature 1..22: note = chemically synthesized
  source 1..22: mol_type = other DNA
tacctcctttgaggtgcatttg

SEQ ID NO: 77101 - DNA, 22 bp, synthetic construct
  misc_feature 1..22: note = chemically synthesized
  source 1..22: mol_type = other DNA
ctttgaggtgcatttgttgttg

SEQ ID NO: 77102 - DNA, 22 bp, synthetic construct
  misc_feature 1..22: note = chemically synthesized
  source 1..22: mol_type = other DNA
tgaggtgcatttgttgttgtgt

SEQ ID NO: 77103 - DNA, 22 bp, synthetic construct
  misc_feature 1..22: note = chemically synthesized
  source 1..22: mol_type = other DNA
gaggtgcatttgttgttgtgtc

SEQ ID NO: 77104 - DNA, 22 bp, synthetic construct
  misc_feature 1..22: note = chemically synthesized
  source 1..22: mol_type = other DNA
aggtgcatttgttgttgtgtcc

SEQ ID NO: 77105 - DNA, 22 bp, synthetic construct
  misc_feature 1..22: note = chemically synthesized
  source 1..22: mol_type = other DNA
gttgttgtgtcctggtctggtt

SEQ ID NO: 77106 - DNA, 22 bp, synthetic construct
  misc_feature 1..22: note = chemically synthesized
  source 1..22: mol_type = other DNA
ttgttgtgtcctggtctggttt

SEQ ID NO: 77107 - DNA, 22 bp, synthetic construct
  misc_feature 1..22: note = chemically synthesized
  source 1..22: mol_type = other DNA
ttgtgtcctggtctggtttggg

SEQ ID NO: 77108 - DNA, 22 bp, synthetic construct
  misc_feature 1..22: note = chemically synthesized
  source 1..22: mol_type = other DNA
tgtcctggtctggtttgggtat

SEQ ID NO: 77109 - DNA, 22 bp, synthetic construct
  misc_feature 1..22: note = chemically synthesized
  source 1..22: mol_type = other DNA
gtctggtttgggtatattagag

SEQ ID NO: 77110 - DNA, 22 bp, synthetic construct
  misc_feature 1..22: note = chemically synthesized
  source 1..22: mol_type = other DNA
gtttgggtatattagagtaatg

SEQ ID NO: 77111 - DNA, 22 bp, synthetic construct
  misc_feature 1..22: note = chemically synthesized
  source 1..22: mol_type = other DNA
gggtatattagagtaatgcttg

SEQ ID NO: 77112 - DNA, 22 bp, synthetic construct
  misc_feature 1..22: note = chemically synthesized
  source 1..22: mol_type = other DNA
ggtatattagagtaatgcttgc

SEQ ID NO: 77113 - DNA, 22 bp, synthetic construct
  misc_feature 1..22: note = chemically synthesized
  source 1..22: mol_type = other DNA
gagtaatgcttgcctcatagaa

SEQ ID NO: 77114 - DNA, 22 bp, synthetic construct
  misc_feature 1..22: note = chemically synthesized
  source 1..22: mol_type = other DNA
gcctcatagaataagtttagaa

SEQ ID NO: 77115 - DNA, 22 bp, synthetic construct
  misc_feature 1..22: note = chemically synthesized
  source 1..22: mol_type = other DNA
cctcatagaataagtttagaag

SEQ ID NO: 77116 - DNA, 22 bp, synthetic construct
  misc_feature 1..22: note = chemically synthesized
  source 1..22: mol_type = other DNA
atagaataagtttagaagtagg

SEQ ID NO: 77117 - DNA, 22 bp, synthetic construct
  misc_feature 1..22: note = chemically synthesized
  source 1..22: mol_type = other DNA
agaagtaggcccttcttttcag

SEQ ID NO: 77118 - DNA, 22 bp, synthetic construct
  misc_feature 1..22: note = chemically synthesized
  source 1..22: mol_type = other DNA
gaagtaggcccttcttttcagt

SEQ ID NO: 77119 - DNA, 22 bp, synthetic construct
  misc_feature 1..22: note = chemically synthesized
  source 1..22: mol_type = other DNA
cttttcagtttttatttgtttg

SEQ ID NO: 77120 - DNA, 22 bp, synthetic construct
  misc_feature 1..22: note = chemically synthesized
  source 1..22: mol_type = other DNA
ttttcagtttttatttgtttgt

SEQ ID NO: 77121 - DNA, 22 bp, synthetic construct
  misc_feature 1..22: note = chemically synthesized
  source 1..22: mol_type = other DNA
ttcagtttttatttgtttgttt

SEQ ID NO: 77122 - DNA, 22 bp, synthetic construct
  misc_feature 1..22: note = chemically synthesized
  source 1..22: mol_type = other DNA
tcagtttttatttgtttgtttg

SEQ ID NO: 77123 - DNA, 22 bp, synthetic construct
  misc_feature 1..22: note = chemically synthesized
  source 1..22: mol_type = other DNA
cagtttttatttgtttgtttgt

SEQ ID NO: 77124 - DNA, 22 bp, synthetic construct
  misc_feature 1..22: note = chemically synthesized
  source 1..22: mol_type = other DNA
agtttttatttgtttgtttgtt

SEQ ID NO: 77125 - DNA, 22 bp, synthetic construct
  misc_feature 1..22: note = chemically synthesized
  source 1..22: mol_type = other DNA
ttatttgtttgtttgtttgagg

SEQ ID NO: 77126 - DNA, 22 bp, synthetic construct
  misc_feature 1..22: note = chemically synthesized
  source 1..22: mol_type = other DNA
tatttgtttgtttgtttgagga

SEQ ID NO: 77127 - DNA, 22 bp, synthetic construct
  misc_feature 1..22: note = chemically synthesized
  source 1..22: mol_type = other DNA
atttgtttgtttgtttgaggaa

SEQ ID NO: 77128 - DNA, 22 bp, synthetic construct
  misc_feature 1..22: note = chemically synthesized
  source 1..22: mol_type = other DNA
tttgtttgtttgtttgaggaat

SEQ ID NO: 77129 - DNA, 22 bp, synthetic construct
  misc_feature 1..22: note = chemically synthesized
  source 1..22: mol_type = other DNA
gtttgtttgtttgaggaatttg

SEQ ID NO: 77130 - DNA, 22 bp, synthetic construct
  misc_feature 1..22: note = chemically synthesized
  source 1..22: mol_type = other DNA
tttgtttgtttgaggaatttga

SEQ ID NO: 77131 - DNA, 22 bp, synthetic construct
  misc_feature 1..22: note = chemically synthesized
  source 1..22: mol_type = other DNA
gtttgtttgaggaatttgagta

SEQ ID NO: 77132 - DNA, 22 bp, synthetic construct
  misc_feature 1..22: note = chemically synthesized
  source 1..22: mol_type = other DNA
tttgtttgaggaatttgagtac

SEQ ID NO: 77133 - DNA, 22 bp, synthetic construct
  misc_feature 1..22: note = chemically synthesized
  source 1..22: mol_type = other DNA
gtttgaggaatttgagtacgat

SEQ ID NO: 77134 - DNA, 22 bp, synthetic construct
  misc_feature 1..22: note = chemically synthesized
  source 1..22: mol_type = other DNA
tttgaggaatttgagtacgatt

SEQ ID NO: 77135 - DNA, 22 bp, synthetic construct
  misc_feature 1..22: note = chemically synthesized
  source 1..22: mol_type = other DNA
gaggaatttgagtacgattagt

SEQ ID NO: 77136 - DNA, 22 bp, synthetic construct
  misc_feature 1..22: note = chemically synthesized
  source 1..22: mol_type = other DNA
aggaatttgagtacgattagta

SEQ ID NO: 77137 - DNA, 22 bp, synthetic construct
  misc_feature 1..22: note = chemically synthesized
  source 1..22: mol_type = other DNA
gagtacgattagtattagttct

SEQ ID NO: 77138 - DNA, 22 bp, synthetic construct
  misc_feature 1..22: note = chemically synthesized
  source 1..22: mol_type = other DNA
agtacgattagtattagttcta

SEQ ID NO: 77139 - DNA, 22 bp, synthetic construct
  misc_feature 1..22: note = chemically synthesized
  source 1..22: mol_type = other DNA
gtattagttctacttgaaatgt

SEQ ID NO: 77140 - DNA, 22 bp, synthetic construct
  misc_feature 1..22: note = chemically synthesized
  source 1..22: mol_type = other DNA
gttctacttgaaatgtttggta

SEQ ID NO: 77141 - DNA, 22 bp, synthetic construct
  misc_feature 1..22: note = chemically synthesized
  source 1..22: mol_type = other DNA
tacttgaaatgtttggtagccc

SEQ ID NO: 77142 - DNA, 22 bp, synthetic construct
  misc_feature 1..22: note = chemically synthesized
  source 1..22: mol_type = other DNA
cttgaaatgtttggtagcccat

SEQ ID NO: 77143 - DNA, 22 bp, synthetic construct
  misc_feature 1..22: note = chemically synthesized
  source 1..22: mol_type = other DNA
gaaatgtttggtagcccatcga

SEQ ID NO: 77144 - DNA, 22 bp, synthetic construct
  misc_feature 1..22: note = chemically synthesized
  source 1..22: mol_type = other DNA
aaatgtttggtagcccatcgag

SEQ ID NO: 77145 - DNA, 22 bp, synthetic construct
  misc_feature 1..22: note = chemically synthesized
  source 1..22: mol_type = other DNA
ggtagcccatcgagtcctgggc

SEQ ID NO: 77146 - DNA, 22 bp, synthetic construct
  misc_feature 1..22: note = chemically synthesized
  source 1..22: mol_type = other DNA
gtagcccatcgagtcctgggct

SEQ ID NO: 77147 - DNA, 22 bp, synthetic construct
  misc_feature 1..22: note = chemically synthesized
  source 1..22: mol_type = other DNA
ggcttttctttaataggaaact

SEQ ID NO: 77148 - DNA, 22 bp, synthetic construct
  misc_feature 1..22: note = chemically synthesized
  source 1..22: mol_type = other DNA
ttctttaataggaaactttata

SEQ ID NO: 77149 - DNA, 22 bp, synthetic construct
  misc_feature 1..22: note = chemically synthesized
  source 1..22: mol_type = other DNA
tctttaataggaaactttatat

SEQ ID NO: 77150 - DNA, 22 bp, synthetic construct
  misc_feature 1..22: note = chemically synthesized
  source 1..22: mol_type = other DNA
ctttaataggaaactttatatt

SEQ ID NO: 77151 - DNA, 22 bp, synthetic construct
  misc_feature 1..22: note = chemically synthesized
  source 1..22: mol_type = other DNA
tttaataggaaactttatatta

SEQ ID NO: 77152 - DNA, 22 bp, synthetic construct
  misc_feature 1..22: note = chemically synthesized
  source 1..22: mol_type = other DNA
taataggaaactttatattaca

SEQ ID NO: 77153 - DNA, 22 bp, synthetic construct
  misc_feature 1..22: note = chemically synthesized
  source 1..22: mol_type = other DNA
aataggaaactttatattacaa

SEQ ID NO: 77154 - DNA, 22 bp, synthetic construct
  misc_feature 1..22: note = chemically synthesized
  source 1..22: mol_type = other DNA
ataggaaactttatattacaac

SEQ ID NO: 77155 - DNA, 22 bp, synthetic construct
  misc_feature 1..22: note = chemically synthesized
  source 1..22: mol_type = other DNA
tatattacaactttaatcttgt

SEQ ID NO: 77156 - DNA, 22 bp, synthetic construct
  misc_feature 1..22: note = chemically synthesized
  source 1..22: mol_type = other DNA
atattacaactttaatcttgtt

SEQ ID NO: 77157 - DNA, 22 bp, synthetic construct
  misc_feature 1..22: note = chemically synthesized
  source 1..22: mol_type = other DNA
tattacaactttaatcttgtta

SEQ ID NO: 77158 - DNA, 22 bp, synthetic construct
  misc_feature 1..22: note = chemically synthesized
  source 1..22: mol_type = other DNA
caactttaatcttgttattcat

SEQ ID NO: 77159 - DNA, 22 bp, synthetic construct
  misc_feature 1..22: note = chemically synthesized
  source 1..22: mol_type = other DNA
taatcttgttattcattattgt

SEQ ID NO: 77160 - DNA, 22 bp, synthetic construct
  misc_feature 1..22: note = chemically synthesized
  source 1..22: mol_type = other DNA
aatcttgttattcattattgtt

SEQ ID NO: 77161 - DNA, 22 bp, synthetic construct
  misc_feature 1..22: note = chemically synthesized
  source 1..22: mol_type = other DNA
atcttgttattcattattgttc

SEQ ID NO: 77162 - DNA, 22 bp, synthetic construct
  misc_feature 1..22: note = chemically synthesized
  source 1..22: mol_type = other DNA
gttattcattattgttctattg

SEQ ID NO: 77163 - DNA, 22 bp, synthetic construct
  misc_feature 1..22: note = chemically synthesized
  source 1..22: mol_type = other DNA
ttattcattattgttctattga

SEQ ID NO: 77164 - DNA, 22 bp, synthetic construct
  misc_feature 1..22: note = chemically synthesized
  source 1..22: mol_type = other DNA
ttcattattgttctattgaggt

SEQ ID NO: 77165 - DNA, 22 bp, synthetic construct
  misc_feature 1..22: note = chemically synthesized
  source 1..22: mol_type = other DNA
attattgttctattgaggtttt

SEQ ID NO: 77166 - DNA, 22 bp, synthetic construct
  misc_feature 1..22: note = chemically synthesized
  source 1..22: mol_type = other DNA
ttgttctattgaggttttctgt

SEQ ID NO: 77167 - DNA, 22 bp, synthetic construct
  misc_feature 1..22: note = chemically synthesized
  source 1..22: mol_type = other DNA
ttctattgaggttttctgtttc

SEQ ID NO: 77168 - DNA, 22 bp, synthetic construct
  misc_feature 1..22: note = chemically synthesized
  source 1..22: mol_type = other DNA
tattgaggttttctgtttctac

SEQ ID NO: 77169 - DNA, 22 bp, synthetic construct
  misc_feature 1..22: note = chemically synthesized
  source 1..22: mol_type = other DNA
ttgaggttttctgtttctacat

SEQ ID NO: 77170 - DNA, 22 bp, synthetic construct
  misc_feature 1..22: note = chemically synthesized
  source 1..22: mol_type = other DNA
aggttttctgtttctacatgct

SEQ ID NO: 77171 - DNA, 22 bp, synthetic construct
  misc_feature 1..22: note = chemically synthesized
  source 1..22: mol_type = other DNA
tctgtttctacatgcttcagtc

SEQ ID NO: 77172 - DNA, 22 bp, synthetic construct
  misc_feature 1..22: note = chemically synthesized
  source 1..22: mol_type = other DNA
ctgtttctacatgcttcagtct

SEQ ID NO: 77173 - DNA, 22 bp, synthetic construct
  misc_feature 1..22: note = chemically synthesized
  source 1..22: mol_type = other DNA
tgtttctacatgcttcagtctt

SEQ ID NO: 77174 - DNA, 22 bp, synthetic construct
  misc_feature 1..22: note = chemically synthesized
  source 1..22: mol_type = other DNA
tttctacatgcttcagtcttgc

SEQ ID NO: 77175 - DNA, 22 bp, synthetic construct
  misc_feature 1..22: note = chemically synthesized
  source 1..22: mol_type = other DNA
ctacatgcttcagtcttgctag

SEQ ID NO: 77176 - DNA, 22 bp, synthetic construct
  misc_feature 1..22: note = chemically synthesized
  source 1..22: mol_type = other DNA
tacatgcttcagtcttgctagg

SEQ ID NO: 77177 - DNA, 22 bp, synthetic construct
  misc_feature 1..22: note = chemically synthesized
  source 1..22: mol_type = other DNA
catgcttcagtcttgctaggct

SEQ ID NO: 77178 - DNA, 22 bp, synthetic construct
  misc_feature 1..22: note = chemically synthesized
  source 1..22: mol_type = other DNA
cagtcttgctaggctgtatgtg

SEQ ID NO: 77179 - DNA, 22 bp, synthetic construct
  misc_feature 1..22: note = chemically synthesized
  source 1..22: mol_type = other DNA
agtcttgctaggctgtatgtgt

SEQ ID NO: 77180 - DNA, 22 bp, synthetic construct
  misc_feature 1..22: note = chemically synthesized
  source 1..22: mol_type = other DNA
gctaggctgtatgtgtccagga

SEQ ID NO: 77181 - DNA, 22 bp, synthetic construct
  misc_feature 1..22: note = chemically synthesized
  source 1..22: mol_type = other DNA
ctaggctgtatgtgtccaggaa

SEQ ID NO: 77182 - DNA, 22 bp, synthetic construct
  misc_feature 1..22: note = chemically synthesized
  source 1..22: mol_type = other DNA
ggctgtatgtgtccaggaattt

SEQ ID NO: 77183 - DNA, 22 bp, synthetic construct
  misc_feature 1..22: note = chemically synthesized
  source 1..22: mol_type = other DNA
tatgtgtccaggaatttatcca

SEQ ID NO: 77184 - DNA, 22 bp, synthetic construct
  misc_feature 1..22: note = chemically synthesized
  source 1..22: mol_type = other DNA
atccatttattctagattttcc

SEQ ID NO: 77185 - DNA, 22 bp, synthetic construct
  misc_feature 1..22: note = chemically synthesized
  source 1..22: mol_type = other DNA
tccatttattctagattttcca

SEQ ID NO: 77186 - DNA, 22 bp, synthetic construct
  misc_feature 1..22: note = chemically synthesized
  source 1..22: mol_type = other DNA
attctagattttccaatttgtt

SEQ ID NO: 77187 - DNA, 22 bp, synthetic construct
  misc_feature 1..22: note = chemically synthesized
  source 1..22: mol_type = other DNA
ttctagattttccaatttgttg

SEQ ID NO: 77188 - DNA, 22 bp, synthetic construct
  misc_feature 1..22: note = chemically synthesized
  source 1..22: mol_type = other DNA
tagattttccaatttgttggaa

SEQ ID NO: 77189 - DNA, 22 bp, synthetic construct
  misc_feature 1..22: note = chemically synthesized
  source 1..22: mol_type = other DNA
gattttccaatttgttggaata

SEQ ID NO: 77190 - DNA, 22 bp, synthetic construct
  misc_feature 1..22: note = chemically synthesized
  source 1..22: mol_type = other DNA
tccaatttgttggaatacagtt

SEQ ID NO: 77191 - DNA, 22 bp, synthetic construct
  misc_feature 1..22: note = chemically synthesized
  source 1..22: mol_type = other DNA
ccaatttgttggaatacagttg

SEQ ID NO: 77192 - DNA, 22 bp, synthetic construct
  misc_feature 1..22: note = chemically synthesized
  source 1..22: mol_type = other DNA
caatttgttggaatacagttgt

SEQ ID NO: 77193 - DNA, 22 bp, synthetic construct
  misc_feature 1..22: note = chemically synthesized
  source 1..22: mol_type = other DNA
gttggaatacagttgttcataa

SEQ ID NO: 77194 - DNA, 22 bp, synthetic construct
  misc_feature 1..22: note = chemically synthesized
  source 1..22: mol_type = other DNA
ttggaatacagttgttcataat

SEQ ID NO: 77195 - DNA, 22 bp, synthetic construct
  misc_feature 1..22: note = chemically synthesized
  source 1..22: mol_type = other DNA
gaatacagttgttcataatagt

SEQ ID NO: 77196 - DNA, 22 bp, synthetic construct
  misc_feature 1..22: note = chemically synthesized
  source 1..22: mol_type = other DNA
ttcataatagtatctaatgagt

SEQ ID NO: 77197 - DNA, 22 bp, synthetic construct
  misc_feature 1..22: note = chemically synthesized
  source 1..22: mol_type = other DNA
ataatagtatctaatgagtctt

SEQ ID NO: 77198 - DNA, 22 bp, synthetic construct
  misc_feature 1..22: note = chemically synthesized
  source 1..22: mol_type = other DNA
atgagtctttgtgttgctgagg

SEQ ID NO: 77199 - DNA, 22 bp, synthetic construct
  misc_feature 1..22: note = chemically synthesized
  source 1..22: mol_type = other DNA
tgtgttgctgaggtctcaattg

SEQ ID NO: 77200 - DNA, 22 bp, synthetic construct
  misc_feature 1..22: note = chemically synthesized
  source 1..22: mol_type = other DNA
gtgttgctgaggtctcaattgt

SEQ ID NO: 77201 - DNA, 22 bp, synthetic construct
  misc_feature 1..22: note = chemically synthesized
  source 1..22: mol_type = other DNA
tgttgctgaggtctcaattgtt

SEQ ID NO: 77202 - DNA, 22 bp, synthetic construct
  misc_feature 1..22: note = chemically synthesized
  source 1..22: mol_type = other DNA
ctgaggtctcaattgttatatc

SEQ ID NO: 77203 - DNA, 22 bp, synthetic construct
  misc_feature 1..22: note = chemically synthesized
  source 1..22: mol_type = other DNA
aggtctcaattgttatatcctc

SEQ ID NO: 77204 - DNA, 22 bp, synthetic construct
  misc_feature 1..22: note = chemically synthesized
  source 1..22: mol_type = other DNA
aattgttatatcctctttttca

SEQ ID NO: 77205 - DNA, 22 bp, synthetic construct
  misc_feature 1..22: note = chemically synthesized
  source 1..22: mol_type = other DNA
ttatatcctctttttcattttc

SEQ ID NO: 77206 - DNA, 22 bp, synthetic construct
  misc_feature 1..22: note = chemically synthesized
  source 1..22: mol_type = other DNA
tatcctctttttcattttctaa

SEQ ID NO: 77207 - DNA, 22 bp, synthetic construct
  misc_feature 1..22: note = chemically synthesized
  source 1..22: mol_type = other DNA
tttttcattttctaattttatt

SEQ ID NO: 77208 - DNA, 22 bp, synthetic construct
  misc_feature 1..22: note = chemically synthesized
  source 1..22: mol_type = other DNA
tttcattttctaattttatttg

SEQ ID NO: 77209 - DNA, 22 bp, synthetic construct
  misc_feature 1..22: note = chemically synthesized
  source 1..22: mol_type = other DNA
ttcattttctaattttatttga

SEQ ID NO: 77210 - DNA, 22 bp, synthetic construct
  misc_feature 1..22: note = chemically synthesized
  source 1..22: mol_type = other DNA
tcattttctaattttatttgac

SEQ ID NO: 77211 - DNA, 22 bp, synthetic construct
  misc_feature 1..22: note = chemically synthesized
  source 1..22: mol_type = other DNA
cattttctaattttatttgact

SEQ ID NO: 77212 - DNA, 22 bp, synthetic construct
  misc_feature 1..22: note = chemically synthesized
  source 1..22: mol_type = other DNA
attttctaattttatttgactc

SEQ ID NO: 77213 - DNA, 22 bp, synthetic construct
  misc_feature 1..22: note = chemically synthesized
  source 1..22: mol_type = other DNA
tctaattttatttgactctttt

SEQ ID NO: 77214 - DNA, 22 bp, synthetic construct
  misc_feature 1..22: note = chemically synthesized
  source 1..22: mol_type = other DNA
ctaattttatttgactcttttt

SEQ ID NO: 77215 - DNA, 22 bp, synthetic construct
  misc_feature 1..22: note = chemically synthesized
  source 1..22: mol_type = other DNA
taattttatttgactctttttt

SEQ ID NO: 77216 - DNA, 22 bp, synthetic construct
  misc_feature 1..22: note = chemically synthesized
  source 1..22: mol_type = other DNA
attttatttgactcttttttct

SEQ ID NO: 77217 - DNA, 22 bp, synthetic construct
  misc_feature 1..22: note = chemically synthesized
  source 1..22: mol_type = other DNA
tatttgactcttttttcttaaa

SEQ ID NO: 77218 - DNA, 22 bp, synthetic construct
  misc_feature 1..22: note = chemically synthesized
  source 1..22: mol_type = other DNA
atttgactcttttttcttaaag

SEQ ID NO: 77219 - DNA, 22 bp, synthetic construct
  misc_feature 1..22: note = chemically synthesized
  source 1..22: mol_type = other DNA
tttgactcttttttcttaaagt

SEQ ID NO: 77220 - DNA, 22 bp, synthetic construct
  misc_feature 1..22: note = chemically synthesized
  source 1..22: mol_type = other DNA
gactcttttttcttaaagtttt

SEQ ID NO: 77221 - DNA, 22 bp, synthetic construct
  misc_feature 1..22: note = chemically synthesized
  source 1..22: mol_type = other DNA
actcttttttcttaaagttttg

SEQ ID NO: 77222 - DNA, 22 bp, synthetic construct
  misc_feature 1..22: note = chemically synthesized
  source 1..22: mol_type = other DNA
ttttttcttaaagttttgttga

SEQ ID NO: 77223 - DNA, 22 bp, synthetic construct
  misc_feature 1..22: note = chemically synthesized
  source 1..22: mol_type = other DNA
ttttcttaaagttttgttgatt

SEQ ID NO: 77224 - DNA, 22 bp, synthetic construct
  misc_feature 1..22: note = chemically synthesized
  source 1..22: mol_type = other DNA
tttcttaaagttttgttgattt

SEQ ID NO: 77225 - DNA, 22 bp, synthetic construct
  misc_feature 1..22: note = chemically synthesized
  source 1..22: mol_type = other DNA
ttcttaaagttttgttgatttt

SEQ ID NO: 77226 - DNA, 22 bp, synthetic construct
  misc_feature 1..22: note = chemically synthesized
  source 1..22: mol_type = other DNA
tcttaaagttttgttgattttg

SEQ ID NO: 77227 - DNA, 22 bp, synthetic construct
  misc_feature 1..22: note = chemically synthesized
  source 1..22: mol_type = other DNA
cttaaagttttgttgattttgt

SEQ ID NO: 77228 - DNA, 22 bp, synthetic construct
  misc_feature 1..22: note = chemically synthesized
  source 1..22: mol_type = other DNA
ttaaagttttgttgattttgtt

SEQ ID NO: 77229 - DNA, 22 bp, synthetic construct
  misc_feature 1..22: note = chemically synthesized
  source 1..22: mol_type = other DNA
aaagttttgttgattttgttta

SEQ ID NO: 77230 - DNA, 22 bp, synthetic construct
  misc_feature 1..22: note = chemically synthesized
  source 1..22: mol_type = other DNA
aagttttgttgattttgtttac

SEQ ID NO: 77231 - DNA, 22 bp, synthetic construct
  misc_feature 1..22: note = chemically synthesized
  source 1..22: mol_type = other DNA
tgttgattttgtttacctttcc

SEQ ID NO: 77232 - DNA, 22 bp, synthetic construct
  misc_feature 1..22: note = chemically synthesized
  source 1..22: mol_type = other DNA
gttgattttgtttacctttcca

SEQ ID NO: 77233 - DNA, 22 bp, synthetic construct
  misc_feature 1..22: note = chemically synthesized
  source 1..22: mol_type = other DNA
ttgattttgtttacctttccaa

SEQ ID NO: 77234 - DNA, 22 bp, synthetic construct
  misc_feature 1..22: note = chemically synthesized
  source 1..22: mol_type = other DNA
attttgtttacctttccaagaa

SEQ ID NO: 77235 - DNA, 22 bp, synthetic construct
  misc_feature 1..22: note = chemically synthesized
  source 1..22: mol_type = other DNA
tgtttacctttccaagaaagca

SEQ ID NO: 77236 - DNA, 22 bp, synthetic construct
  misc_feature 1..22: note = chemically synthesized
  source 1..22: mol_type = other DNA
gtttacctttccaagaaagcaa

SEQ ID NO: 77237 - DNA, 22 bp, synthetic construct
  misc_feature 1..22: note = chemically synthesized
  source 1..22: mol_type = other DNA
tttacctttccaagaaagcaac

SEQ ID NO: 77238 - DNA, 22 bp, synthetic construct
  misc_feature 1..22: note = chemically synthesized
  source 1..22: mol_type = other DNA
acctttccaagaaagcaactgt

SEQ ID NO: 77239 - DNA, 22 bp, synthetic construct
  misc_feature 1..22: note = chemically synthesized
  source 1..22: mol_type = other DNA
cctttccaagaaagcaactgtt

SEQ ID NO: 77240 - DNA, 22 bp, synthetic construct
  misc_feature 1..22: note = chemically synthesized
  source 1..22: mol_type = other DNA
tccaagaaagcaactgtttgtt

SEQ ID NO: 77241 - DNA, 22 bp, synthetic construct
  misc_feature 1..22: note = chemically synthesized
  source 1..22: mol_type = other DNA
ccaagaaagcaactgtttgttt

SEQ ID NO: 77242 - DNA, 22 bp, synthetic construct
  misc_feature 1..22: note = chemically synthesized
  source 1..22: mol_type = other DNA
caagaaagcaactgtttgtttt

SEQ ID NO: 77243 - DNA, 22 bp, synthetic construct
  misc_feature 1..22: note = chemically synthesized
  source 1..22: mol_type = other DNA
tttgtttttaatgattttctgt

SEQ ID NO: 77244 - DNA, 22 bp, synthetic construct
  misc_feature 1..22: note = chemically synthesized
  source 1..22: mol_type = other DNA
gtttttaatgattttctgtatt

SEQ ID NO: 77245 - DNA, 22 bp, synthetic construct
  misc_feature 1..22: note = chemically synthesized
  source 1..22: mol_type = other DNA
tttttaatgattttctgtattt

SEQ ID NO: 77246 - DNA, 22 bp, synthetic construct
  misc_feature 1..22: note = chemically synthesized
  source 1..22: mol_type = other DNA
ttaatgattttctgtatttttt

SEQ ID NO: 77247 - DNA, 22 bp, synthetic construct
  misc_feature 1..22: note = chemically synthesized
  source 1..22: mol_type = other DNA
taatgattttctgtattttttg

SEQ ID NO: 77248 - DNA, 22 bp, synthetic construct
  misc_feature 1..22: note = chemically synthesized
  source 1..22: mol_type = other DNA
aatgattttctgtattttttgg

SEQ ID NO: 77249 - DNA, 22 bp, synthetic construct
  misc_feature 1..22: note = chemically synthesized
  source 1..22: mol_type = other DNA
atgattttctgtattttttggt

SEQ ID NO: 77250 - DNA, 22 bp, synthetic construct
  misc_feature 1..22: note = chemically synthesized
  source 1..22: mol_type = other DNA
tctgtattttttggtctcaatt

SEQ ID NO: 77251 - DNA, 22 bp, synthetic construct
  misc_feature 1..22: note = chemically synthesized
  source 1..22: mol_type = other DNA
ctgtattttttggtctcaattt

SEQ ID NO: 77252 - DNA, 22 bp, synthetic construct
  misc_feature 1..22: note = chemically synthesized
  source 1..22: mol_type = other DNA
tgtattttttggtctcaatttc

SEQ ID NO: 77253 - DNA, 22 bp, synthetic construct
  misc_feature 1..22: note = chemically synthesized
  source 1..22: mol_type = other DNA
tattttttggtctcaatttcat

SEQ ID NO: 77254 - DNA, 22 bp, synthetic construct
  misc_feature 1..22: note = chemically synthesized
  source 1..22: mol_type = other DNA
tttggtctcaatttcatttgtt

SEQ ID NO: 77255 - DNA, 22 bp, synthetic construct
  misc_feature 1..22: note = chemically synthesized
  source 1..22: mol_type = other DNA
ttggtctcaatttcatttgttt

SEQ ID NO: 77256 - DNA, 22 bp, synthetic construct
  misc_feature 1..22: note = chemically synthesized
  source 1..22: mol_type = other DNA
tggtctcaatttcatttgtttc

SEQ ID NO: 77257 - DNA, 22 bp, synthetic construct
  misc_feature 1..22: note = chemically synthesized
  source 1..22: mol_type = other DNA
ggtctcaatttcatttgtttct

SEQ ID NO: 77258 - DNA, 22 bp, synthetic construct
  misc_feature 1..22: note = chemically synthesized
  source 1..22: mol_type = other DNA
gtctcaatttcatttgtttctt

SEQ ID NO: 77259 - DNA, 22 bp, synthetic construct
  misc_feature 1..22: note = chemically synthesized
  source 1..22: mol_type = other DNA
aatttcatttgtttcttctctg

SEQ ID NO: 77260 - DNA, 22 bp, synthetic construct
  misc_feature 1..22: note = chemically synthesized
  source 1..22: mol_type = other DNA
catttgtttcttctctgatctt

SEQ ID NO: 77261 - DNA, 22 bp, synthetic construct
  misc_feature 1..22: note = chemically synthesized
  source 1..22: mol_type = other DNA
atttgtttcttctctgatcttt

SEQ ID NO: 77262 - DNA, 22 bp, synthetic construct
  misc_feature 1..22: note = chemically synthesized
  source 1..22: mol_type = other DNA
gtttcttctctgatctttctta

SEQ ID NO: 77263 - DNA, 22 bp, synthetic construct
  misc_feature 1..22: note = chemically synthesized
  source 1..22: mol_type = other DNA
tttcttctctgatctttcttat

SEQ ID NO: 77264 - DNA, 22 bp, synthetic construct
  misc_feature 1..22: note = chemically synthesized
  source 1..22: mol_type = other DNA
cttctctgatctttcttatttc

SEQ ID NO: 77265 - DNA, 22 bp, synthetic construct
  misc_feature 1..22: note = chemically synthesized
  source 1..22: mol_type = other DNA
ttctctgatctttcttatttct

SEQ ID NO: 77266 - DNA, 22 bp, synthetic construct
  misc_feature 1..22: note = chemically synthesized
  source 1..22: mol_type = other DNA
ctctgatctttcttatttctcc

SEQ ID NO: 77267 - DNA, 22 bp, synthetic construct
  misc_feature 1..22: note = chemically synthesized
  source 1..22: mol_type = other DNA
tctgatctttcttatttctccc

SEQ ID NO: 77268 - DNA, 22 bp, synthetic construct
  misc_feature 1..22: note = chemically synthesized
  source 1..22: mol_type = other DNA
tgatctttcttatttctcccct

SEQ ID NO: 77269 - DNA, 22 bp, synthetic construct
  misc_feature 1..22: note = chemically synthesized
  source 1..22: mol_type = other DNA
atctttcttatttctccccttc

SEQ ID NO: 77270 - DNA, 22 bp, synthetic construct
  misc_feature 1..22: note = chemically synthesized
  source 1..22: mol_type = other DNA
tcttatttctccccttctatta

SEQ ID NO: 77271 - DNA, 22 bp, synthetic construct
  misc_feature 1..22: note = chemically synthesized
  source 1..22: mol_type = other DNA
cttatttctccccttctattaa

SEQ ID NO: 77272 - DNA, 22 bp, synthetic construct
  misc_feature 1..22: note = chemically synthesized
  source 1..22: mol_type = other DNA
ttatttctccccttctattaat

SEQ ID NO: 77273 - DNA, 22 bp, synthetic construct
  misc_feature 1..22: note = chemically synthesized
  source 1..22: mol_type = other DNA
atttctccccttctattaattt

SEQ ID NO: 77274 - DNA, 22 bp, synthetic construct
  misc_feature 1..22: note = chemically synthesized
  source 1..22: mol_type = other DNA
tttctccccttctattaatttt

SEQ ID NO: 77275 - DNA, 22 bp, synthetic construct
  misc_feature 1..22: note = chemically synthesized
  source 1..22: mol_type = other DNA
ctccccttctattaattttgca

SEQ ID NO: 77276 - DNA, 22 bp, synthetic construct
  misc_feature 1..22: note = chemically synthesized
  source 1..22: mol_type = other DNA
tccccttctattaattttgcat

SEQ ID NO: 77277 - DNA, 22 bp, synthetic construct
  misc_feature 1..22: note = chemically synthesized
  source 1..22: mol_type = other DNA
cccttctattaattttgcattt

SEQ ID NO: 77278 - DNA, 22 bp, synthetic construct
  misc_feature 1..22: note = chemically synthesized
  source 1..22: mol_type = other DNA
ctattaattttgcatttggttt

SEQ ID NO: 77279 - DNA, 22 bp, synthetic construct
  misc_feature 1..22: note = chemically synthesized
  source 1..22: mol_type = other DNA
tattaattttgcatttggtttg

SEQ ID NO: 77280 - DNA, 22 bp, synthetic construct
  misc_feature 1..22: note = chemically synthesized
  source 1..22: mol_type = other DNA
ttaattttgcatttggtttgtt

SEQ ID NO: 77281 - DNA, 22 bp, synthetic construct
  misc_feature 1..22: note = chemically synthesized
  source 1..22: mol_type = other DNA
attttgcatttggtttgttctt

SEQ ID NO: 77282 - DNA, 22 bp, synthetic construct
  misc_feature 1..22: note = chemically synthesized
  source 1..22: mol_type = other DNA
tgcatttggtttgttcttgctt

SEQ ID NO: 77283 - DNA, 22 bp, synthetic construct
  misc_feature 1..22: note = chemically synthesized
  source 1..22: mol_type = other DNA
gcatttggtttgttcttgcttt

SEQ ID NO: 77284 - DNA, 22 bp, synthetic construct
  misc_feature 1..22: note = chemically synthesized
  source 1..22: mol_type = other DNA
catttggtttgttcttgctttc

SEQ ID NO: 77285 - DNA, 22 bp, synthetic construct
  misc_feature 1..22: note = chemically synthesized
  source 1..22: mol_type = other DNA
ggtttgttcttgctttcctatt

SEQ ID NO: 77286 - DNA, 22 bp, synthetic construct
  misc_feature 1..22: note = chemically synthesized
  source 1..22: mol_type = other DNA
gtttgttcttgctttcctattt

SEQ ID NO: 77287 - DNA, 22 bp, synthetic construct
  misc_feature 1..22: note = chemically synthesized
  source 1..22: mol_type = other DNA
gttcttgctttcctatttcctt

SEQ ID NO: 77288 - DNA, 22 bp, synthetic construct
  misc_feature 1..22: note = chemically synthesized
  source 1..22: mol_type = other DNA
ttcttgctttcctatttccttg

SEQ ID NO: 77289 - DNA, 22 bp, synthetic construct
  misc_feature 1..22: note = chemically synthesized
  source 1..22: mol_type = other DNA
ttgctttcctatttccttgagg

SEQ ID NO: 77290 - DNA, 22 bp, synthetic construct
  misc_feature 1..22: note = chemically synthesized
  source 1..22: mol_type = other DNA
gctttcctatttccttgaggta

SEQ ID NO: 77291 - DNA, 22 bp, synthetic construct
  misc_feature 1..22: note = chemically synthesized
  source 1..22: mol_type = other DNA
ctttcctatttccttgaggtac

SEQ ID NO: 77292 - DNA, 22 bp, synthetic construct
  misc_feature 1..22: note = chemically synthesized
  source 1..22: mol_type = other DNA
tcctatttccttgaggtacatt

SEQ ID NO: 77293 - DNA, 22 bp, synthetic construct
  misc_feature 1..22: note = chemically synthesized
  source 1..22: mol_type = other DNA
cctatttccttgaggtacattg

SEQ ID NO: 77294 - DNA, 22 bp, synthetic construct
  misc_feature 1..22: note = chemically synthesized
  source 1..22: mol_type = other DNA
ctatttccttgaggtacattgt

SEQ ID NO: 77295 - DNA, 22 bp, synthetic construct
  misc_feature 1..22: note = chemically synthesized
  source 1..22: mol_type = other DNA
tttccttgaggtacattgtttg

SEQ ID NO: 77296 - DNA, 22 bp, synthetic construct
  misc_feature 1..22: note = chemically synthesized
  source 1..22: mol_type = other DNA
ccttgaggtacattgtttggtt

SEQ ID NO: 77297 - DNA, 22 bp, synthetic construct
  misc_feature 1..22: note = chemically synthesized
  source 1..22: mol_type = other DNA
cttgaggtacattgtttggttg

SEQ ID NO: 77298 - DNA, 22 bp, synthetic construct
  misc_feature 1..22: note = chemically synthesized
  source 1..22: mol_type = other DNA
gaggtacattgtttggttgctt

SEQ ID NO: 77299 - DNA, 22 bp, synthetic construct
  misc_feature 1..22: note = chemically synthesized
  source 1..22: mol_type = other DNA
aggtacattgtttggttgctta

SEQ ID NO: 77300 - DNA, 22 bp, synthetic construct
  misc_feature 1..22: note = chemically synthesized
  source 1..22: mol_type = other DNA
tttggttgcttagttgaagcct

SEQ ID NO: 77301 - DNA, 22 bp, synthetic construct
  misc_feature 1..22: note = chemically synthesized
  source 1..22: mol_type = other DNA
ggttgcttagttgaagcctttc

SEQ ID NO: 77302 - DNA, 22 bp, synthetic construct
  misc_feature 1..22: note = chemically synthesized
  source 1..22: mol_type = other DNA
gttgcttagttgaagcctttct

SEQ ID NO: 77303 - DNA, 22 bp, synthetic construct
  misc_feature 1..22: note = chemically synthesized
  source 1..22: mol_type = other DNA
cttagttgaagcctttctactt

SEQ ID NO: 77304 - DNA, 22 bp, synthetic construct
  misc_feature 1..22: note = chemically synthesized
  source 1..22: mol_type = other DNA
agttgaagcctttctacttttt

SEQ ID NO: 77305 - DNA, 22 bp, synthetic construct
  misc_feature 1..22: note = chemically synthesized
  source 1..22: mol_type = other DNA
gttgaagcctttctactttttt

SEQ ID NO: 77306 - DNA, 22 bp, synthetic construct
  misc_feature 1..22: note = chemically synthesized
  source 1..22: mol_type = other DNA
aagcctttctacttttttggat

SEQ ID NO: 77307 - DNA, 22 bp, synthetic construct
  misc_feature 1..22: note = chemically synthesized
  source 1..22: mol_type = other DNA
tctacttttttggatataggtg

SEQ ID NO: 77308 - DNA, 22 bp, synthetic construct
  misc_feature 1..22: note = chemically synthesized
  source 1..22: mol_type = other DNA
ctacttttttggatataggtgt

SEQ ID NO: 77309 - DNA, 22 bp, synthetic construct
  misc_feature 1..22: note = chemically synthesized
  source 1..22: mol_type = other DNA
tacttttttggatataggtgtt

SEQ ID NO: 77310 - DNA, 22 bp, synthetic construct
  misc_feature 1..22: note = chemically synthesized
  source 1..22: mol_type = other DNA
cttttttggatataggtgttta

SEQ ID NO: 77311 - DNA, 22 bp, synthetic construct
  misc_feature 1..22: note = chemically synthesized
  source 1..22: mol_type = other DNA
ttttggatataggtgtttattg

SEQ ID NO: 77312 - DNA, 22 bp, synthetic construct
  misc_feature 1..22: note = chemically synthesized
  source 1..22: mol_type = other DNA
tttggatataggtgtttattgc

SEQ ID NO: 77313 - DNA, 22 bp, synthetic construct
  misc_feature 1..22: note = chemically synthesized
  source 1..22: mol_type = other DNA
ttggatataggtgtttattgct

SEQ ID NO: 77314 - DNA, 22 bp, synthetic construct
  misc_feature 1..22: note = chemically synthesized
  source 1..22: mol_type = other DNA
tggatataggtgtttattgcta

SEQ ID NO: 77315 - DNA, 22 bp, synthetic construct
  misc_feature 1..22: note = chemically synthesized
  source 1..22: mol_type = other DNA
ggatataggtgtttattgctat

SEQ ID NO: 77316 - DNA, 22 bp, synthetic construct
  misc_feature 1..22: note = chemically synthesized
  source 1..22: mol_type = other DNA
gatataggtgtttattgctatg

SEQ ID NO: 77317 - DNA, 22 bp, synthetic construct
  misc_feature 1..22: note = chemically synthesized
  source 1..22: mol_type = other DNA
attgctatgaacttccctctaa

SEQ ID NO: 77318 - DNA, 22 bp, synthetic construct
  misc_feature 1..22: note = chemically synthesized
  source 1..22: mol_type = other DNA
ttgctatgaacttccctctaag

SEQ ID NO: 77319 - DNA, 22 bp, synthetic construct
  misc_feature 1..22: note = chemically synthesized
  source 1..22: mol_type = other DNA
ctatgaacttccctctaagtac

SEQ ID NO: 77320 - DNA, 22 bp, synthetic construct
  misc_feature 1..22: note = chemically synthesized
  source 1..22: mol_type = other DNA
tgaacttccctctaagtactgc

SEQ ID NO: 77321 - DNA, 22 bp, synthetic construct
  misc_feature 1..22: note = chemically synthesized
  source 1..22: mol_type = other DNA
ccctctaagtactgcttttgcc

SEQ ID NO: 77322 - DNA, 22 bp, synthetic construct
  misc_feature 1..22: note = chemically synthesized
  source 1..22: mol_type = other DNA
cctctaagtactgcttttgcca

SEQ ID NO: 77323 - DNA, 22 bp, synthetic construct
  misc_feature 1..22: note = chemically synthesized
  source 1..22: mol_type = other DNA
taagtactgcttttgccatatc

SEQ ID NO: 77324 - DNA, 22 bp, synthetic construct
  misc_feature 1..22: note = chemically synthesized
  source 1..22: mol_type = other DNA
agtactgcttttgccatatcct

SEQ ID NO: 77325 - DNA, 22 bp, synthetic construct
  misc_feature 1..22: note = chemically synthesized
  source 1..22: mol_type = other DNA
cttttgccatatcctgtaggtt

SEQ ID NO: 77326 - DNA, 22 bp, synthetic construct
  misc_feature 1..22: note = chemically synthesized
  source 1..22: mol_type = other DNA
ttgccatatcctgtaggttttg

SEQ ID NO: 77327 - DNA, 22 bp, synthetic construct
  misc_feature 1..22: note = chemically synthesized
  source 1..22: mol_type = other DNA
tgccatatcctgtaggttttgg

SEQ ID NO: 77328 - DNA, 22 bp, synthetic construct
  misc_feature 1..22: note = chemically synthesized
  source 1..22: mol_type = other DNA
gccatatcctgtaggttttggt

SEQ ID NO: 77329 - DNA, 22 bp, synthetic construct
  misc_feature 1..22: note = chemically synthesized
  source 1..22: mol_type = other DNA
ccatatcctgtaggttttggta

SEQ ID NO: 77330 - DNA, 22 bp, synthetic construct
  misc_feature 1..22: note = chemically synthesized
  source 1..22: mol_type = other DNA
taggttttggtatgttgtattt

SEQ ID NO: 77331 - DNA, 22 bp, synthetic construct
  misc_feature 1..22: note = chemically synthesized
  source 1..22: mol_type = other DNA
tggtatgttgtatttccatttt

SEQ ID NO: 77332 - DNA, 22 bp, synthetic construct
  misc_feature 1..22: note = chemically synthesized
  source 1..22: mol_type = other DNA
ggtatgttgtatttccattttc

SEQ ID NO: 77333 - DNA, 22 bp, synthetic construct
  misc_feature 1..22: note = chemically synthesized
  source 1..22: mol_type = other DNA
gtatgttgtatttccattttca

SEQ ID NO: 77334 - DNA, 22 bp, synthetic construct
  misc_feature 1..22: note = chemically synthesized
  source 1..22: mol_type = other DNA
tatttccattttcacttgtttc

SEQ ID NO: 77335 - DNA, 22 bp, synthetic construct
  misc_feature 1..22: note = chemically synthesized
  source 1..22: mol_type = other DNA
ccattttcacttgtttcaagaa

SEQ ID NO: 77336 - DNA, 22 bp, synthetic construct
  misc_feature 1..22: note = chemically synthesized
  source 1..22: mol_type = other DNA
cattttcacttgtttcaagaag

SEQ ID NO: 77337 - DNA, 22 bp, synthetic construct
  misc_feature 1..22: note = chemically synthesized
  source 1..22: mol_type = other DNA
tcacttgtttcaagaagtttta

SEQ ID NO: 77338 - DNA, 22 bp, synthetic construct
  misc_feature 1..22: note = chemically synthesized
  source 1..22: mol_type = other DNA
cacttgtttcaagaagttttaa

SEQ ID NO: 77339 - DNA, 22 bp, synthetic construct
  misc_feature 1..22: note = chemically synthesized
  source 1..22: mol_type = other DNA
acttgtttcaagaagttttaaa

SEQ ID NO: 77340 - DNA, 22 bp, synthetic construct
  misc_feature 1..22: note = chemically synthesized
  source 1..22: mol_type = other DNA
gtttcaagaagttttaaaattt

SEQ ID NO: 77341 - DNA, 22 bp, synthetic construct
  misc_feature 1..22: note = chemically synthesized
  source 1..22: mol_type = other DNA
tttcaagaagttttaaaatttc

SEQ ID NO: 77342 - DNA, 22 bp, synthetic construct
  misc_feature 1..22: note = chemically synthesized
  source 1..22: mol_type = other DNA
caagaagttttaaaatttcctt

SEQ ID NO: 77343 - DNA, 22 bp, synthetic construct
  misc_feature 1..22: note = chemically synthesized
  source 1..22: mol_type = other DNA
aagaagttttaaaatttccttc

SEQ ID NO: 77344 - DNA, 22 bp, synthetic construct
  misc_feature 1..22: note = chemically synthesized
  source 1..22: mol_type = other DNA
taaaatttccttcttaatttct

SEQ ID NO: 77345 - DNA, 22 bp, synthetic construct
  misc_feature 1..22: note = chemically synthesized
  source 1..22: mol_type = other DNA
aaaatttccttcttaatttctt

SEQ ID NO: 77346 - DNA, 22 bp, synthetic construct
  misc_feature 1..22: note = chemically synthesized
  source 1..22: mol_type = other DNA
aaatttccttcttaatttcttt

SEQ ID NO: 77347 - DNA, 22 bp, synthetic construct
  misc_feature 1..22: note = chemically synthesized
  source 1..22: mol_type = other DNA
ccttcttaatttctttagtgac

SEQ ID NO: 77348 - DNA, 22 bp, synthetic construct
  misc_feature 1..22: note = chemically synthesized
  source 1..22: mol_type = other DNA
cttcttaatttctttagtgact

SEQ ID NO: 77349 - DNA, 22 bp, synthetic construct
  misc_feature 1..22: note = chemically synthesized
  source 1..22: mol_type = other DNA
cttaatttctttagtgactcat

SEQ ID NO: 77350 - DNA, 22 bp, synthetic construct
  misc_feature 1..22: note = chemically synthesized
  source 1..22: mol_type = other DNA
ttaatttctttagtgactcatt

SEQ ID NO: 77351 - DNA, 22 bp, synthetic construct
  misc_feature 1..22: note = chemically synthesized
  source 1..22: mol_type = other DNA
aatttctttagtgactcattgg

SEQ ID NO: 77352 - DNA, 22 bp, synthetic construct
  misc_feature 1..22: note = chemically synthesized
  source 1..22: mol_type = other DNA
atttctttagtgactcattggt

SEQ ID NO: 77353 - DNA, 22 bp, synthetic construct
  misc_feature 1..22: note = chemically synthesized
  source 1..22: mol_type = other DNA
ctttagtgactcattggttatt

SEQ ID NO: 77354 - DNA, 22 bp, synthetic construct
  misc_feature 1..22: note = chemically synthesized
  source 1..22: mol_type = other DNA
tttagtgactcattggttattc

SEQ ID NO: 77355 - DNA, 22 bp, synthetic construct
  misc_feature 1..22: note = chemically synthesized
  source 1..22: mol_type = other DNA
tagtgactcattggttattcag

SEQ ID NO: 77356 - DNA, 22 bp, synthetic construct
  misc_feature 1..22: note = chemically synthesized
  source 1..22: mol_type = other DNA
agtgactcattggttattcagt

SEQ ID NO: 77357 - DNA, 22 bp, synthetic construct
  misc_feature 1..22: note = chemically synthesized
  source 1..22: mol_type = other DNA
gtgactcattggttattcagtt

SEQ ID NO: 77358 - DNA, 22 bp, synthetic construct
  misc_feature 1..22: note = chemically synthesized
  source 1..22: mol_type = other DNA
attggttattcagtttcatgcg

SEQ ID NO: 77359 - DNA, 22 bp, synthetic construct
  misc_feature 1..22: note = chemically synthesized
  source 1..22: mol_type = other DNA
gttattcagtttcatgcgcatc

SEQ ID NO: 77360 - DNA, 22 bp, synthetic construct
  misc_feature 1..22: note = chemically synthesized
  source 1..22: mol_type = other DNA
ttcagtttcatgcgcatccctg

SEQ ID NO: 77361 - DNA, 22 bp, synthetic construct
  misc_feature 1..22: note = chemically synthesized
  source 1..22: mol_type = other DNA
agtttcatgcgcatccctgtga

SEQ ID NO: 77362 - DNA, 22 bp, synthetic construct
  misc_feature 1..22: note = chemically synthesized
  source 1..22: mol_type = other DNA
catgcgcatccctgtgaggaga

SEQ ID NO: 77363 - DNA, 22 bp, synthetic construct
  misc_feature 1..22: note = chemically synthesized
  source 1..22: mol_type = other DNA
atgcgcatccctgtgaggagac

SEQ ID NO: 77364 - DNA, 22 bp, synthetic construct
  misc_feature 1..22: note = chemically synthesized
  source 1..22: mol_type = other DNA
tgaggagactaccaaacaggct

SEQ ID NO: 77365 - DNA, 22 bp, synthetic construct
  misc_feature 1..22: note = chemically synthesized
  source 1..22: mol_type = other DNA
ccaaacaggctttgtgtgagca

SEQ ID NO: 77366 - DNA, 22 bp, synthetic construct
  misc_feature 1..22: note = chemically synthesized
  source 1..22: mol_type = other DNA
tgtgtgagcaataaagcttttt

SEQ ID NO: 77367 - DNA, 22 bp, synthetic construct
  misc_feature 1..22: note = chemically synthesized
  source 1..22: mol_type = other DNA
gtgtgagcaataaagcttttta

SEQ ID NO: 77368 - DNA, 22 bp, synthetic construct
  misc_feature 1..22: note = chemically synthesized
  source 1..22: mol_type = other DNA
tgtgagcaataaagctttttat

SEQ ID NO: 77369 - DNA, 22 bp, synthetic construct
  misc_feature 1..22: note = chemically synthesized
  source 1..22: mol_type = other DNA
tttatcacctgggtgcaggcgg

SEQ ID NO: 77370 - DNA, 22 bp, synthetic construct
  misc_feature 1..22: note = chemically synthesized
  source 1..22: mol_type = other DNA
ttatcacctgggtgcaggcggg

SEQ ID NO: 77371 - DNA, 22 bp, synthetic construct
  misc_feature 1..22: note = chemically synthesized
  source 1..22: mol_type = other DNA
tatcacctgggtgcaggcgggc

SEQ ID NO: 77372 - DNA, 22 bp, synthetic construct
  misc_feature 1..22: note = chemically synthesized
  source 1..22: mol_type = other DNA
atcacctgggtgcaggcgggct

SEQ ID NO: 77373 - DNA, 22 bp, synthetic construct
  misc_feature 1..22: note = chemically synthesized
  source 1..22: mol_type = other DNA
tcacctgggtgcaggcgggctg

SEQ ID NO: 77374 - DNA, 22 bp, synthetic construct
  misc_feature 1..22: note = chemically synthesized
  source 1..22: mol_type = other DNA
ggtgcaggcgggctgagtccga

SEQ ID NO: 77375 - DNA, 22 bp, synthetic construct
  misc_feature 1..22: note = chemically synthesized
  source 1..22: mol_type = other DNA
agtccgaaaagagagtcagcaa

SEQ ID NO: 77376 - DNA, 22 bp, synthetic construct
  misc_feature 1..22: note = chemically synthesized
  source 1..22: mol_type = other DNA
ttttataagatttgggtaggta

SEQ ID NO: 77377 - DNA, 22 bp, synthetic construct
  misc_feature 1..22: note = chemically synthesized
  source 1..22: mol_type = other DNA
tataagatttgggtaggtaaag

SEQ ID NO: 77378 - DNA, 22 bp, synthetic construct
  misc_feature 1..22: note = chemically synthesized
  source 1..22: mol_type = other DNA
ataagatttgggtaggtaaagg

SEQ ID NO: 77379 - DNA, 22 bp, synthetic construct
  misc_feature 1..22: note = chemically synthesized
  source 1..22: mol_type = other DNA
taagatttgggtaggtaaagga

SEQ ID NO: 77380 - DNA, 22 bp, synthetic construct
  misc_feature 1..22: note = chemically synthesized
  source 1..22: mol_type = other DNA
gggtaggtaaaggaaaattaca

SEQ ID NO: 77381 - DNA, 22 bp, synthetic construct
  misc_feature 1..22: note = chemically synthesized
  source 1..22: mol_type = other DNA
ggtaggtaaaggaaaattacag

SEQ ID NO: 77382 - DNA, 22 bp, synthetic construct
  misc_feature 1..22: note = chemically synthesized
  source 1..22: mol_type = other DNA
cagtcaaaggggggttgttctc

SEQ ID NO: 77383 - DNA, 22 bp, synthetic construct
  misc_feature 1..22: note = chemically synthesized
  source 1..22: mol_type = other DNA
ttctctggcgggcaggagtggg

SEQ ID NO: 77384 - DNA, 22 bp, synthetic construct
  misc_feature 1..22: note = chemically synthesized
  source 1..22: mol_type = other DNA
tctggcgggcaggagtgggggg

SEQ ID NO: 77385 - DNA, 22 bp, synthetic construct
  misc_feature 1..22: note = chemically synthesized
  source 1..22: mol_type = other DNA
tggcgggcaggagtggggggtc

SEQ ID NO: 77386 - DNA, 22 bp, synthetic construct
  misc_feature 1..22: note = chemically synthesized
  source 1..22: mol_type = other DNA
gcgggcaggagtggggggtcac

SEQ ID NO: 77387 - DNA, 22 bp, synthetic construct
  misc_feature 1..22: note = chemically synthesized
  source 1..22: mol_type = other DNA
agtaggggagcttttgagccag

SEQ ID NO: 77388 - DNA, 22 bp, synthetic construct
  misc_feature 1..22: note = chemically synthesized
  source 1..22: mol_type = other DNA
ttgagccaggatgagccaggag

SEQ ID NO: 77389 - DNA, 22 bp, synthetic construct
  misc_feature 1..22: note = chemically synthesized
  source 1..22: mol_type = other DNA
tgagccaggatgagccaggaga

SEQ ID NO: 77390 - DNA, 22 bp, synthetic construct
  misc_feature 1..22: note = chemically synthesized
  source 1..22: mol_type = other DNA
gagccaggatgagccaggagaa

SEQ ID NO: 77391 - DNA, 22 bp, synthetic construct
  misc_feature 1..22: note = chemically synthesized
  source 1..22: mol_type = other DNA
agccaggatgagccaggagaag

SEQ ID NO: 77392 - DNA, 22 bp, synthetic construct
  misc_feature 1..22: note = chemically synthesized
  source 1..22: mol_type = other DNA
tcacaagacaatgtcatcagtt

SEQ ID NO: 77393 - DNA, 22 bp, synthetic construct
  misc_feature 1..22: note = chemically synthesized
  source 1..22: mol_type = other DNA
cacaagacaatgtcatcagtta

SEQ ID NO: 77394 - DNA, 22 bp, synthetic construct
  misc_feature 1..22: note = chemically synthesized
  source 1..22: mol_type = other DNA
acaagacaatgtcatcagttaa

SEQ ID NO: 77395 - DNA, 22 bp, synthetic construct
  misc_feature 1..22: note = chemically synthesized
  source 1..22: mol_type = other DNA
aggcaggaacaggccattttca

SEQ ID NO: 77396 - DNA, 22 bp, synthetic construct
  misc_feature 1..22: note = chemically synthesized
  source 1..22: mol_type = other DNA
tcacttcttttgtggtggaatg

SEQ ID NO: 77397 - DNA, 22 bp, synthetic construct
  misc_feature 1..22: note = chemically synthesized
  source 1..22: mol_type = other DNA
cacttcttttgtggtggaatgt

SEQ ID NO: 77398 - DNA, 22 bp, synthetic construct
  misc_feature 1..22: note = chemically synthesized
  source 1..22: mol_type = other DNA
acttcttttgtggtggaatgtc

SEQ ID NO: 77399 - DNA, 22 bp, synthetic construct
  misc_feature 1..22: note = chemically synthesized
  source 1..22: mol_type = other DNA
cttttgtggtggaatgtcatca

SEQ ID NO: 77400 - DNA, 22 bp, synthetic construct
  misc_feature 1..22: note = chemically synthesized
  source 1..22: mol_type = other DNA
ttttgtggtggaatgtcatcag

SEQ ID NO: 77401 - DNA, 22 bp, synthetic construct
  misc_feature 1..22: note = chemically synthesized
  source 1..22: mol_type = other DNA
ttgtggtggaatgtcatcagtt

SEQ ID NO: 77402 - DNA, 22 bp, synthetic construct
  misc_feature 1..22: note = chemically synthesized
  source 1..22: mol_type = other DNA
tgtggtggaatgtcatcagtta

SEQ ID NO: 77403 - DNA, 22 bp, synthetic construct
  misc_feature 1..22: note = chemically synthesized
  source 1..22: mol_type = other DNA
gtggtggaatgtcatcagttaa

SEQ ID NO: 77404 - DNA, 22 bp, synthetic construct
  misc_feature 1..22: note = chemically synthesized
  source 1..22: mol_type = other DNA
tggtggaatgtcatcagttaag

SEQ ID NO: 77405 - DNA, 22 bp, synthetic construct
  misc_feature 1..22: note = chemically synthesized
  source 1..22: mol_type = other DNA
aggcaggaactggccatctgta

SEQ ID NO: 77406 - DNA, 22 bp, synthetic construct
  misc_feature 1..22: note = chemically synthesized
  source 1..22: mol_type = other DNA
gccatctgtatgtgtacctgca

SEQ ID NO: 77407 - DNA, 22 bp, synthetic construct
  misc_feature 1..22: note = chemically synthesized
  source 1..22: mol_type = other DNA
tatgtgtacctgcaggtcacag

SEQ ID NO: 77408 - DNA, 22 bp, synthetic construct
  misc_feature 1..22: note = chemically synthesized
  source 1..22: mol_type = other DNA
caggtcacaggggacatgatgg

SEQ ID NO: 77409 - DNA, 22 bp, synthetic construct
  misc_feature 1..22: note = chemically synthesized
  source 1..22: mol_type = other DNA
agcttgggctcagaggcctgac

SEQ ID NO: 77410 - DNA, 22 bp, synthetic construct
  misc_feature 1..22: note = chemically synthesized
  source 1..22: mol_type = other DNA
gcttgggctcagaggcctgaca

SEQ ID NO: 77411 - DNA, 22 bp, synthetic construct
  misc_feature 1..22: note = chemically synthesized
  source 1..22: mol_type = other DNA
gggctcagaggcctgacattcc

SEQ ID NO: 77412 - DNA, 22 bp, synthetic construct
  misc_feature 1..22: note = chemically synthesized
  source 1..22: mol_type = other DNA
ggctcagaggcctgacattcct

SEQ ID NO: 77413 - DNA, 22 bp, synthetic construct
  misc_feature 1..22: note = chemically synthesized
  source 1..22: mol_type = other DNA
agaggcctgacattcctgtctt

SEQ ID NO: 77414 - DNA, 22 bp, synthetic construct
  misc_feature 1..22: note = chemically synthesized
  source 1..22: mol_type = other DNA
acattcctgtcttcttatatta

SEQ ID NO: 77415 - DNA, 22 bp, synthetic construct
  misc_feature 1..22: note = chemically synthesized
  source 1..22: mol_type = other DNA
ctgtcttcttatattaataaga

SEQ ID NO: 77416 - DNA, 22 bp, synthetic construct
  misc_feature 1..22: note = chemically synthesized
  source 1..22: mol_type = other DNA
tcttcttatattaataagaaaa

SEQ ID NO: 77417 - DNA, 22 bp, synthetic construct
  misc_feature 1..22: note = chemically synthesized
  source 1..22: mol_type = other DNA
cttatattaataagaaaaataa

SEQ ID NO: 77418 - DNA, 22 bp, synthetic construct
  misc_feature 1..22: note = chemically synthesized
  source 1..22: mol_type = other DNA
ttatattaataagaaaaataaa

SEQ ID NO: 77419 - DNA, 22 bp, synthetic construct
  misc_feature 1..22: note = chemically synthesized
  source 1..22: mol_type = other DNA
atattaataagaaaaataaaac

SEQ ID NO: 77420 - DNA, 22 bp, synthetic construct
  misc_feature 1..22: note = chemically synthesized
  source 1..22: mol_type = other DNA
tattaataagaaaaataaaaca

SEQ ID NO: 77421 - DNA, 22 bp, synthetic construct
  misc_feature 1..22: note = chemically synthesized
  source 1..22: mol_type = other DNA
ataagaaaaataaaacataata

SEQ ID NO: 77422 - DNA, 22 bp, synthetic construct
  misc_feature 1..22: note = chemically synthesized
  source 1..22: mol_type = other DNA
aagtgttggggcagcgaaaatt

SEQ ID NO: 77423 - DNA, 22 bp, synthetic construct
  misc_feature 1..22: note = chemically synthesized
  source 1..22: mol_type = other DNA
gggcagcgaaaattttggggga

SEQ ID NO: 77424 - DNA, 22 bp, synthetic construct
  misc_feature 1..22: note = chemically synthesized
  source 1..22: mol_type = other DNA
tgggggatggtatggagagata

SEQ ID NO: 77425 - DNA, 22 bp, synthetic construct
  misc_feature 1..22: note = chemically synthesized
  source 1..22: mol_type = other DNA
gggggatggtatggagagataa

SEQ ID NO: 77426 - DNA, 22 bp, synthetic construct
  misc_feature 1..22: note = chemically synthesized
  source 1..22: mol_type = other DNA
ggggatggtatggagagataat

SEQ ID NO: 77427 - DNA, 22 bp, synthetic construct
  misc_feature 1..22: note = chemically synthesized
  source 1..22: mol_type = other DNA
ctcagggctgcttcgagcggga

SEQ ID NO: 77428 - DNA, 22 bp, synthetic construct
  misc_feature 1..22: note = chemically synthesized
  source 1..22: mol_type = other DNA
tcagggctgcttcgagcgggat

SEQ ID NO: 77429 - DNA, 22 bp, synthetic construct
  misc_feature 1..22: note = chemically synthesized
  source 1..22: mol_type = other DNA
agggctgcttcgagcgggatta

SEQ ID NO: 77430 - DNA, 22 bp, synthetic construct
  misc_feature 1..22: note = chemically synthesized
  source 1..22: mol_type = other DNA
cttcgagcgggattaggggcgg

SEQ ID NO: 77431 - DNA, 22 bp, synthetic construct
  misc_feature 1..22: note = chemically synthesized
  source 1..22: mol_type = other DNA
cgagcgggattaggggcggcgt

SEQ ID NO: 77432 - DNA, 22 bp, synthetic construct
  misc_feature 1..22: note = chemically synthesized
  source 1..22: mol_type = other DNA
gagcgggattaggggcggcgtg

SEQ ID NO: 77433 - DNA, 22 bp, synthetic construct
  misc_feature 1..22: note = chemically synthesized
  source 1..22: mol_type = other DNA
ggggcggcgtgggaacctagag

SEQ ID NO: 77434 - DNA, 22 bp, synthetic construct
  misc_feature 1..22: note = chemically synthesized
  source 1..22: mol_type = other DNA
gagtgggagagattaagctgaa

SEQ ID NO: 77435 - DNA, 22 bp, synthetic construct
  misc_feature 1..22: note = chemically synthesized
  source 1..22: mol_type = other DNA
agctgaaggaagattttgtggt

SEQ ID NO: 77436 - DNA, 22 bp, synthetic construct
  misc_feature 1..22: note = chemically synthesized
  source 1..22: mol_type = other DNA
aaggaagattttgtggtaaggg

SEQ ID NO: 77437 - DNA, 22 bp, synthetic construct
  misc_feature 1..22: note = chemically synthesized
  source 1..22: mol_type = other DNA
tgtggtaaggggtgatattgtg

SEQ ID NO: 77438 - DNA, 22 bp, synthetic construct
  misc_feature 1..22: note = chemically synthesized
  source 1..22: mol_type = other DNA
gtggtaaggggtgatattgtgg

SEQ ID NO: 77439 - DNA, 22 bp, synthetic construct
  misc_feature 1..22: note = chemically synthesized
  source 1..22: mol_type = other DNA
tggtaaggggtgatattgtggg

SEQ ID NO: 77440 - DNA, 22 bp, synthetic construct
  misc_feature 1..22: note = chemically synthesized
  source 1..22: mol_type = other DNA
tggggttgttagaagaaacatt

SEQ ID NO: 77441 - DNA, 22 bp, synthetic construct
  misc_feature 1..22: note = chemically synthesized
  source 1..22: mol_type = other DNA
ttagaagaaacatttgtcatgt

SEQ ID NO: 77442 - DNA, 22 bp, synthetic construct
  misc_feature 1..22: note = chemically synthesized
  source 1..22: mol_type = other DNA
gaagaaacatttgtcatgtaga

SEQ ID NO: 77443 - DNA, 22 bp, synthetic construct
  misc_feature 1..22: note = chemically synthesized
  source 1..22: mol_type = other DNA
gtcatgtagaattattggtgat

SEQ ID NO: 77444 - DNA, 22 bp, synthetic construct
  misc_feature 1..22: note = chemically synthesized
  source 1..22: mol_type = other DNA
tcatgtagaattattggtgatg

SEQ ID NO: 77445 - DNA, 22 bp, synthetic construct
  misc_feature 1..22: note = chemically synthesized
  source 1..22: mol_type = other DNA
ttggtgatggcctggatacggt

SEQ ID NO: 77446 - DNA, 22 bp, synthetic construct
  misc_feature 1..22: note = chemically synthesized
  source 1..22: mol_type = other DNA
gtgatggcctggatacggtttt

SEQ ID NO: 77447 - DNA, 22 bp, synthetic construct
  misc_feature 1..22: note = chemically synthesized
  source 1..22: mol_type = other DNA
gatacggttttgtatggattga

SEQ ID NO: 77448 - DNA, 22 bp, synthetic construct
  misc_feature 1..22: note = chemically synthesized
  source 1..22: mol_type = other DNA
tgtatggattgaaaaaccaaat

SEQ ID NO: 77449 - DNA, 22 bp, synthetic construct
  misc_feature 1..22: note = chemically synthesized
  source 1..22: mol_type = other DNA
gtatggattgaaaaaccaaatg

SEQ ID NO: 77450 - DNA, 22 bp, synthetic construct
  misc_feature 1..22: note = chemically synthesized
  source 1..22: mol_type = other DNA
tatggattgaaaaaccaaatgg

SEQ ID NO: 77451 - DNA, 22 bp, synthetic construct
  misc_feature 1..22: note = chemically synthesized
  source 1..22: mol_type = other DNA
aaaaaccaaatggaataagaga

SEQ ID NO: 77452 - DNA, 22 bp, synthetic construct
  misc_feature 1..22: note = chemically synthesized
  source 1..22: mol_type = other DNA
aaggactaagaagtgggaggac

SEQ ID NO: 77453 - DNA, 22 bp, synthetic construct
  misc_feature 1..22: note = chemically synthesized
  source 1..22: mol_type = other DNA
agaagtgggaggacctaggaca

SEQ ID NO: 77454 - DNA, 22 bp, synthetic construct
  misc_feature 1..22: note = chemically synthesized
  source 1..22: mol_type = other DNA
ggacatctgattaaagagtgcc

SEQ ID NO: 77455 - DNA, 22 bp, synthetic construct
  misc_feature 1..22: note = chemically synthesized
  source 1..22: mol_type = other DNA
attaaagagtgcctaaggagat

SEQ ID NO: 77456 - DNA, 22 bp, synthetic construct
  misc_feature 1..22: note = chemically synthesized
  source 1..22: mol_type = other DNA
aagagtgcctaaggagattcaa

SEQ ID NO: 77457 - DNA, 22 bp, synthetic construct
  misc_feature 1..22: note = chemically synthesized
  source 1..22: mol_type = other DNA
aggagattcaacatagtcctgc

SEQ ID NO: 77458 - DNA, 22 bp, synthetic construct
  misc_feature 1..22: note = chemically synthesized
  source 1..22: mol_type = other DNA
aacatagtcctgccagcaaaga

SEQ ID NO: 77459 - DNA, 22 bp, synthetic construct
  misc_feature 1..22: note = chemically synthesized
  source 1..22: mol_type = other DNA
ccagcaaagattatttatttac

SEQ ID NO: 77460 - DNA, 22 bp, synthetic construct
  misc_feature 1..22: note = chemically synthesized
  source 1..22: mol_type = other DNA
tttatttacttcaagagttaag

SEQ ID NO: 77461 - DNA, 22 bp, synthetic construct
  misc_feature 1..22: note = chemically synthesized
  source 1..22: mol_type = other DNA
atttacttcaagagttaagagt

SEQ ID NO: 77462 - DNA, 22 bp, synthetic construct
  misc_feature 1..22: note = chemically synthesized
  source 1..22: mol_type = other DNA
tttacttcaagagttaagagtg

SEQ ID NO: 77463 - DNA, 22 bp, synthetic construct
  misc_feature 1..22: note = chemically synthesized
  source 1..22: mol_type = other DNA
acttcaagagttaagagtggca

SEQ ID NO: 77464 - DNA, 22 bp, synthetic construct
  misc_feature 1..22: note = chemically synthesized
  source 1..22: mol_type = other DNA
cttcaagagttaagagtggcag

SEQ ID NO: 77465 - DNA, 22 bp, synthetic construct
  misc_feature 1..22: note = chemically synthesized
  source 1..22: mol_type = other DNA
caagagttaagagtggcagttt

SEQ ID NO: 77466 - DNA, 22 bp, synthetic construct
  misc_feature 1..22: note = chemically synthesized
  source 1..22: mol_type = other DNA
aagagttaagagtggcagtttg

SEQ ID NO: 77467 - DNA, 22 bp, synthetic construct
  misc_feature 1..22: note = chemically synthesized
  source 1..22: mol_type = other DNA
agagtggcagtttggggatagc

SEQ ID NO: 77468 - DNA, 22 bp, synthetic construct
  misc_feature 1..22: note = chemically synthesized
  source 1..22: mol_type = other DNA
ggggatagcaccaggagatatc

SEQ ID NO: 77469 - DNA, 22 bp, synthetic construct
  misc_feature 1..22: note = chemically synthesized
  source 1..22: mol_type = other DNA
gggatagcaccaggagatatca

SEQ ID NO: 77470 - DNA, 22 bp, synthetic construct
  misc_feature 1..22: note = chemically synthesized
  source 1..22: mol_type = other DNA
tgatggcttggaaaaacagtgt

SEQ ID NO: 77471 - DNA, 22 bp, synthetic construct
  misc_feature 1..22: note = chemically synthesized
  source 1..22: mol_type = other DNA
ggaaaaacagtgtaaaccggca

SEQ ID NO: 77472 - DNA, 22 bp, synthetic construct
  misc_feature 1..22: note = chemically synthesized
  source 1..22: mol_type = other DNA
gaaaaacagtgtaaaccggcag

SEQ ID NO: 77473 - DNA, 22 bp, synthetic construct
  misc_feature 1..22: note = chemically synthesized
  source 1..22: mol_type = other DNA
agaatggtgaataggagtatga

SEQ ID NO: 77474 - DNA, 22 bp, synthetic construct
  misc_feature 1..22: note = chemically synthesized
  source 1..22: mol_type = other DNA
gacagaagatagcagggatgac

SEQ ID NO: 77475 - DNA, 22 bp, synthetic construct
  misc_feature 1..22: note = chemically synthesized
  source 1..22: mol_type = other DNA
ttttggggcacattctaagttg

SEQ ID NO: 77476 - DNA, 22 bp, synthetic construct
  misc_feature 1..22: note = chemically synthesized
  source 1..22: mol_type = other DNA
tttggggcacattctaagttgg

SEQ ID NO: 77477 - DNA, 22 bp, synthetic construct
  misc_feature 1..22: note = chemically synthesized
  source 1..22: mol_type = other DNA
ttggggcacattctaagttggt

SEQ ID NO: 77478 - DNA, 22 bp, synthetic construct
  misc_feature 1..22: note = chemically synthesized
  source 1..22: mol_type = other DNA
tggggcacattctaagttggtc

SEQ ID NO: 77479 - DNA, 22 bp, synthetic construct
  misc_feature 1..22: note = chemically synthesized
  source 1..22: mol_type = other DNA
ggggcacattctaagttggtct

SEQ ID NO: 77480 - DNA, 22 bp, synthetic construct
  misc_feature 1..22: note = chemically synthesized
  source 1..22: mol_type = other DNA
gggcacattctaagttggtctg

SEQ ID NO: 77481 - DNA, 22 bp, synthetic construct
  misc_feature 1..22: note = chemically synthesized
  source 1..22: mol_type = other DNA
taagttggtctggtgtctggaa

SEQ ID NO: 77482 - DNA, 22 bp, synthetic construct
  misc_feature 1..22: note = chemically synthesized
  source 1..22: mol_type = other DNA
agttggtctggtgtctggaatt

SEQ ID NO: 77483 - DNA, 22 bp, synthetic construct
  misc_feature 1..22: note = chemically synthesized
  source 1..22: mol_type = other DNA
gtctggtgtctggaattagact

SEQ ID NO: 77484 - DNA, 22 bp, synthetic construct
  misc_feature 1..22: note = chemically synthesized
  source 1..22: mol_type = other DNA
gtgtctggaattagactggggc

SEQ ID NO: 77485 - DNA, 22 bp, synthetic construct
  misc_feature 1..22: note = chemically synthesized
  source 1..22: mol_type = other DNA
gaattagactggggcctaataa

SEQ ID NO: 77486 - DNA, 22 bp, synthetic construct
  misc_feature 1..22: note = chemically synthesized
  source 1..22: mol_type = other DNA
gactggggcctaataaaaaggc

SEQ ID NO: 77487 - DNA, 22 bp, synthetic construct
  misc_feature 1..22: note = chemically synthesized
  source 1..22: mol_type = other DNA
gggcctaataaaaaggcaaatc

SEQ ID NO: 77488 - DNA, 22 bp, synthetic construct
  misc_feature 1..22: note = chemically synthesized
  source 1..22: mol_type = other DNA
ataaaaaggcaaatctatacag

SEQ ID NO: 77489 - DNA, 22 bp, synthetic construct
  misc_feature 1..22: note = chemically synthesized
  source 1..22: mol_type = other DNA
tacaggagctcaaatgggctgt

SEQ ID NO: 77490 - DNA, 22 bp, synthetic construct
  misc_feature 1..22: note = chemically synthesized
  source 1..22: mol_type = other DNA
aaatgggctgtaccctgtagca

SEQ ID NO: 77491 - DNA, 22 bp, synthetic construct
  misc_feature 1..22: note = chemically synthesized
  source 1..22: mol_type = other DNA
taccctgtagcattctgaggac

SEQ ID NO: 77492 - DNA, 22 bp, synthetic construct
  misc_feature 1..22: note = chemically synthesized
  source 1..22: mol_type = other DNA
tagcattctgaggacaggtctg

SEQ ID NO: 77493 - DNA, 22 bp, synthetic construct
  misc_feature 1..22: note = chemically synthesized
  source 1..22: mol_type = other DNA
tgaggacaggtctgacttctga

SEQ ID NO: 77494 - DNA, 22 bp, synthetic construct
  misc_feature 1..22: note = chemically synthesized
  source 1..22: mol_type = other DNA
aggacaggtctgacttctgaga

SEQ ID NO: 77495 - DNA, 22 bp, synthetic construct
  misc_feature 1..22: note = chemically synthesized
  source 1..22: mol_type = other DNA
acttctgagaaagaaaagtggt

SEQ ID NO: 77496 - DNA, 22 bp, synthetic construct
  misc_feature 1..22: note = chemically synthesized
  source 1..22: mol_type = other DNA
ctgagaaagaaaagtggtaaaa

SEQ ID NO: 77497 - DNA, 22 bp, synthetic construct
  misc_feature 1..22: note = chemically synthesized
  source 1..22: mol_type = other DNA
tgagaaagaaaagtggtaaaag

SEQ ID NO: 77498 - DNA, 22 bp, synthetic construct
  misc_feature 1..22: note = chemically synthesized
  source 1..22: mol_type = other DNA
agaaagaaaagtggtaaaagta

SEQ ID NO: 77499 - DNA, 22 bp, synthetic construct
  misc_feature 1..22: note = chemically synthesized
  source 1..22: mol_type = other DNA
tccagtcctttttaagttggtg

SEQ ID NO: 77500 - DNA, 22 bp, synthetic construct
  misc_feature 1..22: note = chemically synthesized
  source 1..22: mol_type = other DNA
tttaagttggtggctgagcttg

SEQ ID NO: 77501 - DNA, 22 bp, synthetic construct
  misc_feature 1..22: note = chemically synthesized
  source 1..22: mol_type = other DNA
ttaagttggtggctgagcttgg

SEQ ID NO: 77502 - DNA, 22 bp, synthetic construct
  misc_feature 1..22: note = chemically synthesized
  source 1..22: mol_type = other DNA
taagttggtggctgagcttggt

SEQ ID NO: 77503 - DNA, 22 bp, synthetic construct
  misc_feature 1..22: note = chemically synthesized
  source 1..22: mol_type = other DNA
aagttggtggctgagcttggtg

SEQ ID NO: 77504 - DNA, 22 bp, synthetic construct
  misc_feature 1..22: note = chemically synthesized
  source 1..22: mol_type = other DNA
agttggtggctgagcttggtga

SEQ ID NO: 77505 - DNA, 22 bp, synthetic construct
  misc_feature 1..22: note = chemically synthesized
  source 1..22: mol_type = other DNA
gtggctgagcttggtgaggtgt

SEQ ID NO: 77506 - DNA, 22 bp, synthetic construct
  misc_feature 1..22: note = chemically synthesized
  source 1..22: mol_type = other DNA
agcttggtgaggtgtgttttta

SEQ ID NO: 77507 - DNA, 22 bp, synthetic construct
  misc_feature 1..22: note = chemically synthesized
  source 1..22: mol_type = other DNA
ggtgaggtgtgtttttaaaaga

SEQ ID NO: 77508 - DNA, 22 bp, synthetic construct
  misc_feature 1..22: note = chemically synthesized
  source 1..22: mol_type = other DNA
gtgaggtgtgtttttaaaagac

SEQ ID NO: 77509 - DNA, 22 bp, synthetic construct
  misc_feature 1..22: note = chemically synthesized
  source 1..22: mol_type = other DNA
ttaaaagacatttagtccgttc

SEQ ID NO: 77510 - DNA, 22 bp, synthetic construct
  misc_feature 1..22: note = chemically synthesized
  source 1..22: mol_type = other DNA
taaaagacatttagtccgttct

SEQ ID NO: 77511 - DNA, 22 bp, synthetic construct
  misc_feature 1..22: note = chemically synthesized
  source 1..22: mol_type = other DNA
aaaagacatttagtccgttcta

SEQ ID NO: 77512 - DNA, 22 bp, synthetic construct
  misc_feature 1..22: note = chemically synthesized
  source 1..22: mol_type = other DNA
aaagacatttagtccgttctac

SEQ ID NO: 77513 - DNA, 22 bp, synthetic construct
  misc_feature 1..22: note = chemically synthesized
  source 1..22: mol_type = other DNA
agtccgttctacttttcctgaa

SEQ ID NO: 77514 - DNA, 22 bp, synthetic construct
  misc_feature 1..22: note = chemically synthesized
  source 1..22: mol_type = other DNA
gtccgttctacttttcctgaag

SEQ ID NO: 77515 - DNA, 22 bp, synthetic construct
  misc_feature 1..22: note = chemically synthesized
  source 1..22: mol_type = other DNA
tacttttcctgaagacggagga

SEQ ID NO: 77516 - DNA, 22 bp, synthetic construct
  misc_feature 1..22: note = chemically synthesized
  source 1..22: mol_type = other DNA
cttttcctgaagacggaggacc

SEQ ID NO: 77517 - DNA, 22 bp, synthetic construct
  misc_feature 1..22: note = chemically synthesized
  source 1..22: mol_type = other DNA
ttcctgaagacggaggaccgta

SEQ ID NO: 77518 - DNA, 22 bp, synthetic construct
  misc_feature 1..22: note = chemically synthesized
  source 1..22: mol_type = other DNA
tcctgaagacggaggaccgtaa

SEQ ID NO: 77519 - DNA, 22 bp, synthetic construct
  misc_feature 1..22: note = chemically synthesized
  source 1..22: mol_type = other DNA
cctgaagacggaggaccgtaag

SEQ ID NO: 77520 - DNA, 22 bp, synthetic construct
  misc_feature 1..22: note = chemically synthesized
  source 1..22: mol_type = other DNA
ctgaagacggaggaccgtaagg

SEQ ID NO: 77521 - DNA, 22 bp, synthetic construct
  misc_feature 1..22: note = chemically synthesized
  source 1..22: mol_type = other DNA
aagacggaggaccgtaagggat

SEQ ID NO: 77522 - DNA, 22 bp, synthetic construct
  misc_feature 1..22: note = chemically synthesized
  source 1..22: mol_type = other DNA
tactgaatactaagagcctgaa

SEQ ID NO: 77523 - DNA, 22 bp, synthetic construct
  misc_feature 1..22: note = chemically synthesized
  source 1..22: mol_type = other DNA
actgaatactaagagcctgaaa

SEQ ID NO: 77524 - DNA, 22 bp, synthetic construct
  misc_feature 1..22: note = chemically synthesized
  source 1..22: mol_type = other DNA
ctgaatactaagagcctgaaaa

SEQ ID NO: 77525 - DNA, 22 bp, synthetic construct
  misc_feature 1..22: note = chemically synthesized
  source 1..22: mol_type = other DNA
aatactaagagcctgaaaaact

SEQ ID NO: 77526 - DNA, 22 bp, synthetic construct
  misc_feature 1..22: note = chemically synthesized
  source 1..22: mol_type = other DNA
agagcctgaaaaactgcttggc

SEQ ID NO: 77527 - DNA, 22 bp, synthetic construct
  misc_feature 1..22: note = chemically synthesized
  source 1..22: mol_type = other DNA
aaaaactgcttggctgatttga

SEQ ID NO: 77528 - DNA, 22 bp, synthetic construct
  misc_feature 1..22: note = chemically synthesized
  source 1..22: mol_type = other DNA
cttggctgatttgactaataaa

SEQ ID NO: 77529 - DNA, 22 bp, synthetic construct
  misc_feature 1..22: note = chemically synthesized
  source 1..22: mol_type = other DNA
ggctgatttgactaataaaggc

SEQ ID NO: 77530 - DNA, 22 bp, synthetic construct
  misc_feature 1..22: note = chemically synthesized
  source 1..22: mol_type = other DNA
gctgatttgactaataaaggct

SEQ ID NO: 77531 - DNA, 22 bp, synthetic construct
  misc_feature 1..22: note = chemically synthesized
  source 1..22: mol_type = other DNA
atttgactaataaaggctggtc

SEQ ID NO: 77532 - DNA, 22 bp, synthetic construct
  misc_feature 1..22: note = chemically synthesized
  source 1..22: mol_type = other DNA
gactaataaaggctggtctgtt

SEQ ID NO: 77533 - DNA, 22 bp, synthetic construct
  misc_feature 1..22: note = chemically synthesized
  source 1..22: mol_type = other DNA
actaataaaggctggtctgtta

SEQ ID NO: 77534 - DNA, 22 bp, synthetic construct
  misc_feature 1..22: note = chemically synthesized
  source 1..22: mol_type = other DNA
ataaaggctggtctgttatcag

SEQ ID NO: 77535 - DNA, 22 bp, synthetic construct
  misc_feature 1..22: note = chemically synthesized
  source 1..22: mol_type = other DNA
gtctgttatcagactgtataga

SEQ ID NO: 77536 - DNA, 22 bp, synthetic construct
  misc_feature 1..22: note = chemically synthesized
  source 1..22: mol_type = other DNA
ttatcagactgtatagaggtag

SEQ ID NO: 77537 - DNA, 22 bp, synthetic construct
  misc_feature 1..22: note = chemically synthesized
  source 1..22: mol_type = other DNA
tcagactgtatagaggtaggaa

SEQ ID NO: 77538 - DNA, 22 bp, synthetic construct
  misc_feature 1..22: note = chemically synthesized
  source 1..22: mol_type = other DNA
tatagaggtaggaaggctaaac

SEQ ID NO: 77539 - DNA, 22 bp, synthetic construct
  misc_feature 1..22: note = chemically synthesized
  source 1..22: mol_type = other DNA
aactgaggaattatgtctgaca

SEQ ID NO: 77540 - DNA, 22 bp, synthetic construct
  misc_feature 1..22: note = chemically synthesized
  source 1..22: mol_type = other DNA
aggaattatgtctgacagaagg

SEQ ID NO: 77541 - DNA, 22 bp, synthetic construct
  misc_feature 1..22: note = chemically synthesized
  source 1..22: mol_type = other DNA
tgtctgacagaagggaagaaat

SEQ ID NO: 77542 - DNA, 22 bp, synthetic construct
  misc_feature 1..22: note = chemically synthesized
  source 1..22: mol_type = other DNA
acagaagggaagaaatgactgc

SEQ ID NO: 77543 - DNA, 22 bp, synthetic construct
  misc_feature 1..22: note = chemically synthesized
  source 1..22: mol_type = other DNA
cggtggccttctcagaccctgt

SEQ ID NO: 77544 - DNA, 22 bp, synthetic construct
  misc_feature 1..22: note = chemically synthesized
  source 1..22: mol_type = other DNA
ctcagaccctgtaggaaagacc

SEQ ID NO: 77545 - DNA, 22 bp, synthetic construct
  misc_feature 1..22: note = chemically synthesized
  source 1..22: mol_type = other DNA
tcagaccctgtaggaaagacct

SEQ ID NO: 77546 - DNA, 22 bp, synthetic construct
  misc_feature 1..22: note = chemically synthesized
  source 1..22: mol_type = other DNA
agaccctgtaggaaagacctct

SEQ ID NO: 77547 - DNA, 22 bp, synthetic construct
  misc_feature 1..22: note = chemically synthesized
  source 1..22: mol_type = other DNA
taggaaagacctctacttatcc

SEQ ID NO: 77548 - DNA, 22 bp, synthetic construct
  misc_feature 1..22: note = chemically synthesized
  source 1..22: mol_type = other DNA
tacttatccagtgaaagtgtct

SEQ ID NO: 77549 - DNA, 22 bp, synthetic construct
  misc_feature 1..22: note = chemically synthesized
  source 1..22: mol_type = other DNA
cttatccagtgaaagtgtctac

SEQ ID NO: 77550 - DNA, 22 bp, synthetic construct
  misc_feature 1..22: note = chemically synthesized
  source 1..22: mol_type = other DNA
atccagtgaaagtgtctaccta

SEQ ID NO: 77551 - DNA, 22 bp, synthetic construct
  misc_feature 1..22: note = chemically synthesized
  source 1..22: mol_type = other DNA
tccagtgaaagtgtctacctag

SEQ ID NO: 77552 - DNA, 22 bp, synthetic construct
  misc_feature 1..22: note = chemically synthesized
  source 1..22: mol_type = other DNA
cctagactaagaggtattttag

SEQ ID NO: 77553 - DNA, 22 bp, synthetic construct
  misc_feature 1..22: note = chemically synthesized
  source 1..22: mol_type = other DNA
gactaagaggtattttagttat

SEQ ID NO: 77554 - DNA, 22 bp, synthetic construct
  misc_feature 1..22: note = chemically synthesized
  source 1..22: mol_type = other DNA
agaggtattttagttatctgac

SEQ ID NO: 77555 - DNA, 22 bp, synthetic construct
  misc_feature 1..22: note = chemically synthesized
  source 1..22: mol_type = other DNA
tagttatctgactcagggcatg

SEQ ID NO: 77556 - DNA, 22 bp, synthetic construct
  misc_feature 1..22: note = chemically synthesized
  source 1..22: mol_type = other DNA
agttatctgactcagggcatgt

SEQ ID NO: 77557 - DNA, 22 bp, synthetic construct
  misc_feature 1..22: note = chemically synthesized
  source 1..22: mol_type = other DNA
gttatctgactcagggcatgtt

SEQ ID NO: 77558 - DNA, 22 bp, synthetic construct
  misc_feature 1..22: note = chemically synthesized
  source 1..22: mol_type = other DNA
tctgactcagggcatgttgagt

SEQ ID NO: 77559 - DNA, 22 bp, synthetic construct
  misc_feature 1..22: note = chemically synthesized
  source 1..22: mol_type = other DNA
actcagggcatgttgagtaaat

SEQ ID NO: 77560 - DNA, 22 bp, synthetic construct
  misc_feature 1..22: note = chemically synthesized
  source 1..22: mol_type = other DNA
agggcatgttgagtaaatctaa

SEQ ID NO: 77561 - DNA, 22 bp, synthetic construct
  misc_feature 1..22: note = chemically synthesized
  source 1..22: mol_type = other DNA
agtaaatctaatttgccagtcc

SEQ ID NO: 77562 - DNA, 22 bp, synthetic construct
  misc_feature 1..22: note = chemically synthesized
  source 1..22: mol_type = other DNA
atttgccagtcctgggtggggg

SEQ ID NO: 77563 - DNA, 22 bp, synthetic construct
  misc_feature 1..22: note = chemically synthesized
  source 1..22: mol_type = other DNA
gccagtcctgggtgggggcaaa

SEQ ID NO: 77564 - DNA, 22 bp, synthetic construct
  misc_feature 1..22: note = chemically synthesized
  source 1..22: mol_type = other DNA
ccagtcctgggtgggggcaaat

SEQ ID NO: 77565 - DNA, 22 bp, synthetic construct
  misc_feature 1..22: note = chemically synthesized
  source 1..22: mol_type = other DNA
ggtgggggcaaatcctcgagct

SEQ ID NO: 77566 - DNA, 22 bp, synthetic construct
  misc_feature 1..22: note = chemically synthesized
  source 1..22: mol_type = other DNA
gagcttgatgtgtagggaaggg

SEQ ID NO: 77567 - DNA, 22 bp, synthetic construct
  misc_feature 1..22: note = chemically synthesized
  source 1..22: mol_type = other DNA
gatgtgtagggaagggaggggg

SEQ ID NO: 77568 - DNA, 22 bp, synthetic construct
  misc_feature 1..22: note = chemically synthesized
  source 1..22: mol_type = other DNA
atgtgtagggaagggagggggc

SEQ ID NO: 77569 - DNA, 22 bp, synthetic construct
  misc_feature 1..22: note = chemically synthesized
  source 1..22: mol_type = other DNA
aataatccctgaggagtagcag

SEQ ID NO: 77570 - DNA, 22 bp, synthetic construct
  misc_feature 1..22: note = chemically synthesized
  source 1..22: mol_type = other DNA
aggagtagcagaatagcagatg

SEQ ID NO: 77571 - DNA, 22 bp, synthetic construct
  misc_feature 1..22: note = chemically synthesized
  source 1..22: mol_type = other DNA
agaagttatttctttgaggata

SEQ ID NO: 77572 - DNA, 22 bp, synthetic construct
  misc_feature 1..22: note = chemically synthesized
  source 1..22: mol_type = other DNA
tttctttgaggatagatttcta

SEQ ID NO: 77573 - DNA, 22 bp, synthetic construct
  misc_feature 1..22: note = chemically synthesized
  source 1..22: mol_type = other DNA
ctttgaggatagatttctacga

SEQ ID NO: 77574 - DNA, 22 bp, synthetic construct
  misc_feature 1..22: note = chemically synthesized
  source 1..22: mol_type = other DNA
tttgaggatagatttctacgat

SEQ ID NO: 77575 - DNA, 22 bp, synthetic construct
  misc_feature 1..22: note = chemically synthesized
  source 1..22: mol_type = other DNA
tgaggatagatttctacgatgg

SEQ ID NO: 77576 - DNA, 22 bp, synthetic construct
  misc_feature 1..22: note = chemically synthesized
  source 1..22: mol_type = other DNA
gaggatagatttctacgatgga

SEQ ID NO: 77577 - DNA, 22 bp, synthetic construct
  misc_feature 1..22: note = chemically synthesized
  source 1..22: mol_type = other DNA
aggatagatttctacgatggaa

SEQ ID NO: 77578 - DNA, 22 bp, synthetic construct
  misc_feature 1..22: note = chemically synthesized
  source 1..22: mol_type = other DNA
ctacgatggaaaggaaatgaga

SEQ ID NO: 77579 - DNA, 22 bp, synthetic construct
  misc_feature 1..22: note = chemically synthesized
  source 1..22: mol_type = other DNA
tacgatggaaaggaaatgagag

SEQ ID NO: 77580 - DNA, 22 bp, synthetic construct
  misc_feature 1..22: note = chemically synthesized
  source 1..22: mol_type = other DNA
cgatggaaaggaaatgagaggt

SEQ ID NO: 77581 - DNA, 22 bp, synthetic construct
  misc_feature 1..22: note = chemically synthesized
  source 1..22: mol_type = other DNA
gaagaggcaggctagtggtttg

SEQ ID NO: 77582 - DNA, 22 bp, synthetic construct
  misc_feature 1..22: note = chemically synthesized
  source 1..22: mol_type = other DNA
gtggtttgtactatagcatagc

SEQ ID NO: 77583 - DNA, 22 bp, synthetic construct
  misc_feature 1..22: note = chemically synthesized
  source 1..22: mol_type = other DNA
gtactatagcatagcctgcctt

SEQ ID NO: 77584 - DNA, 22 bp, synthetic construct
  misc_feature 1..22: note = chemically synthesized
  source 1..22: mol_type = other DNA
tactatagcatagcctgccttt

SEQ ID NO: 77585 - DNA, 22 bp, synthetic construct
  misc_feature 1..22: note = chemically synthesized
  source 1..22: mol_type = other DNA
tagcatagcctgcctttgctgg

SEQ ID NO: 77586 - DNA, 22 bp, synthetic construct
  misc_feature 1..22: note = chemically synthesized
  source 1..22: mol_type = other DNA
cctttgctggtgtgtggctatt

SEQ ID NO: 77587 - DNA, 22 bp, synthetic construct
  misc_feature 1..22: note = chemically synthesized
  source 1..22: mol_type = other DNA
tgctggtgtgtggctattaggc

SEQ ID NO: 77588 - DNA, 22 bp, synthetic construct
  misc_feature 1..22: note = chemically synthesized
  source 1..22: mol_type = other DNA
gctggtgtgtggctattaggcc

SEQ ID NO: 77589 - DNA, 22 bp, synthetic construct
  misc_feature 1..22: note = chemically synthesized
  source 1..22: mol_type = other DNA
ctggtgtgtggctattaggcct

SEQ ID NO: 77590 - DNA, 22 bp, synthetic construct
  misc_feature 1..22: note = chemically synthesized
  source 1..22: mol_type = other DNA
gtgtgtggctattaggcctggt

SEQ ID NO: 77591 - DNA, 22 bp, synthetic construct
  misc_feature 1..22: note = chemically synthesized
  source 1..22: mol_type = other DNA
ttaggcctggtggaacggccat

SEQ ID NO: 77592 - DNA, 22 bp, synthetic construct
  misc_feature 1..22: note = chemically synthesized
  source 1..22: mol_type = other DNA
ggcctggtggaacggccatcaa

SEQ ID NO: 77593 - DNA, 22 bp, synthetic construct
  misc_feature 1..22: note = chemically synthesized
  source 1..22: mol_type = other DNA
gtggaacggccatcaataaatc

SEQ ID NO: 77594 - DNA, 22 bp, synthetic construct
  misc_feature 1..22: note = chemically synthesized
  source 1..22: mol_type = other DNA
aagtccgggccaggaccaatgg

SEQ ID NO: 77595 - DNA, 22 bp, synthetic construct
  misc_feature 1..22: note = chemically synthesized
  source 1..22: mol_type = other DNA
tgggacttaacaaagagtgagt

SEQ ID NO: 77596 - DNA, 22 bp, synthetic construct
  misc_feature 1..22: note = chemically synthesized
  source 1..22: mol_type = other DNA
aacaaagagtgagtacagctga

SEQ ID NO: 77597 - DNA, 22 bp, synthetic construct
  misc_feature 1..22: note = chemically synthesized
  source 1..22: mol_type = other DNA
acaaagagtgagtacagctgaa

SEQ ID NO: 77598 - DNA, 22 bp, synthetic construct
  misc_feature 1..22: note = chemically synthesized
  source 1..22: mol_type = other DNA
aaggagccggggatcagaaagt

SEQ ID NO: 77599 - DNA, 22 bp, synthetic construct
  misc_feature 1..22: note = chemically synthesized
  source 1..22: mol_type = other DNA
tagaagttatgagaaatgtgaa

SEQ ID NO: 77600 - DNA, 22 bp, synthetic construct
  misc_feature 1..22: note = chemically synthesized
  source 1..22: mol_type = other DNA
agaagttatgagaaatgtgaag

SEQ ID NO: 77601 - DNA, 22 bp, synthetic construct
  misc_feature 1..22: note = chemically synthesized
  source 1..22: mol_type = other DNA
gaagttatgagaaatgtgaaga

SEQ ID NO: 77602 - DNA, 22 bp, synthetic construct
  misc_feature 1..22: note = chemically synthesized
  source 1..22: mol_type = other DNA
tgagaaatgtgaagagtgagct

SEQ ID NO: 77603 - DNA, 22 bp, synthetic construct
  misc_feature 1..22: note = chemically synthesized
  source 1..22: mol_type = other DNA
agcatagtttgtgatttttagg

SEQ ID NO: 77604 - DNA, 22 bp, synthetic construct
  misc_feature 1..22: note = chemically synthesized
  source 1..22: mol_type = other DNA
gtgatttttagggcctctaaaa

SEQ ID NO: 77605 - DNA, 22 bp, synthetic construct
  misc_feature 1..22: note = chemically synthesized
  source 1..22: mol_type = other DNA
tgatttttagggcctctaaaag

SEQ ID NO: 77606 - DNA, 22 bp, synthetic construct
  misc_feature 1..22: note = chemically synthesized
  source 1..22: mol_type = other DNA
ttagggcctctaaaagtattaa

SEQ ID NO: 77607 - DNA, 22 bp, synthetic construct
  misc_feature 1..22: note = chemically synthesized
  source 1..22: mol_type = other DNA
tagggcctctaaaagtattaaa

SEQ ID NO: 77608 - DNA, 22 bp, synthetic construct
  misc_feature 1..22: note = chemically synthesized
  source 1..22: mol_type = other DNA
agggcctctaaaagtattaaag

SEQ ID NO: 77609 - DNA, 22 bp, synthetic construct
  misc_feature 1..22: note = chemically synthesized
  source 1..22: mol_type = other DNA
gggcctctaaaagtattaaagc

SEQ ID NO: 77610 - DNA, 22 bp, synthetic construct
  misc_feature 1..22: note = chemically synthesized
  source 1..22: mol_type = other DNA
taaaagtattaaagcagcggca

SEQ ID NO: 77611 - DNA, 22 bp, synthetic construct
  misc_feature 1..22: note = chemically synthesized
  source 1..22: mol_type = other DNA
aaagtattaaagcagcggcagc

SEQ ID NO: 77612 - DNA, 22 bp, synthetic construct
  misc_feature 1..22: note = chemically synthesized
  source 1..22: mol_type = other DNA
aagcagcggcagccactgcatg

SEQ ID NO: 77613 - DNA, 22 bp, synthetic construct
  misc_feature 1..22: note = chemically synthesized
  source 1..22: mol_type = other DNA
catgcagacctgagggctaggc

SEQ ID NO: 77614 - DNA, 22 bp, synthetic construct
  misc_feature 1..22: note = chemically synthesized
  source 1..22: mol_type = other DNA
agggctaggctaaaacagtaag

SEQ ID NO: 77615 - DNA, 22 bp, synthetic construct
  misc_feature 1..22: note = chemically synthesized
  source 1..22: mol_type = other DNA
ggctaaaacagtaaggtcaagt

SEQ ID NO: 77616 - DNA, 22 bp, synthetic construct
  misc_feature 1..22: note = chemically synthesized
  source 1..22: mol_type = other DNA
aaacagtaaggtcaagttattt

SEQ ID NO: 77617 - DNA, 22 bp, synthetic construct
  misc_feature 1..22: note = chemically synthesized
  source 1..22: mol_type = other DNA
tttggacagaaaggctacaggg

SEQ ID NO: 77618 - DNA, 22 bp, synthetic construct
  misc_feature 1..22: note = chemically synthesized
  source 1..22: mol_type = other DNA
ggacagaaaggctacagggtgc

SEQ ID NO: 77619 - DNA, 22 bp, synthetic construct
  misc_feature 1..22: note = chemically synthesized
  source 1..22: mol_type = other DNA
gacagaaaggctacagggtgca

SEQ ID NO: 77620 - DNA, 22 bp, synthetic construct
  misc_feature 1..22: note = chemically synthesized
  source 1..22: mol_type = other DNA
cagggtgcagtcctggatcttg

SEQ ID NO: 77621 - DNA, 22 bp, synthetic construct
  misc_feature 1..22: note = chemically synthesized
  source 1..22: mol_type = other DNA
gatcttgtgtaagaattctgac

SEQ ID NO: 77622 - DNA, 22 bp, synthetic construct
  misc_feature 1..22: note = chemically synthesized
  source 1..22: mol_type = other DNA
gtgtaagaattctgaccgcact

SEQ ID NO: 77623 - DNA, 22 bp, synthetic construct
  misc_feature 1..22: note = chemically synthesized
  source 1..22: mol_type = other DNA
tgtaagaattctgaccgcacta

SEQ ID NO: 77624 - DNA, 22 bp, synthetic construct
  misc_feature 1..22: note = chemically synthesized
  source 1..22: mol_type = other DNA
tgaccgcactaactatgcctag

SEQ ID NO: 77625 - DNA, 22 bp, synthetic construct
  misc_feature 1..22: note = chemically synthesized
  source 1..22: mol_type = other DNA
accgcactaactatgcctagga

SEQ ID NO: 77626 - DNA, 22 bp, synthetic construct
  misc_feature 1..22: note = chemically synthesized
  source 1..22: mol_type = other DNA
actatgcctaggaaggaaagga

SEQ ID NO: 77627 - DNA, 22 bp, synthetic construct
  misc_feature 1..22: note = chemically synthesized
  source 1..22: mol_type = other DNA
tgcctaggaaggaaaggagttg

SEQ ID NO: 77628 - DNA, 22 bp, synthetic construct
  misc_feature 1..22: note = chemically synthesized
  source 1..22: mol_type = other DNA
ggaaggaaaggagttgttgttt

SEQ ID NO: 77629 - DNA, 22 bp, synthetic construct
  misc_feature 1..22: note = chemically synthesized
  source 1..22: mol_type = other DNA
ttgttttgtagaagggattgag

SEQ ID NO: 77630 - DNA, 22 bp, synthetic construct
  misc_feature 1..22: note = chemically synthesized
  source 1..22: mol_type = other DNA
ttttgtagaagggattgaggtt

SEQ ID NO: 77631 - DNA, 22 bp, synthetic construct
  misc_feature 1..22: note = chemically synthesized
  source 1..22: mol_type = other DNA
tgtagaagggattgaggtttgg

SEQ ID NO: 77632 - DNA, 22 bp, synthetic construct
  misc_feature 1..22: note = chemically synthesized
  source 1..22: mol_type = other DNA
gtagaagggattgaggtttggg

SEQ ID NO: 77633 - DNA, 22 bp, synthetic construct
  misc_feature 1..22: note = chemically synthesized
  source 1..22: mol_type = other DNA
tagaagggattgaggtttggga

SEQ ID NO: 77634 - DNA, 22 bp, synthetic construct
  misc_feature 1..22: note = chemically synthesized
  source 1..22: mol_type = other DNA
aggtttgggagattaatcggac

SEQ ID NO: 77635 - DNA, 22 bp, synthetic construct
  misc_feature 1..22: note = chemically synthesized
  source 1..22: mol_type = other DNA
gggagattaatcggacacaatc

SEQ ID NO: 77636 - DNA, 22 bp, synthetic construct
  misc_feature 1..22: note = chemically synthesized
  source 1..22: mol_type = other DNA
ggagattaatcggacacaatca

SEQ ID NO: 77637 - DNA, 22 bp, synthetic construct
  misc_feature 1..22: note = chemically synthesized
  source 1..22: mol_type = other DNA
atcggacacaatcagcagggag

SEQ ID NO: 77638 - DNA, 22 bp, synthetic construct
  misc_feature 1..22: note = chemically synthesized
  source 1..22: mol_type = other DNA
ttatgagaattatgccgagata

SEQ ID NO: 77639 - DNA, 22 bp, synthetic construct
  misc_feature 1..22: note = chemically synthesized
  source 1..22: mol_type = other DNA
tatgagaattatgccgagatag

SEQ ID NO: 77640 - DNA, 22 bp, synthetic construct
  misc_feature 1..22: note = chemically synthesized
  source 1..22: mol_type = other DNA
atgagaattatgccgagatagg

SEQ ID NO: 77641 - DNA, 22 bp, synthetic construct
  misc_feature 1..22: note = chemically synthesized
  source 1..22: mol_type = other DNA
tgagaattatgccgagataggt

SEQ ID NO: 77642 - DNA, 22 bp, synthetic construct
  misc_feature 1..22: note = chemically synthesized
  source 1..22: mol_type = other DNA
tgccgagataggtaacacatga

SEQ ID NO: 77643 - DNA, 22 bp, synthetic construct
  misc_feature 1..22: note = chemically synthesized
  source 1..22: mol_type = other DNA
gggcttgactgaagtaatgggg

SEQ ID NO: 77644 - DNA, 22 bp, synthetic construct
  misc_feature 1..22: note = chemically synthesized
  source 1..22: mol_type = other DNA
ggcttgactgaagtaatggggt

SEQ ID NO: 77645 - DNA, 22 bp, synthetic construct
  misc_feature 1..22: note = chemically synthesized
  source 1..22: mol_type = other DNA
gactgaagtaatggggtctgtc

SEQ ID NO: 77646 - DNA, 22 bp, synthetic construct
  misc_feature 1..22: note = chemically synthesized
  source 1..22: mol_type = other DNA
actgaagtaatggggtctgtct

SEQ ID NO: 77647 - DNA, 22 bp, synthetic construct
  misc_feature 1..22: note = chemically synthesized
  source 1..22: mol_type = other DNA
aagtaatggggtctgtctgtga

SEQ ID NO: 77648 - DNA, 22 bp, synthetic construct
  misc_feature 1..22: note = chemically synthesized
  source 1..22: mol_type = other DNA
tctgtgaagccttgcagcagta

SEQ ID NO: 77649 - DNA, 22 bp, synthetic construct
  misc_feature 1..22: note = chemically synthesized
  source 1..22: mol_type = other DNA
tgaagccttgcagcagtacagc

SEQ ID NO: 77650 - DNA, 22 bp, synthetic construct
  misc_feature 1..22: note = chemically synthesized
  source 1..22: mol_type = other DNA
gcagcagtacagcccaggtaat

SEQ ID NO: 77651 - DNA, 22 bp, synthetic construct
  misc_feature 1..22: note = chemically synthesized
  source 1..22: mol_type = other DNA
cagcagtacagcccaggtaatt

SEQ ID NO: 77652 - DNA, 22 bp, synthetic construct
  misc_feature 1..22: note = chemically synthesized
  source 1..22: mol_type = other DNA
gctgagcctaatgggtgtcagt

SEQ ID NO: 77653 - DNA, 22 bp, synthetic construct
  misc_feature 1..22: note = chemically synthesized
  source 1..22: mol_type = other DNA
ctgagcctaatgggtgtcagtg

SEQ ID NO: 77654 - DNA, 22 bp, synthetic construct
  misc_feature 1..22: note = chemically synthesized
  source 1..22: mol_type = other DNA
agcctaatgggtgtcagtgtca

SEQ ID NO: 77655 - DNA, 22 bp, synthetic construct
  misc_feature 1..22: note = chemically synthesized
  source 1..22: mol_type = other DNA
atgggtgtcagtgtcagtccaa

SEQ ID NO: 77656 - DNA, 22 bp, synthetic construct
  misc_feature 1..22: note = chemically synthesized
  source 1..22: mol_type = other DNA
gaatgaagggtgcaaaggaata

SEQ ID NO: 77657 - DNA, 22 bp, synthetic construct
  misc_feature 1..22: note = chemically synthesized
  source 1..22: mol_type = other DNA
gagatccagaacagaataatgg

SEQ ID NO: 77658 - DNA, 22 bp, synthetic construct
  misc_feature 1..22: note = chemically synthesized
  source 1..22: mol_type = other DNA
agatccagaacagaataatggg

SEQ ID NO: 77659 - DNA, 22 bp, synthetic construct
  misc_feature 1..22: note = chemically synthesized
  source 1..22: mol_type = other DNA
tagatggaggtattgaggatag

SEQ ID NO: 77660 - DNA, 22 bp, synthetic construct
  misc_feature 1..22: note = chemically synthesized
  source 1..22: mol_type = other DNA
aggataggagagtatatgggtt

SEQ ID NO: 77661 - DNA, 22 bp, synthetic construct
  misc_feature 1..22: note = chemically synthesized
  source 1..22: mol_type = other DNA
ggcaccatggggtggataggca

SEQ ID NO: 77662 - DNA, 22 bp, synthetic construct
  misc_feature 1..22: note = chemically synthesized
  source 1..22: mol_type = other DNA
gcaccatggggtggataggcaa

SEQ ID NO: 77663 - DNA, 22 bp, synthetic construct
  misc_feature 1..22: note = chemically synthesized
  source 1..22: mol_type = other DNA
ggttgataagatgcagattctg

SEQ ID NO: 77664 - DNA, 22 bp, synthetic construct
  misc_feature 1..22: note = chemically synthesized
  source 1..22: mol_type = other DNA
gttgataagatgcagattctga

SEQ ID NO: 77665 - DNA, 22 bp, synthetic construct
  misc_feature 1..22: note = chemically synthesized
  source 1..22: mol_type = other DNA
ataagatgcagattctgaacta

SEQ ID NO: 77666 - DNA, 22 bp, synthetic construct
  misc_feature 1..22: note = chemically synthesized
  source 1..22: mol_type = other DNA
tgaactaacctgtaaggcttgt

SEQ ID NO: 77667 - DNA, 22 bp, synthetic construct
  misc_feature 1..22: note = chemically synthesized
  source 1..22: mol_type = other DNA
aactaacctgtaaggcttgtct

SEQ ID NO: 77668 - DNA, 22 bp, synthetic construct
  misc_feature 1..22: note = chemically synthesized
  source 1..22: mol_type = other DNA
acctgtaaggcttgtctggttt

SEQ ID NO: 77669 - DNA, 22 bp, synthetic construct
  misc_feature 1..22: note = chemically synthesized
  source 1..22: mol_type = other DNA
taaggcttgtctggttttagga

SEQ ID NO: 77670 - DNA, 22 bp, synthetic construct
  misc_feature 1..22: note = chemically synthesized
  source 1..22: mol_type = other DNA
gtctggttttaggacaggtaaa

SEQ ID NO: 77671 - DNA, 22 bp, synthetic construct
  misc_feature 1..22: note = chemically synthesized
  source 1..22: mol_type = other DNA
tctggttttaggacaggtaaaa

SEQ ID NO: 77672 - DNA, 22 bp, synthetic construct
  misc_feature 1..22: note = chemically synthesized
  source 1..22: mol_type = other DNA
gttttaggacaggtaaaatggg

SEQ ID NO: 77673 - DNA, 22 bp, synthetic construct
  misc_feature 1..22: note = chemically synthesized
  source 1..22: mol_type = other DNA
taggacaggtaaaatgggggaa

SEQ ID NO: 77674 - DNA, 22 bp, synthetic construct
  misc_feature 1..22: note = chemically synthesized
  source 1..22: mol_type = other DNA
aggacaggtaaaatgggggaat

SEQ ID NO: 77675 - DNA, 22 bp, synthetic construct
  misc_feature 1..22: note = chemically synthesized
  source 1..22: mol_type = other DNA
ggacaggtaaaatgggggaatg

SEQ ID NO: 77676 - DNA, 22 bp, synthetic construct
  misc_feature 1..22: note = chemically synthesized
  source 1..22: mol_type = other DNA
ataggctttaaaaggccatgct

SEQ ID NO: 77677 - DNA, 22 bp, synthetic construct
  misc_feature 1..22: note = chemically synthesized
  source 1..22: mol_type = other DNA
taggctttaaaaggccatgctg

SEQ ID NO: 77678 - DNA, 22 bp, synthetic construct
  misc_feature 1..22: note = chemically synthesized
  source 1..22: mol_type = other DNA
taaaaggccatgctgtaacagg

SEQ ID NO: 77679 - DNA, 22 bp, synthetic construct
  misc_feature 1..22: note = chemically synthesized
  source 1..22: mol_type = other DNA
aaaaggccatgctgtaacaggc

SEQ ID NO: 77680 - DNA, 22 bp, synthetic construct
  misc_feature 1..22: note = chemically synthesized
  source 1..22: mol_type = other DNA
aaaggccatgctgtaacaggca

SEQ ID NO: 77681 - DNA, 22 bp, synthetic construct
  misc_feature 1..22: note = chemically synthesized
  source 1..22: mol_type = other DNA
taacaggcaagtaataacaggc

SEQ ID NO: 77682 - DNA, 22 bp, synthetic construct
  misc_feature 1..22: note = chemically synthesized
  source 1..22: mol_type = other DNA
taatcctttcaaagcatgctgt

SEQ ID NO: 77683 - DNA, 22 bp, synthetic construct
  misc_feature 1..22: note = chemically synthesized
  source 1..22: mol_type = other DNA
aatcctttcaaagcatgctgtg

SEQ ID NO: 77684 - DNA, 22 bp, synthetic construct
  misc_feature 1..22: note = chemically synthesized
  source 1..22: mol_type = other DNA
atcctttcaaagcatgctgtgg

SEQ ID NO: 77685 - DNA, 22 bp, synthetic construct
  misc_feature 1..22: note = chemically synthesized
  source 1..22: mol_type = other DNA
tcaaagcatgctgtgggatggg

SEQ ID NO: 77686 - DNA, 22 bp, synthetic construct
  misc_feature 1..22: note = chemically synthesized
  source 1..22: mol_type = other DNA
caaagcatgctgtgggatggga

SEQ ID NO: 77687 - DNA, 22 bp, synthetic construct
  misc_feature 1..22: note = chemically synthesized
  source 1..22: mol_type = other DNA
aaagcatgctgtgggatgggat

SEQ ID NO: 77688 - DNA, 22 bp, synthetic construct
  misc_feature 1..22: note = chemically synthesized
  source 1..22: mol_type = other DNA
tgggatgggatactggcattga

SEQ ID NO: 77689 - DNA, 22 bp, synthetic construct
  misc_feature 1..22: note = chemically synthesized
  source 1..22: mol_type = other DNA
gcattgagcggggtaagagtga

SEQ ID NO: 77690 - DNA, 22 bp, synthetic construct
  misc_feature 1..22: note = chemically synthesized
  source 1..22: mol_type = other DNA
agcggggtaagagtgattaggt

SEQ ID NO: 77691 - DNA, 22 bp, synthetic construct
  misc_feature 1..22: note = chemically synthesized
  source 1..22: mol_type = other DNA
ggttttaatgggatggtaaggg

SEQ ID NO: 77692 - DNA, 22 bp, synthetic construct
  misc_feature 1..22: note = chemically synthesized
  source 1..22: mol_type = other DNA
taatgggatggtaaggggcgca

SEQ ID NO: 77693 - DNA, 22 bp, synthetic construct
  misc_feature 1..22: note = chemically synthesized
  source 1..22: mol_type = other DNA
aatgggatggtaaggggcgcat

SEQ ID NO: 77694 - DNA, 22 bp, synthetic construct
  misc_feature 1..22: note = chemically synthesized
  source 1..22: mol_type = other DNA
atgggatggtaaggggcgcatg

SEQ ID NO: 77695 - DNA, 22 bp, synthetic construct
  misc_feature 1..22: note = chemically synthesized
  source 1..22: mol_type = other DNA
atacttgtggattaaggtgggg

SEQ ID NO: 77696 - DNA, 22 bp, synthetic construct
  misc_feature 1..22: note = chemically synthesized
  source 1..22: mol_type = other DNA
tacttgtggattaaggtgggga

SEQ ID NO: 77697 - DNA, 22 bp, synthetic construct
  misc_feature 1..22: note = chemically synthesized
  source 1..22: mol_type = other DNA
gtggattaaggtggggagatac

SEQ ID NO: 77698 - DNA, 22 bp, synthetic construct
  misc_feature 1..22: note = chemically synthesized
  source 1..22: mol_type = other DNA
tggattaaggtggggagataca

SEQ ID NO: 77699 - DNA, 22 bp, synthetic construct
  misc_feature 1..22: note = chemically synthesized
  source 1..22: mol_type = other DNA
aggtggggagatacaaggggag

SEQ ID NO: 77700 - DNA, 22 bp, synthetic construct
  misc_feature 1..22: note = chemically synthesized
  source 1..22: mol_type = other DNA
tgaactgggggaaaacatggca

SEQ ID NO: 77701 - DNA, 22 bp, synthetic construct
  misc_feature 1..22: note = chemically synthesized
  source 1..22: mol_type = other DNA
gaactgggggaaaacatggcaa

SEQ ID NO: 77702 - DNA, 22 bp, synthetic construct
  misc_feature 1..22: note = chemically synthesized
  source 1..22: mol_type = other DNA
aactgggggaaaacatggcaat

SEQ ID NO: 77703 - DNA, 22 bp, synthetic construct
  misc_feature 1..22: note = chemically synthesized
  source 1..22: mol_type = other DNA
ggggaaaacatggcaatgaggt

SEQ ID NO: 77704 - DNA, 22 bp, synthetic construct
  misc_feature 1..22: note = chemically synthesized
  source 1..22: mol_type = other DNA
tagcccaggaatagtcagggaa

SEQ ID NO: 77705 - DNA, 22 bp, synthetic construct
  misc_feature 1..22: note = chemically synthesized
  source 1..22: mol_type = other DNA
agttaaagtgtctcggcctaat

SEQ ID NO: 77706 - DNA, 22 bp, synthetic construct
  misc_feature 1..22: note = chemically synthesized
  source 1..22: mol_type = other DNA
gttaaagtgtctcggcctaata

SEQ ID NO: 77707 - DNA, 22 bp, synthetic construct
  misc_feature 1..22: note = chemically synthesized
  source 1..22: mol_type = other DNA
aagtgtctcggcctaataaggg

SEQ ID NO: 77708 - DNA, 22 bp, synthetic construct
  misc_feature 1..22: note = chemically synthesized
  source 1..22: mol_type = other DNA
ggcctaataagggaactggcag

SEQ ID NO: 77709 - DNA, 22 bp, synthetic construct
  misc_feature 1..22: note = chemically synthesized
  source 1..22: mol_type = other DNA
ataagggaactggcaggtgggg

SEQ ID NO: 77710 - DNA, 22 bp, synthetic construct
  misc_feature 1..22: note = chemically synthesized
  source 1..22: mol_type = other DNA
gcaggtggggataatgaaaaag

SEQ ID NO: 77711 - DNA, 22 bp, synthetic construct
  misc_feature 1..22: note = chemically synthesized
  source 1..22: mol_type = other DNA
aaaagagtatcgtctcggttag

SEQ ID NO: 77712 - DNA, 22 bp, synthetic construct
  misc_feature 1..22: note = chemically synthesized
  source 1..22: mol_type = other DNA
aaagagtatcgtctcggttagc

SEQ ID NO: 77713 - DNA, 22 bp, synthetic construct
  misc_feature 1..22: note = chemically synthesized
  source 1..22: mol_type = other DNA
ggttagcaccagagttggggaa

SEQ ID NO: 77714 - DNA, 22 bp, synthetic construct
  misc_feature 1..22: note = chemically synthesized
  source 1..22: mol_type = other DNA
gcaccagagttggggaatttta

SEQ ID NO: 77715 - DNA, 22 bp, synthetic construct
  misc_feature 1..22: note = chemically synthesized
  source 1..22: mol_type = other DNA
gggaattttaagaggtttagaa

SEQ ID NO: 77716 - DNA, 22 bp, synthetic construct
  misc_feature 1..22: note = chemically synthesized
  source 1..22: mol_type = other DNA
taagaggtttagaagcctggcc

SEQ ID NO: 77717 - DNA, 22 bp, synthetic construct
  misc_feature 1..22: note = chemically synthesized
  source 1..22: mol_type = other DNA
aagaggtttagaagcctggcca

SEQ ID NO: 77718 - DNA, 22 bp, synthetic construct
  misc_feature 1..22: note = chemically synthesized
  source 1..22: mol_type = other DNA
agaggtttagaagcctggccat

SEQ ID NO: 77719 - DNA, 22 bp, synthetic construct
  misc_feature 1..22: note = chemically synthesized
  source 1..22: mol_type = other DNA
agaagcctggccatcaatacct

SEQ ID NO: 77720 - DNA, 22 bp, synthetic construct
  misc_feature 1..22: note = chemically synthesized
  source 1..22: mol_type = other DNA
gaagcctggccatcaataccta

SEQ ID NO: 77721 - DNA, 22 bp, synthetic construct
  misc_feature 1..22: note = chemically synthesized
  source 1..22: mol_type = other DNA
gccatcaatacctacaacagtt

SEQ ID NO: 77722 - DNA, 22 bp, synthetic construct
  misc_feature 1..22: note = chemically synthesized
  source 1..22: mol_type = other DNA
caacagttatggaggcaaggga

SEQ ID NO: 77723 - DNA, 22 bp, synthetic construct
  misc_feature 1..22: note = chemically synthesized
  source 1..22: mol_type = other DNA
tggaggcaagggaaacaggcct

SEQ ID NO: 77724 - DNA, 22 bp, synthetic construct
  misc_feature 1..22: note = chemically synthesized
  source 1..22: mol_type = other DNA
tgaaaagaaggtaatgtggagt

SEQ ID NO: 77725 - DNA, 22 bp, synthetic construct
  misc_feature 1..22: note = chemically synthesized
  source 1..22: mol_type = other DNA
gaaaagaaggtaatgtggagtg

SEQ ID NO: 77726 - DNA, 22 bp, synthetic construct
  misc_feature 1..22: note = chemically synthesized
  source 1..22: mol_type = other DNA
aaaagaaggtaatgtggagtgg

SEQ ID NO: 77727 - DNA, 22 bp, synthetic construct
  misc_feature 1..22: note = chemically synthesized
  source 1..22: mol_type = other DNA
catactgattaagaagggtaca

SEQ ID NO: 77728 - DNA, 22 bp, synthetic construct
  misc_feature 1..22: note = chemically synthesized
  source 1..22: mol_type = other DNA
attaagaagggtacagacttac

SEQ ID NO: 77729 - DNA, 22 bp, synthetic construct
  misc_feature 1..22: note = chemically synthesized
  source 1..22: mol_type = other DNA
agaagggtacagacttaccctc

SEQ ID NO: 77730 - DNA, 22 bp, synthetic construct
  misc_feature 1..22: note = chemically synthesized
  source 1..22: mol_type = other DNA
accctccactgtgagaattacc

SEQ ID NO: 77731 - DNA, 22 bp, synthetic construct
  misc_feature 1..22: note = chemically synthesized
  source 1..22: mol_type = other DNA
ccctccactgtgagaattacct

SEQ ID NO: 77732 - DNA, 22 bp, synthetic construct
  misc_feature 1..22: note = chemically synthesized
  source 1..22: mol_type = other DNA
cactgtgagaattacctaaagc

SEQ ID NO: 77733 - DNA, 22 bp, synthetic construct
  misc_feature 1..22: note = chemically synthesized
  source 1..22: mol_type = other DNA
tgagaattacctaaagctcggt

SEQ ID NO: 77734 - DNA, 22 bp, synthetic construct
  misc_feature 1..22: note = chemically synthesized
  source 1..22: mol_type = other DNA
cctaaagctcggtgtctgtgat

SEQ ID NO: 77735 - DNA, 22 bp, synthetic construct
  misc_feature 1..22: note = chemically synthesized
  source 1..22: mol_type = other DNA
aagctcggtgtctgtgatggtc

SEQ ID NO: 77736 - DNA, 22 bp, synthetic construct
  misc_feature 1..22: note = chemically synthesized
  source 1..22: mol_type = other DNA
ggtgtctgtgatggtctacagg

SEQ ID NO: 77737 - DNA, 22 bp, synthetic construct
  misc_feature 1..22: note = chemically synthesized
  source 1..22: mol_type = other DNA
tgatggtctacagggcttccga

SEQ ID NO: 77738 - DNA, 22 bp, synthetic construct
  misc_feature 1..22: note = chemically synthesized
  source 1..22: mol_type = other DNA
cagggcttccgaggcgatcagg

SEQ ID NO: 77739 - DNA, 22 bp, synthetic construct
  misc_feature 1..22: note = chemically synthesized
  source 1..22: mol_type = other DNA
ccgaggcgatcaggcagtggca

SEQ ID NO: 77740 - DNA, 22 bp, synthetic construct
  misc_feature 1..22: note = chemically synthesized
  source 1..22: mol_type = other DNA
cgaggcgatcaggcagtggcag

SEQ ID NO: 77741 - DNA, 22 bp, synthetic construct
  misc_feature 1..22: note = chemically synthesized
  source 1..22: mol_type = other DNA
cagctgcaaagccgagaagatc

SEQ ID NO: 77742 - DNA, 22 bp, synthetic construct
  misc_feature 1..22: note = chemically synthesized
  source 1..22: mol_type = other DNA
agctgcaaagccgagaagatct

SEQ ID NO: 77743 - DNA, 22 bp, synthetic construct
  misc_feature 1..22: note = chemically synthesized
  source 1..22: mol_type = other DNA
caaagccgagaagatctgggaa

SEQ ID NO: 77744 - DNA, 22 bp, synthetic construct
  misc_feature 1..22: note = chemically synthesized
  source 1..22: mol_type = other DNA
ggaaggagtcagtcagggagcc

SEQ ID NO: 77745 - DNA, 22 bp, synthetic construct
  misc_feature 1..22: note = chemically synthesized
  source 1..22: mol_type = other DNA
gggccagagttccaggggctct

SEQ ID NO: 77746 - DNA, 22 bp, synthetic construct
  misc_feature 1..22: note = chemically synthesized
  source 1..22: mol_type = other DNA
ggccagagttccaggggctcta

SEQ ID NO: 77747 - DNA, 22 bp, synthetic construct
  misc_feature 1..22: note = chemically synthesized
  source 1..22: mol_type = other DNA
caggggctctaggagtggctgc

SEQ ID NO: 77748 - DNA, 22 bp, synthetic construct
  misc_feature 1..22: note = chemically synthesized
  source 1..22: mol_type = other DNA
taggagtggctgccaggtgagt

SEQ ID NO: 77749 - DNA, 22 bp, synthetic construct
  misc_feature 1..22: note = chemically synthesized
  source 1..22: mol_type = other DNA
ggagtggctgccaggtgagttg

SEQ ID NO: 77750 - DNA, 22 bp, synthetic construct
  misc_feature 1..22: note = chemically synthesized
  source 1..22: mol_type = other DNA
ccaggtgagttgaacagtccga

SEQ ID NO: 77751 - DNA, 22 bp, synthetic construct
  misc_feature 1..22: note = chemically synthesized
  source 1..22: mol_type = other DNA
aacagtccgatttctagtgggg

SEQ ID NO: 77752 - DNA, 22 bp, synthetic construct
  misc_feature 1..22: note = chemically synthesized
  source 1..22: mol_type = other DNA
ctagtggggtcctgcacagatg

SEQ ID NO: 77753 - DNA, 22 bp, synthetic construct
  misc_feature 1..22: note = chemically synthesized
  source 1..22: mol_type = other DNA
tagtggggtcctgcacagatgg

SEQ ID NO: 77754 - DNA, 22 bp, synthetic construct
  misc_feature 1..22: note = chemically synthesized
  source 1..22: mol_type = other DNA
gtggggtcctgcacagatggga

SEQ ID NO: 77755 - DNA, 22 bp, synthetic construct
  misc_feature 1..22: note = chemically synthesized
  source 1..22: mol_type = other DNA
cacagatgggacacggcttagg

SEQ ID NO: 77756 - DNA, 22 bp, synthetic construct
  misc_feature 1..22: note = chemically synthesized
  source 1..22: mol_type = other DNA
aggaggaatcctgggctgcggg

SEQ ID NO: 77757 - DNA, 22 bp, synthetic construct
  misc_feature 1..22: note = chemically synthesized
  source 1..22: mol_type = other DNA
ggaggaatcctgggctgcgggc

SEQ ID NO: 77758 - DNA, 22 bp, synthetic construct
  misc_feature 1..22: note = chemically synthesized
  source 1..22: mol_type = other DNA
ggctgcgggcattccttggcct

SEQ ID NO: 77759 - DNA, 22 bp, synthetic construct
  misc_feature 1..22: note = chemically synthesized
  source 1..22: mol_type = other DNA
cgggcattccttggcctggtgg

SEQ ID NO: 77760 - DNA, 22 bp, synthetic construct
  misc_feature 1..22: note = chemically synthesized
  source 1..22: mol_type = other DNA
cttggcctggtggccagatttc

SEQ ID NO: 77761 - DNA, 22 bp, synthetic construct
  misc_feature 1..22: note = chemically synthesized
  source 1..22: mol_type = other DNA
ggcctggtggccagatttctgg

SEQ ID NO: 77762 - DNA, 22 bp, synthetic construct
  misc_feature 1..22: note = chemically synthesized
  source 1..22: mol_type = other DNA
gcctggtggccagatttctggc

SEQ ID NO: 77763 - DNA, 22 bp, synthetic construct
  misc_feature 1..22: note = chemically synthesized
  source 1..22: mol_type = other DNA
gtggccagatttctggcacttg

SEQ ID NO: 77764 - DNA, 22 bp, synthetic construct
  misc_feature 1..22: note = chemically synthesized
  source 1..22: mol_type = other DNA
ctggcacttgtagcaagctcct

SEQ ID NO: 77765 - DNA, 22 bp, synthetic construct
  misc_feature 1..22: note = chemically synthesized
  source 1..22: mol_type = other DNA
tggcacttgtagcaagctcctg

SEQ ID NO: 77766 - DNA, 22 bp, synthetic construct
  misc_feature 1..22: note = chemically synthesized
  source 1..22: mol_type = other DNA
gcacttgtagcaagctcctggg

SEQ ID NO: 77767 - DNA, 22 bp, synthetic construct
  misc_feature 1..22: note = chemically synthesized
  source 1..22: mol_type = other DNA
gtagcaagctcctgggggaggt

SEQ ID NO: 77768 - DNA, 22 bp, synthetic construct
  misc_feature 1..22: note = chemically synthesized
  source 1..22: mol_type = other DNA
tagcaagctcctgggggaggtg

SEQ ID NO: 77769 - DNA, 22 bp, synthetic construct
  misc_feature 1..22: note = chemically synthesized
  source 1..22: mol_type = other DNA
ctgggggaggtggttccggagg

SEQ ID NO: 77770 - DNA, 22 bp, synthetic construct
  misc_feature 1..22: note = chemically synthesized
  source 1..22: mol_type = other DNA
ggggaggtggttccggaggaac

SEQ ID NO: 77771 - DNA, 22 bp, synthetic construct
  misc_feature 1..22: note = chemically synthesized
  source 1..22: mol_type = other DNA
cggaggaacgcctggccactgc

SEQ ID NO: 77772 - DNA, 22 bp, synthetic construct
  misc_feature 1..22: note = chemically synthesized
  source 1..22: mol_type = other DNA
gccactgcggtttaggcatttg

SEQ ID NO: 77773 - DNA, 22 bp, synthetic construct
  misc_feature 1..22: note = chemically synthesized
  source 1..22: mol_type = other DNA
cggtttaggcatttggaagttc

SEQ ID NO: 77774 - DNA, 22 bp, synthetic construct
  misc_feature 1..22: note = chemically synthesized
  source 1..22: mol_type = other DNA
aggcatttggaagttcttgtgt

SEQ ID NO: 77775 - DNA, 22 bp, synthetic construct
  misc_feature 1..22: note = chemically synthesized
  source 1..22: mol_type = other DNA
ggcatttggaagttcttgtgtg

SEQ ID NO: 77776 - DNA, 22 bp, synthetic construct
  misc_feature 1..22: note = chemically synthesized
  source 1..22: mol_type = other DNA
ggaagttcttgtgtgctggaga

SEQ ID NO: 77777 - DNA, 22 bp, synthetic construct
  misc_feature 1..22: note = chemically synthesized
  source 1..22: mol_type = other DNA
gaagttcttgtgtgctggagat

SEQ ID NO: 77778 - DNA, 22 bp, synthetic construct
  misc_feature 1..22: note = chemically synthesized
  source 1..22: mol_type = other DNA
ttgtgtgctggagatgtggctg

SEQ ID NO: 77779 - DNA, 22 bp, synthetic construct
  misc_feature 1..22: note = chemically synthesized
  source 1..22: mol_type = other DNA
gtgtgctggagatgtggctggg

SEQ ID NO: 77780 - DNA, 22 bp, synthetic construct
  misc_feature 1..22: note = chemically synthesized
  source 1..22: mol_type = other DNA
tgtgctggagatgtggctgggg

SEQ ID NO: 77781 - DNA, 22 bp, synthetic construct
  misc_feature 1..22: note = chemically synthesized
  source 1..22: mol_type = other DNA
gagatgtggctggggtttgtct

SEQ ID NO: 77782 - DNA, 22 bp, synthetic construct
  misc_feature 1..22: note = chemically synthesized
  source 1..22: mol_type = other DNA
gggtttgtctcacagtggaggc

SEQ ID NO: 77783 - DNA, 22 bp, synthetic construct
  misc_feature 1..22: note = chemically synthesized
  source 1..22: mol_type = other DNA
gtctcacagtggaggcaaggaa

SEQ ID NO: 77784 - DNA, 22 bp, synthetic construct
  misc_feature 1..22: note = chemically synthesized
  source 1..22: mol_type = other DNA
tctcacagtggaggcaaggaat

SEQ ID NO: 77785 - DNA, 22 bp, synthetic construct
  misc_feature 1..22: note = chemically synthesized
  source 1..22: mol_type = other DNA
acagtggaggcaaggaattgca

SEQ ID NO: 77786 - DNA, 22 bp, synthetic construct
  misc_feature 1..22: note = chemically synthesized
  source 1..22: mol_type = other DNA
caactcaaaaatatgttgctac

SEQ ID NO: 77787 - DNA, 22 bp, synthetic construct
  misc_feature 1..22: note = chemically synthesized
  source 1..22: mol_type = other DNA
aaaaatatgttgctacttggct

SEQ ID NO: 77788 - DNA, 22 bp, synthetic construct
  misc_feature 1..22: note = chemically synthesized
  source 1..22: mol_type = other DNA
ctacttggctgcctctactcta

SEQ ID NO: 77789 - DNA, 22 bp, synthetic construct
  misc_feature 1..22: note = chemically synthesized
  source 1..22: mol_type = other DNA
cttggctgcctctactctatta

SEQ ID NO: 77790 - DNA, 22 bp, synthetic construct
  misc_feature 1..22: note = chemically synthesized
  source 1..22: mol_type = other DNA
ggctgcctctactctattattg

SEQ ID NO: 77791 - DNA, 22 bp, synthetic construct
  misc_feature 1..22: note = chemically synthesized
  source 1..22: mol_type = other DNA
gctgcctctactctattattgt

SEQ ID NO: 77792 - DNA, 22 bp, synthetic construct
  misc_feature 1..22: note = chemically synthesized
  source 1..22: mol_type = other DNA
cctctactctattattgtacac

SEQ ID NO: 77793 - DNA, 22 bp, synthetic construct
  misc_feature 1..22: note = chemically synthesized
  source 1..22: mol_type = other DNA
tactctattattgtacaccttg

SEQ ID NO: 77794 - DNA, 22 bp, synthetic construct
  misc_feature 1..22: note = chemically synthesized
  source 1..22: mol_type = other DNA
ctctattattgtacaccttgaa

SEQ ID NO: 77795 - DNA, 22 bp, synthetic construct
  misc_feature 1..22: note = chemically synthesized
  source 1..22: mol_type = other DNA
tattattgtacaccttgaaggt

SEQ ID NO: 77796 - DNA, 22 bp, synthetic construct
  misc_feature 1..22: note = chemically synthesized
  source 1..22: mol_type = other DNA
ttattgtacaccttgaaggtga

SEQ ID NO: 77797 - DNA, 22 bp, synthetic construct
  misc_feature 1..22: note = chemically synthesized
  source 1..22: mol_type = other DNA
ttgtacaccttgaaggtgaggt

SEQ ID NO: 77798 - DNA, 22 bp, synthetic construct
  misc_feature 1..22: note = chemically synthesized
  source 1..22: mol_type = other DNA
tacaccttgaaggtgaggttaa

SEQ ID NO: 77799 - DNA, 22 bp, synthetic construct
  misc_feature 1..22: note = chemically synthesized
  source 1..22: mol_type = other DNA
gaaggtgaggttaattgagtcc

SEQ ID NO: 77800 - DNA, 22 bp, synthetic construct
  misc_feature 1..22: note = chemically synthesized
  source 1..22: mol_type = other DNA
aaggtgaggttaattgagtcct

SEQ ID NO: 77801 - DNA, 22 bp, synthetic construct
  misc_feature 1..22: note = chemically synthesized
  source 1..22: mol_type = other DNA
attgagtcctgttgtggggttt

SEQ ID NO: 77802 - DNA, 22 bp, synthetic construct
  misc_feature 1..22: note = chemically synthesized
  source 1..22: mol_type = other DNA
agtcctgttgtggggtttgagg

SEQ ID NO: 77803 - DNA, 22 bp, synthetic construct
  misc_feature 1..22: note = chemically synthesized
  source 1..22: mol_type = other DNA
ttgtggggtttgaggtccagaa

SEQ ID NO: 77804 - DNA, 22 bp, synthetic construct
  misc_feature 1..22: note = chemically synthesized
  source 1..22: mol_type = other DNA
tggggtttgaggtccagaattt

SEQ ID NO: 77805 - DNA, 22 bp, synthetic construct
  misc_feature 1..22: note = chemically synthesized
  source 1..22: mol_type = other DNA
gaggtccagaatttaatttttg

SEQ ID NO: 77806 - DNA, 22 bp, synthetic construct
  misc_feature 1..22: note = chemically synthesized
  source 1..22: mol_type = other DNA
aggtccagaatttaatttttgg

SEQ ID NO: 77807 - DNA, 22 bp, synthetic construct
  misc_feature 1..22: note = chemically synthesized
  source 1..22: mol_type = other DNA
aatttttggagttttatttaat

SEQ ID NO: 77808 - DNA, 22 bp, synthetic construct
  misc_feature 1..22: note = chemically synthesized
  source 1..22: mol_type = other DNA
atttttggagttttatttaatg

SEQ ID NO: 77809 - DNA, 22 bp, synthetic construct
  misc_feature 1..22: note = chemically synthesized
  source 1..22: mol_type = other DNA
ttggagttttatttaatgtcag

SEQ ID NO: 77810 - DNA, 22 bp, synthetic construct
  misc_feature 1..22: note = chemically synthesized
  source 1..22: mol_type = other DNA
tggagttttatttaatgtcagg

SEQ ID NO: 77811 - DNA, 22 bp, synthetic construct
  misc_feature 1..22: note = chemically synthesized
  source 1..22: mol_type = other DNA
ggagttttatttaatgtcagga

SEQ ID NO: 77812 - DNA, 22 bp, synthetic construct
  misc_feature 1..22: note = chemically synthesized
  source 1..22: mol_type = other DNA
gagttttatttaatgtcaggag

SEQ ID NO: 77813 - DNA, 22 bp, synthetic construct
  misc_feature 1..22: note = chemically synthesized
  source 1..22: mol_type = other DNA
tatttaatgtcaggagcagatt

SEQ ID NO: 77814 - DNA, 22 bp, synthetic construct
  misc_feature 1..22: note = chemically synthesized
  source 1..22: mol_type = other DNA
atttaatgtcaggagcagattg

SEQ ID NO: 77815 - DNA, 22 bp, synthetic construct
  misc_feature 1..22: note = chemically synthesized
  source 1..22: mol_type = other DNA
tttaatgtcaggagcagattgg

SEQ ID NO: 77816 - DNA, 22 bp, synthetic construct
  misc_feature 1..22: note = chemically synthesized
  source 1..22: mol_type = other DNA
aatgtcaggagcagattgggta

SEQ ID NO: 77817 - DNA, 22 bp, synthetic construct
  misc_feature 1..22: note = chemically synthesized
  source 1..22: mol_type = other DNA
atgtcaggagcagattgggtaa

SEQ ID NO: 77818 - DNA, 22 bp, synthetic construct
  misc_feature 1..22: note = chemically synthesized
  source 1..22: mol_type = other DNA
ggtaataaaatgtatattgaga

SEQ ID NO: 77819 - DNA, 22 bp, synthetic construct
  misc_feature 1..22: note = chemically synthesized
  source 1..22: mol_type = other DNA
agaataaagtggccttttgtcc

SEQ ID NO: 77820 - DNA, 22 bp, synthetic construct
  misc_feature 1..22: note = chemically synthesized
  source 1..22: mol_type = other DNA
ttgtccttttagggtctagggc

SEQ ID NO: 77821 - DNA, 22 bp, synthetic construct
  misc_feature 1..22: note = chemically synthesized
  source 1..22: mol_type = other DNA
tgtccttttagggtctagggct

SEQ ID NO: 77822 - DNA, 22 bp, synthetic construct
  misc_feature 1..22: note = chemically synthesized
  source 1..22: mol_type = other DNA
gtccttttagggtctagggctg

SEQ ID NO: 77823 - DNA, 22 bp, synthetic construct
  misc_feature 1..22: note = chemically synthesized
  source 1..22: mol_type = other DNA
tccttttagggtctagggctgt

SEQ ID NO: 77824 - DNA, 22 bp, synthetic construct
  misc_feature 1..22: note = chemically synthesized
  source 1..22: mol_type = other DNA
ttagggtctagggctgtaaagc

SEQ ID NO: 77825 - DNA, 22 bp, synthetic construct
  misc_feature 1..22: note = chemically synthesized
  source 1..22: mol_type = other DNA
tagggtctagggctgtaaagcg

SEQ ID NO: 77826 - DNA, 22 bp, synthetic construct
  misc_feature 1..22: note = chemically synthesized
  source 1..22: mol_type = other DNA
agggtctagggctgtaaagcgt

SEQ ID NO: 77827 - DNA, 22 bp, synthetic construct
  misc_feature 1..22: note = chemically synthesized
  source 1..22: mol_type = other DNA
gggtctagggctgtaaagcgtc

SEQ ID NO: 77828 - DNA, 22 bp, synthetic construct
  misc_feature 1..22: note = chemically synthesized
  source 1..22: mol_type = other DNA
gggctgtaaagcgtctcagggt

SEQ ID NO: 77829 - DNA, 22 bp, synthetic construct
  misc_feature 1..22: note = chemically synthesized
  source 1..22: mol_type = other DNA
taaagcgtctcagggttgctgc

SEQ ID NO: 77830 - DNA, 22 bp, synthetic construct
  misc_feature 1..22: note = chemically synthesized
  source 1..22: mol_type = other DNA
agggttgctgccgaacgagcca

SEQ ID NO: 77831 - DNA, 22 bp, synthetic construct
  misc_feature 1..22: note = chemically synthesized
  source 1..22: mol_type = other DNA
ctgccgaacgagccatgaactg

SEQ ID NO: 77832 - DNA, 22 bp, synthetic construct
  misc_feature 1..22: note = chemically synthesized
  source 1..22: mol_type = other DNA
ccgaacgagccatgaactgggc

SEQ ID NO: 77833 - DNA, 22 bp, synthetic construct
  misc_feature 1..22: note = chemically synthesized
  source 1..22: mol_type = other DNA
ggctgggtttttcatatttgat

SEQ ID NO: 77834 - DNA, 22 bp, synthetic construct
  misc_feature 1..22: note = chemically synthesized
  source 1..22: mol_type = other DNA
ggtttttcatatttgatgaaag

SEQ ID NO: 77835 - DNA, 22 bp, synthetic construct
  misc_feature 1..22: note = chemically synthesized
  source 1..22: mol_type = other DNA
ttcatatttgatgaaagagcct

SEQ ID NO: 77836 - DNA, 22 bp, synthetic construct
  misc_feature 1..22: note = chemically synthesized
  source 1..22: mol_type = other DNA
tcatatttgatgaaagagccta

SEQ ID NO: 77837 - DNA, 22 bp, synthetic construct
  misc_feature 1..22: note = chemically synthesized
  source 1..22: mol_type = other DNA
catatttgatgaaagagcctaa

SEQ ID NO: 77838 - DNA, 22 bp, synthetic construct
  misc_feature 1..22: note = chemically synthesized
  source 1..22: mol_type = other DNA
atatttgatgaaagagcctaaa

SEQ ID NO: 77839 - DNA, 22 bp, synthetic construct
  misc_feature 1..22: note = chemically synthesized
  source 1..22: mol_type = other DNA
gatgaaagagcctaaacgctct

SEQ ID NO: 77840 - DNA, 22 bp, synthetic construct
  misc_feature 1..22: note = chemically synthesized
  source 1..22: mol_type = other DNA
atgaaagagcctaaacgctctg

SEQ ID NO: 77841 - DNA, 22 bp, synthetic construct
  misc_feature 1..22: note = chemically synthesized
  source 1..22: mol_type = other DNA
aacgctctgattcgggagaggt

SEQ ID NO: 77842 - DNA, 22 bp, synthetic construct
  misc_feature 1..22: note = chemically synthesized
  source 1..22: mol_type = other DNA
tgattcgggagaggtcggataa

SEQ ID NO: 77843 - DNA, 22 bp, synthetic construct
  misc_feature 1..22: note = chemically synthesized
  source 1..22: mol_type = other DNA
attcgggagaggtcggataaag

SEQ ID NO: 77844 - DNA, 22 bp, synthetic construct
  misc_feature 1..22: note = chemically synthesized
  source 1..22: mol_type = other DNA
gggagaggtcggataaagaaaa

SEQ ID NO: 77845 - DNA, 22 bp, synthetic construct
  misc_feature 1..22: note = chemically synthesized
  source 1..22: mol_type = other DNA
accttgactacgcctttagctt

SEQ ID NO: 77846 - DNA, 22 bp, synthetic construct
  misc_feature 1..22: note = chemically synthesized
  source 1..22: mol_type = other DNA
gactacgcctttagcttcagcc

SEQ ID NO: 77847 - DNA, 22 bp, synthetic construct
  misc_feature 1..22: note = chemically synthesized
  source 1..22: mol_type = other DNA
actacgcctttagcttcagcca

SEQ ID NO: 77848 - DNA, 22 bp, synthetic construct
  misc_feature 1..22: note = chemically synthesized
  source 1..22: mol_type = other DNA
cgcctttagcttcagccacctt

SEQ ID NO: 77849 - DNA, 22 bp, synthetic construct
  misc_feature 1..22: note = chemically synthesized
  source 1..22: mol_type = other DNA
tagcttcagccaccttcttaat

SEQ ID NO: 77850 - DNA, 22 bp, synthetic construct
  misc_feature 1..22: note = chemically synthesized
  source 1..22: mol_type = other DNA
agcttcagccaccttcttaata

SEQ ID NO: 77851 - DNA, 22 bp, synthetic construct
  misc_feature 1..22: note = chemically synthesized
  source 1..22: mol_type = other DNA
gcttcagccaccttcttaatag

SEQ ID NO: 77852 - DNA, 22 bp, synthetic construct
  misc_feature 1..22: note = chemically synthesized
  source 1..22: mol_type = other DNA
cagccaccttcttaataggaaa

SEQ ID NO: 77853 - DNA, 22 bp, synthetic construct
  misc_feature 1..22: note = chemically synthesized
  source 1..22: mol_type = other DNA
agccaccttcttaataggaaat

SEQ ID NO: 77854 - DNA, 22 bp, synthetic construct
  misc_feature 1..22: note = chemically synthesized
  source 1..22: mol_type = other DNA
cttaataggaaattgctgggca

SEQ ID NO: 77855 - DNA, 22 bp, synthetic construct
  misc_feature 1..22: note = chemically synthesized
  source 1..22: mol_type = other DNA
ttaataggaaattgctgggcag

SEQ ID NO: 77856 - DNA, 22 bp, synthetic construct
  misc_feature 1..22: note = chemically synthesized
  source 1..22: mol_type = other DNA
aataggaaattgctgggcaggt

SEQ ID NO: 77857 - DNA, 22 bp, synthetic construct
  misc_feature 1..22: note = chemically synthesized
  source 1..22: mol_type = other DNA
ataggaaattgctgggcaggtt

SEQ ID NO: 77858 - DNA, 22 bp, synthetic construct
  misc_feature 1..22: note = chemically synthesized
  source 1..22: mol_type = other DNA
ctgggcaggttggggagggcta

SEQ ID NO: 77859 - DNA, 22 bp, synthetic construct
  misc_feature 1..22: note = chemically synthesized
  source 1..22: mol_type = other DNA
ggcaggttggggagggctagtc

SEQ ID NO: 77860 - DNA, 22 bp, synthetic construct
  misc_feature 1..22: note = chemically synthesized
  source 1..22: mol_type = other DNA
gggagggctagtcacggaatga

SEQ ID NO: 77861 - DNA, 22 bp, synthetic construct
  misc_feature 1..22: note = chemically synthesized
  source 1..22: mol_type = other DNA
gtcacggaatgaaactgtaaac

SEQ ID NO: 77862 - DNA, 22 bp, synthetic construct
  misc_feature 1..22: note = chemically synthesized
  source 1..22: mol_type = other DNA
taaaccggaccgggtgtgagga

SEQ ID NO: 77863 - DNA, 22 bp, synthetic construct
  misc_feature 1..22: note = chemically synthesized
  source 1..22: mol_type = other DNA
cagggtggaggagctgaggctg

SEQ ID NO: 77864 - DNA, 22 bp, synthetic construct
  misc_feature 1..22: note = chemically synthesized
  source 1..22: mol_type = other DNA
aggctgaggaagatttgggacc

SEQ ID NO: 77865 - DNA, 22 bp, synthetic construct
  misc_feature 1..22: note = chemically synthesized
  source 1..22: mol_type = other DNA
aggaagatttgggacctagctc

SEQ ID NO: 77866 - DNA, 22 bp, synthetic construct
  misc_feature 1..22: note = chemically synthesized
  source 1..22: mol_type = other DNA
gggacctagctcggcctggcaa

SEQ ID NO: 77867 - DNA, 22 bp, synthetic construct
  misc_feature 1..22: note = chemically synthesized
  source 1..22: mol_type = other DNA
ggacctagctcggcctggcaag

SEQ ID NO: 77868 - DNA, 22 bp, synthetic construct
  misc_feature 1..22: note = chemically synthesized
  source 1..22: mol_type = other DNA
gctcggcctggcaaggagcagc

SEQ ID NO: 77869 - DNA, 22 bp, synthetic construct
  misc_feature 1..22: note = chemically synthesized
  source 1..22: mol_type = other DNA
ggcctggcaaggagcagcctgg

SEQ ID NO: 77870 - DNA, 22 bp, synthetic construct
  misc_feature 1..22: note = chemically synthesized
  source 1..22: mol_type = other DNA
gcaaggagcagcctggggagga

SEQ ID NO: 77871 - DNA, 22 bp, synthetic construct
  misc_feature 1..22: note = chemically synthesized
  source 1..22: mol_type = other DNA
gggaggaggggagacgtcagat

SEQ ID NO: 77872 - DNA, 22 bp, synthetic construct
  misc_feature 1..22: note = chemically synthesized
  source 1..22: mol_type = other DNA
tagaaaaggaagattagaaaga

SEQ ID NO: 77873 - DNA, 22 bp, synthetic construct
  misc_feature 1..22: note = chemically synthesized
  source 1..22: mol_type = other DNA
gaaagactcagcgacgcttgga

SEQ ID NO: 77874 - DNA, 22 bp, synthetic construct
  misc_feature 1..22: note = chemically synthesized
  source 1..22: mol_type = other DNA
agcgacgcttggagttgggact

SEQ ID NO: 77875 - DNA, 22 bp, synthetic construct
  misc_feature 1..22: note = chemically synthesized
  source 1..22: mol_type = other DNA
ggagttgggactgaggggacag

SEQ ID NO: 77876 - DNA, 22 bp, synthetic construct
  misc_feature 1..22: note = chemically synthesized
  source 1..22: mol_type = other DNA
gagttgggactgaggggacagg

SEQ ID NO: 77877 - DNA, 22 bp, synthetic construct
  misc_feature 1..22: note = chemically synthesized
  source 1..22: mol_type = other DNA
ggactgaggggacaggcgggag

SEQ ID NO: 77878 - DNA, 22 bp, synthetic construct
  misc_feature 1..22: note = chemically synthesized
  source 1..22: mol_type = other DNA
aggggacaggcgggagggaaag

SEQ ID NO: 77879 - DNA, 22 bp, synthetic construct
  misc_feature 1..22: note = chemically synthesized
  source 1..22: mol_type = other DNA
gggacaagttgcattgggaaga

SEQ ID NO: 77880 - DNA, 22 bp, synthetic construct
  misc_feature 1..22: note = chemically synthesized
  source 1..22: mol_type = other DNA
ggacaagttgcattgggaagag

SEQ ID NO: 77881 - DNA, 22 bp, synthetic construct
  misc_feature 1..22: note = chemically synthesized
  source 1..22: mol_type = other DNA
cattgggaagagactagggagg

SEQ ID NO: 77882 - DNA, 22 bp, synthetic construct
  misc_feature 1..22: note = chemically synthesized
  source 1..22: mol_type = other DNA
ggaagagactagggagggacca

SEQ ID NO: 77883 - DNA, 22 bp, synthetic construct
  misc_feature 1..22: note = chemically synthesized
  source 1..22: mol_type = other DNA
gggagggaccaatgtgtaaaag

SEQ ID NO: 77884 - DNA, 22 bp, synthetic construct
  misc_feature 1..22: note = chemically synthesized
  source 1..22: mol_type = other DNA
gacgtcaggcacctcagactgt

SEQ ID NO: 77885 - DNA, 22 bp, synthetic construct
  misc_feature 1..22: note = chemically synthesized
  source 1..22: mol_type = other DNA
agactgtttgcctgttttacga

SEQ ID NO: 77886 - DNA, 22 bp, synthetic construct
  misc_feature 1..22: note = chemically synthesized
  source 1..22: mol_type = other DNA
tttgcctgttttacgacaaaaa

SEQ ID NO: 77887 - DNA, 22 bp, synthetic construct
  misc_feature 1..22: note = chemically synthesized
  source 1..22: mol_type = other DNA
gcctgttttacgacaaaaatta

SEQ ID NO: 77888 - DNA, 22 bp, synthetic construct
  misc_feature 1..22: note = chemically synthesized
  source 1..22: mol_type = other DNA
cctgttttacgacaaaaattat

SEQ ID NO: 77889 - DNA, 22 bp, synthetic construct
  misc_feature 1..22: note = chemically synthesized
  source 1..22: mol_type = other DNA
ttttacgacaaaaattatttag

SEQ ID NO: 77890 - DNA, 22 bp, synthetic construct
  misc_feature 1..22: note = chemically synthesized
  source 1..22: mol_type = other DNA
tacgacaaaaattatttagatc

SEQ ID NO: 77891 - DNA, 22 bp, synthetic construct
  misc_feature 1..22: note = chemically synthesized
  source 1..22: mol_type = other DNA
acgacaaaaattatttagatct

SEQ ID NO: 77892 - DNA, 22 bp, synthetic construct
  misc_feature 1..22: note = chemically synthesized
  source 1..22: mol_type = other DNA
cgacaaaaattatttagatctt

SEQ ID NO: 77893 - DNA, 22 bp, synthetic construct
  misc_feature 1..22: note = chemically synthesized
  source 1..22: mol_type = other DNA
tttagatcttgaagaatggaaa

SEQ ID NO: 77894 - DNA, 22 bp, synthetic construct
  misc_feature 1..22: note = chemically synthesized
  source 1..22: mol_type = other DNA
agatcttgaagaatggaaaaat

SEQ ID NO: 77895 - DNA, 22 bp, synthetic construct
  misc_feature 1..22: note = chemically synthesized
  source 1..22: mol_type = other DNA
gatcttgaagaatggaaaaatt

SEQ ID NO: 77896 - DNA, 22 bp, synthetic construct
  misc_feature 1..22: note = chemically synthesized
  source 1..22: mol_type = other DNA
gaagaatggaaaaattgaaagt

SEQ ID NO: 77897 - DNA, 22 bp, synthetic construct
  misc_feature 1..22: note = chemically synthesized
  source 1..22: mol_type = other DNA
aagaatggaaaaattgaaagtg

SEQ ID NO: 77898 - DNA, 22 bp, synthetic construct
  misc_feature 1..22: note = chemically synthesized
  source 1..22: mol_type = other DNA
aaagtgccattttctggctatt

SEQ ID NO: 77899 - DNA, 22 bp, synthetic construct
  misc_feature 1..22: note = chemically synthesized
  source 1..22: mol_type = other DNA
tctggctatttggaaccactgt

SEQ ID NO: 77900 - DNA, 22 bp, synthetic construct
  misc_feature 1..22: note = chemically synthesized
  source 1..22: mol_type = other DNA
ctggctatttggaaccactgtc

SEQ ID NO: 77901 - DNA, 22 bp, synthetic construct
  misc_feature 1..22: note = chemically synthesized
  source 1..22: mol_type = other DNA
tggctatttggaaccactgtcg

SEQ ID NO: 77902 - DNA, 22 bp, synthetic construct
  misc_feature 1..22: note = chemically synthesized
  source 1..22: mol_type = other DNA
gctatttggaaccactgtcgag

SEQ ID NO: 77903 - DNA, 22 bp, synthetic construct
  misc_feature 1..22: note = chemically synthesized
  source 1..22: mol_type = other DNA
tttggaaccactgtcgagtttg

SEQ ID NO: 77904 - DNA, 22 bp, synthetic construct
  misc_feature 1..22: note = chemically synthesized
  source 1..22: mol_type = other DNA
ggaaccactgtcgagtttgtat

SEQ ID NO: 77905 - DNA, 22 bp, synthetic construct
  misc_feature 1..22: note = chemically synthesized
  source 1..22: mol_type = other DNA
gaaccactgtcgagtttgtatt

SEQ ID NO: 77906 - DNA, 22 bp, synthetic construct
  misc_feature 1..22: note = chemically synthesized
  source 1..22: mol_type = other DNA
tcgagtttgtattggagtcaag

SEQ ID NO: 77907 - DNA, 22 bp, synthetic construct
  misc_feature 1..22: note = chemically synthesized
  source 1..22: mol_type = other DNA
gtattggagtcaagcggccttg

SEQ ID NO: 77908 - DNA, 22 bp, synthetic construct
  misc_feature 1..22: note = chemically synthesized
  source 1..22: mol_type = other DNA
tattggagtcaagcggccttgc

SEQ ID NO: 77909 - DNA, 22 bp, synthetic construct
  misc_feature 1..22: note = chemically synthesized
  source 1..22: mol_type = other DNA
gagtcaagcggccttgcagaag

SEQ ID NO: 77910 - DNA, 22 bp, synthetic construct
  misc_feature 1..22: note = chemically synthesized
  source 1..22: mol_type = other DNA
gcagaagaaaataaggcattta

SEQ ID NO: 77911 - DNA, 22 bp, synthetic construct
  misc_feature 1..22: note = chemically synthesized
  source 1..22: mol_type = other DNA
cagaagaaaataaggcatttag

SEQ ID NO: 77912 - DNA, 22 bp, synthetic construct
  misc_feature 1..22: note = chemically synthesized
  source 1..22: mol_type = other DNA
aggttttaggtcaggtgtgagt

SEQ ID NO: 77913 - DNA, 22 bp, synthetic construct
  misc_feature 1..22: note = chemically synthesized
  source 1..22: mol_type = other DNA
ggttttaggtcaggtgtgagtt

SEQ ID NO: 77914 - DNA, 22 bp, synthetic construct
  misc_feature 1..22: note = chemically synthesized
  source 1..22: mol_type = other DNA
taggtcaggtgtgagttgaaga

SEQ ID NO: 77915 - DNA, 22 bp, synthetic construct
  misc_feature 1..22: note = chemically synthesized
  source 1..22: mol_type = other DNA
aggtcaggtgtgagttgaagag

SEQ ID NO: 77916 - DNA, 22 bp, synthetic construct
  misc_feature 1..22: note = chemically synthesized
  source 1..22: mol_type = other DNA
ggtcaggtgtgagttgaagagg

SEQ ID NO: 77917 - DNA, 22 bp, synthetic construct
  misc_feature 1..22: note = chemically synthesized
  source 1..22: mol_type = other DNA
aagaggttttaagttcttgaga

SEQ ID NO: 77918 - DNA, 22 bp, synthetic construct
  misc_feature 1..22: note = chemically synthesized
  source 1..22: mol_type = other DNA
taagttcttgagagcacaggct

SEQ ID NO: 77919 - DNA, 22 bp, synthetic construct
  misc_feature 1..22: note = chemically synthesized
  source 1..22: mol_type = other DNA
aagttcttgagagcacaggcta

SEQ ID NO: 77920 - DNA, 22 bp, synthetic construct
  misc_feature 1..22: note = chemically synthesized
  source 1..22: mol_type = other DNA
agttcttgagagcacaggctaa

SEQ ID NO: 77921 - DNA, 22 bp, synthetic construct
  misc_feature 1..22: note = chemically synthesized
  source 1..22: mol_type = other DNA
ttgagagcacaggctaagggag

SEQ ID NO: 77922 - DNA, 22 bp, synthetic construct
  misc_feature 1..22: note = chemically synthesized
  source 1..22: mol_type = other DNA
gagagcacaggctaagggagag

SEQ ID NO: 77923 - DNA, 22 bp, synthetic construct
  misc_feature 1..22: note = chemically synthesized
  source 1..22: mol_type = other DNA
agagcacaggctaagggagagg

SEQ ID NO: 77924 - DNA, 22 bp, synthetic construct
  misc_feature 1..22: note = chemically synthesized
  source 1..22: mol_type = other DNA
agggagagggaggaatggaggg

SEQ ID NO: 77925 - DNA, 22 bp, synthetic construct
  misc_feature 1..22: note = chemically synthesized
  source 1..22: mol_type = other DNA
cccctagtgaaggaggcaagcc

SEQ ID NO: 77926 - DNA, 22 bp, synthetic construct
  misc_feature 1..22: note = chemically synthesized
  source 1..22: mol_type = other DNA
gtgaaggaggcaagcccagaga

SEQ ID NO: 77927 - DNA, 22 bp, synthetic construct
  misc_feature 1..22: note = chemically synthesized
  source 1..22: mol_type = other DNA
gggggttcttactcaccagaaa

SEQ ID NO: 77928 - DNA, 22 bp, synthetic construct
  misc_feature 1..22: note = chemically synthesized
  source 1..22: mol_type = other DNA
ttactcaccagaaaaatgggca

SEQ ID NO: 77929 - DNA, 22 bp, synthetic construct
  misc_feature 1..22: note = chemically synthesized
  source 1..22: mol_type = other DNA
actcaccagaaaaatgggcaag

SEQ ID NO: 77930 - DNA, 22 bp, synthetic construct
  misc_feature 1..22: note = chemically synthesized
  source 1..22: mol_type = other DNA
ctcaccagaaaaatgggcaagg

SEQ ID NO: 77931 - DNA, 22 bp, synthetic construct
  misc_feature 1..22: note = chemically synthesized
  source 1..22: mol_type = other DNA
accagaaaaatgggcaaggggt

SEQ ID NO: 77932 - DNA, 22 bp, synthetic construct
  misc_feature 1..22: note = chemically synthesized
  source 1..22: mol_type = other DNA
gggcacggaaataaggggttgg

SEQ ID NO: 77933 - DNA, 22 bp, synthetic construct
  misc_feature 1..22: note = chemically synthesized
  source 1..22: mol_type = other DNA
gggtgcagagataagaggtcag

SEQ ID NO: 77934 - DNA, 22 bp, synthetic construct
  misc_feature 1..22: note = chemically synthesized
  source 1..22: mol_type = other DNA
gggtgcagagataagaggttgg

SEQ ID NO: 77935 - DNA, 22 bp, synthetic construct
  misc_feature 1..22: note = chemically synthesized
  source 1..22: mol_type = other DNA
gggcacagaaataagggatcgg

SEQ ID NO: 77936 - DNA, 22 bp, synthetic construct
  misc_feature 1..22: note = chemically synthesized
  source 1..22: mol_type = other DNA
gggtgcagaaataagggatcag

SEQ ID NO: 77937 - DNA, 22 bp, synthetic construct
  misc_feature 1..22: note = chemically synthesized
  source 1..22: mol_type = other DNA
gggtgcagagataagaggatgg

SEQ ID NO: 77938 - DNA, 22 bp, synthetic construct
  misc_feature 1..22: note = chemically synthesized
  source 1..22: mol_type = other DNA
agataagaggttggggcacaga

SEQ ID NO: 77939 - DNA, 22 bp, synthetic construct
  misc_feature 1..22: note = chemically synthesized
  source 1..22: mol_type = other DNA
gggcacagaaataagggattgg

SEQ ID NO: 77940 - DNA, 22 bp, synthetic construct
  misc_feature 1..22: note = chemically synthesized
  source 1..22: mol_type = other DNA
gggttcttgcccccagaaaagc

SEQ ID NO: 77941 - DNA, 22 bp, synthetic construct
  misc_feature 1..22: note = chemically synthesized
  source 1..22: mol_type = other DNA
ttgcccccagaaaagcagtgaa

SEQ ID NO: 77942 - DNA, 22 bp, synthetic construct
  misc_feature 1..22: note = chemically synthesized
  source 1..22: mol_type = other DNA
gcccccagaaaagcagtgaagg

SEQ ID NO: 77943 - DNA, 22 bp, synthetic construct
  misc_feature 1..22: note = chemically synthesized
  source 1..22: mol_type = other DNA
cccccagaaaagcagtgaaggg

SEQ ID NO: 77944 - DNA, 22 bp, synthetic construct
  misc_feature 1..22: note = chemically synthesized
  source 1..22: mol_type = other DNA
gggtacttacccccctccagaa

SEQ ID NO: 77945 - DNA, 22 bp, synthetic construct
  misc_feature 1..22: note = chemically synthesized
  source 1..22: mol_type = other DNA
acccccctccagaaaagtggga

SEQ ID NO: 77946 - DNA, 22 bp, synthetic construct
  misc_feature 1..22: note = chemically synthesized
  source 1..22: mol_type = other DNA
cccccctccagaaaagtgggat

SEQ ID NO: 77947 - DNA, 22 bp, synthetic construct
  misc_feature 1..22: note = chemically synthesized
  source 1..22: mol_type = other DNA
cagaaaagtgggatttgccgct

SEQ ID NO: 77948 - DNA, 22 bp, synthetic construct
  misc_feature 1..22: note = chemically synthesized
  source 1..22: mol_type = other DNA
gccgctaagggtgaaggaccaa

SEQ ID NO: 77949 - DNA, 22 bp, synthetic construct
  misc_feature 1..22: note = chemically synthesized
  source 1..22: mol_type = other DNA
ccgctaagggtgaaggaccaag

SEQ ID NO: 77950 - DNA, 22 bp, synthetic construct
  misc_feature 1..22: note = chemically synthesized
  source 1..22: mol_type = other DNA
agggtgaaggaccaaggcaggc

SEQ ID NO: 77951 - DNA, 22 bp, synthetic construct
  misc_feature 1..22: note = chemically synthesized
  source 1..22: mol_type = other DNA
cgtggtctgacacctctgaaac

SEQ ID NO: 77952 - DNA, 22 bp, synthetic construct
  misc_feature 1..22: note = chemically synthesized
  source 1..22: mol_type = other DNA
acacctctgaaacatggtttaa

SEQ ID NO: 77953 - DNA, 22 bp, synthetic construct
  misc_feature 1..22: note = chemically synthesized
  source 1..22: mol_type = other DNA
tgaaacatggtttaataatcag

SEQ ID NO: 77954 - DNA, 22 bp, synthetic construct
  misc_feature 1..22: note = chemically synthesized
  source 1..22: mol_type = other DNA
aaacatggtttaataatcagag

SEQ ID NO: 77955 - DNA, 22 bp, synthetic construct
  misc_feature 1..22: note = chemically synthesized
  source 1..22: mol_type = other DNA
aataatcagagaggtgtccctg

SEQ ID NO: 77956 - DNA, 22 bp, synthetic construct
  misc_feature 1..22: note = chemically synthesized
  source 1..22: mol_type = other DNA
ataatcagagaggtgtccctgc

SEQ ID NO: 77957 - DNA, 22 bp, synthetic construct
  misc_feature 1..22: note = chemically synthesized
  source 1..22: mol_type = other DNA
caatgattaaacaccaagggaa

SEQ ID NO: 77958 - DNA, 22 bp, synthetic construct
  misc_feature 1..22: note = chemically synthesized
  source 1..22: mol_type = other DNA
aacaccaagggaaggctgcctt

SEQ ID NO: 77959 - DNA, 22 bp, synthetic construct
  misc_feature 1..22: note = chemically synthesized
  source 1..22: mol_type = other DNA
ccttcccagtccgtgactggca

SEQ ID NO: 77960 - DNA, 22 bp, synthetic construct
  misc_feature 1..22: note = chemically synthesized
  source 1..22: mol_type = other DNA
cccagtccgtgactggcaccgg

SEQ ID NO: 77961 - DNA, 22 bp, synthetic construct
  misc_feature 1..22: note = chemically synthesized
  source 1..22: mol_type = other DNA
ccagtccgtgactggcaccgga

SEQ ID NO: 77962 - DNA, 22 bp, synthetic construct
  misc_feature 1..22: note = chemically synthesized
  source 1..22: mol_type = other DNA
gcaccggagttttgggtccacg

SEQ ID NO: 77963 - DNA, 22 bp, synthetic construct
  misc_feature 1..22: note = chemically synthesized
  source 1..22: mol_type = other DNA
tgggtccacggataaaacatgt

SEQ ID NO: 77964 - DNA, 22 bp, synthetic construct
  misc_feature 1..22: note = chemically synthesized
  source 1..22: mol_type = other DNA
gggtccacggataaaacatgtc

SEQ ID NO: 77965 - DNA, 22 bp, synthetic construct
  misc_feature 1..22: note = chemically synthesized
  source 1..22: mol_type = other DNA
ggtccacggataaaacatgtct

SEQ ID NO: 77966 - DNA, 22 bp, synthetic construct
  misc_feature 1..22: note = chemically synthesized
  source 1..22: mol_type = other DNA
ctttgtctctactggaaaatga

SEQ ID NO: 77967 - DNA, 22 bp, synthetic construct
  misc_feature 1..22: note = chemically synthesized
  source 1..22: mol_type = other DNA
tgtctctactggaaaatgaaag

SEQ ID NO: 77968 - DNA, 22 bp, synthetic construct
  misc_feature 1..22: note = chemically synthesized
  source 1..22: mol_type = other DNA
gtctctactggaaaatgaaagg

SEQ ID NO: 77969 - DNA, 22 bp, synthetic construct
  misc_feature 1..22: note = chemically synthesized
  source 1..22: mol_type = other DNA
tctctactggaaaatgaaagga

SEQ ID NO: 77970 - DNA, 22 bp, synthetic construct
  misc_feature 1..22: note = chemically synthesized
  source 1..22: mol_type = other DNA
tactggaaaatgaaaggaattg

SEQ ID NO: 77971 - DNA, 22 bp, synthetic construct
  misc_feature 1..22: note = chemically synthesized
  source 1..22: mol_type = other DNA
ctggaaaatgaaaggaattgaa

SEQ ID NO: 77972 - DNA, 22 bp, synthetic construct
  misc_feature 1..22: note = chemically synthesized
  source 1..22: mol_type = other DNA
gaaaatgaaaggaattgaaatt

SEQ ID NO: 77973 - DNA, 22 bp, synthetic construct
  misc_feature 1..22: note = chemically synthesized
  source 1..22: mol_type = other DNA
aaattaagagaagggagaaatt

SEQ ID NO: 77974 - DNA, 22 bp, synthetic construct
  misc_feature 1..22: note = chemically synthesized
  source 1..22: mol_type = other DNA
agagaagggagaaattgaagtg

SEQ ID NO: 77975 - DNA, 22 bp, synthetic construct
  misc_feature 1..22: note = chemically synthesized
  source 1..22: mol_type = other DNA
aagtgtggtgccaagattgaaa

SEQ ID NO: 77976 - DNA, 22 bp, synthetic construct
  misc_feature 1..22: note = chemically synthesized
  source 1..22: mol_type = other DNA
aaaggagaaagaagttgaggga

SEQ ID NO: 77977 - DNA, 22 bp, synthetic construct
  misc_feature 1..22: note = chemically synthesized
  source 1..22: mol_type = other DNA
agggatagtgagggaggttgga

SEQ ID NO: 77978 - DNA, 22 bp, synthetic construct
  misc_feature 1..22: note = chemically synthesized
  source 1..22: mol_type = other DNA
gagaagacagtaaaaagaggcc

SEQ ID NO: 77979 - DNA, 22 bp, synthetic construct
  misc_feature 1..22: note = chemically synthesized
  source 1..22: mol_type = other DNA
accggatttgaaattggtgaaa

SEQ ID NO: 77980 - DNA, 22 bp, synthetic construct
  misc_feature 1..22: note = chemically synthesized
  source 1..22: mol_type = other DNA
ccggatttgaaattggtgaaat

SEQ ID NO: 77981 - DNA, 22 bp, synthetic construct
  misc_feature 1..22: note = chemically synthesized
  source 1..22: mol_type = other DNA
gaaattggtgaaatgtttcttg

SEQ ID NO: 77982 - DNA, 22 bp, synthetic construct
  misc_feature 1..22: note = chemically synthesized
  source 1..22: mol_type = other DNA
aaattggtgaaatgtttcttgg

SEQ ID NO: 77983 - DNA, 22 bp, synthetic construct
  misc_feature 1..22: note = chemically synthesized
  source 1..22: mol_type = other DNA
gtgaaatgtttcttgggctggt

SEQ ID NO: 77984 - DNA, 22 bp, synthetic construct
  misc_feature 1..22: note = chemically synthesized
  source 1..22: mol_type = other DNA
cttgggctggtcagtttgagga

SEQ ID NO: 77985 - DNA, 22 bp, synthetic construct
  misc_feature 1..22: note = chemically synthesized
  source 1..22: mol_type = other DNA
ttgggctggtcagtttgaggac

SEQ ID NO: 77986 - DNA, 22 bp, synthetic construct
  misc_feature 1..22: note = chemically synthesized
  source 1..22: mol_type = other DNA
gggctggtcagtttgaggacct

SEQ ID NO: 77987 - DNA, 22 bp, synthetic construct
  misc_feature 1..22: note = chemically synthesized
  source 1..22: mol_type = other DNA
ggctggtcagtttgaggacctg

SEQ ID NO: 77988 - DNA, 22 bp, synthetic construct
  misc_feature 1..22: note = chemically synthesized
  source 1..22: mol_type = other DNA
gtcagtttgaggacctgaggtc

SEQ ID NO: 77989 - DNA, 22 bp, synthetic construct
  misc_feature 1..22: note = chemically synthesized
  source 1..22: mol_type = other DNA
gaggacctgaggtcgtaggtgg

SEQ ID NO: 77990 - DNA, 22 bp, synthetic construct
  misc_feature 1..22: note = chemically synthesized
  source 1..22: mol_type = other DNA
aggacctgaggtcgtaggtgga

SEQ ID NO: 77991 - DNA, 22 bp, synthetic construct
  misc_feature 1..22: note = chemically synthesized
  source 1..22: mol_type = other DNA
aggtcgtaggtggatctttctc

SEQ ID NO: 77992 - DNA, 22 bp, synthetic construct
  misc_feature 1..22: note = chemically synthesized
  source 1..22: mol_type = other DNA
tctcacggagcaaagagcagga

SEQ ID NO: 77993 - DNA, 22 bp, synthetic construct
  misc_feature 1..22: note = chemically synthesized
  source 1..22: mol_type = other DNA
ctcacggagcaaagagcaggag

SEQ ID NO: 77994 - DNA, 22 bp, synthetic construct
  misc_feature 1..22: note = chemically synthesized
  source 1..22: mol_type = other DNA
tcacggagcaaagagcaggagg

SEQ ID NO: 77995 - DNA, 22 bp, synthetic construct
  misc_feature 1..22: note = chemically synthesized
  source 1..22: mol_type = other DNA
acggagcaaagagcaggaggac

SEQ ID NO: 77996 - DNA, 22 bp, synthetic construct
  misc_feature 1..22: note = chemically synthesized
  source 1..22: mol_type = other DNA
atctcccaagggaggtccccca

SEQ ID NO: 77997 - DNA, 22 bp, synthetic construct
  misc_feature 1..22: note = chemically synthesized
  source 1..22: mol_type = other DNA
ccaagggaggtcccccaatctg

SEQ ID NO: 77998 - DNA, 22 bp, synthetic construct
  misc_feature 1..22: note = chemically synthesized
  source 1..22: mol_type = other DNA
agtcacggcaccaaatttcatg

SEQ ID NO: 77999 - DNA, 22 bp, synthetic construct
  misc_feature 1..22: note = chemically synthesized
  source 1..22: mol_type = other DNA
catgcgcgtccatatgaagaga

SEQ ID NO: 78000 - DNA, 22 bp, synthetic construct
  misc_feature 1..22: note = chemically synthesized
  source 1..22: mol_type = other DNA
atgcgcgtccatatgaagagac

SEQ ID NO: 78001 - DNA, 22 bp, synthetic construct
  misc_feature 1..22: note = chemically synthesized
  source 1..22: mol_type = other DNA
ccaaacaggctttgtgtaagca

SEQ ID NO: 78002 - DNA, 22 bp, synthetic construct
  misc_feature 1..22: note = chemically synthesized
  source 1..22: mol_type = other DNA
tgtgtaagcaacaaggctgttt

SEQ ID NO: 78003 - DNA, 22 bp, synthetic construct
  misc_feature 1..22: note = chemically synthesized
  source 1..22: mol_type = other DNA
gtgtaagcaacaaggctgttta

SEQ ID NO: 78004 - DNA, 22 bp, synthetic construct
  misc_feature 1..22: note = chemically synthesized
  source 1..22: mol_type = other DNA
tgtaagcaacaaggctgtttat

SEQ ID NO: 78005 - DNA, 22 bp, synthetic construct
  misc_feature 1..22: note = chemically synthesized
  source 1..22: mol_type = other DNA
tttatttcacctgggtgcaggc

SEQ ID NO: 78006 - DNA, 22 bp, synthetic construct
  misc_feature 1..22: note = chemically synthesized
  source 1..22: mol_type = other DNA
atttcacctgggtgcaggcagg

SEQ ID NO: 78007 - DNA, 22 bp, synthetic construct
  misc_feature 1..22: note = chemically synthesized
  source 1..22: mol_type = other DNA
tttcacctgggtgcaggcaggc

SEQ ID NO: 78008 - DNA, 22 bp, synthetic construct
  misc_feature 1..22: note = chemically synthesized
  source 1..22: mol_type = other DNA
cacctgggtgcaggcaggctga

SEQ ID NO: 78009 - DNA, 22 bp, synthetic construct
  misc_feature 1..22: note = chemically synthesized
  source 1..22: mol_type = other DNA
acctgggtgcaggcaggctgag

SEQ ID NO: 78010 - DNA, 22 bp, synthetic construct
  misc_feature 1..22: note = chemically synthesized
  source 1..22: mol_type = other DNA
ggtgcaggcaggctgagtccaa

SEQ ID NO: 78011 - DNA, 22 bp, synthetic construct
  misc_feature 1..22: note = chemically synthesized
  source 1..22: mol_type = other DNA
agtccaaaaagagagtcagcaa

SEQ ID NO: 78012 - DNA, 22 bp, synthetic construct
  misc_feature 1..22: note = chemically synthesized
  source 1..22: mol_type = other DNA
ttttataagatttgggtaggta

SEQ ID NO: 78013 - DNA, 22 bp, synthetic construct
  misc_feature 1..22: note = chemically synthesized
  source 1..22: mol_type = other DNA
tataagatttgggtaggtaaag

SEQ ID NO: 78014 - DNA, 22 bp, synthetic construct
  misc_feature 1..22: note = chemically synthesized
  source 1..22: mol_type = other DNA
ataagatttgggtaggtaaagg

SEQ ID NO: 78015 - DNA, 22 bp, synthetic construct
  misc_feature 1..22: note = chemically synthesized
  source 1..22: mol_type = other DNA
taagatttgggtaggtaaagga

SEQ ID NO: 78016 - DNA, 22 bp, synthetic construct
  misc_feature 1..22: note = chemically synthesized
  source 1..22: mol_type = other DNA
gggtaggtaaaggaaaattaca

SEQ ID NO: 78017 - DNA, 22 bp, synthetic construct
  misc_feature 1..22: note = chemically synthesized
  source 1..22: mol_type = other DNA
ggtaggtaaaggaaaattacag

SEQ ID NO: 78018 - DNA, 22 bp, synthetic construct
  misc_feature 1..22: note = chemically synthesized
  source 1..22: mol_type = other DNA
cagtcaaaggggggttgttctc

SEQ ID NO: 78019 - DNA, 22 bp, synthetic construct
  misc_feature 1..22: note = chemically synthesized
  source 1..22: mol_type = other DNA
ttctctggcgggcaggagtggg

SEQ ID NO: 78020 - DNA, 22 bp, synthetic construct
  misc_feature 1..22: note = chemically synthesized
  source 1..22: mol_type = other DNA
tctggcgggcaggagtgggggt

SEQ ID NO: 78021 - DNA, 22 bp, synthetic construct
  misc_feature 1..22: note = chemically synthesized
  source 1..22: mol_type = other DNA
tggcgggcaggagtgggggtca

SEQ ID NO: 78022 - DNA, 22 bp, synthetic construct
  misc_feature 1..22: note = chemically synthesized
  source 1..22: mol_type = other DNA
gcgggcaggagtgggggtcaca

SEQ ID NO: 78023 - DNA, 22 bp, synthetic construct
  misc_feature 1..22: note = chemically synthesized
  source 1..22: mol_type = other DNA
agtaggggagcttttgagccag

SEQ ID NO: 78024 - DNA, 22 bp, synthetic construct
  misc_feature 1..22: note = chemically synthesized
  source 1..22: mol_type = other DNA
ttgagccaggatgagccaggag

SEQ ID NO: 78025 - DNA, 22 bp, synthetic construct
  misc_feature 1..22: note = chemically synthesized
  source 1..22: mol_type = other DNA
tgagccaggatgagccaggaga

SEQ ID NO: 78026 - DNA, 22 bp, synthetic construct
  misc_feature 1..22: note = chemically synthesized
  source 1..22: mol_type = other DNA
gagccaggatgagccaggagaa

SEQ ID NO: 78027 - DNA, 22 bp, synthetic construct
  misc_feature 1..22: note = chemically synthesized
  source 1..22: mol_type = other DNA
agccaggatgagccaggagaag

SEQ ID NO: 78028 - DNA, 22 bp, synthetic construct
  misc_feature 1..22: note = chemically synthesized
  source 1..22: mol_type = other DNA
cacaagacaatgtcatcagtta

SEQ ID NO: 78029 - DNA, 22 bp, synthetic construct
  misc_feature 1..22: note = chemically synthesized
  source 1..22: mol_type = other DNA
acaagacaatgtcatcagttaa

SEQ ID NO: 78030 - DNA, 22 bp, synthetic construct
  misc_feature 1..22: note = chemically synthesized
  source 1..22: mol_type = other DNA
aggcaggaacaggccattttca

SEQ ID NO: 78031 - DNA, 22 bp, synthetic construct
  misc_feature 1..22: note = chemically synthesized
  source 1..22: mol_type = other DNA
tcacttcttttgtggtggaatg

SEQ ID NO: 78032 - DNA, 22 bp, synthetic construct
  misc_feature 1..22: note = chemically synthesized
  source 1..22: mol_type = other DNA
cacttcttttgtggtggaatgt

SEQ ID NO: 78033 - DNA, 22 bp, synthetic construct
  misc_feature 1..22: note = chemically synthesized
  source 1..22: mol_type = other DNA
acttcttttgtggtggaatgtc

SEQ ID NO: 78034 - DNA, 22 bp, synthetic construct
  misc_feature 1..22: note = chemically synthesized
  source 1..22: mol_type = other DNA
cttttgtggtggaatgtcatca

SEQ ID NO: 78035 - DNA, 22 bp, synthetic construct
  misc_feature 1..22: note = chemically synthesized
  source 1..22: mol_type = other DNA
ttttgtggtggaatgtcatcag

SEQ ID NO: 78036 - DNA, 22 bp, synthetic construct
  misc_feature 1..22: note = chemically synthesized
  source 1..22: mol_type = other DNA
ttgtggtggaatgtcatcagtt

SEQ ID NO: 78037 - DNA, 22 bp, synthetic construct
  misc_feature 1..22: note = chemically synthesized
  source 1..22: mol_type = other DNA
tgtggtggaatgtcatcagtta

SEQ ID NO: 78038 - DNA, 22 bp, synthetic construct
  misc_feature 1..22: note = chemically synthesized
  source 1..22: mol_type = other DNA
gtggtggaatgtcatcagttaa

SEQ ID NO: 78039 - DNA, 22 bp, synthetic construct
  misc_feature 1..22: note = chemically synthesized
  source 1..22: mol_type = other DNA
tggtggaatgtcatcagttaag

SEQ ID NO: 78040 - DNA, 22 bp, synthetic construct
  misc_feature 1..22: note = chemically synthesized
  source 1..22: mol_type = other DNA
aggcagaaactggccatctgta

SEQ ID NO: 78041 - DNA, 22 bp, synthetic construct
  misc_feature 1..22: note = chemically synthesized
  source 1..22: mol_type = other DNA
gccatctgtatgtgtatatgca

SEQ ID NO: 78042 - DNA, 22 bp, synthetic construct
  misc_feature 1..22: note = chemically synthesized
  source 1..22: mol_type = other DNA
tatgtgtatatgcaggtcacag

SEQ ID NO: 78043 - DNA, 22 bp, synthetic construct
  misc_feature 1..22: note = chemically synthesized
  source 1..22: mol_type = other DNA
agcttgggctcagaggcctgac

SEQ ID NO: 78044 - DNA, 22 bp, synthetic construct
  misc_feature 1..22: note = chemically synthesized
  source 1..22: mol_type = other DNA
gcttgggctcagaggcctgaca

SEQ ID NO: 78045 - DNA, 22 bp, synthetic construct
  misc_feature 1..22: note = chemically synthesized
  source 1..22: mol_type = other DNA
gggctcagaggcctgacattca

SEQ ID NO: 78046 - DNA, 22 bp, synthetic construct
  misc_feature 1..22: note = chemically synthesized
  source 1..22: mol_type = other DNA
ggctcagaggcctgacattcag

SEQ ID NO: 78047 - DNA, 22 bp, synthetic construct
  misc_feature 1..22: note = chemically synthesized
  source 1..22: mol_type = other DNA
agaggcctgacattcaggagca

SEQ ID NO: 78048 - DNA, 22 bp, synthetic construct
  misc_feature 1..22: note = chemically synthesized
  source 1..22: mol_type = other DNA
acattcaggagcatactgtttg

SEQ ID NO: 78049 - DNA, 22 bp, synthetic construct
  misc_feature 1..22: note = chemically synthesized
  source 1..22: mol_type = other DNA
aggagcatactgtttgatttcc

SEQ ID NO: 78050 - DNA, 22 bp, synthetic construct
  misc_feature 1..22: note = chemically synthesized
  source 1..22: mol_type = other DNA
tttgatttccatatgtttctat

SEQ ID NO: 78051 - DNA, 22 bp, synthetic construct
  misc_feature 1..22: note = chemically synthesized
  source 1..22: mol_type = other DNA
gatttccatatgtttctatatt

SEQ ID NO: 78052 - DNA, 22 bp, synthetic construct
  misc_feature 1..22: note = chemically synthesized
  source 1..22: mol_type = other DNA
atttccatatgtttctatattt

SEQ ID NO: 78053 - DNA, 22 bp, synthetic construct
  misc_feature 1..22: note = chemically synthesized
  source 1..22: mol_type = other DNA
ccatatgtttctatattttctg

SEQ ID NO: 78054 - DNA, 22 bp, synthetic construct
  misc_feature 1..22: note = chemically synthesized
  source 1..22: mol_type = other DNA
catatgtttctatattttctga

SEQ ID NO: 78055 - DNA, 22 bp, synthetic construct
  misc_feature 1..22: note = chemically synthesized
  source 1..22: mol_type = other DNA
ctatattttctgatgatcttct

SEQ ID NO: 78056 - DNA, 22 bp, synthetic construct
  misc_feature 1..22: note = chemically synthesized
  source 1..22: mol_type = other DNA
tatattttctgatgatcttctt

SEQ ID NO: 78057 - DNA, 22 bp, synthetic construct
  misc_feature 1..22: note = chemically synthesized
  source 1..22: mol_type = other DNA
tattttctgatgatcttcttgt

SEQ ID NO: 78058 - DNA, 22 bp, synthetic construct
  misc_feature 1..22: note = chemically synthesized
  source 1..22: mol_type = other DNA
tctgatgatcttcttgttattc

SEQ ID NO: 78059 - DNA, 22 bp, synthetic construct
  misc_feature 1..22: note = chemically synthesized
  source 1..22: mol_type = other DNA
ctgatgatcttcttgttattca

SEQ ID NO: 78060 - DNA, 22 bp, synthetic construct
  misc_feature 1..22: note = chemically synthesized
  source 1..22: mol_type = other DNA
tgatgatcttcttgttattcat

SEQ ID NO: 78061 - DNA, 22 bp, synthetic construct
  misc_feature 1..22: note = chemically synthesized
  source 1..22: mol_type = other DNA
atgatcttcttgttattcattt

SEQ ID NO: 78062 - DNA, 22 bp, synthetic construct
  misc_feature 1..22: note = chemically synthesized
  source 1..22: mol_type = other DNA
cttgttattcatttctagtttt

SEQ ID NO: 78063 - DNA, 22 bp, synthetic construct
  misc_feature 1..22: note = chemically synthesized
  source 1..22: mol_type = other DNA
ttgttattcatttctagtttta

SEQ ID NO: 78064 - DNA, 22 bp, synthetic construct
  misc_feature 1..22: note = chemically synthesized
  source 1..22: mol_type = other DNA
gttattcatttctagttttatt

SEQ ID NO: 78065 - DNA, 22 bp, synthetic construct
  misc_feature 1..22: note = chemically synthesized
  source 1..22: mol_type = other DNA
ttattcatttctagttttattc

SEQ ID NO: 78066 - DNA, 22 bp, synthetic construct
  misc_feature 1..22: note = chemically synthesized
  source 1..22: mol_type = other DNA
ttcatttctagttttattccac

SEQ ID NO: 78067 - DNA, 22 bp, synthetic construct
  misc_feature 1..22: note = chemically synthesized
  source 1..22: mol_type = other DNA
atttctagttttattccactgt

SEQ ID NO: 78068 - DNA, 22 bp, synthetic construct
  misc_feature 1..22: note = chemically synthesized
  source 1..22: mol_type = other DNA
ctagttttattccactgtggtc

SEQ ID NO: 78069 - DNA, 22 bp, synthetic construct
  misc_feature 1..22: note = chemically synthesized
  source 1..22: mol_type = other DNA
tagttttattccactgtggtca

SEQ ID NO: 78070 - DNA, 22 bp, synthetic construct
  misc_feature 1..22: note = chemically synthesized
  source 1..22: mol_type = other DNA
gttttattccactgtggtcaga

SEQ ID NO: 78071 - DNA, 22 bp, synthetic construct
  misc_feature 1..22: note = chemically synthesized
  source 1..22: mol_type = other DNA
tattccactgtggtcagaaaat

SEQ ID NO: 78072 - DNA, 22 bp, synthetic construct
  misc_feature 1..22: note = chemically synthesized
  source 1..22: mol_type = other DNA
attccactgtggtcagaaaata

SEQ ID NO: 78073 - DNA, 22 bp, synthetic construct
  misc_feature 1..22: note = chemically synthesized
  source 1..22: mol_type = other DNA
ttccactgtggtcagaaaatat

SEQ ID NO: 78074 - DNA, 22 bp, synthetic construct
  misc_feature 1..22: note = chemically synthesized
  source 1..22: mol_type = other DNA
cactgtggtcagaaaatatact

SEQ ID NO: 78075 - DNA, 22 bp, synthetic construct
  misc_feature 1..22: note = chemically synthesized
  source 1..22: mol_type = other DNA
tggtcagaaaatatacttgata

SEQ ID NO: 78076 - DNA, 22 bp, synthetic construct
  misc_feature 1..22: note = chemically synthesized
  source 1..22: mol_type = other DNA
gataaaatttctacttctgaaa

SEQ ID NO: 78077 - DNA, 22 bp, synthetic construct
  misc_feature 1..22: note = chemically synthesized
  source 1..22: mol_type = other DNA
ataaaatttctacttctgaaaa

SEQ ID NO: 78078 - DNA, 22 bp, synthetic construct
  misc_feature 1..22: note = chemically synthesized
  source 1..22: mol_type = other DNA
ctacttctgaaaaatttgtaca

SEQ ID NO: 78079 - DNA, 22 bp, synthetic construct
  misc_feature 1..22: note = chemically synthesized
  source 1..22: mol_type = other DNA
tacttctgaaaaatttgtacaa

SEQ ID NO: 78080 - DNA, 22 bp, synthetic construct
  misc_feature 1..22: note = chemically synthesized
  source 1..22: mol_type = other DNA
cttctgaaaaatttgtacaaac

SEQ ID NO: 78081 - DNA, 22 bp, synthetic construct
  misc_feature 1..22: note = chemically synthesized
  source 1..22: mol_type = other DNA
ctgaaaaatttgtacaaactta

SEQ ID NO: 78082 - DNA, 22 bp, synthetic construct
  misc_feature 1..22: note = chemically synthesized
  source 1..22: mol_type = other DNA
tgaaaaatttgtacaaacttac

SEQ ID NO: 78083 - DNA, 22 bp, synthetic construct
  misc_feature 1..22: note = chemically synthesized
  source 1..22: mol_type = other DNA
aaaaatttgtacaaacttacct

SEQ ID NO: 78084 - DNA, 22 bp, synthetic construct
  misc_feature 1..22: note = chemically synthesized
  source 1..22: mol_type = other DNA
gtacaaacttaccttgtggcct

SEQ ID NO: 78085 - DNA, 22 bp, synthetic construct
  misc_feature 1..22: note = chemically synthesized
  source 1..22: mol_type = other DNA
tacaaacttaccttgtggccta

SEQ ID NO: 78086 - DNA, 22 bp, synthetic construct
  misc_feature 1..22: note = chemically synthesized
  source 1..22: mol_type = other DNA
accttgtggcctaacatatggc

SEQ ID NO: 78087 - DNA, 22 bp, synthetic construct
  misc_feature 1..22: note = chemically synthesized
  source 1..22: mol_type = other DNA
ccttgtggcctaacatatggcc

SEQ ID NO: 78088 - DNA, 22 bp, synthetic construct
  misc_feature 1..22: note = chemically synthesized
  source 1..22: mol_type = other DNA
gtggcctaacatatggccttat

SEQ ID NO: 78089 - DNA, 22 bp, synthetic construct
  misc_feature 1..22: note = chemically synthesized
  source 1..22: mol_type = other DNA
tggcctaacatatggccttatt

SEQ ID NO: 78090 - DNA, 22 bp, synthetic construct
  misc_feature 1..22: note = chemically synthesized
  source 1..22: mol_type = other DNA
acatatggccttatttaggaaa

SEQ ID NO: 78091 - DNA, 22 bp, synthetic construct
  misc_feature 1..22: note = chemically synthesized
  source 1..22: mol_type = other DNA
atttaggaaaatgttgtacatg

SEQ ID NO: 78092 - DNA, 22 bp, synthetic construct
  misc_feature 1..22: note = chemically synthesized
  source 1..22: mol_type = other DNA
tttaggaaaatgttgtacatgc

SEQ ID NO: 78093 - DNA, 22 bp, synthetic construct
  misc_feature 1..22: note = chemically synthesized
  source 1..22: mol_type = other DNA
aggaaaatgttgtacatgctgc

SEQ ID NO: 78094 - DNA, 22 bp, synthetic construct
  misc_feature 1..22: note = chemically synthesized
  source 1..22: mol_type = other DNA
ggaaaatgttgtacatgctgct

SEQ ID NO: 78095 - DNA, 22 bp, synthetic construct
  misc_feature 1..22: note = chemically synthesized
  source 1..22: mol_type = other DNA
tacatgctgctttaaagaaatg

SEQ ID NO: 78096 - DNA, 22 bp, synthetic construct
  misc_feature 1..22: note = chemically synthesized
  source 1..22: mol_type = other DNA
ctttaaagaaatgtatcttctt

SEQ ID NO: 78097 - DNA, 22 bp, synthetic construct
  misc_feature 1..22: note = chemically synthesized
  source 1..22: mol_type = other DNA
taaagaaatgtatcttcttcag

SEQ ID NO: 78098 - DNA, 22 bp, synthetic construct
  misc_feature 1..22: note = chemically synthesized
  source 1..22: mol_type = other DNA
aaagaaatgtatcttcttcagc

SEQ ID NO: 78099 - DNA, 22 bp, synthetic construct
  misc_feature 1..22: note = chemically synthesized
  source 1..22: mol_type = other DNA
aagaaatgtatcttcttcagca

SEQ ID NO: 78100 - DNA, 22 bp, synthetic construct
  misc_feature 1..22: note = chemically synthesized
  source 1..22: mol_type = other DNA
cttcagcagttgggggacaagt

SEQ ID NO: 78101 - DNA, 22 bp, synthetic construct
  misc_feature 1..22: note = chemically synthesized
  source 1..22: mol_type = other DNA
ttcagcagttgggggacaagtt

SEQ ID NO: 78102 - DNA, 22 bp, synthetic construct
  misc_feature 1..22: note = chemically synthesized
  source 1..22: mol_type = other DNA
cagcagttgggggacaagttct

SEQ ID NO: 78103 - DNA, 22 bp, synthetic construct
  misc_feature 1..22: note = chemically synthesized
  source 1..22: mol_type = other DNA
agcagttgggggacaagttctg

SEQ ID NO: 78104 - DNA, 22 bp, synthetic construct
  misc_feature 1..22: note = chemically synthesized
  source 1..22: mol_type = other DNA
ggggacaagttctgttaatgtc

SEQ ID NO: 78105 - DNA, 22 bp, synthetic construct
  misc_feature 1..22: note = chemically synthesized
  source 1..22: mol_type = other DNA
tgttaatgtcagttgggtctat

SEQ ID NO: 78106 - DNA, 22 bp, synthetic construct
  misc_feature 1..22: note = chemically synthesized
  source 1..22: mol_type = other DNA
ttaatgtcagttgggtctatta

SEQ ID NO: 78107 - DNA, 22 bp, synthetic construct
  misc_feature 1..22: note = chemically synthesized
  source 1..22: mol_type = other DNA
atgtcagttgggtctattagat

SEQ ID NO: 78108 - DNA, 22 bp, synthetic construct
  misc_feature 1..22: note = chemically synthesized
  source 1..22: mol_type = other DNA
ggtctattagatatagtgggta

SEQ ID NO: 78109 - DNA, 22 bp, synthetic construct
  misc_feature 1..22: note = chemically synthesized
  source 1..22: mol_type = other DNA
ttagatatagtgggtacattaa

SEQ ID NO: 78110 - DNA, 22 bp, synthetic construct
  misc_feature 1..22: note = chemically synthesized
  source 1..22: mol_type = other DNA
gatatagtgggtacattaactg

SEQ ID NO: 78111 - DNA, 22 bp, synthetic construct
  misc_feature 1..22: note = chemically synthesized
  source 1..22: mol_type = other DNA
actgtgttgttcatttgttgat

SEQ ID NO: 78112 - DNA, 22 bp, synthetic construct
  misc_feature 1..22: note = chemically synthesized
  source 1..22: mol_type = other DNA
tgttgttcatttgttgattttt

SEQ ID NO: 78113 - DNA, 22 bp, synthetic construct
  misc_feature 1..22: note = chemically synthesized
  source 1..22: mol_type = other DNA
ttcatttgttgatttttagtct

SEQ ID NO: 78114 - DNA, 22 bp, synthetic construct
  misc_feature 1..22: note = chemically synthesized
  source 1..22: mol_type = other DNA
atttgttgatttttagtctggc

SEQ ID NO: 78115 - DNA, 22 bp, synthetic construct
  misc_feature 1..22: note = chemically synthesized
  source 1..22: mol_type = other DNA
gttgatttttagtctggccgat

SEQ ID NO: 78116 - DNA, 22 bp, synthetic construct
  misc_feature 1..22: note = chemically synthesized
  source 1..22: mol_type = other DNA
ttgatttttagtctggccgatc

SEQ ID NO: 78117 - DNA, 22 bp, synthetic construct
  misc_feature 1..22: note = chemically synthesized
  source 1..22: mol_type = other DNA
atttttagtctggccgatctgt

SEQ ID NO: 78118 - DNA, 22 bp, synthetic construct
  misc_feature 1..22: note = chemically synthesized
  source 1..22: mol_type = other DNA
ttagtctggccgatctgttcat

SEQ ID NO: 78119 - DNA, 22 bp, synthetic construct
  misc_feature 1..22: note = chemically synthesized
  source 1..22: mol_type = other DNA
tagtctggccgatctgttcatt

SEQ ID NO: 78120 - DNA, 22 bp, synthetic construct
  misc_feature 1..22: note = chemically synthesized
  source 1..22: mol_type = other DNA
agtctggccgatctgttcatta

SEQ ID NO: 78121 - DNA, 22 bp, synthetic construct
  misc_feature 1..22: note = chemically synthesized
  source 1..22: mol_type = other DNA
gtctggccgatctgttcattac

SEQ ID NO: 78122 - DNA, 22 bp, synthetic construct
  misc_feature 1..22: note = chemically synthesized
  source 1..22: mol_type = other DNA
gccgatctgttcattactgaga

SEQ ID NO: 78123 - DNA, 22 bp, synthetic construct
  misc_feature 1..22: note = chemically synthesized
  source 1..22: mol_type = other DNA
ttcattactgagactgaagtgt

SEQ ID NO: 78124 - DNA, 22 bp, synthetic construct
  misc_feature 1..22: note = chemically synthesized
  source 1..22: mol_type = other DNA
attactgagactgaagtgttta

SEQ ID NO: 78125 - DNA, 22 bp, synthetic construct
  misc_feature 1..22: note = chemically synthesized
  source 1..22: mol_type = other DNA
ctgagactgaagtgtttaaagt

SEQ ID NO: 78126 - DNA, 22 bp, synthetic construct
  misc_feature 1..22: note = chemically synthesized
  source 1..22: mol_type = other DNA
agactgaagtgtttaaagttcc

SEQ ID NO: 78127 - DNA, 22 bp, synthetic construct
  misc_feature 1..22: note = chemically synthesized
  source 1..22: mol_type = other DNA
aagtgtttaaagttccctacta

SEQ ID NO: 78128 - DNA, 22 bp, synthetic construct
  misc_feature 1..22: note = chemically synthesized
  source 1..22: mol_type = other DNA
aaagttccctactattattgta

SEQ ID NO: 78129 - DNA, 22 bp, synthetic construct
  misc_feature 1..22: note = chemically synthesized
  source 1..22: mol_type = other DNA
aagttccctactattattgtat

SEQ ID NO: 78130 - DNA, 22 bp, synthetic construct
  misc_feature 1..22: note = chemically synthesized
  source 1..22: mol_type = other DNA
cctactattattgtattgcagt

SEQ ID NO: 78131 - DNA, 22 bp, synthetic construct
  misc_feature 1..22: note = chemically synthesized
  source 1..22: mol_type = other DNA
ctattattgtattgcagtctgt

SEQ ID NO: 78132 - DNA, 22 bp, synthetic construct
  misc_feature 1..22: note = chemically synthesized
  source 1..22: mol_type = other DNA
ttattgtattgcagtctgtctc

SEQ ID NO: 78133 - DNA, 22 bp, synthetic construct
  misc_feature 1..22: note = chemically synthesized
  source 1..22: mol_type = other DNA
ttgtattgcagtctgtctcgcc

SEQ ID NO: 78134 - DNA, 22 bp, synthetic construct
  misc_feature 1..22: note = chemically synthesized
  source 1..22: mol_type = other DNA
tattgcagtctgtctcgccctt

SEQ ID NO: 78135 - DNA, 22 bp, synthetic construct
  misc_feature 1..22: note = chemically synthesized
  source 1..22: mol_type = other DNA
cagtctgtctcgccctttagga

SEQ ID NO: 78136 - DNA, 22 bp, synthetic construct
  misc_feature 1..22: note = chemically synthesized
  source 1..22: mol_type = other DNA
tctcgccctttaggactattaa

SEQ ID NO: 78137 - DNA, 22 bp, synthetic construct
  misc_feature 1..22: note = chemically synthesized
  source 1..22: mol_type = other DNA
gccctttaggactattaatgtt

SEQ ID NO: 78138 - DNA, 22 bp, synthetic construct
  misc_feature 1..22: note = chemically synthesized
  source 1..22: mol_type = other DNA
taggactattaatgttttcctt

SEQ ID NO: 78139 - DNA, 22 bp, synthetic construct
  misc_feature 1..22: note = chemically synthesized
  source 1..22: mol_type = other DNA
aggactattaatgttttcctta

SEQ ID NO: 78140 - DNA, 22 bp, synthetic construct
  misc_feature 1..22: note = chemically synthesized
  source 1..22: mol_type = other DNA
ggactattaatgttttccttat

SEQ ID NO: 78141 - DNA, 22 bp, synthetic construct
  misc_feature 1..22: note = chemically synthesized
  source 1..22: mol_type = other DNA
ttaatgttttccttatatactt

SEQ ID NO: 78142 - DNA, 22 bp, synthetic construct
  misc_feature 1..22: note = chemically synthesized
  source 1..22: mol_type = other DNA
atgttttccttatatacttggg

SEQ ID NO: 78143 - DNA, 22 bp, synthetic construct
  misc_feature 1..22: note = chemically synthesized
  source 1..22: mol_type = other DNA
tccttatatacttgggaacttt

SEQ ID NO: 78144 - DNA, 22 bp, synthetic construct
  misc_feature 1..22: note = chemically synthesized
  source 1..22: mol_type = other DNA
ccttatatacttgggaactttg

SEQ ID NO: 78145 - DNA, 22 bp, synthetic construct
  misc_feature 1..22: note = chemically synthesized
  source 1..22: mol_type = other DNA
cttatatacttgggaactttga

SEQ ID NO: 78146 - DNA, 22 bp, synthetic construct
  misc_feature 1..22: note = chemically synthesized
  source 1..22: mol_type = other DNA
atatacttgggaactttgatgt

SEQ ID NO: 78147 - DNA, 22 bp, synthetic construct
  misc_feature 1..22: note = chemically synthesized
  source 1..22: mol_type = other DNA
tatacttgggaactttgatgtt

SEQ ID NO: 78148 - DNA, 22 bp, synthetic construct
  misc_feature 1..22: note = chemically synthesized
  source 1..22: mol_type = other DNA
gggaactttgatgttggataca

SEQ ID NO: 78149 - DNA, 22 bp, synthetic construct
  misc_feature 1..22: note = chemically synthesized
  source 1..22: mol_type = other DNA
ggaactttgatgttggatacat

SEQ ID NO: 78150 - DNA, 22 bp, synthetic construct
  misc_feature 1..22: note = chemically synthesized
  source 1..22: mol_type = other DNA
tgatgttggatacatcaatatt

SEQ ID NO: 78151 - DNA, 22 bp, synthetic construct
  misc_feature 1..22: note = chemically synthesized
  source 1..22: mol_type = other DNA
gatgttggatacatcaatattt

SEQ ID NO: 78152 - DNA, 22 bp, synthetic construct
  misc_feature 1..22: note = chemically synthesized
  source 1..22: mol_type = other DNA
atgttggatacatcaatattta

SEQ ID NO: 78153 - DNA, 22 bp, synthetic construct
  misc_feature 1..22: note = chemically synthesized
  source 1..22: mol_type = other DNA
gatacatcaatatttataattg

SEQ ID NO: 78154 - DNA, 22 bp, synthetic construct
  misc_feature 1..22: note = chemically synthesized
  source 1..22: mol_type = other DNA
ataattgtatcctcttgctgaa

SEQ ID NO: 78155 - DNA, 22 bp, synthetic construct
  misc_feature 1..22: note = chemically synthesized
  source 1..22: mol_type = other DNA
taattgtatcctcttgctgaat

SEQ ID NO: 78156 - DNA, 22 bp, synthetic construct
  misc_feature 1..22: note = chemically synthesized
  source 1..22: mol_type = other DNA
tatcctcttgctgaattgaccc

SEQ ID NO: 78157 - DNA, 22 bp, synthetic construct
  misc_feature 1..22: note = chemically synthesized
  source 1..22: mol_type = other DNA
ttgctgaattgacccctttatt

SEQ ID NO: 78158 - DNA, 22 bp, synthetic construct
  misc_feature 1..22: note = chemically synthesized
  source 1..22: mol_type = other DNA
gctgaattgacccctttattat

SEQ ID NO: 78159 - DNA, 22 bp, synthetic construct
  misc_feature 1..22: note = chemically synthesized
  source 1..22: mol_type = other DNA
ctgaattgacccctttattatt

SEQ ID NO: 78160 - DNA, 22 bp, synthetic construct
  misc_feature 1..22: note = chemically synthesized
  source 1..22: mol_type = other DNA
aattgacccctttattattata

SEQ ID NO: 78161 - DNA, 22 bp, synthetic construct
  misc_feature 1..22: note = chemically synthesized
  source 1..22: mol_type = other DNA
acccctttattattatacagtg

SEQ ID NO: 78162 - DNA, 22 bp, synthetic construct
  misc_feature 1..22: note = chemically synthesized
  source 1..22: mol_type = other DNA
tattattatacagtgaccctcc

SEQ ID NO: 78163 - DNA, 22 bp, synthetic construct
  misc_feature 1..22: note = chemically synthesized
  source 1..22: mol_type = other DNA
attattatacagtgaccctcct

SEQ ID NO: 78164 - DNA, 22 bp, synthetic construct
  misc_feature 1..22: note = chemically synthesized
  source 1..22: mol_type = other DNA
ttattatacagtgaccctcctt

SEQ ID NO: 78165 - DNA, 22 bp, synthetic construct
  misc_feature 1..22: note = chemically synthesized
  source 1..22: mol_type = other DNA
ttatacagtgaccctccttatc

SEQ ID NO: 78166 - DNA, 22 bp, synthetic construct
  misc_feature 1..22: note = chemically synthesized
  source 1..22: mol_type = other DNA
tacagtgaccctccttatcttt

SEQ ID NO: 78167 - DNA, 22 bp, synthetic construct
  misc_feature 1..22: note = chemically synthesized
  source 1..22: mol_type = other DNA
cttatcttttcttacagttttt

SEQ ID NO: 78168 - DNA, 22 bp, synthetic construct
  misc_feature 1..22: note = chemically synthesized
  source 1..22: mol_type = other DNA
atcttttcttacagtttttaaa

SEQ ID NO: 78169 - DNA, 22 bp, synthetic construct
  misc_feature 1..22: note = chemically synthesized
  source 1..22: mol_type = other DNA
tcttttcttacagtttttaaat

SEQ ID NO: 78170 - DNA, 22 bp, synthetic construct
  misc_feature 1..22: note = chemically synthesized
  source 1..22: mol_type = other DNA
ttcttacagtttttaaatttgt

SEQ ID NO: 78171 - DNA, 22 bp, synthetic construct
  misc_feature 1..22: note = chemically synthesized
  source 1..22: mol_type = other DNA
tcttacagtttttaaatttgta

SEQ ID NO: 78172 - DNA, 22 bp, synthetic construct
  misc_feature 1..22: note = chemically synthesized
  source 1..22: mol_type = other DNA
cttacagtttttaaatttgtag

SEQ ID NO: 78173 - DNA, 22 bp, synthetic construct
  misc_feature 1..22: note = chemically synthesized
  source 1..22: mol_type = other DNA
ttacagtttttaaatttgtagt

SEQ ID NO: 78174 - DNA, 22 bp, synthetic construct
  misc_feature 1..22: note = chemically synthesized
  source 1..22: mol_type = other DNA
acagtttttaaatttgtagtct

SEQ ID NO: 78175 - DNA, 22 bp, synthetic construct
  misc_feature 1..22: note = chemically synthesized
  source 1..22: mol_type = other DNA
cagtttttaaatttgtagtcta

SEQ ID NO: 78176 - DNA, 22 bp, synthetic construct
  misc_feature 1..22: note = chemically synthesized
  source 1..22: mol_type = other DNA
ttaaatttgtagtctattttat

SEQ ID NO: 78177 - DNA, 22 bp, synthetic construct
  misc_feature 1..22: note = chemically synthesized
  source 1..22: mol_type = other DNA
taaatttgtagtctattttatc

SEQ ID NO: 78178 - DNA, 22 bp, synthetic construct
  misc_feature 1..22: note = chemically synthesized
  source 1..22: mol_type = other DNA
aaatttgtagtctattttatct

SEQ ID NO: 78179 - DNA, 22 bp, synthetic construct
  misc_feature 1..22: note = chemically synthesized
  source 1..22: mol_type = other DNA
aatttgtagtctattttatctg

SEQ ID NO: 78180 - DNA, 22 bp, synthetic construct
  misc_feature 1..22: note = chemically synthesized
  source 1..22: mol_type = other DNA
gtagtctattttatctgattta

SEQ ID NO: 78181 - DNA, 22 bp, synthetic construct
  misc_feature 1..22: note = chemically synthesized
  source 1..22: mol_type = other DNA
tagtctattttatctgatttaa

SEQ ID NO: 78182 - DNA, 22 bp, synthetic construct
  misc_feature 1..22: note = chemically synthesized
  source 1..22: mol_type = other DNA
ttttatctgatttaagtacaat

SEQ ID NO: 78183 - DNA, 22 bp, synthetic construct
  misc_feature 1..22: note = chemically synthesized
  source 1..22: mol_type = other DNA
tatctgatttaagtacaattac

SEQ ID NO: 78184 - DNA, 22 bp, synthetic construct
  misc_feature 1..22: note = chemically synthesized
  source 1..22: mol_type = other DNA
atctgatttaagtacaattact

SEQ ID NO: 78185 - DNA, 22 bp, synthetic construct
  misc_feature 1..22: note = chemically synthesized
  source 1..22: mol_type = other DNA
tctgatttaagtacaattacta

SEQ ID NO: 78186 - DNA, 22 bp, synthetic construct
  misc_feature 1..22: note = chemically synthesized
  source 1..22: mol_type = other DNA
atttaagtacaattactactgc

SEQ ID NO: 78187 - DNA, 22 bp, synthetic construct
  misc_feature 1..22: note = chemically synthesized
  source 1..22: mol_type = other DNA
aagtacaattactactgctctt

SEQ ID NO: 78188 - DNA, 22 bp, synthetic construct
  misc_feature 1..22: note = chemically synthesized
  source 1..22: mol_type = other DNA
agtacaattactactgctcttt

SEQ ID NO: 78189 - DNA, 22 bp, synthetic construct
  misc_feature 1..22: note = chemically synthesized
  source 1..22: mol_type = other DNA
ctactgctctttctggtttcca

SEQ ID NO: 78190 - DNA, 22 bp, synthetic construct
  misc_feature 1..22: note = chemically synthesized
  source 1..22: mol_type = other DNA
ctgctctttctggtttccagtt

SEQ ID NO: 78191 - DNA, 22 bp, synthetic construct
  misc_feature 1..22: note = chemically synthesized
  source 1..22: mol_type = other DNA
ctctttctggtttccagttcat

SEQ ID NO: 78192 - DNA, 22 bp, synthetic construct
  misc_feature 1..22: note = chemically synthesized
  source 1..22: mol_type = other DNA
tttctggtttccagttcatgga

SEQ ID NO: 78193 - DNA, 22 bp, synthetic construct
  misc_feature 1..22: note = chemically synthesized
  source 1..22: mol_type = other DNA
tctggtttccagttcatggaat

SEQ ID NO: 78194 - DNA, 22 bp, synthetic construct
  misc_feature 1..22: note = chemically synthesized
  source 1..22: mol_type = other DNA
ctggtttccagttcatggaatt

SEQ ID NO: 78195 - DNA, 22 bp, synthetic construct
  misc_feature 1..22: note = chemically synthesized
  source 1..22: mol_type = other DNA
tggtttccagttcatggaattt

SEQ ID NO: 78196 - DNA, 22 bp, synthetic construct
  misc_feature 1..22: note = chemically synthesized
  source 1..22: mol_type = other DNA
gtttccagttcatggaattttt

SEQ ID NO: 78197 - DNA, 22 bp, synthetic construct
  misc_feature 1..22: note = chemically synthesized
  source 1..22: mol_type = other DNA
ccagttcatggaatttttttcc

SEQ ID NO: 78198 - DNA, 22 bp, synthetic construct
  misc_feature 1..22: note = chemically synthesized
  source 1..22: mol_type = other DNA
cagttcatggaatttttttcca

SEQ ID NO: 78199 - DNA, 22 bp, synthetic construct
  misc_feature 1..22: note = chemically synthesized
  source 1..22: mol_type = other DNA
atggaatttttttccaaccctt

SEQ ID NO: 78200 - DNA, 22 bp, synthetic construct
  misc_feature 1..22: note = chemically synthesized
  source 1..22: mol_type = other DNA
ttttccaacccttcactttcat

SEQ ID NO: 78201 - DNA, 22 bp, synthetic construct
  misc_feature 1..22: note = chemically synthesized
  source 1..22: mol_type = other DNA
tttccaacccttcactttcatt

SEQ ID NO: 78202 - DNA, 22 bp, synthetic construct
  misc_feature 1..22: note = chemically synthesized
  source 1..22: mol_type = other DNA
ttccaacccttcactttcattt

SEQ ID NO: 78203 - DNA, 22 bp, synthetic construct
  misc_feature 1..22: note = chemically synthesized
  source 1..22: mol_type = other DNA
tccaacccttcactttcattta

SEQ ID NO: 78204 - DNA, 22 bp, synthetic construct
  misc_feature 1..22: note = chemically synthesized
  source 1..22: mol_type = other DNA
ccaacccttcactttcatttat

SEQ ID NO: 78205 - DNA, 22 bp, synthetic construct
  misc_feature 1..22: note = chemically synthesized
  source 1..22: mol_type = other DNA
caacccttcactttcatttatg

SEQ ID NO: 78206 - DNA, 22 bp, synthetic construct
  misc_feature 1..22: note = chemically synthesized
  source 1..22: mol_type = other DNA
cactttcatttatgtgtgcctt

SEQ ID NO: 78207 - DNA, 22 bp, synthetic construct
  misc_feature 1..22: note = chemically synthesized
  source 1..22: mol_type = other DNA
actttcatttatgtgtgccttt

SEQ ID NO: 78208 - DNA, 22 bp, synthetic construct
  misc_feature 1..22: note = chemically synthesized
  source 1..22: mol_type = other DNA
tcatttatgtgtgcctttatag

SEQ ID NO: 78209 - DNA, 22 bp, synthetic construct
  misc_feature 1..22: note = chemically synthesized
  source 1..22: mol_type = other DNA
catttatgtgtgcctttatagg

SEQ ID NO: 78210 - DNA, 22 bp, synthetic construct
  misc_feature 1..22: note = chemically synthesized
  source 1..22: mol_type = other DNA
atttatgtgtgcctttataggt

SEQ ID NO: 78211 - DNA, 22 bp, synthetic construct
  misc_feature 1..22: note = chemically synthesized
  source 1..22: mol_type = other DNA
atgtgtgcctttataggtgaag

SEQ ID NO: 78212 - DNA, 22 bp, synthetic construct
  misc_feature 1..22: note = chemically synthesized
  source 1..22: mol_type = other DNA
tgtgtgcctttataggtgaagt

SEQ ID NO: 78213 - DNA, 22 bp, synthetic construct
  misc_feature 1..22: note = chemically synthesized
  source 1..22: mol_type = other DNA
tataggtgaagtgggtttcttg

SEQ ID NO: 78214 - DNA, 22 bp, synthetic construct
  misc_feature 1..22: note = chemically synthesized
  source 1..22: mol_type = other DNA
ataggtgaagtgggtttcttga

SEQ ID NO: 78215 - DNA, 22 bp, synthetic construct
  misc_feature 1..22: note = chemically synthesized
  source 1..22: mol_type = other DNA
taggtgaagtgggtttcttgaa

SEQ ID NO: 78216 - DNA, 22 bp, synthetic construct
  misc_feature 1..22: note = chemically synthesized
  source 1..22: mol_type = other DNA
cttgaagatcgcataaagttgg

SEQ ID NO: 78217 - DNA, 22 bp, synthetic construct
  misc_feature 1..22: note = chemically synthesized
  source 1..22: mol_type = other DNA
ttgaagatcgcataaagttgga

SEQ ID NO: 78218 - DNA, 22 bp, synthetic construct
  misc_feature 1..22: note = chemically synthesized
  source 1..22: mol_type = other DNA
gaagatcgcataaagttggata

SEQ ID NO: 78219 - DNA, 22 bp, synthetic construct
  misc_feature 1..22: note = chemically synthesized
  source 1..22: mol_type = other DNA
aagatcgcataaagttggatat

SEQ ID NO: 78220 - DNA, 22 bp, synthetic construct
  misc_feature 1..22: note = chemically synthesized
  source 1..22: mol_type = other DNA
gatattgtttctttatccattt

SEQ ID NO: 78221 - DNA, 22 bp, synthetic construct
  misc_feature 1..22: note = chemically synthesized
  source 1..22: mol_type = other DNA
tttctttatccatttaccattc

SEQ ID NO: 78222 - DNA, 22 bp, synthetic construct
  misc_feature 1..22: note = chemically synthesized
  source 1..22: mol_type = other DNA
ctttatccatttaccattctat

SEQ ID NO: 78223 - DNA, 22 bp, synthetic construct
  misc_feature 1..22: note = chemically synthesized
  source 1..22: mol_type = other DNA
tttatccatttaccattctatt

SEQ ID NO: 78224 - DNA, 22 bp, synthetic construct
  misc_feature 1..22: note = chemically synthesized
  source 1..22: mol_type = other DNA
tatccatttaccattctattac

SEQ ID NO: 78225 - DNA, 22 bp, synthetic construct
  misc_feature 1..22: note = chemically synthesized
  source 1..22: mol_type = other DNA
atccatttaccattctattact

SEQ ID NO: 78226 - DNA, 22 bp, synthetic construct
  misc_feature 1..22: note = chemically synthesized
  source 1..22: mol_type = other DNA
tccatttaccattctattactt

SEQ ID NO: 78227 - DNA, 22 bp, synthetic construct
  misc_feature 1..22: note = chemically synthesized
  source 1..22: mol_type = other DNA
accattctattacttttaattg

SEQ ID NO: 78228 - DNA, 22 bp, synthetic construct
  misc_feature 1..22: note = chemically synthesized
  source 1..22: mol_type = other DNA
ccattctattacttttaattgg

SEQ ID NO: 78229 - DNA, 22 bp, synthetic construct
  misc_feature 1..22: note = chemically synthesized
  source 1..22: mol_type = other DNA
tattacttttaattggggaact

SEQ ID NO: 78230 - DNA, 22 bp, synthetic construct
  misc_feature 1..22: note = chemically synthesized
  source 1..22: mol_type = other DNA
ttacttttaattggggaactga

SEQ ID NO: 78231 - DNA, 22 bp, synthetic construct
  misc_feature 1..22: note = chemically synthesized
  source 1..22: mol_type = other DNA
cttttaattggggaactgagac

SEQ ID NO: 78232 - DNA, 22 bp, synthetic construct
  misc_feature 1..22: note = chemically synthesized
  source 1..22: mol_type = other DNA
ttaattggggaactgagactat

SEQ ID NO: 78233 - DNA, 22 bp, synthetic construct
  misc_feature 1..22: note = chemically synthesized
  source 1..22: mol_type = other DNA
taattggggaactgagactatt

SEQ ID NO: 78234 - DNA, 22 bp, synthetic construct
  misc_feature 1..22: note = chemically synthesized
  source 1..22: mol_type = other DNA
aattggggaactgagactattt

SEQ ID NO: 78235 - DNA, 22 bp, synthetic construct
  misc_feature 1..22: note = chemically synthesized
  source 1..22: mol_type = other DNA
attggggaactgagactattta

SEQ ID NO: 78236 - DNA, 22 bp, synthetic construct
  misc_feature 1..22: note = chemically synthesized
  source 1..22: mol_type = other DNA
gggaactgagactatttacact

SEQ ID NO: 78237 - DNA, 22 bp, synthetic construct
  misc_feature 1..22: note = chemically synthesized
  source 1..22: mol_type = other DNA
agactatttacactcagtgtag

SEQ ID NO: 78238 - DNA, 22 bp, synthetic construct
  misc_feature 1..22: note = chemically synthesized
  source 1..22: mol_type = other DNA
tttacactcagtgtagttacta

SEQ ID NO: 78239 - DNA, 22 bp, synthetic construct
  misc_feature 1..22: note = chemically synthesized
  source 1..22: mol_type = other DNA
acactcagtgtagttactaagt

SEQ ID NO: 78240 - DNA, 22 bp, synthetic construct
  misc_feature 1..22: note = chemically synthesized
  source 1..22: mol_type = other DNA
cactcagtgtagttactaagta

SEQ ID NO: 78241 - DNA, 22 bp, synthetic construct
  misc_feature 1..22: note = chemically synthesized
  source 1..22: mol_type = other DNA
agtgtagttactaagtaaggat

SEQ ID NO: 78242 - DNA, 22 bp, synthetic construct
  misc_feature 1..22: note = chemically synthesized
  source 1..22: mol_type = other DNA
ctaagtaaggatttcctttttt

SEQ ID NO: 78243 - DNA, 22 bp, synthetic construct
  misc_feature 1..22: note = chemically synthesized
  source 1..22: mol_type = other DNA
agtaaggatttccttttttttt

SEQ ID NO: 78244 - DNA, 22 bp, synthetic construct
  misc_feature 1..22: note = chemically synthesized
  source 1..22: mol_type = other DNA
cctttttttttttttttttttt

SEQ ID NO: 78245 - DNA, 22 bp, synthetic construct
  misc_feature 1..22: note = chemically synthesized
  source 1..22: mol_type = other DNA
cttttttttttttttttttttt

SEQ ID NO: 78246 - DNA, 22 bp, synthetic construct
  misc_feature 1..22: note = chemically synthesized
  source 1..22: mol_type = other DNA
tttttttttttttttttttttt

SEQ ID NO: 78247 - DNA, 22 bp, synthetic construct
  misc_feature 1..22: note = chemically synthesized
  source 1..22: mol_type = other DNA
tttttttttttttttttttttt

SEQ ID NO: 78248 - DNA, 22 bp, synthetic construct
  misc_feature 1..22: note = chemically synthesized
  source 1..22: mol_type = other DNA
tttttttttttttttttttttg

SEQ ID NO: 78249 - DNA, 22 bp, synthetic construct
  misc_feature 1..22: note = chemically synthesized
  source 1..22: mol_type = other DNA
ttttttttttttttttttttgc

SEQ ID NO: 78250 - DNA, 22 bp, synthetic construct
  misc_feature 1..22: note = chemically synthesized
  source 1..22: mol_type = other DNA
tttttttttttttttttttgct

SEQ ID NO: 78251 - DNA, 22 bp, synthetic construct
  misc_feature 1..22: note = chemically synthesized
  source 1..22: mol_type = other DNA
ttttttttttttttttttgctt

SEQ ID NO: 78252 - DNA, 22 bp, synthetic construct
  misc_feature 1..22: note = chemically synthesized
  source 1..22: mol_type = other DNA
tttttttttttttttttgctta

SEQ ID NO: 78253 - DNA, 22 bp, synthetic construct
  misc_feature 1..22: note = chemically synthesized
  source 1..22: mol_type = other DNA
ttttttttttttttttgcttat

SEQ ID NO: 78254 - DNA, 22 bp, synthetic construct
  misc_feature 1..22: note = chemically synthesized
  source 1..22: mol_type = other DNA
tttttttttttttttgcttatt

SEQ ID NO: 78255 - DNA, 22 bp, synthetic construct
  misc_feature 1..22: note = chemically synthesized
  source 1..22: mol_type = other DNA
ttttttttttttttgcttattt

SEQ ID NO: 78256 - DNA, 22 bp, synthetic construct
  misc_feature 1..22: note = chemically synthesized
  source 1..22: mol_type = other DNA
tttttttttttttgcttatttt

SEQ ID NO: 78257 - DNA, 22 bp, synthetic construct
  misc_feature 1..22: note = chemically synthesized
  source 1..22: mol_type = other DNA
ttttttttttttgcttattttt

SEQ ID NO: 78258 - DNA, 22 bp, synthetic construct
  misc_feature 1..22: note = chemically synthesized
  source 1..22: mol_type = other DNA
tttttttttttgcttatttttg

SEQ ID NO: 78259 - DNA, 22 bp, synthetic construct
  misc_feature 1..22: note = chemically synthesized
  source 1..22: mol_type = other DNA
ttttttttttgcttatttttgg

SEQ ID NO: 78260 - DNA, 22 bp, synthetic construct
  misc_feature 1..22: note = chemically synthesized
  source 1..22: mol_type = other DNA
tttttttttgcttatttttggc

SEQ ID NO: 78261 - DNA, 22 bp, synthetic construct
  misc_feature 1..22: note = chemically synthesized
  source 1..22: mol_type = other DNA
ttttttttgcttatttttggct

SEQ ID NO: 78262 - DNA, 22 bp, synthetic construct
  misc_feature 1..22: note = chemically synthesized
  source 1..22: mol_type = other DNA
tttttttgcttatttttggctg

SEQ ID NO: 78263 - DNA, 22 bp, synthetic construct
  misc_feature 1..22: note = chemically synthesized
  source 1..22: mol_type = other DNA
ttttttgcttatttttggctgt

SEQ ID NO: 78264 - DNA, 22 bp, synthetic construct
  misc_feature 1..22: note = chemically synthesized
  source 1..22: mol_type = other DNA
tttttgcttatttttggctgta

SEQ ID NO: 78265 - DNA, 22 bp, synthetic construct
  misc_feature 1..22: note = chemically synthesized
  source 1..22: mol_type = other DNA
ttttgcttatttttggctgtat

SEQ ID NO: 78266 - DNA, 22 bp, synthetic construct
  misc_feature 1..22: note = chemically synthesized
  source 1..22: mol_type = other DNA
tttgcttatttttggctgtatg

SEQ ID NO: 78267 - DNA, 22 bp, synthetic construct
  misc_feature 1..22: note = chemically synthesized
  source 1..22: mol_type = other DNA
ttgcttatttttggctgtatgg

SEQ ID NO: 78268 - DNA, 22 bp, synthetic construct
  misc_feature 1..22: note = chemically synthesized
  source 1..22: mol_type = other DNA
tgcttatttttggctgtatgga

SEQ ID NO: 78269 - DNA, 22 bp, synthetic construct
  misc_feature 1..22: note = chemically synthesized
  source 1..22: mol_type = other DNA
gcttatttttggctgtatggag

SEQ ID NO: 78270 - DNA, 22 bp, synthetic construct
  misc_feature 1..22: note = chemically synthesized
  source 1..22: mol_type = other DNA
cttatttttggctgtatggaga

SEQ ID NO: 78271 - DNA, 22 bp, synthetic construct
  misc_feature 1..22: note = chemically synthesized
  source 1..22: mol_type = other DNA
atttttggctgtatggagactc

SEQ ID NO: 78272 - DNA, 22 bp, synthetic construct
  misc_feature 1..22: note = chemically synthesized
  source 1..22: mol_type = other DNA
tttttggctgtatggagactcc

SEQ ID NO: 78273 - DNA, 22 bp, synthetic construct
  misc_feature 1..22: note = chemically synthesized
  source 1..22: mol_type = other DNA
ttggctgtatggagactcctct

SEQ ID NO: 78274 - DNA, 22 bp, synthetic construct
  misc_feature 1..22: note = chemically synthesized
  source 1..22: mol_type = other DNA
tggctgtatggagactcctctc

SEQ ID NO: 78275 - DNA, 22 bp, synthetic construct
  misc_feature 1..22: note = chemically synthesized
  source 1..22: mol_type = other DNA
ggctgtatggagactcctctct

SEQ ID NO: 78276 - DNA, 22 bp, synthetic construct
  misc_feature 1..22: note = chemically synthesized
  source 1..22: mol_type = other DNA
gctgtatggagactcctctctt

SEQ ID NO: 78277 - DNA, 22 bp, synthetic construct
  misc_feature 1..22: note = chemically synthesized
  source 1..22: mol_type = other DNA
tatggagactcctctcttcctt

SEQ ID NO: 78278 - DNA, 22 bp, synthetic construct
  misc_feature 1..22: note = chemically synthesized
  source 1..22: mol_type = other DNA
ctctcttccttttttttccttc

SEQ ID NO: 78279 - DNA, 22 bp, synthetic construct
  misc_feature 1..22: note = chemically synthesized
  source 1..22: mol_type = other DNA
tcttccttttttttccttcatg

SEQ ID NO: 78280 - DNA, 22 bp, synthetic construct
  misc_feature 1..22: note = chemically synthesized
  source 1..22: mol_type = other DNA
ttccttttttttccttcatggt

SEQ ID NO: 78281 - DNA, 22 bp, synthetic construct
  misc_feature 1..22: note = chemically synthesized
  source 1..22: mol_type = other DNA
ccttttttttccttcatggtta

SEQ ID NO: 78282 - DNA, 22 bp, synthetic construct
  misc_feature 1..22: note = chemically synthesized
  source 1..22: mol_type = other DNA
cttttttttccttcatggttat

SEQ ID NO: 78283 - DNA, 22 bp, synthetic construct
  misc_feature 1..22: note = chemically synthesized
  source 1..22: mol_type = other DNA
ttttttccttcatggttatgtg

SEQ ID NO: 78284 - DNA, 22 bp, synthetic construct
  misc_feature 1..22: note = chemically synthesized
  source 1..22: mol_type = other DNA
tttttccttcatggttatgtga

SEQ ID NO: 78285 - DNA, 22 bp, synthetic construct
  misc_feature 1..22: note = chemically synthesized
  source 1..22: mol_type = other DNA
ttttccttcatggttatgtgat

SEQ ID NO: 78286 - DNA, 22 bp, synthetic construct
  misc_feature 1..22: note = chemically synthesized
  source 1..22: mol_type = other DNA
tttccttcatggttatgtgatt

SEQ ID NO: 78287 - DNA, 22 bp, synthetic construct
  misc_feature 1..22: note = chemically synthesized
  source 1..22: mol_type = other DNA
ttccttcatggttatgtgatta

SEQ ID NO: 78288 - DNA, 22 bp, synthetic construct
  misc_feature 1..22: note = chemically synthesized
  source 1..22: mol_type = other DNA
tccttcatggttatgtgattat

SEQ ID NO: 78289 - DNA, 22 bp, synthetic construct
  misc_feature 1..22: note = chemically synthesized
  source 1..22: mol_type = other DNA
ccttcatggttatgtgattatc

SEQ ID NO: 78290 - DNA, 22 bp, synthetic construct
  misc_feature 1..22: note = chemically synthesized
  source 1..22: mol_type = other DNA
cttcatggttatgtgattatct

SEQ ID NO: 78291 - DNA, 22 bp, synthetic construct
  misc_feature 1..22: note = chemically synthesized
  source 1..22: mol_type = other DNA
catggttatgtgattatctctg

SEQ ID NO: 78292 - DNA, 22 bp, synthetic construct
  misc_feature 1..22: note = chemically synthesized
  source 1..22: mol_type = other DNA
atggttatgtgattatctctgg

SEQ ID NO: 78293 - DNA, 22 bp, synthetic construct
  misc_feature 1..22: note = chemically synthesized
  source 1..22: mol_type = other DNA
tgtgattatctctggtagcata

SEQ ID NO: 78294 - DNA, 22 bp, synthetic construct
  misc_feature 1..22: note = chemically synthesized
  source 1..22: mol_type = other DNA
tctctggtagcatattttaatt

SEQ ID NO: 78295 - DNA, 22 bp, synthetic construct
  misc_feature 1..22: note = chemically synthesized
  source 1..22: mol_type = other DNA
tggtagcatattttaatttgtt

SEQ ID NO: 78296 - DNA, 22 bp, synthetic construct
  misc_feature 1..22: note = chemically synthesized
  source 1..22: mol_type = other DNA
gtagcatattttaatttgttac

SEQ ID NO: 78297 - DNA, 22 bp, synthetic construct
  misc_feature 1..22: note = chemically synthesized
  source 1..22: mol_type = other DNA
taatttgttactttttattttt

SEQ ID NO: 78298 - DNA, 22 bp, synthetic construct
  misc_feature 1..22: note = chemically synthesized
  source 1..22: mol_type = other DNA
aatttgttactttttattttta

SEQ ID NO: 78299 - DNA, 22 bp, synthetic construct
  misc_feature 1..22: note = chemically synthesized
  source 1..22: mol_type = other DNA
atttgttactttttatttttag

SEQ ID NO: 78300 - DNA, 22 bp, synthetic construct
  misc_feature 1..22: note = chemically synthesized
  source 1..22: mol_type = other DNA
gttactttttatttttagtaaa

SEQ ID NO: 78301 - DNA, 22 bp, synthetic construct
  misc_feature 1..22: note = chemically synthesized
  source 1..22: mol_type = other DNA
ttactttttatttttagtaaat

SEQ ID NO: 78302 - DNA, 22 bp, synthetic construct
  misc_feature 1..22: note = chemically synthesized
  source 1..22: mol_type = other DNA
ctttttatttttagtaaatcta

SEQ ID NO: 78303 - DNA, 22 bp, synthetic construct
  misc_feature 1..22: note = chemically synthesized
  source 1..22: mol_type = other DNA
tttatttttagtaaatctatta

SEQ ID NO: 78304 - DNA, 22 bp, synthetic construct
  misc_feature 1..22: note = chemically synthesized
  source 1..22: mol_type = other DNA
ttatttttagtaaatctattat

SEQ ID NO: 78305 - DNA, 22 bp, synthetic construct
  misc_feature 1..22: note = chemically synthesized
  source 1..22: mol_type = other DNA
tatttttagtaaatctattata

SEQ ID NO: 78306 - DNA, 22 bp, synthetic construct
  misc_feature 1..22: note = chemically synthesized
  source 1..22: mol_type = other DNA
atttttagtaaatctattatag

SEQ ID NO: 78307 - DNA, 22 bp, synthetic construct
  misc_feature 1..22: note = chemically synthesized
  source 1..22: mol_type = other DNA
tttttagtaaatctattataga

SEQ ID NO: 78308 - DNA, 22 bp, synthetic construct
  misc_feature 1..22: note = chemically synthesized
  source 1..22: mol_type = other DNA
ttagtaaatctattatagattt

SEQ ID NO: 78309 - DNA, 22 bp, synthetic construct
  misc_feature 1..22: note = chemically synthesized
  source 1..22: mol_type = other DNA
tagtaaatctattatagatttt

SEQ ID NO: 78310 - DNA, 22 bp, synthetic construct
  misc_feature 1..22: note = chemically synthesized
  source 1..22: mol_type = other DNA
agtaaatctattatagattttt

SEQ ID NO: 78311 - DNA, 22 bp, synthetic construct
  misc_feature 1..22: note = chemically synthesized
  source 1..22: mol_type = other DNA
gtaaatctattatagatttttg

SEQ ID NO: 78312 - DNA, 22 bp, synthetic construct
  misc_feature 1..22: note = chemically synthesized
  source 1..22: mol_type = other DNA
ttatagatttttgtgctgtggt

SEQ ID NO: 78313 - DNA, 22 bp, synthetic construct
  misc_feature 1..22: note = chemically synthesized
  source 1..22: mol_type = other DNA
tagatttttgtgctgtggttac

SEQ ID NO: 78314 - DNA, 22 bp, synthetic construct
  misc_feature 1..22: note = chemically synthesized
  source 1..22: mol_type = other DNA
ttgtgctgtggttaccatgggg

SEQ ID NO: 78315 - DNA, 22 bp, synthetic construct
  misc_feature 1..22: note = chemically synthesized
  source 1..22: mol_type = other DNA
tgtgctgtggttaccatggggc

SEQ ID NO: 78316 - DNA, 22 bp, synthetic construct
  misc_feature 1..22: note = chemically synthesized
  source 1..22: mol_type = other DNA
gtgctgtggttaccatggggct

SEQ ID NO: 78317 - DNA, 22 bp, synthetic construct
  misc_feature 1..22: note = chemically synthesized
  source 1..22: mol_type = other DNA
tgctgtggttaccatggggctt

SEQ ID NO: 78318 - DNA, 22 bp, synthetic construct
  misc_feature 1..22: note = chemically synthesized
  source 1..22: mol_type = other DNA
tggttaccatggggcttacaag

SEQ ID NO: 78319 - DNA, 22 bp, synthetic construct
  misc_feature 1..22: note = chemically synthesized
  source 1..22: mol_type = other DNA
ccatggggcttacaagaaacat

SEQ ID NO: 78320 - DNA, 22 bp, synthetic construct
  misc_feature 1..22: note = chemically synthesized
  source 1..22: mol_type = other DNA
acaagaaacatcttataaatat

SEQ ID NO: 78321 - DNA, 22 bp, synthetic construct
  misc_feature 1..22: note = chemically synthesized
  source 1..22: mol_type = other DNA
caagaaacatcttataaatata

SEQ ID NO: 78322 - DNA, 22 bp, synthetic construct
  misc_feature 1..22: note = chemically synthesized
  source 1..22: mol_type = other DNA
ataaatatagcaagttatttta

SEQ ID NO: 78323 - DNA, 22 bp, synthetic construct
  misc_feature 1..22: note = chemically synthesized
  source 1..22: mol_type = other DNA
taaatatagcaagttattttaa

SEQ ID NO: 78324 - DNA, 22 bp, synthetic construct
  misc_feature 1..22: note = chemically synthesized
  source 1..22: mol_type = other DNA
ttttaaaggatgacgaattatc

SEQ ID NO: 78325 - DNA, 22 bp, synthetic construct
  misc_feature 1..22: note = chemically synthesized
  source 1..22: mol_type = other DNA
taaaggatgacgaattatctta

SEQ ID NO: 78326 - DNA, 22 bp, synthetic construct
  misc_feature 1..22: note = chemically synthesized
  source 1..22: mol_type = other DNA
aaaggatgacgaattatcttag

SEQ ID NO: 78327 - DNA, 22 bp, synthetic construct
  misc_feature 1..22: note = chemically synthesized
  source 1..22: mol_type = other DNA
aaggatgacgaattatcttaga

SEQ ID NO: 78328 - DNA, 22 bp, synthetic construct
  misc_feature 1..22: note = chemically synthesized
  source 1..22: mol_type = other DNA
tcttagatcgcaaataaaggaa

SEQ ID NO: 78329 - DNA, 22 bp, synthetic construct
  misc_feature 1..22: note = chemically synthesized
  source 1..22: mol_type = other DNA
agatcgcaaataaaggaatata

SEQ ID NO: 78330 - DNA, 22 bp, synthetic construct
  misc_feature 1..22: note = chemically synthesized
  source 1..22: mol_type = other DNA
gatcgcaaataaaggaatataa

SEQ ID NO: 78331 - DNA, 22 bp, synthetic construct
  misc_feature 1..22: note = chemically synthesized
  source 1..22: mol_type = other DNA
tacactttaactccactccacc

SEQ ID NO: 78332 - DNA, 22 bp, synthetic construct
  misc_feature 1..22: note = chemically synthesized
  source 1..22: mol_type = other DNA
cactttaactccactccacccc

SEQ ID NO: 78333 - DNA, 22 bp, synthetic construct
  misc_feature 1..22: note = chemically synthesized
  source 1..22: mol_type = other DNA
taactccactccacccccacat

SEQ ID NO: 78334 - DNA, 22 bp, synthetic construct
  misc_feature 1..22: note = chemically synthesized
  source 1..22: mol_type = other DNA
aactccactccacccccacatt

SEQ ID NO: 78335 - DNA, 22 bp, synthetic construct
  misc_feature 1..22: note = chemically synthesized
  source 1..22: mol_type = other DNA
actccactccacccccacattt

SEQ ID NO: 78336 - DNA, 22 bp, synthetic construct
  misc_feature 1..22: note = chemically synthesized
  source 1..22: mol_type = other DNA
cactccacccccacattttgac

SEQ ID NO: 78337 - DNA, 22 bp, synthetic construct
  misc_feature 1..22: note = chemically synthesized
  source 1..22: mol_type = other DNA
cacccccacattttgacttttg

SEQ ID NO: 78338 - DNA, 22 bp, synthetic construct
  misc_feature 1..22: note = chemically synthesized
  source 1..22: mol_type = other DNA
tgacttttgtctcattttacat

SEQ ID NO: 78339 - DNA, 22 bp, synthetic construct
  misc_feature 1..22: note = chemically synthesized
  source 1..22: mol_type = other DNA
gacttttgtctcattttacata

SEQ ID NO: 78340 - DNA, 22 bp, synthetic construct
  misc_feature 1..22: note = chemically synthesized
  source 1..22: mol_type = other DNA
acttttgtctcattttacatat

SEQ ID NO: 78341 - DNA, 22 bp, synthetic construct
  misc_feature 1..22: note = chemically synthesized
  source 1..22: mol_type = other DNA
ttgtctcattttacatatttta

SEQ ID NO: 78342 - DNA, 22 bp, synthetic construct
  misc_feature 1..22: note = chemically synthesized
  source 1..22: mol_type = other DNA
tgtctcattttacatattttat

SEQ ID NO: 78343 - DNA, 22 bp, synthetic construct
  misc_feature 1..22: note = chemically synthesized
  source 1..22: mol_type = other DNA
gtctcattttacatattttata

SEQ ID NO: 78344 - DNA, 22 bp, synthetic construct
  misc_feature 1..22: note = chemically synthesized
  source 1..22: mol_type = other DNA
tctcattttacatattttatat

SEQ ID NO: 78345 - DNA, 22 bp, synthetic construct
  misc_feature 1..22: note = chemically synthesized
  source 1..22: mol_type = other DNA
attttacatattttatattacc

SEQ ID NO: 78346 - DNA, 22 bp, synthetic construct
  misc_feature 1..22: note = chemically synthesized
  source 1..22: mol_type = other DNA
tacatattttatattacctaca

SEQ ID NO: 78347 - DNA, 22 bp, synthetic construct
  misc_feature 1..22: note = chemically synthesized
  source 1..22: mol_type = other DNA
acatattttatattacctacat

SEQ ID NO: 78348 - DNA, 22 bp, synthetic construct
  misc_feature 1..22: note = chemically synthesized
  source 1..22: mol_type = other DNA
catattttatattacctacatc

SEQ ID NO: 78349 - DNA, 22 bp, synthetic construct
  misc_feature 1..22: note = chemically synthesized
  source 1..22: mol_type = other DNA
tatattacctacatcttaaaag

SEQ ID NO: 78350 - DNA, 22 bp, synthetic construct
  misc_feature 1..22: note = chemically synthesized
  source 1..22: mol_type = other DNA
atattacctacatcttaaaagg

SEQ ID NO: 78351 - DNA, 22 bp, synthetic construct
  misc_feature 1..22: note = chemically synthesized
  source 1..22: mol_type = other DNA
tattacctacatcttaaaaggt

SEQ ID NO: 78352 - DNA, 22 bp, synthetic construct
  misc_feature 1..22: note = chemically synthesized
  source 1..22: mol_type = other DNA
cctacatcttaaaaggttgcta

SEQ ID NO: 78353 - DNA, 22 bp, synthetic construct
  misc_feature 1..22: note = chemically synthesized
  source 1..22: mol_type = other DNA
catcttaaaaggttgctatagc

SEQ ID NO: 78354 - DNA, 22 bp, synthetic construct
  misc_feature 1..22: note = chemically synthesized
  source 1..22: mol_type = other DNA
aaaaggttgctatagctattac

SEQ ID NO: 78355 - DNA, 22 bp, synthetic construct
  misc_feature 1..22: note = chemically synthesized
  source 1..22: mol_type = other DNA
aaaggttgctatagctattact

SEQ ID NO: 78356 - DNA, 22 bp, synthetic construct
  misc_feature 1..22: note = chemically synthesized
  source 1..22: mol_type = other DNA
ctatagctattactgtttttga

SEQ ID NO: 78357 - DNA, 22 bp, synthetic construct
  misc_feature 1..22: note = chemically synthesized
  source 1..22: mol_type = other DNA
tagctattactgtttttgaaag

SEQ ID NO: 78358 - DNA, 22 bp, synthetic construct
  misc_feature 1..22: note = chemically synthesized
  source 1..22: mol_type = other DNA
ttactgtttttgaaagatttgt

SEQ ID NO: 78359 - DNA, 22 bp, synthetic construct
  misc_feature 1..22: note = chemically synthesized
  source 1..22: mol_type = other DNA
ctgtttttgaaagatttgtttt

SEQ ID NO: 78360 - DNA, 22 bp, synthetic construct
  misc_feature 1..22: note = chemically synthesized
  source 1..22: mol_type = other DNA
tttttgaaagatttgttttttg

SEQ ID NO: 78361 - DNA, 22 bp, synthetic construct
  misc_feature 1..22: note = chemically synthesized
  source 1..22: mol_type = other DNA
ttgaaagatttgttttttgggt

SEQ ID NO: 78362 - DNA, 22 bp, synthetic construct
  misc_feature 1..22: note = chemically synthesized
  source 1..22: mol_type = other DNA
tgaaagatttgttttttgggtt

SEQ ID NO: 78363 - DNA, 22 bp, synthetic construct
  misc_feature 1..22: note = chemically synthesized
  source 1..22: mol_type = other DNA
gaaagatttgttttttgggttt

SEQ ID NO: 78364 - DNA, 22 bp, synthetic construct
  misc_feature 1..22: note = chemically synthesized
  source 1..22: mol_type = other DNA
aaagatttgttttttgggtttc

SEQ ID NO: 78365 - DNA, 22 bp, synthetic construct
  misc_feature 1..22: note = chemically synthesized
  source 1..22: mol_type = other DNA
gttttttgggtttcatactgga

SEQ ID NO: 78366 - DNA, 22 bp, synthetic construct
  misc_feature 1..22: note = chemically synthesized
  source 1..22: mol_type = other DNA
ttttttgggtttcatactggag

SEQ ID NO: 78367 - DNA, 22 bp, synthetic construct
  misc_feature 1..22: note = chemically synthesized
  source 1..22: mol_type = other DNA
tttgggtttcatactggagttc

SEQ ID NO: 78368 - DNA, 22 bp, synthetic construct
  misc_feature 1..22: note = chemically synthesized
  source 1..22: mol_type = other DNA
ttgggtttcatactggagttct

SEQ ID NO: 78369 - DNA, 22 bp, synthetic construct
  misc_feature 1..22: note = chemically synthesized
  source 1..22: mol_type = other DNA
tgggtttcatactggagttctg

SEQ ID NO: 78370 - DNA, 22 bp, synthetic construct
  misc_feature 1..22: note = chemically synthesized
  source 1..22: mol_type = other DNA
gggtttcatactggagttctgt

SEQ ID NO: 78371 - DNA, 22 bp, synthetic construct
  misc_feature 1..22: note = chemically synthesized
  source 1..22: mol_type = other DNA
ggtttcatactggagttctgtg

SEQ ID NO: 78372 - DNA, 22 bp, synthetic construct
  misc_feature 1..22: note = chemically synthesized
  source 1..22: mol_type = other DNA
catactggagttctgtgtggat

SEQ ID NO: 78373 - DNA, 22 bp, synthetic construct
  misc_feature 1..22: note = chemically synthesized
  source 1..22: mol_type = other DNA
atactggagttctgtgtggatt

SEQ ID NO: 78374 - DNA, 22 bp, synthetic construct
  misc_feature 1..22: note = chemically synthesized
  source 1..22: mol_type = other DNA
gagttctgtgtggattgcacac

SEQ ID NO: 78375 - DNA, 22 bp, synthetic construct
  misc_feature 1..22: note = chemically synthesized
  source 1..22: mol_type = other DNA
tgtgtggattgcacaccaaaaa

SEQ ID NO: 78376 - DNA, 22 bp, synthetic construct
  misc_feature 1..22: note = chemically synthesized
  source 1..22: mol_type = other DNA
tgtggattgcacaccaaaaaat

SEQ ID NO: 78377 - DNA, 22 bp, synthetic construct
  misc_feature 1..22: note = chemically synthesized
  source 1..22: mol_type = other DNA
cacaccaaaaaatacagtaatg

SEQ ID NO: 78378 - DNA, 22 bp, synthetic construct
  misc_feature 1..22: note = chemically synthesized
  source 1..22: mol_type = other DNA
taggtttgtctatgtacttaat

SEQ ID NO: 78379 - DNA, 22 bp, synthetic construct
  misc_feature 1..22: note = chemically synthesized
  source 1..22: mol_type = other DNA
ggtttgtctatgtacttaattt

SEQ ID NO: 78380 - DNA, 22 bp, synthetic construct
  misc_feature 1..22: note = chemically synthesized
  source 1..22: mol_type = other DNA
gtctatgtacttaattttacca

SEQ ID NO: 78381 - DNA, 22 bp, synthetic construct
  misc_feature 1..22: note = chemically synthesized
  source 1..22: mol_type = other DNA
tctatgtacttaattttaccag

SEQ ID NO: 78382 - DNA, 22 bp, synthetic construct
  misc_feature 1..22: note = chemically synthesized
  source 1..22: mol_type = other DNA
tgtacttaattttaccagtggg

SEQ ID NO: 78383 - DNA, 22 bp, synthetic construct
  misc_feature 1..22: note = chemically synthesized
  source 1..22: mol_type = other DNA
aattttaccagtgggtttcata

SEQ ID NO: 78384 - DNA, 22 bp, synthetic construct
  misc_feature 1..22: note = chemically synthesized
  source 1..22: mol_type = other DNA
attttaccagtgggtttcatac

SEQ ID NO: 78385 - DNA, 22 bp, synthetic construct
  misc_feature 1..22: note = chemically synthesized
  source 1..22: mol_type = other DNA
taccagtgggtttcatactttg

SEQ ID NO: 78386 - DNA, 22 bp, synthetic construct
  misc_feature 1..22: note = chemically synthesized
  source 1..22: mol_type = other DNA
accagtgggtttcatactttga

SEQ ID NO: 78387 - DNA, 22 bp, synthetic construct
  misc_feature 1..22: note = chemically synthesized
  source 1..22: mol_type = other DNA
ccagtgggtttcatactttgaa

SEQ ID NO: 78388 - DNA, 22 bp, synthetic construct
  misc_feature 1..22: note = chemically synthesized
  source 1..22: mol_type = other DNA
catactttgaaaagttttcttt

SEQ ID NO: 78389 - DNA, 22 bp, synthetic construct
  misc_feature 1..22: note = chemically synthesized
  source 1..22: mol_type = other DNA
atactttgaaaagttttctttt

SEQ ID NO: 78390 - DNA, 22 bp, synthetic construct
  misc_feature 1..22: note = chemically synthesized
  source 1..22: mol_type = other DNA
tgaaaagttttcttttgcatgt

SEQ ID NO: 78391 - DNA, 22 bp, synthetic construct
  misc_feature 1..22: note = chemically synthesized
  source 1..22: mol_type = other DNA
gaaaagttttcttttgcatgtt

SEQ ID NO: 78392 - DNA, 22 bp, synthetic construct
  misc_feature 1..22: note = chemically synthesized
  source 1..22: mol_type = other DNA
aaaagttttcttttgcatgtta

SEQ ID NO: 78393 - DNA, 22 bp, synthetic construct
  misc_feature 1..22: note = chemically synthesized
  source 1..22: mol_type = other DNA
tcttttgcatgttaatgtcttt

SEQ ID NO: 78394 - DNA, 22 bp, synthetic construct
  misc_feature 1..22: note = chemically synthesized
  source 1..22: mol_type = other DNA
cttttgcatgttaatgtctttt

SEQ ID NO: 78395 - DNA, 22 bp, synthetic construct
  misc_feature 1..22: note = chemically synthesized
  source 1..22: mol_type = other DNA
ttttgcatgttaatgtcttttt

SEQ ID NO: 78396 - DNA, 22 bp, synthetic construct
  misc_feature 1..22: note = chemically synthesized
  source 1..22: mol_type = other DNA
ttgcatgttaatgtcttttttc

SEQ ID NO: 78397 - DNA, 22 bp, synthetic construct
  misc_feature 1..22: note = chemically synthesized
  source 1..22: mol_type = other DNA
tgcatgttaatgtcttttttct

SEQ ID NO: 78398 - DNA, 22 bp, synthetic construct
  misc_feature 1..22: note = chemically synthesized
  source 1..22: mol_type = other DNA
gcatgttaatgtcttttttctt

SEQ ID NO: 78399 - DNA, 22 bp, synthetic construct
  misc_feature 1..22: note = chemically synthesized
  source 1..22: mol_type = other DNA
catgttaatgtcttttttcttt

SEQ ID NO: 78400 - DNA, 22 bp, synthetic construct
  misc_feature 1..22: note = chemically synthesized
  source 1..22: mol_type = other DNA
atgtcttttttctttcagattg

SEQ ID NO: 78401 - DNA, 22 bp, synthetic construct
  misc_feature 1..22: note = chemically synthesized
  source 1..22: mol_type = other DNA
ttttctttcagattgcataact

SEQ ID NO: 78402 - DNA, 22 bp, synthetic construct
  misc_feature 1..22: note = chemically synthesized
  source 1..22: mol_type = other DNA
tttctttcagattgcataactc

SEQ ID NO: 78403 - DNA, 22 bp, synthetic construct
  misc_feature 1..22: note = chemically synthesized
  source 1..22: mol_type = other DNA
ttctttcagattgcataactcc

SEQ ID NO: 78404 - DNA, 22 bp, synthetic construct
  misc_feature 1..22: note = chemically synthesized
  source 1..22: mol_type = other DNA
tctttcagattgcataactccc

SEQ ID NO: 78405 - DNA, 22 bp, synthetic construct
  misc_feature 1..22: note = chemically synthesized
  source 1..22: mol_type = other DNA
ctttcagattgcataactccct

SEQ ID NO: 78406 - DNA, 22 bp, synthetic construct
  misc_feature 1..22: note = chemically synthesized
  source 1..22: mol_type = other DNA
tttcagattgcataactccctt

SEQ ID NO: 78407 - DNA, 22 bp, synthetic construct
  misc_feature 1..22: note = chemically synthesized
  source 1..22: mol_type = other DNA
tcagattgcataactcccttta

SEQ ID NO: 78408 - DNA, 22 bp, synthetic construct
  misc_feature 1..22: note = chemically synthesized
  source 1..22: mol_type = other DNA
cagattgcataactccctttag

SEQ ID NO: 78409 - DNA, 22 bp, synthetic construct
  misc_feature 1..22: note = chemically synthesized
  source 1..22: mol_type = other DNA
agattgcataactccctttagc

SEQ ID NO: 78410 - DNA, 22 bp, synthetic construct
  misc_feature 1..22: note = chemically synthesized
  source 1..22: mol_type = other DNA
cataactccctttagcattttt

SEQ ID NO: 78411 - DNA, 22 bp, synthetic construct
  misc_feature 1..22: note = chemically synthesized
  source 1..22: mol_type = other DNA
cctttagcattttttgcaagat

SEQ ID NO: 78412 - DNA, 22 bp, synthetic construct
  misc_feature 1..22: note = chemically synthesized
  source 1..22: mol_type = other DNA
tagcattttttgcaagatggtc

SEQ ID NO: 78413 - DNA, 22 bp, synthetic construct
  misc_feature 1..22: note = chemically synthesized
  source 1..22: mol_type = other DNA
agcattttttgcaagatggtct

SEQ ID NO: 78414 - DNA, 22 bp, synthetic construct
  misc_feature 1..22: note = chemically synthesized
  source 1..22: mol_type = other DNA
gcattttttgcaagatggtctg

SEQ ID NO: 78415 - DNA, 22 bp, synthetic construct
  misc_feature 1..22: note = chemically synthesized
  source 1..22: mol_type = other DNA
tttgcaagatggtctggtgttg

SEQ ID NO: 78416 - DNA, 22 bp, synthetic construct
  misc_feature 1..22: note = chemically synthesized
  source 1..22: mol_type = other DNA
ttgcaagatggtctggtgttgg

SEQ ID NO: 78417 - DNA, 22 bp, synthetic construct
  misc_feature 1..22: note = chemically synthesized
  source 1..22: mol_type = other DNA
tgcaagatggtctggtgttggt

SEQ ID NO: 78418 - DNA, 22 bp, synthetic construct
  misc_feature 1..22: note = chemically synthesized
  source 1..22: mol_type = other DNA
gcaagatggtctggtgttggtg

SEQ ID NO: 78419 - DNA, 22 bp, synthetic construct
  misc_feature 1..22: note = chemically synthesized
  source 1..22: mol_type = other DNA
caagatggtctggtgttggtga

SEQ ID NO: 78420 - DNA, 22 bp, synthetic construct
  misc_feature 1..22: note = chemically synthesized
  source 1..22: mol_type = other DNA
gtgttggtgaattctctcaact

SEQ ID NO: 78421 - DNA, 22 bp, synthetic construct
  misc_feature 1..22: note = chemically synthesized
  source 1..22: mol_type = other DNA
gtgaattctctcaacttttgtt

SEQ ID NO: 78422 - DNA, 22 bp, synthetic construct
  misc_feature 1..22: note = chemically synthesized
  source 1..22: mol_type = other DNA
tctcaacttttgtttgtctggg

SEQ ID NO: 78423 - DNA, 22 bp, synthetic construct
  misc_feature 1..22: note = chemically synthesized
  source 1..22: mol_type = other DNA
tcaacttttgtttgtctgggaa

SEQ ID NO: 78424 - DNA, 22 bp, synthetic construct
  misc_feature 1..22: note = chemically synthesized
  source 1..22: mol_type = other DNA
aacttttgtttgtctgggaaag

SEQ ID NO: 78425 - DNA, 22 bp, synthetic construct
  misc_feature 1..22: note = chemically synthesized
  source 1..22: mol_type = other DNA
ttgtttgtctgggaaagacttt

SEQ ID NO: 78426 - DNA, 22 bp, synthetic construct
  misc_feature 1..22: note = chemically synthesized
  source 1..22: mol_type = other DNA
tgtttgtctgggaaagacttta

SEQ ID NO: 78427 - DNA, 22 bp, synthetic construct
  misc_feature 1..22: note = chemically synthesized
  source 1..22: mol_type = other DNA
gtttgtctgggaaagactttat

SEQ ID NO: 78428 - DNA, 22 bp, synthetic construct
  misc_feature 1..22: note = chemically synthesized
  source 1..22: mol_type = other DNA
tttgtctgggaaagactttata

SEQ ID NO: 78429 - DNA, 22 bp, synthetic construct
  misc_feature 1..22: note = chemically synthesized
  source 1..22: mol_type = other DNA
gtctgggaaagactttatatat

SEQ ID NO: 78430 - DNA, 22 bp, synthetic construct
  misc_feature 1..22: note = chemically synthesized
  source 1..22: mol_type = other DNA
tctgggaaagactttatatatt

SEQ ID NO: 78431 - DNA, 22 bp, synthetic construct
  misc_feature 1..22: note = chemically synthesized
  source 1..22: mol_type = other DNA
ggaaagactttatatattgctt

SEQ ID NO: 78432 - DNA, 22 bp, synthetic construct
  misc_feature 1..22: note = chemically synthesized
  source 1..22: mol_type = other DNA
tatatattgcttatatttgaat

SEQ ID NO: 78433 - DNA, 22 bp, synthetic construct
  misc_feature 1..22: note = chemically synthesized
  source 1..22: mol_type = other DNA
atatattgcttatatttgaata

SEQ ID NO: 78434 - DNA, 22 bp, synthetic construct
  misc_feature 1..22: note = chemically synthesized
  source 1..22: mol_type = other DNA
tatattgcttatatttgaataa

SEQ ID NO: 78435 - DNA, 22 bp, synthetic construct
  misc_feature 1..22: note = chemically synthesized
  source 1..22: mol_type = other DNA
cttatatttgaataacagtttt

SEQ ID NO: 78436 - DNA, 22 bp, synthetic construct
  misc_feature 1..22: note = chemically synthesized
  source 1..22: mol_type = other DNA
atatttgaataacagttttacc

SEQ ID NO: 78437 - DNA, 22 bp, synthetic construct
  misc_feature 1..22: note = chemically synthesized
  source 1..22: mol_type = other DNA
tatttgaataacagttttaccc

SEQ ID NO: 78438 - DNA, 22 bp, synthetic construct
  misc_feature 1..22: note = chemically synthesized
  source 1..22: mol_type = other DNA
gaataacagttttaccctataa

SEQ ID NO: 78439 - DNA, 22 bp, synthetic construct
  misc_feature 1..22: note = chemically synthesized
  source 1..22: mol_type = other DNA
aataacagttttaccctataaa

SEQ ID NO: 78440 - DNA, 22 bp, synthetic construct
  misc_feature 1..22: note = chemically synthesized
  source 1..22: mol_type = other DNA
taccctataaaatattcttgaa

SEQ ID NO: 78441 - DNA, 22 bp, synthetic construct
  misc_feature 1..22: note = chemically synthesized
  source 1..22: mol_type = other DNA
accctataaaatattcttgaat

SEQ ID NO: 78442 - DNA, 22 bp, synthetic construct
  misc_feature 1..22: note = chemically synthesized
  source 1..22: mol_type = other DNA
ccctataaaatattcttgaata

SEQ ID NO: 78443 - DNA, 22 bp, synthetic construct
  misc_feature 1..22: note = chemically synthesized
  source 1..22: mol_type = other DNA
taaaatattcttgaatatcagt

SEQ ID NO: 78444 - DNA, 22 bp, synthetic construct
  misc_feature 1..22: note = chemically synthesized
  source 1..22: mol_type = other DNA
ttgaatatcagttttcttttat

SEQ ID NO: 78445 - DNA, 22 bp, synthetic construct
  misc_feature 1..22: note = chemically synthesized
  source 1..22: mol_type = other DNA
gaatatcagttttcttttatcc

SEQ ID NO: 78446 - DNA, 22 bp, synthetic construct
  misc_feature 1..22: note = chemically synthesized
  source 1..22: mol_type = other DNA
aatatcagttttcttttatccc

SEQ ID NO: 78447 - DNA, 22 bp, synthetic construct
  misc_feature 1..22: note = chemically synthesized
  source 1..22: mol_type = other DNA
tcttttatccctgagcgctttg

SEQ ID NO: 78448 - DNA, 22 bp, synthetic construct
  misc_feature 1..22: note = chemically synthesized
  source 1..22: mol_type = other DNA
cttttatccctgagcgctttga

SEQ ID NO: 78449 - DNA, 22 bp, synthetic construct
  misc_feature 1..22: note = chemically synthesized
  source 1..22: mol_type = other DNA
ttttatccctgagcgctttgaa

SEQ ID NO: 78450 - DNA, 22 bp, synthetic construct
  misc_feature 1..22: note = chemically synthesized
  source 1..22: mol_type = other DNA
ttatccctgagcgctttgaaaa

SEQ ID NO: 78451 - DNA, 22 bp, synthetic construct
  misc_feature 1..22: note = chemically synthesized
  source 1..22: mol_type = other DNA
tatccctgagcgctttgaaaat

SEQ ID NO: 78452 - DNA, 22 bp, synthetic construct
  misc_feature 1..22: note = chemically synthesized
  source 1..22: mol_type = other DNA
atccctgagcgctttgaaaatt

SEQ ID NO: 78453 - DNA, 22 bp, synthetic construct
  misc_feature 1..22: note = chemically synthesized
  source 1..22: mol_type = other DNA
tccctgagcgctttgaaaattt

SEQ ID NO: 78454 - DNA, 22 bp, synthetic construct
  misc_feature 1..22: note = chemically synthesized
  source 1..22: mol_type = other DNA
agcgctttgaaaatttcattcg

SEQ ID NO: 78455 - DNA, 22 bp, synthetic construct
  misc_feature 1..22: note = chemically synthesized
  source 1..22: mol_type = other DNA
tgaaaatttcattcgactctct

SEQ ID NO: 78456 - DNA, 22 bp, synthetic construct
  misc_feature 1..22: note = chemically synthesized
  source 1..22: mol_type = other DNA
gaaaatttcattcgactctctc

SEQ ID NO: 78457 - DNA, 22 bp, synthetic construct
  misc_feature 1..22: note = chemically synthesized
  source 1..22: mol_type = other DNA
aaaatttcattcgactctctct

SEQ ID NO: 78458 - DNA, 22 bp, synthetic construct
  misc_feature 1..22: note = chemically synthesized
  source 1..22: mol_type = other DNA
cattcgactctctcttggactg

SEQ ID NO: 78459 - DNA, 22 bp, synthetic construct
  misc_feature 1..22: note = chemically synthesized
  source 1..22: mol_type = other DNA
attcgactctctcttggactgt

SEQ ID NO: 78460 - DNA, 22 bp, synthetic construct
  misc_feature 1..22: note = chemically synthesized
  source 1..22: mol_type = other DNA
gactctctcttggactgtgtga

SEQ ID NO: 78461 - DNA, 22 bp, synthetic construct
  misc_feature 1..22: note = chemically synthesized
  source 1..22: mol_type = other DNA
tctcttggactgtgtgatttct

SEQ ID NO: 78462 - DNA, 22 bp, synthetic construct
  misc_feature 1..22: note = chemically synthesized
  source 1..22: mol_type = other DNA
tcttggactgtgtgatttctat

SEQ ID NO: 78463 - DNA, 22 bp, synthetic construct
  misc_feature 1..22: note = chemically synthesized
  source 1..22: mol_type = other DNA
ttggactgtgtgatttctattg

SEQ ID NO: 78464 - DNA, 22 bp, synthetic construct
  misc_feature 1..22: note = chemically synthesized
  source 1..22: mol_type = other DNA
ggactgtgtgatttctattgag

SEQ ID NO: 78465 - DNA, 22 bp, synthetic construct
  misc_feature 1..22: note = chemically synthesized
  source 1..22: mol_type = other DNA
gactgtgtgatttctattgaga

SEQ ID NO: 78466 - DNA, 22 bp, synthetic construct
  misc_feature 1..22: note = chemically synthesized
  source 1..22: mol_type = other DNA
tgtgatttctattgagatgttt

SEQ ID NO: 78467 - DNA, 22 bp, synthetic construct
  misc_feature 1..22: note = chemically synthesized
  source 1..22: mol_type = other DNA
ctattgagatgtttgttgtcac

SEQ ID NO: 78468 - DNA, 22 bp, synthetic construct
  misc_feature 1..22: note = chemically synthesized
  source 1..22: mol_type = other DNA
tattgagatgtttgttgtcaca

SEQ ID NO: 78469 - DNA, 22 bp, synthetic construct
  misc_feature 1..22: note = chemically synthesized
  source 1..22: mol_type = other DNA
ttgagatgtttgttgtcacagg

SEQ ID NO: 78470 - DNA, 22 bp, synthetic construct
  misc_feature 1..22: note = chemically synthesized
  source 1..22: mol_type = other DNA
agatgtttgttgtcacaggatt

SEQ ID NO: 78471 - DNA, 22 bp, synthetic construct
  misc_feature 1..22: note = chemically synthesized
  source 1..22: mol_type = other DNA
gttgtcacaggatttggagctc

SEQ ID NO: 78472 - DNA, 22 bp, synthetic construct
  misc_feature 1..22: note = chemically synthesized
  source 1..22: mol_type = other DNA
ttgtcacaggatttggagctcc

SEQ ID NO: 78473 - DNA, 22 bp, synthetic construct
  misc_feature 1..22: note = chemically synthesized
  source 1..22: mol_type = other DNA
tcacaggatttggagctccttt

SEQ ID NO: 78474 - DNA, 22 bp, synthetic construct
  misc_feature 1..22: note = chemically synthesized
  source 1..22: mol_type = other DNA
ggagctcctttatatgctattt

SEQ ID NO: 78475 - DNA, 22 bp, synthetic construct
  misc_feature 1..22: note = chemically synthesized
  source 1..22: mol_type = other DNA
gagctcctttatatgctatttg

SEQ ID NO: 78476 - DNA, 22 bp, synthetic construct
  misc_feature 1..22: note = chemically synthesized
  source 1..22: mol_type = other DNA
ctttatatgctatttgtttctc

SEQ ID NO: 78477 - DNA, 22 bp, synthetic construct
  misc_feature 1..22: note = chemically synthesized
  source 1..22: mol_type = other DNA
tatatgctatttgtttctcatc

SEQ ID NO: 78478 - DNA, 22 bp, synthetic construct
  misc_feature 1..22: note = chemically synthesized
  source 1..22: mol_type = other DNA
atatgctatttgtttctcatct

SEQ ID NO: 78479 - DNA, 22 bp, synthetic construct
  misc_feature 1..22: note = chemically synthesized
  source 1..22: mol_type = other DNA
tatgctatttgtttctcatctc

SEQ ID NO: 78480 - DNA, 22 bp, synthetic construct
  misc_feature 1..22: note = chemically synthesized
  source 1..22: mol_type = other DNA
tttgtttctcatctcttctgct

SEQ ID NO: 78481 - DNA, 22 bp, synthetic construct
  misc_feature 1..22: note = chemically synthesized
  source 1..22: mol_type = other DNA
gtttctcatctcttctgctttt

SEQ ID NO: 78482 - DNA, 22 bp, synthetic construct
  misc_feature 1..22: note = chemically synthesized
  source 1..22: mol_type = other DNA
tttctcatctcttctgctttta

SEQ ID NO: 78483 - DNA, 22 bp, synthetic construct
  misc_feature 1..22: note = chemically synthesized
  source 1..22: mol_type = other DNA
ctcatctcttctgcttttagga

SEQ ID NO: 78484 - DNA, 22 bp, synthetic construct
  misc_feature 1..22: note = chemically synthesized
  source 1..22: mol_type = other DNA
tcatctcttctgcttttaggat

SEQ ID NO: 78485 - DNA, 22 bp, synthetic construct
  misc_feature 1..22: note = chemically synthesized
  source 1..22: mol_type = other DNA
atctcttctgcttttaggatca

SEQ ID NO: 78486 - DNA, 22 bp, synthetic construct
  misc_feature 1..22: note = chemically synthesized
  source 1..22: mol_type = other DNA
ttctgcttttaggatcatcttt

SEQ ID NO: 78487 - DNA, 22 bp, synthetic construct
  misc_feature 1..22: note = chemically synthesized
  source 1..22: mol_type = other DNA
ctgcttttaggatcatcttttt

SEQ ID NO: 78488 - DNA, 22 bp, synthetic construct
  misc_feature 1..22: note = chemically synthesized
  source 1..22: mol_type = other DNA
tgcttttaggatcatctttttg

SEQ ID NO: 78489 - DNA, 22 bp, synthetic construct
  misc_feature 1..22: note = chemically synthesized
  source 1..22: mol_type = other DNA
cttttaggatcatctttttgtc

SEQ ID NO: 78490 - DNA, 22 bp, synthetic construct
  misc_feature 1..22: note = chemically synthesized
  source 1..22: mol_type = other DNA
ttaggatcatctttttgtcctt

SEQ ID NO: 78491 - DNA, 22 bp, synthetic construct
  misc_feature 1..22: note = chemically synthesized
  source 1..22: mol_type = other DNA
taggatcatctttttgtccttg

SEQ ID NO: 78492 - DNA, 22 bp, synthetic construct
  misc_feature 1..22: note = chemically synthesized
  source 1..22: mol_type = other DNA
aggatcatctttttgtccttga

SEQ ID NO: 78493 - DNA, 22 bp, synthetic construct
  misc_feature 1..22: note = chemically synthesized
  source 1..22: mol_type = other DNA
ggatcatctttttgtccttgac

SEQ ID NO: 78494 - DNA, 22 bp, synthetic construct
  misc_feature 1..22: note = chemically synthesized
  source 1..22: mol_type = other DNA
tttgtccttgacctgatgtctt

SEQ ID NO: 78495 - DNA, 22 bp, synthetic construct
  misc_feature 1..22: note = chemically synthesized
  source 1..22: mol_type = other DNA
ttgtccttgacctgatgtcttg

SEQ ID NO: 78496 - DNA, 22 bp, synthetic construct
  misc_feature 1..22: note = chemically synthesized
  source 1..22: mol_type = other DNA
tgtccttgacctgatgtcttgg

SEQ ID NO: 78497 - DNA, 22 bp, synthetic construct
  misc_feature 1..22: note = chemically synthesized
  source 1..22: mol_type = other DNA
gtccttgacctgatgtcttggc

SEQ ID NO: 78498 - DNA, 22 bp, synthetic construct
  misc_feature 1..22: note = chemically synthesized
  source 1..22: mol_type = other DNA
tccttgacctgatgtcttggcg

SEQ ID NO: 78499 - DNA, 22 bp, synthetic construct
  misc_feature 1..22: note = chemically synthesized
  source 1..22: mol_type = other DNA
gacctgatgtcttggcgtagta

SEQ ID NO: 78500 - DNA, 22 bp, synthetic construct
  misc_feature 1..22: note = chemically synthesized
  source 1..22: mol_type = other DNA
acctgatgtcttggcgtagtac

SEQ ID NO: 78501 - DNA, 22 bp, synthetic construct
  misc_feature 1..22: note = chemically synthesized
  source 1..22: mol_type = other DNA
atgtcttggcgtagtactctac

SEQ ID NO: 78502 - DNA, 22 bp, synthetic construct
  misc_feature 1..22: note = chemically synthesized
  source 1..22: mol_type = other DNA
ggcgtagtactctactatatct

SEQ ID NO: 78503 - DNA, 22 bp, synthetic construct
  misc_feature 1..22: note = chemically synthesized
  source 1..22: mol_type = other DNA
gcgtagtactctactatatcta

SEQ ID NO: 78504 - DNA, 22 bp, synthetic construct
  misc_feature 1..22: note = chemically synthesized
  source 1..22: mol_type = other DNA
tactatatctaggactacactt

SEQ ID NO: 78505 - DNA, 22 bp, synthetic construct
  misc_feature 1..22: note = chemically synthesized
  source 1..22: mol_type = other DNA
ctatatctaggactacacttag

SEQ ID NO: 78506 - DNA, 22 bp, synthetic construct
  misc_feature 1..22: note = chemically synthesized
  source 1..22: mol_type = other DNA
tatctaggactacacttagaat

SEQ ID NO: 78507 - DNA, 22 bp, synthetic construct
  misc_feature 1..22: note = chemically synthesized
  source 1..22: mol_type = other DNA
ggactacacttagaatgaataa

SEQ ID NO: 78508 - DNA, 22 bp, synthetic construct
  misc_feature 1..22: note = chemically synthesized
  source 1..22: mol_type = other DNA
cacttagaatgaataatatgta

SEQ ID NO: 78509 - DNA, 22 bp, synthetic construct
  misc_feature 1..22: note = chemically synthesized
  source 1..22: mol_type = other DNA
agaatgaataatatgtaataaa

SEQ ID NO: 78510 - DNA, 22 bp, synthetic construct
  misc_feature 1..22: note = chemically synthesized
  source 1..22: mol_type = other DNA
gaatgaataatatgtaataaaa

SEQ ID NO: 78511 - DNA, 22 bp, synthetic construct
  misc_feature 1..22: note = chemically synthesized
  source 1..22: mol_type = other DNA
ctggcttaaaaagtatttattt

SEQ ID NO: 78512 - DNA, 22 bp, synthetic construct
  misc_feature 1..22: note = chemically synthesized
  source 1..22: mol_type = other DNA
gcttaaaaagtatttatttatt

SEQ ID NO: 78513 - DNA, 22 bp, synthetic construct
  misc_feature 1..22: note = chemically synthesized
  source 1..22: mol_type = other DNA
aaaaagtatttatttattgtaa

SEQ ID NO: 78514 - DNA, 22 bp, synthetic construct
  misc_feature 1..22: note = chemically synthesized
  source 1..22: mol_type = other DNA
aaaagtatttatttattgtaag

SEQ ID NO: 78515 - DNA, 22 bp, synthetic construct
  misc_feature 1..22: note = chemically synthesized
  source 1..22: mol_type = other DNA
atttattgtaagcataagaaaa

SEQ ID NO: 78516 - DNA, 22 bp, synthetic construct
  misc_feature 1..22: note = chemically synthesized
  source 1..22: mol_type = other DNA
tttattgtaagcataagaaaat

SEQ ID NO: 78517 - DNA, 22 bp, synthetic construct
  misc_feature 1..22: note = chemically synthesized
  source 1..22: mol_type = other DNA
attgtaagcataagaaaatttg

SEQ ID NO: 78518 - DNA, 22 bp, synthetic construct
  misc_feature 1..22: note = chemically synthesized
  source 1..22: mol_type = other DNA
ttgtaagcataagaaaatttga

SEQ ID NO: 78519 - DNA, 22 bp, synthetic construct
  misc_feature 1..22: note = chemically synthesized
  source 1..22: mol_type = other DNA
taagcataagaaaatttgaccg

SEQ ID NO: 78520 - DNA, 22 bp, synthetic construct
  misc_feature 1..22: note = chemically synthesized
  source 1..22: mol_type = other DNA
gaccgatgtaatcttagatgat

SEQ ID NO: 78521 - DNA, 22 bp, synthetic construct
  misc_feature 1..22: note = chemically synthesized
  source 1..22: mol_type = other DNA
accgatgtaatcttagatgata

SEQ ID NO: 78522 - DNA, 22 bp, synthetic construct
  misc_feature 1..22: note = chemically synthesized
  source 1..22: mol_type = other DNA
agatgatagttctaaaagtgtt

SEQ ID NO: 78523 - DNA, 22 bp, synthetic construct
  misc_feature 1..22: note = chemically synthesized
  source 1..22: mol_type = other DNA
gatgatagttctaaaagtgttg

SEQ ID NO: 78524 - DNA, 22 bp, synthetic construct
  misc_feature 1..22: note = chemically synthesized
  source 1..22: mol_type = other DNA
taaaagtgttggttgaggaagt

SEQ ID NO: 78525 - DNA, 22 bp, synthetic construct
  misc_feature 1..22: note = chemically synthesized
  source 1..22: mol_type = other DNA
aaagtgttggttgaggaagtag

SEQ ID NO: 78526 - DNA, 22 bp, synthetic construct
  misc_feature 1..22: note = chemically synthesized
  source 1..22: mol_type = other DNA
gttgaggaagtagaagagaatc

SEQ ID NO: 78527 - DNA, 22 bp, synthetic construct
  misc_feature 1..22: note = chemically synthesized
  source 1..22: mol_type = other DNA
aggaagtagaagagaatcagta

SEQ ID NO: 78528 - DNA, 22 bp, synthetic construct
  misc_feature 1..22: note = chemically synthesized
  source 1..22: mol_type = other DNA
agcagttaaactaatgtgggaa

SEQ ID NO: 78529 - DNA, 22 bp, synthetic construct
  misc_feature 1..22: note = chemically synthesized
  source 1..22: mol_type = other DNA
aactaatgtgggaaggcccctt

SEQ ID NO: 78530 - DNA, 22 bp, synthetic construct
  misc_feature 1..22: note = chemically synthesized
  source 1..22: mol_type = other DNA
atgtgggaaggccccttttata

SEQ ID NO: 78531 - DNA, 22 bp, synthetic construct
  misc_feature 1..22: note = chemically synthesized
  source 1..22: mol_type = other DNA
ttataaagatcctcttgagaaa

SEQ ID NO: 78532 - DNA, 22 bp, synthetic construct
  misc_feature 1..22: note = chemically synthesized
  source 1..22: mol_type = other DNA
tataaagatcctcttgagaaaa

SEQ ID NO: 78533 - DNA, 22 bp, synthetic construct
  misc_feature 1..22: note = chemically synthesized
  source 1..22: mol_type = other DNA
ataaagatcctcttgagaaaac

SEQ ID NO: 78534 - DNA, 22 bp, synthetic construct
  misc_feature 1..22: note = chemically synthesized
  source 1..22: mol_type = other DNA
taaagatcctcttgagaaaacc

SEQ ID NO: 78535 - DNA, 22 bp, synthetic construct
  misc_feature 1..22: note = chemically synthesized
  source 1..22: mol_type = other DNA
ttgagaaaacctttatacatta

SEQ ID NO: 78536 - DNA, 22 bp, synthetic construct
  misc_feature 1..22: note = chemically synthesized
  source 1..22: mol_type = other DNA
gagaaaacctttatacattatt

SEQ ID NO: 78537 - DNA, 22 bp, synthetic construct
  misc_feature 1..22: note = chemically synthesized
  source 1..22: mol_type = other DNA
agaaaacctttatacattatta

SEQ ID NO: 78538 - DNA, 22 bp, synthetic construct
  misc_feature 1..22: note = chemically synthesized
  source 1..22: mol_type = other DNA
tatacattattaatatatgact

SEQ ID NO: 78539 - DNA, 22 bp, synthetic construct
  misc_feature 1..22: note = chemically synthesized
  source 1..22: mol_type = other DNA
atacattattaatatatgacta

SEQ ID NO: 78540 - DNA, 22 bp, synthetic construct
  misc_feature 1..22: note = chemically synthesized
  source 1..22: mol_type = other DNA
tacattattaatatatgactat

SEQ ID NO: 78541 - DNA, 22 bp, synthetic construct
  misc_feature 1..22: note = chemically synthesized
  source 1..22: mol_type = other DNA
ttaatatatgactataattaga

SEQ ID NO: 78542 - DNA, 22 bp, synthetic construct
  misc_feature 1..22: note = chemically synthesized
  source 1..22: mol_type = other DNA
atatatgactataattagagga

SEQ ID NO: 78543 - DNA, 22 bp, synthetic construct
  misc_feature 1..22: note = chemically synthesized
  source 1..22: mol_type = other DNA
taattagaggaaacagaggtga

SEQ ID NO: 78544 - DNA, 22 bp, synthetic construct
  misc_feature 1..22: note = chemically synthesized
  source 1..22: mol_type = other DNA
gaggaaacagaggtgagtgaat

SEQ ID NO: 78545 - DNA, 22 bp, synthetic construct
  misc_feature 1..22: note = chemically synthesized
  source 1..22: mol_type = other DNA
tgtcctcatgaatctcaaagga

SEQ ID NO: 78546 - DNA, 22 bp, synthetic construct
  misc_feature 1..22: note = chemically synthesized
  source 1..22: mol_type = other DNA
gtcctcatgaatctcaaaggag

SEQ ID NO: 78547 - DNA, 22 bp, synthetic construct
  misc_feature 1..22: note = chemically synthesized
  source 1..22: mol_type = other DNA
tcctcatgaatctcaaaggaga

SEQ ID NO: 78548 - DNA, 22 bp, synthetic construct
  misc_feature 1..22: note = chemically synthesized
  source 1..22: mol_type = other DNA
atgaatctcaaaggagaaaatg

SEQ ID NO: 78549 - DNA, 22 bp, synthetic construct
  misc_feature 1..22: note = chemically synthesized
  source 1..22: mol_type = other DNA
aaaggagaaaatggtttacaga

SEQ ID NO: 78550 - DNA, 22 bp, synthetic construct
  misc_feature 1..22: note = chemically synthesized
  source 1..22: mol_type = other DNA
acagaattgcttggtgttcttc

SEQ ID NO: 78551 - DNA, 22 bp, synthetic construct
  misc_feature 1..22: note = chemically synthesized
  source 1..22: mol_type = other DNA
cagaattgcttggtgttcttca

SEQ ID NO: 78552 - DNA, 22 bp, synthetic construct
  misc_feature 1..22: note = chemically synthesized
  source 1..22: mol_type = other DNA
cttggtgttcttcagattccaa

SEQ ID NO: 78553 - DNA, 22 bp, synthetic construct
  misc_feature 1..22: note = chemically synthesized
  source 1..22: mol_type = other DNA
ggtgttcttcagattccaattt

SEQ ID NO: 78554 - DNA, 22 bp, synthetic construct
  misc_feature 1..22: note = chemically synthesized
  source 1..22: mol_type = other DNA
gtgttcttcagattccaatttt

SEQ ID NO: 78555 - DNA, 22 bp, synthetic construct
  misc_feature 1..22: note = chemically synthesized
  source 1..22: mol_type = other DNA
ttcagattccaattttaaagtc

SEQ ID NO: 78556 - DNA, 22 bp, synthetic construct
  misc_feature 1..22: note = chemically synthesized
  source 1..22: mol_type = other DNA
cagattccaattttaaagtcaa

SEQ ID NO: 78557 - DNA, 22 bp, synthetic construct
  misc_feature 1..22: note = chemically synthesized
  source 1..22: mol_type = other DNA
agattccaattttaaagtcaaa

SEQ ID NO: 78558 - DNA, 22 bp, synthetic construct
  misc_feature 1..22: note = chemically synthesized
  source 1..22: mol_type = other DNA
caattttaaagtcaaatctgaa

SEQ ID NO: 78559 - DNA, 22 bp, synthetic construct
  misc_feature 1..22: note = chemically synthesized
  source 1..22: mol_type = other DNA
taaagtcaaatctgaattttaa

SEQ ID NO: 78560 - DNA, 22 bp, synthetic construct
  misc_feature 1..22: note = chemically synthesized
  source 1..22: mol_type = other DNA
aaagtcaaatctgaattttaag

SEQ ID NO: 78561 - DNA, 22 bp, synthetic construct
  misc_feature 1..22: note = chemically synthesized
  source 1..22: mol_type = other DNA
aagtcaaatctgaattttaagt

SEQ ID NO: 78562 - DNA, 22 bp, synthetic construct
  misc_feature 1..22: note = chemically synthesized
  source 1..22: mol_type = other DNA
aattttaagttatgggaccact

SEQ ID NO: 78563 - DNA, 22 bp, synthetic construct
  misc_feature 1..22: note = chemically synthesized
  source 1..22: mol_type = other DNA
taagttatgggaccactgataa

SEQ ID NO: 78564 - DNA, 22 bp, synthetic construct
  misc_feature 1..22: note = chemically synthesized
  source 1..22: mol_type = other DNA
aagttatgggaccactgataat

SEQ ID NO: 78565 - DNA, 22 bp, synthetic construct
  misc_feature 1..22: note = chemically synthesized
  source 1..22: mol_type = other DNA
agttatgggaccactgataata

SEQ ID NO: 78566 - DNA, 22 bp, synthetic construct
  misc_feature 1..22: note = chemically synthesized
  source 1..22: mol_type = other DNA
tgggaccactgataatatggtg

SEQ ID NO: 78567 - DNA, 22 bp, synthetic construct
  misc_feature 1..22: note = chemically synthesized
  source 1..22: mol_type = other DNA
ataatatggtgggctaaagaat

SEQ ID NO: 78568 - DNA, 22 bp, synthetic construct
  misc_feature 1..22: note = chemically synthesized
  source 1..22: mol_type = other DNA
aagaatcaggtttttagttgga

SEQ ID NO: 78569 - DNA, 22 bp, synthetic construct
  misc_feature 1..22: note = chemically synthesized
  source 1..22: mol_type = other DNA
ttagttggattgtctggttttg

SEQ ID NO: 78570 - DNA, 22 bp, synthetic construct
  misc_feature 1..22: note = chemically synthesized
  source 1..22: mol_type = other DNA
tagttggattgtctggttttga

SEQ ID NO: 78571 - DNA, 22 bp, synthetic construct
  misc_feature 1..22: note = chemically synthesized
  source 1..22: mol_type = other DNA
agttggattgtctggttttgag

SEQ ID NO: 78572 - DNA, 22 bp, synthetic construct
  misc_feature 1..22: note = chemically synthesized
  source 1..22: mol_type = other DNA
gttggattgtctggttttgagt

SEQ ID NO: 78573 - DNA, 22 bp, synthetic construct
  misc_feature 1..22: note = chemically synthesized
  source 1..22: mol_type = other DNA
gattgtctggttttgagttgtg

SEQ ID NO: 78574 - DNA, 22 bp, synthetic construct
  misc_feature 1..22: note = chemically synthesized
  source 1..22: mol_type = other DNA
tctggttttgagttgtgattct

SEQ ID NO: 78575 - DNA, 22 bp, synthetic construct
  misc_feature 1..22: note = chemically synthesized
  source 1..22: mol_type = other DNA
gttttgagttgtgattctgcca

SEQ ID NO: 78576 - DNA, 22 bp, synthetic construct
  misc_feature 1..22: note = chemically synthesized
  source 1..22: mol_type = other DNA
tgagttgtgattctgccactta

SEQ ID NO: 78577 - DNA, 22 bp, synthetic construct
  misc_feature 1..22: note = chemically synthesized
  source 1..22: mol_type = other DNA
gagttgtgattctgccacttat

SEQ ID NO: 78578 - DNA, 22 bp, synthetic construct
  misc_feature 1..22: note = chemically synthesized
  source 1..22: mol_type = other DNA
agttgtgattctgccacttatt

SEQ ID NO: 78579 - DNA, 22 bp, synthetic construct
  misc_feature 1..22: note = chemically synthesized
  source 1..22: mol_type = other DNA
tgattctgccacttattaactc

SEQ ID NO: 78580 - DNA, 22 bp, synthetic construct
  misc_feature 1..22: note = chemically synthesized
  source 1..22: mol_type = other DNA
tgccacttattaactctttgac

SEQ ID NO: 78581 - DNA, 22 bp, synthetic construct
  misc_feature 1..22: note = chemically synthesized
  source 1..22: mol_type = other DNA
ccacttattaactctttgactt

SEQ ID NO: 78582 - DNA, 22 bp, synthetic construct
  misc_feature 1..22: note = chemically synthesized
  source 1..22: mol_type = other DNA
attaactctttgacttggggca

SEQ ID NO: 78583 - DNA, 22 bp, synthetic construct
  misc_feature 1..22: note = chemically synthesized
  source 1..22: mol_type = other DNA
ttaactctttgacttggggcat

SEQ ID NO: 78584 - DNA, 22 bp, synthetic construct
  misc_feature 1..22: note = chemically synthesized
  source 1..22: mol_type = other DNA
actctttgacttggggcatgat

SEQ ID NO: 78585 - DNA, 22 bp, synthetic construct
  misc_feature 1..22: note = chemically synthesized
  source 1..22: mol_type = other DNA
tttgacttggggcatgatgact

SEQ ID NO: 78586 - DNA, 22 bp, synthetic construct
  misc_feature 1..22: note = chemically synthesized
  source 1..22: mol_type = other DNA
tgacttggggcatgatgacttg

SEQ ID NO: 78587 - DNA, 22 bp, synthetic construct
  misc_feature 1..22: note = chemically synthesized
  source 1..22: mol_type = other DNA
gacttggggcatgatgacttga

SEQ ID NO: 78588 - DNA, 22 bp, synthetic construct
  misc_feature 1..22: note = chemically synthesized
  source 1..22: mol_type = other DNA
acttggggcatgatgacttgac

SEQ ID NO: 78589 - DNA, 22 bp, synthetic construct
  misc_feature 1..22: note = chemically synthesized
  source 1..22: mol_type = other DNA
ggggcatgatgacttgacttct

SEQ ID NO: 78590 - DNA, 22 bp, synthetic construct
  misc_feature 1..22: note = chemically synthesized
  source 1..22: mol_type = other DNA
gggcatgatgacttgacttctc

SEQ ID NO: 78591 - DNA, 22 bp, synthetic construct
  misc_feature 1..22: note = chemically synthesized
  source 1..22: mol_type = other DNA
gacttctctatgtttctgtttc

SEQ ID NO: 78592 - DNA, 22 bp, synthetic construct
  misc_feature 1..22: note = chemically synthesized
  source 1..22: mol_type = other DNA
acttctctatgtttctgtttct

SEQ ID NO: 78593 - DNA, 22 bp, synthetic construct
  misc_feature 1..22: note = chemically synthesized
  source 1..22: mol_type = other DNA
ctctatgtttctgtttctacat

SEQ ID NO: 78594 - DNA, 22 bp, synthetic construct
  misc_feature 1..22: note = chemically synthesized
  source 1..22: mol_type = other DNA
tctatgtttctgtttctacatt

SEQ ID NO: 78595 - DNA, 22 bp, synthetic construct
  misc_feature 1..22: note = chemically synthesized
  source 1..22: mol_type = other DNA
tatgtttctgtttctacatttg

SEQ ID NO: 78596 - DNA, 22 bp, synthetic construct
  misc_feature 1..22: note = chemically synthesized
  source 1..22: mol_type = other DNA
tgtttctgtttctacatttgta

SEQ ID NO: 78597 - DNA, 22 bp, synthetic construct
  misc_feature 1..22: note = chemically synthesized
  source 1..22: mol_type = other DNA
ctgtttctacatttgtaacatg

SEQ ID NO: 78598 - DNA, 22 bp, synthetic construct
  misc_feature 1..22: note = chemically synthesized
  source 1..22: mol_type = other DNA
tgtttctacatttgtaacatgt

SEQ ID NO: 78599 - DNA, 22 bp, synthetic construct
  misc_feature 1..22: note = chemically synthesized
  source 1..22: mol_type = other DNA
tttctacatttgtaacatgtag

SEQ ID NO: 78600 - DNA, 22 bp, synthetic construct
  misc_feature 1..22: note = chemically synthesized
  source 1..22: mol_type = other DNA
ctacatttgtaacatgtagaca

SEQ ID NO: 78601 - DNA, 22 bp, synthetic construct
  misc_feature 1..22: note = chemically synthesized
  source 1..22: mol_type = other DNA
tacatttgtaacatgtagacaa

SEQ ID NO: 78602 - DNA, 22 bp, synthetic construct
  misc_feature 1..22: note = chemically synthesized
  source 1..22: mol_type = other DNA
catttgtaacatgtagacaaac

SEQ ID NO: 78603 - DNA, 22 bp, synthetic construct
  misc_feature 1..22: note = chemically synthesized
  source 1..22: mol_type = other DNA
gtaacatgtagacaaactgata

SEQ ID NO: 78604 - DNA, 22 bp, synthetic construct
  misc_feature 1..22: note = chemically synthesized
  source 1..22: mol_type = other DNA
taacatgtagacaaactgataa

SEQ ID NO: 78605 - DNA, 22 bp, synthetic construct
  misc_feature 1..22: note = chemically synthesized
  source 1..22: mol_type = other DNA
ataatttcttcatatatttgtt

SEQ ID NO: 78606 - DNA, 22 bp, synthetic construct
  misc_feature 1..22: note = chemically synthesized
  source 1..22: mol_type = other DNA
cttcatatatttgttccgtgga

SEQ ID NO: 78607 - DNA, 22 bp, synthetic construct
  misc_feature 1..22: note = chemically synthesized
  source 1..22: mol_type = other DNA
ttcatatatttgttccgtggat

SEQ ID NO: 78608 - DNA, 22 bp, synthetic construct
  misc_feature 1..22: note = chemically synthesized
  source 1..22: mol_type = other DNA
catatatttgttccgtggatta

SEQ ID NO: 78609 - DNA, 22 bp, synthetic construct
  misc_feature 1..22: note = chemically synthesized
  source 1..22: mol_type = other DNA
atatatttgttccgtggattaa

SEQ ID NO: 78610 - DNA, 22 bp, synthetic construct
  misc_feature 1..22: note = chemically synthesized
  source 1..22: mol_type = other DNA
gttccgtggattaaatgaacta

SEQ ID NO: 78611 - DNA, 22 bp, synthetic construct
  misc_feature 1..22: note = chemically synthesized
  source 1..22: mol_type = other DNA
ttccgtggattaaatgaactaa

SEQ ID NO: 78612 - DNA, 22 bp, synthetic construct
  misc_feature 1..22: note = chemically synthesized
  source 1..22: mol_type = other DNA
cgtggattaaatgaactaatct

SEQ ID NO: 78613 - DNA, 22 bp, synthetic construct
  misc_feature 1..22: note = chemically synthesized
  source 1..22: mol_type = other DNA
aatgaactaatctatataaatc

SEQ ID NO: 78614 - DNA, 22 bp, synthetic construct
  misc_feature 1..22: note = chemically synthesized
  source 1..22: mol_type = other DNA
atctatataaatcacttagtat

SEQ ID NO: 78615 - DNA, 22 bp, synthetic construct
  misc_feature 1..22: note = chemically synthesized
  source 1..22: mol_type = other DNA
tataaatcacttagtatggtac

SEQ ID NO: 78616 - DNA, 22 bp, synthetic construct
  misc_feature 1..22: note = chemically synthesized
  source 1..22: mol_type = other DNA
agtatggtacactatagctcgt

SEQ ID NO: 78617 - DNA, 22 bp, synthetic construct
  misc_feature 1..22: note = chemically synthesized
  source 1..22: mol_type = other DNA
gtatggtacactatagctcgtg

SEQ ID NO: 78618 - DNA, 22 bp, synthetic construct
  misc_feature 1..22: note = chemically synthesized
  source 1..22: mol_type = other DNA
tagctcgtgacagagaaatttg

SEQ ID NO: 78619 - DNA, 22 bp, synthetic construct
  misc_feature 1..22: note = chemically synthesized
  source 1..22: mol_type = other DNA
gtgacagagaaatttgtgactt

SEQ ID NO: 78620 - DNA, 22 bp, synthetic construct
  misc_feature 1..22: note = chemically synthesized
  source 1..22: mol_type = other DNA
gtgactttaatttttatgtact

SEQ ID NO: 78621 - DNA, 22 bp, synthetic construct
  misc_feature 1..22: note = chemically synthesized
  source 1..22: mol_type = other DNA
tgactttaatttttatgtactt

SEQ ID NO: 78622 - DNA, 22 bp, synthetic construct
  misc_feature 1..22: note = chemically synthesized
  source 1..22: mol_type = other DNA
taatttttatgtacttgagttt

SEQ ID NO: 78623 - DNA, 22 bp, synthetic construct
  misc_feature 1..22: note = chemically synthesized
  source 1..22: mol_type = other DNA
aatttttatgtacttgagttta

SEQ ID NO: 78624 - DNA, 22 bp, synthetic construct
  misc_feature 1..22: note = chemically synthesized
  source 1..22: mol_type = other DNA
atttttatgtacttgagtttaa

SEQ ID NO: 78625 - DNA, 22 bp, synthetic construct
  misc_feature 1..22: note = chemically synthesized
  source 1..22: mol_type = other DNA
ttatgtacttgagtttaaaatt

SEQ ID NO: 78626 - DNA, 22 bp, synthetic construct
  misc_feature 1..22: note = chemically synthesized
  source 1..22: mol_type = other DNA
tatgtacttgagtttaaaatta

SEQ ID NO: 78627 - DNA, 22 bp, synthetic construct
  misc_feature 1..22: note = chemically synthesized
  source 1..22: mol_type = other DNA
atgtacttgagtttaaaattag

SEQ ID NO: 78628 - DNA, 22 bp, synthetic construct
  misc_feature 1..22: note = chemically synthesized
  source 1..22: mol_type = other DNA
tgtacttgagtttaaaattagc

SEQ ID NO: 78629 - DNA, 22 bp, synthetic construct
  misc_feature 1..22: note = chemically synthesized
  source 1..22: mol_type = other DNA
gagtttaaaattagcatttaga

SEQ ID NO: 78630 - DNA, 22 bp, synthetic construct
  misc_feature 1..22: note = chemically synthesized
  source 1..22: mol_type = other DNA
agtttaaaattagcatttagag

SEQ ID NO: 78631 - DNA, 22 bp, synthetic construct
  misc_feature 1..22: note = chemically synthesized
  source 1..22: mol_type = other DNA
aaaattagcatttagagagact

SEQ ID NO: 78632 - DNA, 22 bp, synthetic construct
  misc_feature 1..22: note = chemically synthesized
  source 1..22: mol_type = other DNA
aaattagcatttagagagactg

SEQ ID NO: 78633 - DNA, 22 bp, synthetic construct
  misc_feature 1..22: note = chemically synthesized
  source 1..22: mol_type = other DNA
gcatttagagagactgtcagga

SEQ ID NO: 78634 - DNA, 22 bp, synthetic construct
  misc_feature 1..22: note = chemically synthesized
  source 1..22: mol_type = other DNA
agagagactgtcaggaattgtg

SEQ ID NO: 78635 - DNA, 22 bp, synthetic construct
  misc_feature 1..22: note = chemically synthesized
  source 1..22: mol_type = other DNA
gagagactgtcaggaattgtga

SEQ ID NO: 78636 - DNA, 22 bp, synthetic construct
  misc_feature 1..22: note = chemically synthesized
  source 1..22: mol_type = other DNA
tcaggaattgtgaaatttgact

SEQ ID NO: 78637 - DNA, 22 bp, synthetic construct
  misc_feature 1..22: note = chemically synthesized
  source 1..22: mol_type = other DNA
tgaaatttgactgtgtattcac

SEQ ID NO: 78638 - DNA, 22 bp, synthetic construct
  misc_feature 1..22: note = chemically synthesized
  source 1..22: mol_type = other DNA
gactgtgtattcacgtattgta

SEQ ID NO: 78639 - DNA, 22 bp, synthetic construct
  misc_feature 1..22: note = chemically synthesized
  source 1..22: mol_type = other DNA
actgtgtattcacgtattgtag

SEQ ID NO: 78640 - DNA, 22 bp, synthetic construct
  misc_feature 1..22: note = chemically synthesized
  source 1..22: mol_type = other DNA
tgtattcacgtattgtagtcag

SEQ ID NO: 78641 - DNA, 22 bp, synthetic construct
  misc_feature 1..22: note = chemically synthesized
  source 1..22: mol_type = other DNA
acgtattgtagtcagatttggt

SEQ ID NO: 78642 - DNA, 22 bp, synthetic construct
  misc_feature 1..22: note = chemically synthesized
  source 1..22: mol_type = other DNA
tagtcagatttggtgaaaaagt

SEQ ID NO: 78643 - DNA, 22 bp, synthetic construct
  misc_feature 1..22: note = chemically synthesized
  source 1..22: mol_type = other DNA
ggtgaaaaagtaattacttaat

SEQ ID NO: 78644 - DNA, 22 bp, synthetic construct
  misc_feature 1..22: note = chemically synthesized
  source 1..22: mol_type = other DNA
gtgaaaaagtaattacttaata

SEQ ID NO: 78645 - DNA, 22 bp, synthetic construct
  misc_feature 1..22: note = chemically synthesized
  source 1..22: mol_type = other DNA
cttaataaaatataattactta

SEQ ID NO: 78646 - DNA, 22 bp, synthetic construct
  misc_feature 1..22: note = chemically synthesized
  source 1..22: mol_type = other DNA
aataaaatataattacttattg

SEQ ID NO: 78647 - DNA, 22 bp, synthetic construct
  misc_feature 1..22: note = chemically synthesized
  source 1..22: mol_type = other DNA
ataaaatataattacttattga

SEQ ID NO: 78648 - DNA, 22 bp, synthetic construct
  misc_feature 1..22: note = chemically synthesized
  source 1..22: mol_type = other DNA
cttattgagcaaattttactag

SEQ ID NO: 78649 - DNA, 22 bp, synthetic construct
  misc_feature 1..22: note = chemically synthesized
  source 1..22: mol_type = other DNA
attgagcaaattttactaggaa

SEQ ID NO: 78650 - DNA, 22 bp, synthetic construct
  misc_feature 1..22: note = chemically synthesized
  source 1..22: mol_type = other DNA
ttgagcaaattttactaggaac

SEQ ID NO: 78651 - DNA, 22 bp, synthetic construct
  misc_feature 1..22: note = chemically synthesized
  source 1..22: mol_type = other DNA
agcaaattttactaggaacttt

SEQ ID NO: 78652 - DNA, 22 bp, synthetic construct
  misc_feature 1..22: note = chemically synthesized
  source 1..22: mol_type = other DNA
tactaggaactttgctaattgc

SEQ ID NO: 78653 - DNA, 22 bp, synthetic construct
  misc_feature 1..22: note = chemically synthesized
  source 1..22: mol_type = other DNA
actaggaactttgctaattgct

SEQ ID NO: 78654 - DNA, 22 bp, synthetic construct
  misc_feature 1..22: note = chemically synthesized
  source 1..22: mol_type = other DNA
ctaggaactttgctaattgctt

SEQ ID NO: 78655 - DNA, 22 bp, synthetic construct
  misc_feature 1..22: note = chemically synthesized
  source 1..22: mol_type = other DNA
ggaactttgctaattgcttaat

SEQ ID NO: 78656 - DNA, 22 bp, synthetic construct
  misc_feature 1..22: note = chemically synthesized
  source 1..22: mol_type = other DNA
tgctaattgcttaatgtgcacc

SEQ ID NO: 78657 - DNA, 22 bp, synthetic construct
  misc_feature 1..22: note = chemically synthesized
  source 1..22: mol_type = other DNA
gctaattgcttaatgtgcacca

SEQ ID NO: 78658 - DNA, 22 bp, synthetic construct
  misc_feature 1..22: note = chemically synthesized
  source 1..22: mol_type = other DNA
ctaattgcttaatgtgcaccat

SEQ ID NO: 78659 - DNA, 22 bp, synthetic construct
  misc_feature 1..22: note = chemically synthesized
  source 1..22: mol_type = other DNA
attgcttaatgtgcaccatttc

SEQ ID NO: 78660 - DNA, 22 bp, synthetic construct
  misc_feature 1..22: note = chemically synthesized
  source 1..22: mol_type = other DNA
cttaatgtgcaccatttcattt

SEQ ID NO: 78661 - DNA, 22 bp, synthetic construct
  misc_feature 1..22: note = chemically synthesized
  source 1..22: mol_type = other DNA
aatgtgcaccatttcatttaat

SEQ ID NO: 78662 - DNA, 22 bp, synthetic construct
  misc_feature 1..22: note = chemically synthesized
  source 1..22: mol_type = other DNA
atgtgcaccatttcatttaatc

SEQ ID NO: 78663 - DNA, 22 bp, synthetic construct
  misc_feature 1..22: note = chemically synthesized
  source 1..22: mol_type = other DNA
catttaatcttcaagatcataa

SEQ ID NO: 78664 - DNA, 22 bp, synthetic construct
  misc_feature 1..22: note = chemically synthesized
  source 1..22: mol_type = other DNA
atttaatcttcaagatcataaa

SEQ ID NO: 78665 - DNA, 22 bp, synthetic construct
  misc_feature 1..22: note = chemically synthesized
  source 1..22: mol_type = other DNA
aatcttcaagatcataaaagct

SEQ ID NO: 78666 - DNA, 22 bp, synthetic construct
  misc_feature 1..22: note = chemically synthesized
  source 1..22: mol_type = other DNA
atcttcaagatcataaaagctg

SEQ ID NO: 78667 - DNA, 22 bp, synthetic construct
  misc_feature 1..22: note = chemically synthesized
  source 1..22: mol_type = other DNA
caagatcataaaagctggattt

SEQ ID NO: 78668 - DNA, 22 bp, synthetic construct
  misc_feature 1..22: note = chemically synthesized
  source 1..22: mol_type = other DNA
aagatcataaaagctggatttt

SEQ ID NO: 78669 - DNA, 22 bp, synthetic construct
  misc_feature 1..22: note = chemically synthesized
  source 1..22: mol_type = other DNA
gattttattttcttattcattt

SEQ ID NO: 78670 - DNA, 22 bp, synthetic construct
  misc_feature 1..22: note = chemically synthesized
  source 1..22: mol_type = other DNA
tattttcttattcatttataaa

SEQ ID NO: 78671 - DNA, 22 bp, synthetic construct
  misc_feature 1..22: note = chemically synthesized
  source 1..22: mol_type = other DNA
attttcttattcatttataaat

SEQ ID NO: 78672 - DNA, 22 bp, synthetic construct
  misc_feature 1..22: note = chemically synthesized
  source 1..22: mol_type = other DNA
ttttcttattcatttataaatg

SEQ ID NO: 78673 - DNA, 22 bp, synthetic construct
  misc_feature 1..22: note = chemically synthesized
  source 1..22: mol_type = other DNA
tcttattcatttataaatgaat

SEQ ID NO: 78674 - DNA, 22 bp, synthetic construct
  misc_feature 1..22: note = chemically synthesized
  source 1..22: mol_type = other DNA
cttattcatttataaatgaata

SEQ ID NO: 78675 - DNA, 22 bp, synthetic construct
  misc_feature 1..22: note = chemically synthesized
  source 1..22: mol_type = other DNA
ttattcatttataaatgaataa

SEQ ID NO: 78676 - DNA, 22 bp, synthetic construct
  misc_feature 1..22: note = chemically synthesized
  source 1..22: mol_type = other DNA
attcatttataaatgaataaat

SEQ ID NO: 78677 - DNA, 22 bp, synthetic construct
  misc_feature 1..22: note = chemically synthesized
  source 1..22: mol_type = other DNA
ttcatttataaatgaataaatt

SEQ ID NO: 78678 - DNA, 22 bp, synthetic construct
  misc_feature 1..22: note = chemically synthesized
  source 1..22: mol_type = other DNA
atttataaatgaataaattata

SEQ ID NO: 78679 - DNA, 22 bp, synthetic construct
  misc_feature 1..22: note = chemically synthesized
  source 1..22: mol_type = other DNA
ataaatgaataaattatattca

SEQ ID NO: 78680 - DNA, 22 bp, synthetic construct
  misc_feature 1..22: note = chemically synthesized
  source 1..22: mol_type = other DNA
taaatgaataaattatattcaa

SEQ ID NO: 78681 - DNA, 22 bp, synthetic construct
  misc_feature 1..22: note = chemically synthesized
  source 1..22: mol_type = other DNA
tattcaaacaggtcatactact

SEQ ID NO: 78682 - DNA, 22 bp, synthetic construct
  misc_feature 1..22: note = chemically synthesized
  source 1..22: mol_type = other DNA
aaacaggtcatactactagcaa

SEQ ID NO: 78683 - DNA, 22 bp, synthetic construct
  misc_feature 1..22: note = chemically synthesized
  source 1..22: mol_type = other DNA
ctagcaagatcccacaattact

SEQ ID NO: 78684 - DNA, 22 bp, synthetic construct
  misc_feature 1..22: note = chemically synthesized
  source 1..22: mol_type = other DNA
gcaagatcccacaattactaat

SEQ ID NO: 78685 - DNA, 22 bp, synthetic construct
  misc_feature 1..22: note = chemically synthesized
  source 1..22: mol_type = other DNA
ctaatagcaagatagctaagat

SEQ ID NO: 78686 - DNA, 22 bp, synthetic construct
  misc_feature 1..22: note = chemically synthesized
  source 1..22: mol_type = other DNA
atagcaagatagctaagatttc

SEQ ID NO: 78687 - DNA, 22 bp, synthetic construct
  misc_feature 1..22: note = chemically synthesized
  source 1..22: mol_type = other DNA
agatttcaacctaggtacatct

SEQ ID NO: 78688 - DNA, 22 bp, synthetic construct
  misc_feature 1..22: note = chemically synthesized
  source 1..22: mol_type = other DNA
caacctaggtacatctggttca

SEQ ID NO: 78689 - DNA, 22 bp, synthetic construct
  misc_feature 1..22: note = chemically synthesized
  source 1..22: mol_type = other DNA
aacctaggtacatctggttcaa

SEQ ID NO: 78690 - DNA, 22 bp, synthetic construct
  misc_feature 1..22: note = chemically synthesized
  source 1..22: mol_type = other DNA
ggtacatctggttcaagtgtat

SEQ ID NO: 78691 - DNA, 22 bp, synthetic construct
  misc_feature 1..22: note = chemically synthesized
  source 1..22: mol_type = other DNA
gttcaagtgtataacatcacac

SEQ ID NO: 78692 - DNA, 22 bp, synthetic construct
  misc_feature 1..22: note = chemically synthesized
  source 1..22: mol_type = other DNA
aagtgtataacatcacactgag

SEQ ID NO: 78693 - DNA, 22 bp, synthetic construct
  misc_feature 1..22: note = chemically synthesized
  source 1..22: mol_type = other DNA
aggacttggctcttgggtgtac

SEQ ID NO: 78694 - DNA, 22 bp, synthetic construct
  misc_feature 1..22: note = chemically synthesized
  source 1..22: mol_type = other DNA
ggctcttgggtgtacaagtttt

SEQ ID NO: 78695 - DNA, 22 bp, synthetic construct
  misc_feature 1..22: note = chemically synthesized
  source 1..22: mol_type = other DNA
gctcttgggtgtacaagttttc

SEQ ID NO: 78696 - DNA, 22 bp, synthetic construct
  misc_feature 1..22: note = chemically synthesized
  source 1..22: mol_type = other DNA
ttgggtgtacaagttttccatt

SEQ ID NO: 78697 - DNA, 22 bp, synthetic construct
  misc_feature 1..22: note = chemically synthesized
  source 1..22: mol_type = other DNA
gggtgtacaagttttccattgt

SEQ ID NO: 78698 - DNA, 22 bp, synthetic construct
  misc_feature 1..22: note = chemically synthesized
  source 1..22: mol_type = other DNA
ggtgtacaagttttccattgtg

SEQ ID NO: 78699 - DNA, 22 bp, synthetic construct
  misc_feature 1..22: note = chemically synthesized
  source 1..22: mol_type = other DNA
tccattgtgtgaacttgataaa

SEQ ID NO: 78700 - DNA, 22 bp, synthetic construct
  misc_feature 1..22: note = chemically synthesized
  source 1..22: mol_type = other DNA
ccattgtgtgaacttgataaag

SEQ ID NO: 78701 - DNA, 22 bp, synthetic construct
  misc_feature 1..22: note = chemically synthesized
  source 1..22: mol_type = other DNA
cattgtgtgaacttgataaagt

SEQ ID NO: 78702 - DNA, 22 bp, synthetic construct
  misc_feature 1..22: note = chemically synthesized
  source 1..22: mol_type = other DNA
tgtgaacttgataaagttacaa

SEQ ID NO: 78703 - DNA, 22 bp, synthetic construct
  misc_feature 1..22: note = chemically synthesized
  source 1..22: mol_type = other DNA
gataaagttacaaaaattatct

SEQ ID NO: 78704 - DNA, 22 bp, synthetic construct
  misc_feature 1..22: note = chemically synthesized
  source 1..22: mol_type = other DNA
ataaagttacaaaaattatctc

SEQ ID NO: 78705 - DNA, 22 bp, synthetic construct
  misc_feature 1..22: note = chemically synthesized
  source 1..22: mol_type = other DNA
caaaaattatctcttagttttt

SEQ ID NO: 78706 - DNA, 22 bp, synthetic construct
  misc_feature 1..22: note = chemically synthesized
  source 1..22: mol_type = other DNA
tctcttagttttttcatgtata

SEQ ID NO: 78707 - DNA, 22 bp, synthetic construct
  misc_feature 1..22: note = chemically synthesized
  source 1..22: mol_type = other DNA
ttagttttttcatgtataccat

SEQ ID NO: 78708 - DNA, 22 bp, synthetic construct
  misc_feature 1..22: note = chemically synthesized
  source 1..22: mol_type = other DNA
agttttttcatgtataccataa

SEQ ID NO: 78709 - DNA, 22 bp, synthetic construct
  misc_feature 1..22: note = chemically synthesized
  source 1..22: mol_type = other DNA
gttttttcatgtataccataag

SEQ ID NO: 78710 - DNA, 22 bp, synthetic construct
  misc_feature 1..22: note = chemically synthesized
  source 1..22: mol_type = other DNA
tttcatgtataccataagaata

SEQ ID NO: 78711 - DNA, 22 bp, synthetic construct
  misc_feature 1..22: note = chemically synthesized
  source 1..22: mol_type = other DNA
ttcatgtataccataagaatag

SEQ ID NO: 78712 - DNA, 22 bp, synthetic construct
  misc_feature 1..22: note = chemically synthesized
  source 1..22: mol_type = other DNA
tcatgtataccataagaatagt

SEQ ID NO: 78713 - DNA, 22 bp, synthetic construct
  misc_feature 1..22: note = chemically synthesized
  source 1..22: mol_type = other DNA
catgtataccataagaatagta

SEQ ID NO: 78714 - DNA, 22 bp, synthetic construct
  misc_feature 1..22: note = chemically synthesized
  source 1..22: mol_type = other DNA
atgtataccataagaatagtaa

SEQ ID NO: 78715 - DNA, 22 bp, synthetic construct
  misc_feature 1..22: note = chemically synthesized
  source 1..22: mol_type = other DNA
taatggaggttaccaataatta

SEQ ID NO: 78716 - DNA, 22 bp, synthetic construct
  misc_feature 1..22: note = chemically synthesized
  source 1..22: mol_type = other DNA
ccaataattattgttaaggaag

SEQ ID NO: 78717 - DNA, 22 bp, synthetic construct
  misc_feature 1..22: note = chemically synthesized
  source 1..22: mol_type = other DNA
ttgttaaggaagggcttctaaa

SEQ ID NO: 78718 - DNA, 22 bp, synthetic construct
  misc_feature 1..22: note = chemically synthesized
  source 1..22: mol_type = other DNA
ttaaggaagggcttctaaatta

SEQ ID NO: 78719 - DNA, 22 bp, synthetic construct
  misc_feature 1..22: note = chemically synthesized
  source 1..22: mol_type = other DNA
aggaagggcttctaaattactc

SEQ ID NO: 78720 - DNA, 22 bp, synthetic construct
  misc_feature 1..22: note = chemically synthesized
  source 1..22: mol_type = other DNA
ctaaattactctgaaattttga

SEQ ID NO: 78721 - DNA, 22 bp, synthetic construct
  misc_feature 1..22: note = chemically synthesized
  source 1..22: mol_type = other DNA
taaattactctgaaattttgag

SEQ ID NO: 78722 - DNA, 22 bp, synthetic construct
  misc_feature 1..22: note = chemically synthesized
  source 1..22: mol_type = other DNA
aattactctgaaattttgagaa

SEQ ID NO: 78723 - DNA, 22 bp, synthetic construct
  misc_feature 1..22: note = chemically synthesized
  source 1..22: mol_type = other DNA
ctctgaaattttgagaattttt

SEQ ID NO: 78724 - DNA, 22 bp, synthetic construct
  misc_feature 1..22: note = chemically synthesized
  source 1..22: mol_type = other DNA
tgaaattttgagaatttttttt

SEQ ID NO: 78725 - DNA, 22 bp, synthetic construct
  misc_feature 1..22: note = chemically synthesized
  source 1..22: mol_type = other DNA
aaattttgagaattttttttta

SEQ ID NO: 78726 - DNA, 22 bp, synthetic construct
  misc_feature 1..22: note = chemically synthesized
  source 1..22: mol_type = other DNA
tgagaatttttttttaaatccc

SEQ ID NO: 78727 - DNA, 22 bp, synthetic construct
  misc_feature 1..22: note = chemically synthesized
  source 1..22: mol_type = other DNA
gagaatttttttttaaatccca

SEQ ID NO: 78728 - DNA, 22 bp, synthetic construct
  misc_feature 1..22: note = chemically synthesized
  source 1..22: mol_type = other DNA
agaatttttttttaaatcccat

SEQ ID NO: 78729 - DNA, 22 bp, synthetic construct
  misc_feature 1..22: note = chemically synthesized
  source 1..22: mol_type = other DNA
ttttttaaatcccatgttgttt

SEQ ID NO: 78730 - DNA, 22 bp, synthetic construct
  misc_feature 1..22: note = chemically synthesized
  source 1..22: mol_type = other DNA
tttttaaatcccatgttgtttt

SEQ ID NO: 78731 - DNA, 22 bp, synthetic construct
  misc_feature 1..22: note = chemically synthesized
  source 1..22: mol_type = other DNA
ttttaaatcccatgttgttttt

SEQ ID NO: 78732 - DNA, 22 bp, synthetic construct
  misc_feature 1..22: note = chemically synthesized
  source 1..22: mol_type = other DNA
tttaaatcccatgttgttttta

SEQ ID NO: 78733 - DNA, 22 bp, synthetic construct
  misc_feature 1..22: note = chemically synthesized
  source 1..22: mol_type = other DNA
ttaaatcccatgttgtttttat

SEQ ID NO: 78734 - DNA, 22 bp, synthetic construct
  misc_feature 1..22: note = chemically synthesized
  source 1..22: mol_type = other DNA
taaatcccatgttgtttttatg

SEQ ID NO: 78735 - DNA, 22 bp, synthetic construct
  misc_feature 1..22: note = chemically synthesized
  source 1..22: mol_type = other DNA
aaatcccatgttgtttttatga

SEQ ID NO: 78736 - DNA, 22 bp, synthetic construct
  misc_feature 1..22: note = chemically synthesized
  source 1..22: mol_type = other DNA
aatcccatgttgtttttatgac

SEQ ID NO: 78737 - DNA, 22 bp, synthetic construct
  misc_feature 1..22: note = chemically synthesized
  source 1..22: mol_type = other DNA
tttttatgacttcactacattg

SEQ ID NO: 78738 - DNA, 22 bp, synthetic construct
  misc_feature 1..22: note = chemically synthesized
  source 1..22: mol_type = other DNA
ttatgacttcactacattgaac

SEQ ID NO: 78739 - DNA, 22 bp, synthetic construct
  misc_feature 1..22: note = chemically synthesized
  source 1..22: mol_type = other DNA
tatgacttcactacattgaaca

SEQ ID NO: 78740 - DNA, 22 bp, synthetic construct
  misc_feature 1..22: note = chemically synthesized
  source 1..22: mol_type = other DNA
atgacttcactacattgaacac

SEQ ID NO: 78741 - DNA, 22 bp, synthetic construct
  misc_feature 1..22: note = chemically synthesized
  source 1..22: mol_type = other DNA
tgacttcactacattgaacact

SEQ ID NO: 78742 - DNA, 22 bp, synthetic construct
  misc_feature 1..22: note = chemically synthesized
  source 1..22: mol_type = other DNA
cactacattgaacactttcaaa

SEQ ID NO: 78743 - DNA, 22 bp, synthetic construct
  misc_feature 1..22: note = chemically synthesized
  source 1..22: mol_type = other DNA
actacattgaacactttcaaag

SEQ ID NO: 78744 - DNA, 22 bp, synthetic construct
  misc_feature 1..22: note = chemically synthesized
  source 1..22: mol_type = other DNA
cattgaacactttcaaaggtgt

SEQ ID NO: 78745 - DNA, 22 bp, synthetic construct
  misc_feature 1..22: note = chemically synthesized
  source 1..22: mol_type = other DNA
aacactttcaaaggtgtttcat

SEQ ID NO: 78746 - DNA, 22 bp, synthetic construct
  misc_feature 1..22: note = chemically synthesized
  source 1..22: mol_type = other DNA
tcaaaggtgtttcatacattaa

SEQ ID NO: 78747 - DNA, 22 bp, synthetic construct
  misc_feature 1..22: note = chemically synthesized
  source 1..22: mol_type = other DNA
caaaggtgtttcatacattaaa

SEQ ID NO: 78748 - DNA, 22 bp, synthetic construct
  misc_feature 1..22: note = chemically synthesized
  source 1..22: mol_type = other DNA
aaaggtgtttcatacattaaaa

SEQ ID NO: 78749 - DNA, 22 bp, synthetic construct
  misc_feature 1..22: note = chemically synthesized
  source 1..22: mol_type = other DNA
catacattaaaaattttttaag

SEQ ID NO: 78750 - DNA, 22 bp, synthetic construct
  misc_feature 1..22: note = chemically synthesized
  source 1..22: mol_type = other DNA
atacattaaaaattttttaagt

SEQ ID NO: 78751 - DNA, 22 bp, synthetic construct
  misc_feature 1..22: note = chemically synthesized
  source 1..22: mol_type = other DNA
aaaattttttaagtccataaat

SEQ ID NO: 78752 - DNA, 22 bp, synthetic construct
  misc_feature 1..22: note = chemically synthesized
  source 1..22: mol_type = other DNA
tttaagtccataaattaatttc

SEQ ID NO: 78753 - DNA, 22 bp, synthetic construct
  misc_feature 1..22: note = chemically synthesized
  source 1..22: mol_type = other DNA
ttaagtccataaattaatttcg

SEQ ID NO: 78754 - DNA, 22 bp, synthetic construct
  misc_feature 1..22: note = chemically synthesized
  source 1..22: mol_type = other DNA
taagtccataaattaatttcga

SEQ ID NO: 78755 - DNA, 22 bp, synthetic construct
  misc_feature 1..22: note = chemically synthesized
  source 1..22: mol_type = other DNA
aagtccataaattaatttcgag

SEQ ID NO: 78756 - DNA, 22 bp, synthetic construct
  misc_feature 1..22: note = chemically synthesized
  source 1..22: mol_type = other DNA
agtccataaattaatttcgagg

SEQ ID NO: 78757 - DNA, 22 bp, synthetic construct
  misc_feature 1..22: note = chemically synthesized
  source 1..22: mol_type = other DNA
atttcgaggaaaacagaaaaaa

SEQ ID NO: 78758 - DNA, 22 bp, synthetic construct
  misc_feature 1..22: note = chemically synthesized
  source 1..22: mol_type = other DNA
cgaggaaaacagaaaaaaatat

SEQ ID NO: 78759 - DNA, 22 bp, synthetic construct
  misc_feature 1..22: note = chemically synthesized
  source 1..22: mol_type = other DNA
gaggaaaacagaaaaaaatata

SEQ ID NO: 78760 - DNA, 22 bp, synthetic construct
  misc_feature 1..22: note = chemically synthesized
  source 1..22: mol_type = other DNA
tgccactcattacttgatacat

SEQ ID NO: 78761 - DNA, 22 bp, synthetic construct
  misc_feature 1..22: note = chemically synthesized
  source 1..22: mol_type = other DNA
gccactcattacttgatacata

SEQ ID NO: 78762 - DNA, 22 bp, synthetic construct
  misc_feature 1..22: note = chemically synthesized
  source 1..22: mol_type = other DNA
ccactcattacttgatacatat

SEQ ID NO: 78763 - DNA, 22 bp, synthetic construct
  misc_feature 1..22: note = chemically synthesized
  source 1..22: mol_type = other DNA
attacttgatacatatttttat

SEQ ID NO: 78764 - DNA, 22 bp, synthetic construct
  misc_feature 1..22: note = chemically synthesized
  source 1..22: mol_type = other DNA
cttgatacatatttttatttga

SEQ ID NO: 78765 - DNA, 22 bp, synthetic construct
  misc_feature 1..22: note = chemically synthesized
  source 1..22: mol_type = other DNA
gatacatatttttatttgacca

SEQ ID NO: 78766 - DNA, 22 bp, synthetic construct
  misc_feature 1..22: note = chemically synthesized
  source 1..22: mol_type = other DNA
atacatatttttatttgaccaa

SEQ ID NO: 78767 - DNA, 22 bp, synthetic construct
  misc_feature 1..22: note = chemically synthesized
  source 1..22: mol_type = other DNA
ttatttgaccaaaccttctatt

SEQ ID NO: 78768 - DNA, 22 bp, synthetic construct
  misc_feature 1..22: note = chemically synthesized
  source 1..22: mol_type = other DNA
tatttgaccaaaccttctatta

SEQ ID NO: 78769 - DNA, 22 bp, synthetic construct
  misc_feature 1..22: note = chemically synthesized
  source 1..22: mol_type = other DNA
atttgaccaaaccttctattag

SEQ ID NO: 78770 - DNA, 22 bp, synthetic construct
  misc_feature 1..22: note = chemically synthesized
  source 1..22: mol_type = other DNA
tttgaccaaaccttctattagt

SEQ ID NO: 78771 - DNA, 22 bp, synthetic construct
  misc_feature 1..22: note = chemically synthesized
  source 1..22: mol_type = other DNA
gaccaaaccttctattagttac

SEQ ID NO: 78772 - DNA, 22 bp, synthetic construct
  misc_feature 1..22: note = chemically synthesized
  source 1..22: mol_type = other DNA
accaaaccttctattagttact

SEQ ID NO: 78773 - DNA, 22 bp, synthetic construct
  misc_feature 1..22: note = chemically synthesized
  source 1..22: mol_type = other DNA
ctattagttacttggttggctg

SEQ ID NO: 78774 - DNA, 22 bp, synthetic construct
  misc_feature 1..22: note = chemically synthesized
  source 1..22: mol_type = other DNA
tattagttacttggttggctga

SEQ ID NO: 78775 - DNA, 22 bp, synthetic construct
  misc_feature 1..22: note = chemically synthesized
  source 1..22: mol_type = other DNA
ttagttacttggttggctgata

SEQ ID NO: 78776 - DNA, 22 bp, synthetic construct
  misc_feature 1..22: note = chemically synthesized
  source 1..22: mol_type = other DNA
gttacttggttggctgataatc

SEQ ID NO: 78777 - DNA, 22 bp, synthetic construct
  misc_feature 1..22: note = chemically synthesized
  source 1..22: mol_type = other DNA
cttggttggctgataatcactc

SEQ ID NO: 78778 - DNA, 22 bp, synthetic construct
  misc_feature 1..22: note = chemically synthesized
  source 1..22: mol_type = other DNA
ggttggctgataatcactcaag

SEQ ID NO: 78779 - DNA, 22 bp, synthetic construct
  misc_feature 1..22: note = chemically synthesized
  source 1..22: mol_type = other DNA
gttggctgataatcactcaaga

SEQ ID NO: 78780 - DNA, 22 bp, synthetic construct
  misc_feature 1..22: note = chemically synthesized
  source 1..22: mol_type = other DNA
gctgataatcactcaagactgt

SEQ ID NO: 78781 - DNA, 22 bp, synthetic construct
  misc_feature 1..22: note = chemically synthesized
  source 1..22: mol_type = other DNA
ataatcactcaagactgtgtgg

SEQ ID NO: 78782 - DNA, 22 bp, synthetic construct
  misc_feature 1..22: note = chemically synthesized
  source 1..22: mol_type = other DNA
aagactgtgtggtttaatagga

SEQ ID NO: 78783 - DNA, 22 bp, synthetic construct
  misc_feature 1..22: note = chemically synthesized
  source 1..22: mol_type = other DNA
tgtggtttaataggatattcac

SEQ ID NO: 78784 - DNA, 22 bp, synthetic construct
  misc_feature 1..22: note = chemically synthesized
  source 1..22: mol_type = other DNA
aataggatattcactgtggttc

SEQ ID NO: 78785 - DNA, 22 bp, synthetic construct
  misc_feature 1..22: note = chemically synthesized
  source 1..22: mol_type = other DNA
ataggatattcactgtggttca

SEQ ID NO: 78786 - DNA, 22 bp, synthetic construct
  misc_feature 1..22: note = chemically synthesized
  source 1..22: mol_type = other DNA
actgtggttcatggaaattcaa

SEQ ID NO: 78787 - DNA, 22 bp, synthetic construct
  misc_feature 1..22: note = chemically synthesized
  source 1..22: mol_type = other DNA
tggttcatggaaattcaaaatt

SEQ ID NO: 78788 - DNA, 22 bp, synthetic construct
  misc_feature 1..22: note = chemically synthesized
  source 1..22: mol_type = other DNA
atggaaattcaaaattatctga

SEQ ID NO: 78789 - DNA, 22 bp, synthetic construct
  misc_feature 1..22: note = chemically synthesized
  source 1..22: mol_type = other DNA
aaaattatctgaagaaaacaaa

SEQ ID NO: 78790 - DNA, 22 bp, synthetic construct
  misc_feature 1..22: note = chemically synthesized
  source 1..22: mol_type = other DNA
tctgaagaaaacaaaaagttgg

SEQ ID NO: 78791 - DNA, 22 bp, synthetic construct
  misc_feature 1..22: note = chemically synthesized
  source 1..22: mol_type = other DNA
aagaaaacaaaaagttgggctc

SEQ ID NO: 78792 - DNA, 22 bp, synthetic construct
  misc_feature 1..22: note = chemically synthesized
  source 1..22: mol_type = other DNA
ggctctgcaatccctgtctgag

SEQ ID NO: 78793 - DNA, 22 bp, synthetic construct
  misc_feature 1..22: note = chemically synthesized
  source 1..22: mol_type = other DNA
tgcaatccctgtctgagggatt

SEQ ID NO: 78794 - DNA, 22 bp, synthetic construct
  misc_feature 1..22: note = chemically synthesized
  source 1..22: mol_type = other DNA
caatccctgtctgagggatttt

SEQ ID NO: 78795 - DNA, 22 bp, synthetic construct
  misc_feature 1..22: note = chemically synthesized
  source 1..22: mol_type = other DNA
tctgagggattttctagaattc

SEQ ID NO: 78796 - DNA, 22 bp, synthetic construct
  misc_feature 1..22: note = chemically synthesized
  source 1..22: mol_type = other DNA
agggattttctagaattcttct

SEQ ID NO: 78797 - DNA, 22 bp, synthetic construct
  misc_feature 1..22: note = chemically synthesized
  source 1..22: mol_type = other DNA
tctagaattcttctggtcctcc

SEQ ID NO: 78798 - DNA, 22 bp, synthetic construct
  misc_feature 1..22: note = chemically synthesized
  source 1..22: mol_type = other DNA
ctagaattcttctggtcctccc

SEQ ID NO: 78799 - DNA, 22 bp, synthetic construct
  misc_feature 1..22: note = chemically synthesized
  source 1..22: mol_type = other DNA
tagaattcttctggtcctccct

SEQ ID NO: 78800 - DNA, 22 bp, synthetic construct
  misc_feature 1..22: note = chemically synthesized
  source 1..22: mol_type = other DNA
gaattcttctggtcctccctac

SEQ ID NO: 78801 - DNA, 22 bp, synthetic construct
  misc_feature 1..22: note = chemically synthesized
  source 1..22: mol_type = other DNA
ttctggtcctccctaccttttt

SEQ ID NO: 78802 - DNA, 22 bp, synthetic construct
  misc_feature 1..22: note = chemically synthesized
  source 1..22: mol_type = other DNA
ctggtcctccctacctttttgt

SEQ ID NO: 78803 - DNA, 22 bp, synthetic construct
  misc_feature 1..22: note = chemically synthesized
  source 1..22: mol_type = other DNA
tggtcctccctacctttttgtt

SEQ ID NO: 78804 - DNA, 22 bp, synthetic construct
  misc_feature 1..22: note = chemically synthesized
  source 1..22: mol_type = other DNA
gtcctccctacctttttgtttg

SEQ ID NO: 78805 - DNA, 22 bp, synthetic construct
  misc_feature 1..22: note = chemically synthesized
  source 1..22: mol_type = other DNA
cctacctttttgtttgtcagaa

SEQ ID NO: 78806 - DNA, 22 bp, synthetic construct
  misc_feature 1..22: note = chemically synthesized
  source 1..22: mol_type = other DNA
cctttttgtttgtcagaagctt

SEQ ID NO: 78807 - DNA, 22 bp, synthetic construct
  misc_feature 1..22: note = chemically synthesized
  source 1..22: mol_type = other DNA
tttgtttgtcagaagcttgtct

SEQ ID NO: 78808 - DNA, 22 bp, synthetic construct
  misc_feature 1..22: note = chemically synthesized
  source 1..22: mol_type = other DNA
ttgtttgtcagaagcttgtcta

SEQ ID NO: 78809 - DNA, 22 bp, synthetic construct
  misc_feature 1..22: note = chemically synthesized
  source 1..22: mol_type = other DNA
tgtttgtcagaagcttgtctac

SEQ ID NO: 78810 - DNA, 22 bp, synthetic construct
  misc_feature 1..22: note = chemically synthesized
  source 1..22: mol_type = other DNA
gtttgtcagaagcttgtctact

SEQ ID NO: 78811 - DNA, 22 bp, synthetic construct
  misc_feature 1..22: note = chemically synthesized
  source 1..22: mol_type = other DNA
tttgtcagaagcttgtctacta

SEQ ID NO: 78812 - DNA, 22 bp, synthetic construct
  misc_feature 1..22: note = chemically synthesized
  source 1..22: mol_type = other DNA
gtcagaagcttgtctactaccg

SEQ ID NO: 78813 - DNA, 22 bp, synthetic construct
  misc_feature 1..22: note = chemically synthesized
  source 1..22: mol_type = other DNA
tcagaagcttgtctactaccga

SEQ ID NO: 78814 - DNA, 22 bp, synthetic construct
  misc_feature 1..22: note = chemically synthesized
  source 1..22: mol_type = other DNA
gtctactaccgagtgattgatg

SEQ ID NO: 78815 - DNA, 22 bp, synthetic construct
  misc_feature 1..22: note = chemically synthesized
  source 1..22: mol_type = other DNA
tctactaccgagtgattgatgt

SEQ ID NO: 78816 - DNA, 22 bp, synthetic construct
  misc_feature 1..22: note = chemically synthesized
  source 1..22: mol_type = other DNA
ctaccgagtgattgatgtcacc

SEQ ID NO: 78817 - DNA, 22 bp, synthetic construct
  misc_feature 1..22: note = chemically synthesized
  source 1..22: mol_type = other DNA
ccgagtgattgatgtcaccaaa

SEQ ID NO: 78818 - DNA, 22 bp, synthetic construct
  misc_feature 1..22: note = chemically synthesized
  source 1..22: mol_type = other DNA
atgtcaccaaagactattgcag

SEQ ID NO: 78819 - DNA, 22 bp, synthetic construct
  misc_feature 1..22: note = chemically synthesized
  source 1..22: mol_type = other DNA
ttgcaggagtaggccttgcttt

SEQ ID NO: 78820 - DNA, 22 bp, synthetic construct
  misc_feature 1..22: note = chemically synthesized
  source 1..22: mol_type = other DNA
caggagtaggccttgctttttc

SEQ ID NO: 78821 - DNA, 22 bp, synthetic construct
  misc_feature 1..22: note = chemically synthesized
  source 1..22: mol_type = other DNA
gctttttctgttttttagttat

SEQ ID NO: 78822 - DNA, 22 bp, synthetic construct
  misc_feature 1..22: note = chemically synthesized
  source 1..22: mol_type = other DNA
ctttttctgttttttagttatt

SEQ ID NO: 78823 - DNA, 22 bp, synthetic construct
  misc_feature 1..22: note = chemically synthesized
  source 1..22: mol_type = other DNA
tttctgttttttagttattttc

SEQ ID NO: 78824 - DNA, 22 bp, synthetic construct
  misc_feature 1..22: note = chemically synthesized
  source 1..22: mol_type = other DNA
ttctgttttttagttattttct

SEQ ID NO: 78825 - DNA, 22 bp, synthetic construct
  misc_feature 1..22: note = chemically synthesized
  source 1..22: mol_type = other DNA
tctgttttttagttattttctt

SEQ ID NO: 78826 - DNA, 22 bp, synthetic construct
  misc_feature 1..22: note = chemically synthesized
  source 1..22: mol_type = other DNA
ctgttttttagttattttcttc

SEQ ID NO: 78827 - DNA, 22 bp, synthetic construct
  misc_feature 1..22: note = chemically synthesized
  source 1..22: mol_type = other DNA
tgttttttagttattttcttct

SEQ ID NO: 78828 - DNA, 22 bp, synthetic construct
  misc_feature 1..22: note = chemically synthesized
  source 1..22: mol_type = other DNA
ttttttagttattttcttctaa

SEQ ID NO: 78829 - DNA, 22 bp, synthetic construct
  misc_feature 1..22: note = chemically synthesized
  source 1..22: mol_type = other DNA
tttagttattttcttctaaaac

SEQ ID NO: 78830 - DNA, 22 bp, synthetic construct
  misc_feature 1..22: note = chemically synthesized
  source 1..22: mol_type = other DNA
ttagttattttcttctaaaaca

SEQ ID NO: 78831 - DNA, 22 bp, synthetic construct
  misc_feature 1..22: note = chemically synthesized
  source 1..22: mol_type = other DNA
tagttattttcttctaaaacag

SEQ ID NO: 78832 - DNA, 22 bp, synthetic construct
  misc_feature 1..22: note = chemically synthesized
  source 1..22: mol_type = other DNA
agttattttcttctaaaacagt

SEQ ID NO: 78833 - DNA, 22 bp, synthetic construct
  misc_feature 1..22: note = chemically synthesized
  source 1..22: mol_type = other DNA
gttattttcttctaaaacagta

SEQ ID NO: 78834 - DNA, 22 bp, synthetic construct
  misc_feature 1..22: note = chemically synthesized
  source 1..22: mol_type = other DNA
ttttcttctaaaacagtatttt

SEQ ID NO: 78835 - DNA, 22 bp, synthetic construct
  misc_feature 1..22: note = chemically synthesized
  source 1..22: mol_type = other DNA
tcttctaaaacagtattttcaa

SEQ ID NO: 78836 - DNA, 22 bp, synthetic construct
  misc_feature 1..22: note = chemically synthesized
  source 1..22: mol_type = other DNA
cttctaaaacagtattttcaag

SEQ ID NO: 78837 - DNA, 22 bp, synthetic construct
  misc_feature 1..22: note = chemically synthesized
  source 1..22: mol_type = other DNA
ttctaaaacagtattttcaagt

SEQ ID NO: 78838 - DNA, 22 bp, synthetic construct
  misc_feature 1..22: note = chemically synthesized
  source 1..22: mol_type = other DNA
ctaaaacagtattttcaagtag

SEQ ID NO: 78839 - DNA, 22 bp, synthetic construct
  misc_feature 1..22: note = chemically synthesized
  source 1..22: mol_type = other DNA
taaaacagtattttcaagtagt

SEQ ID NO: 78840 - DNA, 22 bp, synthetic construct
  misc_feature 1..22: note = chemically synthesized
  source 1..22: mol_type = other DNA
aaacagtattttcaagtagttg

SEQ ID NO: 78841 - DNA, 22 bp, synthetic construct
  misc_feature 1..22: note = chemically synthesized
  source 1..22: mol_type = other DNA
tcaagtagttgtggtttttttt

SEQ ID NO: 78842 - DNA, 22 bp, synthetic construct
  misc_feature 1..22: note = chemically synthesized
  source 1..22: mol_type = other DNA
caagtagttgtggttttttttc

SEQ ID NO: 78843 - DNA, 22 bp, synthetic construct
  misc_feature 1..22: note = chemically synthesized
  source 1..22: mol_type = other DNA
aagtagttgtggttttttttct

SEQ ID NO: 78844 - DNA, 22 bp, synthetic construct
  misc_feature 1..22: note = chemically synthesized
  source 1..22: mol_type = other DNA
tggttttttttctttctagtat

SEQ ID NO: 78845 - DNA, 22 bp, synthetic construct
  misc_feature 1..22: note = chemically synthesized
  source 1..22: mol_type = other DNA
tttttctttctagtattgaact

SEQ ID NO: 78846 - DNA, 22 bp, synthetic construct
  misc_feature 1..22: note = chemically synthesized
  source 1..22: mol_type = other DNA
ttttctttctagtattgaactc

SEQ ID NO: 78847 - DNA, 22 bp, synthetic construct
  misc_feature 1..22: note = chemically synthesized
  source 1..22: mol_type = other DNA
tttctttctagtattgaactca

SEQ ID NO: 78848 - DNA, 22 bp, synthetic construct
  misc_feature 1..22: note = chemically synthesized
  source 1..22: mol_type = other DNA
ttctttctagtattgaactcat

SEQ ID NO: 78849 - DNA, 22 bp, synthetic construct
  misc_feature 1..22: note = chemically synthesized
  source 1..22: mol_type = other DNA
tctttctagtattgaactcatt

SEQ ID NO: 78850 - DNA, 22 bp, synthetic construct
  misc_feature 1..22: note = chemically synthesized
  source 1..22: mol_type = other DNA
ctttctagtattgaactcatta

SEQ ID NO: 78851 - DNA, 22 bp, synthetic construct
  misc_feature 1..22: note = chemically synthesized
  source 1..22: mol_type = other DNA
tttctagtattgaactcattaa

SEQ ID NO: 78852 - DNA, 22 bp, synthetic construct
  misc_feature 1..22: note = chemically synthesized
  source 1..22: mol_type = other DNA
tctagtattgaactcattaaaa

SEQ ID NO: 78853 - DNA, 22 bp, synthetic construct
  misc_feature 1..22: note = chemically synthesized
  source 1..22: mol_type = other DNA
ctagtattgaactcattaaaaa

SEQ ID NO: 78854 - DNA, 22 bp, synthetic construct
  misc_feature 1..22: note = chemically synthesized
  source 1..22: mol_type = other DNA
tagtattgaactcattaaaaat

SEQ ID NO: 78855 - DNA, 22 bp, synthetic construct
  misc_feature 1..22: note = chemically synthesized
  source 1..22: mol_type = other DNA
gtattgaactcattaaaaataa

SEQ ID NO: 78856 - DNA, 22 bp, synthetic construct
  misc_feature 1..22: note = chemically synthesized
  source 1..22: mol_type = other DNA
aactcattaaaaataaaatagc

SEQ ID NO: 78857 - DNA, 22 bp, synthetic construct
  misc_feature 1..22: note = chemically synthesized
  source 1..22: mol_type = other DNA
attaaaaataaaatagctttct

SEQ ID NO: 78858 - DNA, 22 bp, synthetic construct
  misc_feature 1..22: note = chemically synthesized
  source 1..22: mol_type = other DNA
aaaataaaatagctttctaaag

SEQ ID NO: 78859 - DNA, 22 bp, synthetic construct
  misc_feature 1..22: note = chemically synthesized
  source 1..22: mol_type = other DNA
tctaaagccaaacagtttcctc

SEQ ID NO: 78860 - DNA, 22 bp, synthetic construct
  misc_feature 1..22: note = chemically synthesized
  source 1..22: mol_type = other DNA
ctaaagccaaacagtttcctcc

SEQ ID NO: 78861 - DNA, 22 bp, synthetic construct
  misc_feature 1..22: note = chemically synthesized
  source 1..22: mol_type = other DNA
taaagccaaacagtttcctcct

SEQ ID NO: 78862 - DNA, 22 bp, synthetic construct
  misc_feature 1..22: note = chemically synthesized
  source 1..22: mol_type = other DNA
aagccaaacagtttcctcctga

SEQ ID NO: 78863 - DNA, 22 bp, synthetic construct
  misc_feature 1..22: note = chemically synthesized
  source 1..22: mol_type = other DNA
cctcctgaccagttaaaagtta

SEQ ID NO: 78864 - DNA, 22 bp, synthetic construct
  misc_feature 1..22: note = chemically synthesized
  source 1..22: mol_type = other DNA
ctcctgaccagttaaaagttat

SEQ ID NO: 78865 - DNA, 22 bp, synthetic construct
  misc_feature 1..22: note = chemically synthesized
  source 1..22: mol_type = other DNA
ctgaccagttaaaagttatctc

SEQ ID NO: 78866 - DNA, 22 bp, synthetic construct
  misc_feature 1..22: note = chemically synthesized
  source 1..22: mol_type = other DNA
accagttaaaagttatctctgc

SEQ ID NO: 78867 - DNA, 22 bp, synthetic construct
  misc_feature 1..22: note = chemically synthesized
  source 1..22: mol_type = other DNA
aaagttatctctgcttcatggt

SEQ ID NO: 78868 - DNA, 22 bp, synthetic construct
  misc_feature 1..22: note = chemically synthesized
  source 1..22: mol_type = other DNA
tctctgcttcatggtgcatatt

SEQ ID NO: 78869 - DNA, 22 bp, synthetic construct
  misc_feature 1..22: note = chemically synthesized
  source 1..22: mol_type = other DNA
tgcttcatggtgcatattcaat

SEQ ID NO: 78870 - DNA, 22 bp, synthetic construct
  misc_feature 1..22: note = chemically synthesized
  source 1..22: mol_type = other DNA
cttcatggtgcatattcaatta

SEQ ID NO: 78871 - DNA, 22 bp, synthetic construct
  misc_feature 1..22: note = chemically synthesized
  source 1..22: mol_type = other DNA
catggtgcatattcaattaaga

SEQ ID NO: 78872 - DNA, 22 bp, synthetic construct
  misc_feature 1..22: note = chemically synthesized
  source 1..22: mol_type = other DNA
atggtgcatattcaattaagat

SEQ ID NO: 78873 - DNA, 22 bp, synthetic construct
  misc_feature 1..22: note = chemically synthesized
  source 1..22: mol_type = other DNA
aattaagatttaacattagcac

SEQ ID NO: 78874 - DNA, 22 bp, synthetic construct
  misc_feature 1..22: note = chemically synthesized
  source 1..22: mol_type = other DNA
agatttaacattagcacactga

SEQ ID NO: 78875 - DNA, 22 bp, synthetic construct
  misc_feature 1..22: note = chemically synthesized
  source 1..22: mol_type = other DNA
aacattagcacactgagtataa

SEQ ID NO: 78876 - DNA, 22 bp, synthetic construct
  misc_feature 1..22: note = chemically synthesized
  source 1..22: mol_type = other DNA
acattagcacactgagtataat

SEQ ID NO: 78877 - DNA, 22 bp, synthetic construct
  misc_feature 1..22: note = chemically synthesized
  source 1..22: mol_type = other DNA
gcacactgagtataattttttt

SEQ ID NO: 78878 - DNA, 22 bp, synthetic construct
  misc_feature 1..22: note = chemically synthesized
  source 1..22: mol_type = other DNA
agtataatttttttaagaatct

SEQ ID NO: 78879 - DNA, 22 bp, synthetic construct
  misc_feature 1..22: note = chemically synthesized
  source 1..22: mol_type = other DNA
ttttaagaatctttttattaca

SEQ ID NO: 78880 - DNA, 22 bp, synthetic construct
  misc_feature 1..22: note = chemically synthesized
  source 1..22: mol_type = other DNA
tttaagaatctttttattacag

SEQ ID NO: 78881 - DNA, 22 bp, synthetic construct
  misc_feature 1..22: note = chemically synthesized
  source 1..22: mol_type = other DNA
ttaagaatctttttattacaga

SEQ ID NO: 78882 - DNA, 22 bp, synthetic construct
  misc_feature 1..22: note = chemically synthesized
  source 1..22: mol_type = other DNA
taagaatctttttattacagaa

SEQ ID NO: 78883 - DNA, 22 bp, synthetic construct
  misc_feature 1..22: note = chemically synthesized
  source 1..22: mol_type = other DNA
aagaatctttttattacagaaa

SEQ ID NO: 78884 - DNA, 22 bp, synthetic construct
  misc_feature 1..22: note = chemically synthesized
  source 1..22: mol_type = other DNA
agaatctttttattacagaaat

SEQ ID NO: 78885 - DNA, 22 bp, synthetic construct
  misc_feature 1..22: note = chemically synthesized
  source 1..22: mol_type = other DNA
tttattacagaaattgtaaact

SEQ ID NO: 78886 - DNA, 22 bp, synthetic construct
  misc_feature 1..22: note = chemically synthesized
  source 1..22: mol_type = other DNA
ttattacagaaattgtaaacta

SEQ ID NO: 78887 - DNA, 22 bp, synthetic construct
  misc_feature 1..22: note = chemically synthesized
  source 1..22: mol_type = other DNA
tattacagaaattgtaaactac

SEQ ID NO: 78888 - DNA, 22 bp, synthetic construct
  misc_feature 1..22: note = chemically synthesized
  source 1..22: mol_type = other DNA
attacagaaattgtaaactaca

SEQ ID NO: 78889 - DNA, 22 bp, synthetic construct
  misc_feature 1..22: note = chemically synthesized
  source 1..22: mol_type = other DNA
ttacagaaattgtaaactacac

SEQ ID NO: 78890 - DNA, 22 bp, synthetic construct
  misc_feature 1..22: note = chemically synthesized
  source 1..22: mol_type = other DNA
cagaaattgtaaactacacaaa

SEQ ID NO: 78891 - DNA, 22 bp, synthetic construct
  misc_feature 1..22: note = chemically synthesized
  source 1..22: mol_type = other DNA
taaactacacaaagtaaacaga

SEQ ID NO: 78892 - DNA, 22 bp, synthetic construct
  misc_feature 1..22: note = chemically synthesized
  source 1..22: mol_type = other DNA
cacaaagtaaacagaatattat

SEQ ID NO: 78893 - DNA, 22 bp, synthetic construct
  misc_feature 1..22: note = chemically synthesized
  source 1..22: mol_type = other DNA
taattaatttccaggcacccat

SEQ ID NO: 78894 - DNA, 22 bp, synthetic construct
  misc_feature 1..22: note = chemically synthesized
  source 1..22: mol_type = other DNA
atttccaggcacccatgacaca

SEQ ID NO: 78895 - DNA, 22 bp, synthetic construct
  misc_feature 1..22: note = chemically synthesized
  source 1..22: mol_type = other DNA
ccaggcacccatgacacaactt

SEQ ID NO: 78896 - DNA, 22 bp, synthetic construct
  misc_feature 1..22: note = chemically synthesized
  source 1..22: mol_type = other DNA
caggcacccatgacacaacttc

SEQ ID NO: 78897 - DNA, 22 bp, synthetic construct
  misc_feature 1..22: note = chemically synthesized
  source 1..22: mol_type = other DNA
caacaattatcaacattacacc

SEQ ID NO: 78898 - DNA, 22 bp, synthetic construct
  misc_feature 1..22: note = chemically synthesized
  source 1..22: mol_type = other DNA
aacaattatcaacattacacca

SEQ ID NO: 78899 - DNA, 22 bp, synthetic construct
  misc_feature 1..22: note = chemically synthesized
  source 1..22: mol_type = other DNA
tcaacattacaccattcttgta

SEQ ID NO: 78900 - DNA, 22 bp, synthetic construct
  misc_feature 1..22: note = chemically synthesized
  source 1..22: mol_type = other DNA
caccattcttgtattttccaca

SEQ ID NO: 78901 - DNA, 22 bp, synthetic construct
  misc_feature 1..22: note = chemically synthesized
  source 1..22: mol_type = other DNA
ttgtattttccacacttgtatt

SEQ ID NO: 78902 - DNA, 22 bp, synthetic construct
  misc_feature 1..22: note = chemically synthesized
  source 1..22: mol_type = other DNA
gtattttccacacttgtattca

SEQ ID NO: 78903 - DNA, 22 bp, synthetic construct
  misc_feature 1..22: note = chemically synthesized
  source 1..22: mol_type = other DNA
tattttccacacttgtattcac

SEQ ID NO: 78904 - DNA, 22 bp, synthetic construct
  misc_feature 1..22: note = chemically synthesized
  source 1..22: mol_type = other DNA
tccacacttgtattcactatga

SEQ ID NO: 78905 - DNA, 22 bp, synthetic construct
  misc_feature 1..22: note = chemically synthesized
  source 1..22: mol_type = other DNA
ccacacttgtattcactatgaa

SEQ ID NO: 78906 - DNA, 22 bp, synthetic construct
  misc_feature 1..22: note = chemically synthesized
  source 1..22: mol_type = other DNA
cacacttgtattcactatgaaa

SEQ ID NO: 78907 - DNA, 22 bp, synthetic construct
  misc_feature 1..22: note = chemically synthesized
  source 1..22: mol_type = other DNA
gtattcactatgaaatctaatc

SEQ ID NO: 78908 - DNA, 22 bp, synthetic construct
  misc_feature 1..22: note = chemically synthesized
  source 1..22: mol_type = other DNA
tattcactatgaaatctaatca

SEQ ID NO: 78909 - DNA, 22 bp, synthetic construct
  misc_feature 1..22: note = chemically synthesized
  source 1..22: mol_type = other DNA
actatgaaatctaatcatctgt

SEQ ID NO: 78910 - DNA, 22 bp, synthetic construct
  misc_feature 1..22: note = chemically synthesized
  source 1..22: mol_type = other DNA
tgaaatctaatcatctgtatta

SEQ ID NO: 78911 - DNA, 22 bp, synthetic construct
  misc_feature 1..22: note = chemically synthesized
  source 1..22: mol_type = other DNA
atcatctgtattattattacta

SEQ ID NO: 78912 - DNA, 22 bp, synthetic construct
  misc_feature 1..22: note = chemically synthesized
  source 1..22: mol_type = other DNA
tattattattactattttcctt

SEQ ID NO: 78913 - DNA, 22 bp, synthetic construct
  misc_feature 1..22: note = chemically synthesized
  source 1..22: mol_type = other DNA
ttattactattttcctttttgt

SEQ ID NO: 78914 - DNA, 22 bp, synthetic construct
  misc_feature 1..22: note = chemically synthesized
  source 1..22: mol_type = other DNA
ttactattttcctttttgttat

SEQ ID NO: 78915 - DNA, 22 bp, synthetic construct
  misc_feature 1..22: note = chemically synthesized
  source 1..22: mol_type = other DNA
ctattttcctttttgttattat

SEQ ID NO: 78916 - DNA, 22 bp, synthetic construct
  misc_feature 1..22: note = chemically synthesized
  source 1..22: mol_type = other DNA
ttttcctttttgttattattat

SEQ ID NO: 78917 - DNA, 22 bp, synthetic construct
  misc_feature 1..22: note = chemically synthesized
  source 1..22: mol_type = other DNA
tcctttttgttattattatcat

SEQ ID NO: 78918 - DNA, 22 bp, synthetic construct
  misc_feature 1..22: note = chemically synthesized
  source 1..22: mol_type = other DNA
cctttttgttattattatcatt

SEQ ID NO: 78919 - DNA, 22 bp, synthetic construct
  misc_feature 1..22: note = chemically synthesized
  source 1..22: mol_type = other DNA
ctttttgttattattatcattc

SEQ ID NO: 78920 - DNA, 22 bp, synthetic construct
  misc_feature 1..22: note = chemically synthesized
  source 1..22: mol_type = other DNA
tttgttattattatcattcaga

SEQ ID NO: 78921 - DNA, 22 bp, synthetic construct
  misc_feature 1..22: note = chemically synthesized
  source 1..22: mol_type = other DNA
ttgttattattatcattcagaa

SEQ ID NO: 78922 - DNA, 22 bp, synthetic construct
  misc_feature 1..22: note = chemically synthesized
  source 1..22: mol_type = other DNA
tgttattattatcattcagaag

SEQ ID NO: 78923 - DNA, 22 bp, synthetic construct
  misc_feature 1..22: note = chemically synthesized
  source 1..22: mol_type = other DNA
gttattattatcattcagaagt

SEQ ID NO: 78924 - DNA, 22 bp, synthetic construct
  misc_feature 1..22: note = chemically synthesized
  source 1..22: mol_type = other DNA
ttattattatcattcagaagtt

SEQ ID NO: 78925 - DNA, 22 bp, synthetic construct
  misc_feature 1..22: note = chemically synthesized
  source 1..22: mol_type = other DNA
ttattatcattcagaagttttg

SEQ ID NO: 78926 - DNA, 22 bp, synthetic construct
  misc_feature 1..22: note = chemically synthesized
  source 1..22: mol_type = other DNA
ttatcattcagaagttttgatg

SEQ ID NO: 78927 - DNA, 22 bp, synthetic construct
  misc_feature 1..22: note = chemically synthesized
  source 1..22: mol_type = other DNA
tcattcagaagttttgatgtaa

SEQ ID NO: 78928 - DNA, 22 bp, synthetic construct
  misc_feature 1..22: note = chemically synthesized
  source 1..22: mol_type = other DNA
agaagttttgatgtaaaattga

SEQ ID NO: 78929 - DNA, 22 bp, synthetic construct
  misc_feature 1..22: note = chemically synthesized
  source 1..22: mol_type = other DNA
tgatgtaaaattgatgtaccta

SEQ ID NO: 78930 - DNA, 22 bp, synthetic construct
  misc_feature 1..22: note = chemically synthesized
  source 1..22: mol_type = other DNA
gatgtaaaattgatgtacctag

SEQ ID NO: 78931 - DNA, 22 bp, synthetic construct
  misc_feature 1..22: note = chemically synthesized
  source 1..22: mol_type = other DNA
atgtaaaattgatgtacctaga

SEQ ID NO: 78932 - DNA, 22 bp, synthetic construct
  misc_feature 1..22: note = chemically synthesized
  source 1..22: mol_type = other DNA
atgtacctagaaatgtgcaaat

SEQ ID NO: 78933 - DNA, 22 bp, synthetic construct
  misc_feature 1..22: note = chemically synthesized
  source 1..22: mol_type = other DNA
gaaatgtgcaaatcttagctgt

SEQ ID NO: 78934 - DNA, 22 bp, synthetic construct
  misc_feature 1..22: note = chemically synthesized
  source 1..22: mol_type = other DNA
agctgtaccgttttgacaaatt

SEQ ID NO: 78935 - DNA, 22 bp, synthetic construct
  misc_feature 1..22: note = chemically synthesized
  source 1..22: mol_type = other DNA
gctgtaccgttttgacaaattg

SEQ ID NO: 78936 - DNA, 22 bp, synthetic construct
  misc_feature 1..22: note = chemically synthesized
  source 1..22: mol_type = other DNA
taccgttttgacaaattgacaa

SEQ ID NO: 78937 - DNA, 22 bp, synthetic construct
  misc_feature 1..22: note = chemically synthesized
  source 1..22: mol_type = other DNA
tgacaaattgacaaaacaatgt

SEQ ID NO: 78938 - DNA, 22 bp, synthetic construct
  misc_feature 1..22: note = chemically synthesized
  source 1..22: mol_type = other DNA
gacaaattgacaaaacaatgtc

SEQ ID NO: 78939 - DNA, 22 bp, synthetic construct
  misc_feature 1..22: note = chemically synthesized
  source 1..22: mol_type = other DNA
acaaattgacaaaacaatgtca

SEQ ID NO: 78940 - DNA, 22 bp, synthetic construct
  misc_feature 1..22: note = chemically synthesized
  source 1..22: mol_type = other DNA
acaaaacaatgtcaccacatcc

SEQ ID NO: 78941 - DNA, 22 bp, synthetic construct
  misc_feature 1..22: note = chemically synthesized
  source 1..22: mol_type = other DNA
acacaacaaaatatttccatct

SEQ ID NO: 78942 - DNA, 22 bp, synthetic construct
  misc_feature 1..22: note = chemically synthesized
  source 1..22: mol_type = other DNA
ccatctccccagaaattgcctc

SEQ ID NO: 78943 - DNA, 22 bp, synthetic construct
  misc_feature 1..22: note = chemically synthesized
  source 1..22: mol_type = other DNA
catctccccagaaattgcctca

SEQ ID NO: 78944 - DNA, 22 bp, synthetic construct
  misc_feature 1..22: note = chemically synthesized
  source 1..22: mol_type = other DNA
cccagaaattgcctcatgtctc

SEQ ID NO: 78945 - DNA, 22 bp, synthetic construct
  misc_feature 1..22: note = chemically synthesized
  source 1..22: mol_type = other DNA
cctcatgtctctccccattctt

SEQ ID NO: 78946 - DNA, 22 bp, synthetic construct
  misc_feature 1..22: note = chemically synthesized
  source 1..22: mol_type = other DNA
atgtctctccccattcttccat

SEQ ID NO: 78947 - DNA, 22 bp, synthetic construct
  misc_feature 1..22: note = chemically synthesized
  source 1..22: mol_type = other DNA
tccccattcttccatctttata

SEQ ID NO: 78948 - DNA, 22 bp, synthetic construct
  misc_feature 1..22: note = chemically synthesized
  source 1..22: mol_type = other DNA
cccattcttccatctttatatc

SEQ ID NO: 78949 - DNA, 22 bp, synthetic construct
  misc_feature 1..22: note = chemically synthesized
  source 1..22: mol_type = other DNA
ttccatctttatatccatcaga

SEQ ID NO: 78950 - DNA, 22 bp, synthetic construct
  misc_feature 1..22: note = chemically synthesized
  source 1..22: mol_type = other DNA
ccatctttatatccatcagagg

SEQ ID NO: 78951 - DNA, 22 bp, synthetic construct
  misc_feature 1..22: note = chemically synthesized
  source 1..22: mol_type = other DNA
catctttatatccatcagaggt

SEQ ID NO: 78952 - DNA, 22 bp, synthetic construct
  misc_feature 1..22: note = chemically synthesized
  source 1..22: mol_type = other DNA
tatatccatcagaggtaagcag

SEQ ID NO: 78953 - DNA, 22 bp, synthetic construct
  misc_feature 1..22: note = chemically synthesized
  source 1..22: mol_type = other DNA
atatccatcagaggtaagcagg

SEQ ID NO: 78954 - DNA, 22 bp, synthetic construct
  misc_feature 1..22: note = chemically synthesized
  source 1..22: mol_type = other DNA
tatccatcagaggtaagcaggg

SEQ ID NO: 78955 - DNA, 22 bp, synthetic construct
  misc_feature 1..22: note = chemically synthesized
  source 1..22: mol_type = other DNA
tgattttttgacattaaattag

SEQ ID NO: 78956 - DNA, 22 bp, synthetic construct
  misc_feature 1..22: note = chemically synthesized
  source 1..22: mol_type = other DNA
attttttgacattaaattagat

SEQ ID NO: 78957 - DNA, 22 bp, synthetic construct
  misc_feature 1..22: note = chemically synthesized
  source 1..22: mol_type = other DNA
tttgacattaaattagatgtac

SEQ ID NO: 78958 - DNA, 22 bp, synthetic construct
  misc_feature 1..22: note = chemically synthesized
  source 1..22: mol_type = other DNA
ttgacattaaattagatgtaca

SEQ ID NO: 78959 - DNA, 22 bp, synthetic construct
  misc_feature 1..22: note = chemically synthesized
  source 1..22: mol_type = other DNA
tgacattaaattagatgtacat

SEQ ID NO: 78960 - DNA, 22 bp, synthetic construct
  misc_feature 1..22: note = chemically synthesized
  source 1..22: mol_type = other DNA
gacattaaattagatgtacatg

SEQ ID NO: 78961 - DNA, 22 bp, synthetic construct
  misc_feature 1..22: note = chemically synthesized
  source 1..22: mol_type = other DNA
acattaaattagatgtacatgt

SEQ ID NO: 78962 - DNA, 22 bp, synthetic construct
  misc_feature 1..22: note = chemically synthesized
  source 1..22: mol_type = other DNA
aattagatgtacatgttctgaa

SEQ ID NO: 78963 - DNA, 22 bp, synthetic construct
  misc_feature 1..22: note = chemically synthesized
  source 1..22: mol_type = other DNA
gatgtacatgttctgaaactat

SEQ ID NO: 78964 - DNA, 22 bp, synthetic construct
  misc_feature 1..22: note = chemically synthesized
  source 1..22: mol_type = other DNA
tgaaactatacaaacaaaataa

SEQ ID NO: 78965 - DNA, 22 bp, synthetic construct
  misc_feature 1..22: note = chemically synthesized
  source 1..22: mol_type = other DNA
aaactatacaaacaaaataata

SEQ ID NO: 78966 - DNA, 22 bp, synthetic construct
  misc_feature 1..22: note = chemically synthesized
  source 1..22: mol_type = other DNA
tacaaacaaaataatacaatat

SEQ ID NO: 78967 - DNA, 22 bp, synthetic construct
  misc_feature 1..22: note = chemically synthesized
  source 1..22: mol_type = other DNA
ttttgtgtcctgattattttcc

SEQ ID NO: 78968 - DNA, 22 bp, synthetic construct
  misc_feature 1..22: note = chemically synthesized
  source 1..22: mol_type = other DNA
ttgtgtcctgattattttcctt

SEQ ID NO: 78969 - DNA, 22 bp, synthetic construct
  misc_feature 1..22: note = chemically synthesized
  source 1..22: mol_type = other DNA
tgtgtcctgattattttccttc

SEQ ID NO: 78970 - DNA, 22 bp, synthetic construct
  misc_feature 1..22: note = chemically synthesized
  source 1..22: mol_type = other DNA
gtgtcctgattattttccttca

SEQ ID NO: 78971 - DNA, 22 bp, synthetic construct
  misc_feature 1..22: note = chemically synthesized
  source 1..22: mol_type = other DNA
tgtcctgattattttccttcac

SEQ ID NO: 78972 - DNA, 22 bp, synthetic construct
  misc_feature 1..22: note = chemically synthesized
  source 1..22: mol_type = other DNA
attattttccttcacaagtatg

SEQ ID NO: 78973 - DNA, 22 bp, synthetic construct
  misc_feature 1..22: note = chemically synthesized
  source 1..22: mol_type = other DNA
ttttccttcacaagtatgtatc

SEQ ID NO: 78974 - DNA, 22 bp, synthetic construct
  misc_feature 1..22: note = chemically synthesized
  source 1..22: mol_type = other DNA
tccttcacaagtatgtatcact

SEQ ID NO: 78975 - DNA, 22 bp, synthetic construct
  misc_feature 1..22: note = chemically synthesized
  source 1..22: mol_type = other DNA
ccttcacaagtatgtatcacta

SEQ ID NO: 78976 - DNA, 22 bp, synthetic construct
  misc_feature 1..22: note = chemically synthesized
  source 1..22: mol_type = other DNA
cttcacaagtatgtatcactaa

SEQ ID NO: 78977 - DNA, 22 bp, synthetic construct
  misc_feature 1..22: note = chemically synthesized
  source 1..22: mol_type = other DNA
cacaagtatgtatcactaattt

SEQ ID NO: 78978 - DNA, 22 bp, synthetic construct
  misc_feature 1..22: note = chemically synthesized
  source 1..22: mol_type = other DNA
acaagtatgtatcactaatttt

SEQ ID NO: 78979 - DNA, 22 bp, synthetic construct
  misc_feature 1..22: note = chemically synthesized
  source 1..22: mol_type = other DNA
attttaatataaccagaaactt

SEQ ID NO: 78980 - DNA, 22 bp, synthetic construct
  misc_feature 1..22: note = chemically synthesized
  source 1..22: mol_type = other DNA
taatataaccagaaacttaaac

SEQ ID NO: 78981 - DNA, 22 bp, synthetic construct
  misc_feature 1..22: note = chemically synthesized
  source 1..22: mol_type = other DNA
aatataaccagaaacttaaacc

SEQ ID NO: 78982 - DNA, 22 bp, synthetic construct
  misc_feature 1..22: note = chemically synthesized
  source 1..22: mol_type = other DNA
atataaccagaaacttaaacct

SEQ ID NO: 78983 - DNA, 22 bp, synthetic construct
  misc_feature 1..22: note = chemically synthesized
  source 1..22: mol_type = other DNA
aaacctccccaagactctttct

SEQ ID NO: 78984 - DNA, 22 bp, synthetic construct
  misc_feature 1..22: note = chemically synthesized
  source 1..22: mol_type = other DNA
aacctccccaagactctttcta

SEQ ID NO: 78985 - DNA, 22 bp, synthetic construct
  misc_feature 1..22: note = chemically synthesized
  source 1..22: mol_type = other DNA
cccaagactctttctacatatt

SEQ ID NO: 78986 - DNA, 22 bp, synthetic construct
  misc_feature 1..22: note = chemically synthesized
  source 1..22: mol_type = other DNA
tttctacatattcccagaacca

SEQ ID NO: 78987 - DNA, 22 bp, synthetic construct
  misc_feature 1..22: note = chemically synthesized
  source 1..22: mol_type = other DNA
tctacatattcccagaaccaaa

SEQ ID NO: 78988 - DNA, 22 bp, synthetic construct
  misc_feature 1..22: note = chemically synthesized
  source 1..22: mol_type = other DNA
ctacatattcccagaaccaaat

SEQ ID NO: 78989 - DNA, 22 bp, synthetic construct
  misc_feature 1..22: note = chemically synthesized
  source 1..22: mol_type = other DNA
tacatattcccagaaccaaatg

SEQ ID NO: 78990 - DNA, 22 bp, synthetic construct
  misc_feature 1..22: note = chemically synthesized
  source 1..22: mol_type = other DNA
catattcccagaaccaaatgtc

SEQ ID NO: 78991 - DNA, 22 bp, synthetic construct
  misc_feature 1..22: note = chemically synthesized
  source 1..22: mol_type = other DNA
ccagaaccaaatgtcactgaat

SEQ ID NO: 78992 - DNA, 22 bp, synthetic construct
  misc_feature 1..22: note = chemically synthesized
  source 1..22: mol_type = other DNA
aattgagtattcaaggattcag

SEQ ID NO: 78993 - DNA, 22 bp, synthetic construct
  misc_feature 1..22: note = chemically synthesized
  source 1..22: mol_type = other DNA
agtattcaaggattcagcacac

SEQ ID NO: 78994 - DNA, 22 bp, synthetic construct
  misc_feature 1..22: note = chemically synthesized
  source 1..22: mol_type = other DNA
aaggattcagcacacaaagtgt

SEQ ID NO: 78995 - DNA, 22 bp, synthetic construct
  misc_feature 1..22: note = chemically synthesized
  source 1..22: mol_type = other DNA
agcacacaaagtgtgtcatcac

SEQ ID NO: 78996 - DNA, 22 bp, synthetic construct
  misc_feature 1..22: note = chemically synthesized
  source 1..22: mol_type = other DNA
tgttctatgcctcctcccacaa

SEQ ID NO: 78997 - DNA, 22 bp, synthetic construct
  misc_feature 1..22: note = chemically synthesized
  source 1..22: mol_type = other DNA
tatgcctcctcccacaatttta

SEQ ID NO: 78998 - DNA, 22 bp, synthetic construct
  misc_feature 1..22: note = chemically synthesized
  source 1..22: mol_type = other DNA
tgcctcctcccacaattttatt

SEQ ID NO: 78999 - DNA, 22 bp, synthetic construct
  misc_feature 1..22: note = chemically synthesized
  source 1..22: mol_type = other DNA
ctcccacaattttatttcagag

SEQ ID NO: 79000 - DNA, 22 bp, synthetic construct
  misc_feature 1..22: note = chemically synthesized
  source 1..22: mol_type = other DNA
ccacaattttatttcagagtaa

SEQ ID NO: 79001 - DNA, 22 bp, synthetic construct
  misc_feature 1..22: note = chemically synthesized
  source 1..22: mol_type = other DNA
tatttcagagtaatgccatttc

SEQ ID NO: 79002 - DNA, 22 bp, synthetic construct
  misc_feature 1..22: note = chemically synthesized
  source 1..22: mol_type = other DNA
atttcagagtaatgccatttcc

SEQ ID NO: 79003 - DNA, 22 bp, synthetic construct
  misc_feature 1..22: note = chemically synthesized
  source 1..22: mol_type = other DNA
tttcagagtaatgccatttcct

SEQ ID NO: 79004 - DNA, 22 bp, synthetic construct
  misc_feature 1..22: note = chemically synthesized
  source 1..22: mol_type = other DNA
cagagtaatgccatttcctatt

SEQ ID NO: 79005 - DNA, 22 bp, synthetic construct
  misc_feature 1..22: note = chemically synthesized
  source 1..22: mol_type = other DNA
agagtaatgccatttcctattc

SEQ ID NO: 79006 - DNA, 22 bp, synthetic construct
  misc_feature 1..22: note = chemically synthesized
  source 1..22: mol_type = other DNA
cctattctcagggaaatatata

SEQ ID NO: 79007 - DNA, 22 bp, synthetic construct
  misc_feature 1..22: note = chemically synthesized
  source 1..22: mol_type = other DNA
ctattctcagggaaatatataa

SEQ ID NO: 79008 - DNA, 22 bp, synthetic construct
  misc_feature 1..22: note = chemically synthesized
  source 1..22: mol_type = other DNA
ttctcagggaaatatataaaac

SEQ ID NO: 79009 - DNA, 22 bp, synthetic construct
  misc_feature 1..22: note = chemically synthesized
  source 1..22: mol_type = other DNA
tcagggaaatatataaaactgt

SEQ ID NO: 79010 - DNA, 22 bp, synthetic construct
  misc_feature 1..22: note = chemically synthesized
  source 1..22: mol_type = other DNA
agggaaatatataaaactgttt

SEQ ID NO: 79011 - DNA, 22 bp, synthetic construct
  misc_feature 1..22: note = chemically synthesized
  source 1..22: mol_type = other DNA
ttttttttcttcatctacaaaa

SEQ ID NO: 79012 - DNA, 22 bp, synthetic construct
  misc_feature 1..22: note = chemically synthesized
  source 1..22: mol_type = other DNA
tttttcttcatctacaaaatgt

SEQ ID NO: 79013 - DNA, 22 bp, synthetic construct
  misc_feature 1..22: note = chemically synthesized
  source 1..22: mol_type = other DNA
ttttcttcatctacaaaatgtt

SEQ ID NO: 79014 - DNA, 22 bp, synthetic construct
  misc_feature 1..22: note = chemically synthesized
  source 1..22: mol_type = other DNA
tttcttcatctacaaaatgtta

SEQ ID NO: 79015 - DNA, 22 bp, synthetic construct
  misc_feature 1..22: note = chemically synthesized
  source 1..22: mol_type = other DNA
ttcttcatctacaaaatgttaa

SEQ ID NO: 79016 - DNA, 22 bp, synthetic construct
  misc_feature 1..22: note = chemically synthesized
  source 1..22: mol_type = other DNA
tcttcatctacaaaatgttaaa

SEQ ID NO: 79017 - DNA, 22 bp, synthetic construct
  misc_feature 1..22: note = chemically synthesized
  source 1..22: mol_type = other DNA
cttcatctacaaaatgttaaag

SEQ ID NO: 79018 - DNA, 22 bp, synthetic construct
  misc_feature 1..22: note = chemically synthesized
  source 1..22: mol_type = other DNA
ttcatctacaaaatgttaaagc

SEQ ID NO: 79019 - DNA, 22 bp, synthetic construct
  misc_feature 1..22: note = chemically synthesized
  source 1..22: mol_type = other DNA
catctacaaaatgttaaagctc

SEQ ID NO: 79020 - DNA, 22 bp, synthetic construct
  misc_feature 1..22: note = chemically synthesized
  source 1..22: mol_type = other DNA
atctacaaaatgttaaagctca

SEQ ID NO: 79021 - DNA, 22 bp, synthetic construct
  misc_feature 1..22: note = chemically synthesized
  source 1..22: mol_type = other DNA
caaaatgttaaagctcattaac

SEQ ID NO: 79022 - DNA, 22 bp, synthetic construct
  misc_feature 1..22: note = chemically synthesized
  source 1..22: mol_type = other DNA
aagctcattaacaagcaataat

SEQ ID NO: 79023 - DNA, 22 bp, synthetic construct
  misc_feature 1..22: note = chemically synthesized
  source 1..22: mol_type = other DNA
attaacaagcaataataagcca

SEQ ID NO: 79024 - DNA, 22 bp, synthetic construct
  misc_feature 1..22: note = chemically synthesized
  source 1..22: mol_type = other DNA
acaagcaataataagccatgga

SEQ ID NO: 79025 - DNA, 22 bp, synthetic construct
  misc_feature 1..22: note = chemically synthesized
  source 1..22: mol_type = other DNA
ttcatatttgcaaagctaatat

SEQ ID NO: 79026 - DNA, 22 bp, synthetic construct
  misc_feature 1..22: note = chemically synthesized
  source 1..22: mol_type = other DNA
tcatatttgcaaagctaatatt

SEQ ID NO: 79027 - DNA, 22 bp, synthetic construct
  misc_feature 1..22: note = chemically synthesized
  source 1..22: mol_type = other DNA
catatttgcaaagctaatattc

SEQ ID NO: 79028 - DNA, 22 bp, synthetic construct
  misc_feature 1..22: note = chemically synthesized
  source 1..22: mol_type = other DNA
atatttgcaaagctaatattca

SEQ ID NO: 79029 - DNA, 22 bp, synthetic construct
  misc_feature 1..22: note = chemically synthesized
  source 1..22: mol_type = other DNA
gcaaagctaatattcaggtaat

SEQ ID NO: 79030 - DNA, 22 bp, synthetic construct
  misc_feature 1..22: note = chemically synthesized
  source 1..22: mol_type = other DNA
caaagctaatattcaggtaata

SEQ ID NO: 79031 - DNA, 22 bp, synthetic construct
  misc_feature 1..22: note = chemically synthesized
  source 1..22: mol_type = other DNA
atattcaggtaataaagcctga

SEQ ID NO: 79032 - DNA, 22 bp, synthetic construct
  misc_feature 1..22: note = chemically synthesized
  source 1..22: mol_type = other DNA
aggtaataaagcctgatctaag

SEQ ID NO: 79033 - DNA, 22 bp, synthetic construct
  misc_feature 1..22: note = chemically synthesized
  source 1..22: mol_type = other DNA
atctaagtgcctgtgctgtcag

SEQ ID NO: 79034 - DNA, 22 bp, synthetic construct
  misc_feature 1..22: note = chemically synthesized
  source 1..22: mol_type = other DNA
agtgcctgtgctgtcagggtat

SEQ ID NO: 79035 - DNA, 22 bp, synthetic construct
  misc_feature 1..22: note = chemically synthesized
  source 1..22: mol_type = other DNA
tgctgtcagggtatcttcagtc

SEQ ID NO: 79036 - DNA, 22 bp, synthetic construct
  misc_feature 1..22: note = chemically synthesized
  source 1..22: mol_type = other DNA
tcagggtatcttcagtctccat

SEQ ID NO: 79037 - DNA, 22 bp, synthetic construct
  misc_feature 1..22: note = chemically synthesized
  source 1..22: mol_type = other DNA
cagtctccattagaactcaccc

SEQ ID NO: 79038 - DNA, 22 bp, synthetic construct
  misc_feature 1..22: note = chemically synthesized
  source 1..22: mol_type = other DNA
agtctccattagaactcacccc

SEQ ID NO: 79039 - DNA, 22 bp, synthetic construct
  misc_feature 1..22: note = chemically synthesized
  source 1..22: mol_type = other DNA
cattagaactcacccctcttcc

SEQ ID NO: 79040 - DNA, 22 bp, synthetic construct
  misc_feature 1..22: note = chemically synthesized
  source 1..22: mol_type = other DNA
gaactcacccctcttcctggat

SEQ ID NO: 79041 - DNA, 22 bp, synthetic construct
  misc_feature 1..22: note = chemically synthesized
  source 1..22: mol_type = other DNA
acccctcttcctggatagtgta

SEQ ID NO: 79042 - DNA, 22 bp, synthetic construct
  misc_feature 1..22: note = chemically synthesized
  source 1..22: mol_type = other DNA
ttcctggatagtgtaagaacaa

SEQ ID NO: 79043 - DNA, 22 bp, synthetic construct
  misc_feature 1..22: note = chemically synthesized
  source 1..22: mol_type = other DNA
cctggatagtgtaagaacaacg

SEQ ID NO: 79044 - DNA, 22 bp, synthetic construct
  misc_feature 1..22: note = chemically synthesized
  source 1..22: mol_type = other DNA
ctggatagtgtaagaacaacgc

SEQ ID NO: 79045 - DNA, 22 bp, synthetic construct
  misc_feature 1..22: note = chemically synthesized
  source 1..22: mol_type = other DNA
gatagtgtaagaacaacgctgt

SEQ ID NO: 79046 - DNA, 22 bp, synthetic construct
  misc_feature 1..22: note = chemically synthesized
  source 1..22: mol_type = other DNA
ttgcgaatttctttgattttga

SEQ ID NO: 79047 - DNA, 22 bp, synthetic construct
  misc_feature 1..22: note = chemically synthesized
  source 1..22: mol_type = other DNA
cgaatttctttgattttgatac

SEQ ID NO: 79048 - DNA, 22 bp, synthetic construct
  misc_feature 1..22: note = chemically synthesized
  source 1..22: mol_type = other DNA
ctttgattttgatactatagac

SEQ ID NO: 79049 - DNA, 22 bp, synthetic construct
  misc_feature 1..22: note = chemically synthesized
  source 1..22: mol_type = other DNA
tttgattttgatactatagaca

SEQ ID NO: 79050 - DNA, 22 bp, synthetic construct
  misc_feature 1..22: note = chemically synthesized
  source 1..22: mol_type = other DNA
tgattttgatactatagacaat

SEQ ID NO: 79051 - DNA, 22 bp, synthetic construct
  misc_feature 1..22: note = chemically synthesized
  source 1..22: mol_type = other DNA
gattttgatactatagacaatg

SEQ ID NO: 79052 - DNA, 22 bp, synthetic construct
  misc_feature 1..22: note = chemically synthesized
  source 1..22: mol_type = other DNA
attttgatactatagacaatgg

SEQ ID NO: 79053 - DNA, 22 bp, synthetic construct
  misc_feature 1..22: note = chemically synthesized
  source 1..22: mol_type = other DNA
tgatactatagacaatggggtt

SEQ ID NO: 79054 - DNA, 22 bp, synthetic construct
  misc_feature 1..22: note = chemically synthesized
  source 1..22: mol_type = other DNA
gatactatagacaatggggttg

SEQ ID NO: 79055 - DNA, 22 bp, synthetic construct
  misc_feature 1..22: note = chemically synthesized
  source 1..22: mol_type = other DNA
atactatagacaatggggttga

SEQ ID NO: 79056 - DNA, 22 bp, synthetic construct
  misc_feature 1..22: note = chemically synthesized
  source 1..22: mol_type = other DNA
tagacaatggggttgaccacag

SEQ ID NO: 79057 - DNA, 22 bp, synthetic construct
  misc_feature 1..22: note = chemically synthesized
  source 1..22: mol_type = other DNA
accacaggaggaaaaaagaggt

SEQ ID NO: 79058 - DNA, 22 bp, synthetic construct
  misc_feature 1..22: note = chemically synthesized
  source 1..22: mol_type = other DNA
gccgtgacagtctggaaaagtg

SEQ ID NO: 79059 - DNA, 22 bp, synthetic construct
  misc_feature 1..22: note = chemically synthesized
  source 1..22: mol_type = other DNA
gaaaagtggaggtaaatgccgt

SEQ ID NO: 79060 - DNA, 22 bp, synthetic construct
  misc_feature 1..22: note = chemically synthesized
  source 1..22: mol_type = other DNA
atcatgggcacatagtacacaa

SEQ ID NO: 79061 - DNA, 22 bp, synthetic construct
  misc_feature 1..22: note = chemically synthesized
  source 1..22: mol_type = other DNA
agtgcctgccaccgccctgctc

SEQ ID NO: 79062 - DNA, 22 bp, synthetic construct
  misc_feature 1..22: note = chemically synthesized
  source 1..22: mol_type = other DNA
ccaccgccctgctccagaagct

SEQ ID NO: 79063 - DNA, 22 bp, synthetic construct
  misc_feature 1..22: note = chemically synthesized
  source 1..22: mol_type = other DNA
ctccagaagctatttccagtac

SEQ ID NO: 79064 - DNA, 22 bp, synthetic construct
  misc_feature 1..22: note = chemically synthesized
  source 1..22: mol_type = other DNA
cagaagctatttccagtactgt

SEQ ID NO: 79065 - DNA, 22 bp, synthetic construct
  misc_feature 1..22: note = chemically synthesized
  source 1..22: mol_type = other DNA
tttccagtactgtatgaagaat

SEQ ID NO: 79066 - DNA, 22 bp, synthetic construct
  misc_feature 1..22: note = chemically synthesized
  source 1..22: mol_type = other DNA
ccagtactgtatgaagaatcag

SEQ ID NO: 79067 - DNA, 22 bp, synthetic construct
  misc_feature 1..22: note = chemically synthesized
  source 1..22: mol_type = other DNA
cagtactgtatgaagaatcagc

SEQ ID NO: 79068 - DNA, 22 bp, synthetic construct
  misc_feature 1..22: note = chemically synthesized
  source 1..22: mol_type = other DNA
tatgaagaatcagcacataaga

SEQ ID NO: 79069 - DNA, 22 bp, synthetic construct
  misc_feature 1..22: note = chemically synthesized
  source 1..22: mol_type = other DNA
ttgggacgtgtgtctccacagg

SEQ ID NO: 79070 - DNA, 22 bp, synthetic construct
  misc_feature 1..22: note = chemically synthesized
  source 1..22: mol_type = other DNA
ggacgtgtgtctccacagggca

SEQ ID NO: 79071 - DNA, 22 bp, synthetic construct
  misc_feature 1..22: note = chemically synthesized
  source 1..22: mol_type = other DNA
cacagggcaatttgatcagatc

SEQ ID NO: 79072 - DNA, 22 bp, synthetic construct
  misc_feature 1..22: note = chemically synthesized
  source 1..22: mol_type = other DNA
gatcagatctgagtggaggcaa

SEQ ID NO: 79073 - DNA, 22 bp, synthetic construct
  misc_feature 1..22: note = chemically synthesized
  source 1..22: mol_type = other DNA
atcagatctgagtggaggcaat

SEQ ID NO: 79074 - DNA, 22 bp, synthetic construct
  misc_feature 1..22: note = chemically synthesized
  source 1..22: mol_type = other DNA
agtggaggcaataagagtgtgt

SEQ ID NO: 79075 - DNA, 22 bp, synthetic construct
  misc_feature 1..22: note = chemically synthesized
  source 1..22: mol_type = other DNA
tggccacagaaaggcagacgcc

SEQ ID NO: 79076 - DNA, 22 bp, synthetic construct
  misc_feature 1..22: note = chemically synthesized
  source 1..22: mol_type = other DNA
aggagaaagagcagtgggagca

SEQ ID NO: 79077 - DNA, 22 bp, synthetic construct
  misc_feature 1..22: note = chemically synthesized
  source 1..22: mol_type = other DNA
cactgcgcaaggcaatggcggc

SEQ ID NO: 79078 - DNA, 22 bp, synthetic construct
  misc_feature 1..22: note = chemically synthesized
  source 1..22: mol_type = other DNA
cgcaaggcaatggcggcacccg

SEQ ID NO: 79079 - DNA, 22 bp, synthetic construct
  misc_feature 1..22: note = chemically synthesized
  source 1..22: mol_type = other DNA
tcagaatggttgtgtagcgcag

SEQ ID NO: 79080 - DNA, 22 bp, synthetic construct
  misc_feature 1..22: note = chemically synthesized
  source 1..22: mol_type = other DNA
tgtagcgcagtgggctgtagat

SEQ ID NO: 79081 - DNA, 22 bp, synthetic construct
  misc_feature 1..22: note = chemically synthesized
  source 1..22: mol_type = other DNA
tagatggccacaaagcggtcca

SEQ ID NO: 79082 - DNA, 22 bp, synthetic construct
  misc_feature 1..22: note = chemically synthesized
  source 1..22: mol_type = other DNA
acattgccagaaggacacctga

SEQ ID NO: 79083 - DNA, 22 bp, synthetic construct
  misc_feature 1..22: note = chemically synthesized
  source 1..22: mol_type = other DNA
ccagaaggacacctgactccat

SEQ ID NO: 79084 - DNA, 22 bp, synthetic construct
  misc_feature 1..22: note = chemically synthesized
  source 1..22: mol_type = other DNA
actccataagagtgaaagagtg

SEQ ID NO: 79085 - DNA, 22 bp, synthetic construct
  misc_feature 1..22: note = chemically synthesized
  source 1..22: mol_type = other DNA
cataagagtgaaagagtgcata

SEQ ID NO: 79086 - DNA, 22 bp, synthetic construct
  misc_feature 1..22: note = chemically synthesized
  source 1..22: mol_type = other DNA
gagcaggcaaccaccaaaactg

SEQ ID NO: 79087 - DNA, 22 bp, synthetic construct
  misc_feature 1..22: note = chemically synthesized
  source 1..22: mol_type = other DNA
acatcgttaatgccaaagagga

SEQ ID NO: 79088 - DNA, 22 bp, synthetic construct
  misc_feature 1..22: note = chemically synthesized
  source 1..22: mol_type = other DNA
atgccaaagaggaatatgctta

SEQ ID NO: 79089 - DNA, 22 bp, synthetic construct
  misc_feature 1..22: note = chemically synthesized
  source 1..22: mol_type = other DNA
aacacagtgggcatggtggaag

SEQ ID NO: 79090 - DNA, 22 bp, synthetic construct
  misc_feature 1..22: note = chemically synthesized
  source 1..22: mol_type = other DNA
acacagtgggcatggtggaagc

SEQ ID NO: 79091 - DNA, 22 bp, synthetic construct
  misc_feature 1..22: note = chemically synthesized
  source 1..22: mol_type = other DNA
aacaaaggccggcatggccaga

SEQ ID NO: 79092 - DNA, 22 bp, synthetic construct
  misc_feature 1..22: note = chemically synthesized
  source 1..22: mol_type = other DNA
gtgcaaggaagagtcaattcgg

SEQ ID NO: 79093 - DNA, 22 bp, synthetic construct
  misc_feature 1..22: note = chemically synthesized
  source 1..22: mol_type = other DNA
ggatgatgtgaagaatgatgcc

SEQ ID NO: 79094 - DNA, 22 bp, synthetic construct
  misc_feature 1..22: note = chemically synthesized
  source 1..22: mol_type = other DNA
cccggaaagatgatggtgtata

SEQ ID NO: 79095 - DNA, 22 bp, synthetic construct
  misc_feature 1..22: note = chemically synthesized
  source 1..22: mol_type = other DNA
ccggaaagatgatggtgtatat

SEQ ID NO: 79096 - DNA, 22 bp, synthetic construct
  misc_feature 1..22: note = chemically synthesized
  source 1..22: mol_type = other DNA
tgcctccagtcccgggatgcca

SEQ ID NO: 79097 - DNA, 22 bp, synthetic construct
  misc_feature 1..22: note = chemically synthesized
  source 1..22: mol_type = other DNA
cctccagtcccgggatgccaac

SEQ ID NO: 79098 - DNA, 22 bp, synthetic construct
  misc_feature 1..22: note = chemically synthesized
  source 1..22: mol_type = other DNA
cagtcccgggatgccaacgaga

SEQ ID NO: 79099 - DNA, 22 bp, synthetic construct
  misc_feature 1..22: note = chemically synthesized
  source 1..22: mol_type = other DNA
taggtgtgaatgttatggaacg

SEQ ID NO: 79100 - DNA, 22 bp, synthetic construct
  misc_feature 1..22: note = chemically synthesized
  source 1..22: mol_type = other DNA
tggaacgtttgaaaacgtcatg

SEQ ID NO: 79101 - DNA, 22 bp, synthetic construct
  misc_feature 1..22: note = chemically synthesized
  source 1..22: mol_type = other DNA
gaaaacgtcatggtgatacttc

SEQ ID NO: 79102 - DNA, 22 bp, synthetic construct
  misc_feature 1..22: note = chemically synthesized
  source 1..22: mol_type = other DNA
aaaacgtcatggtgatacttcc

SEQ ID NO: 79103 - DNA, 22 bp, synthetic construct
  misc_feature 1..22: note = chemically synthesized
  source 1..22: mol_type = other DNA
cctctgaagatattgagaagca

SEQ ID NO: 79104 - DNA, 22 bp, synthetic construct
  misc_feature 1..22: note = chemically synthesized
  source 1..22: mol_type = other DNA
ctctgaagatattgagaagcac

SEQ ID NO: 79105 - DNA, 22 bp, synthetic construct
  misc_feature 1..22: note = chemically synthesized
  source 1..22: mol_type = other DNA
tgaagatattgagaagcacatg

SEQ ID NO: 79106 - DNA, 22 bp, synthetic construct
  misc_feature 1..22: note = chemically synthesized
  source 1..22: mol_type = other DNA
aagatattgagaagcacatgga

SEQ ID NO: 79107 - DNA, 22 bp, synthetic construct
  misc_feature 1..22: note = chemically synthesized
  source 1..22: mol_type = other DNA
agaagcacatggagactggaat

SEQ ID NO: 79108 - DNA, 22 bp, synthetic construct
  misc_feature 1..22: note = chemically synthesized
  source 1..22: mol_type = other DNA
gaatatataagtttctactcag

SEQ ID NO: 79109 - DNA, 22 bp, synthetic construct
  misc_feature 1..22: note = chemically synthesized
  source 1..22: mol_type = other DNA
ctactcagttattgcacatcaa

SEQ ID NO: 79110 - DNA, 22 bp, synthetic construct
  misc_feature 1..22: note = chemically synthesized
  source 1..22: mol_type = other DNA
tactcagttattgcacatcaag

SEQ ID NO: 79111 - DNA, 22 bp, synthetic construct
  misc_feature 1..22: note = chemically synthesized
  source 1..22: mol_type = other DNA
ctcagttattgcacatcaagtt

SEQ ID NO: 79112 - DNA, 22 bp, synthetic construct
  misc_feature 1..22: note = chemically synthesized
  source 1..22: mol_type = other DNA
agttattgcacatcaagttctg

SEQ ID NO: 79113 - DNA, 22 bp, synthetic construct
  misc_feature 1..22: note = chemically synthesized
  source 1..22: mol_type = other DNA
ttgcacatcaagttctgagcta

SEQ ID NO: 79114 - DNA, 22 bp, synthetic construct
  misc_feature 1..22: note = chemically synthesized
  source 1..22: mol_type = other DNA
cacatcaagttctgagctaaca

SEQ ID NO: 79115 - DNA, 22 bp, synthetic construct
  misc_feature 1..22: note = chemically synthesized
  source 1..22: mol_type = other DNA
tgagctaacagtcatatctaag

SEQ ID NO: 79116 - DNA, 22 bp, synthetic construct
  misc_feature 1..22: note = chemically synthesized
  source 1..22: mol_type = other DNA
agctaacagtcatatctaagac

SEQ ID NO: 79117 - DNA, 22 bp, synthetic construct
  misc_feature 1..22: note = chemically synthesized
  source 1..22: mol_type = other DNA
acagtcatatctaagacatttc

SEQ ID NO: 79118 - DNA, 22 bp, synthetic construct
  misc_feature 1..22: note = chemically synthesized
  source 1..22: mol_type = other DNA
agacatttcctcagaaaaaggg

SEQ ID NO: 79119 - DNA, 22 bp, synthetic construct
  misc_feature 1..22: note = chemically synthesized
  source 1..22: mol_type = other DNA
cctcagaaaaagggataaaaaa

SEQ ID NO: 79120 - DNA, 22 bp, synthetic construct
  misc_feature 1..22: note = chemically synthesized
  source 1..22: mol_type = other DNA
ctcagaaaaagggataaaaaat

SEQ ID NO: 79121 - DNA, 22 bp, synthetic construct
  misc_feature 1..22: note = chemically synthesized
  source 1..22: mol_type = other DNA
agaaaaagggataaaaaattta

SEQ ID NO: 79122 - DNA, 22 bp, synthetic construct
  misc_feature 1..22: note = chemically synthesized
  source 1..22: mol_type = other DNA
atttctgaaacaagggcacagg

SEQ ID NO: 79123 - DNA, 22 bp, synthetic construct
  misc_feature 1..22: note = chemically synthesized
  source 1..22: mol_type = other DNA
tttctgaaacaagggcacaggt

SEQ ID NO: 79124 - DNA, 22 bp, synthetic construct
  misc_feature 1..22: note = chemically synthesized
  source 1..22: mol_type = other DNA
ctgaaacaagggcacaggtaag

SEQ ID NO: 79125 - DNA, 22 bp, synthetic construct
  misc_feature 1..22: note = chemically synthesized
  source 1..22: mol_type = other DNA
tgaaacaagggcacaggtaagc

SEQ ID NO: 79126 - DNA, 22 bp, synthetic construct
  misc_feature 1..22: note = chemically synthesized
  source 1..22: mol_type = other DNA
aaacaagggcacaggtaagcca

SEQ ID NO: 79127 - DNA, 22 bp, synthetic construct
  misc_feature 1..22: note = chemically synthesized
  source 1..22: mol_type = other DNA
atgggtcatgcagaaaagtatt

SEQ ID NO: 79128 - DNA, 22 bp, synthetic construct
  misc_feature 1..22: note = chemically synthesized
  source 1..22: mol_type = other DNA
caacatagcctatatgccagat

SEQ ID NO: 79129 - DNA, 22 bp, synthetic construct
  misc_feature 1..22: note = chemically synthesized
  source 1..22: mol_type = other DNA
tatgccagataaggcattaata

SEQ ID NO: 79130 - DNA, 22 bp, synthetic construct
  misc_feature 1..22: note = chemically synthesized
  source 1..22: mol_type = other DNA
atagaaatctcaagttgggtca

SEQ ID NO: 79131 - DNA, 22 bp, synthetic construct
  misc_feature 1..22: note = chemically synthesized
  source 1..22: mol_type = other DNA
aagttgggtcatctatggcagt

SEQ ID NO: 79132 - DNA, 22 bp, synthetic construct
  misc_feature 1..22: note = chemically synthesized
  source 1..22: mol_type = other DNA
ggtcatctatggcagtgaaaaa

SEQ ID NO: 79133 - DNA, 22 bp, synthetic construct
  misc_feature 1..22: note = chemically synthesized
  source 1..22: mol_type = other DNA
tggcagtgaaaaacagttaaaa

SEQ ID NO: 79134 - DNA, 22 bp, synthetic construct
  misc_feature 1..22: note = chemically synthesized
  source 1..22: mol_type = other DNA
aaataagcatagagatgacaga

SEQ ID NO: 79135 - DNA, 22 bp, synthetic construct
  misc_feature 1..22: note = chemically synthesized
  source 1..22: mol_type = other DNA
acatggaaattatgactgaaga

SEQ ID NO: 79136 - DNA, 22 bp, synthetic construct
  misc_feature 1..22: note = chemically synthesized
  source 1..22: mol_type = other DNA
tgactgaagaaactgctaactt

SEQ ID NO: 79137 - DNA, 22 bp, synthetic construct
  misc_feature 1..22: note = chemically synthesized
  source 1..22: mol_type = other DNA
aagaaactgctaacttgtagtg

SEQ ID NO: 79138 - DNA, 22 bp, synthetic construct
  misc_feature 1..22: note = chemically synthesized
  source 1..22: mol_type = other DNA
ctaacttgtagtgtttataaag

SEQ ID NO: 79139 - DNA, 22 bp, synthetic construct
  misc_feature 1..22: note = chemically synthesized
  source 1..22: mol_type = other DNA
acttgtagtgtttataaagaga

SEQ ID NO: 79140 - DNA, 22 bp, synthetic construct
  misc_feature 1..22: note = chemically synthesized
  source 1..22: mol_type = other DNA
gtagtgtttataaagagagtag

SEQ ID NO: 79141 - DNA, 22 bp, synthetic construct
  misc_feature 1..22: note = chemically synthesized
  source 1..22: mol_type = other DNA
tagtgtttataaagagagtaga

SEQ ID NO: 79142 - DNA, 22 bp, synthetic construct
  misc_feature 1..22: note = chemically synthesized
  source 1..22: mol_type = other DNA
ataaagagagtagatgaatagc

SEQ ID NO: 79143 - DNA, 22 bp, synthetic construct
  misc_feature 1..22: note = chemically synthesized
  source 1..22: mol_type = other DNA
taaagagagtagatgaatagct

SEQ ID NO: 79144 - DNA, 22 bp, synthetic construct
  misc_feature 1..22: note = chemically synthesized
  source 1..22: mol_type = other DNA
aagtaatataacactaataaag

SEQ ID NO: 79145 - DNA, 22 bp, synthetic construct
  misc_feature 1..22: note = chemically synthesized
  source 1..22: mol_type = other DNA
ataaagagtattgatggttcta

SEQ ID NO: 79146 - DNA, 22 bp, synthetic construct
  misc_feature 1..22: note = chemically synthesized
  source 1..22: mol_type = other DNA
atggttctaacatttaattgac

SEQ ID NO: 79147 - DNA, 22 bp, synthetic construct
  misc_feature 1..22: note = chemically synthesized
  source 1..22: mol_type = other DNA
taacatttaattgacgtgtaat

SEQ ID NO: 79148 - DNA, 22 bp, synthetic construct
  misc_feature 1..22: note = chemically synthesized
  source 1..22: mol_type = other DNA
acatttaattgacgtgtaatct

SEQ ID NO: 79149 - DNA, 22 bp, synthetic construct
  misc_feature 1..22: note = chemically synthesized
  source 1..22: mol_type = other DNA
aattgacgtgtaatcttgggat

SEQ ID NO: 79150 - DNA, 22 bp, synthetic construct
  misc_feature 1..22: note = chemically synthesized
  source 1..22: mol_type = other DNA
attgacgtgtaatcttgggatt

SEQ ID NO: 79151 - DNA, 22 bp, synthetic construct
  misc_feature 1..22: note = chemically synthesized
  source 1..22: mol_type = other DNA
acgtgtaatcttgggattatat

SEQ ID NO: 79152 - DNA, 22 bp, synthetic construct
  misc_feature 1..22: note = chemically synthesized
  source 1..22: mol_type = other DNA
gggattatattaaagttgattt

SEQ ID NO: 79153 - DNA, 22 bp, synthetic construct
  misc_feature 1..22: note = chemically synthesized
  source 1..22: mol_type = other DNA
ggattatattaaagttgattta

SEQ ID NO: 79154 - DNA, 22 bp, synthetic construct
  misc_feature 1..22: note = chemically synthesized
  source 1..22: mol_type = other DNA
tattaaagttgatttatattgc

SEQ ID NO: 79155 - DNA, 22 bp, synthetic construct
  misc_feature 1..22: note = chemically synthesized
  source 1..22: mol_type = other DNA
aagttgatttatattgcaagtt

SEQ ID NO: 79156 - DNA, 22 bp, synthetic construct
  misc_feature 1..22: note = chemically synthesized
  source 1..22: mol_type = other DNA
atttatattgcaagttatctga

SEQ ID NO: 79157 - DNA, 22 bp, synthetic construct
  misc_feature 1..22: note = chemically synthesized
  source 1..22: mol_type = other DNA
atattgcaagttatctgagacc

SEQ ID NO: 79158 - DNA, 22 bp, synthetic construct
  misc_feature 1..22: note = chemically synthesized
  source 1..22: mol_type = other DNA
tattgcaagttatctgagaccc

SEQ ID NO: 79159 - DNA, 22 bp, synthetic construct
  misc_feature 1..22: note = chemically synthesized
  source 1..22: mol_type = other DNA
caagttatctgagacccagata

SEQ ID NO: 79160 - DNA, 22 bp, synthetic construct
  misc_feature 1..22: note = chemically synthesized
  source 1..22: mol_type = other DNA
tctgagacccagatatttgcta

SEQ ID NO: 79161 - DNA, 22 bp, synthetic construct
  misc_feature 1..22: note = chemically synthesized
  source 1..22: mol_type = other DNA
agacccagatatttgctataaa

SEQ ID NO: 79162 - DNA, 22 bp, synthetic construct
  misc_feature 1..22: note = chemically synthesized
  source 1..22: mol_type = other DNA
gctataaagacaataatagtat

SEQ ID NO: 79163 - DNA, 22 bp, synthetic construct
  misc_feature 1..22: note = chemically synthesized
  source 1..22: mol_type = other DNA
ctataaagacaataatagtatt

SEQ ID NO: 79164 - DNA, 22 bp, synthetic construct
  misc_feature 1..22: note = chemically synthesized
  source 1..22: mol_type = other DNA
taaagacaataatagtatttta

SEQ ID NO: 79165 - DNA, 22 bp, synthetic construct
  misc_feature 1..22: note = chemically synthesized
  source 1..22: mol_type = other DNA
taaagtaatatttatatattgt

SEQ ID NO: 79166 - DNA, 22 bp, synthetic construct
  misc_feature 1..22: note = chemically synthesized
  source 1..22: mol_type = other DNA
aaagtaatatttatatattgtt

SEQ ID NO: 79167 - DNA, 22 bp, synthetic construct
  misc_feature 1..22: note = chemically synthesized
  source 1..22: mol_type = other DNA
aagtaatatttatatattgttt

SEQ ID NO: 79168 - DNA, 22 bp, synthetic construct
  misc_feature 1..22: note = chemically synthesized
  source 1..22: mol_type = other DNA
atatattgtttatcattatatg

SEQ ID NO: 79169 - DNA, 22 bp, synthetic construct
  misc_feature 1..22: note = chemically synthesized
  source 1..22: mol_type = other DNA
tatattgtttatcattatatgt

SEQ ID NO: 79170 - DNA, 22 bp, synthetic construct
  misc_feature 1..22: note = chemically synthesized
  source 1..22: mol_type = other DNA
tttatcattatatgtggaatat

SEQ ID NO: 79171 - DNA, 22 bp, synthetic construct
  misc_feature 1..22: note = chemically synthesized
  source 1..22: mol_type = other DNA
atcattatatgtggaatatagt

SEQ ID NO: 79172 - DNA, 22 bp, synthetic construct
  misc_feature 1..22: note = chemically synthesized
  source 1..22: mol_type = other DNA
tcattatatgtggaatatagta

SEQ ID NO: 79173 - DNA, 22 bp, synthetic construct
  misc_feature 1..22: note = chemically synthesized
  source 1..22: mol_type = other DNA
tatgtggaatatagtaaatatt

SEQ ID NO: 79174 - DNA, 22 bp, synthetic construct
  misc_feature 1..22: note = chemically synthesized
  source 1..22: mol_type = other DNA
aatgtatagaataaaaagaaca

SEQ ID NO: 79175 - DNA, 22 bp, synthetic construct
  misc_feature 1..22: note = chemically synthesized
  source 1..22: mol_type = other DNA
aatatattagaacacaaggata

SEQ ID NO: 79176 - DNA, 22 bp, synthetic construct
  misc_feature 1..22: note = chemically synthesized
  source 1..22: mol_type = other DNA
atatattagaacacaaggatag

SEQ ID NO: 79177 - DNA, 22 bp, synthetic construct
  misc_feature 1..22: note = chemically synthesized
  source 1..22: mol_type = other DNA
gaacacaaggatagtttctcct

SEQ ID NO: 79178 - DNA, 22 bp, synthetic construct
  misc_feature 1..22: note = chemically synthesized
  source 1..22: mol_type = other DNA
ctcctagaataaagtattttcc

SEQ ID NO: 79179 - DNA, 22 bp, synthetic construct
  misc_feature 1..22: note = chemically synthesized
  source 1..22: mol_type = other DNA
tcctagaataaagtattttcca

SEQ ID NO: 79180 - DNA, 22 bp, synthetic construct
  misc_feature 1..22: note = chemically synthesized
  source 1..22: mol_type = other DNA
ctagaataaagtattttccatt

SEQ ID NO: 79181 - DNA, 22 bp, synthetic construct
  misc_feature 1..22: note = chemically synthesized
  source 1..22: mol_type = other DNA
gaataaagtattttccattttt

SEQ ID NO: 79182 - DNA, 22 bp, synthetic construct
  misc_feature 1..22: note = chemically synthesized
  source 1..22: mol_type = other DNA
tccatttttttctttaacttac

SEQ ID NO: 79183 - DNA, 22 bp, synthetic construct
  misc_feature 1..22: note = chemically synthesized
  source 1..22: mol_type = other DNA
ccatttttttctttaacttacc

SEQ ID NO: 79184 - DNA, 22 bp, synthetic construct
  misc_feature 1..22: note = chemically synthesized
  source 1..22: mol_type = other DNA
catttttttctttaacttacca

SEQ ID NO: 79185 - DNA, 22 bp, synthetic construct
  misc_feature 1..22: note = chemically synthesized
  source 1..22: mol_type = other DNA
ttttctttaacttaccagttca

SEQ ID NO: 79186 - DNA, 22 bp, synthetic construct
  misc_feature 1..22: note = chemically synthesized
  source 1..22: mol_type = other DNA
tttctttaacttaccagttcac

SEQ ID NO: 79187 - DNA, 22 bp, synthetic construct
  misc_feature 1..22: note = chemically synthesized
  source 1..22: mol_type = other DNA
ttctttaacttaccagttcact

SEQ ID NO: 79188 - DNA, 22 bp, synthetic construct
  misc_feature 1..22: note = chemically synthesized
  source 1..22: mol_type = other DNA
tctttaacttaccagttcactc

SEQ ID NO: 79189 - DNA, 22 bp, synthetic construct
  misc_feature 1..22: note = chemically synthesized
  source 1..22: mol_type = other DNA
ctttaacttaccagttcactct

SEQ ID NO: 79190 - DNA, 22 bp, synthetic construct
  misc_feature 1..22: note = chemically synthesized
  source 1..22: mol_type = other DNA
tttaacttaccagttcactctt

SEQ ID NO: 79191 - DNA, 22 bp, synthetic construct
  misc_feature 1..22: note = chemically synthesized
  source 1..22: mol_type = other DNA
taacttaccagttcactctttc

SEQ ID NO: 79192 - DNA, 22 bp, synthetic construct
  misc_feature 1..22: note = chemically synthesized
  source 1..22: mol_type = other DNA
aacttaccagttcactctttct

SEQ ID NO: 79193 - DNA, 22 bp, synthetic construct
  misc_feature 1..22: note = chemically synthesized
  source 1..22: mol_type = other DNA
acttaccagttcactctttctc

SEQ ID NO: 79194 - DNA, 22 bp, synthetic construct
  misc_feature 1..22: note = chemically synthesized
  source 1..22: mol_type = other DNA
accagttcactctttctccacc

SEQ ID NO: 79195 - DNA, 22 bp, synthetic construct
  misc_feature 1..22: note = chemically synthesized
  source 1..22: mol_type = other DNA
ccagttcactctttctccacct

SEQ ID NO: 79196 - DNA, 22 bp, synthetic construct
  misc_feature 1..22: note = chemically synthesized
  source 1..22: mol_type = other DNA
actctttctccacctgctatcc

SEQ ID NO: 79197 - DNA, 22 bp, synthetic construct
  misc_feature 1..22: note = chemically synthesized
  source 1..22: mol_type = other DNA
tttctccacctgctatccatag

SEQ ID NO: 79198 - DNA, 22 bp, synthetic construct
  misc_feature 1..22: note = chemically synthesized
  source 1..22: mol_type = other DNA
tctccacctgctatccatagat

SEQ ID NO: 79199 - DNA, 22 bp, synthetic construct
  misc_feature 1..22: note = chemically synthesized
  source 1..22: mol_type = other DNA
ctccacctgctatccatagatt

SEQ ID NO: 79200 - DNA, 22 bp, synthetic construct
  misc_feature 1..22: note = chemically synthesized
  source 1..22: mol_type = other DNA
tccacctgctatccatagatta

SEQ ID NO: 79201 - DNA, 22 bp, synthetic construct
  misc_feature 1..22: note = chemically synthesized
  source 1..22: mol_type = other DNA
cacctgctatccatagattaga

SEQ ID NO: 79202 - DNA, 22 bp, synthetic construct
  misc_feature 1..22: note = chemically synthesized
  source 1..22: mol_type = other DNA
ctatccatagattagaaaagct

SEQ ID NO: 79203 - DNA, 22 bp, synthetic construct
  misc_feature 1..22: note = chemically synthesized
  source 1..22: mol_type = other DNA
tccatagattagaaaagctcct

SEQ ID NO: 79204 - DNA, 22 bp, synthetic construct
  misc_feature 1..22: note = chemically synthesized
  source 1..22: mol_type = other DNA
gaaaagctcctctgtattttgc

SEQ ID NO: 79205 - DNA, 22 bp, synthetic construct
  misc_feature 1..22: note = chemically synthesized
  source 1..22: mol_type = other DNA
ctctgtattttgcagaagggtc

SEQ ID NO: 79206 - DNA, 22 bp, synthetic construct
  misc_feature 1..22: note = chemically synthesized
  source 1..22: mol_type = other DNA
tgtattttgcagaagggtcagt

SEQ ID NO: 79207 - DNA, 22 bp, synthetic construct
  misc_feature 1..22: note = chemically synthesized
  source 1..22: mol_type = other DNA
tattttgcagaagggtcagtct

SEQ ID NO: 79208 - DNA, 22 bp, synthetic construct
  misc_feature 1..22: note = chemically synthesized
  source 1..22: mol_type = other DNA
tgcagaagggtcagtcttctgc

SEQ ID NO: 79209 - DNA, 22 bp, synthetic construct
  misc_feature 1..22: note = chemically synthesized
  source 1..22: mol_type = other DNA
gcagaagggtcagtcttctgct

SEQ ID NO: 79210 - DNA, 22 bp, synthetic construct
  misc_feature 1..22: note = chemically synthesized
  source 1..22: mol_type = other DNA
cagaagggtcagtcttctgctg

SEQ ID NO: 79211 - DNA, 22 bp, synthetic construct
  misc_feature 1..22: note = chemically synthesized
  source 1..22: mol_type = other DNA
ctgctggaaccgggtcagggag

SEQ ID NO: 79212 - DNA, 22 bp, synthetic construct
  misc_feature 1..22: note = chemically synthesized
  source 1..22: mol_type = other DNA
tgctggaaccgggtcagggagc

SEQ ID NO: 79213 - DNA, 22 bp, synthetic construct
  misc_feature 1..22: note = chemically synthesized
  source 1..22: mol_type = other DNA
ctggaaccgggtcagggagcaa

SEQ ID NO: 79214 - DNA, 22 bp, synthetic construct
  misc_feature 1..22: note = chemically synthesized
  source 1..22: mol_type = other DNA
gaaccgggtcagggagcaagat

SEQ ID NO: 79215 - DNA, 22 bp, synthetic construct
  misc_feature 1..22: note = chemically synthesized
  source 1..22: mol_type = other DNA
acaagtcacatgtgatggtggg

SEQ ID NO: 79216 - DNA, 22 bp, synthetic construct
  misc_feature 1..22: note = chemically synthesized
  source 1..22: mol_type = other DNA
gggtacaggcttagagatattt

SEQ ID NO: 79217 - DNA, 22 bp, synthetic construct
  misc_feature 1..22: note = chemically synthesized
  source 1..22: mol_type = other DNA
agagatatttatctgggaacaa

SEQ ID NO: 79218 - DNA, 22 bp, synthetic construct
  misc_feature 1..22: note = chemically synthesized
  source 1..22: mol_type = other DNA
gagatatttatctgggaacaag

SEQ ID NO: 79219 - DNA, 22 bp, synthetic construct
  misc_feature 1..22: note = chemically synthesized
  source 1..22: mol_type = other DNA
atctgggaacaagtttattaac

SEQ ID NO: 79220 - DNA, 22 bp, synthetic construct
  misc_feature 1..22: note = chemically synthesized
  source 1..22: mol_type = other DNA
tctgggaacaagtttattaaca

SEQ ID NO: 79221 - DNA, 22 bp, synthetic construct
  misc_feature 1..22: note = chemically synthesized
  source 1..22: mol_type = other DNA
ggaacaagtttattaacactaa

SEQ ID NO: 79222 - DNA, 22 bp, synthetic construct
  misc_feature 1..22: note = chemically synthesized
  source 1..22: mol_type = other DNA
attaacactaaagttccactta

SEQ ID NO: 79223 - DNA, 22 bp, synthetic construct
  misc_feature 1..22: note = chemically synthesized
  source 1..22: mol_type = other DNA
ttaacactaaagttccacttat

SEQ ID NO: 79224 - DNA, 22 bp, synthetic construct
  misc_feature 1..22: note = chemically synthesized
  source 1..22: mol_type = other DNA
acactaaagttccacttatctg

SEQ ID NO: 79225 - DNA, 22 bp, synthetic construct
  misc_feature 1..22: note = chemically synthesized
  source 1..22: mol_type = other DNA
aagttccacttatctgcagcag

SEQ ID NO: 79226 - DNA, 22 bp, synthetic construct
  misc_feature 1..22: note = chemically synthesized
  source 1..22: mol_type = other DNA
cacttatctgcagcagagcctt

SEQ ID NO: 79227 - DNA, 22 bp, synthetic construct
  misc_feature 1..22: note = chemically synthesized
  source 1..22: mol_type = other DNA
atctgcagcagagccttaggta

SEQ ID NO: 79228 - DNA, 22 bp, synthetic construct
  misc_feature 1..22: note = chemically synthesized
  source 1..22: mol_type = other DNA
tctgcagcagagccttaggtat

SEQ ID NO: 79229 - DNA, 22 bp, synthetic construct
  misc_feature 1..22: note = chemically synthesized
  source 1..22: mol_type = other DNA
cagcagagccttaggtattaac

SEQ ID NO: 79230 - DNA, 22 bp, synthetic construct
  misc_feature 1..22: note = chemically synthesized
  source 1..22: mol_type = other DNA
aggtattaacgttggaggccag

SEQ ID NO: 79231 - DNA, 22 bp, synthetic construct
  misc_feature 1..22: note = chemically synthesized
  source 1..22: mol_type = other DNA
ggtattaacgttggaggccaga

SEQ ID NO: 79232 - DNA, 22 bp, synthetic construct
  misc_feature 1..22: note = chemically synthesized
  source 1..22: mol_type = other DNA
acgttggaggccagaaatggaa

SEQ ID NO: 79233 - DNA, 22 bp, synthetic construct
  misc_feature 1..22: note = chemically synthesized
  source 1..22: mol_type = other DNA
gaggccagaaatggaattcagg

SEQ ID NO: 79234 - DNA, 22 bp, synthetic construct
  misc_feature 1..22: note = chemically synthesized
  source 1..22: mol_type = other DNA
aggatggggctcagaaataaga

SEQ ID NO: 79235 - DNA, 22 bp, synthetic construct
  misc_feature 1..22: note = chemically synthesized
  source 1..22: mol_type = other DNA
agaaataagaatgtgaccaagg

SEQ ID NO: 79236 - DNA, 22 bp, synthetic construct
  misc_feature 1..22: note = chemically synthesized
  source 1..22: mol_type = other DNA
aactcttcttcccgtgttgggc

SEQ ID NO: 79237 - DNA, 22 bp, synthetic construct
  misc_feature 1..22: note = chemically synthesized
  source 1..22: mol_type = other DNA
ttcttcccgtgttgggccaggg

SEQ ID NO: 79238 - DNA, 22 bp, synthetic construct
  misc_feature 1..22: note = chemically synthesized
  source 1..22: mol_type = other DNA
cttcccgtgttgggccagggct

SEQ ID NO: 79239 - DNA, 22 bp, synthetic construct
  misc_feature 1..22: note = chemically synthesized
  source 1..22: mol_type = other DNA
ttcccgtgttgggccagggctc

SEQ ID NO: 79240 - DNA, 22 bp, synthetic construct
  misc_feature 1..22: note = chemically synthesized
  source 1..22: mol_type = other DNA
cccgtgttgggccagggctctt

SEQ ID NO: 79241 - DNA, 22 bp, synthetic construct
  misc_feature 1..22: note = chemically synthesized
  source 1..22: mol_type = other DNA
ccgtgttgggccagggctcttc

SEQ ID NO: 79242 - DNA, 22 bp, synthetic construct
  misc_feature 1..22: note = chemically synthesized
  source 1..22: mol_type = other DNA
ggccagggctcttcgttaggca

SEQ ID NO: 79243 - DNA, 22 bp, synthetic construct
  misc_feature 1..22: note = chemically synthesized
  source 1..22: mol_type = other DNA
ttcgttaggcataatcagtggg

SEQ ID NO: 79244 - DNA, 22 bp, synthetic construct
  misc_feature 1..22: note = chemically synthesized
  source 1..22: mol_type = other DNA
cgttaggcataatcagtgggat

SEQ ID NO: 79245 - DNA, 22 bp, synthetic construct
  misc_feature 1..22: note = chemically synthesized
  source 1..22: mol_type = other DNA
gttaggcataatcagtgggata

SEQ ID NO: 79246 - DNA, 22 bp, synthetic construct
  misc_feature 1..22: note = chemically synthesized
  source 1..22: mol_type = other DNA
ggcataatcagtgggatagtaa

SEQ ID NO: 79247 - DNA, 22 bp, synthetic construct
  misc_feature 1..22: note = chemically synthesized
  source 1..22: mol_type = other DNA
ccaaataaaaatgccctgattt

SEQ ID NO: 79248 - DNA, 22 bp, synthetic construct
  misc_feature 1..22: note = chemically synthesized
  source 1..22: mol_type = other DNA
caaataaaaatgccctgatttt

SEQ ID NO: 79249 - DNA, 22 bp, synthetic construct
  misc_feature 1..22: note = chemically synthesized
  source 1..22: mol_type = other DNA
atttttaccagttaccgatttt

SEQ ID NO: 79250 - DNA, 22 bp, synthetic construct
  misc_feature 1..22: note = chemically synthesized
  source 1..22: mol_type = other DNA
ttaccagttaccgattttttgt

SEQ ID NO: 79251 - DNA, 22 bp, synthetic construct
  misc_feature 1..22: note = chemically synthesized
  source 1..22: mol_type = other DNA
taccagttaccgattttttgtg

SEQ ID NO: 79252 - DNA, 22 bp, synthetic construct
  misc_feature 1..22: note = chemically synthesized
  source 1..22: mol_type = other DNA
accagttaccgattttttgtgt

SEQ ID NO: 79253 - DNA, 22 bp, synthetic construct
  misc_feature 1..22: note = chemically synthesized
  source 1..22: mol_type = other DNA
ccagttaccgattttttgtgtt

SEQ ID NO: 79254 - DNA, 22 bp, synthetic construct
  misc_feature 1..22: note = chemically synthesized
  source 1..22: mol_type = other DNA
ccgattttttgtgttttaatga

SEQ ID NO: 79255 - DNA, 22 bp, synthetic construct
  misc_feature 1..22: note = chemically synthesized
  source 1..22: mol_type = other DNA
tttgtgttttaatgactcctac

SEQ ID NO: 79256 - DNA, 22 bp, synthetic construct
  misc_feature 1..22: note = chemically synthesized
  source 1..22: mol_type = other DNA
ttgtgttttaatgactcctacc

SEQ ID NO: 79257 - DNA, 22 bp, synthetic construct
  misc_feature 1..22: note = chemically synthesized
  source 1..22: mol_type = other DNA
tgtgttttaatgactcctacca

SEQ ID NO: 79258 - DNA, 22 bp, synthetic construct
  misc_feature 1..22: note = chemically synthesized
  source 1..22: mol_type = other DNA
gtgttttaatgactcctaccat

SEQ ID NO: 79259 - DNA, 22 bp, synthetic construct
  misc_feature 1..22: note = chemically synthesized
  source 1..22: mol_type = other DNA
tgttttaatgactcctaccatg

SEQ ID NO: 79260 - DNA, 22 bp, synthetic construct
  misc_feature 1..22: note = chemically synthesized
  source 1..22: mol_type = other DNA
taatgactcctaccatgatcaa

SEQ ID NO: 79261 - DNA, 22 bp, synthetic construct
  misc_feature 1..22: note = chemically synthesized
  source 1..22: mol_type = other DNA
aatgactcctaccatgatcaat

SEQ ID NO: 79262 - DNA, 22 bp, synthetic construct
  misc_feature 1..22: note = chemically synthesized
  source 1..22: mol_type = other DNA
atgactcctaccatgatcaatt

SEQ ID NO: 79263 - DNA, 22 bp, synthetic construct
  misc_feature 1..22: note = chemically synthesized
  source 1..22: mol_type = other DNA
ctaccatgatcaatttcagact

SEQ ID NO: 79264 - DNA, 22 bp, synthetic construct
  misc_feature 1..22: note = chemically synthesized
  source 1..22: mol_type = other DNA
ccatgatcaatttcagactacc

SEQ ID NO: 79265 - DNA, 22 bp, synthetic construct
  misc_feature 1..22: note = chemically synthesized
  source 1..22: mol_type = other DNA
cagactaccaaagagatgctat

SEQ ID NO: 79266 - DNA, 22 bp, synthetic construct
  misc_feature 1..22: note = chemically synthesized
  source 1..22: mol_type = other DNA
agactaccaaagagatgctatt

SEQ ID NO: 79267 - DNA, 22 bp, synthetic construct
  misc_feature 1..22: note = chemically synthesized
  source 1..22: mol_type = other DNA
ccaaagagatgctattaaatgc

SEQ ID NO: 79268 - DNA, 22 bp, synthetic construct
  misc_feature 1..22: note = chemically synthesized
  source 1..22: mol_type = other DNA
ttaaatgcagagctgagatgag

SEQ ID NO: 79269 - DNA, 22 bp, synthetic construct
  misc_feature 1..22: note = chemically synthesized
  source 1..22: mol_type = other DNA
aatgcagagctgagatgagcat

SEQ ID NO: 79270 - DNA, 22 bp, synthetic construct
  misc_feature 1..22: note = chemically synthesized
  source 1..22: mol_type = other DNA
agatgagcataatcagctttcc

SEQ ID NO: 79271 - DNA, 22 bp, synthetic construct
  misc_feature 1..22: note = chemically synthesized
  source 1..22: mol_type = other DNA
tcctaagctggtgcaagccagc

SEQ ID NO: 79272 - DNA, 22 bp, synthetic construct
  misc_feature 1..22: note = chemically synthesized
  source 1..22: mol_type = other DNA
cctaagctggtgcaagccagca

SEQ ID NO: 79273 - DNA, 22 bp, synthetic construct
  misc_feature 1..22: note = chemically synthesized
  source 1..22: mol_type = other DNA
ctaagctggtgcaagccagcac

SEQ ID NO: 79274 - DNA, 22 bp, synthetic construct
  misc_feature 1..22: note = chemically synthesized
  source 1..22: mol_type = other DNA
agctggtgcaagccagcacatt

SEQ ID NO: 79275 - DNA, 22 bp, synthetic construct
  misc_feature 1..22: note = chemically synthesized
  source 1..22: mol_type = other DNA
gtgcaagccagcacattatacc

SEQ ID NO: 79276 - DNA, 22 bp, synthetic construct
  misc_feature 1..22: note = chemically synthesized
  source 1..22: mol_type = other DNA
taccattaggcataactatagt

SEQ ID NO: 79277 - DNA, 22 bp, synthetic construct
  misc_feature 1..22: note = chemically synthesized
  source 1..22: mol_type = other DNA
ggcataactatagttgatccta

SEQ ID NO: 79278 - DNA, 22 bp, synthetic construct
  misc_feature 1..22: note = chemically synthesized
  source 1..22: mol_type = other DNA
tagttgatcctagacctcagat

SEQ ID NO: 79279 - DNA, 22 bp, synthetic construct
  misc_feature 1..22: note = chemically synthesized
  source 1..22: mol_type = other DNA
atcctagacctcagatacttac

SEQ ID NO: 79280 - DNA, 22 bp, synthetic construct
  misc_feature 1..22: note = chemically synthesized
  source 1..22: mol_type = other DNA
gacctcagatacttacctaggt

SEQ ID NO: 79281 - DNA, 22 bp, synthetic construct
  misc_feature 1..22: note = chemically synthesized
  source 1..22: mol_type = other DNA
agatacttacctaggtggaact

SEQ ID NO: 79282 - DNA, 22 bp, synthetic construct
  misc_feature 1..22: note = chemically synthesized
  source 1..22: mol_type = other DNA
acctaggtggaactgagagcta

SEQ ID NO: 79283 - DNA, 22 bp, synthetic construct
  misc_feature 1..22: note = chemically synthesized
  source 1..22: mol_type = other DNA
cctaggtggaactgagagctac

SEQ ID NO: 79284 - DNA, 22 bp, synthetic construct
  misc_feature 1..22: note = chemically synthesized
  source 1..22: mol_type = other DNA
ggtggaactgagagctaccaca

SEQ ID NO: 79285 - DNA, 22 bp, synthetic construct
  misc_feature 1..22: note = chemically synthesized
  source 1..22: mol_type = other DNA
agagctaccacatcaatccatg

SEQ ID NO: 79286 - DNA, 22 bp, synthetic construct
  misc_feature 1..22: note = chemically synthesized
  source 1..22: mol_type = other DNA
ccacatcaatccatgcatacta

SEQ ID NO: 79287 - DNA, 22 bp, synthetic construct
  misc_feature 1..22: note = chemically synthesized
  source 1..22: mol_type = other DNA
tttgttactgtttactttcaac

SEQ ID NO: 79288 - DNA, 22 bp, synthetic construct
  misc_feature 1..22: note = chemically synthesized
  source 1..22: mol_type = other DNA
gttactgtttactttcaactgg

SEQ ID NO: 79289 - DNA, 22 bp, synthetic construct
  misc_feature 1..22: note = chemically synthesized
  source 1..22: mol_type = other DNA
ttactgtttactttcaactggg

SEQ ID NO: 79290 - DNA, 22 bp, synthetic construct
  misc_feature 1..22: note = chemically synthesized
  source 1..22: mol_type = other DNA
ctgtttactttcaactgggctg

SEQ ID NO: 79291 - DNA, 22 bp, synthetic construct
  misc_feature 1..22: note = chemically synthesized
  source 1..22: mol_type = other DNA
tttactttcaactgggctgtgg

SEQ ID NO: 79292 - DNA, 22 bp, synthetic construct
  misc_feature 1..22: note = chemically synthesized
  source 1..22: mol_type = other DNA
actttcaactgggctgtggaca

SEQ ID NO: 79293 - DNA, 22 bp, synthetic construct
  misc_feature 1..22: note = chemically synthesized
  source 1..22: mol_type = other DNA
ctttcaactgggctgtggacat

SEQ ID NO: 79294 - DNA, 22 bp, synthetic construct
  misc_feature 1..22: note = chemically synthesized
  source 1..22: mol_type = other DNA
tcaactgggctgtggacatagt

SEQ ID NO: 79295 - DNA, 22 bp, synthetic construct
  misc_feature 1..22: note = chemically synthesized
  source 1..22: mol_type = other DNA
caactgggctgtggacatagtt

SEQ ID NO: 79296 - DNA, 22 bp, synthetic construct
  misc_feature 1..22: note = chemically synthesized
  source 1..22: mol_type = other DNA
aactgggctgtggacatagtta

SEQ ID NO: 79297 - DNA, 22 bp, synthetic construct
  misc_feature 1..22: note = chemically synthesized
  source 1..22: mol_type = other DNA
ggctgtggacatagttactacc

SEQ ID NO: 79298 - DNA, 22 bp, synthetic construct
  misc_feature 1..22: note = chemically synthesized
  source 1..22: mol_type = other DNA
tggacatagttactacctccct

SEQ ID NO: 79299 - DNA, 22 bp, synthetic construct
  misc_feature 1..22: note = chemically synthesized
  source 1..22: mol_type = other DNA
ctacctccctgtatatgtgctt

SEQ ID NO: 79300 - DNA, 22 bp, synthetic construct
  misc_feature 1..22: note = chemically synthesized
  source 1..22: mol_type = other DNA
cctccctgtatatgtgcttagt

SEQ ID NO: 79301 - DNA, 22 bp, synthetic construct
  misc_feature 1..22: note = chemically synthesized
  source 1..22: mol_type = other DNA
cctgtatatgtgcttagttgac

SEQ ID NO: 79302 - DNA, 22 bp, synthetic construct
  misc_feature 1..22: note = chemically synthesized
  source 1..22: mol_type = other DNA
tatatgtgcttagttgactgga

SEQ ID NO: 79303 - DNA, 22 bp, synthetic construct
  misc_feature 1..22: note = chemically synthesized
  source 1..22: mol_type = other DNA
agttgactggaggacatagaga

SEQ ID NO: 79304 - DNA, 22 bp, synthetic construct
  misc_feature 1..22: note = chemically synthesized
  source 1..22: mol_type = other DNA
gttgactggaggacatagagac

SEQ ID NO: 79305 - DNA, 22 bp, synthetic construct
  misc_feature 1..22: note = chemically synthesized
  source 1..22: mol_type = other DNA
actggaggacatagagacagaa

SEQ ID NO: 79306 - DNA, 22 bp, synthetic construct
  misc_feature 1..22: note = chemically synthesized
  source 1..22: mol_type = other DNA
gaggacatagagacagaatgat

SEQ ID NO: 79307 - DNA, 22 bp, synthetic construct
  misc_feature 1..22: note = chemically synthesized
  source 1..22: mol_type = other DNA
agtatccctcaagaagcaatta

SEQ ID NO: 79308 - DNA, 22 bp, synthetic construct
  misc_feature 1..22: note = chemically synthesized
  source 1..22: mol_type = other DNA
aagaagcaattaaccaagaata

SEQ ID NO: 79309 - DNA, 22 bp, synthetic construct
  misc_feature 1..22: note = chemically synthesized
  source 1..22: mol_type = other DNA
accaagaataattattcccaga

SEQ ID NO: 79310 - DNA, 22 bp, synthetic construct
  misc_feature 1..22: note = chemically synthesized
  source 1..22: mol_type = other DNA
ttcccagaaacttcgggtgtat

SEQ ID NO: 79311 - DNA, 22 bp, synthetic construct
  misc_feature 1..22: note = chemically synthesized
  source 1..22: mol_type = other DNA
ccagaaacttcgggtgtattag

SEQ ID NO: 79312 - DNA, 22 bp, synthetic construct
  misc_feature 1..22: note = chemically synthesized
  source 1..22: mol_type = other DNA
cgggtgtattagagagaaaggg

SEQ ID NO: 79313 - DNA, 22 bp, synthetic construct
  misc_feature 1..22: note = chemically synthesized
  source 1..22: mol_type = other DNA
gggtgtattagagagaaagggg

SEQ ID NO: 79314 - DNA, 22 bp, synthetic construct
  misc_feature 1..22: note = chemically synthesized
  source 1..22: mol_type = other DNA
gagagaaaggggggaatagttc

SEQ ID NO: 79315 - DNA, 22 bp, synthetic construct
  misc_feature 1..22: note = chemically synthesized
  source 1..22: mol_type = other DNA
ctgagaagcatgctggagagag

SEQ ID NO: 79316 - DNA, 22 bp, synthetic construct
  misc_feature 1..22: note = chemically synthesized
  source 1..22: mol_type = other DNA
agaagcatgctggagagagtat

SEQ ID NO: 79317 - DNA, 22 bp, synthetic construct
  misc_feature 1..22: note = chemically synthesized
  source 1..22: mol_type = other DNA
gagagagtatacataagaacat

SEQ ID NO: 79318 - DNA, 22 bp, synthetic construct
  misc_feature 1..22: note = chemically synthesized
  source 1..22: mol_type = other DNA
cacaatatcattaattataatt

SEQ ID NO: 79319 - DNA, 22 bp, synthetic construct
  misc_feature 1..22: note = chemically synthesized
  source 1..22: mol_type = other DNA
attataatttaaatataagaca

SEQ ID NO: 79320 - DNA, 22 bp, synthetic construct
  misc_feature 1..22: note = chemically synthesized
  source 1..22: mol_type = other DNA
taatttaaatataagacattgg

SEQ ID NO: 79321 - DNA, 22 bp, synthetic construct
  misc_feature 1..22: note = chemically synthesized
  source 1..22: mol_type = other DNA
aaatataagacattggtttata

SEQ ID NO: 79322 - DNA, 22 bp, synthetic construct
  misc_feature 1..22: note = chemically synthesized
  source 1..22: mol_type = other DNA
aatataagacattggtttatat

SEQ ID NO: 79323 - DNA, 22 bp, synthetic construct
  misc_feature 1..22: note = chemically synthesized
  source 1..22: mol_type = other DNA
gtttatatttcttatatacttc

SEQ ID NO: 79324 - DNA, 22 bp, synthetic construct
  misc_feature 1..22: note = chemically synthesized
  source 1..22: mol_type = other DNA
atatttcttatatacttccccc

SEQ ID NO: 79325 - DNA, 22 bp, synthetic construct
  misc_feature 1..22: note = chemically synthesized
  source 1..22: mol_type = other DNA
tatttcttatatacttcccccg

SEQ ID NO: 79326 - DNA, 22 bp, synthetic construct
  misc_feature 1..22: note = chemically synthesized
  source 1..22: mol_type = other DNA
cttatatacttcccccgcatct

SEQ ID NO: 79327 - DNA, 22 bp, synthetic construct
  misc_feature 1..22: note = chemically synthesized
  source 1..22: mol_type = other DNA
ttatatacttcccccgcatctt

SEQ ID NO: 79328 - DNA, 22 bp, synthetic construct
  misc_feature 1..22: note = chemically synthesized
  source 1..22: mol_type = other DNA
atatacttcccccgcatcttat

SEQ ID NO: 79329 - DNA, 22 bp, synthetic construct
  misc_feature 1..22: note = chemically synthesized
  source 1..22: mol_type = other DNA
tatacttcccccgcatcttatc

SEQ ID NO: 79330 - DNA, 22 bp, synthetic construct
  misc_feature 1..22: note = chemically synthesized
  source 1..22: mol_type = other DNA
cccccgcatcttatcttcatta

SEQ ID NO: 79331 - DNA, 22 bp, synthetic construct
  misc_feature 1..22: note = chemically synthesized
  source 1..22: mol_type = other DNA
ccccgcatcttatcttcattaa

SEQ ID NO: 79332 - DNA, 22 bp, synthetic construct
  misc_feature 1..22: note = chemically synthesized
  source 1..22: mol_type = other DNA
atcttcattaattttttcatac

SEQ ID NO: 79333 - DNA, 22 bp, synthetic construct
  misc_feature 1..22: note = chemically synthesized
  source 1..22: mol_type = other DNA
tcttcattaattttttcataca

SEQ ID NO: 79334 - DNA, 22 bp, synthetic construct
  misc_feature 1..22: note = chemically synthesized
  source 1..22: mol_type = other DNA
cattaattttttcatacacaat

SEQ ID NO: 79335 - DNA, 22 bp, synthetic construct
  misc_feature 1..22: note = chemically synthesized
  source 1..22: mol_type = other DNA
attaattttttcatacacaatc

SEQ ID NO: 79336 - DNA, 22 bp, synthetic construct
  misc_feature 1..22: note = chemically synthesized
  source 1..22: mol_type = other DNA
attttttcatacacaatcattt

SEQ ID NO: 79337 - DNA, 22 bp, synthetic construct
  misc_feature 1..22: note = chemically synthesized
  source 1..22: mol_type = other DNA
tttcatacacaatcatttacaa

SEQ ID NO: 79338 - DNA, 22 bp, synthetic construct
  misc_feature 1..22: note = chemically synthesized
  source 1..22: mol_type = other DNA
ttcatacacaatcatttacaaa

SEQ ID NO: 79339 - DNA, 22 bp, synthetic construct
  misc_feature 1..22: note = chemically synthesized
  source 1..22: mol_type = other DNA
tcatacacaatcatttacaaaa

SEQ ID NO: 79340 - DNA, 22 bp, synthetic construct
  misc_feature 1..22: note = chemically synthesized
  source 1..22: mol_type = other DNA
catacacaatcatttacaaaac

SEQ ID NO: 79341 - DNA, 22 bp, synthetic construct
  misc_feature 1..22: note = chemically synthesized
  source 1..22: mol_type = other DNA
atacacaatcatttacaaaact

SEQ ID NO: 79342 - DNA, 22 bp, synthetic construct
  misc_feature 1..22: note = chemically synthesized
  source 1..22: mol_type = other DNA
acaaaacttttatgtagtcagg

SEQ ID NO: 79343 - DNA, 22 bp, synthetic construct
  misc_feature 1..22: note = chemically synthesized
  source 1..22: mol_type = other DNA
caaaacttttatgtagtcaggt

SEQ ID NO: 79344 - DNA, 22 bp, synthetic construct
  misc_feature 1..22: note = chemically synthesized
  source 1..22: mol_type = other DNA
ttatgtagtcaggttaacatac

SEQ ID NO: 79345 - DNA, 22 bp, synthetic construct
  misc_feature 1..22: note = chemically synthesized
  source 1..22: mol_type = other DNA
tatgtagtcaggttaacataca

SEQ ID NO: 79346 - DNA, 22 bp, synthetic construct
  misc_feature 1..22: note = chemically synthesized
  source 1..22: mol_type = other DNA
atgtagtcaggttaacatacat

SEQ ID NO: 79347 - DNA, 22 bp, synthetic construct
  misc_feature 1..22: note = chemically synthesized
  source 1..22: mol_type = other DNA
tgtagtcaggttaacatacatt

SEQ ID NO: 79348 - DNA, 22 bp, synthetic construct
  misc_feature 1..22: note = chemically synthesized
  source 1..22: mol_type = other DNA
acatacattttattaatattat

SEQ ID NO: 79349 - DNA, 22 bp, synthetic construct
  misc_feature 1..22: note = chemically synthesized
  source 1..22: mol_type = other DNA
tattaatattatatacttttca

SEQ ID NO: 79350 - DNA, 22 bp, synthetic construct
  misc_feature 1..22: note = chemically synthesized
  source 1..22: mol_type = other DNA
attaatattatatacttttcat

SEQ ID NO: 79351 - DNA, 22 bp, synthetic construct
  misc_feature 1..22: note = chemically synthesized
  source 1..22: mol_type = other DNA
ttaatattatatacttttcatt

SEQ ID NO: 79352 - DNA, 22 bp, synthetic construct
  misc_feature 1..22: note = chemically synthesized
  source 1..22: mol_type = other DNA
atattatatacttttcattctt

SEQ ID NO: 79353 - DNA, 22 bp, synthetic construct
  misc_feature 1..22: note = chemically synthesized
  source 1..22: mol_type = other DNA
tatacttttcattcttaagaag

SEQ ID NO: 79354 - DNA, 22 bp, synthetic construct
  misc_feature 1..22: note = chemically synthesized
  source 1..22: mol_type = other DNA
ttcattcttaagaagctattcc

SEQ ID NO: 79355 - DNA, 22 bp, synthetic construct
  misc_feature 1..22: note = chemically synthesized
  source 1..22: mol_type = other DNA
tcattcttaagaagctattcca

SEQ ID NO: 79356 - DNA, 22 bp, synthetic construct
  misc_feature 1..22: note = chemically synthesized
  source 1..22: mol_type = other DNA
cattcttaagaagctattccat

SEQ ID NO: 79357 - DNA, 22 bp, synthetic construct
  misc_feature 1..22: note = chemically synthesized
  source 1..22: mol_type = other DNA
attcttaagaagctattccata

SEQ ID NO: 79358 - DNA, 22 bp, synthetic construct
  misc_feature 1..22: note = chemically synthesized
  source 1..22: mol_type = other DNA
ttaagaagctattccatataca

SEQ ID NO: 79359 - DNA, 22 bp, synthetic construct
  misc_feature 1..22: note = chemically synthesized
  source 1..22: mol_type = other DNA
aagaagctattccatatacaaa

SEQ ID NO: 79360 - DNA, 22 bp, synthetic construct
  misc_feature 1..22: note = chemically synthesized
  source 1..22: mol_type = other DNA
agaagctattccatatacaaag

SEQ ID NO: 79361 - DNA, 22 bp, synthetic construct
  misc_feature 1..22: note = chemically synthesized
  source 1..22: mol_type = other DNA
ttccatatacaaagtaaaaagt

SEQ ID NO: 79362 - DNA, 22 bp, synthetic construct
  misc_feature 1..22: note = chemically synthesized
  source 1..22: mol_type = other DNA
catatacaaagtaaaaagtgga

SEQ ID NO: 79363 - DNA, 22 bp, synthetic construct
  misc_feature 1..22: note = chemically synthesized
  source 1..22: mol_type = other DNA
gatctagagctagagacggaac

SEQ ID NO: 79364 - DNA, 22 bp, synthetic construct
  misc_feature 1..22: note = chemically synthesized
  source 1..22: mol_type = other DNA
gagctagagacggaactgcaga

SEQ ID NO: 79365 - DNA, 22 bp, synthetic construct
  misc_feature 1..22: note = chemically synthesized
  source 1..22: mol_type = other DNA
gagacggaactgcagataggga

SEQ ID NO: 79366 - DNA, 22 bp, synthetic construct
  misc_feature 1..22: note = chemically synthesized
  source 1..22: mol_type = other DNA
cagatagggatagtggtgtaga

SEQ ID NO: 79367 - DNA, 22 bp, synthetic construct
  misc_feature 1..22: note = chemically synthesized
  source 1..22: mol_type = other DNA
gagattcttgattccacctgaa

SEQ ID NO: 79368 - DNA, 22 bp, synthetic construct
  misc_feature 1..22: note = chemically synthesized
  source 1..22: mol_type = other DNA
ttgattccacctgaaatttgtt

SEQ ID NO: 79369 - DNA, 22 bp, synthetic construct
  misc_feature 1..22: note = chemically synthesized
  source 1..22: mol_type = other DNA
gattccacctgaaatttgtttg

SEQ ID NO: 79370 - DNA, 22 bp, synthetic construct
  misc_feature 1..22: note = chemically synthesized
  source 1..22: mol_type = other DNA
attccacctgaaatttgtttgg

SEQ ID NO: 79371 - DNA, 22 bp, synthetic construct
  misc_feature 1..22: note = chemically synthesized
  source 1..22: mol_type = other DNA
cacctgaaatttgtttggggga

SEQ ID NO: 79372 - DNA, 22 bp, synthetic construct
  misc_feature 1..22: note = chemically synthesized
  source 1..22: mol_type = other DNA
aaatttgtttgggggacttggg

SEQ ID NO: 79373 - DNA, 22 bp, synthetic construct
  misc_feature 1..22: note = chemically synthesized
  source 1..22: mol_type = other DNA
gtttgggggacttgggtaatta

SEQ ID NO: 79374 - DNA, 22 bp, synthetic construct
  misc_feature 1..22: note = chemically synthesized
  source 1..22: mol_type = other DNA
tttgggggacttgggtaattag

SEQ ID NO: 79375 - DNA, 22 bp, synthetic construct
  misc_feature 1..22: note = chemically synthesized
  source 1..22: mol_type = other DNA
gggggacttgggtaattagaat

SEQ ID NO: 79376 - DNA, 22 bp, synthetic construct
  misc_feature 1..22: note = chemically synthesized
  source 1..22: mol_type = other DNA
ggggacttgggtaattagaatt

SEQ ID NO: 79377 - DNA, 22 bp, synthetic construct
  misc_feature 1..22: note = chemically synthesized
  source 1..22: mol_type = other DNA
gggtaattagaattttacttaa

SEQ ID NO: 79378 - DNA, 22 bp, synthetic construct
  misc_feature 1..22: note = chemically synthesized
  source 1..22: mol_type = other DNA
ggtaattagaattttacttaag

SEQ ID NO: 79379 - DNA, 22 bp, synthetic construct
  misc_feature 1..22: note = chemically synthesized
  source 1..22: mol_type = other DNA
gaattttacttaagtattctca

SEQ ID NO: 79380 - DNA, 22 bp, synthetic construct
  misc_feature 1..22: note = chemically synthesized
  source 1..22: mol_type = other DNA
tacttaagtattctcaaacata

SEQ ID NO: 79381 - DNA, 22 bp, synthetic construct
  misc_feature 1..22: note = chemically synthesized
  source 1..22: mol_type = other DNA
acttaagtattctcaaacatat

SEQ ID NO: 79382 - DNA, 22 bp, synthetic construct
  misc_feature 1..22: note = chemically synthesized
  source 1..22: mol_type = other DNA
cttaagtattctcaaacatata

SEQ ID NO: 79383 - DNA, 22 bp, synthetic construct
  misc_feature 1..22: note = chemically synthesized
  source 1..22: mol_type = other DNA
aagtattctcaaacatataaac

SEQ ID NO: 79384 - DNA, 22 bp, synthetic construct
  misc_feature 1..22: note = chemically synthesized
  source 1..22: mol_type = other DNA
agtattctcaaacatataaaca

SEQ ID NO: 79385 - DNA, 22 bp, synthetic construct
  misc_feature 1..22: note = chemically synthesized
  source 1..22: mol_type = other DNA
tcaaacatataaacaatttttc

SEQ ID NO: 79386 - DNA, 22 bp, synthetic construct
  misc_feature 1..22: note = chemically synthesized
  source 1..22: mol_type = other DNA
aaacatataaacaatttttcta

SEQ ID NO: 79387 - DNA, 22 bp, synthetic construct
  misc_feature 1..22: note = chemically synthesized
  source 1..22: mol_type = other DNA
ttctaataccaagtataagatc

SEQ ID NO: 79388 - DNA, 22 bp, synthetic construct
  misc_feature 1..22: note = chemically synthesized
  source 1..22: mol_type = other DNA
tctaataccaagtataagatca

SEQ ID NO: 79389 - DNA, 22 bp, synthetic construct
  misc_feature 1..22: note = chemically synthesized
  source 1..22: mol_type = other DNA
ctaataccaagtataagatcaa

SEQ ID NO: 79390 - DNA, 22 bp, synthetic construct
  misc_feature 1..22: note = chemically synthesized
  source 1..22: mol_type = other DNA
taataccaagtataagatcaag

SEQ ID NO: 79391 - DNA, 22 bp, synthetic construct
  misc_feature 1..22: note = chemically synthesized
  source 1..22: mol_type = other DNA
ataccaagtataagatcaaggg

SEQ ID NO: 79392 - DNA, 22 bp, synthetic construct
  misc_feature 1..22: note = chemically synthesized
  source 1..22: mol_type = other DNA
gtctccaagcatgatgagggat

SEQ ID NO: 79393 - DNA, 22 bp, synthetic construct
  misc_feature 1..22: note = chemically synthesized
  source 1..22: mol_type = other DNA
caagcatgatgagggattacat

SEQ ID NO: 79394 - DNA, 22 bp, synthetic construct
  misc_feature 1..22: note = chemically synthesized
  source 1..22: mol_type = other DNA
catacattttattttatatttt

SEQ ID NO: 79395 - DNA, 22 bp, synthetic construct
  misc_feature 1..22: note = chemically synthesized
  source 1..22: mol_type = other DNA
tattttatatttttatataaat

SEQ ID NO: 79396 - DNA, 22 bp, synthetic construct
  misc_feature 1..22: note = chemically synthesized
  source 1..22: mol_type = other DNA
attttatatttttatataaata

SEQ ID NO: 79397 - DNA, 22 bp, synthetic construct
  misc_feature 1..22: note = chemically synthesized
  source 1..22: mol_type = other DNA
ttttatatttttatataaatat

SEQ ID NO: 79398 - DNA, 22 bp, synthetic construct
  misc_feature 1..22: note = chemically synthesized
  source 1..22: mol_type = other DNA
tatatttttatataaatatgga

SEQ ID NO: 79399 - DNA, 22 bp, synthetic construct
  misc_feature 1..22: note = chemically synthesized
  source 1..22: mol_type = other DNA
atatttttatataaatatggat

SEQ ID NO: 79400 - DNA, 22 bp, synthetic construct
  misc_feature 1..22: note = chemically synthesized
  source 1..22: mol_type = other DNA
tatttttatataaatatggatc

SEQ ID NO: 79401 - DNA, 22 bp, synthetic construct
  misc_feature 1..22: note = chemically synthesized
  source 1..22: mol_type = other DNA
ttatataaatatggatctaatt

SEQ ID NO: 79402 - DNA, 22 bp, synthetic construct
  misc_feature 1..22: note = chemically synthesized
  source 1..22: mol_type = other DNA
tatataaatatggatctaattc

SEQ ID NO: 79403 - DNA, 22 bp, synthetic construct
  misc_feature 1..22: note = chemically synthesized
  source 1..22: mol_type = other DNA
atataaatatggatctaattct

SEQ ID NO: 79404 - DNA, 22 bp, synthetic construct
  misc_feature 1..22: note = chemically synthesized
  source 1..22: mol_type = other DNA
tataaatatggatctaattcta

SEQ ID NO: 79405 - DNA, 22 bp, synthetic construct
  misc_feature 1..22: note = chemically synthesized
  source 1..22: mol_type = other DNA
attctagactgttttctgttgt

SEQ ID NO: 79406 - DNA, 22 bp, synthetic construct
  misc_feature 1..22: note = chemically synthesized
  source 1..22: mol_type = other DNA
tagactgttttctgttgtttga

SEQ ID NO: 79407 - DNA, 22 bp, synthetic construct
  misc_feature 1..22: note = chemically synthesized
  source 1..22: mol_type = other DNA
gactgttttctgttgtttgatc

SEQ ID NO: 79408 - DNA, 22 bp, synthetic construct
  misc_feature 1..22: note = chemically synthesized
  source 1..22: mol_type = other DNA
ttttctgttgtttgatctgtgt

SEQ ID NO: 79409 - DNA, 22 bp, synthetic construct
  misc_feature 1..22: note = chemically synthesized
  source 1..22: mol_type = other DNA
tctgttgtttgatctgtgtcct

SEQ ID NO: 79410 - DNA, 22 bp, synthetic construct
  misc_feature 1..22: note = chemically synthesized
  source 1..22: mol_type = other DNA
ctgttgtttgatctgtgtcctt

SEQ ID NO: 79411 - DNA, 22 bp, synthetic construct
  misc_feature 1..22: note = chemically synthesized
  source 1..22: mol_type = other DNA
tgttgtttgatctgtgtccttt

SEQ ID NO: 79412 - DNA, 22 bp, synthetic construct
  misc_feature 1..22: note = chemically synthesized
  source 1..22: mol_type = other DNA
ttgtttgatctgtgtccttttt

SEQ ID NO: 79413 - DNA, 22 bp, synthetic construct
  misc_feature 1..22: note = chemically synthesized
  source 1..22: mol_type = other DNA
tttgatctgtgtcctttttgcc

SEQ ID NO: 79414 - DNA, 22 bp, synthetic construct
  misc_feature 1..22: note = chemically synthesized
  source 1..22: mol_type = other DNA
gatctgtgtcctttttgccaca

SEQ ID NO: 79415 - DNA, 22 bp, synthetic construct
  misc_feature 1..22: note = chemically synthesized
  source 1..22: mol_type = other DNA
atctgtgtcctttttgccacat

SEQ ID NO: 79416 - DNA, 22 bp, synthetic construct
  misc_feature 1..22: note = chemically synthesized
  source 1..22: mol_type = other DNA
tgtcctttttgccacatgcaca

SEQ ID NO: 79417 - DNA, 22 bp, synthetic construct
  misc_feature 1..22: note = chemically synthesized
  source 1..22: mol_type = other DNA
tttgccacatgcacatactgcc

SEQ ID NO: 79418 - DNA, 22 bp, synthetic construct
  misc_feature 1..22: note = chemically synthesized
  source 1..22: mol_type = other DNA
ttgccacatgcacatactgccg

SEQ ID NO: 79419 - DNA, 22 bp, synthetic construct
  misc_feature 1..22: note = chemically synthesized
  source 1..22: mol_type = other DNA
tgccacatgcacatactgccgt

SEQ ID NO: 79420 - DNA, 22 bp, synthetic construct
  misc_feature 1..22: note = chemically synthesized
  source 1..22: mol_type = other DNA
gccacatgcacatactgccgtt

SEQ ID NO: 79421 - DNA, 22 bp, synthetic construct
  misc_feature 1..22: note = chemically synthesized
  source 1..22: mol_type = other DNA
ccacatgcacatactgccgttc

SEQ ID NO: 79422 - DNA, 22 bp, synthetic construct
  misc_feature 1..22: note = chemically synthesized
  source 1..22: mol_type = other DNA
ccgttcttattctgtttttata

SEQ ID NO: 79423 - DNA, 22 bp, synthetic construct
  misc_feature 1..22: note = chemically synthesized
  source 1..22: mol_type = other DNA
ttattctgtttttatatacaac

SEQ ID NO: 79424 - DNA, 22 bp, synthetic construct
  misc_feature 1..22: note = chemically synthesized
  source 1..22: mol_type = other DNA
attctgtttttatatacaactt

SEQ ID NO: 79425 - DNA, 22 bp, synthetic construct
  misc_feature 1..22: note = chemically synthesized
  source 1..22: mol_type = other DNA
ttctgtttttatatacaacttc

SEQ ID NO: 79426 - DNA, 22 bp, synthetic construct
  misc_feature 1..22: note = chemically synthesized
  source 1..22: mol_type = other DNA
tgtttttatatacaacttcata

SEQ ID NO: 79427 - DNA, 22 bp, synthetic construct
  misc_feature 1..22: note = chemically synthesized
  source 1..22: mol_type = other DNA
tttttatatacaacttcatatt

SEQ ID NO: 79428 - DNA, 22 bp, synthetic construct
  misc_feature 1..22: note = chemically synthesized
  source 1..22: mol_type = other DNA
ttatatacaacttcatattcaa

SEQ ID NO: 79429 - DNA, 22 bp, synthetic construct
  misc_feature 1..22: note = chemically synthesized
  source 1..22: mol_type = other DNA
tatatacaacttcatattcaat

SEQ ID NO: 79430 - DNA, 22 bp, synthetic construct
  misc_feature 1..22: note = chemically synthesized
  source 1..22: mol_type = other DNA
atatacaacttcatattcaatt

SEQ ID NO: 79431 - DNA, 22 bp, synthetic construct
  misc_feature 1..22: note = chemically synthesized
  source 1..22: mol_type = other DNA
tatacaacttcatattcaattg

SEQ ID NO: 79432 - DNA, 22 bp, synthetic construct
  misc_feature 1..22: note = chemically synthesized
  source 1..22: mol_type = other DNA
catattcaattggtcaagctat

SEQ ID NO: 79433 - DNA, 22 bp, synthetic construct
  misc_feature 1..22: note = chemically synthesized
  source 1..22: mol_type = other DNA
atattcaattggtcaagctata

SEQ ID NO: 79434 - DNA, 22 bp, synthetic construct
  misc_feature 1..22: note = chemically synthesized
  source 1..22: mol_type = other DNA
aattggtcaagctatatttttg

SEQ ID NO: 79435 - DNA, 22 bp, synthetic construct
  misc_feature 1..22: note = chemically synthesized
  source 1..22: mol_type = other DNA
gtcaagctatatttttgttgtc

SEQ ID NO: 79436 - DNA, 22 bp, synthetic construct
  misc_feature 1..22: note = chemically synthesized
  source 1..22: mol_type = other DNA
tatttttgttgtcatgctaact

SEQ ID NO: 79437 - DNA, 22 bp, synthetic construct
  misc_feature 1..22: note = chemically synthesized
  source 1..22: mol_type = other DNA
ttgttgtcatgctaactttgta

SEQ ID NO: 79438 - DNA, 22 bp, synthetic construct
  misc_feature 1..22: note = chemically synthesized
  source 1..22: mol_type = other DNA
tgttgtcatgctaactttgtat

SEQ ID NO: 79439 - DNA, 22 bp, synthetic construct
  misc_feature 1..22: note = chemically synthesized
  source 1..22: mol_type = other DNA
gttgtcatgctaactttgtatt

SEQ ID NO: 79440 - DNA, 22 bp, synthetic construct
  misc_feature 1..22: note = chemically synthesized
  source 1..22: mol_type = other DNA
ttgtcatgctaactttgtattc

SEQ ID NO: 79441 - DNA, 22 bp, synthetic construct
  misc_feature 1..22: note = chemically synthesized
  source 1..22: mol_type = other DNA
tcatgctaactttgtattcttt

SEQ ID NO: 79442 - DNA, 22 bp, synthetic construct
  misc_feature 1..22: note = chemically synthesized
  source 1..22: mol_type = other DNA
actttgtattctttcaaataag

SEQ ID NO: 79443 - DNA, 22 bp, synthetic construct
  misc_feature 1..22: note = chemically synthesized
  source 1..22: mol_type = other DNA
tgtattctttcaaataaggatt

SEQ ID NO: 79444 - DNA, 22 bp, synthetic construct
  misc_feature 1..22: note = chemically synthesized
  source 1..22: mol_type = other DNA
gtattctttcaaataaggatta

SEQ ID NO: 79445 - DNA, 22 bp, synthetic construct
  misc_feature 1..22: note = chemically synthesized
  source 1..22: mol_type = other DNA
tattctttcaaataaggattaa

SEQ ID NO: 79446 - DNA, 22 bp, synthetic construct
  misc_feature 1..22: note = chemically synthesized
  source 1..22: mol_type = other DNA
tttcaaataaggattaaaagcc

SEQ ID NO: 79447 - DNA, 22 bp, synthetic construct
  misc_feature 1..22: note = chemically synthesized
  source 1..22: mol_type = other DNA
tcaaataaggattaaaagccag

SEQ ID NO: 79448 - DNA, 22 bp, synthetic construct
  misc_feature 1..22: note = chemically synthesized
  source 1..22: mol_type = other DNA
caaataaggattaaaagccagc

SEQ ID NO: 79449 - DNA, 22 bp, synthetic construct
  misc_feature 1..22: note = chemically synthesized
  source 1..22: mol_type = other DNA
aaataaggattaaaagccagca

SEQ ID NO: 79450 - DNA, 22 bp, synthetic construct
  misc_feature 1..22: note = chemically synthesized
  source 1..22: mol_type = other DNA
aaagccagcatgcataaaaatt

SEQ ID NO: 79451 - DNA, 22 bp, synthetic construct
  misc_feature 1..22: note = chemically synthesized
  source 1..22: mol_type = other DNA
tgtaatgacctaaattgaacta

SEQ ID NO: 79452 - DNA, 22 bp, synthetic construct
  misc_feature 1..22: note = chemically synthesized
  source 1..22: mol_type = other DNA
aattgaactaaagccataacac

SEQ ID NO: 79453 - DNA, 22 bp, synthetic construct
  misc_feature 1..22: note = chemically synthesized
  source 1..22: mol_type = other DNA
aactaaagccataacaccctcg

SEQ ID NO: 79454 - DNA, 22 bp, synthetic construct
  misc_feature 1..22: note = chemically synthesized
  source 1..22: mol_type = other DNA
aagccataacaccctcggaagg

SEQ ID NO: 79455 - DNA, 22 bp, synthetic construct
  misc_feature 1..22: note = chemically synthesized
  source 1..22: mol_type = other DNA
ggaaggaagcatgggtaaatct

SEQ ID NO: 79456 - DNA, 22 bp, synthetic construct
  misc_feature 1..22: note = chemically synthesized
  source 1..22: mol_type = other DNA
catgaactttgattttacaata

SEQ ID NO: 79457 - DNA, 22 bp, synthetic construct
  misc_feature 1..22: note = chemically synthesized
  source 1..22: mol_type = other DNA
atgaactttgattttacaatag

SEQ ID NO: 79458 - DNA, 22 bp, synthetic construct
  misc_feature 1..22: note = chemically synthesized
  source 1..22: mol_type = other DNA
tgattttacaatagattcttag

SEQ ID NO: 79459 - DNA, 22 bp, synthetic construct
  misc_feature 1..22: note = chemically synthesized
  source 1..22: mol_type = other DNA
gattttacaatagattcttaga

SEQ ID NO: 79460 - DNA, 22 bp, synthetic construct
  misc_feature 1..22: note = chemically synthesized
  source 1..22: mol_type = other DNA
attttacaatagattcttagat

SEQ ID NO: 79461 - DNA, 22 bp, synthetic construct
  misc_feature 1..22: note = chemically synthesized
  source 1..22: mol_type = other DNA
tacaatagattcttagatatga

SEQ ID NO: 79462 - DNA, 22 bp, synthetic construct
  misc_feature 1..22: note = chemically synthesized
  source 1..22: mol_type = other DNA
acaatagattcttagatatgac

SEQ ID NO: 79463 - DNA, 22 bp, synthetic construct
  misc_feature 1..22: note = chemically synthesized
  source 1..22: mol_type = other DNA
caatagattcttagatatgaca

SEQ ID NO: 79464 - DNA, 22 bp, synthetic construct
  misc_feature 1..22: note = chemically synthesized
  source 1..22: mol_type = other DNA
ttagatatgacacaaaaagtat

SEQ ID NO: 79465 - DNA, 22 bp, synthetic construct
  misc_feature 1..22: note = chemically synthesized
  source 1..22: mol_type = other DNA
agatatgacacaaaaagtatga

SEQ ID NO: 79466 - DNA, 22 bp, synthetic construct
  misc_feature 1..22: note = chemically synthesized
  source 1..22: mol_type = other DNA
gatatgacacaaaaagtatgag

SEQ ID NO: 79467 - DNA, 22 bp, synthetic construct
  misc_feature 1..22: note = chemically synthesized
  source 1..22: mol_type = other DNA
gatttcatttaaaaagttcatg

SEQ ID NO: 79468 - DNA, 22 bp, synthetic construct
  misc_feature 1..22: note = chemically synthesized
  source 1..22: mol_type = other DNA
catttaaaaagttcatgcaaca

SEQ ID NO: 79469 - DNA, 22 bp, synthetic construct
  misc_feature 1..22: note = chemically synthesized
  source 1..22: mol_type = other DNA
atttaaaaagttcatgcaacaa

SEQ ID NO: 79470 - DNA, 22 bp, synthetic construct
  misc_feature 1..22: note = chemically synthesized
  source 1..22: mol_type = other DNA
aaaaagttcatgcaacaaacga

SEQ ID NO: 79471 - DNA, 22 bp, synthetic construct
  misc_feature 1..22: note = chemically synthesized
  source 1..22: mol_type = other DNA
aaaagttcatgcaacaaacgac

SEQ ID NO: 79472 - DNA, 22 bp, synthetic construct
  misc_feature 1..22: note = chemically synthesized
  source 1..22: mol_type = other DNA
atgcaacaaacgactttaagaa

SEQ ID NO: 79473 - DNA, 22 bp, synthetic construct
  misc_feature 1..22: note = chemically synthesized
  source 1..22: mol_type = other DNA
taagaaagtaaaaagacaacct

SEQ ID NO: 79474 - DNA, 22 bp, synthetic construct
  misc_feature 1..22: note = chemically synthesized
  source 1..22: mol_type = other DNA
aagaaagtaaaaagacaaccta

SEQ ID NO: 79475 - DNA, 22 bp, synthetic construct
  misc_feature 1..22: note = chemically synthesized
  source 1..22: mol_type = other DNA
agaaagtaaaaagacaacctat

SEQ ID NO: 79476 - DNA, 22 bp, synthetic construct
  misc_feature 1..22: note = chemically synthesized
  source 1..22: mol_type = other DNA
taagatgagagaacatctttgc

SEQ ID NO: 79477 - DNA, 22 bp, synthetic construct
  misc_feature 1..22: note = chemically synthesized
  source 1..22: mol_type = other DNA
tgcaaattatgtatttcataag

SEQ ID NO: 79478 - DNA, 22 bp, synthetic construct
  misc_feature 1..22: note = chemically synthesized
  source 1..22: mol_type = other DNA
gcaaattatgtatttcataagt

SEQ ID NO: 79479 - DNA, 22 bp, synthetic construct
  misc_feature 1..22: note = chemically synthesized
  source 1..22: mol_type = other DNA
caaattatgtatttcataagtt

SEQ ID NO: 79480 - DNA, 22 bp, synthetic construct
  misc_feature 1..22: note = chemically synthesized
  source 1..22: mol_type = other DNA
tgtatttcataagtttaatatc

SEQ ID NO: 79481 - DNA, 22 bp, synthetic construct
  misc_feature 1..22: note = chemically synthesized
  source 1..22: mol_type = other DNA
cataagtttaatatccagaatg

SEQ ID NO: 79482 - DNA, 22 bp, synthetic construct
  misc_feature 1..22: note = chemically synthesized
  source 1..22: mol_type = other DNA
ataagtttaatatccagaatgt

SEQ ID NO: 79483 - DNA, 22 bp, synthetic construct
  misc_feature 1..22: note = chemically synthesized
  source 1..22: mol_type = other DNA
aatatccagaatgtatgaaaaa

SEQ ID NO: 79484 - DNA, 22 bp, synthetic construct
  misc_feature 1..22: note = chemically synthesized
  source 1..22: mol_type = other DNA
atatccagaatgtatgaaaaag

SEQ ID NO: 79485 - DNA, 22 bp, synthetic construct
  misc_feature 1..22: note = chemically synthesized
  source 1..22: mol_type = other DNA
caactcaaaaacaaaaagacaa

SEQ ID NO: 79486 - DNA, 22 bp, synthetic construct
  misc_feature 1..22: note = chemically synthesized
  source 1..22: mol_type = other DNA
aaaaacaaaaagacaaacaact

SEQ ID NO: 79487 - DNA, 22 bp, synthetic construct
  misc_feature 1..22: note = chemically synthesized
  source 1..22: mol_type = other DNA
aatttaaaaatatgcaaatgat

SEQ ID NO: 79488 - DNA, 22 bp, synthetic construct
  misc_feature 1..22: note = chemically synthesized
  source 1..22: mol_type = other DNA
aaaaatatgcaaatgatgggaa

SEQ ID NO: 79489 - DNA, 22 bp, synthetic construct
  misc_feature 1..22: note = chemically synthesized
  source 1..22: mol_type = other DNA
aaaatatgcaaatgatgggaat

SEQ ID NO: 79490 - DNA, 22 bp, synthetic construct
  misc_feature 1..22: note = chemically synthesized
  source 1..22: mol_type = other DNA
ctagaaagaagatatacaaatg

SEQ ID NO: 79491 - DNA, 22 bp, synthetic construct
  misc_feature 1..22: note = chemically synthesized
  source 1..22: mol_type = other DNA
tagaaagaagatatacaaatga

SEQ ID NO: 79492 - DNA, 22 bp, synthetic construct
  misc_feature 1..22: note = chemically synthesized
  source 1..22: mol_type = other DNA
gaaagaagatatacaaatgaac

SEQ ID NO: 79493 - DNA, 22 bp, synthetic construct
  misc_feature 1..22: note = chemically synthesized
  source 1..22: mol_type = other DNA
gcacataaaatgcaaaccaaaa

SEQ ID NO: 79494 - DNA, 22 bp, synthetic construct
  misc_feature 1..22: note = chemically synthesized
  source 1..22: mol_type = other DNA
cttcaaacttactagaatgtct

SEQ ID NO: 79495 - DNA, 22 bp, synthetic construct
  misc_feature 1..22: note = chemically synthesized
  source 1..22: mol_type = other DNA
caaacttactagaatgtctata

SEQ ID NO: 79496 - DNA, 22 bp, synthetic construct
  misc_feature 1..22: note = chemically synthesized
  source 1..22: mol_type = other DNA
aaacttactagaatgtctatac

SEQ ID NO: 79497 - DNA, 22 bp, synthetic construct
  misc_feature 1..22: note = chemically synthesized
  source 1..22: mol_type = other DNA
actagaatgtctatactttaag

SEQ ID NO: 79498 - DNA, 22 bp, synthetic construct
  misc_feature 1..22: note = chemically synthesized
  source 1..22: mol_type = other DNA
ctagaatgtctatactttaaga

SEQ ID NO: 79499 - DNA, 22 bp, synthetic construct
  misc_feature 1..22: note = chemically synthesized
  source 1..22: mol_type = other DNA
gaatgtctatactttaagagaa

SEQ ID NO: 79500 - DNA, 22 bp, synthetic construct
  misc_feature 1..22: note = chemically synthesized
  source 1..22: mol_type = other DNA
tactttaagagaaacaaaacaa

SEQ ID NO: 79501 - DNA, 22 bp, synthetic construct
  misc_feature 1..22: note = chemically synthesized
  source 1..22: mol_type = other DNA
taagagaaacaaaacaaatgaa

SEQ ID NO: 79502 - DNA, 22 bp, synthetic construct
  misc_feature 1..22: note = chemically synthesized
  source 1..22: mol_type = other DNA
aagagaaacaaaacaaatgaaa

SEQ ID NO: 79503 - DNA, 22 bp, synthetic construct
  misc_feature 1..22: note = chemically synthesized
  source 1..22: mol_type = other DNA
agagaaacaaaacaaatgaaaa

SEQ ID NO: 79504 - DNA, 22 bp, synthetic construct
  misc_feature 1..22: note = chemically synthesized
  source 1..22: mol_type = other DNA
acaaagatataagaaaattgga

SEQ ID NO: 79505 - DNA, 22 bp, synthetic construct
  misc_feature 1..22: note = chemically synthesized
  source 1..22: mol_type = other DNA
gaatcctcatatattgctgcta

SEQ ID NO: 79506 - DNA, 22 bp, synthetic construct
  misc_feature 1..22: note = chemically synthesized
  source 1..22: mol_type = other DNA
atatattgctgctaaaaatgtt

SEQ ID NO: 79507 - DNA, 22 bp, synthetic construct
  misc_feature 1..22: note = chemically synthesized
  source 1..22: mol_type = other DNA
ctgctaaaaatgttaagtggtg

SEQ ID NO: 79508 - DNA, 22 bp, synthetic construct
  misc_feature 1..22: note = chemically synthesized
  source 1..22: mol_type = other DNA
ctaaaaatgttaagtggtgcaa

SEQ ID NO: 79509 - DNA, 22 bp, synthetic construct
  misc_feature 1..22: note = chemically synthesized
  source 1..22: mol_type = other DNA
aaaatgttaagtggtgcaactt

SEQ ID NO: 79510 - DNA, 22 bp, synthetic construct
  misc_feature 1..22: note = chemically synthesized
  source 1..22: mol_type = other DNA
agtggtgcaacttctgtagaaa

SEQ ID NO: 79511 - DNA, 22 bp, synthetic construct
  misc_feature 1..22: note = chemically synthesized
  source 1..22: mol_type = other DNA
ctgtagaaaatattttgacagt

SEQ ID NO: 79512 - DNA, 22 bp, synthetic construct
  misc_feature 1..22: note = chemically synthesized
  source 1..22: mol_type = other DNA
tgtagaaaatattttgacagtt

SEQ ID NO: 79513 - DNA, 22 bp, synthetic construct
  misc_feature 1..22: note = chemically synthesized
  source 1..22: mol_type = other DNA
tagaaaatattttgacagttct

SEQ ID NO: 79514 - DNA, 22 bp, synthetic construct
  misc_feature 1..22: note = chemically synthesized
  source 1..22: mol_type = other DNA
tgacagttcttcaaaaacttag

SEQ ID NO: 79515 - DNA, 22 bp, synthetic construct
  misc_feature 1..22: note = chemically synthesized
  source 1..22: mol_type = other DNA
gacagttcttcaaaaacttagg

SEQ ID NO: 79516 - DNA, 22 bp, synthetic construct
  misc_feature 1..22: note = chemically synthesized
  source 1..22: mol_type = other DNA
acagttcttcaaaaacttaggc

SEQ ID NO: 79517 - DNA, 22 bp, synthetic construct
  misc_feature 1..22: note = chemically synthesized
  source 1..22: mol_type = other DNA
ttcaaaaacttaggcactgaat

SEQ ID NO: 79518 - DNA, 22 bp, synthetic construct
  misc_feature 1..22: note = chemically synthesized
  source 1..22: mol_type = other DNA
caaaaacttaggcactgaataa

SEQ ID NO: 79519 - DNA, 22 bp, synthetic construct
  misc_feature 1..22: note = chemically synthesized
  source 1..22: mol_type = other DNA
aaaaacttaggcactgaataac

SEQ ID NO: 79520 - DNA, 22 bp, synthetic construct
  misc_feature 1..22: note = chemically synthesized
  source 1..22: mol_type = other DNA
aggcactgaataacatatgacc

SEQ ID NO: 79521 - DNA, 22 bp, synthetic construct
  misc_feature 1..22: note = chemically synthesized
  source 1..22: mol_type = other DNA
ggcactgaataacatatgaccc

SEQ ID NO: 79522 - DNA, 22 bp, synthetic construct
  misc_feature 1..22: note = chemically synthesized
  source 1..22: mol_type = other DNA
aataacatatgaccccaaaatt

SEQ ID NO: 79523 - DNA, 22 bp, synthetic construct
  misc_feature 1..22: note = chemically synthesized
  source 1..22: mol_type = other DNA
ctctcctaggtatatattaaaa

SEQ ID NO: 79524 - DNA, 22 bp, synthetic construct
  misc_feature 1..22: note = chemically synthesized
  source 1..22: mol_type = other DNA
tcctaggtatatattaaaaata

SEQ ID NO: 79525 - DNA, 22 bp, synthetic construct
  misc_feature 1..22: note = chemically synthesized
  source 1..22: mol_type = other DNA
ctaggtatatattaaaaatata

SEQ ID NO: 79526 - DNA, 22 bp, synthetic construct
  misc_feature 1..22: note = chemically synthesized
  source 1..22: mol_type = other DNA
ggtatatattaaaaatatatat

SEQ ID NO: 79527 - DNA, 22 bp, synthetic construct
  misc_feature 1..22: note = chemically synthesized
  source 1..22: mol_type = other DNA
aaaatatatataaagatttaaa

SEQ ID NO: 79528 - DNA, 22 bp, synthetic construct
  misc_feature 1..22: note = chemically synthesized
  source 1..22: mol_type = other DNA
aaacaggtacttgtactgaaat

SEQ ID NO: 79529 - DNA, 22 bp, synthetic construct
  misc_feature 1..22: note = chemically synthesized
  source 1..22: mol_type = other DNA
aacaggtacttgtactgaaatg

SEQ ID NO: 79530 - DNA, 22 bp, synthetic construct
  misc_feature 1..22: note = chemically synthesized
  source 1..22: mol_type = other DNA
gtactgaaatgttcattgtagc

SEQ ID NO: 79531 - DNA, 22 bp, synthetic construct
  misc_feature 1..22: note = chemically synthesized
  source 1..22: mol_type = other DNA
tactgaaatgttcattgtagca

SEQ ID NO: 79532 - DNA, 22 bp, synthetic construct
  misc_feature 1..22: note = chemically synthesized
  source 1..22: mol_type = other DNA
aaatgttcattgtagcattatt

SEQ ID NO: 79533 - DNA, 22 bp, synthetic construct
  misc_feature 1..22: note = chemically synthesized
  source 1..22: mol_type = other DNA
attgtagcattattcacaatag

SEQ ID NO: 79534 - DNA, 22 bp, synthetic construct
  misc_feature 1..22: note = chemically synthesized
  source 1..22: mol_type = other DNA
tagcattattcacaatagccaa

SEQ ID NO: 79535 - DNA, 22 bp, synthetic construct
  misc_feature 1..22: note = chemically synthesized
  source 1..22: mol_type = other DNA
ttcacaatagccaaaaggtgga

SEQ ID NO: 79536 - DNA, 22 bp, synthetic construct
  misc_feature 1..22: note = chemically synthesized
  source 1..22: mol_type = other DNA
acaatagccaaaaggtggaaac

SEQ ID NO: 79537 - DNA, 22 bp, synthetic construct
  misc_feature 1..22: note = chemically synthesized
  source 1..22: mol_type = other DNA
tgtagcaataaaaaagaatgaa

SEQ ID NO: 79538 - DNA, 22 bp, synthetic construct
  misc_feature 1..22: note = chemically synthesized
  source 1..22: mol_type = other DNA
atttaatgtcatgaataggttt

SEQ ID NO: 79539 - DNA, 22 bp, synthetic construct
  misc_feature 1..22: note = chemically synthesized
  source 1..22: mol_type = other DNA
tttaatgtcatgaataggtttt

SEQ ID NO: 79540 - DNA, 22 bp, synthetic construct
  misc_feature 1..22: note = chemically synthesized
  source 1..22: mol_type = other DNA
aatgtcatgaataggtttttgg

SEQ ID NO: 79541 - DNA, 22 bp, synthetic construct
  misc_feature 1..22: note = chemically synthesized
  source 1..22: mol_type = other DNA
atgtcatgaataggtttttgga

SEQ ID NO: 79542 - DNA, 22 bp, synthetic construct
  misc_feature 1..22: note = chemically synthesized
  source 1..22: mol_type = other DNA
ttggaaatggcaactttaagtg

SEQ ID NO: 79543 - DNA, 22 bp, synthetic construct
  misc_feature 1..22: note = chemically synthesized
  source 1..22: mol_type = other DNA
tggaaatggcaactttaagtga

SEQ ID NO: 79544 - DNA, 22 bp, synthetic construct
  misc_feature 1..22: note = chemically synthesized
  source 1..22: mol_type = other DNA
ggaaatggcaactttaagtgaa

SEQ ID NO: 79545 - DNA, 22 bp, synthetic construct
  misc_feature 1..22: note = chemically synthesized
  source 1..22: mol_type = other DNA
gaaatggcaactttaagtgaaa

SEQ ID NO: 79546 - DNA, 22 bp, synthetic construct
  misc_feature 1..22: note = chemically synthesized
  source 1..22: mol_type = other DNA
taagtgaaatgatgtaaaacag

SEQ ID NO: 79547 - DNA, 22 bp, synthetic construct
  misc_feature 1..22: note = chemically synthesized
  source 1..22: mol_type = other DNA
aagtgaaatgatgtaaaacaga

SEQ ID NO: 79548 - DNA, 22 bp, synthetic construct
  misc_feature 1..22: note = chemically synthesized
  source 1..22: mol_type = other DNA
agtgaaatgatgtaaaacagat

SEQ ID NO: 79549 - DNA, 22 bp, synthetic construct
  misc_feature 1..22: note = chemically synthesized
  source 1..22: mol_type = other DNA
aaataacactgttttagccaac

SEQ ID NO: 79550 - DNA, 22 bp, synthetic construct
  misc_feature 1..22: note = chemically synthesized
  source 1..22: mol_type = other DNA
ttttagccaacactgttagatg

SEQ ID NO: 79551 - DNA, 22 bp, synthetic construct
  misc_feature 1..22: note = chemically synthesized
  source 1..22: mol_type = other DNA
tagccaacactgttagatgaga

SEQ ID NO: 79552 - DNA, 22 bp, synthetic construct
  misc_feature 1..22: note = chemically synthesized
  source 1..22: mol_type = other DNA
agccaacactgttagatgagaa

SEQ ID NO: 79553 - DNA, 22 bp, synthetic construct
  misc_feature 1..22: note = chemically synthesized
  source 1..22: mol_type = other DNA
gccaacactgttagatgagaaa

SEQ ID NO: 79554 - DNA, 22 bp, synthetic construct
  misc_feature 1..22: note = chemically synthesized
  source 1..22: mol_type = other DNA
ttagatgagaaaaaaaatggat

SEQ ID NO: 79555 - DNA, 22 bp, synthetic construct
  misc_feature 1..22: note = chemically synthesized
  source 1..22: mol_type = other DNA
gatgagaaaaaaaatggatatc

SEQ ID NO: 79556 - DNA, 22 bp, synthetic construct
  misc_feature 1..22: note = chemically synthesized
  source 1..22: mol_type = other DNA
tatgtcacttggcttaaagttt

SEQ ID NO: 79557 - DNA, 22 bp, synthetic construct
  misc_feature 1..22: note = chemically synthesized
  source 1..22: mol_type = other DNA
ggcttaaagtttcagtttccaa

SEQ ID NO: 79558 - DNA, 22 bp, synthetic construct
  misc_feature 1..22: note = chemically synthesized
  source 1..22: mol_type = other DNA
gcttaaagtttcagtttccaag

SEQ ID NO: 79559 - DNA, 22 bp, synthetic construct
  misc_feature 1..22: note = chemically synthesized
  source 1..22: mol_type = other DNA
aaagtttcagtttccaagaatc

SEQ ID NO: 79560 - DNA, 22 bp, synthetic construct
  misc_feature 1..22: note = chemically synthesized
  source 1..22: mol_type = other DNA
aagtttcagtttccaagaatct

SEQ ID NO: 79561 - DNA, 22 bp, synthetic construct
  misc_feature 1..22: note = chemically synthesized
  source 1..22: mol_type = other DNA
cagtttccaagaatctatgaat

SEQ ID NO: 79562 - DNA, 22 bp, synthetic construct
  misc_feature 1..22: note = chemically synthesized
  source 1..22: mol_type = other DNA
agtttccaagaatctatgaatg

SEQ ID NO: 79563 - DNA, 22 bp, synthetic construct
  misc_feature 1..22: note = chemically synthesized
  source 1..22: mol_type = other DNA
ccaagaatctatgaatggacaa

SEQ ID NO: 79564 - DNA, 22 bp, synthetic construct
  misc_feature 1..22: note = chemically synthesized
  source 1..22: mol_type = other DNA
caagaatctatgaatggacaac

SEQ ID NO: 79565 - DNA, 22 bp, synthetic construct
  misc_feature 1..22: note = chemically synthesized
  source 1..22: mol_type = other DNA
tgaatggacaacattaagcaaa

SEQ ID NO: 79566 - DNA, 22 bp, synthetic construct
  misc_feature 1..22: note = chemically synthesized
  source 1..22: mol_type = other DNA
agcaaagacttaccactataca

SEQ ID NO: 79567 - DNA, 22 bp, synthetic construct
  misc_feature 1..22: note = chemically synthesized
  source 1..22: mol_type = other DNA
accactatacatgttatggcat

SEQ ID NO: 79568 - DNA, 22 bp, synthetic construct
  misc_feature 1..22: note = chemically synthesized
  source 1..22: mol_type = other DNA
ccactatacatgttatggcatg

SEQ ID NO: 79569 - DNA, 22 bp, synthetic construct
  misc_feature 1..22: note = chemically synthesized
  source 1..22: mol_type = other DNA
tacatgttatggcatggatgga

SEQ ID NO: 79570 - DNA, 22 bp, synthetic construct
  misc_feature 1..22: note = chemically synthesized
  source 1..22: mol_type = other DNA
tggcatggatggactttgaaac

SEQ ID NO: 79571 - DNA, 22 bp, synthetic construct
  misc_feature 1..22: note = chemically synthesized
  source 1..22: mol_type = other DNA
tgaaaccttatgttgggtaaaa

SEQ ID NO: 79572 - DNA, 22 bp, synthetic construct
  misc_feature 1..22: note = chemically synthesized
  source 1..22: mol_type = other DNA
gaaaccttatgttgggtaaaat

SEQ ID NO: 79573 - DNA, 22 bp, synthetic construct
  misc_feature 1..22: note = chemically synthesized
  source 1..22: mol_type = other DNA
aaaccttatgttgggtaaaata

SEQ ID NO: 79574 - DNA, 22 bp, synthetic construct
  misc_feature 1..22: note = chemically synthesized
  source 1..22: mol_type = other DNA
atgttgggtaaaataagccaga

SEQ ID NO: 79575 - DNA, 22 bp, synthetic construct
  misc_feature 1..22: note = chemically synthesized
  source 1..22: mol_type = other DNA
tgttgggtaaaataagccagac

SEQ ID NO: 79576 - DNA, 22 bp, synthetic construct
  misc_feature 1..22: note = chemically synthesized
  source 1..22: mol_type = other DNA
ggtaaaataagccagacacaaa

SEQ ID NO: 79577 - DNA, 22 bp, synthetic construct
  misc_feature 1..22: note = chemically synthesized
  source 1..22: mol_type = other DNA
tatgaatctatttatatgaatt

SEQ ID NO: 79578 - DNA, 22 bp, synthetic construct
  misc_feature 1..22: note = chemically synthesized
  source 1..22: mol_type = other DNA
tttatatgaattatctaaaata

SEQ ID NO: 79579 - DNA, 22 bp, synthetic construct
  misc_feature 1..22: note = chemically synthesized
  source 1..22: mol_type = other DNA
atatgaattatctaaaatagac

SEQ ID NO: 79580 - DNA, 22 bp, synthetic construct
  misc_feature 1..22: note = chemically synthesized
  source 1..22: mol_type = other DNA
tatgaattatctaaaatagact

SEQ ID NO: 79581 - DNA, 22 bp, synthetic construct
  misc_feature 1..22: note = chemically synthesized
  source 1..22: mol_type = other DNA
tctaaaatagactgatttagag

SEQ ID NO: 79582 - DNA, 22 bp, synthetic construct
  misc_feature 1..22: note = chemically synthesized
  source 1..22: mol_type = other DNA
aaatagactgatttagagaaac

SEQ ID NO: 79583 - DNA, 22 bp, synthetic construct
  misc_feature 1..22: note = chemically synthesized
  source 1..22: mol_type = other DNA
atttagagaaacatatagtaga

SEQ ID NO: 79584 - DNA, 22 bp, synthetic construct
  misc_feature 1..22: note = chemically synthesized
  source 1..22: mol_type = other DNA
agagaaacatatagtagattag

SEQ ID NO: 79585 - DNA, 22 bp, synthetic construct
  misc_feature 1..22: note = chemically synthesized
  source 1..22: mol_type = other DNA
gagaaacatatagtagattaga

SEQ ID NO: 79586 - DNA, 22 bp, synthetic construct
  misc_feature 1..22: note = chemically synthesized
  source 1..22: mol_type = other DNA
gaggttactatgggactgggga

SEQ ID NO: 79587 - DNA, 22 bp, synthetic construct
  misc_feature 1..22: note = chemically synthesized
  source 1..22: mol_type = other DNA
ctatgggactggggagttactg

SEQ ID NO: 79588 - DNA, 22 bp, synthetic construct
  misc_feature 1..22: note = chemically synthesized
  source 1..22: mol_type = other DNA
tgggactggggagttactgcct

SEQ ID NO: 79589 - DNA, 22 bp, synthetic construct
  misc_feature 1..22: note = chemically synthesized
  source 1..22: mol_type = other DNA
gggagttactgcctaacaagta

SEQ ID NO: 79590 - DNA, 22 bp, synthetic construct
  misc_feature 1..22: note = chemically synthesized
  source 1..22: mol_type = other DNA
ctgcctaacaagtatagcattt

SEQ ID NO: 79591 - DNA, 22 bp, synthetic construct
  misc_feature 1..22: note = chemically synthesized
  source 1..22: mol_type = other DNA
cctaacaagtatagcatttctg

SEQ ID NO: 79592 - DNA, 22 bp, synthetic construct
  misc_feature 1..22: note = chemically synthesized
  source 1..22: mol_type = other DNA
acaagtatagcatttctgcttg

SEQ ID NO: 79593 - DNA, 22 bp, synthetic construct
  misc_feature 1..22: note = chemically synthesized
  source 1..22: mol_type = other DNA
ctgcttggatgatgaaaaagtt

SEQ ID NO: 79594 - DNA, 22 bp, synthetic construct
  misc_feature 1..22: note = chemically synthesized
  source 1..22: mol_type = other DNA
tgcttggatgatgaaaaagttt

SEQ ID NO: 79595 - DNA, 22 bp, synthetic construct
  misc_feature 1..22: note = chemically synthesized
  source 1..22: mol_type = other DNA
cttggatgatgaaaaagttttg

SEQ ID NO: 79596 - DNA, 22 bp, synthetic construct
  misc_feature 1..22: note = chemically synthesized
  source 1..22: mol_type = other DNA
ggatgatgaaaaagttttggca

SEQ ID NO: 79597 - DNA, 22 bp, synthetic construct
  misc_feature 1..22: note = chemically synthesized
  source 1..22: mol_type = other DNA
gatgatgaaaaagttttggcat

SEQ ID NO: 79598 - DNA, 22 bp, synthetic construct
  misc_feature 1..22: note = chemically synthesized
  source 1..22: mol_type = other DNA
tggcatgagatcatggtgatag

SEQ ID NO: 79599 - DNA, 22 bp, synthetic construct
  misc_feature 1..22: note = chemically synthesized
  source 1..22: mol_type = other DNA
ggcatgagatcatggtgatagc

SEQ ID NO: 79600 - DNA, 22 bp, synthetic construct
  misc_feature 1..22: note = chemically synthesized
  source 1..22: mol_type = other DNA
gcatgagatcatggtgatagcg

SEQ ID NO: 79601 - DNA, 22 bp, synthetic construct
  misc_feature 1..22: note = chemically synthesized
  source 1..22: mol_type = other DNA
ttaatataattaatgccacata

SEQ ID NO: 79602 - DNA, 22 bp, synthetic construct
  misc_feature 1..22: note = chemically synthesized
  source 1..22: mol_type = other DNA
atataattaatgccacataatt

SEQ ID NO: 79603 - DNA, 22 bp, synthetic construct
  misc_feature 1..22: note = chemically synthesized
  source 1..22: mol_type = other DNA
atgccacataattatacttaaa

SEQ ID NO: 79604 - DNA, 22 bp, synthetic construct
  misc_feature 1..22: note = chemically synthesized
  source 1..22: mol_type = other DNA
tacttaaaaatggttaatatgg

SEQ ID NO: 79605 - DNA, 22 bp, synthetic construct
  misc_feature 1..22: note = chemically synthesized
  source 1..22: mol_type = other DNA
aaaaatggttaatatggtgagc

SEQ ID NO: 79606 - DNA, 22 bp, synthetic construct
  misc_feature 1..22: note = chemically synthesized
  source 1..22: mol_type = other DNA
aaaatggttaatatggtgagct

SEQ ID NO: 79607 - DNA, 22 bp, synthetic construct
  misc_feature 1..22: note = chemically synthesized
  source 1..22: mol_type = other DNA
atatggtgagctttattatata

SEQ ID NO: 79608 - DNA, 22 bp, synthetic construct
  misc_feature 1..22: note = chemically synthesized
  source 1..22: mol_type = other DNA
tattatatatgatatacggtat

SEQ ID NO: 79609 - DNA, 22 bp, synthetic construct
  misc_feature 1..22: note = chemically synthesized
  source 1..22: mol_type = other DNA
attatatatgatatacggtatt

SEQ ID NO: 79610 - DNA, 22 bp, synthetic construct
  misc_feature 1..22: note = chemically synthesized
  source 1..22: mol_type = other DNA
ttatatatgatatacggtatta

SEQ ID NO: 79611 - DNA, 22 bp, synthetic construct
  misc_feature 1..22: note = chemically synthesized
  source 1..22: mol_type = other DNA
tatatgatatacggtattatat

SEQ ID NO: 79612 - DNA, 22 bp, synthetic construct
  misc_feature 1..22: note = chemically synthesized
  source 1..22: mol_type = other DNA
tatgtagcatatttataaactt

SEQ ID NO: 79613 - DNA, 22 bp, synthetic construct
  misc_feature 1..22: note = chemically synthesized
  source 1..22: mol_type = other DNA
ataaactttatcacaataaaaa

SEQ ID NO: 79614 - DNA, 22 bp, synthetic construct
  misc_feature 1..22: note = chemically synthesized
  source 1..22: mol_type = other DNA
taaactttatcacaataaaaat

SEQ ID NO: 79615 - DNA, 22 bp, synthetic construct
  misc_feature 1..22: note = chemically synthesized
  source 1..22: mol_type = other DNA
tatcacaataaaaatggaaaga

SEQ ID NO: 79616 - DNA, 22 bp, synthetic construct
  misc_feature 1..22: note = chemically synthesized
  source 1..22: mol_type = other DNA
atcacaataaaaatggaaagaa

SEQ ID NO: 79617 - DNA, 22 bp, synthetic construct
  misc_feature 1..22: note = chemically synthesized
  source 1..22: mol_type = other DNA
tcacaataaaaatggaaagaaa

SEQ ID NO: 79618 - DNA, 22 bp, synthetic construct
  misc_feature 1..22: note = chemically synthesized
  source 1..22: mol_type = other DNA
aaaacaagacaaatttttattt

SEQ ID NO: 79619 - DNA, 22 bp, synthetic construct
  misc_feature 1..22: note = chemically synthesized
  source 1..22: mol_type = other DNA
aaacaagacaaatttttatttt

SEQ ID NO: 79620 - DNA, 22 bp, synthetic construct
  misc_feature 1..22: note = chemically synthesized
  source 1..22: mol_type = other DNA
ttattttgattagggttgaatt

SEQ ID NO: 79621 - DNA, 22 bp, synthetic construct
  misc_feature 1..22: note = chemically synthesized
  source 1..22: mol_type = other DNA
tattttgattagggttgaattg

SEQ ID NO: 79622 - DNA, 22 bp, synthetic construct
  misc_feature 1..22: note = chemically synthesized
  source 1..22: mol_type = other DNA
attttgattagggttgaattga

SEQ ID NO: 79623 - DNA, 22 bp, synthetic construct
  misc_feature 1..22: note = chemically synthesized
  source 1..22: mol_type = other DNA
ttttgattagggttgaattgaa

SEQ ID NO: 79624 - DNA, 22 bp, synthetic construct
  misc_feature 1..22: note = chemically synthesized
  source 1..22: mol_type = other DNA
tgattagggttgaattgaattt

SEQ ID NO: 79625 - DNA, 22 bp, synthetic construct
  misc_feature 1..22: note = chemically synthesized
  source 1..22: mol_type = other DNA
gattagggttgaattgaattta

SEQ ID NO: 79626 - DNA, 22 bp, synthetic construct
  misc_feature 1..22: note = chemically synthesized
  source 1..22: mol_type = other DNA
attagggttgaattgaatttat

SEQ ID NO: 79627 - DNA, 22 bp, synthetic construct
  misc_feature 1..22: note = chemically synthesized
  source 1..22: mol_type = other DNA
gggttgaattgaatttattatg

SEQ ID NO: 79628 - DNA, 22 bp, synthetic construct
  misc_feature 1..22: note = chemically synthesized
  source 1..22: mol_type = other DNA
aattgaatttattatgagttgt

SEQ ID NO: 79629 - DNA, 22 bp, synthetic construct
  misc_feature 1..22: note = chemically synthesized
  source 1..22: mol_type = other DNA
aatttattatgagttgtttctg

SEQ ID NO: 79630 - DNA, 22 bp, synthetic construct
  misc_feature 1..22: note = chemically synthesized
  source 1..22: mol_type = other DNA
attatgagttgtttctgagaga

SEQ ID NO: 79631 - DNA, 22 bp, synthetic construct
  misc_feature 1..22: note = chemically synthesized
  source 1..22: mol_type = other DNA
ttatgagttgtttctgagagaa

SEQ ID NO: 79632 - DNA, 22 bp, synthetic construct
  misc_feature 1..22: note = chemically synthesized
  source 1..22: mol_type = other DNA
tgagttgtttctgagagaattg

SEQ ID NO: 79633 - DNA, 22 bp, synthetic construct
  misc_feature 1..22: note = chemically synthesized
  source 1..22: mol_type = other DNA
tttctgagagaattgttacaat

SEQ ID NO: 79634 - DNA, 22 bp, synthetic construct
  misc_feature 1..22: note = chemically synthesized
  source 1..22: mol_type = other DNA
ctgagagaattgttacaataaa

SEQ ID NO: 79635 - DNA, 22 bp, synthetic construct
  misc_feature 1..22: note = chemically synthesized
  source 1..22: mol_type = other DNA
tgagagaattgttacaataaac

SEQ ID NO: 79636 - DNA, 22 bp, synthetic construct
  misc_feature 1..22: note = chemically synthesized
  source 1..22: mol_type = other DNA
agagaattgttacaataaacaa

SEQ ID NO: 79637 - DNA, 22 bp, synthetic construct
  misc_feature 1..22: note = chemically synthesized
  source 1..22: mol_type = other DNA
ttacaataaacaatgtataata

SEQ ID NO: 79638 - DNA, 22 bp, synthetic construct
  misc_feature 1..22: note = chemically synthesized
  source 1..22: mol_type = other DNA
caataaacaatgtataataaac

SEQ ID NO: 79639 - DNA, 22 bp, synthetic construct
  misc_feature 1..22: note = chemically synthesized
  source 1..22: mol_type = other DNA
tttcatttattttaggcacata

SEQ ID NO: 79640 - DNA, 22 bp, synthetic construct
  misc_feature 1..22: note = chemically synthesized
  source 1..22: mol_type = other DNA
catttattttaggcacatatac

SEQ ID NO: 79641 - DNA, 22 bp, synthetic construct
  misc_feature 1..22: note = chemically synthesized
  source 1..22: mol_type = other DNA
atttattttaggcacatataca

SEQ ID NO: 79642 - DNA, 22 bp, synthetic construct
  misc_feature 1..22: note = chemically synthesized
  source 1..22: mol_type = other DNA
attttaggcacatatacagttc

SEQ ID NO: 79643 - DNA, 22 bp, synthetic construct
  misc_feature 1..22: note = chemically synthesized
  source 1..22: mol_type = other DNA
ttttaggcacatatacagttct

SEQ ID NO: 79644 - DNA, 22 bp, synthetic construct
  misc_feature 1..22: note = chemically synthesized
  source 1..22: mol_type = other DNA
taggcacatatacagttctatt

SEQ ID NO: 79645 - DNA, 22 bp, synthetic construct
  misc_feature 1..22: note = chemically synthesized
  source 1..22: mol_type = other DNA
aggcacatatacagttctatta

SEQ ID NO: 79646 - DNA, 22 bp, synthetic construct
  misc_feature 1..22: note = chemically synthesized
  source 1..22: mol_type = other DNA
ggcacatatacagttctattat

SEQ ID NO: 79647 - DNA, 22 bp, synthetic construct
  misc_feature 1..22: note = chemically synthesized
  source 1..22: mol_type = other DNA
tattatcattttgggttttatt

SEQ ID NO: 79648 - DNA, 22 bp, synthetic construct
  misc_feature 1..22: note = chemically synthesized
  source 1..22: mol_type = other DNA
ttatcattttgggttttatttt

SEQ ID NO: 79649 - DNA, 22 bp, synthetic construct
  misc_feature 1..22: note = chemically synthesized
  source 1..22: mol_type = other DNA
tcattttgggttttattttttg

SEQ ID NO: 79650 - DNA, 22 bp, synthetic construct
  misc_feature 1..22: note = chemically synthesized
  source 1..22: mol_type = other DNA
tgggttttattttttgtttttc

SEQ ID NO: 79651 - DNA, 22 bp, synthetic construct
  misc_feature 1..22: note = chemically synthesized
  source 1..22: mol_type = other DNA
gggttttattttttgtttttct

SEQ ID NO: 79652 - DNA, 22 bp, synthetic construct
  misc_feature 1..22: note = chemically synthesized
  source 1..22: mol_type = other DNA
ggttttattttttgtttttctt

SEQ ID NO: 79653 - DNA, 22 bp, synthetic construct
  misc_feature 1..22: note = chemically synthesized
  source 1..22: mol_type = other DNA
tattttttgtttttctttttgt

SEQ ID NO: 79654 - DNA, 22 bp, synthetic construct
  misc_feature 1..22: note = chemically synthesized
  source 1..22: mol_type = other DNA
attttttgtttttctttttgtt

SEQ ID NO: 79655 - DNA, 22 bp, synthetic construct
  misc_feature 1..22: note = chemically synthesized
  source 1..22: mol_type = other DNA
ttttttgtttttctttttgttt

SEQ ID NO: 79656 - DNA, 22 bp, synthetic construct
  misc_feature 1..22: note = chemically synthesized
  source 1..22: mol_type = other DNA
tttgtttttctttttgtttttg

SEQ ID NO: 79657 - DNA, 22 bp, synthetic construct
  misc_feature 1..22: note = chemically synthesized
  source 1..22: mol_type = other DNA
ttgtttttctttttgtttttgt

SEQ ID NO: 79658 - DNA, 22 bp, synthetic construct
  misc_feature 1..22: note = chemically synthesized
  source 1..22: mol_type = other DNA
tgtttttctttttgtttttgtt

SEQ ID NO: 79659 - DNA, 22 bp, synthetic construct
  misc_feature 1..22: note = chemically synthesized
  source 1..22: mol_type = other DNA
gtttttctttttgtttttgttt

SEQ ID NO: 79660 - DNA, 22 bp, synthetic construct
  misc_feature 1..22: note = chemically synthesized
  source 1..22: mol_type = other DNA
tttttctttttgtttttgtttt

SEQ ID NO: 79661 - DNA, 22 bp, synthetic construct
  misc_feature 1..22: note = chemically synthesized
  source 1..22: mol_type = other DNA
ttctttttgtttttgttttacg

SEQ ID NO: 79662 - DNA, 22 bp, synthetic construct
  misc_feature 1..22: note = chemically synthesized
  source 1..22: mol_type = other DNA
tctttttgtttttgttttacgt

SEQ ID NO: 79663 - DNA, 22 bp, synthetic construct
  misc_feature 1..22: note = chemically synthesized
  source 1..22: mol_type = other DNA
ctttttgtttttgttttacgta

SEQ ID NO: 79664 - DNA, 22 bp, synthetic construct
  misc_feature 1..22: note = chemically synthesized
  source 1..22: mol_type = other DNA
tttttgtttttgttttacgtat

SEQ ID NO: 79665 - DNA, 22 bp, synthetic construct
  misc_feature 1..22: note = chemically synthesized
  source 1..22: mol_type = other DNA
tttgtttttgttttacgtattt

SEQ ID NO: 79666 - DNA, 22 bp, synthetic construct
  misc_feature 1..22: note = chemically synthesized
  source 1..22: mol_type = other DNA
ttgtttttgttttacgtatttt

SEQ ID NO: 79667 - DNA, 22 bp, synthetic construct
  misc_feature 1..22: note = chemically synthesized
  source 1..22: mol_type = other DNA
tgtttttgttttacgtattttt

SEQ ID NO: 79668 - DNA, 22 bp, synthetic construct
  misc_feature 1..22: note = chemically synthesized
  source 1..22: mol_type = other DNA
gtttttgttttacgtatttttg

SEQ ID NO: 79669 - DNA, 22 bp, synthetic construct
  misc_feature 1..22: note = chemically synthesized
  source 1..22: mol_type = other DNA
tttttgttttacgtatttttgg

SEQ ID NO: 79670 - DNA, 22 bp, synthetic construct
  misc_feature 1..22: note = chemically synthesized
  source 1..22: mol_type = other DNA
ttgttttacgtatttttggttt

SEQ ID NO: 79671 - DNA, 22 bp, synthetic construct
  misc_feature 1..22: note = chemically synthesized
  source 1..22: mol_type = other DNA
tgttttacgtatttttggtttt

SEQ ID NO: 79672 - DNA, 22 bp, synthetic construct
  misc_feature 1..22: note = chemically synthesized
  source 1..22: mol_type = other DNA
gttttacgtatttttggttttt

SEQ ID NO: 79673 - DNA, 22 bp, synthetic construct
  misc_feature 1..22: note = chemically synthesized
  source 1..22: mol_type = other DNA
ttttacgtatttttggtttttt

SEQ ID NO: 79674 - DNA, 22 bp, synthetic construct
  misc_feature 1..22: note = chemically synthesized
  source 1..22: mol_type = other DNA
tacgtatttttggtttttttga

SEQ ID NO: 79675 - DNA, 22 bp, synthetic construct
  misc_feature 1..22: note = chemically synthesized
  source 1..22: mol_type = other DNA
acgtatttttggtttttttgag

SEQ ID NO: 79676 - DNA, 22 bp, synthetic construct
  misc_feature 1..22: note = chemically synthesized
  source 1..22: mol_type = other DNA
cgtatttttggtttttttgaga

SEQ ID NO: 79677 - DNA, 22 bp, synthetic construct
  misc_feature 1..22: note = chemically synthesized
  source 1..22: mol_type = other DNA
ttggtttttttgagatggagtc

SEQ ID NO: 79678 - DNA, 22 bp, synthetic construct
  misc_feature 1..22: note = chemically synthesized
  source 1..22: mol_type = other DNA
tggtttttttgagatggagtct

SEQ ID NO: 79679 - DNA, 22 bp, synthetic construct
  misc_feature 1..22: note = chemically synthesized
  source 1..22: mol_type = other DNA
ggtttttttgagatggagtctc

SEQ ID NO: 79680 - DNA, 22 bp, synthetic construct
  misc_feature 1..22: note = chemically synthesized
  source 1..22: mol_type = other DNA
gtttttttgagatggagtctct

SEQ ID NO: 79681 - DNA, 22 bp, synthetic construct
  misc_feature 1..22: note = chemically synthesized
  source 1..22: mol_type = other DNA
ttttgagatggagtctctctct

SEQ ID NO: 79682 - DNA, 22 bp, synthetic construct
  misc_feature 1..22: note = chemically synthesized
  source 1..22: mol_type = other DNA
tttgagatggagtctctctctg

SEQ ID NO: 79683 - DNA, 22 bp, synthetic construct
  misc_feature 1..22: note = chemically synthesized
  source 1..22: mol_type = other DNA
ttgagatggagtctctctctgt

SEQ ID NO: 79684 - DNA, 22 bp, synthetic construct
  misc_feature 1..22: note = chemically synthesized
  source 1..22: mol_type = other DNA
tgagatggagtctctctctgtg

SEQ ID NO: 79685 - DNA, 22 bp, synthetic construct
  misc_feature 1..22: note = chemically synthesized
  source 1..22: mol_type = other DNA
gagatggagtctctctctgtgg

SEQ ID NO: 79686 - DNA, 22 bp, synthetic construct
  misc_feature 1..22: note = chemically synthesized
  source 1..22: mol_type = other DNA
agatggagtctctctctgtggt

SEQ ID NO: 79687 - DNA, 22 bp, synthetic construct
  misc_feature 1..22: note = chemically synthesized
  source 1..22: mol_type = other DNA
tctctgtggtccaggctagagt

SEQ ID NO: 79688 - DNA, 22 bp, synthetic construct
  misc_feature 1..22: note = chemically synthesized
  source 1..22: mol_type = other DNA
tctgtggtccaggctagagtga

SEQ ID NO: 79689 - DNA, 22 bp, synthetic construct
  misc_feature 1..22: note = chemically synthesized
  source 1..22: mol_type = other DNA
tgtggtccaggctagagtgagg

SEQ ID NO: 79690 - DNA, 22 bp, synthetic construct
  misc_feature 1..22: note = chemically synthesized
  source 1..22: mol_type = other DNA
tggtccaggctagagtgaggtg

SEQ ID NO: 79691 - DNA, 22 bp, synthetic construct
  misc_feature 1..22: note = chemically synthesized
  source 1..22: mol_type = other DNA
gagtgaggtgacgcgatctcgg

SEQ ID NO: 79692 - DNA, 22 bp, synthetic construct
  misc_feature 1..22: note = chemically synthesized
  source 1..22: mol_type = other DNA
ggctcactgcaacctccgcctc

SEQ ID NO: 79693 - DNA, 22 bp, synthetic construct
  misc_feature 1..22: note = chemically synthesized
  source 1..22: mol_type = other DNA
actgcaacctccgcctccagaa

SEQ ID NO: 79694 - DNA, 22 bp, synthetic construct
  misc_feature 1..22: note = chemically synthesized
  source 1..22: mol_type = other DNA
caacctccgcctccagaattca

SEQ ID NO: 79695 - DNA, 22 bp, synthetic construct
  misc_feature 1..22: note = chemically synthesized
  source 1..22: mol_type = other DNA
cgcctccagaattcaaatcatt

SEQ ID NO: 79696 - DNA, 22 bp, synthetic construct
  misc_feature 1..22: note = chemically synthesized
  source 1..22: mol_type = other DNA
cagaattcaaatcattctcctg

SEQ ID NO: 79697 - DNA, 22 bp, synthetic construct
  misc_feature 1..22: note = chemically synthesized
  source 1..22: mol_type = other DNA
aaatcattctcctgcctcagcc

SEQ ID NO: 79698 - DNA, 22 bp, synthetic construct
  misc_feature 1..22: note = chemically synthesized
  source 1..22: mol_type = other DNA
tcctgcctcagcctcccatgta

SEQ ID NO: 79699 - DNA, 22 bp, synthetic construct
  misc_feature 1..22: note = chemically synthesized
  source 1..22: mol_type = other DNA
ctgcctcagcctcccatgtagc

SEQ ID NO: 79700 - DNA, 22 bp, synthetic construct
  misc_feature 1..22: note = chemically synthesized
  source 1..22: mol_type = other DNA
cctcagcctcccatgtagctgg

SEQ ID NO: 79701 - DNA, 22 bp, synthetic construct
  misc_feature 1..22: note = chemically synthesized
  source 1..22: mol_type = other DNA
agcctcccatgtagctgggatt

SEQ ID NO: 79702 - DNA, 22 bp, synthetic construct
  misc_feature 1..22: note = chemically synthesized
  source 1..22: mol_type = other DNA
ccatgtagctgggattacaggt

SEQ ID NO: 79703 - DNA, 22 bp, synthetic construct
  misc_feature 1..22: note = chemically synthesized
  source 1..22: mol_type = other DNA
ggattacaggtgtgcgccacca

SEQ ID NO: 79704 - DNA, 22 bp, synthetic construct
  misc_feature 1..22: note = chemically synthesized
  source 1..22: mol_type = other DNA
caggtgtgcgccaccacgtctg

SEQ ID NO: 79705 - DNA, 22 bp, synthetic construct
  misc_feature 1..22: note = chemically synthesized
  source 1..22: mol_type = other DNA
gcctctatcatcattttgaatg

SEQ ID NO: 79706 - DNA, 22 bp, synthetic construct
  misc_feature 1..22: note = chemically synthesized
  source 1..22: mol_type = other DNA
tatcatcattttgaatgtgaca

SEQ ID NO: 79707 - DNA, 22 bp, synthetic construct
  misc_feature 1..22: note = chemically synthesized
  source 1..22: mol_type = other DNA
tcatcattttgaatgtgacatt

SEQ ID NO: 79708 - DNA, 22 bp, synthetic construct
  misc_feature 1..22: note = chemically synthesized
  source 1..22: mol_type = other DNA
tgaatgtgacatttttcccatt

SEQ ID NO: 79709 - DNA, 22 bp, synthetic construct
  misc_feature 1..22: note = chemically synthesized
  source 1..22: mol_type = other DNA
gaatgtgacatttttcccattc

SEQ ID NO: 79710 - DNA, 22 bp, synthetic construct
  misc_feature 1..22: note = chemically synthesized
  source 1..22: mol_type = other DNA
aatgtgacatttttcccattct

SEQ ID NO: 79711 - DNA, 22 bp, synthetic construct
  misc_feature 1..22: note = chemically synthesized
  source 1..22: mol_type = other DNA
ttcccattctattttcctattg

SEQ ID NO: 79712 - DNA, 22 bp, synthetic construct
  misc_feature 1..22: note = chemically synthesized
  source 1..22: mol_type = other DNA
tcccattctattttcctattgg

SEQ ID NO: 79713 - DNA, 22 bp, synthetic construct
  misc_feature 1..22: note = chemically synthesized
  source 1..22: mol_type = other DNA
cccattctattttcctattggt

SEQ ID NO: 79714 - DNA, 22 bp, synthetic construct
  misc_feature 1..22: note = chemically synthesized
  source 1..22: mol_type = other DNA
ccattctattttcctattggtt

SEQ ID NO: 79715 - DNA, 22 bp, synthetic construct
  misc_feature 1..22: note = chemically synthesized
  source 1..22: mol_type = other DNA
tattttcctattggttcttgca

SEQ ID NO: 79716 - DNA, 22 bp, synthetic construct
  misc_feature 1..22: note = chemically synthesized
  source 1..22: mol_type = other DNA
ttttcctattggttcttgcagt

SEQ ID NO: 79717 - DNA, 22 bp, synthetic construct
  misc_feature 1..22: note = chemically synthesized
  source 1..22: mol_type = other DNA
tcctattggttcttgcagttgc

SEQ ID NO: 79718 - DNA, 22 bp, synthetic construct
  misc_feature 1..22: note = chemically synthesized
  source 1..22: mol_type = other DNA
cctattggttcttgcagttgca

SEQ ID NO: 79719 - DNA, 22 bp, synthetic construct
  misc_feature 1..22: note = chemically synthesized
  source 1..22: mol_type = other DNA
ctattggttcttgcagttgcat

SEQ ID NO: 79720 - DNA, 22 bp, synthetic construct
  misc_feature 1..22: note = chemically synthesized
  source 1..22: mol_type = other DNA
ttggttcttgcagttgcataaa

SEQ ID NO: 79721 - DNA, 22 bp, synthetic construct
  misc_feature 1..22: note = chemically synthesized
  source 1..22: mol_type = other DNA
gttcttgcagttgcataaaaca

SEQ ID NO: 79722 - DNA, 22 bp, synthetic construct
  misc_feature 1..22: note = chemically synthesized
  source 1..22: mol_type = other DNA
ttgcagttgcataaaacattat

SEQ ID NO: 79723 - DNA, 22 bp, synthetic construct
  misc_feature 1..22: note = chemically synthesized
  source 1..22: mol_type = other DNA
gcagttgcataaaacattattg

SEQ ID NO: 79724 - DNA, 22 bp, synthetic construct
  misc_feature 1..22: note = chemically synthesized
  source 1..22: mol_type = other DNA
cagttgcataaaacattattga

SEQ ID NO: 79725 - DNA, 22 bp, synthetic construct
  misc_feature 1..22: note = chemically synthesized
  source 1..22: mol_type = other DNA
cataaaacattattgattttta

SEQ ID NO: 79726 - DNA, 22 bp, synthetic construct
  misc_feature 1..22: note = chemically synthesized
  source 1..22: mol_type = other DNA
ttgatttttatgttgtccttat

SEQ ID NO: 79727 - DNA, 22 bp, synthetic construct
  misc_feature 1..22: note = chemically synthesized
  source 1..22: mol_type = other DNA
atttttatgttgtccttatata

SEQ ID NO: 79728 - DNA, 22 bp, synthetic construct
  misc_feature 1..22: note = chemically synthesized
  source 1..22: mol_type = other DNA
ttatgttgtccttatataactc

SEQ ID NO: 79729 - DNA, 22 bp, synthetic construct
  misc_feature 1..22: note = chemically synthesized
  source 1..22: mol_type = other DNA
tatgttgtccttatataactct

SEQ ID NO: 79730 - DNA, 22 bp, synthetic construct
  misc_feature 1..22: note = chemically synthesized
  source 1..22: mol_type = other DNA
atgttgtccttatataactctt

SEQ ID NO: 79731 - DNA, 22 bp, synthetic construct
  misc_feature 1..22: note = chemically synthesized
  source 1..22: mol_type = other DNA
tgttgtccttatataactcttt

SEQ ID NO: 79732 - DNA, 22 bp, synthetic construct
  misc_feature 1..22: note = chemically synthesized
  source 1..22: mol_type = other DNA
tccttatataactctttttact

SEQ ID NO: 79733 - DNA, 22 bp, synthetic construct
  misc_feature 1..22: note = chemically synthesized
  source 1..22: mol_type = other DNA
atataactctttttactttcag

SEQ ID NO: 79734 - DNA, 22 bp, synthetic construct
  misc_feature 1..22: note = chemically synthesized
  source 1..22: mol_type = other DNA
tataactctttttactttcagg

SEQ ID NO: 79735 - DNA, 22 bp, synthetic construct
  misc_feature 1..22: note = chemically synthesized
  source 1..22: mol_type = other DNA
tttttactttcaggtgacttat

SEQ ID NO: 79736 - DNA, 22 bp, synthetic construct
  misc_feature 1..22: note = chemically synthesized
  source 1..22: mol_type = other DNA
tttactttcaggtgacttatac

SEQ ID NO: 79737 - DNA, 22 bp, synthetic construct
  misc_feature 1..22: note = chemically synthesized
  source 1..22: mol_type = other DNA
ttactttcaggtgacttatact

SEQ ID NO: 79738 - DNA, 22 bp, synthetic construct
  misc_feature 1..22: note = chemically synthesized
  source 1..22: mol_type = other DNA
tactttcaggtgacttatactt

SEQ ID NO: 79739 - DNA, 22 bp, synthetic construct
  misc_feature 1..22: note = chemically synthesized
  source 1..22: mol_type = other DNA
actttcaggtgacttatactta

SEQ ID NO: 79740 - DNA, 22 bp, synthetic construct
  misc_feature 1..22: note = chemically synthesized
  source 1..22: mol_type = other DNA
ctttcaggtgacttatacttaa

SEQ ID NO: 79741 - DNA, 22 bp, synthetic construct
  misc_feature 1..22: note = chemically synthesized
  source 1..22: mol_type = other DNA
tcaggtgacttatacttaaatg

SEQ ID NO: 79742 - DNA, 22 bp, synthetic construct
  misc_feature 1..22: note = chemically synthesized
  source 1..22: mol_type = other DNA
caggtgacttatacttaaatga

SEQ ID NO: 79743 - DNA, 22 bp, synthetic construct
  misc_feature 1..22: note = chemically synthesized
  source 1..22: mol_type = other DNA
aggtgacttatacttaaatgat

SEQ ID NO: 79744 - DNA, 22 bp, synthetic construct
  misc_feature 1..22: note = chemically synthesized
  source 1..22: mol_type = other DNA
atacttaaatgatcatatcata

SEQ ID NO: 79745 - DNA, 22 bp, synthetic construct
  misc_feature 1..22: note = chemically synthesized
  source 1..22: mol_type = other DNA
tacttaaatgatcatatcatat

SEQ ID NO: 79746 - DNA, 22 bp, synthetic construct
  misc_feature 1..22: note = chemically synthesized
  source 1..22: mol_type = other DNA
aaatgatcatatcatatacaaa

SEQ ID NO: 79747 - DNA, 22 bp, synthetic construct
  misc_feature 1..22: note = chemically synthesized
  source 1..22: mol_type = other DNA
aatgatcatatcatatacaaaa

SEQ ID NO: 79748 - DNA, 22 bp, synthetic construct
  misc_feature 1..22: note = chemically synthesized
  source 1..22: mol_type = other DNA
aaaaataaaggcaaagatgtaa

SEQ ID NO: 79749 - DNA, 22 bp, synthetic construct
  misc_feature 1..22: note = chemically synthesized
  source 1..22: mol_type = other DNA
caatttggtcttttttctcccc

SEQ ID NO: 79750 - DNA, 22 bp, synthetic construct
  misc_feature 1..22: note = chemically synthesized
  source 1..22: mol_type = other DNA
ggtcttttttctccccccgaaa

SEQ ID NO: 79751 - DNA, 22 bp, synthetic construct
  misc_feature 1..22: note = chemically synthesized
  source 1..22: mol_type = other DNA
gtcttttttctccccccgaaat

SEQ ID NO: 79752 - DNA, 22 bp, synthetic construct
  misc_feature 1..22: note = chemically synthesized
  source 1..22: mol_type = other DNA
ttttctccccccgaaatcaaaa

SEQ ID NO: 79753 - DNA, 22 bp, synthetic construct
  misc_feature 1..22: note = chemically synthesized
  source 1..22: mol_type = other DNA
tttctccccccgaaatcaaaat

SEQ ID NO: 79754 - DNA, 22 bp, synthetic construct
  misc_feature 1..22: note = chemically synthesized
  source 1..22: mol_type = other DNA
ttctccccccgaaatcaaaatt

SEQ ID NO: 79755 - DNA, 22 bp, synthetic construct
  misc_feature 1..22: note = chemically synthesized
  source 1..22: mol_type = other DNA
tctccccccgaaatcaaaattt

SEQ ID NO: 79756 - DNA, 22 bp, synthetic construct
  misc_feature 1..22: note = chemically synthesized
  source 1..22: mol_type = other DNA
ctccccccgaaatcaaaatttt

SEQ ID NO: 79757 - DNA, 22 bp, synthetic construct
  misc_feature 1..22: note = chemically synthesized
  source 1..22: mol_type = other DNA
tccccccgaaatcaaaattttg

SEQ ID NO: 79758 - DNA, 22 bp, synthetic construct
  misc_feature 1..22: note = chemically synthesized
  source 1..22: mol_type = other DNA
cccccgaaatcaaaattttgct

SEQ ID NO: 79759 - DNA, 22 bp, synthetic construct
  misc_feature 1..22: note = chemically synthesized
  source 1..22: mol_type = other DNA
tgcttgattgatattaactaag

SEQ ID NO: 79760 - DNA, 22 bp, synthetic construct
  misc_feature 1..22: note = chemically synthesized
  source 1..22: mol_type = other DNA
gcttgattgatattaactaaga

SEQ ID NO: 79761 - DNA, 22 bp, synthetic construct
  misc_feature 1..22: note = chemically synthesized
  source 1..22: mol_type = other DNA
cttgattgatattaactaagac

SEQ ID NO: 79762 - DNA, 22 bp, synthetic construct
  misc_feature 1..22: note = chemically synthesized
  source 1..22: mol_type = other DNA
gattgatattaactaagacctc

SEQ ID NO: 79763 - DNA, 22 bp, synthetic construct
  misc_feature 1..22: note = chemically synthesized
  source 1..22: mol_type = other DNA
attgatattaactaagacctca

SEQ ID NO: 79764 - DNA, 22 bp, synthetic construct
  misc_feature 1..22: note = chemically synthesized
  source 1..22: mol_type = other DNA
atattaactaagacctcagtta

SEQ ID NO: 79765 - DNA, 22 bp, synthetic construct
  misc_feature 1..22: note = chemically synthesized
  source 1..22: mol_type = other DNA
actaagacctcagttataaaac

SEQ ID NO: 79766 - DNA, 22 bp, synthetic construct
  misc_feature 1..22: note = chemically synthesized
  source 1..22: mol_type = other DNA
agacctcagttataaaacaata

SEQ ID NO: 79767 - DNA, 22 bp, synthetic construct
  misc_feature 1..22: note = chemically synthesized
  source 1..22: mol_type = other DNA
agttataaaacaatagtctgta

SEQ ID NO: 79768 - DNA, 22 bp, synthetic construct
  misc_feature 1..22: note = chemically synthesized
  source 1..22: mol_type = other DNA
taaaacaatagtctgtagtggt

SEQ ID NO: 79769 - DNA, 22 bp, synthetic construct
  misc_feature 1..22: note = chemically synthesized
  source 1..22: mol_type = other DNA
tagtggtactggtcttggatct

SEQ ID NO: 79770 - DNA, 22 bp, synthetic construct
  misc_feature 1..22: note = chemically synthesized
  source 1..22: mol_type = other DNA
gtcttggatctcttgctcattt

SEQ ID NO: 79771 - DNA, 22 bp, synthetic construct
  misc_feature 1..22: note = chemically synthesized
  source 1..22: mol_type = other DNA
ggatctcttgctcatttgaaat

SEQ ID NO: 79772 - DNA, 22 bp, synthetic construct
  misc_feature 1..22: note = chemically synthesized
  source 1..22: mol_type = other DNA
gatctcttgctcatttgaaata

SEQ ID NO: 79773 - DNA, 22 bp, synthetic construct
  misc_feature 1..22: note = chemically synthesized
  source 1..22: mol_type = other DNA
ttgctcatttgaaatactattc

SEQ ID NO: 79774 - DNA, 22 bp, synthetic construct
  misc_feature 1..22: note = chemically synthesized
  source 1..22: mol_type = other DNA
gctcatttgaaatactattctc

SEQ ID NO: 79775 - DNA, 22 bp, synthetic construct
  misc_feature 1..22: note = chemically synthesized
  source 1..22: mol_type = other DNA
ctcatttgaaatactattctca

SEQ ID NO: 79776 - DNA, 22 bp, synthetic construct
  misc_feature 1..22: note = chemically synthesized
  source 1..22: mol_type = other DNA
atttgaaatactattctcacct

SEQ ID NO: 79777 - DNA, 22 bp, synthetic construct
  misc_feature 1..22: note = chemically synthesized
  source 1..22: mol_type = other DNA
gaaatactattctcaccttatc

SEQ ID NO: 79778 - DNA, 22 bp, synthetic construct
  misc_feature 1..22: note = chemically synthesized
  source 1..22: mol_type = other DNA
aaatactattctcaccttatca

SEQ ID NO: 79779 - DNA, 22 bp, synthetic construct
  misc_feature 1..22: note = chemically synthesized
  source 1..22: mol_type = other DNA
ttctcaccttatcaatcactta

SEQ ID NO: 79780 - DNA, 22 bp, synthetic construct
  misc_feature 1..22: note = chemically synthesized
  source 1..22: mol_type = other DNA
tcaccttatcaatcacttagca

SEQ ID NO: 79781 - DNA, 22 bp, synthetic construct
  misc_feature 1..22: note = chemically synthesized
  source 1..22: mol_type = other DNA
accttatcaatcacttagcacc

SEQ ID NO: 79782 - DNA, 22 bp, synthetic construct
  misc_feature 1..22: note = chemically synthesized
  source 1..22: mol_type = other DNA
atcaatcacttagcaccctgta

SEQ ID NO: 79783 - DNA, 22 bp, synthetic construct
  misc_feature 1..22: note = chemically synthesized
  source 1..22: mol_type = other DNA
tcaatcacttagcaccctgtac

SEQ ID NO: 79784 - DNA, 22 bp, synthetic construct
  misc_feature 1..22: note = chemically synthesized
  source 1..22: mol_type = other DNA
agcaccctgtaccttttgtttt

SEQ ID NO: 79785 - DNA, 22 bp, synthetic construct
  misc_feature 1..22: note = chemically synthesized
  source 1..22: mol_type = other DNA
gcaccctgtaccttttgttttt

SEQ ID NO: 79786 - DNA, 22 bp, synthetic construct
  misc_feature 1..22: note = chemically synthesized
  source 1..22: mol_type = other DNA
taccttttgttttttgtttttg

SEQ ID NO: 79787 - DNA, 22 bp, synthetic construct
  misc_feature 1..22: note = chemically synthesized
  source 1..22: mol_type = other DNA
ttgttttttgtttttgctaatt

SEQ ID NO: 79788 - DNA, 22 bp, synthetic construct
  misc_feature 1..22: note = chemically synthesized
  source 1..22: mol_type = other DNA
tgttttttgtttttgctaattc

SEQ ID NO: 79789 - DNA, 22 bp, synthetic construct
  misc_feature 1..22: note = chemically synthesized
  source 1..22: mol_type = other DNA
gttttttgtttttgctaattct

SEQ ID NO: 79790 - DNA, 22 bp, synthetic construct
  misc_feature 1..22: note = chemically synthesized
  source 1..22: mol_type = other DNA
ttttttgtttttgctaattctg

SEQ ID NO: 79791 - DNA, 22 bp, synthetic construct
  misc_feature 1..22: note = chemically synthesized
  source 1..22: mol_type = other DNA
tttgtttttgctaattctgtct

SEQ ID NO: 79792 - DNA, 22 bp, synthetic construct
  misc_feature 1..22: note = chemically synthesized
  source 1..22: mol_type = other DNA
ttgtttttgctaattctgtcta

SEQ ID NO: 79793 - DNA, 22 bp, synthetic construct
  misc_feature 1..22: note = chemically synthesized
  source 1..22: mol_type = other DNA
tgtttttgctaattctgtctag

SEQ ID NO: 79794 - DNA, 22 bp, synthetic construct
  misc_feature 1..22: note = chemically synthesized
  source 1..22: mol_type = other DNA
gtttttgctaattctgtctaga

SEQ ID NO: 79795 - DNA, 22 bp, synthetic construct
  misc_feature 1..22: note = chemically synthesized
  source 1..22: mol_type = other DNA
tttttgctaattctgtctagaa

SEQ ID NO: 79796 - DNA, 22 bp, synthetic construct
  misc_feature 1..22: note = chemically synthesized
  source 1..22: mol_type = other DNA
ttgctaattctgtctagaacac

SEQ ID NO: 79797 - DNA, 22 bp, synthetic construct
  misc_feature 1..22: note = chemically synthesized
  source 1..22: mol_type = other DNA
tgctaattctgtctagaacacc

SEQ ID NO: 79798 - DNA, 22 bp, synthetic construct
  misc_feature 1..22: note = chemically synthesized
  source 1..22: mol_type = other DNA
gctaattctgtctagaacacca

SEQ ID NO: 79799 - DNA, 22 bp, synthetic construct
  misc_feature 1..22: note = chemically synthesized
  source 1..22: mol_type = other DNA
ctaattctgtctagaacaccat

SEQ ID NO: 79800 - DNA, 22 bp, synthetic construct
  misc_feature 1..22: note = chemically synthesized
  source 1..22: mol_type = other DNA
attctgtctagaacaccatatc

SEQ ID NO: 79801 - DNA, 22 bp, synthetic construct
  misc_feature 1..22: note = chemically synthesized
  source 1..22: mol_type = other DNA
tgtctagaacaccatatcagtt

SEQ ID NO: 79802 - DNA, 22 bp, synthetic construct
  misc_feature 1..22: note = chemically synthesized
  source 1..22: mol_type = other DNA
tctagaacaccatatcagtttt

SEQ ID NO: 79803 - DNA, 22 bp, synthetic construct
  misc_feature 1..22: note = chemically synthesized
  source 1..22: mol_type = other DNA
gaacaccatatcagttttagct

SEQ ID NO: 79804 - DNA, 22 bp, synthetic construct
  misc_feature 1..22: note = chemically synthesized
  source 1..22: mol_type = other DNA
tagctaagtgcttccaaaactc

SEQ ID NO: 79805 - DNA, 22 bp, synthetic construct
  misc_feature 1..22: note = chemically synthesized
  source 1..22: mol_type = other DNA
agctaagtgcttccaaaactcc

SEQ ID NO: 79806 - DNA, 22 bp, synthetic construct
  misc_feature 1..22: note = chemically synthesized
  source 1..22: mol_type = other DNA
gctaagtgcttccaaaactccc

SEQ ID NO: 79807 - DNA, 22 bp, synthetic construct
  misc_feature 1..22: note = chemically synthesized
  source 1..22: mol_type = other DNA
agtgcttccaaaactccctgct

SEQ ID NO: 79808 - DNA, 22 bp, synthetic construct
  misc_feature 1..22: note = chemically synthesized
  source 1..22: mol_type = other DNA
ccaaaactccctgctttaaaat

SEQ ID NO: 79809 - DNA, 22 bp, synthetic construct
  misc_feature 1..22: note = chemically synthesized
  source 1..22: mol_type = other DNA
caaaactccctgctttaaaatt

SEQ ID NO: 79810 - DNA, 22 bp, synthetic construct
  misc_feature 1..22: note = chemically synthesized
  source 1..22: mol_type = other DNA
cctgctttaaaattgtttggtt

SEQ ID NO: 79811 - DNA, 22 bp, synthetic construct
  misc_feature 1..22: note = chemically synthesized
  source 1..22: mol_type = other DNA
ctttaaaattgtttggtttctg

SEQ ID NO: 79812 - DNA, 22 bp, synthetic construct
  misc_feature 1..22: note = chemically synthesized
  source 1..22: mol_type = other DNA
taaaattgtttggtttctgccc

SEQ ID NO: 79813 - DNA, 22 bp, synthetic construct
  misc_feature 1..22: note = chemically synthesized
  source 1..22: mol_type = other DNA
aaaattgtttggtttctgccct

SEQ ID NO: 79814 - DNA, 22 bp, synthetic construct
  misc_feature 1..22: note = chemically synthesized
  source 1..22: mol_type = other DNA
aaattgtttggtttctgccctt

SEQ ID NO: 79815 - DNA, 22 bp, synthetic construct
  misc_feature 1..22: note = chemically synthesized
  source 1..22: mol_type = other DNA
tttggtttctgcccttttttgg

SEQ ID NO: 79816 - DNA, 22 bp, synthetic construct
  misc_feature 1..22: note = chemically synthesized
  source 1..22: mol_type = other DNA
ggtttctgcccttttttggacc

SEQ ID NO: 79817 - DNA, 22 bp, synthetic construct
  misc_feature 1..22: note = chemically synthesized
  source 1..22: mol_type = other DNA
gtttctgcccttttttggacct

SEQ ID NO: 79818 - DNA, 22 bp, synthetic construct
  misc_feature 1..22: note = chemically synthesized
  source 1..22: mol_type = other DNA
ctgcccttttttggacctttcc

SEQ ID NO: 79819 - DNA, 22 bp, synthetic construct
  misc_feature 1..22: note = chemically synthesized
  source 1..22: mol_type = other DNA
tgcccttttttggacctttcct

SEQ ID NO: 79820 - DNA, 22 bp, synthetic construct
  misc_feature 1..22: note = chemically synthesized
  source 1..22: mol_type = other DNA
cccttttttggacctttccttt

SEQ ID NO: 79821 - DNA, 22 bp, synthetic construct
  misc_feature 1..22: note = chemically synthesized
  source 1..22: mol_type = other DNA
ttttggacctttcctttccttt

SEQ ID NO: 79822 - DNA, 22 bp, synthetic construct
  misc_feature 1..22: note = chemically synthesized
  source 1..22: mol_type = other DNA
tttggacctttcctttcctttc

SEQ ID NO: 79823 - DNA, 22 bp, synthetic construct
  misc_feature 1..22: note = chemically synthesized
  source 1..22: mol_type = other DNA
ttggacctttcctttcctttcc

SEQ ID NO: 79824 - DNA, 22 bp, synthetic construct
  misc_feature 1..22: note = chemically synthesized
  source 1..22: mol_type = other DNA
tggacctttcctttcctttcct

SEQ ID NO: 79825 - DNA, 22 bp, synthetic construct
  misc_feature 1..22: note = chemically synthesized
  source 1..22: mol_type = other DNA
ggacctttcctttcctttcctt

SEQ ID NO: 79826 - DNA, 22 bp, synthetic construct
  misc_feature 1..22: note = chemically synthesized
  source 1..22: mol_type = other DNA
gacctttcctttcctttccttt

SEQ ID NO: 79827 - DNA, 22 bp, synthetic construct
  misc_feature 1..22: note = chemically synthesized
  source 1..22: mol_type = other DNA
tcctttcctttcctttcctttc

SEQ ID NO: 79828 - DNA, 22 bp, synthetic construct
  misc_feature 1..22: note = chemically synthesized
  source 1..22: mol_type = other DNA
cctttcctttcctttcctttcc

SEQ ID NO: 79829 - DNA, 22 bp, synthetic construct
  misc_feature 1..22: note = chemically synthesized
  source 1..22: mol_type = other DNA
ctttcctttcctttcctttcct

SEQ ID NO: 79830 - DNA, 22 bp, synthetic construct
  misc_feature 1..22: note = chemically synthesized
  source 1..22: mol_type = other DNA
tcctttcctttcctttcctttc

SEQ ID NO: 79831 - DNA, 22 bp, synthetic construct
  misc_feature 1..22: note = chemically synthesized
  source 1..22: mol_type = other DNA
cctttcctttcctttcctttcc

SEQ ID NO: 79832 - DNA, 22 bp, synthetic construct
  misc_feature 1..22: note = chemically synthesized
  source 1..22: mol_type = other DNA
ctttcctttcctttcctttcct

SEQ ID NO: 79833 - DNA, 22 bp, synthetic construct
  misc_feature 1..22: note = chemically synthesized
  source 1..22: mol_type = other DNA
tcctttcctttcctttcctttc

SEQ ID NO: 79834 - DNA, 22 bp, synthetic construct
  misc_feature 1..22: note = chemically synthesized
  source 1..22: mol_type = other DNA
cctttcctttcctttcctttcc

SEQ ID NO: 79835 - DNA, 22 bp, synthetic construct
  misc_feature 1..22: note = chemically synthesized
  source 1..22: mol_type = other DNA
ctttcctttcctttcctttcct

SEQ ID NO: 79836 - DNA, 22 bp, synthetic construct
  misc_feature 1..22: note = chemically synthesized
  source 1..22: mol_type = other DNA
tcctttcctttcctttcctttc

SEQ ID NO: 79837 - DNA, 22 bp, synthetic construct
  misc_feature 1..22: note = chemically synthesized
  source 1..22: mol_type = other DNA
cctttcctttcctttcctttcc

SEQ ID NO: 79838 - DNA, 22 bp, synthetic construct
  misc_feature 1..22: note = chemically synthesized
  source 1..22: mol_type = other DNA
ctttcctttcctttcctttcct

SEQ ID NO: 79839 - DNA, 22 bp, synthetic construct
  misc_feature 1..22: note = chemically synthesized
  source 1..22: mol_type = other DNA
tcctttcctttcctttcctttt

SEQ ID NO: 79840 - DNA, 22 bp, synthetic construct
  misc_feature 1..22: note = chemically synthesized
  source 1..22: mol_type = other DNA
cctttcctttcctttccttttt

SEQ ID NO: 79841 - DNA, 22 bp, synthetic construct
  misc_feature 1..22: note = chemically synthesized
  source 1..22: mol_type = other DNA
ctttcctttcctttcctttttc

SEQ ID NO: 79842 - DNA, 22 bp, synthetic construct
  misc_feature 1..22: note = chemically synthesized
  source 1..22: mol_type = other DNA
tcctttcctttcctttttcctt

SEQ ID NO: 79843 - DNA, 22 bp, synthetic construct
  misc_feature 1..22: note = chemically synthesized
  source 1..22: mol_type = other DNA
cctttcctttcctttttccttt

SEQ ID NO: 79844 - DNA, 22 bp, synthetic construct
  misc_feature 1..22: note = chemically synthesized
  source 1..22: mol_type = other DNA
ctttcctttcctttttcctttc

SEQ ID NO: 79845 - DNA, 22 bp, synthetic construct
  misc_feature 1..22: note = chemically synthesized
  source 1..22: mol_type = other DNA
tcctttcctttttcctttcctt

SEQ ID NO: 79846 - DNA, 22 bp, synthetic construct
  misc_feature 1..22: note = chemically synthesized
  source 1..22: mol_type = other DNA
cctttcctttttcctttccttt

SEQ ID NO: 79847 - DNA, 22 bp, synthetic construct
  misc_feature 1..22: note = chemically synthesized
  source 1..22: mol_type = other DNA
ctttcctttttcctttcctttc

SEQ ID NO: 79848 - DNA, 22 bp, synthetic construct
  misc_feature 1..22: note = chemically synthesized
  source 1..22: mol_type = other DNA
tcctttttcctttcctttcctt

SEQ ID NO: 79849 - DNA, 22 bp, synthetic construct
  misc_feature 1..22: note = chemically synthesized
  source 1..22: mol_type = other DNA
cctttttcctttcctttccttc

SEQ ID NO: 79850 - DNA, 22 bp, synthetic construct
  misc_feature 1..22: note = chemically synthesized
  source 1..22: mol_type = other DNA
ctttttcctttcctttccttcc

SEQ ID NO: 79851 - DNA, 22 bp, synthetic construct
  misc_feature 1..22: note = chemically synthesized
  source 1..22: mol_type = other DNA
tttcctttcctttccttccctt

SEQ ID NO: 79852 - DNA, 22 bp, synthetic construct
  misc_feature 1..22: note = chemically synthesized
  source 1..22: mol_type = other DNA
ttcctttcctttccttcccttc

SEQ ID NO: 79853 - DNA, 22 bp, synthetic construct
  misc_feature 1..22: note = chemically synthesized
  source 1..22: mol_type = other DNA
tcctttcctttccttcccttcc

SEQ ID NO: 79854 - DNA, 22 bp, synthetic construct
  misc_feature 1..22: note = chemically synthesized
  source 1..22: mol_type = other DNA
cctttcctttccttcccttccc

SEQ ID NO: 79855 - DNA, 22 bp, synthetic construct
  misc_feature 1..22: note = chemically synthesized
  source 1..22: mol_type = other DNA
ctttcctttccttcccttccct

SEQ ID NO: 79856 - DNA, 22 bp, synthetic construct
  misc_feature 1..22: note = chemically synthesized
  source 1..22: mol_type = other DNA
tcctttccttcccttccctttc

SEQ ID NO: 79857 - DNA, 22 bp, synthetic construct
  misc_feature 1..22: note = chemically synthesized
  source 1..22: mol_type = other DNA
cctttccttcccttccctttcc

SEQ ID NO: 79858 - DNA, 22 bp, synthetic construct
  misc_feature 1..22: note = chemically synthesized
  source 1..22: mol_type = other DNA
ctttccttcccttccctttcct

SEQ ID NO: 79859 - DNA, 22 bp, synthetic construct
  misc_feature 1..22: note = chemically synthesized
  source 1..22: mol_type = other DNA
tccttcccttccctttcctttc

SEQ ID NO: 79860 - DNA, 22 bp, synthetic construct
  misc_feature 1..22: note = chemically synthesized
  source 1..22: mol_type = other DNA
ccttcccttccctttcctttcc

SEQ ID NO: 79861 - DNA, 22 bp, synthetic construct
  misc_feature 1..22: note = chemically synthesized
  source 1..22: mol_type = other DNA
cttcccttccctttcctttccc

SEQ ID NO: 79862 - DNA, 22 bp, synthetic construct
  misc_feature 1..22: note = chemically synthesized
  source 1..22: mol_type = other DNA
cccttccctttcctttcccttc

SEQ ID NO: 79863 - DNA, 22 bp, synthetic construct
  misc_feature 1..22: note = chemically synthesized
  source 1..22: mol_type = other DNA
ccttccctttcctttcccttcc

SEQ ID NO: 79864 - DNA, 22 bp, synthetic construct
  misc_feature 1..22: note = chemically synthesized
  source 1..22: mol_type = other DNA
ccctttcctttcccttccctcc

SEQ ID NO: 79865 - DNA, 22 bp, synthetic construct
  misc_feature 1..22: note = chemically synthesized
  source 1..22: mol_type = other DNA
cctttcctttcccttccctccc

SEQ ID NO: 79866 - DNA, 22 bp, synthetic construct
  misc_feature 1..22: note = chemically synthesized
  source 1..22: mol_type = other DNA
tcctttcccttccctccctttc

SEQ ID NO: 79867 - DNA, 22 bp, synthetic construct
  misc_feature 1..22: note = chemically synthesized
  source 1..22: mol_type = other DNA
cctttcccttccctccctttcc

SEQ ID NO: 79868 - DNA, 22 bp, synthetic construct
  misc_feature 1..22: note = chemically synthesized
  source 1..22: mol_type = other DNA
ctttcccttccctccctttccc

SEQ ID NO: 79869 - DNA, 22 bp, synthetic construct
  misc_feature 1..22: note = chemically synthesized
  source 1..22: mol_type = other DNA
tcccttccctccctttcccttt

SEQ ID NO: 79870 - DNA, 22 bp, synthetic construct
  misc_feature 1..22: note = chemically synthesized
  source 1..22: mol_type = other DNA
cccttccctccctttccctttc

SEQ ID NO: 79871 - DNA, 22 bp, synthetic construct
  misc_feature 1..22: note = chemically synthesized
  source 1..22: mol_type = other DNA
ccttccctccctttccctttcc

SEQ ID NO: 79872 - DNA, 22 bp, synthetic construct
  misc_feature 1..22: note = chemically synthesized
  source 1..22: mol_type = other DNA
ccctccctttccctttcccttt

SEQ ID NO: 79873 - DNA, 22 bp, synthetic construct
  misc_feature 1..22: note = chemically synthesized
  source 1..22: mol_type = other DNA
cctccctttccctttccctttc

SEQ ID NO: 79874 - DNA, 22 bp, synthetic construct
  misc_feature 1..22: note = chemically synthesized
  source 1..22: mol_type = other DNA
cctttccctttccctttccctt

SEQ ID NO: 79875 - DNA, 22 bp, synthetic construct
  misc_feature 1..22: note = chemically synthesized
  source 1..22: mol_type = other DNA
tccctttccctttccctttccc

SEQ ID NO: 79876 - DNA, 22 bp, synthetic construct
  misc_feature 1..22: note = chemically synthesized
  source 1..22: mol_type = other DNA
ccctttccctttccctttccct

SEQ ID NO: 79877 - DNA, 22 bp, synthetic construct
  misc_feature 1..22: note = chemically synthesized
  source 1..22: mol_type = other DNA
cctttccctttccctttccctt

SEQ ID NO: 79878 - DNA, 22 bp, synthetic construct
  misc_feature 1..22: note = chemically synthesized
  source 1..22: mol_type = other DNA
tccctttccctttccctttccc

SEQ ID NO: 79879 - DNA, 22 bp, synthetic construct
  misc_feature 1..22: note = chemically synthesized
  source 1..22: mol_type = other DNA
ccctttccctttccctttccct

SEQ ID NO: 79880 - DNA, 22 bp, synthetic construct
  misc_feature 1..22: note = chemically synthesized
  source 1..22: mol_type = other DNA
cctttccctttccctttccctt

SEQ ID NO: 79881 - DNA, 22 bp, synthetic construct
  misc_feature 1..22: note = chemically synthesized
  source 1..22: mol_type = other DNA
tccctttccctttccctttccc

SEQ ID NO: 79882 - DNA, 22 bp, synthetic construct
  misc_feature 1..22: note = chemically synthesized
  source 1..22: mol_type = other DNA
ccctttccctttccctttccct

SEQ ID NO: 79883 - DNA, 22 bp, synthetic construct
  misc_feature 1..22: note = chemically synthesized
  source 1..22: mol_type = other DNA
cctttccctttccctttccctt

SEQ ID NO: 79884 - DNA, 22 bp, synthetic construct
  misc_feature 1..22: note = chemically synthesized
  source 1..22: mol_type = other DNA
tccctttccctttcccttcctg

SEQ ID NO: 79885 - DNA, 22 bp, synthetic construct
  misc_feature 1..22: note = chemically synthesized
  source 1..22: mol_type = other DNA
ccctttccctttcccttcctgc

SEQ ID NO: 79886 - DNA, 22 bp, synthetic construct
  misc_feature 1..22: note = chemically synthesized
  source 1..22: mol_type = other DNA
cctttccctttcccttcctgct

SEQ ID NO: 79887 - DNA, 22 bp, synthetic construct
  misc_feature 1..22: note = chemically synthesized
  source 1..22: mol_type = other DNA
tccctttcccttcctgctgaag

SEQ ID NO: 79888 - DNA, 22 bp, synthetic construct
  misc_feature 1..22: note = chemically synthesized
  source 1..22: mol_type = other DNA
ccctttcccttcctgctgaagg

SEQ ID NO: 79889 - DNA, 22 bp, synthetic construct
  misc_feature 1..22: note = chemically synthesized
  source 1..22: mol_type = other DNA
cctttcccttcctgctgaagga

SEQ ID NO: 79890 - DNA, 22 bp, synthetic construct
  misc_feature 1..22: note = chemically synthesized
  source 1..22: mol_type = other DNA
tcccttcctgctgaaggattac

SEQ ID NO: 79891 - DNA, 22 bp, synthetic construct
  misc_feature 1..22: note = chemically synthesized
  source 1..22: mol_type = other DNA
cccttcctgctgaaggattact

SEQ ID NO: 79892 - DNA, 22 bp, synthetic construct
  misc_feature 1..22: note = chemically synthesized
  source 1..22: mol_type = other DNA
ccttcctgctgaaggattactg

SEQ ID NO: 79893 - DNA, 22 bp, synthetic construct
  misc_feature 1..22: note = chemically synthesized
  source 1..22: mol_type = other DNA
cctgctgaaggattactggtta

SEQ ID NO: 79894 - DNA, 22 bp, synthetic construct
  misc_feature 1..22: note = chemically synthesized
  source 1..22: mol_type = other DNA
ctgctgaaggattactggttaa

SEQ ID NO: 79895 - DNA, 22 bp, synthetic construct
  misc_feature 1..22: note = chemically synthesized
  source 1..22: mol_type = other DNA
ctgaaggattactggttaagga

SEQ ID NO: 79896 - DNA, 22 bp, synthetic construct
  misc_feature 1..22: note = chemically synthesized
  source 1..22: mol_type = other DNA
aaggattactggttaaggagac

SEQ ID NO: 79897 - DNA, 22 bp, synthetic construct
  misc_feature 1..22: note = chemically synthesized
  source 1..22: mol_type = other DNA
ctggttaaggagacagtagaac

SEQ ID NO: 79898 - DNA, 22 bp, synthetic construct
  misc_feature 1..22: note = chemically synthesized
  source 1..22: mol_type = other DNA
gttaaggagacagtagaacatg

SEQ ID NO: 79899 - DNA, 22 bp, synthetic construct
  misc_feature 1..22: note = chemically synthesized
  source 1..22: mol_type = other DNA
aggagacagtagaacatgaaaa

SEQ ID NO: 79900 - DNA, 22 bp, synthetic construct
  misc_feature 1..22: note = chemically synthesized
  source 1..22: mol_type = other DNA
cttctcatgtccagggcaatgg

SEQ ID NO: 79901 - DNA, 22 bp, synthetic construct
  misc_feature 1..22: note = chemically synthesized
  source 1..22: mol_type = other DNA
ttctcatgtccagggcaatggc

SEQ ID NO: 79902 - DNA, 22 bp, synthetic construct
  misc_feature 1..22: note = chemically synthesized
  source 1..22: mol_type = other DNA
ctcatgtccagggcaatggctc

SEQ ID NO: 79903 - DNA, 22 bp, synthetic construct
  misc_feature 1..22: note = chemically synthesized
  source 1..22: mol_type = other DNA
tcatgtccagggcaatggctca

SEQ ID NO: 79904 - DNA, 22 bp, synthetic construct
  misc_feature 1..22: note = chemically synthesized
  source 1..22: mol_type = other DNA
atgtccagggcaatggctcagt

SEQ ID NO: 79905 - DNA, 22 bp, synthetic construct
  misc_feature 1..22: note = chemically synthesized
  source 1..22: mol_type = other DNA
agtaatgttaaattcagcagct

SEQ ID NO: 79906 - DNA, 22 bp, synthetic construct
  misc_feature 1..22: note = chemically synthesized
  source 1..22: mol_type = other DNA
aattcagcagctgcatagcaac

SEQ ID NO: 79907 - DNA, 22 bp, synthetic construct
  misc_feature 1..22: note = chemically synthesized
  source 1..22: mol_type = other DNA
agcagctgcatagcaacagcca

SEQ ID NO: 79908 - DNA, 22 bp, synthetic construct
  misc_feature 1..22: note = chemically synthesized
  source 1..22: mol_type = other DNA
catagcaacagccatttcctaa

SEQ ID NO: 79909 - DNA, 22 bp, synthetic construct
  misc_feature 1..22: note = chemically synthesized
  source 1..22: mol_type = other DNA
cctaaatcctttcagaatctga

SEQ ID NO: 79910 - DNA, 22 bp, synthetic construct
  misc_feature 1..22: note = chemically synthesized
  source 1..22: mol_type = other DNA
ctaaatcctttcagaatctgag

SEQ ID NO: 79911 - DNA, 22 bp, synthetic construct
  misc_feature 1..22: note = chemically synthesized
  source 1..22: mol_type = other DNA
aatcctttcagaatctgagtgc

SEQ ID NO: 79912 - DNA, 22 bp, synthetic construct
  misc_feature 1..22: note = chemically synthesized
  source 1..22: mol_type = other DNA
tcagaatctgagtgctcaactg

SEQ ID NO: 79913 - DNA, 22 bp, synthetic construct
  misc_feature 1..22: note = chemically synthesized
  source 1..22: mol_type = other DNA
cagaatctgagtgctcaactga

SEQ ID NO: 79914 - DNA, 22 bp, synthetic construct
  misc_feature 1..22: note = chemically synthesized
  source 1..22: mol_type = other DNA
agaatctgagtgctcaactgaa

SEQ ID NO: 79915 - DNA, 22 bp, synthetic construct
  misc_feature 1..22: note = chemically synthesized
  source 1..22: mol_type = other DNA
agtgctcaactgaaagtttatt

SEQ ID NO: 79916 - DNA, 22 bp, synthetic construct
  misc_feature 1..22: note = chemically synthesized
  source 1..22: mol_type = other DNA
aactgaaagtttatttagagat

SEQ ID NO: 79917 - DNA, 22 bp, synthetic construct
  misc_feature 1..22: note = chemically synthesized
  source 1..22: mol_type = other DNA
aaagtttatttagagattgtaa

SEQ ID NO: 79918 - DNA, 22 bp, synthetic construct
  misc_feature 1..22: note = chemically synthesized
  source 1..22: mol_type = other DNA
atttagagattgtaaattcaat

SEQ ID NO: 79919 - DNA, 22 bp, synthetic construct
  misc_feature 1..22: note = chemically synthesized
  source 1..22: mol_type = other DNA
tttagagattgtaaattcaatc

SEQ ID NO: 79920 - DNA, 22 bp, synthetic construct
  misc_feature 1..22: note = chemically synthesized
  source 1..22: mol_type = other DNA
agagattgtaaattcaatcatt

SEQ ID NO: 79921 - DNA, 22 bp, synthetic construct
  misc_feature 1..22: note = chemically synthesized
  source 1..22: mol_type = other DNA
gagattgtaaattcaatcattt

SEQ ID NO: 79922 - DNA, 22 bp, synthetic construct
  misc_feature 1..22: note = chemically synthesized
  source 1..22: mol_type = other DNA
taaattcaatcatttttacttc

SEQ ID NO: 79923 - DNA, 22 bp, synthetic construct
  misc_feature 1..22: note = chemically synthesized
  source 1..22: mol_type = other DNA
aatcatttttacttctaccatt

SEQ ID NO: 79924 - DNA, 22 bp, synthetic construct
  misc_feature 1..22: note = chemically synthesized
  source 1..22: mol_type = other DNA
ttacttctaccattttaactgt

SEQ ID NO: 79925 - DNA, 22 bp, synthetic construct
  misc_feature 1..22: note = chemically synthesized
  source 1..22: mol_type = other DNA
tacttctaccattttaactgtc

SEQ ID NO: 79926 - DNA, 22 bp, synthetic construct
  misc_feature 1..22: note = chemically synthesized
  source 1..22: mol_type = other DNA
acttctaccattttaactgtca

SEQ ID NO: 79927 - DNA, 22 bp, synthetic construct
  misc_feature 1..22: note = chemically synthesized
  source 1..22: mol_type = other DNA
cttctaccattttaactgtcaa

SEQ ID NO: 79928 - DNA, 22 bp, synthetic construct
  misc_feature 1..22: note = chemically synthesized
  source 1..22: mol_type = other DNA
ctaccattttaactgtcaaaat

SEQ ID NO: 79929 - DNA, 22 bp, synthetic construct
  misc_feature 1..22: note = chemically synthesized
  source 1..22: mol_type = other DNA
taccattttaactgtcaaaatg

SEQ ID NO: 79930 - DNA, 22 bp, synthetic construct
  misc_feature 1..22: note = chemically synthesized
  source 1..22: mol_type = other DNA
ccattttaactgtcaaaatgac

SEQ ID NO: 79931 - DNA, 22 bp, synthetic construct
  misc_feature 1..22: note = chemically synthesized
  source 1..22: mol_type = other DNA
taactgtcaaaatgacatgtat

SEQ ID NO: 79932 - DNA, 22 bp, synthetic construct
  misc_feature 1..22: note = chemically synthesized
  source 1..22: mol_type = other DNA
aactgtcaaaatgacatgtata

SEQ ID NO: 79933 - DNA, 22 bp, synthetic construct
  misc_feature 1..22: note = chemically synthesized
  source 1..22: mol_type = other DNA
actgtcaaaatgacatgtatat

SEQ ID NO: 79934 - DNA, 22 bp, synthetic construct
  misc_feature 1..22: note = chemically synthesized
  source 1..22: mol_type = other DNA
tcaaaatgacatgtatatgtta

SEQ ID NO: 79935 - DNA, 22 bp, synthetic construct
  misc_feature 1..22: note = chemically synthesized
  source 1..22: mol_type = other DNA
ctgtgtagctatatatgtatat

SEQ ID NO: 79936 - DNA, 22 bp, synthetic construct
  misc_feature 1..22: note = chemically synthesized
  source 1..22: mol_type = other DNA
tgtagctatatatgtatatatg

SEQ ID NO: 79937 - DNA, 22 bp, synthetic construct
  misc_feature 1..22: note = chemically synthesized
  source 1..22: mol_type = other DNA
tatatgtatatatgattatata

SEQ ID NO: 79938 - DNA, 22 bp, synthetic construct
  misc_feature 1..22: note = chemically synthesized
  source 1..22: mol_type = other DNA
tatatattcatatacctattta

SEQ ID NO: 79939 - DNA, 22 bp, synthetic construct
  misc_feature 1..22: note = chemically synthesized
  source 1..22: mol_type = other DNA
atatacctatttaagatatcat

SEQ ID NO: 79940 - DNA, 22 bp, synthetic construct
  misc_feature 1..22: note = chemically synthesized
  source 1..22: mol_type = other DNA
tttaagatatcatgttgcatgc

SEQ ID NO: 79941 - DNA, 22 bp, synthetic construct
  misc_feature 1..22: note = chemically synthesized
  source 1..22: mol_type = other DNA
aagatatcatgttgcatgcatt

SEQ ID NO: 79942 - DNA, 22 bp, synthetic construct
  misc_feature 1..22: note = chemically synthesized
  source 1..22: mol_type = other DNA
agatatcatgttgcatgcattt

SEQ ID NO: 79943 - DNA, 22 bp, synthetic construct
  misc_feature 1..22: note = chemically synthesized
  source 1..22: mol_type = other DNA
catgcattttggatgtgaaatt

SEQ ID NO: 79944 - DNA, 22 bp, synthetic construct
  misc_feature 1..22: note = chemically synthesized
  source 1..22: mol_type = other DNA
tggatgtgaaattggcattttc

SEQ ID NO: 79945 - DNA, 22 bp, synthetic construct
  misc_feature 1..22: note = chemically synthesized
  source 1..22: mol_type = other DNA
ggatgtgaaattggcattttct

SEQ ID NO: 79946 - DNA, 22 bp, synthetic construct
  misc_feature 1..22: note = chemically synthesized
  source 1..22: mol_type = other DNA
gatgtgaaattggcattttctt

SEQ ID NO: 79947 - DNA, 22 bp, synthetic construct
  misc_feature 1..22: note = chemically synthesized
  source 1..22: mol_type = other DNA
gcattttcttagctccccactg

SEQ ID NO: 79948 - DNA, 22 bp, synthetic construct
  misc_feature 1..22: note = chemically synthesized
  source 1..22: mol_type = other DNA
tcttagctccccactgctaaaa

SEQ ID NO: 79949 - DNA, 22 bp, synthetic construct
  misc_feature 1..22: note = chemically synthesized
  source 1..22: mol_type = other DNA
cttagctccccactgctaaaat

SEQ ID NO: 79950 - DNA, 22 bp, synthetic construct
  misc_feature 1..22: note = chemically synthesized
  source 1..22: mol_type = other DNA
ttagctccccactgctaaaatc

SEQ ID NO: 79951 - DNA, 22 bp, synthetic construct
  misc_feature 1..22: note = chemically synthesized
  source 1..22: mol_type = other DNA
agctccccactgctaaaatcaa

SEQ ID NO: 79952 - DNA, 22 bp, synthetic construct
  misc_feature 1..22: note = chemically synthesized
  source 1..22: mol_type = other DNA
gctccccactgctaaaatcaag

SEQ ID NO: 79953 - DNA, 22 bp, synthetic construct
  misc_feature 1..22: note = chemically synthesized
  source 1..22: mol_type = other DNA
cccactgctaaaatcaagtata

SEQ ID NO: 79954 - DNA, 22 bp, synthetic construct
  misc_feature 1..22: note = chemically synthesized
  source 1..22: mol_type = other DNA
ctaaaatcaagtatacaaaatc

SEQ ID NO: 79955 - DNA, 22 bp, synthetic construct
  misc_feature 1..22: note = chemically synthesized
  source 1..22: mol_type = other DNA
aaatcaagtatacaaaatcttc

SEQ ID NO: 79956 - DNA, 22 bp, synthetic construct
  misc_feature 1..22: note = chemically synthesized
  source 1..22: mol_type = other DNA
cctacctttcagtcaaatcctc

SEQ ID NO: 79957 - DNA, 22 bp, synthetic construct
  misc_feature 1..22: note = chemically synthesized
  source 1..22: mol_type = other DNA
ctacctttcagtcaaatcctct

SEQ ID NO: 79958 - DNA, 22 bp, synthetic construct
  misc_feature 1..22: note = chemically synthesized
  source 1..22: mol_type = other DNA
cctttcagtcaaatcctctgtc

SEQ ID NO: 79959 - DNA, 22 bp, synthetic construct
  misc_feature 1..22: note = chemically synthesized
  source 1..22: mol_type = other DNA
tcagtcaaatcctctgtcatca

SEQ ID NO: 79960 - DNA, 22 bp, synthetic construct
  misc_feature 1..22: note = chemically synthesized
  source 1..22: mol_type = other DNA
cagtcaaatcctctgtcatcat

SEQ ID NO: 79961 - DNA, 22 bp, synthetic construct
  misc_feature 1..22: note = chemically synthesized
  source 1..22: mol_type = other DNA
agtcaaatcctctgtcatcata

SEQ ID NO: 79962 - DNA, 22 bp, synthetic construct
  misc_feature 1..22: note = chemically synthesized
  source 1..22: mol_type = other DNA
tgtcatcatactgcaatctatc

SEQ ID NO: 79963 - DNA, 22 bp, synthetic construct
  misc_feature 1..22: note = chemically synthesized
  source 1..22: mol_type = other DNA
tcatcatactgcaatctatcta

SEQ ID NO: 79964 - DNA, 22 bp, synthetic construct
  misc_feature 1..22: note = chemically synthesized
  source 1..22: mol_type = other DNA
caatctatctattccctcattt

SEQ ID NO: 79965 - DNA, 22 bp, synthetic construct
  misc_feature 1..22: note = chemically synthesized
  source 1..22: mol_type = other DNA
tctattccctcattttccatca

SEQ ID NO: 79966 - DNA, 22 bp, synthetic construct
  misc_feature 1..22: note = chemically synthesized
  source 1..22: mol_type = other DNA
ttccctcattttccatcatatt

SEQ ID NO: 79967 - DNA, 22 bp, synthetic construct
  misc_feature 1..22: note = chemically synthesized
  source 1..22: mol_type = other DNA
cctcattttccatcatattatt

SEQ ID NO: 79968 - DNA, 22 bp, synthetic construct
  misc_feature 1..22: note = chemically synthesized
  source 1..22: mol_type = other DNA
attttccatcatattattactt

SEQ ID NO: 79969 - DNA, 22 bp, synthetic construct
  misc_feature 1..22: note = chemically synthesized
  source 1..22: mol_type = other DNA
tccatcatattattacttttat

SEQ ID NO: 79970 - DNA, 22 bp, synthetic construct
  misc_feature 1..22: note = chemically synthesized
  source 1..22: mol_type = other DNA
ccatcatattattacttttatg

SEQ ID NO: 79971 - DNA, 22 bp, synthetic construct
  misc_feature 1..22: note = chemically synthesized
  source 1..22: mol_type = other DNA
catcatattattacttttatgg

SEQ ID NO: 79972 - DNA, 22 bp, synthetic construct
  misc_feature 1..22: note = chemically synthesized
  source 1..22: mol_type = other DNA
ttacttttatggagaaatgcaa

SEQ ID NO: 79973 - DNA, 22 bp, synthetic construct
  misc_feature 1..22: note = chemically synthesized
  source 1..22: mol_type = other DNA
cttttatggagaaatgcaacgc

SEQ ID NO: 79974 - DNA, 22 bp, synthetic construct
  misc_feature 1..22: note = chemically synthesized
  source 1..22: mol_type = other DNA
ttatggagaaatgcaacgctga

SEQ ID NO: 79975 - DNA, 22 bp, synthetic construct
  misc_feature 1..22: note = chemically synthesized
  source 1..22: mol_type = other DNA
tatggagaaatgcaacgctgag

SEQ ID NO: 79976 - DNA, 22 bp, synthetic construct
  misc_feature 1..22: note = chemically synthesized
  source 1..22: mol_type = other DNA
atggagaaatgcaacgctgagt

SEQ ID NO: 79977 - DNA, 22 bp, synthetic construct
  misc_feature 1..22: note = chemically synthesized
  source 1..22: mol_type = other DNA
tggagaaatgcaacgctgagtg

SEQ ID NO: 79978 - DNA, 22 bp, synthetic construct
  misc_feature 1..22: note = chemically synthesized
  source 1..22: mol_type = other DNA
agtgtaaatttcacattagaat

SEQ ID NO: 79979 - DNA, 22 bp, synthetic construct
  misc_feature 1..22: note = chemically synthesized
  source 1..22: mol_type = other DNA
cacattagaatgtccaaaacat

SEQ ID NO: 79980 - DNA, 22 bp, synthetic construct
  misc_feature 1..22: note = chemically synthesized
  source 1..22: mol_type = other DNA
acattagaatgtccaaaacatt

SEQ ID NO: 79981 - DNA, 22 bp, synthetic construct
  misc_feature 1..22: note = chemically synthesized
  source 1..22: mol_type = other DNA
gaatgtccaaaacattgtgtag

SEQ ID NO: 79982 - DNA, 22 bp, synthetic construct
  misc_feature 1..22: note = chemically synthesized
  source 1..22: mol_type = other DNA
tgtagagtagaaaaaaaaacta

SEQ ID NO: 79983 - DNA, 22 bp, synthetic construct
  misc_feature 1..22: note = chemically synthesized
  source 1..22: mol_type = other DNA
tatgaagtttaacagatgtact

SEQ ID NO: 79984 - DNA, 22 bp, synthetic construct
  misc_feature 1..22: note = chemically synthesized
  source 1..22: mol_type = other DNA
aacagatgtactgagaaatgca

SEQ ID NO: 79985 - DNA, 22 bp, synthetic construct
  misc_feature 1..22: note = chemically synthesized
  source 1..22: mol_type = other DNA
acagatgtactgagaaatgcaa

SEQ ID NO: 79986 - DNA, 22 bp, synthetic construct
  misc_feature 1..22: note = chemically synthesized
  source 1..22: mol_type = other DNA
agaaatgcaaatattttgaaga

SEQ ID NO: 79987 - DNA, 22 bp, synthetic construct
  misc_feature 1..22: note = chemically synthesized
  source 1..22: mol_type = other DNA
tgaagacaattcaaaatagcac

SEQ ID NO: 79988 - DNA, 22 bp, synthetic construct
  misc_feature 1..22: note = chemically synthesized
  source 1..22: mol_type = other DNA
gaagacaattcaaaatagcact

SEQ ID NO: 79989 - DNA, 22 bp, synthetic construct
  misc_feature 1..22: note = chemically synthesized
  source 1..22: mol_type = other DNA
aagacaattcaaaatagcactt

SEQ ID NO: 79990 - DNA, 22 bp, synthetic construct
  misc_feature 1..22: note = chemically synthesized
  source 1..22: mol_type = other DNA
aaaatagcacttaaatatttag

SEQ ID NO: 79991 - DNA, 22 bp, synthetic construct
  misc_feature 1..22: note = chemically synthesized
  source 1..22: mol_type = other DNA
aaatatttagtgtagtactagc

SEQ ID NO: 79992 - DNA, 22 bp, synthetic construct
  misc_feature 1..22: note = chemically synthesized
  source 1..22: mol_type = other DNA
aatatttagtgtagtactagca

SEQ ID NO: 79993 - DNA, 22 bp, synthetic construct
  misc_feature 1..22: note = chemically synthesized
  source 1..22: mol_type = other DNA
agtgtagtactagcagaaacaa

SEQ ID NO: 79994 - DNA, 22 bp, synthetic construct
  misc_feature 1..22: note = chemically synthesized
  source 1..22: mol_type = other DNA
gtgtagtactagcagaaacaaa

SEQ ID NO: 79995 - DNA, 22 bp, synthetic construct
  misc_feature 1..22: note = chemically synthesized
  source 1..22: mol_type = other DNA
gcagaaacaaattaattagatt

SEQ ID NO: 79996 - DNA, 22 bp, synthetic construct
  misc_feature 1..22: note = chemically synthesized
  source 1..22: mol_type = other DNA
attagattttttagaatgtttt

SEQ ID NO: 79997 - DNA, 22 bp, synthetic construct
  misc_feature 1..22: note = chemically synthesized
  source 1..22: mol_type = other DNA
gattttttagaatgttttatgt

SEQ ID NO: 79998 - DNA, 22 bp, synthetic construct
  misc_feature 1..22: note = chemically synthesized
  source 1..22: mol_type = other DNA
tttagaatgttttatgtattct

SEQ ID NO: 79999 - DNA, 22 bp, synthetic construct
  misc_feature 1..22: note = chemically synthesized
  source 1..22: mol_type = other DNA
ttagaatgttttatgtattctc

SEQ ID NO: 80000 - DNA, 22 bp, synthetic construct
  misc_feature 1..22: note = chemically synthesized
  source 1..22: mol_type = other DNA
tagaatgttttatgtattctcc

SEQ ID NO: 80001 - DNA, 22 bp, synthetic construct
  misc_feature 1..22: note = chemically synthesized
  source 1..22: mol_type = other DNA
agaatgttttatgtattctccc

SEQ ID NO: 80002 - DNA, 22 bp, synthetic construct
  misc_feature 1..22: note = chemically synthesized
  source 1..22: mol_type = other DNA
gaatgttttatgtattctccct

SEQ ID NO: 80003 - DNA, 22 bp, synthetic construct
  misc_feature 1..22: note = chemically synthesized
  source 1..22: mol_type = other DNA
tatgtattctcccttcccaata

SEQ ID NO: 80004 - DNA, 22 bp, synthetic construct
  misc_feature 1..22: note = chemically synthesized
  source 1..22: mol_type = other DNA
atgtattctcccttcccaataa

SEQ ID NO: 80005 - DNA, 22 bp, synthetic construct
  misc_feature 1..22: note = chemically synthesized
  source 1..22: mol_type = other DNA
tgtattctcccttcccaataat

SEQ ID NO: 80006 - DNA, 22 bp, synthetic construct
  misc_feature 1..22: note = chemically synthesized
  source 1..22: mol_type = other DNA
tcccttcccaataatggaaata

SEQ ID NO: 80007 - DNA, 22 bp, synthetic construct
  misc_feature 1..22: note = chemically synthesized
  source 1..22: mol_type = other DNA
ccttcccaataatggaaatact

SEQ ID NO: 80008 - DNA, 22 bp, synthetic construct
  misc_feature 1..22: note = chemically synthesized
  source 1..22: mol_type = other DNA
cccaataatggaaatactgtag

SEQ ID NO: 80009 - DNA, 22 bp, synthetic construct
  misc_feature 1..22: note = chemically synthesized
  source 1..22: mol_type = other DNA
ccaataatggaaatactgtagg

SEQ ID NO: 80010 - DNA, 22 bp, synthetic construct
  misc_feature 1..22: note = chemically synthesized
  source 1..22: mol_type = other DNA
taggaagtctatttctaacttt

SEQ ID NO: 80011 - DNA, 22 bp, synthetic construct
  misc_feature 1..22: note = chemically synthesized
  source 1..22: mol_type = other DNA
tttctaactttcttattctttg

SEQ ID NO: 80012 - DNA, 22 bp, synthetic construct
  misc_feature 1..22: note = chemically synthesized
  source 1..22: mol_type = other DNA
ctaactttcttattctttggtg

SEQ ID NO: 80013 - DNA, 22 bp, synthetic construct
  misc_feature 1..22: note = chemically synthesized
  source 1..22: mol_type = other DNA
taactttcttattctttggtgc

SEQ ID NO: 80014 - DNA, 22 bp, synthetic construct
  misc_feature 1..22: note = chemically synthesized
  source 1..22: mol_type = other DNA
actttcttattctttggtgcac

SEQ ID NO: 80015 - DNA, 22 bp, synthetic construct
  misc_feature 1..22: note = chemically synthesized
  source 1..22: mol_type = other DNA
tcttattctttggtgcacaaac

SEQ ID NO: 80016 - DNA, 22 bp, synthetic construct
  misc_feature 1..22: note = chemically synthesized
  source 1..22: mol_type = other DNA
cttattctttggtgcacaaacg

SEQ ID NO: 80017 - DNA, 22 bp, synthetic construct
  misc_feature 1..22: note = chemically synthesized
  source 1..22: mol_type = other DNA
ttattctttggtgcacaaacgt

SEQ ID NO: 80018 - DNA, 22 bp, synthetic construct
  misc_feature 1..22: note = chemically synthesized
  source 1..22: mol_type = other DNA
attctttggtgcacaaacgtgt

SEQ ID NO: 80019 - DNA, 22 bp, synthetic construct
  misc_feature 1..22: note = chemically synthesized
  source 1..22: mol_type = other DNA
ttctttggtgcacaaacgtgtg

SEQ ID NO: 80020 - DNA, 22 bp, synthetic construct
  misc_feature 1..22: note = chemically synthesized
  source 1..22: mol_type = other DNA
tttggtgcacaaacgtgtgtgt

SEQ ID NO: 80021 - DNA, 22 bp, synthetic construct
  misc_feature 1..22: note = chemically synthesized
  source 1..22: mol_type = other DNA
tggtgcacaaacgtgtgtgtgt

SEQ ID NO: 80022 - DNA, 22 bp, synthetic construct
  misc_feature 1..22: note = chemically synthesized
  source 1..22: mol_type = other DNA
ggtgcacaaacgtgtgtgtgtg

SEQ ID NO: 80023 - DNA, 22 bp, synthetic construct
  misc_feature 1..22: note = chemically synthesized
  source 1..22: mol_type = other DNA
gtgcacaaacgtgtgtgtgtgt

SEQ ID NO: 80024 - DNA, 22 bp, synthetic construct
  misc_feature 1..22: note = chemically synthesized
  source 1..22: mol_type = other DNA
agtgtgtgtatatgtaaatcta

SEQ ID NO: 80025 - DNA, 22 bp, synthetic construct
  misc_feature 1..22: note = chemically synthesized
  source 1..22: mol_type = other DNA
agtgttaatacatgtataaatt

SEQ ID NO: 80026 - DNA, 22 bp, synthetic construct
  misc_feature 1..22: note = chemically synthesized
  source 1..22: mol_type = other DNA
atacatgtataaatttctataa

SEQ ID NO: 80027 - DNA, 22 bp, synthetic construct
  misc_feature 1..22: note = chemically synthesized
  source 1..22: mol_type = other DNA
ctataaaaatcacagaaaaagc

SEQ ID NO: 80028 - DNA, 22 bp, synthetic construct
  misc_feature 1..22: note = chemically synthesized
  source 1..22: mol_type = other DNA
tataaaaatcacagaaaaagct

SEQ ID NO: 80029 - DNA, 22 bp, synthetic construct
  misc_feature 1..22: note = chemically synthesized
  source 1..22: mol_type = other DNA
taaaaatcacagaaaaagctaa

SEQ ID NO: 80030 - DNA, 22 bp, synthetic construct
  misc_feature 1..22: note = chemically synthesized
  source 1..22: mol_type = other DNA
agcataagccaagcatgagtag

SEQ ID NO: 80031 - DNA, 22 bp, synthetic construct
  misc_feature 1..22: note = chemically synthesized
  source 1..22: mol_type = other DNA
caagtgtttaagatagtacctc

SEQ ID NO: 80032 - DNA, 22 bp, synthetic construct
  misc_feature 1..22: note = chemically synthesized
  source 1..22: mol_type = other DNA
aagtgtttaagatagtacctca

SEQ ID NO: 80033 - DNA, 22 bp, synthetic construct
  misc_feature 1..22: note = chemically synthesized
  source 1..22: mol_type = other DNA
aagatagtacctcagatttctc

SEQ ID NO: 80034 - DNA, 22 bp, synthetic construct
  misc_feature 1..22: note = chemically synthesized
  source 1..22: mol_type = other DNA
agatagtacctcagatttctca

SEQ ID NO: 80035 - DNA, 22 bp, synthetic construct
  misc_feature 1..22: note = chemically synthesized
  source 1..22: mol_type = other DNA
agatttctcaaagttttttttt

SEQ ID NO: 80036 - DNA, 22 bp, synthetic construct
  misc_feature 1..22: note = chemically synthesized
  source 1..22: mol_type = other DNA
ctcaaagttttttttttgtctt

SEQ ID NO: 80037 - DNA, 22 bp, synthetic construct
  misc_feature 1..22: note = chemically synthesized
  source 1..22: mol_type = other DNA
tcaaagttttttttttgtcttt

SEQ ID NO: 80038 - DNA, 22 bp, synthetic construct
  misc_feature 1..22: note = chemically synthesized
  source 1..22: mol_type = other DNA
aaagttttttttttgtctttct

SEQ ID NO: 80039 - DNA, 22 bp, synthetic construct
  misc_feature 1..22: note = chemically synthesized
  source 1..22: mol_type = other DNA
tttttttgtctttctttaggtg

SEQ ID NO: 80040 - DNA, 22 bp, synthetic construct
  misc_feature 1..22: note = chemically synthesized
  source 1..22: mol_type = other DNA
ttttttgtctttctttaggtgt

SEQ ID NO: 80041 - DNA, 22 bp, synthetic construct
  misc_feature 1..22: note = chemically synthesized
  source 1..22: mol_type = other DNA
tttttgtctttctttaggtgta

SEQ ID NO: 80042 - DNA, 22 bp, synthetic construct
  misc_feature 1..22: note = chemically synthesized
  source 1..22: mol_type = other DNA
ttttgtctttctttaggtgtaa

SEQ ID NO: 80043 - DNA, 22 bp, synthetic construct
  misc_feature 1..22: note = chemically synthesized
  source 1..22: mol_type = other DNA
tttgtctttctttaggtgtaaa

SEQ ID NO: 80044 - DNA, 22 bp, synthetic construct
  misc_feature 1..22: note = chemically synthesized
  source 1..22: mol_type = other DNA
ttgtctttctttaggtgtaaat

SEQ ID NO: 80045 - DNA, 22 bp, synthetic construct
  misc_feature 1..22: note = chemically synthesized
  source 1..22: mol_type = other DNA
tgtctttctttaggtgtaaata

SEQ ID NO: 80046 - DNA, 22 bp, synthetic construct
  misc_feature 1..22: note = chemically synthesized
  source 1..22: mol_type = other DNA
gtctttctttaggtgtaaataa

SEQ ID NO: 80047 - DNA, 22 bp, synthetic construct
  misc_feature 1..22: note = chemically synthesized
  source 1..22: mol_type = other DNA
tctttctttaggtgtaaataag

SEQ ID NO: 80048 - DNA, 22 bp, synthetic construct
  misc_feature 1..22: note = chemically synthesized
  source 1..22: mol_type = other DNA
tctttaggtgtaaataaggtca

SEQ ID NO: 80049 - DNA, 22 bp, synthetic construct
  misc_feature 1..22: note = chemically synthesized
  source 1..22: mol_type = other DNA
ctttaggtgtaaataaggtcat

SEQ ID NO: 80050 - DNA, 22 bp, synthetic construct
  misc_feature 1..22: note = chemically synthesized
  source 1..22: mol_type = other DNA
tttaggtgtaaataaggtcatt

SEQ ID NO: 80051 - DNA, 22 bp, synthetic construct
  misc_feature 1..22: note = chemically synthesized
  source 1..22: mol_type = other DNA
taggtgtaaataaggtcatttt

SEQ ID NO: 80052 - DNA, 22 bp, synthetic construct
  misc_feature 1..22: note = chemically synthesized
  source 1..22: mol_type = other DNA
aggtgtaaataaggtcattttt

SEQ ID NO: 80053 - DNA, 22 bp, synthetic construct
  misc_feature 1..22: note = chemically synthesized
  source 1..22: mol_type = other DNA
ggtgtaaataaggtcatttttt

SEQ ID NO: 80054 - DNA, 22 bp, synthetic construct
  misc_feature 1..22: note = chemically synthesized
  source 1..22: mol_type = other DNA
tttaaacattctcatggcattg

SEQ ID NO: 80055 - DNA, 22 bp, synthetic construct
  misc_feature 1..22: note = chemically synthesized
  source 1..22: mol_type = other DNA
ttaaacattctcatggcattgt

SEQ ID NO: 80056 - DNA, 22 bp, synthetic construct
  misc_feature 1..22: note = chemically synthesized
  source 1..22: mol_type = other DNA
taaacattctcatggcattgtt

SEQ ID NO: 80057 - DNA, 22 bp, synthetic construct
  misc_feature 1..22: note = chemically synthesized
  source 1..22: mol_type = other DNA
aaacattctcatggcattgttc

SEQ ID NO: 80058 - DNA, 22 bp, synthetic construct
  misc_feature 1..22: note = chemically synthesized
  source 1..22: mol_type = other DNA
aacattctcatggcattgttct

SEQ ID NO: 80059 - DNA, 22 bp, synthetic construct
  misc_feature 1..22: note = chemically synthesized
  source 1..22: mol_type = other DNA
tcatggcattgttctaggcttt

SEQ ID NO: 80060 - DNA, 22 bp, synthetic construct
  misc_feature 1..22: note = chemically synthesized
  source 1..22: mol_type = other DNA
atggcattgttctaggctttta

SEQ ID NO: 80061 - DNA, 22 bp, synthetic construct
  misc_feature 1..22: note = chemically synthesized
  source 1..22: mol_type = other DNA
ttctaggcttttaagaaggaga

SEQ ID NO: 80062 - DNA, 22 bp, synthetic construct
  misc_feature 1..22: note = chemically synthesized
  source 1..22: mol_type = other DNA
taggcttttaagaaggagagat

SEQ ID NO: 80063 - DNA, 22 bp, synthetic construct
  misc_feature 1..22: note = chemically synthesized
  source 1..22: mol_type = other DNA
ggcttttaagaaggagagattg

SEQ ID NO: 80064 - DNA, 22 bp, synthetic construct
  misc_feature 1..22: note = chemically synthesized
  source 1..22: mol_type = other DNA
ttaagaaggagagattgtaaaa

SEQ ID NO: 80065 - DNA, 22 bp, synthetic construct
  misc_feature 1..22: note = chemically synthesized
  source 1..22: mol_type = other DNA
taagaaggagagattgtaaaaa

SEQ ID NO: 80066 - DNA, 22 bp, synthetic construct
  misc_feature 1..22: note = chemically synthesized
  source 1..22: mol_type = other DNA
aagaaggagagattgtaaaaat

SEQ ID NO: 80067 - DNA, 22 bp, synthetic construct
  misc_feature 1..22: note = chemically synthesized
  source 1..22: mol_type = other DNA
agaaggagagattgtaaaaatt

SEQ ID NO: 80068 - DNA, 22 bp, synthetic construct
  misc_feature 1..22: note = chemically synthesized
  source 1..22: mol_type = other DNA
taaaaatttgtattgatgtgaa

SEQ ID NO: 80069 - DNA, 22 bp, synthetic construct
  misc_feature 1..22: note = chemically synthesized
  source 1..22: mol_type = other DNA
gtattgatgtgaagggattaag

SEQ ID NO: 80070 - DNA, 22 bp, synthetic construct
  misc_feature 1..22: note = chemically synthesized
  source 1..22: mol_type = other DNA
tattgatgtgaagggattaagg

SEQ ID NO: 80071 - DNA, 22 bp, synthetic construct
  misc_feature 1..22: note = chemically synthesized
  source 1..22: mol_type = other DNA
atgtgaagggattaaggtatag

SEQ ID NO: 80072 - DNA, 22 bp, synthetic construct
  misc_feature 1..22: note = chemically synthesized
  source 1..22: mol_type = other DNA
aggtatagtctgtagataatat

SEQ ID NO: 80073 - DNA, 22 bp, synthetic construct
  misc_feature 1..22: note = chemically synthesized
  source 1..22: mol_type = other DNA
tagataatatcatagataatta

SEQ ID NO: 80074 - DNA, 22 bp, synthetic construct
  misc_feature 1..22: note = chemically synthesized
  source 1..22: mol_type = other DNA
cttttgctgggattacattctt

SEQ ID NO: 80075 - DNA, 22 bp, synthetic construct
  misc_feature 1..22: note = chemically synthesized
  source 1..22: mol_type = other DNA
ttgctgggattacattcttttt

SEQ ID NO: 80076 - DNA, 22 bp, synthetic construct
  misc_feature 1..22: note = chemically synthesized
  source 1..22: mol_type = other DNA
tgctgggattacattctttttt

SEQ ID NO: 80077 - DNA, 22 bp, synthetic construct
  misc_feature 1..22: note = chemically synthesized
  source 1..22: mol_type = other DNA
gctgggattacattctttttta

SEQ ID NO: 80078 - DNA, 22 bp, synthetic construct
  misc_feature 1..22: note = chemically synthesized
  source 1..22: mol_type = other DNA
ctgggattacattcttttttat

SEQ ID NO: 80079 - DNA, 22 bp, synthetic construct
  misc_feature 1..22: note = chemically synthesized
  source 1..22: mol_type = other DNA
ggattacattcttttttattta

SEQ ID NO: 80080 - DNA, 22 bp, synthetic construct
  misc_feature 1..22: note = chemically synthesized
  source 1..22: mol_type = other DNA
cattcttttttatttaagtttc

SEQ ID NO: 80081 - DNA, 22 bp, synthetic construct
  misc_feature 1..22: note = chemically synthesized
  source 1..22: mol_type = other DNA
ttttttatttaagtttcttgga

SEQ ID NO: 80082 - DNA, 22 bp, synthetic construct
  misc_feature 1..22: note = chemically synthesized
  source 1..22: mol_type = other DNA
ttttatttaagtttcttggaaa

SEQ ID NO: 80083 - DNA, 22 bp, synthetic construct
  misc_feature 1..22: note = chemically synthesized
  source 1..22: mol_type = other DNA
tttatttaagtttcttggaaaa

SEQ ID NO: 80084 - DNA, 22 bp, synthetic construct
  misc_feature 1..22: note = chemically synthesized
  source 1..22: mol_type = other DNA
ttatttaagtttcttggaaaat

SEQ ID NO: 80085 - DNA, 22 bp, synthetic construct
  misc_feature 1..22: note = chemically synthesized
  source 1..22: mol_type = other DNA
tatttaagtttcttggaaaata

SEQ ID NO: 80086 - DNA, 22 bp, synthetic construct
  misc_feature 1..22: note = chemically synthesized
  source 1..22: mol_type = other DNA
atttaagtttcttggaaaatat

SEQ ID NO: 80087 - DNA, 22 bp, synthetic construct
  misc_feature 1..22: note = chemically synthesized
  source 1..22: mol_type = other DNA
tttaagtttcttggaaaatatt

SEQ ID NO: 80088 - DNA, 22 bp, synthetic construct
  misc_feature 1..22: note = chemically synthesized
  source 1..22: mol_type = other DNA
aagtttcttggaaaatattctc

SEQ ID NO: 80089 - DNA, 22 bp, synthetic construct
  misc_feature 1..22: note = chemically synthesized
  source 1..22: mol_type = other DNA
agtttcttggaaaatattctcc

SEQ ID NO: 80090 - DNA, 22 bp, synthetic construct
  misc_feature 1..22: note = chemically synthesized
  source 1..22: mol_type = other DNA
cttggaaaatattctccttaat

SEQ ID NO: 80091 - DNA, 22 bp, synthetic construct
  misc_feature 1..22: note = chemically synthesized
  source 1..22: mol_type = other DNA
ttggaaaatattctccttaatc

SEQ ID NO: 80092 - DNA, 22 bp, synthetic construct
  misc_feature 1..22: note = chemically synthesized
  source 1..22: mol_type = other DNA
ggaaaatattctccttaatctt

SEQ ID NO: 80093 - DNA, 22 bp, synthetic construct
  misc_feature 1..22: note = chemically synthesized
  source 1..22: mol_type = other DNA
gaaaatattctccttaatcttc

SEQ ID NO: 80094 - DNA, 22 bp, synthetic construct
  misc_feature 1..22: note = chemically synthesized
  source 1..22: mol_type = other DNA
tccttaatcttctctagctttt

SEQ ID NO: 80095 - DNA, 22 bp, synthetic construct
  misc_feature 1..22: note = chemically synthesized
  source 1..22: mol_type = other DNA
cttaatcttctctagcttttta

SEQ ID NO: 80096 - DNA, 22 bp, synthetic construct
  misc_feature 1..22: note = chemically synthesized
  source 1..22: mol_type = other DNA
aatcttctctagctttttaaaa

SEQ ID NO: 80097 - DNA, 22 bp, synthetic construct
  misc_feature 1..22: note = chemically synthesized
  source 1..22: mol_type = other DNA
atcttctctagctttttaaaaa

SEQ ID NO: 80098 - DNA, 22 bp, synthetic construct
  misc_feature 1..22: note = chemically synthesized
  source 1..22: mol_type = other DNA
ctctagctttttaaaaaatgtt

SEQ ID NO: 80099 - DNA, 22 bp, synthetic construct
  misc_feature 1..22: note = chemically synthesized
  source 1..22: mol_type = other DNA
tctagctttttaaaaaatgttt

SEQ ID NO: 80100 - DNA, 22 bp, synthetic construct
  misc_feature 1..22: note = chemically synthesized
  source 1..22: mol_type = other DNA
tagctttttaaaaaatgtttat

SEQ ID NO: 80101 - DNA, 22 bp, synthetic construct
  misc_feature 1..22: note = chemically synthesized
  source 1..22: mol_type = other DNA
gctttttaaaaaatgtttattt

SEQ ID NO: 80102 - DNA, 22 bp, synthetic construct
  misc_feature 1..22: note = chemically synthesized
  source 1..22: mol_type = other DNA
tttaaaaaatgtttattttaaa

SEQ ID NO: 80103 - DNA, 22 bp, synthetic construct
  misc_feature 1..22: note = chemically synthesized
  source 1..22: mol_type = other DNA
ttaaaaaatgtttattttaaaa

SEQ ID NO: 80104 - DNA, 22 bp, synthetic construct
  misc_feature 1..22: note = chemically synthesized
  source 1..22: mol_type = other DNA
taaaaaatgtttattttaaaaa

SEQ ID NO: 80105 - DNA, 22 bp, synthetic construct
  misc_feature 1..22: note = chemically synthesized
  source 1..22: mol_type = other DNA
aaaaaatgtttattttaaaaat

SEQ ID NO: 80106 - DNA, 22 bp, synthetic construct
  misc_feature 1..22: note = chemically synthesized
  source 1..22: mol_type = other DNA
aaaaatgtttattttaaaaatt

SEQ ID NO: 80107 - DNA, 22 bp, synthetic construct
  misc_feature 1..22: note = chemically synthesized
  source 1..22: mol_type = other DNA
attttaaaaatttatttatcac

SEQ ID NO: 80108 - DNA, 22 bp, synthetic construct
  misc_feature 1..22: note = chemically synthesized
  source 1..22: mol_type = other DNA
ttttaaaaatttatttatcacc

SEQ ID NO: 80109 - DNA, 22 bp, synthetic construct
  misc_feature 1..22: note = chemically synthesized
  source 1..22: mol_type = other DNA
taaaaatttatttatcacccag

SEQ ID NO: 80110 - DNA, 22 bp, synthetic construct
  misc_feature 1..22: note = chemically synthesized
  source 1..22: mol_type = other DNA
aaaaatttatttatcacccagg

SEQ ID NO: 80111 - DNA, 22 bp, synthetic construct
  misc_feature 1..22: note = chemically synthesized
  source 1..22: mol_type = other DNA
aaaatttatttatcacccaggt

SEQ ID NO: 80112 - DNA, 22 bp, synthetic construct
  misc_feature 1..22: note = chemically synthesized
  source 1..22: mol_type = other DNA
atttatcacccaggtatagaaa

SEQ ID NO: 80113 - DNA, 22 bp, synthetic construct
  misc_feature 1..22: note = chemically synthesized
  source 1..22: mol_type = other DNA
tttatcacccaggtatagaaat

SEQ ID NO: 80114 - DNA, 22 bp, synthetic construct
  misc_feature 1..22: note = chemically synthesized
  source 1..22: mol_type = other DNA
atcacccaggtatagaaatttt

SEQ ID NO: 80115 - DNA, 22 bp, synthetic construct
  misc_feature 1..22: note = chemically synthesized
  source 1..22: mol_type = other DNA
tcacccaggtatagaaattttc

SEQ ID NO: 80116 - DNA, 22 bp, synthetic construct
  misc_feature 1..22: note = chemically synthesized
  source 1..22: mol_type = other DNA
tcaatcattttacttcttcagt

SEQ ID NO: 80117 - DNA, 22 bp, synthetic construct
  misc_feature 1..22: note = chemically synthesized
  source 1..22: mol_type = other DNA
caatcattttacttcttcagtg

SEQ ID NO: 80118 - DNA, 22 bp, synthetic construct
  misc_feature 1..22: note = chemically synthesized
  source 1..22: mol_type = other DNA
aatcattttacttcttcagtga

SEQ ID NO: 80119 - DNA, 22 bp, synthetic construct
  misc_feature 1..22: note = chemically synthesized
  source 1..22: mol_type = other DNA
tacttcttcagtgatgtttctg

SEQ ID NO: 80120 - DNA, 22 bp, synthetic construct
  misc_feature 1..22: note = chemically synthesized
  source 1..22: mol_type = other DNA
acttcttcagtgatgtttctgt

SEQ ID NO: 80121 - DNA, 22 bp, synthetic construct
  misc_feature 1..22: note = chemically synthesized
  source 1..22: mol_type = other DNA
cttcttcagtgatgtttctgtt

SEQ ID NO: 80122 - DNA, 22 bp, synthetic construct
  misc_feature 1..22: note = chemically synthesized
  source 1..22: mol_type = other DNA
cttcagtgatgtttctgttgat

SEQ ID NO: 80123 - DNA, 22 bp, synthetic construct
  misc_feature 1..22: note = chemically synthesized
  source 1..22: mol_type = other DNA
ttcagtgatgtttctgttgatg

SEQ ID NO: 80124 - DNA, 22 bp, synthetic construct
  misc_feature 1..22: note = chemically synthesized
  source 1..22: mol_type = other DNA
cagtgatgtttctgttgatgcc

SEQ ID NO: 80125 - DNA, 22 bp, synthetic construct
  misc_feature 1..22: note = chemically synthesized
  source 1..22: mol_type = other DNA
agtgatgtttctgttgatgcca

SEQ ID NO: 80126 - DNA, 22 bp, synthetic construct
  misc_feature 1..22: note = chemically synthesized
  source 1..22: mol_type = other DNA
ctgttgatgccatgatgctcca

SEQ ID NO: 80127 - DNA, 22 bp, synthetic construct
  misc_feature 1..22: note = chemically synthesized
  source 1..22: mol_type = other DNA
tgttgatgccatgatgctccat

SEQ ID NO: 80128 - DNA, 22 bp, synthetic construct
  misc_feature 1..22: note = chemically synthesized
  source 1..22: mol_type = other DNA
ttgatgccatgatgctccattg

SEQ ID NO: 80129 - DNA, 22 bp, synthetic construct
  misc_feature 1..22: note = chemically synthesized
  source 1..22: mol_type = other DNA
atgccatgatgctccattgatg

SEQ ID NO: 80130 - DNA, 22 bp, synthetic construct
  misc_feature 1..22: note = chemically synthesized
  source 1..22: mol_type = other DNA
cattgatgacttgggtctaaaa

SEQ ID NO: 80131 - DNA, 22 bp, synthetic construct
  misc_feature 1..22: note = chemically synthesized
  source 1..22: mol_type = other DNA
atgacttgggtctaaaatctcc

SEQ ID NO: 80132 - DNA, 22 bp, synthetic construct
  misc_feature 1..22: note = chemically synthesized
  source 1..22: mol_type = other DNA
gggtctaaaatctccactatag

SEQ ID NO: 80133 - DNA, 22 bp, synthetic construct
  misc_feature 1..22: note = chemically synthesized
  source 1..22: mol_type = other DNA
ggtctaaaatctccactatagg

SEQ ID NO: 80134 - DNA, 22 bp, synthetic construct
  misc_feature 1..22: note = chemically synthesized
  source 1..22: mol_type = other DNA
aaatctccactatagggggaaa

SEQ ID NO: 80135 - DNA, 22 bp, synthetic construct
  misc_feature 1..22: note = chemically synthesized
  source 1..22: mol_type = other DNA
cactatagggggaaatgtgtat

SEQ ID NO: 80136 - DNA, 22 bp, synthetic construct
  misc_feature 1..22: note = chemically synthesized
  source 1..22: mol_type = other DNA
tagggggaaatgtgtatcagat

SEQ ID NO: 80137 - DNA, 22 bp, synthetic construct
  misc_feature 1..22: note = chemically synthesized
  source 1..22: mol_type = other DNA
tacatcatccaggcaatctcat

SEQ ID NO: 80138 - DNA, 22 bp, synthetic construct
  misc_feature 1..22: note = chemically synthesized
  source 1..22: mol_type = other DNA
acatcatccaggcaatctcata

SEQ ID NO: 80139 - DNA, 22 bp, synthetic construct
  misc_feature 1..22: note = chemically synthesized
  source 1..22: mol_type = other DNA
catcatccaggcaatctcatat

SEQ ID NO: 80140 - DNA, 22 bp, synthetic construct
  misc_feature 1..22: note = chemically synthesized
  source 1..22: mol_type = other DNA
atatttgttaatttaatattgg

SEQ ID NO: 80141 - DNA, 22 bp, synthetic construct
  misc_feature 1..22: note = chemically synthesized
  source 1..22: mol_type = other DNA
gttaatttaatattggttatta

SEQ ID NO: 80142 - DNA, 22 bp, synthetic construct
  misc_feature 1..22: note = chemically synthesized
  source 1..22: mol_type = other DNA
ttaatttaatattggttattat

SEQ ID NO: 80143 - DNA, 22 bp, synthetic construct
  misc_feature 1..22: note = chemically synthesized
  source 1..22: mol_type = other DNA
atttaatattggttattatttg

SEQ ID NO: 80144 - DNA, 22 bp, synthetic construct
  misc_feature 1..22: note = chemically synthesized
  source 1..22: mol_type = other DNA
aatattggttattatttgcttt

SEQ ID NO: 80145 - DNA, 22 bp, synthetic construct
  misc_feature 1..22: note = chemically synthesized
  source 1..22: mol_type = other DNA
atattggttattatttgcttta

SEQ ID NO: 80146 - DNA, 22 bp, synthetic construct
  misc_feature 1..22: note = chemically synthesized
  source 1..22: mol_type = other DNA
gttattatttgctttaattcac

SEQ ID NO: 80147 - DNA, 22 bp, synthetic construct
  misc_feature 1..22: note = chemically synthesized
  source 1..22: mol_type = other DNA
ttatttgctttaattcactatt

SEQ ID NO: 80148 - DNA, 22 bp, synthetic construct
  misc_feature 1..22: note = chemically synthesized
  source 1..22: mol_type = other DNA
tttgctttaattcactattatt

SEQ ID NO: 80149 - DNA, 22 bp, synthetic construct
  misc_feature 1..22: note = chemically synthesized
  source 1..22: mol_type = other DNA
gctttaattcactattattcac

SEQ ID NO: 80150 - DNA, 22 bp, synthetic construct
  misc_feature 1..22: note = chemically synthesized
  source 1..22: mol_type = other DNA
ctttaattcactattattcact

SEQ ID NO: 80151 - DNA, 22 bp, synthetic construct
  misc_feature 1..22: note = chemically synthesized
  source 1..22: mol_type = other DNA
taattcactattattcacttgt

SEQ ID NO: 80152 - DNA, 22 bp, synthetic construct
  misc_feature 1..22: note = chemically synthesized
  source 1..22: mol_type = other DNA
aattcactattattcacttgtt

SEQ ID NO: 80153 - DNA, 22 bp, synthetic construct
  misc_feature 1..22: note = chemically synthesized
  source 1..22: mol_type = other DNA
attcactattattcacttgttg

SEQ ID NO: 80154 - DNA, 22 bp, synthetic construct
  misc_feature 1..22: note = chemically synthesized
  source 1..22: mol_type = other DNA
actattattcacttgttgaata

SEQ ID NO: 80155 - DNA, 22 bp, synthetic construct
  misc_feature 1..22: note = chemically synthesized
  source 1..22: mol_type = other DNA
ttattcacttgttgaatacata

SEQ ID NO: 80156 - DNA, 22 bp, synthetic construct
  misc_feature 1..22: note = chemically synthesized
  source 1..22: mol_type = other DNA
ttcacttgttgaatacatatgt

SEQ ID NO: 80157 - DNA, 22 bp, synthetic construct
  misc_feature 1..22: note = chemically synthesized
  source 1..22: mol_type = other DNA
acttgttgaatacatatgtatt

SEQ ID NO: 80158 - DNA, 22 bp, synthetic construct
  misc_feature 1..22: note = chemically synthesized
  source 1..22: mol_type = other DNA
gttgaatacatatgtattatgt

SEQ ID NO: 80159 - DNA, 22 bp, synthetic construct
  misc_feature 1..22: note = chemically synthesized
  source 1..22: mol_type = other DNA
ttgaatacatatgtattatgtg

SEQ ID NO: 80160 - DNA, 22 bp, synthetic construct
  misc_feature 1..22: note = chemically synthesized
  source 1..22: mol_type = other DNA
aatacatatgtattatgtgtct

SEQ ID NO: 80161 - DNA, 22 bp, synthetic construct
  misc_feature 1..22: note = chemically synthesized
  source 1..22: mol_type = other DNA
tgtgtctattccatacaagaga

SEQ ID NO: 80162 - DNA, 22 bp, synthetic construct
  misc_feature 1..22: note = chemically synthesized
  source 1..22: mol_type = other DNA
ttccatacaagagactttgtga

SEQ ID NO: 80163 - DNA, 22 bp, synthetic construct
  misc_feature 1..22: note = chemically synthesized
  source 1..22: mol_type = other DNA
catacaagagactttgtgagat

SEQ ID NO: 80164 - DNA, 22 bp, synthetic construct
  misc_feature 1..22: note = chemically synthesized
  source 1..22: mol_type = other DNA
tgtgagatgtcagtgagttaga

SEQ ID NO: 80165 - DNA, 22 bp, synthetic construct
  misc_feature 1..22: note = chemically synthesized
  source 1..22: mol_type = other DNA
gtgagatgtcagtgagttagaa

SEQ ID NO: 80166 - DNA, 22 bp, synthetic construct
  misc_feature 1..22: note = chemically synthesized
  source 1..22: mol_type = other DNA
tgagatgtcagtgagttagaaa

SEQ ID NO: 80167 - DNA, 22 bp, synthetic construct
  misc_feature 1..22: note = chemically synthesized
  source 1..22: mol_type = other DNA
gaaaatattctagggataacat

SEQ ID NO: 80168 - DNA, 22 bp, synthetic construct
  misc_feature 1..22: note = chemically synthesized
  source 1..22: mol_type = other DNA
tagggataacattttaacttaa

SEQ ID NO: 80169 - DNA, 22 bp, synthetic construct
  misc_feature 1..22: note = chemically synthesized
  source 1..22: mol_type = other DNA
gggataacattttaacttaagt

SEQ ID NO: 80170 - DNA, 22 bp, synthetic construct
  misc_feature 1..22: note = chemically synthesized
  source 1..22: mol_type = other DNA
taacttaagtaacaggtgttga

SEQ ID NO: 80171 - DNA, 22 bp, synthetic construct
  misc_feature 1..22: note = chemically synthesized
  source 1..22: mol_type = other DNA
aacttaagtaacaggtgttgac

SEQ ID NO: 80172 - DNA, 22 bp, synthetic construct
  misc_feature 1..22: note = chemically synthesized
  source 1..22: mol_type = other DNA
acttaagtaacaggtgttgaca

SEQ ID NO: 80173 - DNA, 22 bp, synthetic construct
  misc_feature 1..22: note = chemically synthesized
  source 1..22: mol_type = other DNA
aagtaacaggtgttgacaaaaa

SEQ ID NO: 80174 - DNA, 22 bp, synthetic construct
  misc_feature 1..22: note = chemically synthesized
  source 1..22: mol_type = other DNA
agtaacaggtgttgacaaaaat

SEQ ID NO: 80175 - DNA, 22 bp, synthetic construct
  misc_feature 1..22: note = chemically synthesized
  source 1..22: mol_type = other DNA
acaaaaataatattatggcttc

SEQ ID NO: 80176 - DNA, 22 bp, synthetic construct
  misc_feature 1..22: note = chemically synthesized
  source 1..22: mol_type = other DNA
tggcttcatgttattggttcaa

SEQ ID NO: 80177 - DNA, 22 bp, synthetic construct
  misc_feature 1..22: note = chemically synthesized
  source 1..22: mol_type = other DNA
catgttattggttcaagtctct

SEQ ID NO: 80178 - DNA, 22 bp, synthetic construct
  misc_feature 1..22: note = chemically synthesized
  source 1..22: mol_type = other DNA
atgttattggttcaagtctctg

SEQ ID NO: 80179 - DNA, 22 bp, synthetic construct
  misc_feature 1..22: note = chemically synthesized
  source 1..22: mol_type = other DNA
ttggttcaagtctctgcagagt

SEQ ID NO: 80180 - DNA, 22 bp, synthetic construct
  misc_feature 1..22: note = chemically synthesized
  source 1..22: mol_type = other DNA
gttcaagtctctgcagagtaca

SEQ ID NO: 80181 - DNA, 22 bp, synthetic construct
  misc_feature 1..22: note = chemically synthesized
  source 1..22: mol_type = other DNA
aagtctctgcagagtacagcgg

SEQ ID NO: 80182 - DNA, 22 bp, synthetic construct
  misc_feature 1..22: note = chemically synthesized
  source 1..22: mol_type = other DNA
tgcagagtacagcgggagtgtt

SEQ ID NO: 80183 - DNA, 22 bp, synthetic construct
  misc_feature 1..22: note = chemically synthesized
  source 1..22: mol_type = other DNA
cagagtacagcgggagtgttgt

SEQ ID NO: 80184 - DNA, 22 bp, synthetic construct
  misc_feature 1..22: note = chemically synthesized
  source 1..22: mol_type = other DNA
tacatttcagcagaatttcaga

SEQ ID NO: 80185 - DNA, 22 bp, synthetic construct
  misc_feature 1..22: note = chemically synthesized
  source 1..22: mol_type = other DNA
cagcagaatttcagactgacta

SEQ ID NO: 80186 - DNA, 22 bp, synthetic construct
  misc_feature 1..22: note = chemically synthesized
  source 1..22: mol_type = other DNA
agcagaatttcagactgactat

SEQ ID NO: 80187 - DNA, 22 bp, synthetic construct
  misc_feature 1..22: note = chemically synthesized
  source 1..22: mol_type = other DNA
cagactgactataaaaagccca

SEQ ID NO: 80188 - DNA, 22 bp, synthetic construct
  misc_feature 1..22: note = chemically synthesized
  source 1..22: mol_type = other DNA
agactgactataaaaagcccag

SEQ ID NO: 80189 - DNA, 22 bp, synthetic construct
  misc_feature 1..22: note = chemically synthesized
  source 1..22: mol_type = other DNA
actataaaaagcccagtgactg

SEQ ID NO: 80190 - DNA, 22 bp, synthetic construct
  misc_feature 1..22: note = chemically synthesized
  source 1..22: mol_type = other DNA
taaaaagcccagtgactgactc

SEQ ID NO: 80191 - DNA, 22 bp, synthetic construct
  misc_feature 1..22: note = chemically synthesized
  source 1..22: mol_type = other DNA
actcaaaaccccacttcctagc

SEQ ID NO: 80192 - DNA, 22 bp, synthetic construct
  misc_feature 1..22: note = chemically synthesized
  source 1..22: mol_type = other DNA
aaaaccccacttcctagctcta

SEQ ID NO: 80193 - DNA, 22 bp, synthetic construct
  misc_feature 1..22: note = chemically synthesized
  source 1..22: mol_type = other DNA
cctagctctacgtaggaaaagt

SEQ ID NO: 80194 - DNA, 22 bp, synthetic construct
  misc_feature 1..22: note = chemically synthesized
  source 1..22: mol_type = other DNA
ctagctctacgtaggaaaagtc

SEQ ID NO: 80195 - DNA, 22 bp, synthetic construct
  misc_feature 1..22: note = chemically synthesized
  source 1..22: mol_type = other DNA
gctctacgtaggaaaagtcaat

SEQ ID NO: 80196 - DNA, 22 bp, synthetic construct
  misc_feature 1..22: note = chemically synthesized
  source 1..22: mol_type = other DNA
tacgtaggaaaagtcaatctgg

SEQ ID NO: 80197 - DNA, 22 bp, synthetic construct
  misc_feature 1..22: note = chemically synthesized
  source 1..22: mol_type = other DNA
cgtaggaaaagtcaatctggat

SEQ ID NO: 80198 - DNA, 22 bp, synthetic construct
  misc_feature 1..22: note = chemically synthesized
  source 1..22: mol_type = other DNA
gattaaaccctaaaatatattt

SEQ ID NO: 80199 - DNA, 22 bp, synthetic construct
  misc_feature 1..22: note = chemically synthesized
  source 1..22: mol_type = other DNA
aaccctaaaatatatttctctt

SEQ ID NO: 80200 - DNA, 22 bp, synthetic construct
  misc_feature 1..22: note = chemically synthesized
  source 1..22: mol_type = other DNA
aaatatatttctcttttctcga

SEQ ID NO: 80201 - DNA, 22 bp, synthetic construct
  misc_feature 1..22: note = chemically synthesized
  source 1..22: mol_type = other DNA
ctcttttctcgattatctttat

SEQ ID NO: 80202 - DNA, 22 bp, synthetic construct
  misc_feature 1..22: note = chemically synthesized
  source 1..22: mol_type = other DNA
tcttttctcgattatctttata

SEQ ID NO: 80203 - DNA, 22 bp, synthetic construct
  misc_feature 1..22: note = chemically synthesized
  source 1..22: mol_type = other DNA
ttttctcgattatctttatata

SEQ ID NO: 80204 - DNA, 22 bp, synthetic construct
  misc_feature 1..22: note = chemically synthesized
  source 1..22: mol_type = other DNA
ttctcgattatctttatatatt

SEQ ID NO: 80205 - DNA, 22 bp, synthetic construct
  misc_feature 1..22: note = chemically synthesized
  source 1..22: mol_type = other DNA
tctcgattatctttatatattt

SEQ ID NO: 80206 - DNA, 22 bp, synthetic construct
  misc_feature 1..22: note = chemically synthesized
  source 1..22: mol_type = other DNA
ctcgattatctttatatatttt

SEQ ID NO: 80207 - DNA, 22 bp, synthetic construct
  misc_feature 1..22: note = chemically synthesized
  source 1..22: mol_type = other DNA
tcgattatctttatatattttt

SEQ ID NO: 80208 - DNA, 22 bp, synthetic construct
  misc_feature 1..22: note = chemically synthesized
  source 1..22: mol_type = other DNA
gattatctttatatatttttaa

SEQ ID NO: 80209 - DNA, 22 bp, synthetic construct
  misc_feature 1..22: note = chemically synthesized
  source 1..22: mol_type = other DNA
tctttatatatttttaagttaa

SEQ ID NO: 80210 - DNA, 22 bp, synthetic construct
  misc_feature 1..22: note = chemically synthesized
  source 1..22: mol_type = other DNA
tatatatttttaagttaaaatt

SEQ ID NO: 80211 - DNA, 22 bp, synthetic construct
  misc_feature 1..22: note = chemically synthesized
  source 1..22: mol_type = other DNA
atatatttttaagttaaaattc

SEQ ID NO: 80212 - DNA, 22 bp, synthetic construct
  misc_feature 1..22: note = chemically synthesized
  source 1..22: mol_type = other DNA
tatatttttaagttaaaattca

SEQ ID NO: 80213 - DNA, 22 bp, synthetic construct
  misc_feature 1..22: note = chemically synthesized
  source 1..22: mol_type = other DNA
ttaagttaaaattcatgaaaat

SEQ ID NO: 80214 - DNA, 22 bp, synthetic construct
  misc_feature 1..22: note = chemically synthesized
  source 1..22: mol_type = other DNA
taagttaaaattcatgaaaata

SEQ ID NO: 80215 - DNA, 22 bp, synthetic construct
  misc_feature 1..22: note = chemically synthesized
  source 1..22: mol_type = other DNA
aagttaaaattcatgaaaatag

SEQ ID NO: 80216 - DNA, 22 bp, synthetic construct
  misc_feature 1..22: note = chemically synthesized
  source 1..22: mol_type = other DNA
agttaaaattcatgaaaatagt

SEQ ID NO: 80217 - DNA, 22 bp, synthetic construct
  misc_feature 1..22: note = chemically synthesized
  source 1..22: mol_type = other DNA
aaattcatgaaaatagtatttc

SEQ ID NO: 80218 - DNA, 22 bp, synthetic construct
  misc_feature 1..22: note = chemically synthesized
  source 1..22: mol_type = other DNA
atgaaaatagtatttctgaaaa

SEQ ID NO: 80219 - DNA, 22 bp, synthetic construct
  misc_feature 1..22: note = chemically synthesized
  source 1..22: mol_type = other DNA
ctgaaaaaatggagaatttcat

SEQ ID NO: 80220 - DNA, 22 bp, synthetic construct
  misc_feature 1..22: note = chemically synthesized
  source 1..22: mol_type = other DNA
tgaaaaaatggagaatttcatt

SEQ ID NO: 80221 - DNA, 22 bp, synthetic construct
  misc_feature 1..22: note = chemically synthesized
  source 1..22: mol_type = other DNA
aaaaaatggagaatttcattaa

SEQ ID NO: 80222 - DNA, 22 bp, synthetic construct
  misc_feature 1..22: note = chemically synthesized
  source 1..22: mol_type = other DNA
cattaaagtattttttttttca

SEQ ID NO: 80223 - DNA, 22 bp, synthetic construct
  misc_feature 1..22: note = chemically synthesized
  source 1..22: mol_type = other DNA
attaaagtattttttttttcaa

SEQ ID NO: 80224 - DNA, 22 bp, synthetic construct
  misc_feature 1..22: note = chemically synthesized
  source 1..22: mol_type = other DNA
aagtattttttttttcaaaacc

SEQ ID NO: 80225 - DNA, 22 bp, synthetic construct
  misc_feature 1..22: note = chemically synthesized
  source 1..22: mol_type = other DNA
tttttttcaaaacctttgatct

SEQ ID NO: 80226 - DNA, 22 bp, synthetic construct
  misc_feature 1..22: note = chemically synthesized
  source 1..22: mol_type = other DNA
ttttttcaaaacctttgatctt

SEQ ID NO: 80227 - DNA, 22 bp, synthetic construct
  misc_feature 1..22: note = chemically synthesized
  source 1..22: mol_type = other DNA
tttttcaaaacctttgatcttt

SEQ ID NO: 80228 - DNA, 22 bp, synthetic construct
  misc_feature 1..22: note = chemically synthesized
  source 1..22: mol_type = other DNA
ttttcaaaacctttgatctttg

SEQ ID NO: 80229 - DNA, 22 bp, synthetic construct
  misc_feature 1..22: note = chemically synthesized
  source 1..22: mol_type = other DNA
tttcaaaacctttgatctttga

SEQ ID NO: 80230 - DNA, 22 bp, synthetic construct
  misc_feature 1..22: note = chemically synthesized
  source 1..22: mol_type = other DNA
ttcaaaacctttgatctttgag

SEQ ID NO: 80231 - DNA, 22 bp, synthetic construct
  misc_feature 1..22: note = chemically synthesized
  source 1..22: mol_type = other DNA
tcaaaacctttgatctttgagt

SEQ ID NO: 80232 - DNA, 22 bp, synthetic construct
  misc_feature 1..22: note = chemically synthesized
  source 1..22: mol_type = other DNA
caaaacctttgatctttgagtg

SEQ ID NO: 80233 - DNA, 22 bp, synthetic construct
  misc_feature 1..22: note = chemically synthesized
  source 1..22: mol_type = other DNA
aaaacctttgatctttgagtgc

SEQ ID NO: 80234 - DNA, 22 bp, synthetic construct
  misc_feature 1..22: note = chemically synthesized
  source 1..22: mol_type = other DNA
tgatctttgagtgccttagcaa

SEQ ID NO: 80235 - DNA, 22 bp, synthetic construct
  misc_feature 1..22: note = chemically synthesized
  source 1..22: mol_type = other DNA
gatctttgagtgccttagcaaa

SEQ ID NO: 80236 - DNA, 22 bp, synthetic construct
  misc_feature 1..22: note = chemically synthesized
  source 1..22: mol_type = other DNA
atctttgagtgccttagcaaaa

SEQ ID NO: 80237 - DNA, 22 bp, synthetic construct
  misc_feature 1..22: note = chemically synthesized
  source 1..22: mol_type = other DNA
tgagtgccttagcaaaattccg

SEQ ID NO: 80238 - DNA, 22 bp, synthetic construct
  misc_feature 1..22: note = chemically synthesized
  source 1..22: mol_type = other DNA
gagtgccttagcaaaattccgt

SEQ ID NO: 80239 - DNA, 22 bp, synthetic construct
  misc_feature 1..22: note = chemically synthesized
  source 1..22: mol_type = other DNA
agtgccttagcaaaattccgtg

SEQ ID NO: 80240 - DNA, 22 bp, synthetic construct
  misc_feature 1..22: note = chemically synthesized
  source 1..22: mol_type = other DNA
agcaaaattccgtggacacttt

SEQ ID NO: 80241 - DNA, 22 bp, synthetic construct
  misc_feature 1..22: note = chemically synthesized
  source 1..22: mol_type = other DNA
gcaaaattccgtggacactttg

SEQ ID NO: 80242 - DNA, 22 bp, synthetic construct
  misc_feature 1..22: note = chemically synthesized
  source 1..22: mol_type = other DNA
cgtggacactttgatagacacc

SEQ ID NO: 80243 - DNA, 22 bp, synthetic construct
  misc_feature 1..22: note = chemically synthesized
  source 1..22: mol_type = other DNA
tgatagacaccatcattttaag

SEQ ID NO: 80244 - DNA, 22 bp, synthetic construct
  misc_feature 1..22: note = chemically synthesized
  source 1..22: mol_type = other DNA
gatagacaccatcattttaagt

SEQ ID NO: 80245 - DNA, 22 bp, synthetic construct
  misc_feature 1..22: note = chemically synthesized
  source 1..22: mol_type = other DNA
atagacaccatcattttaagtg

SEQ ID NO: 80246 - DNA, 22 bp, synthetic construct
  misc_feature 1..22: note = chemically synthesized
  source 1..22: mol_type = other DNA
taagtgtgtttgaggatttcta

SEQ ID NO: 80247 - DNA, 22 bp, synthetic construct
  misc_feature 1..22: note = chemically synthesized
  source 1..22: mol_type = other DNA
aagtgtgtttgaggatttctat

SEQ ID NO: 80248 - DNA, 22 bp, synthetic construct
  misc_feature 1..22: note = chemically synthesized
  source 1..22: mol_type = other DNA
agtgtgtttgaggatttctatg

SEQ ID NO: 80249 - DNA, 22 bp, synthetic construct
  misc_feature 1..22: note = chemically synthesized
  source 1..22: mol_type = other DNA
gaggatttctatggattgtatt

SEQ ID NO: 80250 - DNA, 22 bp, synthetic construct
  misc_feature 1..22: note = chemically synthesized
  source 1..22: mol_type = other DNA
aggatttctatggattgtattt

SEQ ID NO: 80251 - DNA, 22 bp, synthetic construct
  misc_feature 1..22: note = chemically synthesized
  source 1..22: mol_type = other DNA
ctatggattgtatttattctat

SEQ ID NO: 80252 - DNA, 22 bp, synthetic construct
  misc_feature 1..22: note = chemically synthesized
  source 1..22: mol_type = other DNA
tatggattgtatttattctatt

SEQ ID NO: 80253 - DNA, 22 bp, synthetic construct
  misc_feature 1..22: note = chemically synthesized
  source 1..22: mol_type = other DNA
tggattgtatttattctattcc

SEQ ID NO: 80254 - DNA, 22 bp, synthetic construct
  misc_feature 1..22: note = chemically synthesized
  source 1..22: mol_type = other DNA
tatttattctattccctaaaac

SEQ ID NO: 80255 - DNA, 22 bp, synthetic construct
  misc_feature 1..22: note = chemically synthesized
  source 1..22: mol_type = other DNA
attctattccctaaaacagact

SEQ ID NO: 80256 - DNA, 22 bp, synthetic construct
  misc_feature 1..22: note = chemically synthesized
  source 1..22: mol_type = other DNA
ttctattccctaaaacagactt

SEQ ID NO: 80257 - DNA, 22 bp, synthetic construct
  misc_feature 1..22: note = chemically synthesized
  source 1..22: mol_type = other DNA
tattccctaaaacagacttttt

SEQ ID NO: 80258 - DNA, 22 bp, synthetic construct
  misc_feature 1..22: note = chemically synthesized
  source 1..22: mol_type = other DNA
ttccctaaaacagactttttaa

SEQ ID NO: 80259 - DNA, 22 bp, synthetic construct
  misc_feature 1..22: note = chemically synthesized
  source 1..22: mol_type = other DNA
cctaaaacagactttttaatct

SEQ ID NO: 80260 - DNA, 22 bp, synthetic construct
  misc_feature 1..22: note = chemically synthesized
  source 1..22: mol_type = other DNA
aaacagactttttaatcttaac

SEQ ID NO: 80261 - DNA, 22 bp, synthetic construct
  misc_feature 1..22: note = chemically synthesized
  source 1..22: mol_type = other DNA
tttaatcttaacagcatacact

SEQ ID NO: 80262 - DNA, 22 bp, synthetic construct
  misc_feature 1..22: note = chemically synthesized
  source 1..22: mol_type = other DNA
ttaatcttaacagcatacactg

SEQ ID NO: 80263 - DNA, 22 bp, synthetic construct
  misc_feature 1..22: note = chemically synthesized
  source 1..22: mol_type = other DNA
taatcttaacagcatacactga

SEQ ID NO: 80264 - DNA, 22 bp, synthetic construct
  misc_feature 1..22: note = chemically synthesized
  source 1..22: mol_type = other DNA
aatcttaacagcatacactgat

SEQ ID NO: 80265 - DNA, 22 bp, synthetic construct
  misc_feature 1..22: note = chemically synthesized
  source 1..22: mol_type = other DNA
atcttaacagcatacactgata

SEQ ID NO: 80266 - DNA, 22 bp, synthetic construct
  misc_feature 1..22: note = chemically synthesized
  source 1..22: mol_type = other DNA
aacagcatacactgataggaga

SEQ ID NO: 80267 - DNA, 22 bp, synthetic construct
  misc_feature 1..22: note = chemically synthesized
  source 1..22: mol_type = other DNA
acagcatacactgataggagag

SEQ ID NO: 80268 - DNA, 22 bp, synthetic construct
  misc_feature 1..22: note = chemically synthesized
  source 1..22: mol_type = other DNA
ataggagagaaaagcaaaatca

SEQ ID NO: 80269 - DNA, 22 bp, synthetic construct
  misc_feature 1..22: note = chemically synthesized
  source 1..22: mol_type = other DNA
gatctttaatttgtttggtctt

SEQ ID NO: 80270 - DNA, 22 bp, synthetic construct
  misc_feature 1..22: note = chemically synthesized
  source 1..22: mol_type = other DNA
taatttgtttggtcttcacccc

SEQ ID NO: 80271 - DNA, 22 bp, synthetic construct
  misc_feature 1..22: note = chemically synthesized
  source 1..22: mol_type = other DNA
aatttgtttggtcttcacccca

SEQ ID NO: 80272 - DNA, 22 bp, synthetic construct
  misc_feature 1..22: note = chemically synthesized
  source 1..22: mol_type = other DNA
atttgtttggtcttcaccccat

SEQ ID NO: 80273 - DNA, 22 bp, synthetic construct
  misc_feature 1..22: note = chemically synthesized
  source 1..22: mol_type = other DNA
gtttggtcttcaccccataaat

SEQ ID NO: 80274 - DNA, 22 bp, synthetic construct
  misc_feature 1..22: note = chemically synthesized
  source 1..22: mol_type = other DNA
tttggtcttcaccccataaatg

SEQ ID NO: 80275 - DNA, 22 bp, synthetic construct
  misc_feature 1..22: note = chemically synthesized
  source 1..22: mol_type = other DNA
ggtcttcaccccataaatgatg

SEQ ID NO: 80276 - DNA, 22 bp, synthetic construct
  misc_feature 1..22: note = chemically synthesized
  source 1..22: mol_type = other DNA
gtcttcaccccataaatgatgg

SEQ ID NO: 80277 - DNA, 22 bp, synthetic construct
  misc_feature 1..22: note = chemically synthesized
  source 1..22: mol_type = other DNA
caccccataaatgatggggttt

SEQ ID NO: 80278 - DNA, 22 bp, synthetic construct
  misc_feature 1..22: note = chemically synthesized
  source 1..22: mol_type = other DNA
accccataaatgatggggttta

SEQ ID NO: 80279 - DNA, 22 bp, synthetic construct
  misc_feature 1..22: note = chemically synthesized
  source 1..22: mol_type = other DNA
agcatagggggcactaacacat

SEQ ID NO: 80280 - DNA, 22 bp, synthetic construct
  misc_feature 1..22: note = chemically synthesized
  source 1..22: mol_type = other DNA
gcatagggggcactaacacata

SEQ ID NO: 80281 - DNA, 22 bp, synthetic construct
  misc_feature 1..22: note = chemically synthesized
  source 1..22: mol_type = other DNA
acacatagagactgcccactag

SEQ ID NO: 80282 - DNA, 22 bp, synthetic construct
  misc_feature 1..22: note = chemically synthesized
  source 1..22: mol_type = other DNA
cccactaggatgtgaatgtggt

SEQ ID NO: 80283 - DNA, 22 bp, synthetic construct
  misc_feature 1..22: note = chemically synthesized
  source 1..22: mol_type = other DNA
ggatgtgaatgtggtgagggat

SEQ ID NO: 80284 - DNA, 22 bp, synthetic construct
  misc_feature 1..22: note = chemically synthesized
  source 1..22: mol_type = other DNA
tacctccaaagcgatgggcaag

SEQ ID NO: 80285 - DNA, 22 bp, synthetic construct
  misc_feature 1..22: note = chemically synthesized
  source 1..22: mol_type = other DNA
acctccaaagcgatgggcaaga

SEQ ID NO: 80286 - DNA, 22 bp, synthetic construct
  misc_feature 1..22: note = chemically synthesized
  source 1..22: mol_type = other DNA
cctccaaagcgatgggcaagaa

SEQ ID NO: 80287 - DNA, 22 bp, synthetic construct
  misc_feature 1..22: note = chemically synthesized
  source 1..22: mol_type = other DNA
caaagcgatgggcaagaaatga

SEQ ID NO: 80288 - DNA, 22 bp, synthetic construct
  misc_feature 1..22: note = chemically synthesized
  source 1..22: mol_type = other DNA
gggtatagaacataaatatgac

SEQ ID NO: 80289 - DNA, 22 bp, synthetic construct
  misc_feature 1..22: note = chemically synthesized
  source 1..22: mol_type = other DNA
agggccttgaacctggcagccc

SEQ ID NO: 80290 - DNA, 22 bp, synthetic construct
  misc_feature 1..22: note = chemically synthesized
  source 1..22: mol_type = other DNA
gaacctggcagcccaggaagat

SEQ ID NO: 80291 - DNA, 22 bp, synthetic construct
  misc_feature 1..22: note = chemically synthesized
  source 1..22: mol_type = other DNA
aacctggcagcccaggaagata

SEQ ID NO: 80292 - DNA, 22 bp, synthetic construct
  misc_feature 1..22: note = chemically synthesized
  source 1..22: mol_type = other DNA
gcagcccaggaagatatctgaa

SEQ ID NO: 80293 - DNA, 22 bp, synthetic construct
  misc_feature 1..22: note = chemically synthesized
  source 1..22: mol_type = other DNA
aaacactgagtgaaggatcatt

SEQ ID NO: 80294 - DNA, 22 bp, synthetic construct
  misc_feature 1..22: note = chemically synthesized
  source 1..22: mol_type = other DNA
agtgaaggatcattgtgtagga

SEQ ID NO: 80295 - DNA, 22 bp, synthetic construct
  misc_feature 1..22: note = chemically synthesized
  source 1..22: mol_type = other DNA
tgtaggatataatgataagcac

SEQ ID NO: 80296 - DNA, 22 bp, synthetic construct
  misc_feature 1..22: note = chemically synthesized
  source 1..22: mol_type = other DNA
tatccagtcctgtagagagtag

SEQ ID NO: 80297 - DNA, 22 bp, synthetic construct
  misc_feature 1..22: note = chemically synthesized
  source 1..22: mol_type = other DNA
tagagagtagggccacagtgag

SEQ ID NO: 80298 - DNA, 22 bp, synthetic construct
  misc_feature 1..22: note = chemically synthesized
  source 1..22: mol_type = other DNA
acattgatattgccacaagcca

SEQ ID NO: 80299 - DNA, 22 bp, synthetic construct
  misc_feature 1..22: note = chemically synthesized
  source 1..22: mol_type = other DNA
atattgccacaagccaatctgg

SEQ ID NO: 80300 - DNA, 22 bp, synthetic construct
  misc_feature 1..22: note = chemically synthesized
  source 1..22: mol_type = other DNA
ccacaagccaatctggcaatgt

SEQ ID NO: 80301 - DNA, 22 bp, synthetic construct
  misc_feature 1..22: note = chemically synthesized
  source 1..22: mol_type = other DNA
gcaatgtgctcacagtaggaat

SEQ ID NO: 80302 - DNA, 22 bp, synthetic construct
  misc_feature 1..22: note = chemically synthesized
  source 1..22: mol_type = other DNA
acagtaggaatgaggaatgatg

SEQ ID NO: 80303 - DNA, 22 bp, synthetic construct
  misc_feature 1..22: note = chemically synthesized
  source 1..22: mol_type = other DNA
ctcccacaatatgtaagtcggt

SEQ ID NO: 80304 - DNA, 22 bp, synthetic construct
  misc_feature 1..22: note = chemically synthesized
  source 1..22: mol_type = other DNA
tcccacaatatgtaagtcggta

SEQ ID NO: 80305 - DNA, 22 bp, synthetic construct
  misc_feature 1..22: note = chemically synthesized
  source 1..22: mol_type = other DNA
ccacaatatgtaagtcggtata

SEQ ID NO: 80306 - DNA, 22 bp, synthetic construct
  misc_feature 1..22: note = chemically synthesized
  source 1..22: mol_type = other DNA
ctgaccacagctgctatgccaa

SEQ ID NO: 80307 - DNA, 22 bp, synthetic construct
  misc_feature 1..22: note = chemically synthesized
  source 1..22: mol_type = other DNA
accacagctgctatgccaatct

SEQ ID NO: 80308 - DNA, 22 bp, synthetic construct
  misc_feature 1..22: note = chemically synthesized
  source 1..22: mol_type = other DNA
ctatgccaatcttcctgacggc

SEQ ID NO: 80309 - DNA, 22 bp, synthetic construct
  misc_feature 1..22: note = chemically synthesized
  source 1..22: mol_type = other DNA
tgccaatcttcctgacggctga

SEQ ID NO: 80310 - DNA, 22 bp, synthetic construct
  misc_feature 1..22: note = chemically synthesized
  source 1..22: mol_type = other DNA
cctgacggctgatgaggttaaa

SEQ ID NO: 80311 - DNA, 22 bp, synthetic construct
  misc_feature 1..22: note = chemically synthesized
  source 1..22: mol_type = other DNA
ctgacggctgatgaggttaaaa

SEQ ID NO: 80312 - DNA, 22 bp, synthetic construct
  misc_feature 1..22: note = chemically synthesized
  source 1..22: mol_type = other DNA
acggctgatgaggttaaaatgg

SEQ ID NO: 80313 - DNA, 22 bp, synthetic construct
  misc_feature 1..22: note = chemically synthesized
  source 1..22: mol_type = other DNA
atgaggttaaaatggtgtatct

SEQ ID NO: 80314 - DNA, 22 bp, synthetic construct
  misc_feature 1..22: note = chemically synthesized
  source 1..22: mol_type = other DNA
aaatggtgtatctcagtgggta

SEQ ID NO: 80315 - DNA, 22 bp, synthetic construct
  misc_feature 1..22: note = chemically synthesized
  source 1..22: mol_type = other DNA
agtgggtaacagatggccacat

SEQ ID NO: 80316 - DNA, 22 bp, synthetic construct
  misc_feature 1..22: note = chemically synthesized
  source 1..22: mol_type = other DNA
ccaggagaatagcagattctgc

SEQ ID NO: 80317 - DNA, 22 bp, synthetic construct
  misc_feature 1..22: note = chemically synthesized
  source 1..22: mol_type = other DNA
tgccacaaagatgaaatgtatg

SEQ ID NO: 80318 - DNA, 22 bp, synthetic construct
  misc_feature 1..22: note = chemically synthesized
  source 1..22: mol_type = other DNA
ccacaaagatgaaatgtatgaa

SEQ ID NO: 80319 - DNA, 22 bp, synthetic construct
  misc_feature 1..22: note = chemically synthesized
  source 1..22: mol_type = other DNA
agacacacaactaccaaaggat

SEQ ID NO: 80320 - DNA, 22 bp, synthetic construct
  misc_feature 1..22: note = chemically synthesized
  source 1..22: mol_type = other DNA
ccaaaggatatgtccatggagt

SEQ ID NO: 80321 - DNA, 22 bp, synthetic construct
  misc_feature 1..22: note = chemically synthesized
  source 1..22: mol_type = other DNA
aggggctgcagcagtggcgagc

SEQ ID NO: 80322 - DNA, 22 bp, synthetic construct
  misc_feature 1..22: note = chemically synthesized
  source 1..22: mol_type = other DNA
ggggctgcagcagtggcgagca

SEQ ID NO: 80323 - DNA, 22 bp, synthetic construct
  misc_feature 1..22: note = chemically synthesized
  source 1..22: mol_type = other DNA
cagcagtggcgagcaggaagtc

SEQ ID NO: 80324 - DNA, 22 bp, synthetic construct
  misc_feature 1..22: note = chemically synthesized
  source 1..22: mol_type = other DNA
aggccagcatggataggaagag

SEQ ID NO: 80325 - DNA, 22 bp, synthetic construct
  misc_feature 1..22: note = chemically synthesized
  source 1..22: mol_type = other DNA
atggagactgcgctcagtcatg

SEQ ID NO: 80326 - DNA, 22 bp, synthetic construct
  misc_feature 1..22: note = chemically synthesized
  source 1..22: mol_type = other DNA
cgctcagtcatgatcaggaaga

SEQ ID NO: 80327 - DNA, 22 bp, synthetic construct
  misc_feature 1..22: note = chemically synthesized
  source 1..22: mol_type = other DNA
agtcatgatcaggaagatcaag

SEQ ID NO: 80328 - DNA, 22 bp, synthetic construct
  misc_feature 1..22: note = chemically synthesized
  source 1..22: mol_type = other DNA
cctgcaacagccacaatgtaca

SEQ ID NO: 80329 - DNA, 22 bp, synthetic construct
  misc_feature 1..22: note = chemically synthesized
  source 1..22: mol_type = other DNA
caacagccacaatgtacataaa

SEQ ID NO: 80330 - DNA, 22 bp, synthetic construct
  misc_feature 1..22: note = chemically synthesized
  source 1..22: mol_type = other DNA
ccagccctgggattcccatcag

SEQ ID NO: 80331 - DNA, 22 bp, synthetic construct
  misc_feature 1..22: note = chemically synthesized
  source 1..22: mol_type = other DNA
cagccctgggattcccatcagg

SEQ ID NO: 80332 - DNA, 22 bp, synthetic construct
  misc_feature 1..22: note = chemically synthesized
  source 1..22: mol_type = other DNA
ggattcccatcaggacatacca

SEQ ID NO: 80333 - DNA, 22 bp, synthetic construct
  misc_feature 1..22: note = chemically synthesized
  source 1..22: mol_type = other DNA
ccatcaggacataccacacatc

SEQ ID NO: 80334 - DNA, 22 bp, synthetic construct
  misc_feature 1..22: note = chemically synthesized
  source 1..22: mol_type = other DNA
ggaattagtgtgattgcgaaag

SEQ ID NO: 80335 - DNA, 22 bp, synthetic construct
  misc_feature 1..22: note = chemically synthesized
  source 1..22: mol_type = other DNA
gtgtgattgcgaaagaaaggag

SEQ ID NO: 80336 - DNA, 22 bp, synthetic construct
  misc_feature 1..22: note = chemically synthesized
  source 1..22: mol_type = other DNA
cgaaagaaaggagccgtatgta

SEQ ID NO: 80337 - DNA, 22 bp, synthetic construct
  misc_feature 1..22: note = chemically synthesized
  source 1..22: mol_type = other DNA
attccaggcctagtgccattag

SEQ ID NO: 80338 - DNA, 22 bp, synthetic construct
  misc_feature 1..22: note = chemically synthesized
  source 1..22: mol_type = other DNA
ttccaggcctagtgccattagt

SEQ ID NO: 80339 - DNA, 22 bp, synthetic construct
  misc_feature 1..22: note = chemically synthesized
  source 1..22: mol_type = other DNA
caggcctagtgccattagtgaa

SEQ ID NO: 80340 - DNA, 22 bp, synthetic construct
  misc_feature 1..22: note = chemically synthesized
  source 1..22: mol_type = other DNA
gtgccattagtgaaagactaca

SEQ ID NO: 80341 - DNA, 22 bp, synthetic construct
  misc_feature 1..22: note = chemically synthesized
  source 1..22: mol_type = other DNA
gtgaaagactacaaagttgagg

SEQ ID NO: 80342 - DNA, 22 bp, synthetic construct
  misc_feature 1..22: note = chemically synthesized
  source 1..22: mol_type = other DNA
caaagttgaggatttagaaaca

SEQ ID NO: 80343 - DNA, 22 bp, synthetic construct
  misc_feature 1..22: note = chemically synthesized
  source 1..22: mol_type = other DNA
aggatttagaaacactacctta

SEQ ID NO: 80344 - DNA, 22 bp, synthetic construct
  misc_feature 1..22: note = chemically synthesized
  source 1..22: mol_type = other DNA
agaaacactaccttaggctgaa

SEQ ID NO: 80345 - DNA, 22 bp, synthetic construct
  misc_feature 1..22: note = chemically synthesized
  source 1..22: mol_type = other DNA
gaaacactaccttaggctgaat

SEQ ID NO: 80346 - DNA, 22 bp, synthetic construct
  misc_feature 1..22: note = chemically synthesized
  source 1..22: mol_type = other DNA
ccttaggctgaatgaggtctca

SEQ ID NO: 80347 - DNA, 22 bp, synthetic construct
  misc_feature 1..22: note = chemically synthesized
  source 1..22: mol_type = other DNA
aggctgaatgaggtctcatcag

SEQ ID NO: 80348 - DNA, 22 bp, synthetic construct
  misc_feature 1..22: note = chemically synthesized
  source 1..22: mol_type = other DNA
ggctgaatgaggtctcatcaga

SEQ ID NO: 80349 - DNA, 22 bp, synthetic construct
  misc_feature 1..22: note = chemically synthesized
  source 1..22: mol_type = other DNA
aatgaggtctcatcagatttgt

SEQ ID NO: 80350 - DNA, 22 bp, synthetic construct
  misc_feature 1..22: note = chemically synthesized
  source 1..22: mol_type = other DNA
atcagatttgttttctttccaa

SEQ ID NO: 80351 - DNA, 22 bp, synthetic construct
  misc_feature 1..22: note = chemically synthesized
  source 1..22: mol_type = other DNA
gttttctttccaatgttttctt

SEQ ID NO: 80352 - DNA, 22 bp, synthetic construct
  misc_feature 1..22: note = chemically synthesized
  source 1..22: mol_type = other DNA
ttttctttccaatgttttcttc

SEQ ID NO: 80353 - DNA, 22 bp, synthetic construct
  misc_feature 1..22: note = chemically synthesized
  source 1..22: mol_type = other DNA
tctttccaatgttttcttctct

SEQ ID NO: 80354 - DNA, 22 bp, synthetic construct
  misc_feature 1..22: note = chemically synthesized
  source 1..22: mol_type = other DNA
ctttccaatgttttcttctctg

SEQ ID NO: 80355 - DNA, 22 bp, synthetic construct
  misc_feature 1..22: note = chemically synthesized
  source 1..22: mol_type = other DNA
tttccaatgttttcttctctgg

SEQ ID NO: 80356 - DNA, 22 bp, synthetic construct
  misc_feature 1..22: note = chemically synthesized
  source 1..22: mol_type = other DNA
tccaatgttttcttctctggga

SEQ ID NO: 80357 - DNA, 22 bp, synthetic construct
  misc_feature 1..22: note = chemically synthesized
  source 1..22: mol_type = other DNA
ccaatgttttcttctctgggaa

SEQ ID NO: 80358 - DNA, 22 bp, synthetic construct
  misc_feature 1..22: note = chemically synthesized
  source 1..22: mol_type = other DNA
caatgttttcttctctgggaaa

SEQ ID NO: 80359 - DNA, 22 bp, synthetic construct
  misc_feature 1..22: note = chemically synthesized
  source 1..22: mol_type = other DNA
tcttctctgggaaaggagagta

SEQ ID NO: 80360 - DNA, 22 bp, synthetic construct
  misc_feature 1..22: note = chemically synthesized
  source 1..22: mol_type = other DNA
cttctctgggaaaggagagtaa

SEQ ID NO: 80361 - DNA, 22 bp, synthetic construct
  misc_feature 1..22: note = chemically synthesized
  source 1..22: mol_type = other DNA
ttctctgggaaaggagagtaaa

SEQ ID NO: 80362 - DNA, 22 bp, synthetic construct
  misc_feature 1..22: note = chemically synthesized
  source 1..22: mol_type = other DNA
ctctgggaaaggagagtaaaat

SEQ ID NO: 80363 - DNA, 22 bp, synthetic construct
  misc_feature 1..22: note = chemically synthesized
  source 1..22: mol_type = other DNA
tctgggaaaggagagtaaaatg

SEQ ID NO: 80364 - DNA, 22 bp, synthetic construct
  misc_feature 1..22: note = chemically synthesized
  source 1..22: mol_type = other DNA
tgggaaaggagagtaaaatggg

SEQ ID NO: 80365 - DNA, 22 bp, synthetic construct
  misc_feature 1..22: note = chemically synthesized
  source 1..22: mol_type = other DNA
ggaaaggagagtaaaatgggtt

SEQ ID NO: 80366 - DNA, 22 bp, synthetic construct
  misc_feature 1..22: note = chemically synthesized
  source 1..22: mol_type = other DNA
atagaccgaatatataagtcct

SEQ ID NO: 80367 - DNA, 22 bp, synthetic construct
  misc_feature 1..22: note = chemically synthesized
  source 1..22: mol_type = other DNA
ccaaataattaattttttgtac

SEQ ID NO: 80368 - DNA, 22 bp, synthetic construct
  misc_feature 1..22: note = chemically synthesized
  source 1..22: mol_type = other DNA
attttttgtaccttaaaaaatt

SEQ ID NO: 80369 - DNA, 22 bp, synthetic construct
  misc_feature 1..22: note = chemically synthesized
  source 1..22: mol_type = other DNA
tttgtaccttaaaaaattagta

SEQ ID NO: 80370 - DNA, 22 bp, synthetic construct
  misc_feature 1..22: note = chemically synthesized
  source 1..22: mol_type = other DNA
ttgtaccttaaaaaattagtag

SEQ ID NO: 80371 - DNA, 22 bp, synthetic construct
  misc_feature 1..22: note = chemically synthesized
  source 1..22: mol_type = other DNA
tgtaccttaaaaaattagtaga

SEQ ID NO: 80372 - DNA, 22 bp, synthetic construct
  misc_feature 1..22: note = chemically synthesized
  source 1..22: mol_type = other DNA
gtaccttaaaaaattagtagat

SEQ ID NO: 80373 - DNA, 22 bp, synthetic construct
  misc_feature 1..22: note = chemically synthesized
  source 1..22: mol_type = other DNA
taccttaaaaaattagtagata

SEQ ID NO: 80374 - DNA, 22 bp, synthetic construct
  misc_feature 1..22: note = chemically synthesized
  source 1..22: mol_type = other DNA
aaaaaattagtagatattattt

SEQ ID NO: 80375 - DNA, 22 bp, synthetic construct
  misc_feature 1..22: note = chemically synthesized
  source 1..22: mol_type = other DNA
aaaaattagtagatattattta

SEQ ID NO: 80376 - DNA, 22 bp, synthetic construct
  misc_feature 1..22: note = chemically synthesized
  source 1..22: mol_type = other DNA
gtagatattatttaataactgc

SEQ ID NO: 80377 - DNA, 22 bp, synthetic construct
  misc_feature 1..22: note = chemically synthesized
  source 1..22: mol_type = other DNA
tttaataactgcttaatatgtg

SEQ ID NO: 80378 - DNA, 22 bp, synthetic construct
  misc_feature 1..22: note = chemically synthesized
  source 1..22: mol_type = other DNA
aataactgcttaatatgtgtca

SEQ ID NO: 80379 - DNA, 22 bp, synthetic construct
  misc_feature 1..22: note = chemically synthesized
  source 1..22: mol_type = other DNA
ataactgcttaatatgtgtcat

SEQ ID NO: 80380 - DNA, 22 bp, synthetic construct
  misc_feature 1..22: note = chemically synthesized
  source 1..22: mol_type = other DNA
cttaatatgtgtcatactactt

SEQ ID NO: 80381 - DNA, 22 bp, synthetic construct
  misc_feature 1..22: note = chemically synthesized
  source 1..22: mol_type = other DNA
aatatgtgtcatactactttac

SEQ ID NO: 80382 - DNA, 22 bp, synthetic construct
  misc_feature 1..22: note = chemically synthesized
  source 1..22: mol_type = other DNA
atatgtgtcatactactttaca

SEQ ID NO: 80383 - DNA, 22 bp, synthetic construct
  misc_feature 1..22: note = chemically synthesized
  source 1..22: mol_type = other DNA
ctttacaaatattaacttatta

SEQ ID NO: 80384 - DNA, 22 bp, synthetic construct
  misc_feature 1..22: note = chemically synthesized
  source 1..22: mol_type = other DNA
tacaaatattaacttattaaat

SEQ ID NO: 80385 - DNA, 22 bp, synthetic construct
  misc_feature 1..22: note = chemically synthesized
  source 1..22: mol_type = other DNA
acaaatattaacttattaaatc

SEQ ID NO: 80386 - DNA, 22 bp, synthetic construct
  misc_feature 1..22: note = chemically synthesized
  source 1..22: mol_type = other DNA
caaatattaacttattaaatct

SEQ ID NO: 80387 - DNA, 22 bp, synthetic construct
  misc_feature 1..22: note = chemically synthesized
  source 1..22: mol_type = other DNA
acttattaaatcttcacaataa

SEQ ID NO: 80388 - DNA, 22 bp, synthetic construct
  misc_feature 1..22: note = chemically synthesized
  source 1..22: mol_type = other DNA
attaaatcttcacaataaccta

SEQ ID NO: 80389 - DNA, 22 bp, synthetic construct
  misc_feature 1..22: note = chemically synthesized
  source 1..22: mol_type = other DNA
ttaaatcttcacaataacctat

SEQ ID NO: 80390 - DNA, 22 bp, synthetic construct
  misc_feature 1..22: note = chemically synthesized
  source 1..22: mol_type = other DNA
aatcttcacaataacctattga

SEQ ID NO: 80391 - DNA, 22 bp, synthetic construct
  misc_feature 1..22: note = chemically synthesized
  source 1..22: mol_type = other DNA
cacaataacctattgaaaagcc

SEQ ID NO: 80392 - DNA, 22 bp, synthetic construct
  misc_feature 1..22: note = chemically synthesized
  source 1..22: mol_type = other DNA
acaataacctattgaaaagccc

SEQ ID NO: 80393 - DNA, 22 bp, synthetic construct
  misc_feature 1..22: note = chemically synthesized
  source 1..22: mol_type = other DNA
ttgaaaagccctttaaataacc

SEQ ID NO: 80394 - DNA, 22 bp, synthetic construct
  misc_feature 1..22: note = chemically synthesized
  source 1..22: mol_type = other DNA
aaaagccctttaaataaccatt

SEQ ID NO: 80395 - DNA, 22 bp, synthetic construct
  misc_feature 1..22: note = chemically synthesized
  source 1..22: mol_type = other DNA
taaataaccattatataaatac

SEQ ID NO: 80396 - DNA, 22 bp, synthetic construct
  misc_feature 1..22: note = chemically synthesized
  source 1..22: mol_type = other DNA
aaataaccattatataaatact

SEQ ID NO: 80397 - DNA, 22 bp, synthetic construct
  misc_feature 1..22: note = chemically synthesized
  source 1..22: mol_type = other DNA
aataaccattatataaatacta

SEQ ID NO: 80398 - DNA, 22 bp, synthetic construct
  misc_feature 1..22: note = chemically synthesized
  source 1..22: mol_type = other DNA
tataaatactattatttctaca

SEQ ID NO: 80399 - DNA, 22 bp, synthetic construct
  misc_feature 1..22: note = chemically synthesized
  source 1..22: mol_type = other DNA
ttatttctacagatgtaaaaaa

SEQ ID NO: 80400 - DNA, 22 bp, synthetic construct
  misc_feature 1..22: note = chemically synthesized
  source 1..22: mol_type = other DNA
tttctacagatgtaaaaaaaac

SEQ ID NO: 80401 - DNA, 22 bp, synthetic construct
  misc_feature 1..22: note = chemically synthesized
  source 1..22: mol_type = other DNA
ctacagatgtaaaaaaaaccca

SEQ ID NO: 80402 - DNA, 22 bp, synthetic construct
  misc_feature 1..22: note = chemically synthesized
  source 1..22: mol_type = other DNA
tacagatgtaaaaaaaacccac

SEQ ID NO: 80403 - DNA, 22 bp, synthetic construct
  misc_feature 1..22: note = chemically synthesized
  source 1..22: mol_type = other DNA
cagatgtaaaaaaaacccacag

SEQ ID NO: 80404 - DNA, 22 bp, synthetic construct
  misc_feature 1..22: note = chemically synthesized
  source 1..22: mol_type = other DNA
tcagcctcttaccctaggccct

SEQ ID NO: 80405 - DNA, 22 bp, synthetic construct
  misc_feature 1..22: note = chemically synthesized
  source 1..22: mol_type = other DNA
cagcctcttaccctaggcccta

SEQ ID NO: 80406 - DNA, 22 bp, synthetic construct
  misc_feature 1..22: note = chemically synthesized
  source 1..22: mol_type = other DNA
agcctcttaccctaggccctac

SEQ ID NO: 80407 - DNA, 22 bp, synthetic construct
  misc_feature 1..22: note = chemically synthesized
  source 1..22: mol_type = other DNA
ttaccctaggccctactggatt

SEQ ID NO: 80408 - DNA, 22 bp, synthetic construct
  misc_feature 1..22: note = chemically synthesized
  source 1..22: mol_type = other DNA
accctaggccctactggattta

SEQ ID NO: 80409 - DNA, 22 bp, synthetic construct
  misc_feature 1..22: note = chemically synthesized
  source 1..22: mol_type = other DNA
ccctaggccctactggatttaa

SEQ ID NO: 80410 - DNA, 22 bp, synthetic construct
  misc_feature 1..22: note = chemically synthesized
  source 1..22: mol_type = other DNA
ggccctactggatttaaagtaa

SEQ ID NO: 80411 - DNA, 22 bp, synthetic construct
  misc_feature 1..22: note = chemically synthesized
  source 1..22: mol_type = other DNA
ctggatttaaagtaaggcagga

SEQ ID NO: 80412 - DNA, 22 bp, synthetic construct
  misc_feature 1..22: note = chemically synthesized
  source 1..22: mol_type = other DNA
gatttaaagtaaggcaggataa

SEQ ID NO: 80413 - DNA, 22 bp, synthetic construct
  misc_feature 1..22: note = chemically synthesized
  source 1..22: mol_type = other DNA
aaagtaaggcaggataaatctg

SEQ ID NO: 80414 - DNA, 22 bp, synthetic construct
  misc_feature 1..22: note = chemically synthesized
  source 1..22: mol_type = other DNA
aagtaaggcaggataaatctga

SEQ ID NO: 80415 - DNA, 22 bp, synthetic construct
  misc_feature 1..22: note = chemically synthesized
  source 1..22: mol_type = other DNA
aaagctttgatctttactacca

SEQ ID NO: 80416 - DNA, 22 bp, synthetic construct
  misc_feature 1..22: note = chemically synthesized
  source 1..22: mol_type = other DNA
tgatctttactaccatccaatg

SEQ ID NO: 80417 - DNA, 22 bp, synthetic construct
  misc_feature 1..22: note = chemically synthesized
  source 1..22: mol_type = other DNA
gatctttactaccatccaatgc

SEQ ID NO: 80418 - DNA, 22 bp, synthetic construct
  misc_feature 1..22: note = chemically synthesized
  source 1..22: mol_type = other DNA
atctttactaccatccaatgct

SEQ ID NO: 80419 - DNA, 22 bp, synthetic construct
  misc_feature 1..22: note = chemically synthesized
  source 1..22: mol_type = other DNA
tactaccatccaatgctgccta

SEQ ID NO: 80420 - DNA, 22 bp, synthetic construct
  misc_feature 1..22: note = chemically synthesized
  source 1..22: mol_type = other DNA
actaccatccaatgctgcctat

SEQ ID NO: 80421 - DNA, 22 bp, synthetic construct
  misc_feature 1..22: note = chemically synthesized
  source 1..22: mol_type = other DNA
ctaccatccaatgctgcctatc

SEQ ID NO: 80422 - DNA, 22 bp, synthetic construct
  misc_feature 1..22: note = chemically synthesized
  source 1..22: mol_type = other DNA
ccatccaatgctgcctatcaag

SEQ ID NO: 80423 - DNA, 22 bp, synthetic construct
  misc_feature 1..22: note = chemically synthesized
  source 1..22: mol_type = other DNA
cctatcaaggtaaaactagata

SEQ ID NO: 80424 - DNA, 22 bp, synthetic construct
  misc_feature 1..22: note = chemically synthesized
  source 1..22: mol_type = other DNA
tcaaggtaaaactagatataaa

SEQ ID NO: 80425 - DNA, 22 bp, synthetic construct
  misc_feature 1..22: note = chemically synthesized
  source 1..22: mol_type = other DNA
gatataaaacgcagcatcaaat

SEQ ID NO: 80426 - DNA, 22 bp, synthetic construct
  misc_feature 1..22: note = chemically synthesized
  source 1..22: mol_type = other DNA
tttactgatcatatccctaagg

SEQ ID NO: 80427 - DNA, 22 bp, synthetic construct
  misc_feature 1..22: note = chemically synthesized
  source 1..22: mol_type = other DNA
ttactgatcatatccctaagga

SEQ ID NO: 80428 - DNA, 22 bp, synthetic construct
  misc_feature 1..22: note = chemically synthesized
  source 1..22: mol_type = other DNA
tactgatcatatccctaaggaa

SEQ ID NO: 80429 - DNA, 22 bp, synthetic construct
  misc_feature 1..22: note = chemically synthesized
  source 1..22: mol_type = other DNA
actgatcatatccctaaggaaa

SEQ ID NO: 80430 - DNA, 22 bp, synthetic construct
  misc_feature 1..22: note = chemically synthesized
  source 1..22: mol_type = other DNA
ctgatcatatccctaaggaaaa

SEQ ID NO: 80431 - DNA, 22 bp, synthetic construct
  misc_feature 1..22: note = chemically synthesized
  source 1..22: mol_type = other DNA
atcatatccctaaggaaaatag

SEQ ID NO: 80432 - DNA, 22 bp, synthetic construct
  misc_feature 1..22: note = chemically synthesized
  source 1..22: mol_type = other DNA
aggaaaatagagagttatgaaa

SEQ ID NO: 80433 - DNA, 22 bp, synthetic construct
  misc_feature 1..22: note = chemically synthesized
  source 1..22: mol_type = other DNA
tgaaatttagttgtgctgctta

SEQ ID NO: 80434 - DNA, 22 bp, synthetic construct
  misc_feature 1..22: note = chemically synthesized
  source 1..22: mol_type = other DNA
agttgtgctgcttacagaaatg

SEQ ID NO: 80435 - DNA, 22 bp, synthetic construct
  misc_feature 1..22: note = chemically synthesized
  source 1..22: mol_type = other DNA
gttgtgctgcttacagaaatgg

SEQ ID NO: 80436 - DNA, 22 bp, synthetic construct
  misc_feature 1..22: note = chemically synthesized
  source 1..22: mol_type = other DNA
tgctgcttacagaaatgggagg

SEQ ID NO: 80437 - DNA, 22 bp, synthetic construct
  misc_feature 1..22: note = chemically synthesized
  source 1..22: mol_type = other DNA
cttacagaaatgggagggaatt

SEQ ID NO: 80438 - DNA, 22 bp, synthetic construct
  misc_feature 1..22: note = chemically synthesized
  source 1..22: mol_type = other DNA
acagaaatgggagggaattaag

SEQ ID NO: 80439 - DNA, 22 bp, synthetic construct
  misc_feature 1..22: note = chemically synthesized
  source 1..22: mol_type = other DNA
cagaaatgggagggaattaagt

SEQ ID NO: 80440 - DNA, 22 bp, synthetic construct
  misc_feature 1..22: note = chemically synthesized
  source 1..22: mol_type = other DNA
agtctgacaaaatagatttcaa

SEQ ID NO: 80441 - DNA, 22 bp, synthetic construct
  misc_feature 1..22: note = chemically synthesized
  source 1..22: mol_type = other DNA
acaaaatagatttcaagcaata

SEQ ID NO: 80442 - DNA, 22 bp, synthetic construct
  misc_feature 1..22: note = chemically synthesized
  source 1..22: mol_type = other DNA
caagcaatatagcatgtatgcc

SEQ ID NO: 80443 - DNA, 22 bp, synthetic construct
  misc_feature 1..22: note = chemically synthesized
  source 1..22: mol_type = other DNA
aagcaatatagcatgtatgcct

SEQ ID NO: 80444 - DNA, 22 bp, synthetic construct
  misc_feature 1..22: note = chemically synthesized
  source 1..22: mol_type = other DNA
cttccacattgattggccttaa

SEQ ID NO: 80445 - DNA, 22 bp, synthetic construct
  misc_feature 1..22: note = chemically synthesized
  source 1..22: mol_type = other DNA
ttccacattgattggccttaac

SEQ ID NO: 80446 - DNA, 22 bp, synthetic construct
  misc_feature 1..22: note = chemically synthesized
  source 1..22: mol_type = other DNA
ccacattgattggccttaactt

SEQ ID NO: 80447 - DNA, 22 bp, synthetic construct
  misc_feature 1..22: note = chemically synthesized
  source 1..22: mol_type = other DNA
cacattgattggccttaactta

SEQ ID NO: 80448 - DNA, 22 bp, synthetic construct
  misc_feature 1..22: note = chemically synthesized
  source 1..22: mol_type = other DNA
attggccttaacttattgttaa

SEQ ID NO: 80449 - DNA, 22 bp, synthetic construct
  misc_feature 1..22: note = chemically synthesized
  source 1..22: mol_type = other DNA
gccttaacttattgttaagcca

SEQ ID NO: 80450 - DNA, 22 bp, synthetic construct
  misc_feature 1..22: note = chemically synthesized
  source 1..22: mol_type = other DNA
aacttattgttaagccatatgc

SEQ ID NO: 80451 - DNA, 22 bp, synthetic construct
  misc_feature 1..22: note = chemically synthesized
  source 1..22: mol_type = other DNA
acttattgttaagccatatgct

SEQ ID NO: 80452 - DNA, 22 bp, synthetic construct
  misc_feature 1..22: note = chemically synthesized
  source 1..22: mol_type = other DNA
attgttaagccatatgctagcc

SEQ ID NO: 80453 - DNA, 22 bp, synthetic construct
  misc_feature 1..22: note = chemically synthesized
  source 1..22: mol_type = other DNA
ttgttaagccatatgctagcca

SEQ ID NO: 80454 - DNA, 22 bp, synthetic construct
  misc_feature 1..22: note = chemically synthesized
  source 1..22: mol_type = other DNA
ttaagccatatgctagccattg

SEQ ID NO: 80455 - DNA, 22 bp, synthetic construct
  misc_feature 1..22: note = chemically synthesized
  source 1..22: mol_type = other DNA
agccatatgctagccattgaag

SEQ ID NO: 80456 - DNA, 22 bp, synthetic construct
  misc_feature 1..22: note = chemically synthesized
  source 1..22: mol_type = other DNA
gccattgaagacatacagcaaa

SEQ ID NO: 80457 - DNA, 22 bp, synthetic construct
  misc_feature 1..22: note = chemically synthesized
  source 1..22: mol_type = other DNA
aagacatacagcaaattaaatt

SEQ ID NO: 80458 - DNA, 22 bp, synthetic construct
  misc_feature 1..22: note = chemically synthesized
  source 1..22: mol_type = other DNA
aattgttctgccaattaatcta

SEQ ID NO: 80459 - DNA, 22 bp, synthetic construct
  misc_feature 1..22: note = chemically synthesized
  source 1..22: mol_type = other DNA
ttctgccaattaatctatttct

SEQ ID NO: 80460 - DNA, 22 bp, synthetic construct
  misc_feature 1..22: note = chemically synthesized
  source 1..22: mol_type = other DNA
tgccaattaatctatttctcaa

SEQ ID NO: 80461 - DNA, 22 bp, synthetic construct
  misc_feature 1..22: note = chemically synthesized
  source 1..22: mol_type = other DNA
ccaattaatctatttctcaaaa

SEQ ID NO: 80462 - DNA, 22 bp, synthetic construct
  misc_feature 1..22: note = chemically synthesized
  source 1..22: mol_type = other DNA
atctatttctcaaaaatatagg

SEQ ID NO: 80463 - DNA, 22 bp, synthetic construct
  misc_feature 1..22: note = chemically synthesized
  source 1..22: mol_type = other DNA
tttctcaaaaatataggataaa

SEQ ID NO: 80464 - DNA, 22 bp, synthetic construct
  misc_feature 1..22: note = chemically synthesized
  source 1..22: mol_type = other DNA
ctcaaaaatataggataaaaca

SEQ ID NO: 80465 - DNA, 22 bp, synthetic construct
  misc_feature 1..22: note = chemically synthesized
  source 1..22: mol_type = other DNA
tcaaaaatataggataaaacat

SEQ ID NO: 80466 - DNA, 22 bp, synthetic construct
  misc_feature 1..22: note = chemically synthesized
  source 1..22: mol_type = other DNA
aaaaatataggataaaacatta

SEQ ID NO: 80467 - DNA, 22 bp, synthetic construct
  misc_feature 1..22: note = chemically synthesized
  source 1..22: mol_type = other DNA
taaactttagatatttgcaatg

SEQ ID NO: 80468 - DNA, 22 bp, synthetic construct
  misc_feature 1..22: note = chemically synthesized
  source 1..22: mol_type = other DNA
tagatatttgcaatggcagacg

SEQ ID NO: 80469 - DNA, 22 bp, synthetic construct
  misc_feature 1..22: note = chemically synthesized
  source 1..22: mol_type = other DNA
agatatttgcaatggcagacgg

SEQ ID NO: 80470 - DNA, 22 bp, synthetic construct
  misc_feature 1..22: note = chemically synthesized
  source 1..22: mol_type = other DNA
gatatttgcaatggcagacgga

SEQ ID NO: 80471 - DNA, 22 bp, synthetic construct
  misc_feature 1..22: note = chemically synthesized
  source 1..22: mol_type = other DNA
gcaatggcagacggagctgggt

SEQ ID NO: 80472 - DNA, 22 bp, synthetic construct
  misc_feature 1..22: note = chemically synthesized
  source 1..22: mol_type = other DNA
caatggcagacggagctgggtt

SEQ ID NO: 80473 - DNA, 22 bp, synthetic construct
  misc_feature 1..22: note = chemically synthesized
  source 1..22: mol_type = other DNA
ggtttttaaatctatatgccag

SEQ ID NO: 80474 - DNA, 22 bp, synthetic construct
  misc_feature 1..22: note = chemically synthesized
  source 1..22: mol_type = other DNA
ttaaatctatatgccagcctgg

SEQ ID NO: 80475 - DNA, 22 bp, synthetic construct
  misc_feature 1..22: note = chemically synthesized
  source 1..22: mol_type = other DNA
taaatctatatgccagcctggc

SEQ ID NO: 80476 - DNA, 22 bp, synthetic construct
  misc_feature 1..22: note = chemically synthesized
  source 1..22: mol_type = other DNA
aaatctatatgccagcctggca

SEQ ID NO: 80477 - DNA, 22 bp, synthetic construct
  misc_feature 1..22: note = chemically synthesized
  source 1..22: mol_type = other DNA
aatctatatgccagcctggcac

SEQ ID NO: 80478 - DNA, 22 bp, synthetic construct
  misc_feature 1..22: note = chemically synthesized
  source 1..22: mol_type = other DNA
tatgccagcctggcacggtggc

SEQ ID NO: 80479 - DNA, 22 bp, synthetic construct
  misc_feature 1..22: note = chemically synthesized
  source 1..22: mol_type = other DNA
gcacggtggctcacacctgtaa

SEQ ID NO: 80480 - DNA, 22 bp, synthetic construct
  misc_feature 1..22: note = chemically synthesized
  source 1..22: mol_type = other DNA
acacctgtaatcccagcacttt

SEQ ID NO: 80481 - DNA, 22 bp, synthetic construct
  misc_feature 1..22: note = chemically synthesized
  source 1..22: mol_type = other DNA
taatcccagcactttgagaggc

SEQ ID NO: 80482 - DNA, 22 bp, synthetic construct
  misc_feature 1..22: note = chemically synthesized
  source 1..22: mol_type = other DNA
tgagaggctgaggcgggtagat

SEQ ID NO: 80483 - DNA, 22 bp, synthetic construct
  misc_feature 1..22: note = chemically synthesized
  source 1..22: mol_type = other DNA
gagaggctgaggcgggtagatc

SEQ ID NO: 80484 - DNA, 22 bp, synthetic construct
  misc_feature 1..22: note = chemically synthesized
  source 1..22: mol_type = other DNA
agaggctgaggcgggtagatca

SEQ ID NO: 80485 - DNA, 22 bp, synthetic construct
  misc_feature 1..22: note = chemically synthesized
  source 1..22: mol_type = other DNA
aggcgggtagatcacaaggtca

SEQ ID NO: 80486 - DNA, 22 bp, synthetic construct
  misc_feature 1..22: note = chemically synthesized
  source 1..22: mol_type = other DNA
cagaccagcttgaccaaaacaa

SEQ ID NO: 80487 - DNA, 22 bp, synthetic construct
  misc_feature 1..22: note = chemically synthesized
  source 1..22: mol_type = other DNA
gaccaaaacaatgaaaccccgt

SEQ ID NO: 80488 - DNA, 22 bp, synthetic construct
  misc_feature 1..22: note = chemically synthesized
  source 1..22: mol_type = other DNA
accaaaacaatgaaaccccgtc

SEQ ID NO: 80489 - DNA, 22 bp, synthetic construct
  misc_feature 1..22: note = chemically synthesized
  source 1..22: mol_type = other DNA
tactaaaaatacaaaaattagc

SEQ ID NO: 80490 - DNA, 22 bp, synthetic construct
  misc_feature 1..22: note = chemically synthesized
  source 1..22: mol_type = other DNA
ctaaaaatacaaaaattagctg

SEQ ID NO: 80491 - DNA, 22 bp, synthetic construct
  misc_feature 1..22: note = chemically synthesized
  source 1..22: mol_type = other DNA
aaaatacaaaaattagctgggc

SEQ ID NO: 80492 - DNA, 22 bp, synthetic construct
  misc_feature 1..22: note = chemically synthesized
  source 1..22: mol_type = other DNA
gctgggcatagtggtgtgcacc

SEQ ID NO: 80493 - DNA, 22 bp, synthetic construct
  misc_feature 1..22: note = chemically synthesized
  source 1..22: mol_type = other DNA
ggcatagtggtgtgcaccttta

SEQ ID NO: 80494 - DNA, 22 bp, synthetic construct
  misc_feature 1..22: note = chemically synthesized
  source 1..22: mol_type = other DNA
taatcccagctactcaagaggc

SEQ ID NO: 80495 - DNA, 22 bp, synthetic construct
  misc_feature 1..22: note = chemically synthesized
  source 1..22: mol_type = other DNA
aatcccagctactcaagaggct

SEQ ID NO: 80496 - DNA, 22 bp, synthetic construct
  misc_feature 1..22: note = chemically synthesized
  source 1..22: mol_type = other DNA
atcccagctactcaagaggctg

SEQ ID NO: 80497 - DNA, 22 bp, synthetic construct
  misc_feature 1..22: note = chemically synthesized
  source 1..22: mol_type = other DNA
ctcaagaggctgaggcaggaga

SEQ ID NO: 80498 - DNA, 22 bp, synthetic construct
  misc_feature 1..22: note = chemically synthesized
  source 1..22: mol_type = other DNA
aagaggctgaggcaggagaatc

SEQ ID NO: 80499 - DNA, 22 bp, synthetic construct
  misc_feature 1..22: note = chemically synthesized
  source 1..22: mol_type = other DNA
aggcaggagaatcgcttgaacc

SEQ ID NO: 80500 - DNA, 22 bp, synthetic construct
  misc_feature 1..22: note = chemically synthesized
  source 1..22: mol_type = other DNA
gaacctgggaggcagaagtttc

SEQ ID NO: 80501 - DNA, 22 bp, synthetic construct
  misc_feature 1..22: note = chemically synthesized
  source 1..22: mol_type = other DNA
aacctgggaggcagaagtttca

SEQ ID NO: 80502 - DNA, 22 bp, synthetic construct
  misc_feature 1..22: note = chemically synthesized
  source 1..22: mol_type = other DNA
ggaggcagaagtttcagtgagc

SEQ ID NO: 80503 - DNA, 22 bp, synthetic construct
  misc_feature 1..22: note = chemically synthesized
  source 1..22: mol_type = other DNA
cagtgagcagagatcgcgcaac

SEQ ID NO: 80504 - DNA, 22 bp, synthetic construct
  misc_feature 1..22: note = chemically synthesized
  source 1..22: mol_type = other DNA
agtgagcagagatcgcgcaact

SEQ ID NO: 80505 - DNA, 22 bp, synthetic construct
  misc_feature 1..22: note = chemically synthesized
  source 1..22: mol_type = other DNA
cactccagcctaggtgacagag

SEQ ID NO: 80506 - DNA, 22 bp, synthetic construct
  misc_feature 1..22: note = chemically synthesized
  source 1..22: mol_type = other DNA
cagcctaggtgacagagcgaga

SEQ ID NO: 80507 - DNA, 22 bp, synthetic construct
  misc_feature 1..22: note = chemically synthesized
  source 1..22: mol_type = other DNA
ggtgacagagcgagactccctc

SEQ ID NO: 80508 - DNA, 22 bp, synthetic construct
  misc_feature 1..22: note = chemically synthesized
  source 1..22: mol_type = other DNA
cctctcaaaaaaaaaagtatat

SEQ ID NO: 80509 - DNA, 22 bp, synthetic construct
  misc_feature 1..22: note = chemically synthesized
  source 1..22: mol_type = other DNA
tcaaaaaaaaaagtatatgcct

SEQ ID NO: 80510 - DNA, 22 bp, synthetic construct
  misc_feature 1..22: note = chemically synthesized
  source 1..22: mol_type = other DNA
aaaaaaaaaagtatatgcctca

SEQ ID NO: 80511 - DNA, 22 bp, synthetic construct
  misc_feature 1..22: note = chemically synthesized
  source 1..22: mol_type = other DNA
ataggtggtaaagaataaaata

SEQ ID NO: 80512 - DNA, 22 bp, synthetic construct
  misc_feature 1..22: note = chemically synthesized
  source 1..22: mol_type = other DNA
tgtttctttccacttcagtcac

SEQ ID NO: 80513 - DNA, 22 bp, synthetic construct
  misc_feature 1..22: note = chemically synthesized
  source 1..22: mol_type = other DNA
gtttctttccacttcagtcact

SEQ ID NO: 80514 - DNA, 22 bp, synthetic construct
  misc_feature 1..22: note = chemically synthesized
  source 1..22: mol_type = other DNA
tttctttccacttcagtcactg

SEQ ID NO: 80515 - DNA, 22 bp, synthetic construct
  misc_feature 1..22: note = chemically synthesized
  source 1..22: mol_type = other DNA
ctttccacttcagtcactgatt

SEQ ID NO: 80516 - DNA, 22 bp, synthetic construct
  misc_feature 1..22: note = chemically synthesized
  source 1..22: mol_type = other DNA
tttccacttcagtcactgattg

SEQ ID NO: 80517 - DNA, 22 bp, synthetic construct
  misc_feature 1..22: note = chemically synthesized
  source 1..22: mol_type = other DNA
tccacttcagtcactgattgaa

SEQ ID NO: 80518 - DNA, 22 bp, synthetic construct
  misc_feature 1..22: note = chemically synthesized
  source 1..22: mol_type = other DNA
ccacttcagtcactgattgaaa

SEQ ID NO: 80519 - DNA, 22 bp, synthetic construct
  misc_feature 1..22: note = chemically synthesized
  source 1..22: mol_type = other DNA
cacttcagtcactgattgaaaa

SEQ ID NO: 80520 - DNA, 22 bp, synthetic construct
  misc_feature 1..22: note = chemically synthesized
  source 1..22: mol_type = other DNA
cagtcactgattgaaaatgaga

SEQ ID NO: 80521 - DNA, 22 bp, synthetic construct
  misc_feature 1..22: note = chemically synthesized
  source 1..22: mol_type = other DNA
agtcactgattgaaaatgagac

SEQ ID NO: 80522 - DNA, 22 bp, synthetic construct
  misc_feature 1..22: note = chemically synthesized
  source 1..22: mol_type = other DNA
attgaaaatgagacaatacaca

SEQ ID NO: 80523 - DNA, 22 bp, synthetic construct
  misc_feature 1..22: note = chemically synthesized
  source 1..22: mol_type = other DNA
aaaatgagacaatacacattgt

SEQ ID NO: 80524 - DNA, 22 bp, synthetic construct
  misc_feature 1..22: note = chemically synthesized
  source 1..22: mol_type = other DNA
tatatatatatatatgtttatt

SEQ ID NO: 80525 - DNA, 22 bp, synthetic construct
  misc_feature 1..22: note = chemically synthesized
  source 1..22: mol_type = other DNA
attatactttaagttctagggt

SEQ ID NO: 80526 - DNA, 22 bp, synthetic construct
  misc_feature 1..22: note = chemically synthesized
  source 1..22: mol_type = other DNA
ttatactttaagttctagggta

SEQ ID NO: 80527 - DNA, 22 bp, synthetic construct
  misc_feature 1..22: note = chemically synthesized
  source 1..22: mol_type = other DNA
tactttaagttctagggtacat

SEQ ID NO: 80528 - DNA, 22 bp, synthetic construct
  misc_feature 1..22: note = chemically synthesized
  source 1..22: mol_type = other DNA
taagttctagggtacatgtgca

SEQ ID NO: 80529 - DNA, 22 bp, synthetic construct
  misc_feature 1..22: note = chemically synthesized
  source 1..22: mol_type = other DNA
aagttctagggtacatgtgcac

SEQ ID NO: 80530 - DNA, 22 bp, synthetic construct
  misc_feature 1..22: note = chemically synthesized
  source 1..22: mol_type = other DNA
agttctagggtacatgtgcaca

SEQ ID NO: 80531 - DNA, 22 bp, synthetic construct
  misc_feature 1..22: note = chemically synthesized
  source 1..22: mol_type = other DNA
tagggtacatgtgcacaacatg

SEQ ID NO: 80532 - DNA, 22 bp, synthetic construct
  misc_feature 1..22: note = chemically synthesized
  source 1..22: mol_type = other DNA
gggtacatgtgcacaacatgca

SEQ ID NO: 80533 - DNA, 22 bp, synthetic construct
  misc_feature 1..22: note = chemically synthesized
  source 1..22: mol_type = other DNA
gttacatatgtatacatgtgcc

SEQ ID NO: 80534 - DNA, 22 bp, synthetic construct
  misc_feature 1..22: note = chemically synthesized
  source 1..22: mol_type = other DNA
ttacatatgtatacatgtgcca

SEQ ID NO: 80535 - DNA, 22 bp, synthetic construct
  misc_feature 1..22: note = chemically synthesized
  source 1..22: mol_type = other DNA
catatgtatacatgtgccatgt

SEQ ID NO: 80536 - DNA, 22 bp, synthetic construct
  misc_feature 1..22: note = chemically synthesized
  source 1..22: mol_type = other DNA
gtgtgctgcacccattaactcg

SEQ ID NO: 80537 - DNA, 22 bp, synthetic construct
  misc_feature 1..22: note = chemically synthesized
  source 1..22: mol_type = other DNA
cacccattaactcgtcatttac

SEQ ID NO: 80538 - DNA, 22 bp, synthetic construct
  misc_feature 1..22: note = chemically synthesized
  source 1..22: mol_type = other DNA
actcgtcatttacattaggtat

SEQ ID NO: 80539 - DNA, 22 bp, synthetic construct
  misc_feature 1..22: note = chemically synthesized
  source 1..22: mol_type = other DNA
gtcatttacattaggtatatct

SEQ ID NO: 80540 - DNA, 22 bp, synthetic construct
  misc_feature 1..22: note = chemically synthesized
  source 1..22: mol_type = other DNA
acattaggtatatctcctaatg

SEQ ID NO: 80541 - DNA, 22 bp, synthetic construct
  misc_feature 1..22: note = chemically synthesized
  source 1..22: mol_type = other DNA
cattaggtatatctcctaatgc

SEQ ID NO: 80542 - DNA, 22 bp, synthetic construct
  misc_feature 1..22: note = chemically synthesized
  source 1..22: mol_type = other DNA
ggtatatctcctaatgctatcc

SEQ ID NO: 80543 - DNA, 22 bp, synthetic construct
  misc_feature 1..22: note = chemically synthesized
  source 1..22: mol_type = other DNA
ctaatgctatccctccccccgg

SEQ ID NO: 80544 - DNA, 22 bp, synthetic construct
  misc_feature 1..22: note = chemically synthesized
  source 1..22: mol_type = other DNA
atgctatccctccccccggccc

SEQ ID NO: 80545 - DNA, 22 bp, synthetic construct
  misc_feature 1..22: note = chemically synthesized
  source 1..22: mol_type = other DNA
tccctccccccggcccccaccc

SEQ ID NO: 80546 - DNA, 22 bp, synthetic construct
  misc_feature 1..22: note = chemically synthesized
  source 1..22: mol_type = other DNA
cccccggcccccaccccacaac

SEQ ID NO: 80547 - DNA, 22 bp, synthetic construct
  misc_feature 1..22: note = chemically synthesized
  source 1..22: mol_type = other DNA
ccctcactgtgtccaaatgttc

SEQ ID NO: 80548 - DNA, 22 bp, synthetic construct
  misc_feature 1..22: note = chemically synthesized
  source 1..22: mol_type = other DNA
actgtgtccaaatgttctcatt

SEQ ID NO: 80549 - DNA, 22 bp, synthetic construct
  misc_feature 1..22: note = chemically synthesized
  source 1..22: mol_type = other DNA
tgtccaaatgttctcattgttc

SEQ ID NO: 80550 - DNA, 22 bp, synthetic construct
  misc_feature 1..22: note = chemically synthesized
  source 1..22: mol_type = other DNA
tcattgttcaactcccacctat

SEQ ID NO: 80551 - DNA, 22 bp, synthetic construct
  misc_feature 1..22: note = chemically synthesized
  source 1..22: mol_type = other DNA
attgttcaactcccacctatga

SEQ ID NO: 80552 - DNA, 22 bp, synthetic construct
  misc_feature 1..22: note = chemically synthesized
  source 1..22: mol_type = other DNA
ttcaactcccacctatgagtga

SEQ ID NO: 80553 - DNA, 22 bp, synthetic construct
  misc_feature 1..22: note = chemically synthesized
  source 1..22: mol_type = other DNA
aactcccacctatgagtgagaa

SEQ ID NO: 80554 - DNA, 22 bp, synthetic construct
  misc_feature 1..22: note = chemically synthesized
  source 1..22: mol_type = other DNA
ccacctatgagtgagaatatgt

SEQ ID NO: 80555 - DNA, 22 bp, synthetic construct
  misc_feature 1..22: note = chemically synthesized
  source 1..22: mol_type = other DNA
tgagtgagaatatgtggtgttt

SEQ ID NO: 80556 - DNA, 22 bp, synthetic construct
  misc_feature 1..22: note = chemically synthesized
  source 1..22: mol_type = other DNA
ggtttttcgtccttgcgatact

SEQ ID NO: 80557 - DNA, 22 bp, synthetic construct
  misc_feature 1..22: note = chemically synthesized
  source 1..22: mol_type = other DNA
gtttttcgtccttgcgatactt

SEQ ID NO: 80558 - DNA, 22 bp, synthetic construct
  misc_feature 1..22: note = chemically synthesized
  source 1..22: mol_type = other DNA
ttcgtccttgcgatactttgct

SEQ ID NO: 80559 - DNA, 22 bp, synthetic construct
  misc_feature 1..22: note = chemically synthesized
  source 1..22: mol_type = other DNA
tcgtccttgcgatactttgctc

SEQ ID NO: 80560 - DNA, 22 bp, synthetic construct
  misc_feature 1..22: note = chemically synthesized
  source 1..22: mol_type = other DNA
cgtccttgcgatactttgctca

SEQ ID NO: 80561 - DNA, 22 bp, synthetic construct
  misc_feature 1..22: note = chemically synthesized
  source 1..22: mol_type = other DNA
gtccttgcgatactttgctcag

SEQ ID NO: 80562 - DNA, 22 bp, synthetic construct
  misc_feature 1..22: note = chemically synthesized
  source 1..22: mol_type = other DNA
gcgatactttgctcagaatgat

SEQ ID NO: 80563 - DNA, 22 bp, synthetic construct
  misc_feature 1..22: note = chemically synthesized
  source 1..22: mol_type = other DNA
cgatactttgctcagaatgatg

SEQ ID NO: 80564 - DNA, 22 bp, synthetic construct
  misc_feature 1..22: note = chemically synthesized
  source 1..22: mol_type = other DNA
tgctcagaatgatggtttccag

SEQ ID NO: 80565 - DNA, 22 bp, synthetic construct
  misc_feature 1..22: note = chemically synthesized
  source 1..22: mol_type = other DNA
gctcagaatgatggtttccagt

SEQ ID NO: 80566 - DNA, 22 bp, synthetic construct
  misc_feature 1..22: note = chemically synthesized
  source 1..22: mol_type = other DNA
ctcagaatgatggtttccagtt

SEQ ID NO: 80567 - DNA, 22 bp, synthetic construct
  misc_feature 1..22: note = chemically synthesized
  source 1..22: mol_type = other DNA
agaatgatggtttccagtttca

SEQ ID NO: 80568 - DNA, 22 bp, synthetic construct
  misc_feature 1..22: note = chemically synthesized
  source 1..22: mol_type = other DNA
ccagtttcatccatgtccctac

SEQ ID NO: 80569 - DNA, 22 bp, synthetic construct
  misc_feature 1..22: note = chemically synthesized
  source 1..22: mol_type = other DNA
cagtttcatccatgtccctaca

SEQ ID NO: 80570 - DNA, 22 bp, synthetic construct
  misc_feature 1..22: note = chemically synthesized
  source 1..22: mol_type = other DNA
catccatgtccctacaaaggac

SEQ ID NO: 80571 - DNA, 22 bp, synthetic construct
  misc_feature 1..22: note = chemically synthesized
  source 1..22: mol_type = other DNA
atccatgtccctacaaaggaca

SEQ ID NO: 80572 - DNA, 22 bp, synthetic construct
  misc_feature 1..22: note = chemically synthesized
  source 1..22: mol_type = other DNA
caaaggacatgaactcatcatt

SEQ ID NO: 80573 - DNA, 22 bp, synthetic construct
  misc_feature 1..22: note = chemically synthesized
  source 1..22: mol_type = other DNA
atcattttttatggctgcatag

SEQ ID NO: 80574 - DNA, 22 bp, synthetic construct
  misc_feature 1..22: note = chemically synthesized
  source 1..22: mol_type = other DNA
tttatggctgcatagtattcca

SEQ ID NO: 80575 - DNA, 22 bp, synthetic construct
  misc_feature 1..22: note = chemically synthesized
  source 1..22: mol_type = other DNA
ttatggctgcatagtattccat

SEQ ID NO: 80576 - DNA, 22 bp, synthetic construct
  misc_feature 1..22: note = chemically synthesized
  source 1..22: mol_type = other DNA
tatggctgcatagtattccatg

SEQ ID NO: 80577 - DNA, 22 bp, synthetic construct
  misc_feature 1..22: note = chemically synthesized
  source 1..22: mol_type = other DNA
atggctgcatagtattccatga

SEQ ID NO: 80578 - DNA, 22 bp, synthetic construct
  misc_feature 1..22: note = chemically synthesized
  source 1..22: mol_type = other DNA
tggctgcatagtattccatgat

SEQ ID NO: 80579 - DNA, 22 bp, synthetic construct
  misc_feature 1..22: note = chemically synthesized
  source 1..22: mol_type = other DNA
catagtattccatgatgtatat

SEQ ID NO: 80580 - DNA, 22 bp, synthetic construct
  misc_feature 1..22: note = chemically synthesized
  source 1..22: mol_type = other DNA
catgatgtatatgtgccacatt

SEQ ID NO: 80581 - DNA, 22 bp, synthetic construct
  misc_feature 1..22: note = chemically synthesized
  source 1..22: mol_type = other DNA
tcttaatccagtctatcattgt

SEQ ID NO: 80582 - DNA, 22 bp, synthetic construct
  misc_feature 1..22: note = chemically synthesized
  source 1..22: mol_type = other DNA
cttaatccagtctatcattgtt

SEQ ID NO: 80583 - DNA, 22 bp, synthetic construct
  misc_feature 1..22: note = chemically synthesized
  source 1..22: mol_type = other DNA
ttaatccagtctatcattgttg

SEQ ID NO: 80584 - DNA, 22 bp, synthetic construct
  misc_feature 1..22: note = chemically synthesized
  source 1..22: mol_type = other DNA
aatccagtctatcattgttgga

SEQ ID NO: 80585 - DNA, 22 bp, synthetic construct
  misc_feature 1..22: note = chemically synthesized
  source 1..22: mol_type = other DNA
atccagtctatcattgttggac

SEQ ID NO: 80586 - DNA, 22 bp, synthetic construct
  misc_feature 1..22: note = chemically synthesized
  source 1..22: mol_type = other DNA
tcattgttggacatttgggttg

SEQ ID NO: 80587 - DNA, 22 bp, synthetic construct
  misc_feature 1..22: note = chemically synthesized
  source 1..22: mol_type = other DNA
ttggacatttgggttggttcca

SEQ ID NO: 80588 - DNA, 22 bp, synthetic construct
  misc_feature 1..22: note = chemically synthesized
  source 1..22: mol_type = other DNA
gacatttgggttggttccaagt

SEQ ID NO: 80589 - DNA, 22 bp, synthetic construct
  misc_feature 1..22: note = chemically synthesized
  source 1..22: mol_type = other DNA
gggttggttccaagtctttgct

SEQ ID NO: 80590 - DNA, 22 bp, synthetic construct
  misc_feature 1..22: note = chemically synthesized
  source 1..22: mol_type = other DNA
ggttggttccaagtctttgcta

SEQ ID NO: 80591 - DNA, 22 bp, synthetic construct
  misc_feature 1..22: note = chemically synthesized
  source 1..22: mol_type = other DNA
gttccaagtctttgctattgtg

SEQ ID NO: 80592 - DNA, 22 bp, synthetic construct
  misc_feature 1..22: note = chemically synthesized
  source 1..22: mol_type = other DNA
caagtctttgctattgtgaata

SEQ ID NO: 80593 - DNA, 22 bp, synthetic construct
  misc_feature 1..22: note = chemically synthesized
  source 1..22: mol_type = other DNA
tgctattgtgaatagtgccaca

SEQ ID NO: 80594 - DNA, 22 bp, synthetic construct
  misc_feature 1..22: note = chemically synthesized
  source 1..22: mol_type = other DNA
gctattgtgaatagtgccacaa

SEQ ID NO: 80595 - DNA, 22 bp, synthetic construct
  misc_feature 1..22: note = chemically synthesized
  source 1..22: mol_type = other DNA
ctattgtgaatagtgccacaat

SEQ ID NO: 80596 - DNA, 22 bp, synthetic construct
  misc_feature 1..22: note = chemically synthesized
  source 1..22: mol_type = other DNA
ttgtgaatagtgccacaataaa

SEQ ID NO: 80597 - DNA, 22 bp, synthetic construct
  misc_feature 1..22: note = chemically synthesized
  source 1..22: mol_type = other DNA
tgaatagtgccacaataaacat

SEQ ID NO: 80598 - DNA, 22 bp, synthetic construct
  misc_feature 1..22: note = chemically synthesized
  source 1..22: mol_type = other DNA
tatagcagcatgatttacattc

SEQ ID NO: 80599 - DNA, 22 bp, synthetic construct
  misc_feature 1..22: note = chemically synthesized
  source 1..22: mol_type = other DNA
atagcagcatgatttacattcc

SEQ ID NO: 80600 - DNA, 22 bp, synthetic construct
  misc_feature 1..22: note = chemically synthesized
  source 1..22: mol_type = other DNA
tagcagcatgatttacattcct

SEQ ID NO: 80601 - DNA, 22 bp, synthetic construct
  misc_feature 1..22: note = chemically synthesized
  source 1..22: mol_type = other DNA
acattcctttgggtatataccc

SEQ ID NO: 80602 - DNA, 22 bp, synthetic construct
  misc_feature 1..22: note = chemically synthesized
  source 1..22: mol_type = other DNA
cattcctttgggtatataccca

SEQ ID NO: 80603 - DNA, 22 bp, synthetic construct
  misc_feature 1..22: note = chemically synthesized
  source 1..22: mol_type = other DNA
ctttgggtatatacccagtaat

SEQ ID NO: 80604 - DNA, 22 bp, synthetic construct
  misc_feature 1..22: note = chemically synthesized
  source 1..22: mol_type = other DNA
tgggtatatacccagtaatagg

SEQ ID NO: 80605 - DNA, 22 bp, synthetic construct
  misc_feature 1..22: note = chemically synthesized
  source 1..22: mol_type = other DNA
gggtatatacccagtaatagga

SEQ ID NO: 80606 - DNA, 22 bp, synthetic construct
  misc_feature 1..22: note = chemically synthesized
  source 1..22: mol_type = other DNA
ggtatatacccagtaataggat

SEQ ID NO: 80607 - DNA, 22 bp, synthetic construct
  misc_feature 1..22: note = chemically synthesized
  source 1..22: mol_type = other DNA
ggtcaaatggtatttctagttc

SEQ ID NO: 80608 - DNA, 22 bp, synthetic construct
  misc_feature 1..22: note = chemically synthesized
  source 1..22: mol_type = other DNA
ctagttctagatccctgaggaa

SEQ ID NO: 80609 - DNA, 22 bp, synthetic construct
  misc_feature 1..22: note = chemically synthesized
  source 1..22: mol_type = other DNA
tagttctagatccctgaggaat

SEQ ID NO: 80610 - DNA, 22 bp, synthetic construct
  misc_feature 1..22: note = chemically synthesized
  source 1..22: mol_type = other DNA
gttctagatccctgaggaattg

SEQ ID NO: 80611 - DNA, 22 bp, synthetic construct
  misc_feature 1..22: note = chemically synthesized
  source 1..22: mol_type = other DNA
tagatccctgaggaattgccac

SEQ ID NO: 80612 - DNA, 22 bp, synthetic construct
  misc_feature 1..22: note = chemically synthesized
  source 1..22: mol_type = other DNA
gatccctgaggaattgccacac

SEQ ID NO: 80613 - DNA, 22 bp, synthetic construct
  misc_feature 1..22: note = chemically synthesized
  source 1..22: mol_type = other DNA
aggaattgccacactgacttcc

SEQ ID NO: 80614 - DNA, 22 bp, synthetic construct
  misc_feature 1..22: note = chemically synthesized
  source 1..22: mol_type = other DNA
ccacactgacttccacaatggt

SEQ ID NO: 80615 - DNA, 22 bp, synthetic construct
  misc_feature 1..22: note = chemically synthesized
  source 1..22: mol_type = other DNA
acttccacaatggttgaactag

SEQ ID NO: 80616 - DNA, 22 bp, synthetic construct
  misc_feature 1..22: note = chemically synthesized
  source 1..22: mol_type = other DNA
ccacaatggttgaactagttta

SEQ ID NO: 80617 - DNA, 22 bp, synthetic construct
  misc_feature 1..22: note = chemically synthesized
  source 1..22: mol_type = other DNA
cacaatggttgaactagtttat

SEQ ID NO: 80618 - DNA, 22 bp, synthetic construct
  misc_feature 1..22: note = chemically synthesized
  source 1..22: mol_type = other DNA
aactagtttatagtcccaccaa

SEQ ID NO: 80619 - DNA, 22 bp, synthetic construct
  misc_feature 1..22: note = chemically synthesized
  source 1..22: mol_type = other DNA
gtttatagtcccaccaacagtg

SEQ ID NO: 80620 - DNA, 22 bp, synthetic construct
  misc_feature 1..22: note = chemically synthesized
  source 1..22: mol_type = other DNA
atagtcccaccaacagtgtaaa

SEQ ID NO: 80621 - DNA, 22 bp, synthetic construct
  misc_feature 1..22: note = chemically synthesized
  source 1..22: mol_type = other DNA
tagtcccaccaacagtgtaaaa

SEQ ID NO: 80622 - DNA, 22 bp, synthetic construct
  misc_feature 1..22: note = chemically synthesized
  source 1..22: mol_type = other DNA
ctatttctccacatcctctcca

SEQ ID NO: 80623 - DNA, 22 bp, synthetic construct
  misc_feature 1..22: note = chemically synthesized
  source 1..22: mol_type = other DNA
tttctccacatcctctccagca

SEQ ID NO: 80624 - DNA, 22 bp, synthetic construct
  misc_feature 1..22: note = chemically synthesized
  source 1..22: mol_type = other DNA
ctccacatcctctccagcacct

SEQ ID NO: 80625 - DNA, 22 bp, synthetic construct
  misc_feature 1..22: note = chemically synthesized
  source 1..22: mol_type = other DNA
tccacatcctctccagcacctg

SEQ ID NO: 80626 - DNA, 22 bp, synthetic construct
  misc_feature 1..22: note = chemically synthesized
  source 1..22: mol_type = other DNA
cacatcctctccagcacctgtg

SEQ ID NO: 80627 - DNA, 22 bp, synthetic construct
  misc_feature 1..22: note = chemically synthesized
  source 1..22: mol_type = other DNA
tccagcacctgtggtttcctga

SEQ ID NO: 80628 - DNA, 22 bp, synthetic construct
  misc_feature 1..22: note = chemically synthesized
  source 1..22: mol_type = other DNA
cagcacctgtggtttcctgact

SEQ ID NO: 80629 - DNA, 22 bp, synthetic construct
  misc_feature 1..22: note = chemically synthesized
  source 1..22: mol_type = other DNA
tggtttcctgactttttaatga

SEQ ID NO: 80630 - DNA, 22 bp, synthetic construct
  misc_feature 1..22: note = chemically synthesized
  source 1..22: mol_type = other DNA
cctgactttttaatgatcacca

SEQ ID NO: 80631 - DNA, 22 bp, synthetic construct
  misc_feature 1..22: note = chemically synthesized
  source 1..22: mol_type = other DNA
ctgactttttaatgatcaccat

SEQ ID NO: 80632 - DNA, 22 bp, synthetic construct
  misc_feature 1..22: note = chemically synthesized
  source 1..22: mol_type = other DNA
actttttaatgatcaccattct

SEQ ID NO: 80633 - DNA, 22 bp, synthetic construct
  misc_feature 1..22: note = chemically synthesized
  source 1..22: mol_type = other DNA
tttaatgatcaccattctaact

SEQ ID NO: 80634 - DNA, 22 bp, synthetic construct
  misc_feature 1..22: note = chemically synthesized
  source 1..22: mol_type = other DNA
ttaatgatcaccattctaactg

SEQ ID NO: 80635 - DNA, 22 bp, synthetic construct
  misc_feature 1..22: note = chemically synthesized
  source 1..22: mol_type = other DNA
taatgatcaccattctaactgg

SEQ ID NO: 80636 - DNA, 22 bp, synthetic construct
  misc_feature 1..22: note = chemically synthesized
  source 1..22: mol_type = other DNA
aatgatcaccattctaactggt

SEQ ID NO: 80637 - DNA, 22 bp, synthetic construct
  misc_feature 1..22: note = chemically synthesized
  source 1..22: mol_type = other DNA
atgatcaccattctaactggtg

SEQ ID NO: 80638 - DNA, 22 bp, synthetic construct
  misc_feature 1..22: note = chemically synthesized
  source 1..22: mol_type = other DNA
taactggtgtgagatgatatct

SEQ ID NO: 80639 - DNA, 22 bp, synthetic construct
  misc_feature 1..22: note = chemically synthesized
  source 1..22: mol_type = other DNA
actggtgtgagatgatatctca

SEQ ID NO: 80640 - DNA, 22 bp, synthetic construct
  misc_feature 1..22: note = chemically synthesized
  source 1..22: mol_type = other DNA
gtgtgagatgatatctcattgt

SEQ ID NO: 80641 - DNA, 22 bp, synthetic construct
  misc_feature 1..22: note = chemically synthesized
  source 1..22: mol_type = other DNA
attgtggttttgatttgcattt

SEQ ID NO: 80642 - DNA, 22 bp, synthetic construct
  misc_feature 1..22: note = chemically synthesized
  source 1..22: mol_type = other DNA
tggttttgatttgcatttctct

SEQ ID NO: 80643 - DNA, 22 bp, synthetic construct
  misc_feature 1..22: note = chemically synthesized
  source 1..22: mol_type = other DNA
tgatttgcatttctctgatggc

SEQ ID NO: 80644 - DNA, 22 bp, synthetic construct
  misc_feature 1..22: note = chemically synthesized
  source 1..22: mol_type = other DNA
gatttgcatttctctgatggcc

SEQ ID NO: 80645 - DNA, 22 bp, synthetic construct
  misc_feature 1..22: note = chemically synthesized
  source 1..22: mol_type = other DNA
atttgcatttctctgatggcca

SEQ ID NO: 80646 - DNA, 22 bp, synthetic construct
  misc_feature 1..22: note = chemically synthesized
  source 1..22: mol_type = other DNA
gcatttctctgatggccagtga

SEQ ID NO: 80647 - DNA, 22 bp, synthetic construct
  misc_feature 1..22: note = chemically synthesized
  source 1..22: mol_type = other DNA
catttctctgatggccagtgat

SEQ ID NO: 80648 - DNA, 22 bp, synthetic construct
  misc_feature 1..22: note = chemically synthesized
  source 1..22: mol_type = other DNA
ctctgatggccagtgatgatga

SEQ ID NO: 80649 - DNA, 22 bp, synthetic construct
  misc_feature 1..22: note = chemically synthesized
  source 1..22: mol_type = other DNA
tctgatggccagtgatgatgag

SEQ ID NO: 80650 - DNA, 22 bp, synthetic construct
  misc_feature 1..22: note = chemically synthesized
  source 1..22: mol_type = other DNA
tgatggccagtgatgatgagca

SEQ ID NO: 80651 - DNA, 22 bp, synthetic construct
  misc_feature 1..22: note = chemically synthesized
  source 1..22: mol_type = other DNA
atggccagtgatgatgagcatt

SEQ ID NO: 80652 - DNA, 22 bp, synthetic construct
  misc_feature 1..22: note = chemically synthesized
  source 1..22: mol_type = other DNA
tttcatgtgttttttggctgca

SEQ ID NO: 80653 - DNA, 22 bp, synthetic construct
  misc_feature 1..22: note = chemically synthesized
  source 1..22: mol_type = other DNA
ttcatgtgttttttggctgcat

SEQ ID NO: 80654 - DNA, 22 bp, synthetic construct
  misc_feature 1..22: note = chemically synthesized
  source 1..22: mol_type = other DNA
tcatgtgttttttggctgcata

SEQ ID NO: 80655 - DNA, 22 bp, synthetic construct
  misc_feature 1..22: note = chemically synthesized
  source 1..22: mol_type = other DNA
catgtgttttttggctgcataa

SEQ ID NO: 80656 - DNA, 22 bp, synthetic construct
  misc_feature 1..22: note = chemically synthesized
  source 1..22: mol_type = other DNA
atgtgttttttggctgcataaa

SEQ ID NO: 80657 - DNA, 22 bp, synthetic construct
  misc_feature 1..22: note = chemically synthesized
  source 1..22: mol_type = other DNA
tttggctgcataaatgtcttct

SEQ ID NO: 80658 - DNA, 22 bp, synthetic construct
  misc_feature 1..22: note = chemically synthesized
  source 1..22: mol_type = other DNA
ttggctgcataaatgtcttctt

SEQ ID NO: 80659 - DNA, 22 bp, synthetic construct
  misc_feature 1..22: note = chemically synthesized
  source 1..22: mol_type = other DNA
tggctgcataaatgtcttcttt

SEQ ID NO: 80660 - DNA, 22 bp, synthetic construct
  misc_feature 1..22: note = chemically synthesized
  source 1..22: mol_type = other DNA
ggctgcataaatgtcttctttt

SEQ ID NO: 80661 - DNA, 22 bp, synthetic construct
  misc_feature 1..22: note = chemically synthesized
  source 1..22: mol_type = other DNA
gctgcataaatgtcttcttttg

SEQ ID NO: 80662 - DNA, 22 bp, synthetic construct
  misc_feature 1..22: note = chemically synthesized
  source 1..22: mol_type = other DNA
cataaatgtcttcttttgagaa

SEQ ID NO: 80663 - DNA, 22 bp, synthetic construct
  misc_feature 1..22: note = chemically synthesized
  source 1..22: mol_type = other DNA
cttttgagaagtgtctgttcat

SEQ ID NO: 80664 - DNA, 22 bp, synthetic construct
  misc_feature 1..22: note = chemically synthesized
  source 1..22: mol_type = other DNA
ttttgagaagtgtctgttcata

SEQ ID NO: 80665 - DNA, 22 bp, synthetic construct
  misc_feature 1..22: note = chemically synthesized
  source 1..22: mol_type = other DNA
ttgagaagtgtctgttcatatc

SEQ ID NO: 80666 - DNA, 22 bp, synthetic construct
  misc_feature 1..22: note = chemically synthesized
  source 1..22: mol_type = other DNA
tgagaagtgtctgttcatatcc

SEQ ID NO: 80667 - DNA, 22 bp, synthetic construct
  misc_feature 1..22: note = chemically synthesized
  source 1..22: mol_type = other DNA
gagaagtgtctgttcatatcct

SEQ ID NO: 80668 - DNA, 22 bp, synthetic construct
  misc_feature 1..22: note = chemically synthesized
  source 1..22: mol_type = other DNA
agaagtgtctgttcatatcctt

SEQ ID NO: 80669 - DNA, 22 bp, synthetic construct
  misc_feature 1..22: note = chemically synthesized
  source 1..22: mol_type = other DNA
ttcatatccttcacccccttgt

SEQ ID NO: 80670 - DNA, 22 bp, synthetic construct
  misc_feature 1..22: note = chemically synthesized
  source 1..22: mol_type = other DNA
atatccttcacccccttgttga

SEQ ID NO: 80671 - DNA, 22 bp, synthetic construct
  misc_feature 1..22: note = chemically synthesized
  source 1..22: mol_type = other DNA
cacccccttgttgatgcagttg

SEQ ID NO: 80672 - DNA, 22 bp, synthetic construct
  misc_feature 1..22: note = chemically synthesized
  source 1..22: mol_type = other DNA
acccccttgttgatgcagttgt

SEQ ID NO: 80673 - DNA, 22 bp, synthetic construct
  misc_feature 1..22: note = chemically synthesized
  source 1..22: mol_type = other DNA
gttgatgcagttgtttgttttt

SEQ ID NO: 80674 - DNA, 22 bp, synthetic construct
  misc_feature 1..22: note = chemically synthesized
  source 1..22: mol_type = other DNA
ttgatgcagttgtttgtttttt

SEQ ID NO: 80675 - DNA, 22 bp, synthetic construct
  misc_feature 1..22: note = chemically synthesized
  source 1..22: mol_type = other DNA
atgcagttgtttgtttttttct

SEQ ID NO: 80676 - DNA, 22 bp, synthetic construct
  misc_feature 1..22: note = chemically synthesized
  source 1..22: mol_type = other DNA
tttgtttttttcttgtaaattt

SEQ ID NO: 80677 - DNA, 22 bp, synthetic construct
  misc_feature 1..22: note = chemically synthesized
  source 1..22: mol_type = other DNA
gtttttttcttgtaaatttgtt

SEQ ID NO: 80678 - DNA, 22 bp, synthetic construct
  misc_feature 1..22: note = chemically synthesized
  source 1..22: mol_type = other DNA
tttttttcttgtaaatttgttt

SEQ ID NO: 80679 - DNA, 22 bp, synthetic construct
  misc_feature 1..22: note = chemically synthesized
  source 1..22: mol_type = other DNA
ttttcttgtaaatttgtttgag

SEQ ID NO: 80680 - DNA, 22 bp, synthetic construct
  misc_feature 1..22: note = chemically synthesized
  source 1..22: mol_type = other DNA
tttcttgtaaatttgtttgagt

SEQ ID NO: 80681 - DNA, 22 bp, synthetic construct
  misc_feature 1..22: note = chemically synthesized
  source 1..22: mol_type = other DNA
ttcttgtaaatttgtttgagtt

SEQ ID NO: 80682 - DNA, 22 bp, synthetic construct
  misc_feature 1..22: note = chemically synthesized
  source 1..22: mol_type = other DNA
tcttgtaaatttgtttgagttc

SEQ ID NO: 80683 - DNA, 22 bp, synthetic construct
  misc_feature 1..22: note = chemically synthesized
  source 1..22: mol_type = other DNA
cttgtaaatttgtttgagttca

SEQ ID NO: 80684 - DNA, 22 bp, synthetic construct
  misc_feature 1..22: note = chemically synthesized
  source 1..22: mol_type = other DNA
ttgtaaatttgtttgagttcat

SEQ ID NO: 80685 - DNA, 22 bp, synthetic construct
  misc_feature 1..22: note = chemically synthesized
  source 1..22: mol_type = other DNA
gtaaatttgtttgagttcattg

SEQ ID NO: 80686 - DNA, 22 bp, synthetic construct
  misc_feature 1..22: note = chemically synthesized
  source 1..22: mol_type = other DNA
taaatttgtttgagttcattgt

SEQ ID NO: 80687 - DNA, 22 bp, synthetic construct
  misc_feature 1..22: note = chemically synthesized
  source 1..22: mol_type = other DNA
gtttgagttcattgtagattct

SEQ ID NO: 80688 - DNA, 22 bp, synthetic construct
  misc_feature 1..22: note = chemically synthesized
  source 1..22: mol_type = other DNA
tttgagttcattgtagattctg

SEQ ID NO: 80689 - DNA, 22 bp, synthetic construct
  misc_feature 1..22: note = chemically synthesized
  source 1..22: mol_type = other DNA
gagttcattgtagattctggat

SEQ ID NO: 80690 - DNA, 22 bp, synthetic construct
  misc_feature 1..22: note = chemically synthesized
  source 1..22: mol_type = other DNA
agttcattgtagattctggata

SEQ ID NO: 80691 - DNA, 22 bp, synthetic construct
  misc_feature 1..22: note = chemically synthesized
  source 1..22: mol_type = other DNA
attgtagattctggatattagc

SEQ ID NO: 80692 - DNA, 22 bp, synthetic construct
  misc_feature 1..22: note = chemically synthesized
  source 1..22: mol_type = other DNA
tagattctggatattagccctt

SEQ ID NO: 80693 - DNA, 22 bp, synthetic construct
  misc_feature 1..22: note = chemically synthesized
  source 1..22: mol_type = other DNA
tggatattagccctttgtcaga

SEQ ID NO: 80694 - DNA, 22 bp, synthetic construct
  misc_feature 1..22: note = chemically synthesized
  source 1..22: mol_type = other DNA
gatattagccctttgtcagatg

SEQ ID NO: 80695 - DNA, 22 bp, synthetic construct
  misc_feature 1..22: note = chemically synthesized
  source 1..22: mol_type = other DNA
gccctttgtcagatgagtagat

SEQ ID NO: 80696 - DNA, 22 bp, synthetic construct
  misc_feature 1..22: note = chemically synthesized
  source 1..22: mol_type = other DNA
tgtcagatgagtagattgcaaa

SEQ ID NO: 80697 - DNA, 22 bp, synthetic construct
  misc_feature 1..22: note = chemically synthesized
  source 1..22: mol_type = other DNA
gtcagatgagtagattgcaaaa

SEQ ID NO: 80698 - DNA, 22 bp, synthetic construct
  misc_feature 1..22: note = chemically synthesized
  source 1..22: mol_type = other DNA
tcagatgagtagattgcaaaaa

SEQ ID NO: 80699 - DNA, 22 bp, synthetic construct
  misc_feature 1..22: note = chemically synthesized
  source 1..22: mol_type = other DNA
caaaaattttctcccattgtgt

SEQ ID NO: 80700 - DNA, 22 bp, synthetic construct
  misc_feature 1..22: note = chemically synthesized
  source 1..22: mol_type = other DNA
tctcccattgtgtaggttgcct

SEQ ID NO: 80701 - DNA, 22 bp, synthetic construct
  misc_feature 1..22: note = chemically synthesized
  source 1..22: mol_type = other DNA
ctcccattgtgtaggttgcctg

SEQ ID NO: 80702 - DNA, 22 bp, synthetic construct
  misc_feature 1..22: note = chemically synthesized
  source 1..22: mol_type = other DNA
tcccattgtgtaggttgcctgt

SEQ ID NO: 80703 - DNA, 22 bp, synthetic construct
  misc_feature 1..22: note = chemically synthesized
  source 1..22: mol_type = other DNA
ccattgtgtaggttgcctgttc

SEQ ID NO: 80704 - DNA, 22 bp, synthetic construct
  misc_feature 1..22: note = chemically synthesized
  source 1..22: mol_type = other DNA
tgtaggttgcctgttcactctg

SEQ ID NO: 80705 - DNA, 22 bp, synthetic construct
  misc_feature 1..22: note = chemically synthesized
  source 1..22: mol_type = other DNA
cctgttcactctgatggtagtt

SEQ ID NO: 80706 - DNA, 22 bp, synthetic construct
  misc_feature 1..22: note = chemically synthesized
  source 1..22: mol_type = other DNA
ttcactctgatggtagtttctt

SEQ ID NO: 80707 - DNA, 22 bp, synthetic construct
  misc_feature 1..22: note = chemically synthesized
  source 1..22: mol_type = other DNA
actctgatggtagtttcttttg

SEQ ID NO: 80708 - DNA, 22 bp, synthetic construct
  misc_feature 1..22: note = chemically synthesized
  source 1..22: mol_type = other DNA
tgatggtagtttcttttgctgt

SEQ ID NO: 80709 - DNA, 22 bp, synthetic construct
  misc_feature 1..22: note = chemically synthesized
  source 1..22: mol_type = other DNA
atggtagtttcttttgctgtgc

SEQ ID NO: 80710 - DNA, 22 bp, synthetic construct
  misc_feature 1..22: note = chemically synthesized
  source 1..22: mol_type = other DNA
cttttgctgtgcagaagctctt

SEQ ID NO: 80711 - DNA, 22 bp, synthetic construct
  misc_feature 1..22: note = chemically synthesized
  source 1..22: mol_type = other DNA
ttttgctgtgcagaagctcttt

SEQ ID NO: 80712 - DNA, 22 bp, synthetic construct
  misc_feature 1..22: note = chemically synthesized
  source 1..22: mol_type = other DNA
ttgctgtgcagaagctctttag

SEQ ID NO: 80713 - DNA, 22 bp, synthetic construct
  misc_feature 1..22: note = chemically synthesized
  source 1..22: mol_type = other DNA
tgctgtgcagaagctctttagt

SEQ ID NO: 80714 - DNA, 22 bp, synthetic construct
  misc_feature 1..22: note = chemically synthesized
  source 1..22: mol_type = other DNA
gctgtgcagaagctctttagtt

SEQ ID NO: 80715 - DNA, 22 bp, synthetic construct
  misc_feature 1..22: note = chemically synthesized
  source 1..22: mol_type = other DNA
ctgtgcagaagctctttagttt

SEQ ID NO: 80716 - DNA, 22 bp, synthetic construct
  misc_feature 1..22: note = chemically synthesized
  source 1..22: mol_type = other DNA
tgcagaagctctttagtttaat

SEQ ID NO: 80717 - DNA, 22 bp, synthetic construct
  misc_feature 1..22: note = chemically synthesized
  source 1..22: mol_type = other DNA
tttagtttaattagatcccatt

SEQ ID NO: 80718 - DNA, 22 bp, synthetic construct
  misc_feature 1..22: note = chemically synthesized
  source 1..22: mol_type = other DNA
tagtttaattagatcccatttg

SEQ ID NO: 80719 - DNA, 22 bp, synthetic construct
  misc_feature 1..22: note = chemically synthesized
  source 1..22: mol_type = other DNA
agtttaattagatcccatttgt

SEQ ID NO: 80720 - DNA, 22 bp, synthetic construct
  misc_feature 1..22: note = chemically synthesized
  source 1..22: mol_type = other DNA
gtttaattagatcccatttgtc

SEQ ID NO: 80721 - DNA, 22 bp, synthetic construct
  misc_feature 1..22: note = chemically synthesized
  source 1..22: mol_type = other DNA
aattagatcccatttgtccatt

SEQ ID NO: 80722 - DNA, 22 bp, synthetic construct
  misc_feature 1..22: note = chemically synthesized
  source 1..22: mol_type = other DNA
attagatcccatttgtccattt

SEQ ID NO: 80723 - DNA, 22 bp, synthetic construct
  misc_feature 1..22: note = chemically synthesized
  source 1..22: mol_type = other DNA
gatcccatttgtccattttgtc

SEQ ID NO: 80724 - DNA, 22 bp, synthetic construct
  misc_feature 1..22: note = chemically synthesized
  source 1..22: mol_type = other DNA
gtccattttgtcttttgttgcc

SEQ ID NO: 80725 - DNA, 22 bp, synthetic construct
  misc_feature 1..22: note = chemically synthesized
  source 1..22: mol_type = other DNA
tccattttgtcttttgttgcca

SEQ ID NO: 80726 - DNA, 22 bp, synthetic construct
  misc_feature 1..22: note = chemically synthesized
  source 1..22: mol_type = other DNA
tgtcttttgttgccattgcttt

SEQ ID NO: 80727 - DNA, 22 bp, synthetic construct
  misc_feature 1..22: note = chemically synthesized
  source 1..22: mol_type = other DNA
gtcttttgttgccattgctttt

SEQ ID NO: 80728 - DNA, 22 bp, synthetic construct
  misc_feature 1..22: note = chemically synthesized
  source 1..22: mol_type = other DNA
tcttttgttgccattgcttttg

SEQ ID NO: 80729 - DNA, 22 bp, synthetic construct
  misc_feature 1..22: note = chemically synthesized
  source 1..22: mol_type = other DNA
ttgttgccattgcttttggtgt

SEQ ID NO: 80730 - DNA, 22 bp, synthetic construct
  misc_feature 1..22: note = chemically synthesized
  source 1..22: mol_type = other DNA
tgttgccattgcttttggtgtt

SEQ ID NO: 80731 - DNA, 22 bp, synthetic construct
  misc_feature 1..22: note = chemically synthesized
  source 1..22: mol_type = other DNA
gttgccattgcttttggtgttt

SEQ ID NO: 80732 - DNA, 22 bp, synthetic construct
  misc_feature 1..22: note = chemically synthesized
  source 1..22: mol_type = other DNA
ttgccattgcttttggtgtttt

SEQ ID NO: 80733 - DNA, 22 bp, synthetic construct
  misc_feature 1..22: note = chemically synthesized
  source 1..22: mol_type = other DNA
ccattgcttttggtgttttaga

SEQ ID NO: 80734 - DNA, 22 bp, synthetic construct
  misc_feature 1..22: note = chemically synthesized
  source 1..22: mol_type = other DNA
cttttggtgttttagacatgaa

SEQ ID NO: 80735 - DNA, 22 bp, synthetic construct
  misc_feature 1..22: note = chemically synthesized
  source 1..22: mol_type = other DNA
ttggtgttttagacatgaagtc

SEQ ID NO: 80736 - DNA, 22 bp, synthetic construct
  misc_feature 1..22: note = chemically synthesized
  source 1..22: mol_type = other DNA
tggtgttttagacatgaagtcc

SEQ ID NO: 80737 - DNA, 22 bp, synthetic construct
  misc_feature 1..22: note = chemically synthesized
  source 1..22: mol_type = other DNA
ggtgttttagacatgaagtcct

SEQ ID NO: 80738 - DNA, 22 bp, synthetic construct
  misc_feature 1..22: note = chemically synthesized
  source 1..22: mol_type = other DNA
gtgttttagacatgaagtcctt

SEQ ID NO: 80739 - DNA, 22 bp, synthetic construct
  misc_feature 1..22: note = chemically synthesized
  source 1..22: mol_type = other DNA
tagacatgaagtccttgcccat

SEQ ID NO: 80740 - DNA, 22 bp, synthetic construct
  misc_feature 1..22: note = chemically synthesized
  source 1..22: mol_type = other DNA
agacatgaagtccttgcccatg

SEQ ID NO: 80741 - DNA, 22 bp, synthetic construct
  misc_feature 1..22: note = chemically synthesized
  source 1..22: mol_type = other DNA
gacatgaagtccttgcccatgc

SEQ ID NO: 80742 - DNA, 22 bp, synthetic construct
  misc_feature 1..22: note = chemically synthesized
  source 1..22: mol_type = other DNA
gcccatgcctatgtcctgaatg

SEQ ID NO: 80743 - DNA, 22 bp, synthetic construct
  misc_feature 1..22: note = chemically synthesized
  source 1..22: mol_type = other DNA
cccatgcctatgtcctgaatgg

SEQ ID NO: 80744 - DNA, 22 bp, synthetic construct
  misc_feature 1..22: note = chemically synthesized
  source 1..22: mol_type = other DNA
tgtcctgaatggtattgcttag

SEQ ID NO: 80745 - DNA, 22 bp, synthetic construct
  misc_feature 1..22: note = chemically synthesized
  source 1..22: mol_type = other DNA
aatggtattgcttaggttttct

SEQ ID NO: 80746 - DNA, 22 bp, synthetic construct
  misc_feature 1..22: note = chemically synthesized
  source 1..22: mol_type = other DNA
cttaggttttcttctaaggttt

SEQ ID NO: 80747 - DNA, 22 bp, synthetic construct
  misc_feature 1..22: note = chemically synthesized
  source 1..22: mol_type = other DNA
aggttttcttctaaggttttta

SEQ ID NO: 80748 - DNA, 22 bp, synthetic construct
  misc_feature 1..22: note = chemically synthesized
  source 1..22: mol_type = other DNA
ggttttcttctaaggtttttat

SEQ ID NO: 80749 - DNA, 22 bp, synthetic construct
  misc_feature 1..22: note = chemically synthesized
  source 1..22: mol_type = other DNA
tcttctaaggtttttatggttt

SEQ ID NO: 80750 - DNA, 22 bp, synthetic construct
  misc_feature 1..22: note = chemically synthesized
  source 1..22: mol_type = other DNA
cttctaaggtttttatggtttt

SEQ ID NO: 80751 - DNA, 22 bp, synthetic construct
  misc_feature 1..22: note = chemically synthesized
  source 1..22: mol_type = other DNA
ttctaaggtttttatggtttta

SEQ ID NO: 80752 - DNA, 22 bp, synthetic construct
  misc_feature 1..22: note = chemically synthesized
  source 1..22: mol_type = other DNA
ctaaggtttttatggttttagg

SEQ ID NO: 80753 - DNA, 22 bp, synthetic construct
  misc_feature 1..22: note = chemically synthesized
  source 1..22: mol_type = other DNA
taaggtttttatggttttaggt

SEQ ID NO: 80754 - DNA, 22 bp, synthetic construct
  misc_feature 1..22: note = chemically synthesized
  source 1..22: mol_type = other DNA
aggtttttatggttttaggtct

SEQ ID NO: 80755 - DNA, 22 bp, synthetic construct
  misc_feature 1..22: note = chemically synthesized
  source 1..22: mol_type = other DNA
ttatggttttaggtctaacatg

SEQ ID NO: 80756 - DNA, 22 bp, synthetic construct
  misc_feature 1..22: note = chemically synthesized
  source 1..22: mol_type = other DNA
tatggttttaggtctaacatgt

SEQ ID NO: 80757 - DNA, 22 bp, synthetic construct
  misc_feature 1..22: note = chemically synthesized
  source 1..22: mol_type = other DNA
atggttttaggtctaacatgta

SEQ ID NO: 80758 - DNA, 22 bp, synthetic construct
  misc_feature 1..22: note = chemically synthesized
  source 1..22: mol_type = other DNA
tggttttaggtctaacatgtaa

SEQ ID NO: 80759 - DNA, 22 bp, synthetic construct
  misc_feature 1..22: note = chemically synthesized
  source 1..22: mol_type = other DNA
taggtctaacatgtaagtcttt

SEQ ID NO: 80760 - DNA, 22 bp, synthetic construct
  misc_feature 1..22: note = chemically synthesized
  source 1..22: mol_type = other DNA
aggtctaacatgtaagtcttta

SEQ ID NO: 80761 - DNA, 22 bp, synthetic construct
  misc_feature 1..22: note = chemically synthesized
  source 1..22: mol_type = other DNA
ggtctaacatgtaagtctttaa

SEQ ID NO: 80762 - DNA, 22 bp, synthetic construct
  misc_feature 1..22: note = chemically synthesized
  source 1..22: mol_type = other DNA
acatgtaagtctttaatccatc

SEQ ID NO: 80763 - DNA, 22 bp, synthetic construct
  misc_feature 1..22: note = chemically synthesized
  source 1..22: mol_type = other DNA
taatccatcttgaaataatttt

SEQ ID NO: 80764 - DNA, 22 bp, synthetic construct
  misc_feature 1..22: note = chemically synthesized
  source 1..22: mol_type = other DNA
aatccatcttgaaataattttt

SEQ ID NO: 80765 - DNA, 22 bp, synthetic construct
  misc_feature 1..22: note = chemically synthesized
  source 1..22: mol_type = other DNA
atccatcttgaaataatttttg

SEQ ID NO: 80766 - DNA, 22 bp, synthetic construct
  misc_feature 1..22: note = chemically synthesized
  source 1..22: mol_type = other DNA
gaaataatttttgtataaggtg

SEQ ID NO: 80767 - DNA, 22 bp, synthetic construct
  misc_feature 1..22: note = chemically synthesized
  source 1..22: mol_type = other DNA
aaataatttttgtataaggtgt

SEQ ID NO: 80768 - DNA, 22 bp, synthetic construct
  misc_feature 1..22: note = chemically synthesized
  source 1..22: mol_type = other DNA
ttgtataaggtgtaaggaaggg

SEQ ID NO: 80769 - DNA, 22 bp, synthetic construct
  misc_feature 1..22: note = chemically synthesized
  source 1..22: mol_type = other DNA
tgtataaggtgtaaggaaggga

SEQ ID NO: 80770 - DNA, 22 bp, synthetic construct
  misc_feature 1..22: note = chemically synthesized
  source 1..22: mol_type = other DNA
gtataaggtgtaaggaagggat

SEQ ID NO: 80771 - DNA, 22 bp, synthetic construct
  misc_feature 1..22: note = chemically synthesized
  source 1..22: mol_type = other DNA
tataaggtgtaaggaagggatc

SEQ ID NO: 80772 - DNA, 22 bp, synthetic construct
  misc_feature 1..22: note = chemically synthesized
  source 1..22: mol_type = other DNA
cagctttctacatatggctagc

SEQ ID NO: 80773 - DNA, 22 bp, synthetic construct
  misc_feature 1..22: note = chemically synthesized
  source 1..22: mol_type = other DNA
agctttctacatatggctagcc

SEQ ID NO: 80774 - DNA, 22 bp, synthetic construct
  misc_feature 1..22: note = chemically synthesized
  source 1..22: mol_type = other DNA
tctacatatggctagccagttt

SEQ ID NO: 80775 - DNA, 22 bp, synthetic construct
  misc_feature 1..22: note = chemically synthesized
  source 1..22: mol_type = other DNA
ctacatatggctagccagtttt

SEQ ID NO: 80776 - DNA, 22 bp, synthetic construct
  misc_feature 1..22: note = chemically synthesized
  source 1..22: mol_type = other DNA
tacatatggctagccagttttc

SEQ ID NO: 80777 - DNA, 22 bp, synthetic construct
  misc_feature 1..22: note = chemically synthesized
  source 1..22: mol_type = other DNA
catatggctagccagttttccc

SEQ ID NO: 80778 - DNA, 22 bp, synthetic construct
  misc_feature 1..22: note = chemically synthesized
  source 1..22: mol_type = other DNA
gccagttttcccagcatcattt

SEQ ID NO: 80779 - DNA, 22 bp, synthetic construct
  misc_feature 1..22: note = chemically synthesized
  source 1..22: mol_type = other DNA
tcccagcatcatttattaaata

SEQ ID NO: 80780 - DNA, 22 bp, synthetic construct
  misc_feature 1..22: note = chemically synthesized
  source 1..22: mol_type = other DNA
cccagcatcatttattaaatag

SEQ ID NO: 80781 - DNA, 22 bp, synthetic construct
  misc_feature 1..22: note = chemically synthesized
  source 1..22: mol_type = other DNA
ccagcatcatttattaaatagg

SEQ ID NO: 80782 - DNA, 22 bp, synthetic construct
  misc_feature 1..22: note = chemically synthesized
  source 1..22: mol_type = other DNA
attaaatagggaatcctttccc

SEQ ID NO: 80783 - DNA, 22 bp, synthetic construct
  misc_feature 1..22: note = chemically synthesized
  source 1..22: mol_type = other DNA
ttaaatagggaatcctttcccc

SEQ ID NO: 80784 - DNA, 22 bp, synthetic construct
  misc_feature 1..22: note = chemically synthesized
  source 1..22: mol_type = other DNA
aatagggaatcctttccccatt

SEQ ID NO: 80785 - DNA, 22 bp, synthetic construct
  misc_feature 1..22: note = chemically synthesized
  source 1..22: mol_type = other DNA
tccccattgcttgtttttgtca

SEQ ID NO: 80786 - DNA, 22 bp, synthetic construct
  misc_feature 1..22: note = chemically synthesized
  source 1..22: mol_type = other DNA
ccccattgcttgtttttgtcag

SEQ ID NO: 80787 - DNA, 22 bp, synthetic construct
  misc_feature 1..22: note = chemically synthesized
  source 1..22: mol_type = other DNA
cccattgcttgtttttgtcagg

SEQ ID NO: 80788 - DNA, 22 bp, synthetic construct
  misc_feature 1..22: note = chemically synthesized
  source 1..22: mol_type = other DNA
cttgtttttgtcaggtttgtca

SEQ ID NO: 80789 - DNA, 22 bp, synthetic construct
  misc_feature 1..22: note = chemically synthesized
  source 1..22: mol_type = other DNA
gtttttgtcaggtttgtcaaag

SEQ ID NO: 80790 - DNA, 22 bp, synthetic construct
  misc_feature 1..22: note = chemically synthesized
  source 1..22: mol_type = other DNA
tttttgtcaggtttgtcaaaga

SEQ ID NO: 80791 - DNA, 22 bp, synthetic construct
  misc_feature 1..22: note = chemically synthesized
  source 1..22: mol_type = other DNA
ttgtcaggtttgtcaaagatca

SEQ ID NO: 80792 - DNA, 22 bp, synthetic construct
  misc_feature 1..22: note = chemically synthesized
  source 1..22: mol_type = other DNA
tgtcaggtttgtcaaagatcag

SEQ ID NO: 80793 - DNA, 22 bp, synthetic construct
  misc_feature 1..22: note = chemically synthesized
  source 1..22: mol_type = other DNA
gtcaggtttgtcaaagatcaga

SEQ ID NO: 80794 - DNA, 22 bp, synthetic construct
  misc_feature 1..22: note = chemically synthesized
  source 1..22: mol_type = other DNA
tcaggtttgtcaaagatcagat

SEQ ID NO: 80795 - DNA, 22 bp, synthetic construct
  misc_feature 1..22: note = chemically synthesized
  source 1..22: mol_type = other DNA
gtcaaagatcagatagttgtgg

SEQ ID NO: 80796 - DNA, 22 bp, synthetic construct
  misc_feature 1..22: note = chemically synthesized
  source 1..22: mol_type = other DNA
tcaaagatcagatagttgtgga

SEQ ID NO: 80797 - DNA, 22 bp, synthetic construct
  misc_feature 1..22: note = chemically synthesized
  source 1..22: mol_type = other DNA
tggatgtgtggtattatttctg

SEQ ID NO: 80798 - DNA, 22 bp, synthetic construct
  misc_feature 1..22: note = chemically synthesized
  source 1..22: mol_type = other DNA
tttctgagagctctgttctgct

SEQ ID NO: 80799 - DNA, 22 bp, synthetic construct
  misc_feature 1..22: note = chemically synthesized
  source 1..22: mol_type = other DNA
ctgagagctctgttctgctcca

SEQ ID NO: 80800 - DNA, 22 bp, synthetic construct
  misc_feature 1..22: note = chemically synthesized
  source 1..22: mol_type = other DNA
tgagagctctgttctgctccat

SEQ ID NO: 80801 - DNA, 22 bp, synthetic construct
  misc_feature 1..22: note = chemically synthesized
  source 1..22: mol_type = other DNA
agagctctgttctgctccattg

SEQ ID NO: 80802 - DNA, 22 bp, synthetic construct
  misc_feature 1..22: note = chemically synthesized
  source 1..22: mol_type = other DNA
tgttctgctccattggtctaca

SEQ ID NO: 80803 - DNA, 22 bp, synthetic construct
  misc_feature 1..22: note = chemically synthesized
  source 1..22: mol_type = other DNA
ttctgctccattggtctacatc

SEQ ID NO: 80804 - DNA, 22 bp, synthetic construct
  misc_feature 1..22: note = chemically synthesized
  source 1..22: mol_type = other DNA
tgctccattggtctacatctct

SEQ ID NO: 80805 - DNA, 22 bp, synthetic construct
  misc_feature 1..22: note = chemically synthesized
  source 1..22: mol_type = other DNA
ctccattggtctacatctctgt

SEQ ID NO: 80806 - DNA, 22 bp, synthetic construct
  misc_feature 1..22: note = chemically synthesized
  source 1..22: mol_type = other DNA
cattggtctacatctctgtttt

SEQ ID NO: 80807 - DNA, 22 bp, synthetic construct
  misc_feature 1..22: note = chemically synthesized
  source 1..22: mol_type = other DNA
gtctacatctctgttttggtac

SEQ ID NO: 80808 - DNA, 22 bp, synthetic construct
  misc_feature 1..22: note = chemically synthesized
  source 1..22: mol_type = other DNA
catctctgttttggtaccagta

SEQ ID NO: 80809 - DNA, 22 bp, synthetic construct
  misc_feature 1..22: note = chemically synthesized
  source 1..22: mol_type = other DNA
tgttttggtaccagtaccatgt

SEQ ID NO: 80810 - DNA, 22 bp, synthetic construct
  misc_feature 1..22: note = chemically synthesized
  source 1..22: mol_type = other DNA
ttttggtaccagtaccatgttg

SEQ ID NO: 80811 - DNA, 22 bp, synthetic construct
  misc_feature 1..22: note = chemically synthesized
  source 1..22: mol_type = other DNA
tggtaccagtaccatgttgttt

SEQ ID NO: 80812 - DNA, 22 bp, synthetic construct
  misc_feature 1..22: note = chemically synthesized
  source 1..22: mol_type = other DNA
ggtaccagtaccatgttgtttt

SEQ ID NO: 80813 - DNA, 22 bp, synthetic construct
  misc_feature 1..22: note = chemically synthesized
  source 1..22: mol_type = other DNA
gtaccagtaccatgttgttttg

SEQ ID NO: 80814 - DNA, 22 bp, synthetic construct
  misc_feature 1..22: note = chemically synthesized
  source 1..22: mol_type = other DNA
ttttggttactgtaccttgtag

SEQ ID NO: 80815 - DNA, 22 bp, synthetic construct
  misc_feature 1..22: note = chemically synthesized
  source 1..22: mol_type = other DNA
tggttactgtaccttgtagtat

SEQ ID NO: 80816 - DNA, 22 bp, synthetic construct
  misc_feature 1..22: note = chemically synthesized
  source 1..22: mol_type = other DNA
ggttactgtaccttgtagtata

SEQ ID NO: 80817 - DNA, 22 bp, synthetic construct
  misc_feature 1..22: note = chemically synthesized
  source 1..22: mol_type = other DNA
gttactgtaccttgtagtatag

SEQ ID NO: 80818 - DNA, 22 bp, synthetic construct
  misc_feature 1..22: note = chemically synthesized
  source 1..22: mol_type = other DNA
ctgtaccttgtagtatagtttg

SEQ ID NO: 80819 - DNA, 22 bp, synthetic construct
  misc_feature 1..22: note = chemically synthesized
  source 1..22: mol_type = other DNA
taccttgtagtatagtttgaag

SEQ ID NO: 80820 - DNA, 22 bp, synthetic construct
  misc_feature 1..22: note = chemically synthesized
  source 1..22: mol_type = other DNA
gtagtatagtttgaagtcaggt

SEQ ID NO: 80821 - DNA, 22 bp, synthetic construct
  misc_feature 1..22: note = chemically synthesized
  source 1..22: mol_type = other DNA
tagtatagtttgaagtcaggta

SEQ ID NO: 80822 - DNA, 22 bp, synthetic construct
  misc_feature 1..22: note = chemically synthesized
  source 1..22: mol_type = other DNA
gaagtcaggtagcatgatgcct

SEQ ID NO: 80823 - DNA, 22 bp, synthetic construct
  misc_feature 1..22: note = chemically synthesized
  source 1..22: mol_type = other DNA
aagtcaggtagcatgatgcctc

SEQ ID NO: 80824 - DNA, 22 bp, synthetic construct
  misc_feature 1..22: note = chemically synthesized
  source 1..22: mol_type = other DNA
tagctttgttcttttggcttag

SEQ ID NO: 80825 - DNA, 22 bp, synthetic construct
  misc_feature 1..22: note = chemically synthesized
  source 1..22: mol_type = other DNA
gctttgttcttttggcttagga

SEQ ID NO: 80826 - DNA, 22 bp, synthetic construct
  misc_feature 1..22: note = chemically synthesized
  source 1..22: mol_type = other DNA
tgttcttttggcttaggattga

SEQ ID NO: 80827 - DNA, 22 bp, synthetic construct
  misc_feature 1..22: note = chemically synthesized
  source 1..22: mol_type = other DNA
gttcttttggcttaggattgac

SEQ ID NO: 80828 - DNA, 22 bp, synthetic construct
  misc_feature 1..22: note = chemically synthesized
  source 1..22: mol_type = other DNA
ttcttttggcttaggattgact

SEQ ID NO: 80829 - DNA, 22 bp, synthetic construct
  misc_feature 1..22: note = chemically synthesized
  source 1..22: mol_type = other DNA
ttttggcttaggattgacttgt

SEQ ID NO: 80830 - DNA, 22 bp, synthetic construct
  misc_feature 1..22: note = chemically synthesized
  source 1..22: mol_type = other DNA
ttggcttaggattgacttgtca

SEQ ID NO: 80831 - DNA, 22 bp, synthetic construct
  misc_feature 1..22: note = chemically synthesized
  source 1..22: mol_type = other DNA
tggcttaggattgacttgtcaa

SEQ ID NO: 80832 - DNA, 22 bp, synthetic construct
  misc_feature 1..22: note = chemically synthesized
  source 1..22: mol_type = other DNA
ggcttaggattgacttgtcaat

SEQ ID NO: 80833 - DNA, 22 bp, synthetic construct
  misc_feature 1..22: note = chemically synthesized
  source 1..22: mol_type = other DNA
gcttaggattgacttgtcaatg

SEQ ID NO: 80834 - DNA, 22 bp, synthetic construct
  misc_feature 1..22: note = chemically synthesized
  source 1..22: mol_type = other DNA
aggattgacttgtcaatgcggg

SEQ ID NO: 80835 - DNA, 22 bp, synthetic construct
  misc_feature 1..22: note = chemically synthesized
  source 1..22: mol_type = other DNA
ggattgacttgtcaatgcgggc

SEQ ID NO: 80836 - DNA, 22 bp, synthetic construct
  misc_feature 1..22: note = chemically synthesized
  source 1..22: mol_type = other DNA
acttgtcaatgcgggctctttt

SEQ ID NO: 80837 - DNA, 22 bp, synthetic construct
  misc_feature 1..22: note = chemically synthesized
  source 1..22: mol_type = other DNA
gtcaatgcgggctcttttttgg

SEQ ID NO: 80838 - DNA, 22 bp, synthetic construct
  misc_feature 1..22: note = chemically synthesized
  source 1..22: mol_type = other DNA
tcaatgcgggctcttttttggt

SEQ ID NO: 80839 - DNA, 22 bp, synthetic construct
  misc_feature 1..22: note = chemically synthesized
  source 1..22: mol_type = other DNA
ttttttggttccatatgaactt

SEQ ID NO: 80840 - DNA, 22 bp, synthetic construct
  misc_feature 1..22: note = chemically synthesized
  source 1..22: mol_type = other DNA
ttttggttccatatgaacttta

SEQ ID NO: 80841 - DNA, 22 bp, synthetic construct
  misc_feature 1..22: note = chemically synthesized
  source 1..22: mol_type = other DNA
tttggttccatatgaactttaa

SEQ ID NO: 80842 - DNA, 22 bp, synthetic construct
  misc_feature 1..22: note = chemically synthesized
  source 1..22: mol_type = other DNA
ttggttccatatgaactttaaa

SEQ ID NO: 80843 - DNA, 22 bp, synthetic construct
  misc_feature 1..22: note = chemically synthesized
  source 1..22: mol_type = other DNA
tggttccatatgaactttaaag

SEQ ID NO: 80844 - DNA, 22 bp, synthetic construct
  misc_feature 1..22: note = chemically synthesized
  source 1..22: mol_type = other DNA
ggttccatatgaactttaaagt

SEQ ID NO: 80845 - DNA, 22 bp, synthetic construct
  misc_feature 1..22: note = chemically synthesized
  source 1..22: mol_type = other DNA
gttccatatgaactttaaagta

SEQ ID NO: 80846 - DNA, 22 bp, synthetic construct
  misc_feature 1..22: note = chemically synthesized
  source 1..22: mol_type = other DNA
catatgaactttaaagtagttt

SEQ ID NO: 80847 - DNA, 22 bp, synthetic construct
  misc_feature 1..22: note = chemically synthesized
  source 1..22: mol_type = other DNA
taaagtagttttttccaattct

SEQ ID NO: 80848 - DNA, 22 bp, synthetic construct
  misc_feature 1..22: note = chemically synthesized
  source 1..22: mol_type = other DNA
aaagtagttttttccaattctg

SEQ ID NO: 80849 - DNA, 22 bp, synthetic construct
  misc_feature 1..22: note = chemically synthesized
  source 1..22: mol_type = other DNA
aagtagttttttccaattctgt

SEQ ID NO: 80850 - DNA, 22 bp, synthetic construct
  misc_feature 1..22: note = chemically synthesized
  source 1..22: mol_type = other DNA
tttccaattctgtgaagaaagt

SEQ ID NO: 80851 - DNA, 22 bp, synthetic construct
  misc_feature 1..22: note = chemically synthesized
  source 1..22: mol_type = other DNA
ttccaattctgtgaagaaagtc

SEQ ID NO: 80852 - DNA, 22 bp, synthetic construct
  misc_feature 1..22: note = chemically synthesized
  source 1..22: mol_type = other DNA
tccaattctgtgaagaaagtca

SEQ ID NO: 80853 - DNA, 22 bp, synthetic construct
  misc_feature 1..22: note = chemically synthesized
  source 1..22: mol_type = other DNA
ccaattctgtgaagaaagtcat

SEQ ID NO: 80854 - DNA, 22 bp, synthetic construct
  misc_feature 1..22: note = chemically synthesized
  source 1..22: mol_type = other DNA
caattctgtgaagaaagtcatt

SEQ ID NO: 80855 - DNA, 22 bp, synthetic construct
  misc_feature 1..22: note = chemically synthesized
  source 1..22: mol_type = other DNA
tgtgaagaaagtcattggtagc

SEQ ID NO: 80856 - DNA, 22 bp, synthetic construct
  misc_feature 1..22: note = chemically synthesized
  source 1..22: mol_type = other DNA
tgaagaaagtcattggtagctt

SEQ ID NO: 80857 - DNA, 22 bp, synthetic construct
  misc_feature 1..22: note = chemically synthesized
  source 1..22: mol_type = other DNA
gtagcttgatggggatggcatt

SEQ ID NO: 80858 - DNA, 22 bp, synthetic construct
  misc_feature 1..22: note = chemically synthesized
  source 1..22: mol_type = other DNA
gatggggatggcattgaatcta

SEQ ID NO: 80859 - DNA, 22 bp, synthetic construct
  misc_feature 1..22: note = chemically synthesized
  source 1..22: mol_type = other DNA
atggggatggcattgaatctat

SEQ ID NO: 80860 - DNA, 22 bp, synthetic construct
  misc_feature 1..22: note = chemically synthesized
  source 1..22: mol_type = other DNA
aatctataaattaccttgggca

SEQ ID NO: 80861 - DNA, 22 bp, synthetic construct
  misc_feature 1..22: note = chemically synthesized
  source 1..22: mol_type = other DNA
taaattaccttgggcagtaagg

SEQ ID NO: 80862 - DNA, 22 bp, synthetic construct
  misc_feature 1..22: note = chemically synthesized
  source 1..22: mol_type = other DNA
ccttgggcagtaaggccatttt

SEQ ID NO: 80863 - DNA, 22 bp, synthetic construct
  misc_feature 1..22: note = chemically synthesized
  source 1..22: mol_type = other DNA
gggcagtaaggccattttcacg

SEQ ID NO: 80864 - DNA, 22 bp, synthetic construct
  misc_feature 1..22: note = chemically synthesized
  source 1..22: mol_type = other DNA
ggcagtaaggccattttcacga

SEQ ID NO: 80865 - DNA, 22 bp, synthetic construct
  misc_feature 1..22: note = chemically synthesized
  source 1..22: mol_type = other DNA
tcacgatattgattcttcctat

SEQ ID NO: 80866 - DNA, 22 bp, synthetic construct
  misc_feature 1..22: note = chemically synthesized
  source 1..22: mol_type = other DNA
cacgatattgattcttcctatc

SEQ ID NO: 80867 - DNA, 22 bp, synthetic construct
  misc_feature 1..22: note = chemically synthesized
  source 1..22: mol_type = other DNA
acgatattgattcttcctatcc

SEQ ID NO: 80868 - DNA, 22 bp, synthetic construct
  misc_feature 1..22: note = chemically synthesized
  source 1..22: mol_type = other DNA
attcttcctatccatgagcatg

SEQ ID NO: 80869 - DNA, 22 bp, synthetic construct
  misc_feature 1..22: note = chemically synthesized
  source 1..22: mol_type = other DNA
ttcctatccatgagcatggaat

SEQ ID NO: 80870 - DNA, 22 bp, synthetic construct
  misc_feature 1..22: note = chemically synthesized
  source 1..22: mol_type = other DNA
cctatccatgagcatggaatgt

SEQ ID NO: 80871 - DNA, 22 bp, synthetic construct
  misc_feature 1..22: note = chemically synthesized
  source 1..22: mol_type = other DNA
ctatccatgagcatggaatgtt

SEQ ID NO: 80872 - DNA, 22 bp, synthetic construct
  misc_feature 1..22: note = chemically synthesized
  source 1..22: mol_type = other DNA
tccatgagcatggaatgttctt

SEQ ID NO: 80873 - DNA, 22 bp, synthetic construct
  misc_feature 1..22: note = chemically synthesized
  source 1..22: mol_type = other DNA
ttccatttgtttgtatcctctt

SEQ ID NO: 80874 - DNA, 22 bp, synthetic construct
  misc_feature 1..22: note = chemically synthesized
  source 1..22: mol_type = other DNA
ccatttgtttgtatcctctttt

SEQ ID NO: 80875 - DNA, 22 bp, synthetic construct
  misc_feature 1..22: note = chemically synthesized
  source 1..22: mol_type = other DNA
catttgtttgtatcctctttta

SEQ ID NO: 80876 - DNA, 22 bp, synthetic construct
  misc_feature 1..22: note = chemically synthesized
  source 1..22: mol_type = other DNA
gtttgtatcctcttttatttcg

SEQ ID NO: 80877 - DNA, 22 bp, synthetic construct
  misc_feature 1..22: note = chemically synthesized
  source 1..22: mol_type = other DNA
tttgtatcctcttttatttcgt

SEQ ID NO: 80878 - DNA, 22 bp, synthetic construct
  misc_feature 1..22: note = chemically synthesized
  source 1..22: mol_type = other DNA
gtatcctcttttatttcgttga

SEQ ID NO: 80879 - DNA, 22 bp, synthetic construct
  misc_feature 1..22: note = chemically synthesized
  source 1..22: mol_type = other DNA
tatcctcttttatttcgttgag

SEQ ID NO: 80880 - DNA, 22 bp, synthetic construct
  misc_feature 1..22: note = chemically synthesized
  source 1..22: mol_type = other DNA
ttttatttcgttgagcagtgtt

SEQ ID NO: 80881 - DNA, 22 bp, synthetic construct
  misc_feature 1..22: note = chemically synthesized
  source 1..22: mol_type = other DNA
ttatttcgttgagcagtgtttt

SEQ ID NO: 80882 - DNA, 22 bp, synthetic construct
  misc_feature 1..22: note = chemically synthesized
  source 1..22: mol_type = other DNA
tatttcgttgagcagtgttttg

SEQ ID NO: 80883 - DNA, 22 bp, synthetic construct
  misc_feature 1..22: note = chemically synthesized
  source 1..22: mol_type = other DNA
atttcgttgagcagtgttttgt

SEQ ID NO: 80884 - DNA, 22 bp, synthetic construct
  misc_feature 1..22: note = chemically synthesized
  source 1..22: mol_type = other DNA
tttcgttgagcagtgttttgtt

SEQ ID NO: 80885 - DNA, 22 bp, synthetic construct
  misc_feature 1..22: note = chemically synthesized
  source 1..22: mol_type = other DNA
cgttgagcagtgttttgttgtt

SEQ ID NO: 80886 - DNA, 22 bp, synthetic construct
  misc_feature 1..22: note = chemically synthesized
  source 1..22: mol_type = other DNA
gttgagcagtgttttgttgttc

SEQ ID NO: 80887 - DNA, 22 bp, synthetic construct
  misc_feature 1..22: note = chemically synthesized
  source 1..22: mol_type = other DNA
agcagtgttttgttgttctcct

SEQ ID NO: 80888 - DNA, 22 bp, synthetic construct
  misc_feature 1..22: note = chemically synthesized
  source 1..22: mol_type = other DNA
tgttgttctccttgaagaggtc

SEQ ID NO: 80889 - DNA, 22 bp, synthetic construct
  misc_feature 1..22: note = chemically synthesized
  source 1..22: mol_type = other DNA
gttgttctccttgaagaggtcc

SEQ ID NO: 80890 - DNA, 22 bp, synthetic construct
  misc_feature 1..22: note = chemically synthesized
  source 1..22: mol_type = other DNA
ttgttctccttgaagaggtcct

SEQ ID NO: 80891 - DNA, 22 bp, synthetic construct
  misc_feature 1..22: note = chemically synthesized
  source 1..22: mol_type = other DNA
ttctccttgaagaggtccttca

SEQ ID NO: 80892 - DNA, 22 bp, synthetic construct
  misc_feature 1..22: note = chemically synthesized
  source 1..22: mol_type = other DNA
tccttgaagaggtccttcacat

SEQ ID NO: 80893 - DNA, 22 bp, synthetic construct
  misc_feature 1..22: note = chemically synthesized
  source 1..22: mol_type = other DNA
cttgaagaggtccttcacatcc

SEQ ID NO: 80894 - DNA, 22 bp, synthetic construct
  misc_feature 1..22: note = chemically synthesized
  source 1..22: mol_type = other DNA
gaagaggtccttcacatccctt

SEQ ID NO: 80895 - DNA, 22 bp, synthetic construct
  misc_feature 1..22: note = chemically synthesized
  source 1..22: mol_type = other DNA
aagaggtccttcacatcccttg

SEQ ID NO: 80896 - DNA, 22 bp, synthetic construct
  misc_feature 1..22: note = chemically synthesized
  source 1..22: mol_type = other DNA
cacatcccttgtaagttggatt

SEQ ID NO: 80897 - DNA, 22 bp, synthetic construct
  misc_feature 1..22: note = chemically synthesized
  source 1..22: mol_type = other DNA
acatcccttgtaagttggattc

SEQ ID NO: 80898 - DNA, 22 bp, synthetic construct
  misc_feature 1..22: note = chemically synthesized
  source 1..22: mol_type = other DNA
gtaagttggattcctaggtatt

SEQ ID NO: 80899 - DNA, 22 bp, synthetic construct
  misc_feature 1..22: note = chemically synthesized
  source 1..22: mol_type = other DNA
taagttggattcctaggtattt

SEQ ID NO: 80900 - DNA, 22 bp, synthetic construct
  misc_feature 1..22: note = chemically synthesized
  source 1..22: mol_type = other DNA
gattcctaggtattttattctc

SEQ ID NO: 80901 - DNA, 22 bp, synthetic construct
  misc_feature 1..22: note = chemically synthesized
  source 1..22: mol_type = other DNA
ctaggtattttattctctttga

SEQ ID NO: 80902 - DNA, 22 bp, synthetic construct
  misc_feature 1..22: note = chemically synthesized
  source 1..22: mol_type = other DNA
ggtattttattctctttgaggc

SEQ ID NO: 80903 - DNA, 22 bp, synthetic construct
  misc_feature 1..22: note = chemically synthesized
  source 1..22: mol_type = other DNA
tattctctttgaggcaattgtg

SEQ ID NO: 80904 - DNA, 22 bp, synthetic construct
  misc_feature 1..22: note = chemically synthesized
  source 1..22: mol_type = other DNA
attctctttgaggcaattgtga

SEQ ID NO: 80905 - DNA, 22 bp, synthetic construct
  misc_feature 1..22: note = chemically synthesized
  source 1..22: mol_type = other DNA
ttctctttgaggcaattgtgaa

SEQ ID NO: 80906 - DNA, 22 bp, synthetic construct
  misc_feature 1..22: note = chemically synthesized
  source 1..22: mol_type = other DNA
tctttgaggcaattgtgaatgg

SEQ ID NO: 80907 - DNA, 22 bp, synthetic construct
  misc_feature 1..22: note = chemically synthesized
  source 1..22: mol_type = other DNA
tttgaggcaattgtgaatggga

SEQ ID NO: 80908 - DNA, 22 bp, synthetic construct
  misc_feature 1..22: note = chemically synthesized
  source 1..22: mol_type = other DNA
tgaggcaattgtgaatgggagt

SEQ ID NO: 80909 - DNA, 22 bp, synthetic construct
  misc_feature 1..22: note = chemically synthesized
  source 1..22: mol_type = other DNA
gaggcaattgtgaatgggagtt

SEQ ID NO: 80910 - DNA, 22 bp, synthetic construct
  misc_feature 1..22: note = chemically synthesized
  source 1..22: mol_type = other DNA
aggcaattgtgaatgggagttc

SEQ ID NO: 80911 - DNA, 22 bp, synthetic construct
  misc_feature 1..22: note = chemically synthesized
  source 1..22: mol_type = other DNA
tgaatgggagttcactcatgat

SEQ ID NO: 80912 - DNA, 22 bp, synthetic construct
  misc_feature 1..22: note = chemically synthesized
  source 1..22: mol_type = other DNA
actcatgatttggctctctgtt

SEQ ID NO: 80913 - DNA, 22 bp, synthetic construct
  misc_feature 1..22: note = chemically synthesized
  source 1..22: mol_type = other DNA
atgatttggctctctgtttgtc

SEQ ID NO: 80914 - DNA, 22 bp, synthetic construct
  misc_feature 1..22: note = chemically synthesized
  source 1..22: mol_type = other DNA
ggctctctgtttgtctgttatt

SEQ ID NO: 80915 - DNA, 22 bp, synthetic construct
  misc_feature 1..22: note = chemically synthesized
  source 1..22: mol_type = other DNA
gctctctgtttgtctgttattg

SEQ ID NO: 80916 - DNA, 22 bp, synthetic construct
  misc_feature 1..22: note = chemically synthesized
  source 1..22: mol_type = other DNA
tctgtttgtctgttattggtgt

SEQ ID NO: 80917 - DNA, 22 bp, synthetic construct
  misc_feature 1..22: note = chemically synthesized
  source 1..22: mol_type = other DNA
tgtttgtctgttattggtgtat

SEQ ID NO: 80918 - DNA, 22 bp, synthetic construct
  misc_feature 1..22: note = chemically synthesized
  source 1..22: mol_type = other DNA
tttgtctgttattggtgtatag

SEQ ID NO: 80919 - DNA, 22 bp, synthetic construct
  misc_feature 1..22: note = chemically synthesized
  source 1..22: mol_type = other DNA
gtctgttattggtgtataggaa

SEQ ID NO: 80920 - DNA, 22 bp, synthetic construct
  misc_feature 1..22: note = chemically synthesized
  source 1..22: mol_type = other DNA
tctgttattggtgtataggaat

SEQ ID NO: 80921 - DNA, 22 bp, synthetic construct
  misc_feature 1..22: note = chemically synthesized
  source 1..22: mol_type = other DNA
ttattggtgtataggaatgctt

SEQ ID NO: 80922 - DNA, 22 bp, synthetic construct
  misc_feature 1..22: note = chemically synthesized
  source 1..22: mol_type = other DNA
ttggtgtataggaatgcttgtg

SEQ ID NO: 80923 - DNA, 22 bp, synthetic construct
  misc_feature 1..22: note = chemically synthesized
  source 1..22: mol_type = other DNA
gtgtataggaatgcttgtgatt

SEQ ID NO: 80924 - DNA, 22 bp, synthetic construct
  misc_feature 1..22: note = chemically synthesized
  source 1..22: mol_type = other DNA
gtgatttttgcacattgatttt

SEQ ID NO: 80925 - DNA, 22 bp, synthetic construct
  misc_feature 1..22: note = chemically synthesized
  source 1..22: mol_type = other DNA
tgatttttgcacattgattttg

SEQ ID NO: 80926 - DNA, 22 bp, synthetic construct
  misc_feature 1..22: note = chemically synthesized
  source 1..22: mol_type = other DNA
ttgcacattgattttgtatgct

SEQ ID NO: 80927 - DNA, 22 bp, synthetic construct
  misc_feature 1..22: note = chemically synthesized
  source 1..22: mol_type = other DNA
tgcacattgattttgtatgctg

SEQ ID NO: 80928 - DNA, 22 bp, synthetic construct
  misc_feature 1..22: note = chemically synthesized
  source 1..22: mol_type = other DNA
gcacattgattttgtatgctga

SEQ ID NO: 80929 - DNA, 22 bp, synthetic construct
  misc_feature 1..22: note = chemically synthesized
  source 1..22: mol_type = other DNA
cacattgattttgtatgctgag

SEQ ID NO: 80930 - DNA, 22 bp, synthetic construct
  misc_feature 1..22: note = chemically synthesized
  source 1..22: mol_type = other DNA
attttgtatgctgagacttttc

SEQ ID NO: 80931 - DNA, 22 bp, synthetic construct
  misc_feature 1..22: note = chemically synthesized
  source 1..22: mol_type = other DNA
tgtatgctgagacttttctgaa

SEQ ID NO: 80932 - DNA, 22 bp, synthetic construct
  misc_feature 1..22: note = chemically synthesized
  source 1..22: mol_type = other DNA
gtatgctgagacttttctgaag

SEQ ID NO: 80933 - DNA, 22 bp, synthetic construct
  misc_feature 1..22: note = chemically synthesized
  source 1..22: mol_type = other DNA
tatgctgagacttttctgaagt

SEQ ID NO: 80934 - DNA, 22 bp, synthetic construct
  misc_feature 1..22: note = chemically synthesized
  source 1..22: mol_type = other DNA
agacttttctgaagttgcttat

SEQ ID NO: 80935 - DNA, 22 bp, synthetic construct
  misc_feature 1..22: note = chemically synthesized
  source 1..22: mol_type = other DNA
ttctgaagttgcttatcagctt

SEQ ID NO: 80936 - DNA, 22 bp, synthetic construct
  misc_feature 1..22: note = chemically synthesized
  source 1..22: mol_type = other DNA
tctgaagttgcttatcagctta

SEQ ID NO: 80937 - DNA, 22 bp, synthetic construct
  misc_feature 1..22: note = chemically synthesized
  source 1..22: mol_type = other DNA
ctgaagttgcttatcagcttaa

SEQ ID NO: 80938 - DNA, 22 bp, synthetic construct
  misc_feature 1..22: note = chemically synthesized
  source 1..22: mol_type = other DNA
tgaagttgcttatcagcttaag

SEQ ID NO: 80939 - DNA, 22 bp, synthetic construct
  misc_feature 1..22: note = chemically synthesized
  source 1..22: mol_type = other DNA
aagttgcttatcagcttaagga

SEQ ID NO: 80940 - DNA, 22 bp, synthetic construct
  misc_feature 1..22: note = chemically synthesized
  source 1..22: mol_type = other DNA
cttatcagcttaaggagatttt

SEQ ID NO: 80941 - DNA, 22 bp, synthetic construct
  misc_feature 1..22: note = chemically synthesized
  source 1..22: mol_type = other DNA
atcagcttaaggagattttggg

SEQ ID NO: 80942 - DNA, 22 bp, synthetic construct
  misc_feature 1..22: note = chemically synthesized
  source 1..22: mol_type = other DNA
tcagcttaaggagattttgggc

SEQ ID NO: 80943 - DNA, 22 bp, synthetic construct
  misc_feature 1..22: note = chemically synthesized
  source 1..22: mol_type = other DNA
aaggagattttgggctgagacg

SEQ ID NO: 80944 - DNA, 22 bp, synthetic construct
  misc_feature 1..22: note = chemically synthesized
  source 1..22: mol_type = other DNA
aggagattttgggctgagacga

SEQ ID NO: 80945 - DNA, 22 bp, synthetic construct
  misc_feature 1..22: note = chemically synthesized
  source 1..22: mol_type = other DNA
tgggctgagacgatggggtttt

SEQ ID NO: 80946 - DNA, 22 bp, synthetic construct
  misc_feature 1..22: note = chemically synthesized
  source 1..22: mol_type = other DNA
gggctgagacgatggggttttc

SEQ ID NO: 80947 - DNA, 22 bp, synthetic construct
  misc_feature 1..22: note = chemically synthesized
  source 1..22: mol_type = other DNA
ggctgagacgatggggttttct

SEQ ID NO: 80948 - DNA, 22 bp, synthetic construct
  misc_feature 1..22: note = chemically synthesized
  source 1..22: mol_type = other DNA
agacgatggggttttctagata

SEQ ID NO: 80949 - DNA, 22 bp, synthetic construct
  misc_feature 1..22: note = chemically synthesized
  source 1..22: mol_type = other DNA
tctagatatacaatcacgtcat

SEQ ID NO: 80950 - DNA, 22 bp, synthetic construct
  misc_feature 1..22: note = chemically synthesized
  source 1..22: mol_type = other DNA
ctagatatacaatcacgtcatc

SEQ ID NO: 80951 - DNA, 22 bp, synthetic construct
  misc_feature 1..22: note = chemically synthesized
  source 1..22: mol_type = other DNA
tagatatacaatcacgtcatct

SEQ ID NO: 80952 - DNA, 22 bp, synthetic construct
  misc_feature 1..22: note = chemically synthesized
  source 1..22: mol_type = other DNA
gatatacaatcacgtcatctgc

SEQ ID NO: 80953 - DNA, 22 bp, synthetic construct
  misc_feature 1..22: note = chemically synthesized
  source 1..22: mol_type = other DNA
caaacagggacaatttcacttc

SEQ ID NO: 80954 - DNA, 22 bp, synthetic construct
  misc_feature 1..22: note = chemically synthesized
  source 1..22: mol_type = other DNA
cacttcctcttttcctaattga

SEQ ID NO: 80955 - DNA, 22 bp, synthetic construct
  misc_feature 1..22: note = chemically synthesized
  source 1..22: mol_type = other DNA
acttcctcttttcctaattgaa

SEQ ID NO: 80956 - DNA, 22 bp, synthetic construct
  misc_feature 1..22: note = chemically synthesized
  source 1..22: mol_type = other DNA
cctcttttcctaattgaatgcc

SEQ ID NO: 80957 - DNA, 22 bp, synthetic construct
  misc_feature 1..22: note = chemically synthesized
  source 1..22: mol_type = other DNA
ctcttttcctaattgaatgccc

SEQ ID NO: 80958 - DNA, 22 bp, synthetic construct
  misc_feature 1..22: note = chemically synthesized
  source 1..22: mol_type = other DNA
ttttcctaattgaatgcccttt

SEQ ID NO: 80959 - DNA, 22 bp, synthetic construct
  misc_feature 1..22: note = chemically synthesized
  source 1..22: mol_type = other DNA
ttcctaattgaatgccctttat

SEQ ID NO: 80960 - DNA, 22 bp, synthetic construct
  misc_feature 1..22: note = chemically synthesized
  source 1..22: mol_type = other DNA
tcctaattgaatgccctttatt

SEQ ID NO: 80961 - DNA, 22 bp, synthetic construct
  misc_feature 1..22: note = chemically synthesized
  source 1..22: mol_type = other DNA
cctaattgaatgccctttattt

SEQ ID NO: 80962 - DNA, 22 bp, synthetic construct
  misc_feature 1..22: note = chemically synthesized
  source 1..22: mol_type = other DNA
ctaattgaatgccctttatttc

SEQ ID NO: 80963 - DNA, 22 bp, synthetic construct
  misc_feature 1..22: note = chemically synthesized
  source 1..22: mol_type = other DNA
attgaatgccctttatttcttt

SEQ ID NO: 80964 - DNA, 22 bp, synthetic construct
  misc_feature 1..22: note = chemically synthesized
  source 1..22: mol_type = other DNA
aatgccctttatttctttctct

SEQ ID NO: 80965 - DNA, 22 bp, synthetic construct
  misc_feature 1..22: note = chemically synthesized
  source 1..22: mol_type = other DNA
tatttctttctcttgcctgatt

SEQ ID NO: 80966 - DNA, 22 bp, synthetic construct
  misc_feature 1..22: note = chemically synthesized
  source 1..22: mol_type = other DNA
atttctttctcttgcctgattg

SEQ ID NO: 80967 - DNA, 22 bp, synthetic construct
  misc_feature 1..22: note = chemically synthesized
  source 1..22: mol_type = other DNA
tttctttctcttgcctgattgc

SEQ ID NO: 80968 - DNA, 22 bp, synthetic construct
  misc_feature 1..22: note = chemically synthesized
  source 1..22: mol_type = other DNA
ctttctcttgcctgattgccct

SEQ ID NO: 80969 - DNA, 22 bp, synthetic construct
  misc_feature 1..22: note = chemically synthesized
  source 1..22: mol_type = other DNA
tttctcttgcctgattgccctg

SEQ ID NO: 80970 - DNA, 22 bp, synthetic construct
  misc_feature 1..22: note = chemically synthesized
  source 1..22: mol_type = other DNA
tctcttgcctgattgccctggc

SEQ ID NO: 80971 - DNA, 22 bp, synthetic construct
  misc_feature 1..22: note = chemically synthesized
  source 1..22: mol_type = other DNA
ctcttgcctgattgccctggcc

SEQ ID NO: 80972 - DNA, 22 bp, synthetic construct
  misc_feature 1..22: note = chemically synthesized
  source 1..22: mol_type = other DNA
tcttgcctgattgccctggcca

SEQ ID NO: 80973 - DNA, 22 bp, synthetic construct
  misc_feature 1..22: note = chemically synthesized
  source 1..22: mol_type = other DNA
ttgcctgattgccctggccaga

SEQ ID NO: 80974 - DNA, 22 bp, synthetic construct
  misc_feature 1..22: note = chemically synthesized
  source 1..22: mol_type = other DNA
gcctgattgccctggccagaac

SEQ ID NO: 80975 - DNA, 22 bp, synthetic construct
  misc_feature 1..22: note = chemically synthesized
  source 1..22: mol_type = other DNA
cctgattgccctggccagaact

SEQ ID NO: 80976 - DNA, 22 bp, synthetic construct
  misc_feature 1..22: note = chemically synthesized
  source 1..22: mol_type = other DNA
attgccctggccagaacttcca

SEQ ID NO: 80977 - DNA, 22 bp, synthetic construct
  misc_feature 1..22: note = chemically synthesized
  source 1..22: mol_type = other DNA
ccctggccagaacttccaacac

SEQ ID NO: 80978 - DNA, 22 bp, synthetic construct
  misc_feature 1..22: note = chemically synthesized
  source 1..22: mol_type = other DNA
gccagaacttccaacactatgt

SEQ ID NO: 80979 - DNA, 22 bp, synthetic construct
  misc_feature 1..22: note = chemically synthesized
  source 1..22: mol_type = other DNA
ccaacactatgttgaataggag

SEQ ID NO: 80980 - DNA, 22 bp, synthetic construct
  misc_feature 1..22: note = chemically synthesized
  source 1..22: mol_type = other DNA
caacactatgttgaataggagt

SEQ ID NO: 80981 - DNA, 22 bp, synthetic construct
  misc_feature 1..22: note = chemically synthesized
  source 1..22: mol_type = other DNA
tgttgaataggagtggtgagag

SEQ ID NO: 80982 - DNA, 22 bp, synthetic construct
  misc_feature 1..22: note = chemically synthesized
  source 1..22: mol_type = other DNA
aataggagtggtgagagagggc

SEQ ID NO: 80983 - DNA, 22 bp, synthetic construct
  misc_feature 1..22: note = chemically synthesized
  source 1..22: mol_type = other DNA
tcttgtgccagttttcaaaggg

SEQ ID NO: 80984 - DNA, 22 bp, synthetic construct
  misc_feature 1..22: note = chemically synthesized
  source 1..22: mol_type = other DNA
gtgccagttttcaaagggaatg

SEQ ID NO: 80985 - DNA, 22 bp, synthetic construct
  misc_feature 1..22: note = chemically synthesized
  source 1..22: mol_type = other DNA
tgccagttttcaaagggaatgc

SEQ ID NO: 80986 - DNA, 22 bp, synthetic construct
  misc_feature 1..22: note = chemically synthesized
  source 1..22: mol_type = other DNA
tcaaagggaatgcttccagttt

SEQ ID NO: 80987 - DNA, 22 bp, synthetic construct
  misc_feature 1..22: note = chemically synthesized
  source 1..22: mol_type = other DNA
caaagggaatgcttccagtttt

SEQ ID NO: 80988 - DNA, 22 bp, synthetic construct
  misc_feature 1..22: note = chemically synthesized
  source 1..22: mol_type = other DNA
aaagggaatgcttccagttttt

SEQ ID NO: 80989 - DNA, 22 bp, synthetic construct
  misc_feature 1..22: note = chemically synthesized
  source 1..22: mol_type = other DNA
ccagtttttgtccattcagtat

SEQ ID NO: 80990 - DNA, 22 bp, synthetic construct
  misc_feature 1..22: note = chemically synthesized
  source 1..22: mol_type = other DNA
cagtttttgtccattcagtatg

SEQ ID NO: 80991 - DNA, 22 bp, synthetic construct
  misc_feature 1..22: note = chemically synthesized
  source 1..22: mol_type = other DNA
ttgtccattcagtatgatattg

SEQ ID NO: 80992 - DNA, 22 bp, synthetic construct
  misc_feature 1..22: note = chemically synthesized
  source 1..22: mol_type = other DNA
tgtccattcagtatgatattgg

SEQ ID NO: 80993 - DNA, 22 bp, synthetic construct
  misc_feature 1..22: note = chemically synthesized
  source 1..22: mol_type = other DNA
gtccattcagtatgatattggc

SEQ ID NO: 80994 - DNA, 22 bp, synthetic construct
  misc_feature 1..22: note = chemically synthesized
  source 1..22: mol_type = other DNA
tccattcagtatgatattggct

SEQ ID NO: 80995 - DNA, 22 bp, synthetic construct
  misc_feature 1..22: note = chemically synthesized
  source 1..22: mol_type = other DNA
agtatgatattggctgtgggtt

SEQ ID NO: 80996 - DNA, 22 bp, synthetic construct
  misc_feature 1..22: note = chemically synthesized
  source 1..22: mol_type = other DNA
gctgtgggtttgtcatagatag

SEQ ID NO: 80997 - DNA, 22 bp, synthetic construct
  misc_feature 1..22: note = chemically synthesized
  source 1..22: mol_type = other DNA
tgggtttgtcatagatagctct

SEQ ID NO: 80998 - DNA, 22 bp, synthetic construct
  misc_feature 1..22: note = chemically synthesized
  source 1..22: mol_type = other DNA
gtcatagatagctcttattatt

SEQ ID NO: 80999 - DNA, 22 bp, synthetic construct
  misc_feature 1..22: note = chemically synthesized
  source 1..22: mol_type = other DNA
tcatagatagctcttattattt

SEQ ID NO: 81000 - DNA, 22 bp, synthetic construct
  misc_feature 1..22: note = chemically synthesized
  source 1..22: mol_type = other DNA
ttattattttgagatatgtccc

SEQ ID NO: 81001 - DNA, 22 bp, synthetic construct
  misc_feature 1..22: note = chemically synthesized
  source 1..22: mol_type = other DNA
attattttgagatatgtcccat

SEQ ID NO: 81002 - DNA, 22 bp, synthetic construct
  misc_feature 1..22: note = chemically synthesized
  source 1..22: mol_type = other DNA
ttattttgagatatgtcccatc

SEQ ID NO: 81003 - DNA, 22 bp, synthetic construct
  misc_feature 1..22: note = chemically synthesized
  source 1..22: mol_type = other DNA
ttttgagatatgtcccatcgat

SEQ ID NO: 81004 - DNA, 22 bp, synthetic construct
  misc_feature 1..22: note = chemically synthesized
  source 1..22: mol_type = other DNA
tgagatatgtcccatcgatacc

SEQ ID NO: 81005 - DNA, 22 bp, synthetic construct
  misc_feature 1..22: note = chemically synthesized
  source 1..22: mol_type = other DNA
gagatatgtcccatcgatacct

SEQ ID NO: 81006 - DNA, 22 bp, synthetic construct
  misc_feature 1..22: note = chemically synthesized
  source 1..22: mol_type = other DNA
agatatgtcccatcgataccta

SEQ ID NO: 81007 - DNA, 22 bp, synthetic construct
  misc_feature 1..22: note = chemically synthesized
  source 1..22: mol_type = other DNA
atttattgagagtttttagtat

SEQ ID NO: 81008 - DNA, 22 bp, synthetic construct
  misc_feature 1..22: note = chemically synthesized
  source 1..22: mol_type = other DNA
attgagagtttttagtatgaag

SEQ ID NO: 81009 - DNA, 22 bp, synthetic construct
  misc_feature 1..22: note = chemically synthesized
  source 1..22: mol_type = other DNA
ttgagagtttttagtatgaagc

SEQ ID NO: 81010 - DNA, 22 bp, synthetic construct
  misc_feature 1..22: note = chemically synthesized
  source 1..22: mol_type = other DNA
agagtttttagtatgaagcatt

SEQ ID NO: 81011 - DNA, 22 bp, synthetic construct
  misc_feature 1..22: note = chemically synthesized
  source 1..22: mol_type = other DNA
ttagtatgaagcattgttgaat

SEQ ID NO: 81012 - DNA, 22 bp, synthetic construct
  misc_feature 1..22: note = chemically synthesized
  source 1..22: mol_type = other DNA
tagtatgaagcattgttgaatt

SEQ ID NO: 81013 - DNA, 22 bp, synthetic construct
  misc_feature 1..22: note = chemically synthesized
  source 1..22: mol_type = other DNA
agtatgaagcattgttgaattt

SEQ ID NO: 81014 - DNA, 22 bp, synthetic construct
  misc_feature 1..22: note = chemically synthesized
  source 1..22: mol_type = other DNA
gtatgaagcattgttgaatttt

SEQ ID NO: 81015 - DNA, 22 bp, synthetic construct
  misc_feature 1..22: note = chemically synthesized
  source 1..22: mol_type = other DNA
ttgaattttgtcaaaggccttt

SEQ ID NO: 81016 - DNA, 22 bp, synthetic construct
  misc_feature 1..22: note = chemically synthesized
  source 1..22: mol_type = other DNA
aattttgtcaaaggccttttct

SEQ ID NO: 81017 - DNA, 22 bp, synthetic construct
  misc_feature 1..22: note = chemically synthesized
  source 1..22: mol_type = other DNA
tgtcaaaggccttttctgcatc

SEQ ID NO: 81018 - DNA, 22 bp, synthetic construct
  misc_feature 1..22: note = chemically synthesized
  source 1..22: mol_type = other DNA
gtcaaaggccttttctgcatct

SEQ ID NO: 81019 - DNA, 22 bp, synthetic construct
  misc_feature 1..22: note = chemically synthesized
  source 1..22: mol_type = other DNA
tcaaaggccttttctgcatcta

SEQ ID NO: 81020 - DNA, 22 bp, synthetic construct
  misc_feature 1..22: note = chemically synthesized
  source 1..22: mol_type = other DNA
ttctgcatctattgagataatc

SEQ ID NO: 81021 - DNA, 22 bp, synthetic construct
  misc_feature 1..22: note = chemically synthesized
  source 1..22: mol_type = other DNA
tctgcatctattgagataatca

SEQ ID NO: 81022 - DNA, 22 bp, synthetic construct
  misc_feature 1..22: note = chemically synthesized
  source 1..22: mol_type = other DNA
ctgcatctattgagataatcat

SEQ ID NO: 81023 - DNA, 22 bp, synthetic construct
  misc_feature 1..22: note = chemically synthesized
  source 1..22: mol_type = other DNA
tgcatctattgagataatcatg

SEQ ID NO: 81024 - DNA, 22 bp, synthetic construct
  misc_feature 1..22: note = chemically synthesized
  source 1..22: mol_type = other DNA
catctattgagataatcatgtg

SEQ ID NO: 81025 - DNA, 22 bp, synthetic construct
  misc_feature 1..22: note = chemically synthesized
  source 1..22: mol_type = other DNA
ttgagataatcatgtggtttgt

SEQ ID NO: 81026 - DNA, 22 bp, synthetic construct
  misc_feature 1..22: note = chemically synthesized
  source 1..22: mol_type = other DNA
agataatcatgtggtttgtgtc

SEQ ID NO: 81027 - DNA, 22 bp, synthetic construct
  misc_feature 1..22: note = chemically synthesized
  source 1..22: mol_type = other DNA
gtgtctttggttctgtttatat

SEQ ID NO: 81028 - DNA, 22 bp, synthetic construct
  misc_feature 1..22: note = chemically synthesized
  source 1..22: mol_type = other DNA
tgtctttggttctgtttatatg

SEQ ID NO: 81029 - DNA, 22 bp, synthetic construct
  misc_feature 1..22: note = chemically synthesized
  source 1..22: mol_type = other DNA
tggttctgtttatatgctggat

SEQ ID NO: 81030 - DNA, 22 bp, synthetic construct
  misc_feature 1..22: note = chemically synthesized
  source 1..22: mol_type = other DNA
ggttctgtttatatgctggatt

SEQ ID NO: 81031 - DNA, 22 bp, synthetic construct
  misc_feature 1..22: note = chemically synthesized
  source 1..22: mol_type = other DNA
gttctgtttatatgctggatta

SEQ ID NO: 81032 - DNA, 22 bp, synthetic construct
  misc_feature 1..22: note = chemically synthesized
  source 1..22: mol_type = other DNA
tgtttatatgctggattatgtt

SEQ ID NO: 81033 - DNA, 22 bp, synthetic construct
  misc_feature 1..22: note = chemically synthesized
  source 1..22: mol_type = other DNA
tttatatgctggattatgttta

SEQ ID NO: 81034 - DNA, 22 bp, synthetic construct
  misc_feature 1..22: note = chemically synthesized
  source 1..22: mol_type = other DNA
atatgctggattatgtttattg

SEQ ID NO: 81035 - DNA, 22 bp, synthetic construct
  misc_feature 1..22: note = chemically synthesized
  source 1..22: mol_type = other DNA
tatgctggattatgtttattga

SEQ ID NO: 81036 - DNA, 22 bp, synthetic construct
  misc_feature 1..22: note = chemically synthesized
  source 1..22: mol_type = other DNA
gattatgtttattgatttgcat

SEQ ID NO: 81037 - DNA, 22 bp, synthetic construct
  misc_feature 1..22: note = chemically synthesized
  source 1..22: mol_type = other DNA
tgtttattgatttgcatatgtt

SEQ ID NO: 81038 - DNA, 22 bp, synthetic construct
  misc_feature 1..22: note = chemically synthesized
  source 1..22: mol_type = other DNA
attgatttgcatatgttgaacc

SEQ ID NO: 81039 - DNA, 22 bp, synthetic construct
  misc_feature 1..22: note = chemically synthesized
  source 1..22: mol_type = other DNA
ttgatttgcatatgttgaacca

SEQ ID NO: 81040 - DNA, 22 bp, synthetic construct
  misc_feature 1..22: note = chemically synthesized
  source 1..22: mol_type = other DNA
atttgcatatgttgaaccagcc

SEQ ID NO: 81041 - DNA, 22 bp, synthetic construct
  misc_feature 1..22: note = chemically synthesized
  source 1..22: mol_type = other DNA
gcatatgttgaaccagccctgc

SEQ ID NO: 81042 - DNA, 22 bp, synthetic construct
  misc_feature 1..22: note = chemically synthesized
  source 1..22: mol_type = other DNA
catatgttgaaccagccctgca

SEQ ID NO: 81043 - DNA, 22 bp, synthetic construct
  misc_feature 1..22: note = chemically synthesized
  source 1..22: mol_type = other DNA
aaccagccctgcatcccaggga

SEQ ID NO: 81044 - DNA, 22 bp, synthetic construct
  misc_feature 1..22: note = chemically synthesized
  source 1..22: mol_type = other DNA
catcccagggatgaagcccact

SEQ ID NO: 81045 - DNA, 22 bp, synthetic construct
  misc_feature 1..22: note = chemically synthesized
  source 1..22: mol_type = other DNA
gatcatggtggataagcttttt

SEQ ID NO: 81046 - DNA, 22 bp, synthetic construct
  misc_feature 1..22: note = chemically synthesized
  source 1..22: mol_type = other DNA
atcatggtggataagctttttg

SEQ ID NO: 81047 - DNA, 22 bp, synthetic construct
  misc_feature 1..22: note = chemically synthesized
  source 1..22: mol_type = other DNA
tttgatgtgctcctggatttgg

SEQ ID NO: 81048 - DNA, 22 bp, synthetic construct
  misc_feature 1..22: note = chemically synthesized
  source 1..22: mol_type = other DNA
ttgatgtgctcctggatttggt

SEQ ID NO: 81049 - DNA, 22 bp, synthetic construct
  misc_feature 1..22: note = chemically synthesized
  source 1..22: mol_type = other DNA
tgatgtgctcctggatttggtt

SEQ ID NO: 81050 - DNA, 22 bp, synthetic construct
  misc_feature 1..22: note = chemically synthesized
  source 1..22: mol_type = other DNA
gatgtgctcctggatttggttt

SEQ ID NO: 81051 - DNA, 22 bp, synthetic construct
  misc_feature 1..22: note = chemically synthesized
  source 1..22: mol_type = other DNA
atgtgctcctggatttggtttg

SEQ ID NO: 81052 - DNA, 22 bp, synthetic construct
  misc_feature 1..22: note = chemically synthesized
  source 1..22: mol_type = other DNA
ctggatttggtttgccagtatt

SEQ ID NO: 81053 - DNA, 22 bp, synthetic construct
  misc_feature 1..22: note = chemically synthesized
  source 1..22: mol_type = other DNA
gatttggtttgccagtatttta

SEQ ID NO: 81054 - DNA, 22 bp, synthetic construct
  misc_feature 1..22: note = chemically synthesized
  source 1..22: mol_type = other DNA
ggtttgccagtattttactgag

SEQ ID NO: 81055 - DNA, 22 bp, synthetic construct
  misc_feature 1..22: note = chemically synthesized
  source 1..22: mol_type = other DNA
gtttgccagtattttactgagg

SEQ ID NO: 81056 - DNA, 22 bp, synthetic construct
  misc_feature 1..22: note = chemically synthesized
  source 1..22: mol_type = other DNA
gccagtattttactgaggattt

SEQ ID NO: 81057 - DNA, 22 bp, synthetic construct
  misc_feature 1..22: note = chemically synthesized
  source 1..22: mol_type = other DNA
ccagtattttactgaggatttt

SEQ ID NO: 81058 - DNA, 22 bp, synthetic construct
  misc_feature 1..22: note = chemically synthesized
  source 1..22: mol_type = other DNA
tactgaggatttttgcatcgat

SEQ ID NO: 81059 - DNA, 22 bp, synthetic construct
  misc_feature 1..22: note = chemically synthesized
  source 1..22: mol_type = other DNA
actgaggatttttgcatcgatg

SEQ ID NO: 81060 - DNA, 22 bp, synthetic construct
  misc_feature 1..22: note = chemically synthesized
  source 1..22: mol_type = other DNA
ctgaggatttttgcatcgatgt

SEQ ID NO: 81061 - DNA, 22 bp, synthetic construct
  misc_feature 1..22: note = chemically synthesized
  source 1..22: mol_type = other DNA
aggatttttgcatcgatgttca

SEQ ID NO: 81062 - DNA, 22 bp, synthetic construct
  misc_feature 1..22: note = chemically synthesized
  source 1..22: mol_type = other DNA
ttgcatcgatgttcatcaggga

SEQ ID NO: 81063 - DNA, 22 bp, synthetic construct
  misc_feature 1..22: note = chemically synthesized
  source 1..22: mol_type = other DNA
tgcatcgatgttcatcagggat

SEQ ID NO: 81064 - DNA, 22 bp, synthetic construct
  misc_feature 1..22: note = chemically synthesized
  source 1..22: mol_type = other DNA
gcatcgatgttcatcagggata

SEQ ID NO: 81065 - DNA, 22 bp, synthetic construct
  misc_feature 1..22: note = chemically synthesized
  source 1..22: mol_type = other DNA
catcgatgttcatcagggatat

SEQ ID NO: 81066 - DNA, 22 bp, synthetic construct
  misc_feature 1..22: note = chemically synthesized
  source 1..22: mol_type = other DNA
atcagggatattggtgtaaaat

SEQ ID NO: 81067 - DNA, 22 bp, synthetic construct
  misc_feature 1..22: note = chemically synthesized
  source 1..22: mol_type = other DNA
gtgtaaaattctctttttttgt

SEQ ID NO: 81068 - DNA, 22 bp, synthetic construct
  misc_feature 1..22: note = chemically synthesized
  source 1..22: mol_type = other DNA
tctttttttgttgtgtgtctgc

SEQ ID NO: 81069 - DNA, 22 bp, synthetic construct
  misc_feature 1..22: note = chemically synthesized
  source 1..22: mol_type = other DNA
tttttttgttgtgtgtctgcta

SEQ ID NO: 81070 - DNA, 22 bp, synthetic construct
  misc_feature 1..22: note = chemically synthesized
  source 1..22: mol_type = other DNA
tttttgttgtgtgtctgctagg

SEQ ID NO: 81071 - DNA, 22 bp, synthetic construct
  misc_feature 1..22: note = chemically synthesized
  source 1..22: mol_type = other DNA
ttttgttgtgtgtctgctaggc

SEQ ID NO: 81072 - DNA, 22 bp, synthetic construct
  misc_feature 1..22: note = chemically synthesized
  source 1..22: mol_type = other DNA
tttgttgtgtgtctgctaggct

SEQ ID NO: 81073 - DNA, 22 bp, synthetic construct
  misc_feature 1..22: note = chemically synthesized
  source 1..22: mol_type = other DNA
ttgttgtgtgtctgctaggctt

SEQ ID NO: 81074 - DNA, 22 bp, synthetic construct
  misc_feature 1..22: note = chemically synthesized
  source 1..22: mol_type = other DNA
tgttgtgtgtctgctaggcttt

SEQ ID NO: 81075 - DNA, 22 bp, synthetic construct
  misc_feature 1..22: note = chemically synthesized
  source 1..22: mol_type = other DNA
gttgtgtgtctgctaggctttg

SEQ ID NO: 81076 - DNA, 22 bp, synthetic construct
  misc_feature 1..22: note = chemically synthesized
  source 1..22: mol_type = other DNA
ttgtgtgtctgctaggctttgg

SEQ ID NO: 81077 - DNA, 22 bp, synthetic construct
  misc_feature 1..22: note = chemically synthesized
  source 1..22: mol_type = other DNA
tgtgtctgctaggctttggtat

SEQ ID NO: 81078 - DNA, 22 bp, synthetic construct
  misc_feature 1..22: note = chemically synthesized
  source 1..22: mol_type = other DNA
ctaggctttggtatcaagatga

SEQ ID NO: 81079 - DNA, 22 bp, synthetic construct
  misc_feature 1..22: note = chemically synthesized
  source 1..22: mol_type = other DNA
ggctttggtatcaagatgatgc

SEQ ID NO: 81080 - DNA, 22 bp, synthetic construct
  misc_feature 1..22: note = chemically synthesized
  source 1..22: mol_type = other DNA
tggtatcaagatgatgctggcc

SEQ ID NO: 81081 - DNA, 22 bp, synthetic construct
  misc_feature 1..22: note = chemically synthesized
  source 1..22: mol_type = other DNA
ggtatcaagatgatgctggcct

SEQ ID NO: 81082 - DNA, 22 bp, synthetic construct
  misc_feature 1..22: note = chemically synthesized
  source 1..22: mol_type = other DNA
gtatcaagatgatgctggcctc

SEQ ID NO: 81083 - DNA, 22 bp, synthetic construct
  misc_feature 1..22: note = chemically synthesized
  source 1..22: mol_type = other DNA
gcctcataaaatgagttaggga

SEQ ID NO: 81084 - DNA, 22 bp, synthetic construct
  misc_feature 1..22: note = chemically synthesized
  source 1..22: mol_type = other DNA
ataaaatgagttagggaggatt

SEQ ID NO: 81085 - DNA, 22 bp, synthetic construct
  misc_feature 1..22: note = chemically synthesized
  source 1..22: mol_type = other DNA
gggaggattccctctttttcta

SEQ ID NO: 81086 - DNA, 22 bp, synthetic construct
  misc_feature 1..22: note = chemically synthesized
  source 1..22: mol_type = other DNA
cctctttttctattgattggaa

SEQ ID NO: 81087 - DNA, 22 bp, synthetic construct
  misc_feature 1..22: note = chemically synthesized
  source 1..22: mol_type = other DNA
tttttctattgattggaatagt

SEQ ID NO: 81088 - DNA, 22 bp, synthetic construct
  misc_feature 1..22: note = chemically synthesized
  source 1..22: mol_type = other DNA
tttctattgattggaatagttt

SEQ ID NO: 81089 - DNA, 22 bp, synthetic construct
  misc_feature 1..22: note = chemically synthesized
  source 1..22: mol_type = other DNA
ttctattgattggaatagtttc

SEQ ID NO: 81090 - DNA, 22 bp, synthetic construct
  misc_feature 1..22: note = chemically synthesized
  source 1..22: mol_type = other DNA
tctattgattggaatagtttca

SEQ ID NO: 81091 - DNA, 22 bp, synthetic construct
  misc_feature 1..22: note = chemically synthesized
  source 1..22: mol_type = other DNA
ctattgattggaatagtttcag

SEQ ID NO: 81092 - DNA, 22 bp, synthetic construct
  misc_feature 1..22: note = chemically synthesized
  source 1..22: mol_type = other DNA
tattgattggaatagtttcaga

SEQ ID NO: 81093 - DNA, 22 bp, synthetic construct
  misc_feature 1..22: note = chemically synthesized
  source 1..22: mol_type = other DNA
ttgattggaatagtttcagaag

SEQ ID NO: 81094 - DNA, 22 bp, synthetic construct
  misc_feature 1..22: note = chemically synthesized
  source 1..22: mol_type = other DNA
attggaatagtttcagaaggaa

SEQ ID NO: 81095 - DNA, 22 bp, synthetic construct
  misc_feature 1..22: note = chemically synthesized
  source 1..22: mol_type = other DNA
gaatagtttcagaaggaatggt

SEQ ID NO: 81096 - DNA, 22 bp, synthetic construct
  misc_feature 1..22: note = chemically synthesized
  source 1..22: mol_type = other DNA
cagaaggaatggtaccagctcc

SEQ ID NO: 81097 - DNA, 22 bp, synthetic construct
  misc_feature 1..22: note = chemically synthesized
  source 1..22: mol_type = other DNA
agaaggaatggtaccagctcct

SEQ ID NO: 81098 - DNA, 22 bp, synthetic construct
  misc_feature 1..22: note = chemically synthesized
  source 1..22: mol_type = other DNA
ctccttgtacctctggtagaat

SEQ ID NO: 81099 - DNA, 22 bp, synthetic construct
  misc_feature 1..22: note = chemically synthesized
  source 1..22: mol_type = other DNA
cttgtacctctggtagaattcg

SEQ ID NO: 81100 - DNA, 22 bp, synthetic construct
  misc_feature 1..22: note = chemically synthesized
  source 1..22: mol_type = other DNA
gtacctctggtagaattcggct

SEQ ID NO: 81101 - DNA, 22 bp, synthetic construct
  misc_feature 1..22: note = chemically synthesized
  source 1..22: mol_type = other DNA
tacctctggtagaattcggctg

SEQ ID NO: 81102 - DNA, 22 bp, synthetic construct
  misc_feature 1..22: note = chemically synthesized
  source 1..22: mol_type = other DNA
tggtagaattcggctgtgaatc

SEQ ID NO: 81103 - DNA, 22 bp, synthetic construct
  misc_feature 1..22: note = chemically synthesized
  source 1..22: mol_type = other DNA
gtagaattcggctgtgaatcca

SEQ ID NO: 81104 - DNA, 22 bp, synthetic construct
  misc_feature 1..22: note = chemically synthesized
  source 1..22: mol_type = other DNA
ggctgtgaatccatctggtcct

SEQ ID NO: 81105 - DNA, 22 bp, synthetic construct
  misc_feature 1..22: note = chemically synthesized
  source 1..22: mol_type = other DNA
tgaatccatctggtcctggact

SEQ ID NO: 81106 - DNA, 22 bp, synthetic construct
  misc_feature 1..22: note = chemically synthesized
  source 1..22: mol_type = other DNA
gtcctggactttttttggttgg

SEQ ID NO: 81107 - DNA, 22 bp, synthetic construct
  misc_feature 1..22: note = chemically synthesized
  source 1..22: mol_type = other DNA
gactttttttggttggtaagct

SEQ ID NO: 81108 - DNA, 22 bp, synthetic construct
  misc_feature 1..22: note = chemically synthesized
  source 1..22: mol_type = other DNA
tttttggttggtaagcttcata

SEQ ID NO: 81109 - DNA, 22 bp, synthetic construct
  misc_feature 1..22: note = chemically synthesized
  source 1..22: mol_type = other DNA
ttttggttggtaagcttcataa

SEQ ID NO: 81110 - DNA, 22 bp, synthetic construct
  misc_feature 1..22: note = chemically synthesized
  source 1..22: mol_type = other DNA
tttggttggtaagcttcataag

SEQ ID NO: 81111 - DNA, 22 bp, synthetic construct
  misc_feature 1..22: note = chemically synthesized
  source 1..22: mol_type = other DNA
ttggttggtaagcttcataagt

SEQ ID NO: 81112 - DNA, 22 bp, synthetic construct
  misc_feature 1..22: note = chemically synthesized
  source 1..22: mol_type = other DNA
tggttggtaagcttcataagtg

SEQ ID NO: 81113 - DNA, 22 bp, synthetic construct
  misc_feature 1..22: note = chemically synthesized
  source 1..22: mol_type = other DNA
ggttggtaagcttcataagtga

SEQ ID NO: 81114 - DNA, 22 bp, synthetic construct
  misc_feature 1..22: note = chemically synthesized
  source 1..22: mol_type = other DNA
gttggtaagcttcataagtgaa

SEQ ID NO: 81115 - DNA, 22 bp, synthetic construct
  misc_feature 1..22: note = chemically synthesized
  source 1..22: mol_type = other DNA
gtaagcttcataagtgaaggag

SEQ ID NO: 81116 - DNA, 22 bp, synthetic construct
  misc_feature 1..22: note = chemically synthesized
  source 1..22: mol_type = other DNA
cataagtgaaggagaaataaaa

SEQ ID NO: 81117 - DNA, 22 bp, synthetic construct
  misc_feature 1..22: note = chemically synthesized
  source 1..22: mol_type = other DNA
ataagtgaaggagaaataaaat

SEQ ID NO: 81118 - DNA, 22 bp, synthetic construct
  misc_feature 1..22: note = chemically synthesized
  source 1..22: mol_type = other DNA
tacagacaagcaattgctgatt

SEQ ID NO: 81119 - DNA, 22 bp, synthetic construct
  misc_feature 1..22: note = chemically synthesized
  source 1..22: mol_type = other DNA
acagacaagcaattgctgattt

SEQ ID NO: 81120 - DNA, 22 bp, synthetic construct
  misc_feature 1..22: note = chemically synthesized
  source 1..22: mol_type = other DNA
cagacaagcaattgctgatttt

SEQ ID NO: 81121 - DNA, 22 bp, synthetic construct
  misc_feature 1..22: note = chemically synthesized
  source 1..22: mol_type = other DNA
ctgattttgtcaccaccaggcc

SEQ ID NO: 81122 - DNA, 22 bp, synthetic construct
  misc_feature 1..22: note = chemically synthesized
  source 1..22: mol_type = other DNA
attttgtcaccaccaggcctgc

SEQ ID NO: 81123 - DNA, 22 bp, synthetic construct
  misc_feature 1..22: note = chemically synthesized
  source 1..22: mol_type = other DNA
tgtcaccaccaggcctgcccta

SEQ ID NO: 81124 - DNA, 22 bp, synthetic construct
  misc_feature 1..22: note = chemically synthesized
  source 1..22: mol_type = other DNA
gtcaccaccaggcctgccctaa

SEQ ID NO: 81125 - DNA, 22 bp, synthetic construct
  misc_feature 1..22: note = chemically synthesized
  source 1..22: mol_type = other DNA
tcaccaccaggcctgccctaaa

SEQ ID NO: 81126 - DNA, 22 bp, synthetic construct
  misc_feature 1..22: note = chemically synthesized
  source 1..22: mol_type = other DNA
ccctaaaagagctcctgaagga

SEQ ID NO: 81127 - DNA, 22 bp, synthetic construct
  misc_feature 1..22: note = chemically synthesized
  source 1..22: mol_type = other DNA
aaagagctcctgaaggaagcag

SEQ ID NO: 81128 - DNA, 22 bp, synthetic construct
  misc_feature 1..22: note = chemically synthesized
  source 1..22: mol_type = other DNA
ctgaaggaagcagtaaacatgg

SEQ ID NO: 81129 - DNA, 22 bp, synthetic construct
  misc_feature 1..22: note = chemically synthesized
  source 1..22: mol_type = other DNA
aaggaagcagtaaacatggaaa

SEQ ID NO: 81130 - DNA, 22 bp, synthetic construct
  misc_feature 1..22: note = chemically synthesized
  source 1..22: mol_type = other DNA
caaaaacatgccaaattgtaaa

SEQ ID NO: 81131 - DNA, 22 bp, synthetic construct
  misc_feature 1..22: note = chemically synthesized
  source 1..22: mol_type = other DNA
taaagaccatcaaggctaggga

SEQ ID NO: 81132 - DNA, 22 bp, synthetic construct
  misc_feature 1..22: note = chemically synthesized
  source 1..22: mol_type = other DNA
gggagaaactgcatcaactagc

SEQ ID NO: 81133 - DNA, 22 bp, synthetic construct
  misc_feature 1..22: note = chemically synthesized
  source 1..22: mol_type = other DNA
catcaactagcaagcaaaataa

SEQ ID NO: 81134 - DNA, 22 bp, synthetic construct
  misc_feature 1..22: note = chemically synthesized
  source 1..22: mol_type = other DNA
gcaagcaaaataaccagctaac

SEQ ID NO: 81135 - DNA, 22 bp, synthetic construct
  misc_feature 1..22: note = chemically synthesized
  source 1..22: mol_type = other DNA
acatcataatgacaggatcaaa

SEQ ID NO: 81136 - DNA, 22 bp, synthetic construct
  misc_feature 1..22: note = chemically synthesized
  source 1..22: mol_type = other DNA
tcacataacaatattaacctta

SEQ ID NO: 81137 - DNA, 22 bp, synthetic construct
  misc_feature 1..22: note = chemically synthesized
  source 1..22: mol_type = other DNA
acataacaatattaaccttaaa

SEQ ID NO: 81138 - DNA, 22 bp, synthetic construct
  misc_feature 1..22: note = chemically synthesized
  source 1..22: mol_type = other DNA
accttaaatgtaaatgagctaa

SEQ ID NO: 81139 - DNA, 22 bp, synthetic construct
  misc_feature 1..22: note = chemically synthesized
  source 1..22: mol_type = other DNA
aaatgtaaatgagctaaatgct

SEQ ID NO: 81140 - DNA, 22 bp, synthetic construct
  misc_feature 1..22: note = chemically synthesized
  source 1..22: mol_type = other DNA
aatgtaaatgagctaaatgctc

SEQ ID NO: 81141 - DNA, 22 bp, synthetic construct
  misc_feature 1..22: note = chemically synthesized
  source 1..22: mol_type = other DNA
aatgctccaattaaaagacaca

SEQ ID NO: 81142 - DNA, 22 bp, synthetic construct
  misc_feature 1..22: note = chemically synthesized
  source 1..22: mol_type = other DNA
caattaaaagacacagactggc

SEQ ID NO: 81143 - DNA, 22 bp, synthetic construct
  misc_feature 1..22: note = chemically synthesized
  source 1..22: mol_type = other DNA
aaagacacagactggcaaattg

SEQ ID NO: 81144 - DNA, 22 bp, synthetic construct
  misc_feature 1..22: note = chemically synthesized
  source 1..22: mol_type = other DNA
gcaaattggataaagagtcaag

SEQ ID NO: 81145 - DNA, 22 bp, synthetic construct
  misc_feature 1..22: note = chemically synthesized
  source 1..22: mol_type = other DNA
gataaagagtcaagacctatca

SEQ ID NO: 81146 - DNA, 22 bp, synthetic construct
  misc_feature 1..22: note = chemically synthesized
  source 1..22: mol_type = other DNA
tcagtgtgctgtattcaggaaa

SEQ ID NO: 81147 - DNA, 22 bp, synthetic construct
  misc_feature 1..22: note = chemically synthesized
  source 1..22: mol_type = other DNA
tattcaggaaaccaatctcatg

SEQ ID NO: 81148 - DNA, 22 bp, synthetic construct
  misc_feature 1..22: note = chemically synthesized
  source 1..22: mol_type = other DNA
aggaaaccaatctcatgtggag

SEQ ID NO: 81149 - DNA, 22 bp, synthetic construct
  misc_feature 1..22: note = chemically synthesized
  source 1..22: mol_type = other DNA
atgtggagagacacacataggc

SEQ ID NO: 81150 - DNA, 22 bp, synthetic construct
  misc_feature 1..22: note = chemically synthesized
  source 1..22: mol_type = other DNA
aaaataaagggatggaggaaga

SEQ ID NO: 81151 - DNA, 22 bp, synthetic construct
  misc_feature 1..22: note = chemically synthesized
  source 1..22: mol_type = other DNA
ccaagcaaatggaaaacaaaaa

SEQ ID NO: 81152 - DNA, 22 bp, synthetic construct
  misc_feature 1..22: note = chemically synthesized
  source 1..22: mol_type = other DNA
gcaatcttagtctctgataaaa

SEQ ID NO: 81153 - DNA, 22 bp, synthetic construct
  misc_feature 1..22: note = chemically synthesized
  source 1..22: mol_type = other DNA
caatcttagtctctgataaaac

SEQ ID NO: 81154 - DNA, 22 bp, synthetic construct
  misc_feature 1..22: note = chemically synthesized
  source 1..22: mol_type = other DNA
agtctctgataaaacagacttt

SEQ ID NO: 81155 - DNA, 22 bp, synthetic construct
  misc_feature 1..22: note = chemically synthesized
  source 1..22: mol_type = other DNA
gtctctgataaaacagacttta

SEQ ID NO: 81156 - DNA, 22 bp, synthetic construct
  misc_feature 1..22: note = chemically synthesized
  source 1..22: mol_type = other DNA
tgataaaacagactttaaacca

SEQ ID NO: 81157 - DNA, 22 bp, synthetic construct
  misc_feature 1..22: note = chemically synthesized
  source 1..22: mol_type = other DNA
ataaaacagactttaaaccaac

SEQ ID NO: 81158 - DNA, 22 bp, synthetic construct
  misc_feature 1..22: note = chemically synthesized
  source 1..22: mol_type = other DNA
taaaccaacaaagatcaaaaga

SEQ ID NO: 81159 - DNA, 22 bp, synthetic construct
  misc_feature 1..22: note = chemically synthesized
  source 1..22: mol_type = other DNA
aaaccaacaaagatcaaaagag

SEQ ID NO: 81160 - DNA, 22 bp, synthetic construct
  misc_feature 1..22: note = chemically synthesized
  source 1..22: mol_type = other DNA
aaccaacaaagatcaaaagaga

SEQ ID NO: 81161 - DNA, 22 bp, synthetic construct
  misc_feature 1..22: note = chemically synthesized
  source 1..22: mol_type = other DNA
catactggtaaagggatcaatt

SEQ ID NO: 81162 - DNA, 22 bp, synthetic construct
  misc_feature 1..22: note = chemically synthesized
  source 1..22: mol_type = other DNA
gtaaagggatcaattcaacaag

SEQ ID NO: 81163 - DNA, 22 bp, synthetic construct
  misc_feature 1..22: note = chemically synthesized
  source 1..22: mol_type = other DNA
aacaagaagagctaactatcct

SEQ ID NO: 81164 - DNA, 22 bp, synthetic construct
  misc_feature 1..22: note = chemically synthesized
  source 1..22: mol_type = other DNA
actatcctaaatatatatgcac

SEQ ID NO: 81165 - DNA, 22 bp, synthetic construct
  misc_feature 1..22: note = chemically synthesized
  source 1..22: mol_type = other DNA
tcctaaatatatatgcacccaa

SEQ ID NO: 81166 - DNA, 22 bp, synthetic construct
  misc_feature 1..22: note = chemically synthesized
  source 1..22: mol_type = other DNA
aatatatatgcacccaatacag

SEQ ID NO: 81167 - DNA, 22 bp, synthetic construct
  misc_feature 1..22: note = chemically synthesized
  source 1..22: mol_type = other DNA
ataaagcaagtccttagagacc

SEQ ID NO: 81168 - DNA, 22 bp, synthetic construct
  misc_feature 1..22: note = chemically synthesized
  source 1..22: mol_type = other DNA
agagacctacaaagagacttag

SEQ ID NO: 81169 - DNA, 22 bp, synthetic construct
  misc_feature 1..22: note = chemically synthesized
  source 1..22: mol_type = other DNA
gagacctacaaagagacttaga

SEQ ID NO: 81170 - DNA, 22 bp, synthetic construct
  misc_feature 1..22: note = chemically synthesized
  source 1..22: mol_type = other DNA
caaagagacttagactcccaca

SEQ ID NO: 81171 - DNA, 22 bp, synthetic construct
  misc_feature 1..22: note = chemically synthesized
  source 1..22: mol_type = other DNA
agactcccacacaataataatg

SEQ ID NO: 81172 - DNA, 22 bp, synthetic construct
  misc_feature 1..22: note = chemically synthesized
  source 1..22: mol_type = other DNA
gactcccacacaataataatgg

SEQ ID NO: 81173 - DNA, 22 bp, synthetic construct
  misc_feature 1..22: note = chemically synthesized
  source 1..22: mol_type = other DNA
ccacacaataataatgggagac

SEQ ID NO: 81174 - DNA, 22 bp, synthetic construct
  misc_feature 1..22: note = chemically synthesized
  source 1..22: mol_type = other DNA
taacaccccactgtcaacatta

SEQ ID NO: 81175 - DNA, 22 bp, synthetic construct
  misc_feature 1..22: note = chemically synthesized
  source 1..22: mol_type = other DNA
aacaccccactgtcaacattag

SEQ ID NO: 81176 - DNA, 22 bp, synthetic construct
  misc_feature 1..22: note = chemically synthesized
  source 1..22: mol_type = other DNA
acaccccactgtcaacattaga

SEQ ID NO: 81177 - DNA, 22 bp, synthetic construct
  misc_feature 1..22: note = chemically synthesized
  source 1..22: mol_type = other DNA
tcaacattagacagatcaacga

SEQ ID NO: 81178 - DNA, 22 bp, synthetic construct
  misc_feature 1..22: note = chemically synthesized
  source 1..22: mol_type = other DNA
gacagatcaacgagacagaaag

SEQ ID NO: 81179 - DNA, 22 bp, synthetic construct
  misc_feature 1..22: note = chemically synthesized
  source 1..22: mol_type = other DNA
acaaggatatccaggaattgaa

SEQ ID NO: 81180 - DNA, 22 bp, synthetic construct
  misc_feature 1..22: note = chemically synthesized
  source 1..22: mol_type = other DNA
aattcagctctgcaccaagcag

SEQ ID NO: 81181 - DNA, 22 bp, synthetic construct
  misc_feature 1..22: note = chemically synthesized
  source 1..22: mol_type = other DNA
agctctgcaccaagcagaccta

SEQ ID NO: 81182 - DNA, 22 bp, synthetic construct
  misc_feature 1..22: note = chemically synthesized
  source 1..22: mol_type = other DNA
tgcaccaagcagacctaataga

SEQ ID NO: 81183 - DNA, 22 bp, synthetic construct
  misc_feature 1..22: note = chemically synthesized
  source 1..22: mol_type = other DNA
caccaagcagacctaatagaca

SEQ ID NO: 81184 - DNA, 22 bp, synthetic construct
  misc_feature 1..22: note = chemically synthesized
  source 1..22: mol_type = other DNA
atagacatctacagaactctcc

SEQ ID NO: 81185 - DNA, 22 bp, synthetic construct
  misc_feature 1..22: note = chemically synthesized
  source 1..22: mol_type = other DNA
cagaactctccatcccaaatca

SEQ ID NO: 81186 - DNA, 22 bp, synthetic construct
  misc_feature 1..22: note = chemically synthesized
  source 1..22: mol_type = other DNA
tccatcccaaatcaatagaata

SEQ ID NO: 81187 - DNA, 22 bp, synthetic construct
  misc_feature 1..22: note = chemically synthesized
  source 1..22: mol_type = other DNA
catcccaaatcaatagaatata

SEQ ID NO: 81188 - DNA, 22 bp, synthetic construct
  misc_feature 1..22: note = chemically synthesized
  source 1..22: mol_type = other DNA
ttctcagcaccacaccacacct

SEQ ID NO: 81189 - DNA, 22 bp, synthetic construct
  misc_feature 1..22: note = chemically synthesized
  source 1..22: mol_type = other DNA
ctcagcaccacaccacacctat

SEQ ID NO: 81190 - DNA, 22 bp, synthetic construct
  misc_feature 1..22: note = chemically synthesized
  source 1..22: mol_type = other DNA
tcagcaccacaccacacctatt

SEQ ID NO: 81191 - DNA, 22 bp, synthetic construct
  misc_feature 1..22: note = chemically synthesized
  source 1..22: mol_type = other DNA
agcaccacaccacacctattcc

SEQ ID NO: 81192 - DNA, 22 bp, synthetic construct
  misc_feature 1..22: note = chemically synthesized
  source 1..22: mol_type = other DNA
ttccagttgaccacatagttgg

SEQ ID NO: 81193 - DNA, 22 bp, synthetic construct
  misc_feature 1..22: note = chemically synthesized
  source 1..22: mol_type = other DNA
cagttgaccacatagttggaag

SEQ ID NO: 81194 - DNA, 22 bp, synthetic construct
  misc_feature 1..22: note = chemically synthesized
  source 1..22: mol_type = other DNA
accacatagttggaagtgaagc

SEQ ID NO: 81195 - DNA, 22 bp, synthetic construct
  misc_feature 1..22: note = chemically synthesized
  source 1..22: mol_type = other DNA
gaagtgaagcactcctcagcaa

SEQ ID NO: 81196 - DNA, 22 bp, synthetic construct
  misc_feature 1..22: note = chemically synthesized
  source 1..22: mol_type = other DNA
ctcagcaaacgtaaaagaacag

SEQ ID NO: 81197 - DNA, 22 bp, synthetic construct
  misc_feature 1..22: note = chemically synthesized
  source 1..22: mol_type = other DNA
agcaaacgtaaaagaacagaaa

SEQ ID NO: 81198 - DNA, 22 bp, synthetic construct
  misc_feature 1..22: note = chemically synthesized
  source 1..22: mol_type = other DNA
tctctcagaccacagtgcaatc

SEQ ID NO: 81199 - DNA, 22 bp, synthetic construct
  misc_feature 1..22: note = chemically synthesized
  source 1..22: mol_type = other DNA
tcagaccacagtgcaatcaaac

SEQ ID NO: 81200 - DNA, 22 bp, synthetic construct
  misc_feature 1..22: note = chemically synthesized
  source 1..22: mol_type = other DNA
agaccacagtgcaatcaaacta

SEQ ID NO: 81201 - DNA, 22 bp, synthetic construct
  misc_feature 1..22: note = chemically synthesized
  source 1..22: mol_type = other DNA
gaactcaggattaagaaactca

SEQ ID NO: 81202 - DNA, 22 bp, synthetic construct
  misc_feature 1..22: note = chemically synthesized
  source 1..22: mol_type = other DNA
aggattaagaaactcactcaaa

SEQ ID NO: 81203 - DNA, 22 bp, synthetic construct
  misc_feature 1..22: note = chemically synthesized
  source 1..22: mol_type = other DNA
agaaactcactcaaaaccactc

SEQ ID NO: 81204 - DNA, 22 bp, synthetic construct
  misc_feature 1..22: note = chemically synthesized
  source 1..22: mol_type = other DNA
actcaaaaccactcaactacat

SEQ ID NO: 81205 - DNA, 22 bp, synthetic construct
  misc_feature 1..22: note = chemically synthesized
  source 1..22: mol_type = other DNA
aaaaccactcaactacatggaa

SEQ ID NO: 81206 - DNA, 22 bp, synthetic construct
  misc_feature 1..22: note = chemically synthesized
  source 1..22: mol_type = other DNA
aactacatggaaactgaacagc

SEQ ID NO: 81207 - DNA, 22 bp, synthetic construct
  misc_feature 1..22: note = chemically synthesized
  source 1..22: mol_type = other DNA
catggaaactgaacagcctgct

SEQ ID NO: 81208 - DNA, 22 bp, synthetic construct
  misc_feature 1..22: note = chemically synthesized
  source 1..22: mol_type = other DNA
aacagcctgctcctgaatgact

SEQ ID NO: 81209 - DNA, 22 bp, synthetic construct
  misc_feature 1..22: note = chemically synthesized
  source 1..22: mol_type = other DNA
ctcctgaatgactactgggtac

SEQ ID NO: 81210 - DNA, 22 bp, synthetic construct
  misc_feature 1..22: note = chemically synthesized
  source 1..22: mol_type = other DNA
ctgaatgactactgggtacata

SEQ ID NO: 81211 - DNA, 22 bp, synthetic construct
  misc_feature 1..22: note = chemically synthesized
  source 1..22: mol_type = other DNA
aatgactactgggtacataaca

SEQ ID NO: 81212 - DNA, 22 bp, synthetic construct
  misc_feature 1..22: note = chemically synthesized
  source 1..22: mol_type = other DNA
ctgggtacataacaaaatgaag

SEQ ID NO: 81213 - DNA, 22 bp, synthetic construct
  misc_feature 1..22: note = chemically synthesized
  source 1..22: mol_type = other DNA
ggtacataacaaaatgaaggca

SEQ ID NO: 81214 - DNA, 22 bp, synthetic construct
  misc_feature 1..22: note = chemically synthesized
  source 1..22: mol_type = other DNA
tttgaaaccaacgagaataaag

SEQ ID NO: 81215 - DNA, 22 bp, synthetic construct
  misc_feature 1..22: note = chemically synthesized
  source 1..22: mol_type = other DNA
tgaaaccaacgagaataaagat

SEQ ID NO: 81216 - DNA, 22 bp, synthetic construct
  misc_feature 1..22: note = chemically synthesized
  source 1..22: mol_type = other DNA
gaaaccaacgagaataaagata

SEQ ID NO: 81217 - DNA, 22 bp, synthetic construct
  misc_feature 1..22: note = chemically synthesized
  source 1..22: mol_type = other DNA
aaaccaacgagaataaagatac

SEQ ID NO: 81218 - DNA, 22 bp, synthetic construct
  misc_feature 1..22: note = chemically synthesized
  source 1..22: mol_type = other DNA
tgggacacatttaaagcagtgt

SEQ ID NO: 81219 - DNA, 22 bp, synthetic construct
  misc_feature 1..22: note = chemically synthesized
  source 1..22: mol_type = other DNA
ggacacatttaaagcagtgtgt

SEQ ID NO: 81220 - DNA, 22 bp, synthetic construct
  misc_feature 1..22: note = chemically synthesized
  source 1..22: mol_type = other DNA
aaagcagtgtgtagagggaaat

SEQ ID NO: 81221 - DNA, 22 bp, synthetic construct
  misc_feature 1..22: note = chemically synthesized
  source 1..22: mol_type = other DNA
aagcagtgtgtagagggaaatt

SEQ ID NO: 81222 - DNA, 22 bp, synthetic construct
  misc_feature 1..22: note = chemically synthesized
  source 1..22: mol_type = other DNA
atagcactaaatgcccacaaaa

SEQ ID NO: 81223 - DNA, 22 bp, synthetic construct
  misc_feature 1..22: note = chemically synthesized
  source 1..22: mol_type = other DNA
tagcactaaatgcccacaaaag

SEQ ID NO: 81224 - DNA, 22 bp, synthetic construct
  misc_feature 1..22: note = chemically synthesized
  source 1..22: mol_type = other DNA
aatgcccacaaaagaaagcagg

SEQ ID NO: 81225 - DNA, 22 bp, synthetic construct
  misc_feature 1..22: note = chemically synthesized
  source 1..22: mol_type = other DNA
aaattgacaccctaacatcaca

SEQ ID NO: 81226 - DNA, 22 bp, synthetic construct
  misc_feature 1..22: note = chemically synthesized
  source 1..22: mol_type = other DNA
acaccctaacatcacaattaaa

SEQ ID NO: 81227 - DNA, 22 bp, synthetic construct
  misc_feature 1..22: note = chemically synthesized
  source 1..22: mol_type = other DNA
acatcacaattaaaagaactag

SEQ ID NO: 81228 - DNA, 22 bp, synthetic construct
  misc_feature 1..22: note = chemically synthesized
  source 1..22: mol_type = other DNA
aaagaactagagaagcaagagc

SEQ ID NO: 81229 - DNA, 22 bp, synthetic construct
  misc_feature 1..22: note = chemically synthesized
  source 1..22: mol_type = other DNA
gagaagcaagagcaaacacttt

SEQ ID NO: 81230 - DNA, 22 bp, synthetic construct
  misc_feature 1..22: note = chemically synthesized
  source 1..22: mol_type = other DNA
tcaaaagctagcggaaggcaag

SEQ ID NO: 81231 - DNA, 22 bp, synthetic construct
  misc_feature 1..22: note = chemically synthesized
  source 1..22: mol_type = other DNA
caaaagctagcggaaggcaaga

SEQ ID NO: 81232 - DNA, 22 bp, synthetic construct
  misc_feature 1..22: note = chemically synthesized
  source 1..22: mol_type = other DNA
aaaagctagcggaaggcaagaa

SEQ ID NO: 81233 - DNA, 22 bp, synthetic construct
  misc_feature 1..22: note = chemically synthesized
  source 1..22: mol_type = other DNA
gcggaaggcaagaaataagtaa

SEQ ID NO: 81234 - DNA, 22 bp, synthetic construct
  misc_feature 1..22: note = chemically synthesized
  source 1..22: mol_type = other DNA
agacacaaaaaacccttaaaaa

SEQ ID NO: 81235 - DNA, 22 bp, synthetic construct
  misc_feature 1..22: note = chemically synthesized
  source 1..22: mol_type = other DNA
aaaaaaatcaatgaatccagga

SEQ ID NO: 81236 - DNA, 22 bp, synthetic construct
  misc_feature 1..22: note = chemically synthesized
  source 1..22: mol_type = other DNA
aaaaaatcaatgaatccaggag

SEQ ID NO: 81237 - DNA, 22 bp, synthetic construct
  misc_feature 1..22: note = chemically synthesized
  source 1..22: mol_type = other DNA
gttttttgaaaagatcaacaaa

SEQ ID NO: 81238 - DNA, 22 bp, synthetic construct
  misc_feature 1..22: note = chemically synthesized
  source 1..22: mol_type = other DNA
tttgaaaagatcaacaaaattg

SEQ ID NO: 81239 - DNA, 22 bp, synthetic construct
  misc_feature 1..22: note = chemically synthesized
  source 1..22: mol_type = other DNA
ttgaaaagatcaacaaaattga

SEQ ID NO: 81240 - DNA, 22 bp, synthetic construct
  misc_feature 1..22: note = chemically synthesized
  source 1..22: mol_type = other DNA
tgaaaagatcaacaaaattgat

SEQ ID NO: 81241 - DNA, 22 bp, synthetic construct
  misc_feature 1..22: note = chemically synthesized
  source 1..22: mol_type = other DNA
gaaaagatcaacaaaattgata

SEQ ID NO: 81242 - DNA, 22 bp, synthetic construct
  misc_feature 1..22: note = chemically synthesized
  source 1..22: mol_type = other DNA
aaaagatcaacaaaattgatag

SEQ ID NO: 81243 - DNA, 22 bp, synthetic construct
  misc_feature 1..22: note = chemically synthesized
  source 1..22: mol_type = other DNA
atagactgctagcaagactaat

SEQ ID NO: 81244 - DNA, 22 bp, synthetic construct
  misc_feature 1..22: note = chemically synthesized
  source 1..22: mol_type = other DNA
ctagcaagactaataaagaaga

SEQ ID NO: 81245 - DNA, 22 bp, synthetic construct
  misc_feature 1..22: note = chemically synthesized
  source 1..22: mol_type = other DNA
gcaagactaataaagaagaaaa

SEQ ID NO: 81246 - DNA, 22 bp, synthetic construct
  misc_feature 1..22: note = chemically synthesized
  source 1..22: mol_type = other DNA
ataaagaagaaaagagagaaga

SEQ ID NO: 81247 - DNA, 22 bp, synthetic construct
  misc_feature 1..22: note = chemically synthesized
  source 1..22: mol_type = other DNA
aaatagatgcaataagaaatga

SEQ ID NO: 81248 - DNA, 22 bp, synthetic construct
  misc_feature 1..22: note = chemically synthesized
  source 1..22: mol_type = other DNA
ccatcagagaatactataaaca

SEQ ID NO: 81249 - DNA, 22 bp, synthetic construct
  misc_feature 1..22: note = chemically synthesized
  source 1..22: mol_type = other DNA
taaacacctctacgcaaataaa

SEQ ID NO: 81250 - DNA, 22 bp, synthetic construct
  misc_feature 1..22: note = chemically synthesized
  source 1..22: mol_type = other DNA
tacgcaaataaactagaaaatc

SEQ ID NO: 81251 - DNA, 22 bp, synthetic construct
  misc_feature 1..22: note = chemically synthesized
  source 1..22: mol_type = other DNA
cgcaaataaactagaaaatcta

SEQ ID NO: 81252 - DNA, 22 bp, synthetic construct
  misc_feature 1..22: note = chemically synthesized
  source 1..22: mol_type = other DNA
gaaaatctagtagaaatggata

SEQ ID NO: 81253 - DNA, 22 bp, synthetic construct
  misc_feature 1..22: note = chemically synthesized
  source 1..22: mol_type = other DNA
gtagaaatggataaattcctcg

SEQ ID NO: 81254 - DNA, 22 bp, synthetic construct
  misc_feature 1..22: note = chemically synthesized
  source 1..22: mol_type = other DNA
ctcgacacatacaccctcccaa

SEQ ID NO: 81255 - DNA, 22 bp, synthetic construct
  misc_feature 1..22: note = chemically synthesized
  source 1..22: mol_type = other DNA
gacacatacaccctcccaagac

SEQ ID NO: 81256 - DNA, 22 bp, synthetic construct
  misc_feature 1..22: note = chemically synthesized
  source 1..22: mol_type = other DNA
ccaagactaaaccagggagaaa

SEQ ID NO: 81257 - DNA, 22 bp, synthetic construct
  misc_feature 1..22: note = chemically synthesized
  source 1..22: mol_type = other DNA
aaccagggagaaattgaatctc

SEQ ID NO: 81258 - DNA, 22 bp, synthetic construct
  misc_feature 1..22: note = chemically synthesized
  source 1..22: mol_type = other DNA
aatctcttaatagacaaataat

SEQ ID NO: 81259 - DNA, 22 bp, synthetic construct
  misc_feature 1..22: note = chemically synthesized
  source 1..22: mol_type = other DNA
ttaatagacaaataataggctc

SEQ ID NO: 81260 - DNA, 22 bp, synthetic construct
  misc_feature 1..22: note = chemically synthesized
  source 1..22: mol_type = other DNA
aatagacaaataataggctctg

SEQ ID NO: 81261 - DNA, 22 bp, synthetic construct
  misc_feature 1..22: note = chemically synthesized
  source 1..22: mol_type = other DNA
atagacaaataataggctctga

SEQ ID NO: 81262 - DNA, 22 bp, synthetic construct
  misc_feature 1..22: note = chemically synthesized
  source 1..22: mol_type = other DNA
tgaaattgagacaataattaat

SEQ ID NO: 81263 - DNA, 22 bp, synthetic construct
  misc_feature 1..22: note = chemically synthesized
  source 1..22: mol_type = other DNA
aaattgagacaataattaatag

SEQ ID NO: 81264 - DNA, 22 bp, synthetic construct
  misc_feature 1..22: note = chemically synthesized
  source 1..22: mol_type = other DNA
agacaataattaatagtttaca

SEQ ID NO: 81265 - DNA, 22 bp, synthetic construct
  misc_feature 1..22: note = chemically synthesized
  source 1..22: mol_type = other DNA
atagtttacacattgtatatct

SEQ ID NO: 81266 - DNA, 22 bp, synthetic construct
  misc_feature 1..22: note = chemically synthesized
  source 1..22: mol_type = other DNA
acacattgtatatctaagtacc

SEQ ID NO: 81267 - DNA, 22 bp, synthetic construct
  misc_feature 1..22: note = chemically synthesized
  source 1..22: mol_type = other DNA
cacattgtatatctaagtacca

SEQ ID NO: 81268 - DNA, 22 bp, synthetic construct
  misc_feature 1..22: note = chemically synthesized
  source 1..22: mol_type = other DNA
tatatctaagtaccaccacagc

SEQ ID NO: 81269 - DNA, 22 bp, synthetic construct
  misc_feature 1..22: note = chemically synthesized
  source 1..22: mol_type = other DNA
agtaccaccacagcagcaagta

SEQ ID NO: 81270 - DNA, 22 bp, synthetic construct
  misc_feature 1..22: note = chemically synthesized
  source 1..22: mol_type = other DNA
aatgttttcacattataaaaca

SEQ ID NO: 81271 - DNA, 22 bp, synthetic construct
  misc_feature 1..22: note = chemically synthesized
  source 1..22: mol_type = other DNA
atgttttcacattataaaacag

SEQ ID NO: 81272 - DNA, 22 bp, synthetic construct
  misc_feature 1..22: note = chemically synthesized
  source 1..22: mol_type = other DNA
tcacattataaaacaggagtct

SEQ ID NO: 81273 - DNA, 22 bp, synthetic construct
  misc_feature 1..22: note = chemically synthesized
  source 1..22: mol_type = other DNA
cacattataaaacaggagtcta

SEQ ID NO: 81274 - DNA, 22 bp, synthetic construct
  misc_feature 1..22: note = chemically synthesized
  source 1..22: mol_type = other DNA
acattataaaacaggagtctat

SEQ ID NO: 81275 - DNA, 22 bp, synthetic construct
  misc_feature 1..22: note = chemically synthesized
  source 1..22: mol_type = other DNA
taaaacaggagtctatattact

SEQ ID NO: 81276 - DNA, 22 bp, synthetic construct
  misc_feature 1..22: note = chemically synthesized
  source 1..22: mol_type = other DNA
tattacttcaatatattacttg

SEQ ID NO: 81277 - DNA, 22 bp, synthetic construct
  misc_feature 1..22: note = chemically synthesized
  source 1..22: mol_type = other DNA
cttcaatatattacttgttatt

SEQ ID NO: 81278 - DNA, 22 bp, synthetic construct
  misc_feature 1..22: note = chemically synthesized
  source 1..22: mol_type = other DNA
caatatattacttgttattact

SEQ ID NO: 81279 - DNA, 22 bp, synthetic construct
  misc_feature 1..22: note = chemically synthesized
  source 1..22: mol_type = other DNA
aatatattacttgttattacta

SEQ ID NO: 81280 - DNA, 22 bp, synthetic construct
  misc_feature 1..22: note = chemically synthesized
  source 1..22: mol_type = other DNA
cttgttattactaattactagt

SEQ ID NO: 81281 - DNA, 22 bp, synthetic construct
  misc_feature 1..22: note = chemically synthesized
  source 1..22: mol_type = other DNA
gttattactaattactagttct

SEQ ID NO: 81282 - DNA, 22 bp, synthetic construct
  misc_feature 1..22: note = chemically synthesized
  source 1..22: mol_type = other DNA
ttattactaattactagttcta

SEQ ID NO: 81283 - DNA, 22 bp, synthetic construct
  misc_feature 1..22: note = chemically synthesized
  source 1..22: mol_type = other DNA
ttactaattactagttctaaaa

SEQ ID NO: 81284 - DNA, 22 bp, synthetic construct
  misc_feature 1..22: note = chemically synthesized
  source 1..22: mol_type = other DNA
ctaattactagttctaaaaaat

SEQ ID NO: 81285 - DNA, 22 bp, synthetic construct
  misc_feature 1..22: note = chemically synthesized
  source 1..22: mol_type = other DNA
attactagttctaaaaaatgtg

SEQ ID NO: 81286 - DNA, 22 bp, synthetic construct
  misc_feature 1..22: note = chemically synthesized
  source 1..22: mol_type = other DNA
ctagttctaaaaaatgtggata

SEQ ID NO: 81287 - DNA, 22 bp, synthetic construct
  misc_feature 1..22: note = chemically synthesized
  source 1..22: mol_type = other DNA
gttctaaaaaatgtggatagaa

SEQ ID NO: 81288 - DNA, 22 bp, synthetic construct
  misc_feature 1..22: note = chemically synthesized
  source 1..22: mol_type = other DNA
taaaaaatgtggatagaagcaa

SEQ ID NO: 81289 - DNA, 22 bp, synthetic construct
  misc_feature 1..22: note = chemically synthesized
  source 1..22: mol_type = other DNA
aaaaatgtggatagaagcaagt

SEQ ID NO: 81290 - DNA, 22 bp, synthetic construct
  misc_feature 1..22: note = chemically synthesized
  source 1..22: mol_type = other DNA
aatattgagtggaaaataagat

SEQ ID NO: 81291 - DNA, 22 bp, synthetic construct
  misc_feature 1..22: note = chemically synthesized
  source 1..22: mol_type = other DNA
atattgagtggaaaataagatt

SEQ ID NO: 81292 - DNA, 22 bp, synthetic construct
  misc_feature 1..22: note = chemically synthesized
  source 1..22: mol_type = other DNA
agtggaaaataagattaggaga

SEQ ID NO: 81293 - DNA, 22 bp, synthetic construct
  misc_feature 1..22: note = chemically synthesized
  source 1..22: mol_type = other DNA
ggagatgcaacaccagggtagg

SEQ ID NO: 81294 - DNA, 22 bp, synthetic construct
  misc_feature 1..22: note = chemically synthesized
  source 1..22: mol_type = other DNA
gataggtagatagctagctagc

SEQ ID NO: 81295 - DNA, 22 bp, synthetic construct
  misc_feature 1..22: note = chemically synthesized
  source 1..22: mol_type = other DNA
gctagctagctagctagctagc

SEQ ID NO: 81296 - DNA, 22 bp, synthetic construct
  misc_feature 1..22: note = chemically synthesized
  source 1..22: mol_type = other DNA
gctagctagctagctagctaga

SEQ ID NO: 81297 - DNA, 22 bp, synthetic construct
  misc_feature 1..22: note = chemically synthesized
  source 1..22: mol_type = other DNA
gctagctagctagctagaaaga

SEQ ID NO: 81298 - DNA, 22 bp, synthetic construct
  misc_feature 1..22: note = chemically synthesized
  source 1..22: mol_type = other DNA
gctagctagctagaaagataga

SEQ ID NO: 81299 - DNA, 22 bp, synthetic construct
  misc_feature 1..22: note = chemically synthesized
  source 1..22: mol_type = other DNA
gctagctagaaagatagataga

SEQ ID NO: 81300 - DNA, 22 bp, synthetic construct
  misc_feature 1..22: note = chemically synthesized
  source 1..22: mol_type = other DNA
gctagaaagatagatagataga

SEQ ID NO: 81301 - DNA, 22 bp, synthetic construct
  misc_feature 1..22: note = chemically synthesized
  source 1..22: mol_type = other DNA
gaaagatagatagatagataga

SEQ ID NO: 81302 - DNA, 22 bp, synthetic construct
  misc_feature 1..22: note = chemically synthesized
  source 1..22: mol_type = other DNA
ctatactctctaagttcccttt

SEQ ID NO: 81303 - DNA, 22 bp, synthetic construct
  misc_feature 1..22: note = chemically synthesized
  source 1..22: mol_type = other DNA
tatactctctaagttccctttc

SEQ ID NO: 81304 - DNA, 22 bp, synthetic construct
  misc_feature 1..22: note = chemically synthesized
  source 1..22: mol_type = other DNA
tactctctaagttccctttctc

SEQ ID NO: 81305 - DNA, 22 bp, synthetic construct
  misc_feature 1..22: note = chemically synthesized
  source 1..22: mol_type = other DNA
tctaagttccctttctcaagta

SEQ ID NO: 81306 - DNA, 22 bp, synthetic construct
  misc_feature 1..22: note = chemically synthesized
  source 1..22: mol_type = other DNA
taagttccctttctcaagtaaa

SEQ ID NO: 81307 - DNA, 22 bp, synthetic construct
  misc_feature 1..22: note = chemically synthesized
  source 1..22: mol_type = other DNA
agttccctttctcaagtaaaag

SEQ ID NO: 81308 - DNA, 22 bp, synthetic construct
  misc_feature 1..22: note = chemically synthesized
  source 1..22: mol_type = other DNA
cctttctcaagtaaaagctggc

SEQ ID NO: 81309 - DNA, 22 bp, synthetic construct
  misc_feature 1..22: note = chemically synthesized
  source 1..22: mol_type = other DNA
tctcaagtaaaagctggctaaa

SEQ ID NO: 81310 - DNA, 22 bp, synthetic construct
  misc_feature 1..22: note = chemically synthesized
  source 1..22: mol_type = other DNA
ctcaagtaaaagctggctaaag

SEQ ID NO: 81311 - DNA, 22 bp, synthetic construct
  misc_feature 1..22: note = chemically synthesized
  source 1..22: mol_type = other DNA
tcaagtaaaagctggctaaagt

SEQ ID NO: 81312 - DNA, 22 bp, synthetic construct
  misc_feature 1..22: note = chemically synthesized
  source 1..22: mol_type = other DNA
aagtaaaagctggctaaagttc

SEQ ID NO: 81313 - DNA, 22 bp, synthetic construct
  misc_feature 1..22: note = chemically synthesized
  source 1..22: mol_type = other DNA
gctaaagttcttgttttttgag

SEQ ID NO: 81314 - DNA, 22 bp, synthetic construct
  misc_feature 1..22: note = chemically synthesized
  source 1..22: mol_type = other DNA
aagttcttgttttttgaggtgg

SEQ ID NO: 81315 - DNA, 22 bp, synthetic construct
  misc_feature 1..22: note = chemically synthesized
  source 1..22: mol_type = other DNA
ttgttttttgaggtggcacagg

SEQ ID NO: 81316 - DNA, 22 bp, synthetic construct
  misc_feature 1..22: note = chemically synthesized
  source 1..22: mol_type = other DNA
gttttttgaggtggcacagggg

SEQ ID NO: 81317 - DNA, 22 bp, synthetic construct
  misc_feature 1..22: note = chemically synthesized
  source 1..22: mol_type = other DNA
ttttttgaggtggcacaggggc

SEQ ID NO: 81318 - DNA, 22 bp, synthetic construct
  misc_feature 1..22: note = chemically synthesized
  source 1..22: mol_type = other DNA
tttgaggtggcacaggggctta

SEQ ID NO: 81319 - DNA, 22 bp, synthetic construct
  misc_feature 1..22: note = chemically synthesized
  source 1..22: mol_type = other DNA
ttgaggtggcacaggggcttaa

SEQ ID NO: 81320 - DNA, 22 bp, synthetic construct
  misc_feature 1..22: note = chemically synthesized
  source 1..22: mol_type = other DNA
tgaggtggcacaggggcttaag

SEQ ID NO: 81321 - DNA, 22 bp, synthetic construct
  misc_feature 1..22: note = chemically synthesized
  source 1..22: mol_type = other DNA
gaggtggcacaggggcttaaga

SEQ ID NO: 81322 - DNA, 22 bp, synthetic construct
  misc_feature 1..22: note = chemically synthesized
  source 1..22: mol_type = other DNA
aggtggcacaggggcttaagaa

SEQ ID NO: 81323 - DNA, 22 bp, synthetic construct
  misc_feature 1..22: note = chemically synthesized
  source 1..22: mol_type = other DNA
aagaaatgactgctcccccatc

SEQ ID NO: 81324 - DNA, 22 bp, synthetic construct
  misc_feature 1..22: note = chemically synthesized
  source 1..22: mol_type = other DNA
agaaatgactgctcccccatct

SEQ ID NO: 81325 - DNA, 22 bp, synthetic construct
  misc_feature 1..22: note = chemically synthesized
  source 1..22: mol_type = other DNA
ctcccccatctcttgattccat

SEQ ID NO: 81326 - DNA, 22 bp, synthetic construct
  misc_feature 1..22: note = chemically synthesized
  source 1..22: mol_type = other DNA
ccccatctcttgattccattac

SEQ ID NO: 81327 - DNA, 22 bp, synthetic construct
  misc_feature 1..22: note = chemically synthesized
  source 1..22: mol_type = other DNA
ttgattccattacagttcaata

SEQ ID NO: 81328 - DNA, 22 bp, synthetic construct
  misc_feature 1..22: note = chemically synthesized
  source 1..22: mol_type = other DNA
gattccattacagttcaatata

SEQ ID NO: 81329 - DNA, 22 bp, synthetic construct
  misc_feature 1..22: note = chemically synthesized
  source 1..22: mol_type = other DNA
attccattacagttcaatatac

SEQ ID NO: 81330 - DNA, 22 bp, synthetic construct
  misc_feature 1..22: note = chemically synthesized
  source 1..22: mol_type = other DNA
cattacagttcaatatactgat

SEQ ID NO: 81331 - DNA, 22 bp, synthetic construct
  misc_feature 1..22: note = chemically synthesized
  source 1..22: mol_type = other DNA
cagttcaatatactgatcattg

SEQ ID NO: 81332 - DNA, 22 bp, synthetic construct
  misc_feature 1..22: note = chemically synthesized
  source 1..22: mol_type = other DNA
aatatactgatcattgtatagc

SEQ ID NO: 81333 - DNA, 22 bp, synthetic construct
  misc_feature 1..22: note = chemically synthesized
  source 1..22: mol_type = other DNA
atcattgtatagcatagtctgc

SEQ ID NO: 81334 - DNA, 22 bp, synthetic construct
  misc_feature 1..22: note = chemically synthesized
  source 1..22: mol_type = other DNA
tatagcatagtctgctaccttt

SEQ ID NO: 81335 - DNA, 22 bp, synthetic construct
  misc_feature 1..22: note = chemically synthesized
  source 1..22: mol_type = other DNA
ctacctttacttttgtttttgc

SEQ ID NO: 81336 - DNA, 22 bp, synthetic construct
  misc_feature 1..22: note = chemically synthesized
  source 1..22: mol_type = other DNA
cctttacttttgtttttgctaa

SEQ ID NO: 81337 - DNA, 22 bp, synthetic construct
  misc_feature 1..22: note = chemically synthesized
  source 1..22: mol_type = other DNA
tacttttgtttttgctaagtgc

SEQ ID NO: 81338 - DNA, 22 bp, synthetic construct
  misc_feature 1..22: note = chemically synthesized
  source 1..22: mol_type = other DNA
acttttgtttttgctaagtgct

SEQ ID NO: 81339 - DNA, 22 bp, synthetic construct
  misc_feature 1..22: note = chemically synthesized
  source 1..22: mol_type = other DNA
cttttgtttttgctaagtgcta

SEQ ID NO: 81340 - DNA, 22 bp, synthetic construct
  misc_feature 1..22: note = chemically synthesized
  source 1..22: mol_type = other DNA
ttgtttttgctaagtgctaaat

SEQ ID NO: 81341 - DNA, 22 bp, synthetic construct
  misc_feature 1..22: note = chemically synthesized
  source 1..22: mol_type = other DNA
tgtttttgctaagtgctaaata

SEQ ID NO: 81342 - DNA, 22 bp, synthetic construct
  misc_feature 1..22: note = chemically synthesized
  source 1..22: mol_type = other DNA
gtttttgctaagtgctaaatat

SEQ ID NO: 81343 - DNA, 22 bp, synthetic construct
  misc_feature 1..22: note = chemically synthesized
  source 1..22: mol_type = other DNA
tttttgctaagtgctaaatatt

SEQ ID NO: 81344 - DNA, 22 bp, synthetic construct
  misc_feature 1..22: note = chemically synthesized
  source 1..22: mol_type = other DNA
ttgctaagtgctaaatattctg

SEQ ID NO: 81345 - DNA, 22 bp, synthetic construct
  misc_feature 1..22: note = chemically synthesized
  source 1..22: mol_type = other DNA
tgctaagtgctaaatattctgg

SEQ ID NO: 81346 - DNA, 22 bp, synthetic construct
  misc_feature 1..22: note = chemically synthesized
  source 1..22: mol_type = other DNA
gctaagtgctaaatattctggt

SEQ ID NO: 81347 - DNA, 22 bp, synthetic construct
  misc_feature 1..22: note = chemically synthesized
  source 1..22: mol_type = other DNA
ctaagtgctaaatattctggtc

SEQ ID NO: 81348 - DNA, 22 bp, synthetic construct
  misc_feature 1..22: note = chemically synthesized
  source 1..22: mol_type = other DNA
agtgctaaatattctggtctca

SEQ ID NO: 81349 - DNA, 22 bp, synthetic construct
  misc_feature 1..22: note = chemically synthesized
  source 1..22: mol_type = other DNA
aatattctggtctcaaatttta

SEQ ID NO: 81350 - DNA, 22 bp, synthetic construct
  misc_feature 1..22: note = chemically synthesized
  source 1..22: mol_type = other DNA
tggtctcaaattttatatgatg

SEQ ID NO: 81351 - DNA, 22 bp, synthetic construct
  misc_feature 1..22: note = chemically synthesized
  source 1..22: mol_type = other DNA
gtctcaaattttatatgatgga

SEQ ID NO: 81352 - DNA, 22 bp, synthetic construct
  misc_feature 1..22: note = chemically synthesized
  source 1..22: mol_type = other DNA
aaattttatatgatggaaatgt

SEQ ID NO: 81353 - DNA, 22 bp, synthetic construct
  misc_feature 1..22: note = chemically synthesized
  source 1..22: mol_type = other DNA
tatatgatggaaatgtttgggt

SEQ ID NO: 81354 - DNA, 22 bp, synthetic construct
  misc_feature 1..22: note = chemically synthesized
  source 1..22: mol_type = other DNA
atatgatggaaatgtttgggtc

SEQ ID NO: 81355 - DNA, 22 bp, synthetic construct
  misc_feature 1..22: note = chemically synthesized
  source 1..22: mol_type = other DNA
tatgatggaaatgtttgggtcc

SEQ ID NO: 81356 - DNA, 22 bp, synthetic construct
  misc_feature 1..22: note = chemically synthesized
  source 1..22: mol_type = other DNA
gggtcccattttttgagttaca

SEQ ID NO: 81357 - DNA, 22 bp, synthetic construct
  misc_feature 1..22: note = chemically synthesized
  source 1..22: mol_type = other DNA
ggtcccattttttgagttacag

SEQ ID NO: 81358 - DNA, 22 bp, synthetic construct
  misc_feature 1..22: note = chemically synthesized
  source 1..22: mol_type = other DNA
tttgagttacagtttagaattt

SEQ ID NO: 81359 - DNA, 22 bp, synthetic construct
  misc_feature 1..22: note = chemically synthesized
  source 1..22: mol_type = other DNA
ttgagttacagtttagaattta

SEQ ID NO: 81360 - DNA, 22 bp, synthetic construct
  misc_feature 1..22: note = chemically synthesized
  source 1..22: mol_type = other DNA
tgagttacagtttagaatttaa

SEQ ID NO: 81361 - DNA, 22 bp, synthetic construct
  misc_feature 1..22: note = chemically synthesized
  source 1..22: mol_type = other DNA
gagttacagtttagaatttaaa

SEQ ID NO: 81362 - DNA, 22 bp, synthetic construct
  misc_feature 1..22: note = chemically synthesized
  source 1..22: mol_type = other DNA
agttacagtttagaatttaaaa

SEQ ID NO: 81363 - DNA, 22 bp, synthetic construct
  misc_feature 1..22: note = chemically synthesized
  source 1..22: mol_type = other DNA
cagtttagaatttaaaataccc

SEQ ID NO: 81364 - DNA, 22 bp, synthetic construct
  misc_feature 1..22: note = chemically synthesized
  source 1..22: mol_type = other DNA
agaatttaaaatacccacacag

SEQ ID NO: 81365 - DNA, 22 bp, synthetic construct
  misc_feature 1..22: note = chemically synthesized
  source 1..22: mol_type = other DNA
gaatttaaaatacccacacagc

SEQ ID NO: 81366 - DNA, 22 bp, synthetic construct
  misc_feature 1..22: note = chemically synthesized
  source 1..22: mol_type = other DNA
aaaatacccacacagctgagca

SEQ ID NO: 81367 - DNA, 22 bp, synthetic construct
  misc_feature 1..22: note = chemically synthesized
  source 1..22: mol_type = other DNA
aaatacccacacagctgagcaa

SEQ ID NO: 81368 - DNA, 22 bp, synthetic construct
  misc_feature 1..22: note = chemically synthesized
  source 1..22: mol_type = other DNA
agcaatttacccttgctttaag

SEQ ID NO: 81369 - DNA, 22 bp, synthetic construct
  misc_feature 1..22: note = chemically synthesized
  source 1..22: mol_type = other DNA
acccttgctttaagttggaatg

SEQ ID NO: 81370 - DNA, 22 bp, synthetic construct
  misc_feature 1..22: note = chemically synthesized
  source 1..22: mol_type = other DNA
cccttgctttaagttggaatga

SEQ ID NO: 81371 - DNA, 22 bp, synthetic construct
  misc_feature 1..22: note = chemically synthesized
  source 1..22: mol_type = other DNA
gctttaagttggaatgaggttc

SEQ ID NO: 81372 - DNA, 22 bp, synthetic construct
  misc_feature 1..22: note = chemically synthesized
  source 1..22: mol_type = other DNA
ctttaagttggaatgaggttct

SEQ ID NO: 81373 - DNA, 22 bp, synthetic construct
  misc_feature 1..22: note = chemically synthesized
  source 1..22: mol_type = other DNA
taagttggaatgaggttcttta

SEQ ID NO: 81374 - DNA, 22 bp, synthetic construct
  misc_feature 1..22: note = chemically synthesized
  source 1..22: mol_type = other DNA
aagttggaatgaggttctttaa

SEQ ID NO: 81375 - DNA, 22 bp, synthetic construct
  misc_feature 1..22: note = chemically synthesized
  source 1..22: mol_type = other DNA
agttggaatgaggttctttaaa

SEQ ID NO: 81376 - DNA, 22 bp, synthetic construct
  misc_feature 1..22: note = chemically synthesized
  source 1..22: mol_type = other DNA
gaatgaggttctttaaaaatat

SEQ ID NO: 81377 - DNA, 22 bp, synthetic construct
  misc_feature 1..22: note = chemically synthesized
  source 1..22: mol_type = other DNA
tttaaaaatattaagataaaat

SEQ ID NO: 81378 - DNA, 22 bp, synthetic construct
  misc_feature 1..22: note = chemically synthesized
  source 1..22: mol_type = other DNA
taaaaatattaagataaaattt

SEQ ID NO: 81379 - DNA, 22 bp, synthetic construct
  misc_feature 1..22: note = chemically synthesized
  source 1..22: mol_type = other DNA
aaaaatattaagataaaatttg

SEQ ID NO: 81380 - DNA, 22 bp, synthetic construct
  misc_feature 1..22: note = chemically synthesized
  source 1..22: mol_type = other DNA
aaaatattaagataaaatttga

SEQ ID NO: 81381 - DNA, 22 bp, synthetic construct
  misc_feature 1..22: note = chemically synthesized
  source 1..22: mol_type = other DNA
agataaaatttgaagttattta

SEQ ID NO: 81382 - DNA, 22 bp, synthetic construct
  misc_feature 1..22: note = chemically synthesized
  source 1..22: mol_type = other DNA
gaagttatttaactctgtggat

SEQ ID NO: 81383 - DNA, 22 bp, synthetic construct
  misc_feature 1..22: note = chemically synthesized
  source 1..22: mol_type = other DNA
aagttatttaactctgtggatc

SEQ ID NO: 81384 - DNA, 22 bp, synthetic construct
  misc_feature 1..22: note = chemically synthesized
  source 1..22: mol_type = other DNA
tttaactctgtggatctacttt

SEQ ID NO: 81385 - DNA, 22 bp, synthetic construct
  misc_feature 1..22: note = chemically synthesized
  source 1..22: mol_type = other DNA
aactctgtggatctactttatt

SEQ ID NO: 81386 - DNA, 22 bp, synthetic construct
  misc_feature 1..22: note = chemically synthesized
  source 1..22: mol_type = other DNA
actctgtggatctactttattt

SEQ ID NO: 81387 - DNA, 22 bp, synthetic construct
  misc_feature 1..22: note = chemically synthesized
  source 1..22: mol_type = other DNA
tgtggatctactttatttacat

SEQ ID NO: 81388 - DNA, 22 bp, synthetic construct
  misc_feature 1..22: note = chemically synthesized
  source 1..22: mol_type = other DNA
tggatctactttatttacataa

SEQ ID NO: 81389 - DNA, 22 bp, synthetic construct
  misc_feature 1..22: note = chemically synthesized
  source 1..22: mol_type = other DNA
ctttatttacataaactaattg

SEQ ID NO: 81390 - DNA, 22 bp, synthetic construct
  misc_feature 1..22: note = chemically synthesized
  source 1..22: mol_type = other DNA
tatttacataaactaattgttt

SEQ ID NO: 81391 - DNA, 22 bp, synthetic construct
  misc_feature 1..22: note = chemically synthesized
  source 1..22: mol_type = other DNA
atttacataaactaattgtttt

SEQ ID NO: 81392 - DNA, 22 bp, synthetic construct
  misc_feature 1..22: note = chemically synthesized
  source 1..22: mol_type = other DNA
tttacataaactaattgtttta

SEQ ID NO: 81393 - DNA, 22 bp, synthetic construct
  misc_feature 1..22: note = chemically synthesized
  source 1..22: mol_type = other DNA
acataaactaattgttttacta

SEQ ID NO: 81394 - DNA, 22 bp, synthetic construct
  misc_feature 1..22: note = chemically synthesized
  source 1..22: mol_type = other DNA
cataaactaattgttttactat

SEQ ID NO: 81395 - DNA, 22 bp, synthetic construct
  misc_feature 1..22: note = chemically synthesized
  source 1..22: mol_type = other DNA
attgttttactatttaatatat

SEQ ID NO: 81396 - DNA, 22 bp, synthetic construct
  misc_feature 1..22: note = chemically synthesized
  source 1..22: mol_type = other DNA
ttttactatttaatatatatct

SEQ ID NO: 81397 - DNA, 22 bp, synthetic construct
  misc_feature 1..22: note = chemically synthesized
  source 1..22: mol_type = other DNA
tactatttaatatatatctcac

SEQ ID NO: 81398 - DNA, 22 bp, synthetic construct
  misc_feature 1..22: note = chemically synthesized
  source 1..22: mol_type = other DNA
actatttaatatatatctcaca

SEQ ID NO: 81399 - DNA, 22 bp, synthetic construct
  misc_feature 1..22: note = chemically synthesized
  source 1..22: mol_type = other DNA
ctatttaatatatatctcacat

SEQ ID NO: 81400 - DNA, 22 bp, synthetic construct
  misc_feature 1..22: note = chemically synthesized
  source 1..22: mol_type = other DNA
tttaatatatatctcacattgt

SEQ ID NO: 81401 - DNA, 22 bp, synthetic construct
  misc_feature 1..22: note = chemically synthesized
  source 1..22: mol_type = other DNA
aatatatatctcacattgttag

SEQ ID NO: 81402 - DNA, 22 bp, synthetic construct
  misc_feature 1..22: note = chemically synthesized
  source 1..22: mol_type = other DNA
atatatatctcacattgttaga

SEQ ID NO: 81403 - DNA, 22 bp, synthetic construct
  misc_feature 1..22: note = chemically synthesized
  source 1..22: mol_type = other DNA
acattgttagaatattttaagt

SEQ ID NO: 81404 - DNA, 22 bp, synthetic construct
  misc_feature 1..22: note = chemically synthesized
  source 1..22: mol_type = other DNA
ttagaatattttaagtaaactg

SEQ ID NO: 81405 - DNA, 22 bp, synthetic construct
  misc_feature 1..22: note = chemically synthesized
  source 1..22: mol_type = other DNA
gaatattttaagtaaactgttg

SEQ ID NO: 81406 - DNA, 22 bp, synthetic construct
  misc_feature 1..22: note = chemically synthesized
  source 1..22: mol_type = other DNA
taagtaaactgttgatgtttca

SEQ ID NO: 81407 - DNA, 22 bp, synthetic construct
  misc_feature 1..22: note = chemically synthesized
  source 1..22: mol_type = other DNA
aagtaaactgttgatgtttcag

SEQ ID NO: 81408 - DNA, 22 bp, synthetic construct
  misc_feature 1..22: note = chemically synthesized
  source 1..22: mol_type = other DNA
agtaaactgttgatgtttcaga

SEQ ID NO: 81409 - DNA, 22 bp, synthetic construct
  misc_feature 1..22: note = chemically synthesized
  source 1..22: mol_type = other DNA
ttgatgtttcagagaaaggaaa

SEQ ID NO: 81410 - DNA, 22 bp, synthetic construct
  misc_feature 1..22: note = chemically synthesized
  source 1..22: mol_type = other DNA
atgtttcagagaaaggaaagaa

SEQ ID NO: 81411 - DNA, 22 bp, synthetic construct
  misc_feature 1..22: note = chemically synthesized
  source 1..22: mol_type = other DNA
cagagaaaggaaagaataattt

SEQ ID NO: 81412 - DNA, 22 bp, synthetic construct
  misc_feature 1..22: note = chemically synthesized
  source 1..22: mol_type = other DNA
agagaaaggaaagaataatttt

SEQ ID NO: 81413 - DNA, 22 bp, synthetic construct
  misc_feature 1..22: note = chemically synthesized
  source 1..22: mol_type = other DNA
tgaagcattcctgacacagttc

SEQ ID NO: 81414 - DNA, 22 bp, synthetic construct
  misc_feature 1..22: note = chemically synthesized
  source 1..22: mol_type = other DNA
gaagcattcctgacacagttct

SEQ ID NO: 81415 - DNA, 22 bp, synthetic construct
  misc_feature 1..22: note = chemically synthesized
  source 1..22: mol_type = other DNA
aagcattcctgacacagttcta

SEQ ID NO: 81416 - DNA, 22 bp, synthetic construct
  misc_feature 1..22: note = chemically synthesized
  source 1..22: mol_type = other DNA
ctgacacagttctaggccagag

SEQ ID NO: 81417 - DNA, 22 bp, synthetic construct
  misc_feature 1..22: note = chemically synthesized
  source 1..22: mol_type = other DNA
acacagttctaggccagagcca

SEQ ID NO: 81418 - DNA, 22 bp, synthetic construct
  misc_feature 1..22: note = chemically synthesized
  source 1..22: mol_type = other DNA
taggccagagccatgcatgtga

SEQ ID NO: 81419 - DNA, 22 bp, synthetic construct
  misc_feature 1..22: note = chemically synthesized
  source 1..22: mol_type = other DNA
ggccagagccatgcatgtgagt

SEQ ID NO: 81420 - DNA, 22 bp, synthetic construct
  misc_feature 1..22: note = chemically synthesized
  source 1..22: mol_type = other DNA
tagaagtgagggttacagtgac

SEQ ID NO: 81421 - DNA, 22 bp, synthetic construct
  misc_feature 1..22: note = chemically synthesized
  source 1..22: mol_type = other DNA
cagtgactggggcttcatcagg

SEQ ID NO: 81422 - DNA, 22 bp, synthetic construct
  misc_feature 1..22: note = chemically synthesized
  source 1..22: mol_type = other DNA
gggcttcatcaggacattaggg

SEQ ID NO: 81423 - DNA, 22 bp, synthetic construct
  misc_feature 1..22: note = chemically synthesized
  source 1..22: mol_type = other DNA
catcaggacattagggatggga

SEQ ID NO: 81424 - DNA, 22 bp, synthetic construct
  misc_feature 1..22: note = chemically synthesized
  source 1..22: mol_type = other DNA
atcaggacattagggatgggag

SEQ ID NO: 81425 - DNA, 22 bp, synthetic construct
  misc_feature 1..22: note = chemically synthesized
  source 1..22: mol_type = other DNA
gggatgggagagaagaatctaa

SEQ ID NO: 81426 - DNA, 22 bp, synthetic construct
  misc_feature 1..22: note = chemically synthesized
  source 1..22: mol_type = other DNA
agtgaaaaaaaaatacaggaat

SEQ ID NO: 81427 - DNA, 22 bp, synthetic construct
  misc_feature 1..22: note = chemically synthesized
  source 1..22: mol_type = other DNA
tctggcctttaaattttttctg

SEQ ID NO: 81428 - DNA, 22 bp, synthetic construct
  misc_feature 1..22: note = chemically synthesized
  source 1..22: mol_type = other DNA
ctggcctttaaattttttctgg

SEQ ID NO: 81429 - DNA, 22 bp, synthetic construct
  misc_feature 1..22: note = chemically synthesized
  source 1..22: mol_type = other DNA
tggcctttaaattttttctggt

SEQ ID NO: 81430 - DNA, 22 bp, synthetic construct
  misc_feature 1..22: note = chemically synthesized
  source 1..22: mol_type = other DNA
gcctttaaattttttctggtga

SEQ ID NO: 81431 - DNA, 22 bp, synthetic construct
  misc_feature 1..22: note = chemically synthesized
  source 1..22: mol_type = other DNA
taaattttttctggtgatcttt

SEQ ID NO: 81432 - DNA, 22 bp, synthetic construct
  misc_feature 1..22: note = chemically synthesized
  source 1..22: mol_type = other DNA
aaattttttctggtgatctttt

SEQ ID NO: 81433 - DNA, 22 bp, synthetic construct
  misc_feature 1..22: note = chemically synthesized
  source 1..22: mol_type = other DNA
aattttttctggtgatcttttg

SEQ ID NO: 81434 - DNA, 22 bp, synthetic construct
  misc_feature 1..22: note = chemically synthesized
  source 1..22: mol_type = other DNA
tttctggtgatcttttgtgata

SEQ ID NO: 81435 - DNA, 22 bp, synthetic construct
  misc_feature 1..22: note = chemically synthesized
  source 1..22: mol_type = other DNA
ttctggtgatcttttgtgatac

SEQ ID NO: 81436 - DNA, 22 bp, synthetic construct
  misc_feature 1..22: note = chemically synthesized
  source 1..22: mol_type = other DNA
tctggtgatcttttgtgatacc

SEQ ID NO: 81437 - DNA, 22 bp, synthetic construct
  misc_feature 1..22: note = chemically synthesized
  source 1..22: mol_type = other DNA
ctggtgatcttttgtgatacct

SEQ ID NO: 81438 - DNA, 22 bp, synthetic construct
  misc_feature 1..22: note = chemically synthesized
  source 1..22: mol_type = other DNA
tggtgatcttttgtgataccta

SEQ ID NO: 81439 - DNA, 22 bp, synthetic construct
  misc_feature 1..22: note = chemically synthesized
  source 1..22: mol_type = other DNA
gtgatcttttgtgatacctatg

SEQ ID NO: 81440 - DNA, 22 bp, synthetic construct
  misc_feature 1..22: note = chemically synthesized
  source 1..22: mol_type = other DNA
ttgtgatacctatggtttttaa

SEQ ID NO: 81441 - DNA, 22 bp, synthetic construct
  misc_feature 1..22: note = chemically synthesized
  source 1..22: mol_type = other DNA
tgtgatacctatggtttttaaa

SEQ ID NO: 81442 - DNA, 22 bp, synthetic construct
  misc_feature 1..22: note = chemically synthesized
  source 1..22: mol_type = other DNA
gtgatacctatggtttttaaat

SEQ ID NO: 81443 - DNA, 22 bp, synthetic construct
  misc_feature 1..22: note = chemically synthesized
  source 1..22: mol_type = other DNA
tgatacctatggtttttaaata

SEQ ID NO: 81444 - DNA, 22 bp, synthetic construct
  misc_feature 1..22: note = chemically synthesized
  source 1..22: mol_type = other DNA
tggtttttaaatatttgtttgt

SEQ ID NO: 81445 - DNA, 22 bp, synthetic construct
  misc_feature 1..22: note = chemically synthesized
  source 1..22: mol_type = other DNA
ttaaatatttgtttgttttttt

SEQ ID NO: 81446 - DNA, 22 bp, synthetic construct
  misc_feature 1..22: note = chemically synthesized
  source 1..22: mol_type = other DNA
taaatatttgtttgtttttttg

SEQ ID NO: 81447 - DNA, 22 bp, synthetic construct
  misc_feature 1..22: note = chemically synthesized
  source 1..22: mol_type = other DNA
aaatatttgtttgtttttttgt

SEQ ID NO: 81448 - DNA, 22 bp, synthetic construct
  misc_feature 1..22: note = chemically synthesized
  source 1..22: mol_type = other DNA
aatatttgtttgtttttttgtt

SEQ ID NO: 81449 - DNA, 22 bp, synthetic construct
  misc_feature 1..22: note = chemically synthesized
  source 1..22: mol_type = other DNA
gtttgtttttttgtttttccta

SEQ ID NO: 81450 - DNA, 22 bp, synthetic construct
  misc_feature 1..22: note = chemically synthesized
  source 1..22: mol_type = other DNA
tttgtttttttgtttttcctaa

SEQ ID NO: 81451 - DNA, 22 bp, synthetic construct
  misc_feature 1..22: note = chemically synthesized
  source 1..22: mol_type = other DNA
gtttttttgtttttcctaaaac

SEQ ID NO: 81452 - DNA, 22 bp, synthetic construct
  misc_feature 1..22: note = chemically synthesized
  source 1..22: mol_type = other DNA
tttttttgtttttcctaaaaca

SEQ ID NO: 81453 - DNA, 22 bp, synthetic construct
  misc_feature 1..22: note = chemically synthesized
  source 1..22: mol_type = other DNA
ttttgtttttcctaaaacattg

SEQ ID NO: 81454 - DNA, 22 bp, synthetic construct
  misc_feature 1..22: note = chemically synthesized
  source 1..22: mol_type = other DNA
tttgtttttcctaaaacattgt

SEQ ID NO: 81455 - DNA, 22 bp, synthetic construct
  misc_feature 1..22: note = chemically synthesized
  source 1..22: mol_type = other DNA
ttgtttttcctaaaacattgtc

SEQ ID NO: 81456 - DNA, 22 bp, synthetic construct
  misc_feature 1..22: note = chemically synthesized
  source 1..22: mol_type = other DNA
tgtttttcctaaaacattgtca

SEQ ID NO: 81457 - DNA, 22 bp, synthetic construct
  misc_feature 1..22: note = chemically synthesized
  source 1..22: mol_type = other DNA
gtttttcctaaaacattgtcat

SEQ ID NO: 81458 - DNA, 22 bp, synthetic construct
  misc_feature 1..22: note = chemically synthesized
  source 1..22: mol_type = other DNA
tttttcctaaaacattgtcata

SEQ ID NO: 81459 - DNA, 22 bp, synthetic construct
  misc_feature 1..22: note = chemically synthesized
  source 1..22: mol_type = other DNA
ttcctaaaacattgtcatatgt

SEQ ID NO: 81460 - DNA, 22 bp, synthetic construct
  misc_feature 1..22: note = chemically synthesized
  source 1..22: mol_type = other DNA
tcctaaaacattgtcatatgtg

SEQ ID NO: 81461 - DNA, 22 bp, synthetic construct
  misc_feature 1..22: note = chemically synthesized
  source 1..22: mol_type = other DNA
cctaaaacattgtcatatgtga

SEQ ID NO: 81462 - DNA, 22 bp, synthetic construct
  misc_feature 1..22: note = chemically synthesized
  source 1..22: mol_type = other DNA
ctaaaacattgtcatatgtgat

SEQ ID NO: 81463 - DNA, 22 bp, synthetic construct
  misc_feature 1..22: note = chemically synthesized
  source 1..22: mol_type = other DNA
aaacattgtcatatgtgatgac

SEQ ID NO: 81464 - DNA, 22 bp, synthetic construct
  misc_feature 1..22: note = chemically synthesized
  source 1..22: mol_type = other DNA
tcatatgtgatgacccaaatta

SEQ ID NO: 81465 - DNA, 22 bp, synthetic construct
  misc_feature 1..22: note = chemically synthesized
  source 1..22: mol_type = other DNA
taggcctgggttccttgtagca

SEQ ID NO: 81466 - DNA, 22 bp, synthetic construct
  misc_feature 1..22: note = chemically synthesized
  source 1..22: mol_type = other DNA
ggttccttgtagcattattcta

SEQ ID NO: 81467 - DNA, 22 bp, synthetic construct
  misc_feature 1..22: note = chemically synthesized
  source 1..22: mol_type = other DNA
cttgtagcattattctaggata

SEQ ID NO: 81468 - DNA, 22 bp, synthetic construct
  misc_feature 1..22: note = chemically synthesized
  source 1..22: mol_type = other DNA
gtagcattattctaggatattt

SEQ ID NO: 81469 - DNA, 22 bp, synthetic construct
  misc_feature 1..22: note = chemically synthesized
  source 1..22: mol_type = other DNA
tagcattattctaggatatttc

SEQ ID NO: 81470 - DNA, 22 bp, synthetic construct
  misc_feature 1..22: note = chemically synthesized
  source 1..22: mol_type = other DNA
ttctaggatatttctgacagca

SEQ ID NO: 81471 - DNA, 22 bp, synthetic construct
  misc_feature 1..22: note = chemically synthesized
  source 1..22: mol_type = other DNA
taggatatttctgacagcatat

SEQ ID NO: 81472 - DNA, 22 bp, synthetic construct
  misc_feature 1..22: note = chemically synthesized
  source 1..22: mol_type = other DNA
ggatatttctgacagcatattc

SEQ ID NO: 81473 - DNA, 22 bp, synthetic construct
  misc_feature 1..22: note = chemically synthesized
  source 1..22: mol_type = other DNA
ctgacagcatattctgactgaa

SEQ ID NO: 81474 - DNA, 22 bp, synthetic construct
  misc_feature 1..22: note = chemically synthesized
  source 1..22: mol_type = other DNA
tgacagcatattctgactgaat

SEQ ID NO: 81475 - DNA, 22 bp, synthetic construct
  misc_feature 1..22: note = chemically synthesized
  source 1..22: mol_type = other DNA
acagcatattctgactgaatca

SEQ ID NO: 81476 - DNA, 22 bp, synthetic construct
  misc_feature 1..22: note = chemically synthesized
  source 1..22: mol_type = other DNA
tgactgaatcatgaatgtatcc

SEQ ID NO: 81477 - DNA, 22 bp, synthetic construct
  misc_feature 1..22: note = chemically synthesized
  source 1..22: mol_type = other DNA
actgaatcatgaatgtatccac

SEQ ID NO: 81478 - DNA, 22 bp, synthetic construct
  misc_feature 1..22: note = chemically synthesized
  source 1..22: mol_type = other DNA
aatcatgaatgtatccacggag

SEQ ID NO: 81479 - DNA, 22 bp, synthetic construct
  misc_feature 1..22: note = chemically synthesized
  source 1..22: mol_type = other DNA
taaggacatatatagttgtatt

SEQ ID NO: 81480 - DNA, 22 bp, synthetic construct
  misc_feature 1..22: note = chemically synthesized
  source 1..22: mol_type = other DNA
aggacatatatagttgtattta

SEQ ID NO: 81481 - DNA, 22 bp, synthetic construct
  misc_feature 1..22: note = chemically synthesized
  source 1..22: mol_type = other DNA
tatttaaatactggctaaatct

SEQ ID NO: 81482 - DNA, 22 bp, synthetic construct
  misc_feature 1..22: note = chemically synthesized
  source 1..22: mol_type = other DNA
aaatactggctaaatcttattc

SEQ ID NO: 81483 - DNA, 22 bp, synthetic construct
  misc_feature 1..22: note = chemically synthesized
  source 1..22: mol_type = other DNA
aatactggctaaatcttattct

SEQ ID NO: 81484 - DNA, 22 bp, synthetic construct
  misc_feature 1..22: note = chemically synthesized
  source 1..22: mol_type = other DNA
gctaaatcttattctgactcta

SEQ ID NO: 81485 - DNA, 22 bp, synthetic construct
  misc_feature 1..22: note = chemically synthesized
  source 1..22: mol_type = other DNA
aatcttattctgactctatgac

SEQ ID NO: 81486 - DNA, 22 bp, synthetic construct
  misc_feature 1..22: note = chemically synthesized
  source 1..22: mol_type = other DNA
attctgactctatgaccctgga

SEQ ID NO: 81487 - DNA, 22 bp, synthetic construct
  misc_feature 1..22: note = chemically synthesized
  source 1..22: mol_type = other DNA
ttctgactctatgaccctggac

SEQ ID NO: 81488 - DNA, 22 bp, synthetic construct
  misc_feature 1..22: note = chemically synthesized
  source 1..22: mol_type = other DNA
tgactctatgaccctggacacg

SEQ ID NO: 81489 - DNA, 22 bp, synthetic construct
  misc_feature 1..22: note = chemically synthesized
  source 1..22: mol_type = other DNA
actctatgaccctggacacgtc

SEQ ID NO: 81490 - DNA, 22 bp, synthetic construct
  misc_feature 1..22: note = chemically synthesized
  source 1..22: mol_type = other DNA
tatgaccctggacacgtcattt

SEQ ID NO: 81491 - DNA, 22 bp, synthetic construct
  misc_feature 1..22: note = chemically synthesized
  source 1..22: mol_type = other DNA
tgaccctggacacgtcatttaa

SEQ ID NO: 81492 - DNA, 22 bp, synthetic construct
  misc_feature 1..22: note = chemically synthesized
  source 1..22: mol_type = other DNA
gacacgtcatttaatttaaact

SEQ ID NO: 81493 - DNA, 22 bp, synthetic construct
  misc_feature 1..22: note = chemically synthesized
  source 1..22: mol_type = other DNA
aatttaaactttagttctcttg

SEQ ID NO: 81494 - DNA, 22 bp, synthetic construct
  misc_feature 1..22: note = chemically synthesized
  source 1..22: mol_type = other DNA
atttaaactttagttctcttgc

SEQ ID NO: 81495 - DNA, 22 bp, synthetic construct
  misc_feature 1..22: note = chemically synthesized
  source 1..22: mol_type = other DNA
aaactttagttctcttgcttgt

SEQ ID NO: 81496 - DNA, 22 bp, synthetic construct
  misc_feature 1..22: note = chemically synthesized
  source 1..22: mol_type = other DNA
aactttagttctcttgcttgta

SEQ ID NO: 81497 - DNA, 22 bp, synthetic construct
  misc_feature 1..22: note = chemically synthesized
  source 1..22: mol_type = other DNA
tagttctcttgcttgtaaaata

SEQ ID NO: 81498 - DNA, 22 bp, synthetic construct
  misc_feature 1..22: note = chemically synthesized
  source 1..22: mol_type = other DNA
agttctcttgcttgtaaaatac

SEQ ID NO: 81499 - DNA, 22 bp, synthetic construct
  misc_feature 1..22: note = chemically synthesized
  source 1..22: mol_type = other DNA
gttctcttgcttgtaaaatacc

SEQ ID NO: 81500 - DNA, 22 bp, synthetic construct
  misc_feature 1..22: note = chemically synthesized
  source 1..22: mol_type = other DNA
tcttgcttgtaaaatacctaac

SEQ ID NO: 81501 - DNA, 22 bp, synthetic construct
  misc_feature 1..22: note = chemically synthesized
  source 1..22: mol_type = other DNA
ttgcttgtaaaatacctaacaa

SEQ ID NO: 81502 - DNA, 22 bp, synthetic construct
  misc_feature 1..22: note = chemically synthesized
  source 1..22: mol_type = other DNA
gcttgtaaaatacctaacaata

SEQ ID NO: 81503 - DNA, 22 bp, synthetic construct
  misc_feature 1..22: note = chemically synthesized
  source 1..22: mol_type = other DNA
cttgtaaaatacctaacaataa

SEQ ID NO: 81504 - DNA, 22 bp, synthetic construct
  misc_feature 1..22: note = chemically synthesized
  source 1..22: mol_type = other DNA
gtaaaatacctaacaataagca

SEQ ID NO: 81505 - DNA, 22 bp, synthetic construct
  misc_feature 1..22: note = chemically synthesized
  source 1..22: mol_type = other DNA
taaaatacctaacaataagcat

SEQ ID NO: 81506 - DNA, 22 bp, synthetic construct
  misc_feature 1..22: note = chemically synthesized
  source 1..22: mol_type = other DNA
acaataagcataaatttaaaat

SEQ ID NO: 81507 - DNA, 22 bp, synthetic construct
  misc_feature 1..22: note = chemically synthesized
  source 1..22: mol_type = other DNA
aaaatgtgagtcttttctgaag

SEQ ID NO: 81508 - DNA, 22 bp, synthetic construct
  misc_feature 1..22: note = chemically synthesized
  source 1..22: mol_type = other DNA
aaatgtgagtcttttctgaagt

SEQ ID NO: 81509 - DNA, 22 bp, synthetic construct
  misc_feature 1..22: note = chemically synthesized
  source 1..22: mol_type = other DNA
ttctgaagtcagtgtcttagga

SEQ ID NO: 81510 - DNA, 22 bp, synthetic construct
  misc_feature 1..22: note = chemically synthesized
  source 1..22: mol_type = other DNA
tctgaagtcagtgtcttaggaa

SEQ ID NO: 81511 - DNA, 22 bp, synthetic construct
  misc_feature 1..22: note = chemically synthesized
  source 1..22: mol_type = other DNA
ctgaagtcagtgtcttaggaag

SEQ ID NO: 81512 - DNA, 22 bp, synthetic construct
  misc_feature 1..22: note = chemically synthesized
  source 1..22: mol_type = other DNA
tgaagtcagtgtcttaggaagg

SEQ ID NO: 81513 - DNA, 22 bp, synthetic construct
  misc_feature 1..22: note = chemically synthesized
  source 1..22: mol_type = other DNA
aagtcagtgtcttaggaaggta

SEQ ID NO: 81514 - DNA, 22 bp, synthetic construct
  misc_feature 1..22: note = chemically synthesized
  source 1..22: mol_type = other DNA
aggaaggtagctacataagtca

SEQ ID NO: 81515 - DNA, 22 bp, synthetic construct
  misc_feature 1..22: note = chemically synthesized
  source 1..22: mol_type = other DNA
ggaaggtagctacataagtcat

SEQ ID NO: 81516 - DNA, 22 bp, synthetic construct
  misc_feature 1..22: note = chemically synthesized
  source 1..22: mol_type = other DNA
cataagtcatttatatctctat

SEQ ID NO: 81517 - DNA, 22 bp, synthetic construct
  misc_feature 1..22: note = chemically synthesized
  source 1..22: mol_type = other DNA
atatctctatcccaacaataga

SEQ ID NO: 81518 - DNA, 22 bp, synthetic construct
  misc_feature 1..22: note = chemically synthesized
  source 1..22: mol_type = other DNA
tatctctatcccaacaatagat

SEQ ID NO: 81519 - DNA, 22 bp, synthetic construct
  misc_feature 1..22: note = chemically synthesized
  source 1..22: mol_type = other DNA
tatcccaacaatagatgacatc

SEQ ID NO: 81520 - DNA, 22 bp, synthetic construct
  misc_feature 1..22: note = chemically synthesized
  source 1..22: mol_type = other DNA
tcccaacaatagatgacatcag

SEQ ID NO: 81521 - DNA, 22 bp, synthetic construct
  misc_feature 1..22: note = chemically synthesized
  source 1..22: mol_type = other DNA
acaaaattgtagcaattaagac

SEQ ID NO: 81522 - DNA, 22 bp, synthetic construct
  misc_feature 1..22: note = chemically synthesized
  source 1..22: mol_type = other DNA
tagcaattaagaccaaaattat

SEQ ID NO: 81523 - DNA, 22 bp, synthetic construct
  misc_feature 1..22: note = chemically synthesized
  source 1..22: mol_type = other DNA
agaccaaaattattgtcaactg

SEQ ID NO: 81524 - DNA, 22 bp, synthetic construct
  misc_feature 1..22: note = chemically synthesized
  source 1..22: mol_type = other DNA
ttgtcaactggaataagtttaa

SEQ ID NO: 81525 - DNA, 22 bp, synthetic construct
  misc_feature 1..22: note = chemically synthesized
  source 1..22: mol_type = other DNA
tcaactggaataagtttaactt

SEQ ID NO: 81526 - DNA, 22 bp, synthetic construct
  misc_feature 1..22: note = chemically synthesized
  source 1..22: mol_type = other DNA
gaataagtttaactttcaggac

SEQ ID NO: 81527 - DNA, 22 bp, synthetic construct
  misc_feature 1..22: note = chemically synthesized
  source 1..22: mol_type = other DNA
aactttcaggacttcaggctta

SEQ ID NO: 81528 - DNA, 22 bp, synthetic construct
  misc_feature 1..22: note = chemically synthesized
  source 1..22: mol_type = other DNA
actttcaggacttcaggcttat

SEQ ID NO: 81529 - DNA, 22 bp, synthetic construct
  misc_feature 1..22: note = chemically synthesized
  source 1..22: mol_type = other DNA
tcaggacttcaggcttattatc

SEQ ID NO: 81530 - DNA, 22 bp, synthetic construct
  misc_feature 1..22: note = chemically synthesized
  source 1..22: mol_type = other DNA
caggacttcaggcttattatcc

SEQ ID NO: 81531 - DNA, 22 bp, synthetic construct
  misc_feature 1..22: note = chemically synthesized
  source 1..22: mol_type = other DNA
aggacttcaggcttattatcca

SEQ ID NO: 81532 - DNA, 22 bp, synthetic construct
  misc_feature 1..22: note = chemically synthesized
  source 1..22: mol_type = other DNA
caggcttattatccatcaaact

SEQ ID NO: 81533 - DNA, 22 bp, synthetic construct
  misc_feature 1..22: note = chemically synthesized
  source 1..22: mol_type = other DNA
aggcttattatccatcaaactg

SEQ ID NO: 81534 - DNA, 22 bp, synthetic construct
  misc_feature 1..22: note = chemically synthesized
  source 1..22: mol_type = other DNA
attatccatcaaactgagattg

SEQ ID NO: 81535 - DNA, 22 bp, synthetic construct
  misc_feature 1..22: note = chemically synthesized
  source 1..22: mol_type = other DNA
ttatccatcaaactgagattga

SEQ ID NO: 81536 - DNA, 22 bp, synthetic construct
  misc_feature 1..22: note = chemically synthesized
  source 1..22: mol_type = other DNA
tccatcaaactgagattgaatt

SEQ ID NO: 81537 - DNA, 22 bp, synthetic construct
  misc_feature 1..22: note = chemically synthesized
  source 1..22: mol_type = other DNA
agattgaattgatttagagtat

SEQ ID NO: 81538 - DNA, 22 bp, synthetic construct
  misc_feature 1..22: note = chemically synthesized
  source 1..22: mol_type = other DNA
aattgatttagagtatccataa

SEQ ID NO: 81539 - DNA, 22 bp, synthetic construct
  misc_feature 1..22: note = chemically synthesized
  source 1..22: mol_type = other DNA
atttagagtatccataaatact

SEQ ID NO: 81540 - DNA, 22 bp, synthetic construct
  misc_feature 1..22: note = chemically synthesized
  source 1..22: mol_type = other DNA
agagtatccataaatactagga

SEQ ID NO: 81541 - DNA, 22 bp, synthetic construct
  misc_feature 1..22: note = chemically synthesized
  source 1..22: mol_type = other DNA
gagtatccataaatactaggaa

SEQ ID NO: 81542 - DNA, 22 bp, synthetic construct
  misc_feature 1..22: note = chemically synthesized
  source 1..22: mol_type = other DNA
ggaataaatttttttttaataa

SEQ ID NO: 81543 - DNA, 22 bp, synthetic construct
  misc_feature 1..22: note = chemically synthesized
  source 1..22: mol_type = other DNA
ttttttaataaatttcttatac

SEQ ID NO: 81544 - DNA, 22 bp, synthetic construct
  misc_feature 1..22: note = chemically synthesized
  source 1..22: mol_type = other DNA
tttttaataaatttcttatact

SEQ ID NO: 81545 - DNA, 22 bp, synthetic construct
  misc_feature 1..22: note = chemically synthesized
  source 1..22: mol_type = other DNA
ttttaataaatttcttatactg

SEQ ID NO: 81546 - DNA, 22 bp, synthetic construct
  misc_feature 1..22: note = chemically synthesized
  source 1..22: mol_type = other DNA
tttaataaatttcttatactgg

SEQ ID NO: 81547 - DNA, 22 bp, synthetic construct
  misc_feature 1..22: note = chemically synthesized
  source 1..22: mol_type = other DNA
ttaataaatttcttatactggg

SEQ ID NO: 81548 - DNA, 22 bp, synthetic construct
  misc_feature 1..22: note = chemically synthesized
  source 1..22: mol_type = other DNA
taataaatttcttatactgggc

SEQ ID NO: 81549 - DNA, 22 bp, synthetic construct
  misc_feature 1..22: note = chemically synthesized
  source 1..22: mol_type = other DNA
aataaatttcttatactgggca

SEQ ID NO: 81550 - DNA, 22 bp, synthetic construct
  misc_feature 1..22: note = chemically synthesized
  source 1..22: mol_type = other DNA
ataaatttcttatactgggcac

SEQ ID NO: 81551 - DNA, 22 bp, synthetic construct
  misc_feature 1..22: note = chemically synthesized
  source 1..22: mol_type = other DNA
cttatactgggcacatggtatc

SEQ ID NO: 81552 - DNA, 22 bp, synthetic construct
  misc_feature 1..22: note = chemically synthesized
  source 1..22: mol_type = other DNA
ttatactgggcacatggtatca

SEQ ID NO: 81553 - DNA, 22 bp, synthetic construct
  misc_feature 1..22: note = chemically synthesized
  source 1..22: mol_type = other DNA
atactgggcacatggtatcaat

SEQ ID NO: 81554 - DNA, 22 bp, synthetic construct
  misc_feature 1..22: note = chemically synthesized
  source 1..22: mol_type = other DNA
tactgggcacatggtatcaatt

SEQ ID NO: 81555 - DNA, 22 bp, synthetic construct
  misc_feature 1..22: note = chemically synthesized
  source 1..22: mol_type = other DNA
ggcacatggtatcaattggtaa

SEQ ID NO: 81556 - DNA, 22 bp, synthetic construct
  misc_feature 1..22: note = chemically synthesized
  source 1..22: mol_type = other DNA
gtaatcttcaccctgtatctgt

SEQ ID NO: 81557 - DNA, 22 bp, synthetic construct
  misc_feature 1..22: note = chemically synthesized
  source 1..22: mol_type = other DNA
caccctgtatctgtcatttact

SEQ ID NO: 81558 - DNA, 22 bp, synthetic construct
  misc_feature 1..22: note = chemically synthesized
  source 1..22: mol_type = other DNA
accctgtatctgtcatttactt

SEQ ID NO: 81559 - DNA, 22 bp, synthetic construct
  misc_feature 1..22: note = chemically synthesized
  source 1..22: mol_type = other DNA
tatctgtcatttacttttataa

SEQ ID NO: 81560 - DNA, 22 bp, synthetic construct
  misc_feature 1..22: note = chemically synthesized
  source 1..22: mol_type = other DNA
tcatttacttttataaggtgca

SEQ ID NO: 81561 - DNA, 22 bp, synthetic construct
  misc_feature 1..22: note = chemically synthesized
  source 1..22: mol_type = other DNA
acttttataaggtgcaaatagt

SEQ ID NO: 81562 - DNA, 22 bp, synthetic construct
  misc_feature 1..22: note = chemically synthesized
  source 1..22: mol_type = other DNA
cttttataaggtgcaaatagtt

SEQ ID NO: 81563 - DNA, 22 bp, synthetic construct
  misc_feature 1..22: note = chemically synthesized
  source 1..22: mol_type = other DNA
ttataaggtgcaaatagttcag

SEQ ID NO: 81564 - DNA, 22 bp, synthetic construct
  misc_feature 1..22: note = chemically synthesized
  source 1..22: mol_type = other DNA
tataaggtgcaaatagttcagc

SEQ ID NO: 81565 - DNA, 22 bp, synthetic construct
  misc_feature 1..22: note = chemically synthesized
  source 1..22: mol_type = other DNA
ataaggtgcaaatagttcagca

SEQ ID NO: 81566 - DNA, 22 bp, synthetic construct
  misc_feature 1..22: note = chemically synthesized
  source 1..22: mol_type = other DNA
taaggtgcaaatagttcagcat

SEQ ID NO: 81567 - DNA, 22 bp, synthetic construct
  misc_feature 1..22: note = chemically synthesized
  source 1..22: mol_type = other DNA
agcatggtgacagacacatgaa

SEQ ID NO: 81568 - DNA, 22 bp, synthetic construct
  misc_feature 1..22: note = chemically synthesized
  source 1..22: mol_type = other DNA
tgaaatggagttttatttttgc

SEQ ID NO: 81569 - DNA, 22 bp, synthetic construct
  misc_feature 1..22: note = chemically synthesized
  source 1..22: mol_type = other DNA
gaaatggagttttatttttgcc

SEQ ID NO: 81570 - DNA, 22 bp, synthetic construct
  misc_feature 1..22: note = chemically synthesized
  source 1..22: mol_type = other DNA
aaatggagttttatttttgccc

SEQ ID NO: 81571 - DNA, 22 bp, synthetic construct
  misc_feature 1..22: note = chemically synthesized
  source 1..22: mol_type = other DNA
tatttttgccccatcaccagta

SEQ ID NO: 81572 - DNA, 22 bp, synthetic construct
  misc_feature 1..22: note = chemically synthesized
  source 1..22: mol_type = other DNA
atttttgccccatcaccagtat

SEQ ID NO: 81573 - DNA, 22 bp, synthetic construct
  misc_feature 1..22: note = chemically synthesized
  source 1..22: mol_type = other DNA
tttttgccccatcaccagtata

SEQ ID NO: 81574 - DNA, 22 bp, synthetic construct
  misc_feature 1..22: note = chemically synthesized
  source 1..22: mol_type = other DNA
ttgccccatcaccagtataata

SEQ ID NO: 81575 - DNA, 22 bp, synthetic construct
  misc_feature 1..22: note = chemically synthesized
  source 1..22: mol_type = other DNA
tgccccatcaccagtataatat

SEQ ID NO: 81576 - DNA, 22 bp, synthetic construct
  misc_feature 1..22: note = chemically synthesized
  source 1..22: mol_type = other DNA
gccccatcaccagtataatatc

SEQ ID NO: 81577 - DNA, 22 bp, synthetic construct
  misc_feature 1..22: note = chemically synthesized
  source 1..22: mol_type = other DNA
ccccatcaccagtataatatct

SEQ ID NO: 81578 - DNA, 22 bp, synthetic construct
  misc_feature 1..22: note = chemically synthesized
  source 1..22: mol_type = other DNA
tgttacatagggaagagagtta

SEQ ID NO: 81579 - DNA, 22 bp, synthetic construct
  misc_feature 1..22: note = chemically synthesized
  source 1..22: mol_type = other DNA
gttacatagggaagagagttaa

SEQ ID NO: 81580 - DNA, 22 bp, synthetic construct
  misc_feature 1..22: note = chemically synthesized
  source 1..22: mol_type = other DNA
ttacatagggaagagagttaaa

SEQ ID NO: 81581 - DNA, 22 bp, synthetic construct
  misc_feature 1..22: note = chemically synthesized
  source 1..22: mol_type = other DNA
catagggaagagagttaaaaat

SEQ ID NO: 81582 - DNA, 22 bp, synthetic construct
  misc_feature 1..22: note = chemically synthesized
  source 1..22: mol_type = other DNA
aaaattttggagtgccagcttc

SEQ ID NO: 81583 - DNA, 22 bp, synthetic construct
  misc_feature 1..22: note = chemically synthesized
  source 1..22: mol_type = other DNA
tggagtgccagcttcttaatct

SEQ ID NO: 81584 - DNA, 22 bp, synthetic construct
  misc_feature 1..22: note = chemically synthesized
  source 1..22: mol_type = other DNA
ggagtgccagcttcttaatctg

SEQ ID NO: 81585 - DNA, 22 bp, synthetic construct
  misc_feature 1..22: note = chemically synthesized
  source 1..22: mol_type = other DNA
gagtgccagcttcttaatctgt

SEQ ID NO: 81586 - DNA, 22 bp, synthetic construct
  misc_feature 1..22: note = chemically synthesized
  source 1..22: mol_type = other DNA
cttaatctgtgcctagactatt

SEQ ID NO: 81587 - DNA, 22 bp, synthetic construct
  misc_feature 1..22: note = chemically synthesized
  source 1..22: mol_type = other DNA
ttaatctgtgcctagactatta

SEQ ID NO: 81588 - DNA, 22 bp, synthetic construct
  misc_feature 1..22: note = chemically synthesized
  source 1..22: mol_type = other DNA
aatctgtgcctagactattacc

SEQ ID NO: 81589 - DNA, 22 bp, synthetic construct
  misc_feature 1..22: note = chemically synthesized
  source 1..22: mol_type = other DNA
atctgtgcctagactattacct

SEQ ID NO: 81590 - DNA, 22 bp, synthetic construct
  misc_feature 1..22: note = chemically synthesized
  source 1..22: mol_type = other DNA
tgcctagactattacctgatga

SEQ ID NO: 81591 - DNA, 22 bp, synthetic construct
  misc_feature 1..22: note = chemically synthesized
  source 1..22: mol_type = other DNA
gactattacctgatgagtaata

SEQ ID NO: 81592 - DNA, 22 bp, synthetic construct
  misc_feature 1..22: note = chemically synthesized
  source 1..22: mol_type = other DNA
ttacctgatgagtaatagtcaa

SEQ ID NO: 81593 - DNA, 22 bp, synthetic construct
  misc_feature 1..22: note = chemically synthesized
  source 1..22: mol_type = other DNA
cctgatgagtaatagtcaataa

SEQ ID NO: 81594 - DNA, 22 bp, synthetic construct
  misc_feature 1..22: note = chemically synthesized
  source 1..22: mol_type = other DNA
atgagtaatagtcaataaacta

SEQ ID NO: 81595 - DNA, 22 bp, synthetic construct
  misc_feature 1..22: note = chemically synthesized
  source 1..22: mol_type = other DNA
cagaacgatgcacacacacaca

SEQ ID NO: 81596 - DNA, 22 bp, synthetic construct
  misc_feature 1..22: note = chemically synthesized
  source 1..22: mol_type = other DNA
aactactaaaattttttattac

SEQ ID NO: 81597 - DNA, 22 bp, synthetic construct
  misc_feature 1..22: note = chemically synthesized
  source 1..22: mol_type = other DNA
ctaaaattttttattactgagc

SEQ ID NO: 81598 - DNA, 22 bp, synthetic construct
  misc_feature 1..22: note = chemically synthesized
  source 1..22: mol_type = other DNA
aaattttttattactgagcctt

SEQ ID NO: 81599 - DNA, 22 bp, synthetic construct
  misc_feature 1..22: note = chemically synthesized
  source 1..22: mol_type = other DNA
tttattactgagccttgtttta

SEQ ID NO: 81600 - DNA, 22 bp, synthetic construct
  misc_feature 1..22: note = chemically synthesized
  source 1..22: mol_type = other DNA
ttattactgagccttgttttaa

SEQ ID NO: 81601 - DNA, 22 bp, synthetic construct
  misc_feature 1..22: note = chemically synthesized
  source 1..22: mol_type = other DNA
tattactgagccttgttttaac

SEQ ID NO: 81602 - DNA, 22 bp, synthetic construct
  misc_feature 1..22: note = chemically synthesized
  source 1..22: mol_type = other DNA
attactgagccttgttttaact

SEQ ID NO: 81603 - DNA, 22 bp, synthetic construct
  misc_feature 1..22: note = chemically synthesized
  source 1..22: mol_type = other DNA
ttactgagccttgttttaacta

SEQ ID NO: 81604 - DNA, 22 bp, synthetic construct
  misc_feature 1..22: note = chemically synthesized
  source 1..22: mol_type = other DNA
ctgagccttgttttaactacta

SEQ ID NO: 81605 - DNA, 22 bp, synthetic construct
  misc_feature 1..22: note = chemically synthesized
  source 1..22: mol_type = other DNA
agccttgttttaactactagaa

SEQ ID NO: 81606 - DNA, 22 bp, synthetic construct
  misc_feature 1..22: note = chemically synthesized
  source 1..22: mol_type = other DNA
gttttaactactagaatataaa

SEQ ID NO: 81607 - DNA, 22 bp, synthetic construct
  misc_feature 1..22: note = chemically synthesized
  source 1..22: mol_type = other DNA
ttttaactactagaatataaat

SEQ ID NO: 81608 - DNA, 22 bp, synthetic construct
  misc_feature 1..22: note = chemically synthesized
  source 1..22: mol_type = other DNA
taactactagaatataaattca

SEQ ID NO: 81609 - DNA, 22 bp, synthetic construct
  misc_feature 1..22: note = chemically synthesized
  source 1..22: mol_type = other DNA
aactactagaatataaattcat

SEQ ID NO: 81610 - DNA, 22 bp, synthetic construct
  misc_feature 1..22: note = chemically synthesized
  source 1..22: mol_type = other DNA
actactagaatataaattcatt

SEQ ID NO: 81611 - DNA, 22 bp, synthetic construct
  misc_feature 1..22: note = chemically synthesized
  source 1..22: mol_type = other DNA
ctagaatataaattcattgaat

SEQ ID NO: 81612 - DNA, 22 bp, synthetic construct
  misc_feature 1..22: note = chemically synthesized
  source 1..22: mol_type = other DNA
gaatataaattcattgaatctt

SEQ ID NO: 81613 - DNA, 22 bp, synthetic construct
  misc_feature 1..22: note = chemically synthesized
  source 1..22: mol_type = other DNA
attgaatctttgtacaacattc

SEQ ID NO: 81614 - DNA, 22 bp, synthetic construct
  misc_feature 1..22: note = chemically synthesized
  source 1..22: mol_type = other DNA
aatctttgtacaacattcaaat

SEQ ID NO: 81615 - DNA, 22 bp, synthetic construct
  misc_feature 1..22: note = chemically synthesized
  source 1..22: mol_type = other DNA
tgtacaacattcaaatctgcat

SEQ ID NO: 81616 - DNA, 22 bp, synthetic construct
  misc_feature 1..22: note = chemically synthesized
  source 1..22: mol_type = other DNA
gtacaacattcaaatctgcata

SEQ ID NO: 81617 - DNA, 22 bp, synthetic construct
  misc_feature 1..22: note = chemically synthesized
  source 1..22: mol_type = other DNA
tacaacattcaaatctgcatat

SEQ ID NO: 81618 - DNA, 22 bp, synthetic construct
  misc_feature 1..22: note = chemically synthesized
  source 1..22: mol_type = other DNA
aaatctgcatatcaaagaaaat

SEQ ID NO: 81619 - DNA, 22 bp, synthetic construct
  misc_feature 1..22: note = chemically synthesized
  source 1..22: mol_type = other DNA
catatcaaagaaaatgagcatt

SEQ ID NO: 81620 - DNA, 22 bp, synthetic construct
  misc_feature 1..22: note = chemically synthesized
  source 1..22: mol_type = other DNA
tttaaacatattctaagagaaa

SEQ ID NO: 81621 - DNA, 22 bp, synthetic construct
  misc_feature 1..22: note = chemically synthesized
  source 1..22: mol_type = other DNA
aaacatattctaagagaaaact

SEQ ID NO: 81622 - DNA, 22 bp, synthetic construct
  misc_feature 1..22: note = chemically synthesized
  source 1..22: mol_type = other DNA
aacatattctaagagaaaacta

SEQ ID NO: 81623 - DNA, 22 bp, synthetic construct
  misc_feature 1..22: note = chemically synthesized
  source 1..22: mol_type = other DNA
taagagaaaactaaaatattct

SEQ ID NO: 81624 - DNA, 22 bp, synthetic construct
  misc_feature 1..22: note = chemically synthesized
  source 1..22: mol_type = other DNA
agagaaaactaaaatattcttt

SEQ ID NO: 81625 - DNA, 22 bp, synthetic construct
  misc_feature 1..22: note = chemically synthesized
  source 1..22: mol_type = other DNA
aaatattctttttgaaaatgac

SEQ ID NO: 81626 - DNA, 22 bp, synthetic construct
  misc_feature 1..22: note = chemically synthesized
  source 1..22: mol_type = other DNA
tttttgaaaatgacttacttaa

SEQ ID NO: 81627 - DNA, 22 bp, synthetic construct
  misc_feature 1..22: note = chemically synthesized
  source 1..22: mol_type = other DNA
tttgaaaatgacttacttaata

SEQ ID NO: 81628 - DNA, 22 bp, synthetic construct
  misc_feature 1..22: note = chemically synthesized
  source 1..22: mol_type = other DNA
ttgaaaatgacttacttaatac

SEQ ID NO: 81629 - DNA, 22 bp, synthetic construct
  misc_feature 1..22: note = chemically synthesized
  source 1..22: mol_type = other DNA
tgaaaatgacttacttaataca

SEQ ID NO: 81630 - DNA, 22 bp, synthetic construct
  misc_feature 1..22: note = chemically synthesized
  source 1..22: mol_type = other DNA
gaaaatgacttacttaatacaa

SEQ ID NO: 81631 - DNA, 22 bp, synthetic construct
  misc_feature 1..22: note = chemically synthesized
  source 1..22: mol_type = other DNA
aaaatgacttacttaatacaag

SEQ ID NO: 81632 - DNA, 22 bp, synthetic construct
  misc_feature 1..22: note = chemically synthesized
  source 1..22: mol_type = other DNA
acttaatacaagaacacaaaaa

SEQ ID NO: 81633 - DNA, 22 bp, synthetic construct
  misc_feature 1..22: note = chemically synthesized
  source 1..22: mol_type = other DNA
cttaatacaagaacacaaaaaa

SEQ ID NO: 81634 - DNA, 22 bp, synthetic construct
  misc_feature 1..22: note = chemically synthesized
  source 1..22: mol_type = other DNA
aatacaagaacacaaaaaatac

SEQ ID NO: 81635 - DNA, 22 bp, synthetic construct
  misc_feature 1..22: note = chemically synthesized
  source 1..22: mol_type = other DNA
atacaagaacacaaaaaatact

SEQ ID NO: 81636 - DNA, 22 bp, synthetic construct
  misc_feature 1..22: note = chemically synthesized
  source 1..22: mol_type = other DNA
caattgcaaatcaactccagct

SEQ ID NO: 81637 - DNA, 22 bp, synthetic construct
  misc_feature 1..22: note = chemically synthesized
  source 1..22: mol_type = other DNA
caaatcaactccagctaaagcc

SEQ ID NO: 81638 - DNA, 22 bp, synthetic construct
  misc_feature 1..22: note = chemically synthesized
  source 1..22: mol_type = other DNA
cagctaaagccaagtctagtat

SEQ ID NO: 81639 - DNA, 22 bp, synthetic construct
  misc_feature 1..22: note = chemically synthesized
  source 1..22: mol_type = other DNA
aagccaagtctagtattccatg

SEQ ID NO: 81640 - DNA, 22 bp, synthetic construct
  misc_feature 1..22: note = chemically synthesized
  source 1..22: mol_type = other DNA
gtattccatgggtcaaaaatca

SEQ ID NO: 81641 - DNA, 22 bp, synthetic construct
  misc_feature 1..22: note = chemically synthesized
  source 1..22: mol_type = other DNA
catgggtcaaaaatcaaggaaa

SEQ ID NO: 81642 - DNA, 22 bp, synthetic construct
  misc_feature 1..22: note = chemically synthesized
  source 1..22: mol_type = other DNA
gatgattaagttatcggaagaa

SEQ ID NO: 81643 - DNA, 22 bp, synthetic construct
  misc_feature 1..22: note = chemically synthesized
  source 1..22: mol_type = other DNA
agttatcggaagaatgagctgc

SEQ ID NO: 81644 - DNA, 22 bp, synthetic construct
  misc_feature 1..22: note = chemically synthesized
  source 1..22: mol_type = other DNA
tcggaagaatgagctgcttctg

SEQ ID NO: 81645 - DNA, 22 bp, synthetic construct
  misc_feature 1..22: note = chemically synthesized
  source 1..22: mol_type = other DNA
cttctgcagtttcttgcctttt

SEQ ID NO: 81646 - DNA, 22 bp, synthetic construct
  misc_feature 1..22: note = chemically synthesized
  source 1..22: mol_type = other DNA
ctgcagtttcttgccttttttt

SEQ ID NO: 81647 - DNA, 22 bp, synthetic construct
  misc_feature 1..22: note = chemically synthesized
  source 1..22: mol_type = other DNA
tgcagtttcttgcctttttttt

SEQ ID NO: 81648 - DNA, 22 bp, synthetic construct
  misc_feature 1..22: note = chemically synthesized
  source 1..22: mol_type = other DNA
cagtttcttgcctttttttttt

SEQ ID NO: 81649 - DNA, 22 bp, synthetic construct
  misc_feature 1..22: note = chemically synthesized
  source 1..22: mol_type = other DNA
cttgccttttttttttctggtg

SEQ ID NO: 81650 - DNA, 22 bp, synthetic construct
  misc_feature 1..22: note = chemically synthesized
  source 1..22: mol_type = other DNA
ttgccttttttttttctggtgt

SEQ ID NO: 81651 - DNA, 22 bp, synthetic construct
  misc_feature 1..22: note = chemically synthesized
  source 1..22: mol_type = other DNA
gccttttttttttctggtgtta

SEQ ID NO: 81652 - DNA, 22 bp, synthetic construct
  misc_feature 1..22: note = chemically synthesized
  source 1..22: mol_type = other DNA
ccttttttttttctggtgttat

SEQ ID NO: 81653 - DNA, 22 bp, synthetic construct
  misc_feature 1..22: note = chemically synthesized
  source 1..22: mol_type = other DNA
ttttttttctggtgttattttc

SEQ ID NO: 81654 - DNA, 22 bp, synthetic construct
  misc_feature 1..22: note = chemically synthesized
  source 1..22: mol_type = other DNA
tttttttctggtgttattttct

SEQ ID NO: 81655 - DNA, 22 bp, synthetic construct
  misc_feature 1..22: note = chemically synthesized
  source 1..22: mol_type = other DNA
ttttttctggtgttattttcta

SEQ ID NO: 81656 - DNA, 22 bp, synthetic construct
  misc_feature 1..22: note = chemically synthesized
  source 1..22: mol_type = other DNA
tttttctggtgttattttctac

SEQ ID NO: 81657 - DNA, 22 bp, synthetic construct
  misc_feature 1..22: note = chemically synthesized
  source 1..22: mol_type = other DNA
ttttctggtgttattttctaca

SEQ ID NO: 81658 - DNA, 22 bp, synthetic construct
  misc_feature 1..22: note = chemically synthesized
  source 1..22: mol_type = other DNA
tttctggtgttattttctacaa

SEQ ID NO: 81659 - DNA, 22 bp, synthetic construct
  misc_feature 1..22: note = chemically synthesized
  source 1..22: mol_type = other DNA
ttctggtgttattttctacaag

SEQ ID NO: 81660 - DNA, 22 bp, synthetic construct
  misc_feature 1..22: note = chemically synthesized
  source 1..22: mol_type = other DNA
tctggtgttattttctacaagt

SEQ ID NO: 81661 - DNA, 22 bp, synthetic construct
  misc_feature 1..22: note = chemically synthesized
  source 1..22: mol_type = other DNA
ctggtgttattttctacaagtt

SEQ ID NO: 81662 - DNA, 22 bp, synthetic construct
  misc_feature 1..22: note = chemically synthesized
  source 1..22: mol_type = other DNA
tggtgttattttctacaagttt

SEQ ID NO: 81663 - DNA, 22 bp, synthetic construct
  misc_feature 1..22: note = chemically synthesized
  source 1..22: mol_type = other DNA
gtgttattttctacaagttttc

SEQ ID NO: 81664 - DNA, 22 bp, synthetic construct
  misc_feature 1..22: note = chemically synthesized
  source 1..22: mol_type = other DNA
ttttctacaagttttcattgag

SEQ ID NO: 81665 - DNA, 22 bp, synthetic construct
  misc_feature 1..22: note = chemically synthesized
  source 1..22: mol_type = other DNA
tctacaagttttcattgagcat

SEQ ID NO: 81666 - DNA, 22 bp, synthetic construct
  misc_feature 1..22: note = chemically synthesized
  source 1..22: mol_type = other DNA
ctacaagttttcattgagcata

SEQ ID NO: 81667 - DNA, 22 bp, synthetic construct
  misc_feature 1..22: note = chemically synthesized
  source 1..22: mol_type = other DNA
tacaagttttcattgagcataa

SEQ ID NO: 81668 - DNA, 22 bp, synthetic construct
  misc_feature 1..22: note = chemically synthesized
  source 1..22: mol_type = other DNA
caagttttcattgagcataact

SEQ ID NO: 81669 - DNA, 22 bp, synthetic construct
  misc_feature 1..22: note = chemically synthesized
  source 1..22: mol_type = other DNA
tcattgagcataactcagttta

SEQ ID NO: 81670 - DNA, 22 bp, synthetic construct
  misc_feature 1..22: note = chemically synthesized
  source 1..22: mol_type = other DNA
cattgagcataactcagtttac

SEQ ID NO: 81671 - DNA, 22 bp, synthetic construct
  misc_feature 1..22: note = chemically synthesized
  source 1..22: mol_type = other DNA
attgagcataactcagtttact

SEQ ID NO: 81672 - DNA, 22 bp, synthetic construct
  misc_feature 1..22: note = chemically synthesized
  source 1..22: mol_type = other DNA
agcataactcagtttacttact

SEQ ID NO: 81673 - DNA, 22 bp, synthetic construct
  misc_feature 1..22: note = chemically synthesized
  source 1..22: mol_type = other DNA
agtttacttacttgcattttct

SEQ ID NO: 81674 - DNA, 22 bp, synthetic construct
  misc_feature 1..22: note = chemically synthesized
  source 1..22: mol_type = other DNA
acttacttgcattttctagaat

SEQ ID NO: 81675 - DNA, 22 bp, synthetic construct
  misc_feature 1..22: note = chemically synthesized
  source 1..22: mol_type = other DNA
cttacttgcattttctagaatc

SEQ ID NO: 81676 - DNA, 22 bp, synthetic construct
  misc_feature 1..22: note = chemically synthesized
  source 1..22: mol_type = other DNA
acttgcattttctagaatcctg

SEQ ID NO: 81677 - DNA, 22 bp, synthetic construct
  misc_feature 1..22: note = chemically synthesized
  source 1..22: mol_type = other DNA
cttgcattttctagaatcctga

SEQ ID NO: 81678 - DNA, 22 bp, synthetic construct
  misc_feature 1..22: note = chemically synthesized
  source 1..22: mol_type = other DNA
gcattttctagaatcctgaaga

SEQ ID NO: 81679 - DNA, 22 bp, synthetic construct
  misc_feature 1..22: note = chemically synthesized
  source 1..22: mol_type = other DNA
cattttctagaatcctgaagat

SEQ ID NO: 81680 - DNA, 22 bp, synthetic construct
  misc_feature 1..22: note = chemically synthesized
  source 1..22: mol_type = other DNA
tctagaatcctgaagatattta

SEQ ID NO: 81681 - DNA, 22 bp, synthetic construct
  misc_feature 1..22: note = chemically synthesized
  source 1..22: mol_type = other DNA
ctagaatcctgaagatatttag

SEQ ID NO: 81682 - DNA, 22 bp, synthetic construct
  misc_feature 1..22: note = chemically synthesized
  source 1..22: mol_type = other DNA
tagaatcctgaagatatttagc

SEQ ID NO: 81683 - DNA, 22 bp, synthetic construct
  misc_feature 1..22: note = chemically synthesized
  source 1..22: mol_type = other DNA
gaatcctgaagatatttagcag

SEQ ID NO: 81684 - DNA, 22 bp, synthetic construct
  misc_feature 1..22: note = chemically synthesized
  source 1..22: mol_type = other DNA
aagatatttagcaggttgagag

SEQ ID NO: 81685 - DNA, 22 bp, synthetic construct
  misc_feature 1..22: note = chemically synthesized
  source 1..22: mol_type = other DNA
agcaggttgagaggagacaaaa

SEQ ID NO: 81686 - DNA, 22 bp, synthetic construct
  misc_feature 1..22: note = chemically synthesized
  source 1..22: mol_type = other DNA
gcaggttgagaggagacaaaat

SEQ ID NO: 81687 - DNA, 22 bp, synthetic construct
  misc_feature 1..22: note = chemically synthesized
  source 1..22: mol_type = other DNA
agaggagacaaaataaatgcaa

SEQ ID NO: 81688 - DNA, 22 bp, synthetic construct
  misc_feature 1..22: note = chemically synthesized
  source 1..22: mol_type = other DNA
ggaaatctggaactatttatac

SEQ ID NO: 81689 - DNA, 22 bp, synthetic construct
  misc_feature 1..22: note = chemically synthesized
  source 1..22: mol_type = other DNA
gaactatttatacttcttttaa

SEQ ID NO: 81690 - DNA, 22 bp, synthetic construct
  misc_feature 1..22: note = chemically synthesized
  source 1..22: mol_type = other DNA
tttatacttcttttaaagcatg

SEQ ID NO: 81691 - DNA, 22 bp, synthetic construct
  misc_feature 1..22: note = chemically synthesized
  source 1..22: mol_type = other DNA
atacttcttttaaagcatgtct

SEQ ID NO: 81692 - DNA, 22 bp, synthetic construct
  misc_feature 1..22: note = chemically synthesized
  source 1..22: mol_type = other DNA
tacttcttttaaagcatgtctt

SEQ ID NO: 81693 - DNA, 22 bp, synthetic construct
  misc_feature 1..22: note = chemically synthesized
  source 1..22: mol_type = other DNA
cttttaaagcatgtcttgggcc

SEQ ID NO: 81694 - DNA, 22 bp, synthetic construct
  misc_feature 1..22: note = chemically synthesized
  source 1..22: mol_type = other DNA
ttttaaagcatgtcttgggccc

SEQ ID NO: 81695 - DNA, 22 bp, synthetic construct
  misc_feature 1..22: note = chemically synthesized
  source 1..22: mol_type = other DNA
ttaaagcatgtcttgggcccaa

SEQ ID NO: 81696 - DNA, 22 bp, synthetic construct
  misc_feature 1..22: note = chemically synthesized
  source 1..22: mol_type = other DNA
taaagcatgtcttgggcccaag

SEQ ID NO: 81697 - DNA, 22 bp, synthetic construct
  misc_feature 1..22: note = chemically synthesized
  source 1..22: mol_type = other DNA
aaagcatgtcttgggcccaagg

SEQ ID NO: 81698 - DNA, 22 bp, synthetic construct
  misc_feature 1..22: note = chemically synthesized
  source 1..22: mol_type = other DNA
aagcatgtcttgggcccaaggt

SEQ ID NO: 81699 - DNA, 22 bp, synthetic construct
  misc_feature 1..22: note = chemically synthesized
  source 1..22: mol_type = other DNA
gggcccaaggttttcagcttaa

SEQ ID NO: 81700 - DNA, 22 bp, synthetic construct
  misc_feature 1..22: note = chemically synthesized
  source 1..22: mol_type = other DNA
ggcccaaggttttcagcttaag

SEQ ID NO: 81701 - DNA, 22 bp, synthetic construct
  misc_feature 1..22: note = chemically synthesized
  source 1..22: mol_type = other DNA
tcagcttaagaggacgaatttt

SEQ ID NO: 81702 - DNA, 22 bp, synthetic construct
  misc_feature 1..22: note = chemically synthesized
  source 1..22: mol_type = other DNA
cagcttaagaggacgaatttta

SEQ ID NO: 81703 - DNA, 22 bp, synthetic construct
  misc_feature 1..22: note = chemically synthesized
  source 1..22: mol_type = other DNA
agcttaagaggacgaattttac

SEQ ID NO: 81704 - DNA, 22 bp, synthetic construct
  misc_feature 1..22: note = chemically synthesized
  source 1..22: mol_type = other DNA
aagaggacgaattttactcctc

SEQ ID NO: 81705 - DNA, 22 bp, synthetic construct
  misc_feature 1..22: note = chemically synthesized
  source 1..22: mol_type = other DNA
agaggacgaattttactcctcc

SEQ ID NO: 81706 - DNA, 22 bp, synthetic construct
  misc_feature 1..22: note = chemically synthesized
  source 1..22: mol_type = other DNA
tactcctcccatggaaggagat

SEQ ID NO: 81707 - DNA, 22 bp, synthetic construct
  misc_feature 1..22: note = chemically synthesized
  source 1..22: mol_type = other DNA
actcctcccatggaaggagatg

SEQ ID NO: 81708 - DNA, 22 bp, synthetic construct
  misc_feature 1..22: note = chemically synthesized
  source 1..22: mol_type = other DNA
ctcctcccatggaaggagatga

SEQ ID NO: 81709 - DNA, 22 bp, synthetic construct
  misc_feature 1..22: note = chemically synthesized
  source 1..22: mol_type = other DNA
ctcccatggaaggagatgacac

SEQ ID NO: 81710 - DNA, 22 bp, synthetic construct
  misc_feature 1..22: note = chemically synthesized
  source 1..22: mol_type = other DNA
ccatggaaggagatgacacaga

SEQ ID NO: 81711 - DNA, 22 bp, synthetic construct
  misc_feature 1..22: note = chemically synthesized
  source 1..22: mol_type = other DNA
cttctggtacatagtccacagg

SEQ ID NO: 81712 - DNA, 22 bp, synthetic construct
  misc_feature 1..22: note = chemically synthesized
  source 1..22: mol_type = other DNA
ctggtacatagtccacagggag

SEQ ID NO: 81713 - DNA, 22 bp, synthetic construct
  misc_feature 1..22: note = chemically synthesized
  source 1..22: mol_type = other DNA
tggtacatagtccacagggaga

SEQ ID NO: 81714 - DNA, 22 bp, synthetic construct
  misc_feature 1..22: note = chemically synthesized
  source 1..22: mol_type = other DNA
gtacatagtccacagggagaaa

SEQ ID NO: 81715 - DNA, 22 bp, synthetic construct
  misc_feature 1..22: note = chemically synthesized
  source 1..22: mol_type = other DNA
cattctctttcattataatttg

SEQ ID NO: 81716 - DNA, 22 bp, synthetic construct
  misc_feature 1..22: note = chemically synthesized
  source 1..22: mol_type = other DNA
tctttcattataatttgtgcat

SEQ ID NO: 81717 - DNA, 22 bp, synthetic construct
  misc_feature 1..22: note = chemically synthesized
  source 1..22: mol_type = other DNA
tttcattataatttgtgcattt

SEQ ID NO: 81718 - DNA, 22 bp, synthetic construct
  misc_feature 1..22: note = chemically synthesized
  source 1..22: mol_type = other DNA
tcattataatttgtgcattttt

SEQ ID NO: 81719 - DNA, 22 bp, synthetic construct
  misc_feature 1..22: note = chemically synthesized
  source 1..22: mol_type = other DNA
cattataatttgtgcatttttt

SEQ ID NO: 81720 - DNA, 22 bp, synthetic construct
  misc_feature 1..22: note = chemically synthesized
  source 1..22: mol_type = other DNA
attataatttgtgcattttttt

SEQ ID NO: 81721 - DNA, 22 bp, synthetic construct
  misc_feature 1..22: note = chemically synthesized
  source 1..22: mol_type = other DNA
taatttgtgcattttttttctt

SEQ ID NO: 81722 - DNA, 22 bp, synthetic construct
  misc_feature 1..22: note = chemically synthesized
  source 1..22: mol_type = other DNA
gtgcattttttttcttcagcca

SEQ ID NO: 81723 - DNA, 22 bp, synthetic construct
  misc_feature 1..22: note = chemically synthesized
  source 1..22: mol_type = other DNA
tgcattttttttcttcagccac

SEQ ID NO: 81724 - DNA, 22 bp, synthetic construct
  misc_feature 1..22: note = chemically synthesized
  source 1..22: mol_type = other DNA
tttttcttcagccaccactctc

SEQ ID NO: 81725 - DNA, 22 bp, synthetic construct
  misc_feature 1..22: note = chemically synthesized
  source 1..22: mol_type = other DNA
ttttcttcagccaccactctct

SEQ ID NO: 81726 - DNA, 22 bp, synthetic construct
  misc_feature 1..22: note = chemically synthesized
  source 1..22: mol_type = other DNA
tttcttcagccaccactctctg

SEQ ID NO: 81727 - DNA, 22 bp, synthetic construct
  misc_feature 1..22: note = chemically synthesized
  source 1..22: mol_type = other DNA
ttcttcagccaccactctctga

SEQ ID NO: 81728 - DNA, 22 bp, synthetic construct
  misc_feature 1..22: note = chemically synthesized
  source 1..22: mol_type = other DNA
tcttcagccaccactctctgac

SEQ ID NO: 81729 - DNA, 22 bp, synthetic construct
  misc_feature 1..22: note = chemically synthesized
  source 1..22: mol_type = other DNA
cttcagccaccactctctgaca

SEQ ID NO: 81730 - DNA, 22 bp, synthetic construct
  misc_feature 1..22: note = chemically synthesized
  source 1..22: mol_type = other DNA
ttcagccaccactctctgacac

SEQ ID NO: 81731 - DNA, 22 bp, synthetic construct
  misc_feature 1..22: note = chemically synthesized
  source 1..22: mol_type = other DNA
cagccaccactctctgacacct

SEQ ID NO: 81732 - DNA, 22 bp, synthetic construct
  misc_feature 1..22: note = chemically synthesized
  source 1..22: mol_type = other DNA
agccaccactctctgacaccta

SEQ ID NO: 81733 - DNA, 22 bp, synthetic construct
  misc_feature 1..22: note = chemically synthesized
  source 1..22: mol_type = other DNA
tctgacacctaagttaatacat

SEQ ID NO: 81734 - DNA, 22 bp, synthetic construct
  misc_feature 1..22: note = chemically synthesized
  source 1..22: mol_type = other DNA
tgacacctaagttaatacatac

SEQ ID NO: 81735 - DNA, 22 bp, synthetic construct
  misc_feature 1..22: note = chemically synthesized
  source 1..22: mol_type = other DNA
acacctaagttaatacatacat

SEQ ID NO: 81736 - DNA, 22 bp, synthetic construct
  misc_feature 1..22: note = chemically synthesized
  source 1..22: mol_type = other DNA
agttaatacatacatctacatg

SEQ ID NO: 81737 - DNA, 22 bp, synthetic construct
  misc_feature 1..22: note = chemically synthesized
  source 1..22: mol_type = other DNA
atacatacatctacatgtccag

SEQ ID NO: 81738 - DNA, 22 bp, synthetic construct
  misc_feature 1..22: note = chemically synthesized
  source 1..22: mol_type = other DNA
catgtccaggtcttttgtccct

SEQ ID NO: 81739 - DNA, 22 bp, synthetic construct
  misc_feature 1..22: note = chemically synthesized
  source 1..22: mol_type = other DNA
ttgtccctgtcatatattgttt

SEQ ID NO: 81740 - DNA, 22 bp, synthetic construct
  misc_feature 1..22: note = chemically synthesized
  source 1..22: mol_type = other DNA
tgtccctgtcatatattgtttc

SEQ ID NO: 81741 - DNA, 22 bp, synthetic construct
  misc_feature 1..22: note = chemically synthesized
  source 1..22: mol_type = other DNA
gtccctgtcatatattgtttcc

SEQ ID NO: 81742 - DNA, 22 bp, synthetic construct
  misc_feature 1..22: note = chemically synthesized
  source 1..22: mol_type = other DNA
tccctgtcatatattgtttcca

SEQ ID NO: 81743 - DNA, 22 bp, synthetic construct
  misc_feature 1..22: note = chemically synthesized
  source 1..22: mol_type = other DNA
tcatatattgtttccaatgagc

SEQ ID NO: 81744 - DNA, 22 bp, synthetic construct
  misc_feature 1..22: note = chemically synthesized
  source 1..22: mol_type = other DNA
tttccaatgagccattggcaaa

SEQ ID NO: 81745 - DNA, 22 bp, synthetic construct
  misc_feature 1..22: note = chemically synthesized
  source 1..22: mol_type = other DNA
ccaatgagccattggcaaatat

SEQ ID NO: 81746 - DNA, 22 bp, synthetic construct
  misc_feature 1..22: note = chemically synthesized
  source 1..22: mol_type = other DNA
caatgagccattggcaaatata

SEQ ID NO: 81747 - DNA, 22 bp, synthetic construct
  misc_feature 1..22: note = chemically synthesized
  source 1..22: mol_type = other DNA
gcaaatataggttgcaaaggag

SEQ ID NO: 81748 - DNA, 22 bp, synthetic construct
  misc_feature 1..22: note = chemically synthesized
  source 1..22: mol_type = other DNA
caaaggagacatgtgggagaag

SEQ ID NO: 81749 - DNA, 22 bp, synthetic construct
  misc_feature 1..22: note = chemically synthesized
  source 1..22: mol_type = other DNA
tacacatcttagatggcaccta

SEQ ID NO: 81750 - DNA, 22 bp, synthetic construct
  misc_feature 1..22: note = chemically synthesized
  source 1..22: mol_type = other DNA
acacatcttagatggcacctaa

SEQ ID NO: 81751 - DNA, 22 bp, synthetic construct
  misc_feature 1..22: note = chemically synthesized
  source 1..22: mol_type = other DNA
cacatcttagatggcacctaaa

SEQ ID NO: 81752 - DNA, 22 bp, synthetic construct
  misc_feature 1..22: note = chemically synthesized
  source 1..22: mol_type = other DNA
agatggcacctaaaagttaatt

SEQ ID NO: 81753 - DNA, 22 bp, synthetic construct
  misc_feature 1..22: note = chemically synthesized
  source 1..22: mol_type = other DNA
gatggcacctaaaagttaattc

SEQ ID NO: 81754 - DNA, 22 bp, synthetic construct
  misc_feature 1..22: note = chemically synthesized
  source 1..22: mol_type = other DNA
aaagttaattctctcattttat

SEQ ID NO: 81755 - DNA, 22 bp, synthetic construct
  misc_feature 1..22: note = chemically synthesized
  source 1..22: mol_type = other DNA
attctctcattttatttccctt

SEQ ID NO: 81756 - DNA, 22 bp, synthetic construct
  misc_feature 1..22: note = chemically synthesized
  source 1..22: mol_type = other DNA
tctcattttatttccctttaat

SEQ ID NO: 81757 - DNA, 22 bp, synthetic construct
  misc_feature 1..22: note = chemically synthesized
  source 1..22: mol_type = other DNA
tcattttatttccctttaattt

SEQ ID NO: 81758 - DNA, 22 bp, synthetic construct
  misc_feature 1..22: note = chemically synthesized
  source 1..22: mol_type = other DNA
attttatttccctttaattttt

SEQ ID NO: 81759 - DNA, 22 bp, synthetic construct
  misc_feature 1..22: note = chemically synthesized
  source 1..22: mol_type = other DNA
tatttccctttaatttttaagg

SEQ ID NO: 81760 - DNA, 22 bp, synthetic construct
  misc_feature 1..22: note = chemically synthesized
  source 1..22: mol_type = other DNA
atttccctttaatttttaaggt

SEQ ID NO: 81761 - DNA, 22 bp, synthetic construct
  misc_feature 1..22: note = chemically synthesized
  source 1..22: mol_type = other DNA
tttccctttaatttttaaggtt

SEQ ID NO: 81762 - DNA, 22 bp, synthetic construct
  misc_feature 1..22: note = chemically synthesized
  source 1..22: mol_type = other DNA
ccctttaatttttaaggttcta

SEQ ID NO: 81763 - DNA, 22 bp, synthetic construct
  misc_feature 1..22: note = chemically synthesized
  source 1..22: mol_type = other DNA
cctttaatttttaaggttctat

SEQ ID NO: 81764 - DNA, 22 bp, synthetic construct
  misc_feature 1..22: note = chemically synthesized
  source 1..22: mol_type = other DNA
taatttttaaggttctattgct

SEQ ID NO: 81765 - DNA, 22 bp, synthetic construct
  misc_feature 1..22: note = chemically synthesized
  source 1..22: mol_type = other DNA
aatttttaaggttctattgctt

SEQ ID NO: 81766 - DNA, 22 bp, synthetic construct
  misc_feature 1..22: note = chemically synthesized
  source 1..22: mol_type = other DNA
atttttaaggttctattgcttt

SEQ ID NO: 81767 - DNA, 22 bp, synthetic construct
  misc_feature 1..22: note = chemically synthesized
  source 1..22: mol_type = other DNA
ttaaggttctattgctttccct

SEQ ID NO: 81768 - DNA, 22 bp, synthetic construct
  misc_feature 1..22: note = chemically synthesized
  source 1..22: mol_type = other DNA
taaggttctattgctttccctg

SEQ ID NO: 81769 - DNA, 22 bp, synthetic construct
  misc_feature 1..22: note = chemically synthesized
  source 1..22: mol_type = other DNA
aaggttctattgctttccctgc

SEQ ID NO: 81770 - DNA, 22 bp, synthetic construct
  misc_feature 1..22: note = chemically synthesized
  source 1..22: mol_type = other DNA
aggttctattgctttccctgct

SEQ ID NO: 81771 - DNA, 22 bp, synthetic construct
  misc_feature 1..22: note = chemically synthesized
  source 1..22: mol_type = other DNA
tattgctttccctgctttttct

SEQ ID NO: 81772 - DNA, 22 bp, synthetic construct
  misc_feature 1..22: note = chemically synthesized
  source 1..22: mol_type = other DNA
ttgctttccctgctttttcttg

SEQ ID NO: 81773 - DNA, 22 bp, synthetic construct
  misc_feature 1..22: note = chemically synthesized
  source 1..22: mol_type = other DNA
ctttccctgctttttcttggtc

SEQ ID NO: 81774 - DNA, 22 bp, synthetic construct
  misc_feature 1..22: note = chemically synthesized
  source 1..22: mol_type = other DNA
tccctgctttttcttggtcaca

SEQ ID NO: 81775 - DNA, 22 bp, synthetic construct
  misc_feature 1..22: note = chemically synthesized
  source 1..22: mol_type = other DNA
ccctgctttttcttggtcacat

SEQ ID NO: 81776 - DNA, 22 bp, synthetic construct
  misc_feature 1..22: note = chemically synthesized
  source 1..22: mol_type = other DNA
cctgctttttcttggtcacatg

SEQ ID NO: 81777 - DNA, 22 bp, synthetic construct
  misc_feature 1..22: note = chemically synthesized
  source 1..22: mol_type = other DNA
ctttttcttggtcacatggtaa

SEQ ID NO: 81778 - DNA, 22 bp, synthetic construct
  misc_feature 1..22: note = chemically synthesized
  source 1..22: mol_type = other DNA
tttcttggtcacatggtaaatg

SEQ ID NO: 81779 - DNA, 22 bp, synthetic construct
  misc_feature 1..22: note = chemically synthesized
  source 1..22: mol_type = other DNA
ttcttggtcacatggtaaatgg

SEQ ID NO: 81780 - DNA, 22 bp, synthetic construct
  misc_feature 1..22: note = chemically synthesized
  source 1..22: mol_type = other DNA
tcttggtcacatggtaaatggg

SEQ ID NO: 81781 - DNA, 22 bp, synthetic construct
  misc_feature 1..22: note = chemically synthesized
  source 1..22: mol_type = other DNA
cttggtcacatggtaaatgggt

SEQ ID NO: 81782 - DNA, 22 bp, synthetic construct
  misc_feature 1..22: note = chemically synthesized
  source 1..22: mol_type = other DNA
ttggtcacatggtaaatgggtc

SEQ ID NO: 81783 - DNA, 22 bp, synthetic construct
  misc_feature 1..22: note = chemically synthesized
  source 1..22: mol_type = other DNA
ggtcacatggtaaatgggtcag

SEQ ID NO: 81784 - DNA, 22 bp, synthetic construct
  misc_feature 1..22: note = chemically synthesized
  source 1..22: mol_type = other DNA
gtcacatggtaaatgggtcaga

SEQ ID NO: 81785 - DNA, 22 bp, synthetic construct
  misc_feature 1..22: note = chemically synthesized
  source 1..22: mol_type = other DNA
aagggccaagaaattatattag

SEQ ID NO: 81786 - DNA, 22 bp, synthetic construct
  misc_feature 1..22: note = chemically synthesized
  source 1..22: mol_type = other DNA
tattagctactgtagatatccc

SEQ ID NO: 81787 - DNA, 22 bp, synthetic construct
  misc_feature 1..22: note = chemically synthesized
  source 1..22: mol_type = other DNA
gctactgtagatatcccattct

SEQ ID NO: 81788 - DNA, 22 bp, synthetic construct
  misc_feature 1..22: note = chemically synthesized
  source 1..22: mol_type = other DNA
ctgtagatatcccattctcttg

SEQ ID NO: 81789 - DNA, 22 bp, synthetic construct
  misc_feature 1..22: note = chemically synthesized
  source 1..22: mol_type = other DNA
tagatatcccattctcttgaag

SEQ ID NO: 81790 - DNA, 22 bp, synthetic construct
  misc_feature 1..22: note = chemically synthesized
  source 1..22: mol_type = other DNA
tcttgaaggatactttaatgag

SEQ ID NO: 81791 - DNA, 22 bp, synthetic construct
  misc_feature 1..22: note = chemically synthesized
  source 1..22: mol_type = other DNA
ttgaaggatactttaatgagga

SEQ ID NO: 81792 - DNA, 22 bp, synthetic construct
  misc_feature 1..22: note = chemically synthesized
  source 1..22: mol_type = other DNA
gaaggatactttaatgaggaat

SEQ ID NO: 81793 - DNA, 22 bp, synthetic construct
  misc_feature 1..22: note = chemically synthesized
  source 1..22: mol_type = other DNA
aaggatactttaatgaggaata

SEQ ID NO: 81794 - DNA, 22 bp, synthetic construct
  misc_feature 1..22: note = chemically synthesized
  source 1..22: mol_type = other DNA
taatgaggaatacagatgaaga

SEQ ID NO: 81795 - DNA, 22 bp, synthetic construct
  misc_feature 1..22: note = chemically synthesized
  source 1..22: mol_type = other DNA
aatgaggaatacagatgaagat

SEQ ID NO: 81796 - DNA, 22 bp, synthetic construct
  misc_feature 1..22: note = chemically synthesized
  source 1..22: mol_type = other DNA
atgaggaatacagatgaagata

SEQ ID NO: 81797 - DNA, 22 bp, synthetic construct
  misc_feature 1..22: note = chemically synthesized
  source 1..22: mol_type = other DNA
atggaattaaaaactggcttca

SEQ ID NO: 81798 - DNA, 22 bp, synthetic construct
  misc_feature 1..22: note = chemically synthesized
  source 1..22: mol_type = other DNA
aaaactggcttcacactgataa

SEQ ID NO: 81799 - DNA, 22 bp, synthetic construct
  misc_feature 1..22: note = chemically synthesized
  source 1..22: mol_type = other DNA
gcttcacactgataagccagat

SEQ ID NO: 81800 - DNA, 22 bp, synthetic construct
  misc_feature 1..22: note = chemically synthesized
  source 1..22: mol_type = other DNA
cacactgataagccagatttat

SEQ ID NO: 81801 - DNA, 22 bp, synthetic construct
  misc_feature 1..22: note = chemically synthesized
  source 1..22: mol_type = other DNA
acactgataagccagatttatg

SEQ ID NO: 81802 - DNA, 22 bp, synthetic construct
  misc_feature 1..22: note = chemically synthesized
  source 1..22: mol_type = other DNA
ataagccagatttatggagaga

SEQ ID NO: 81803 - DNA, 22 bp, synthetic construct
  misc_feature 1..22: note = chemically synthesized
  source 1..22: mol_type = other DNA
atggagagagatgtttccttat

SEQ ID NO: 81804 - DNA, 22 bp, synthetic construct
  misc_feature 1..22: note = chemically synthesized
  source 1..22: mol_type = other DNA
tggagagagatgtttccttatt

SEQ ID NO: 81805 - DNA, 22 bp, synthetic construct
  misc_feature 1..22: note = chemically synthesized
  source 1..22: mol_type = other DNA
ccttattctctcaagtggagcc

SEQ ID NO: 81806 - DNA, 22 bp, synthetic construct
  misc_feature 1..22: note = chemically synthesized
  source 1..22: mol_type = other DNA
cttattctctcaagtggagcct

SEQ ID NO: 81807 - DNA, 22 bp, synthetic construct
  misc_feature 1..22: note = chemically synthesized
  source 1..22: mol_type = other DNA
attctctcaagtggagccttcc

SEQ ID NO: 81808 - DNA, 22 bp, synthetic construct
  misc_feature 1..22: note = chemically synthesized
  source 1..22: mol_type = other DNA
ttctctcaagtggagccttcca

SEQ ID NO: 81809 - DNA, 22 bp, synthetic construct
  misc_feature 1..22: note = chemically synthesized
  source 1..22: mol_type = other DNA
tctcaagtggagccttccatat

SEQ ID NO: 81810 - DNA, 22 bp, synthetic construct
  misc_feature 1..22: note = chemically synthesized
  source 1..22: mol_type = other DNA
tcaagtggagccttccatatat

SEQ ID NO: 81811 - DNA, 22 bp, synthetic construct
  misc_feature 1..22: note = chemically synthesized
  source 1..22: mol_type = other DNA
aagtggagccttccatatatct

SEQ ID NO: 81812 - DNA, 22 bp, synthetic construct
  misc_feature 1..22: note = chemically synthesized
  source 1..22: mol_type = other DNA
ccatatatctgtgattttctga

SEQ ID NO: 81813 - DNA, 22 bp, synthetic construct
  misc_feature 1..22: note = chemically synthesized
  source 1..22: mol_type = other DNA
catatatctgtgattttctgat

SEQ ID NO: 81814 - DNA, 22 bp, synthetic construct
  misc_feature 1..22: note = chemically synthesized
  source 1..22: mol_type = other DNA
tgattttctgatatttttcaaa

SEQ ID NO: 81815 - DNA, 22 bp, synthetic construct
  misc_feature 1..22: note = chemically synthesized
  source 1..22: mol_type = other DNA
tctgatatttttcaaagaatcc

SEQ ID NO: 81816 - DNA, 22 bp, synthetic construct
  misc_feature 1..22: note = chemically synthesized
  source 1..22: mol_type = other DNA
ctgatatttttcaaagaatccc

SEQ ID NO: 81817 - DNA, 22 bp, synthetic construct
  misc_feature 1..22: note = chemically synthesized
  source 1..22: mol_type = other DNA
tgatatttttcaaagaatccct

SEQ ID NO: 81818 - DNA, 22 bp, synthetic construct
  misc_feature 1..22: note = chemically synthesized
  source 1..22: mol_type = other DNA
atatttttcaaagaatccctag

SEQ ID NO: 81819 - DNA, 22 bp, synthetic construct
  misc_feature 1..22: note = chemically synthesized
  source 1..22: mol_type = other DNA
ttcaaagaatccctagaagctt

SEQ ID NO: 81820 - DNA, 22 bp, synthetic construct
  misc_feature 1..22: note = chemically synthesized
  source 1..22: mol_type = other DNA
tcaaagaatccctagaagcttt

SEQ ID NO: 81821 - DNA, 22 bp, synthetic construct
  misc_feature 1..22: note = chemically synthesized
  source 1..22: mol_type = other DNA
caaagaatccctagaagctttt

SEQ ID NO: 81822 - DNA, 22 bp, synthetic construct
  misc_feature 1..22: note = chemically synthesized
  source 1..22: mol_type = other DNA
aaagaatccctagaagcttttt

SEQ ID NO: 81823 - DNA, 22 bp, synthetic construct
  misc_feature 1..22: note = chemically synthesized
  source 1..22: mol_type = other DNA
gaagcttttttcacctatagta

SEQ ID NO: 81824 - DNA, 22 bp, synthetic construct
  misc_feature 1..22: note = chemically synthesized
  source 1..22: mol_type = other DNA
ttttcacctatagtagtaaaac

SEQ ID NO: 81825 - DNA, 22 bp, synthetic construct
  misc_feature 1..22: note = chemically synthesized
  source 1..22: mol_type = other DNA
tttcacctatagtagtaaaact

SEQ ID NO: 81826 - DNA, 22 bp, synthetic construct
  misc_feature 1..22: note = chemically synthesized
  source 1..22: mol_type = other DNA
ttcacctatagtagtaaaactt

SEQ ID NO: 81827 - DNA, 22 bp, synthetic construct
  misc_feature 1..22: note = chemically synthesized
  source 1..22: mol_type = other DNA
tcacctatagtagtaaaactta

SEQ ID NO: 81828 - DNA, 22 bp, synthetic construct
  misc_feature 1..22: note = chemically synthesized
  source 1..22: mol_type = other DNA
cacctatagtagtaaaacttag

SEQ ID NO: 81829 - DNA, 22 bp, synthetic construct
  misc_feature 1..22: note = chemically synthesized
  source 1..22: mol_type = other DNA
acctatagtagtaaaacttagt

SEQ ID NO: 81830 - DNA, 22 bp, synthetic construct
  misc_feature 1..22: note = chemically synthesized
  source 1..22: mol_type = other DNA
tagtagtaaaacttagtaaaaa

SEQ ID NO: 81831 - DNA, 22 bp, synthetic construct
  misc_feature 1..22: note = chemically synthesized
  source 1..22: mol_type = other DNA
agtaaaaaaaaatagtaaaact

SEQ ID NO: 81832 - DNA, 22 bp, synthetic construct
  misc_feature 1..22: note = chemically synthesized
  source 1..22: mol_type = other DNA
gtaaaaaaaaatagtaaaactt

SEQ ID NO: 81833 - DNA, 22 bp, synthetic construct
  misc_feature 1..22: note = chemically synthesized
  source 1..22: mol_type = other DNA
ccctataaatatgatgtttgac

SEQ ID NO: 81834 - DNA, 22 bp, synthetic construct
  misc_feature 1..22: note = chemically synthesized
  source 1..22: mol_type = other DNA
cctataaatatgatgtttgaca

SEQ ID NO: 81835 - DNA, 22 bp, synthetic construct
  misc_feature 1..22: note = chemically synthesized
  source 1..22: mol_type = other DNA
taaatatgatgtttgacatcag

SEQ ID NO: 81836 - DNA, 22 bp, synthetic construct
  misc_feature 1..22: note = chemically synthesized
  source 1..22: mol_type = other DNA
gacatcagctgaccctgactgg

SEQ ID NO: 81837 - DNA, 22 bp, synthetic construct
  misc_feature 1..22: note = chemically synthesized
  source 1..22: mol_type = other DNA
acatcagctgaccctgactgga

SEQ ID NO: 81838 - DNA, 22 bp, synthetic construct
  misc_feature 1..22: note = chemically synthesized
  source 1..22: mol_type = other DNA
accctgactggatgatcttgat

SEQ ID NO: 81839 - DNA, 22 bp, synthetic construct
  misc_feature 1..22: note = chemically synthesized
  source 1..22: mol_type = other DNA
actggatgatcttgattggatg

SEQ ID NO: 81840 - DNA, 22 bp, synthetic construct
  misc_feature 1..22: note = chemically synthesized
  source 1..22: mol_type = other DNA
gatgatcttgattggatgctag

SEQ ID NO: 81841 - DNA, 22 bp, synthetic construct
  misc_feature 1..22: note = chemically synthesized
  source 1..22: mol_type = other DNA
gattggatgctaggcaagtgcc

SEQ ID NO: 81842 - DNA, 22 bp, synthetic construct
  misc_feature 1..22: note = chemically synthesized
  source 1..22: mol_type = other DNA
attggatgctaggcaagtgccc

SEQ ID NO: 81843 - DNA, 22 bp, synthetic construct
  misc_feature 1..22: note = chemically synthesized
  source 1..22: mol_type = other DNA
gatgctaggcaagtgcccaggt

SEQ ID NO: 81844 - DNA, 22 bp, synthetic construct
  misc_feature 1..22: note = chemically synthesized
  source 1..22: mol_type = other DNA
ggcaagtgcccaggtcctccaa

SEQ ID NO: 81845 - DNA, 22 bp, synthetic construct
  misc_feature 1..22: note = chemically synthesized
  source 1..22: mol_type = other DNA
caatcagtcatctaggcatctt

SEQ ID NO: 81846 - DNA, 22 bp, synthetic construct
  misc_feature 1..22: note = chemically synthesized
  source 1..22: mol_type = other DNA
ggcatcttagttctcactggct

SEQ ID NO: 81847 - DNA, 22 bp, synthetic construct
  misc_feature 1..22: note = chemically synthesized
  source 1..22: mol_type = other DNA
agttctcactggctaagagagg

SEQ ID NO: 81848 - DNA, 22 bp, synthetic construct
  misc_feature 1..22: note = chemically synthesized
  source 1..22: mol_type = other DNA
gttctcactggctaagagaggt

SEQ ID NO: 81849 - DNA, 22 bp, synthetic construct
  misc_feature 1..22: note = chemically synthesized
  source 1..22: mol_type = other DNA
tcactggctaagagaggtcata

SEQ ID NO: 81850 - DNA, 22 bp, synthetic construct
  misc_feature 1..22: note = chemically synthesized
  source 1..22: mol_type = other DNA
actggctaagagaggtcatatt

SEQ ID NO: 81851 - DNA, 22 bp, synthetic construct
  misc_feature 1..22: note = chemically synthesized
  source 1..22: mol_type = other DNA
gctaagagaggtcatattttat

SEQ ID NO: 81852 - DNA, 22 bp, synthetic construct
  misc_feature 1..22: note = chemically synthesized
  source 1..22: mol_type = other DNA
agagaggtcatattttattacg

SEQ ID NO: 81853 - DNA, 22 bp, synthetic construct
  misc_feature 1..22: note = chemically synthesized
  source 1..22: mol_type = other DNA
tattacgtaagtgtgagtgcta

SEQ ID NO: 81854 - DNA, 22 bp, synthetic construct
  misc_feature 1..22: note = chemically synthesized
  source 1..22: mol_type = other DNA
attacgtaagtgtgagtgctat

SEQ ID NO: 81855 - DNA, 22 bp, synthetic construct
  misc_feature 1..22: note = chemically synthesized
  source 1..22: mol_type = other DNA
ttacgtaagtgtgagtgctata

SEQ ID NO: 81856 - DNA, 22 bp, synthetic construct
  misc_feature 1..22: note = chemically synthesized
  source 1..22: mol_type = other DNA
cgtaagtgtgagtgctatatgg

SEQ ID NO: 81857 - DNA, 22 bp, synthetic construct
  misc_feature 1..22: note = chemically synthesized
  source 1..22: mol_type = other DNA
tatggtgggagatataagaatt

SEQ ID NO: 81858 - DNA, 22 bp, synthetic construct
  misc_feature 1..22: note = chemically synthesized
  source 1..22: mol_type = other DNA
tcacatgcatttcaagtgcttt

SEQ ID NO: 81859 - DNA, 22 bp, synthetic construct
  misc_feature 1..22: note = chemically synthesized
  source 1..22: mol_type = other DNA
caagtgctttccattcaaaggt

SEQ ID NO: 81860 - DNA, 22 bp, synthetic construct
  misc_feature 1..22: note = chemically synthesized
  source 1..22: mol_type = other DNA
aagtgctttccattcaaaggtc

SEQ ID NO: 81861 - DNA, 22 bp, synthetic construct
  misc_feature 1..22: note = chemically synthesized
  source 1..22: mol_type = other DNA
tccattcaaaggtcttgaaacc

SEQ ID NO: 81862 - DNA, 22 bp, synthetic construct
  misc_feature 1..22: note = chemically synthesized
  source 1..22: mol_type = other DNA
ccattcaaaggtcttgaaacca

SEQ ID NO: 81863 - DNA, 22 bp, synthetic construct
  misc_feature 1..22: note = chemically synthesized
  source 1..22: mol_type = other DNA
cattcaaaggtcttgaaaccat

SEQ ID NO: 81864 - DNA, 22 bp, synthetic construct
  misc_feature 1..22: note = chemically synthesized
  source 1..22: mol_type = other DNA
aaaggtcttgaaaccatagtga

SEQ ID NO: 81865 - DNA, 22 bp, synthetic construct
  misc_feature 1..22: note = chemically synthesized
  source 1..22: mol_type = other DNA
gaaaccatagtgagggtaaatt

SEQ ID NO: 81866 - DNA, 22 bp, synthetic construct
  misc_feature 1..22: note = chemically synthesized
  source 1..22: mol_type = other DNA
aaaccatagtgagggtaaattg

SEQ ID NO: 81867 - DNA, 22 bp, synthetic construct
  misc_feature 1..22: note = chemically synthesized
  source 1..22: mol_type = other DNA
gatggcttcaccttgctttttt

SEQ ID NO: 81868 - DNA, 22 bp, synthetic construct
  misc_feature 1..22: note = chemically synthesized
  source 1..22: mol_type = other DNA
caccttgcttttttagacatta

SEQ ID NO: 81869 - DNA, 22 bp, synthetic construct
  misc_feature 1..22: note = chemically synthesized
  source 1..22: mol_type = other DNA
accttgcttttttagacattaa

SEQ ID NO: 81870 - DNA, 22 bp, synthetic construct
  misc_feature 1..22: note = chemically synthesized
  source 1..22: mol_type = other DNA
gcttttttagacattaaagaaa

SEQ ID NO: 81871 - DNA, 22 bp, synthetic construct
  misc_feature 1..22: note = chemically synthesized
  source 1..22: mol_type = other DNA
cttttttagacattaaagaaag

SEQ ID NO: 81872 - DNA, 22 bp, synthetic construct
  misc_feature 1..22: note = chemically synthesized
  source 1..22: mol_type = other DNA
ttttagacattaaagaaaggac

SEQ ID NO: 81873 - DNA, 22 bp, synthetic construct
  misc_feature 1..22: note = chemically synthesized
  source 1..22: mol_type = other DNA
tttagacattaaagaaaggaca

SEQ ID NO: 81874 - DNA, 22 bp, synthetic construct
  misc_feature 1..22: note = chemically synthesized
  source 1..22: mol_type = other DNA
ttagacattaaagaaaggacag

SEQ ID NO: 81875 - DNA, 22 bp, synthetic construct
  misc_feature 1..22: note = chemically synthesized
  source 1..22: mol_type = other DNA
tagacattaaagaaaggacagt

SEQ ID NO: 81876 - DNA, 22 bp, synthetic construct
  misc_feature 1..22: note = chemically synthesized
  source 1..22: mol_type = other DNA
agacattaaagaaaggacagta

SEQ ID NO: 81877 - DNA, 22 bp, synthetic construct
  misc_feature 1..22: note = chemically synthesized
  source 1..22: mol_type = other DNA
gacattaaagaaaggacagtac

SEQ ID NO: 81878 - DNA, 22 bp, synthetic construct
  misc_feature 1..22: note = chemically synthesized
  source 1..22: mol_type = other DNA
aagaaaggacagtacttatctt

SEQ ID NO: 81879 - DNA, 22 bp, synthetic construct
  misc_feature 1..22: note = chemically synthesized
  source 1..22: mol_type = other DNA
atcttcccacctatccttggaa

SEQ ID NO: 81880 - DNA, 22 bp, synthetic construct
  misc_feature 1..22: note = chemically synthesized
  source 1..22: mol_type = other DNA
tcttcccacctatccttggaaa

SEQ ID NO: 81881 - DNA, 22 bp, synthetic construct
  misc_feature 1..22: note = chemically synthesized
  source 1..22: mol_type = other DNA
cccacctatccttggaaaagaa

SEQ ID NO: 81882 - DNA, 22 bp, synthetic construct
  misc_feature 1..22: note = chemically synthesized
  source 1..22: mol_type = other DNA
ccacctatccttggaaaagaaa

SEQ ID NO: 81883 - DNA, 22 bp, synthetic construct
  misc_feature 1..22: note = chemically synthesized
  source 1..22: mol_type = other DNA
tccttggaaaagaaattaaagg

SEQ ID NO: 81884 - DNA, 22 bp, synthetic construct
  misc_feature 1..22: note = chemically synthesized
  source 1..22: mol_type = other DNA
ggaaaagaaattaaaggaatca

SEQ ID NO: 81885 - DNA, 22 bp, synthetic construct
  misc_feature 1..22: note = chemically synthesized
  source 1..22: mol_type = other DNA
gaaaagaaattaaaggaatcaa

SEQ ID NO: 81886 - DNA, 22 bp, synthetic construct
  misc_feature 1..22: note = chemically synthesized
  source 1..22: mol_type = other DNA
aaggaatcaaaggatattatag

SEQ ID NO: 81887 - DNA, 22 bp, synthetic construct
  misc_feature 1..22: note = chemically synthesized
  source 1..22: mol_type = other DNA
tagaaaaagagatggagaaagg

SEQ ID NO: 81888 - DNA, 22 bp, synthetic construct
  misc_feature 1..22: note = chemically synthesized
  source 1..22: mol_type = other DNA
aggggacaacagaaattgatgt

SEQ ID NO: 81889 - DNA, 22 bp, synthetic construct
  misc_feature 1..22: note = chemically synthesized
  source 1..22: mol_type = other DNA
ggggacaacagaaattgatgtc

SEQ ID NO: 81890 - DNA, 22 bp, synthetic construct
  misc_feature 1..22: note = chemically synthesized
  source 1..22: mol_type = other DNA
atgtctgcatctgactacctga

SEQ ID NO: 81891 - DNA, 22 bp, synthetic construct
  misc_feature 1..22: note = chemically synthesized
  source 1..22: mol_type = other DNA
catctgactacctgatagtgac

SEQ ID NO: 81892 - DNA, 22 bp, synthetic construct
  misc_feature 1..22: note = chemically synthesized
  source 1..22: mol_type = other DNA
actacctgatagtgacaggaag

SEQ ID NO: 81893 - DNA, 22 bp, synthetic construct
  misc_feature 1..22: note = chemically synthesized
  source 1..22: mol_type = other DNA
cctgatagtgacaggaagaaca

SEQ ID NO: 81894 - DNA, 22 bp, synthetic construct
  misc_feature 1..22: note = chemically synthesized
  source 1..22: mol_type = other DNA
atagtgacaggaagaacaaaga

SEQ ID NO: 81895 - DNA, 22 bp, synthetic construct
  misc_feature 1..22: note = chemically synthesized
  source 1..22: mol_type = other DNA
tgctgataacttattataatgt

SEQ ID NO: 81896 - DNA, 22 bp, synthetic construct
  misc_feature 1..22: note = chemically synthesized
  source 1..22: mol_type = other DNA
ctgataacttattataatgttt

SEQ ID NO: 81897 - DNA, 22 bp, synthetic construct
  misc_feature 1..22: note = chemically synthesized
  source 1..22: mol_type = other DNA
ataacttattataatgttttta

SEQ ID NO: 81898 - DNA, 22 bp, synthetic construct
  misc_feature 1..22: note = chemically synthesized
  source 1..22: mol_type = other DNA
attataatgtttttaaatctgg

SEQ ID NO: 81899 - DNA, 22 bp, synthetic construct
  misc_feature 1..22: note = chemically synthesized
  source 1..22: mol_type = other DNA
ttataatgtttttaaatctggg

SEQ ID NO: 81900 - DNA, 22 bp, synthetic construct
  misc_feature 1..22: note = chemically synthesized
  source 1..22: mol_type = other DNA
taatgtttttaaatctggggac

SEQ ID NO: 81901 - DNA, 22 bp, synthetic construct
  misc_feature 1..22: note = chemically synthesized
  source 1..22: mol_type = other DNA
ttaaatctggggactctaaaac

SEQ ID NO: 81902 - DNA, 22 bp, synthetic construct
  misc_feature 1..22: note = chemically synthesized
  source 1..22: mol_type = other DNA
taaatctggggactctaaaact

SEQ ID NO: 81903 - DNA, 22 bp, synthetic construct
  misc_feature 1..22: note = chemically synthesized
  source 1..22: mol_type = other DNA
aaatctggggactctaaaactt

SEQ ID NO: 81904 - DNA, 22 bp, synthetic construct
  misc_feature 1..22: note = chemically synthesized
  source 1..22: mol_type = other DNA
aatctggggactctaaaacttg

SEQ ID NO: 81905 - DNA, 22 bp, synthetic construct
  misc_feature 1..22: note = chemically synthesized
  source 1..22: mol_type = other DNA
gggactctaaaacttgaagaat

SEQ ID NO: 81906 - DNA, 22 bp, synthetic construct
  misc_feature 1..22: note = chemically synthesized
  source 1..22: mol_type = other DNA
taaaacttgaagaatttttttt

SEQ ID NO: 81907 - DNA, 22 bp, synthetic construct
  misc_feature 1..22: note = chemically synthesized
  source 1..22: mol_type = other DNA
aaacttgaagaatttttttttg

SEQ ID NO: 81908 - DNA, 22 bp, synthetic construct
  misc_feature 1..22: note = chemically synthesized
  source 1..22: mol_type = other DNA
gaagaatttttttttgagcaaa

SEQ ID NO: 81909 - DNA, 22 bp, synthetic construct
  misc_feature 1..22: note = chemically synthesized
  source 1..22: mol_type = other DNA
aagaatttttttttgagcaaat

SEQ ID NO: 81910 - DNA, 22 bp, synthetic construct
  misc_feature 1..22: note = chemically synthesized
  source 1..22: mol_type = other DNA
ttttttgagcaaatgttttcag

SEQ ID NO: 81911 - DNA, 22 bp, synthetic construct
  misc_feature 1..22: note = chemically synthesized
  source 1..22: mol_type = other DNA
tttttgagcaaatgttttcagt

SEQ ID NO: 81912 - DNA, 22 bp, synthetic construct
  misc_feature 1..22: note = chemically synthesized
  source 1..22: mol_type = other DNA
ttttgagcaaatgttttcagta

SEQ ID NO: 81913 - DNA, 22 bp, synthetic construct
  misc_feature 1..22: note = chemically synthesized
  source 1..22: mol_type = other DNA
tttgagcaaatgttttcagtaa

SEQ ID NO: 81914 - DNA, 22 bp, synthetic construct
  misc_feature 1..22: note = chemically synthesized
  source 1..22: mol_type = other DNA
ttgagcaaatgttttcagtaaa

SEQ ID NO: 81915 - DNA, 22 bp, synthetic construct
  misc_feature 1..22: note = chemically synthesized
  source 1..22: mol_type = other DNA
tgagcaaatgttttcagtaaat

SEQ ID NO: 81916 - DNA, 22 bp, synthetic construct
  misc_feature 1..22: note = chemically synthesized
  source 1..22: mol_type = other DNA
gagcaaatgttttcagtaaata

SEQ ID NO: 81917 - DNA, 22 bp, synthetic construct
  misc_feature 1..22: note = chemically synthesized
  source 1..22: mol_type = other DNA
agcaaatgttttcagtaaataa

SEQ ID NO: 81918 - DNA, 22 bp, synthetic construct
  misc_feature 1..22: note = chemically synthesized
  source 1..22: mol_type = other DNA
tcagtaaataatgatttctgat

SEQ ID NO: 81919 - DNA, 22 bp, synthetic construct
  misc_feature 1..22: note = chemically synthesized
  source 1..22: mol_type = other DNA
cagtaaataatgatttctgata

SEQ ID NO: 81920 - DNA, 22 bp, synthetic construct
  misc_feature 1..22: note = chemically synthesized
  source 1..22: mol_type = other DNA
agtaaataatgatttctgataa

SEQ ID NO: 81921 - DNA, 22 bp, synthetic construct
  misc_feature 1..22: note = chemically synthesized
  source 1..22: mol_type = other DNA
ctgataaatataatatgcaaga

SEQ ID NO: 81922 - DNA, 22 bp, synthetic construct
  misc_feature 1..22: note = chemically synthesized
  source 1..22: mol_type = other DNA
tgataaatataatatgcaagag

SEQ ID NO: 81923 - DNA, 22 bp, synthetic construct
  misc_feature 1..22: note = chemically synthesized
  source 1..22: mol_type = other DNA
ataaatataatatgcaagaggg

SEQ ID NO: 81924 - DNA, 22 bp, synthetic construct
  misc_feature 1..22: note = chemically synthesized
  source 1..22: mol_type = other DNA
cggctgctgtgatacaagtacc

SEQ ID NO: 81925 - DNA, 22 bp, synthetic construct
  misc_feature 1..22: note = chemically synthesized
  source 1..22: mol_type = other DNA
ctgtgatacaagtaccatgtta

SEQ ID NO: 81926 - DNA, 22 bp, synthetic construct
  misc_feature 1..22: note = chemically synthesized
  source 1..22: mol_type = other DNA
tgatacaagtaccatgttacta

SEQ ID NO: 81927 - DNA, 22 bp, synthetic construct
  misc_feature 1..22: note = chemically synthesized
  source 1..22: mol_type = other DNA
ctactttaaaacacaccttcag

SEQ ID NO: 81928 - DNA, 22 bp, synthetic construct
  misc_feature 1..22: note = chemically synthesized
  source 1..22: mol_type = other DNA
ctttaaaacacaccttcagcaa

SEQ ID NO: 81929 - DNA, 22 bp, synthetic construct
  misc_feature 1..22: note = chemically synthesized
  source 1..22: mol_type = other DNA
taaaacacaccttcagcaatat

SEQ ID NO: 81930 - DNA, 22 bp, synthetic construct
  misc_feature 1..22: note = chemically synthesized
  source 1..22: mol_type = other DNA
aaaacacaccttcagcaatatt

SEQ ID NO: 81931 - DNA, 22 bp, synthetic construct
  misc_feature 1..22: note = chemically synthesized
  source 1..22: mol_type = other DNA
aaacacaccttcagcaatattc

SEQ ID NO: 81932 - DNA, 22 bp, synthetic construct
  misc_feature 1..22: note = chemically synthesized
  source 1..22: mol_type = other DNA
cagcaatattctatgcagatga

SEQ ID NO: 81933 - DNA, 22 bp, synthetic construct
  misc_feature 1..22: note = chemically synthesized
  source 1..22: mol_type = other DNA
agcaatattctatgcagatgaa

SEQ ID NO: 81934 - DNA, 22 bp, synthetic construct
  misc_feature 1..22: note = chemically synthesized
  source 1..22: mol_type = other DNA
tatgcagatgaaataatagtta

SEQ ID NO: 81935 - DNA, 22 bp, synthetic construct
  misc_feature 1..22: note = chemically synthesized
  source 1..22: mol_type = other DNA
tgcagatgaaataatagttatt

SEQ ID NO: 81936 - DNA, 22 bp, synthetic construct
  misc_feature 1..22: note = chemically synthesized
  source 1..22: mol_type = other DNA
ttgatatgtttaatttaatatg

SEQ ID NO: 81937 - DNA, 22 bp, synthetic construct
  misc_feature 1..22: note = chemically synthesized
  source 1..22: mol_type = other DNA
atatgtttaatttaatatgttt

SEQ ID NO: 81938 - DNA, 22 bp, synthetic construct
  misc_feature 1..22: note = chemically synthesized
  source 1..22: mol_type = other DNA
aatttaatatgtttagttttct

SEQ ID NO: 81939 - DNA, 22 bp, synthetic construct
  misc_feature 1..22: note = chemically synthesized
  source 1..22: mol_type = other DNA
atttaatatgtttagttttctt

SEQ ID NO: 81940 - DNA, 22 bp, synthetic construct
  misc_feature 1..22: note = chemically synthesized
  source 1..22: mol_type = other DNA
aatatgtttagttttcttatag

SEQ ID NO: 81941 - DNA, 22 bp, synthetic construct
  misc_feature 1..22: note = chemically synthesized
  source 1..22: mol_type = other DNA
atatgtttagttttcttataga

SEQ ID NO: 81942 - DNA, 22 bp, synthetic construct
  misc_feature 1..22: note = chemically synthesized
  source 1..22: mol_type = other DNA
agttttcttatagaagtctaca

SEQ ID NO: 81943 - DNA, 22 bp, synthetic construct
  misc_feature 1..22: note = chemically synthesized
  source 1..22: mol_type = other DNA
gttttcttatagaagtctacag

SEQ ID NO: 81944 - DNA, 22 bp, synthetic construct
  misc_feature 1..22: note = chemically synthesized
  source 1..22: mol_type = other DNA
tcttatagaagtctacagtctt

SEQ ID NO: 81945 - DNA, 22 bp, synthetic construct
  misc_feature 1..22: note = chemically synthesized
  source 1..22: mol_type = other DNA
cttatagaagtctacagtcttt

SEQ ID NO: 81946 - DNA, 22 bp, synthetic construct
  misc_feature 1..22: note = chemically synthesized
  source 1..22: mol_type = other DNA
ttatagaagtctacagtctttg

SEQ ID NO: 81947 - DNA, 22 bp, synthetic construct
  misc_feature 1..22: note = chemically synthesized
  source 1..22: mol_type = other DNA
atagaagtctacagtctttgag

SEQ ID NO: 81948 - DNA, 22 bp, synthetic construct
  misc_feature 1..22: note = chemically synthesized
  source 1..22: mol_type = other DNA
tagaagtctacagtctttgagc

SEQ ID NO: 81949 - DNA, 22 bp, synthetic construct
  misc_feature 1..22: note = chemically synthesized
  source 1..22: mol_type = other DNA
cagtctttgagccacatgcttt

SEQ ID NO: 81950 - DNA, 22 bp, synthetic construct
  misc_feature 1..22: note = chemically synthesized
  source 1..22: mol_type = other DNA
tgagccacatgctttagaaaaa

SEQ ID NO: 81951 - DNA, 22 bp, synthetic construct
  misc_feature 1..22: note = chemically synthesized
  source 1..22: mol_type = other DNA
gagccacatgctttagaaaaat

SEQ ID NO: 81952 - DNA, 22 bp, synthetic construct
  misc_feature 1..22: note = chemically synthesized
  source 1..22: mol_type = other DNA
agccacatgctttagaaaaata

SEQ ID NO: 81953 - DNA, 22 bp, synthetic construct
  misc_feature 1..22: note = chemically synthesized
  source 1..22: mol_type = other DNA
tagaaaaataattttccaattt

SEQ ID NO: 81954 - DNA, 22 bp, synthetic construct
  misc_feature 1..22: note = chemically synthesized
  source 1..22: mol_type = other DNA
agaaaaataattttccaatttt

SEQ ID NO: 81955 - DNA, 22 bp, synthetic construct
  misc_feature 1..22: note = chemically synthesized
  source 1..22: mol_type = other DNA
gaaaaataattttccaattttt

SEQ ID NO: 81956 - DNA, 22 bp, synthetic construct
  misc_feature 1..22: note = chemically synthesized
  source 1..22: mol_type = other DNA
tccaatttttatgaatgttata

SEQ ID NO: 81957 - DNA, 22 bp, synthetic construct
  misc_feature 1..22: note = chemically synthesized
  source 1..22: mol_type = other DNA
ccaatttttatgaatgttatat

SEQ ID NO: 81958 - DNA, 22 bp, synthetic construct
  misc_feature 1..22: note = chemically synthesized
  source 1..22: mol_type = other DNA
caatttttatgaatgttatata

SEQ ID NO: 81959 - DNA, 22 bp, synthetic construct
  misc_feature 1..22: note = chemically synthesized
  source 1..22: mol_type = other DNA
ttatgaatgttatataatatta

SEQ ID NO: 81960 - DNA, 22 bp, synthetic construct
  misc_feature 1..22: note = chemically synthesized
  source 1..22: mol_type = other DNA
tatgaatgttatataatattat

SEQ ID NO: 81961 - DNA, 22 bp, synthetic construct
  misc_feature 1..22: note = chemically synthesized
  source 1..22: mol_type = other DNA
atgaatgttatataatattatt

SEQ ID NO: 81962 - DNA, 22 bp, synthetic construct
  misc_feature 1..22: note = chemically synthesized
  source 1..22: mol_type = other DNA
tgaatgttatataatattattg

SEQ ID NO: 81963 - DNA, 22 bp, synthetic construct
  misc_feature 1..22: note = chemically synthesized
  source 1..22: mol_type = other DNA
tataatattattgacatcaagt

SEQ ID NO: 81964 - DNA, 22 bp, synthetic construct
  misc_feature 1..22: note = chemically synthesized
  source 1..22: mol_type = other DNA
ttgacatcaagtaacaatatca

SEQ ID NO: 81965 - DNA, 22 bp, synthetic construct
  misc_feature 1..22: note = chemically synthesized
  source 1..22: mol_type = other DNA
acatcaagtaacaatatcattg

SEQ ID NO: 81966 - DNA, 22 bp, synthetic construct
  misc_feature 1..22: note = chemically synthesized
  source 1..22: mol_type = other DNA
gaatctcggtatgcccttaata

SEQ ID NO: 81967 - DNA, 22 bp, synthetic construct
  misc_feature 1..22: note = chemically synthesized
  source 1..22: mol_type = other DNA
ggtatgcccttaataatcatat

SEQ ID NO: 81968 - DNA, 22 bp, synthetic construct
  misc_feature 1..22: note = chemically synthesized
  source 1..22: mol_type = other DNA
aataatcatatatctatatgat

SEQ ID NO: 81969 - DNA, 22 bp, synthetic construct
  misc_feature 1..22: note = chemically synthesized
  source 1..22: mol_type = other DNA
ataatcatatatctatatgatt

SEQ ID NO: 81970 - DNA, 22 bp, synthetic construct
  misc_feature 1..22: note = chemically synthesized
  source 1..22: mol_type = other DNA
tatgattatctaatatacctag

SEQ ID NO: 81971 - DNA, 22 bp, synthetic construct
  misc_feature 1..22: note = chemically synthesized
  source 1..22: mol_type = other DNA
tctaatatacctagatattttt

SEQ ID NO: 81972 - DNA, 22 bp, synthetic construct
  misc_feature 1..22: note = chemically synthesized
  source 1..22: mol_type = other DNA
atatacctagatatttttgcag

SEQ ID NO: 81973 - DNA, 22 bp, synthetic construct
  misc_feature 1..22: note = chemically synthesized
  source 1..22: mol_type = other DNA
gatatttttgcagggaacatgt

SEQ ID NO: 81974 - DNA, 22 bp, synthetic construct
  misc_feature 1..22: note = chemically synthesized
  source 1..22: mol_type = other DNA
ttgcagggaacatgtaagtatt

SEQ ID NO: 81975 - DNA, 22 bp, synthetic construct
  misc_feature 1..22: note = chemically synthesized
  source 1..22: mol_type = other DNA
tgcagggaacatgtaagtatta

SEQ ID NO: 81976 - DNA, 22 bp, synthetic construct
  misc_feature 1..22: note = chemically synthesized
  source 1..22: mol_type = other DNA
gcagggaacatgtaagtattat

SEQ ID NO: 81977 - DNA, 22 bp, synthetic construct
  misc_feature 1..22: note = chemically synthesized
  source 1..22: mol_type = other DNA
cagggaacatgtaagtattatg

SEQ ID NO: 81978 - DNA, 22 bp, synthetic construct
  misc_feature 1..22: note = chemically synthesized
  source 1..22: mol_type = other DNA
tgtagaataaataaagattata

SEQ ID NO: 81979 - DNA, 22 bp, synthetic construct
  misc_feature 1..22: note = chemically synthesized
  source 1..22: mol_type = other DNA
taaaaattctcacataagttca

SEQ ID NO: 81980 - DNA, 22 bp, synthetic construct
  misc_feature 1..22: note = chemically synthesized
  source 1..22: mol_type = other DNA
tcacataagttcatgtcagaaa

SEQ ID NO: 81981 - DNA, 22 bp, synthetic construct
  misc_feature 1..22: note = chemically synthesized
  source 1..22: mol_type = other DNA
acataagttcatgtcagaaatt

SEQ ID NO: 81982 - DNA, 22 bp, synthetic construct
  misc_feature 1..22: note = chemically synthesized
  source 1..22: mol_type = other DNA
atgtcagaaattgccatcactt

SEQ ID NO: 81983 - DNA, 22 bp, synthetic construct
  misc_feature 1..22: note = chemically synthesized
  source 1..22: mol_type = other DNA
ccatcactttagagcagattgt

SEQ ID NO: 81984 - DNA, 22 bp, synthetic construct
  misc_feature 1..22: note = chemically synthesized
  source 1..22: mol_type = other DNA
tagagcagattgtgctgttaaa

SEQ ID NO: 81985 - DNA, 22 bp, synthetic construct
  misc_feature 1..22: note = chemically synthesized
  source 1..22: mol_type = other DNA
agagcagattgtgctgttaaaa

SEQ ID NO: 81986 - DNA, 22 bp, synthetic construct
  misc_feature 1..22: note = chemically synthesized
  source 1..22: mol_type = other DNA
gagcagattgtgctgttaaaag

SEQ ID NO: 81987 - DNA, 22 bp, synthetic construct
  misc_feature 1..22: note = chemically synthesized
  source 1..22: mol_type = other DNA
tgctgttaaaagactcagtttt

SEQ ID NO: 81988 - DNA, 22 bp, synthetic construct
  misc_feature 1..22: note = chemically synthesized
  source 1..22: mol_type = other DNA
ttaaaagactcagtttttaaat

SEQ ID NO: 81989 - DNA, 22 bp, synthetic construct
  misc_feature 1..22: note = chemically synthesized
  source 1..22: mol_type = other DNA
aaagactcagtttttaaatttc

SEQ ID NO: 81990 - DNA, 22 bp, synthetic construct
  misc_feature 1..22: note = chemically synthesized
  source 1..22: mol_type = other DNA
agtttttaaatttctatggatt

SEQ ID NO: 81991 - DNA, 22 bp, synthetic construct
  misc_feature 1..22: note = chemically synthesized
  source 1..22: mol_type = other DNA
ttaaatttctatggatttcaag

SEQ ID NO: 81992 - DNA, 22 bp, synthetic construct
  misc_feature 1..22: note = chemically synthesized
  source 1..22: mol_type = other DNA
taaatttctatggatttcaagg

SEQ ID NO: 81993 - DNA, 22 bp, synthetic construct
  misc_feature 1..22: note = chemically synthesized
  source 1..22: mol_type = other DNA
aaatttctatggatttcaagga

SEQ ID NO: 81994 - DNA, 22 bp, synthetic construct
  misc_feature 1..22: note = chemically synthesized
  source 1..22: mol_type = other DNA
aatttctatggatttcaaggaa

SEQ ID NO: 81995 - DNA, 22 bp, synthetic construct
  misc_feature 1..22: note = chemically synthesized
  source 1..22: mol_type = other DNA
ctatggatttcaaggaaatgga

SEQ ID NO: 81996 - DNA, 22 bp, synthetic construct
  misc_feature 1..22: note = chemically synthesized
  source 1..22: mol_type = other DNA
tatggatttcaaggaaatggat

SEQ ID NO: 81997 - DNA, 22 bp, synthetic construct
  misc_feature 1..22: note = chemically synthesized
  source 1..22: mol_type = other DNA
tggatttcaaggaaatggataa

SEQ ID NO: 81998 - DNA, 22 bp, synthetic construct
  misc_feature 1..22: note = chemically synthesized
  source 1..22: mol_type = other DNA
caaggaaatggataaatgattg

SEQ ID NO: 81999 - DNA, 22 bp, synthetic construct
  misc_feature 1..22: note = chemically synthesized
  source 1..22: mol_type = other DNA
aaggaaatggataaatgattgt

SEQ ID NO: 82000 - DNA, 22 bp, synthetic construct
  misc_feature 1..22: note = chemically synthesized
  source 1..22: mol_type = other DNA
tggccctgttaaccaaaatagc

SEQ ID NO: 82001 - DNA, 22 bp, synthetic construct
  misc_feature 1..22: note = chemically synthesized
  source 1..22: mol_type = other DNA
ttaaccaaaatagcagtaaaaa

SEQ ID NO: 82002 - DNA, 22 bp, synthetic construct
  misc_feature 1..22: note = chemically synthesized
  source 1..22: mol_type = other DNA
accaaaatagcagtaaaaatgg

SEQ ID NO: 82003 - DNA, 22 bp, synthetic construct
  misc_feature 1..22: note = chemically synthesized
  source 1..22: mol_type = other DNA
tggctactgatttagtatctgt

SEQ ID NO: 82004 - DNA, 22 bp, synthetic construct
  misc_feature 1..22: note = chemically synthesized
  source 1..22: mol_type = other DNA
ggctactgatttagtatctgta

SEQ ID NO: 82005 - DNA, 22 bp, synthetic construct
  misc_feature 1..22: note = chemically synthesized
  source 1..22: mol_type = other DNA
gctactgatttagtatctgtaa

SEQ ID NO: 82006 - DNA, 22 bp, synthetic construct
  misc_feature 1..22: note = chemically synthesized
  source 1..22: mol_type = other DNA
ctgatttagtatctgtaaatta

SEQ ID NO: 82007 - DNA, 22 bp, synthetic construct
  misc_feature 1..22: note = chemically synthesized
  source 1..22: mol_type = other DNA
atttagtatctgtaaattaagg

SEQ ID NO: 82008 - DNA, 22 bp, synthetic construct
  misc_feature 1..22: note = chemically synthesized
  source 1..22: mol_type = other DNA
agtatctgtaaattaaggatgt

SEQ ID NO: 82009 - DNA, 22 bp, synthetic construct
  misc_feature 1..22: note = chemically synthesized
  source 1..22: mol_type = other DNA
gtatctgtaaattaaggatgtt

SEQ ID NO: 82010 - DNA, 22 bp, synthetic construct
  misc_feature 1..22: note = chemically synthesized
  source 1..22: mol_type = other DNA
taaattaaggatgttggattgc

SEQ ID NO: 82011 - DNA, 22 bp, synthetic construct
  misc_feature 1..22: note = chemically synthesized
  source 1..22: mol_type = other DNA
aggatgttggattgcttgagat

SEQ ID NO: 82012 - DNA, 22 bp, synthetic construct
  misc_feature 1..22: note = chemically synthesized
  source 1..22: mol_type = other DNA
gattgcttgagattttagctct

SEQ ID NO: 82013 - DNA, 22 bp, synthetic construct
  misc_feature 1..22: note = chemically synthesized
  source 1..22: mol_type = other DNA
cttgagattttagctctaactc

SEQ ID NO: 82014 - DNA, 22 bp, synthetic construct
  misc_feature 1..22: note = chemically synthesized
  source 1..22: mol_type = other DNA
gagattttagctctaactctgc

SEQ ID NO: 82015 - DNA, 22 bp, synthetic construct
  misc_feature 1..22: note = chemically synthesized
  source 1..22: mol_type = other DNA
agattttagctctaactctgct

SEQ ID NO: 82016 - DNA, 22 bp, synthetic construct
  misc_feature 1..22: note = chemically synthesized
  source 1..22: mol_type = other DNA
tagctctaactctgcttcaata

SEQ ID NO: 82017 - DNA, 22 bp, synthetic construct
  misc_feature 1..22: note = chemically synthesized
  source 1..22: mol_type = other DNA
agctctaactctgcttcaatat

SEQ ID NO: 82018 - DNA, 22 bp, synthetic construct
  misc_feature 1..22: note = chemically synthesized
  source 1..22: mol_type = other DNA
gctctaactctgcttcaatatg

SEQ ID NO: 82019 - DNA, 22 bp, synthetic construct
  misc_feature 1..22: note = chemically synthesized
  source 1..22: mol_type = other DNA
taactctgcttcaatatgtaag

SEQ ID NO: 82020 - DNA, 22 bp, synthetic construct
  misc_feature 1..22: note = chemically synthesized
  source 1..22: mol_type = other DNA
actctgcttcaatatgtaagat

SEQ ID NO: 82021 - DNA, 22 bp, synthetic construct
  misc_feature 1..22: note = chemically synthesized
  source 1..22: mol_type = other DNA
tgcttcaatatgtaagatactt

SEQ ID NO: 82022 - DNA, 22 bp, synthetic construct
  misc_feature 1..22: note = chemically synthesized
  source 1..22: mol_type = other DNA
cttcaatatgtaagatacttct

SEQ ID NO: 82023 - DNA, 22 bp, synthetic construct
  misc_feature 1..22: note = chemically synthesized
  source 1..22: mol_type = other DNA
caatatgtaagatacttctaat

SEQ ID NO: 82024 - DNA, 22 bp, synthetic construct
  misc_feature 1..22: note = chemically synthesized
  source 1..22: mol_type = other DNA
aatatgtaagatacttctaatt

SEQ ID NO: 82025 - DNA, 22 bp, synthetic construct
  misc_feature 1..22: note = chemically synthesized
  source 1..22: mol_type = other DNA
ctaattgagtctagataattgt

SEQ ID NO: 82026 - DNA, 22 bp, synthetic construct
  misc_feature 1..22: note = chemically synthesized
  source 1..22: mol_type = other DNA
taattgagtctagataattgtt

SEQ ID NO: 82027 - DNA, 22 bp, synthetic construct
  misc_feature 1..22: note = chemically synthesized
  source 1..22: mol_type = other DNA
attgagtctagataattgttct

SEQ ID NO: 82028 - DNA, 22 bp, synthetic construct
  misc_feature 1..22: note = chemically synthesized
  source 1..22: mol_type = other DNA
agtctagataattgttctatag

SEQ ID NO: 82029 - DNA, 22 bp, synthetic construct
  misc_feature 1..22: note = chemically synthesized
  source 1..22: mol_type = other DNA
gataattgttctataggtaaat

SEQ ID NO: 82030 - DNA, 22 bp, synthetic construct
  misc_feature 1..22: note = chemically synthesized
  source 1..22: mol_type = other DNA
ttctataggtaaattagtgtcc

SEQ ID NO: 82031 - DNA, 22 bp, synthetic construct
  misc_feature 1..22: note = chemically synthesized
  source 1..22: mol_type = other DNA
tataggtaaattagtgtcctgg

SEQ ID NO: 82032 - DNA, 22 bp, synthetic construct
  misc_feature 1..22: note = chemically synthesized
  source 1..22: mol_type = other DNA
taggtaaattagtgtcctggat

SEQ ID NO: 82033 - DNA, 22 bp, synthetic construct
  misc_feature 1..22: note = chemically synthesized
  source 1..22: mol_type = other DNA
gtgtcctggatgctagtgcttc

SEQ ID NO: 82034 - DNA, 22 bp, synthetic construct
  misc_feature 1..22: note = chemically synthesized
  source 1..22: mol_type = other DNA
gatgctagtgcttcagccaaaa

SEQ ID NO: 82035 - DNA, 22 bp, synthetic construct
  misc_feature 1..22: note = chemically synthesized
  source 1..22: mol_type = other DNA
gtgcttcagccaaaaaatgaaa

SEQ ID NO: 82036 - DNA, 22 bp, synthetic construct
  misc_feature 1..22: note = chemically synthesized
  source 1..22: mol_type = other DNA
cagccaaaaaatgaaaaagata

SEQ ID NO: 82037 - DNA, 22 bp, synthetic construct
  misc_feature 1..22: note = chemically synthesized
  source 1..22: mol_type = other DNA
agccaaaaaatgaaaaagatac

SEQ ID NO: 82038 - DNA, 22 bp, synthetic construct
  misc_feature 1..22: note = chemically synthesized
  source 1..22: mol_type = other DNA
aatgaaagcctttatcttacta

SEQ ID NO: 82039 - DNA, 22 bp, synthetic construct
  misc_feature 1..22: note = chemically synthesized
  source 1..22: mol_type = other DNA
tatcttactatgggacttgagt

SEQ ID NO: 82040 - DNA, 22 bp, synthetic construct
  misc_feature 1..22: note = chemically synthesized
  source 1..22: mol_type = other DNA
atcttactatgggacttgagtg

SEQ ID NO: 82041 - DNA, 22 bp, synthetic construct
  misc_feature 1..22: note = chemically synthesized
  source 1..22: mol_type = other DNA
tcttactatgggacttgagtgg

SEQ ID NO: 82042 - DNA, 22 bp, synthetic construct
  misc_feature 1..22: note = chemically synthesized
  source 1..22: mol_type = other DNA
actatgggacttgagtggagga

SEQ ID NO: 82043 - DNA, 22 bp, synthetic construct
  misc_feature 1..22: note = chemically synthesized
  source 1..22: mol_type = other DNA
ctatgggacttgagtggaggaa

SEQ ID NO: 82044 - DNA, 22 bp, synthetic construct
  misc_feature 1..22: note = chemically synthesized
  source 1..22: mol_type = other DNA
tgggacttgagtggaggaaatc

SEQ ID NO: 82045 - DNA, 22 bp, synthetic construct
  misc_feature 1..22: note = chemically synthesized
  source 1..22: mol_type = other DNA
gagtggaggaaatccaagaaaa

SEQ ID NO: 82046 - DNA, 22 bp, synthetic construct
  misc_feature 1..22: note = chemically synthesized
  source 1..22: mol_type = other DNA
agtggaggaaatccaagaaaag

SEQ ID NO: 82047 - DNA, 22 bp, synthetic construct
  misc_feature 1..22: note = chemically synthesized
  source 1..22: mol_type = other DNA
cagatgatcctttcttcgaaca

SEQ ID NO: 82048 - DNA, 22 bp, synthetic construct
  misc_feature 1..22: note = chemically synthesized
  source 1..22: mol_type = other DNA
tcttcgaacaagtaatttggca

SEQ ID NO: 82049 - DNA, 22 bp, synthetic construct
  misc_feature 1..22: note = chemically synthesized
  source 1..22: mol_type = other DNA
cttcgaacaagtaatttggcat

SEQ ID NO: 82050 - DNA, 22 bp, synthetic construct
  misc_feature 1..22: note = chemically synthesized
  source 1..22: mol_type = other DNA
ttcgaacaagtaatttggcata

SEQ ID NO: 82051 - DNA, 22 bp, synthetic construct
  misc_feature 1..22: note = chemically synthesized
  source 1..22: mol_type = other DNA
cgaacaagtaatttggcataat

SEQ ID NO: 82052 - DNA, 22 bp, synthetic construct
  misc_feature 1..22: note = chemically synthesized
  source 1..22: mol_type = other DNA
gaacaagtaatttggcataatt

SEQ ID NO: 82053 - DNA, 22 bp, synthetic construct
  misc_feature 1..22: note = chemically synthesized
  source 1..22: mol_type = other DNA
ggcataattggacacctggttt

SEQ ID NO: 82054 - DNA, 22 bp, synthetic construct
  misc_feature 1..22: note = chemically synthesized
  source 1..22: mol_type = other DNA
gcataattggacacctggtttc

SEQ ID NO: 82055 - DNA, 22 bp, synthetic construct
  misc_feature 1..22: note = chemically synthesized
  source 1..22: mol_type = other DNA
gacacctggtttcttctcattt

SEQ ID NO: 82056 - DNA, 22 bp, synthetic construct
  misc_feature 1..22: note = chemically synthesized
  source 1..22: mol_type = other DNA
gtttcttctcatttgtaagtta

SEQ ID NO: 82057 - DNA, 22 bp, synthetic construct
  misc_feature 1..22: note = chemically synthesized
  source 1..22: mol_type = other DNA
cttctcatttgtaagttagtaa

SEQ ID NO: 82058 - DNA, 22 bp, synthetic construct
  misc_feature 1..22: note = chemically synthesized
  source 1..22: mol_type = other DNA
ttctcatttgtaagttagtaaa

SEQ ID NO: 82059 - DNA, 22 bp, synthetic construct
  misc_feature 1..22: note = chemically synthesized
  source 1..22: mol_type = other DNA
ctcatttgtaagttagtaaagc

SEQ ID NO: 82060 - DNA, 22 bp, synthetic construct
  misc_feature 1..22: note = chemically synthesized
  source 1..22: mol_type = other DNA
tcatttgtaagttagtaaagct

SEQ ID NO: 82061 - DNA, 22 bp, synthetic construct
  misc_feature 1..22: note = chemically synthesized
  source 1..22: mol_type = other DNA
atttgtaagttagtaaagctgg

SEQ ID NO: 82062 - DNA, 22 bp, synthetic construct
  misc_feature 1..22: note = chemically synthesized
  source 1..22: mol_type = other DNA
gtaagttagtaaagctgggagt

SEQ ID NO: 82063 - DNA, 22 bp, synthetic construct
  misc_feature 1..22: note = chemically synthesized
  source 1..22: mol_type = other DNA
taagttagtaaagctgggagtt

SEQ ID NO: 82064 - DNA, 22 bp, synthetic construct
  misc_feature 1..22: note = chemically synthesized
  source 1..22: mol_type = other DNA
gtaaagctgggagttggtgcta

SEQ ID NO: 82065 - DNA, 22 bp, synthetic construct
  misc_feature 1..22: note = chemically synthesized
  source 1..22: mol_type = other DNA
ggagttggtgctagtaaagctg

SEQ ID NO: 82066 - DNA, 22 bp, synthetic construct
  misc_feature 1..22: note = chemically synthesized
  source 1..22: mol_type = other DNA
gtgctagtaaagctgggagttg

SEQ ID NO: 82067 - DNA, 22 bp, synthetic construct
  misc_feature 1..22: note = chemically synthesized
  source 1..22: mol_type = other DNA
gtaaagctgggagttggtgcca

SEQ ID NO: 82068 - DNA, 22 bp, synthetic construct
  misc_feature 1..22: note = chemically synthesized
  source 1..22: mol_type = other DNA
ggagttggtgccagaaaagaga

SEQ ID NO: 82069 - DNA, 22 bp, synthetic construct
  misc_feature 1..22: note = chemically synthesized
  source 1..22: mol_type = other DNA
gtgccagaaaagagaacagaaa

SEQ ID NO: 82070 - DNA, 22 bp, synthetic construct
  misc_feature 1..22: note = chemically synthesized
  source 1..22: mol_type = other DNA
atttatttcttccttgtttgta

SEQ ID NO: 82071 - DNA, 22 bp, synthetic construct
  misc_feature 1..22: note = chemically synthesized
  source 1..22: mol_type = other DNA
atttcttccttgtttgtaggct

SEQ ID NO: 82072 - DNA, 22 bp, synthetic construct
  misc_feature 1..22: note = chemically synthesized
  source 1..22: mol_type = other DNA
tttcttccttgtttgtaggctg

SEQ ID NO: 82073 - DNA, 22 bp, synthetic construct
  misc_feature 1..22: note = chemically synthesized
  source 1..22: mol_type = other DNA
cttccttgtttgtaggctgtag

SEQ ID NO: 82074 - DNA, 22 bp, synthetic construct
  misc_feature 1..22: note = chemically synthesized
  source 1..22: mol_type = other DNA
ttccttgtttgtaggctgtaga

SEQ ID NO: 82075 - DNA, 22 bp, synthetic construct
  misc_feature 1..22: note = chemically synthesized
  source 1..22: mol_type = other DNA
ccttgtttgtaggctgtagagc

SEQ ID NO: 82076 - DNA, 22 bp, synthetic construct
  misc_feature 1..22: note = chemically synthesized
  source 1..22: mol_type = other DNA
cttgtttgtaggctgtagagca

SEQ ID NO: 82077 - DNA, 22 bp, synthetic construct
  misc_feature 1..22: note = chemically synthesized
  source 1..22: mol_type = other DNA
gtttgtaggctgtagagcaagc

SEQ ID NO: 82078 - DNA, 22 bp, synthetic construct
  misc_feature 1..22: note = chemically synthesized
  source 1..22: mol_type = other DNA
tttgtaggctgtagagcaagct

SEQ ID NO: 82079 - DNA, 22 bp, synthetic construct
  misc_feature 1..22: note = chemically synthesized
  source 1..22: mol_type = other DNA
gtaggctgtagagcaagcttgt

SEQ ID NO: 82080 - DNA, 22 bp, synthetic construct
  misc_feature 1..22: note = chemically synthesized
  source 1..22: mol_type = other DNA
taggctgtagagcaagcttgtc

SEQ ID NO: 82081 - DNA, 22 bp, synthetic construct
  misc_feature 1..22: note = chemically synthesized
  source 1..22: mol_type = other DNA
tagagcaagcttgtccaacctg

SEQ ID NO: 82082 - DNA, 22 bp, synthetic construct
  misc_feature 1..22: note = chemically synthesized
  source 1..22: mol_type = other DNA
gtccaacctgtggcccgtgggc

SEQ ID NO: 82083 - DNA, 22 bp, synthetic construct
  misc_feature 1..22: note = chemically synthesized
  source 1..22: mol_type = other DNA
tccaacctgtggcccgtgggct

SEQ ID NO: 82084 - DNA, 22 bp, synthetic construct
  misc_feature 1..22: note = chemically synthesized
  source 1..22: mol_type = other DNA
tggcccgtgggctgcatgcatc

SEQ ID NO: 82085 - DNA, 22 bp, synthetic construct
  misc_feature 1..22: note = chemically synthesized
  source 1..22: mol_type = other DNA
catgcatcccaagatggctttg

SEQ ID NO: 82086 - DNA, 22 bp, synthetic construct
  misc_feature 1..22: note = chemically synthesized
  source 1..22: mol_type = other DNA
tgaatgctatccaacacaactt

SEQ ID NO: 82087 - DNA, 22 bp, synthetic construct
  misc_feature 1..22: note = chemically synthesized
  source 1..22: mol_type = other DNA
gaatgctatccaacacaacttt

SEQ ID NO: 82088 - DNA, 22 bp, synthetic construct
  misc_feature 1..22: note = chemically synthesized
  source 1..22: mol_type = other DNA
aatgctatccaacacaactttc

SEQ ID NO: 82089 - DNA, 22 bp, synthetic construct
  misc_feature 1..22: note = chemically synthesized
  source 1..22: mol_type = other DNA
tccaacacaactttcttaaaac

SEQ ID NO: 82090 - DNA, 22 bp, synthetic construct
  misc_feature 1..22: note = chemically synthesized
  source 1..22: mol_type = other DNA
tcttaaaacattatgagatttt

SEQ ID NO: 82091 - DNA, 22 bp, synthetic construct
  misc_feature 1..22: note = chemically synthesized
  source 1..22: mol_type = other DNA
cttaaaacattatgagatttta

SEQ ID NO: 82092 - DNA, 22 bp, synthetic construct
  misc_feature 1..22: note = chemically synthesized
  source 1..22: mol_type = other DNA
ttaaaacattatgagattttat

SEQ ID NO: 82093 - DNA, 22 bp, synthetic construct
  misc_feature 1..22: note = chemically synthesized
  source 1..22: mol_type = other DNA
aaaacattatgagattttatgg

SEQ ID NO: 82094 - DNA, 22 bp, synthetic construct
  misc_feature 1..22: note = chemically synthesized
  source 1..22: mol_type = other DNA
aaacattatgagattttatggg

SEQ ID NO: 82095 - DNA, 22 bp, synthetic construct
  misc_feature 1..22: note = chemically synthesized
  source 1..22: mol_type = other DNA
tgagattttatgggacattttg

SEQ ID NO: 82096 - DNA, 22 bp, synthetic construct
  misc_feature 1..22: note = chemically synthesized
  source 1..22: mol_type = other DNA
tatgggacattttgtgattttt

SEQ ID NO: 82097 - DNA, 22 bp, synthetic construct
  misc_feature 1..22: note = chemically synthesized
  source 1..22: mol_type = other DNA
atgggacattttgtgatttttt

SEQ ID NO: 82098 - DNA, 22 bp, synthetic construct
  misc_feature 1..22: note = chemically synthesized
  source 1..22: mol_type = other DNA
tgggacattttgtgattttttt

SEQ ID NO: 82099 - DNA, 22 bp, synthetic construct
  misc_feature 1..22: note = chemically synthesized
  source 1..22: mol_type = other DNA
tgtgatttttttttttttttgg

SEQ ID NO: 82100 - DNA, 22 bp, synthetic construct
  misc_feature 1..22: note = chemically synthesized
  source 1..22: mol_type = other DNA
gtgatttttttttttttttggc

SEQ ID NO: 82101 - DNA, 22 bp, synthetic construct
  misc_feature 1..22: note = chemically synthesized
  source 1..22: mol_type = other DNA
tgatttttttttttttttggct

SEQ ID NO: 82102 - DNA, 22 bp, synthetic construct
  misc_feature 1..22: note = chemically synthesized
  source 1..22: mol_type = other DNA
ttttttttttttggctcatgag

SEQ ID NO: 82103 - DNA, 22 bp, synthetic construct
  misc_feature 1..22: note = chemically synthesized
  source 1..22: mol_type = other DNA
tttttttttttggctcatgagc

SEQ ID NO: 82104 - DNA, 22 bp, synthetic construct
  misc_feature 1..22: note = chemically synthesized
  source 1..22: mol_type = other DNA
ttttttttttggctcatgagct

SEQ ID NO: 82105 - DNA, 22 bp, synthetic construct
  misc_feature 1..22: note = chemically synthesized
  source 1..22: mol_type = other DNA
tttttttttggctcatgagctg

SEQ ID NO: 82106 - DNA, 22 bp, synthetic construct
  misc_feature 1..22: note = chemically synthesized
  source 1..22: mol_type = other DNA
ttttttttggctcatgagctgt

SEQ ID NO: 82107 - DNA, 22 bp, synthetic construct
  misc_feature 1..22: note = chemically synthesized
  source 1..22: mol_type = other DNA
tttttttggctcatgagctgtc

SEQ ID NO: 82108 - DNA, 22 bp, synthetic construct
  misc_feature 1..22: note = chemically synthesized
  source 1..22: mol_type = other DNA
ttttttggctcatgagctgtca

SEQ ID NO: 82109 - DNA, 22 bp, synthetic construct
  misc_feature 1..22: note = chemically synthesized
  source 1..22: mol_type = other DNA
tttttggctcatgagctgtcat

SEQ ID NO: 82110 - DNA, 22 bp, synthetic construct
  misc_feature 1..22: note = chemically synthesized
  source 1..22: mol_type = other DNA
ttttggctcatgagctgtcatt

SEQ ID NO: 82111 - DNA, 22 bp, synthetic construct
  misc_feature 1..22: note = chemically synthesized
  source 1..22: mol_type = other DNA
tttggctcatgagctgtcatta

SEQ ID NO: 82112 - DNA, 22 bp, synthetic construct
  misc_feature 1..22: note = chemically synthesized
  source 1..22: mol_type = other DNA
ttggctcatgagctgtcattag

SEQ ID NO: 82113 - DNA, 22 bp, synthetic construct
  misc_feature 1..22: note = chemically synthesized
  source 1..22: mol_type = other DNA
tggctcatgagctgtcattagt

SEQ ID NO: 82114 - DNA, 22 bp, synthetic construct
  misc_feature 1..22: note = chemically synthesized
  source 1..22: mol_type = other DNA
ggctcatgagctgtcattagtg

SEQ ID NO: 82115 - DNA, 22 bp, synthetic construct
  misc_feature 1..22: note = chemically synthesized
  source 1..22: mol_type = other DNA
gctcatgagctgtcattagtgt

SEQ ID NO: 82116 - DNA, 22 bp, synthetic construct
  misc_feature 1..22: note = chemically synthesized
  source 1..22: mol_type = other DNA
atgagctgtcattagtgttagt

SEQ ID NO: 82117 - DNA, 22 bp, synthetic construct
  misc_feature 1..22: note = chemically synthesized
  source 1..22: mol_type = other DNA
tcattagtgttagtatatttta

SEQ ID NO: 82118 - DNA, 22 bp, synthetic construct
  misc_feature 1..22: note = chemically synthesized
  source 1..22: mol_type = other DNA
gtgttagtatattttatgtgtg

SEQ ID NO: 82119 - DNA, 22 bp, synthetic construct
  misc_feature 1..22: note = chemically synthesized
  source 1..22: mol_type = other DNA
gtatattttatgtgtggcccag

SEQ ID NO: 82120 - DNA, 22 bp, synthetic construct
  misc_feature 1..22: note = chemically synthesized
  source 1..22: mol_type = other DNA
tatgtgtggcccagggaagcca

SEQ ID NO: 82121 - DNA, 22 bp, synthetic construct
  misc_feature 1..22: note = chemically synthesized
  source 1..22: mol_type = other DNA
atgtgtggcccagggaagccaa

SEQ ID NO: 82122 - DNA, 22 bp, synthetic construct
  misc_feature 1..22: note = chemically synthesized
  source 1..22: mol_type = other DNA
tgtgtggcccagggaagccaaa

SEQ ID NO: 82123 - DNA, 22 bp, synthetic construct
  misc_feature 1..22: note = chemically synthesized
  source 1..22: mol_type = other DNA
gacatccctgctgtagagtttc

SEQ ID NO: 82124 - DNA, 22 bp, synthetic construct
  misc_feature 1..22: note = chemically synthesized
  source 1..22: mol_type = other DNA
ctgtagagtttctcagtggttg

SEQ ID NO: 82125 - DNA, 22 bp, synthetic construct
  misc_feature 1..22: note = chemically synthesized
  source 1..22: mol_type = other DNA
tagagtttctcagtggttggaa

SEQ ID NO: 82126 - DNA, 22 bp, synthetic construct
  misc_feature 1..22: note = chemically synthesized
  source 1..22: mol_type = other DNA
ctcagtggttggaatcaatatt

SEQ ID NO: 82127 - DNA, 22 bp, synthetic construct
  misc_feature 1..22: note = chemically synthesized
  source 1..22: mol_type = other DNA
tcagtggttggaatcaatattt

SEQ ID NO: 82128 - DNA, 22 bp, synthetic construct
  misc_feature 1..22: note = chemically synthesized
  source 1..22: mol_type = other DNA
agtggttggaatcaatatttgc

SEQ ID NO: 82129 - DNA, 22 bp, synthetic construct
  misc_feature 1..22: note = chemically synthesized
  source 1..22: mol_type = other DNA
gaatcaatatttgcagagtctt

SEQ ID NO: 82130 - DNA, 22 bp, synthetic construct
  misc_feature 1..22: note = chemically synthesized
  source 1..22: mol_type = other DNA
gcagagtcttgtagctttttca

SEQ ID NO: 82131 - DNA, 22 bp, synthetic construct
  misc_feature 1..22: note = chemically synthesized
  source 1..22: mol_type = other DNA
cagagtcttgtagctttttcaa

SEQ ID NO: 82132 - DNA, 22 bp, synthetic construct
  misc_feature 1..22: note = chemically synthesized
  source 1..22: mol_type = other DNA
gtagctttttcaaagatttttc

SEQ ID NO: 82133 - DNA, 22 bp, synthetic construct
  misc_feature 1..22: note = chemically synthesized
  source 1..22: mol_type = other DNA
tagctttttcaaagatttttcc

SEQ ID NO: 82134 - DNA, 22 bp, synthetic construct
  misc_feature 1..22: note = chemically synthesized
  source 1..22: mol_type = other DNA
tttcaaagatttttcccctgcc

SEQ ID NO: 82135 - DNA, 22 bp, synthetic construct
  misc_feature 1..22: note = chemically synthesized
  source 1..22: mol_type = other DNA
ttcaaagatttttcccctgcca

SEQ ID NO: 82136 - DNA, 22 bp, synthetic construct
  misc_feature 1..22: note = chemically synthesized
  source 1..22: mol_type = other DNA
tcaaagatttttcccctgccac

SEQ ID NO: 82137 - DNA, 22 bp, synthetic construct
  misc_feature 1..22: note = chemically synthesized
  source 1..22: mol_type = other DNA
caaagatttttcccctgccaca

SEQ ID NO: 82138 - DNA, 22 bp, synthetic construct
  misc_feature 1..22: note = chemically synthesized
  source 1..22: mol_type = other DNA
aaagatttttcccctgccacat

SEQ ID NO: 82139 - DNA, 22 bp, synthetic construct
  misc_feature 1..22: note = chemically synthesized
  source 1..22: mol_type = other DNA
ttcccctgccacattgaagaat

SEQ ID NO: 82140 - DNA, 22 bp, synthetic construct
  misc_feature 1..22: note = chemically synthesized
  source 1..22: mol_type = other DNA
tcccctgccacattgaagaata

SEQ ID NO: 82141 - DNA, 22 bp, synthetic construct
  misc_feature 1..22: note = chemically synthesized
  source 1..22: mol_type = other DNA
cccctgccacattgaagaatag

SEQ ID NO: 82142 - DNA, 22 bp, synthetic construct
  misc_feature 1..22: note = chemically synthesized
  source 1..22: mol_type = other DNA
ccctgccacattgaagaatagc

SEQ ID NO: 82143 - DNA, 22 bp, synthetic construct
  misc_feature 1..22: note = chemically synthesized
  source 1..22: mol_type = other DNA
ccacattgaagaatagcttgag

SEQ ID NO: 82144 - DNA, 22 bp, synthetic construct
  misc_feature 1..22: note = chemically synthesized
  source 1..22: mol_type = other DNA
aagaatagcttgagcaatagcc

SEQ ID NO: 82145 - DNA, 22 bp, synthetic construct
  misc_feature 1..22: note = chemically synthesized
  source 1..22: mol_type = other DNA
gagcaatagccactcttctttc

SEQ ID NO: 82146 - DNA, 22 bp, synthetic construct
  misc_feature 1..22: note = chemically synthesized
  source 1..22: mol_type = other DNA
agcaatagccactcttctttcc

SEQ ID NO: 82147 - DNA, 22 bp, synthetic construct
  misc_feature 1..22: note = chemically synthesized
  source 1..22: mol_type = other DNA
ttctttccaggtggagtttgtg

SEQ ID NO: 82148 - DNA, 22 bp, synthetic construct
  misc_feature 1..22: note = chemically synthesized
  source 1..22: mol_type = other DNA
ctttccaggtggagtttgtgaa

SEQ ID NO: 82149 - DNA, 22 bp, synthetic construct
  misc_feature 1..22: note = chemically synthesized
  source 1..22: mol_type = other DNA
tttccaggtggagtttgtgaat

SEQ ID NO: 82150 - DNA, 22 bp, synthetic construct
  misc_feature 1..22: note = chemically synthesized
  source 1..22: mol_type = other DNA
tccaggtggagtttgtgaatta

SEQ ID NO: 82151 - DNA, 22 bp, synthetic construct
  misc_feature 1..22: note = chemically synthesized
  source 1..22: mol_type = other DNA
ccaggtggagtttgtgaattac

SEQ ID NO: 82152 - DNA, 22 bp, synthetic construct
  misc_feature 1..22: note = chemically synthesized
  source 1..22: mol_type = other DNA
caggtggagtttgtgaattact

SEQ ID NO: 82153 - DNA, 22 bp, synthetic construct
  misc_feature 1..22: note = chemically synthesized
  source 1..22: mol_type = other DNA
gtgaattactttagagatgatc

SEQ ID NO: 82154 - DNA, 22 bp, synthetic construct
  misc_feature 1..22: note = chemically synthesized
  source 1..22: mol_type = other DNA
tgaattactttagagatgatct

SEQ ID NO: 82155 - DNA, 22 bp, synthetic construct
  misc_feature 1..22: note = chemically synthesized
  source 1..22: mol_type = other DNA
ctttagagatgatctttatctg

SEQ ID NO: 82156 - DNA, 22 bp, synthetic construct
  misc_feature 1..22: note = chemically synthesized
  source 1..22: mol_type = other DNA
tagagatgatctttatctggga

SEQ ID NO: 82157 - DNA, 22 bp, synthetic construct
  misc_feature 1..22: note = chemically synthesized
  source 1..22: mol_type = other DNA
agagatgatctttatctgggaa

SEQ ID NO: 82158 - DNA, 22 bp, synthetic construct
  misc_feature 1..22: note = chemically synthesized
  source 1..22: mol_type = other DNA
gagatgatctttatctgggaag

SEQ ID NO: 82159 - DNA, 22 bp, synthetic construct
  misc_feature 1..22: note = chemically synthesized
  source 1..22: mol_type = other DNA
tatctgggaagaattactaata

SEQ ID NO: 82160 - DNA, 22 bp, synthetic construct
  misc_feature 1..22: note = chemically synthesized
  source 1..22: mol_type = other DNA
atctgggaagaattactaatat

SEQ ID NO: 82161 - DNA, 22 bp, synthetic construct
  misc_feature 1..22: note = chemically synthesized
  source 1..22: mol_type = other DNA
tctgggaagaattactaatata

SEQ ID NO: 82162 - DNA, 22 bp, synthetic construct
  misc_feature 1..22: note = chemically synthesized
  source 1..22: mol_type = other DNA
ggaagaattactaatatattat

SEQ ID NO: 82163 - DNA, 22 bp, synthetic construct
  misc_feature 1..22: note = chemically synthesized
  source 1..22: mol_type = other DNA
ctaatatattatctcttcgttt

SEQ ID NO: 82164 - DNA, 22 bp, synthetic construct
  misc_feature 1..22: note = chemically synthesized
  source 1..22: mol_type = other DNA
atatattatctcttcgtttagc

SEQ ID NO: 82165 - DNA, 22 bp, synthetic construct
  misc_feature 1..22: note = chemically synthesized
  source 1..22: mol_type = other DNA
tctcttcgtttagctaacgtaa

SEQ ID NO: 82166 - DNA, 22 bp, synthetic construct
  misc_feature 1..22: note = chemically synthesized
  source 1..22: mol_type = other DNA
ttcgtttagctaacgtaaggtt

SEQ ID NO: 82167 - DNA, 22 bp, synthetic construct
  misc_feature 1..22: note = chemically synthesized
  source 1..22: mol_type = other DNA
cgtttagctaacgtaaggttat

SEQ ID NO: 82168 - DNA, 22 bp, synthetic construct
  misc_feature 1..22: note = chemically synthesized
  source 1..22: mol_type = other DNA
gtttagctaacgtaaggttatt

SEQ ID NO: 82169 - DNA, 22 bp, synthetic construct
  misc_feature 1..22: note = chemically synthesized
  source 1..22: mol_type = other DNA
agctaacgtaaggttattagat

SEQ ID NO: 82170 - DNA, 22 bp, synthetic construct
  misc_feature 1..22: note = chemically synthesized
  source 1..22: mol_type = other DNA
gctaacgtaaggttattagata

SEQ ID NO: 82171 - DNA, 22 bp, synthetic construct
  misc_feature 1..22: note = chemically synthesized
  source 1..22: mol_type = other DNA
acgtaaggttattagatacttt

SEQ ID NO: 82172 - DNA, 22 bp, synthetic construct
  misc_feature 1..22: note = chemically synthesized
  source 1..22: mol_type = other DNA
ttagatacttttctttaaggaa

SEQ ID NO: 82173 - DNA, 22 bp, synthetic construct
  misc_feature 1..22: note = chemically synthesized
  source 1..22: mol_type = other DNA
gatacttttctttaaggaagga

SEQ ID NO: 82174 - DNA, 22 bp, synthetic construct
  misc_feature 1..22: note = chemically synthesized
  source 1..22: mol_type = other DNA
ttctttaaggaaggatacacca

SEQ ID NO: 82175 - DNA, 22 bp, synthetic construct
  misc_feature 1..22: note = chemically synthesized
  source 1..22: mol_type = other DNA
tctttaaggaaggatacaccag

SEQ ID NO: 82176 - DNA, 22 bp, synthetic construct
  misc_feature 1..22: note = chemically synthesized
  source 1..22: mol_type = other DNA
ctttaaggaaggatacaccagg

SEQ ID NO: 82177 - DNA, 22 bp, synthetic construct
  misc_feature 1..22: note = chemically synthesized
  source 1..22: mol_type = other DNA
tttaaggaaggatacaccagga

SEQ ID NO: 82178 - DNA, 22 bp, synthetic construct
  misc_feature 1..22: note = chemically synthesized
  source 1..22: mol_type = other DNA
taaggaaggatacaccaggacc

SEQ ID NO: 82179 - DNA, 22 bp, synthetic construct
  misc_feature 1..22: note = chemically synthesized
  source 1..22: mol_type = other DNA
aaggaaggatacaccaggacct

SEQ ID NO: 82180 - DNA, 22 bp, synthetic construct
  misc_feature 1..22: note = chemically synthesized
  source 1..22: mol_type = other DNA
aggaaggatacaccaggacctg

SEQ ID NO: 82181 - DNA, 22 bp, synthetic construct
  misc_feature 1..22: note = chemically synthesized
  source 1..22: mol_type = other DNA
ccttaataaggcttgatgacat

SEQ ID NO: 82182 - DNA, 22 bp, synthetic construct
  misc_feature 1..22: note = chemically synthesized
  source 1..22: mol_type = other DNA
aataaggcttgatgacatttat

SEQ ID NO: 82183 - DNA, 22 bp, synthetic construct
  misc_feature 1..22: note = chemically synthesized
  source 1..22: mol_type = other DNA
ataaggcttgatgacatttatc

SEQ ID NO: 82184 - DNA, 22 bp, synthetic construct
  misc_feature 1..22: note = chemically synthesized
  source 1..22: mol_type = other DNA
gatgacatttatcttccttcta

SEQ ID NO: 82185 - DNA, 22 bp, synthetic construct
  misc_feature 1..22: note = chemically synthesized
  source 1..22: mol_type = other DNA
atgacatttatcttccttctaa

SEQ ID NO: 82186 - DNA, 22 bp, synthetic construct
  misc_feature 1..22: note = chemically synthesized
  source 1..22: mol_type = other DNA
atcttccttctaatacatcata

SEQ ID NO: 82187 - DNA, 22 bp, synthetic construct
  misc_feature 1..22: note = chemically synthesized
  source 1..22: mol_type = other DNA
tcttccttctaatacatcataa

SEQ ID NO: 82188 - DNA, 22 bp, synthetic construct
  misc_feature 1..22: note = chemically synthesized
  source 1..22: mol_type = other DNA
ccttctaatacatcataatatg

SEQ ID NO: 82189 - DNA, 22 bp, synthetic construct
  misc_feature 1..22: note = chemically synthesized
  source 1..22: mol_type = other DNA
cttctaatacatcataatatgt

SEQ ID NO: 82190 - DNA, 22 bp, synthetic construct
  misc_feature 1..22: note = chemically synthesized
  source 1..22: mol_type = other DNA
ctaatacatcataatatgtgtg

SEQ ID NO: 82191 - DNA, 22 bp, synthetic construct
  misc_feature 1..22: note = chemically synthesized
  source 1..22: mol_type = other DNA
taatacatcataatatgtgtgt

SEQ ID NO: 82192 - DNA, 22 bp, synthetic construct
  misc_feature 1..22: note = chemically synthesized
  source 1..22: mol_type = other DNA
atacatcataatatgtgtgtcg

SEQ ID NO: 82193 - DNA, 22 bp, synthetic construct
  misc_feature 1..22: note = chemically synthesized
  source 1..22: mol_type = other DNA
gtatagaagccaatacgactgc

SEQ ID NO: 82194 - DNA, 22 bp, synthetic construct
  misc_feature 1..22: note = chemically synthesized
  source 1..22: mol_type = other DNA
tatagaagccaatacgactgct

SEQ ID NO: 82195 - DNA, 22 bp, synthetic construct
  misc_feature 1..22: note = chemically synthesized
  source 1..22: mol_type = other DNA
cttgtattaaagaaacaaagtt

SEQ ID NO: 82196 - DNA, 22 bp, synthetic construct
  misc_feature 1..22: note = chemically synthesized
  source 1..22: mol_type = other DNA
gtattaaagaaacaaagtttaa

SEQ ID NO: 82197 - DNA, 22 bp, synthetic construct
  misc_feature 1..22: note = chemically synthesized
  source 1..22: mol_type = other DNA
tattaaagaaacaaagtttaat

SEQ ID NO: 82198 - DNA, 22 bp, synthetic construct
  misc_feature 1..22: note = chemically synthesized
  source 1..22: mol_type = other DNA
aagaaacaaagtttaattcatc

SEQ ID NO: 82199 - DNA, 22 bp, synthetic construct
  misc_feature 1..22: note = chemically synthesized
  source 1..22: mol_type = other DNA
aattcatcgttttgttgttgtg

SEQ ID NO: 82200 - DNA, 22 bp, synthetic construct
  misc_feature 1..22: note = chemically synthesized
  source 1..22: mol_type = other DNA
attcatcgttttgttgttgtgt

SEQ ID NO: 82201 - DNA, 22 bp, synthetic construct
  misc_feature 1..22: note = chemically synthesized
  source 1..22: mol_type = other DNA
atcgttttgttgttgtgttttg

SEQ ID NO: 82202 - DNA, 22 bp, synthetic construct
  misc_feature 1..22: note = chemically synthesized
  source 1..22: mol_type = other DNA
tgttgttgtgttttgcttacat

SEQ ID NO: 82203 - DNA, 22 bp, synthetic construct
  misc_feature 1..22: note = chemically synthesized
  source 1..22: mol_type = other DNA
gttgttgtgttttgcttacatt

SEQ ID NO: 82204 - DNA, 22 bp, synthetic construct
  misc_feature 1..22: note = chemically synthesized
  source 1..22: mol_type = other DNA
ttgttgtgttttgcttacattt

SEQ ID NO: 82205 - DNA, 22 bp, synthetic construct
  misc_feature 1..22: note = chemically synthesized
  source 1..22: mol_type = other DNA
ttgtgttttgcttacattttat

SEQ ID NO: 82206 - DNA, 22 bp, synthetic construct
  misc_feature 1..22: note = chemically synthesized
  source 1..22: mol_type = other DNA
tgttttgcttacattttatgta

SEQ ID NO: 82207 - DNA, 22 bp, synthetic construct
  misc_feature 1..22: note = chemically synthesized
  source 1..22: mol_type = other DNA
tgcttacattttatgtattttg

SEQ ID NO: 82208 - DNA, 22 bp, synthetic construct
  misc_feature 1..22: note = chemically synthesized
  source 1..22: mol_type = other DNA
gcttacattttatgtattttgt

SEQ ID NO: 82209 - DNA, 22 bp, synthetic construct
  misc_feature 1..22: note = chemically synthesized
  source 1..22: mol_type = other DNA
cttacattttatgtattttgtt

SEQ ID NO: 82210 - DNA, 22 bp, synthetic construct
  misc_feature 1..22: note = chemically synthesized
  source 1..22: mol_type = other DNA
acattttatgtattttgttgaa

SEQ ID NO: 82211 - DNA, 22 bp, synthetic construct
  misc_feature 1..22: note = chemically synthesized
  source 1..22: mol_type = other DNA
cattttatgtattttgttgaat

SEQ ID NO: 82212 - DNA, 22 bp, synthetic construct
  misc_feature 1..22: note = chemically synthesized
  source 1..22: mol_type = other DNA
tatgtattttgttgaattgtgt

SEQ ID NO: 82213 - DNA, 22 bp, synthetic construct
  misc_feature 1..22: note = chemically synthesized
  source 1..22: mol_type = other DNA
atgtattttgttgaattgtgtt

SEQ ID NO: 82214 - DNA, 22 bp, synthetic construct
  misc_feature 1..22: note = chemically synthesized
  source 1..22: mol_type = other DNA
tgtattttgttgaattgtgttt

SEQ ID NO: 82215 - DNA, 22 bp, synthetic construct
  misc_feature 1..22: note = chemically synthesized
  source 1..22: mol_type = other DNA
tgttgaattgtgtttaatcaca

SEQ ID NO: 82216 - DNA, 22 bp, synthetic construct
  misc_feature 1..22: note = chemically synthesized
  source 1..22: mol_type = other DNA
gttgaattgtgtttaatcacaa

SEQ ID NO: 82217 - DNA, 22 bp, synthetic construct
  misc_feature 1..22: note = chemically synthesized
  source 1..22: mol_type = other DNA
ttgaattgtgtttaatcacaag

SEQ ID NO: 82218 - DNA, 22 bp, synthetic construct
  misc_feature 1..22: note = chemically synthesized
  source 1..22: mol_type = other DNA
aattgtgtttaatcacaagagt

SEQ ID NO: 82219 - DNA, 22 bp, synthetic construct
  misc_feature 1..22: note = chemically synthesized
  source 1..22: mol_type = other DNA
tgtttaatcacaagagtaatgc

SEQ ID NO: 82220 - DNA, 22 bp, synthetic construct
  misc_feature 1..22: note = chemically synthesized
  source 1..22: mol_type = other DNA
aatcacaagagtaatgcatgcc

SEQ ID NO: 82221 - DNA, 22 bp, synthetic construct
  misc_feature 1..22: note = chemically synthesized
  source 1..22: mol_type = other DNA
atcacaagagtaatgcatgcct

SEQ ID NO: 82222 - DNA, 22 bp, synthetic construct
  misc_feature 1..22: note = chemically synthesized
  source 1..22: mol_type = other DNA
atatggtttggatctgtgtctc

SEQ ID NO: 82223 - DNA, 22 bp, synthetic construct
  misc_feature 1..22: note = chemically synthesized
  source 1..22: mol_type = other DNA
ggatctgtgtctccaccctaat

SEQ ID NO: 82224 - DNA, 22 bp, synthetic construct
  misc_feature 1..22: note = chemically synthesized
  source 1..22: mol_type = other DNA
gatctgtgtctccaccctaatc

SEQ ID NO: 82225 - DNA, 22 bp, synthetic construct
  misc_feature 1..22: note = chemically synthesized
  source 1..22: mol_type = other DNA
tgtctccaccctaatctcatgt

SEQ ID NO: 82226 - DNA, 22 bp, synthetic construct
  misc_feature 1..22: note = chemically synthesized
  source 1..22: mol_type = other DNA
caccctaatctcatgttcagct

SEQ ID NO: 82227 - DNA, 22 bp, synthetic construct
  misc_feature 1..22: note = chemically synthesized
  source 1..22: mol_type = other DNA
atctcatgttcagctgtaatcc

SEQ ID NO: 82228 - DNA, 22 bp, synthetic construct
  misc_feature 1..22: note = chemically synthesized
  source 1..22: mol_type = other DNA
atgttcagctgtaatccccagt

SEQ ID NO: 82229 - DNA, 22 bp, synthetic construct
  misc_feature 1..22: note = chemically synthesized
  source 1..22: mol_type = other DNA
agctgtaatccccagtgttgaa

SEQ ID NO: 82230 - DNA, 22 bp, synthetic construct
  misc_feature 1..22: note = chemically synthesized
  source 1..22: mol_type = other DNA
taatccccagtgttgaagatgg

SEQ ID NO: 82231 - DNA, 22 bp, synthetic construct
  misc_feature 1..22: note = chemically synthesized
  source 1..22: mol_type = other DNA
aagatggggcctggtgggaagt

SEQ ID NO: 82232 - DNA, 22 bp, synthetic construct
  misc_feature 1..22: note = chemically synthesized
  source 1..22: mol_type = other DNA
gtgggaagtgattggatcatag

SEQ ID NO: 82233 - DNA, 22 bp, synthetic construct
  misc_feature 1..22: note = chemically synthesized
  source 1..22: mol_type = other DNA
gatcataggagcagagttatca

SEQ ID NO: 82234 - DNA, 22 bp, synthetic construct
  misc_feature 1..22: note = chemically synthesized
  source 1..22: mol_type = other DNA
tcataaatagcttaatatcagt

SEQ ID NO: 82235 - DNA, 22 bp, synthetic construct
  misc_feature 1..22: note = chemically synthesized
  source 1..22: mol_type = other DNA
aatatcagtcccttttggtacg

SEQ ID NO: 82236 - DNA, 22 bp, synthetic construct
  misc_feature 1..22: note = chemically synthesized
  source 1..22: mol_type = other DNA
atatcagtcccttttggtacgt

SEQ ID NO: 82237 - DNA, 22 bp, synthetic construct
  misc_feature 1..22: note = chemically synthesized
  source 1..22: mol_type = other DNA
ttggtacgtatagtgggtgagt

SEQ ID NO: 82238 - DNA, 22 bp, synthetic construct
  misc_feature 1..22: note = chemically synthesized
  source 1..22: mol_type = other DNA
tggtacgtatagtgggtgagtt

SEQ ID NO: 82239 - DNA, 22 bp, synthetic construct
  misc_feature 1..22: note = chemically synthesized
  source 1..22: mol_type = other DNA
ggtacgtatagtgggtgagttc

SEQ ID NO: 82240 - DNA, 22 bp, synthetic construct
  misc_feature 1..22: note = chemically synthesized
  source 1..22: mol_type = other DNA
gtacgtatagtgggtgagttct

SEQ ID NO: 82241 - DNA, 22 bp, synthetic construct
  misc_feature 1..22: note = chemically synthesized
  source 1..22: mol_type = other DNA
tcatgagatatggttgtttact

SEQ ID NO: 82242 - DNA, 22 bp, synthetic construct
  misc_feature 1..22: note = chemically synthesized
  source 1..22: mol_type = other DNA
atgagatatggttgtttactac

SEQ ID NO: 82243 - DNA, 22 bp, synthetic construct
  misc_feature 1..22: note = chemically synthesized
  source 1..22: mol_type = other DNA
tttactacctccctgcctcttc

SEQ ID NO: 82244 - DNA, 22 bp, synthetic construct
  misc_feature 1..22: note = chemically synthesized
  source 1..22: mol_type = other DNA
actacctccctgcctcttcttc

SEQ ID NO: 82245 - DNA, 22 bp, synthetic construct
  misc_feature 1..22: note = chemically synthesized
  source 1..22: mol_type = other DNA
ctacctccctgcctcttcttcc

SEQ ID NO: 82246 - DNA, 22 bp, synthetic construct
  misc_feature 1..22: note = chemically synthesized
  source 1..22: mol_type = other DNA
cctccctgcctcttcttcctgc

SEQ ID NO: 82247 - DNA, 22 bp, synthetic construct
  misc_feature 1..22: note = chemically synthesized
  source 1..22: mol_type = other DNA
cctgcctcttcttcctgctcca

SEQ ID NO: 82248 - DNA, 22 bp, synthetic construct
  misc_feature 1..22: note = chemically synthesized
  source 1..22: mol_type = other DNA
cctcttcttcctgctccagcca

SEQ ID NO: 82249 - DNA, 22 bp, synthetic construct
  misc_feature 1..22: note = chemically synthesized
  source 1..22: mol_type = other DNA
ttcttcctgctccagccatgtg

SEQ ID NO: 82250 - DNA, 22 bp, synthetic construct
  misc_feature 1..22: note = chemically synthesized
  source 1..22: mol_type = other DNA
cttcctgctccagccatgtgaa

SEQ ID NO: 82251 - DNA, 22 bp, synthetic construct
  misc_feature 1..22: note = chemically synthesized
  source 1..22: mol_type = other DNA
ttcctgctccagccatgtgaag

SEQ ID NO: 82252 - DNA, 22 bp, synthetic construct
  misc_feature 1..22: note = chemically synthesized
  source 1..22: mol_type = other DNA
cctgctccagccatgtgaagac

SEQ ID NO: 82253 - DNA, 22 bp, synthetic construct
  misc_feature 1..22: note = chemically synthesized
  source 1..22: mol_type = other DNA
ctgctccagccatgtgaagaca

SEQ ID NO: 82254 - DNA, 22 bp, synthetic construct
  misc_feature 1..22: note = chemically synthesized
  source 1..22: mol_type = other DNA
ctccagccatgtgaagacacat

SEQ ID NO: 82255 - DNA, 22 bp, synthetic construct
  misc_feature 1..22: note = chemically synthesized
  source 1..22: mol_type = other DNA
cagccatgtgaagacacatgct

SEQ ID NO: 82256 - DNA, 22 bp, synthetic construct
  misc_feature 1..22: note = chemically synthesized
  source 1..22: mol_type = other DNA
ctgtttttctctctgccatgat

SEQ ID NO: 82257 - DNA, 22 bp, synthetic construct
  misc_feature 1..22: note = chemically synthesized
  source 1..22: mol_type = other DNA
tttttctctctgccatgattat

SEQ ID NO: 82258 - DNA, 22 bp, synthetic construct
  misc_feature 1..22: note = chemically synthesized
  source 1..22: mol_type = other DNA
ttctctctgccatgattataag

SEQ ID NO: 82259 - DNA, 22 bp, synthetic construct
  misc_feature 1..22: note = chemically synthesized
  source 1..22: mol_type = other DNA
tctctctgccatgattataagt

SEQ ID NO: 82260 - DNA, 22 bp, synthetic construct
  misc_feature 1..22: note = chemically synthesized
  source 1..22: mol_type = other DNA
ctctctgccatgattataagtt

SEQ ID NO: 82261 - DNA, 22 bp, synthetic construct
  misc_feature 1..22: note = chemically synthesized
  source 1..22: mol_type = other DNA
tctctgccatgattataagttt

SEQ ID NO: 82262 - DNA, 22 bp, synthetic construct
  misc_feature 1..22: note = chemically synthesized
  source 1..22: mol_type = other DNA
tctgccatgattataagtttcc

SEQ ID NO: 82263 - DNA, 22 bp, synthetic construct
  misc_feature 1..22: note = chemically synthesized
  source 1..22: mol_type = other DNA
tgccatgattataagtttcctg

SEQ ID NO: 82264 - DNA, 22 bp, synthetic construct
  misc_feature 1..22: note = chemically synthesized
  source 1..22: mol_type = other DNA
ccatgattataagtttcctgaa

SEQ ID NO: 82265 - DNA, 22 bp, synthetic construct
  misc_feature 1..22: note = chemically synthesized
  source 1..22: mol_type = other DNA
taagtttcctgaaacctcccta

SEQ ID NO: 82266 - DNA, 22 bp, synthetic construct
  misc_feature 1..22: note = chemically synthesized
  source 1..22: mol_type = other DNA
cctgaaacctccctagaagctg

SEQ ID NO: 82267 - DNA, 22 bp, synthetic construct
  misc_feature 1..22: note = chemically synthesized
  source 1..22: mol_type = other DNA
ctgaaacctccctagaagctga

SEQ ID NO: 82268 - DNA, 22 bp, synthetic construct
  misc_feature 1..22: note = chemically synthesized
  source 1..22: mol_type = other DNA
aaacctccctagaagctgagca

SEQ ID NO: 82269 - DNA, 22 bp, synthetic construct
  misc_feature 1..22: note = chemically synthesized
  source 1..22: mol_type = other DNA
cctagaagctgagcagacgttg

SEQ ID NO: 82270 - DNA, 22 bp, synthetic construct
  misc_feature 1..22: note = chemically synthesized
  source 1..22: mol_type = other DNA
gaagctgagcagacgttgccat

SEQ ID NO: 82271 - DNA, 22 bp, synthetic construct
  misc_feature 1..22: note = chemically synthesized
  source 1..22: mol_type = other DNA
agcagacgttgccatgcttcct

SEQ ID NO: 82272 - DNA, 22 bp, synthetic construct
  misc_feature 1..22: note = chemically synthesized
  source 1..22: mol_type = other DNA
ccatgcttcctgtacagccttt

SEQ ID NO: 82273 - DNA, 22 bp, synthetic construct
  misc_feature 1..22: note = chemically synthesized
  source 1..22: mol_type = other DNA
cctgtacagcctttagaactgt

SEQ ID NO: 82274 - DNA, 22 bp, synthetic construct
  misc_feature 1..22: note = chemically synthesized
  source 1..22: mol_type = other DNA
ctgtacagcctttagaactgtg

SEQ ID NO: 82275 - DNA, 22 bp, synthetic construct
  misc_feature 1..22: note = chemically synthesized
  source 1..22: mol_type = other DNA
tacagcctttagaactgtgagc

SEQ ID NO: 82276 - DNA, 22 bp, synthetic construct
  misc_feature 1..22: note = chemically synthesized
  source 1..22: mol_type = other DNA
tagaactgtgagccaattaaat

SEQ ID NO: 82277 - DNA, 22 bp, synthetic construct
  misc_feature 1..22: note = chemically synthesized
  source 1..22: mol_type = other DNA
agaactgtgagccaattaaatc

SEQ ID NO: 82278 - DNA, 22 bp, synthetic construct
  misc_feature 1..22: note = chemically synthesized
  source 1..22: mol_type = other DNA
gaactgtgagccaattaaatct

SEQ ID NO: 82279 - DNA, 22 bp, synthetic construct
  misc_feature 1..22: note = chemically synthesized
  source 1..22: mol_type = other DNA
tgagccaattaaatctctgttc

SEQ ID NO: 82280 - DNA, 22 bp, synthetic construct
  misc_feature 1..22: note = chemically synthesized
  source 1..22: mol_type = other DNA
aatctctgttcttcaccattta

SEQ ID NO: 82281 - DNA, 22 bp, synthetic construct
  misc_feature 1..22: note = chemically synthesized
  source 1..22: mol_type = other DNA
tgttcttcaccatttacccagt

SEQ ID NO: 82282 - DNA, 22 bp, synthetic construct
  misc_feature 1..22: note = chemically synthesized
  source 1..22: mol_type = other DNA
ttcttcaccatttacccagtct

SEQ ID NO: 82283 - DNA, 22 bp, synthetic construct
  misc_feature 1..22: note = chemically synthesized
  source 1..22: mol_type = other DNA
ttcaccatttacccagtctcag

SEQ ID NO: 82284 - DNA, 22 bp, synthetic construct
  misc_feature 1..22: note = chemically synthesized
  source 1..22: mol_type = other DNA
caccatttacccagtctcaggt

SEQ ID NO: 82285 - DNA, 22 bp, synthetic construct
  misc_feature 1..22: note = chemically synthesized
  source 1..22: mol_type = other DNA
accatttacccagtctcaggta

SEQ ID NO: 82286 - DNA, 22 bp, synthetic construct
  misc_feature 1..22: note = chemically synthesized
  source 1..22: mol_type = other DNA
acccagtctcaggtatttcctt

SEQ ID NO: 82287 - DNA, 22 bp, synthetic construct
  misc_feature 1..22: note = chemically synthesized
  source 1..22: mol_type = other DNA
cccagtctcaggtatttcctta

SEQ ID NO: 82288 - DNA, 22 bp, synthetic construct
  misc_feature 1..22: note = chemically synthesized
  source 1..22: mol_type = other DNA
aggtatttccttatagcaagat

SEQ ID NO: 82289 - DNA, 22 bp, synthetic construct
  misc_feature 1..22: note = chemically synthesized
  source 1..22: mol_type = other DNA
ccttatagcaagatgagaatgg

SEQ ID NO: 82290 - DNA, 22 bp, synthetic construct
  misc_feature 1..22: note = chemically synthesized
  source 1..22: mol_type = other DNA
cttatagcaagatgagaatgga

SEQ ID NO: 82291 - DNA, 22 bp, synthetic construct
  misc_feature 1..22: note = chemically synthesized
  source 1..22: mol_type = other DNA
atagcaagatgagaatggacca

SEQ ID NO: 82292 - DNA, 22 bp, synthetic construct
  misc_feature 1..22: note = chemically synthesized
  source 1..22: mol_type = other DNA
tagcaagatgagaatggaccag

SEQ ID NO: 82293 - DNA, 22 bp, synthetic construct
  misc_feature 1..22: note = chemically synthesized
  source 1..22: mol_type = other DNA
gtaccaaaagtggggtactgct

SEQ ID NO: 82294 - DNA, 22 bp, synthetic construct
  misc_feature 1..22: note = chemically synthesized
  source 1..22: mol_type = other DNA
ctataaagatacatgaaaatgt

SEQ ID NO: 82295 - DNA, 22 bp, synthetic construct
  misc_feature 1..22: note = chemically synthesized
  source 1..22: mol_type = other DNA
taaagatacatgaaaatgtgga

SEQ ID NO: 82296 - DNA, 22 bp, synthetic construct
  misc_feature 1..22: note = chemically synthesized
  source 1..22: mol_type = other DNA
tggcattggataacaggcagaa

SEQ ID NO: 82297 - DNA, 22 bp, synthetic construct
  misc_feature 1..22: note = chemically synthesized
  source 1..22: mol_type = other DNA
ggcattggataacaggcagaag

SEQ ID NO: 82298 - DNA, 22 bp, synthetic construct
  misc_feature 1..22: note = chemically synthesized
  source 1..22: mol_type = other DNA
gcattggataacaggcagaagt

SEQ ID NO: 82299 - DNA, 22 bp, synthetic construct
  misc_feature 1..22: note = chemically synthesized
  source 1..22: mol_type = other DNA
gataacaggcagaagttggaag

SEQ ID NO: 82300 - DNA, 22 bp, synthetic construct
  misc_feature 1..22: note = chemically synthesized
  source 1..22: mol_type = other DNA
gaagagtgtggacggctcagaa

SEQ ID NO: 82301 - DNA, 22 bp, synthetic construct
  misc_feature 1..22: note = chemically synthesized
  source 1..22: mol_type = other DNA
agaagaagacagggagatgagg

SEQ ID NO: 82302 - DNA, 22 bp, synthetic construct
  misc_feature 1..22: note = chemically synthesized
  source 1..22: mol_type = other DNA
ggaactttctagagacttgtgg

SEQ ID NO: 82303 - DNA, 22 bp, synthetic construct
  misc_feature 1..22: note = chemically synthesized
  source 1..22: mol_type = other DNA
gaactttctagagacttgtgga

SEQ ID NO: 82304 - DNA, 22 bp, synthetic construct
  misc_feature 1..22: note = chemically synthesized
  source 1..22: mol_type = other DNA
tctagagacttgtggaatggtt

SEQ ID NO: 82305 - DNA, 22 bp, synthetic construct
  misc_feature 1..22: note = chemically synthesized
  source 1..22: mol_type = other DNA
ctagagacttgtggaatggttg

SEQ ID NO: 82306 - DNA, 22 bp, synthetic construct
  misc_feature 1..22: note = chemically synthesized
  source 1..22: mol_type = other DNA
tagagacttgtggaatggttgt

SEQ ID NO: 82307 - DNA, 22 bp, synthetic construct
  misc_feature 1..22: note = chemically synthesized
  source 1..22: mol_type = other DNA
gagacttgtggaatggttgtga

SEQ ID NO: 82308 - DNA, 22 bp, synthetic construct
  misc_feature 1..22: note = chemically synthesized
  source 1..22: mol_type = other DNA
gtggaatggttgtgaccaaaat

SEQ ID NO: 82309 - DNA, 22 bp, synthetic construct
  misc_feature 1..22: note = chemically synthesized
  source 1..22: mol_type = other DNA
tggaatggttgtgaccaaaatt

SEQ ID NO: 82310 - DNA, 22 bp, synthetic construct
  misc_feature 1..22: note = chemically synthesized
  source 1..22: mol_type = other DNA
tgaccaaaattctgatagtgat

SEQ ID NO: 82311 - DNA, 22 bp, synthetic construct
  misc_feature 1..22: note = chemically synthesized
  source 1..22: mol_type = other DNA
tgatagtgatatggacaatgaa

SEQ ID NO: 82312 - DNA, 22 bp, synthetic construct
  misc_feature 1..22: note = chemically synthesized
  source 1..22: mol_type = other DNA
atagtgatatggacaatgaagt

SEQ ID NO: 82313 - DNA, 22 bp, synthetic construct
  misc_feature 1..22: note = chemically synthesized
  source 1..22: mol_type = other DNA
aggtggtctcagatggaaatga

SEQ ID NO: 82314 - DNA, 22 bp, synthetic construct
  misc_feature 1..22: note = chemically synthesized
  source 1..22: mol_type = other DNA
agatggaaatgaatttattgga

SEQ ID NO: 82315 - DNA, 22 bp, synthetic construct
  misc_feature 1..22: note = chemically synthesized
  source 1..22: mol_type = other DNA
attggaaactggagcaaaggtc

SEQ ID NO: 82316 - DNA, 22 bp, synthetic construct
  misc_feature 1..22: note = chemically synthesized
  source 1..22: mol_type = other DNA
ttggaaactggagcaaaggtca

SEQ ID NO: 82317 - DNA, 22 bp, synthetic construct
  misc_feature 1..22: note = chemically synthesized
  source 1..22: mol_type = other DNA
gaaactggagcaaaggtcactt

SEQ ID NO: 82318 - DNA, 22 bp, synthetic construct
  misc_feature 1..22: note = chemically synthesized
  source 1..22: mol_type = other DNA
gagcaaaggtcacttttgttat

SEQ ID NO: 82319 - DNA, 22 bp, synthetic construct
  misc_feature 1..22: note = chemically synthesized
  source 1..22: mol_type = other DNA
ttgttatacattagcaaagagg

SEQ ID NO: 82320 - DNA, 22 bp, synthetic construct
  misc_feature 1..22: note = chemically synthesized
  source 1..22: mol_type = other DNA
tgttatacattagcaaagaggt

SEQ ID NO: 82321 - DNA, 22 bp, synthetic construct
  misc_feature 1..22: note = chemically synthesized
  source 1..22: mol_type = other DNA
gttatacattagcaaagaggtt

SEQ ID NO: 82322 - DNA, 22 bp, synthetic construct
  misc_feature 1..22: note = chemically synthesized
  source 1..22: mol_type = other DNA
ttatacattagcaaagaggttg

SEQ ID NO: 82323 - DNA, 22 bp, synthetic construct
  misc_feature 1..22: note = chemically synthesized
  source 1..22: mol_type = other DNA
tacattagcaaagaggttgact

SEQ ID NO: 82324 - DNA, 22 bp, synthetic construct
  misc_feature 1..22: note = chemically synthesized
  source 1..22: mol_type = other DNA
gcaaagaggttgactgcactgt

SEQ ID NO: 82325 - DNA, 22 bp, synthetic construct
  misc_feature 1..22: note = chemically synthesized
  source 1..22: mol_type = other DNA
actgcactgtgcctctacctta

SEQ ID NO: 82326 - DNA, 22 bp, synthetic construct
  misc_feature 1..22: note = chemically synthesized
  source 1..22: mol_type = other DNA
cactgtgcctctaccttagaga

SEQ ID NO: 82327 - DNA, 22 bp, synthetic construct
  misc_feature 1..22: note = chemically synthesized
  source 1..22: mol_type = other DNA
tgcctctaccttagagaatctg

SEQ ID NO: 82328 - DNA, 22 bp, synthetic construct
  misc_feature 1..22: note = chemically synthesized
  source 1..22: mol_type = other DNA
taccttagagaatctgtggaaa

SEQ ID NO: 82329 - DNA, 22 bp, synthetic construct
  misc_feature 1..22: note = chemically synthesized
  source 1..22: mol_type = other DNA
ccttagagaatctgtggaaatt

SEQ ID NO: 82330 - DNA, 22 bp, synthetic construct
  misc_feature 1..22: note = chemically synthesized
  source 1..22: mol_type = other DNA
agagaatctgtggaaattcgaa

SEQ ID NO: 82331 - DNA, 22 bp, synthetic construct
  misc_feature 1..22: note = chemically synthesized
  source 1..22: mol_type = other DNA
gagaatctgtggaaattcgaag

SEQ ID NO: 82332 - DNA, 22 bp, synthetic construct
  misc_feature 1..22: note = chemically synthesized
  source 1..22: mol_type = other DNA
tggaaattcgaagttgataata

SEQ ID NO: 82333 - DNA, 22 bp, synthetic construct
  misc_feature 1..22: note = chemically synthesized
  source 1..22: mol_type = other DNA
gaagttgataatattatttaag

SEQ ID NO: 82334 - DNA, 22 bp, synthetic construct
  misc_feature 1..22: note = chemically synthesized
  source 1..22: mol_type = other DNA
ataatattatttaagttatgtg

SEQ ID NO: 82335 - DNA, 22 bp, synthetic construct
  misc_feature 1..22: note = chemically synthesized
  source 1..22: mol_type = other DNA
tttaagttatgtgacagaagtt

SEQ ID NO: 82336 - DNA, 22 bp, synthetic construct
  misc_feature 1..22: note = chemically synthesized
  source 1..22: mol_type = other DNA
aagttatgtgacagaagtttct

SEQ ID NO: 82337 - DNA, 22 bp, synthetic construct
  misc_feature 1..22: note = chemically synthesized
  source 1..22: mol_type = other DNA
agttatgtgacagaagtttcta

SEQ ID NO: 82338 - DNA, 22 bp, synthetic construct
  misc_feature 1..22: note = chemically synthesized
  source 1..22: mol_type = other DNA
tgtgacagaagtttctaagcag

SEQ ID NO: 82339 - DNA, 22 bp, synthetic construct
  misc_feature 1..22: note = chemically synthesized
  source 1..22: mol_type = other DNA
ctaagcagcaaggtgttcaaga

SEQ ID NO: 82340 - DNA, 22 bp, synthetic construct
  misc_feature 1..22: note = chemically synthesized
  source 1..22: mol_type = other DNA
taagcagcaaggtgttcaagat

SEQ ID NO: 82341 - DNA, 22 bp, synthetic construct
  misc_feature 1..22: note = chemically synthesized
  source 1..22: mol_type = other DNA
agcagcaaggtgttcaagatgt

SEQ ID NO: 82342 - DNA, 22 bp, synthetic construct
  misc_feature 1..22: note = chemically synthesized
  source 1..22: mol_type = other DNA
aagatgtgtcctggctgcttct

SEQ ID NO: 82343 - DNA, 22 bp, synthetic construct
  misc_feature 1..22: note = chemically synthesized
  source 1..22: mol_type = other DNA
gctgcttctaacaacctatgct

SEQ ID NO: 82344 - DNA, 22 bp, synthetic construct
  misc_feature 1..22: note = chemically synthesized
  source 1..22: mol_type = other DNA
cttctaacaacctatgctcata

SEQ ID NO: 82345 - DNA, 22 bp, synthetic construct
  misc_feature 1..22: note = chemically synthesized
  source 1..22: mol_type = other DNA
ctaacaacctatgctcatatgt

SEQ ID NO: 82346 - DNA, 22 bp, synthetic construct
  misc_feature 1..22: note = chemically synthesized
  source 1..22: mol_type = other DNA
taacaacctatgctcatatgtg

SEQ ID NO: 82347 - DNA, 22 bp, synthetic construct
  misc_feature 1..22: note = chemically synthesized
  source 1..22: mol_type = other DNA
acaacctatgctcatatgtgtg

SEQ ID NO: 82348 - DNA, 22 bp, synthetic construct
  misc_feature 1..22: note = chemically synthesized
  source 1..22: mol_type = other DNA
tgctcatatgtgtgagcaaaga

SEQ ID NO: 82349 - DNA, 22 bp, synthetic construct
  misc_feature 1..22: note = chemically synthesized
  source 1..22: mol_type = other DNA
atatgtgtgagcaaagaaataa

SEQ ID NO: 82350 - DNA, 22 bp, synthetic construct
  misc_feature 1..22: note = chemically synthesized
  source 1..22: mol_type = other DNA
atatttaaaagggaagcagagc

SEQ ID NO: 82351 - DNA, 22 bp, synthetic construct
  misc_feature 1..22: note = chemically synthesized
  source 1..22: mol_type = other DNA
tatttaaaagggaagcagagca

SEQ ID NO: 82352 - DNA, 22 bp, synthetic construct
  misc_feature 1..22: note = chemically synthesized
  source 1..22: mol_type = other DNA
aaaagggaagcagagcataaaa

SEQ ID NO: 82353 - DNA, 22 bp, synthetic construct
  misc_feature 1..22: note = chemically synthesized
  source 1..22: mol_type = other DNA
aaagggaagcagagcataaaag

SEQ ID NO: 82354 - DNA, 22 bp, synthetic construct
  misc_feature 1..22: note = chemically synthesized
  source 1..22: mol_type = other DNA
ggaaaattatctgctcggccat

SEQ ID NO: 82355 - DNA, 22 bp, synthetic construct
  misc_feature 1..22: note = chemically synthesized
  source 1..22: mol_type = other DNA
gaaaattatctgctcggccatg

SEQ ID NO: 82356 - DNA, 22 bp, synthetic construct
  misc_feature 1..22: note = chemically synthesized
  source 1..22: mol_type = other DNA
tctgctcggccatgtggtagaa

SEQ ID NO: 82357 - DNA, 22 bp, synthetic construct
  misc_feature 1..22: note = chemically synthesized
  source 1..22: mol_type = other DNA
ctcggccatgtggtagaaaaca

SEQ ID NO: 82358 - DNA, 22 bp, synthetic construct
  misc_feature 1..22: note = chemically synthesized
  source 1..22: mol_type = other DNA
ggccatgtggtagaaaacagaa

SEQ ID NO: 82359 - DNA, 22 bp, synthetic construct
  misc_feature 1..22: note = chemically synthesized
  source 1..22: mol_type = other DNA
attttcaaaggagcaattcaag

SEQ ID NO: 82360 - DNA, 22 bp, synthetic construct
  misc_feature 1..22: note = chemically synthesized
  source 1..22: mol_type = other DNA
tcaaaggagcaattcaagcagg

SEQ ID NO: 82361 - DNA, 22 bp, synthetic construct
  misc_feature 1..22: note = chemically synthesized
  source 1..22: mol_type = other DNA
caaaggagcaattcaagcaggc

SEQ ID NO: 82362 - DNA, 22 bp, synthetic construct
  misc_feature 1..22: note = chemically synthesized
  source 1..22: mol_type = other DNA
aaaggagcaattcaagcaggct

SEQ ID NO: 82363 - DNA, 22 bp, synthetic construct
  misc_feature 1..22: note = chemically synthesized
  source 1..22: mol_type = other DNA
aagcaggctgtagaaatttgca

SEQ ID NO: 82364 - DNA, 22 bp, synthetic construct
  misc_feature 1..22: note = chemically synthesized
  source 1..22: mol_type = other DNA
tagaaatttgcataaatgaaga

SEQ ID NO: 82365 - DNA, 22 bp, synthetic construct
  misc_feature 1..22: note = chemically synthesized
  source 1..22: mol_type = other DNA
gcataaatgaagaggagccgag

SEQ ID NO: 82366 - DNA, 22 bp, synthetic construct
  misc_feature 1..22: note = chemically synthesized
  source 1..22: mol_type = other DNA
cataaatgaagaggagccgagt

SEQ ID NO: 82367 - DNA, 22 bp, synthetic construct
  misc_feature 1..22: note = chemically synthesized
  source 1..22: mol_type = other DNA
taatagccaaaataaaggggag

SEQ ID NO: 82368 - DNA, 22 bp, synthetic construct
  misc_feature 1..22: note = chemically synthesized
  source 1..22: mol_type = other DNA
atagccaaaataaaggggagaa

SEQ ID NO: 82369 - DNA, 22 bp, synthetic construct
  misc_feature 1..22: note = chemically synthesized
  source 1..22: mol_type = other DNA
aaagacatttcagagacccttg

SEQ ID NO: 82370 - DNA, 22 bp, synthetic construct
  misc_feature 1..22: note = chemically synthesized
  source 1..22: mol_type = other DNA
cagagacccttgtagcagcccc

SEQ ID NO: 82371 - DNA, 22 bp, synthetic construct
  misc_feature 1..22: note = chemically synthesized
  source 1..22: mol_type = other DNA
agagacccttgtagcagcccct

SEQ ID NO: 82372 - DNA, 22 bp, synthetic construct
  misc_feature 1..22: note = chemically synthesized
  source 1..22: mol_type = other DNA
gtagcagcccctcacatcacag

SEQ ID NO: 82373 - DNA, 22 bp, synthetic construct
  misc_feature 1..22: note = chemically synthesized
  source 1..22: mol_type = other DNA
tagcagcccctcacatcacagg

SEQ ID NO: 82374 - DNA, 22 bp, synthetic construct
  misc_feature 1..22: note = chemically synthesized
  source 1..22: mol_type = other DNA
acatcacaggcctggtggccta

SEQ ID NO: 82375 - DNA, 22 bp, synthetic construct
  misc_feature 1..22: note = chemically synthesized
  source 1..22: mol_type = other DNA
gtggcctaggagtactgaatga

SEQ ID NO: 82376 - DNA, 22 bp, synthetic construct
  misc_feature 1..22: note = chemically synthesized
  source 1..22: mol_type = other DNA
ggagtactgaatgattttgtgg

SEQ ID NO: 82377 - DNA, 22 bp, synthetic construct
  misc_feature 1..22: note = chemically synthesized
  source 1..22: mol_type = other DNA
aatgattttgtgggtgagattc

SEQ ID NO: 82378 - DNA, 22 bp, synthetic construct
  misc_feature 1..22: note = chemically synthesized
  source 1..22: mol_type = other DNA
tgtgggtgagattcaggaccct

SEQ ID NO: 82379 - DNA, 22 bp, synthetic construct
  misc_feature 1..22: note = chemically synthesized
  source 1..22: mol_type = other DNA
gtgggtgagattcaggaccctg

SEQ ID NO: 82380 - DNA, 22 bp, synthetic construct
  misc_feature 1..22: note = chemically synthesized
  source 1..22: mol_type = other DNA
tgggtgagattcaggaccctgc

SEQ ID NO: 82381 - DNA, 22 bp, synthetic construct
  misc_feature 1..22: note = chemically synthesized
  source 1..22: mol_type = other DNA
aggaccctgctgccttgagcag

SEQ ID NO: 82382 - DNA, 22 bp, synthetic construct
  misc_feature 1..22: note = chemically synthesized
  source 1..22: mol_type = other DNA
ctgccttgagcagcttcaggac

SEQ ID NO: 82383 - DNA, 22 bp, synthetic construct
  misc_feature 1..22: note = chemically synthesized
  source 1..22: mol_type = other DNA
ccttgagcagcttcaggacact

SEQ ID NO: 82384 - DNA, 22 bp, synthetic construct
  misc_feature 1..22: note = chemically synthesized
  source 1..22: mol_type = other DNA
gagcagcttcaggacactgttc

SEQ ID NO: 82385 - DNA, 22 bp, synthetic construct
  misc_feature 1..22: note = chemically synthesized
  source 1..22: mol_type = other DNA
agcagcttcaggacactgttcc

SEQ ID NO: 82386 - DNA, 22 bp, synthetic construct
  misc_feature 1..22: note = chemically synthesized
  source 1..22: mol_type = other DNA
caggacactgttccttgcatcc

SEQ ID NO: 82387 - DNA, 22 bp, synthetic construct
  misc_feature 1..22: note = chemically synthesized
  source 1..22: mol_type = other DNA
aggacactgttccttgcatcct

SEQ ID NO: 82388 - DNA, 22 bp, synthetic construct
  misc_feature 1..22: note = chemically synthesized
  source 1..22: mol_type = other DNA
ttccttgcatcctggctgctcc

SEQ ID NO: 82389 - DNA, 22 bp, synthetic construct
  misc_feature 1..22: note = chemically synthesized
  source 1..22: mol_type = other DNA
cttgcatcctggctgctccagc

SEQ ID NO: 82390 - DNA, 22 bp, synthetic construct
  misc_feature 1..22: note = chemically synthesized
  source 1..22: mol_type = other DNA
gcatcctggctgctccagcacc

SEQ ID NO: 82391 - DNA, 22 bp, synthetic construct
  misc_feature 1..22: note = chemically synthesized
  source 1..22: mol_type = other DNA
catcctggctgctccagcacca

SEQ ID NO: 82392 - DNA, 22 bp, synthetic construct
  misc_feature 1..22: note = chemically synthesized
  source 1..22: mol_type = other DNA
gctgctccagcaccagctgtgg

SEQ ID NO: 82393 - DNA, 22 bp, synthetic construct
  misc_feature 1..22: note = chemically synthesized
  source 1..22: mol_type = other DNA
ctccagcaccagctgtggctca

SEQ ID NO: 82394 - DNA, 22 bp, synthetic construct
  misc_feature 1..22: note = chemically synthesized
  source 1..22: mol_type = other DNA
cagcaccagctgtggctcaaag

SEQ ID NO: 82395 - DNA, 22 bp, synthetic construct
  misc_feature 1..22: note = chemically synthesized
  source 1..22: mol_type = other DNA
tggctcaaaggggcccaagaac

SEQ ID NO: 82396 - DNA, 22 bp, synthetic construct
  misc_feature 1..22: note = chemically synthesized
  source 1..22: mol_type = other DNA
aaaggggcccaagaacagctaa

SEQ ID NO: 82397 - DNA, 22 bp, synthetic construct
  misc_feature 1..22: note = chemically synthesized
  source 1..22: mol_type = other DNA
aggccactgcttcagagggtgc

SEQ ID NO: 82398 - DNA, 22 bp, synthetic construct
  misc_feature 1..22: note = chemically synthesized
  source 1..22: mol_type = other DNA
cttcagagggtgcaagacataa

SEQ ID NO: 82399 - DNA, 22 bp, synthetic construct
  misc_feature 1..22: note = chemically synthesized
  source 1..22: mol_type = other DNA
cagagggtgcaagacataagcc

SEQ ID NO: 82400 - DNA, 22 bp, synthetic construct
  misc_feature 1..22: note = chemically synthesized
  source 1..22: mol_type = other DNA
agagggtgcaagacataagcct

SEQ ID NO: 82401 - DNA, 22 bp, synthetic construct
  misc_feature 1..22: note = chemically synthesized
  source 1..22: mol_type = other DNA
ggaggcttccacatggtgataa

SEQ ID NO: 82402 - DNA, 22 bp, synthetic construct
  misc_feature 1..22: note = chemically synthesized
  source 1..22: mol_type = other DNA
gaggcttccacatggtgataaa

SEQ ID NO: 82403 - DNA, 22 bp, synthetic construct
  misc_feature 1..22: note = chemically synthesized
  source 1..22: mol_type = other DNA
ccacatggtgataaatctggga

SEQ ID NO: 82404 - DNA, 22 bp, synthetic construct
  misc_feature 1..22: note = chemically synthesized
  source 1..22: mol_type = other DNA
cacatggtgataaatctgggag

SEQ ID NO: 82405 - DNA, 22 bp, synthetic construct
  misc_feature 1..22: note = chemically synthesized
  source 1..22: mol_type = other DNA
ggagtgtgcaaaggtcaaaaag

SEQ ID NO: 82406 - DNA, 22 bp, synthetic construct
  misc_feature 1..22: note = chemically synthesized
  source 1..22: mol_type = other DNA
aggcttgtaagcctccacctag

SEQ ID NO: 82407 - DNA, 22 bp, synthetic construct
  misc_feature 1..22: note = chemically synthesized
  source 1..22: mol_type = other DNA
gtaagcctccacctagatttca

SEQ ID NO: 82408 - DNA, 22 bp, synthetic construct
  misc_feature 1..22: note = chemically synthesized
  source 1..22: mol_type = other DNA
taagcctccacctagatttcag

SEQ ID NO: 82409 - DNA, 22 bp, synthetic construct
  misc_feature 1..22: note = chemically synthesized
  source 1..22: mol_type = other DNA
cacctagatttcagaggatgtg

SEQ ID NO: 82410 - DNA, 22 bp, synthetic construct
  misc_feature 1..22: note = chemically synthesized
  source 1..22: mol_type = other DNA
gatttcagaggatgtgtagaaa

SEQ ID NO: 82411 - DNA, 22 bp, synthetic construct
  misc_feature 1..22: note = chemically synthesized
  source 1..22: mol_type = other DNA
cagaggatgtgtagaaaagcct

SEQ ID NO: 82412 - DNA, 22 bp, synthetic construct
  misc_feature 1..22: note = chemically synthesized
  source 1..22: mol_type = other DNA
agaggatgtgtagaaaagcctg

SEQ ID NO: 82413 - DNA, 22 bp, synthetic construct
  misc_feature 1..22: note = chemically synthesized
  source 1..22: mol_type = other DNA
agtgttcaggcagaagcctcct

SEQ ID NO: 82414 - DNA, 22 bp, synthetic construct
  misc_feature 1..22: note = chemically synthesized
  source 1..22: mol_type = other DNA
aggcagaagcctcctgcagggg

SEQ ID NO: 82415 - DNA, 22 bp, synthetic construct
  misc_feature 1..22: note = chemically synthesized
  source 1..22: mol_type = other DNA
ctgcaggggcagaaccctcatg

SEQ ID NO: 82416 - DNA, 22 bp, synthetic construct
  misc_feature 1..22: note = chemically synthesized
  source 1..22: mol_type = other DNA
caggggcagaaccctcatgaag

SEQ ID NO: 82417 - DNA, 22 bp, synthetic construct
  misc_feature 1..22: note = chemically synthesized
  source 1..22: mol_type = other DNA
atgaagaacctctaatagggca

SEQ ID NO: 82418 - DNA, 22 bp, synthetic construct
  misc_feature 1..22: note = chemically synthesized
  source 1..22: mol_type = other DNA
taatagggcaatgtggaggaaa

SEQ ID NO: 82419 - DNA, 22 bp, synthetic construct
  misc_feature 1..22: note = chemically synthesized
  source 1..22: mol_type = other DNA
atagggcaatgtggaggaaaaa

SEQ ID NO: 82420 - DNA, 22 bp, synthetic construct
  misc_feature 1..22: note = chemically synthesized
  source 1..22: mol_type = other DNA
gaaccccctcacagagtctcca

SEQ ID NO: 82421 - DNA, 22 bp, synthetic construct
  misc_feature 1..22: note = chemically synthesized
  source 1..22: mol_type = other DNA
acagagtctccactggggcact

SEQ ID NO: 82422 - DNA, 22 bp, synthetic construct
  misc_feature 1..22: note = chemically synthesized
  source 1..22: mol_type = other DNA
cactggggcactgcctagcaga

SEQ ID NO: 82423 - DNA, 22 bp, synthetic construct
  misc_feature 1..22: note = chemically synthesized
  source 1..22: mol_type = other DNA
gggcactgcctagcagagctat

SEQ ID NO: 82424 - DNA, 22 bp, synthetic construct
  misc_feature 1..22: note = chemically synthesized
  source 1..22: mol_type = other DNA
cctagcagagctatgagaaaag

SEQ ID NO: 82425 - DNA, 22 bp, synthetic construct
  misc_feature 1..22: note = chemically synthesized
  source 1..22: mol_type = other DNA
gcagagctatgagaaaagggcc

SEQ ID NO: 82426 - DNA, 22 bp, synthetic construct
  misc_feature 1..22: note = chemically synthesized
  source 1..22: mol_type = other DNA
tgagaaaagggccaccgtcctc

SEQ ID NO: 82427 - DNA, 22 bp, synthetic construct
  misc_feature 1..22: note = chemically synthesized
  source 1..22: mol_type = other DNA
cagaccccagaatggtagatcc

SEQ ID NO: 82428 - DNA, 22 bp, synthetic construct
  misc_feature 1..22: note = chemically synthesized
  source 1..22: mol_type = other DNA
acagtttgcaccgtgcacctag

SEQ ID NO: 82429 - DNA, 22 bp, synthetic construct
  misc_feature 1..22: note = chemically synthesized
  source 1..22: mol_type = other DNA
gcaccgtgcacctagaaaagct

SEQ ID NO: 82430 - DNA, 22 bp, synthetic construct
  misc_feature 1..22: note = chemically synthesized
  source 1..22: mol_type = other DNA
caccgtgcacctagaaaagctg

SEQ ID NO: 82431 - DNA, 22 bp, synthetic construct
  misc_feature 1..22: note = chemically synthesized
  source 1..22: mol_type = other DNA
gaaaagctgcaaacactcaata

SEQ ID NO: 82432 - DNA, 22 bp, synthetic construct
  misc_feature 1..22: note = chemically synthesized
  source 1..22: mol_type = other DNA
caaacactcaatacaatctctt

SEQ ID NO: 82433 - DNA, 22 bp, synthetic construct
  misc_feature 1..22: note = chemically synthesized
  source 1..22: mol_type = other DNA
aatacaatctcttaagagcagc

SEQ ID NO: 82434 - DNA, 22 bp, synthetic construct
  misc_feature 1..22: note = chemically synthesized
  source 1..22: mol_type = other DNA
ttaagagcagcagcaggggcta

SEQ ID NO: 82435 - DNA, 22 bp, synthetic construct
  misc_feature 1..22: note = chemically synthesized
  source 1..22: mol_type = other DNA
aagagcagcagcaggggctaaa

SEQ ID NO: 82436 - DNA, 22 bp, synthetic construct
  misc_feature 1..22: note = chemically synthesized
  source 1..22: mol_type = other DNA
agagcagcagcaggggctaaac

SEQ ID NO: 82437 - DNA, 22 bp, synthetic construct
  misc_feature 1..22: note = chemically synthesized
  source 1..22: mol_type = other DNA
aactgtgcaaagcaataggggt

SEQ ID NO: 82438 - DNA, 22 bp, synthetic construct
  misc_feature 1..22: note = chemically synthesized
  source 1..22: mol_type = other DNA
tgcaaagcaataggggtggaac

SEQ ID NO: 82439 - DNA, 22 bp, synthetic construct
  misc_feature 1..22: note = chemically synthesized
  source 1..22: mol_type = other DNA
cccaaggccttgggagcccacc

SEQ ID NO: 82440 - DNA, 22 bp, synthetic construct
  misc_feature 1..22: note = chemically synthesized
  source 1..22: mol_type = other DNA
gggagcccacctcttgcatcag

SEQ ID NO: 82441 - DNA, 22 bp, synthetic construct
  misc_feature 1..22: note = chemically synthesized
  source 1..22: mol_type = other DNA
ggagcccacctcttgcatcagt

SEQ ID NO: 82442 - DNA, 22 bp, synthetic construct
  misc_feature 1..22: note = chemically synthesized
  source 1..22: mol_type = other DNA
ttgcatcagtgtgtccctgata

SEQ ID NO: 82443 - DNA, 22 bp, synthetic construct
  misc_feature 1..22: note = chemically synthesized
  source 1..22: mol_type = other DNA
gcatcagtgtgtccctgatatg

SEQ ID NO: 82444 - DNA, 22 bp, synthetic construct
  misc_feature 1..22: note = chemically synthesized
  source 1..22: mol_type = other DNA
catcagtgtgtccctgatatga

SEQ ID NO: 82445 - DNA, 22 bp, synthetic construct
  misc_feature 1..22: note = chemically synthesized
  source 1..22: mol_type = other DNA
atatgagacatggggtcaaagg

SEQ ID NO: 82446 - DNA, 22 bp, synthetic construct
  misc_feature 1..22: note = chemically synthesized
  source 1..22: mol_type = other DNA
ttttggagtgttaaggtgtgta

SEQ ID NO: 82447 - DNA, 22 bp, synthetic construct
  misc_feature 1..22: note = chemically synthesized
  source 1..22: mol_type = other DNA
tggagtgttaaggtgtgtattt

SEQ ID NO: 82448 - DNA, 22 bp, synthetic construct
  misc_feature 1..22: note = chemically synthesized
  source 1..22: mol_type = other DNA
ggagtgttaaggtgtgtatttg

SEQ ID NO: 82449 - DNA, 22 bp, synthetic construct
  misc_feature 1..22: note = chemically synthesized
  source 1..22: mol_type = other DNA
gagtgttaaggtgtgtatttgt

SEQ ID NO: 82450 - DNA, 22 bp, synthetic construct
  misc_feature 1..22: note = chemically synthesized
  source 1..22: mol_type = other DNA
aggtgtgtatttgtccgtttta

SEQ ID NO: 82451 - DNA, 22 bp, synthetic construct
  misc_feature 1..22: note = chemically synthesized
  source 1..22: mol_type = other DNA
gtccgttttaaactgctatgaa

SEQ ID NO: 82452 - DNA, 22 bp, synthetic construct
  misc_feature 1..22: note = chemically synthesized
  source 1..22: mol_type = other DNA
tccgttttaaactgctatgaag

SEQ ID NO: 82453 - DNA, 22 bp, synthetic construct
  misc_feature 1..22: note = chemically synthesized
  source 1..22: mol_type = other DNA
taaactgctatgaagaaatacc

SEQ ID NO: 82454 - DNA, 22 bp, synthetic construct
  misc_feature 1..22: note = chemically synthesized
  source 1..22: mol_type = other DNA
aaactgctatgaagaaataccc

SEQ ID NO: 82455 - DNA, 22 bp, synthetic construct
  misc_feature 1..22: note = chemically synthesized
  source 1..22: mol_type = other DNA
aactgctatgaagaaatacccg

SEQ ID NO: 82456 - DNA, 22 bp, synthetic construct
  misc_feature 1..22: note = chemically synthesized
  source 1..22: mol_type = other DNA
ctatgaagaaatacccgagact

SEQ ID NO: 82457 - DNA, 22 bp, synthetic construct
  misc_feature 1..22: note = chemically synthesized
  source 1..22: mol_type = other DNA
tgaagaaatacccgagactggg

SEQ ID NO: 82458 - DNA, 22 bp, synthetic construct
  misc_feature 1..22: note = chemically synthesized
  source 1..22: mol_type = other DNA
ggtaatttataaagaaaaagag

SEQ ID NO: 82459 - DNA, 22 bp, synthetic construct
  misc_feature 1..22: note = chemically synthesized
  source 1..22: mol_type = other DNA
ataaagaaaaagagatttaatg

SEQ ID NO: 82460 - DNA, 22 bp, synthetic construct
  misc_feature 1..22: note = chemically synthesized
  source 1..22: mol_type = other DNA
taaagaaaaagagatttaatgg

SEQ ID NO: 82461 - DNA, 22 bp, synthetic construct
  misc_feature 1..22: note = chemically synthesized
  source 1..22: mol_type = other DNA
aatggactcatagatccacatt

SEQ ID NO: 82462 - DNA, 22 bp, synthetic construct
  misc_feature 1..22: note = chemically synthesized
  source 1..22: mol_type = other DNA
atggactcatagatccacattg

SEQ ID NO: 82463 - DNA, 22 bp, synthetic construct
  misc_feature 1..22: note = chemically synthesized
  source 1..22: mol_type = other DNA
atagatccacattgctggggag

SEQ ID NO: 82464 - DNA, 22 bp, synthetic construct
  misc_feature 1..22: note = chemically synthesized
  source 1..22: mol_type = other DNA
ctggggaggccttacaatcatg

SEQ ID NO: 82465 - DNA, 22 bp, synthetic construct
  misc_feature 1..22: note = chemically synthesized
  source 1..22: mol_type = other DNA
gggaggccttacaatcatggtg

SEQ ID NO: 82466 - DNA, 22 bp, synthetic construct
  misc_feature 1..22: note = chemically synthesized
  source 1..22: mol_type = other DNA
acaatcatggtggaaggtgaag

SEQ ID NO: 82467 - DNA, 22 bp, synthetic construct
  misc_feature 1..22: note = chemically synthesized
  source 1..22: mol_type = other DNA
caatcatggtggaaggtgaagg

SEQ ID NO: 82468 - DNA, 22 bp, synthetic construct
  misc_feature 1..22: note = chemically synthesized
  source 1..22: mol_type = other DNA
acatggtggcaggcaagagagc

SEQ ID NO: 82469 - DNA, 22 bp, synthetic construct
  misc_feature 1..22: note = chemically synthesized
  source 1..22: mol_type = other DNA
tataaaaccatcagatcttgtg

SEQ ID NO: 82470 - DNA, 22 bp, synthetic construct
  misc_feature 1..22: note = chemically synthesized
  source 1..22: mol_type = other DNA
ataaaaccatcagatcttgtga

SEQ ID NO: 82471 - DNA, 22 bp, synthetic construct
  misc_feature 1..22: note = chemically synthesized
  source 1..22: mol_type = other DNA
taaaaccatcagatcttgtgag

SEQ ID NO: 82472 - DNA, 22 bp, synthetic construct
  misc_feature 1..22: note = chemically synthesized
  source 1..22: mol_type = other DNA
gtgagacttactcactatcatg

SEQ ID NO: 82473 - DNA, 22 bp, synthetic construct
  misc_feature 1..22: note = chemically synthesized
  source 1..22: mol_type = other DNA
tgagacttactcactatcatga

SEQ ID NO: 82474 - DNA, 22 bp, synthetic construct
  misc_feature 1..22: note = chemically synthesized
  source 1..22: mol_type = other DNA
actcactatcatgagaacagca

SEQ ID NO: 82475 - DNA, 22 bp, synthetic construct
  misc_feature 1..22: note = chemically synthesized
  source 1..22: mol_type = other DNA
ctcactatcatgagaacagcat

SEQ ID NO: 82476 - DNA, 22 bp, synthetic construct
  misc_feature 1..22: note = chemically synthesized
  source 1..22: mol_type = other DNA
actatcatgagaacagcatgtg

SEQ ID NO: 82477 - DNA, 22 bp, synthetic construct
  misc_feature 1..22: note = chemically synthesized
  source 1..22: mol_type = other DNA
tcatgagaacagcatgtgaaaa

SEQ ID NO: 82478 - DNA, 22 bp, synthetic construct
  misc_feature 1..22: note = chemically synthesized
  source 1..22: mol_type = other DNA
cccccatgattcaattacatcc

SEQ ID NO: 82479 - DNA, 22 bp, synthetic construct
  misc_feature 1..22: note = chemically synthesized
  source 1..22: mol_type = other DNA
aattacatcccagtgtgttcct

SEQ ID NO: 82480 - DNA, 22 bp, synthetic construct
  misc_feature 1..22: note = chemically synthesized
  source 1..22: mol_type = other DNA
catcccagtgtgttccttccat

SEQ ID NO: 82481 - DNA, 22 bp, synthetic construct
  misc_feature 1..22: note = chemically synthesized
  source 1..22: mol_type = other DNA
cttccatgacaggcagggatta

SEQ ID NO: 82482 - DNA, 22 bp, synthetic construct
  misc_feature 1..22: note = chemically synthesized
  source 1..22: mol_type = other DNA
ccatgacaggcagggattatgg

SEQ ID NO: 82483 - DNA, 22 bp, synthetic construct
  misc_feature 1..22: note = chemically synthesized
  source 1..22: mol_type = other DNA
catgacaggcagggattatggg

SEQ ID NO: 82484 - DNA, 22 bp, synthetic construct
  misc_feature 1..22: note = chemically synthesized
  source 1..22: mol_type = other DNA
tgggacctactattcaagaaga

SEQ ID NO: 82485 - DNA, 22 bp, synthetic construct
  misc_feature 1..22: note = chemically synthesized
  source 1..22: mol_type = other DNA
ctattcaagaagaaatttgggt

SEQ ID NO: 82486 - DNA, 22 bp, synthetic construct
  misc_feature 1..22: note = chemically synthesized
  source 1..22: mol_type = other DNA
ttcaagaagaaatttgggtggg

SEQ ID NO: 82487 - DNA, 22 bp, synthetic construct
  misc_feature 1..22: note = chemically synthesized
  source 1..22: mol_type = other DNA
aagaagaaatttgggtgggaaa

SEQ ID NO: 82488 - DNA, 22 bp, synthetic construct
  misc_feature 1..22: note = chemically synthesized
  source 1..22: mol_type = other DNA
gggtgggaaaactgccaaacca

SEQ ID NO: 82489 - DNA, 22 bp, synthetic construct
  misc_feature 1..22: note = chemically synthesized
  source 1..22: mol_type = other DNA
ggtgggaaaactgccaaaccat

SEQ ID NO: 82490 - DNA, 22 bp, synthetic construct
  misc_feature 1..22: note = chemically synthesized
  source 1..22: mol_type = other DNA
ccaaaccatatcaaggtgtaat

SEQ ID NO: 82491 - DNA, 22 bp, synthetic construct
  misc_feature 1..22: note = chemically synthesized
  source 1..22: mol_type = other DNA
ccctgctgggttttctactcgt

SEQ ID NO: 82492 - DNA, 22 bp, synthetic construct
  misc_feature 1..22: note = chemically synthesized
  source 1..22: mol_type = other DNA
ctgggttttctactcgtgtggg

SEQ ID NO: 82493 - DNA, 22 bp, synthetic construct
  misc_feature 1..22: note = chemically synthesized
  source 1..22: mol_type = other DNA
ggttttctactcgtgtgggatc

SEQ ID NO: 82494 - DNA, 22 bp, synthetic construct
  misc_feature 1..22: note = chemically synthesized
  source 1..22: mol_type = other DNA
tctactcgtgtgggatctttag

SEQ ID NO: 82495 - DNA, 22 bp, synthetic construct
  misc_feature 1..22: note = chemically synthesized
  source 1..22: mol_type = other DNA
ctactcgtgtgggatctttagc

SEQ ID NO: 82496 - DNA, 22 bp, synthetic construct
  misc_feature 1..22: note = chemically synthesized
  source 1..22: mol_type = other DNA
tactcgtgtgggatctttagcc

SEQ ID NO: 82497 - DNA, 22 bp, synthetic construct
  misc_feature 1..22: note = chemically synthesized
  source 1..22: mol_type = other DNA
ctcgtgtgggatctttagcccc

SEQ ID NO: 82498 - DNA, 22 bp, synthetic construct
  misc_feature 1..22: note = chemically synthesized
  source 1..22: mol_type = other DNA
gtgtgggatctttagccccttt

SEQ ID NO: 82499 - DNA, 22 bp, synthetic construct
  misc_feature 1..22: note = chemically synthesized
  source 1..22: mol_type = other DNA
tagcccctttcttttggtgcat

SEQ ID NO: 82500 - DNA, 22 bp, synthetic construct
  misc_feature 1..22: note = chemically synthesized
  source 1..22: mol_type = other DNA
agcccctttcttttggtgcatt

SEQ ID NO: 82501 - DNA, 22 bp, synthetic construct
  misc_feature 1..22: note = chemically synthesized
  source 1..22: mol_type = other DNA
gcccctttcttttggtgcattt

SEQ ID NO: 82502 - DNA, 22 bp, synthetic construct
  misc_feature 1..22: note = chemically synthesized
  source 1..22: mol_type = other DNA
tcttttggtgcatttctctctt

SEQ ID NO: 82503 - DNA, 22 bp, synthetic construct
  misc_feature 1..22: note = chemically synthesized
  source 1..22: mol_type = other DNA
cttttggtgcatttctctcttt

SEQ ID NO: 82504 - DNA, 22 bp, synthetic construct
  misc_feature 1..22: note = chemically synthesized
  source 1..22: mol_type = other DNA
ttttggtgcatttctctctttt

SEQ ID NO: 82505 - DNA, 22 bp, synthetic construct
  misc_feature 1..22: note = chemically synthesized
  source 1..22: mol_type = other DNA
ttggtgcatttctctcttttgg

SEQ ID NO: 82506 - DNA, 22 bp, synthetic construct
  misc_feature 1..22: note = chemically synthesized
  source 1..22: mol_type = other DNA
tggtgcatttctctcttttgga

SEQ ID NO: 82507 - DNA, 22 bp, synthetic construct
  misc_feature 1..22: note = chemically synthesized
  source 1..22: mol_type = other DNA
ggtgcatttctctcttttggaa

SEQ ID NO: 82508 - DNA, 22 bp, synthetic construct
  misc_feature 1..22: note = chemically synthesized
  source 1..22: mol_type = other DNA
gtgcatttctctcttttggaat

SEQ ID NO: 82509 - DNA, 22 bp, synthetic construct
  misc_feature 1..22: note = chemically synthesized
  source 1..22: mol_type = other DNA
ctctcttttggaatgggaattt

SEQ ID NO: 82510 - DNA, 22 bp, synthetic construct
  misc_feature 1..22: note = chemically synthesized
  source 1..22: mol_type = other DNA
tctcttttggaatgggaatttg

SEQ ID NO: 82511 - DNA, 22 bp, synthetic construct
  misc_feature 1..22: note = chemically synthesized
  source 1..22: mol_type = other DNA
tcttttggaatgggaatttgta

SEQ ID NO: 82512 - DNA, 22 bp, synthetic construct
  misc_feature 1..22: note = chemically synthesized
  source 1..22: mol_type = other DNA
ttttggaatgggaatttgtacc

SEQ ID NO: 82513 - DNA, 22 bp, synthetic construct
  misc_feature 1..22: note = chemically synthesized
  source 1..22: mol_type = other DNA
ttggaatgggaatttgtaccca

SEQ ID NO: 82514 - DNA, 22 bp, synthetic construct
  misc_feature 1..22: note = chemically synthesized
  source 1..22: mol_type = other DNA
tggaatgggaatttgtacccaa

SEQ ID NO: 82515 - DNA, 22 bp, synthetic construct
  misc_feature 1..22: note = chemically synthesized
  source 1..22: mol_type = other DNA
ggaatgggaatttgtacccaat

SEQ ID NO: 82516 - DNA, 22 bp, synthetic construct
  misc_feature 1..22: note = chemically synthesized
  source 1..22: mol_type = other DNA
gaatgggaatttgtacccaatg

SEQ ID NO: 82517 - DNA, 22 bp, synthetic construct
  misc_feature 1..22: note = chemically synthesized
  source 1..22: mol_type = other DNA
gtacccaatgccagtacctcca

SEQ ID NO: 82518 - DNA, 22 bp, synthetic construct
  misc_feature 1..22: note = chemically synthesized
  source 1..22: mol_type = other DNA
tacccaatgccagtacctccat

SEQ ID NO: 82519 - DNA, 22 bp, synthetic construct
  misc_feature 1..22: note = chemically synthesized
  source 1..22: mol_type = other DNA
cattatgtcttggaagtaacta

SEQ ID NO: 82520 - DNA, 22 bp, synthetic construct
  misc_feature 1..22: note = chemically synthesized
  source 1..22: mol_type = other DNA
tgtcttggaagtaactaacttg

SEQ ID NO: 82521 - DNA, 22 bp, synthetic construct
  misc_feature 1..22: note = chemically synthesized
  source 1..22: mol_type = other DNA
ggaagtaactaacttgtttttg

SEQ ID NO: 82522 - DNA, 22 bp, synthetic construct
  misc_feature 1..22: note = chemically synthesized
  source 1..22: mol_type = other DNA
gaagtaactaacttgtttttga

SEQ ID NO: 82523 - DNA, 22 bp, synthetic construct
  misc_feature 1..22: note = chemically synthesized
  source 1..22: mol_type = other DNA
acttgtttttgattttacaggc

SEQ ID NO: 82524 - DNA, 22 bp, synthetic construct
  misc_feature 1..22: note = chemically synthesized
  source 1..22: mol_type = other DNA
gtttttgattttacaggctcat

SEQ ID NO: 82525 - DNA, 22 bp, synthetic construct
  misc_feature 1..22: note = chemically synthesized
  source 1..22: mol_type = other DNA
tttttgattttacaggctcata

SEQ ID NO: 82526 - DNA, 22 bp, synthetic construct
  misc_feature 1..22: note = chemically synthesized
  source 1..22: mol_type = other DNA
ttgattttacaggctcataggt

SEQ ID NO: 82527 - DNA, 22 bp, synthetic construct
  misc_feature 1..22: note = chemically synthesized
  source 1..22: mol_type = other DNA
tgattttacaggctcataggtt

SEQ ID NO: 82528 - DNA, 22 bp, synthetic construct
  misc_feature 1..22: note = chemically synthesized
  source 1..22: mol_type = other DNA
gattttacaggctcataggttg

SEQ ID NO: 82529 - DNA, 22 bp, synthetic construct
  misc_feature 1..22: note = chemically synthesized
  source 1..22: mol_type = other DNA
attttacaggctcataggttga

SEQ ID NO: 82530 - DNA, 22 bp, synthetic construct
  misc_feature 1..22: note = chemically synthesized
  source 1..22: mol_type = other DNA
tacaggctcataggttgaaggg

SEQ ID NO: 82531 - DNA, 22 bp, synthetic construct
  misc_feature 1..22: note = chemically synthesized
  source 1..22: mol_type = other DNA
acaggctcataggttgaaggga

SEQ ID NO: 82532 - DNA, 22 bp, synthetic construct
  misc_feature 1..22: note = chemically synthesized
  source 1..22: mol_type = other DNA
caggctcataggttgaagggac

SEQ ID NO: 82533 - DNA, 22 bp, synthetic construct
  misc_feature 1..22: note = chemically synthesized
  source 1..22: mol_type = other DNA
ataggttgaagggacttgcctt

SEQ ID NO: 82534 - DNA, 22 bp, synthetic construct
  misc_feature 1..22: note = chemically synthesized
  source 1..22: mol_type = other DNA
aagggacttgccttgtcttgga

SEQ ID NO: 82535 - DNA, 22 bp, synthetic construct
  misc_feature 1..22: note = chemically synthesized
  source 1..22: mol_type = other DNA
gccttgtcttggataagacttt

SEQ ID NO: 82536 - DNA, 22 bp, synthetic construct
  misc_feature 1..22: note = chemically synthesized
  source 1..22: mol_type = other DNA
ccttgtcttggataagactttg

SEQ ID NO: 82537 - DNA, 22 bp, synthetic construct
  misc_feature 1..22: note = chemically synthesized
  source 1..22: mol_type = other DNA
gtcttggataagactttggact

SEQ ID NO: 82538 - DNA, 22 bp, synthetic construct
  misc_feature 1..22: note = chemically synthesized
  source 1..22: mol_type = other DNA
tcttggataagactttggactt

SEQ ID NO: 82539 - DNA, 22 bp, synthetic construct
  misc_feature 1..22: note = chemically synthesized
  source 1..22: mol_type = other DNA
ggataagactttggactttgga

SEQ ID NO: 82540 - DNA, 22 bp, synthetic construct
  misc_feature 1..22: note = chemically synthesized
  source 1..22: mol_type = other DNA
gataagactttggactttggac

SEQ ID NO: 82541 - DNA, 22 bp, synthetic construct
  misc_feature 1..22: note = chemically synthesized
  source 1..22: mol_type = other DNA
tggactttggacttttgagtta

SEQ ID NO: 82542 - DNA, 22 bp, synthetic construct
  misc_feature 1..22: note = chemically synthesized
  source 1..22: mol_type = other DNA
ggactttggacttttgagttaa

SEQ ID NO: 82543 - DNA, 22 bp, synthetic construct
  misc_feature 1..22: note = chemically synthesized
  source 1..22: mol_type = other DNA
gactttggacttttgagttaat

SEQ ID NO: 82544 - DNA, 22 bp, synthetic construct
  misc_feature 1..22: note = chemically synthesized
  source 1..22: mol_type = other DNA
tggacttttgagttaatgctgg

SEQ ID NO: 82545 - DNA, 22 bp, synthetic construct
  misc_feature 1..22: note = chemically synthesized
  source 1..22: mol_type = other DNA
ggacttttgagttaatgctgga

SEQ ID NO: 82546 - DNA, 22 bp, synthetic construct
  misc_feature 1..22: note = chemically synthesized
  source 1..22: mol_type = other DNA
gacttttgagttaatgctggaa

SEQ ID NO: 82547 - DNA, 22 bp, synthetic construct
  misc_feature 1..22: note = chemically synthesized
  source 1..22: mol_type = other DNA
ttgagttaatgctggaatgagt

SEQ ID NO: 82548 - DNA, 22 bp, synthetic construct
  misc_feature 1..22: note = chemically synthesized
  source 1..22: mol_type = other DNA
tgagttaatgctggaatgagtt

SEQ ID NO: 82549 - DNA, 22 bp, synthetic construct
  misc_feature 1..22: note = chemically synthesized
  source 1..22: mol_type = other DNA
gagttaatgctggaatgagtta

SEQ ID NO: 82550 - DNA, 22 bp, synthetic construct
  misc_feature 1..22: note = chemically synthesized
  source 1..22: mol_type = other DNA
agttaatgctggaatgagttaa

SEQ ID NO: 82551 - DNA, 22 bp, synthetic construct
  misc_feature 1..22: note = chemically synthesized
  source 1..22: mol_type = other DNA
atgctggaatgagttaagactt

SEQ ID NO: 82552 - DNA, 22 bp, synthetic construct
  misc_feature 1..22: note = chemically synthesized
  source 1..22: mol_type = other DNA
gaatgagttaagactttgtagg

SEQ ID NO: 82553 - DNA, 22 bp, synthetic construct
  misc_feature 1..22: note = chemically synthesized
  source 1..22: mol_type = other DNA
agactttgtaggactgttggga

SEQ ID NO: 82554 - DNA, 22 bp, synthetic construct
  misc_feature 1..22: note = chemically synthesized
  source 1..22: mol_type = other DNA
tgtaggactgttgggaagtaat

SEQ ID NO: 82555 - DNA, 22 bp, synthetic construct
  misc_feature 1..22: note = chemically synthesized
  source 1..22: mol_type = other DNA
gtaggactgttgggaagtaatg

SEQ ID NO: 82556 - DNA, 22 bp, synthetic construct
  misc_feature 1..22: note = chemically synthesized
  source 1..22: mol_type = other DNA
taggactgttgggaagtaatga

SEQ ID NO: 82557 - DNA, 22 bp, synthetic construct
  misc_feature 1..22: note = chemically synthesized
  source 1..22: mol_type = other DNA
ttgggaagtaatgattgtattt

SEQ ID NO: 82558 - DNA, 22 bp, synthetic construct
  misc_feature 1..22: note = chemically synthesized
  source 1..22: mol_type = other DNA
ggaagtaatgattgtattttgt

SEQ ID NO: 82559 - DNA, 22 bp, synthetic construct
  misc_feature 1..22: note = chemically synthesized
  source 1..22: mol_type = other DNA
tattttgtgatgtgagaagaac

SEQ ID NO: 82560 - DNA, 22 bp, synthetic construct
  misc_feature 1..22: note = chemically synthesized
  source 1..22: mol_type = other DNA
tgtgatgtgagaagaacatgag

SEQ ID NO: 82561 - DNA, 22 bp, synthetic construct
  misc_feature 1..22: note = chemically synthesized
  source 1..22: mol_type = other DNA
gtgatgtgagaagaacatgaga

SEQ ID NO: 82562 - DNA, 22 bp, synthetic construct
  misc_feature 1..22: note = chemically synthesized
  source 1..22: mol_type = other DNA
tgatgtgagaagaacatgagat

SEQ ID NO: 82563 - DNA, 22 bp, synthetic construct
  misc_feature 1..22: note = chemically synthesized
  source 1..22: mol_type = other DNA
ggaaggggccagaggtggaagg

SEQ ID NO: 82564 - DNA, 22 bp, synthetic construct
  misc_feature 1..22: note = chemically synthesized
  source 1..22: mol_type = other DNA
gaaggggccagaggtggaagga

SEQ ID NO: 82565 - DNA, 22 bp, synthetic construct
  misc_feature 1..22: note = chemically synthesized
  source 1..22: mol_type = other DNA
ggatctgtgtcaccacccaaat

SEQ ID NO: 82566 - DNA, 22 bp, synthetic construct
  misc_feature 1..22: note = chemically synthesized
  source 1..22: mol_type = other DNA
gatctgtgtcaccacccaaata

SEQ ID NO: 82567 - DNA, 22 bp, synthetic construct
  misc_feature 1..22: note = chemically synthesized
  source 1..22: mol_type = other DNA
tgtcaccacccaaatatcatgt

SEQ ID NO: 82568 - DNA, 22 bp, synthetic construct
  misc_feature 1..22: note = chemically synthesized
  source 1..22: mol_type = other DNA
aattataatcaccagcgttgga

SEQ ID NO: 82569 - DNA, 22 bp, synthetic construct
  misc_feature 1..22: note = chemically synthesized
  source 1..22: mol_type = other DNA
taatcaccagcgttggaggtgg

SEQ ID NO: 82570 - DNA, 22 bp, synthetic construct
  misc_feature 1..22: note = chemically synthesized
  source 1..22: mol_type = other DNA
gaggtggggccttgtgggaggt

SEQ ID NO: 82571 - DNA, 22 bp, synthetic construct
  misc_feature 1..22: note = chemically synthesized
  source 1..22: mol_type = other DNA
gtgggaggtaattcaatcatgg

SEQ ID NO: 82572 - DNA, 22 bp, synthetic construct
  misc_feature 1..22: note = chemically synthesized
  source 1..22: mol_type = other DNA
tgggaggtaattcaatcatggt

SEQ ID NO: 82573 - DNA, 22 bp, synthetic construct
  misc_feature 1..22: note = chemically synthesized
  source 1..22: mol_type = other DNA
aatcatggtggcagagttctca

SEQ ID NO: 82574 - DNA, 22 bp, synthetic construct
  misc_feature 1..22: note = chemically synthesized
  source 1..22: mol_type = other DNA
tcatcagcgatttagtaccatc

SEQ ID NO: 82575 - DNA, 22 bp, synthetic construct
  misc_feature 1..22: note = chemically synthesized
  source 1..22: mol_type = other DNA
atcagcgatttagtaccatccc

SEQ ID NO: 82576 - DNA, 22 bp, synthetic construct
  misc_feature 1..22: note = chemically synthesized
  source 1..22: mol_type = other DNA
agtaccatcccccttggtactg

SEQ ID NO: 82577 - DNA, 22 bp, synthetic construct
  misc_feature 1..22: note = chemically synthesized
  source 1..22: mol_type = other DNA
gtaccatcccccttggtactgt

SEQ ID NO: 82578 - DNA, 22 bp, synthetic construct
  misc_feature 1..22: note = chemically synthesized
  source 1..22: mol_type = other DNA
ggtactgtatagtgagttctca

SEQ ID NO: 82579 - DNA, 22 bp, synthetic construct
  misc_feature 1..22: note = chemically synthesized
  source 1..22: mol_type = other DNA
gtactgtatagtgagttctcaa

SEQ ID NO: 82580 - DNA, 22 bp, synthetic construct
  misc_feature 1..22: note = chemically synthesized
  source 1..22: mol_type = other DNA
tatagtgagttctcaagaggct

SEQ ID NO: 82581 - DNA, 22 bp, synthetic construct
  misc_feature 1..22: note = chemically synthesized
  source 1..22: mol_type = other DNA
tcaagaggctggttgtttgaaa

SEQ ID NO: 82582 - DNA, 22 bp, synthetic construct
  misc_feature 1..22: note = chemically synthesized
  source 1..22: mol_type = other DNA
aagaggctggttgtttgaaagt

SEQ ID NO: 82583 - DNA, 22 bp, synthetic construct
  misc_feature 1..22: note = chemically synthesized
  source 1..22: mol_type = other DNA
gttgtttgaaagtgtgtagcac

SEQ ID NO: 82584 - DNA, 22 bp, synthetic construct
  misc_feature 1..22: note = chemically synthesized
  source 1..22: mol_type = other DNA
tttgaaagtgtgtagcacctcc

SEQ ID NO: 82585 - DNA, 22 bp, synthetic construct
  misc_feature 1..22: note = chemically synthesized
  source 1..22: mol_type = other DNA
gaaagtgtgtagcacctcctac

SEQ ID NO: 82586 - DNA, 22 bp, synthetic construct
  misc_feature 1..22: note = chemically synthesized
  source 1..22: mol_type = other DNA
aaagtgtgtagcacctcctacc

SEQ ID NO: 82587 - DNA, 22 bp, synthetic construct
  misc_feature 1..22: note = chemically synthesized
  source 1..22: mol_type = other DNA
ctaccctgcttctccctgtcct

SEQ ID NO: 82588 - DNA, 22 bp, synthetic construct
  misc_feature 1..22: note = chemically synthesized
  source 1..22: mol_type = other DNA
ccctgcttctccctgtcctggc

SEQ ID NO: 82589 - DNA, 22 bp, synthetic construct
  misc_feature 1..22: note = chemically synthesized
  source 1..22: mol_type = other DNA
cttctccctgtcctggccatgt

SEQ ID NO: 82590 - DNA, 22 bp, synthetic construct
  misc_feature 1..22: note = chemically synthesized
  source 1..22: mol_type = other DNA
ctccctgtcctggccatgtgaa

SEQ ID NO: 82591 - DNA, 22 bp, synthetic construct
  misc_feature 1..22: note = chemically synthesized
  source 1..22: mol_type = other DNA
tccctgtcctggccatgtgaag

SEQ ID NO: 82592 - DNA, 22 bp, synthetic construct
  misc_feature 1..22: note = chemically synthesized
  source 1..22: mol_type = other DNA
cctgtcctggccatgtgaagat

SEQ ID NO: 82593 - DNA, 22 bp, synthetic construct
  misc_feature 1..22: note = chemically synthesized
  source 1..22: mol_type = other DNA
tcctggccatgtgaagatactt

SEQ ID NO: 82594 - DNA, 22 bp, synthetic construct
  misc_feature 1..22: note = chemically synthesized
  source 1..22: mol_type = other DNA
gccatgtgaagatacttgctcc

SEQ ID NO: 82595 - DNA, 22 bp, synthetic construct
  misc_feature 1..22: note = chemically synthesized
  source 1..22: mol_type = other DNA
gctcctgctttgtcttctgcca

SEQ ID NO: 82596 - DNA, 22 bp, synthetic construct
  misc_feature 1..22: note = chemically synthesized
  source 1..22: mol_type = other DNA
ctcctgctttgtcttctgccat

SEQ ID NO: 82597 - DNA, 22 bp, synthetic construct
  misc_feature 1..22: note = chemically synthesized
  source 1..22: mol_type = other DNA
ctgctttgtcttctgccatgat

SEQ ID NO: 82598 - DNA, 22 bp, synthetic construct
  misc_feature 1..22: note = chemically synthesized
  source 1..22: mol_type = other DNA
ctttgtcttctgccatgattgt

SEQ ID NO: 82599 - DNA, 22 bp, synthetic construct
  misc_feature 1..22: note = chemically synthesized
  source 1..22: mol_type = other DNA
tgtcttctgccatgattgtaag

SEQ ID NO: 82600 - DNA, 22 bp, synthetic construct
  misc_feature 1..22: note = chemically synthesized
  source 1..22: mol_type = other DNA
gtcttctgccatgattgtaagt

SEQ ID NO: 82601 - DNA, 22 bp, synthetic construct
  misc_feature 1..22: note = chemically synthesized
  source 1..22: mol_type = other DNA
tcttctgccatgattgtaagtt

SEQ ID NO: 82602 - DNA, 22 bp, synthetic construct
  misc_feature 1..22: note = chemically synthesized
  source 1..22: mol_type = other DNA
ctgccatgattgtaagtttctt

SEQ ID NO: 82603 - DNA, 22 bp, synthetic construct
  misc_feature 1..22: note = chemically synthesized
  source 1..22: mol_type = other DNA
tgccatgattgtaagtttcttg

SEQ ID NO: 82604 - DNA, 22 bp, synthetic construct
  misc_feature 1..22: note = chemically synthesized
  source 1..22: mol_type = other DNA
ccatgattgtaagtttcttgag

SEQ ID NO: 82605 - DNA, 22 bp, synthetic construct
  misc_feature 1..22: note = chemically synthesized
  source 1..22: mol_type = other DNA
taagtttcttgaggtctcccta

SEQ ID NO: 82606 - DNA, 22 bp, synthetic construct
  misc_feature 1..22: note = chemically synthesized
  source 1..22: mol_type = other DNA
cttgaggtctccctagaagctg

SEQ ID NO: 82607 - DNA, 22 bp, synthetic construct
  misc_feature 1..22: note = chemically synthesized
  source 1..22: mol_type = other DNA
ttgaggtctccctagaagctga

SEQ ID NO: 82608 - DNA, 22 bp, synthetic construct
  misc_feature 1..22: note = chemically synthesized
  source 1..22: mol_type = other DNA
gaggtctccctagaagctgagc

SEQ ID NO: 82609 - DNA, 22 bp, synthetic construct
  misc_feature 1..22: note = chemically synthesized
  source 1..22: mol_type = other DNA
aggtctccctagaagctgagca

SEQ ID NO: 82610 - DNA, 22 bp, synthetic construct
  misc_feature 1..22: note = chemically synthesized
  source 1..22: mol_type = other DNA
cctagaagctgagcagatgctg

SEQ ID NO: 82611 - DNA, 22 bp, synthetic construct
  misc_feature 1..22: note = chemically synthesized
  source 1..22: mol_type = other DNA
gaagctgagcagatgctgccat

SEQ ID NO: 82612 - DNA, 22 bp, synthetic construct
  misc_feature 1..22: note = chemically synthesized
  source 1..22: mol_type = other DNA
agcagatgctgccatgcttctt

SEQ ID NO: 82613 - DNA, 22 bp, synthetic construct
  misc_feature 1..22: note = chemically synthesized
  source 1..22: mol_type = other DNA
ccatgcttcttgtacagcctga

SEQ ID NO: 82614 - DNA, 22 bp, synthetic construct
  misc_feature 1..22: note = chemically synthesized
  source 1..22: mol_type = other DNA
cttgtacagcctgaagaacttt

SEQ ID NO: 82615 - DNA, 22 bp, synthetic construct
  misc_feature 1..22: note = chemically synthesized
  source 1..22: mol_type = other DNA
ttgtacagcctgaagaactttg

SEQ ID NO: 82616 - DNA, 22 bp, synthetic construct
  misc_feature 1..22: note = chemically synthesized
  source 1..22: mol_type = other DNA
gtacagcctgaagaactttgag

SEQ ID NO: 82617 - DNA, 22 bp, synthetic construct
  misc_feature 1..22: note = chemically synthesized
  source 1..22: mol_type = other DNA
tacagcctgaagaactttgagc

SEQ ID NO: 82618 - DNA, 22 bp, synthetic construct
  misc_feature 1..22: note = chemically synthesized
  source 1..22: mol_type = other DNA
aagaactttgagccaattaaac

SEQ ID NO: 82619 - DNA, 22 bp, synthetic construct
  misc_feature 1..22: note = chemically synthesized
  source 1..22: mol_type = other DNA
tgagccaattaaacctctgttc

SEQ ID NO: 82620 - DNA, 22 bp, synthetic construct
  misc_feature 1..22: note = chemically synthesized
  source 1..22: mol_type = other DNA
gagccaattaaacctctgttct

SEQ ID NO: 82621 - DNA, 22 bp, synthetic construct
  misc_feature 1..22: note = chemically synthesized
  source 1..22: mol_type = other DNA
agccaattaaacctctgttctt

SEQ ID NO: 82622 - DNA, 22 bp, synthetic construct
  misc_feature 1..22: note = chemically synthesized
  source 1..22: mol_type = other DNA
aacctctgttctttataaatta

SEQ ID NO: 82623 - DNA, 22 bp, synthetic construct
  misc_feature 1..22: note = chemically synthesized
  source 1..22: mol_type = other DNA
tgttctttataaattacccagt

SEQ ID NO: 82624 - DNA, 22 bp, synthetic construct
  misc_feature 1..22: note = chemically synthesized
  source 1..22: mol_type = other DNA
ttctttataaattacccagtct

SEQ ID NO: 82625 - DNA, 22 bp, synthetic construct
  misc_feature 1..22: note = chemically synthesized
  source 1..22: mol_type = other DNA
tttataaattacccagtctcag

SEQ ID NO: 82626 - DNA, 22 bp, synthetic construct
  misc_feature 1..22: note = chemically synthesized
  source 1..22: mol_type = other DNA
tataaattacccagtctcaggt

SEQ ID NO: 82627 - DNA, 22 bp, synthetic construct
  misc_feature 1..22: note = chemically synthesized
  source 1..22: mol_type = other DNA
ataaattacccagtctcaggta

SEQ ID NO: 82628 - DNA, 22 bp, synthetic construct
  misc_feature 1..22: note = chemically synthesized
  source 1..22: mol_type = other DNA
taaattacccagtctcaggtat

SEQ ID NO: 82629 - DNA, 22 bp, synthetic construct
  misc_feature 1..22: note = chemically synthesized
  source 1..22: mol_type = other DNA
cccagtctcaggtattttttta

SEQ ID NO: 82630 - DNA, 22 bp, synthetic construct
  misc_feature 1..22: note = chemically synthesized
  source 1..22: mol_type = other DNA
aggtatttttttacagcagtgt

SEQ ID NO: 82631 - DNA, 22 bp, synthetic construct
  misc_feature 1..22: note = chemically synthesized
  source 1..22: mol_type = other DNA
ttttacagcagtgtgaaaacat

SEQ ID NO: 82632 - DNA, 22 bp, synthetic construct
  misc_feature 1..22: note = chemically synthesized
  source 1..22: mol_type = other DNA
tttacagcagtgtgaaaacatg

SEQ ID NO: 82633 - DNA, 22 bp, synthetic construct
  misc_feature 1..22: note = chemically synthesized
  source 1..22: mol_type = other DNA
ttacagcagtgtgaaaacatgc

SEQ ID NO: 82634 - DNA, 22 bp, synthetic construct
  misc_feature 1..22: note = chemically synthesized
  source 1..22: mol_type = other DNA
tacagcagtgtgaaaacatgcc

SEQ ID NO: 82635 - DNA, 22 bp, synthetic construct
  misc_feature 1..22: note = chemically synthesized
  source 1..22: mol_type = other DNA
acagcagtgtgaaaacatgcca

SEQ ID NO: 82636 - DNA, 22 bp, synthetic construct
  misc_feature 1..22: note = chemically synthesized
  source 1..22: mol_type = other DNA
cagcagtgtgaaaacatgccaa

SEQ ID NO: 82637 - DNA, 22 bp, synthetic construct
  misc_feature 1..22: note = chemically synthesized
  source 1..22: mol_type = other DNA
aatgccaccattaataattttt

SEQ ID NO: 82638 - DNA, 22 bp, synthetic construct
  misc_feature 1..22: note = chemically synthesized
  source 1..22: mol_type = other DNA
atgccaccattaataatttttt

SEQ ID NO: 82639 - DNA, 22 bp, synthetic construct
  misc_feature 1..22: note = chemically synthesized
  source 1..22: mol_type = other DNA
ataattttttcttcttccttcc

SEQ ID NO: 82640 - DNA, 22 bp, synthetic construct
  misc_feature 1..22: note = chemically synthesized
  source 1..22: mol_type = other DNA
tttcttcttccttcctttgata

SEQ ID NO: 82641 - DNA, 22 bp, synthetic construct
  misc_feature 1..22: note = chemically synthesized
  source 1..22: mol_type = other DNA
ttcttcttccttcctttgatac

SEQ ID NO: 82642 - DNA, 22 bp, synthetic construct
  misc_feature 1..22: note = chemically synthesized
  source 1..22: mol_type = other DNA
tcttcttccttcctttgatact

SEQ ID NO: 82643 - DNA, 22 bp, synthetic construct
  misc_feature 1..22: note = chemically synthesized
  source 1..22: mol_type = other DNA
cttcttccttcctttgatactc

SEQ ID NO: 82644 - DNA, 22 bp, synthetic construct
  misc_feature 1..22: note = chemically synthesized
  source 1..22: mol_type = other DNA
ttcttccttcctttgatactca

SEQ ID NO: 82645 - DNA, 22 bp, synthetic construct
  misc_feature 1..22: note = chemically synthesized
  source 1..22: mol_type = other DNA
cttccttcctttgatactcaat

SEQ ID NO: 82646 - DNA, 22 bp, synthetic construct
  misc_feature 1..22: note = chemically synthesized
  source 1..22: mol_type = other DNA
ttccttcctttgatactcaatg

SEQ ID NO: 82647 - DNA, 22 bp, synthetic construct
  misc_feature 1..22: note = chemically synthesized
  source 1..22: mol_type = other DNA
ccttcctttgatactcaatgtg

SEQ ID NO: 82648 - DNA, 22 bp, synthetic construct
  misc_feature 1..22: note = chemically synthesized
  source 1..22: mol_type = other DNA
cttcctttgatactcaatgtga

SEQ ID NO: 82649 - DNA, 22 bp, synthetic construct
  misc_feature 1..22: note = chemically synthesized
  source 1..22: mol_type = other DNA
cctttgatactcaatgtgatca

SEQ ID NO: 82650 - DNA, 22 bp, synthetic construct
  misc_feature 1..22: note = chemically synthesized
  source 1..22: mol_type = other DNA
ctttgatactcaatgtgatcaa

SEQ ID NO: 82651 - DNA, 22 bp, synthetic construct
  misc_feature 1..22: note = chemically synthesized
  source 1..22: mol_type = other DNA
tgatactcaatgtgatcaagat

SEQ ID NO: 82652 - DNA, 22 bp, synthetic construct
  misc_feature 1..22: note = chemically synthesized
  source 1..22: mol_type = other DNA
gatactcaatgtgatcaagatt

SEQ ID NO: 82653 - DNA, 22 bp, synthetic construct
  misc_feature 1..22: note = chemically synthesized
  source 1..22: mol_type = other DNA
atactcaatgtgatcaagattt

SEQ ID NO: 82654 - DNA, 22 bp, synthetic construct
  misc_feature 1..22: note = chemically synthesized
  source 1..22: mol_type = other DNA
aatgtgatcaagatttgggagt

SEQ ID NO: 82655 - DNA, 22 bp, synthetic construct
  misc_feature 1..22: note = chemically synthesized
  source 1..22: mol_type = other DNA
gggagttaatcattttactcct

SEQ ID NO: 82656 - DNA, 22 bp, synthetic construct
  misc_feature 1..22: note = chemically synthesized
  source 1..22: mol_type = other DNA
ggagttaatcattttactcctc

SEQ ID NO: 82657 - DNA, 22 bp, synthetic construct
  misc_feature 1..22: note = chemically synthesized
  source 1..22: mol_type = other DNA
atcattttactcctctttactc

SEQ ID NO: 82658 - DNA, 22 bp, synthetic construct
  misc_feature 1..22: note = chemically synthesized
  source 1..22: mol_type = other DNA
tactcctctttactcatgtcca

SEQ ID NO: 82659 - DNA, 22 bp, synthetic construct
  misc_feature 1..22: note = chemically synthesized
  source 1..22: mol_type = other DNA
actcctctttactcatgtccaa

SEQ ID NO: 82660 - DNA, 22 bp, synthetic construct
  misc_feature 1..22: note = chemically synthesized
  source 1..22: mol_type = other DNA
ctcctctttactcatgtccaaa

SEQ ID NO: 82661 - DNA, 22 bp, synthetic construct
  misc_feature 1..22: note = chemically synthesized
  source 1..22: mol_type = other DNA
ctctttactcatgtccaaagtg

SEQ ID NO: 82662 - DNA, 22 bp, synthetic construct
  misc_feature 1..22: note = chemically synthesized
  source 1..22: mol_type = other DNA
tttactcatgtccaaagtgaca

SEQ ID NO: 82663 - DNA, 22 bp, synthetic construct
  misc_feature 1..22: note = chemically synthesized
  source 1..22: mol_type = other DNA
tactcatgtccaaagtgacatg

SEQ ID NO: 82664 - DNA, 22 bp, synthetic construct
  misc_feature 1..22: note = chemically synthesized
  source 1..22: mol_type = other DNA
actcatgtccaaagtgacatga

SEQ ID NO: 82665 - DNA, 22 bp, synthetic construct
  misc_feature 1..22: note = chemically synthesized
  source 1..22: mol_type = other DNA
ctcatgtccaaagtgacatgaa

SEQ ID NO: 82666 - DNA, 22 bp, synthetic construct
  misc_feature 1..22: note = chemically synthesized
  source 1..22: mol_type = other DNA
atgtccaaagtgacatgaaacc

SEQ ID NO: 82667 - DNA, 22 bp, synthetic construct
  misc_feature 1..22: note = chemically synthesized
  source 1..22: mol_type = other DNA
tatctaagtgtgttatctccat

SEQ ID NO: 82668 - DNA, 22 bp, synthetic construct
  misc_feature 1..22: note = chemically synthesized
  source 1..22: mol_type = other DNA
agtgtgttatctccatgggaag

SEQ ID NO: 82669 - DNA, 22 bp, synthetic construct
  misc_feature 1..22: note = chemically synthesized
  source 1..22: mol_type = other DNA
tctccatgggaagatactaaat

SEQ ID NO: 82670 - DNA, 22 bp, synthetic construct
  misc_feature 1..22: note = chemically synthesized
  source 1..22: mol_type = other DNA
catgggaagatactaaatcttt

SEQ ID NO: 82671 - DNA, 22 bp, synthetic construct
  misc_feature 1..22: note = chemically synthesized
  source 1..22: mol_type = other DNA
aatcttttatttatcatcttat

SEQ ID NO: 82672 - DNA, 22 bp, synthetic construct
  misc_feature 1..22: note = chemically synthesized
  source 1..22: mol_type = other DNA
ttatttatcatcttatttttaa

SEQ ID NO: 82673 - DNA, 22 bp, synthetic construct
  misc_feature 1..22: note = chemically synthesized
  source 1..22: mol_type = other DNA
tatttatcatcttatttttaat

SEQ ID NO: 82674 - DNA, 22 bp, synthetic construct
  misc_feature 1..22: note = chemically synthesized
  source 1..22: mol_type = other DNA
atttatcatcttatttttaata

SEQ ID NO: 82675 - DNA, 22 bp, synthetic construct
  misc_feature 1..22: note = chemically synthesized
  source 1..22: mol_type = other DNA
tttatcatcttatttttaataa

SEQ ID NO: 82676 - DNA, 22 bp, synthetic construct
  misc_feature 1..22: note = chemically synthesized
  source 1..22: mol_type = other DNA
atcatcttatttttaataaatc

SEQ ID NO: 82677 - DNA, 22 bp, synthetic construct
  misc_feature 1..22: note = chemically synthesized
  source 1..22: mol_type = other DNA
tcatcttatttttaataaatca

SEQ ID NO: 82678 - DNA, 22 bp, synthetic construct
  misc_feature 1..22: note = chemically synthesized
  source 1..22: mol_type = other DNA
atttttaataaatcataacatt

SEQ ID NO: 82679 - DNA, 22 bp, synthetic construct
  misc_feature 1..22: note = chemically synthesized
  source 1..22: mol_type = other DNA
tttttaataaatcataacatta

SEQ ID NO: 82680 - DNA, 22 bp, synthetic construct
  misc_feature 1..22: note = chemically synthesized
  source 1..22: mol_type = other DNA
ttaataaatcataacattacct

SEQ ID NO: 82681 - DNA, 22 bp, synthetic construct
  misc_feature 1..22: note = chemically synthesized
  source 1..22: mol_type = other DNA
taataaatcataacattacctg

SEQ ID NO: 82682 - DNA, 22 bp, synthetic construct
  misc_feature 1..22: note = chemically synthesized
  source 1..22: mol_type = other DNA
aataaatcataacattacctgt

SEQ ID NO: 82683 - DNA, 22 bp, synthetic construct
  misc_feature 1..22: note = chemically synthesized
  source 1..22: mol_type = other DNA
ataaatcataacattacctgtt

SEQ ID NO: 82684 - DNA, 22 bp, synthetic construct
  misc_feature 1..22: note = chemically synthesized
  source 1..22: mol_type = other DNA
cctgttattaaatattaatcta

SEQ ID NO: 82685 - DNA, 22 bp, synthetic construct
  misc_feature 1..22: note = chemically synthesized
  source 1..22: mol_type = other DNA
ttattaaatattaatctatttc

SEQ ID NO: 82686 - DNA, 22 bp, synthetic construct
  misc_feature 1..22: note = chemically synthesized
  source 1..22: mol_type = other DNA
ttaaatattaatctatttcatt

SEQ ID NO: 82687 - DNA, 22 bp, synthetic construct
  misc_feature 1..22: note = chemically synthesized
  source 1..22: mol_type = other DNA
aatattaatctatttcattcta

SEQ ID NO: 82688 - DNA, 22 bp, synthetic construct
  misc_feature 1..22: note = chemically synthesized
  source 1..22: mol_type = other DNA
atctatttcattctatgcaata

SEQ ID NO: 82689 - DNA, 22 bp, synthetic construct
  misc_feature 1..22: note = chemically synthesized
  source 1..22: mol_type = other DNA
tttcattctatgcaatagctgt

SEQ ID NO: 82690 - DNA, 22 bp, synthetic construct
  misc_feature 1..22: note = chemically synthesized
  source 1..22: mol_type = other DNA
cattctatgcaatagctgtctg

SEQ ID NO: 82691 - DNA, 22 bp, synthetic construct
  misc_feature 1..22: note = chemically synthesized
  source 1..22: mol_type = other DNA
attctatgcaatagctgtctga

SEQ ID NO: 82692 - DNA, 22 bp, synthetic construct
  misc_feature 1..22: note = chemically synthesized
  source 1..22: mol_type = other DNA
tatgcaatagctgtctgaaact

SEQ ID NO: 82693 - DNA, 22 bp, synthetic construct
  misc_feature 1..22: note = chemically synthesized
  source 1..22: mol_type = other DNA
tgcaatagctgtctgaaactaa

SEQ ID NO: 82694 - DNA, 22 bp, synthetic construct
  misc_feature 1..22: note = chemically synthesized
  source 1..22: mol_type = other DNA
tctgaaactaagtcaaagaatg

SEQ ID NO: 82695 - DNA, 22 bp, synthetic construct
  misc_feature 1..22: note = chemically synthesized
  source 1..22: mol_type = other DNA
aaactaagtcaaagaatgtacc

SEQ ID NO: 82696 - DNA, 22 bp, synthetic construct
  misc_feature 1..22: note = chemically synthesized
  source 1..22: mol_type = other DNA
agtcaaagaatgtaccatactt

SEQ ID NO: 82697 - DNA, 22 bp, synthetic construct
  misc_feature 1..22: note = chemically synthesized
  source 1..22: mol_type = other DNA
tattcactatttgtctattatt

SEQ ID NO: 82698 - DNA, 22 bp, synthetic construct
  misc_feature 1..22: note = chemically synthesized
  source 1..22: mol_type = other DNA
attcactatttgtctattattg

SEQ ID NO: 82699 - DNA, 22 bp, synthetic construct
  misc_feature 1..22: note = chemically synthesized
  source 1..22: mol_type = other DNA
ttcactatttgtctattattga

SEQ ID NO: 82700 - DNA, 22 bp, synthetic construct
  misc_feature 1..22: note = chemically synthesized
  source 1..22: mol_type = other DNA
actatttgtctattattgaata

SEQ ID NO: 82701 - DNA, 22 bp, synthetic construct
  misc_feature 1..22: note = chemically synthesized
  source 1..22: mol_type = other DNA
tttgtctattattgaatatcta

SEQ ID NO: 82702 - DNA, 22 bp, synthetic construct
  misc_feature 1..22: note = chemically synthesized
  source 1..22: mol_type = other DNA
gtctattattgaatatctatat

SEQ ID NO: 82703 - DNA, 22 bp, synthetic construct
  misc_feature 1..22: note = chemically synthesized
  source 1..22: mol_type = other DNA
tctattattgaatatctatatt

SEQ ID NO: 82704 - DNA, 22 bp, synthetic construct
  misc_feature 1..22: note = chemically synthesized
  source 1..22: mol_type = other DNA
ttattgaatatctatatttgtt

SEQ ID NO: 82705 - DNA, 22 bp, synthetic construct
  misc_feature 1..22: note = chemically synthesized
  source 1..22: mol_type = other DNA
ttgaatatctatatttgtttga

SEQ ID NO: 82706 - DNA, 22 bp, synthetic construct
  misc_feature 1..22: note = chemically synthesized
  source 1..22: mol_type = other DNA
aatatctatatttgtttgagga

SEQ ID NO: 82707 - DNA, 22 bp, synthetic construct
  misc_feature 1..22: note = chemically synthesized
  source 1..22: mol_type = other DNA
tatttgtttgaggaataataat

SEQ ID NO: 82708 - DNA, 22 bp, synthetic construct
  misc_feature 1..22: note = chemically synthesized
  source 1..22: mol_type = other DNA
gtttgaggaataataatcagaa

SEQ ID NO: 82709 - DNA, 22 bp, synthetic construct
  misc_feature 1..22: note = chemically synthesized
  source 1..22: mol_type = other DNA
tttgaggaataataatcagaac

SEQ ID NO: 82710 - DNA, 22 bp, synthetic construct
  misc_feature 1..22: note = chemically synthesized
  source 1..22: mol_type = other DNA
gaggaataataatcagaacaga

SEQ ID NO: 82711 - DNA, 22 bp, synthetic construct
  misc_feature 1..22: note = chemically synthesized
  source 1..22: mol_type = other DNA
aggaataataatcagaacagaa

SEQ ID NO: 82712 - DNA, 22 bp, synthetic construct
  misc_feature 1..22: note = chemically synthesized
  source 1..22: mol_type = other DNA
taggaatggaagtttctcaaca

SEQ ID NO: 82713 - DNA, 22 bp, synthetic construct
  misc_feature 1..22: note = chemically synthesized
  source 1..22: mol_type = other DNA
ctcaacagcaagataaaatagg

SEQ ID NO: 82714 - DNA, 22 bp, synthetic construct
  misc_feature 1..22: note = chemically synthesized
  source 1..22: mol_type = other DNA
tcaacagcaagataaaataggt

SEQ ID NO: 82715 - DNA, 22 bp, synthetic construct
  misc_feature 1..22: note = chemically synthesized
  source 1..22: mol_type = other DNA
aacagcaagataaaataggtta

SEQ ID NO: 82716 - DNA, 22 bp, synthetic construct
  misc_feature 1..22: note = chemically synthesized
  source 1..22: mol_type = other DNA
atggagtaatatgtagagaatg

SEQ ID NO: 82717 - DNA, 22 bp, synthetic construct
  misc_feature 1..22: note = chemically synthesized
  source 1..22: mol_type = other DNA
taattaaagaaaatgaattaag

SEQ ID NO: 82718 - DNA, 22 bp, synthetic construct
  misc_feature 1..22: note = chemically synthesized
  source 1..22: mol_type = other DNA
aagaaaatgaattaagcaatat

SEQ ID NO: 82719 - DNA, 22 bp, synthetic construct
  misc_feature 1..22: note = chemically synthesized
  source 1..22: mol_type = other DNA
agcaatatacaattaaagctct

SEQ ID NO: 82720 - DNA, 22 bp, synthetic construct
  misc_feature 1..22: note = chemically synthesized
  source 1..22: mol_type = other DNA
aagctctttatgtcttttcaca

SEQ ID NO: 82721 - DNA, 22 bp, synthetic construct
  misc_feature 1..22: note = chemically synthesized
  source 1..22: mol_type = other DNA
tttatgtcttttcacagcttga

SEQ ID NO: 82722 - DNA, 22 bp, synthetic construct
  misc_feature 1..22: note = chemically synthesized
  source 1..22: mol_type = other DNA
tatgtcttttcacagcttgata

SEQ ID NO: 82723 - DNA, 22 bp, synthetic construct
  misc_feature 1..22: note = chemically synthesized
  source 1..22: mol_type = other DNA
atgtcttttcacagcttgatag

SEQ ID NO: 82724 - DNA, 22 bp, synthetic construct
  misc_feature 1..22: note = chemically synthesized
  source 1..22: mol_type = other DNA
tgtcttttcacagcttgataga

SEQ ID NO: 82725 - DNA, 22 bp, synthetic construct
  misc_feature 1..22: note = chemically synthesized
  source 1..22: mol_type = other DNA
ttcacagcttgatagaccttta

SEQ ID NO: 82726 - DNA, 22 bp, synthetic construct
  misc_feature 1..22: note = chemically synthesized
  source 1..22: mol_type = other DNA
tcacagcttgatagacctttat

SEQ ID NO: 82727 - DNA, 22 bp, synthetic construct
  misc_feature 1..22: note = chemically synthesized
  source 1..22: mol_type = other DNA
cacagcttgatagacctttatt

SEQ ID NO: 82728 - DNA, 22 bp, synthetic construct
  misc_feature 1..22: note = chemically synthesized
  source 1..22: mol_type = other DNA
acagcttgatagacctttattt

SEQ ID NO: 82729 - DNA, 22 bp, synthetic construct
  misc_feature 1..22: note = chemically synthesized
  source 1..22: mol_type = other DNA
gatagacctttatttatatcac

SEQ ID NO: 82730 - DNA, 22 bp, synthetic construct
  misc_feature 1..22: note = chemically synthesized
  source 1..22: mol_type = other DNA
atagacctttatttatatcact

SEQ ID NO: 82731 - DNA, 22 bp, synthetic construct
  misc_feature 1..22: note = chemically synthesized
  source 1..22: mol_type = other DNA
tatttatatcactgaataatat

SEQ ID NO: 82732 - DNA, 22 bp, synthetic construct
  misc_feature 1..22: note = chemically synthesized
  source 1..22: mol_type = other DNA
atttatatcactgaataatatt

SEQ ID NO: 82733 - DNA, 22 bp, synthetic construct
  misc_feature 1..22: note = chemically synthesized
  source 1..22: mol_type = other DNA
tttatatcactgaataatattc

SEQ ID NO: 82734 - DNA, 22 bp, synthetic construct
  misc_feature 1..22: note = chemically synthesized
  source 1..22: mol_type = other DNA
atatcactgaataatattctat

SEQ ID NO: 82735 - DNA, 22 bp, synthetic construct
  misc_feature 1..22: note = chemically synthesized
  source 1..22: mol_type = other DNA
tatcactgaataatattctatc

SEQ ID NO: 82736 - DNA, 22 bp, synthetic construct
  misc_feature 1..22: note = chemically synthesized
  source 1..22: mol_type = other DNA
aataatattctatcctatggat

SEQ ID NO: 82737 - DNA, 22 bp, synthetic construct
  misc_feature 1..22: note = chemically synthesized
  source 1..22: mol_type = other DNA
tatcctatggatgttccacagt

SEQ ID NO: 82738 - DNA, 22 bp, synthetic construct
  misc_feature 1..22: note = chemically synthesized
  source 1..22: mol_type = other DNA
tcctatggatgttccacagttt

SEQ ID NO: 82739 - DNA, 22 bp, synthetic construct
  misc_feature 1..22: note = chemically synthesized
  source 1..22: mol_type = other DNA
tggatgttccacagtttatcca

SEQ ID NO: 82740 - DNA, 22 bp, synthetic construct
  misc_feature 1..22: note = chemically synthesized
  source 1..22: mol_type = other DNA
cacagtttatccattcatcttg

SEQ ID NO: 82741 - DNA, 22 bp, synthetic construct
  misc_feature 1..22: note = chemically synthesized
  source 1..22: mol_type = other DNA
atccattcatcttggttacttt

SEQ ID NO: 82742 - DNA, 22 bp, synthetic construct
  misc_feature 1..22: note = chemically synthesized
  source 1..22: mol_type = other DNA
tccattcatcttggttactttc

SEQ ID NO: 82743 - DNA, 22 bp, synthetic construct
  misc_feature 1..22: note = chemically synthesized
  source 1..22: mol_type = other DNA
atcttggttactttcaactttt

SEQ ID NO: 82744 - DNA, 22 bp, synthetic construct
  misc_feature 1..22: note = chemically synthesized
  source 1..22: mol_type = other DNA
ggttactttcaacttttggcaa

SEQ ID NO: 82745 - DNA, 22 bp, synthetic construct
  misc_feature 1..22: note = chemically synthesized
  source 1..22: mol_type = other DNA
gttactttcaacttttggcaat

SEQ ID NO: 82746 - DNA, 22 bp, synthetic construct
  misc_feature 1..22: note = chemically synthesized
  source 1..22: mol_type = other DNA
ctttcaacttttggcaattatg

SEQ ID NO: 82747 - DNA, 22 bp, synthetic construct
  misc_feature 1..22: note = chemically synthesized
  source 1..22: mol_type = other DNA
tcaacttttggcaattatgagt

SEQ ID NO: 82748 - DNA, 22 bp, synthetic construct
  misc_feature 1..22: note = chemically synthesized
  source 1..22: mol_type = other DNA
caacttttggcaattatgagta

SEQ ID NO: 82749 - DNA, 22 bp, synthetic construct
  misc_feature 1..22: note = chemically synthesized
  source 1..22: mol_type = other DNA
aacttttggcaattatgagtaa

SEQ ID NO: 82750 - DNA, 22 bp, synthetic construct
  misc_feature 1..22: note = chemically synthesized
  source 1..22: mol_type = other DNA
ttggcaattatgagtaaagttc

SEQ ID NO: 82751 - DNA, 22 bp, synthetic construct
  misc_feature 1..22: note = chemically synthesized
  source 1..22: mol_type = other DNA
tggcaattatgagtaaagttcc

SEQ ID NO: 82752 - DNA, 22 bp, synthetic construct
  misc_feature 1..22: note = chemically synthesized
  source 1..22: mol_type = other DNA
ggcaattatgagtaaagttcct

SEQ ID NO: 82753 - DNA, 22 bp, synthetic construct
  misc_feature 1..22: note = chemically synthesized
  source 1..22: mol_type = other DNA
gcaattatgagtaaagttccta

SEQ ID NO: 82754 - DNA, 22 bp, synthetic construct
  misc_feature 1..22: note = chemically synthesized
  source 1..22: mol_type = other DNA
tgagtaaagttcctataaacct

SEQ ID NO: 82755 - DNA, 22 bp, synthetic construct
  misc_feature 1..22: note = chemically synthesized
  source 1..22: mol_type = other DNA
ctataaaccttggttagttcat

SEQ ID NO: 82756 - DNA, 22 bp, synthetic construct
  misc_feature 1..22: note = chemically synthesized
  source 1..22: mol_type = other DNA
taaaccttggttagttcatgtc

SEQ ID NO: 82757 - DNA, 22 bp, synthetic construct
  misc_feature 1..22: note = chemically synthesized
  source 1..22: mol_type = other DNA
ggttagttcatgtctgtgtgtg

SEQ ID NO: 82758 - DNA, 22 bp, synthetic construct
  misc_feature 1..22: note = chemically synthesized
  source 1..22: mol_type = other DNA
gttagttcatgtctgtgtgtgg

SEQ ID NO: 82759 - DNA, 22 bp, synthetic construct
  misc_feature 1..22: note = chemically synthesized
  source 1..22: mol_type = other DNA
gttcatgtctgtgtgtggacat

SEQ ID NO: 82760 - DNA, 22 bp, synthetic construct
  misc_feature 1..22: note = chemically synthesized
  source 1..22: mol_type = other DNA
atgtctgtgtgtggacataaat

SEQ ID NO: 82761 - DNA, 22 bp, synthetic construct
  misc_feature 1..22: note = chemically synthesized
  source 1..22: mol_type = other DNA
tgtgtggacataaatttttgac

SEQ ID NO: 82762 - DNA, 22 bp, synthetic construct
  misc_feature 1..22: note = chemically synthesized
  source 1..22: mol_type = other DNA
ttgactcatttgggtaaataca

SEQ ID NO: 82763 - DNA, 22 bp, synthetic construct
  misc_feature 1..22: note = chemically synthesized
  source 1..22: mol_type = other DNA
tgactcatttgggtaaatacat

SEQ ID NO: 82764 - DNA, 22 bp, synthetic construct
  misc_feature 1..22: note = chemically synthesized
  source 1..22: mol_type = other DNA
gactcatttgggtaaatacata

SEQ ID NO: 82765 - DNA, 22 bp, synthetic construct
  misc_feature 1..22: note = chemically synthesized
  source 1..22: mol_type = other DNA
actcatttgggtaaatacatag

SEQ ID NO: 82766 - DNA, 22 bp, synthetic construct
  misc_feature 1..22: note = chemically synthesized
  source 1..22: mol_type = other DNA
atttgggtaaatacataggagt

SEQ ID NO: 82767 - DNA, 22 bp, synthetic construct
  misc_feature 1..22: note = chemically synthesized
  source 1..22: mol_type = other DNA
gggtaaatacataggagtgtga

SEQ ID NO: 82768 - DNA, 22 bp, synthetic construct
  misc_feature 1..22: note = chemically synthesized
  source 1..22: mol_type = other DNA
ggtaaatacataggagtgtgat

SEQ ID NO: 82769 - DNA, 22 bp, synthetic construct
  misc_feature 1..22: note = chemically synthesized
  source 1..22: mol_type = other DNA
ttgggtcacatgaaaagactag

SEQ ID NO: 82770 - DNA, 22 bp, synthetic construct
  misc_feature 1..22: note = chemically synthesized
  source 1..22: mol_type = other DNA
ggtcacatgaaaagactagttt

SEQ ID NO: 82771 - DNA, 22 bp, synthetic construct
  misc_feature 1..22: note = chemically synthesized
  source 1..22: mol_type = other DNA
gttttgtaagaaactgtaaact

SEQ ID NO: 82772 - DNA, 22 bp, synthetic construct
  misc_feature 1..22: note = chemically synthesized
  source 1..22: mol_type = other DNA
tgtaagaaactgtaaactgtct

SEQ ID NO: 82773 - DNA, 22 bp, synthetic construct
  misc_feature 1..22: note = chemically synthesized
  source 1..22: mol_type = other DNA
gtaagaaactgtaaactgtctt

SEQ ID NO: 82774 - DNA, 22 bp, synthetic construct
  misc_feature 1..22: note = chemically synthesized
  source 1..22: mol_type = other DNA
taagaaactgtaaactgtcttc

SEQ ID NO: 82775 - DNA, 22 bp, synthetic construct
  misc_feature 1..22: note = chemically synthesized
  source 1..22: mol_type = other DNA
taaactgtcttccaatttggct

SEQ ID NO: 82776 - DNA, 22 bp, synthetic construct
  misc_feature 1..22: note = chemically synthesized
  source 1..22: mol_type = other DNA
tcttccaatttggctgcactat

SEQ ID NO: 82777 - DNA, 22 bp, synthetic construct
  misc_feature 1..22: note = chemically synthesized
  source 1..22: mol_type = other DNA
ccaatttggctgcactatttct

SEQ ID NO: 82778 - DNA, 22 bp, synthetic construct
  misc_feature 1..22: note = chemically synthesized
  source 1..22: mol_type = other DNA
caatttggctgcactatttctc

SEQ ID NO: 82779 - DNA, 22 bp, synthetic construct
  misc_feature 1..22: note = chemically synthesized
  source 1..22: mol_type = other DNA
ggctgcactatttctcatccct

SEQ ID NO: 82780 - DNA, 22 bp, synthetic construct
  misc_feature 1..22: note = chemically synthesized
  source 1..22: mol_type = other DNA
gctgcactatttctcatcccta

SEQ ID NO: 82781 - DNA, 22 bp, synthetic construct
  misc_feature 1..22: note = chemically synthesized
  source 1..22: mol_type = other DNA
cactatttctcatccctacaag

SEQ ID NO: 82782 - DNA, 22 bp, synthetic construct
  misc_feature 1..22: note = chemically synthesized
  source 1..22: mol_type = other DNA
tttctcatccctacaagcaata

SEQ ID NO: 82783 - DNA, 22 bp, synthetic construct
  misc_feature 1..22: note = chemically synthesized
  source 1..22: mol_type = other DNA
ctcatccctacaagcaataagt

SEQ ID NO: 82784 - DNA, 22 bp, synthetic construct
  misc_feature 1..22: note = chemically synthesized
  source 1..22: mol_type = other DNA
tcatccctacaagcaataagtg

SEQ ID NO: 82785 - DNA, 22 bp, synthetic construct
  misc_feature 1..22: note = chemically synthesized
  source 1..22: mol_type = other DNA
atccctacaagcaataagtgag

SEQ ID NO: 82786 - DNA, 22 bp, synthetic construct
  misc_feature 1..22: note = chemically synthesized
  source 1..22: mol_type = other DNA
caagcaataagtgagagttact

SEQ ID NO: 82787 - DNA, 22 bp, synthetic construct
  misc_feature 1..22: note = chemically synthesized
  source 1..22: mol_type = other DNA
ctgttgctccacttcgttgcca

SEQ ID NO: 82788 - DNA, 22 bp, synthetic construct
  misc_feature 1..22: note = chemically synthesized
  source 1..22: mol_type = other DNA
ttgctccacttcgttgccagtg

SEQ ID NO: 82789 - DNA, 22 bp, synthetic construct
  misc_feature 1..22: note = chemically synthesized
  source 1..22: mol_type = other DNA
ctccacttcgttgccagtgttt

SEQ ID NO: 82790 - DNA, 22 bp, synthetic construct
  misc_feature 1..22: note = chemically synthesized
  source 1..22: mol_type = other DNA
cacttcgttgccagtgtttggt

SEQ ID NO: 82791 - DNA, 22 bp, synthetic construct
  misc_feature 1..22: note = chemically synthesized
  source 1..22: mol_type = other DNA
cgttgccagtgtttggtggatg

SEQ ID NO: 82792 - DNA, 22 bp, synthetic construct
  misc_feature 1..22: note = chemically synthesized
  source 1..22: mol_type = other DNA
gttgccagtgtttggtggatgt

SEQ ID NO: 82793 - DNA, 22 bp, synthetic construct
  misc_feature 1..22: note = chemically synthesized
  source 1..22: mol_type = other DNA
ccagtgtttggtggatgtcagt

SEQ ID NO: 82794 - DNA, 22 bp, synthetic construct
  misc_feature 1..22: note = chemically synthesized
  source 1..22: mol_type = other DNA
ggtggatgtcagtattttggaa

SEQ ID NO: 82795 - DNA, 22 bp, synthetic construct
  misc_feature 1..22: note = chemically synthesized
  source 1..22: mol_type = other DNA
gtggatgtcagtattttggaat

SEQ ID NO: 82796 - DNA, 22 bp, synthetic construct
  misc_feature 1..22: note = chemically synthesized
  source 1..22: mol_type = other DNA
tggaatttggccttctaatatg

SEQ ID NO: 82797 - DNA, 22 bp, synthetic construct
  misc_feature 1..22: note = chemically synthesized
  source 1..22: mol_type = other DNA
ggaatttggccttctaatatgt

SEQ ID NO: 82798 - DNA, 22 bp, synthetic construct
  misc_feature 1..22: note = chemically synthesized
  source 1..22: mol_type = other DNA
gaatttggccttctaatatgtg

SEQ ID NO: 82799 - DNA, 22 bp, synthetic construct
  misc_feature 1..22: note = chemically synthesized
  source 1..22: mol_type = other DNA
ggccttctaatatgtgtgtagt

SEQ ID NO: 82800 - DNA, 22 bp, synthetic construct
  misc_feature 1..22: note = chemically synthesized
  source 1..22: mol_type = other DNA
gccttctaatatgtgtgtagtg

SEQ ID NO: 82801 - DNA, 22 bp, synthetic construct
  misc_feature 1..22: note = chemically synthesized
  source 1..22: mol_type = other DNA
ctaatatgtgtgtagtggttgg

SEQ ID NO: 82802 - DNA, 22 bp, synthetic construct
  misc_feature 1..22: note = chemically synthesized
  source 1..22: mol_type = other DNA
taatatgtgtgtagtggttggt

SEQ ID NO: 82803 - DNA, 22 bp, synthetic construct
  misc_feature 1..22: note = chemically synthesized
  source 1..22: mol_type = other DNA
atatgtgtgtagtggttggtat

SEQ ID NO: 82804 - DNA, 22 bp, synthetic construct
  misc_feature 1..22: note = chemically synthesized
  source 1..22: mol_type = other DNA
gtatcttcttgttttaatgtgc

SEQ ID NO: 82805 - DNA, 22 bp, synthetic construct
  misc_feature 1..22: note = chemically synthesized
  source 1..22: mol_type = other DNA
cttgttttaatgtgcagtttct

SEQ ID NO: 82806 - DNA, 22 bp, synthetic construct
  misc_feature 1..22: note = chemically synthesized
  source 1..22: mol_type = other DNA
ttgttttaatgtgcagtttctt

SEQ ID NO: 82807 - DNA, 22 bp, synthetic construct
  misc_feature 1..22: note = chemically synthesized
  source 1..22: mol_type = other DNA
gttttaatgtgcagtttcttaa

SEQ ID NO: 82808 - DNA, 22 bp, synthetic construct
  misc_feature 1..22: note = chemically synthesized
  source 1..22: mol_type = other DNA
ttttaatgtgcagtttcttaat

SEQ ID NO: 82809 - DNA, 22 bp, synthetic construct
  misc_feature 1..22: note = chemically synthesized
  source 1..22: mol_type = other DNA
taatgtgcagtttcttaatgac

SEQ ID NO: 82810 - DNA, 22 bp, synthetic construct
  misc_feature 1..22: note = chemically synthesized
  source 1..22: mol_type = other DNA
aatgtgcagtttcttaatgaca

SEQ ID NO: 82811 - DNA, 22 bp, synthetic construct
  misc_feature 1..22: note = chemically synthesized
  source 1..22: mol_type = other DNA
atgtgcagtttcttaatgacat

SEQ ID NO: 82812 - DNA, 22 bp, synthetic construct
  misc_feature 1..22: note = chemically synthesized
  source 1..22: mol_type = other DNA
cttaatgacatgtgttactgag

SEQ ID NO: 82813 - DNA, 22 bp, synthetic construct
  misc_feature 1..22: note = chemically synthesized
  source 1..22: mol_type = other DNA
ttaatgacatgtgttactgagt

SEQ ID NO: 82814 - DNA, 22 bp, synthetic construct
  misc_feature 1..22: note = chemically synthesized
  source 1..22: mol_type = other DNA
aatgacatgtgttactgagtat

SEQ ID NO: 82815 - DNA, 22 bp, synthetic construct
  misc_feature 1..22: note = chemically synthesized
  source 1..22: mol_type = other DNA
atgacatgtgttactgagtata

SEQ ID NO: 82816 - DNA, 22 bp, synthetic construct
  misc_feature 1..22: note = chemically synthesized
  source 1..22: mol_type = other DNA
ctgagtatattttcatgtgctt

SEQ ID NO: 82817 - DNA, 22 bp, synthetic construct
  misc_feature 1..22: note = chemically synthesized
  source 1..22: mol_type = other DNA
agtatattttcatgtgcttatt

SEQ ID NO: 82818 - DNA, 22 bp, synthetic construct
  misc_feature 1..22: note = chemically synthesized
  source 1..22: mol_type = other DNA
tcatgtgcttattgcaatctat

SEQ ID NO: 82819 - DNA, 22 bp, synthetic construct
  misc_feature 1..22: note = chemically synthesized
  source 1..22: mol_type = other DNA
catgtgcttattgcaatctata

SEQ ID NO: 82820 - DNA, 22 bp, synthetic construct
  misc_feature 1..22: note = chemically synthesized
  source 1..22: mol_type = other DNA
atgtgcttattgcaatctatat

SEQ ID NO: 82821 - DNA, 22 bp, synthetic construct
  misc_feature 1..22: note = chemically synthesized
  source 1..22: mol_type = other DNA
attgcaatctatatatcttctt

SEQ ID NO: 82822 - DNA, 22 bp, synthetic construct
  misc_feature 1..22: note = chemically synthesized
  source 1..22: mol_type = other DNA
ttgcaatctatatatcttcttt

SEQ ID NO: 82823 - DNA, 22 bp, synthetic construct
  misc_feature 1..22: note = chemically synthesized
  source 1..22: mol_type = other DNA
caatctatatatcttctttggt

SEQ ID NO: 82824 - DNA, 22 bp, synthetic construct
  misc_feature 1..22: note = chemically synthesized
  source 1..22: mol_type = other DNA
tatatcttctttggtaaagtgt

SEQ ID NO: 82825 - DNA, 22 bp, synthetic construct
  misc_feature 1..22: note = chemically synthesized
  source 1..22: mol_type = other DNA
ctttggtaaagtgtctgttcag

SEQ ID NO: 82826 - DNA, 22 bp, synthetic construct
  misc_feature 1..22: note = chemically synthesized
  source 1..22: mol_type = other DNA
tttggtaaagtgtctgttcaga

SEQ ID NO: 82827 - DNA, 22 bp, synthetic construct
  misc_feature 1..22: note = chemically synthesized
  source 1..22: mol_type = other DNA
tggtaaagtgtctgttcagatc

SEQ ID NO: 82828 - DNA, 22 bp, synthetic construct
  misc_feature 1..22: note = chemically synthesized
  source 1..22: mol_type = other DNA
ggtaaagtgtctgttcagatct

SEQ ID NO: 82829 - DNA, 22 bp, synthetic construct
  misc_feature 1..22: note = chemically synthesized
  source 1..22: mol_type = other DNA
gtaaagtgtctgttcagatctt

SEQ ID NO: 82830 - DNA, 22 bp, synthetic construct
  misc_feature 1..22: note = chemically synthesized
  source 1..22: mol_type = other DNA
ttcagatcttttgcccactttg

SEQ ID NO: 82831 - DNA, 22 bp, synthetic construct
  misc_feature 1..22: note = chemically synthesized
  source 1..22: mol_type = other DNA
agatcttttgcccactttgcaa

SEQ ID NO: 82832 - DNA, 22 bp, synthetic construct
  misc_feature 1..22: note = chemically synthesized
  source 1..22: mol_type = other DNA
ttgcccactttgcaattggatt

SEQ ID NO: 82833 - DNA, 22 bp, synthetic construct
  misc_feature 1..22: note = chemically synthesized
  source 1..22: mol_type = other DNA
tgcccactttgcaattggattg

SEQ ID NO: 82834 - DNA, 22 bp, synthetic construct
  misc_feature 1..22: note = chemically synthesized
  source 1..22: mol_type = other DNA
gcccactttgcaattggattgt

SEQ ID NO: 82835 - DNA, 22 bp, synthetic construct
  misc_feature 1..22: note = chemically synthesized
  source 1..22: mol_type = other DNA
cccactttgcaattggattgtt

SEQ ID NO: 82836 - DNA, 22 bp, synthetic construct
  misc_feature 1..22: note = chemically synthesized
  source 1..22: mol_type = other DNA
tgcaattggattgtttgttttt

SEQ ID NO: 82837 - DNA, 22 bp, synthetic construct
  misc_feature 1..22: note = chemically synthesized
  source 1..22: mol_type = other DNA
gcaattggattgtttgtttttt

SEQ ID NO: 82838 - DNA, 22 bp, synthetic construct
  misc_feature 1..22: note = chemically synthesized
  source 1..22: mol_type = other DNA
caattggattgtttgtttttta

SEQ ID NO: 82839 - DNA, 22 bp, synthetic construct
  misc_feature 1..22: note = chemically synthesized
  source 1..22: mol_type = other DNA
gattgtttgttttttattgtag

SEQ ID NO: 82840 - DNA, 22 bp, synthetic construct
  misc_feature 1..22: note = chemically synthesized
  source 1..22: mol_type = other DNA
tttgttttttattgtagaattt

SEQ ID NO: 82841 - DNA, 22 bp, synthetic construct
  misc_feature 1..22: note = chemically synthesized
  source 1..22: mol_type = other DNA
gttttttattgtagaattttaa

SEQ ID NO: 82842 - DNA, 22 bp, synthetic construct
  misc_feature 1..22: note = chemically synthesized
  source 1..22: mol_type = other DNA
ttttttattgtagaattttaaa

SEQ ID NO: 82843 - DNA, 22 bp, synthetic construct
  misc_feature 1..22: note = chemically synthesized
  source 1..22: mol_type = other DNA
tttattgtagaattttaaaagt

SEQ ID NO: 82844 - DNA, 22 bp, synthetic construct
  misc_feature 1..22: note = chemically synthesized
  source 1..22: mol_type = other DNA
ttattgtagaattttaaaagtt

SEQ ID NO: 82845 - DNA, 22 bp, synthetic construct
  misc_feature 1..22: note = chemically synthesized
  source 1..22: mol_type = other DNA
tattgtagaattttaaaagttc

SEQ ID NO: 82846 - DNA, 22 bp, synthetic construct
  misc_feature 1..22: note = chemically synthesized
  source 1..22: mol_type = other DNA
attgtagaattttaaaagttct

SEQ ID NO: 82847 - DNA, 22 bp, synthetic construct
  misc_feature 1..22: note = chemically synthesized
  source 1..22: mol_type = other DNA
ttgtagaattttaaaagttctt

SEQ ID NO: 82848 - DNA, 22 bp, synthetic construct
  misc_feature 1..22: note = chemically synthesized
  source 1..22: mol_type = other DNA
tagaattttaaaagttctttgt

SEQ ID NO: 82849 - DNA, 22 bp, synthetic construct
  misc_feature 1..22: note = chemically synthesized
  source 1..22: mol_type = other DNA
taaaagttctttgtataatatg

SEQ ID NO: 82850 - DNA, 22 bp, synthetic construct
  misc_feature 1..22: note = chemically synthesized
  source 1..22: mol_type = other DNA
aaaagttctttgtataatatgt

SEQ ID NO: 82851 - DNA, 22 bp, synthetic construct
  misc_feature 1..22: note = chemically synthesized
  source 1..22: mol_type = other DNA
aaagttctttgtataatatgta

SEQ ID NO: 82852 - DNA, 22 bp, synthetic construct
  misc_feature 1..22: note = chemically synthesized
  source 1..22: mol_type = other DNA
tttgtataatatgtatacaagt

SEQ ID NO: 82853 - DNA, 22 bp, synthetic construct
  misc_feature 1..22: note = chemically synthesized
  source 1..22: mol_type = other DNA
tgtataatatgtatacaagtcc

SEQ ID NO: 82854 - DNA, 22 bp, synthetic construct
  misc_feature 1..22: note = chemically synthesized
  source 1..22: mol_type = other DNA
gtataatatgtatacaagtcct

SEQ ID NO: 82855 - DNA, 22 bp, synthetic construct
  misc_feature 1..22: note = chemically synthesized
  source 1..22: mol_type = other DNA
tataatatgtatacaagtcctt

SEQ ID NO: 82856 - DNA, 22 bp, synthetic construct
  misc_feature 1..22: note = chemically synthesized
  source 1..22: mol_type = other DNA
tatcagataatatgttttgcaa

SEQ ID NO: 82857 - DNA, 22 bp, synthetic construct
  misc_feature 1..22: note = chemically synthesized
  source 1..22: mol_type = other DNA
atcagataatatgttttgcaaa

SEQ ID NO: 82858 - DNA, 22 bp, synthetic construct
  misc_feature 1..22: note = chemically synthesized
  source 1..22: mol_type = other DNA
tcagataatatgttttgcaaat

SEQ ID NO: 82859 - DNA, 22 bp, synthetic construct
  misc_feature 1..22: note = chemically synthesized
  source 1..22: mol_type = other DNA
tgcaaatatgttctctgtggct

SEQ ID NO: 82860 - DNA, 22 bp, synthetic construct
  misc_feature 1..22: note = chemically synthesized
  source 1..22: mol_type = other DNA
gcaaatatgttctctgtggctt

SEQ ID NO: 82861 - DNA, 22 bp, synthetic construct
  misc_feature 1..22: note = chemically synthesized
  source 1..22: mol_type = other DNA
caaatatgttctctgtggcttg

SEQ ID NO: 82862 - DNA, 22 bp, synthetic construct
  misc_feature 1..22: note = chemically synthesized
  source 1..22: mol_type = other DNA
tctgtggcttgtttttttcatt

SEQ ID NO: 82863 - DNA, 22 bp, synthetic construct
  misc_feature 1..22: note = chemically synthesized
  source 1..22: mol_type = other DNA
tgtggcttgtttttttcattct

SEQ ID NO: 82864 - DNA, 22 bp, synthetic construct
  misc_feature 1..22: note = chemically synthesized
  source 1..22: mol_type = other DNA
tggcttgtttttttcattctct

SEQ ID NO: 82865 - DNA, 22 bp, synthetic construct
  misc_feature 1..22: note = chemically synthesized
  source 1..22: mol_type = other DNA
gtttttttcattctcttaactt

SEQ ID NO: 82866 - DNA, 22 bp, synthetic construct
  misc_feature 1..22: note = chemically synthesized
  source 1..22: mol_type = other DNA
tttttttcattctcttaactta

SEQ ID NO: 82867 - DNA, 22 bp, synthetic construct
  misc_feature 1..22: note = chemically synthesized
  source 1..22: mol_type = other DNA
ttttcattctcttaacttacca

SEQ ID NO: 82868 - DNA, 22 bp, synthetic construct
  misc_feature 1..22: note = chemically synthesized
  source 1..22: mol_type = other DNA
tttcattctcttaacttaccat

SEQ ID NO: 82869 - DNA, 22 bp, synthetic construct
  misc_feature 1..22: note = chemically synthesized
  source 1..22: mol_type = other DNA
ttcattctcttaacttaccatg

SEQ ID NO: 82870 - DNA, 22 bp, synthetic construct
  misc_feature 1..22: note = chemically synthesized
  source 1..22: mol_type = other DNA
tcattctcttaacttaccatga

SEQ ID NO: 82871 - DNA, 22 bp, synthetic construct
  misc_feature 1..22: note = chemically synthesized
  source 1..22: mol_type = other DNA
cattctcttaacttaccatgaa

SEQ ID NO: 82872 - DNA, 22 bp, synthetic construct
  misc_feature 1..22: note = chemically synthesized
  source 1..22: mol_type = other DNA
attctcttaacttaccatgaat

SEQ ID NO: 82873 - DNA, 22 bp, synthetic construct
  misc_feature 1..22: note = chemically synthesized
  source 1..22: mol_type = other DNA
tcttaacttaccatgaattttt

SEQ ID NO: 82874 - DNA, 22 bp, synthetic construct
  misc_feature 1..22: note = chemically synthesized
  source 1..22: mol_type = other DNA
ttaacttaccatgaatttttat

SEQ ID NO: 82875 - DNA, 22 bp, synthetic construct
  misc_feature 1..22: note = chemically synthesized
  source 1..22: mol_type = other DNA
aacttaccatgaatttttattt

SEQ ID NO: 82876 - DNA, 22 bp, synthetic construct
  misc_feature 1..22: note = chemically synthesized
  source 1..22: mol_type = other DNA
acttaccatgaatttttatttt

SEQ ID NO: 82877 - DNA, 22 bp, synthetic construct
  misc_feature 1..22: note = chemically synthesized
  source 1..22: mol_type = other DNA
accatgaatttttattttattt

SEQ ID NO: 82878 - DNA, 22 bp, synthetic construct
  misc_feature 1..22: note = chemically synthesized
  source 1..22: mol_type = other DNA
ccatgaatttttattttatttt

SEQ ID NO: 82879 - DNA, 22 bp, synthetic construct
  misc_feature 1..22: note = chemically synthesized
  source 1..22: mol_type = other DNA
ttattttattttattttgttct

SEQ ID NO: 82880 - DNA, 22 bp, synthetic construct
  misc_feature 1..22: note = chemically synthesized
  source 1..22: mol_type = other DNA
tattttattttattttgttctg

SEQ ID NO: 82881 - DNA, 22 bp, synthetic construct
  misc_feature 1..22: note = chemically synthesized
  source 1..22: mol_type = other DNA
attttattttattttgttctgg

SEQ ID NO: 82882 - DNA, 22 bp, synthetic construct
  misc_feature 1..22: note = chemically synthesized
  source 1..22: mol_type = other DNA
ttttattttattttgttctggg

SEQ ID NO: 82883 - DNA, 22 bp, synthetic construct
  misc_feature 1..22: note = chemically synthesized
  source 1..22: mol_type = other DNA
tattttattttgttctgggtat

SEQ ID NO: 82884 - DNA, 22 bp, synthetic construct
  misc_feature 1..22: note = chemically synthesized
  source 1..22: mol_type = other DNA
attttattttgttctgggtatt

SEQ ID NO: 82885 - DNA, 22 bp, synthetic construct
  misc_feature 1..22: note = chemically synthesized
  source 1..22: mol_type = other DNA
ttttattttgttctgggtattt

SEQ ID NO: 82886 - DNA, 22 bp, synthetic construct
  misc_feature 1..22: note = chemically synthesized
  source 1..22: mol_type = other DNA
tattttgttctgggtattttgt

SEQ ID NO: 82887 - DNA, 22 bp, synthetic construct
  misc_feature 1..22: note = chemically synthesized
  source 1..22: mol_type = other DNA
attttgttctgggtattttgtg

SEQ ID NO: 82888 - DNA, 22 bp, synthetic construct
  misc_feature 1..22: note = chemically synthesized
  source 1..22: mol_type = other DNA
ttttgttctgggtattttgtgg

SEQ ID NO: 82889 - DNA, 22 bp, synthetic construct
  misc_feature 1..22: note = chemically synthesized
  source 1..22: mol_type = other DNA
tgttctgggtattttgtggata

SEQ ID NO: 82890 - DNA, 22 bp, synthetic construct
  misc_feature 1..22: note = chemically synthesized
  source 1..22: mol_type = other DNA
gttctgggtattttgtggatac

SEQ ID NO: 82891 - DNA, 22 bp, synthetic construct
  misc_feature 1..22: note = chemically synthesized
  source 1..22: mol_type = other DNA
ttctgggtattttgtggatact

SEQ ID NO: 82892 - DNA, 22 bp, synthetic construct
  misc_feature 1..22: note = chemically synthesized
  source 1..22: mol_type = other DNA
tgggtattttgtggatactctc

SEQ ID NO: 82893 - DNA, 22 bp, synthetic construct
  misc_feature 1..22: note = chemically synthesized
  source 1..22: mol_type = other DNA
ggtattttgtggatactctcaa

SEQ ID NO: 82894 - DNA, 22 bp, synthetic construct
  misc_feature 1..22: note = chemically synthesized
  source 1..22: mol_type = other DNA
tgtggatactctcaatttcaac

SEQ ID NO: 82895 - DNA, 22 bp, synthetic construct
  misc_feature 1..22: note = chemically synthesized
  source 1..22: mol_type = other DNA
gtggatactctcaatttcaact

SEQ ID NO: 82896 - DNA, 22 bp, synthetic construct
  misc_feature 1..22: note = chemically synthesized
  source 1..22: mol_type = other DNA
tggatactctcaatttcaactg

SEQ ID NO: 82897 - DNA, 22 bp, synthetic construct
  misc_feature 1..22: note = chemically synthesized
  source 1..22: mol_type = other DNA
tcaatttcaactgctgtgttct

SEQ ID NO: 82898 - DNA, 22 bp, synthetic construct
  misc_feature 1..22: note = chemically synthesized
  source 1..22: mol_type = other DNA
aatttcaactgctgtgttcttt

SEQ ID NO: 82899 - DNA, 22 bp, synthetic construct
  misc_feature 1..22: note = chemically synthesized
  source 1..22: mol_type = other DNA
caactgctgtgttcttttgttc

SEQ ID NO: 82900 - DNA, 22 bp, synthetic construct
  misc_feature 1..22: note = chemically synthesized
  source 1..22: mol_type = other DNA
aactgctgtgttcttttgttca

SEQ ID NO: 82901 - DNA, 22 bp, synthetic construct
  misc_feature 1..22: note = chemically synthesized
  source 1..22: mol_type = other DNA
ctgtgttcttttgttcagaaaa

SEQ ID NO: 82902 - DNA, 22 bp, synthetic construct
  misc_feature 1..22: note = chemically synthesized
  source 1..22: mol_type = other DNA
tgttcttttgttcagaaaattg

SEQ ID NO: 82903 - DNA, 22 bp, synthetic construct
  misc_feature 1..22: note = chemically synthesized
  source 1..22: mol_type = other DNA
ttttgttcagaaaattgtcttg

SEQ ID NO: 82904 - DNA, 22 bp, synthetic construct
  misc_feature 1..22: note = chemically synthesized
  source 1..22: mol_type = other DNA
ttgttcagaaaattgtcttgta

SEQ ID NO: 82905 - DNA, 22 bp, synthetic construct
  misc_feature 1..22: note = chemically synthesized
  source 1..22: mol_type = other DNA
tgttcagaaaattgtcttgtat

SEQ ID NO: 82906 - DNA, 22 bp, synthetic construct
  misc_feature 1..22: note = chemically synthesized
  source 1..22: mol_type = other DNA
gttcagaaaattgtcttgtatt

SEQ ID NO: 82907 - DNA, 22 bp, synthetic construct
  misc_feature 1..22: note = chemically synthesized
  source 1..22: mol_type = other DNA
ttcagaaaattgtcttgtattg

SEQ ID NO: 82908 - DNA, 22 bp, synthetic construct
  misc_feature 1..22: note = chemically synthesized
  source 1..22: mol_type = other DNA
agaaaattgtcttgtattgatc

SEQ ID NO: 82909 - DNA, 22 bp, synthetic construct
  misc_feature 1..22: note = chemically synthesized
  source 1..22: mol_type = other DNA
tcttgtattgatctctagtaag

SEQ ID NO: 82910 - DNA, 22 bp, synthetic construct
  misc_feature 1..22: note = chemically synthesized
  source 1..22: mol_type = other DNA
gtattgatctctagtaagttcc

SEQ ID NO: 82911 - DNA, 22 bp, synthetic construct
  misc_feature 1..22: note = chemically synthesized
  source 1..22: mol_type = other DNA
tattgatctctagtaagttcct

SEQ ID NO: 82912 - DNA, 22 bp, synthetic construct
  misc_feature 1..22: note = chemically synthesized
  source 1..22: mol_type = other DNA
atctctagtaagttccttctac

SEQ ID NO: 82913 - DNA, 22 bp, synthetic construct
  misc_feature 1..22: note = chemically synthesized
  source 1..22: mol_type = other DNA
tagtaagttccttctacatgtt

SEQ ID NO: 82914 - DNA, 22 bp, synthetic construct
  misc_feature 1..22: note = chemically synthesized
  source 1..22: mol_type = other DNA
gtaagttccttctacatgttct

SEQ ID NO: 82915 - DNA, 22 bp, synthetic construct
  misc_feature 1..22: note = chemically synthesized
  source 1..22: mol_type = other DNA
cttctacatgttctattttcac

SEQ ID NO: 82916 - DNA, 22 bp, synthetic construct
  misc_feature 1..22: note = chemically synthesized
  source 1..22: mol_type = other DNA
ctacatgttctattttcactct

SEQ ID NO: 82917 - DNA, 22 bp, synthetic construct
  misc_feature 1..22: note = chemically synthesized
  source 1..22: mol_type = other DNA
tacatgttctattttcactctc

SEQ ID NO: 82918 - DNA, 22 bp, synthetic construct
  misc_feature 1..22: note = chemically synthesized
  source 1..22: mol_type = other DNA
catgttctattttcactctctc

SEQ ID NO: 82919 - DNA, 22 bp, synthetic construct
  misc_feature 1..22: note = chemically synthesized
  source 1..22: mol_type = other DNA
tattttcactctctcctgaact

SEQ ID NO: 82920 - DNA, 22 bp, synthetic construct
  misc_feature 1..22: note = chemically synthesized
  source 1..22: mol_type = other DNA
ttttcactctctcctgaactcc

SEQ ID NO: 82921 - DNA, 22 bp, synthetic construct
  misc_feature 1..22: note = chemically synthesized
  source 1..22: mol_type = other DNA
tcactctctcctgaactccagt

SEQ ID NO: 82922 - DNA, 22 bp, synthetic construct
  misc_feature 1..22: note = chemically synthesized
  source 1..22: mol_type = other DNA
cactctctcctgaactccagtt

SEQ ID NO: 82923 - DNA, 22 bp, synthetic construct
  misc_feature 1..22: note = chemically synthesized
  source 1..22: mol_type = other DNA
actctctcctgaactccagtta

SEQ ID NO: 82924 - DNA, 22 bp, synthetic construct
  misc_feature 1..22: note = chemically synthesized
  source 1..22: mol_type = other DNA
tctcctgaactccagttaagat

SEQ ID NO: 82925 - DNA, 22 bp, synthetic construct
  misc_feature 1..22: note = chemically synthesized
  source 1..22: mol_type = other DNA
tcctgaactccagttaagattt

SEQ ID NO: 82926 - DNA, 22 bp, synthetic construct
  misc_feature 1..22: note = chemically synthesized
  source 1..22: mol_type = other DNA
ctgaactccagttaagattttg

SEQ ID NO: 82927 - DNA, 22 bp, synthetic construct
  misc_feature 1..22: note = chemically synthesized
  source 1..22: mol_type = other DNA
aactccagttaagattttggag

SEQ ID NO: 82928 - DNA, 22 bp, synthetic construct
  misc_feature 1..22: note = chemically synthesized
  source 1..22: mol_type = other DNA
cagttaagattttggagttcct

SEQ ID NO: 82929 - DNA, 22 bp, synthetic construct
  misc_feature 1..22: note = chemically synthesized
  source 1..22: mol_type = other DNA
agattttggagttcctgacttc

SEQ ID NO: 82930 - DNA, 22 bp, synthetic construct
  misc_feature 1..22: note = chemically synthesized
  source 1..22: mol_type = other DNA
tggagttcctgacttcacccta

SEQ ID NO: 82931 - DNA, 22 bp, synthetic construct
  misc_feature 1..22: note = chemically synthesized
  source 1..22: mol_type = other DNA
ggagttcctgacttcaccctat

SEQ ID NO: 82932 - DNA, 22 bp, synthetic construct
  misc_feature 1..22: note = chemically synthesized
  source 1..22: mol_type = other DNA
gagttcctgacttcaccctatt

SEQ ID NO: 82933 - DNA, 22 bp, synthetic construct
  misc_feature 1..22: note = chemically synthesized
  source 1..22: mol_type = other DNA
ctgacttcaccctattttttcc

SEQ ID NO: 82934 - DNA, 22 bp, synthetic construct
  misc_feature 1..22: note = chemically synthesized
  source 1..22: mol_type = other DNA
acttcaccctattttttcctcc

SEQ ID NO: 82935 - DNA, 22 bp, synthetic construct
  misc_feature 1..22: note = chemically synthesized
  source 1..22: mol_type = other DNA
caccctattttttcctccatgc

SEQ ID NO: 82936 - DNA, 22 bp, synthetic construct
  misc_feature 1..22: note = chemically synthesized
  source 1..22: mol_type = other DNA
accctattttttcctccatgcc

SEQ ID NO: 82937 - DNA, 22 bp, synthetic construct
  misc_feature 1..22: note = chemically synthesized
  source 1..22: mol_type = other DNA
ttttttcctccatgccccccat

SEQ ID NO: 82938 - DNA, 22 bp, synthetic construct
  misc_feature 1..22: note = chemically synthesized
  source 1..22: mol_type = other DNA
tttcctccatgccccccatatt

SEQ ID NO: 82939 - DNA, 22 bp, synthetic construct
  misc_feature 1..22: note = chemically synthesized
  source 1..22: mol_type = other DNA
ttcctccatgccccccatattt

SEQ ID NO: 82940 - DNA, 22 bp, synthetic construct
  misc_feature 1..22: note = chemically synthesized
  source 1..22: mol_type = other DNA
tcctccatgccccccatattta

SEQ ID NO: 82941 - DNA, 22 bp, synthetic construct
  misc_feature 1..22: note = chemically synthesized
  source 1..22: mol_type = other DNA
cctccatgccccccatatttat

SEQ ID NO: 82942 - DNA, 22 bp, synthetic construct
  misc_feature 1..22: note = chemically synthesized
  source 1..22: mol_type = other DNA
ctccatgccccccatatttatt

SEQ ID NO: 82943 - DNA, 22 bp, synthetic construct
  misc_feature 1..22: note = chemically synthesized
  source 1..22: mol_type = other DNA
catgccccccatatttattcct

SEQ ID NO: 82944 - DNA, 22 bp, synthetic construct
  misc_feature 1..22: note = chemically synthesized
  source 1..22: mol_type = other DNA
attcctttgtcctttttttctg

SEQ ID NO: 82945 - DNA, 22 bp, synthetic construct
  misc_feature 1..22: note = chemically synthesized
  source 1..22: mol_type = other DNA
ttcctttgtcctttttttctgc

SEQ ID NO: 82946 - DNA, 22 bp, synthetic construct
  misc_feature 1..22: note = chemically synthesized
  source 1..22: mol_type = other DNA
ctttgtcctttttttctgcact

SEQ ID NO: 82947 - DNA, 22 bp, synthetic construct
  misc_feature 1..22: note = chemically synthesized
  source 1..22: mol_type = other DNA
tgtcctttttttctgcactctt

SEQ ID NO: 82948 - DNA, 22 bp, synthetic construct
  misc_feature 1..22: note = chemically synthesized
  source 1..22: mol_type = other DNA
gtcctttttttctgcactctta

SEQ ID NO: 82949 - DNA, 22 bp, synthetic construct
  misc_feature 1..22: note = chemically synthesized
  source 1..22: mol_type = other DNA
tcctttttttctgcactcttaa

SEQ ID NO: 82950 - DNA, 22 bp, synthetic construct
  misc_feature 1..22: note = chemically synthesized
  source 1..22: mol_type = other DNA
tttttctgcactcttaaatcta

SEQ ID NO: 82951 - DNA, 22 bp, synthetic construct
  misc_feature 1..22: note = chemically synthesized
  source 1..22: mol_type = other DNA
ttttctgcactcttaaatctac

SEQ ID NO: 82952 - DNA, 22 bp, synthetic construct
  misc_feature 1..22: note = chemically synthesized
  source 1..22: mol_type = other DNA
tttctgcactcttaaatctact

SEQ ID NO: 82953 - DNA, 22 bp, synthetic construct
  misc_feature 1..22: note = chemically synthesized
  source 1..22: mol_type = other DNA
ttctgcactcttaaatctactt

SEQ ID NO: 82954 - DNA, 22 bp, synthetic construct
  misc_feature 1..22: note = chemically synthesized
  source 1..22: mol_type = other DNA
tctgcactcttaaatctacttc

SEQ ID NO: 82955 - DNA, 22 bp, synthetic construct
  misc_feature 1..22: note = chemically synthesized
  source 1..22: mol_type = other DNA
ctgcactcttaaatctacttcc

SEQ ID NO: 82956 - DNA, 22 bp, synthetic construct
  misc_feature 1..22: note = chemically synthesized
  source 1..22: mol_type = other DNA
tgcactcttaaatctacttcct

SEQ ID NO: 82957 - DNA, 22 bp, synthetic construct
  misc_feature 1..22: note = chemically synthesized
  source 1..22: mol_type = other DNA
cactcttaaatctacttcctgt

SEQ ID NO: 82958 - DNA, 22 bp, synthetic construct
  misc_feature 1..22: note = chemically synthesized
  source 1..22: mol_type = other DNA
ttaaatctacttcctgtccccc

SEQ ID NO: 82959 - DNA, 22 bp, synthetic construct
  misc_feature 1..22: note = chemically synthesized
  source 1..22: mol_type = other DNA
aaatctacttcctgtccccctt

SEQ ID NO: 82960 - DNA, 22 bp, synthetic construct
  misc_feature 1..22: note = chemically synthesized
  source 1..22: mol_type = other DNA
aatctacttcctgtccccctta

SEQ ID NO: 82961 - DNA, 22 bp, synthetic construct
  misc_feature 1..22: note = chemically synthesized
  source 1..22: mol_type = other DNA
cttcctgtcccccttattggct

SEQ ID NO: 82962 - DNA, 22 bp, synthetic construct
  misc_feature 1..22: note = chemically synthesized
  source 1..22: mol_type = other DNA
cctgtcccccttattggctact

SEQ ID NO: 82963 - DNA, 22 bp, synthetic construct
  misc_feature 1..22: note = chemically synthesized
  source 1..22: mol_type = other DNA
ctgtcccccttattggctactt

SEQ ID NO: 82964 - DNA, 22 bp, synthetic construct
  misc_feature 1..22: note = chemically synthesized
  source 1..22: mol_type = other DNA
tcccccttattggctacttcat

SEQ ID NO: 82965 - DNA, 22 bp, synthetic construct
  misc_feature 1..22: note = chemically synthesized
  source 1..22: mol_type = other DNA
attggctacttcatctcatctc

SEQ ID NO: 82966 - DNA, 22 bp, synthetic construct
  misc_feature 1..22: note = chemically synthesized
  source 1..22: mol_type = other DNA
ttggctacttcatctcatctct

SEQ ID NO: 82967 - DNA, 22 bp, synthetic construct
  misc_feature 1..22: note = chemically synthesized
  source 1..22: mol_type = other DNA
gctacttcatctcatctctcat

SEQ ID NO: 82968 - DNA, 22 bp, synthetic construct
  misc_feature 1..22: note = chemically synthesized
  source 1..22: mol_type = other DNA
cttcatctcatctctcatattt

SEQ ID NO: 82969 - DNA, 22 bp, synthetic construct
  misc_feature 1..22: note = chemically synthesized
  source 1..22: mol_type = other DNA
catctcatctctcatatttttg

SEQ ID NO: 82970 - DNA, 22 bp, synthetic construct
  misc_feature 1..22: note = chemically synthesized
  source 1..22: mol_type = other DNA
atctcatctctcatatttttgc

SEQ ID NO: 82971 - DNA, 22 bp, synthetic construct
  misc_feature 1..22: note = chemically synthesized
  source 1..22: mol_type = other DNA
atctctcatatttttgctttat

SEQ ID NO: 82972 - DNA, 22 bp, synthetic construct
  misc_feature 1..22: note = chemically synthesized
  source 1..22: mol_type = other DNA
tcatatttttgctttatttact

SEQ ID NO: 82973 - DNA, 22 bp, synthetic construct
  misc_feature 1..22: note = chemically synthesized
  source 1..22: mol_type = other DNA
atatttttgctttatttactat

SEQ ID NO: 82974 - DNA, 22 bp, synthetic construct
  misc_feature 1..22: note = chemically synthesized
  source 1..22: mol_type = other DNA
ttgctttatttactatttatca

SEQ ID NO: 82975 - DNA, 22 bp, synthetic construct
  misc_feature 1..22: note = chemically synthesized
  source 1..22: mol_type = other DNA
tgctttatttactatttatcat

SEQ ID NO: 82976 - DNA, 22 bp, synthetic construct
  misc_feature 1..22: note = chemically synthesized
  source 1..22: mol_type = other DNA
gctttatttactatttatcatg

SEQ ID NO: 82977 - DNA, 22 bp, synthetic construct
  misc_feature 1..22: note = chemically synthesized
  source 1..22: mol_type = other DNA
ctttatttactatttatcatgc

SEQ ID NO: 82978 - DNA, 22 bp, synthetic construct
  misc_feature 1..22: note = chemically synthesized
  source 1..22: mol_type = other DNA
tatttactatttatcatgccct

SEQ ID NO: 82979 - DNA, 22 bp, synthetic construct
  misc_feature 1..22: note = chemically synthesized
  source 1..22: mol_type = other DNA
atttactatttatcatgccctc

SEQ ID NO: 82980 - DNA, 22 bp, synthetic construct
  misc_feature 1..22: note = chemically synthesized
  source 1..22: mol_type = other DNA
tttactatttatcatgccctct

SEQ ID NO: 82981 - DNA, 22 bp, synthetic construct
  misc_feature 1..22: note = chemically synthesized
  source 1..22: mol_type = other DNA
actatttatcatgccctctatt

SEQ ID NO: 82982 - DNA, 22 bp, synthetic construct
  misc_feature 1..22: note = chemically synthesized
  source 1..22: mol_type = other DNA
ctatttatcatgccctctattt

SEQ ID NO: 82983 - DNA, 22 bp, synthetic construct
  misc_feature 1..22: note = chemically synthesized
  source 1..22: mol_type = other DNA
tttatcatgccctctatttttt

SEQ ID NO: 82984 - DNA, 22 bp, synthetic construct
  misc_feature 1..22: note = chemically synthesized
  source 1..22: mol_type = other DNA
atcatgccctctattttttata

SEQ ID NO: 82985 - DNA, 22 bp, synthetic construct
  misc_feature 1..22: note = chemically synthesized
  source 1..22: mol_type = other DNA
tcatgccctctattttttatac

SEQ ID NO: 82986 - DNA, 22 bp, synthetic construct
  misc_feature 1..22: note = chemically synthesized
  source 1..22: mol_type = other DNA
tattttttatactattctgttc

SEQ ID NO: 82987 - DNA, 22 bp, synthetic construct
  misc_feature 1..22: note = chemically synthesized
  source 1..22: mol_type = other DNA
ttttttatactattctgttcaa

SEQ ID NO: 82988 - DNA, 22 bp, synthetic construct
  misc_feature 1..22: note = chemically synthesized
  source 1..22: mol_type = other DNA
tttatactattctgttcaaata

SEQ ID NO: 82989 - DNA, 22 bp, synthetic construct
  misc_feature 1..22: note = chemically synthesized
  source 1..22: mol_type = other DNA
ttatactattctgttcaaatat

SEQ ID NO: 82990 - DNA, 22 bp, synthetic construct
  misc_feature 1..22: note = chemically synthesized
  source 1..22: mol_type = other DNA
tatactattctgttcaaatatc

SEQ ID NO: 82991 - DNA, 22 bp, synthetic construct
  misc_feature 1..22: note = chemically synthesized
  source 1..22: mol_type = other DNA
atactattctgttcaaatatca

SEQ ID NO: 82992 - DNA, 22 bp, synthetic construct
  misc_feature 1..22: note = chemically synthesized
  source 1..22: mol_type = other DNA
tactattctgttcaaatatcaa

SEQ ID NO: 82993 - DNA, 22 bp, synthetic construct
  misc_feature 1..22: note = chemically synthesized
  source 1..22: mol_type = other DNA
ttctgttcaaatatcaaggatc

SEQ ID NO: 82994 - DNA, 22 bp, synthetic construct
  misc_feature 1..22: note = chemically synthesized
  source 1..22: mol_type = other DNA
tgttcaaatatcaaggatctaa

SEQ ID NO: 82995 - DNA, 22 bp, synthetic construct
  misc_feature 1..22: note = chemically synthesized
  source 1..22: mol_type = other DNA
ttcaaatatcaaggatctaaaa

SEQ ID NO: 82996 - DNA, 22 bp, synthetic construct
  misc_feature 1..22: note = chemically synthesized
  source 1..22: mol_type = other DNA
aaatatcaaggatctaaaatga

SEQ ID NO: 82997 - DNA, 22 bp, synthetic construct
  misc_feature 1..22: note = chemically synthesized
  source 1..22: mol_type = other DNA
aaatgagtggttatttaattaa

SEQ ID NO: 82998 - DNA, 22 bp, synthetic construct
  misc_feature 1..22: note = chemically synthesized
  source 1..22: mol_type = other DNA
tttaattaagaatatttattat

SEQ ID NO: 82999 - DNA, 22 bp, synthetic construct
  misc_feature 1..22: note = chemically synthesized
  source 1..22: mol_type = other DNA
aattaagaatatttattatgca

SEQ ID NO: 83000 - DNA, 22 bp, synthetic construct
  misc_feature 1..22: note = chemically synthesized
  source 1..22: mol_type = other DNA
attaagaatatttattatgcac

SEQ ID NO: 83001 - DNA, 22 bp, synthetic construct
  misc_feature 1..22: note = chemically synthesized
  source 1..22: mol_type = other DNA
agaatatttattatgcacctct

SEQ ID NO: 83002 - DNA, 22 bp, synthetic construct
  misc_feature 1..22: note = chemically synthesized
  source 1..22: mol_type = other DNA
attatgcacctcttttattatt

SEQ ID NO: 83003 - DNA, 22 bp, synthetic construct
  misc_feature 1..22: note = chemically synthesized
  source 1..22: mol_type = other DNA
ttatgcacctcttttattatta

SEQ ID NO: 83004 - DNA, 22 bp, synthetic construct
  misc_feature 1..22: note = chemically synthesized
  source 1..22: mol_type = other DNA
tgcacctcttttattattagct

SEQ ID NO: 83005 - DNA, 22 bp, synthetic construct
  misc_feature 1..22: note = chemically synthesized
  source 1..22: mol_type = other DNA
ttttattattagcttttatttt

SEQ ID NO: 83006 - DNA, 22 bp, synthetic construct
  misc_feature 1..22: note = chemically synthesized
  source 1..22: mol_type = other DNA
ttattattagcttttattttct

SEQ ID NO: 83007 - DNA, 22 bp, synthetic construct
  misc_feature 1..22: note = chemically synthesized
  source 1..22: mol_type = other DNA
tattattagcttttattttctg

SEQ ID NO: 83008 - DNA, 22 bp, synthetic construct
  misc_feature 1..22: note = chemically synthesized
  source 1..22: mol_type = other DNA
attattagcttttattttctgc

SEQ ID NO: 83009 - DNA, 22 bp, synthetic construct
  misc_feature 1..22: note = chemically synthesized
  source 1..22: mol_type = other DNA
ttattagcttttattttctgcc

SEQ ID NO: 83010 - DNA, 22 bp, synthetic construct
  misc_feature 1..22: note = chemically synthesized
  source 1..22: mol_type = other DNA
ttagcttttattttctgccctg

SEQ ID NO: 83011 - DNA, 22 bp, synthetic construct
  misc_feature 1..22: note = chemically synthesized
  source 1..22: mol_type = other DNA
gcttttattttctgccctgaat

SEQ ID NO: 83012 - DNA, 22 bp, synthetic construct
  misc_feature 1..22: note = chemically synthesized
  source 1..22: mol_type = other DNA
ttattttctgccctgaataagc

SEQ ID NO: 83013 - DNA, 22 bp, synthetic construct
  misc_feature 1..22: note = chemically synthesized
  source 1..22: mol_type = other DNA
tattttctgccctgaataagct

SEQ ID NO: 83014 - DNA, 22 bp, synthetic construct
  misc_feature 1..22: note = chemically synthesized
  source 1..22: mol_type = other DNA
attttctgccctgaataagctg

SEQ ID NO: 83015 - DNA, 22 bp, synthetic construct
  misc_feature 1..22: note = chemically synthesized
  source 1..22: mol_type = other DNA
ttttctgccctgaataagctgt

SEQ ID NO: 83016 - DNA, 22 bp, synthetic construct
  misc_feature 1..22: note = chemically synthesized
  source 1..22: mol_type = other DNA
tctgccctgaataagctgtgct

SEQ ID NO: 83017 - DNA, 22 bp, synthetic construct
  misc_feature 1..22: note = chemically synthesized
  source 1..22: mol_type = other DNA
ctgccctgaataagctgtgctc

SEQ ID NO: 83018 - DNA, 22 bp, synthetic construct
  misc_feature 1..22: note = chemically synthesized
  source 1..22: mol_type = other DNA
tgccctgaataagctgtgctcc

SEQ ID NO: 83019 - DNA, 22 bp, synthetic construct
  misc_feature 1..22: note = chemically synthesized
  source 1..22: mol_type = other DNA
ccctgaataagctgtgctccaa

SEQ ID NO: 83020 - DNA, 22 bp, synthetic construct
  misc_feature 1..22: note = chemically synthesized
  source 1..22: mol_type = other DNA
aataagctgtgctccaaataag

SEQ ID NO: 83021 - DNA, 22 bp, synthetic construct
  misc_feature 1..22: note = chemically synthesized
  source 1..22: mol_type = other DNA
tgctccaaataagttttcttta

SEQ ID NO: 83022 - DNA, 22 bp, synthetic construct
  misc_feature 1..22: note = chemically synthesized
  source 1..22: mol_type = other DNA
caaataagttttctttattaaa

SEQ ID NO: 83023 - DNA, 22 bp, synthetic construct
  misc_feature 1..22: note = chemically synthesized
  source 1..22: mol_type = other DNA
tctttattaaaattgattctag

SEQ ID NO: 83024 - DNA, 22 bp, synthetic construct
  misc_feature 1..22: note = chemically synthesized
  source 1..22: mol_type = other DNA
ctttattaaaattgattctagg

SEQ ID NO: 83025 - DNA, 22 bp, synthetic construct
  misc_feature 1..22: note = chemically synthesized
  source 1..22: mol_type = other DNA
tttattaaaattgattctaggt

SEQ ID NO: 83026 - DNA, 22 bp, synthetic construct
  misc_feature 1..22: note = chemically synthesized
  source 1..22: mol_type = other DNA
tattaaaattgattctaggtat

SEQ ID NO: 83027 - DNA, 22 bp, synthetic construct
  misc_feature 1..22: note = chemically synthesized
  source 1..22: mol_type = other DNA
attaaaattgattctaggtatg

SEQ ID NO: 83028 - DNA, 22 bp, synthetic construct
  misc_feature 1..22: note = chemically synthesized
  source 1..22: mol_type = other DNA
ttaaaattgattctaggtatgt

SEQ ID NO: 83029 - DNA, 22 bp, synthetic construct
  misc_feature 1..22: note = chemically synthesized
  source 1..22: mol_type = other DNA
aaattgattctaggtatgtaat

SEQ ID NO: 83030 - DNA, 22 bp, synthetic construct
  misc_feature 1..22: note = chemically synthesized
  source 1..22: mol_type = other DNA
attctaggtatgtaatttttgt

SEQ ID NO: 83031 - DNA, 22 bp, synthetic construct
  misc_feature 1..22: note = chemically synthesized
  source 1..22: mol_type = other DNA
taggtatgtaatttttgtgttg

SEQ ID NO: 83032 - DNA, 22 bp, synthetic construct
  misc_feature 1..22: note = chemically synthesized
  source 1..22: mol_type = other DNA
ggtatgtaatttttgtgttggt

SEQ ID NO: 83033 - DNA, 22 bp, synthetic construct
  misc_feature 1..22: note = chemically synthesized
  source 1..22: mol_type = other DNA
ttgtgttggtggacttaattgc

SEQ ID NO: 83034 - DNA, 22 bp, synthetic construct
  misc_feature 1..22: note = chemically synthesized
  source 1..22: mol_type = other DNA
tgtgttggtggacttaattgca

SEQ ID NO: 83035 - DNA, 22 bp, synthetic construct
  misc_feature 1..22: note = chemically synthesized
  source 1..22: mol_type = other DNA
gtgttggtggacttaattgcat

SEQ ID NO: 83036 - DNA, 22 bp, synthetic construct
  misc_feature 1..22: note = chemically synthesized
  source 1..22: mol_type = other DNA
tgttggtggacttaattgcatt

SEQ ID NO: 83037 - DNA, 22 bp, synthetic construct
  misc_feature 1..22: note = chemically synthesized
  source 1..22: mol_type = other DNA
gtggacttaattgcattcctga

SEQ ID NO: 83038 - DNA, 22 bp, synthetic construct
  misc_feature 1..22: note = chemically synthesized
  source 1..22: mol_type = other DNA
aattgcattcctgataatcttt

SEQ ID NO: 83039 - DNA, 22 bp, synthetic construct
  misc_feature 1..22: note = chemically synthesized
  source 1..22: mol_type = other DNA
attgcattcctgataatctttg

SEQ ID NO: 83040 - DNA, 22 bp, synthetic construct
  misc_feature 1..22: note = chemically synthesized
  source 1..22: mol_type = other DNA
cattcctgataatctttgtcca

SEQ ID NO: 83041 - DNA, 22 bp, synthetic construct
  misc_feature 1..22: note = chemically synthesized
  source 1..22: mol_type = other DNA
ctgataatctttgtccatcctt

SEQ ID NO: 83042 - DNA, 22 bp, synthetic construct
  misc_feature 1..22: note = chemically synthesized
  source 1..22: mol_type = other DNA
ataatctttgtccatccttctg

SEQ ID NO: 83043 - DNA, 22 bp, synthetic construct
  misc_feature 1..22: note = chemically synthesized
  source 1..22: mol_type = other DNA
tgtccatccttctgtgtccgga

SEQ ID NO: 83044 - DNA, 22 bp, synthetic construct
  misc_feature 1..22: note = chemically synthesized
  source 1..22: mol_type = other DNA
gtccatccttctgtgtccggaa

SEQ ID NO: 83045 - DNA, 22 bp, synthetic construct
  misc_feature 1..22: note = chemically synthesized
  source 1..22: mol_type = other DNA
tccatccttctgtgtccggaat

SEQ ID NO: 83046 - DNA, 22 bp, synthetic construct
  misc_feature 1..22: note = chemically synthesized
  source 1..22: mol_type = other DNA
ctgtgtccggaattggtgggtt

SEQ ID NO: 83047 - DNA, 22 bp, synthetic construct
  misc_feature 1..22: note = chemically synthesized
  source 1..22: mol_type = other DNA
tgtgtccggaattggtgggttc

SEQ ID NO: 83048 - DNA, 22 bp, synthetic construct
  misc_feature 1..22: note = chemically synthesized
  source 1..22: mol_type = other DNA
tgtccggaattggtgggttctt

SEQ ID NO: 83049 - DNA, 22 bp, synthetic construct
  misc_feature 1..22: note = chemically synthesized
  source 1..22: mol_type = other DNA
gtgggttcttggtctcgctgac

SEQ ID NO: 83050 - DNA, 22 bp, synthetic construct
  misc_feature 1..22: note = chemically synthesized
  source 1..22: mol_type = other DNA
ttggtctcgctgacttaaagaa

SEQ ID NO: 83051 - DNA, 22 bp, synthetic construct
  misc_feature 1..22: note = chemically synthesized
  source 1..22: mol_type = other DNA
ggtctcgctgacttaaagaatg

SEQ ID NO: 83052 - DNA, 22 bp, synthetic construct
  misc_feature 1..22: note = chemically synthesized
  source 1..22: mol_type = other DNA
gtctcgctgacttaaagaatga

SEQ ID NO: 83053 - DNA, 22 bp, synthetic construct
  misc_feature 1..22: note = chemically synthesized
  source 1..22: mol_type = other DNA
gctgacttaaagaatgaagccg

SEQ ID NO: 83054 - DNA, 22 bp, synthetic construct
  misc_feature 1..22: note = chemically synthesized
  source 1..22: mol_type = other DNA
acttaaagaatgaagccgcgaa

SEQ ID NO: 83055 - DNA, 22 bp, synthetic construct
  misc_feature 1..22: note = chemically synthesized
  source 1..22: mol_type = other DNA
aaagaatgaagccgcgaaccct

SEQ ID NO: 83056 - DNA, 22 bp, synthetic construct
  misc_feature 1..22: note = chemically synthesized
  source 1..22: mol_type = other DNA
aagaatgaagccgcgaaccctc

SEQ ID NO: 83057 - DNA, 22 bp, synthetic construct
  misc_feature 1..22: note = chemically synthesized
  source 1..22: mol_type = other DNA
gtggtgagtgttacaattctta

SEQ ID NO: 83058 - DNA, 22 bp, synthetic construct
  misc_feature 1..22: note = chemically synthesized
  source 1..22: mol_type = other DNA
caattcttaaagatggtgtgtt

SEQ ID NO: 83059 - DNA, 22 bp, synthetic construct
  misc_feature 1..22: note = chemically synthesized
  source 1..22: mol_type = other DNA
ttaaagatggtgtgttcaaagg

SEQ ID NO: 83060 - DNA, 22 bp, synthetic construct
  misc_feature 1..22: note = chemically synthesized
  source 1..22: mol_type = other DNA
aaagatggtgtgttcaaaggat

SEQ ID NO: 83061 - DNA, 22 bp, synthetic construct
  misc_feature 1..22: note = chemically synthesized
  source 1..22: mol_type = other DNA
aagatggtgtgttcaaaggatg

SEQ ID NO: 83062 - DNA, 22 bp, synthetic construct
  misc_feature 1..22: note = chemically synthesized
  source 1..22: mol_type = other DNA
aaaggatggtgtgtccaaagtt

SEQ ID NO: 83063 - DNA, 22 bp, synthetic construct
  misc_feature 1..22: note = chemically synthesized
  source 1..22: mol_type = other DNA
gttacttcagatgtgtccagag

SEQ ID NO: 83064 - DNA, 22 bp, synthetic construct
  misc_feature 1..22: note = chemically synthesized
  source 1..22: mol_type = other DNA
ttacttcagatgtgtccagagt

SEQ ID NO: 83065 - DNA, 22 bp, synthetic construct
  misc_feature 1..22: note = chemically synthesized
  source 1..22: mol_type = other DNA
cttcagatgtgtccagagtttc

SEQ ID NO: 83066 - DNA, 22 bp, synthetic construct
  misc_feature 1..22: note = chemically synthesized
  source 1..22: mol_type = other DNA
cagatgtgtccagagtttcttc

SEQ ID NO: 83067 - DNA, 22 bp, synthetic construct
  misc_feature 1..22: note = chemically synthesized
  source 1..22: mol_type = other DNA
agatgtgtccagagtttcttcc

SEQ ID NO: 83068 - DNA, 22 bp, synthetic construct
  misc_feature 1..22: note = chemically synthesized
  source 1..22: mol_type = other DNA
cttccttctggtgtgttcacgg

SEQ ID NO: 83069 - DNA, 22 bp, synthetic construct
  misc_feature 1..22: note = chemically synthesized
  source 1..22: mol_type = other DNA
ttccttctggtgtgttcacggt

SEQ ID NO: 83070 - DNA, 22 bp, synthetic construct
  misc_feature 1..22: note = chemically synthesized
  source 1..22: mol_type = other DNA
ccttctggtgtgttcacggtct

SEQ ID NO: 83071 - DNA, 22 bp, synthetic construct
  misc_feature 1..22: note = chemically synthesized
  source 1..22: mol_type = other DNA
cttctggtgtgttcacggtctt

SEQ ID NO: 83072 - DNA, 22 bp, synthetic construct
  misc_feature 1..22: note = chemically synthesized
  source 1..22: mol_type = other DNA
ctggtgtgttcacggtcttgct

SEQ ID NO: 83073 - DNA, 22 bp, synthetic construct
  misc_feature 1..22: note = chemically synthesized
  source 1..22: mol_type = other DNA
tggtgtgttcacggtcttgctg

SEQ ID NO: 83074 - DNA, 22 bp, synthetic construct
  misc_feature 1..22: note = chemically synthesized
  source 1..22: mol_type = other DNA
gtgtgttcacggtcttgctggc

SEQ ID NO: 83075 - DNA, 22 bp, synthetic construct
  misc_feature 1..22: note = chemically synthesized
  source 1..22: mol_type = other DNA
acggtcttgctggctccaggag

SEQ ID NO: 83076 - DNA, 22 bp, synthetic construct
  misc_feature 1..22: note = chemically synthesized
  source 1..22: mol_type = other DNA
gctggctccaggagtgaagctg

SEQ ID NO: 83077 - DNA, 22 bp, synthetic construct
  misc_feature 1..22: note = chemically synthesized
  source 1..22: mol_type = other DNA
ctggctccaggagtgaagctgc

SEQ ID NO: 83078 - DNA, 22 bp, synthetic construct
  misc_feature 1..22: note = chemically synthesized
  source 1..22: mol_type = other DNA
gctccaggagtgaagctgcaga

SEQ ID NO: 83079 - DNA, 22 bp, synthetic construct
  misc_feature 1..22: note = chemically synthesized
  source 1..22: mol_type = other DNA
caggagtgaagctgcagacccc

SEQ ID NO: 83080 - DNA, 22 bp, synthetic construct
  misc_feature 1..22: note = chemically synthesized
  source 1..22: mol_type = other DNA
cagacccccacggggagtgtta

SEQ ID NO: 83081 - DNA, 22 bp, synthetic construct
  misc_feature 1..22: note = chemically synthesized
  source 1..22: mol_type = other DNA
cagctcttaaaggcggagcgta

SEQ ID NO: 83082 - DNA, 22 bp, synthetic construct
  misc_feature 1..22: note = chemically synthesized
  source 1..22: mol_type = other DNA
ttaaaggcggagcgtatggagt

SEQ ID NO: 83083 - DNA, 22 bp, synthetic construct
  misc_feature 1..22: note = chemically synthesized
  source 1..22: mol_type = other DNA
aaaggcggagcgtatggagttg

SEQ ID NO: 83084 - DNA, 22 bp, synthetic construct
  misc_feature 1..22: note = chemically synthesized
  source 1..22: mol_type = other DNA
aaggcggagcgtatggagttgc

SEQ ID NO: 83085 - DNA, 22 bp, synthetic construct
  misc_feature 1..22: note = chemically synthesized
  source 1..22: mol_type = other DNA
ctcattcctcctgtcttgggtt

SEQ ID NO: 83086 - DNA, 22 bp, synthetic construct
  misc_feature 1..22: note = chemically synthesized
  source 1..22: mol_type = other DNA
attcctcctgtcttgggttgtt

SEQ ID NO: 83087 - DNA, 22 bp, synthetic construct
  misc_feature 1..22: note = chemically synthesized
  source 1..22: mol_type = other DNA
ctcctgtcttgggttgttcatc

SEQ ID NO: 83088 - DNA, 22 bp, synthetic construct
  misc_feature 1..22: note = chemically synthesized
  source 1..22: mol_type = other DNA
ctgtcttgggttgttcatcccc

SEQ ID NO: 83089 - DNA, 22 bp, synthetic construct
  misc_feature 1..22: note = chemically synthesized
  source 1..22: mol_type = other DNA
tcttgggttgttcatcccccat

SEQ ID NO: 83090 - DNA, 22 bp, synthetic construct
  misc_feature 1..22: note = chemically synthesized
  source 1..22: mol_type = other DNA
gggttgttcatcccccatgctg

SEQ ID NO: 83091 - DNA, 22 bp, synthetic construct
  misc_feature 1..22: note = chemically synthesized
  source 1..22: mol_type = other DNA
ggttgttcatcccccatgctgg

SEQ ID NO: 83092 - DNA, 22 bp, synthetic construct
  misc_feature 1..22: note = chemically synthesized
  source 1..22: mol_type = other DNA
ttcatcccccatgctgggttcg

SEQ ID NO: 83093 - DNA, 22 bp, synthetic construct
  misc_feature 1..22: note = chemically synthesized
  source 1..22: mol_type = other DNA
atcccccatgctgggttcgtgg

SEQ ID NO: 83094 - DNA, 22 bp, synthetic construct
  misc_feature 1..22: note = chemically synthesized
  source 1..22: mol_type = other DNA
ggttcgtggtcttgctggcttc

SEQ ID NO: 83095 - DNA, 22 bp, synthetic construct
  misc_feature 1..22: note = chemically synthesized
  source 1..22: mol_type = other DNA
gtggtcttgctggcttcagaag

SEQ ID NO: 83096 - DNA, 22 bp, synthetic construct
  misc_feature 1..22: note = chemically synthesized
  source 1..22: mol_type = other DNA
gctggcttcagaagtgaagccg

SEQ ID NO: 83097 - DNA, 22 bp, synthetic construct
  misc_feature 1..22: note = chemically synthesized
  source 1..22: mol_type = other DNA
ctggcttcagaagtgaagccgc

SEQ ID NO: 83098 - DNA, 22 bp, synthetic construct
  misc_feature 1..22: note = chemically synthesized
  source 1..22: mol_type = other DNA
gcttcagaagtgaagccgcaga

SEQ ID NO: 83099 - DNA, 22 bp, synthetic construct
  misc_feature 1..22: note = chemically synthesized
  source 1..22: mol_type = other DNA
cagaagtgaagccgcagacctt

SEQ ID NO: 83100 - DNA, 22 bp, synthetic construct
  misc_feature 1..22: note = chemically synthesized
  source 1..22: mol_type = other DNA
agaagtgaagccgcagaccttc

SEQ ID NO: 83101 - DNA, 22 bp, synthetic construct
  misc_feature 1..22: note = chemically synthesized
  source 1..22: mol_type = other DNA
cgcagtgagtgttacagctcat

SEQ ID NO: 83102 - DNA, 22 bp, synthetic construct
  misc_feature 1..22: note = chemically synthesized
  source 1..22: mol_type = other DNA
gcagtgagtgttacagctcata

SEQ ID NO: 83103 - DNA, 22 bp, synthetic construct
  misc_feature 1..22: note = chemically synthesized
  source 1..22: mol_type = other DNA
cagctcataaaggcagcgcgga

SEQ ID NO: 83104 - DNA, 22 bp, synthetic construct
  misc_feature 1..22: note = chemically synthesized
  source 1..22: mol_type = other DNA
ataaaggcagcgcggatccaaa

SEQ ID NO: 83105 - DNA, 22 bp, synthetic construct
  misc_feature 1..22: note = chemically synthesized
  source 1..22: mol_type = other DNA
attgtgaagaataaaagaacaa

SEQ ID NO: 83106 - DNA, 22 bp, synthetic construct
  misc_feature 1..22: note = chemically synthesized
  source 1..22: mol_type = other DNA
ttgtgaagaataaaagaacaaa

SEQ ID NO: 83107 - DNA, 22 bp, synthetic construct
  misc_feature 1..22: note = chemically synthesized
  source 1..22: mol_type = other DNA
tgaagaataaaagaacaaagct

SEQ ID NO: 83108 - DNA, 22 bp, synthetic construct
  misc_feature 1..22: note = chemically synthesized
  source 1..22: mol_type = other DNA
ccacagcatggtagggaaccca

SEQ ID NO: 83109 - DNA, 22 bp, synthetic construct
  misc_feature 1..22: note = chemically synthesized
  source 1..22: mol_type = other DNA
cacagcatggtagggaacccaa

SEQ ID NO: 83110 - DNA, 22 bp, synthetic construct
  misc_feature 1..22: note = chemically synthesized
  source 1..22: mol_type = other DNA
tcacagctggctccggcagcct

SEQ ID NO: 83111 - DNA, 22 bp, synthetic construct
  misc_feature 1..22: note = chemically synthesized
  source 1..22: mol_type = other DNA
gctccggcagcctgcctttatt

SEQ ID NO: 83112 - DNA, 22 bp, synthetic construct
  misc_feature 1..22: note = chemically synthesized
  source 1..22: mol_type = other DNA
cggcagcctgcctttatttcct

SEQ ID NO: 83113 - DNA, 22 bp, synthetic construct
  misc_feature 1..22: note = chemically synthesized
  source 1..22: mol_type = other DNA
cctttatttccttatctgaccc

SEQ ID NO: 83114 - DNA, 22 bp, synthetic construct
  misc_feature 1..22: note = chemically synthesized
  source 1..22: mol_type = other DNA
tatttccttatctgaccccacc

SEQ ID NO: 83115 - DNA, 22 bp, synthetic construct
  misc_feature 1..22: note = chemically synthesized
  source 1..22: mol_type = other DNA
atttccttatctgaccccaccc

SEQ ID NO: 83116 - DNA, 22 bp, synthetic construct
  misc_feature 1..22: note = chemically synthesized
  source 1..22: mol_type = other DNA
tttccttatctgaccccaccca

SEQ ID NO: 83117 - DNA, 22 bp, synthetic construct
  misc_feature 1..22: note = chemically synthesized
  source 1..22: mol_type = other DNA
ccttatctgaccccacccacat

SEQ ID NO: 83118 - DNA, 22 bp, synthetic construct
  misc_feature 1..22: note = chemically synthesized
  source 1..22: mol_type = other DNA
cttatctgaccccacccacatc

SEQ ID NO: 83119 - DNA, 22 bp, synthetic construct
  misc_feature 1..22: note = chemically synthesized
  source 1..22: mol_type = other DNA
atctgaccccacccacatcctg

SEQ ID NO: 83120 - DNA, 22 bp, synthetic construct
  misc_feature 1..22: note = chemically synthesized
  source 1..22: mol_type = other DNA
tctgaccccacccacatcctgc

SEQ ID NO: 83121 - DNA, 22 bp, synthetic construct
  misc_feature 1..22: note = chemically synthesized
  source 1..22: mol_type = other DNA
accccacccacatcctgctgat

SEQ ID NO: 83122 - DNA, 22 bp, synthetic construct
  misc_feature 1..22: note = chemically synthesized
  source 1..22: mol_type = other DNA
ctgattggtccattttacagag

SEQ ID NO: 83123 - DNA, 22 bp, synthetic construct
  misc_feature 1..22: note = chemically synthesized
  source 1..22: mol_type = other DNA
attggtccattttacagagagc

SEQ ID NO: 83124 - DNA, 22 bp, synthetic construct
  misc_feature 1..22: note = chemically synthesized
  source 1..22: mol_type = other DNA
gtccattttacagagagctgat

SEQ ID NO: 83125 - DNA, 22 bp, synthetic construct
  misc_feature 1..22: note = chemically synthesized
  source 1..22: mol_type = other DNA
tacagagagctgattggcccat

SEQ ID NO: 83126 - DNA, 22 bp, synthetic construct
  misc_feature 1..22: note = chemically synthesized
  source 1..22: mol_type = other DNA
acagagagctgattggcccatt

SEQ ID NO: 83127 - DNA, 22 bp, synthetic construct
  misc_feature 1..22: note = chemically synthesized
  source 1..22: mol_type = other DNA
cagagagctgattggcccattt

SEQ ID NO: 83128 - DNA, 22 bp, synthetic construct
  misc_feature 1..22: note = chemically synthesized
  source 1..22: mol_type = other DNA
attggcccattttacagagagc

SEQ ID NO: 83129 - DNA, 22 bp, synthetic construct
  misc_feature 1..22: note = chemically synthesized
  source 1..22: mol_type = other DNA
gcccattttacagagagctggt

SEQ ID NO: 83130 - DNA, 22 bp, synthetic construct
  misc_feature 1..22: note = chemically synthesized
  source 1..22: mol_type = other DNA
tacagagagctggttggtccgt

SEQ ID NO: 83131 - DNA, 22 bp, synthetic construct
  misc_feature 1..22: note = chemically synthesized
  source 1..22: mol_type = other DNA
acagagagctggttggtccgtt

SEQ ID NO: 83132 - DNA, 22 bp, synthetic construct
  misc_feature 1..22: note = chemically synthesized
  source 1..22: mol_type = other DNA
cagagagctggttggtccgttt

SEQ ID NO: 83133 - DNA, 22 bp, synthetic construct
  misc_feature 1..22: note = chemically synthesized
  source 1..22: mol_type = other DNA
gttggtccgttttggcagagtg

SEQ ID NO: 83134 - DNA, 22 bp, synthetic construct
  misc_feature 1..22: note = chemically synthesized
  source 1..22: mol_type = other DNA
gtccgttttggcagagtgctga

SEQ ID NO: 83135 - DNA, 22 bp, synthetic construct
  misc_feature 1..22: note = chemically synthesized
  source 1..22: mol_type = other DNA
tggcagagtgctgattggtgca

SEQ ID NO: 83136 - DNA, 22 bp, synthetic construct
  misc_feature 1..22: note = chemically synthesized
  source 1..22: mol_type = other DNA
ggcagagtgctgattggtgcat

SEQ ID NO: 83137 - DNA, 22 bp, synthetic construct
  misc_feature 1..22: note = chemically synthesized
  source 1..22: mol_type = other DNA
gcagagtgctgattggtgcatt

SEQ ID NO: 83138 - DNA, 22 bp, synthetic construct
  misc_feature 1..22: note = chemically synthesized
  source 1..22: mol_type = other DNA
attggtgcatttacaaaccttg

SEQ ID NO: 83139 - DNA, 22 bp, synthetic construct
  misc_feature 1..22: note = chemically synthesized
  source 1..22: mol_type = other DNA
gtgcatttacaaaccttgagct

SEQ ID NO: 83140 - DNA, 22 bp, synthetic construct
  misc_feature 1..22: note = chemically synthesized
  source 1..22: mol_type = other DNA
acaaaccttgagctagacacag

SEQ ID NO: 83141 - DNA, 22 bp, synthetic construct
  misc_feature 1..22: note = chemically synthesized
  source 1..22: mol_type = other DNA
caaaccttgagctagacacaga

SEQ ID NO: 83142 - DNA, 22 bp, synthetic construct
  misc_feature 1..22: note = chemically synthesized
  source 1..22: mol_type = other DNA
gagctagacacagagtgctgat

SEQ ID NO: 83143 - DNA, 22 bp, synthetic construct
  misc_feature 1..22: note = chemically synthesized
  source 1..22: mol_type = other DNA
agctagacacagagtgctgatt

SEQ ID NO: 83144 - DNA, 22 bp, synthetic construct
  misc_feature 1..22: note = chemically synthesized
  source 1..22: mol_type = other DNA
gacacagagtgctgattagtgc

SEQ ID NO: 83145 - DNA, 22 bp, synthetic construct
  misc_feature 1..22: note = chemically synthesized
  source 1..22: mol_type = other DNA
attagtgcatttacaatccttt

SEQ ID NO: 83146 - DNA, 22 bp, synthetic construct
  misc_feature 1..22: note = chemically synthesized
  source 1..22: mol_type = other DNA
gtgcatttacaatcctttagct

SEQ ID NO: 83147 - DNA, 22 bp, synthetic construct
  misc_feature 1..22: note = chemically synthesized
  source 1..22: mol_type = other DNA
acaatcctttagctagacacaa

SEQ ID NO: 83148 - DNA, 22 bp, synthetic construct
  misc_feature 1..22: note = chemically synthesized
  source 1..22: mol_type = other DNA
caatcctttagctagacacaaa

SEQ ID NO: 83149 - DNA, 22 bp, synthetic construct
  misc_feature 1..22: note = chemically synthesized
  source 1..22: mol_type = other DNA
tagctagacacaaaagttctcc

SEQ ID NO: 83150 - DNA, 22 bp, synthetic construct
  misc_feature 1..22: note = chemically synthesized
  source 1..22: mol_type = other DNA
agctagacacaaaagttctcca

SEQ ID NO: 83151 - DNA, 22 bp, synthetic construct
  misc_feature 1..22: note = chemically synthesized
  source 1..22: mol_type = other DNA
gctagacacaaaagttctccaa

SEQ ID NO: 83152 - DNA, 22 bp, synthetic construct
  misc_feature 1..22: note = chemically synthesized
  source 1..22: mol_type = other DNA
gacacaaaagttctccaagtcc

SEQ ID NO: 83153 - DNA, 22 bp, synthetic construct
  misc_feature 1..22: note = chemically synthesized
  source 1..22: mol_type = other DNA
tccaagtccccactagattagc

SEQ ID NO: 83154 - DNA, 22 bp, synthetic construct
  misc_feature 1..22: note = chemically synthesized
  source 1..22: mol_type = other DNA
caagtccccactagattagcta

SEQ ID NO: 83155 - DNA, 22 bp, synthetic construct
  misc_feature 1..22: note = chemically synthesized
  source 1..22: mol_type = other DNA
gattagctagacacagagcact

SEQ ID NO: 83156 - DNA, 22 bp, synthetic construct
  misc_feature 1..22: note = chemically synthesized
  source 1..22: mol_type = other DNA
gctagacacagagcactgattg

SEQ ID NO: 83157 - DNA, 22 bp, synthetic construct
  misc_feature 1..22: note = chemically synthesized
  source 1..22: mol_type = other DNA
gacacagagcactgattggtgc

SEQ ID NO: 83158 - DNA, 22 bp, synthetic construct
  misc_feature 1..22: note = chemically synthesized
  source 1..22: mol_type = other DNA
attggtgcatttacaaaccttg

SEQ ID NO: 83159 - DNA, 22 bp, synthetic construct
  misc_feature 1..22: note = chemically synthesized
  source 1..22: mol_type = other DNA
gtgcatttacaaaccttgagtt

SEQ ID NO: 83160 - DNA, 22 bp, synthetic construct
  misc_feature 1..22: note = chemically synthesized
  source 1..22: mol_type = other DNA
acaaaccttgagttagacacag

SEQ ID NO: 83161 - DNA, 22 bp, synthetic construct
  misc_feature 1..22: note = chemically synthesized
  source 1..22: mol_type = other DNA
caaaccttgagttagacacaga

SEQ ID NO: 83162 - DNA, 22 bp, synthetic construct
  misc_feature 1..22: note = chemically synthesized
  source 1..22: mol_type = other DNA
gagttagacacagattgctgat

SEQ ID NO: 83163 - DNA, 22 bp, synthetic construct
  misc_feature 1..22: note = chemically synthesized
  source 1..22: mol_type = other DNA
agttagacacagattgctgatt

SEQ ID NO: 83164 - DNA, 22 bp, synthetic construct
  misc_feature 1..22: note = chemically synthesized
  source 1..22: mol_type = other DNA
gacacagattgctgattggtgc

SEQ ID NO: 83165 - DNA, 22 bp, synthetic construct
  misc_feature 1..22: note = chemically synthesized
  source 1..22: mol_type = other DNA
ctgattggtgcatttacaaacc

SEQ ID NO: 83166 - DNA, 22 bp, synthetic construct
  misc_feature 1..22: note = chemically synthesized
  source 1..22: mol_type = other DNA
attggtgcatttacaaaccttt

SEQ ID NO: 83167 - DNA, 22 bp, synthetic construct
  misc_feature 1..22: note = chemically synthesized
  source 1..22: mol_type = other DNA
gtgcatttacaaacctttagct

SEQ ID NO: 83168 - DNA, 22 bp, synthetic construct
  misc_feature 1..22: note = chemically synthesized
  source 1..22: mol_type = other DNA
acaaacctttagctagacatga

SEQ ID NO: 83169 - DNA, 22 bp, synthetic construct
  misc_feature 1..22: note = chemically synthesized
  source 1..22: mol_type = other DNA
caaacctttagctagacatgaa

SEQ ID NO: 83170 - DNA, 22 bp, synthetic construct
  misc_feature 1..22: note = chemically synthesized
  source 1..22: mol_type = other DNA
tagctagacatgaaagttctcc

SEQ ID NO: 83171 - DNA, 22 bp, synthetic construct
  misc_feature 1..22: note = chemically synthesized
  source 1..22: mol_type = other DNA
agctagacatgaaagttctcca

SEQ ID NO: 83172 - DNA, 22 bp, synthetic construct
  misc_feature 1..22: note = chemically synthesized
  source 1..22: mol_type = other DNA
gctagacatgaaagttctccag

SEQ ID NO: 83173 - DNA, 22 bp, synthetic construct
  misc_feature 1..22: note = chemically synthesized
  source 1..22: mol_type = other DNA
gacatgaaagttctccagttcc

SEQ ID NO: 83174 - DNA, 22 bp, synthetic construct
  misc_feature 1..22: note = chemically synthesized
  source 1..22: mol_type = other DNA
tccagttccatatttcatggtg

SEQ ID NO: 83175 - DNA, 22 bp, synthetic construct
  misc_feature 1..22: note = chemically synthesized
  source 1..22: mol_type = other DNA
cagttccatatttcatggtgag

SEQ ID NO: 83176 - DNA, 22 bp, synthetic construct
  misc_feature 1..22: note = chemically synthesized
  source 1..22: mol_type = other DNA
catatttcatggtgaggaacaa

SEQ ID NO: 83177 - DNA, 22 bp, synthetic construct
  misc_feature 1..22: note = chemically synthesized
  source 1..22: mol_type = other DNA
catggtgaggaacaaagaatat

SEQ ID NO: 83178 - DNA, 22 bp, synthetic construct
  misc_feature 1..22: note = chemically synthesized
  source 1..22: mol_type = other DNA
atggtgaggaacaaagaatata

SEQ ID NO: 83179 - DNA, 22 bp, synthetic construct
  misc_feature 1..22: note = chemically synthesized
  source 1..22: mol_type = other DNA
tttgttcctcaccatgaaatat

SEQ ID NO: 83180 - DNA, 22 bp, synthetic construct
  misc_feature 1..22: note = chemically synthesized
  source 1..22: mol_type = other DNA
tgttcctcaccatgaaatatgg

SEQ ID NO: 83181 - DNA, 22 bp, synthetic construct
  misc_feature 1..22: note = chemically synthesized
  source 1..22: mol_type = other DNA
gttcctcaccatgaaatatgga

SEQ ID NO: 83182 - DNA, 22 bp, synthetic construct
  misc_feature 1..22: note = chemically synthesized
  source 1..22: mol_type = other DNA
ttcctcaccatgaaatatggaa

SEQ ID NO: 83183 - DNA, 22 bp, synthetic construct
  misc_feature 1..22: note = chemically synthesized
  source 1..22: mol_type = other DNA
ctcaccatgaaatatggaactg

SEQ ID NO: 83184 - DNA, 22 bp, synthetic construct
  misc_feature 1..22: note = chemically synthesized
  source 1..22: mol_type = other DNA
accatgaaatatggaactggag

SEQ ID NO: 83185 - DNA, 22 bp, synthetic construct
  misc_feature 1..22: note = chemically synthesized
  source 1..22: mol_type = other DNA
gagaactttcatgtctagctaa

SEQ ID NO: 83186 - DNA, 22 bp, synthetic construct
  misc_feature 1..22: note = chemically synthesized
  source 1..22: mol_type = other DNA
tcatgtctagctaaaggtttgt

SEQ ID NO: 83187 - DNA, 22 bp, synthetic construct
  misc_feature 1..22: note = chemically synthesized
  source 1..22: mol_type = other DNA
catgtctagctaaaggtttgta

SEQ ID NO: 83188 - DNA, 22 bp, synthetic construct
  misc_feature 1..22: note = chemically synthesized
  source 1..22: mol_type = other DNA
atgtctagctaaaggtttgtaa

SEQ ID NO: 83189 - DNA, 22 bp, synthetic construct
  misc_feature 1..22: note = chemically synthesized
  source 1..22: mol_type = other DNA
gctaaaggtttgtaaatgcaat

SEQ ID NO: 83190 - DNA, 22 bp, synthetic construct
  misc_feature 1..22: note = chemically synthesized
  source 1..22: mol_type = other DNA
aaggtttgtaaatgcaatttat

SEQ ID NO: 83191 - DNA, 22 bp, synthetic construct
  misc_feature 1..22: note = chemically synthesized
  source 1..22: mol_type = other DNA
gtaaatgcaatttattgcggca

SEQ ID NO: 83192 - DNA, 22 bp, synthetic construct
  misc_feature 1..22: note = chemically synthesized
  source 1..22: mol_type = other DNA
taaatgcaatttattgcggcac

SEQ ID NO: 83193 - DNA, 22 bp, synthetic construct
  misc_feature 1..22: note = chemically synthesized
  source 1..22: mol_type = other DNA
attgcggcactattcacaatag

SEQ ID NO: 83194 - DNA, 22 bp, synthetic construct
  misc_feature 1..22: note = chemically synthesized
  source 1..22: mol_type = other DNA
ttgcggcactattcacaatagc

SEQ ID NO: 83195 - DNA, 22 bp, synthetic construct
  misc_feature 1..22: note = chemically synthesized
  source 1..22: mol_type = other DNA
cggcactattcacaatagcaaa

SEQ ID NO: 83196 - DNA, 22 bp, synthetic construct
  misc_feature 1..22: note = chemically synthesized
  source 1..22: mol_type = other DNA
ttcacaatagcaaagacttgga

SEQ ID NO: 83197 - DNA, 22 bp, synthetic construct
  misc_feature 1..22: note = chemically synthesized
  source 1..22: mol_type = other DNA
acaatagcaaagacttggaacc

SEQ ID NO: 83198 - DNA, 22 bp, synthetic construct
  misc_feature 1..22: note = chemically synthesized
  source 1..22: mol_type = other DNA
ggaaccaacccaaatgtccaac

SEQ ID NO: 83199 - DNA, 22 bp, synthetic construct
  misc_feature 1..22: note = chemically synthesized
  source 1..22: mol_type = other DNA
gaaccaacccaaatgtccaaca

SEQ ID NO: 83200 - DNA, 22 bp, synthetic construct
  misc_feature 1..22: note = chemically synthesized
  source 1..22: mol_type = other DNA
gattaagaaaatgtggcacata

SEQ ID NO: 83201 - DNA, 22 bp, synthetic construct
  misc_feature 1..22: note = chemically synthesized
  source 1..22: mol_type = other DNA
agaaaatgtggcacatacacac

SEQ ID NO: 83202 - DNA, 22 bp, synthetic construct
  misc_feature 1..22: note = chemically synthesized
  source 1..22: mol_type = other DNA
tgcagccataaaaaaggatgag

SEQ ID NO: 83203 - DNA, 22 bp, synthetic construct
  misc_feature 1..22: note = chemically synthesized
  source 1..22: mol_type = other DNA
atgtcctttgtagggacatgga

SEQ ID NO: 83204 - DNA, 22 bp, synthetic construct
  misc_feature 1..22: note = chemically synthesized
  source 1..22: mol_type = other DNA
tgtagggacatggatgaaattg

SEQ ID NO: 83205 - DNA, 22 bp, synthetic construct
  misc_feature 1..22: note = chemically synthesized
  source 1..22: mol_type = other DNA
gtagggacatggatgaaattgg

SEQ ID NO: 83206 - DNA, 22 bp, synthetic construct
  misc_feature 1..22: note = chemically synthesized
  source 1..22: mol_type = other DNA
tagggacatggatgaaattgga

SEQ ID NO: 83207 - DNA, 22 bp, synthetic construct
  misc_feature 1..22: note = chemically synthesized
  source 1..22: mol_type = other DNA
gaaatcatcattctcagtaaac

SEQ ID NO: 83208 - DNA, 22 bp, synthetic construct
  misc_feature 1..22: note = chemically synthesized
  source 1..22: mol_type = other DNA
tcagtaaactatcgcaaggacg

SEQ ID NO: 83209 - DNA, 22 bp, synthetic construct
  misc_feature 1..22: note = chemically synthesized
  source 1..22: mol_type = other DNA
agtaaactatcgcaaggacgaa

SEQ ID NO: 83210 - DNA, 22 bp, synthetic construct
  misc_feature 1..22: note = chemically synthesized
  source 1..22: mol_type = other DNA
tcgcaaggacgaaaaaccaaac

SEQ ID NO: 83211 - DNA, 22 bp, synthetic construct
  misc_feature 1..22: note = chemically synthesized
  source 1..22: mol_type = other DNA
catgttctcactcataggtggg

SEQ ID NO: 83212 - DNA, 22 bp, synthetic construct
  misc_feature 1..22: note = chemically synthesized
  source 1..22: mol_type = other DNA
tcactcataggtgggaattgaa

SEQ ID NO: 83213 - DNA, 22 bp, synthetic construct
  misc_feature 1..22: note = chemically synthesized
  source 1..22: mol_type = other DNA
actcataggtgggaattgaaca

SEQ ID NO: 83214 - DNA, 22 bp, synthetic construct
  misc_feature 1..22: note = chemically synthesized
  source 1..22: mol_type = other DNA
ataggtgggaattgaacaatga

SEQ ID NO: 83215 - DNA, 22 bp, synthetic construct
  misc_feature 1..22: note = chemically synthesized
  source 1..22: mol_type = other DNA
aacaatgagaacacatggacac

SEQ ID NO: 83216 - DNA, 22 bp, synthetic construct
  misc_feature 1..22: note = chemically synthesized
  source 1..22: mol_type = other DNA
tggggactgttgtggggtgggg

SEQ ID NO: 83217 - DNA, 22 bp, synthetic construct
  misc_feature 1..22: note = chemically synthesized
  source 1..22: mol_type = other DNA
gggactgttgtggggtgggggg

SEQ ID NO: 83218 - DNA, 22 bp, synthetic construct
  misc_feature 1..22: note = chemically synthesized
  source 1..22: mol_type = other DNA
ttgtggggtggggggagggagg

SEQ ID NO: 83219 - DNA, 22 bp, synthetic construct
  misc_feature 1..22: note = chemically synthesized
  source 1..22: mol_type = other DNA
tggggtggggggagggaggagg

SEQ ID NO: 83220 - DNA, 22 bp, synthetic construct
  misc_feature 1..22: note = chemically synthesized
  source 1..22: mol_type = other DNA
ggagatatacctaatgctaaat

SEQ ID NO: 83221 - DNA, 22 bp, synthetic construct
  misc_feature 1..22: note = chemically synthesized
  source 1..22: mol_type = other DNA
atgctaaatgatgagttaatgg

SEQ ID NO: 83222 - DNA, 22 bp, synthetic construct
  misc_feature 1..22: note = chemically synthesized
  source 1..22: mol_type = other DNA
aatgatgagttaatgggtgaag

SEQ ID NO: 83223 - DNA, 22 bp, synthetic construct
  misc_feature 1..22: note = chemically synthesized
  source 1..22: mol_type = other DNA
atgggtgaagcacaccagcatg

SEQ ID NO: 83224 - DNA, 22 bp, synthetic construct
  misc_feature 1..22: note = chemically synthesized
  source 1..22: mol_type = other DNA
acctgcacattgtgcacatgta

SEQ ID NO: 83225 - DNA, 22 bp, synthetic construct
  misc_feature 1..22: note = chemically synthesized
  source 1..22: mol_type = other DNA
cacattgtgcacatgtacccta

SEQ ID NO: 83226 - DNA, 22 bp, synthetic construct
  misc_feature 1..22: note = chemically synthesized
  source 1..22: mol_type = other DNA
tgcacatgtaccctaaaactta

SEQ ID NO: 83227 - DNA, 22 bp, synthetic construct
  misc_feature 1..22: note = chemically synthesized
  source 1..22: mol_type = other DNA
aaacttaaagtataataataat

SEQ ID NO: 83228 - DNA, 22 bp, synthetic construct
  misc_feature 1..22: note = chemically synthesized
  source 1..22: mol_type = other DNA
aaagtataataataataaaata

SEQ ID NO: 83229 - DNA, 22 bp, synthetic construct
  misc_feature 1..22: note = chemically synthesized
  source 1..22: mol_type = other DNA
aagtataataataataaaataa

SEQ ID NO: 83230 - DNA, 22 bp, synthetic construct
  misc_feature 1..22: note = chemically synthesized
  source 1..22: mol_type = other DNA
taaaaagagtatagtggggatt

SEQ ID NO: 83231 - DNA, 22 bp, synthetic construct
  misc_feature 1..22: note = chemically synthesized
  source 1..22: mol_type = other DNA
aaaaagagtatagtggggattt

SEQ ID NO: 83232 - DNA, 22 bp, synthetic construct
  misc_feature 1..22: note = chemically synthesized
  source 1..22: mol_type = other DNA
aaaagagtatagtggggatttc

SEQ ID NO: 83233 - DNA, 22 bp, synthetic construct
  misc_feature 1..22: note = chemically synthesized
  source 1..22: mol_type = other DNA
ctatgaacacggtacaattagt

SEQ ID NO: 83234 - DNA, 22 bp, synthetic construct
  misc_feature 1..22: note = chemically synthesized
  source 1..22: mol_type = other DNA
tatgaacacggtacaattagtt

SEQ ID NO: 83235 - DNA, 22 bp, synthetic construct
  misc_feature 1..22: note = chemically synthesized
  source 1..22: mol_type = other DNA
tgaacacggtacaattagttat

SEQ ID NO: 83236 - DNA, 22 bp, synthetic construct
  misc_feature 1..22: note = chemically synthesized
  source 1..22: mol_type = other DNA
gttatctggccagttactttga

SEQ ID NO: 83237 - DNA, 22 bp, synthetic construct
  misc_feature 1..22: note = chemically synthesized
  source 1..22: mol_type = other DNA
tctggccagttactttgaaggc

SEQ ID NO: 83238 - DNA, 22 bp, synthetic construct
  misc_feature 1..22: note = chemically synthesized
  source 1..22: mol_type = other DNA
gccagttactttgaaggctgat

SEQ ID NO: 83239 - DNA, 22 bp, synthetic construct
  misc_feature 1..22: note = chemically synthesized
  source 1..22: mol_type = other DNA
ctttgaaggctgatcagaaaga

SEQ ID NO: 83240 - DNA, 22 bp, synthetic construct
  misc_feature 1..22: note = chemically synthesized
  source 1..22: mol_type = other DNA
tgaaggctgatcagaaagaagc

SEQ ID NO: 83241 - DNA, 22 bp, synthetic construct
  misc_feature 1..22: note = chemically synthesized
  source 1..22: mol_type = other DNA
gaaggctgatcagaaagaagcc

SEQ ID NO: 83242 - DNA, 22 bp, synthetic construct
  misc_feature 1..22: note = chemically synthesized
  source 1..22: mol_type = other DNA
aaggctgatcagaaagaagcct

SEQ ID NO: 83243 - DNA, 22 bp, synthetic construct
  misc_feature 1..22: note = chemically synthesized
  source 1..22: mol_type = other DNA
atcagaaagaagcctagctaat

SEQ ID NO: 83244 - DNA, 22 bp, synthetic construct
  misc_feature 1..22: note = chemically synthesized
  source 1..22: mol_type = other DNA
gctaatccagtaagcgaatact

SEQ ID NO: 83245 - DNA, 22 bp, synthetic construct
  misc_feature 1..22: note = chemically synthesized
  source 1..22: mol_type = other DNA
atccagtaagcgaatactcaaa

SEQ ID NO: 83246 - DNA, 22 bp, synthetic construct
  misc_feature 1..22: note = chemically synthesized
  source 1..22: mol_type = other DNA
aaatgccaatatctattagtcc

SEQ ID NO: 83247 - DNA, 22 bp, synthetic construct
  misc_feature 1..22: note = chemically synthesized
  source 1..22: mol_type = other DNA
ttagtcctttctcttgagacag

SEQ ID NO: 83248 - DNA, 22 bp, synthetic construct
  misc_feature 1..22: note = chemically synthesized
  source 1..22: mol_type = other DNA
gtcctttctcttgagacagttt

SEQ ID NO: 83249 - DNA, 22 bp, synthetic construct
  misc_feature 1..22: note = chemically synthesized
  source 1..22: mol_type = other DNA
tctcttgagacagtttatcatc

SEQ ID NO: 83250 - DNA, 22 bp, synthetic construct
  misc_feature 1..22: note = chemically synthesized
  source 1..22: mol_type = other DNA
ctcttgagacagtttatcatca

SEQ ID NO: 83251 - DNA, 22 bp, synthetic construct
  misc_feature 1..22: note = chemically synthesized
  source 1..22: mol_type = other DNA
tcttgagacagtttatcatcat

SEQ ID NO: 83252 - DNA, 22 bp, synthetic construct
  misc_feature 1..22: note = chemically synthesized
  source 1..22: mol_type = other DNA
ttgagacagtttatcatcattc

SEQ ID NO: 83253 - DNA, 22 bp, synthetic construct
  misc_feature 1..22: note = chemically synthesized
  source 1..22: mol_type = other DNA
gagacagtttatcatcattcaa

SEQ ID NO: 83254 - DNA, 22 bp, synthetic construct
  misc_feature 1..22: note = chemically synthesized
  source 1..22: mol_type = other DNA
agacagtttatcatcattcaat

SEQ ID NO: 83255 - DNA, 22 bp, synthetic construct
  misc_feature 1..22: note = chemically synthesized
  source 1..22: mol_type = other DNA
atcatcattcaatatgtattct

SEQ ID NO: 83256 - DNA, 22 bp, synthetic construct
  misc_feature 1..22: note = chemically synthesized
  source 1..22: mol_type = other DNA
tcatcattcaatatgtattctt

SEQ ID NO: 83257 - DNA, 22 bp, synthetic construct
  misc_feature 1..22: note = chemically synthesized
  source 1..22: mol_type = other DNA
aatatgtattcttttgcataat

SEQ ID NO: 83258 - DNA, 22 bp, synthetic construct
  misc_feature 1..22: note = chemically synthesized
  source 1..22: mol_type = other DNA
ttttgcataatctctctgtttc

SEQ ID NO: 83259 - DNA, 22 bp, synthetic construct
  misc_feature 1..22: note = chemically synthesized
  source 1..22: mol_type = other DNA
ttgcataatctctctgtttcat

SEQ ID NO: 83260 - DNA, 22 bp, synthetic construct
  misc_feature 1..22: note = chemically synthesized
  source 1..22: mol_type = other DNA
tgcataatctctctgtttcata

SEQ ID NO: 83261 - DNA, 22 bp, synthetic construct
  misc_feature 1..22: note = chemically synthesized
  source 1..22: mol_type = other DNA
gcataatctctctgtttcatat

SEQ ID NO: 83262 - DNA, 22 bp, synthetic construct
  misc_feature 1..22: note = chemically synthesized
  source 1..22: mol_type = other DNA
cataatctctctgtttcatata

SEQ ID NO: 83263 - DNA, 22 bp, synthetic construct
  misc_feature 1..22: note = chemically synthesized
  source 1..22: mol_type = other DNA
tctgtttcatatattacacctt

SEQ ID NO: 83264 - DNA, 22 bp, synthetic construct
  misc_feature 1..22: note = chemically synthesized
  source 1..22: mol_type = other DNA
tgtttcatatattacaccttag

SEQ ID NO: 83265 - DNA, 22 bp, synthetic construct
  misc_feature 1..22: note = chemically synthesized
  source 1..22: mol_type = other DNA
tttcatatattacaccttagtc

SEQ ID NO: 83266 - DNA, 22 bp, synthetic construct
  misc_feature 1..22: note = chemically synthesized
  source 1..22: mol_type = other DNA
catatattacaccttagtcctg

SEQ ID NO: 83267 - DNA, 22 bp, synthetic construct
  misc_feature 1..22: note = chemically synthesized
  source 1..22: mol_type = other DNA
atatattacaccttagtcctgg

SEQ ID NO: 83268 - DNA, 22 bp, synthetic construct
  misc_feature 1..22: note = chemically synthesized
  source 1..22: mol_type = other DNA
caccttagtcctggcatccttt

SEQ ID NO: 83269 - DNA, 22 bp, synthetic construct
  misc_feature 1..22: note = chemically synthesized
  source 1..22: mol_type = other DNA
agtcctggcatcctttgcactg

SEQ ID NO: 83270 - DNA, 22 bp, synthetic construct
  misc_feature 1..22: note = chemically synthesized
  source 1..22: mol_type = other DNA
gtcctggcatcctttgcactga

SEQ ID NO: 83271 - DNA, 22 bp, synthetic construct
  misc_feature 1..22: note = chemically synthesized
  source 1..22: mol_type = other DNA
gcatcctttgcactgaatttcc

SEQ ID NO: 83272 - DNA, 22 bp, synthetic construct
  misc_feature 1..22: note = chemically synthesized
  source 1..22: mol_type = other DNA
tgcactgaatttcccagtgtct

SEQ ID NO: 83273 - DNA, 22 bp, synthetic construct
  misc_feature 1..22: note = chemically synthesized
  source 1..22: mol_type = other DNA
gcactgaatttcccagtgtctg

SEQ ID NO: 83274 - DNA, 22 bp, synthetic construct
  misc_feature 1..22: note = chemically synthesized
  source 1..22: mol_type = other DNA
cactgaatttcccagtgtctgg

SEQ ID NO: 83275 - DNA, 22 bp, synthetic construct
  misc_feature 1..22: note = chemically synthesized
  source 1..22: mol_type = other DNA
aatttcccagtgtctggatcat

SEQ ID NO: 83276 - DNA, 22 bp, synthetic construct
  misc_feature 1..22: note = chemically synthesized
  source 1..22: mol_type = other DNA
cccagtgtctggatcatcattg

SEQ ID NO: 83277 - DNA, 22 bp, synthetic construct
  misc_feature 1..22: note = chemically synthesized
  source 1..22: mol_type = other DNA
ccagtgtctggatcatcattga

SEQ ID NO: 83278 - DNA, 22 bp, synthetic construct
  misc_feature 1..22: note = chemically synthesized
  source 1..22: mol_type = other DNA
gatcatcattgatttggttact

SEQ ID NO: 83279 - DNA, 22 bp, synthetic construct
  misc_feature 1..22: note = chemically synthesized
  source 1..22: mol_type = other DNA
atttggttactacagacactaa

SEQ ID NO: 83280 - DNA, 22 bp, synthetic construct
  misc_feature 1..22: note = chemically synthesized
  source 1..22: mol_type = other DNA
ggttactacagacactaatcat

SEQ ID NO: 83281 - DNA, 22 bp, synthetic construct
  misc_feature 1..22: note = chemically synthesized
  source 1..22: mol_type = other DNA
gttactacagacactaatcatt

SEQ ID NO: 83282 - DNA, 22 bp, synthetic construct
  misc_feature 1..22: note = chemically synthesized
  source 1..22: mol_type = other DNA
ctacagacactaatcattttgc

SEQ ID NO: 83283 - DNA, 22 bp, synthetic construct
  misc_feature 1..22: note = chemically synthesized
  source 1..22: mol_type = other DNA
cagacactaatcattttgccag

SEQ ID NO: 83284 - DNA, 22 bp, synthetic construct
  misc_feature 1..22: note = chemically synthesized
  source 1..22: mol_type = other DNA
atcattttgccagaactaaaga

SEQ ID NO: 83285 - DNA, 22 bp, synthetic construct
  misc_feature 1..22: note = chemically synthesized
  source 1..22: mol_type = other DNA
tgccagaactaaagagaaatga

SEQ ID NO: 83286 - DNA, 22 bp, synthetic construct
  misc_feature 1..22: note = chemically synthesized
  source 1..22: mol_type = other DNA
gccagaactaaagagaaatgag

SEQ ID NO: 83287 - DNA, 22 bp, synthetic construct
  misc_feature 1..22: note = chemically synthesized
  source 1..22: mol_type = other DNA
ccagaactaaagagaaatgagt

SEQ ID NO: 83288 - DNA, 22 bp, synthetic construct
  misc_feature 1..22: note = chemically synthesized
  source 1..22: mol_type = other DNA
aagagaaatgagtacctggcta

SEQ ID NO: 83289 - DNA, 22 bp, synthetic construct
  misc_feature 1..22: note = chemically synthesized
  source 1..22: mol_type = other DNA
gctatcttttaggcaaccttaa

SEQ ID NO: 83290 - DNA, 22 bp, synthetic construct
  misc_feature 1..22: note = chemically synthesized
  source 1..22: mol_type = other DNA
tcttttaggcaaccttaaacag

SEQ ID NO: 83291 - DNA, 22 bp, synthetic construct
  misc_feature 1..22: note = chemically synthesized
  source 1..22: mol_type = other DNA
ttaggcaaccttaaacaggtat

SEQ ID NO: 83292 - DNA, 22 bp, synthetic construct
  misc_feature 1..22: note = chemically synthesized
  source 1..22: mol_type = other DNA
taggcaaccttaaacaggtatt

SEQ ID NO: 83293 - DNA, 22 bp, synthetic construct
  misc_feature 1..22: note = chemically synthesized
  source 1..22: mol_type = other DNA
aggcaaccttaaacaggtattc

SEQ ID NO: 83294 - DNA, 22 bp, synthetic construct
  misc_feature 1..22: note = chemically synthesized
  source 1..22: mol_type = other DNA
ggcaaccttaaacaggtattca

SEQ ID NO: 83295 - DNA, 22 bp, synthetic construct
  misc_feature 1..22: note = chemically synthesized
  source 1..22: mol_type = other DNA
aaacaggtattcaccttttcta

SEQ ID NO: 83296 - DNA, 22 bp, synthetic construct
  misc_feature 1..22: note = chemically synthesized
  source 1..22: mol_type = other DNA
aacaggtattcaccttttctac

SEQ ID NO: 83297 - DNA, 22 bp, synthetic construct
  misc_feature 1..22: note = chemically synthesized
  source 1..22: mol_type = other DNA
accttttctaccatttttagcc

SEQ ID NO: 83298 - DNA, 22 bp, synthetic construct
  misc_feature 1..22: note = chemically synthesized
  source 1..22: mol_type = other DNA
ttctaccatttttagccctacc

SEQ ID NO: 83299 - DNA, 22 bp, synthetic construct
  misc_feature 1..22: note = chemically synthesized
  source 1..22: mol_type = other DNA
tctaccatttttagccctaccc

SEQ ID NO: 83300 - DNA, 22 bp, synthetic construct
  misc_feature 1..22: note = chemically synthesized
  source 1..22: mol_type = other DNA
ctaccatttttagccctacccc

SEQ ID NO: 83301 - DNA, 22 bp, synthetic construct
  misc_feature 1..22: note = chemically synthesized
  source 1..22: mol_type = other DNA
taccatttttagccctacccct

SEQ ID NO: 83302 - DNA, 22 bp, synthetic construct
  misc_feature 1..22: note = chemically synthesized
  source 1..22: mol_type = other DNA
ccatttttagccctacccctca

SEQ ID NO: 83303 - DNA, 22 bp, synthetic construct
  misc_feature 1..22: note = chemically synthesized
  source 1..22: mol_type = other DNA
ttagccctacccctcacgaatg

SEQ ID NO: 83304 - DNA, 22 bp, synthetic construct
  misc_feature 1..22: note = chemically synthesized
  source 1..22: mol_type = other DNA
tagccctacccctcacgaatgc

SEQ ID NO: 83305 - DNA, 22 bp, synthetic construct
  misc_feature 1..22: note = chemically synthesized
  source 1..22: mol_type = other DNA
agccctacccctcacgaatgct

SEQ ID NO: 83306 - DNA, 22 bp, synthetic construct
  misc_feature 1..22: note = chemically synthesized
  source 1..22: mol_type = other DNA
gccctacccctcacgaatgctt

SEQ ID NO: 83307 - DNA, 22 bp, synthetic construct
  misc_feature 1..22: note = chemically synthesized
  source 1..22: mol_type = other DNA
cccctcacgaatgctttataag

SEQ ID NO: 83308 - DNA, 22 bp, synthetic construct
  misc_feature 1..22: note = chemically synthesized
  source 1..22: mol_type = other DNA
acgaatgctttataagtaattt

SEQ ID NO: 83309 - DNA, 22 bp, synthetic construct
  misc_feature 1..22: note = chemically synthesized
  source 1..22: mol_type = other DNA
tataagtaatttctgtgttttt

SEQ ID NO: 83310 - DNA, 22 bp, synthetic construct
  misc_feature 1..22: note = chemically synthesized
  source 1..22: mol_type = other DNA
ataagtaatttctgtgtttttc

SEQ ID NO: 83311 - DNA, 22 bp, synthetic construct
  misc_feature 1..22: note = chemically synthesized
  source 1..22: mol_type = other DNA
taagtaatttctgtgtttttcc

SEQ ID NO: 83312 - DNA, 22 bp, synthetic construct
  misc_feature 1..22: note = chemically synthesized
  source 1..22: mol_type = other DNA
ctgtgtttttccagaaaatgct

SEQ ID NO: 83313 - DNA, 22 bp, synthetic construct
  misc_feature 1..22: note = chemically synthesized
  source 1..22: mol_type = other DNA
tgtgtttttccagaaaatgctc

SEQ ID NO: 83314 - DNA, 22 bp, synthetic construct
  misc_feature 1..22: note = chemically synthesized
  source 1..22: mol_type = other DNA
tgtttttccagaaaatgctctt

SEQ ID NO: 83315 - DNA, 22 bp, synthetic construct
  misc_feature 1..22: note = chemically synthesized
  source 1..22: mol_type = other DNA
ttccagaaaatgctctttgcag

SEQ ID NO: 83316 - DNA, 22 bp, synthetic construct
  misc_feature 1..22: note = chemically synthesized
  source 1..22: mol_type = other DNA
tccagaaaatgctctttgcaga

SEQ ID NO: 83317 - DNA, 22 bp, synthetic construct
  misc_feature 1..22: note = chemically synthesized
  source 1..22: mol_type = other DNA
ccagaaaatgctctttgcagat

SEQ ID NO: 83318 - DNA, 22 bp, synthetic construct
  misc_feature 1..22: note = chemically synthesized
  source 1..22: mol_type = other DNA
cagaaaatgctctttgcagata

SEQ ID NO: 83319 - DNA, 22 bp, synthetic construct
  misc_feature 1..22: note = chemically synthesized
  source 1..22: mol_type = other DNA
tttgcagataacgttttttctc

SEQ ID NO: 83320 - DNA, 22 bp, synthetic construct
  misc_feature 1..22: note = chemically synthesized
  source 1..22: mol_type = other DNA
tgcagataacgttttttctcat

SEQ ID NO: 83321 - DNA, 22 bp, synthetic construct
  misc_feature 1..22: note = chemically synthesized
  source 1..22: mol_type = other DNA
gcagataacgttttttctcatt

SEQ ID NO: 83322 - DNA, 22 bp, synthetic construct
  misc_feature 1..22: note = chemically synthesized
  source 1..22: mol_type = other DNA
cagataacgttttttctcattg

SEQ ID NO: 83323 - DNA, 22 bp, synthetic construct
  misc_feature 1..22: note = chemically synthesized
  source 1..22: mol_type = other DNA
tttctcattggtatccttttct

SEQ ID NO: 83324 - DNA, 22 bp, synthetic construct
  misc_feature 1..22: note = chemically synthesized
  source 1..22: mol_type = other DNA
ttctcattggtatccttttctg

SEQ ID NO: 83325 - DNA, 22 bp, synthetic construct
  misc_feature 1..22: note = chemically synthesized
  source 1..22: mol_type = other DNA
tctcattggtatccttttctgt

SEQ ID NO: 83326 - DNA, 22 bp, synthetic construct
  misc_feature 1..22: note = chemically synthesized
  source 1..22: mol_type = other DNA
ctcattggtatccttttctgta

SEQ ID NO: 83327 - DNA, 22 bp, synthetic construct
  misc_feature 1..22: note = chemically synthesized
  source 1..22: mol_type = other DNA
tcattggtatccttttctgtag

SEQ ID NO: 83328 - DNA, 22 bp, synthetic construct
  misc_feature 1..22: note = chemically synthesized
  source 1..22: mol_type = other DNA
attggtatccttttctgtagac

SEQ ID NO: 83329 - DNA, 22 bp, synthetic construct
  misc_feature 1..22: note = chemically synthesized
  source 1..22: mol_type = other DNA
gtatccttttctgtagacatat

SEQ ID NO: 83330 - DNA, 22 bp, synthetic construct
  misc_feature 1..22: note = chemically synthesized
  source 1..22: mol_type = other DNA
ttctgtagacatatagatttca

SEQ ID NO: 83331 - DNA, 22 bp, synthetic construct
  misc_feature 1..22: note = chemically synthesized
  source 1..22: mol_type = other DNA
tctgtagacatatagatttcag

SEQ ID NO: 83332 - DNA, 22 bp, synthetic construct
  misc_feature 1..22: note = chemically synthesized
  source 1..22: mol_type = other DNA
ctgtagacatatagatttcaga

SEQ ID NO: 83333 - DNA, 22 bp, synthetic construct
  misc_feature 1..22: note = chemically synthesized
  source 1..22: mol_type = other DNA
tgtagacatatagatttcagat

SEQ ID NO: 83334 - DNA, 22 bp, synthetic construct
  misc_feature 1..22: note = chemically synthesized
  source 1..22: mol_type = other DNA
tagacatatagatttcagatta

SEQ ID NO: 83335 - DNA, 22 bp, synthetic construct
  misc_feature 1..22: note = chemically synthesized
  source 1..22: mol_type = other DNA
cagattatcctgttctgttttt

SEQ ID NO: 83336 - DNA, 22 bp, synthetic construct
  misc_feature 1..22: note = chemically synthesized
  source 1..22: mol_type = other DNA
agattatcctgttctgtttttt

SEQ ID NO: 83337 - DNA, 22 bp, synthetic construct
  misc_feature 1..22: note = chemically synthesized
  source 1..22: mol_type = other DNA
tcctgttctgttttttaaaaaa

SEQ ID NO: 83338 - DNA, 22 bp, synthetic construct
  misc_feature 1..22: note = chemically synthesized
  source 1..22: mol_type = other DNA
ttctgttttttaaaaaatcata

SEQ ID NO: 83339 - DNA, 22 bp, synthetic construct
  misc_feature 1..22: note = chemically synthesized
  source 1..22: mol_type = other DNA
tgttttttaaaaaatcatattt

SEQ ID NO: 83340 - DNA, 22 bp, synthetic construct
  misc_feature 1..22: note = chemically synthesized
  source 1..22: mol_type = other DNA
ttttttaaaaaatcatatttaa

SEQ ID NO: 83341 - DNA, 22 bp, synthetic construct
  misc_feature 1..22: note = chemically synthesized
  source 1..22: mol_type = other DNA
tttaaaaaatcatatttaaatg

SEQ ID NO: 83342 - DNA, 22 bp, synthetic construct
  misc_feature 1..22: note = chemically synthesized
  source 1..22: mol_type = other DNA
ttaaaaaatcatatttaaatgt

SEQ ID NO: 83343 - DNA, 22 bp, synthetic construct
  misc_feature 1..22: note = chemically synthesized
  source 1..22: mol_type = other DNA
taaaaaatcatatttaaatgta

SEQ ID NO: 83344 - DNA, 22 bp, synthetic construct
  misc_feature 1..22: note = chemically synthesized
  source 1..22: mol_type = other DNA
aaaaaatcatatttaaatgtat

SEQ ID NO: 83345 - DNA, 22 bp, synthetic construct
  misc_feature 1..22: note = chemically synthesized
  source 1..22: mol_type = other DNA
aaaaatcatatttaaatgtata

SEQ ID NO: 83346 - DNA, 22 bp, synthetic construct
  misc_feature 1..22: note = chemically synthesized
  source 1..22: mol_type = other DNA
aaatgtatatacttatcaattt

SEQ ID NO: 83347 - DNA, 22 bp, synthetic construct
  misc_feature 1..22: note = chemically synthesized
  source 1..22: mol_type = other DNA
aatgtatatacttatcaatttg

SEQ ID NO: 83348 - DNA, 22 bp, synthetic construct
  misc_feature 1..22: note = chemically synthesized
  source 1..22: mol_type = other DNA
atcaatttgttcatacatattg

SEQ ID NO: 83349 - DNA, 22 bp, synthetic construct
  misc_feature 1..22: note = chemically synthesized
  source 1..22: mol_type = other DNA
tcaatttgttcatacatattgt

SEQ ID NO: 83350 - DNA, 22 bp, synthetic construct
  misc_feature 1..22: note = chemically synthesized
  source 1..22: mol_type = other DNA
gttcatacatattgtgctattt

SEQ ID NO: 83351 - DNA, 22 bp, synthetic construct
  misc_feature 1..22: note = chemically synthesized
  source 1..22: mol_type = other DNA
ttcatacatattgtgctatttt

SEQ ID NO: 83352 - DNA, 22 bp, synthetic construct
  misc_feature 1..22: note = chemically synthesized
  source 1..22: mol_type = other DNA
atacatattgtgctattttctt

SEQ ID NO: 83353 - DNA, 22 bp, synthetic construct
  misc_feature 1..22: note = chemically synthesized
  source 1..22: mol_type = other DNA
tgctattttcttcacagtgtct

SEQ ID NO: 83354 - DNA, 22 bp, synthetic construct
  misc_feature 1..22: note = chemically synthesized
  source 1..22: mol_type = other DNA
ttttcttcacagtgtctctgtg

SEQ ID NO: 83355 - DNA, 22 bp, synthetic construct
  misc_feature 1..22: note = chemically synthesized
  source 1..22: mol_type = other DNA
tcttcacagtgtctctgtgtac

SEQ ID NO: 83356 - DNA, 22 bp, synthetic construct
  misc_feature 1..22: note = chemically synthesized
  source 1..22: mol_type = other DNA
cttcacagtgtctctgtgtaca

SEQ ID NO: 83357 - DNA, 22 bp, synthetic construct
  misc_feature 1..22: note = chemically synthesized
  source 1..22: mol_type = other DNA
ttcacagtgtctctgtgtacat

SEQ ID NO: 83358 - DNA, 22 bp, synthetic construct
  misc_feature 1..22: note = chemically synthesized
  source 1..22: mol_type = other DNA
cacagtgtctctgtgtacatct

SEQ ID NO: 83359 - DNA, 22 bp, synthetic construct
  misc_feature 1..22: note = chemically synthesized
  source 1..22: mol_type = other DNA
acagtgtctctgtgtacatcta

SEQ ID NO: 83360 - DNA, 22 bp, synthetic construct
  misc_feature 1..22: note = chemically synthesized
  source 1..22: mol_type = other DNA
tgtgtacatctatagctttagt

SEQ ID NO: 83361 - DNA, 22 bp, synthetic construct
  misc_feature 1..22: note = chemically synthesized
  source 1..22: mol_type = other DNA
tgtacatctatagctttagtgg

SEQ ID NO: 83362 - DNA, 22 bp, synthetic construct
  misc_feature 1..22: note = chemically synthesized
  source 1..22: mol_type = other DNA
tagctttagtggattagagaaa

SEQ ID NO: 83363 - DNA, 22 bp, synthetic construct
  misc_feature 1..22: note = chemically synthesized
  source 1..22: mol_type = other DNA
tagtggattagagaaagtagca

SEQ ID NO: 83364 - DNA, 22 bp, synthetic construct
  misc_feature 1..22: note = chemically synthesized
  source 1..22: mol_type = other DNA
agtggattagagaaagtagcag

SEQ ID NO: 83365 - DNA, 22 bp, synthetic construct
  misc_feature 1..22: note = chemically synthesized
  source 1..22: mol_type = other DNA
gtggattagagaaagtagcaga

SEQ ID NO: 83366 - DNA, 22 bp, synthetic construct
  misc_feature 1..22: note = chemically synthesized
  source 1..22: mol_type = other DNA
gagaaagtagcagaaatgaaca

SEQ ID NO: 83367 - DNA, 22 bp, synthetic construct
  misc_feature 1..22: note = chemically synthesized
  source 1..22: mol_type = other DNA
agtctgccaggtttatatgtaa

SEQ ID NO: 83368 - DNA, 22 bp, synthetic construct
  misc_feature 1..22: note = chemically synthesized
  source 1..22: mol_type = other DNA
ccaggtttatatgtaaattgac

SEQ ID NO: 83369 - DNA, 22 bp, synthetic construct
  misc_feature 1..22: note = chemically synthesized
  source 1..22: mol_type = other DNA
atatgtaaattgacactttcac

SEQ ID NO: 83370 - DNA, 22 bp, synthetic construct
  misc_feature 1..22: note = chemically synthesized
  source 1..22: mol_type = other DNA
tatgtaaattgacactttcact

SEQ ID NO: 83371 - DNA, 22 bp, synthetic construct
  misc_feature 1..22: note = chemically synthesized
  source 1..22: mol_type = other DNA
acactttcactcatatttctta

SEQ ID NO: 83372 - DNA, 22 bp, synthetic construct
  misc_feature 1..22: note = chemically synthesized
  source 1..22: mol_type = other DNA
tcactcatatttcttaaattta

SEQ ID NO: 83373 - DNA, 22 bp, synthetic construct
  misc_feature 1..22: note = chemically synthesized
  source 1..22: mol_type = other DNA
cactcatatttcttaaatttat

SEQ ID NO: 83374 - DNA, 22 bp, synthetic construct
  misc_feature 1..22: note = chemically synthesized
  source 1..22: mol_type = other DNA
actcatatttcttaaatttata

SEQ ID NO: 83375 - DNA, 22 bp, synthetic construct
  misc_feature 1..22: note = chemically synthesized
  source 1..22: mol_type = other DNA
atatttcttaaatttatatttt

SEQ ID NO: 83376 - DNA, 22 bp, synthetic construct
  misc_feature 1..22: note = chemically synthesized
  source 1..22: mol_type = other DNA
cttaaatttatattttattatt

SEQ ID NO: 83377 - DNA, 22 bp, synthetic construct
  misc_feature 1..22: note = chemically synthesized
  source 1..22: mol_type = other DNA
ttaaatttatattttattattc

SEQ ID NO: 83378 - DNA, 22 bp, synthetic construct
  misc_feature 1..22: note = chemically synthesized
  source 1..22: mol_type = other DNA
aaatttatattttattattcag

SEQ ID NO: 83379 - DNA, 22 bp, synthetic construct
  misc_feature 1..22: note = chemically synthesized
  source 1..22: mol_type = other DNA
aatttatattttattattcagt

SEQ ID NO: 83380 - DNA, 22 bp, synthetic construct
  misc_feature 1..22: note = chemically synthesized
  source 1..22: mol_type = other DNA
atattttattattcagtacaga

SEQ ID NO: 83381 - DNA, 22 bp, synthetic construct
  misc_feature 1..22: note = chemically synthesized
  source 1..22: mol_type = other DNA
tattttattattcagtacagaa

SEQ ID NO: 83382 - DNA, 22 bp, synthetic construct
  misc_feature 1..22: note = chemically synthesized
  source 1..22: mol_type = other DNA
tattattcagtacagaaaaata

SEQ ID NO: 83383 - DNA, 22 bp, synthetic construct
  misc_feature 1..22: note = chemically synthesized
  source 1..22: mol_type = other DNA
attattcagtacagaaaaatac

SEQ ID NO: 83384 - DNA, 22 bp, synthetic construct
  misc_feature 1..22: note = chemically synthesized
  source 1..22: mol_type = other DNA
ttattcagtacagaaaaataca

SEQ ID NO: 83385 - DNA, 22 bp, synthetic construct
  misc_feature 1..22: note = chemically synthesized
  source 1..22: mol_type = other DNA
ttcagtacagaaaaatacataa

SEQ ID NO: 83386 - DNA, 22 bp, synthetic construct
  misc_feature 1..22: note = chemically synthesized
  source 1..22: mol_type = other DNA
agtacagaaaaatacataaata

SEQ ID NO: 83387 - DNA, 22 bp, synthetic construct
  misc_feature 1..22: note = chemically synthesized
  source 1..22: mol_type = other DNA
gttaaattgacacaaaattagc

SEQ ID NO: 83388 - DNA, 22 bp, synthetic construct
  misc_feature 1..22: note = chemically synthesized
  source 1..22: mol_type = other DNA
ttaaattgacacaaaattagca

SEQ ID NO: 83389 - DNA, 22 bp, synthetic construct
  misc_feature 1..22: note = chemically synthesized
  source 1..22: mol_type = other DNA
aattgacacaaaattagcaaaa

SEQ ID NO: 83390 - DNA, 22 bp, synthetic construct
  misc_feature 1..22: note = chemically synthesized
  source 1..22: mol_type = other DNA
acacaaaattagcaaaagcttt

SEQ ID NO: 83391 - DNA, 22 bp, synthetic construct
  misc_feature 1..22: note = chemically synthesized
  source 1..22: mol_type = other DNA
gcaaaagcttttaacaaacact

SEQ ID NO: 83392 - DNA, 22 bp, synthetic construct
  misc_feature 1..22: note = chemically synthesized
  source 1..22: mol_type = other DNA
ttaacaaacactcagaccaaga

SEQ ID NO: 83393 - DNA, 22 bp, synthetic construct
  misc_feature 1..22: note = chemically synthesized
  source 1..22: mol_type = other DNA
taacaaacactcagaccaagaa

SEQ ID NO: 83394 - DNA, 22 bp, synthetic construct
  misc_feature 1..22: note = chemically synthesized
  source 1..22: mol_type = other DNA
aacaaacactcagaccaagaaa

SEQ ID NO: 83395 - DNA, 22 bp, synthetic construct
  misc_feature 1..22: note = chemically synthesized
  source 1..22: mol_type = other DNA
acaaacactcagaccaagaaag

SEQ ID NO: 83396 - DNA, 22 bp, synthetic construct
  misc_feature 1..22: note = chemically synthesized
  source 1..22: mol_type = other DNA
agaccaagaaagagaacattac

SEQ ID NO: 83397 - DNA, 22 bp, synthetic construct
  misc_feature 1..22: note = chemically synthesized
  source 1..22: mol_type = other DNA
ccagcatctcaaaagctaaaca

SEQ ID NO: 83398 - DNA, 22 bp, synthetic construct
  misc_feature 1..22: note = chemically synthesized
  source 1..22: mol_type = other DNA
aaaagctaaacaccgattgatt

SEQ ID NO: 83399 - DNA, 22 bp, synthetic construct
  misc_feature 1..22: note = chemically synthesized
  source 1..22: mol_type = other DNA
aacaccgattgattcctcagtt

SEQ ID NO: 83400 - DNA, 22 bp, synthetic construct
  misc_feature 1..22: note = chemically synthesized
  source 1..22: mol_type = other DNA
attcctcagttctggctgcaac

SEQ ID NO: 83401 - DNA, 22 bp, synthetic construct
  misc_feature 1..22: note = chemically synthesized
  source 1..22: mol_type = other DNA
ctcagttctggctgcaacctga

SEQ ID NO: 83402 - DNA, 22 bp, synthetic construct
  misc_feature 1..22: note = chemically synthesized
  source 1..22: mol_type = other DNA
agttctggctgcaacctgaaag

SEQ ID NO: 83403 - DNA, 22 bp, synthetic construct
  misc_feature 1..22: note = chemically synthesized
  source 1..22: mol_type = other DNA
tggctgcaacctgaaagcctgc

SEQ ID NO: 83404 - DNA, 22 bp, synthetic construct
  misc_feature 1..22: note = chemically synthesized
  source 1..22: mol_type = other DNA
gctgcaacctgaaagcctgcat

SEQ ID NO: 83405 - DNA, 22 bp, synthetic construct
  misc_feature 1..22: note = chemically synthesized
  source 1..22: mol_type = other DNA
caacctgaaagcctgcattttc

SEQ ID NO: 83406 - DNA, 22 bp, synthetic construct
  misc_feature 1..22: note = chemically synthesized
  source 1..22: mol_type = other DNA
aaagcctgcattttctatgtgc

SEQ ID NO: 83407 - DNA, 22 bp, synthetic construct
  misc_feature 1..22: note = chemically synthesized
  source 1..22: mol_type = other DNA
cattttctatgtgccattacat

SEQ ID NO: 83408 - DNA, 22 bp, synthetic construct
  misc_feature 1..22: note = chemically synthesized
  source 1..22: mol_type = other DNA
tctatgtgccattacatggtgc

SEQ ID NO: 83409 - DNA, 22 bp, synthetic construct
  misc_feature 1..22: note = chemically synthesized
  source 1..22: mol_type = other DNA
ctatgtgccattacatggtgcc

SEQ ID NO: 83410 - DNA, 22 bp, synthetic construct
  misc_feature 1..22: note = chemically synthesized
  source 1..22: mol_type = other DNA
tatgtgccattacatggtgcca

SEQ ID NO: 83411 - DNA, 22 bp, synthetic construct
  misc_feature 1..22: note = chemically synthesized
  source 1..22: mol_type = other DNA
tgtgccattacatggtgccaag

SEQ ID NO: 83412 - DNA, 22 bp, synthetic construct
  misc_feature 1..22: note = chemically synthesized
  source 1..22: mol_type = other DNA
catggtgccaagactgcagggg

SEQ ID NO: 83413 - DNA, 22 bp, synthetic construct
  misc_feature 1..22: note = chemically synthesized
  source 1..22: mol_type = other DNA
caggggcagaaaccacactttt

SEQ ID NO: 83414 - DNA, 22 bp, synthetic construct
  misc_feature 1..22: note = chemically synthesized
  source 1..22: mol_type = other DNA
ttactggaaaagctttaggaca

SEQ ID NO: 83415 - DNA, 22 bp, synthetic construct
  misc_feature 1..22: note = chemically synthesized
  source 1..22: mol_type = other DNA
tactggaaaagctttaggacat

SEQ ID NO: 83416 - DNA, 22 bp, synthetic construct
  misc_feature 1..22: note = chemically synthesized
  source 1..22: mol_type = other DNA
actggaaaagctttaggacatc

SEQ ID NO: 83417 - DNA, 22 bp, synthetic construct
  misc_feature 1..22: note = chemically synthesized
  source 1..22: mol_type = other DNA
ctggaaaagctttaggacatcg

SEQ ID NO: 83418 - DNA, 22 bp, synthetic construct
  misc_feature 1..22: note = chemically synthesized
  source 1..22: mol_type = other DNA
gaaaagctttaggacatcgact

SEQ ID NO: 83419 - DNA, 22 bp, synthetic construct
  misc_feature 1..22: note = chemically synthesized
  source 1..22: mol_type = other DNA
taggacatcgactcctactgca

SEQ ID NO: 83420 - DNA, 22 bp, synthetic construct
  misc_feature 1..22: note = chemically synthesized
  source 1..22: mol_type = other DNA
aggacatcgactcctactgcag

SEQ ID NO: 83421 - DNA, 22 bp, synthetic construct
  misc_feature 1..22: note = chemically synthesized
  source 1..22: mol_type = other DNA
ggacatcgactcctactgcagg

SEQ ID NO: 83422 - DNA, 22 bp, synthetic construct
  misc_feature 1..22: note = chemically synthesized
  source 1..22: mol_type = other DNA
ctactgcaggggtgttcttggc

SEQ ID NO: 83423 - DNA, 22 bp, synthetic construct
  misc_feature 1..22: note = chemically synthesized
  source 1..22: mol_type = other DNA
ctgcaggggtgttcttggctag

SEQ ID NO: 83424 - DNA, 22 bp, synthetic construct
  misc_feature 1..22: note = chemically synthesized
  source 1..22: mol_type = other DNA
caggggtgttcttggctaggtt

SEQ ID NO: 83425 - DNA, 22 bp, synthetic construct
  misc_feature 1..22: note = chemically synthesized
  source 1..22: mol_type = other DNA
ttggctaggttggcattaattt

SEQ ID NO: 83426 - DNA, 22 bp, synthetic construct
  misc_feature 1..22: note = chemically synthesized
  source 1..22: mol_type = other DNA
ggctaggttggcattaattttt

SEQ ID NO: 83427 - DNA, 22 bp, synthetic construct
  misc_feature 1..22: note = chemically synthesized
  source 1..22: mol_type = other DNA
gctaggttggcattaattttta

SEQ ID NO: 83428 - DNA, 22 bp, synthetic construct
  misc_feature 1..22: note = chemically synthesized
  source 1..22: mol_type = other DNA
ggttggcattaatttttaagtt

SEQ ID NO: 83429 - DNA, 22 bp, synthetic construct
  misc_feature 1..22: note = chemically synthesized
  source 1..22: mol_type = other DNA
gcattaatttttaagtttctgc

SEQ ID NO: 83430 - DNA, 22 bp, synthetic construct
  misc_feature 1..22: note = chemically synthesized
  source 1..22: mol_type = other DNA
atttttaagtttctgcaagaga

SEQ ID NO: 83431 - DNA, 22 bp, synthetic construct
  misc_feature 1..22: note = chemically synthesized
  source 1..22: mol_type = other DNA
ttaagtttctgcaagagacttc

SEQ ID NO: 83432 - DNA, 22 bp, synthetic construct
  misc_feature 1..22: note = chemically synthesized
  source 1..22: mol_type = other DNA
taagtttctgcaagagacttct

SEQ ID NO: 83433 - DNA, 22 bp, synthetic construct
  misc_feature 1..22: note = chemically synthesized
  source 1..22: mol_type = other DNA
aagtttctgcaagagacttctg

SEQ ID NO: 83434 - DNA, 22 bp, synthetic construct
  misc_feature 1..22: note = chemically synthesized
  source 1..22: mol_type = other DNA
agtttctgcaagagacttctgg

SEQ ID NO: 83435 - DNA, 22 bp, synthetic construct
  misc_feature 1..22: note = chemically synthesized
  source 1..22: mol_type = other DNA
ctgcaagagacttctgggaaaa

SEQ ID NO: 83436 - DNA, 22 bp, synthetic construct
  misc_feature 1..22: note = chemically synthesized
  source 1..22: mol_type = other DNA
tgcaagagacttctgggaaaat

SEQ ID NO: 83437 - DNA, 22 bp, synthetic construct
  misc_feature 1..22: note = chemically synthesized
  source 1..22: mol_type = other DNA
caagagacttctgggaaaatgg

SEQ ID NO: 83438 - DNA, 22 bp, synthetic construct
  misc_feature 1..22: note = chemically synthesized
  source 1..22: mol_type = other DNA
ctgggaaaatggactattttta

SEQ ID NO: 83439 - DNA, 22 bp, synthetic construct
  misc_feature 1..22: note = chemically synthesized
  source 1..22: mol_type = other DNA
tgggaaaatggactatttttat

SEQ ID NO: 83440 - DNA, 22 bp, synthetic construct
  misc_feature 1..22: note = chemically synthesized
  source 1..22: mol_type = other DNA
ggaaaatggactatttttattt

SEQ ID NO: 83441 - DNA, 22 bp, synthetic construct
  misc_feature 1..22: note = chemically synthesized
  source 1..22: mol_type = other DNA
tttttatttccttcatctggag

SEQ ID NO: 83442 - DNA, 22 bp, synthetic construct
  misc_feature 1..22: note = chemically synthesized
  source 1..22: mol_type = other DNA
ttatttccttcatctggaggcc

SEQ ID NO: 83443 - DNA, 22 bp, synthetic construct
  misc_feature 1..22: note = chemically synthesized
  source 1..22: mol_type = other DNA
tatttccttcatctggaggcct

SEQ ID NO: 83444 - DNA, 22 bp, synthetic construct
  misc_feature 1..22: note = chemically synthesized
  source 1..22: mol_type = other DNA
atttccttcatctggaggcctc

SEQ ID NO: 83445 - DNA, 22 bp, synthetic construct
  misc_feature 1..22: note = chemically synthesized
  source 1..22: mol_type = other DNA
tttccttcatctggaggcctct

SEQ ID NO: 83446 - DNA, 22 bp, synthetic construct
  misc_feature 1..22: note = chemically synthesized
  source 1..22: mol_type = other DNA
ccttcatctggaggcctctatt

SEQ ID NO: 83447 - DNA, 22 bp, synthetic construct
  misc_feature 1..22: note = chemically synthesized
  source 1..22: mol_type = other DNA
cttcatctggaggcctctattc

SEQ ID NO: 83448 - DNA, 22 bp, synthetic construct
  misc_feature 1..22: note = chemically synthesized
  source 1..22: mol_type = other DNA
catctggaggcctctattcact

SEQ ID NO: 83449 - DNA, 22 bp, synthetic construct
  misc_feature 1..22: note = chemically synthesized
  source 1..22: mol_type = other DNA
atctggaggcctctattcacta

SEQ ID NO: 83450 - DNA, 22 bp, synthetic construct
  misc_feature 1..22: note = chemically synthesized
  source 1..22: mol_type = other DNA
gaggcctctattcactactcta

SEQ ID NO: 83451 - DNA, 22 bp, synthetic construct
  misc_feature 1..22: note = chemically synthesized
  source 1..22: mol_type = other DNA
tattcactactctagcaattat

SEQ ID NO: 83452 - DNA, 22 bp, synthetic construct
  misc_feature 1..22: note = chemically synthesized
  source 1..22: mol_type = other DNA
ttcactactctagcaattatct

SEQ ID NO: 83453 - DNA, 22 bp, synthetic construct
  misc_feature 1..22: note = chemically synthesized
  source 1..22: mol_type = other DNA
actactctagcaattatcttct

SEQ ID NO: 83454 - DNA, 22 bp, synthetic construct
  misc_feature 1..22: note = chemically synthesized
  source 1..22: mol_type = other DNA
ctctagcaattatcttctgcaa

SEQ ID NO: 83455 - DNA, 22 bp, synthetic construct
  misc_feature 1..22: note = chemically synthesized
  source 1..22: mol_type = other DNA
tagcaattatcttctgcaagta

SEQ ID NO: 83456 - DNA, 22 bp, synthetic construct
  misc_feature 1..22: note = chemically synthesized
  source 1..22: mol_type = other DNA
gcaattatcttctgcaagtaat

SEQ ID NO: 83457 - DNA, 22 bp, synthetic construct
  misc_feature 1..22: note = chemically synthesized
  source 1..22: mol_type = other DNA
tcttctgcaagtaatggtaaca

SEQ ID NO: 83458 - DNA, 22 bp, synthetic construct
  misc_feature 1..22: note = chemically synthesized
  source 1..22: mol_type = other DNA
ctgcaagtaatggtaacaaata

SEQ ID NO: 83459 - DNA, 22 bp, synthetic construct
  misc_feature 1..22: note = chemically synthesized
  source 1..22: mol_type = other DNA
tgcaagtaatggtaacaaatat

SEQ ID NO: 83460 - DNA, 22 bp, synthetic construct
  misc_feature 1..22: note = chemically synthesized
  source 1..22: mol_type = other DNA
caagtaatggtaacaaatatcc

SEQ ID NO: 83461 - DNA, 22 bp, synthetic construct
  misc_feature 1..22: note = chemically synthesized
  source 1..22: mol_type = other DNA
gggaatggagacacaacctcaa

SEQ ID NO: 83462 - DNA, 22 bp, synthetic construct
  misc_feature 1..22: note = chemically synthesized
  source 1..22: mol_type = other DNA
aagtagaacatctcttaagtct

SEQ ID NO: 83463 - DNA, 22 bp, synthetic construct
  misc_feature 1..22: note = chemically synthesized
  source 1..22: mol_type = other DNA
ttaagtctgtttaacaatacga

SEQ ID NO: 83464 - DNA, 22 bp, synthetic construct
  misc_feature 1..22: note = chemically synthesized
  source 1..22: mol_type = other DNA
aagtctgtttaacaatacgatt

SEQ ID NO: 83465 - DNA, 22 bp, synthetic construct
  misc_feature 1..22: note = chemically synthesized
  source 1..22: mol_type = other DNA
agtctgtttaacaatacgattt

SEQ ID NO: 83466 - DNA, 22 bp, synthetic construct
  misc_feature 1..22: note = chemically synthesized
  source 1..22: mol_type = other DNA
tttaacaatacgattttgataa

SEQ ID NO: 83467 - DNA, 22 bp, synthetic construct
  misc_feature 1..22: note = chemically synthesized
  source 1..22: mol_type = other DNA
aacaatacgattttgataagcc

SEQ ID NO: 83468 - DNA, 22 bp, synthetic construct
  misc_feature 1..22: note = chemically synthesized
  source 1..22: mol_type = other DNA
acaatacgattttgataagcct

SEQ ID NO: 83469 - DNA, 22 bp, synthetic construct
  misc_feature 1..22: note = chemically synthesized
  source 1..22: mol_type = other DNA
tgataagcctaggaaaataggg

SEQ ID NO: 83470 - DNA, 22 bp, synthetic construct
  misc_feature 1..22: note = chemically synthesized
  source 1..22: mol_type = other DNA
gataagcctaggaaaataggga

SEQ ID NO: 83471 - DNA, 22 bp, synthetic construct
  misc_feature 1..22: note = chemically synthesized
  source 1..22: mol_type = other DNA
ataagcctaggaaaatagggag

SEQ ID NO: 83472 - DNA, 22 bp, synthetic construct
  misc_feature 1..22: note = chemically synthesized
  source 1..22: mol_type = other DNA
ggaaaatagggaggtatagtgt

SEQ ID NO: 83473 - DNA, 22 bp, synthetic construct
  misc_feature 1..22: note = chemically synthesized
  source 1..22: mol_type = other DNA
gccacttaccagtactggtccg

SEQ ID NO: 83474 - DNA, 22 bp, synthetic construct
  misc_feature 1..22: note = chemically synthesized
  source 1..22: mol_type = other DNA
accagtactggtccgtggcctg

SEQ ID NO: 83475 - DNA, 22 bp, synthetic construct
  misc_feature 1..22: note = chemically synthesized
  source 1..22: mol_type = other DNA
ccagtactggtccgtggcctgc

SEQ ID NO: 83476 - DNA, 22 bp, synthetic construct
  misc_feature 1..22: note = chemically synthesized
  source 1..22: mol_type = other DNA
gtccgtggcctgctaggaacct

SEQ ID NO: 83477 - DNA, 22 bp, synthetic construct
  misc_feature 1..22: note = chemically synthesized
  source 1..22: mol_type = other DNA
ctaggaacctggtctcacagca

SEQ ID NO: 83478 - DNA, 22 bp, synthetic construct
  misc_feature 1..22: note = chemically synthesized
  source 1..22: mol_type = other DNA
ggaacctggtctcacagcaggg

SEQ ID NO: 83479 - DNA, 22 bp, synthetic construct
  misc_feature 1..22: note = chemically synthesized
  source 1..22: mol_type = other DNA
gtctcacagcagggggatgagc

SEQ ID NO: 83480 - DNA, 22 bp, synthetic construct
  misc_feature 1..22: note = chemically synthesized
  source 1..22: mol_type = other DNA
acagcagggggatgagcaagca

SEQ ID NO: 83481 - DNA, 22 bp, synthetic construct
  misc_feature 1..22: note = chemically synthesized
  source 1..22: mol_type = other DNA
ctgcctgagctcctcctcctgt

SEQ ID NO: 83482 - DNA, 22 bp, synthetic construct
  misc_feature 1..22: note = chemically synthesized
  source 1..22: mol_type = other DNA
cctgagctcctcctcctgtcac

SEQ ID NO: 83483 - DNA, 22 bp, synthetic construct
  misc_feature 1..22: note = chemically synthesized
  source 1..22: mol_type = other DNA
agctcctcctcctgtcacatcg

SEQ ID NO: 83484 - DNA, 22 bp, synthetic construct
  misc_feature 1..22: note = chemically synthesized
  source 1..22: mol_type = other DNA
ctcctcctgtcacatcggcagt

SEQ ID NO: 83485 - DNA, 22 bp, synthetic construct
  misc_feature 1..22: note = chemically synthesized
  source 1..22: mol_type = other DNA
ctcctgtcacatcggcagtggc

SEQ ID NO: 83486 - DNA, 22 bp, synthetic construct
  misc_feature 1..22: note = chemically synthesized
  source 1..22: mol_type = other DNA
ctgtcacatcggcagtggcggc

SEQ ID NO: 83487 - DNA, 22 bp, synthetic construct
  misc_feature 1..22: note = chemically synthesized
  source 1..22: mol_type = other DNA
tcacatcggcagtggcggcatt

SEQ ID NO: 83488 - DNA, 22 bp, synthetic construct
  misc_feature 1..22: note = chemically synthesized
  source 1..22: mol_type = other DNA
gattctcatagaggcatgcaag

SEQ ID NO: 83489 - DNA, 22 bp, synthetic construct
  misc_feature 1..22: note = chemically synthesized
  source 1..22: mol_type = other DNA
tcatagaggcatgcaagggatc

SEQ ID NO: 83490 - DNA, 22 bp, synthetic construct
  misc_feature 1..22: note = chemically synthesized
  source 1..22: mol_type = other DNA
atagaggcatgcaagggatcta

SEQ ID NO: 83491 - DNA, 22 bp, synthetic construct
  misc_feature 1..22: note = chemically synthesized
  source 1..22: mol_type = other DNA
ggttgcggcttcttatgagaat

SEQ ID NO: 83492 - DNA, 22 bp, synthetic construct
  misc_feature 1..22: note = chemically synthesized
  source 1..22: mol_type = other DNA
cggcttcttatgagaatctaat

SEQ ID NO: 83493 - DNA, 22 bp, synthetic construct
  misc_feature 1..22: note = chemically synthesized
  source 1..22: mol_type = other DNA
cttatgagaatctaatgcctaa

SEQ ID NO: 83494 - DNA, 22 bp, synthetic construct
  misc_feature 1..22: note = chemically synthesized
  source 1..22: mol_type = other DNA
ttatgagaatctaatgcctaat

SEQ ID NO: 83495 - DNA, 22 bp, synthetic construct
  misc_feature 1..22: note = chemically synthesized
  source 1..22: mol_type = other DNA
atgagaatctaatgcctaatgc

SEQ ID NO: 83496 - DNA, 22 bp, synthetic construct
  misc_feature 1..22: note = chemically synthesized
  source 1..22: mol_type = other DNA
tgagaatctaatgcctaatgct

SEQ ID NO: 83497 - DNA, 22 bp, synthetic construct
  misc_feature 1..22: note = chemically synthesized
  source 1..22: mol_type = other DNA
atgcctaatgctctgaggtgga

SEQ ID NO: 83498 - DNA, 22 bp, synthetic construct
  misc_feature 1..22: note = chemically synthesized
  source 1..22: mol_type = other DNA
atgctctgaggtggaacagttt

SEQ ID NO: 83499 - DNA, 22 bp, synthetic construct
  misc_feature 1..22: note = chemically synthesized
  source 1..22: mol_type = other DNA
tgaggtggaacagtttcatcct

SEQ ID NO: 83500 - DNA, 22 bp, synthetic construct
  misc_feature 1..22: note = chemically synthesized
  source 1..22: mol_type = other DNA
aggtggaacagtttcatcctga

SEQ ID NO: 83501 - DNA, 22 bp, synthetic construct
  misc_feature 1..22: note = chemically synthesized
  source 1..22: mol_type = other DNA
catcctgaaaccatgccctcct

SEQ ID NO: 83502 - DNA, 22 bp, synthetic construct
  misc_feature 1..22: note = chemically synthesized
  source 1..22: mol_type = other DNA
atcctgaaaccatgccctcctg

SEQ ID NO: 83503 - DNA, 22 bp, synthetic construct
  misc_feature 1..22: note = chemically synthesized
  source 1..22: mol_type = other DNA
aaaccatgccctcctgcacctt

SEQ ID NO: 83504 - DNA, 22 bp, synthetic construct
  misc_feature 1..22: note = chemically synthesized
  source 1..22: mol_type = other DNA
ctgcaccttgtcttccacaaaa

SEQ ID NO: 83505 - DNA, 22 bp, synthetic construct
  misc_feature 1..22: note = chemically synthesized
  source 1..22: mol_type = other DNA
caccttgtcttccacaaaagca

SEQ ID NO: 83506 - DNA, 22 bp, synthetic construct
  misc_feature 1..22: note = chemically synthesized
  source 1..22: mol_type = other DNA
gtcttccacaaaagcagtccct

SEQ ID NO: 83507 - DNA, 22 bp, synthetic construct
  misc_feature 1..22: note = chemically synthesized
  source 1..22: mol_type = other DNA
tcttccacaaaagcagtccctg

SEQ ID NO: 83508 - DNA, 22 bp, synthetic construct
  misc_feature 1..22: note = chemically synthesized
  source 1..22: mol_type = other DNA
ccacaaaagcagtccctggtac

SEQ ID NO: 83509 - DNA, 22 bp, synthetic construct
  misc_feature 1..22: note = chemically synthesized
  source 1..22: mol_type = other DNA
cacaaaagcagtccctggtacc

SEQ ID NO: 83510 - DNA, 22 bp, synthetic construct
  misc_feature 1..22: note = chemically synthesized
  source 1..22: mol_type = other DNA
gtaccaaaaacattgaagactg

SEQ ID NO: 83511 - DNA, 22 bp, synthetic construct
  misc_feature 1..22: note = chemically synthesized
  source 1..22: mol_type = other DNA
aagactgctggtgtacagtgaa

SEQ ID NO: 83512 - DNA, 22 bp, synthetic construct
  misc_feature 1..22: note = chemically synthesized
  source 1..22: mol_type = other DNA
ctggtgtacagtgaacatctgc

SEQ ID NO: 83513 - DNA, 22 bp, synthetic construct
  misc_feature 1..22: note = chemically synthesized
  source 1..22: mol_type = other DNA
gtgtacagtgaacatctgcctg

SEQ ID NO: 83514 - DNA, 22 bp, synthetic construct
  misc_feature 1..22: note = chemically synthesized
  source 1..22: mol_type = other DNA
cctgtggatttattattagcag

SEQ ID NO: 83515 - DNA, 22 bp, synthetic construct
  misc_feature 1..22: note = chemically synthesized
  source 1..22: mol_type = other DNA
tggatttattattagcagatca

SEQ ID NO: 83516 - DNA, 22 bp, synthetic construct
  misc_feature 1..22: note = chemically synthesized
  source 1..22: mol_type = other DNA
attattagcagatcatttttac

SEQ ID NO: 83517 - DNA, 22 bp, synthetic construct
  misc_feature 1..22: note = chemically synthesized
  source 1..22: mol_type = other DNA
ttattagcagatcatttttact

SEQ ID NO: 83518 - DNA, 22 bp, synthetic construct
  misc_feature 1..22: note = chemically synthesized
  source 1..22: mol_type = other DNA
ttagcagatcatttttactaaa

SEQ ID NO: 83519 - DNA, 22 bp, synthetic construct
  misc_feature 1..22: note = chemically synthesized
  source 1..22: mol_type = other DNA
gcagatcatttttactaaaaac

SEQ ID NO: 83520 - DNA, 22 bp, synthetic construct
  misc_feature 1..22: note = chemically synthesized
  source 1..22: mol_type = other DNA
ttactaaaaacacatttctaat

SEQ ID NO: 83521 - DNA, 22 bp, synthetic construct
  misc_feature 1..22: note = chemically synthesized
  source 1..22: mol_type = other DNA
tactaaaaacacatttctaatc

SEQ ID NO: 83522 - DNA, 22 bp, synthetic construct
  misc_feature 1..22: note = chemically synthesized
  source 1..22: mol_type = other DNA
actaaaaacacatttctaatcc

SEQ ID NO: 83523 - DNA, 22 bp, synthetic construct
  misc_feature 1..22: note = chemically synthesized
  source 1..22: mol_type = other DNA
ctaaaaacacatttctaatcct

SEQ ID NO: 83524 - DNA, 22 bp, synthetic construct
  misc_feature 1..22: note = chemically synthesized
  source 1..22: mol_type = other DNA
aaaacacatttctaatcctgaa

SEQ ID NO: 83525 - DNA, 22 bp, synthetic construct
  misc_feature 1..22: note = chemically synthesized
  source 1..22: mol_type = other DNA
ctaatcctgaatcatgtcctct

SEQ ID NO: 83526 - DNA, 22 bp, synthetic construct
  misc_feature 1..22: note = chemically synthesized
  source 1..22: mol_type = other DNA
taatcctgaatcatgtcctctc

SEQ ID NO: 83527 - DNA, 22 bp, synthetic construct
  misc_feature 1..22: note = chemically synthesized
  source 1..22: mol_type = other DNA
atcctgaatcatgtcctctcac

SEQ ID NO: 83528 - DNA, 22 bp, synthetic construct
  misc_feature 1..22: note = chemically synthesized
  source 1..22: mol_type = other DNA
aatcatgtcctctcacttctaa

SEQ ID NO: 83529 - DNA, 22 bp, synthetic construct
  misc_feature 1..22: note = chemically synthesized
  source 1..22: mol_type = other DNA
tcacttctaagaatcactgatt

SEQ ID NO: 83530 - DNA, 22 bp, synthetic construct
  misc_feature 1..22: note = chemically synthesized
  source 1..22: mol_type = other DNA
acttctaagaatcactgatttc

SEQ ID NO: 83531 - DNA, 22 bp, synthetic construct
  misc_feature 1..22: note = chemically synthesized
  source 1..22: mol_type = other DNA
ctaagaatcactgatttctccc

SEQ ID NO: 83532 - DNA, 22 bp, synthetic construct
  misc_feature 1..22: note = chemically synthesized
  source 1..22: mol_type = other DNA
taagaatcactgatttctccca

SEQ ID NO: 83533 - DNA, 22 bp, synthetic construct
  misc_feature 1..22: note = chemically synthesized
  source 1..22: mol_type = other DNA
agaatcactgatttctcccact

SEQ ID NO: 83534 - DNA, 22 bp, synthetic construct
  misc_feature 1..22: note = chemically synthesized
  source 1..22: mol_type = other DNA
atttctcccactggaccttagc

SEQ ID NO: 83535 - DNA, 22 bp, synthetic construct
  misc_feature 1..22: note = chemically synthesized
  source 1..22: mol_type = other DNA
ctcccactggaccttagctttt

SEQ ID NO: 83536 - DNA, 22 bp, synthetic construct
  misc_feature 1..22: note = chemically synthesized
  source 1..22: mol_type = other DNA
tcccactggaccttagcttttc

SEQ ID NO: 83537 - DNA, 22 bp, synthetic construct
  misc_feature 1..22: note = chemically synthesized
  source 1..22: mol_type = other DNA
ccactggaccttagcttttcgg

SEQ ID NO: 83538 - DNA, 22 bp, synthetic construct
  misc_feature 1..22: note = chemically synthesized
  source 1..22: mol_type = other DNA
gaccttagcttttcggtgtaag

SEQ ID NO: 83539 - DNA, 22 bp, synthetic construct
  misc_feature 1..22: note = chemically synthesized
  source 1..22: mol_type = other DNA
agcttttcggtgtaagagttaa

SEQ ID NO: 83540 - DNA, 22 bp, synthetic construct
  misc_feature 1..22: note = chemically synthesized
  source 1..22: mol_type = other DNA
gcttttcggtgtaagagttaaa

SEQ ID NO: 83541 - DNA, 22 bp, synthetic construct
  misc_feature 1..22: note = chemically synthesized
  source 1..22: mol_type = other DNA
ttcggtgtaagagttaaatgaa

SEQ ID NO: 83542 - DNA, 22 bp, synthetic construct
  misc_feature 1..22: note = chemically synthesized
  source 1..22: mol_type = other DNA
tcggtgtaagagttaaatgaat

SEQ ID NO: 83543 - DNA, 22 bp, synthetic construct
  misc_feature 1..22: note = chemically synthesized
  source 1..22: mol_type = other DNA
cggtgtaagagttaaatgaata

SEQ ID NO: 83544 - DNA, 22 bp, synthetic construct
  misc_feature 1..22: note = chemically synthesized
  source 1..22: mol_type = other DNA
ggtgtaagagttaaatgaatag

SEQ ID NO: 83545 - DNA, 22 bp, synthetic construct
  misc_feature 1..22: note = chemically synthesized
  source 1..22: mol_type = other DNA
aatgaatagcaattgaatggac

SEQ ID NO: 83546 - DNA, 22 bp, synthetic construct
  misc_feature 1..22: note = chemically synthesized
  source 1..22: mol_type = other DNA
aatggactagactttctgattt

SEQ ID NO: 83547 - DNA, 22 bp, synthetic construct
  misc_feature 1..22: note = chemically synthesized
  source 1..22: mol_type = other DNA
gactttctgattttctgaatct

SEQ ID NO: 83548 - DNA, 22 bp, synthetic construct
  misc_feature 1..22: note = chemically synthesized
  source 1..22: mol_type = other DNA
tctgattttctgaatcttactt

SEQ ID NO: 83549 - DNA, 22 bp, synthetic construct
  misc_feature 1..22: note = chemically synthesized
  source 1..22: mol_type = other DNA
ctgattttctgaatcttacttt

SEQ ID NO: 83550 - DNA, 22 bp, synthetic construct
  misc_feature 1..22: note = chemically synthesized
  source 1..22: mol_type = other DNA
tgattttctgaatcttactttt

SEQ ID NO: 83551 - DNA, 22 bp, synthetic construct
  misc_feature 1..22: note = chemically synthesized
  source 1..22: mol_type = other DNA
attttctgaatcttacttttgt

SEQ ID NO: 83552 - DNA, 22 bp, synthetic construct
  misc_feature 1..22: note = chemically synthesized
  source 1..22: mol_type = other DNA
tctgaatcttacttttgtcacc

SEQ ID NO: 83553 - DNA, 22 bp, synthetic construct
  misc_feature 1..22: note = chemically synthesized
  source 1..22: mol_type = other DNA
ctgaatcttacttttgtcacct

SEQ ID NO: 83554 - DNA, 22 bp, synthetic construct
  misc_feature 1..22: note = chemically synthesized
  source 1..22: mol_type = other DNA
tgaatcttacttttgtcacctt

SEQ ID NO: 83555 - DNA, 22 bp, synthetic construct
  misc_feature 1..22: note = chemically synthesized
  source 1..22: mol_type = other DNA
aatcttacttttgtcaccttgt

SEQ ID NO: 83556 - DNA, 22 bp, synthetic construct
  misc_feature 1..22: note = chemically synthesized
  source 1..22: mol_type = other DNA
acttttgtcaccttgttctcgg

SEQ ID NO: 83557 - DNA, 22 bp, synthetic construct
  misc_feature 1..22: note = chemically synthesized
  source 1..22: mol_type = other DNA
cttttgtcaccttgttctcggc

SEQ ID NO: 83558 - DNA, 22 bp, synthetic construct
  misc_feature 1..22: note = chemically synthesized
  source 1..22: mol_type = other DNA
ttgtcaccttgttctcggcaat

SEQ ID NO: 83559 - DNA, 22 bp, synthetic construct
  misc_feature 1..22: note = chemically synthesized
  source 1..22: mol_type = other DNA
tgtcaccttgttctcggcaata

SEQ ID NO: 83560 - DNA, 22 bp, synthetic construct
  misc_feature 1..22: note = chemically synthesized
  source 1..22: mol_type = other DNA
gtcaccttgttctcggcaatat

SEQ ID NO: 83561 - DNA, 22 bp, synthetic construct
  misc_feature 1..22: note = chemically synthesized
  source 1..22: mol_type = other DNA
tcaccttgttctcggcaatatt

SEQ ID NO: 83562 - DNA, 22 bp, synthetic construct
  misc_feature 1..22: note = chemically synthesized
  source 1..22: mol_type = other DNA
gttctcggcaatatttttgttt

SEQ ID NO: 83563 - DNA, 22 bp, synthetic construct
  misc_feature 1..22: note = chemically synthesized
  source 1..22: mol_type = other DNA
ttctcggcaatatttttgtttt

SEQ ID NO: 83564 - DNA, 22 bp, synthetic construct
  misc_feature 1..22: note = chemically synthesized
  source 1..22: mol_type = other DNA
tcggcaatatttttgttttctc

SEQ ID NO: 83565 - DNA, 22 bp, synthetic construct
  misc_feature 1..22: note = chemically synthesized
  source 1..22: mol_type = other DNA
ggcaatatttttgttttctcct

SEQ ID NO: 83566 - DNA, 22 bp, synthetic construct
  misc_feature 1..22: note = chemically synthesized
  source 1..22: mol_type = other DNA
ttgttttctccttattataata

SEQ ID NO: 83567 - DNA, 22 bp, synthetic construct
  misc_feature 1..22: note = chemically synthesized
  source 1..22: mol_type = other DNA
tgttttctccttattataataa

SEQ ID NO: 83568 - DNA, 22 bp, synthetic construct
  misc_feature 1..22: note = chemically synthesized
  source 1..22: mol_type = other DNA
gttttctccttattataataac

SEQ ID NO: 83569 - DNA, 22 bp, synthetic construct
  misc_feature 1..22: note = chemically synthesized
  source 1..22: mol_type = other DNA
ttttctccttattataataacc

SEQ ID NO: 83570 - DNA, 22 bp, synthetic construct
  misc_feature 1..22: note = chemically synthesized
  source 1..22: mol_type = other DNA
tctccttattataataaccgtg

SEQ ID NO: 83571 - DNA, 22 bp, synthetic construct
  misc_feature 1..22: note = chemically synthesized
  source 1..22: mol_type = other DNA
ctccttattataataaccgtga

SEQ ID NO: 83572 - DNA, 22 bp, synthetic construct
  misc_feature 1..22: note = chemically synthesized
  source 1..22: mol_type = other DNA
tccttattataataaccgtgac

SEQ ID NO: 83573 - DNA, 22 bp, synthetic construct
  misc_feature 1..22: note = chemically synthesized
  source 1..22: mol_type = other DNA
cttattataataaccgtgactt

SEQ ID NO: 83574 - DNA, 22 bp, synthetic construct
  misc_feature 1..22: note = chemically synthesized
  source 1..22: mol_type = other DNA
attataataaccgtgacttcat

SEQ ID NO: 83575 - DNA, 22 bp, synthetic construct
  misc_feature 1..22: note = chemically synthesized
  source 1..22: mol_type = other DNA
ttataataaccgtgacttcatt

SEQ ID NO: 83576 - DNA, 22 bp, synthetic construct
  misc_feature 1..22: note = chemically synthesized
  source 1..22: mol_type = other DNA
taataaccgtgacttcatttaa

SEQ ID NO: 83577 - DNA, 22 bp, synthetic construct
  misc_feature 1..22: note = chemically synthesized
  source 1..22: mol_type = other DNA
catttaaggcagcagttacaat

SEQ ID NO: 83578 - DNA, 22 bp, synthetic construct
  misc_feature 1..22: note = chemically synthesized
  source 1..22: mol_type = other DNA
atttaaggcagcagttacaatg

SEQ ID NO: 83579 - DNA, 22 bp, synthetic construct
  misc_feature 1..22: note = chemically synthesized
  source 1..22: mol_type = other DNA
aaggcagcagttacaatgatat

SEQ ID NO: 83580 - DNA, 22 bp, synthetic construct
  misc_feature 1..22: note = chemically synthesized
  source 1..22: mol_type = other DNA
aggcagcagttacaatgatatg

SEQ ID NO: 83581 - DNA, 22 bp, synthetic construct
  misc_feature 1..22: note = chemically synthesized
  source 1..22: mol_type = other DNA
caatgatatgacagtctaccta

SEQ ID NO: 83582 - DNA, 22 bp, synthetic construct
  misc_feature 1..22: note = chemically synthesized
  source 1..22: mol_type = other DNA
cctattaaaaaaaaaaaggcaa

SEQ ID NO: 83583 - DNA, 22 bp, synthetic construct
  misc_feature 1..22: note = chemically synthesized
  source 1..22: mol_type = other DNA
ttaaaaaaaaaaaggcaaaaga

SEQ ID NO: 83584 - DNA, 22 bp, synthetic construct
  misc_feature 1..22: note = chemically synthesized
  source 1..22: mol_type = other DNA
aaaaaaaaaaggcaaaagagaa

SEQ ID NO: 83585 - DNA, 22 bp, synthetic construct
  misc_feature 1..22: note = chemically synthesized
  source 1..22: mol_type = other DNA
tgtttccctaacatcactgtgg

SEQ ID NO: 83586 - DNA, 22 bp, synthetic construct
  misc_feature 1..22: note = chemically synthesized
  source 1..22: mol_type = other DNA
ccctaacatcactgtggctgtt

SEQ ID NO: 83587 - DNA, 22 bp, synthetic construct
  misc_feature 1..22: note = chemically synthesized
  source 1..22: mol_type = other DNA
cctaacatcactgtggctgttt

SEQ ID NO: 83588 - DNA, 22 bp, synthetic construct
  misc_feature 1..22: note = chemically synthesized
  source 1..22: mol_type = other DNA
acatcactgtggctgttttcgt

SEQ ID NO: 83589 - DNA, 22 bp, synthetic construct
  misc_feature 1..22: note = chemically synthesized
  source 1..22: mol_type = other DNA
tggctgttttcgtaacgtttct

SEQ ID NO: 83590 - DNA, 22 bp, synthetic construct
  misc_feature 1..22: note = chemically synthesized
  source 1..22: mol_type = other DNA
ttttcgtaacgtttctcagtga

SEQ ID NO: 83591 - DNA, 22 bp, synthetic construct
  misc_feature 1..22: note = chemically synthesized
  source 1..22: mol_type = other DNA
tcgtaacgtttctcagtgacgc

SEQ ID NO: 83592 - DNA, 22 bp, synthetic construct
  misc_feature 1..22: note = chemically synthesized
  source 1..22: mol_type = other DNA
cgtaacgtttctcagtgacgct

SEQ ID NO: 83593 - DNA, 22 bp, synthetic construct
  misc_feature 1..22: note = chemically synthesized
  source 1..22: mol_type = other DNA
gtaacgtttctcagtgacgctg

SEQ ID NO: 83594 - DNA, 22 bp, synthetic construct
  misc_feature 1..22: note = chemically synthesized
  source 1..22: mol_type = other DNA
ctcagtgacgctggatagtagc

SEQ ID NO: 83595 - DNA, 22 bp, synthetic construct
  misc_feature 1..22: note = chemically synthesized
  source 1..22: mol_type = other DNA
tcagtgacgctggatagtagcc

SEQ ID NO: 83596 - DNA, 22 bp, synthetic construct
  misc_feature 1..22: note = chemically synthesized
  source 1..22: mol_type = other DNA
agtgacgctggatagtagcctt

SEQ ID NO: 83597 - DNA, 22 bp, synthetic construct
  misc_feature 1..22: note = chemically synthesized
  source 1..22: mol_type = other DNA
gatagtagccttgcaggcctta

SEQ ID NO: 83598 - DNA, 22 bp, synthetic construct
  misc_feature 1..22: note = chemically synthesized
  source 1..22: mol_type = other DNA
gcaggccttacaaaggaatctg

SEQ ID NO: 83599 - DNA, 22 bp, synthetic construct
  misc_feature 1..22: note = chemically synthesized
  source 1..22: mol_type = other DNA
caggccttacaaaggaatctga

SEQ ID NO: 83600 - DNA, 22 bp, synthetic construct
  misc_feature 1..22: note = chemically synthesized
  source 1..22: mol_type = other DNA
acaaaggaatctgataactgct

SEQ ID NO: 83601 - DNA, 22 bp, synthetic construct
  misc_feature 1..22: note = chemically synthesized
  source 1..22: mol_type = other DNA
caaaggaatctgataactgctt

SEQ ID NO: 83602 - DNA, 22 bp, synthetic construct
  misc_feature 1..22: note = chemically synthesized
  source 1..22: mol_type = other DNA
ataactgcttctcactggctct

SEQ ID NO: 83603 - DNA, 22 bp, synthetic construct
  misc_feature 1..22: note = chemically synthesized
  source 1..22: mol_type = other DNA
cttctcactggctctgcaggct

SEQ ID NO: 83604 - DNA, 22 bp, synthetic construct
  misc_feature 1..22: note = chemically synthesized
  source 1..22: mol_type = other DNA
ctcactggctctgcaggctacc

SEQ ID NO: 83605 - DNA, 22 bp, synthetic construct
  misc_feature 1..22: note = chemically synthesized
  source 1..22: mol_type = other DNA
tcactggctctgcaggctacca

SEQ ID NO: 83606 - DNA, 22 bp, synthetic construct
  misc_feature 1..22: note = chemically synthesized
  source 1..22: mol_type = other DNA
actggctctgcaggctaccaca

SEQ ID NO: 83607 - DNA, 22 bp, synthetic construct
  misc_feature 1..22: note = chemically synthesized
  source 1..22: mol_type = other DNA
gctctgcaggctaccacatcaa

SEQ ID NO: 83608 - DNA, 22 bp, synthetic construct
  misc_feature 1..22: note = chemically synthesized
  source 1..22: mol_type = other DNA
tgcaggctaccacatcaacaac

SEQ ID NO: 83609 - DNA, 22 bp, synthetic construct
  misc_feature 1..22: note = chemically synthesized
  source 1..22: mol_type = other DNA
caggctaccacatcaacaacag

SEQ ID NO: 83610 - DNA, 22 bp, synthetic construct
  misc_feature 1..22: note = chemically synthesized
  source 1..22: mol_type = other DNA
ccacatcaacaacagtttcagc

SEQ ID NO: 83611 - DNA, 22 bp, synthetic construct
  misc_feature 1..22: note = chemically synthesized
  source 1..22: mol_type = other DNA
cagctgttgttgcctaattcat

SEQ ID NO: 83612 - DNA, 22 bp, synthetic construct
  misc_feature 1..22: note = chemically synthesized
  source 1..22: mol_type = other DNA
agctgttgttgcctaattcatg

SEQ ID NO: 83613 - DNA, 22 bp, synthetic construct
  misc_feature 1..22: note = chemically synthesized
  source 1..22: mol_type = other DNA
ttgttgcctaattcatggaaaa

SEQ ID NO: 83614 - DNA, 22 bp, synthetic construct
  misc_feature 1..22: note = chemically synthesized
  source 1..22: mol_type = other DNA
ttgcctaattcatggaaaacaa

SEQ ID NO: 83615 - DNA, 22 bp, synthetic construct
  misc_feature 1..22: note = chemically synthesized
  source 1..22: mol_type = other DNA
cctaattcatggaaaacaagtt

SEQ ID NO: 83616 - DNA, 22 bp, synthetic construct
  misc_feature 1..22: note = chemically synthesized
  source 1..22: mol_type = other DNA
attcatggaaaacaagtttcct

SEQ ID NO: 83617 - DNA, 22 bp, synthetic construct
  misc_feature 1..22: note = chemically synthesized
  source 1..22: mol_type = other DNA
atggaaaacaagtttccttaga

SEQ ID NO: 83618 - DNA, 22 bp, synthetic construct
  misc_feature 1..22: note = chemically synthesized
  source 1..22: mol_type = other DNA
ccttagaagctggctttttgag

SEQ ID NO: 83619 - DNA, 22 bp, synthetic construct
  misc_feature 1..22: note = chemically synthesized
  source 1..22: mol_type = other DNA
cttagaagctggctttttgaga

SEQ ID NO: 83620 - DNA, 22 bp, synthetic construct
  misc_feature 1..22: note = chemically synthesized
  source 1..22: mol_type = other DNA
agaagctggctttttgagatat

SEQ ID NO: 83621 - DNA, 22 bp, synthetic construct
  misc_feature 1..22: note = chemically synthesized
  source 1..22: mol_type = other DNA
gaagctggctttttgagatata

SEQ ID NO: 83622 - DNA, 22 bp, synthetic construct
  misc_feature 1..22: note = chemically synthesized
  source 1..22: mol_type = other DNA
gctttttgagatatatggaaaa

SEQ ID NO: 83623 - DNA, 22 bp, synthetic construct
  misc_feature 1..22: note = chemically synthesized
  source 1..22: mol_type = other DNA
tttgagatatatggaaaaatgt

SEQ ID NO: 83624 - DNA, 22 bp, synthetic construct
  misc_feature 1..22: note = chemically synthesized
  source 1..22: mol_type = other DNA
ttgagatatatggaaaaatgtc

SEQ ID NO: 83625 - DNA, 22 bp, synthetic construct
  misc_feature 1..22: note = chemically synthesized
  source 1..22: mol_type = other DNA
tgagatatatggaaaaatgtct

SEQ ID NO: 83626 - DNA, 22 bp, synthetic construct
  misc_feature 1..22: note = chemically synthesized
  source 1..22: mol_type = other DNA
gagatatatggaaaaatgtctc

SEQ ID NO: 83627 - DNA, 22 bp, synthetic construct
  misc_feature 1..22: note = chemically synthesized
  source 1..22: mol_type = other DNA
agatatatggaaaaatgtctcc

SEQ ID NO: 83628 - DNA, 22 bp, synthetic construct
  misc_feature 1..22: note = chemically synthesized
  source 1..22: mol_type = other DNA
cacctggctactatgtagcttt

SEQ ID NO: 83629 - DNA, 22 bp, synthetic construct
  misc_feature 1..22: note = chemically synthesized
  source 1..22: mol_type = other DNA
gctactatgtagcttttcaaaa

SEQ ID NO: 83630 - DNA, 22 bp, synthetic construct
  misc_feature 1..22: note = chemically synthesized
  source 1..22: mol_type = other DNA
ctatgtagcttttcaaaacaga

SEQ ID NO: 83631 - DNA, 22 bp, synthetic construct
  misc_feature 1..22: note = chemically synthesized
  source 1..22: mol_type = other DNA
tgtagcttttcaaaacagacag

SEQ ID NO: 83632 - DNA, 22 bp, synthetic construct
  misc_feature 1..22: note = chemically synthesized
  source 1..22: mol_type = other DNA
ttcaaaacagacagtgttttaa

SEQ ID NO: 83633 - DNA, 22 bp, synthetic construct
  misc_feature 1..22: note = chemically synthesized
  source 1..22: mol_type = other DNA
tcaaaacagacagtgttttaaa

SEQ ID NO: 83634 - DNA, 22 bp, synthetic construct
  misc_feature 1..22: note = chemically synthesized
  source 1..22: mol_type = other DNA
caaaacagacagtgttttaaac

SEQ ID NO: 83635 - DNA, 22 bp, synthetic construct
  misc_feature 1..22: note = chemically synthesized
  source 1..22: mol_type = other DNA
aaaacagacagtgttttaaaca

SEQ ID NO: 83636 - DNA, 22 bp, synthetic construct
  misc_feature 1..22: note = chemically synthesized
  source 1..22: mol_type = other DNA
taaacacctgtgatgtctccat

SEQ ID NO: 83637 - DNA, 22 bp, synthetic construct
  misc_feature 1..22: note = chemically synthesized
  source 1..22: mol_type = other DNA
aaacacctgtgatgtctccatc

SEQ ID NO: 83638 - DNA, 22 bp, synthetic construct
  misc_feature 1..22: note = chemically synthesized
  source 1..22: mol_type = other DNA
aacacctgtgatgtctccatct

SEQ ID NO: 83639 - DNA, 22 bp, synthetic construct
  misc_feature 1..22: note = chemically synthesized
  source 1..22: mol_type = other DNA
tgatgtctccatctgctcttcc

SEQ ID NO: 83640 - DNA, 22 bp, synthetic construct
  misc_feature 1..22: note = chemically synthesized
  source 1..22: mol_type = other DNA
catctgctcttcctttcaggac

SEQ ID NO: 83641 - DNA, 22 bp, synthetic construct
  misc_feature 1..22: note = chemically synthesized
  source 1..22: mol_type = other DNA
ctcttcctttcaggacctgggc

SEQ ID NO: 83642 - DNA, 22 bp, synthetic construct
  misc_feature 1..22: note = chemically synthesized
  source 1..22: mol_type = other DNA
ttcctttcaggacctgggctga

SEQ ID NO: 83643 - DNA, 22 bp, synthetic construct
  misc_feature 1..22: note = chemically synthesized
  source 1..22: mol_type = other DNA
cctttcaggacctgggctgatg

SEQ ID NO: 83644 - DNA, 22 bp, synthetic construct
  misc_feature 1..22: note = chemically synthesized
  source 1..22: mol_type = other DNA
ctttcaggacctgggctgatgt

SEQ ID NO: 83645 - DNA, 22 bp, synthetic construct
  misc_feature 1..22: note = chemically synthesized
  source 1..22: mol_type = other DNA
tcaggacctgggctgatgtctc

SEQ ID NO: 83646 - DNA, 22 bp, synthetic construct
  misc_feature 1..22: note = chemically synthesized
  source 1..22: mol_type = other DNA
caggacctgggctgatgtctct

SEQ ID NO: 83647 - DNA, 22 bp, synthetic construct
  misc_feature 1..22: note = chemically synthesized
  source 1..22: mol_type = other DNA
aggacctgggctgatgtctctg

SEQ ID NO: 83648 - DNA, 22 bp, synthetic construct
  misc_feature 1..22: note = chemically synthesized
  source 1..22: mol_type = other DNA
ggctgatgtctctgaaattgcc

SEQ ID NO: 83649 - DNA, 22 bp, synthetic construct
  misc_feature 1..22: note = chemically synthesized
  source 1..22: mol_type = other DNA
atgtctctgaaattgccttttc

SEQ ID NO: 83650 - DNA, 22 bp, synthetic construct
  misc_feature 1..22: note = chemically synthesized
  source 1..22: mol_type = other DNA
tgaaattgccttttcttcctca

SEQ ID NO: 83651 - DNA, 22 bp, synthetic construct
  misc_feature 1..22: note = chemically synthesized
  source 1..22: mol_type = other DNA
aaattgccttttcttcctcagg

SEQ ID NO: 83652 - DNA, 22 bp, synthetic construct
  misc_feature 1..22: note = chemically synthesized
  source 1..22: mol_type = other DNA
ccttttcttcctcaggagaggt

SEQ ID NO: 83653 - DNA, 22 bp, synthetic construct
  misc_feature 1..22: note = chemically synthesized
  source 1..22: mol_type = other DNA
ttcttcctcaggagaggtttag

SEQ ID NO: 83654 - DNA, 22 bp, synthetic construct
  misc_feature 1..22: note = chemically synthesized
  source 1..22: mol_type = other DNA
tcttcctcaggagaggtttagt

SEQ ID NO: 83655 - DNA, 22 bp, synthetic construct
  misc_feature 1..22: note = chemically synthesized
  source 1..22: mol_type = other DNA
cttcctcaggagaggtttagtt

SEQ ID NO: 83656 - DNA, 22 bp, synthetic construct
  misc_feature 1..22: note = chemically synthesized
  source 1..22: mol_type = other DNA
ttcctcaggagaggtttagtta

SEQ ID NO: 83657 - DNA, 22 bp, synthetic construct
  misc_feature 1..22: note = chemically synthesized
  source 1..22: mol_type = other DNA
cctcaggagaggtttagttatt

SEQ ID NO: 83658 - DNA, 22 bp, synthetic construct
  misc_feature 1..22: note = chemically synthesized
  source 1..22: mol_type = other DNA
ctcaggagaggtttagttattt

SEQ ID NO: 83659 - DNA, 22 bp, synthetic construct
  misc_feature 1..22: note = chemically synthesized
  source 1..22: mol_type = other DNA
aggagaggtttagttatttttt

SEQ ID NO: 83660 - DNA, 22 bp, synthetic construct
  misc_feature 1..22: note = chemically synthesized
  source 1..22: mol_type = other DNA
agttatttttttaagtaattgc

SEQ ID NO: 83661 - DNA, 22 bp, synthetic construct
  misc_feature 1..22: note = chemically synthesized
  source 1..22: mol_type = other DNA
gttatttttttaagtaattgct

SEQ ID NO: 83662 - DNA, 22 bp, synthetic construct
  misc_feature 1..22: note = chemically synthesized
  source 1..22: mol_type = other DNA
tttttttaagtaattgcttcca

SEQ ID NO: 83663 - DNA, 22 bp, synthetic construct
  misc_feature 1..22: note = chemically synthesized
  source 1..22: mol_type = other DNA
ttttaagtaattgcttccagat

SEQ ID NO: 83664 - DNA, 22 bp, synthetic construct
  misc_feature 1..22: note = chemically synthesized
  source 1..22: mol_type = other DNA
tttaagtaattgcttccagata

SEQ ID NO: 83665 - DNA, 22 bp, synthetic construct
  misc_feature 1..22: note = chemically synthesized
  source 1..22: mol_type = other DNA
ttaagtaattgcttccagatag

SEQ ID NO: 83666 - DNA, 22 bp, synthetic construct
  misc_feature 1..22: note = chemically synthesized
  source 1..22: mol_type = other DNA
taagtaattgcttccagataga

SEQ ID NO: 83667 - DNA, 22 bp, synthetic construct
  misc_feature 1..22: note = chemically synthesized
  source 1..22: mol_type = other DNA
aagtaattgcttccagatagag

SEQ ID NO: 83668 - DNA, 22 bp, synthetic construct
  misc_feature 1..22: note = chemically synthesized
  source 1..22: mol_type = other DNA
agtaattgcttccagatagagg

SEQ ID NO: 83669 - DNA, 22 bp, synthetic construct
  misc_feature 1..22: note = chemically synthesized
  source 1..22: mol_type = other DNA
cttccagatagaggcctttgca

SEQ ID NO: 83670 - DNA, 22 bp, synthetic construct
  misc_feature 1..22: note = chemically synthesized
  source 1..22: mol_type = other DNA
ccagatagaggcctttgcaaaa

SEQ ID NO: 83671 - DNA, 22 bp, synthetic construct
  misc_feature 1..22: note = chemically synthesized
  source 1..22: mol_type = other DNA
cagatagaggcctttgcaaaac

SEQ ID NO: 83672 - DNA, 22 bp, synthetic construct
  misc_feature 1..22: note = chemically synthesized
  source 1..22: mol_type = other DNA
tgcaaaacaaacaatctaaact

SEQ ID NO: 83673 - DNA, 22 bp, synthetic construct
  misc_feature 1..22: note = chemically synthesized
  source 1..22: mol_type = other DNA
gcaaaacaaacaatctaaacta

SEQ ID NO: 83674 - DNA, 22 bp, synthetic construct
  misc_feature 1..22: note = chemically synthesized
  source 1..22: mol_type = other DNA
caaaacaaacaatctaaactac

SEQ ID NO: 83675 - DNA, 22 bp, synthetic construct
  misc_feature 1..22: note = chemically synthesized
  source 1..22: mol_type = other DNA
aactactaatgttctaaacctg

SEQ ID NO: 83676 - DNA, 22 bp, synthetic construct
  misc_feature 1..22: note = chemically synthesized
  source 1..22: mol_type = other DNA
ctaatgttctaaacctgtttct

SEQ ID NO: 83677 - DNA, 22 bp, synthetic construct
  misc_feature 1..22: note = chemically synthesized
  source 1..22: mol_type = other DNA
atgttctaaacctgtttctttc

SEQ ID NO: 83678 - DNA, 22 bp, synthetic construct
  misc_feature 1..22: note = chemically synthesized
  source 1..22: mol_type = other DNA
taaacctgtttctttctgtata

SEQ ID NO: 83679 - DNA, 22 bp, synthetic construct
  misc_feature 1..22: note = chemically synthesized
  source 1..22: mol_type = other DNA
aacctgtttctttctgtataaa

SEQ ID NO: 83680 - DNA, 22 bp, synthetic construct
  misc_feature 1..22: note = chemically synthesized
  source 1..22: mol_type = other DNA
tttctttctgtataaagcccag

SEQ ID NO: 83681 - DNA, 22 bp, synthetic construct
  misc_feature 1..22: note = chemically synthesized
  source 1..22: mol_type = other DNA
ctttctgtataaagcccagtaa

SEQ ID NO: 83682 - DNA, 22 bp, synthetic construct
  misc_feature 1..22: note = chemically synthesized
  source 1..22: mol_type = other DNA
tttctgtataaagcccagtaat

SEQ ID NO: 83683 - DNA, 22 bp, synthetic construct
  misc_feature 1..22: note = chemically synthesized
  source 1..22: mol_type = other DNA
tctgtataaagcccagtaatca

SEQ ID NO: 83684 - DNA, 22 bp, synthetic construct
  misc_feature 1..22: note = chemically synthesized
  source 1..22: mol_type = other DNA
ctgtataaagcccagtaatcat

SEQ ID NO: 83685 - DNA, 22 bp, synthetic construct
  misc_feature 1..22: note = chemically synthesized
  source 1..22: mol_type = other DNA
tgtataaagcccagtaatcata

SEQ ID NO: 83686 - DNA, 22 bp, synthetic construct
  misc_feature 1..22: note = chemically synthesized
  source 1..22: mol_type = other DNA
tataaagcccagtaatcatata

SEQ ID NO: 83687 - DNA, 22 bp, synthetic construct
  misc_feature 1..22: note = chemically synthesized
  source 1..22: mol_type = other DNA
actttcattggctttttttttt

SEQ ID NO: 83688 - DNA, 22 bp, synthetic construct
  misc_feature 1..22: note = chemically synthesized
  source 1..22: mol_type = other DNA
ctttcattggcttttttttttt

SEQ ID NO: 83689 - DNA, 22 bp, synthetic construct
  misc_feature 1..22: note = chemically synthesized
  source 1..22: mol_type = other DNA
tcattggctttttttttttttt

SEQ ID NO: 83690 - DNA, 22 bp, synthetic construct
  misc_feature 1..22: note = chemically synthesized
  source 1..22: mol_type = other DNA
cattggcttttttttttttttt

SEQ ID NO: 83691 - DNA, 22 bp, synthetic construct
  misc_feature 1..22: note = chemically synthesized
  source 1..22: mol_type = other DNA
attggctttttttttttttttt

SEQ ID NO: 83692 - DNA, 22 bp, synthetic construct
  misc_feature 1..22: note = chemically synthesized
  source 1..22: mol_type = other DNA
gctttttttttttttttttact

SEQ ID NO: 83693 - DNA, 22 bp, synthetic construct
  misc_feature 1..22: note = chemically synthesized
  source 1..22: mol_type = other DNA
tttttttttttttttactgatt

SEQ ID NO: 83694 - DNA, 22 bp, synthetic construct
  misc_feature 1..22: note = chemically synthesized
  source 1..22: mol_type = other DNA
ttttttttttttttactgattt

SEQ ID NO: 83695 - DNA, 22 bp, synthetic construct
  misc_feature 1..22: note = chemically synthesized
  source 1..22: mol_type = other DNA
tttttttttttttactgatttt

SEQ ID NO: 83696 - DNA, 22 bp, synthetic construct
  misc_feature 1..22: note = chemically synthesized
  source 1..22: mol_type = other DNA
ttttttttttttactgattttc

SEQ ID NO: 83697 - DNA, 22 bp, synthetic construct
  misc_feature 1..22: note = chemically synthesized
  source 1..22: mol_type = other DNA
tttttttttttactgattttcc

SEQ ID NO: 83698 - DNA, 22 bp, synthetic construct
  misc_feature 1..22: note = chemically synthesized
  source 1..22: mol_type = other DNA
ttttttttttactgattttcct

SEQ ID NO: 83699 - DNA, 22 bp, synthetic construct
  misc_feature 1..22: note = chemically synthesized
  source 1..22: mol_type = other DNA
tttttttttactgattttcctc

SEQ ID NO: 83700 - DNA, 22 bp, synthetic construct
  misc_feature 1..22: note = chemically synthesized
  source 1..22: mol_type = other DNA
ttttttttactgattttcctcc

SEQ ID NO: 83701 - DNA, 22 bp, synthetic construct
  misc_feature 1..22: note = chemically synthesized
  source 1..22: mol_type = other DNA
tttttttactgattttcctccc

SEQ ID NO: 83702 - DNA, 22 bp, synthetic construct
  misc_feature 1..22: note = chemically synthesized
  source 1..22: mol_type = other DNA
ttttttactgattttcctccct

SEQ ID NO: 83703 - DNA, 22 bp, synthetic construct
  misc_feature 1..22: note = chemically synthesized
  source 1..22: mol_type = other DNA
tttttactgattttcctccctt

SEQ ID NO: 83704 - DNA, 22 bp, synthetic construct
  misc_feature 1..22: note = chemically synthesized
  source 1..22: mol_type = other DNA
ttttactgattttcctcccttt

SEQ ID NO: 83705 - DNA, 22 bp, synthetic construct
  misc_feature 1..22: note = chemically synthesized
  source 1..22: mol_type = other DNA
tttactgattttcctccctttg

SEQ ID NO: 83706 - DNA, 22 bp, synthetic construct
  misc_feature 1..22: note = chemically synthesized
  source 1..22: mol_type = other DNA
ttactgattttcctccctttgg

SEQ ID NO: 83707 - DNA, 22 bp, synthetic construct
  misc_feature 1..22: note = chemically synthesized
  source 1..22: mol_type = other DNA
tactgattttcctccctttggc

SEQ ID NO: 83708 - DNA, 22 bp, synthetic construct
  misc_feature 1..22: note = chemically synthesized
  source 1..22: mol_type = other DNA
actgattttcctccctttggct

SEQ ID NO: 83709 - DNA, 22 bp, synthetic construct
  misc_feature 1..22: note = chemically synthesized
  source 1..22: mol_type = other DNA
ctgattttcctccctttggctg

SEQ ID NO: 83710 - DNA, 22 bp, synthetic construct
  misc_feature 1..22: note = chemically synthesized
  source 1..22: mol_type = other DNA
attttcctccctttggctgaat

SEQ ID NO: 83711 - DNA, 22 bp, synthetic construct
  misc_feature 1..22: note = chemically synthesized
  source 1..22: mol_type = other DNA
tcctccctttggctgaattgta

SEQ ID NO: 83712 - DNA, 22 bp, synthetic construct
  misc_feature 1..22: note = chemically synthesized
  source 1..22: mol_type = other DNA
cctccctttggctgaattgtaa

SEQ ID NO: 83713 - DNA, 22 bp, synthetic construct
  misc_feature 1..22: note = chemically synthesized
  source 1..22: mol_type = other DNA
ctccctttggctgaattgtaaa

SEQ ID NO: 83714 - DNA, 22 bp, synthetic construct
  misc_feature 1..22: note = chemically synthesized
  source 1..22: mol_type = other DNA
cctttggctgaattgtaaagat

SEQ ID NO: 83715 - DNA, 22 bp, synthetic construct
  misc_feature 1..22: note = chemically synthesized
  source 1..22: mol_type = other DNA
tggctgaattgtaaagattctg

SEQ ID NO: 83716 - DNA, 22 bp, synthetic construct
  misc_feature 1..22: note = chemically synthesized
  source 1..22: mol_type = other DNA
ggctgaattgtaaagattctga

SEQ ID NO: 83717 - DNA, 22 bp, synthetic construct
  misc_feature 1..22: note = chemically synthesized
  source 1..22: mol_type = other DNA
gctgaattgtaaagattctgaa

SEQ ID NO: 83718 - DNA, 22 bp, synthetic construct
  misc_feature 1..22: note = chemically synthesized
  source 1..22: mol_type = other DNA
aattgtaaagattctgaagttc

SEQ ID NO: 83719 - DNA, 22 bp, synthetic construct
  misc_feature 1..22: note = chemically synthesized
  source 1..22: mol_type = other DNA
taaagattctgaagttcttcat

SEQ ID NO: 83720 - DNA, 22 bp, synthetic construct
  misc_feature 1..22: note = chemically synthesized
  source 1..22: mol_type = other DNA
tgaagttcttcataaatcttat

SEQ ID NO: 83721 - DNA, 22 bp, synthetic construct
  misc_feature 1..22: note = chemically synthesized
  source 1..22: mol_type = other DNA
aagttcttcataaatcttatca

SEQ ID NO: 83722 - DNA, 22 bp, synthetic construct
  misc_feature 1..22: note = chemically synthesized
  source 1..22: mol_type = other DNA
ttcataaatcttatcatcatag

SEQ ID NO: 83723 - DNA, 22 bp, synthetic construct
  misc_feature 1..22: note = chemically synthesized
  source 1..22: mol_type = other DNA
cataaatcttatcatcatagta

SEQ ID NO: 83724 - DNA, 22 bp, synthetic construct
  misc_feature 1..22: note = chemically synthesized
  source 1..22: mol_type = other DNA
ataaatcttatcatcatagtac

SEQ ID NO: 83725 - DNA, 22 bp, synthetic construct
  misc_feature 1..22: note = chemically synthesized
  source 1..22: mol_type = other DNA
atcatcatagtacaattatata

SEQ ID NO: 83726 - DNA, 22 bp, synthetic construct
  misc_feature 1..22: note = chemically synthesized
  source 1..22: mol_type = other DNA
tcatcatagtacaattatatag

SEQ ID NO: 83727 - DNA, 22 bp, synthetic construct
  misc_feature 1..22: note = chemically synthesized
  source 1..22: mol_type = other DNA
tatagctctaaaataagcaatg

SEQ ID NO: 83728 - DNA, 22 bp, synthetic construct
  misc_feature 1..22: note = chemically synthesized
  source 1..22: mol_type = other DNA
taaaataagcaatgatttctga

SEQ ID NO: 83729 - DNA, 22 bp, synthetic construct
  misc_feature 1..22: note = chemically synthesized
  source 1..22: mol_type = other DNA
aaataagcaatgatttctgagg

SEQ ID NO: 83730 - DNA, 22 bp, synthetic construct
  misc_feature 1..22: note = chemically synthesized
  source 1..22: mol_type = other DNA
ctgaggatactcttaggtattt

SEQ ID NO: 83731 - DNA, 22 bp, synthetic construct
  misc_feature 1..22: note = chemically synthesized
  source 1..22: mol_type = other DNA
tgaggatactcttaggtatttt

SEQ ID NO: 83732 - DNA, 22 bp, synthetic construct
  misc_feature 1..22: note = chemically synthesized
  source 1..22: mol_type = other DNA
aggatactcttaggtatttttt

SEQ ID NO: 83733 - DNA, 22 bp, synthetic construct
  misc_feature 1..22: note = chemically synthesized
  source 1..22: mol_type = other DNA
ttaggtattttttattaactgt

SEQ ID NO: 83734 - DNA, 22 bp, synthetic construct
  misc_feature 1..22: note = chemically synthesized
  source 1..22: mol_type = other DNA
aggtattttttattaactgttt

SEQ ID NO: 83735 - DNA, 22 bp, synthetic construct
  misc_feature 1..22: note = chemically synthesized
  source 1..22: mol_type = other DNA
ggtattttttattaactgtttt

SEQ ID NO: 83736 - DNA, 22 bp, synthetic construct
  misc_feature 1..22: note = chemically synthesized
  source 1..22: mol_type = other DNA
tttattaactgttttgtcacgg

SEQ ID NO: 83737 - DNA, 22 bp, synthetic construct
  misc_feature 1..22: note = chemically synthesized
  source 1..22: mol_type = other DNA
ttattaactgttttgtcacggc

SEQ ID NO: 83738 - DNA, 22 bp, synthetic construct
  misc_feature 1..22: note = chemically synthesized
  source 1..22: mol_type = other DNA
tattaactgttttgtcacggcc

SEQ ID NO: 83739 - DNA, 22 bp, synthetic construct
  misc_feature 1..22: note = chemically synthesized
  source 1..22: mol_type = other DNA
attaactgttttgtcacggcca

SEQ ID NO: 83740 - DNA, 22 bp, synthetic construct
  misc_feature 1..22: note = chemically synthesized
  source 1..22: mol_type = other DNA
ttaactgttttgtcacggccat

SEQ ID NO: 83741 - DNA, 22 bp, synthetic construct
  misc_feature 1..22: note = chemically synthesized
  source 1..22: mol_type = other DNA
actgttttgtcacggccattat

SEQ ID NO: 83742 - DNA, 22 bp, synthetic construct
  misc_feature 1..22: note = chemically synthesized
  source 1..22: mol_type = other DNA
ttttgtcacggccattatttca

SEQ ID NO: 83743 - DNA, 22 bp, synthetic construct
  misc_feature 1..22: note = chemically synthesized
  source 1..22: mol_type = other DNA
tgtcacggccattatttcaaac

SEQ ID NO: 83744 - DNA, 22 bp, synthetic construct
  misc_feature 1..22: note = chemically synthesized
  source 1..22: mol_type = other DNA
gtcacggccattatttcaaact

SEQ ID NO: 83745 - DNA, 22 bp, synthetic construct
  misc_feature 1..22: note = chemically synthesized
  source 1..22: mol_type = other DNA
tcacggccattatttcaaacta

SEQ ID NO: 83746 - DNA, 22 bp, synthetic construct
  misc_feature 1..22: note = chemically synthesized
  source 1..22: mol_type = other DNA
tttcaaactattttggttcaca

SEQ ID NO: 83747 - DNA, 22 bp, synthetic construct
  misc_feature 1..22: note = chemically synthesized
  source 1..22: mol_type = other DNA
caaactattttggttcacattc

SEQ ID NO: 83748 - DNA, 22 bp, synthetic construct
  misc_feature 1..22: note = chemically synthesized
  source 1..22: mol_type = other DNA
aaactattttggttcacattct

SEQ ID NO: 83749 - DNA, 22 bp, synthetic construct
  misc_feature 1..22: note = chemically synthesized
  source 1..22: mol_type = other DNA
ttttggttcacattctataggt

SEQ ID NO: 83750 - DNA, 22 bp, synthetic construct
  misc_feature 1..22: note = chemically synthesized
  source 1..22: mol_type = other DNA
tggttcacattctataggttgc

SEQ ID NO: 83751 - DNA, 22 bp, synthetic construct
  misc_feature 1..22: note = chemically synthesized
  source 1..22: mol_type = other DNA
ggttcacattctataggttgcc

SEQ ID NO: 83752 - DNA, 22 bp, synthetic construct
  misc_feature 1..22: note = chemically synthesized
  source 1..22: mol_type = other DNA
gttcacattctataggttgcct

SEQ ID NO: 83753 - DNA, 22 bp, synthetic construct
  misc_feature 1..22: note = chemically synthesized
  source 1..22: mol_type = other DNA
acattctataggttgcctaatc

SEQ ID NO: 83754 - DNA, 22 bp, synthetic construct
  misc_feature 1..22: note = chemically synthesized
  source 1..22: mol_type = other DNA
tataggttgcctaatctgaagc

SEQ ID NO: 83755 - DNA, 22 bp, synthetic construct
  misc_feature 1..22: note = chemically synthesized
  source 1..22: mol_type = other DNA
taggttgcctaatctgaagcac

SEQ ID NO: 83756 - DNA, 22 bp, synthetic construct
  misc_feature 1..22: note = chemically synthesized
  source 1..22: mol_type = other DNA
cctaatctgaagcacaaacact

SEQ ID NO: 83757 - DNA, 22 bp, synthetic construct
  misc_feature 1..22: note = chemically synthesized
  source 1..22: mol_type = other DNA
atctgaagcacaaacactcata

SEQ ID NO: 83758 - DNA, 22 bp, synthetic construct
  misc_feature 1..22: note = chemically synthesized
  source 1..22: mol_type = other DNA
aagcacaaacactcatagtatg

SEQ ID NO: 83759 - DNA, 22 bp, synthetic construct
  misc_feature 1..22: note = chemically synthesized
  source 1..22: mol_type = other DNA
atagtatgaagtcttcagatga

SEQ ID NO: 83760 - DNA, 22 bp, synthetic construct
  misc_feature 1..22: note = chemically synthesized
  source 1..22: mol_type = other DNA
cagatgagccttcctactctcc

SEQ ID NO: 83761 - DNA, 22 bp, synthetic construct
  misc_feature 1..22: note = chemically synthesized
  source 1..22: mol_type = other DNA
agatgagccttcctactctccc

SEQ ID NO: 83762 - DNA, 22 bp, synthetic construct
  misc_feature 1..22: note = chemically synthesized
  source 1..22: mol_type = other DNA
cctactctccctgttaaacata

SEQ ID NO: 83763 - DNA, 22 bp, synthetic construct
  misc_feature 1..22: note = chemically synthesized
  source 1..22: mol_type = other DNA
ctactctccctgttaaacataa

SEQ ID NO: 83764 - DNA, 22 bp, synthetic construct
  misc_feature 1..22: note = chemically synthesized
  source 1..22: mol_type = other DNA
ctctccctgttaaacataactc

SEQ ID NO: 83765 - DNA, 22 bp, synthetic construct
  misc_feature 1..22: note = chemically synthesized
  source 1..22: mol_type = other DNA
tccctgttaaacataactctca

SEQ ID NO: 83766 - DNA, 22 bp, synthetic construct
  misc_feature 1..22: note = chemically synthesized
  source 1..22: mol_type = other DNA
cctgttaaacataactctcaaa

SEQ ID NO: 83767 - DNA, 22 bp, synthetic construct
  misc_feature 1..22: note = chemically synthesized
  source 1..22: mol_type = other DNA
ttaaacataactctcaaaccaa

SEQ ID NO: 83768 - DNA, 22 bp, synthetic construct
  misc_feature 1..22: note = chemically synthesized
  source 1..22: mol_type = other DNA
aacataactctcaaaccaacaa

SEQ ID NO: 83769 - DNA, 22 bp, synthetic construct
  misc_feature 1..22: note = chemically synthesized
  source 1..22: mol_type = other DNA
tcaaaccaacaactcagttgtg

SEQ ID NO: 83770 - DNA, 22 bp, synthetic construct
  misc_feature 1..22: note = chemically synthesized
  source 1..22: mol_type = other DNA
aaaccaacaactcagttgtgtc

SEQ ID NO: 83771 - DNA, 22 bp, synthetic construct
  misc_feature 1..22: note = chemically synthesized
  source 1..22: mol_type = other DNA
agttgtgtcagacatgtaatat

SEQ ID NO: 83772 - DNA, 22 bp, synthetic construct
  misc_feature 1..22: note = chemically synthesized
  source 1..22: mol_type = other DNA
tgtcagacatgtaatattgttc

SEQ ID NO: 83773 - DNA, 22 bp, synthetic construct
  misc_feature 1..22: note = chemically synthesized
  source 1..22: mol_type = other DNA
ttcaaataataaatataaattc

SEQ ID NO: 83774 - DNA, 22 bp, synthetic construct
  misc_feature 1..22: note = chemically synthesized
  source 1..22: mol_type = other DNA
aaataataaatataaattcatt

SEQ ID NO: 83775 - DNA, 22 bp, synthetic construct
  misc_feature 1..22: note = chemically synthesized
  source 1..22: mol_type = other DNA
attctgatgcttccctatgagt

SEQ ID NO: 83776 - DNA, 22 bp, synthetic construct
  misc_feature 1..22: note = chemically synthesized
  source 1..22: mol_type = other DNA
tgatgcttccctatgagtggct

SEQ ID NO: 83777 - DNA, 22 bp, synthetic construct
  misc_feature 1..22: note = chemically synthesized
  source 1..22: mol_type = other DNA
atgcttccctatgagtggctgg

SEQ ID NO: 83778 - DNA, 22 bp, synthetic construct
  misc_feature 1..22: note = chemically synthesized
  source 1..22: mol_type = other DNA
ccctatgagtggctggtggaaa

SEQ ID NO: 83779 - DNA, 22 bp, synthetic construct
  misc_feature 1..22: note = chemically synthesized
  source 1..22: mol_type = other DNA
cctatgagtggctggtggaaaa

SEQ ID NO: 83780 - DNA, 22 bp, synthetic construct
  misc_feature 1..22: note = chemically synthesized
  source 1..22: mol_type = other DNA
tgagtggctggtggaaaacata

SEQ ID NO: 83781 - DNA, 22 bp, synthetic construct
  misc_feature 1..22: note = chemically synthesized
  source 1..22: mol_type = other DNA
gtggaaaacatattgtcagttg

SEQ ID NO: 83782 - DNA, 22 bp, synthetic construct
  misc_feature 1..22: note = chemically synthesized
  source 1..22: mol_type = other DNA
tcagttgttgaagaattctctg

SEQ ID NO: 83783 - DNA, 22 bp, synthetic construct
  misc_feature 1..22: note = chemically synthesized
  source 1..22: mol_type = other DNA
ttgaagaattctctgcttcccc

SEQ ID NO: 83784 - DNA, 22 bp, synthetic construct
  misc_feature 1..22: note = chemically synthesized
  source 1..22: mol_type = other DNA
aagaattctctgcttccccagt

SEQ ID NO: 83785 - DNA, 22 bp, synthetic construct
  misc_feature 1..22: note = chemically synthesized
  source 1..22: mol_type = other DNA
tctgcttccccagtgttgtgtc

SEQ ID NO: 83786 - DNA, 22 bp, synthetic construct
  misc_feature 1..22: note = chemically synthesized
  source 1..22: mol_type = other DNA
tgcttccccagtgttgtgtcag

SEQ ID NO: 83787 - DNA, 22 bp, synthetic construct
  misc_feature 1..22: note = chemically synthesized
  source 1..22: mol_type = other DNA
cttccccagtgttgtgtcagct

SEQ ID NO: 83788 - DNA, 22 bp, synthetic construct
  misc_feature 1..22: note = chemically synthesized
  source 1..22: mol_type = other DNA
ccccagtgttgtgtcagctctc

SEQ ID NO: 83789 - DNA, 22 bp, synthetic construct
  misc_feature 1..22: note = chemically synthesized
  source 1..22: mol_type = other DNA
cccagtgttgtgtcagctctcc

SEQ ID NO: 83790 - DNA, 22 bp, synthetic construct
  misc_feature 1..22: note = chemically synthesized
  source 1..22: mol_type = other DNA
tgtcagctctccggcgtatggg

SEQ ID NO: 83791 - DNA, 22 bp, synthetic construct
  misc_feature 1..22: note = chemically synthesized
  source 1..22: mol_type = other DNA
tccggcgtatgggagggtggat

SEQ ID NO: 83792 - DNA, 22 bp, synthetic construct
  misc_feature 1..22: note = chemically synthesized
  source 1..22: mol_type = other DNA
cggcgtatgggagggtggatgc

SEQ ID NO: 83793 - DNA, 22 bp, synthetic construct
  misc_feature 1..22: note = chemically synthesized
  source 1..22: mol_type = other DNA
attcactttcaaagcattagaa

SEQ ID NO: 83794 - DNA, 22 bp, synthetic construct
  misc_feature 1..22: note = chemically synthesized
  source 1..22: mol_type = other DNA
ttcactttcaaagcattagaag

SEQ ID NO: 83795 - DNA, 22 bp, synthetic construct
  misc_feature 1..22: note = chemically synthesized
  source 1..22: mol_type = other DNA
actttcaaagcattagaaggaa

SEQ ID NO: 83796 - DNA, 22 bp, synthetic construct
  misc_feature 1..22: note = chemically synthesized
  source 1..22: mol_type = other DNA
tcaaagcattagaaggaagctt

SEQ ID NO: 83797 - DNA, 22 bp, synthetic construct
  misc_feature 1..22: note = chemically synthesized
  source 1..22: mol_type = other DNA
caaagcattagaaggaagcttc

SEQ ID NO: 83798 - DNA, 22 bp, synthetic construct
  misc_feature 1..22: note = chemically synthesized
  source 1..22: mol_type = other DNA
aaagcattagaaggaagcttct

SEQ ID NO: 83799 - DNA, 22 bp, synthetic construct
  misc_feature 1..22: note = chemically synthesized
  source 1..22: mol_type = other DNA
gaaggaagcttctttggccatt

SEQ ID NO: 83800 - DNA, 22 bp, synthetic construct
  misc_feature 1..22: note = chemically synthesized
  source 1..22: mol_type = other DNA
ctttggccattgagaaatctat

SEQ ID NO: 83801 - DNA, 22 bp, synthetic construct
  misc_feature 1..22: note = chemically synthesized
  source 1..22: mol_type = other DNA
tttggccattgagaaatctatg

SEQ ID NO: 83802 - DNA, 22 bp, synthetic construct
  misc_feature 1..22: note = chemically synthesized
  source 1..22: mol_type = other DNA
tggccattgagaaatctatgag

SEQ ID NO: 83803 - DNA, 22 bp, synthetic construct
  misc_feature 1..22: note = chemically synthesized
  source 1..22: mol_type = other DNA
ggccattgagaaatctatgaga

SEQ ID NO: 83804 - DNA, 22 bp, synthetic construct
  misc_feature 1..22: note = chemically synthesized
  source 1..22: mol_type = other DNA
gccattgagaaatctatgagac

SEQ ID NO: 83805 - DNA, 22 bp, synthetic construct
  misc_feature 1..22: note = chemically synthesized
  source 1..22: mol_type = other DNA
agaaatctatgagacattcaca

SEQ ID NO: 83806 - DNA, 22 bp, synthetic construct
  misc_feature 1..22: note = chemically synthesized
  source 1..22: mol_type = other DNA
tgagacattcacatgacctcta

SEQ ID NO: 83807 - DNA, 22 bp, synthetic construct
  misc_feature 1..22: note = chemically synthesized
  source 1..22: mol_type = other DNA
acatgacctctacagattcagc

SEQ ID NO: 83808 - DNA, 22 bp, synthetic construct
  misc_feature 1..22: note = chemically synthesized
  source 1..22: mol_type = other DNA
tacagattcagcagctaacttc

SEQ ID NO: 83809 - DNA, 22 bp, synthetic construct
  misc_feature 1..22: note = chemically synthesized
  source 1..22: mol_type = other DNA
cagattcagcagctaacttctc

SEQ ID NO: 83810 - DNA, 22 bp, synthetic construct
  misc_feature 1..22: note = chemically synthesized
  source 1..22: mol_type = other DNA
agcagctaacttctcttttcat

SEQ ID NO: 83811 - DNA, 22 bp, synthetic construct
  misc_feature 1..22: note = chemically synthesized
  source 1..22: mol_type = other DNA
acttctcttttcattataaaac

SEQ ID NO: 83812 - DNA, 22 bp, synthetic construct
  misc_feature 1..22: note = chemically synthesized
  source 1..22: mol_type = other DNA
ctcttttcattataaaactggg

SEQ ID NO: 83813 - DNA, 22 bp, synthetic construct
  misc_feature 1..22: note = chemically synthesized
  source 1..22: mol_type = other DNA
tcttttcattataaaactgggg

SEQ ID NO: 83814 - DNA, 22 bp, synthetic construct
  misc_feature 1..22: note = chemically synthesized
  source 1..22: mol_type = other DNA
ttttcattataaaactggggca

SEQ ID NO: 83815 - DNA, 22 bp, synthetic construct
  misc_feature 1..22: note = chemically synthesized
  source 1..22: mol_type = other DNA
ttcattataaaactggggcata

SEQ ID NO: 83816 - DNA, 22 bp, synthetic construct
  misc_feature 1..22: note = chemically synthesized
  source 1..22: mol_type = other DNA
tcattataaaactggggcatag

SEQ ID NO: 83817 - DNA, 22 bp, synthetic construct
  misc_feature 1..22: note = chemically synthesized
  source 1..22: mol_type = other DNA
cattataaaactggggcatagg

SEQ ID NO: 83818 - DNA, 22 bp, synthetic construct
  misc_feature 1..22: note = chemically synthesized
  source 1..22: mol_type = other DNA
attataaaactggggcatagga

SEQ ID NO: 83819 - DNA, 22 bp, synthetic construct
  misc_feature 1..22: note = chemically synthesized
  source 1..22: mol_type = other DNA
taaaactggggcataggaatct

SEQ ID NO: 83820 - DNA, 22 bp, synthetic construct
  misc_feature 1..22: note = chemically synthesized
  source 1..22: mol_type = other DNA
gggcataggaatcttgtcagat

SEQ ID NO: 83821 - DNA, 22 bp, synthetic construct
  misc_feature 1..22: note = chemically synthesized
  source 1..22: mol_type = other DNA
gtcagattggccacattccagt

SEQ ID NO: 83822 - DNA, 22 bp, synthetic construct
  misc_feature 1..22: note = chemically synthesized
  source 1..22: mol_type = other DNA
tcagattggccacattccagtc

SEQ ID NO: 83823 - DNA, 22 bp, synthetic construct
  misc_feature 1..22: note = chemically synthesized
  source 1..22: mol_type = other DNA
gccacattccagtcggccagga

SEQ ID NO: 83824 - DNA, 22 bp, synthetic construct
  misc_feature 1..22: note = chemically synthesized
  source 1..22: mol_type = other DNA
cagtcggccaggagggaccatg

SEQ ID NO: 83825 - DNA, 22 bp, synthetic construct
  misc_feature 1..22: note = chemically synthesized
  source 1..22: mol_type = other DNA
attatcattagggaacctggag

SEQ ID NO: 83826 - DNA, 22 bp, synthetic construct
  misc_feature 1..22: note = chemically synthesized
  source 1..22: mol_type = other DNA
ttatcattagggaacctggagc

SEQ ID NO: 83827 - DNA, 22 bp, synthetic construct
  misc_feature 1..22: note = chemically synthesized
  source 1..22: mol_type = other DNA
tcattagggaacctggagcagt

SEQ ID NO: 83828 - DNA, 22 bp, synthetic construct
  misc_feature 1..22: note = chemically synthesized
  source 1..22: mol_type = other DNA
gggaacctggagcagtactacc

SEQ ID NO: 83829 - DNA, 22 bp, synthetic construct
  misc_feature 1..22: note = chemically synthesized
  source 1..22: mol_type = other DNA
gagcagtactaccacctgacat

SEQ ID NO: 83830 - DNA, 22 bp, synthetic construct
  misc_feature 1..22: note = chemically synthesized
  source 1..22: mol_type = other DNA
ccacctgacattcatatcaact

SEQ ID NO: 83831 - DNA, 22 bp, synthetic construct
  misc_feature 1..22: note = chemically synthesized
  source 1..22: mol_type = other DNA
acattcatatcaacttttcttt

SEQ ID NO: 83832 - DNA, 22 bp, synthetic construct
  misc_feature 1..22: note = chemically synthesized
  source 1..22: mol_type = other DNA
atatcaacttttcttttttttt

SEQ ID NO: 83833 - DNA, 22 bp, synthetic construct
  misc_feature 1..22: note = chemically synthesized
  source 1..22: mol_type = other DNA
ttctttttttttctcttttttt

SEQ ID NO: 83834 - DNA, 22 bp, synthetic construct
  misc_feature 1..22: note = chemically synthesized
  source 1..22: mol_type = other DNA
tctttttttttctctttttttt

SEQ ID NO: 83835 - DNA, 22 bp, synthetic construct
  misc_feature 1..22: note = chemically synthesized
  source 1..22: mol_type = other DNA
ctttttttttctcttttttttt

SEQ ID NO: 83836 - DNA, 22 bp, synthetic construct
  misc_feature 1..22: note = chemically synthesized
  source 1..22: mol_type = other DNA
tttttttttctctttttttttt

SEQ ID NO: 83837 - DNA, 22 bp, synthetic construct
  misc_feature 1..22: note = chemically synthesized
  source 1..22: mol_type = other DNA
tttttttctctttttttttttt

SEQ ID NO: 83838 - DNA, 22 bp, synthetic construct
  misc_feature 1..22: note = chemically synthesized
  source 1..22: mol_type = other DNA
ttttttctcttttttttttttt

SEQ ID NO: 83839 - DNA, 22 bp, synthetic construct
  misc_feature 1..22: note = chemically synthesized
  source 1..22: mol_type = other DNA
tttttctctttttttttttttt

SEQ ID NO: 83840 - DNA, 22 bp, synthetic construct
  misc_feature 1..22: note = chemically synthesized
  source 1..22: mol_type = other DNA
ttttctcttttttttttttttt

SEQ ID NO: 83841 - DNA, 22 bp, synthetic construct
  misc_feature 1..22: note = chemically synthesized
  source 1..22: mol_type = other DNA
tttctctttttttttttttttt

SEQ ID NO: 83842 - DNA, 22 bp, synthetic construct
  misc_feature 1..22: note = chemically synthesized
  source 1..22: mol_type = other DNA
ttctcttttttttttttttttt

SEQ ID NO: 83843 - DNA, 22 bp, synthetic construct
  misc_feature 1..22: note = chemically synthesized
  source 1..22: mol_type = other DNA
tctctttttttttttttttttg

SEQ ID NO: 83844 - DNA, 22 bp, synthetic construct
  misc_feature 1..22: note = chemically synthesized
  source 1..22: mol_type = other DNA
ctctttttttttttttttttga

SEQ ID NO: 83845 - DNA, 22 bp, synthetic construct
  misc_feature 1..22: note = chemically synthesized
  source 1..22: mol_type = other DNA
tctttttttttttttttttgag

SEQ ID NO: 83846 - DNA, 22 bp, synthetic construct
  misc_feature 1..22: note = chemically synthesized
  source 1..22: mol_type = other DNA
tttttttttttttttttgagac

SEQ ID NO: 83847 - DNA, 22 bp, synthetic construct
  misc_feature 1..22: note = chemically synthesized
  source 1..22: mol_type = other DNA
tttttttttttttttgagacag

SEQ ID NO: 83848 - DNA, 22 bp, synthetic construct
  misc_feature 1..22: note = chemically synthesized
  source 1..22: mol_type = other DNA
ttttttttttttttgagacaga

SEQ ID NO: 83849 - DNA, 22 bp, synthetic construct
  misc_feature 1..22: note = chemically synthesized
  source 1..22: mol_type = other DNA
tttttttttttttgagacagag

SEQ ID NO: 83850 - DNA, 22 bp, synthetic construct
  misc_feature 1..22: note = chemically synthesized
  source 1..22: mol_type = other DNA
ttttttttttttgagacagagt

SEQ ID NO: 83851 - DNA, 22 bp, synthetic construct
  misc_feature 1..22: note = chemically synthesized
  source 1..22: mol_type = other DNA
tttttttttttgagacagagtc

SEQ ID NO: 83852 - DNA, 22 bp, synthetic construct
  misc_feature 1..22: note = chemically synthesized
  source 1..22: mol_type = other DNA
ttttttttttgagacagagtct

SEQ ID NO: 83853 - DNA, 22 bp, synthetic construct
  misc_feature 1..22: note = chemically synthesized
  source 1..22: mol_type = other DNA
tttttttttgagacagagtctc

SEQ ID NO: 83854 - DNA, 22 bp, synthetic construct
  misc_feature 1..22: note = chemically synthesized
  source 1..22: mol_type = other DNA
ttttttttgagacagagtctct

SEQ ID NO: 83855 - DNA, 22 bp, synthetic construct
  misc_feature 1..22: note = chemically synthesized
  source 1..22: mol_type = other DNA
tttttttgagacagagtctctc

SEQ ID NO: 83856 - DNA, 22 bp, synthetic construct
  misc_feature 1..22: note = chemically synthesized
  source 1..22: mol_type = other DNA
ttttttgagacagagtctctct

SEQ ID NO: 83857 - DNA, 22 bp, synthetic construct
  misc_feature 1..22: note = chemically synthesized
  source 1..22: mol_type = other DNA
tttttgagacagagtctctctc

SEQ ID NO: 83858 - DNA, 22 bp, synthetic construct
  misc_feature 1..22: note = chemically synthesized
  source 1..22: mol_type = other DNA
ttttgagacagagtctctctct

SEQ ID NO: 83859 - DNA, 22 bp, synthetic construct
  misc_feature 1..22: note = chemically synthesized
  source 1..22: mol_type = other DNA
tttgagacagagtctctctctg

SEQ ID NO: 83860 - DNA, 22 bp, synthetic construct
  misc_feature 1..22: note = chemically synthesized
  source 1..22: mol_type = other DNA
ttgagacagagtctctctctgt

SEQ ID NO: 83861 - DNA, 22 bp, synthetic construct
  misc_feature 1..22: note = chemically synthesized
  source 1..22: mol_type = other DNA
tgagacagagtctctctctgtc

SEQ ID NO: 83862 - DNA, 22 bp, synthetic construct
  misc_feature 1..22: note = chemically synthesized
  source 1..22: mol_type = other DNA
gagacagagtctctctctgtcg

SEQ ID NO: 83863 - DNA, 22 bp, synthetic construct
  misc_feature 1..22: note = chemically synthesized
  source 1..22: mol_type = other DNA
agacagagtctctctctgtcgc

SEQ ID NO: 83864 - DNA, 22 bp, synthetic construct
  misc_feature 1..22: note = chemically synthesized
  source 1..22: mol_type = other DNA
tctctgtcgcccaggctggagt

SEQ ID NO: 83865 - DNA, 22 bp, synthetic construct
  misc_feature 1..22: note = chemically synthesized
  source 1..22: mol_type = other DNA
tctgtcgcccaggctggagtgc

SEQ ID NO: 83866 - DNA, 22 bp, synthetic construct
  misc_feature 1..22: note = chemically synthesized
  source 1..22: mol_type = other DNA
tgtcgcccaggctggagtgcag

SEQ ID NO: 83867 - DNA, 22 bp, synthetic construct
  misc_feature 1..22: note = chemically synthesized
  source 1..22: mol_type = other DNA
tcgcccaggctggagtgcagtg

SEQ ID NO: 83868 - DNA, 22 bp, synthetic construct
  misc_feature 1..22: note = chemically synthesized
  source 1..22: mol_type = other DNA
gagtgcagtggcgtgatctcga

SEQ ID NO: 83869 - DNA, 22 bp, synthetic construct
  misc_feature 1..22: note = chemically synthesized
  source 1..22: mol_type = other DNA
gactcactgcaagctccacctc

SEQ ID NO: 83870 - DNA, 22 bp, synthetic construct
  misc_feature 1..22: note = chemically synthesized
  source 1..22: mol_type = other DNA
actgcaagctccacctcccggg

SEQ ID NO: 83871 - DNA, 22 bp, synthetic construct
  misc_feature 1..22: note = chemically synthesized
  source 1..22: mol_type = other DNA
caagctccacctcccgggttca

SEQ ID NO: 83872 - DNA, 22 bp, synthetic construct
  misc_feature 1..22: note = chemically synthesized
  source 1..22: mol_type = other DNA
cacctcccgggttcacgccatt

SEQ ID NO: 83873 - DNA, 22 bp, synthetic construct
  misc_feature 1..22: note = chemically synthesized
  source 1..22: mol_type = other DNA
ccgggttcacgccattctcctg

SEQ ID NO: 83874 - DNA, 22 bp, synthetic construct
  misc_feature 1..22: note = chemically synthesized
  source 1..22: mol_type = other DNA
acgccattctcctgtctcagcc

SEQ ID NO: 83875 - DNA, 22 bp, synthetic construct
  misc_feature 1..22: note = chemically synthesized
  source 1..22: mol_type = other DNA
tcctgtctcagcctcccgagta

SEQ ID NO: 83876 - DNA, 22 bp, synthetic construct
  misc_feature 1..22: note = chemically synthesized
  source 1..22: mol_type = other DNA
ctgtctcagcctcccgagtacc

SEQ ID NO: 83877 - DNA, 22 bp, synthetic construct
  misc_feature 1..22: note = chemically synthesized
  source 1..22: mol_type = other DNA
tctcagcctcccgagtacctgg

SEQ ID NO: 83878 - DNA, 22 bp, synthetic construct
  misc_feature 1..22: note = chemically synthesized
  source 1..22: mol_type = other DNA
agcctcccgagtacctgggact

SEQ ID NO: 83879 - DNA, 22 bp, synthetic construct
  misc_feature 1..22: note = chemically synthesized
  source 1..22: mol_type = other DNA
ccgagtacctgggactacaggt

SEQ ID NO: 83880 - DNA, 22 bp, synthetic construct
  misc_feature 1..22: note = chemically synthesized
  source 1..22: mol_type = other DNA
ggactacaggtgcccgccacca

SEQ ID NO: 83881 - DNA, 22 bp, synthetic construct
  misc_feature 1..22: note = chemically synthesized
  source 1..22: mol_type = other DNA
caggtgcccgccaccacgcctg

SEQ ID NO: 83882 - DNA, 22 bp, synthetic construct
  misc_feature 1..22: note = chemically synthesized
  source 1..22: mol_type = other DNA
gatactttcttgtgttttttta

SEQ ID NO: 83883 - DNA, 22 bp, synthetic construct
  misc_feature 1..22: note = chemically synthesized
  source 1..22: mol_type = other DNA
tcttgtgtttttttagtagaga

SEQ ID NO: 83884 - DNA, 22 bp, synthetic construct
  misc_feature 1..22: note = chemically synthesized
  source 1..22: mol_type = other DNA
cttgtgtttttttagtagagac

SEQ ID NO: 83885 - DNA, 22 bp, synthetic construct
  misc_feature 1..22: note = chemically synthesized
  source 1..22: mol_type = other DNA
ttgtgtttttttagtagagacg

SEQ ID NO: 83886 - DNA, 22 bp, synthetic construct
  misc_feature 1..22: note = chemically synthesized
  source 1..22: mol_type = other DNA
gtgtttttttagtagagacggg

SEQ ID NO: 83887 - DNA, 22 bp, synthetic construct
  misc_feature 1..22: note = chemically synthesized
  source 1..22: mol_type = other DNA
tgtttttttagtagagacgggg

SEQ ID NO: 83888 - DNA, 22 bp, synthetic construct
  misc_feature 1..22: note = chemically synthesized
  source 1..22: mol_type = other DNA
ttttagtagagacggggtttca

SEQ ID NO: 83889 - DNA, 22 bp, synthetic construct
  misc_feature 1..22: note = chemically synthesized
  source 1..22: mol_type = other DNA
tttagtagagacggggtttcac

SEQ ID NO: 83890 - DNA, 22 bp, synthetic construct
  misc_feature 1..22: note = chemically synthesized
  source 1..22: mol_type = other DNA
ttagtagagacggggtttcacc

SEQ ID NO: 83891 - DNA, 22 bp, synthetic construct
  misc_feature 1..22: note = chemically synthesized
  source 1..22: mol_type = other DNA
tagtagagacggggtttcacca

SEQ ID NO: 83892 - DNA, 22 bp, synthetic construct
  misc_feature 1..22: note = chemically synthesized
  source 1..22: mol_type = other DNA
agtagagacggggtttcaccat

SEQ ID NO: 83893 - DNA, 22 bp, synthetic construct
  misc_feature 1..22: note = chemically synthesized
  source 1..22: mol_type = other DNA
gtagagacggggtttcaccatt

SEQ ID NO: 83894 - DNA, 22 bp, synthetic construct
  misc_feature 1..22: note = chemically synthesized
  source 1..22: mol_type = other DNA
caccattgctggccaggatggt

SEQ ID NO: 83895 - DNA, 22 bp, synthetic construct
  misc_feature 1..22: note = chemically synthesized
  source 1..22: mol_type = other DNA
accattgctggccaggatggtc

SEQ ID NO: 83896 - DNA, 22 bp, synthetic construct
  misc_feature 1..22: note = chemically synthesized
  source 1..22: mol_type = other DNA
ctggccaggatggtctcgatct

SEQ ID NO: 83897 - DNA, 22 bp, synthetic construct
  misc_feature 1..22: note = chemically synthesized
  source 1..22: mol_type = other DNA
gccaggatggtctcgatctcct

SEQ ID NO: 83898 - DNA, 22 bp, synthetic construct
  misc_feature 1..22: note = chemically synthesized
  source 1..22: mol_type = other DNA
gatctcctgacctcatgatccg

SEQ ID NO: 83899 - DNA, 22 bp, synthetic construct
  misc_feature 1..22: note = chemically synthesized
  source 1..22: mol_type = other DNA
ctgacctcatgatccgcccgcc

SEQ ID NO: 83900 - DNA, 22 bp, synthetic construct
  misc_feature 1..22: note = chemically synthesized
  source 1..22: mol_type = other DNA
acctcatgatccgcccgcctcg

SEQ ID NO: 83901 - DNA, 22 bp, synthetic construct
  misc_feature 1..22: note = chemically synthesized
  source 1..22: mol_type = other DNA
atgatccgcccgcctcggcagc

SEQ ID NO: 83902 - DNA, 22 bp, synthetic construct
  misc_feature 1..22: note = chemically synthesized
  source 1..22: mol_type = other DNA
ggcagctactatgattatatag

SEQ ID NO: 83903 - DNA, 22 bp, synthetic construct
  misc_feature 1..22: note = chemically synthesized
  source 1..22: mol_type = other DNA
ctatgattatatagtaaaaaat

SEQ ID NO: 83904 - DNA, 22 bp, synthetic construct
  misc_feature 1..22: note = chemically synthesized
  source 1..22: mol_type = other DNA
tgattatatagtaaaaaatata

SEQ ID NO: 83905 - DNA, 22 bp, synthetic construct
  misc_feature 1..22: note = chemically synthesized
  source 1..22: mol_type = other DNA
tatagtaaaaaatatatatatt

SEQ ID NO: 83906 - DNA, 22 bp, synthetic construct
  misc_feature 1..22: note = chemically synthesized
  source 1..22: mol_type = other DNA
acattttcccctctagaaccta

SEQ ID NO: 83907 - DNA, 22 bp, synthetic construct
  misc_feature 1..22: note = chemically synthesized
  source 1..22: mol_type = other DNA
tcccctctagaacctacctcac

SEQ ID NO: 83908 - DNA, 22 bp, synthetic construct
  misc_feature 1..22: note = chemically synthesized
  source 1..22: mol_type = other DNA
cccctctagaacctacctcaca

SEQ ID NO: 83909 - DNA, 22 bp, synthetic construct
  misc_feature 1..22: note = chemically synthesized
  source 1..22: mol_type = other DNA
ccctctagaacctacctcacag

SEQ ID NO: 83910 - DNA, 22 bp, synthetic construct
  misc_feature 1..22: note = chemically synthesized
  source 1..22: mol_type = other DNA
tagaacctacctcacagttttc

SEQ ID NO: 83911 - DNA, 22 bp, synthetic construct
  misc_feature 1..22: note = chemically synthesized
  source 1..22: mol_type = other DNA
gaacctacctcacagttttcac

SEQ ID NO: 83912 - DNA, 22 bp, synthetic construct
  misc_feature 1..22: note = chemically synthesized
  source 1..22: mol_type = other DNA
cctcacagttttcacttctgat

SEQ ID NO: 83913 - DNA, 22 bp, synthetic construct
  misc_feature 1..22: note = chemically synthesized
  source 1..22: mol_type = other DNA
acagttttcacttctgatagct

SEQ ID NO: 83914 - DNA, 22 bp, synthetic construct
  misc_feature 1..22: note = chemically synthesized
  source 1..22: mol_type = other DNA
tcacttctgatagctataccag

SEQ ID NO: 83915 - DNA, 22 bp, synthetic construct
  misc_feature 1..22: note = chemically synthesized
  source 1..22: mol_type = other DNA
cacttctgatagctataccaga

SEQ ID NO: 83916 - DNA, 22 bp, synthetic construct
  misc_feature 1..22: note = chemically synthesized
  source 1..22: mol_type = other DNA
acttctgatagctataccagaa

SEQ ID NO: 83917 - DNA, 22 bp, synthetic construct
  misc_feature 1..22: note = chemically synthesized
  source 1..22: mol_type = other DNA
ctgatagctataccagaagatg

SEQ ID NO: 83918 - DNA, 22 bp, synthetic construct
  misc_feature 1..22: note = chemically synthesized
  source 1..22: mol_type = other DNA
tgatagctataccagaagatgc

SEQ ID NO: 83919 - DNA, 22 bp, synthetic construct
  misc_feature 1..22: note = chemically synthesized
  source 1..22: mol_type = other DNA
atagctataccagaagatgcac

SEQ ID NO: 83920 - DNA, 22 bp, synthetic construct
  misc_feature 1..22: note = chemically synthesized
  source 1..22: mol_type = other DNA
taccagaagatgcactagatcc

SEQ ID NO: 83921 - DNA, 22 bp, synthetic construct
  misc_feature 1..22: note = chemically synthesized
  source 1..22: mol_type = other DNA
gatcctctttgacatcaggaaa

SEQ ID NO: 83922 - DNA, 22 bp, synthetic construct
  misc_feature 1..22: note = chemically synthesized
  source 1..22: mol_type = other DNA
tttgacatcaggaaattcactc

SEQ ID NO: 83923 - DNA, 22 bp, synthetic construct
  misc_feature 1..22: note = chemically synthesized
  source 1..22: mol_type = other DNA
tgacatcaggaaattcactcct

SEQ ID NO: 83924 - DNA, 22 bp, synthetic construct
  misc_feature 1..22: note = chemically synthesized
  source 1..22: mol_type = other DNA
gacatcaggaaattcactcctt

SEQ ID NO: 83925 - DNA, 22 bp, synthetic construct
  misc_feature 1..22: note = chemically synthesized
  source 1..22: mol_type = other DNA
acatcaggaaattcactccttt

SEQ ID NO: 83926 - DNA, 22 bp, synthetic construct
  misc_feature 1..22: note = chemically synthesized
  source 1..22: mol_type = other DNA
actcctttatccttcaaattaa

SEQ ID NO: 83927 - DNA, 22 bp, synthetic construct
  misc_feature 1..22: note = chemically synthesized
  source 1..22: mol_type = other DNA
ctttatccttcaaattaacctt

SEQ ID NO: 83928 - DNA, 22 bp, synthetic construct
  misc_feature 1..22: note = chemically synthesized
  source 1..22: mol_type = other DNA
tatccttcaaattaaccttata

SEQ ID NO: 83929 - DNA, 22 bp, synthetic construct
  misc_feature 1..22: note = chemically synthesized
  source 1..22: mol_type = other DNA
atccttcaaattaaccttatac

SEQ ID NO: 83930 - DNA, 22 bp, synthetic construct
  misc_feature 1..22: note = chemically synthesized
  source 1..22: mol_type = other DNA
tccttcaaattaaccttatact

SEQ ID NO: 83931 - DNA, 22 bp, synthetic construct
  misc_feature 1..22: note = chemically synthesized
  source 1..22: mol_type = other DNA
caaattaaccttatactgtaac

SEQ ID NO: 83932 - DNA, 22 bp, synthetic construct
  misc_feature 1..22: note = chemically synthesized
  source 1..22: mol_type = other DNA
aaattaaccttatactgtaacc

SEQ ID NO: 83933 - DNA, 22 bp, synthetic construct
  misc_feature 1..22: note = chemically synthesized
  source 1..22: mol_type = other DNA
accttatactgtaacccagaag

SEQ ID NO: 83934 - DNA, 22 bp, synthetic construct
  misc_feature 1..22: note = chemically synthesized
  source 1..22: mol_type = other DNA
atactgtaacccagaagaccta

SEQ ID NO: 83935 - DNA, 22 bp, synthetic construct
  misc_feature 1..22: note = chemically synthesized
  source 1..22: mol_type = other DNA
tactgtaacccagaagacctaa

SEQ ID NO: 83936 - DNA, 22 bp, synthetic construct
  misc_feature 1..22: note = chemically synthesized
  source 1..22: mol_type = other DNA
taacccagaagacctaatttat

SEQ ID NO: 83937 - DNA, 22 bp, synthetic construct
  misc_feature 1..22: note = chemically synthesized
  source 1..22: mol_type = other DNA
atttattgttctaggaataatt

SEQ ID NO: 83938 - DNA, 22 bp, synthetic construct
  misc_feature 1..22: note = chemically synthesized
  source 1..22: mol_type = other DNA
attgttctaggaataattttac

SEQ ID NO: 83939 - DNA, 22 bp, synthetic construct
  misc_feature 1..22: note = chemically synthesized
  source 1..22: mol_type = other DNA
ttgttctaggaataattttaca

SEQ ID NO: 83940 - DNA, 22 bp, synthetic construct
  misc_feature 1..22: note = chemically synthesized
  source 1..22: mol_type = other DNA
ttctaggaataattttacactt

SEQ ID NO: 83941 - DNA, 22 bp, synthetic construct
  misc_feature 1..22: note = chemically synthesized
  source 1..22: mol_type = other DNA
taggaataattttacacttatc

SEQ ID NO: 83942 - DNA, 22 bp, synthetic construct
  misc_feature 1..22: note = chemically synthesized
  source 1..22: mol_type = other DNA
ggaataattttacacttatctt

SEQ ID NO: 83943 - DNA, 22 bp, synthetic construct
  misc_feature 1..22: note = chemically synthesized
  source 1..22: mol_type = other DNA
tacacttatctttctaaccaga

SEQ ID NO: 83944 - DNA, 22 bp, synthetic construct
  misc_feature 1..22: note = chemically synthesized
  source 1..22: mol_type = other DNA
acacttatctttctaaccagat

SEQ ID NO: 83945 - DNA, 22 bp, synthetic construct
  misc_feature 1..22: note = chemically synthesized
  source 1..22: mol_type = other DNA
cacttatctttctaaccagata

SEQ ID NO: 83946 - DNA, 22 bp, synthetic construct
  misc_feature 1..22: note = chemically synthesized
  source 1..22: mol_type = other DNA
atctttctaaccagatacttta

SEQ ID NO: 83947 - DNA, 22 bp, synthetic construct
  misc_feature 1..22: note = chemically synthesized
  source 1..22: mol_type = other DNA
tctttctaaccagatactttac

SEQ ID NO: 83948 - DNA, 22 bp, synthetic construct
  misc_feature 1..22: note = chemically synthesized
  source 1..22: mol_type = other DNA
tctaaccagatactttactctg

SEQ ID NO: 83949 - DNA, 22 bp, synthetic construct
  misc_feature 1..22: note = chemically synthesized
  source 1..22: mol_type = other DNA
ctaaccagatactttactctgt

SEQ ID NO: 83950 - DNA, 22 bp, synthetic construct
  misc_feature 1..22: note = chemically synthesized
  source 1..22: mol_type = other DNA
taaccagatactttactctgtc

SEQ ID NO: 83951 - DNA, 22 bp, synthetic construct
  misc_feature 1..22: note = chemically synthesized
  source 1..22: mol_type = other DNA
accagatactttactctgtcca

SEQ ID NO: 83952 - DNA, 22 bp, synthetic construct
  misc_feature 1..22: note = chemically synthesized
  source 1..22: mol_type = other DNA
tactctgtccagaaacaatttc

SEQ ID NO: 83953 - DNA, 22 bp, synthetic construct
  misc_feature 1..22: note = chemically synthesized
  source 1..22: mol_type = other DNA
actctgtccagaaacaatttcc

SEQ ID NO: 83954 - DNA, 22 bp, synthetic construct
  misc_feature 1..22: note = chemically synthesized
  source 1..22: mol_type = other DNA
ctctgtccagaaacaatttcct

SEQ ID NO: 83955 - DNA, 22 bp, synthetic construct
  misc_feature 1..22: note = chemically synthesized
  source 1..22: mol_type = other DNA
tgtccagaaacaatttcctcac

SEQ ID NO: 83956 - DNA, 22 bp, synthetic construct
  misc_feature 1..22: note = chemically synthesized
  source 1..22: mol_type = other DNA
tccagaaacaatttcctcactt

SEQ ID NO: 83957 - DNA, 22 bp, synthetic construct
  misc_feature 1..22: note = chemically synthesized
  source 1..22: mol_type = other DNA
cctcactttgaggcttaagcta

SEQ ID NO: 83958 - DNA, 22 bp, synthetic construct
  misc_feature 1..22: note = chemically synthesized
  source 1..22: mol_type = other DNA
ctcactttgaggcttaagctat

SEQ ID NO: 83959 - DNA, 22 bp, synthetic construct
  misc_feature 1..22: note = chemically synthesized
  source 1..22: mol_type = other DNA
actttgaggcttaagctattag

SEQ ID NO: 83960 - DNA, 22 bp, synthetic construct
  misc_feature 1..22: note = chemically synthesized
  source 1..22: mol_type = other DNA
tgaggcttaagctattagaaac

SEQ ID NO: 83961 - DNA, 22 bp, synthetic construct
  misc_feature 1..22: note = chemically synthesized
  source 1..22: mol_type = other DNA
gaggcttaagctattagaaacc

SEQ ID NO: 83962 - DNA, 22 bp, synthetic construct
  misc_feature 1..22: note = chemically synthesized
  source 1..22: mol_type = other DNA
aggcttaagctattagaaacca

SEQ ID NO: 83963 - DNA, 22 bp, synthetic construct
  misc_feature 1..22: note = chemically synthesized
  source 1..22: mol_type = other DNA
aagctattagaaaccaaagcct

SEQ ID NO: 83964 - DNA, 22 bp, synthetic construct
  misc_feature 1..22: note = chemically synthesized
  source 1..22: mol_type = other DNA
agctattagaaaccaaagcctg

SEQ ID NO: 83965 - DNA, 22 bp, synthetic construct
  misc_feature 1..22: note = chemically synthesized
  source 1..22: mol_type = other DNA
ttagaaaccaaagcctgtattt

SEQ ID NO: 83966 - DNA, 22 bp, synthetic construct
  misc_feature 1..22: note = chemically synthesized
  source 1..22: mol_type = other DNA
gaaaccaaagcctgtatttttg

SEQ ID NO: 83967 - DNA, 22 bp, synthetic construct
  misc_feature 1..22: note = chemically synthesized
  source 1..22: mol_type = other DNA
tatttttgtttccctctgagtc

SEQ ID NO: 83968 - DNA, 22 bp, synthetic construct
  misc_feature 1..22: note = chemically synthesized
  source 1..22: mol_type = other DNA
ttgtttccctctgagtcaaata

SEQ ID NO: 83969 - DNA, 22 bp, synthetic construct
  misc_feature 1..22: note = chemically synthesized
  source 1..22: mol_type = other DNA
tgtttccctctgagtcaaataa

SEQ ID NO: 83970 - DNA, 22 bp, synthetic construct
  misc_feature 1..22: note = chemically synthesized
  source 1..22: mol_type = other DNA
gtttccctctgagtcaaataag

SEQ ID NO: 83971 - DNA, 22 bp, synthetic construct
  misc_feature 1..22: note = chemically synthesized
  source 1..22: mol_type = other DNA
tttccctctgagtcaaataagt

SEQ ID NO: 83972 - DNA, 22 bp, synthetic construct
  misc_feature 1..22: note = chemically synthesized
  source 1..22: mol_type = other DNA
ccctctgagtcaaataagtaga

SEQ ID NO: 83973 - DNA, 22 bp, synthetic construct
  misc_feature 1..22: note = chemically synthesized
  source 1..22: mol_type = other DNA
cctctgagtcaaataagtagac

SEQ ID NO: 83974 - DNA, 22 bp, synthetic construct
  misc_feature 1..22: note = chemically synthesized
  source 1..22: mol_type = other DNA
tgagtcaaataagtagacagag

SEQ ID NO: 83975 - DNA, 22 bp, synthetic construct
  misc_feature 1..22: note = chemically synthesized
  source 1..22: mol_type = other DNA
agtcaaataagtagacagaggc

SEQ ID NO: 83976 - DNA, 22 bp, synthetic construct
  misc_feature 1..22: note = chemically synthesized
  source 1..22: mol_type = other DNA
tgttattgaatgaagtccaaag

SEQ ID NO: 83977 - DNA, 22 bp, synthetic construct
  misc_feature 1..22: note = chemically synthesized
  source 1..22: mol_type = other DNA
ttgaatgaagtccaaagtgaaa

SEQ ID NO: 83978 - DNA, 22 bp, synthetic construct
  misc_feature 1..22: note = chemically synthesized
  source 1..22: mol_type = other DNA
aatgaagtccaaagtgaaagga

SEQ ID NO: 83979 - DNA, 22 bp, synthetic construct
  misc_feature 1..22: note = chemically synthesized
  source 1..22: mol_type = other DNA
caggaagacaaatctggttgtt

SEQ ID NO: 83980 - DNA, 22 bp, synthetic construct
  misc_feature 1..22: note = chemically synthesized
  source 1..22: mol_type = other DNA
gttgttttagttgatatctaaa

SEQ ID NO: 83981 - DNA, 22 bp, synthetic construct
  misc_feature 1..22: note = chemically synthesized
  source 1..22: mol_type = other DNA
ttttagttgatatctaaaaata

SEQ ID NO: 83982 - DNA, 22 bp, synthetic construct
  misc_feature 1..22: note = chemically synthesized
  source 1..22: mol_type = other DNA
tagttgatatctaaaaataaaa

SEQ ID NO: 83983 - DNA, 22 bp, synthetic construct
  misc_feature 1..22: note = chemically synthesized
  source 1..22: mol_type = other DNA
agttgatatctaaaaataaaaa

SEQ ID NO: 83984 - DNA, 22 bp, synthetic construct
  misc_feature 1..22: note = chemically synthesized
  source 1..22: mol_type = other DNA
gttgatatctaaaaataaaaat

SEQ ID NO: 83985 - DNA, 22 bp, synthetic construct
  misc_feature 1..22: note = chemically synthesized
  source 1..22: mol_type = other DNA
atatctaaaaataaaaataaat

SEQ ID NO: 83986 - DNA, 22 bp, synthetic construct
  misc_feature 1..22: note = chemically synthesized
  source 1..22: mol_type = other DNA
aaaataaaaataaatatttgct

SEQ ID NO: 83987 - DNA, 22 bp, synthetic construct
  misc_feature 1..22: note = chemically synthesized
  source 1..22: mol_type = other DNA
gctttttggtgtaaaatgactc

SEQ ID NO: 83988 - DNA, 22 bp, synthetic construct
  misc_feature 1..22: note = chemically synthesized
  source 1..22: mol_type = other DNA
ctttttggtgtaaaatgactct

SEQ ID NO: 83989 - DNA, 22 bp, synthetic construct
  misc_feature 1..22: note = chemically synthesized
  source 1..22: mol_type = other DNA
tttggtgtaaaatgactcttat

SEQ ID NO: 83990 - DNA, 22 bp, synthetic construct
  misc_feature 1..22: note = chemically synthesized
  source 1..22: mol_type = other DNA
ttggtgtaaaatgactcttatg

SEQ ID NO: 83991 - DNA, 22 bp, synthetic construct
  misc_feature 1..22: note = chemically synthesized
  source 1..22: mol_type = other DNA
tggtgtaaaatgactcttatgc

SEQ ID NO: 83992 - DNA, 22 bp, synthetic construct
  misc_feature 1..22: note = chemically synthesized
  source 1..22: mol_type = other DNA
ggtgtaaaatgactcttatgca

SEQ ID NO: 83993 - DNA, 22 bp, synthetic construct
  misc_feature 1..22: note = chemically synthesized
  source 1..22: mol_type = other DNA
gtgtaaaatgactcttatgcat

SEQ ID NO: 83994 - DNA, 22 bp, synthetic construct
  misc_feature 1..22: note = chemically synthesized
  source 1..22: mol_type = other DNA
ttatgcattaatttgtccaatt

SEQ ID NO: 83995 - DNA, 22 bp, synthetic construct
  misc_feature 1..22: note = chemically synthesized
  source 1..22: mol_type = other DNA
atgcattaatttgtccaatttt

SEQ ID NO: 83996 - DNA, 22 bp, synthetic construct
  misc_feature 1..22: note = chemically synthesized
  source 1..22: mol_type = other DNA
tgcattaatttgtccaatttta

SEQ ID NO: 83997 - DNA, 22 bp, synthetic construct
  misc_feature 1..22: note = chemically synthesized
  source 1..22: mol_type = other DNA
atttgtccaattttaacactta

SEQ ID NO: 83998 - DNA, 22 bp, synthetic construct
  misc_feature 1..22: note = chemically synthesized
  source 1..22: mol_type = other DNA
gtccaattttaacacttacctt

SEQ ID NO: 83999 - DNA, 22 bp, synthetic construct
  misc_feature 1..22: note = chemically synthesized
  source 1..22: mol_type = other DNA
tccaattttaacacttaccttc

SEQ ID NO: 84000 - DNA, 22 bp, synthetic construct
  misc_feature 1..22: note = chemically synthesized
  source 1..22: mol_type = other DNA
taacacttaccttcttagatac

SEQ ID NO: 84001 - DNA, 22 bp, synthetic construct
  misc_feature 1..22: note = chemically synthesized
  source 1..22: mol_type = other DNA
aacacttaccttcttagatacc

SEQ ID NO: 84002 - DNA, 22 bp, synthetic construct
  misc_feature 1..22: note = chemically synthesized
  source 1..22: mol_type = other DNA
acacttaccttcttagatacct

SEQ ID NO: 84003 - DNA, 22 bp, synthetic construct
  misc_feature 1..22: note = chemically synthesized
  source 1..22: mol_type = other DNA
accttcttagatacctaataga

SEQ ID NO: 84004 - DNA, 22 bp, synthetic construct
  misc_feature 1..22: note = chemically synthesized
  source 1..22: mol_type = other DNA
ccttcttagatacctaatagaa

SEQ ID NO: 84005 - DNA, 22 bp, synthetic construct
  misc_feature 1..22: note = chemically synthesized
  source 1..22: mol_type = other DNA
cttagatacctaatagaatata

SEQ ID NO: 84006 - DNA, 22 bp, synthetic construct
  misc_feature 1..22: note = chemically synthesized
  source 1..22: mol_type = other DNA
ttagatacctaatagaatatag

SEQ ID NO: 84007 - DNA, 22 bp, synthetic construct
  misc_feature 1..22: note = chemically synthesized
  source 1..22: mol_type = other DNA
agatacctaatagaatatagga

SEQ ID NO: 84008 - DNA, 22 bp, synthetic construct
  misc_feature 1..22: note = chemically synthesized
  source 1..22: mol_type = other DNA
gatacctaatagaatataggaa

SEQ ID NO: 84009 - DNA, 22 bp, synthetic construct
  misc_feature 1..22: note = chemically synthesized
  source 1..22: mol_type = other DNA
atagaatataggaagattaaaa

SEQ ID NO: 84010 - DNA, 22 bp, synthetic construct
  misc_feature 1..22: note = chemically synthesized
  source 1..22: mol_type = other DNA
aaacaattattttcttgttatc

SEQ ID NO: 84011 - DNA, 22 bp, synthetic construct
  misc_feature 1..22: note = chemically synthesized
  source 1..22: mol_type = other DNA
ttttcttgttatccatgcatag

SEQ ID NO: 84012 - DNA, 22 bp, synthetic construct
  misc_feature 1..22: note = chemically synthesized
  source 1..22: mol_type = other DNA
tcttgttatccatgcatagttt

SEQ ID NO: 84013 - DNA, 22 bp, synthetic construct
  misc_feature 1..22: note = chemically synthesized
  source 1..22: mol_type = other DNA
cttgttatccatgcatagtttt

SEQ ID NO: 84014 - DNA, 22 bp, synthetic construct
  misc_feature 1..22: note = chemically synthesized
  source 1..22: mol_type = other DNA
ttgttatccatgcatagttttg

SEQ ID NO: 84015 - DNA, 22 bp, synthetic construct
  misc_feature 1..22: note = chemically synthesized
  source 1..22: mol_type = other DNA
gttatccatgcatagttttgta

SEQ ID NO: 84016 - DNA, 22 bp, synthetic construct
  misc_feature 1..22: note = chemically synthesized
  source 1..22: mol_type = other DNA
ttatccatgcatagttttgtac

SEQ ID NO: 84017 - DNA, 22 bp, synthetic construct
  misc_feature 1..22: note = chemically synthesized
  source 1..22: mol_type = other DNA
tccatgcatagttttgtacctg

SEQ ID NO: 84018 - DNA, 22 bp, synthetic construct
  misc_feature 1..22: note = chemically synthesized
  source 1..22: mol_type = other DNA
tgtacctgatttccttcctttc

SEQ ID NO: 84019 - DNA, 22 bp, synthetic construct
  misc_feature 1..22: note = chemically synthesized
  source 1..22: mol_type = other DNA
gtacctgatttccttcctttct

SEQ ID NO: 84020 - DNA, 22 bp, synthetic construct
  misc_feature 1..22: note = chemically synthesized
  source 1..22: mol_type = other DNA
tacctgatttccttcctttctt

SEQ ID NO: 84021 - DNA, 22 bp, synthetic construct
  misc_feature 1..22: note = chemically synthesized
  source 1..22: mol_type = other DNA
atttccttcctttctttccttc

SEQ ID NO: 84022 - DNA, 22 bp, synthetic construct
  misc_feature 1..22: note = chemically synthesized
  source 1..22: mol_type = other DNA
ccttcctttctttccttctttg

SEQ ID NO: 84023 - DNA, 22 bp, synthetic construct
  misc_feature 1..22: note = chemically synthesized
  source 1..22: mol_type = other DNA
cttcctttctttccttctttgg

SEQ ID NO: 84024 - DNA, 22 bp, synthetic construct
  misc_feature 1..22: note = chemically synthesized
  source 1..22: mol_type = other DNA
cctttctttccttctttggaaa

SEQ ID NO: 84025 - DNA, 22 bp, synthetic construct
  misc_feature 1..22: note = chemically synthesized
  source 1..22: mol_type = other DNA
ctttctttccttctttggaaag

SEQ ID NO: 84026 - DNA, 22 bp, synthetic construct
  misc_feature 1..22: note = chemically synthesized
  source 1..22: mol_type = other DNA
tctttccttctttggaaagctg

SEQ ID NO: 84027 - DNA, 22 bp, synthetic construct
  misc_feature 1..22: note = chemically synthesized
  source 1..22: mol_type = other DNA
ctttccttctttggaaagctgc

SEQ ID NO: 84028 - DNA, 22 bp, synthetic construct
  misc_feature 1..22: note = chemically synthesized
  source 1..22: mol_type = other DNA
tttccttctttggaaagctgca

SEQ ID NO: 84029 - DNA, 22 bp, synthetic construct
  misc_feature 1..22: note = chemically synthesized
  source 1..22: mol_type = other DNA
tccttctttggaaagctgcact

SEQ ID NO: 84030 - DNA, 22 bp, synthetic construct
  misc_feature 1..22: note = chemically synthesized
  source 1..22: mol_type = other DNA
ccttctttggaaagctgcacta

SEQ ID NO: 84031 - DNA, 22 bp, synthetic construct
  misc_feature 1..22: note = chemically synthesized
  source 1..22: mol_type = other DNA
cttctttggaaagctgcactag

SEQ ID NO: 84032 - DNA, 22 bp, synthetic construct
  misc_feature 1..22: note = chemically synthesized
  source 1..22: mol_type = other DNA
ctttggaaagctgcactagctt

SEQ ID NO: 84033 - DNA, 22 bp, synthetic construct
  misc_feature 1..22: note = chemically synthesized
  source 1..22: mol_type = other DNA
tttggaaagctgcactagctta

SEQ ID NO: 84034 - DNA, 22 bp, synthetic construct
  misc_feature 1..22: note = chemically synthesized
  source 1..22: mol_type = other DNA
tggaaagctgcactagcttact

SEQ ID NO: 84035 - DNA, 22 bp, synthetic construct
  misc_feature 1..22: note = chemically synthesized
  source 1..22: mol_type = other DNA
ggaaagctgcactagcttactt

SEQ ID NO: 84036 - DNA, 22 bp, synthetic construct
  misc_feature 1..22: note = chemically synthesized
  source 1..22: mol_type = other DNA
gaaagctgcactagcttactta

SEQ ID NO: 84037 - DNA, 22 bp, synthetic construct
  misc_feature 1..22: note = chemically synthesized
  source 1..22: mol_type = other DNA
cactagcttacttagaaaagaa

SEQ ID NO: 84038 - DNA, 22 bp, synthetic construct
  misc_feature 1..22: note = chemically synthesized
  source 1..22: mol_type = other DNA
gcttacttagaaaagaaccgct

SEQ ID NO: 84039 - DNA, 22 bp, synthetic construct
  misc_feature 1..22: note = chemically synthesized
  source 1..22: mol_type = other DNA
acttagaaaagaaccgctttat

SEQ ID NO: 84040 - DNA, 22 bp, synthetic construct
  misc_feature 1..22: note = chemically synthesized
  source 1..22: mol_type = other DNA
cttagaaaagaaccgctttatg

SEQ ID NO: 84041 - DNA, 22 bp, synthetic construct
  misc_feature 1..22: note = chemically synthesized
  source 1..22: mol_type = other DNA
agaaaagaaccgctttatgttc

SEQ ID NO: 84042 - DNA, 22 bp, synthetic construct
  misc_feature 1..22: note = chemically synthesized
  source 1..22: mol_type = other DNA
gaaaagaaccgctttatgttct

SEQ ID NO: 84043 - DNA, 22 bp, synthetic construct
  misc_feature 1..22: note = chemically synthesized
  source 1..22: mol_type = other DNA
tatgttcttttatcttttttct

SEQ ID NO: 84044 - DNA, 22 bp, synthetic construct
  misc_feature 1..22: note = chemically synthesized
  source 1..22: mol_type = other DNA
atgttcttttatcttttttctt

SEQ ID NO: 84045 - DNA, 22 bp, synthetic construct
  misc_feature 1..22: note = chemically synthesized
  source 1..22: mol_type = other DNA
tgttcttttatcttttttcttt

SEQ ID NO: 84046 - DNA, 22 bp, synthetic construct
  misc_feature 1..22: note = chemically synthesized
  source 1..22: mol_type = other DNA
ttttatcttttttcttttaaac

SEQ ID NO: 84047 - DNA, 22 bp, synthetic construct
  misc_feature 1..22: note = chemically synthesized
  source 1..22: mol_type = other DNA
ttatcttttttcttttaaactc

SEQ ID NO: 84048 - DNA, 22 bp, synthetic construct
  misc_feature 1..22: note = chemically synthesized
  source 1..22: mol_type = other DNA
tatcttttttcttttaaactca

SEQ ID NO: 84049 - DNA, 22 bp, synthetic construct
  misc_feature 1..22: note = chemically synthesized
  source 1..22: mol_type = other DNA
atcttttttcttttaaactcag

SEQ ID NO: 84050 - DNA, 22 bp, synthetic construct
  misc_feature 1..22: note = chemically synthesized
  source 1..22: mol_type = other DNA
tcttttttcttttaaactcaga

SEQ ID NO: 84051 - DNA, 22 bp, synthetic construct
  misc_feature 1..22: note = chemically synthesized
  source 1..22: mol_type = other DNA
ttttcttttaaactcagaataa

SEQ ID NO: 84052 - DNA, 22 bp, synthetic construct
  misc_feature 1..22: note = chemically synthesized
  source 1..22: mol_type = other DNA
tttcttttaaactcagaataag

SEQ ID NO: 84053 - DNA, 22 bp, synthetic construct
  misc_feature 1..22: note = chemically synthesized
  source 1..22: mol_type = other DNA
ttcttttaaactcagaataagt

SEQ ID NO: 84054 - DNA, 22 bp, synthetic construct
  misc_feature 1..22: note = chemically synthesized
  source 1..22: mol_type = other DNA
tcttttaaactcagaataagtc

SEQ ID NO: 84055 - DNA, 22 bp, synthetic construct
  misc_feature 1..22: note = chemically synthesized
  source 1..22: mol_type = other DNA
cttttaaactcagaataagtcg

SEQ ID NO: 84056 - DNA, 22 bp, synthetic construct
  misc_feature 1..22: note = chemically synthesized
  source 1..22: mol_type = other DNA
ttttaaactcagaataagtcgg

SEQ ID NO: 84057 - DNA, 22 bp, synthetic construct
  misc_feature 1..22: note = chemically synthesized
  source 1..22: mol_type = other DNA
ttaaactcagaataagtcggta

SEQ ID NO: 84058 - DNA, 22 bp, synthetic construct
  misc_feature 1..22: note = chemically synthesized
  source 1..22: mol_type = other DNA
taaactcagaataagtcggtag

SEQ ID NO: 84059 - DNA, 22 bp, synthetic construct
  misc_feature 1..22: note = chemically synthesized
  source 1..22: mol_type = other DNA
aaactcagaataagtcggtagc

SEQ ID NO: 84060 - DNA, 22 bp, synthetic construct
  misc_feature 1..22: note = chemically synthesized
  source 1..22: mol_type = other DNA
aactcagaataagtcggtagcg

SEQ ID NO: 84061 - DNA, 22 bp, synthetic construct
  misc_feature 1..22: note = chemically synthesized
  source 1..22: mol_type = other DNA
agaataagtcggtagcggacag

SEQ ID NO: 84062 - DNA, 22 bp, synthetic construct
  misc_feature 1..22: note = chemically synthesized
  source 1..22: mol_type = other DNA
atctgttcagaagatcccccac

SEQ ID NO: 84063 - DNA, 22 bp, synthetic construct
  misc_feature 1..22: note = chemically synthesized
  source 1..22: mol_type = other DNA
ttcagaagatcccccacttaga

SEQ ID NO: 84064 - DNA, 22 bp, synthetic construct
  misc_feature 1..22: note = chemically synthesized
  source 1..22: mol_type = other DNA
agaagatcccccacttagatat

SEQ ID NO: 84065 - DNA, 22 bp, synthetic construct
  misc_feature 1..22: note = chemically synthesized
  source 1..22: mol_type = other DNA
agatataaaagcaaaagatcta

SEQ ID NO: 84066 - DNA, 22 bp, synthetic construct
  misc_feature 1..22: note = chemically synthesized
  source 1..22: mol_type = other DNA
gatataaaagcaaaagatctag

SEQ ID NO: 84067 - DNA, 22 bp, synthetic construct
  misc_feature 1..22: note = chemically synthesized
  source 1..22: mol_type = other DNA
gagcaaaatctgcttccagcct

SEQ ID NO: 84068 - DNA, 22 bp, synthetic construct
  misc_feature 1..22: note = chemically synthesized
  source 1..22: mol_type = other DNA
cttccagccttgtagcagtgga

SEQ ID NO: 84069 - DNA, 22 bp, synthetic construct
  misc_feature 1..22: note = chemically synthesized
  source 1..22: mol_type = other DNA
ccagccttgtagcagtggagtc

SEQ ID NO: 84070 - DNA, 22 bp, synthetic construct
  misc_feature 1..22: note = chemically synthesized
  source 1..22: mol_type = other DNA
cagccttgtagcagtggagtcc

SEQ ID NO: 84071 - DNA, 22 bp, synthetic construct
  misc_feature 1..22: note = chemically synthesized
  source 1..22: mol_type = other DNA
gtagcagtggagtccacatata

SEQ ID NO: 84072 - DNA, 22 bp, synthetic construct
  misc_feature 1..22: note = chemically synthesized
  source 1..22: mol_type = other DNA
tagcagtggagtccacatataa

SEQ ID NO: 84073 - DNA, 22 bp, synthetic construct
  misc_feature 1..22: note = chemically synthesized
  source 1..22: mol_type = other DNA
aaaaataaggattctaatttaa

SEQ ID NO: 84074 - DNA, 22 bp, synthetic construct
  misc_feature 1..22: note = chemically synthesized
  source 1..22: mol_type = other DNA
taatttaaattagacatggtag

SEQ ID NO: 84075 - DNA, 22 bp, synthetic construct
  misc_feature 1..22: note = chemically synthesized
  source 1..22: mol_type = other DNA
atttaaattagacatggtagaa

SEQ ID NO: 84076 - DNA, 22 bp, synthetic construct
  misc_feature 1..22: note = chemically synthesized
  source 1..22: mol_type = other DNA
aaattagacatggtagaagttg

SEQ ID NO: 84077 - DNA, 22 bp, synthetic construct
  misc_feature 1..22: note = chemically synthesized
  source 1..22: mol_type = other DNA
aattagacatggtagaagttga

SEQ ID NO: 84078 - DNA, 22 bp, synthetic construct
  misc_feature 1..22: note = chemically synthesized
  source 1..22: mol_type = other DNA
gacatggtagaagttgaatcca

SEQ ID NO: 84079 - DNA, 22 bp, synthetic construct
  misc_feature 1..22: note = chemically synthesized
  source 1..22: mol_type = other DNA
aatccaaagtcatatttctttg

SEQ ID NO: 84080 - DNA, 22 bp, synthetic construct
  misc_feature 1..22: note = chemically synthesized
  source 1..22: mol_type = other DNA
ctttgtgtcctctttatgaact

SEQ ID NO: 84081 - DNA, 22 bp, synthetic construct
  misc_feature 1..22: note = chemically synthesized
  source 1..22: mol_type = other DNA
tttgtgtcctctttatgaactg

SEQ ID NO: 84082 - DNA, 22 bp, synthetic construct
  misc_feature 1..22: note = chemically synthesized
  source 1..22: mol_type = other DNA
tgtgtcctctttatgaactgta

SEQ ID NO: 84083 - DNA, 22 bp, synthetic construct
  misc_feature 1..22: note = chemically synthesized
  source 1..22: mol_type = other DNA
gtgtcctctttatgaactgtag

SEQ ID NO: 84084 - DNA, 22 bp, synthetic construct
  misc_feature 1..22: note = chemically synthesized
  source 1..22: mol_type = other DNA
tgtcctctttatgaactgtagc

SEQ ID NO: 84085 - DNA, 22 bp, synthetic construct
  misc_feature 1..22: note = chemically synthesized
  source 1..22: mol_type = other DNA
tttatgaactgtagcttccctg

SEQ ID NO: 84086 - DNA, 22 bp, synthetic construct
  misc_feature 1..22: note = chemically synthesized
  source 1..22: mol_type = other DNA
tatgaactgtagcttccctgtc

SEQ ID NO: 84087 - DNA, 22 bp, synthetic construct
  misc_feature 1..22: note = chemically synthesized
  source 1..22: mol_type = other DNA
atgaactgtagcttccctgtcc

SEQ ID NO: 84088 - DNA, 22 bp, synthetic construct
  misc_feature 1..22: note = chemically synthesized
  source 1..22: mol_type = other DNA
tgaactgtagcttccctgtcca

SEQ ID NO: 84089 - DNA, 22 bp, synthetic construct
  misc_feature 1..22: note = chemically synthesized
  source 1..22: mol_type = other DNA
tagcttccctgtccaatatagt

SEQ ID NO: 84090 - DNA, 22 bp, synthetic construct
  misc_feature 1..22: note = chemically synthesized
  source 1..22: mol_type = other DNA
ccctgtccaatatagtggctgc

SEQ ID NO: 84091 - DNA, 22 bp, synthetic construct
  misc_feature 1..22: note = chemically synthesized
  source 1..22: mol_type = other DNA
cctgtccaatatagtggctgct

SEQ ID NO: 84092 - DNA, 22 bp, synthetic construct
  misc_feature 1..22: note = chemically synthesized
  source 1..22: mol_type = other DNA
tccaatatagtggctgctgaac

SEQ ID NO: 84093 - DNA, 22 bp, synthetic construct
  misc_feature 1..22: note = chemically synthesized
  source 1..22: mol_type = other DNA
ctgaactgaactgtccaataca

SEQ ID NO: 84094 - DNA, 22 bp, synthetic construct
  misc_feature 1..22: note = chemically synthesized
  source 1..22: mol_type = other DNA
aactgaactgtccaatacaagg

SEQ ID NO: 84095 - DNA, 22 bp, synthetic construct
  misc_feature 1..22: note = chemically synthesized
  source 1..22: mol_type = other DNA
aactgtccaatacaaggacatt

SEQ ID NO: 84096 - DNA, 22 bp, synthetic construct
  misc_feature 1..22: note = chemically synthesized
  source 1..22: mol_type = other DNA
tccaatacaaggacattaaaca

SEQ ID NO: 84097 - DNA, 22 bp, synthetic construct
  misc_feature 1..22: note = chemically synthesized
  source 1..22: mol_type = other DNA
aacatttaaatataaattaact

SEQ ID NO: 84098 - DNA, 22 bp, synthetic construct
  misc_feature 1..22: note = chemically synthesized
  source 1..22: mol_type = other DNA
aaatataaattaacttaaagta

SEQ ID NO: 84099 - DNA, 22 bp, synthetic construct
  misc_feature 1..22: note = chemically synthesized
  source 1..22: mol_type = other DNA
aatataaattaacttaaagtaa

SEQ ID NO: 84100 - DNA, 22 bp, synthetic construct
  misc_feature 1..22: note = chemically synthesized
  source 1..22: mol_type = other DNA
acttaaagtaactgaaattgta

SEQ ID NO: 84101 - DNA, 22 bp, synthetic construct
  misc_feature 1..22: note = chemically synthesized
  source 1..22: mol_type = other DNA
aaagtaactgaaattgtaaatg

SEQ ID NO: 84102 - DNA, 22 bp, synthetic construct
  misc_feature 1..22: note = chemically synthesized
  source 1..22: mol_type = other DNA
aagtaactgaaattgtaaatgc

SEQ ID NO: 84103 - DNA, 22 bp, synthetic construct
  misc_feature 1..22: note = chemically synthesized
  source 1..22: mol_type = other DNA
aaattgtaaatgcagttgttca

SEQ ID NO: 84104 - DNA, 22 bp, synthetic construct
  misc_feature 1..22: note = chemically synthesized
  source 1..22: mol_type = other DNA
taaatgcagttgttcaattaca

SEQ ID NO: 84105 - DNA, 22 bp, synthetic construct
  misc_feature 1..22: note = chemically synthesized
  source 1..22: mol_type = other DNA
ttcaattacactaccatcattt

SEQ ID NO: 84106 - DNA, 22 bp, synthetic construct
  misc_feature 1..22: note = chemically synthesized
  source 1..22: mol_type = other DNA
aattacactaccatcatttcaa

SEQ ID NO: 84107 - DNA, 22 bp, synthetic construct
  misc_feature 1..22: note = chemically synthesized
  source 1..22: mol_type = other DNA
cactaccatcatttcaagcgca

SEQ ID NO: 84108 - DNA, 22 bp, synthetic construct
  misc_feature 1..22: note = chemically synthesized
  source 1..22: mol_type = other DNA
ccatcatttcaagcgcacagga

SEQ ID NO: 84109 - DNA, 22 bp, synthetic construct
  misc_feature 1..22: note = chemically synthesized
  source 1..22: mol_type = other DNA
caagcgcacaggagccatatat

SEQ ID NO: 84110 - DNA, 22 bp, synthetic construct
  misc_feature 1..22: note = chemically synthesized
  source 1..22: mol_type = other DNA
aagcgcacaggagccatatatt

SEQ ID NO: 84111 - DNA, 22 bp, synthetic construct
  misc_feature 1..22: note = chemically synthesized
  source 1..22: mol_type = other DNA
cactttagccattttatggtat

SEQ ID NO: 84112 - DNA, 22 bp, synthetic construct
  misc_feature 1..22: note = chemically synthesized
  source 1..22: mol_type = other DNA
tagccattttatggtattttat

SEQ ID NO: 84113 - DNA, 22 bp, synthetic construct
  misc_feature 1..22: note = chemically synthesized
  source 1..22: mol_type = other DNA
agccattttatggtattttata

SEQ ID NO: 84114 - DNA, 22 bp, synthetic construct
  misc_feature 1..22: note = chemically synthesized
  source 1..22: mol_type = other DNA
gccattttatggtattttatag

SEQ ID NO: 84115 - DNA, 22 bp, synthetic construct
  misc_feature 1..22: note = chemically synthesized
  source 1..22: mol_type = other DNA
tatggtattttatagaacatcg

SEQ ID NO: 84116 - DNA, 22 bp, synthetic construct
  misc_feature 1..22: note = chemically synthesized
  source 1..22: mol_type = other DNA
atggtattttatagaacatcgc

SEQ ID NO: 84117 - DNA, 22 bp, synthetic construct
  misc_feature 1..22: note = chemically synthesized
  source 1..22: mol_type = other DNA
tggtattttatagaacatcgcc

SEQ ID NO: 84118 - DNA, 22 bp, synthetic construct
  misc_feature 1..22: note = chemically synthesized
  source 1..22: mol_type = other DNA
tatagaacatcgccatcagttt

SEQ ID NO: 84119 - DNA, 22 bp, synthetic construct
  misc_feature 1..22: note = chemically synthesized
  source 1..22: mol_type = other DNA
atagaacatcgccatcagttta

SEQ ID NO: 84120 - DNA, 22 bp, synthetic construct
  misc_feature 1..22: note = chemically synthesized
  source 1..22: mol_type = other DNA
tagaacatcgccatcagtttag

SEQ ID NO: 84121 - DNA, 22 bp, synthetic construct
  misc_feature 1..22: note = chemically synthesized
  source 1..22: mol_type = other DNA
agaaaagttcccttggacaatt

SEQ ID NO: 84122 - DNA, 22 bp, synthetic construct
  misc_feature 1..22: note = chemically synthesized
  source 1..22: mol_type = other DNA
gaaaagttcccttggacaattc

SEQ ID NO: 84123 - DNA, 22 bp, synthetic construct
  misc_feature 1..22: note = chemically synthesized
  source 1..22: mol_type = other DNA
ccttggacaattctggtccata

SEQ ID NO: 84124 - DNA, 22 bp, synthetic construct
  misc_feature 1..22: note = chemically synthesized
  source 1..22: mol_type = other DNA
ggacaattctggtccatacaga

SEQ ID NO: 84125 - DNA, 22 bp, synthetic construct
  misc_feature 1..22: note = chemically synthesized
  source 1..22: mol_type = other DNA
gacaattctggtccatacagat

SEQ ID NO: 84126 - DNA, 22 bp, synthetic construct
  misc_feature 1..22: note = chemically synthesized
  source 1..22: mol_type = other DNA
tggtccatacagatatcacaac

SEQ ID NO: 84127 - DNA, 22 bp, synthetic construct
  misc_feature 1..22: note = chemically synthesized
  source 1..22: mol_type = other DNA
gtccatacagatatcacaacat

SEQ ID NO: 84128 - DNA, 22 bp, synthetic construct
  misc_feature 1..22: note = chemically synthesized
  source 1..22: mol_type = other DNA
ctgtgagttggctatagtctcc

SEQ ID NO: 84129 - DNA, 22 bp, synthetic construct
  misc_feature 1..22: note = chemically synthesized
  source 1..22: mol_type = other DNA
tgagttggctatagtctccatt

SEQ ID NO: 84130 - DNA, 22 bp, synthetic construct
  misc_feature 1..22: note = chemically synthesized
  source 1..22: mol_type = other DNA
gctatagtctccattttgaagg

SEQ ID NO: 84131 - DNA, 22 bp, synthetic construct
  misc_feature 1..22: note = chemically synthesized
  source 1..22: mol_type = other DNA
tagtctccattttgaaggttaa

SEQ ID NO: 84132 - DNA, 22 bp, synthetic construct
  misc_feature 1..22: note = chemically synthesized
  source 1..22: mol_type = other DNA
cattttgaaggttaattaagta

SEQ ID NO: 84133 - DNA, 22 bp, synthetic construct
  misc_feature 1..22: note = chemically synthesized
  source 1..22: mol_type = other DNA
tgaaggttaattaagtaaacct

SEQ ID NO: 84134 - DNA, 22 bp, synthetic construct
  misc_feature 1..22: note = chemically synthesized
  source 1..22: mol_type = other DNA
gaaggttaattaagtaaacctc

SEQ ID NO: 84135 - DNA, 22 bp, synthetic construct
  misc_feature 1..22: note = chemically synthesized
  source 1..22: mol_type = other DNA
aaggttaattaagtaaacctca

SEQ ID NO: 84136 - DNA, 22 bp, synthetic construct
  misc_feature 1..22: note = chemically synthesized
  source 1..22: mol_type = other DNA
attaagtaaacctcagagaatg

SEQ ID NO: 84137 - DNA, 22 bp, synthetic construct
  misc_feature 1..22: note = chemically synthesized
  source 1..22: mol_type = other DNA
agtaaacctcagagaatgaaag

SEQ ID NO: 84138 - DNA, 22 bp, synthetic construct
  misc_feature 1..22: note = chemically synthesized
  source 1..22: mol_type = other DNA
agagaatgaaagaaacttcaag

SEQ ID NO: 84139 - DNA, 22 bp, synthetic construct
  misc_feature 1..22: note = chemically synthesized
  source 1..22: mol_type = other DNA
caagttttctactttgaaactt

SEQ ID NO: 84140 - DNA, 22 bp, synthetic construct
  misc_feature 1..22: note = chemically synthesized
  source 1..22: mol_type = other DNA
aagttttctactttgaaacttg

SEQ ID NO: 84141 - DNA, 22 bp, synthetic construct
  misc_feature 1..22: note = chemically synthesized
  source 1..22: mol_type = other DNA
tctactttgaaacttgaaaacc

SEQ ID NO: 84142 - DNA, 22 bp, synthetic construct
  misc_feature 1..22: note = chemically synthesized
  source 1..22: mol_type = other DNA
ctactttgaaacttgaaaacct

SEQ ID NO: 84143 - DNA, 22 bp, synthetic construct
  misc_feature 1..22: note = chemically synthesized
  source 1..22: mol_type = other DNA
tactttgaaacttgaaaaccta

SEQ ID NO: 84144 - DNA, 22 bp, synthetic construct
  misc_feature 1..22: note = chemically synthesized
  source 1..22: mol_type = other DNA
ctttgaaacttgaaaacctagg

SEQ ID NO: 84145 - DNA, 22 bp, synthetic construct
  misc_feature 1..22: note = chemically synthesized
  source 1..22: mol_type = other DNA
tgaaacttgaaaacctaggttt

SEQ ID NO: 84146 - DNA, 22 bp, synthetic construct
  misc_feature 1..22: note = chemically synthesized
  source 1..22: mol_type = other DNA
gaaacttgaaaacctaggtttt

SEQ ID NO: 84147 - DNA, 22 bp, synthetic construct
  misc_feature 1..22: note = chemically synthesized
  source 1..22: mol_type = other DNA
aaacttgaaaacctaggttttt

SEQ ID NO: 84148 - DNA, 22 bp, synthetic construct
  misc_feature 1..22: note = chemically synthesized
  source 1..22: mol_type = other DNA
gaaaacctaggtttttaatcca

SEQ ID NO: 84149 - DNA, 22 bp, synthetic construct
  misc_feature 1..22: note = chemically synthesized
  source 1..22: mol_type = other DNA
aaaacctaggtttttaatccag

SEQ ID NO: 84150 - DNA, 22 bp, synthetic construct
  misc_feature 1..22: note = chemically synthesized
  source 1..22: mol_type = other DNA
ggtttttaatccagctttgttt

SEQ ID NO: 84151 - DNA, 22 bp, synthetic construct
  misc_feature 1..22: note = chemically synthesized
  source 1..22: mol_type = other DNA
ttaatccagctttgttttacag

SEQ ID NO: 84152 - DNA, 22 bp, synthetic construct
  misc_feature 1..22: note = chemically synthesized
  source 1..22: mol_type = other DNA
taatccagctttgttttacagc

SEQ ID NO: 84153 - DNA, 22 bp, synthetic construct
  misc_feature 1..22: note = chemically synthesized
  source 1..22: mol_type = other DNA
aatccagctttgttttacagca

SEQ ID NO: 84154 - DNA, 22 bp, synthetic construct
  misc_feature 1..22: note = chemically synthesized
  source 1..22: mol_type = other DNA
atccagctttgttttacagcaa

SEQ ID NO: 84155 - DNA, 22 bp, synthetic construct
  misc_feature 1..22: note = chemically synthesized
  source 1..22: mol_type = other DNA
tgttttacagcaaaggaaatgc

SEQ ID NO: 84156 - DNA, 22 bp, synthetic construct
  misc_feature 1..22: note = chemically synthesized
  source 1..22: mol_type = other DNA
gttttacagcaaaggaaatgct

SEQ ID NO: 84157 - DNA, 22 bp, synthetic construct
  misc_feature 1..22: note = chemically synthesized
  source 1..22: mol_type = other DNA
ttttacagcaaaggaaatgctc

SEQ ID NO: 84158 - DNA, 22 bp, synthetic construct
  misc_feature 1..22: note = chemically synthesized
  source 1..22: mol_type = other DNA
tacagcaaaggaaatgctcaaa

SEQ ID NO: 84159 - DNA, 22 bp, synthetic construct
  misc_feature 1..22: note = chemically synthesized
  source 1..22: mol_type = other DNA
acagcaaaggaaatgctcaaaa

SEQ ID NO: 84160 - DNA, 22 bp, synthetic construct
  misc_feature 1..22: note = chemically synthesized
  source 1..22: mol_type = other DNA
cagcaaaggaaatgctcaaaag

SEQ ID NO: 84161 - DNA, 22 bp, synthetic construct
  misc_feature 1..22: note = chemically synthesized
  source 1..22: mol_type = other DNA
aaaagtacatttcaggcaaata

SEQ ID NO: 84162 - DNA, 22 bp, synthetic construct
  misc_feature 1..22: note = chemically synthesized
  source 1..22: mol_type = other DNA
caggcaaataaacaattttttc

SEQ ID NO: 84163 - DNA, 22 bp, synthetic construct
  misc_feature 1..22: note = chemically synthesized
  source 1..22: mol_type = other DNA
aggcaaataaacaattttttcc

SEQ ID NO: 84164 - DNA, 22 bp, synthetic construct
  misc_feature 1..22: note = chemically synthesized
  source 1..22: mol_type = other DNA
tttcctctttcttaaatatggt

SEQ ID NO: 84165 - DNA, 22 bp, synthetic construct
  misc_feature 1..22: note = chemically synthesized
  source 1..22: mol_type = other DNA
ttcctctttcttaaatatggtc

SEQ ID NO: 84166 - DNA, 22 bp, synthetic construct
  misc_feature 1..22: note = chemically synthesized
  source 1..22: mol_type = other DNA
tcctctttcttaaatatggtca

SEQ ID NO: 84167 - DNA, 22 bp, synthetic construct
  misc_feature 1..22: note = chemically synthesized
  source 1..22: mol_type = other DNA
cctctttcttaaatatggtcag

SEQ ID NO: 84168 - DNA, 22 bp, synthetic construct
  misc_feature 1..22: note = chemically synthesized
  source 1..22: mol_type = other DNA
ctctttcttaaatatggtcaga

SEQ ID NO: 84169 - DNA, 22 bp, synthetic construct
  misc_feature 1..22: note = chemically synthesized
  source 1..22: mol_type = other DNA
tttcttaaatatggtcagactg

SEQ ID NO: 84170 - DNA, 22 bp, synthetic construct
  misc_feature 1..22: note = chemically synthesized
  source 1..22: mol_type = other DNA
tcttaaatatggtcagactgat

SEQ ID NO: 84171 - DNA, 22 bp, synthetic construct
  misc_feature 1..22: note = chemically synthesized
  source 1..22: mol_type = other DNA
cttaaatatggtcagactgata

SEQ ID NO: 84172 - DNA, 22 bp, synthetic construct
  misc_feature 1..22: note = chemically synthesized
  source 1..22: mol_type = other DNA
ttaaatatggtcagactgatag

SEQ ID NO: 84173 - DNA, 22 bp, synthetic construct
  misc_feature 1..22: note = chemically synthesized
  source 1..22: mol_type = other DNA
aaatatggtcagactgatagag

SEQ ID NO: 84174 - DNA, 22 bp, synthetic construct
  misc_feature 1..22: note = chemically synthesized
  source 1..22: mol_type = other DNA
aatatggtcagactgatagagt

SEQ ID NO: 84175 - DNA, 22 bp, synthetic construct
  misc_feature 1..22: note = chemically synthesized
  source 1..22: mol_type = other DNA
atagagtgacctacatgtgtcc

SEQ ID NO: 84176 - DNA, 22 bp, synthetic construct
  misc_feature 1..22: note = chemically synthesized
  source 1..22: mol_type = other DNA
catgtgtccaggctgacacaat

SEQ ID NO: 84177 - DNA, 22 bp, synthetic construct
  misc_feature 1..22: note = chemically synthesized
  source 1..22: mol_type = other DNA
acacaatggaacttgtttgttg

SEQ ID NO: 84178 - DNA, 22 bp, synthetic construct
  misc_feature 1..22: note = chemically synthesized
  source 1..22: mol_type = other DNA
gtttgttgattctctgactata

SEQ ID NO: 84179 - DNA, 22 bp, synthetic construct
  misc_feature 1..22: note = chemically synthesized
  source 1..22: mol_type = other DNA
tttgttgattctctgactatat

SEQ ID NO: 84180 - DNA, 22 bp, synthetic construct
  misc_feature 1..22: note = chemically synthesized
  source 1..22: mol_type = other DNA
gttgattctctgactatattta

SEQ ID NO: 84181 - DNA, 22 bp, synthetic construct
  misc_feature 1..22: note = chemically synthesized
  source 1..22: mol_type = other DNA
ttgattctctgactatatttaa

SEQ ID NO: 84182 - DNA, 22 bp, synthetic construct
  misc_feature 1..22: note = chemically synthesized
  source 1..22: mol_type = other DNA
attctctgactatatttaaata

SEQ ID NO: 84183 - DNA, 22 bp, synthetic construct
  misc_feature 1..22: note = chemically synthesized
  source 1..22: mol_type = other DNA
tctgactatatttaaatatttt

SEQ ID NO: 84184 - DNA, 22 bp, synthetic construct
  misc_feature 1..22: note = chemically synthesized
  source 1..22: mol_type = other DNA
tgactatatttaaatatttttt

SEQ ID NO: 84185 - DNA, 22 bp, synthetic construct
  misc_feature 1..22: note = chemically synthesized
  source 1..22: mol_type = other DNA
actatatttaaatattttttaa

SEQ ID NO: 84186 - DNA, 22 bp, synthetic construct
  misc_feature 1..22: note = chemically synthesized
  source 1..22: mol_type = other DNA
tatttaaatattttttaaggtc

SEQ ID NO: 84187 - DNA, 22 bp, synthetic construct
  misc_feature 1..22: note = chemically synthesized
  source 1..22: mol_type = other DNA
aaatattttttaaggtcatttg

SEQ ID NO: 84188 - DNA, 22 bp, synthetic construct
  misc_feature 1..22: note = chemically synthesized
  source 1..22: mol_type = other DNA
aatattttttaaggtcatttgt

SEQ ID NO: 84189 - DNA, 22 bp, synthetic construct
  misc_feature 1..22: note = chemically synthesized
  source 1..22: mol_type = other DNA
tttaaggtcatttgtcatggac

SEQ ID NO: 84190 - DNA, 22 bp, synthetic construct
  misc_feature 1..22: note = chemically synthesized
  source 1..22: mol_type = other DNA
ttaaggtcatttgtcatggact

SEQ ID NO: 84191 - DNA, 22 bp, synthetic construct
  misc_feature 1..22: note = chemically synthesized
  source 1..22: mol_type = other DNA
taaggtcatttgtcatggactc

SEQ ID NO: 84192 - DNA, 22 bp, synthetic construct
  misc_feature 1..22: note = chemically synthesized
  source 1..22: mol_type = other DNA
aaggtcatttgtcatggactca

SEQ ID NO: 84193 - DNA, 22 bp, synthetic construct
  misc_feature 1..22: note = chemically synthesized
  source 1..22: mol_type = other DNA
aggtcatttgtcatggactcag

SEQ ID NO: 84194 - DNA, 22 bp, synthetic construct
  misc_feature 1..22: note = chemically synthesized
  source 1..22: mol_type = other DNA
gtcatggactcagagtaaatct

SEQ ID NO: 84195 - DNA, 22 bp, synthetic construct
  misc_feature 1..22: note = chemically synthesized
  source 1..22: mol_type = other DNA
tcatggactcagagtaaatcta

SEQ ID NO: 84196 - DNA, 22 bp, synthetic construct
  misc_feature 1..22: note = chemically synthesized
  source 1..22: mol_type = other DNA
agagtaaatctacaattttaat

SEQ ID NO: 84197 - DNA, 22 bp, synthetic construct
  misc_feature 1..22: note = chemically synthesized
  source 1..22: mol_type = other DNA
caattttaataattttttcttt

SEQ ID NO: 84198 - DNA, 22 bp, synthetic construct
  misc_feature 1..22: note = chemically synthesized
  source 1..22: mol_type = other DNA
taataattttttcttttttatg

SEQ ID NO: 84199 - DNA, 22 bp, synthetic construct
  misc_feature 1..22: note = chemically synthesized
  source 1..22: mol_type = other DNA
aataattttttcttttttatgg

SEQ ID NO: 84200 - DNA, 22 bp, synthetic construct
  misc_feature 1..22: note = chemically synthesized
  source 1..22: mol_type = other DNA
ataattttttcttttttatggc

SEQ ID NO: 84201 - DNA, 22 bp, synthetic construct
  misc_feature 1..22: note = chemically synthesized
  source 1..22: mol_type = other DNA
tttcttttttatggcactgatt

SEQ ID NO: 84202 - DNA, 22 bp, synthetic construct
  misc_feature 1..22: note = chemically synthesized
  source 1..22: mol_type = other DNA
ttcttttttatggcactgattt

SEQ ID NO: 84203 - DNA, 22 bp, synthetic construct
  misc_feature 1..22: note = chemically synthesized
  source 1..22: mol_type = other DNA
tcttttttatggcactgatttt

SEQ ID NO: 84204 - DNA, 22 bp, synthetic construct
  misc_feature 1..22: note = chemically synthesized
  source 1..22: mol_type = other DNA
cttttttatggcactgattttt

SEQ ID NO: 84205 - DNA, 22 bp, synthetic construct
  misc_feature 1..22: note = chemically synthesized
  source 1..22: mol_type = other DNA
ttttttatggcactgatttttg

SEQ ID NO: 84206 - DNA, 22 bp, synthetic construct
  misc_feature 1..22: note = chemically synthesized
  source 1..22: mol_type = other DNA
ttttatggcactgatttttgtt

SEQ ID NO: 84207 - DNA, 22 bp, synthetic construct
  misc_feature 1..22: note = chemically synthesized
  source 1..22: mol_type = other DNA
tttatggcactgatttttgttt

SEQ ID NO: 84208 - DNA, 22 bp, synthetic construct
  misc_feature 1..22: note = chemically synthesized
  source 1..22: mol_type = other DNA
ttatggcactgatttttgttta

SEQ ID NO: 84209 - DNA, 22 bp, synthetic construct
  misc_feature 1..22: note = chemically synthesized
  source 1..22: mol_type = other DNA
tatggcactgatttttgtttat

SEQ ID NO: 84210 - DNA, 22 bp, synthetic construct
  misc_feature 1..22: note = chemically synthesized
  source 1..22: mol_type = other DNA
atggcactgatttttgtttatt

SEQ ID NO: 84211 - DNA, 22 bp, synthetic construct
  misc_feature 1..22: note = chemically synthesized
  source 1..22: mol_type = other DNA
tggcactgatttttgtttatta

SEQ ID NO: 84212 - DNA, 22 bp, synthetic construct
  misc_feature 1..22: note = chemically synthesized
  source 1..22: mol_type = other DNA
atttttgtttattattgttgct

SEQ ID NO: 84213 - DNA, 22 bp, synthetic construct
  misc_feature 1..22: note = chemically synthesized
  source 1..22: mol_type = other DNA
ttgtttattattgttgctgctt

SEQ ID NO: 84214 - DNA, 22 bp, synthetic construct
  misc_feature 1..22: note = chemically synthesized
  source 1..22: mol_type = other DNA
tgtttattattgttgctgcttt

SEQ ID NO: 84215 - DNA, 22 bp, synthetic construct
  misc_feature 1..22: note = chemically synthesized
  source 1..22: mol_type = other DNA
gtttattattgttgctgctttt

SEQ ID NO: 84216 - DNA, 22 bp, synthetic construct
  misc_feature 1..22: note = chemically synthesized
  source 1..22: mol_type = other DNA
tttattattgttgctgcttttc

SEQ ID NO: 84217 - DNA, 22 bp, synthetic construct
  misc_feature 1..22: note = chemically synthesized
  source 1..22: mol_type = other DNA
attattgttgctgcttttcttt

SEQ ID NO: 84218 - DNA, 22 bp, synthetic construct
  misc_feature 1..22: note = chemically synthesized
  source 1..22: mol_type = other DNA
ttattgttgctgcttttctttc

SEQ ID NO: 84219 - DNA, 22 bp, synthetic construct
  misc_feature 1..22: note = chemically synthesized
  source 1..22: mol_type = other DNA
ttgttgctgcttttctttcttt

SEQ ID NO: 84220 - DNA, 22 bp, synthetic construct
  misc_feature 1..22: note = chemically synthesized
  source 1..22: mol_type = other DNA
ttgctgcttttctttctttttt

SEQ ID NO: 84221 - DNA, 22 bp, synthetic construct
  misc_feature 1..22: note = chemically synthesized
  source 1..22: mol_type = other DNA
ctgcttttctttctttttttta

SEQ ID NO: 84222 - DNA, 22 bp, synthetic construct
  misc_feature 1..22: note = chemically synthesized
  source 1..22: mol_type = other DNA
cttttctttcttttttttaggc

SEQ ID NO: 84223 - DNA, 22 bp, synthetic construct
  misc_feature 1..22: note = chemically synthesized
  source 1..22: mol_type = other DNA
ttctttcttttttttaggcaat

SEQ ID NO: 84224 - DNA, 22 bp, synthetic construct
  misc_feature 1..22: note = chemically synthesized
  source 1..22: mol_type = other DNA
tctttcttttttttaggcaata

SEQ ID NO: 84225 - DNA, 22 bp, synthetic construct
  misc_feature 1..22: note = chemically synthesized
  source 1..22: mol_type = other DNA
ctttcttttttttaggcaatac

SEQ ID NO: 84226 - DNA, 22 bp, synthetic construct
  misc_feature 1..22: note = chemically synthesized
  source 1..22: mol_type = other DNA
tttcttttttttaggcaataca

SEQ ID NO: 84227 - DNA, 22 bp, synthetic construct
  misc_feature 1..22: note = chemically synthesized
  source 1..22: mol_type = other DNA
tcttttttttaggcaatacatc

SEQ ID NO: 84228 - DNA, 22 bp, synthetic construct
  misc_feature 1..22: note = chemically synthesized
  source 1..22: mol_type = other DNA
cttttttttaggcaatacatct

SEQ ID NO: 84229 - DNA, 22 bp, synthetic construct
  misc_feature 1..22: note = chemically synthesized
  source 1..22: mol_type = other DNA
ttttttttaggcaatacatctc

SEQ ID NO: 84230 - DNA, 22 bp, synthetic construct
  misc_feature 1..22: note = chemically synthesized
  source 1..22: mol_type = other DNA
ttttttaggcaatacatctcaa

SEQ ID NO: 84231 - DNA, 22 bp, synthetic construct
  misc_feature 1..22: note = chemically synthesized
  source 1..22: mol_type = other DNA
tttttaggcaatacatctcaat

SEQ ID NO: 84232 - DNA, 22 bp, synthetic construct
  misc_feature 1..22: note = chemically synthesized
  source 1..22: mol_type = other DNA
ttttaggcaatacatctcaata

SEQ ID NO: 84233 - DNA, 22 bp, synthetic construct
  misc_feature 1..22: note = chemically synthesized
  source 1..22: mol_type = other DNA
tttaggcaatacatctcaatat

SEQ ID NO: 84234 - DNA, 22 bp, synthetic construct
  misc_feature 1..22: note = chemically synthesized
  source 1..22: mol_type = other DNA
ttaggcaatacatctcaatatc

SEQ ID NO: 84235 - DNA, 22 bp, synthetic construct
  misc_feature 1..22: note = chemically synthesized
  source 1..22: mol_type = other DNA
taggcaatacatctcaatatct

SEQ ID NO: 84236 - DNA, 22 bp, synthetic construct
  misc_feature 1..22: note = chemically synthesized
  source 1..22: mol_type = other DNA
aggcaatacatctcaatatctc

SEQ ID NO: 84237 - DNA, 22 bp, synthetic construct
  misc_feature 1..22: note = chemically synthesized
  source 1..22: mol_type = other DNA
ggcaatacatctcaatatctct

SEQ ID NO: 84238 - DNA, 22 bp, synthetic construct
  misc_feature 1..22: note = chemically synthesized
  source 1..22: mol_type = other DNA
aatatctctcaatatcttttca

SEQ ID NO: 84239 - DNA, 22 bp, synthetic construct
  misc_feature 1..22: note = chemically synthesized
  source 1..22: mol_type = other DNA
tcaatatcttttcagagaaaag

SEQ ID NO: 84240 - DNA, 22 bp, synthetic construct
  misc_feature 1..22: note = chemically synthesized
  source 1..22: mol_type = other DNA
aatatcttttcagagaaaagag

SEQ ID NO: 84241 - DNA, 22 bp, synthetic construct
  misc_feature 1..22: note = chemically synthesized
  source 1..22: mol_type = other DNA
ttcagagaaaagagtctaagca

SEQ ID NO: 84242 - DNA, 22 bp, synthetic construct
  misc_feature 1..22: note = chemically synthesized
  source 1..22: mol_type = other DNA
tcagagaaaagagtctaagcat

SEQ ID NO: 84243 - DNA, 22 bp, synthetic construct
  misc_feature 1..22: note = chemically synthesized
  source 1..22: mol_type = other DNA
cagagaaaagagtctaagcatt

SEQ ID NO: 84244 - DNA, 22 bp, synthetic construct
  misc_feature 1..22: note = chemically synthesized
  source 1..22: mol_type = other DNA
agagaaaagagtctaagcattc

SEQ ID NO: 84245 - DNA, 22 bp, synthetic construct
  misc_feature 1..22: note = chemically synthesized
  source 1..22: mol_type = other DNA
agcattctggtatgaatctgtt

SEQ ID NO: 84246 - DNA, 22 bp, synthetic construct
  misc_feature 1..22: note = chemically synthesized
  source 1..22: mol_type = other DNA
tggtatgaatctgttgggtctt

SEQ ID NO: 84247 - DNA, 22 bp, synthetic construct
  misc_feature 1..22: note = chemically synthesized
  source 1..22: mol_type = other DNA
gtatgaatctgttgggtcttga

SEQ ID NO: 84248 - DNA, 22 bp, synthetic construct
  misc_feature 1..22: note = chemically synthesized
  source 1..22: mol_type = other DNA
ttgggtcttgacactgtagatg

SEQ ID NO: 84249 - DNA, 22 bp, synthetic construct
  misc_feature 1..22: note = chemically synthesized
  source 1..22: mol_type = other DNA
ggtcttgacactgtagatgatg

SEQ ID NO: 84250 - DNA, 22 bp, synthetic construct
  misc_feature 1..22: note = chemically synthesized
  source 1..22: mol_type = other DNA
gacactgtagatgatgggattc

SEQ ID NO: 84251 - DNA, 22 bp, synthetic construct
  misc_feature 1..22: note = chemically synthesized
  source 1..22: mol_type = other DNA
acactgtagatgatgggattca

SEQ ID NO: 84252 - DNA, 22 bp, synthetic construct
  misc_feature 1..22: note = chemically synthesized
  source 1..22: mol_type = other DNA
tagatgatgggattcattaaag

SEQ ID NO: 84253 - DNA, 22 bp, synthetic construct
  misc_feature 1..22: note = chemically synthesized
  source 1..22: mol_type = other DNA
attaaaggtgggaaaaggatgt

SEQ ID NO: 84254 - DNA, 22 bp, synthetic construct
  misc_feature 1..22: note = chemically synthesized
  source 1..22: mol_type = other DNA
aaggtgggaaaaggatgtagat

SEQ ID NO: 84255 - DNA, 22 bp, synthetic construct
  misc_feature 1..22: note = chemically synthesized
  source 1..22: mol_type = other DNA
ccaatgagaacgtgggccacgg

SEQ ID NO: 84256 - DNA, 22 bp, synthetic construct
  misc_feature 1..22: note = chemically synthesized
  source 1..22: mol_type = other DNA
gccaaaacggtgcaccattgtg

SEQ ID NO: 84257 - DNA, 22 bp, synthetic construct
  misc_feature 1..22: note = chemically synthesized
  source 1..22: mol_type = other DNA
ccaaaacggtgcaccattgtga

SEQ ID NO: 84258 - DNA, 22 bp, synthetic construct
  misc_feature 1..22: note = chemically synthesized
  source 1..22: mol_type = other DNA
tgaggctaatgatagggatgta

SEQ ID NO: 84259 - DNA, 22 bp, synthetic construct
  misc_feature 1..22: note = chemically synthesized
  source 1..22: mol_type = other DNA
atgatagggatgtagaacacaa

SEQ ID NO: 84260 - DNA, 22 bp, synthetic construct
  misc_feature 1..22: note = chemically synthesized
  source 1..22: mol_type = other DNA
aaataatttatgcctctcttcc

SEQ ID NO: 84261 - DNA, 22 bp, synthetic construct
  misc_feature 1..22: note = chemically synthesized
  source 1..22: mol_type = other DNA
atgcctctcttcctgagaggca

SEQ ID NO: 84262 - DNA, 22 bp, synthetic construct
  misc_feature 1..22: note = chemically synthesized
  source 1..22: mol_type = other DNA
tgcctctcttcctgagaggcaa

SEQ ID NO: 84263 - DNA, 22 bp, synthetic construct
  misc_feature 1..22: note = chemically synthesized
  source 1..22: mol_type = other DNA
tcttcctgagaggcaactgcca

SEQ ID NO: 84264 - DNA, 22 bp, synthetic construct
  misc_feature 1..22: note = chemically synthesized
  source 1..22: mol_type = other DNA
ttcctgagaggcaactgccagg

SEQ ID NO: 84265 - DNA, 22 bp, synthetic construct
  misc_feature 1..22: note = chemically synthesized
  source 1..22: mol_type = other DNA
cctgagaggcaactgccaggac

SEQ ID NO: 84266 - DNA, 22 bp, synthetic construct
  misc_feature 1..22: note = chemically synthesized
  source 1..22: mol_type = other DNA
ctgagaggcaactgccaggact

SEQ ID NO: 84267 - DNA, 22 bp, synthetic construct
  misc_feature 1..22: note = chemically synthesized
  source 1..22: mol_type = other DNA
agaggcaactgccaggactgac

SEQ ID NO: 84268 - DNA, 22 bp, synthetic construct
  misc_feature 1..22: note = chemically synthesized
  source 1..22: mol_type = other DNA
ccaggactgacttaagaatcag

SEQ ID NO: 84269 - DNA, 22 bp, synthetic construct
  misc_feature 1..22: note = chemically synthesized
  source 1..22: mol_type = other DNA
acttaagaatcaggatgtagga

SEQ ID NO: 84270 - DNA, 22 bp, synthetic construct
  misc_feature 1..22: note = chemically synthesized
  source 1..22: mol_type = other DNA
aagaatcaggatgtaggagaaa

SEQ ID NO: 84271 - DNA, 22 bp, synthetic construct
  misc_feature 1..22: note = chemically synthesized
  source 1..22: mol_type = other DNA
agaatcaggatgtaggagaaaa

SEQ ID NO: 84272 - DNA, 22 bp, synthetic construct
  misc_feature 1..22: note = chemically synthesized
  source 1..22: mol_type = other DNA
ttgaatcggatgtctgaacagg

SEQ ID NO: 84273 - DNA, 22 bp, synthetic construct
  misc_feature 1..22: note = chemically synthesized
  source 1..22: mol_type = other DNA
aatcggatgtctgaacaggcta

SEQ ID NO: 84274 - DNA, 22 bp, synthetic construct
  misc_feature 1..22: note = chemically synthesized
  source 1..22: mol_type = other DNA
aacaggctaagcggagaagatc

SEQ ID NO: 84275 - DNA, 22 bp, synthetic construct
  misc_feature 1..22: note = chemically synthesized
  source 1..22: mol_type = other DNA
agcggagaagatcctggtgcag

SEQ ID NO: 84276 - DNA, 22 bp, synthetic construct
  misc_feature 1..22: note = chemically synthesized
  source 1..22: mol_type = other DNA
gtgcaggcagaaagagtgagaa

SEQ ID NO: 84277 - DNA, 22 bp, synthetic construct
  misc_feature 1..22: note = chemically synthesized
  source 1..22: mol_type = other DNA
aaaaatttcagacagatgatgg

SEQ ID NO: 84278 - DNA, 22 bp, synthetic construct
  misc_feature 1..22: note = chemically synthesized
  source 1..22: mol_type = other DNA
cagacagatgatggggggtgta

SEQ ID NO: 84279 - DNA, 22 bp, synthetic construct
  misc_feature 1..22: note = chemically synthesized
  source 1..22: mol_type = other DNA
agacagatgatggggggtgtaa

SEQ ID NO: 84280 - DNA, 22 bp, synthetic construct
  misc_feature 1..22: note = chemically synthesized
  source 1..22: mol_type = other DNA
ctacctattatagtgagcccaa

SEQ ID NO: 84281 - DNA, 22 bp, synthetic construct
  misc_feature 1..22: note = chemically synthesized
  source 1..22: mol_type = other DNA
cctattatagtgagcccaattt

SEQ ID NO: 84282 - DNA, 22 bp, synthetic construct
  misc_feature 1..22: note = chemically synthesized
  source 1..22: mol_type = other DNA
ttatagtgagcccaattttgat

SEQ ID NO: 84283 - DNA, 22 bp, synthetic construct
  misc_feature 1..22: note = chemically synthesized
  source 1..22: mol_type = other DNA
tagtgagcccaattttgataat

SEQ ID NO: 84284 - DNA, 22 bp, synthetic construct
  misc_feature 1..22: note = chemically synthesized
  source 1..22: mol_type = other DNA
tgataattctggaattagtcag

SEQ ID NO: 84285 - DNA, 22 bp, synthetic construct
  misc_feature 1..22: note = chemically synthesized
  source 1..22: mol_type = other DNA
gataattctggaattagtcagg

SEQ ID NO: 84286 - DNA, 22 bp, synthetic construct
  misc_feature 1..22: note = chemically synthesized
  source 1..22: mol_type = other DNA
ataattctggaattagtcagga

SEQ ID NO: 84287 - DNA, 22 bp, synthetic construct
  misc_feature 1..22: note = chemically synthesized
  source 1..22: mol_type = other DNA
tggaattagtcaggatggagga

SEQ ID NO: 84288 - DNA, 22 bp, synthetic construct
  misc_feature 1..22: note = chemically synthesized
  source 1..22: mol_type = other DNA
gaattagtcaggatggaggaat

SEQ ID NO: 84289 - DNA, 22 bp, synthetic construct
  misc_feature 1..22: note = chemically synthesized
  source 1..22: mol_type = other DNA
gtcaggatggaggaataacgta

SEQ ID NO: 84290 - DNA, 22 bp, synthetic construct
  misc_feature 1..22: note = chemically synthesized
  source 1..22: mol_type = other DNA
caaattgcaatgtaccggtcaa

SEQ ID NO: 84291 - DNA, 22 bp, synthetic construct
  misc_feature 1..22: note = chemically synthesized
  source 1..22: mol_type = other DNA
caatgtaccggtcaaaggccat

SEQ ID NO: 84292 - DNA, 22 bp, synthetic construct
  misc_feature 1..22: note = chemically synthesized
  source 1..22: mol_type = other DNA
catgaaggacagaccatggatg

SEQ ID NO: 84293 - DNA, 22 bp, synthetic construct
  misc_feature 1..22: note = chemically synthesized
  source 1..22: mol_type = other DNA
ggcaatgcaggaatccaagctg

SEQ ID NO: 84294 - DNA, 22 bp, synthetic construct
  misc_feature 1..22: note = chemically synthesized
  source 1..22: mol_type = other DNA
atctctcgaatgatcccccaca

SEQ ID NO: 84295 - DNA, 22 bp, synthetic construct
  misc_feature 1..22: note = chemically synthesized
  source 1..22: mol_type = other DNA
tcgaatgatcccccacaggatc

SEQ ID NO: 84296 - DNA, 22 bp, synthetic construct
  misc_feature 1..22: note = chemically synthesized
  source 1..22: mol_type = other DNA
gaatgatcccccacaggatccc

SEQ ID NO: 84297 - DNA, 22 bp, synthetic construct
  misc_feature 1..22: note = chemically synthesized
  source 1..22: mol_type = other DNA
tgtacacagtggacagccccat

SEQ ID NO: 84298 - DNA, 22 bp, synthetic construct
  misc_feature 1..22: note = chemically synthesized
  source 1..22: mol_type = other DNA
gtgcaggcttggctcagtccat

SEQ ID NO: 84299 - DNA, 22 bp, synthetic construct
  misc_feature 1..22: note = chemically synthesized
  source 1..22: mol_type = other DNA
ggctcagtccatatcacatgga

SEQ ID NO: 84300 - DNA, 22 bp, synthetic construct
  misc_feature 1..22: note = chemically synthesized
  source 1..22: mol_type = other DNA
gctcagtccatatcacatggag

SEQ ID NO: 84301 - DNA, 22 bp, synthetic construct
  misc_feature 1..22: note = chemically synthesized
  source 1..22: mol_type = other DNA
agtccatatcacatggagaacc

SEQ ID NO: 84302 - DNA, 22 bp, synthetic construct
  misc_feature 1..22: note = chemically synthesized
  source 1..22: mol_type = other DNA
cccaaaagcaccatggcataga

SEQ ID NO: 84303 - DNA, 22 bp, synthetic construct
  misc_feature 1..22: note = chemically synthesized
  source 1..22: mol_type = other DNA
aggagaaggggatggaaagcca

SEQ ID NO: 84304 - DNA, 22 bp, synthetic construct
  misc_feature 1..22: note = chemically synthesized
  source 1..22: mol_type = other DNA
ctgctccatgccagaaaatcca

SEQ ID NO: 84305 - DNA, 22 bp, synthetic construct
  misc_feature 1..22: note = chemically synthesized
  source 1..22: mol_type = other DNA
ctccatgccagaaaatccagtg

SEQ ID NO: 84306 - DNA, 22 bp, synthetic construct
  misc_feature 1..22: note = chemically synthesized
  source 1..22: mol_type = other DNA
catgccagaaaatccagtgaga

SEQ ID NO: 84307 - DNA, 22 bp, synthetic construct
  misc_feature 1..22: note = chemically synthesized
  source 1..22: mol_type = other DNA
gtgctggtgctagggcttactg

SEQ ID NO: 84308 - DNA, 22 bp, synthetic construct
  misc_feature 1..22: note = chemically synthesized
  source 1..22: mol_type = other DNA
gtgctagggcttactgaagtaa

SEQ ID NO: 84309 - DNA, 22 bp, synthetic construct
  misc_feature 1..22: note = chemically synthesized
  source 1..22: mol_type = other DNA
gggcttactgaagtaatcattc

SEQ ID NO: 84310 - DNA, 22 bp, synthetic construct
  misc_feature 1..22: note = chemically synthesized
  source 1..22: mol_type = other DNA
actgaagtaatcattctggaac

SEQ ID NO: 84311 - DNA, 22 bp, synthetic construct
  misc_feature 1..22: note = chemically synthesized
  source 1..22: mol_type = other DNA
ctgaagtaatcattctggaact

SEQ ID NO: 84312 - DNA, 22 bp, synthetic construct
  misc_feature 1..22: note = chemically synthesized
  source 1..22: mol_type = other DNA
aagtaatcattctggaactgag

SEQ ID NO: 84313 - DNA, 22 bp, synthetic construct
  misc_feature 1..22: note = chemically synthesized
  source 1..22: mol_type = other DNA
tggaactgagaaacatgtgaga

SEQ ID NO: 84314 - DNA, 22 bp, synthetic construct
  misc_feature 1..22: note = chemically synthesized
  source 1..22: mol_type = other DNA
gaactgagaaacatgtgagagt

SEQ ID NO: 84315 - DNA, 22 bp, synthetic construct
  misc_feature 1..22: note = chemically synthesized
  source 1..22: mol_type = other DNA
agaaacatgtgagagtattttt

SEQ ID NO: 84316 - DNA, 22 bp, synthetic construct
  misc_feature 1..22: note = chemically synthesized
  source 1..22: mol_type = other DNA
tttcaaaggaaatgtttcaatt

SEQ ID NO: 84317 - DNA, 22 bp, synthetic construct
  misc_feature 1..22: note = chemically synthesized
  source 1..22: mol_type = other DNA
ttcaaaggaaatgtttcaattt

SEQ ID NO: 84318 - DNA, 22 bp, synthetic construct
  misc_feature 1..22: note = chemically synthesized
  source 1..22: mol_type = other DNA
tcaaaggaaatgtttcaatttc

SEQ ID NO: 84319 - DNA, 22 bp, synthetic construct
  misc_feature 1..22: note = chemically synthesized
  source 1..22: mol_type = other DNA
caaaggaaatgtttcaatttca

SEQ ID NO: 84320 - DNA, 22 bp, synthetic construct
  misc_feature 1..22: note = chemically synthesized
  source 1..22: mol_type = other DNA
aaaggaaatgtttcaatttcac

SEQ ID NO: 84321 - DNA, 22 bp, synthetic construct
  misc_feature 1..22: note = chemically synthesized
  source 1..22: mol_type = other DNA
caatttcacctgaatacaatga

SEQ ID NO: 84322 - DNA, 22 bp, synthetic construct
  misc_feature 1..22: note = chemically synthesized
  source 1..22: mol_type = other DNA
aatttcacctgaatacaatgaa

SEQ ID NO: 84323 - DNA, 22 bp, synthetic construct
  misc_feature 1..22: note = chemically synthesized
  source 1..22: mol_type = other DNA
cacctgaatacaatgaaatttc

SEQ ID NO: 84324 - DNA, 22 bp, synthetic construct
  misc_feature 1..22: note = chemically synthesized
  source 1..22: mol_type = other DNA
acctgaatacaatgaaatttct

SEQ ID NO: 84325 - DNA, 22 bp, synthetic construct
  misc_feature 1..22: note = chemically synthesized
  source 1..22: mol_type = other DNA
aatacaatgaaatttctaagta

SEQ ID NO: 84326 - DNA, 22 bp, synthetic construct
  misc_feature 1..22: note = chemically synthesized
  source 1..22: mol_type = other DNA
ctaagtaaatgaaataccctaa

SEQ ID NO: 84327 - DNA, 22 bp, synthetic construct
  misc_feature 1..22: note = chemically synthesized
  source 1..22: mol_type = other DNA
taagtaaatgaaataccctaaa

SEQ ID NO: 84328 - DNA, 22 bp, synthetic construct
  misc_feature 1..22: note = chemically synthesized
  source 1..22: mol_type = other DNA
agtaaatgaaataccctaaaac

SEQ ID NO: 84329 - DNA, 22 bp, synthetic construct
  misc_feature 1..22: note = chemically synthesized
  source 1..22: mol_type = other DNA
aaacttactgacttaaaaaaaa

SEQ ID NO: 84330 - DNA, 22 bp, synthetic construct
  misc_feature 1..22: note = chemically synthesized
  source 1..22: mol_type = other DNA
actgacttaaaaaaaacagctg

SEQ ID NO: 84331 - DNA, 22 bp, synthetic construct
  misc_feature 1..22: note = chemically synthesized
  source 1..22: mol_type = other DNA
ctgacttaaaaaaaacagctga

SEQ ID NO: 84332 - DNA, 22 bp, synthetic construct
  misc_feature 1..22: note = chemically synthesized
  source 1..22: mol_type = other DNA
acttaaaaaaaacagctgagaa

SEQ ID NO: 84333 - DNA, 22 bp, synthetic construct
  misc_feature 1..22: note = chemically synthesized
  source 1..22: mol_type = other DNA
aaaaaaaacagctgagaaattc

SEQ ID NO: 84334 - DNA, 22 bp, synthetic construct
  misc_feature 1..22: note = chemically synthesized
  source 1..22: mol_type = other DNA
aaaaaaacagctgagaaattct

SEQ ID NO: 84335 - DNA, 22 bp, synthetic construct
  misc_feature 1..22: note = chemically synthesized
  source 1..22: mol_type = other DNA
agaaattctgtttctttgagac

SEQ ID NO: 84336 - DNA, 22 bp, synthetic construct
  misc_feature 1..22: note = chemically synthesized
  source 1..22: mol_type = other DNA
tgtttctttgagacatagtatc

SEQ ID NO: 84337 - DNA, 22 bp, synthetic construct
  misc_feature 1..22: note = chemically synthesized
  source 1..22: mol_type = other DNA
tttctttgagacatagtatcca

SEQ ID NO: 84338 - DNA, 22 bp, synthetic construct
  misc_feature 1..22: note = chemically synthesized
  source 1..22: mol_type = other DNA
ctttgagacatagtatccattg

SEQ ID NO: 84339 - DNA, 22 bp, synthetic construct
  misc_feature 1..22: note = chemically synthesized
  source 1..22: mol_type = other DNA
tttgagacatagtatccattgc

SEQ ID NO: 84340 - DNA, 22 bp, synthetic construct
  misc_feature 1..22: note = chemically synthesized
  source 1..22: mol_type = other DNA
tgagacatagtatccattgcct

SEQ ID NO: 84341 - DNA, 22 bp, synthetic construct
  misc_feature 1..22: note = chemically synthesized
  source 1..22: mol_type = other DNA
gagacatagtatccattgcctt

SEQ ID NO: 84342 - DNA, 22 bp, synthetic construct
  misc_feature 1..22: note = chemically synthesized
  source 1..22: mol_type = other DNA
agacatagtatccattgccttt

SEQ ID NO: 84343 - DNA, 22 bp, synthetic construct
  misc_feature 1..22: note = chemically synthesized
  source 1..22: mol_type = other DNA
cctttgagaaaatggtcttctt

SEQ ID NO: 84344 - DNA, 22 bp, synthetic construct
  misc_feature 1..22: note = chemically synthesized
  source 1..22: mol_type = other DNA
tgagaaaatggtcttcttttga

SEQ ID NO: 84345 - DNA, 22 bp, synthetic construct
  misc_feature 1..22: note = chemically synthesized
  source 1..22: mol_type = other DNA
gagaaaatggtcttcttttgat

SEQ ID NO: 84346 - DNA, 22 bp, synthetic construct
  misc_feature 1..22: note = chemically synthesized
  source 1..22: mol_type = other DNA
agaaaatggtcttcttttgatg

SEQ ID NO: 84347 - DNA, 22 bp, synthetic construct
  misc_feature 1..22: note = chemically synthesized
  source 1..22: mol_type = other DNA
cttttgatgtcatttaaaagtc

SEQ ID NO: 84348 - DNA, 22 bp, synthetic construct
  misc_feature 1..22: note = chemically synthesized
  source 1..22: mol_type = other DNA
ttttgatgtcatttaaaagtca

SEQ ID NO: 84349 - DNA, 22 bp, synthetic construct
  misc_feature 1..22: note = chemically synthesized
  source 1..22: mol_type = other DNA
ttgatgtcatttaaaagtcatt

SEQ ID NO: 84350 - DNA, 22 bp, synthetic construct
  misc_feature 1..22: note = chemically synthesized
  source 1..22: mol_type = other DNA
tgatgtcatttaaaagtcatta

SEQ ID NO: 84351 - DNA, 22 bp, synthetic construct
  misc_feature 1..22: note = chemically synthesized
  source 1..22: mol_type = other DNA
gatgtcatttaaaagtcattat

SEQ ID NO: 84352 - DNA, 22 bp, synthetic construct
  misc_feature 1..22: note = chemically synthesized
  source 1..22: mol_type = other DNA
atgtcatttaaaagtcattatt

SEQ ID NO: 84353 - DNA, 22 bp, synthetic construct
  misc_feature 1..22: note = chemically synthesized
  source 1..22: mol_type = other DNA
aaaagtcattattttttcactg

SEQ ID NO: 84354 - DNA, 22 bp, synthetic construct
  misc_feature 1..22: note = chemically synthesized
  source 1..22: mol_type = other DNA
aaagtcattattttttcactgt

SEQ ID NO: 84355 - DNA, 22 bp, synthetic construct
  misc_feature 1..22: note = chemically synthesized
  source 1..22: mol_type = other DNA
ttttttcactgtctggatgtga

SEQ ID NO: 84356 - DNA, 22 bp, synthetic construct
  misc_feature 1..22: note = chemically synthesized
  source 1..22: mol_type = other DNA
tttcactgtctggatgtgaaca

SEQ ID NO: 84357 - DNA, 22 bp, synthetic construct
  misc_feature 1..22: note = chemically synthesized
  source 1..22: mol_type = other DNA
ttcactgtctggatgtgaacat

SEQ ID NO: 84358 - DNA, 22 bp, synthetic construct
  misc_feature 1..22: note = chemically synthesized
  source 1..22: mol_type = other DNA
tcactgtctggatgtgaacata

SEQ ID NO: 84359 - DNA, 22 bp, synthetic construct
  misc_feature 1..22: note = chemically synthesized
  source 1..22: mol_type = other DNA
cactgtctggatgtgaacatat

SEQ ID NO: 84360 - DNA, 22 bp, synthetic construct
  misc_feature 1..22: note = chemically synthesized
  source 1..22: mol_type = other DNA
actgtctggatgtgaacatatc

SEQ ID NO: 84361 - DNA, 22 bp, synthetic construct
  misc_feature 1..22: note = chemically synthesized
  source 1..22: mol_type = other DNA
tctggatgtgaacatatcctta

SEQ ID NO: 84362 - DNA, 22 bp, synthetic construct
  misc_feature 1..22: note = chemically synthesized
  source 1..22: mol_type = other DNA
gatgtgaacatatccttagaag

SEQ ID NO: 84363 - DNA, 22 bp, synthetic construct
  misc_feature 1..22: note = chemically synthesized
  source 1..22: mol_type = other DNA
agaagccataagcaaaaacaaa

SEQ ID NO: 84364 - DNA, 22 bp, synthetic construct
  misc_feature 1..22: note = chemically synthesized
  source 1..22: mol_type = other DNA
gaagccataagcaaaaacaaat

SEQ ID NO: 84365 - DNA, 22 bp, synthetic construct
  misc_feature 1..22: note = chemically synthesized
  source 1..22: mol_type = other DNA
gtaaaaggagaaggctagtttt

SEQ ID NO: 84366 - DNA, 22 bp, synthetic construct
  misc_feature 1..22: note = chemically synthesized
  source 1..22: mol_type = other DNA
gttttaaaaaaatacgttgctt

SEQ ID NO: 84367 - DNA, 22 bp, synthetic construct
  misc_feature 1..22: note = chemically synthesized
  source 1..22: mol_type = other DNA
taaaaaaatacgttgcttagac

SEQ ID NO: 84368 - DNA, 22 bp, synthetic construct
  misc_feature 1..22: note = chemically synthesized
  source 1..22: mol_type = other DNA
aaaaaaatacgttgcttagaca

SEQ ID NO: 84369 - DNA, 22 bp, synthetic construct
  misc_feature 1..22: note = chemically synthesized
  source 1..22: mol_type = other DNA
aaaaaatacgttgcttagacat

SEQ ID NO: 84370 - DNA, 22 bp, synthetic construct
  misc_feature 1..22: note = chemically synthesized
  source 1..22: mol_type = other DNA
cttagacattttcccaaggata

SEQ ID NO: 84371 - DNA, 22 bp, synthetic construct
  misc_feature 1..22: note = chemically synthesized
  source 1..22: mol_type = other DNA
agacattttcccaaggatagtg

SEQ ID NO: 84372 - DNA, 22 bp, synthetic construct
  misc_feature 1..22: note = chemically synthesized
  source 1..22: mol_type = other DNA
gacattttcccaaggatagtgg

SEQ ID NO: 84373 - DNA, 22 bp, synthetic construct
  misc_feature 1..22: note = chemically synthesized
  source 1..22: mol_type = other DNA
tcccaaggatagtggtaaaaat

SEQ ID NO: 84374 - DNA, 22 bp, synthetic construct
  misc_feature 1..22: note = chemically synthesized
  source 1..22: mol_type = other DNA
cccaaggatagtggtaaaaatt

SEQ ID NO: 84375 - DNA, 22 bp, synthetic construct
  misc_feature 1..22: note = chemically synthesized
  source 1..22: mol_type = other DNA
ccaaggatagtggtaaaaattt

SEQ ID NO: 84376 - DNA, 22 bp, synthetic construct
  misc_feature 1..22: note = chemically synthesized
  source 1..22: mol_type = other DNA
tataccagtaaagagccgaggt

SEQ ID NO: 84377 - DNA, 22 bp, synthetic construct
  misc_feature 1..22: note = chemically synthesized
  source 1..22: mol_type = other DNA
ataccagtaaagagccgaggtt

SEQ ID NO: 84378 - DNA, 22 bp, synthetic construct
  misc_feature 1..22: note = chemically synthesized
  source 1..22: mol_type = other DNA
taccagtaaagagccgaggttc

SEQ ID NO: 84379 - DNA, 22 bp, synthetic construct
  misc_feature 1..22: note = chemically synthesized
  source 1..22: mol_type = other DNA
ttgaaaaattattttcttctct

SEQ ID NO: 84380 - DNA, 22 bp, synthetic construct
  misc_feature 1..22: note = chemically synthesized
  source 1..22: mol_type = other DNA
gaaaaattattttcttctctcc

SEQ ID NO: 84381 - DNA, 22 bp, synthetic construct
  misc_feature 1..22: note = chemically synthesized
  source 1..22: mol_type = other DNA
aaaaattattttcttctctcca

SEQ ID NO: 84382 - DNA, 22 bp, synthetic construct
  misc_feature 1..22: note = chemically synthesized
  source 1..22: mol_type = other DNA
ttttcttctctccaattcatta

SEQ ID NO: 84383 - DNA, 22 bp, synthetic construct
  misc_feature 1..22: note = chemically synthesized
  source 1..22: mol_type = other DNA
tcttctctccaattcattaaac

SEQ ID NO: 84384 - DNA, 22 bp, synthetic construct
  misc_feature 1..22: note = chemically synthesized
  source 1..22: mol_type = other DNA
cttctctccaattcattaaaca

SEQ ID NO: 84385 - DNA, 22 bp, synthetic construct
  misc_feature 1..22: note = chemically synthesized
  source 1..22: mol_type = other DNA
ttctctccaattcattaaacat

SEQ ID NO: 84386 - DNA, 22 bp, synthetic construct
  misc_feature 1..22: note = chemically synthesized
  source 1..22: mol_type = other DNA
ctctccaattcattaaacattc

SEQ ID NO: 84387 - DNA, 22 bp, synthetic construct
  misc_feature 1..22: note = chemically synthesized
  source 1..22: mol_type = other DNA
tctccaattcattaaacattcg

SEQ ID NO: 84388 - DNA, 22 bp, synthetic construct
  misc_feature 1..22: note = chemically synthesized
  source 1..22: mol_type = other DNA
tccaattcattaaacattcgaa

SEQ ID NO: 84389 - DNA, 22 bp, synthetic construct
  misc_feature 1..22: note = chemically synthesized
  source 1..22: mol_type = other DNA
caattcattaaacattcgaagt

SEQ ID NO: 84390 - DNA, 22 bp, synthetic construct
  misc_feature 1..22: note = chemically synthesized
  source 1..22: mol_type = other DNA
attaaacattcgaagtgaagag

SEQ ID NO: 84391 - DNA, 22 bp, synthetic construct
  misc_feature 1..22: note = chemically synthesized
  source 1..22: mol_type = other DNA
aacattcgaagtgaagagtaat

SEQ ID NO: 84392 - DNA, 22 bp, synthetic construct
  misc_feature 1..22: note = chemically synthesized
  source 1..22: mol_type = other DNA
gaagtgaagagtaatctttggg

SEQ ID NO: 84393 - DNA, 22 bp, synthetic construct
  misc_feature 1..22: note = chemically synthesized
  source 1..22: mol_type = other DNA
tgggctttaaatatcataagtc

SEQ ID NO: 84394 - DNA, 22 bp, synthetic construct
  misc_feature 1..22: note = chemically synthesized
  source 1..22: mol_type = other DNA
gggctttaaatatcataagtct

SEQ ID NO: 84395 - DNA, 22 bp, synthetic construct
  misc_feature 1..22: note = chemically synthesized
  source 1..22: mol_type = other DNA
ggctttaaatatcataagtcta

SEQ ID NO: 84396 - DNA, 22 bp, synthetic construct
  misc_feature 1..22: note = chemically synthesized
  source 1..22: mol_type = other DNA
taaatatcataagtctattaaa

SEQ ID NO: 84397 - DNA, 22 bp, synthetic construct
  misc_feature 1..22: note = chemically synthesized
  source 1..22: mol_type = other DNA
aaatatcataagtctattaaat

SEQ ID NO: 84398 - DNA, 22 bp, synthetic construct
  misc_feature 1..22: note = chemically synthesized
  source 1..22: mol_type = other DNA
aatatcataagtctattaaata

SEQ ID NO: 84399 - DNA, 22 bp, synthetic construct
  misc_feature 1..22: note = chemically synthesized
  source 1..22: mol_type = other DNA
ttaaatagtcacttttccgtca

SEQ ID NO: 84400 - DNA, 22 bp, synthetic construct
  misc_feature 1..22: note = chemically synthesized
  source 1..22: mol_type = other DNA
aatagtcacttttccgtcattt

SEQ ID NO: 84401 - DNA, 22 bp, synthetic construct
  misc_feature 1..22: note = chemically synthesized
  source 1..22: mol_type = other DNA
ttccgtcattttccattttgtg

SEQ ID NO: 84402 - DNA, 22 bp, synthetic construct
  misc_feature 1..22: note = chemically synthesized
  source 1..22: mol_type = other DNA
tccgtcattttccattttgtgc

SEQ ID NO: 84403 - DNA, 22 bp, synthetic construct
  misc_feature 1..22: note = chemically synthesized
  source 1..22: mol_type = other DNA
ccgtcattttccattttgtgcc

SEQ ID NO: 84404 - DNA, 22 bp, synthetic construct
  misc_feature 1..22: note = chemically synthesized
  source 1..22: mol_type = other DNA
cgtcattttccattttgtgccg

SEQ ID NO: 84405 - DNA, 22 bp, synthetic construct
  misc_feature 1..22: note = chemically synthesized
  source 1..22: mol_type = other DNA
tccattttgtgccgtctccaag

SEQ ID NO: 84406 - DNA, 22 bp, synthetic construct
  misc_feature 1..22: note = chemically synthesized
  source 1..22: mol_type = other DNA
ccattttgtgccgtctccaagt

SEQ ID NO: 84407 - DNA, 22 bp, synthetic construct
  misc_feature 1..22: note = chemically synthesized
  source 1..22: mol_type = other DNA
cattttgtgccgtctccaagta

SEQ ID NO: 84408 - DNA, 22 bp, synthetic construct
  misc_feature 1..22: note = chemically synthesized
  source 1..22: mol_type = other DNA
tgtgccgtctccaagtatattt

SEQ ID NO: 84409 - DNA, 22 bp, synthetic construct
  misc_feature 1..22: note = chemically synthesized
  source 1..22: mol_type = other DNA
gtgccgtctccaagtatatttt

SEQ ID NO: 84410 - DNA, 22 bp, synthetic construct
  misc_feature 1..22: note = chemically synthesized
  source 1..22: mol_type = other DNA
tgccgtctccaagtatattttt

SEQ ID NO: 84411 - DNA, 22 bp, synthetic construct
  misc_feature 1..22: note = chemically synthesized
  source 1..22: mol_type = other DNA
caagtatattttttctccaaat

SEQ ID NO: 84412 - DNA, 22 bp, synthetic construct
  misc_feature 1..22: note = chemically synthesized
  source 1..22: mol_type = other DNA
tttctccaaatactatttaatg

SEQ ID NO: 84413 - DNA, 22 bp, synthetic construct
  misc_feature 1..22: note = chemically synthesized
  source 1..22: mol_type = other DNA
ttctccaaatactatttaatga

SEQ ID NO: 84414 - DNA, 22 bp, synthetic construct
  misc_feature 1..22: note = chemically synthesized
  source 1..22: mol_type = other DNA
tctccaaatactatttaatgaa

SEQ ID NO: 84415 - DNA, 22 bp, synthetic construct
  misc_feature 1..22: note = chemically synthesized
  source 1..22: mol_type = other DNA
ctccaaatactatttaatgaag

SEQ ID NO: 84416 - DNA, 22 bp, synthetic construct
  misc_feature 1..22: note = chemically synthesized
  source 1..22: mol_type = other DNA
tccaaatactatttaatgaaga

SEQ ID NO: 84417 - DNA, 22 bp, synthetic construct
  misc_feature 1..22: note = chemically synthesized
  source 1..22: mol_type = other DNA
caaatactatttaatgaagata

SEQ ID NO: 84418 - DNA, 22 bp, synthetic construct
  misc_feature 1..22: note = chemically synthesized
  source 1..22: mol_type = other DNA
tttaatgaagatactcctgttt

SEQ ID NO: 84419 - DNA, 22 bp, synthetic construct
  misc_feature 1..22: note = chemically synthesized
  source 1..22: mol_type = other DNA
aatgaagatactcctgttttct

SEQ ID NO: 84420 - DNA, 22 bp, synthetic construct
  misc_feature 1..22: note = chemically synthesized
  source 1..22: mol_type = other DNA
atgaagatactcctgttttctc

SEQ ID NO: 84421 - DNA, 22 bp, synthetic construct
  misc_feature 1..22: note = chemically synthesized
  source 1..22: mol_type = other DNA
ctgttttctccccctccagatg

SEQ ID NO: 84422 - DNA, 22 bp, synthetic construct
  misc_feature 1..22: note = chemically synthesized
  source 1..22: mol_type = other DNA
ttttctccccctccagatgacg

SEQ ID NO: 84423 - DNA, 22 bp, synthetic construct
  misc_feature 1..22: note = chemically synthesized
  source 1..22: mol_type = other DNA
tctccccctccagatgacgtag

SEQ ID NO: 84424 - DNA, 22 bp, synthetic construct
  misc_feature 1..22: note = chemically synthesized
  source 1..22: mol_type = other DNA
ctccccctccagatgacgtagc

SEQ ID NO: 84425 - DNA, 22 bp, synthetic construct
  misc_feature 1..22: note = chemically synthesized
  source 1..22: mol_type = other DNA
tccccctccagatgacgtagcc

SEQ ID NO: 84426 - DNA, 22 bp, synthetic construct
  misc_feature 1..22: note = chemically synthesized
  source 1..22: mol_type = other DNA
cccctccagatgacgtagccag

SEQ ID NO: 84427 - DNA, 22 bp, synthetic construct
  misc_feature 1..22: note = chemically synthesized
  source 1..22: mol_type = other DNA
cagatgacgtagccagcaatta

SEQ ID NO: 84428 - DNA, 22 bp, synthetic construct
  misc_feature 1..22: note = chemically synthesized
  source 1..22: mol_type = other DNA
ctttttcttcattggtgataag

SEQ ID NO: 84429 - DNA, 22 bp, synthetic construct
  misc_feature 1..22: note = chemically synthesized
  source 1..22: mol_type = other DNA
tttcttcattggtgataagcag

SEQ ID NO: 84430 - DNA, 22 bp, synthetic construct
  misc_feature 1..22: note = chemically synthesized
  source 1..22: mol_type = other DNA
ttcttcattggtgataagcaga

SEQ ID NO: 84431 - DNA, 22 bp, synthetic construct
  misc_feature 1..22: note = chemically synthesized
  source 1..22: mol_type = other DNA
tcttcattggtgataagcagac

SEQ ID NO: 84432 - DNA, 22 bp, synthetic construct
  misc_feature 1..22: note = chemically synthesized
  source 1..22: mol_type = other DNA
cttcattggtgataagcagaca

SEQ ID NO: 84433 - DNA, 22 bp, synthetic construct
  misc_feature 1..22: note = chemically synthesized
  source 1..22: mol_type = other DNA
ttcattggtgataagcagacag

SEQ ID NO: 84434 - DNA, 22 bp, synthetic construct
  misc_feature 1..22: note = chemically synthesized
  source 1..22: mol_type = other DNA
cattggtgataagcagacagga

SEQ ID NO: 84435 - DNA, 22 bp, synthetic construct
  misc_feature 1..22: note = chemically synthesized
  source 1..22: mol_type = other DNA
attggtgataagcagacaggaa

SEQ ID NO: 84436 - DNA, 22 bp, synthetic construct
  misc_feature 1..22: note = chemically synthesized
  source 1..22: mol_type = other DNA
gtgataagcagacaggaatatt

SEQ ID NO: 84437 - DNA, 22 bp, synthetic construct
  misc_feature 1..22: note = chemically synthesized
  source 1..22: mol_type = other DNA
atgcatgagaccttgggtaaat

SEQ ID NO: 84438 - DNA, 22 bp, synthetic construct
  misc_feature 1..22: note = chemically synthesized
  source 1..22: mol_type = other DNA
tgcatgagaccttgggtaaatg

SEQ ID NO: 84439 - DNA, 22 bp, synthetic construct
  misc_feature 1..22: note = chemically synthesized
  source 1..22: mol_type = other DNA
gggtaaatgatttctcactgga

SEQ ID NO: 84440 - DNA, 22 bp, synthetic construct
  misc_feature 1..22: note = chemically synthesized
  source 1..22: mol_type = other DNA
ggtaaatgatttctcactggag

SEQ ID NO: 84441 - DNA, 22 bp, synthetic construct
  misc_feature 1..22: note = chemically synthesized
  source 1..22: mol_type = other DNA
ctcactggagctctggcctctt

SEQ ID NO: 84442 - DNA, 22 bp, synthetic construct
  misc_feature 1..22: note = chemically synthesized
  source 1..22: mol_type = other DNA
tcactggagctctggcctcttg

SEQ ID NO: 84443 - DNA, 22 bp, synthetic construct
  misc_feature 1..22: note = chemically synthesized
  source 1..22: mol_type = other DNA
actggagctctggcctcttgag

SEQ ID NO: 84444 - DNA, 22 bp, synthetic construct
  misc_feature 1..22: note = chemically synthesized
  source 1..22: mol_type = other DNA
gagctctggcctcttgagatgt

SEQ ID NO: 84445 - DNA, 22 bp, synthetic construct
  misc_feature 1..22: note = chemically synthesized
  source 1..22: mol_type = other DNA
tggcctcttgagatgttcaact

SEQ ID NO: 84446 - DNA, 22 bp, synthetic construct
  misc_feature 1..22: note = chemically synthesized
  source 1..22: mol_type = other DNA
gcctcttgagatgttcaactca

SEQ ID NO: 84447 - DNA, 22 bp, synthetic construct
  misc_feature 1..22: note = chemically synthesized
  source 1..22: mol_type = other DNA
ttgagatgttcaactcatttgt

SEQ ID NO: 84448 - DNA, 22 bp, synthetic construct
  misc_feature 1..22: note = chemically synthesized
  source 1..22: mol_type = other DNA
gagatgttcaactcatttgtgc

SEQ ID NO: 84449 - DNA, 22 bp, synthetic construct
  misc_feature 1..22: note = chemically synthesized
  source 1..22: mol_type = other DNA
agatgttcaactcatttgtgcc

SEQ ID NO: 84450 - DNA, 22 bp, synthetic construct
  misc_feature 1..22: note = chemically synthesized
  source 1..22: mol_type = other DNA
aactcatttgtgcctttgtgat

SEQ ID NO: 84451 - DNA, 22 bp, synthetic construct
  misc_feature 1..22: note = chemically synthesized
  source 1..22: mol_type = other DNA
atttgtgcctttgtgatgtaga

SEQ ID NO: 84452 - DNA, 22 bp, synthetic construct
  misc_feature 1..22: note = chemically synthesized
  source 1..22: mol_type = other DNA
gtgcctttgtgatgtagagaat

SEQ ID NO: 84453 - DNA, 22 bp, synthetic construct
  misc_feature 1..22: note = chemically synthesized
  source 1..22: mol_type = other DNA
tgcctttgtgatgtagagaatt

SEQ ID NO: 84454 - DNA, 22 bp, synthetic construct
  misc_feature 1..22: note = chemically synthesized
  source 1..22: mol_type = other DNA
tgtgatgtagagaattagattg

SEQ ID NO: 84455 - DNA, 22 bp, synthetic construct
  misc_feature 1..22: note = chemically synthesized
  source 1..22: mol_type = other DNA
gtgatgtagagaattagattga

SEQ ID NO: 84456 - DNA, 22 bp, synthetic construct
  misc_feature 1..22: note = chemically synthesized
  source 1..22: mol_type = other DNA
tgatgtagagaattagattgaa

SEQ ID NO: 84457 - DNA, 22 bp, synthetic construct
  misc_feature 1..22: note = chemically synthesized
  source 1..22: mol_type = other DNA
gattgaagacactgagcctttg

SEQ ID NO: 84458 - DNA, 22 bp, synthetic construct
  misc_feature 1..22: note = chemically synthesized
  source 1..22: mol_type = other DNA
aagacactgagcctttgatagc

SEQ ID NO: 84459 - DNA, 22 bp, synthetic construct
  misc_feature 1..22: note = chemically synthesized
  source 1..22: mol_type = other DNA
agcctttgatagcagctcagtg

SEQ ID NO: 84460 - DNA, 22 bp, synthetic construct
  misc_feature 1..22: note = chemically synthesized
  source 1..22: mol_type = other DNA
tgatagcagctcagtgcttccc

SEQ ID NO: 84461 - DNA, 22 bp, synthetic construct
  misc_feature 1..22: note = chemically synthesized
  source 1..22: mol_type = other DNA
gatagcagctcagtgcttccca

SEQ ID NO: 84462 - DNA, 22 bp, synthetic construct
  misc_feature 1..22: note = chemically synthesized
  source 1..22: mol_type = other DNA
atagcagctcagtgcttcccat

SEQ ID NO: 84463 - DNA, 22 bp, synthetic construct
  misc_feature 1..22: note = chemically synthesized
  source 1..22: mol_type = other DNA
agtgcttcccattcctttattt

SEQ ID NO: 84464 - DNA, 22 bp, synthetic construct
  misc_feature 1..22: note = chemically synthesized
  source 1..22: mol_type = other DNA
cccattcctttatttattcagt

SEQ ID NO: 84465 - DNA, 22 bp, synthetic construct
  misc_feature 1..22: note = chemically synthesized
  source 1..22: mol_type = other DNA
ccattcctttatttattcagtt

SEQ ID NO: 84466 - DNA, 22 bp, synthetic construct
  misc_feature 1..22: note = chemically synthesized
  source 1..22: mol_type = other DNA
ctttatttattcagttaatgag

SEQ ID NO: 84467 - DNA, 22 bp, synthetic construct
  misc_feature 1..22: note = chemically synthesized
  source 1..22: mol_type = other DNA
tatttattcagttaatgagctg

SEQ ID NO: 84468 - DNA, 22 bp, synthetic construct
  misc_feature 1..22: note = chemically synthesized
  source 1..22: mol_type = other DNA
atttattcagttaatgagctga

SEQ ID NO: 84469 - DNA, 22 bp, synthetic construct
  misc_feature 1..22: note = chemically synthesized
  source 1..22: mol_type = other DNA
tttattcagttaatgagctgat

SEQ ID NO: 84470 - DNA, 22 bp, synthetic construct
  misc_feature 1..22: note = chemically synthesized
  source 1..22: mol_type = other DNA
attcagttaatgagctgattaa

SEQ ID NO: 84471 - DNA, 22 bp, synthetic construct
  misc_feature 1..22: note = chemically synthesized
  source 1..22: mol_type = other DNA
ttcagttaatgagctgattaac

SEQ ID NO: 84472 - DNA, 22 bp, synthetic construct
  misc_feature 1..22: note = chemically synthesized
  source 1..22: mol_type = other DNA
agttaatgagctgattaactat

SEQ ID NO: 84473 - DNA, 22 bp, synthetic construct
  misc_feature 1..22: note = chemically synthesized
  source 1..22: mol_type = other DNA
atgagctgattaactatttatt

SEQ ID NO: 84474 - DNA, 22 bp, synthetic construct
  misc_feature 1..22: note = chemically synthesized
  source 1..22: mol_type = other DNA
attaactatttattcaatatac

SEQ ID NO: 84475 - DNA, 22 bp, synthetic construct
  misc_feature 1..22: note = chemically synthesized
  source 1..22: mol_type = other DNA
actatttattcaatatacattt

SEQ ID NO: 84476 - DNA, 22 bp, synthetic construct
  misc_feature 1..22: note = chemically synthesized
  source 1..22: mol_type = other DNA
tttattcaatatacatttattc

SEQ ID NO: 84477 - DNA, 22 bp, synthetic construct
  misc_feature 1..22: note = chemically synthesized
  source 1..22: mol_type = other DNA
attcaatatacatttattcaat

SEQ ID NO: 84478 - DNA, 22 bp, synthetic construct
  misc_feature 1..22: note = chemically synthesized
  source 1..22: mol_type = other DNA
ttcaatatacatttattcaatg

SEQ ID NO: 84479 - DNA, 22 bp, synthetic construct
  misc_feature 1..22: note = chemically synthesized
  source 1..22: mol_type = other DNA
aatatacatttattcaatgtat

SEQ ID NO: 84480 - DNA, 22 bp, synthetic construct
  misc_feature 1..22: note = chemically synthesized
  source 1..22: mol_type = other DNA
attcaatgtattggccaattgt

SEQ ID NO: 84481 - DNA, 22 bp, synthetic construct
  misc_feature 1..22: note = chemically synthesized
  source 1..22: mol_type = other DNA
ttcaatgtattggccaattgtg

SEQ ID NO: 84482 - DNA, 22 bp, synthetic construct
  misc_feature 1..22: note = chemically synthesized
  source 1..22: mol_type = other DNA
aatgtattggccaattgtgttt

SEQ ID NO: 84483 - DNA, 22 bp, synthetic construct
  misc_feature 1..22: note = chemically synthesized
  source 1..22: mol_type = other DNA
gccaattgtgttttctttctta

SEQ ID NO: 84484 - DNA, 22 bp, synthetic construct
  misc_feature 1..22: note = chemically synthesized
  source 1..22: mol_type = other DNA
tgttttctttcttagaacctgc

SEQ ID NO: 84485 - DNA, 22 bp, synthetic construct
  misc_feature 1..22: note = chemically synthesized
  source 1..22: mol_type = other DNA
tctttcttagaacctgcagttc

SEQ ID NO: 84486 - DNA, 22 bp, synthetic construct
  misc_feature 1..22: note = chemically synthesized
  source 1..22: mol_type = other DNA
ctttcttagaacctgcagttct

SEQ ID NO: 84487 - DNA, 22 bp, synthetic construct
  misc_feature 1..22: note = chemically synthesized
  source 1..22: mol_type = other DNA
tttcttagaacctgcagttcta

SEQ ID NO: 84488 - DNA, 22 bp, synthetic construct
  misc_feature 1..22: note = chemically synthesized
  source 1..22: mol_type = other DNA
tcttagaacctgcagttctaca

SEQ ID NO: 84489 - DNA, 22 bp, synthetic construct
  misc_feature 1..22: note = chemically synthesized
  source 1..22: mol_type = other DNA
cttagaacctgcagttctacag

SEQ ID NO: 84490 - DNA, 22 bp, synthetic construct
  misc_feature 1..22: note = chemically synthesized
  source 1..22: mol_type = other DNA
ttagaacctgcagttctacaga

SEQ ID NO: 84491 - DNA, 22 bp, synthetic construct
  misc_feature 1..22: note = chemically synthesized
  source 1..22: mol_type = other DNA
agaacctgcagttctacagatc

SEQ ID NO: 84492 - DNA, 22 bp, synthetic construct
  misc_feature 1..22: note = chemically synthesized
  source 1..22: mol_type = other DNA
gaacctgcagttctacagatca

SEQ ID NO: 84493 - DNA, 22 bp, synthetic construct
  misc_feature 1..22: note = chemically synthesized
  source 1..22: mol_type = other DNA
cagttctacagatcacaaagcc

SEQ ID NO: 84494 - DNA, 22 bp, synthetic construct
  misc_feature 1..22: note = chemically synthesized
  source 1..22: mol_type = other DNA
tacagatcacaaagccaggctc

SEQ ID NO: 84495 - DNA, 22 bp, synthetic construct
  misc_feature 1..22: note = chemically synthesized
  source 1..22: mol_type = other DNA
cagatcacaaagccaggctcaa

SEQ ID NO: 84496 - DNA, 22 bp, synthetic construct
  misc_feature 1..22: note = chemically synthesized
  source 1..22: mol_type = other DNA
aaacaagcaagcttataatttc

SEQ ID NO: 84497 - DNA, 22 bp, synthetic construct
  misc_feature 1..22: note = chemically synthesized
  source 1..22: mol_type = other DNA
ataatttcaaaagcctcatggt

SEQ ID NO: 84498 - DNA, 22 bp, synthetic construct
  misc_feature 1..22: note = chemically synthesized
  source 1..22: mol_type = other DNA
taatttcaaaagcctcatggta

SEQ ID NO: 84499 - DNA, 22 bp, synthetic construct
  misc_feature 1..22: note = chemically synthesized
  source 1..22: mol_type = other DNA
caaaagcctcatggtagcagaa

SEQ ID NO: 84500 - DNA, 22 bp, synthetic construct
  misc_feature 1..22: note = chemically synthesized
  source 1..22: mol_type = other DNA
aaaagcctcatggtagcagaat

SEQ ID NO: 84501 - DNA, 22 bp, synthetic construct
  misc_feature 1..22: note = chemically synthesized
  source 1..22: mol_type = other DNA
atggtagcagaatcaattggct

SEQ ID NO: 84502 - DNA, 22 bp, synthetic construct
  misc_feature 1..22: note = chemically synthesized
  source 1..22: mol_type = other DNA
gcttcttctttacattgtttgc

SEQ ID NO: 84503 - DNA, 22 bp, synthetic construct
  misc_feature 1..22: note = chemically synthesized
  source 1..22: mol_type = other DNA
cttctttacattgtttgcctgc

SEQ ID NO: 84504 - DNA, 22 bp, synthetic construct
  misc_feature 1..22: note = chemically synthesized
  source 1..22: mol_type = other DNA
ttctttacattgtttgcctgct

SEQ ID NO: 84505 - DNA, 22 bp, synthetic construct
  misc_feature 1..22: note = chemically synthesized
  source 1..22: mol_type = other DNA
ctttacattgtttgcctgcttt

SEQ ID NO: 84506 - DNA, 22 bp, synthetic construct
  misc_feature 1..22: note = chemically synthesized
  source 1..22: mol_type = other DNA
tttacattgtttgcctgcttta

SEQ ID NO: 84507 - DNA, 22 bp, synthetic construct
  misc_feature 1..22: note = chemically synthesized
  source 1..22: mol_type = other DNA
tacattgtttgcctgctttaag

SEQ ID NO: 84508 - DNA, 22 bp, synthetic construct
  misc_feature 1..22: note = chemically synthesized
  source 1..22: mol_type = other DNA
acattgtttgcctgctttaagt

SEQ ID NO: 84509 - DNA, 22 bp, synthetic construct
  misc_feature 1..22: note = chemically synthesized
  source 1..22: mol_type = other DNA
cattgtttgcctgctttaagtt

SEQ ID NO: 84510 - DNA, 22 bp, synthetic construct
  misc_feature 1..22: note = chemically synthesized
  source 1..22: mol_type = other DNA
tttgcctgctttaagttccaga

SEQ ID NO: 84511 - DNA, 22 bp, synthetic construct
  misc_feature 1..22: note = chemically synthesized
  source 1..22: mol_type = other DNA
gcctgctttaagttccagacct

SEQ ID NO: 84512 - DNA, 22 bp, synthetic construct
  misc_feature 1..22: note = chemically synthesized
  source 1..22: mol_type = other DNA
cctgctttaagttccagacctg

SEQ ID NO: 84513 - DNA, 22 bp, synthetic construct
  misc_feature 1..22: note = chemically synthesized
  source 1..22: mol_type = other DNA
ctttaagttccagacctgagaa

SEQ ID NO: 84514 - DNA, 22 bp, synthetic construct
  misc_feature 1..22: note = chemically synthesized
  source 1..22: mol_type = other DNA
taagttccagacctgagaatca

SEQ ID NO: 84515 - DNA, 22 bp, synthetic construct
  misc_feature 1..22: note = chemically synthesized
  source 1..22: mol_type = other DNA
aagttccagacctgagaatcat

SEQ ID NO: 84516 - DNA, 22 bp, synthetic construct
  misc_feature 1..22: note = chemically synthesized
  source 1..22: mol_type = other DNA
agttccagacctgagaatcatc

SEQ ID NO: 84517 - DNA, 22 bp, synthetic construct
  misc_feature 1..22: note = chemically synthesized
  source 1..22: mol_type = other DNA
cagacctgagaatcatcataag

SEQ ID NO: 84518 - DNA, 22 bp, synthetic construct
  misc_feature 1..22: note = chemically synthesized
  source 1..22: mol_type = other DNA
agaatcatcataagttttttta

SEQ ID NO: 84519 - DNA, 22 bp, synthetic construct
  misc_feature 1..22: note = chemically synthesized
  source 1..22: mol_type = other DNA
ttttaaagctctaataatgtaa

SEQ ID NO: 84520 - DNA, 22 bp, synthetic construct
  misc_feature 1..22: note = chemically synthesized
  source 1..22: mol_type = other DNA
tttaaagctctaataatgtaaa

SEQ ID NO: 84521 - DNA, 22 bp, synthetic construct
  misc_feature 1..22: note = chemically synthesized
  source 1..22: mol_type = other DNA
ttaaagctctaataatgtaaac

SEQ ID NO: 84522 - DNA, 22 bp, synthetic construct
  misc_feature 1..22: note = chemically synthesized
  source 1..22: mol_type = other DNA
taaagctctaataatgtaaaca

SEQ ID NO: 84523 - DNA, 22 bp, synthetic construct
  misc_feature 1..22: note = chemically synthesized
  source 1..22: mol_type = other DNA
aaagctctaataatgtaaacag

SEQ ID NO: 84524 - DNA, 22 bp, synthetic construct
  misc_feature 1..22: note = chemically synthesized
  source 1..22: mol_type = other DNA
aagctctaataatgtaaacaga

SEQ ID NO: 84525 - DNA, 22 bp, synthetic construct
  misc_feature 1..22: note = chemically synthesized
  source 1..22: mol_type = other DNA
taataatgtaaacagatgttca

SEQ ID NO: 84526 - DNA, 22 bp, synthetic construct
  misc_feature 1..22: note = chemically synthesized
  source 1..22: mol_type = other DNA
ataatgtaaacagatgttcaaa

SEQ ID NO: 84527 - DNA, 22 bp, synthetic construct
  misc_feature 1..22: note = chemically synthesized
  source 1..22: mol_type = other DNA
aaaagtccatactttcatgttt

SEQ ID NO: 84528 - DNA, 22 bp, synthetic construct
  misc_feature 1..22: note = chemically synthesized
  source 1..22: mol_type = other DNA
tcatgtttgattgagtaacttc

SEQ ID NO: 84529 - DNA, 22 bp, synthetic construct
  misc_feature 1..22: note = chemically synthesized
  source 1..22: mol_type = other DNA
catgtttgattgagtaacttcg

SEQ ID NO: 84530 - DNA, 22 bp, synthetic construct
  misc_feature 1..22: note = chemically synthesized
  source 1..22: mol_type = other DNA
atgtttgattgagtaacttcga

SEQ ID NO: 84531 - DNA, 22 bp, synthetic construct
  misc_feature 1..22: note = chemically synthesized
  source 1..22: mol_type = other DNA
gattgagtaacttcgagatgtt

SEQ ID NO: 84532 - DNA, 22 bp, synthetic construct
  misc_feature 1..22: note = chemically synthesized
  source 1..22: mol_type = other DNA
attgagtaacttcgagatgtta

SEQ ID NO: 84533 - DNA, 22 bp, synthetic construct
  misc_feature 1..22: note = chemically synthesized
  source 1..22: mol_type = other DNA
agtaacttcgagatgttaaagt

SEQ ID NO: 84534 - DNA, 22 bp, synthetic construct
  misc_feature 1..22: note = chemically synthesized
  source 1..22: mol_type = other DNA
cgagatgttaaagtaacttcag

SEQ ID NO: 84535 - DNA, 22 bp, synthetic construct
  misc_feature 1..22: note = chemically synthesized
  source 1..22: mol_type = other DNA
gagatgttaaagtaacttcaga

SEQ ID NO: 84536 - DNA, 22 bp, synthetic construct
  misc_feature 1..22: note = chemically synthesized
  source 1..22: mol_type = other DNA
aagtaacttcagatttgggctg

SEQ ID NO: 84537 - DNA, 22 bp, synthetic construct
  misc_feature 1..22: note = chemically synthesized
  source 1..22: mol_type = other DNA
cagatttgggctgccctttatg

SEQ ID NO: 84538 - DNA, 22 bp, synthetic construct
  misc_feature 1..22: note = chemically synthesized
  source 1..22: mol_type = other DNA
agatttgggctgccctttatgt

SEQ ID NO: 84539 - DNA, 22 bp, synthetic construct
  misc_feature 1..22: note = chemically synthesized
  source 1..22: mol_type = other DNA
gggctgccctttatgtcctact

SEQ ID NO: 84540 - DNA, 22 bp, synthetic construct
  misc_feature 1..22: note = chemically synthesized
  source 1..22: mol_type = other DNA
ggctgccctttatgtcctactt

SEQ ID NO: 84541 - DNA, 22 bp, synthetic construct
  misc_feature 1..22: note = chemically synthesized
  source 1..22: mol_type = other DNA
ccctttatgtcctacttttcag

SEQ ID NO: 84542 - DNA, 22 bp, synthetic construct
  misc_feature 1..22: note = chemically synthesized
  source 1..22: mol_type = other DNA
tatgtcctacttttcagctttg

SEQ ID NO: 84543 - DNA, 22 bp, synthetic construct
  misc_feature 1..22: note = chemically synthesized
  source 1..22: mol_type = other DNA
atgtcctacttttcagctttgt

SEQ ID NO: 84544 - DNA, 22 bp, synthetic construct
  misc_feature 1..22: note = chemically synthesized
  source 1..22: mol_type = other DNA
tgtcctacttttcagctttgtc

SEQ ID NO: 84545 - DNA, 22 bp, synthetic construct
  misc_feature 1..22: note = chemically synthesized
  source 1..22: mol_type = other DNA
cttttcagctttgtcttattag

SEQ ID NO: 84546 - DNA, 22 bp, synthetic construct
  misc_feature 1..22: note = chemically synthesized
  source 1..22: mol_type = other DNA
ttcagctttgtcttattagcct

SEQ ID NO: 84547 - DNA, 22 bp, synthetic construct
  misc_feature 1..22: note = chemically synthesized
  source 1..22: mol_type = other DNA
tcagctttgtcttattagcctc

SEQ ID NO: 84548 - DNA, 22 bp, synthetic construct
  misc_feature 1..22: note = chemically synthesized
  source 1..22: mol_type = other DNA
cagctttgtcttattagcctca

SEQ ID NO: 84549 - DNA, 22 bp, synthetic construct
  misc_feature 1..22: note = chemically synthesized
  source 1..22: mol_type = other DNA
agctttgtcttattagcctcac

SEQ ID NO: 84550 - DNA, 22 bp, synthetic construct
  misc_feature 1..22: note = chemically synthesized
  source 1..22: mol_type = other DNA
tgtcttattagcctcacaacac

SEQ ID NO: 84551 - DNA, 22 bp, synthetic construct
  misc_feature 1..22: note = chemically synthesized
  source 1..22: mol_type = other DNA
gtcttattagcctcacaacaca

SEQ ID NO: 84552 - DNA, 22 bp, synthetic construct
  misc_feature 1..22: note = chemically synthesized
  source 1..22: mol_type = other DNA
tcttattagcctcacaacacag

SEQ ID NO: 84553 - DNA, 22 bp, synthetic construct
  misc_feature 1..22: note = chemically synthesized
  source 1..22: mol_type = other DNA
attagcctcacaacacagttcc

SEQ ID NO: 84554 - DNA, 22 bp, synthetic construct
  misc_feature 1..22: note = chemically synthesized
  source 1..22: mol_type = other DNA
ttagcctcacaacacagttcca

SEQ ID NO: 84555 - DNA, 22 bp, synthetic construct
  misc_feature 1..22: note = chemically synthesized
  source 1..22: mol_type = other DNA
gcctcacaacacagttccacag

SEQ ID NO: 84556 - DNA, 22 bp, synthetic construct
  misc_feature 1..22: note = chemically synthesized
  source 1..22: mol_type = other DNA
acaacacagttccacagacttt

SEQ ID NO: 84557 - DNA, 22 bp, synthetic construct
  misc_feature 1..22: note = chemically synthesized
  source 1..22: mol_type = other DNA
cacagactttcttctcaatgta

SEQ ID NO: 84558 - DNA, 22 bp, synthetic construct
  misc_feature 1..22: note = chemically synthesized
  source 1..22: mol_type = other DNA
tcttctcaatgtactctctata

SEQ ID NO: 84559 - DNA, 22 bp, synthetic construct
  misc_feature 1..22: note = chemically synthesized
  source 1..22: mol_type = other DNA
cttctcaatgtactctctatac

SEQ ID NO: 84560 - DNA, 22 bp, synthetic construct
  misc_feature 1..22: note = chemically synthesized
  source 1..22: mol_type = other DNA
ttctcaatgtactctctatact

SEQ ID NO: 84561 - DNA, 22 bp, synthetic construct
  misc_feature 1..22: note = chemically synthesized
  source 1..22: mol_type = other DNA
ctcaatgtactctctatactac

SEQ ID NO: 84562 - DNA, 22 bp, synthetic construct
  misc_feature 1..22: note = chemically synthesized
  source 1..22: mol_type = other DNA
tcaatgtactctctatactaca

SEQ ID NO: 84563 - DNA, 22 bp, synthetic construct
  misc_feature 1..22: note = chemically synthesized
  source 1..22: mol_type = other DNA
aatgtactctctatactacact

SEQ ID NO: 84564 - DNA, 22 bp, synthetic construct
  misc_feature 1..22: note = chemically synthesized
  source 1..22: mol_type = other DNA
tctatactacactgacgtcttc

SEQ ID NO: 84565 - DNA, 22 bp, synthetic construct
  misc_feature 1..22: note = chemically synthesized
  source 1..22: mol_type = other DNA
tatactacactgacgtcttcta

SEQ ID NO: 84566 - DNA, 22 bp, synthetic construct
  misc_feature 1..22: note = chemically synthesized
  source 1..22: mol_type = other DNA
tactacactgacgtcttctagc

SEQ ID NO: 84567 - DNA, 22 bp, synthetic construct
  misc_feature 1..22: note = chemically synthesized
  source 1..22: mol_type = other DNA
cactgacgtcttctagcagtct

SEQ ID NO: 84568 - DNA, 22 bp, synthetic construct
  misc_feature 1..22: note = chemically synthesized
  source 1..22: mol_type = other DNA
acgtcttctagcagtctaacca

SEQ ID NO: 84569 - DNA, 22 bp, synthetic construct
  misc_feature 1..22: note = chemically synthesized
  source 1..22: mol_type = other DNA
ctagcagtctaaccattgtttt

SEQ ID NO: 84570 - DNA, 22 bp, synthetic construct
  misc_feature 1..22: note = chemically synthesized
  source 1..22: mol_type = other DNA
tagcagtctaaccattgttttt

SEQ ID NO: 84571 - DNA, 22 bp, synthetic construct
  misc_feature 1..22: note = chemically synthesized
  source 1..22: mol_type = other DNA
gcagtctaaccattgtttttct

SEQ ID NO: 84572 - DNA, 22 bp, synthetic construct
  misc_feature 1..22: note = chemically synthesized
  source 1..22: mol_type = other DNA
accattgtttttcttgccctga

SEQ ID NO: 84573 - DNA, 22 bp, synthetic construct
  misc_feature 1..22: note = chemically synthesized
  source 1..22: mol_type = other DNA
tttttcttgccctgactccttc

SEQ ID NO: 84574 - DNA, 22 bp, synthetic construct
  misc_feature 1..22: note = chemically synthesized
  source 1..22: mol_type = other DNA
ttcttgccctgactccttctca

SEQ ID NO: 84575 - DNA, 22 bp, synthetic construct
  misc_feature 1..22: note = chemically synthesized
  source 1..22: mol_type = other DNA
tcttgccctgactccttctcag

SEQ ID NO: 84576 - DNA, 22 bp, synthetic construct
  misc_feature 1..22: note = chemically synthesized
  source 1..22: mol_type = other DNA
cttgccctgactccttctcagc

SEQ ID NO: 84577 - DNA, 22 bp, synthetic construct
  misc_feature 1..22: note = chemically synthesized
  source 1..22: mol_type = other DNA
ttgccctgactccttctcagca

SEQ ID NO: 84578 - DNA, 22 bp, synthetic construct
  misc_feature 1..22: note = chemically synthesized
  source 1..22: mol_type = other DNA
gccctgactccttctcagcatt

SEQ ID NO: 84579 - DNA, 22 bp, synthetic construct
  misc_feature 1..22: note = chemically synthesized
  source 1..22: mol_type = other DNA
ccctgactccttctcagcattg

SEQ ID NO: 84580 - DNA, 22 bp, synthetic construct
  misc_feature 1..22: note = chemically synthesized
  source 1..22: mol_type = other DNA
actccttctcagcattgaataa

SEQ ID NO: 84581 - DNA, 22 bp, synthetic construct
  misc_feature 1..22: note = chemically synthesized
  source 1..22: mol_type = other DNA
cttctcagcattgaataactta

SEQ ID NO: 84582 - DNA, 22 bp, synthetic construct
  misc_feature 1..22: note = chemically synthesized
  source 1..22: mol_type = other DNA
ctcagcattgaataacttagct

SEQ ID NO: 84583 - DNA, 22 bp, synthetic construct
  misc_feature 1..22: note = chemically synthesized
  source 1..22: mol_type = other DNA
tcagcattgaataacttagctc

SEQ ID NO: 84584 - DNA, 22 bp, synthetic construct
  misc_feature 1..22: note = chemically synthesized
  source 1..22: mol_type = other DNA
agcattgaataacttagctcac

SEQ ID NO: 84585 - DNA, 22 bp, synthetic construct
  misc_feature 1..22: note = chemically synthesized
  source 1..22: mol_type = other DNA
aataacttagctcactattttt

SEQ ID NO: 84586 - DNA, 22 bp, synthetic construct
  misc_feature 1..22: note = chemically synthesized
  source 1..22: mol_type = other DNA
agctcactatttttaatacttt

SEQ ID NO: 84587 - DNA, 22 bp, synthetic construct
  misc_feature 1..22: note = chemically synthesized
  source 1..22: mol_type = other DNA
gctcactatttttaatactttt

SEQ ID NO: 84588 - DNA, 22 bp, synthetic construct
  misc_feature 1..22: note = chemically synthesized
  source 1..22: mol_type = other DNA
actatttttaatacttttttct

SEQ ID NO: 84589 - DNA, 22 bp, synthetic construct
  misc_feature 1..22: note = chemically synthesized
  source 1..22: mol_type = other DNA
tttttaatacttttttctccat

SEQ ID NO: 84590 - DNA, 22 bp, synthetic construct
  misc_feature 1..22: note = chemically synthesized
  source 1..22: mol_type = other DNA
ttaatacttttttctccataga

SEQ ID NO: 84591 - DNA, 22 bp, synthetic construct
  misc_feature 1..22: note = chemically synthesized
  source 1..22: mol_type = other DNA
taatacttttttctccatagaa

SEQ ID NO: 84592 - DNA, 22 bp, synthetic construct
  misc_feature 1..22: note = chemically synthesized
  source 1..22: mol_type = other DNA
aatacttttttctccatagaat

SEQ ID NO: 84593 - DNA, 22 bp, synthetic construct
  misc_feature 1..22: note = chemically synthesized
  source 1..22: mol_type = other DNA
atacttttttctccatagaatg

SEQ ID NO: 84594 - DNA, 22 bp, synthetic construct
  misc_feature 1..22: note = chemically synthesized
  source 1..22: mol_type = other DNA
ttttctccatagaatgcttgaa

SEQ ID NO: 84595 - DNA, 22 bp, synthetic construct
  misc_feature 1..22: note = chemically synthesized
  source 1..22: mol_type = other DNA
tttctccatagaatgcttgaag

SEQ ID NO: 84596 - DNA, 22 bp, synthetic construct
  misc_feature 1..22: note = chemically synthesized
  source 1..22: mol_type = other DNA
ttctccatagaatgcttgaagt

SEQ ID NO: 84597 - DNA, 22 bp, synthetic construct
  misc_feature 1..22: note = chemically synthesized
  source 1..22: mol_type = other DNA
tctccatagaatgcttgaagtt

SEQ ID NO: 84598 - DNA, 22 bp, synthetic construct
  misc_feature 1..22: note = chemically synthesized
  source 1..22: mol_type = other DNA
ctccatagaatgcttgaagttt

SEQ ID NO: 84599 - DNA, 22 bp, synthetic construct
  misc_feature 1..22: note = chemically synthesized
  source 1..22: mol_type = other DNA
tccatagaatgcttgaagtttc

SEQ ID NO: 84600 - DNA, 22 bp, synthetic construct
  misc_feature 1..22: note = chemically synthesized
  source 1..22: mol_type = other DNA
catagaatgcttgaagtttctt

SEQ ID NO: 84601 - DNA, 22 bp, synthetic construct
  misc_feature 1..22: note = chemically synthesized
  source 1..22: mol_type = other DNA
gaagtttcttcgtttcttgcag

SEQ ID NO: 84602 - DNA, 22 bp, synthetic construct
  misc_feature 1..22: note = chemically synthesized
  source 1..22: mol_type = other DNA
aagtttcttcgtttcttgcaga

SEQ ID NO: 84603 - DNA, 22 bp, synthetic construct
  misc_feature 1..22: note = chemically synthesized
  source 1..22: mol_type = other DNA
cttcgtttcttgcagaggattt

SEQ ID NO: 84604 - DNA, 22 bp, synthetic construct
  misc_feature 1..22: note = chemically synthesized
  source 1..22: mol_type = other DNA
ttcgtttcttgcagaggatttt

SEQ ID NO: 84605 - DNA, 22 bp, synthetic construct
  misc_feature 1..22: note = chemically synthesized
  source 1..22: mol_type = other DNA
cgtttcttgcagaggatttttc

SEQ ID NO: 84606 - DNA, 22 bp, synthetic construct
  misc_feature 1..22: note = chemically synthesized
  source 1..22: mol_type = other DNA
gtttcttgcagaggatttttca

SEQ ID NO: 84607 - DNA, 22 bp, synthetic construct
  misc_feature 1..22: note = chemically synthesized
  source 1..22: mol_type = other DNA
cttgcagaggatttttcagtct

SEQ ID NO: 84608 - DNA, 22 bp, synthetic construct
  misc_feature 1..22: note = chemically synthesized
  source 1..22: mol_type = other DNA
ttgcagaggatttttcagtctt

SEQ ID NO: 84609 - DNA, 22 bp, synthetic construct
  misc_feature 1..22: note = chemically synthesized
  source 1..22: mol_type = other DNA
gcagaggatttttcagtctttt

SEQ ID NO: 84610 - DNA, 22 bp, synthetic construct
  misc_feature 1..22: note = chemically synthesized
  source 1..22: mol_type = other DNA
cagaggatttttcagtcttttg

SEQ ID NO: 84611 - DNA, 22 bp, synthetic construct
  misc_feature 1..22: note = chemically synthesized
  source 1..22: mol_type = other DNA
ttcagtcttttgaatacgtatc

SEQ ID NO: 84612 - DNA, 22 bp, synthetic construct
  misc_feature 1..22: note = chemically synthesized
  source 1..22: mol_type = other DNA
tcagtcttttgaatacgtatct

SEQ ID NO: 84613 - DNA, 22 bp, synthetic construct
  misc_feature 1..22: note = chemically synthesized
  source 1..22: mol_type = other DNA
cagtcttttgaatacgtatctt

SEQ ID NO: 84614 - DNA, 22 bp, synthetic construct
  misc_feature 1..22: note = chemically synthesized
  source 1..22: mol_type = other DNA
agtcttttgaatacgtatcttc

SEQ ID NO: 84615 - DNA, 22 bp, synthetic construct
  misc_feature 1..22: note = chemically synthesized
  source 1..22: mol_type = other DNA
ttgaatacgtatcttctttcat

SEQ ID NO: 84616 - DNA, 22 bp, synthetic construct
  misc_feature 1..22: note = chemically synthesized
  source 1..22: mol_type = other DNA
tgaatacgtatcttctttcatt

SEQ ID NO: 84617 - DNA, 22 bp, synthetic construct
  misc_feature 1..22: note = chemically synthesized
  source 1..22: mol_type = other DNA
gaatacgtatcttctttcattt

SEQ ID NO: 84618 - DNA, 22 bp, synthetic construct
  misc_feature 1..22: note = chemically synthesized
  source 1..22: mol_type = other DNA
aatacgtatcttctttcatttc

SEQ ID NO: 84619 - DNA, 22 bp, synthetic construct
  misc_feature 1..22: note = chemically synthesized
  source 1..22: mol_type = other DNA
ctttcatttctctaaatcgaat

SEQ ID NO: 84620 - DNA, 22 bp, synthetic construct
  misc_feature 1..22: note = chemically synthesized
  source 1..22: mol_type = other DNA
tttcatttctctaaatcgaatt

SEQ ID NO: 84621 - DNA, 22 bp, synthetic construct
  misc_feature 1..22: note = chemically synthesized
  source 1..22: mol_type = other DNA
tcatttctctaaatcgaatttc

SEQ ID NO: 84622 - DNA, 22 bp, synthetic construct
  misc_feature 1..22: note = chemically synthesized
  source 1..22: mol_type = other DNA
catttctctaaatcgaatttct

SEQ ID NO: 84623 - DNA, 22 bp, synthetic construct
  misc_feature 1..22: note = chemically synthesized
  source 1..22: mol_type = other DNA
atttctctaaatcgaatttctc

SEQ ID NO: 84624 - DNA, 22 bp, synthetic construct
  misc_feature 1..22: note = chemically synthesized
  source 1..22: mol_type = other DNA
ctctaaatcgaatttctcttct

SEQ ID NO: 84625 - DNA, 22 bp, synthetic construct
  misc_feature 1..22: note = chemically synthesized
  source 1..22: mol_type = other DNA
tctaaatcgaatttctcttctt

SEQ ID NO: 84626 - DNA, 22 bp, synthetic construct
  misc_feature 1..22: note = chemically synthesized
  source 1..22: mol_type = other DNA
taaatcgaatttctcttctttc

SEQ ID NO: 84627 - DNA, 22 bp, synthetic construct
  misc_feature 1..22: note = chemically synthesized
  source 1..22: mol_type = other DNA
aatcgaatttctcttctttcgt

SEQ ID NO: 84628 - DNA, 22 bp, synthetic construct
  misc_feature 1..22: note = chemically synthesized
  source 1..22: mol_type = other DNA
ctcttctttcgtaaaatttttc

SEQ ID NO: 84629 - DNA, 22 bp, synthetic construct
  misc_feature 1..22: note = chemically synthesized
  source 1..22: mol_type = other DNA
tcttctttcgtaaaatttttct

SEQ ID NO: 84630 - DNA, 22 bp, synthetic construct
  misc_feature 1..22: note = chemically synthesized
  source 1..22: mol_type = other DNA
ttctttcgtaaaatttttctcg

SEQ ID NO: 84631 - DNA, 22 bp, synthetic construct
  misc_feature 1..22: note = chemically synthesized
  source 1..22: mol_type = other DNA
ctttcgtaaaatttttctcgaa

SEQ ID NO: 84632 - DNA, 22 bp, synthetic construct
  misc_feature 1..22: note = chemically synthesized
  source 1..22: mol_type = other DNA
tttcgtaaaatttttctcgaaa

SEQ ID NO: 84633 - DNA, 22 bp, synthetic construct
  misc_feature 1..22: note = chemically synthesized
  source 1..22: mol_type = other DNA
tcgtaaaatttttctcgaaatg

SEQ ID NO: 84634 - DNA, 22 bp, synthetic construct
  misc_feature 1..22: note = chemically synthesized
  source 1..22: mol_type = other DNA
cgtaaaatttttctcgaaatgt

SEQ ID NO: 84635 - DNA, 22 bp, synthetic construct
  misc_feature 1..22: note = chemically synthesized
  source 1..22: mol_type = other DNA
gtaaaatttttctcgaaatgtt

SEQ ID NO: 84636 - DNA, 22 bp, synthetic construct
  misc_feature 1..22: note = chemically synthesized
  source 1..22: mol_type = other DNA
ttctcgaaatgttctatctgcc

SEQ ID NO: 84637 - DNA, 22 bp, synthetic construct
  misc_feature 1..22: note = chemically synthesized
  source 1..22: mol_type = other DNA
tctcgaaatgttctatctgcct

SEQ ID NO: 84638 - DNA, 22 bp, synthetic construct
  misc_feature 1..22: note = chemically synthesized
  source 1..22: mol_type = other DNA
ctcgaaatgttctatctgccta

SEQ ID NO: 84639 - DNA, 22 bp, synthetic construct
  misc_feature 1..22: note = chemically synthesized
  source 1..22: mol_type = other DNA
tcgaaatgttctatctgcctaa

SEQ ID NO: 84640 - DNA, 22 bp, synthetic construct
  misc_feature 1..22: note = chemically synthesized
  source 1..22: mol_type = other DNA
gaaatgttctatctgcctaaat

SEQ ID NO: 84641 - DNA, 22 bp, synthetic construct
  misc_feature 1..22: note = chemically synthesized
  source 1..22: mol_type = other DNA
tatctgcctaaattattcatca

SEQ ID NO: 84642 - DNA, 22 bp, synthetic construct
  misc_feature 1..22: note = chemically synthesized
  source 1..22: mol_type = other DNA
tctgcctaaattattcatcatc

SEQ ID NO: 84643 - DNA, 22 bp, synthetic construct
  misc_feature 1..22: note = chemically synthesized
  source 1..22: mol_type = other DNA
cctaaattattcatcatctttt

SEQ ID NO: 84644 - DNA, 22 bp, synthetic construct
  misc_feature 1..22: note = chemically synthesized
  source 1..22: mol_type = other DNA
aattattcatcatcttttcctc

SEQ ID NO: 84645 - DNA, 22 bp, synthetic construct
  misc_feature 1..22: note = chemically synthesized
  source 1..22: mol_type = other DNA
ttcatcatcttttcctcaattt

SEQ ID NO: 84646 - DNA, 22 bp, synthetic construct
  misc_feature 1..22: note = chemically synthesized
  source 1..22: mol_type = other DNA
atcatcttttcctcaatttctt

SEQ ID NO: 84647 - DNA, 22 bp, synthetic construct
  misc_feature 1..22: note = chemically synthesized
  source 1..22: mol_type = other DNA
ttcctcaatttcttcctaccct

SEQ ID NO: 84648 - DNA, 22 bp, synthetic construct
  misc_feature 1..22: note = chemically synthesized
  source 1..22: mol_type = other DNA
tcctcaatttcttcctaccctt

SEQ ID NO: 84649 - DNA, 22 bp, synthetic construct
  misc_feature 1..22: note = chemically synthesized
  source 1..22: mol_type = other DNA
cctcaatttcttcctacccttt

SEQ ID NO: 84650 - DNA, 22 bp, synthetic construct
  misc_feature 1..22: note = chemically synthesized
  source 1..22: mol_type = other DNA
ctcaatttcttcctaccctttt

SEQ ID NO: 84651 - DNA, 22 bp, synthetic construct
  misc_feature 1..22: note = chemically synthesized
  source 1..22: mol_type = other DNA
aatttcttcctaccctttttaa

SEQ ID NO: 84652 - DNA, 22 bp, synthetic construct
  misc_feature 1..22: note = chemically synthesized
  source 1..22: mol_type = other DNA
cttcctaccctttttaaaacga

SEQ ID NO: 84653 - DNA, 22 bp, synthetic construct
  misc_feature 1..22: note = chemically synthesized
  source 1..22: mol_type = other DNA
ttcctaccctttttaaaacgat

SEQ ID NO: 84654 - DNA, 22 bp, synthetic construct
  misc_feature 1..22: note = chemically synthesized
  source 1..22: mol_type = other DNA
cctaccctttttaaaacgatct

SEQ ID NO: 84655 - DNA, 22 bp, synthetic construct
  misc_feature 1..22: note = chemically synthesized
  source 1..22: mol_type = other DNA
ctaccctttttaaaacgatctt

SEQ ID NO: 84656 - DNA, 22 bp, synthetic construct
  misc_feature 1..22: note = chemically synthesized
  source 1..22: mol_type = other DNA
ccctttttaaaacgatcttgca

SEQ ID NO: 84657 - DNA, 22 bp, synthetic construct
  misc_feature 1..22: note = chemically synthesized
  source 1..22: mol_type = other DNA
tttaaaacgatcttgcaactca

SEQ ID NO: 84658 - DNA, 22 bp, synthetic construct
  misc_feature 1..22: note = chemically synthesized
  source 1..22: mol_type = other DNA
ttaaaacgatcttgcaactcaa

SEQ ID NO: 84659 - DNA, 22 bp, synthetic construct
  misc_feature 1..22: note = chemically synthesized
  source 1..22: mol_type = other DNA
taaaacgatcttgcaactcaac

SEQ ID NO: 84660 - DNA, 22 bp, synthetic construct
  misc_feature 1..22: note = chemically synthesized
  source 1..22: mol_type = other DNA
aaaacgatcttgcaactcaaca

SEQ ID NO: 84661 - DNA, 22 bp, synthetic construct
  misc_feature 1..22: note = chemically synthesized
  source 1..22: mol_type = other DNA
aaacgatcttgcaactcaacaa

SEQ ID NO: 84662 - DNA, 22 bp, synthetic construct
  misc_feature 1..22: note = chemically synthesized
  source 1..22: mol_type = other DNA
gcaactcaacaatcacttttca

SEQ ID NO: 84663 - DNA, 22 bp, synthetic construct
  misc_feature 1..22: note = chemically synthesized
  source 1..22: mol_type = other DNA
caactcaacaatcacttttcaa

SEQ ID NO: 84664 - DNA, 22 bp, synthetic construct
  misc_feature 1..22: note = chemically synthesized
  source 1..22: mol_type = other DNA
aacaatcacttttcaagaagtt

SEQ ID NO: 84665 - DNA, 22 bp, synthetic construct
  misc_feature 1..22: note = chemically synthesized
  source 1..22: mol_type = other DNA
ttcaagaagtttcttaagacaa

SEQ ID NO: 84666 - DNA, 22 bp, synthetic construct
  misc_feature 1..22: note = chemically synthesized
  source 1..22: mol_type = other DNA
tcaagaagtttcttaagacaaa

SEQ ID NO: 84667 - DNA, 22 bp, synthetic construct
  misc_feature 1..22: note = chemically synthesized
  source 1..22: mol_type = other DNA
caagaagtttcttaagacaaat

SEQ ID NO: 84668 - DNA, 22 bp, synthetic construct
  misc_feature 1..22: note = chemically synthesized
  source 1..22: mol_type = other DNA
aagaagtttcttaagacaaatt

SEQ ID NO: 84669 - DNA, 22 bp, synthetic construct
  misc_feature 1..22: note = chemically synthesized
  source 1..22: mol_type = other DNA
cttaagacaaatttatccatat

SEQ ID NO: 84670 - DNA, 22 bp, synthetic construct
  misc_feature 1..22: note = chemically synthesized
  source 1..22: mol_type = other DNA
ttaagacaaatttatccatata

SEQ ID NO: 84671 - DNA, 22 bp, synthetic construct
  misc_feature 1..22: note = chemically synthesized
  source 1..22: mol_type = other DNA
aagacaaatttatccatatatc

SEQ ID NO: 84672 - DNA, 22 bp, synthetic construct
  misc_feature 1..22: note = chemically synthesized
  source 1..22: mol_type = other DNA
agacaaatttatccatatatct

SEQ ID NO: 84673 - DNA, 22 bp, synthetic construct
  misc_feature 1..22: note = chemically synthesized
  source 1..22: mol_type = other DNA
atccatatatctattattttgg

SEQ ID NO: 84674 - DNA, 22 bp, synthetic construct
  misc_feature 1..22: note = chemically synthesized
  source 1..22: mol_type = other DNA
tccatatatctattattttggt

SEQ ID NO: 84675 - DNA, 22 bp, synthetic construct
  misc_feature 1..22: note = chemically synthesized
  source 1..22: mol_type = other DNA
ttattttggtatcatgtttcaa

SEQ ID NO: 84676 - DNA, 22 bp, synthetic construct
  misc_feature 1..22: note = chemically synthesized
  source 1..22: mol_type = other DNA
ttttggtatcatgtttcaattt

SEQ ID NO: 84677 - DNA, 22 bp, synthetic construct
  misc_feature 1..22: note = chemically synthesized
  source 1..22: mol_type = other DNA
tggtatcatgtttcaattttaa

SEQ ID NO: 84678 - DNA, 22 bp, synthetic construct
  misc_feature 1..22: note = chemically synthesized
  source 1..22: mol_type = other DNA
ggtatcatgtttcaattttaaa

SEQ ID NO: 84679 - DNA, 22 bp, synthetic construct
  misc_feature 1..22: note = chemically synthesized
  source 1..22: mol_type = other DNA
gtatcatgtttcaattttaaat

SEQ ID NO: 84680 - DNA, 22 bp, synthetic construct
  misc_feature 1..22: note = chemically synthesized
  source 1..22: mol_type = other DNA
caattttaaataaaacttataa

SEQ ID NO: 84681 - DNA, 22 bp, synthetic construct
  misc_feature 1..22: note = chemically synthesized
  source 1..22: mol_type = other DNA
aattttaaataaaacttataat

SEQ ID NO: 84682 - DNA, 22 bp, synthetic construct
  misc_feature 1..22: note = chemically synthesized
  source 1..22: mol_type = other DNA
taaataaaacttataattttgt

SEQ ID NO: 84683 - DNA, 22 bp, synthetic construct
  misc_feature 1..22: note = chemically synthesized
  source 1..22: mol_type = other DNA
aaataaaacttataattttgta

SEQ ID NO: 84684 - DNA, 22 bp, synthetic construct
  misc_feature 1..22: note = chemically synthesized
  source 1..22: mol_type = other DNA
aataaaacttataattttgtat

SEQ ID NO: 84685 - DNA, 22 bp, synthetic construct
  misc_feature 1..22: note = chemically synthesized
  source 1..22: mol_type = other DNA
ataattttgtatttattagcta

SEQ ID NO: 84686 - DNA, 22 bp, synthetic construct
  misc_feature 1..22: note = chemically synthesized
  source 1..22: mol_type = other DNA
taattttgtatttattagctaa

SEQ ID NO: 84687 - DNA, 22 bp, synthetic construct
  misc_feature 1..22: note = chemically synthesized
  source 1..22: mol_type = other DNA
tgtatttattagctaaatattt

SEQ ID NO: 84688 - DNA, 22 bp, synthetic construct
  misc_feature 1..22: note = chemically synthesized
  source 1..22: mol_type = other DNA
gtatttattagctaaatattta

SEQ ID NO: 84689 - DNA, 22 bp, synthetic construct
  misc_feature 1..22: note = chemically synthesized
  source 1..22: mol_type = other DNA
tatttattagctaaatatttaa

SEQ ID NO: 84690 - DNA, 22 bp, synthetic construct
  misc_feature 1..22: note = chemically synthesized
  source 1..22: mol_type = other DNA
attagctaaatatttaactaat

SEQ ID NO: 84691 - DNA, 22 bp, synthetic construct
  misc_feature 1..22: note = chemically synthesized
  source 1..22: mol_type = other DNA
ttagctaaatatttaactaata

SEQ ID NO: 84692 - DNA, 22 bp, synthetic construct
  misc_feature 1..22: note = chemically synthesized
  source 1..22: mol_type = other DNA
gctaaatatttaactaatattt

SEQ ID NO: 84693 - DNA, 22 bp, synthetic construct
  misc_feature 1..22: note = chemically synthesized
  source 1..22: mol_type = other DNA
aatatttaactaatatttaaac

SEQ ID NO: 84694 - DNA, 22 bp, synthetic construct
  misc_feature 1..22: note = chemically synthesized
  source 1..22: mol_type = other DNA
aactaatatttaaactaaatat

SEQ ID NO: 84695 - DNA, 22 bp, synthetic construct
  misc_feature 1..22: note = chemically synthesized
  source 1..22: mol_type = other DNA
actaatatttaaactaaatatt

SEQ ID NO: 84696 - DNA, 22 bp, synthetic construct
  misc_feature 1..22: note = chemically synthesized
  source 1..22: mol_type = other DNA
atatttaaactaaatatttaac

SEQ ID NO: 84697 - DNA, 22 bp, synthetic construct
  misc_feature 1..22: note = chemically synthesized
  source 1..22: mol_type = other DNA
aaactaaatatttaactaatat

SEQ ID NO: 84698 - DNA, 22 bp, synthetic construct
  misc_feature 1..22: note = chemically synthesized
  source 1..22: mol_type = other DNA
aactaaatatttaactaatatc

SEQ ID NO: 84699 - DNA, 22 bp, synthetic construct
  misc_feature 1..22: note = chemically synthesized
  source 1..22: mol_type = other DNA
aatatttaactaatatctctgt

SEQ ID NO: 84700 - DNA, 22 bp, synthetic construct
  misc_feature 1..22: note = chemically synthesized
  source 1..22: mol_type = other DNA
aactaatatctctgttacaaac

SEQ ID NO: 84701 - DNA, 22 bp, synthetic construct
  misc_feature 1..22: note = chemically synthesized
  source 1..22: mol_type = other DNA
actaatatctctgttacaaact

SEQ ID NO: 84702 - DNA, 22 bp, synthetic construct
  misc_feature 1..22: note = chemically synthesized
  source 1..22: mol_type = other DNA
atatctctgttacaaactaaat

SEQ ID NO: 84703 - DNA, 22 bp, synthetic construct
  misc_feature 1..22: note = chemically synthesized
  source 1..22: mol_type = other DNA
tgttacaaactaaattctcagt

SEQ ID NO: 84704 - DNA, 22 bp, synthetic construct
  misc_feature 1..22: note = chemically synthesized
  source 1..22: mol_type = other DNA
ttacaaactaaattctcagttc

SEQ ID NO: 84705 - DNA, 22 bp, synthetic construct
  misc_feature 1..22: note = chemically synthesized
  source 1..22: mol_type = other DNA
caaactaaattctcagttcctt

SEQ ID NO: 84706 - DNA, 22 bp, synthetic construct
  misc_feature 1..22: note = chemically synthesized
  source 1..22: mol_type = other DNA
aattctcagttccttaatgtgc

SEQ ID NO: 84707 - DNA, 22 bp, synthetic construct
  misc_feature 1..22: note = chemically synthesized
  source 1..22: mol_type = other DNA
tcagttccttaatgtgcagact

SEQ ID NO: 84708 - DNA, 22 bp, synthetic construct
  misc_feature 1..22: note = chemically synthesized
  source 1..22: mol_type = other DNA
agttccttaatgtgcagactat

SEQ ID NO: 84709 - DNA, 22 bp, synthetic construct
  misc_feature 1..22: note = chemically synthesized
  source 1..22: mol_type = other DNA
cttaatgtgcagactatgtcaa

SEQ ID NO: 84710 - DNA, 22 bp, synthetic construct
  misc_feature 1..22: note = chemically synthesized
  source 1..22: mol_type = other DNA
aatgtgcagactatgtcaactt

SEQ ID NO: 84711 - DNA, 22 bp, synthetic construct
  misc_feature 1..22: note = chemically synthesized
  source 1..22: mol_type = other DNA
atgtgcagactatgtcaacttt

SEQ ID NO: 84712 - DNA, 22 bp, synthetic construct
  misc_feature 1..22: note = chemically synthesized
  source 1..22: mol_type = other DNA
tgtcaactttttcttattattt

SEQ ID NO: 84713 - DNA, 22 bp, synthetic construct
  misc_feature 1..22: note = chemically synthesized
  source 1..22: mol_type = other DNA
tttcttattatttgaaactaac

SEQ ID NO: 84714 - DNA, 22 bp, synthetic construct
  misc_feature 1..22: note = chemically synthesized
  source 1..22: mol_type = other DNA
ttcttattatttgaaactaaca

SEQ ID NO: 84715 - DNA, 22 bp, synthetic construct
  misc_feature 1..22: note = chemically synthesized
  source 1..22: mol_type = other DNA
tcttattatttgaaactaacat

SEQ ID NO: 84716 - DNA, 22 bp, synthetic construct
  misc_feature 1..22: note = chemically synthesized
  source 1..22: mol_type = other DNA
cttattatttgaaactaacatt

SEQ ID NO: 84717 - DNA, 22 bp, synthetic construct
  misc_feature 1..22: note = chemically synthesized
  source 1..22: mol_type = other DNA
ttattatttgaaactaacattt

SEQ ID NO: 84718 - DNA, 22 bp, synthetic construct
  misc_feature 1..22: note = chemically synthesized
  source 1..22: mol_type = other DNA
attatttgaaactaacatttgc

SEQ ID NO: 84719 - DNA, 22 bp, synthetic construct
  misc_feature 1..22: note = chemically synthesized
  source 1..22: mol_type = other DNA
ttatttgaaactaacatttgca

SEQ ID NO: 84720 - DNA, 22 bp, synthetic construct
  misc_feature 1..22: note = chemically synthesized
  source 1..22: mol_type = other DNA
tttgaaactaacatttgcacct

SEQ ID NO: 84721 - DNA, 22 bp, synthetic construct
  misc_feature 1..22: note = chemically synthesized
  source 1..22: mol_type = other DNA
gaaactaacatttgcacctctg

SEQ ID NO: 84722 - DNA, 22 bp, synthetic construct
  misc_feature 1..22: note = chemically synthesized
  source 1..22: mol_type = other DNA
aaactaacatttgcacctctga

SEQ ID NO: 84723 - DNA, 22 bp, synthetic construct
  misc_feature 1..22: note = chemically synthesized
  source 1..22: mol_type = other DNA
acatttgcacctctgattcctg

SEQ ID NO: 84724 - DNA, 22 bp, synthetic construct
  misc_feature 1..22: note = chemically synthesized
  source 1..22: mol_type = other DNA
gcacctctgattcctgaccact

SEQ ID NO: 84725 - DNA, 22 bp, synthetic construct
  misc_feature 1..22: note = chemically synthesized
  source 1..22: mol_type = other DNA
cacctctgattcctgaccactc

SEQ ID NO: 84726 - DNA, 22 bp, synthetic construct
  misc_feature 1..22: note = chemically synthesized
  source 1..22: mol_type = other DNA
tgattcctgaccactcctgaga

SEQ ID NO: 84727 - DNA, 22 bp, synthetic construct
  misc_feature 1..22: note = chemically synthesized
  source 1..22: mol_type = other DNA
attcctgaccactcctgagagc

SEQ ID NO: 84728 - DNA, 22 bp, synthetic construct
  misc_feature 1..22: note = chemically synthesized
  source 1..22: mol_type = other DNA
ctgaccactcctgagagctcaa

SEQ ID NO: 84729 - DNA, 22 bp, synthetic construct
  misc_feature 1..22: note = chemically synthesized
  source 1..22: mol_type = other DNA
accactcctgagagctcaaatt

SEQ ID NO: 84730 - DNA, 22 bp, synthetic construct
  misc_feature 1..22: note = chemically synthesized
  source 1..22: mol_type = other DNA
ctgagagctcaaattcatgaat

SEQ ID NO: 84731 - DNA, 22 bp, synthetic construct
  misc_feature 1..22: note = chemically synthesized
  source 1..22: mol_type = other DNA
agagctcaaattcatgaataca

SEQ ID NO: 84732 - DNA, 22 bp, synthetic construct
  misc_feature 1..22: note = chemically synthesized
  source 1..22: mol_type = other DNA
aaattcatgaatacaactggct

SEQ ID NO: 84733 - DNA, 22 bp, synthetic construct
  misc_feature 1..22: note = chemically synthesized
  source 1..22: mol_type = other DNA
atgaatacaactggctatttaa

SEQ ID NO: 84734 - DNA, 22 bp, synthetic construct
  misc_feature 1..22: note = chemically synthesized
  source 1..22: mol_type = other DNA
gctatttaatatattcatctga

SEQ ID NO: 84735 - DNA, 22 bp, synthetic construct
  misc_feature 1..22: note = chemically synthesized
  source 1..22: mol_type = other DNA
tttaatatattcatctgagtgt

SEQ ID NO: 84736 - DNA, 22 bp, synthetic construct
  misc_feature 1..22: note = chemically synthesized
  source 1..22: mol_type = other DNA
aatatattcatctgagtgttta

SEQ ID NO: 84737 - DNA, 22 bp, synthetic construct
  misc_feature 1..22: note = chemically synthesized
  source 1..22: mol_type = other DNA
atatattcatctgagtgtttaa

SEQ ID NO: 84738 - DNA, 22 bp, synthetic construct
  misc_feature 1..22: note = chemically synthesized
  source 1..22: mol_type = other DNA
atctgagtgtttaatcttaaaa

SEQ ID NO: 84739 - DNA, 22 bp, synthetic construct
  misc_feature 1..22: note = chemically synthesized
  source 1..22: mol_type = other DNA
agtgtttaatcttaaaataaga

SEQ ID NO: 84740 - DNA, 22 bp, synthetic construct
  misc_feature 1..22: note = chemically synthesized
  source 1..22: mol_type = other DNA
aatcttaaaataagaatgatgc

SEQ ID NO: 84741 - DNA, 22 bp, synthetic construct
  misc_feature 1..22: note = chemically synthesized
  source 1..22: mol_type = other DNA
atcttaaaataagaatgatgcc

SEQ ID NO: 84742 - DNA, 22 bp, synthetic construct
  misc_feature 1..22: note = chemically synthesized
  source 1..22: mol_type = other DNA
aaaataagaatgatgccaataa

SEQ ID NO: 84743 - DNA, 22 bp, synthetic construct
  misc_feature 1..22: note = chemically synthesized
  source 1..22: mol_type = other DNA
aaataagaatgatgccaataaa

SEQ ID NO: 84744 - DNA, 22 bp, synthetic construct
  misc_feature 1..22: note = chemically synthesized
  source 1..22: mol_type = other DNA
gattttccccccaaaatctatt

SEQ ID NO: 84745 - DNA, 22 bp, synthetic construct
  misc_feature 1..22: note = chemically synthesized
  source 1..22: mol_type = other DNA
attttccccccaaaatctattt

SEQ ID NO: 84746 - DNA, 22 bp, synthetic construct
  misc_feature 1..22: note = chemically synthesized
  source 1..22: mol_type = other DNA
tccccccaaaatctattttctg

SEQ ID NO: 84747 - DNA, 22 bp, synthetic construct
  misc_feature 1..22: note = chemically synthesized
  source 1..22: mol_type = other DNA
ccccccaaaatctattttctgt

SEQ ID NO: 84748 - DNA, 22 bp, synthetic construct
  misc_feature 1..22: note = chemically synthesized
  source 1..22: mol_type = other DNA
cccccaaaatctattttctgtc

SEQ ID NO: 84749 - DNA, 22 bp, synthetic construct
  misc_feature 1..22: note = chemically synthesized
  source 1..22: mol_type = other DNA
ttttctgtcccttttctcctaa

SEQ ID NO: 84750 - DNA, 22 bp, synthetic construct
  misc_feature 1..22: note = chemically synthesized
  source 1..22: mol_type = other DNA
tctgtcccttttctcctaatat

SEQ ID NO: 84751 - DNA, 22 bp, synthetic construct
  misc_feature 1..22: note = chemically synthesized
  source 1..22: mol_type = other DNA
ctgtcccttttctcctaatatt

SEQ ID NO: 84752 - DNA, 22 bp, synthetic construct
  misc_feature 1..22: note = chemically synthesized
  source 1..22: mol_type = other DNA
tgtcccttttctcctaatatta

SEQ ID NO: 84753 - DNA, 22 bp, synthetic construct
  misc_feature 1..22: note = chemically synthesized
  source 1..22: mol_type = other DNA
tcccttttctcctaatattata

SEQ ID NO: 84754 - DNA, 22 bp, synthetic construct
  misc_feature 1..22: note = chemically synthesized
  source 1..22: mol_type = other DNA
ttctcctaatattataaagtga

SEQ ID NO: 84755 - DNA, 22 bp, synthetic construct
  misc_feature 1..22: note = chemically synthesized
  source 1..22: mol_type = other DNA
tctcctaatattataaagtgac

SEQ ID NO: 84756 - DNA, 22 bp, synthetic construct
  misc_feature 1..22: note = chemically synthesized
  source 1..22: mol_type = other DNA
ctcctaatattataaagtgact

SEQ ID NO: 84757 - DNA, 22 bp, synthetic construct
  misc_feature 1..22: note = chemically synthesized
  source 1..22: mol_type = other DNA
tcctaatattataaagtgactc

SEQ ID NO: 84758 - DNA, 22 bp, synthetic construct
  misc_feature 1..22: note = chemically synthesized
  source 1..22: mol_type = other DNA
ctaatattataaagtgactcca

SEQ ID NO: 84759 - DNA, 22 bp, synthetic construct
  misc_feature 1..22: note = chemically synthesized
  source 1..22: mol_type = other DNA
atattataaagtgactccacca

SEQ ID NO: 84760 - DNA, 22 bp, synthetic construct
  misc_feature 1..22: note = chemically synthesized
  source 1..22: mol_type = other DNA
taaagtgactccaccaataaca

SEQ ID NO: 84761 - DNA, 22 bp, synthetic construct
  misc_feature 1..22: note = chemically synthesized
  source 1..22: mol_type = other DNA
caccaataacacaattgcataa

SEQ ID NO: 84762 - DNA, 22 bp, synthetic construct
  misc_feature 1..22: note = chemically synthesized
  source 1..22: mol_type = other DNA
cataagacaagtcttgagtcat

SEQ ID NO: 84763 - DNA, 22 bp, synthetic construct
  misc_feature 1..22: note = chemically synthesized
  source 1..22: mol_type = other DNA
gagtcatttttaaaatttttta

SEQ ID NO: 84764 - DNA, 22 bp, synthetic construct
  misc_feature 1..22: note = chemically synthesized
  source 1..22: mol_type = other DNA
agtcatttttaaaattttttat

SEQ ID NO: 84765 - DNA, 22 bp, synthetic construct
  misc_feature 1..22: note = chemically synthesized
  source 1..22: mol_type = other DNA
ttaaaattttttatttctctct

SEQ ID NO: 84766 - DNA, 22 bp, synthetic construct
  misc_feature 1..22: note = chemically synthesized
  source 1..22: mol_type = other DNA
taaaattttttatttctctctt

SEQ ID NO: 84767 - DNA, 22 bp, synthetic construct
  misc_feature 1..22: note = chemically synthesized
  source 1..22: mol_type = other DNA
aaaattttttatttctctcttt

SEQ ID NO: 84768 - DNA, 22 bp, synthetic construct
  misc_feature 1..22: note = chemically synthesized
  source 1..22: mol_type = other DNA
aaattttttatttctctctttc

SEQ ID NO: 84769 - DNA, 22 bp, synthetic construct
  misc_feature 1..22: note = chemically synthesized
  source 1..22: mol_type = other DNA
tttatttctctctttccttccc

SEQ ID NO: 84770 - DNA, 22 bp, synthetic construct
  misc_feature 1..22: note = chemically synthesized
  source 1..22: mol_type = other DNA
ttatttctctctttccttccct

SEQ ID NO: 84771 - DNA, 22 bp, synthetic construct
  misc_feature 1..22: note = chemically synthesized
  source 1..22: mol_type = other DNA
tatttctctctttccttccctt

SEQ ID NO: 84772 - DNA, 22 bp, synthetic construct
  misc_feature 1..22: note = chemically synthesized
  source 1..22: mol_type = other DNA
atttctctctttccttcccttt

SEQ ID NO: 84773 - DNA, 22 bp, synthetic construct
  misc_feature 1..22: note = chemically synthesized
  source 1..22: mol_type = other DNA
tttctctctttccttccctttc

SEQ ID NO: 84774 - DNA, 22 bp, synthetic construct
  misc_feature 1..22: note = chemically synthesized
  source 1..22: mol_type = other DNA
ctctctttccttccctttcctc

SEQ ID NO: 84775 - DNA, 22 bp, synthetic construct
  misc_feature 1..22: note = chemically synthesized
  source 1..22: mol_type = other DNA
tctctttccttccctttcctct

SEQ ID NO: 84776 - DNA, 22 bp, synthetic construct
  misc_feature 1..22: note = chemically synthesized
  source 1..22: mol_type = other DNA
tctttccttccctttcctctct

SEQ ID NO: 84777 - DNA, 22 bp, synthetic construct
  misc_feature 1..22: note = chemically synthesized
  source 1..22: mol_type = other DNA
tttccttccctttcctctctcc

SEQ ID NO: 84778 - DNA, 22 bp, synthetic construct
  misc_feature 1..22: note = chemically synthesized
  source 1..22: mol_type = other DNA
tccttccctttcctctctccat

SEQ ID NO: 84779 - DNA, 22 bp, synthetic construct
  misc_feature 1..22: note = chemically synthesized
  source 1..22: mol_type = other DNA
ccttccctttcctctctccatc

SEQ ID NO: 84780 - DNA, 22 bp, synthetic construct
  misc_feature 1..22: note = chemically synthesized
  source 1..22: mol_type = other DNA
cttccctttcctctctccatca

SEQ ID NO: 84781 - DNA, 22 bp, synthetic construct
  misc_feature 1..22: note = chemically synthesized
  source 1..22: mol_type = other DNA
ccctttcctctctccatcaaat

SEQ ID NO: 84782 - DNA, 22 bp, synthetic construct
  misc_feature 1..22: note = chemically synthesized
  source 1..22: mol_type = other DNA
cctttcctctctccatcaaatc

SEQ ID NO: 84783 - DNA, 22 bp, synthetic construct
  misc_feature 1..22: note = chemically synthesized
  source 1..22: mol_type = other DNA
tcctctctccatcaaatctttc

SEQ ID NO: 84784 - DNA, 22 bp, synthetic construct
  misc_feature 1..22: note = chemically synthesized
  source 1..22: mol_type = other DNA
cctctctccatcaaatctttca

SEQ ID NO: 84785 - DNA, 22 bp, synthetic construct
  misc_feature 1..22: note = chemically synthesized
  source 1..22: mol_type = other DNA
ctctctccatcaaatctttcat

SEQ ID NO: 84786 - DNA, 22 bp, synthetic construct
  misc_feature 1..22: note = chemically synthesized
  source 1..22: mol_type = other DNA
tctccatcaaatctttcatcaa

SEQ ID NO: 84787 - DNA, 22 bp, synthetic construct
  misc_feature 1..22: note = chemically synthesized
  source 1..22: mol_type = other DNA
tccatcaaatctttcatcaatt

SEQ ID NO: 84788 - DNA, 22 bp, synthetic construct
  misc_feature 1..22: note = chemically synthesized
  source 1..22: mol_type = other DNA
catcaaatctttcatcaatttc

SEQ ID NO: 84789 - DNA, 22 bp, synthetic construct
  misc_feature 1..22: note = chemically synthesized
  source 1..22: mol_type = other DNA
tcatcaatttctaccatttcta

SEQ ID NO: 84790 - DNA, 22 bp, synthetic construct
  misc_feature 1..22: note = chemically synthesized
  source 1..22: mol_type = other DNA
catcaatttctaccatttctac

SEQ ID NO: 84791 - DNA, 22 bp, synthetic construct
  misc_feature 1..22: note = chemically synthesized
  source 1..22: mol_type = other DNA
atcaatttctaccatttctacc

SEQ ID NO: 84792 - DNA, 22 bp, synthetic construct
  misc_feature 1..22: note = chemically synthesized
  source 1..22: mol_type = other DNA
ctaccatttctaccagaaacac

SEQ ID NO: 84793 - DNA, 22 bp, synthetic construct
  misc_feature 1..22: note = chemically synthesized
  source 1..22: mol_type = other DNA
taccatttctaccagaaacaca

SEQ ID NO: 84794 - DNA, 22 bp, synthetic construct
  misc_feature 1..22: note = chemically synthesized
  source 1..22: mol_type = other DNA
ccatttctaccagaaacacatc

SEQ ID NO: 84795 - DNA, 22 bp, synthetic construct
  misc_feature 1..22: note = chemically synthesized
  source 1..22: mol_type = other DNA
ctaccagaaacacatcccagat

SEQ ID NO: 84796 - DNA, 22 bp, synthetic construct
  misc_feature 1..22: note = chemically synthesized
  source 1..22: mol_type = other DNA
taccagaaacacatcccagata

SEQ ID NO: 84797 - DNA, 22 bp, synthetic construct
  misc_feature 1..22: note = chemically synthesized
  source 1..22: mol_type = other DNA
ccagaaacacatcccagatagg

SEQ ID NO: 84798 - DNA, 22 bp, synthetic construct
  misc_feature 1..22: note = chemically synthesized
  source 1..22: mol_type = other DNA
ttacacattgcccgtcttggtt

SEQ ID NO: 84799 - DNA, 22 bp, synthetic construct
  misc_feature 1..22: note = chemically synthesized
  source 1..22: mol_type = other DNA
tacacattgcccgtcttggttt

SEQ ID NO: 84800 - DNA, 22 bp, synthetic construct
  misc_feature 1..22: note = chemically synthesized
  source 1..22: mol_type = other DNA
acacattgcccgtcttggttta

SEQ ID NO: 84801 - DNA, 22 bp, synthetic construct
  misc_feature 1..22: note = chemically synthesized
  source 1..22: mol_type = other DNA
cacattgcccgtcttggtttat

SEQ ID NO: 84802 - DNA, 22 bp, synthetic construct
  misc_feature 1..22: note = chemically synthesized
  source 1..22: mol_type = other DNA
cccgtcttggtttataatatca

SEQ ID NO: 84803 - DNA, 22 bp, synthetic construct
  misc_feature 1..22: note = chemically synthesized
  source 1..22: mol_type = other DNA
ggtttataatatcattgtttcc

SEQ ID NO: 84804 - DNA, 22 bp, synthetic construct
  misc_feature 1..22: note = chemically synthesized
  source 1..22: mol_type = other DNA
gtttataatatcattgtttccc

SEQ ID NO: 84805 - DNA, 22 bp, synthetic construct
  misc_feature 1..22: note = chemically synthesized
  source 1..22: mol_type = other DNA
ataatatcattgtttccctggc

SEQ ID NO: 84806 - DNA, 22 bp, synthetic construct
  misc_feature 1..22: note = chemically synthesized
  source 1..22: mol_type = other DNA
taatatcattgtttccctggct

SEQ ID NO: 84807 - DNA, 22 bp, synthetic construct
  misc_feature 1..22: note = chemically synthesized
  source 1..22: mol_type = other DNA
tttccctggctactatgataat

SEQ ID NO: 84808 - DNA, 22 bp, synthetic construct
  misc_feature 1..22: note = chemically synthesized
  source 1..22: mol_type = other DNA
ccctggctactatgataattta

SEQ ID NO: 84809 - DNA, 22 bp, synthetic construct
  misc_feature 1..22: note = chemically synthesized
  source 1..22: mol_type = other DNA
cctggctactatgataatttat

SEQ ID NO: 84810 - DNA, 22 bp, synthetic construct
  misc_feature 1..22: note = chemically synthesized
  source 1..22: mol_type = other DNA
gctactatgataatttattaaa

SEQ ID NO: 84811 - DNA, 22 bp, synthetic construct
  misc_feature 1..22: note = chemically synthesized
  source 1..22: mol_type = other DNA
ctatgataatttattaaattaa

SEQ ID NO: 84812 - DNA, 22 bp, synthetic construct
  misc_feature 1..22: note = chemically synthesized
  source 1..22: mol_type = other DNA
tgataatttattaaattaataa

SEQ ID NO: 84813 - DNA, 22 bp, synthetic construct
  misc_feature 1..22: note = chemically synthesized
  source 1..22: mol_type = other DNA
attaaattaataataatttaat

SEQ ID NO: 84814 - DNA, 22 bp, synthetic construct
  misc_feature 1..22: note = chemically synthesized
  source 1..22: mol_type = other DNA
ttaaattaataataatttaata

SEQ ID NO: 84815 - DNA, 22 bp, synthetic construct
  misc_feature 1..22: note = chemically synthesized
  source 1..22: mol_type = other DNA
aattaataataatttaatatta

SEQ ID NO: 84816 - DNA, 22 bp, synthetic construct
  misc_feature 1..22: note = chemically synthesized
  source 1..22: mol_type = other DNA
ataataatttaatattattact

SEQ ID NO: 84817 - DNA, 22 bp, synthetic construct
  misc_feature 1..22: note = chemically synthesized
  source 1..22: mol_type = other DNA
aatattattactagctaatatc

SEQ ID NO: 84818 - DNA, 22 bp, synthetic construct
  misc_feature 1..22: note = chemically synthesized
  source 1..22: mol_type = other DNA
atattattactagctaatatca

SEQ ID NO: 84819 - DNA, 22 bp, synthetic construct
  misc_feature 1..22: note = chemically synthesized
  source 1..22: mol_type = other DNA
ttactagctaatatcatgattt

SEQ ID NO: 84820 - DNA, 22 bp, synthetic construct
  misc_feature 1..22: note = chemically synthesized
  source 1..22: mol_type = other DNA
ctagctaatatcatgatttatc

SEQ ID NO: 84821 - DNA, 22 bp, synthetic construct
  misc_feature 1..22: note = chemically synthesized
  source 1..22: mol_type = other DNA
gctaatatcatgatttatctgt

SEQ ID NO: 84822 - DNA, 22 bp, synthetic construct
  misc_feature 1..22: note = chemically synthesized
  source 1..22: mol_type = other DNA
atatcatgatttatctgtttgt

SEQ ID NO: 84823 - DNA, 22 bp, synthetic construct
  misc_feature 1..22: note = chemically synthesized
  source 1..22: mol_type = other DNA
atctgtttgtcctctaaaaaat

SEQ ID NO: 84824 - DNA, 22 bp, synthetic construct
  misc_feature 1..22: note = chemically synthesized
  source 1..22: mol_type = other DNA
tctgtttgtcctctaaaaaatg

SEQ ID NO: 84825 - DNA, 22 bp, synthetic construct
  misc_feature 1..22: note = chemically synthesized
  source 1..22: mol_type = other DNA
tttgtcctctaaaaaatgtatt

SEQ ID NO: 84826 - DNA, 22 bp, synthetic construct
  misc_feature 1..22: note = chemically synthesized
  source 1..22: mol_type = other DNA
gtcctctaaaaaatgtattatc

SEQ ID NO: 84827 - DNA, 22 bp, synthetic construct
  misc_feature 1..22: note = chemically synthesized
  source 1..22: mol_type = other DNA
tcctctaaaaaatgtattatct

SEQ ID NO: 84828 - DNA, 22 bp, synthetic construct
  misc_feature 1..22: note = chemically synthesized
  source 1..22: mol_type = other DNA
taaaaaatgtattatctccagg

SEQ ID NO: 84829 - DNA, 22 bp, synthetic construct
  misc_feature 1..22: note = chemically synthesized
  source 1..22: mol_type = other DNA
aaaaatgtattatctccaggga

SEQ ID NO: 84830 - DNA, 22 bp, synthetic construct
  misc_feature 1..22: note = chemically synthesized
  source 1..22: mol_type = other DNA
tctccagggaaaccaaattgct

SEQ ID NO: 84831 - DNA, 22 bp, synthetic construct
  misc_feature 1..22: note = chemically synthesized
  source 1..22: mol_type = other DNA
cagggaaaccaaattgcttttc

SEQ ID NO: 84832 - DNA, 22 bp, synthetic construct
  misc_feature 1..22: note = chemically synthesized
  source 1..22: mol_type = other DNA
cttttctacaaacatctactaa

SEQ ID NO: 84833 - DNA, 22 bp, synthetic construct
  misc_feature 1..22: note = chemically synthesized
  source 1..22: mol_type = other DNA
ttctacaaacatctactaaatc

SEQ ID NO: 84834 - DNA, 22 bp, synthetic construct
  misc_feature 1..22: note = chemically synthesized
  source 1..22: mol_type = other DNA
tctacaaacatctactaaatca

SEQ ID NO: 84835 - DNA, 22 bp, synthetic construct
  misc_feature 1..22: note = chemically synthesized
  source 1..22: mol_type = other DNA
ctacaaacatctactaaatcac

SEQ ID NO: 84836 - DNA, 22 bp, synthetic construct
  misc_feature 1..22: note = chemically synthesized
  source 1..22: mol_type = other DNA
tacaaacatctactaaatcaca

SEQ ID NO: 84837 - DNA, 22 bp, synthetic construct
  misc_feature 1..22: note = chemically synthesized
  source 1..22: mol_type = other DNA
caaacatctactaaatcacaca

SEQ ID NO: 84838 - DNA, 22 bp, synthetic construct
  misc_feature 1..22: note = chemically synthesized
  source 1..22: mol_type = other DNA
ctaaatcacacaaacctttgtt

SEQ ID NO: 84839 - DNA, 22 bp, synthetic construct
  misc_feature 1..22: note = chemically synthesized
  source 1..22: mol_type = other DNA
aatcacacaaacctttgttgaa

SEQ ID NO: 84840 - DNA, 22 bp, synthetic construct
  misc_feature 1..22: note = chemically synthesized
  source 1..22: mol_type = other DNA
tgttgaaaaaactctttgatgg

SEQ ID NO: 84841 - DNA, 22 bp, synthetic construct
  misc_feature 1..22: note = chemically synthesized
  source 1..22: mol_type = other DNA
gttgaaaaaactctttgatggt

SEQ ID NO: 84842 - DNA, 22 bp, synthetic construct
  misc_feature 1..22: note = chemically synthesized
  source 1..22: mol_type = other DNA
ttgaaaaaactctttgatggtc

SEQ ID NO: 84843 - DNA, 22 bp, synthetic construct
  misc_feature 1..22: note = chemically synthesized
  source 1..22: mol_type = other DNA
aaaaaactctttgatggtcact

SEQ ID NO: 84844 - DNA, 22 bp, synthetic construct
  misc_feature 1..22: note = chemically synthesized
  source 1..22: mol_type = other DNA
tttgatggtcacttacccattg

SEQ ID NO: 84845 - DNA, 22 bp, synthetic construct
  misc_feature 1..22: note = chemically synthesized
  source 1..22: mol_type = other DNA
tgatggtcacttacccattgct

SEQ ID NO: 84846 - DNA, 22 bp, synthetic construct
  misc_feature 1..22: note = chemically synthesized
  source 1..22: mol_type = other DNA
gatggtcacttacccattgctc

SEQ ID NO: 84847 - DNA, 22 bp, synthetic construct
  misc_feature 1..22: note = chemically synthesized
  source 1..22: mol_type = other DNA
atggtcacttacccattgctcg

SEQ ID NO: 84848 - DNA, 22 bp, synthetic construct
  misc_feature 1..22: note = chemically synthesized
  source 1..22: mol_type = other DNA
acccattgctcgtaatgtaaaa

SEQ ID NO: 84849 - DNA, 22 bp, synthetic construct
  misc_feature 1..22: note = chemically synthesized
  source 1..22: mol_type = other DNA
cccattgctcgtaatgtaaaat

SEQ ID NO: 84850 - DNA, 22 bp, synthetic construct
  misc_feature 1..22: note = chemically synthesized
  source 1..22: mol_type = other DNA
ctcgtaatgtaaaatacaaatt

SEQ ID NO: 84851 - DNA, 22 bp, synthetic construct
  misc_feature 1..22: note = chemically synthesized
  source 1..22: mol_type = other DNA
gtaatgtaaaatacaaattctt

SEQ ID NO: 84852 - DNA, 22 bp, synthetic construct
  misc_feature 1..22: note = chemically synthesized
  source 1..22: mol_type = other DNA
tttatcatagtcaaaaagcctt

SEQ ID NO: 84853 - DNA, 22 bp, synthetic construct
  misc_feature 1..22: note = chemically synthesized
  source 1..22: mol_type = other DNA
tatcatagtcaaaaagccttgt

SEQ ID NO: 84854 - DNA, 22 bp, synthetic construct
  misc_feature 1..22: note = chemically synthesized
  source 1..22: mol_type = other DNA
atcatagtcaaaaagccttgta

SEQ ID NO: 84855 - DNA, 22 bp, synthetic construct
  misc_feature 1..22: note = chemically synthesized
  source 1..22: mol_type = other DNA
tcatagtcaaaaagccttgtat

SEQ ID NO: 84856 - DNA, 22 bp, synthetic construct
  misc_feature 1..22: note = chemically synthesized
  source 1..22: mol_type = other DNA
gtataacgtggctcacctgcct

SEQ ID NO: 84857 - DNA, 22 bp, synthetic construct
  misc_feature 1..22: note = chemically synthesized
  source 1..22: mol_type = other DNA
tataacgtggctcacctgcctc

SEQ ID NO: 84858 - DNA, 22 bp, synthetic construct
  misc_feature 1..22: note = chemically synthesized
  source 1..22: mol_type = other DNA
acctgcctcttctattacatct

SEQ ID NO: 84859 - DNA, 22 bp, synthetic construct
  misc_feature 1..22: note = chemically synthesized
  source 1..22: mol_type = other DNA
cctcttctattacatctttaga

SEQ ID NO: 84860 - DNA, 22 bp, synthetic construct
  misc_feature 1..22: note = chemically synthesized
  source 1..22: mol_type = other DNA
ttctattacatctttagaccac

SEQ ID NO: 84861 - DNA, 22 bp, synthetic construct
  misc_feature 1..22: note = chemically synthesized
  source 1..22: mol_type = other DNA
ctattacatctttagaccacta

SEQ ID NO: 84862 - DNA, 22 bp, synthetic construct
  misc_feature 1..22: note = chemically synthesized
  source 1..22: mol_type = other DNA
tattacatctttagaccactac

SEQ ID NO: 84863 - DNA, 22 bp, synthetic construct
  misc_feature 1..22: note = chemically synthesized
  source 1..22: mol_type = other DNA
ttacatctttagaccactactg

SEQ ID NO: 84864 - DNA, 22 bp, synthetic construct
  misc_feature 1..22: note = chemically synthesized
  source 1..22: mol_type = other DNA
catctttagaccactactgcct

SEQ ID NO: 84865 - DNA, 22 bp, synthetic construct
  misc_feature 1..22: note = chemically synthesized
  source 1..22: mol_type = other DNA
tagaccactactgcctacactc

SEQ ID NO: 84866 - DNA, 22 bp, synthetic construct
  misc_feature 1..22: note = chemically synthesized
  source 1..22: mol_type = other DNA
agaccactactgcctacactcc

SEQ ID NO: 84867 - DNA, 22 bp, synthetic construct
  misc_feature 1..22: note = chemically synthesized
  source 1..22: mol_type = other DNA
gaccactactgcctacactcct

SEQ ID NO: 84868 - DNA, 22 bp, synthetic construct
  misc_feature 1..22: note = chemically synthesized
  source 1..22: mol_type = other DNA
ctgcctacactccttaatattt

SEQ ID NO: 84869 - DNA, 22 bp, synthetic construct
  misc_feature 1..22: note = chemically synthesized
  source 1..22: mol_type = other DNA
cctacactccttaatatttagg

SEQ ID NO: 84870 - DNA, 22 bp, synthetic construct
  misc_feature 1..22: note = chemically synthesized
  source 1..22: mol_type = other DNA
cactccttaatatttaggtatc

SEQ ID NO: 84871 - DNA, 22 bp, synthetic construct
  misc_feature 1..22: note = chemically synthesized
  source 1..22: mol_type = other DNA
cttaatatttaggtatctttat

SEQ ID NO: 84872 - DNA, 22 bp, synthetic construct
  misc_feature 1..22: note = chemically synthesized
  source 1..22: mol_type = other DNA
aatatttaggtatctttatctt

SEQ ID NO: 84873 - DNA, 22 bp, synthetic construct
  misc_feature 1..22: note = chemically synthesized
  source 1..22: mol_type = other DNA
atatttaggtatctttatcttc

SEQ ID NO: 84874 - DNA, 22 bp, synthetic construct
  misc_feature 1..22: note = chemically synthesized
  source 1..22: mol_type = other DNA
aggtatctttatcttcctcaaa

SEQ ID NO: 84875 - DNA, 22 bp, synthetic construct
  misc_feature 1..22: note = chemically synthesized
  source 1..22: mol_type = other DNA
ggtatctttatcttcctcaaaa

SEQ ID NO: 84876 - DNA, 22 bp, synthetic construct
  misc_feature 1..22: note = chemically synthesized
  source 1..22: mol_type = other DNA
tatcttcctcaaaacaagctaa

SEQ ID NO: 84877 - DNA, 22 bp, synthetic construct
  misc_feature 1..22: note = chemically synthesized
  source 1..22: mol_type = other DNA
atcttcctcaaaacaagctaag

SEQ ID NO: 84878 - DNA, 22 bp, synthetic construct
  misc_feature 1..22: note = chemically synthesized
  source 1..22: mol_type = other DNA
tcttcctcaaaacaagctaagt

SEQ ID NO: 84879 - DNA, 22 bp, synthetic construct
  misc_feature 1..22: note = chemically synthesized
  source 1..22: mol_type = other DNA
cctcaaaacaagctaagtacat

SEQ ID NO: 84880 - DNA, 22 bp, synthetic construct
  misc_feature 1..22: note = chemically synthesized
  source 1..22: mol_type = other DNA
ctcaaaacaagctaagtacatg

SEQ ID NO: 84881 - DNA, 22 bp, synthetic construct
  misc_feature 1..22: note = chemically synthesized
  source 1..22: mol_type = other DNA
aaaacaagctaagtacatgcat

SEQ ID NO: 84882 - DNA, 22 bp, synthetic construct
  misc_feature 1..22: note = chemically synthesized
  source 1..22: mol_type = other DNA
agtacatgcatgtctcaggatc

SEQ ID NO: 84883 - DNA, 22 bp, synthetic construct
  misc_feature 1..22: note = chemically synthesized
  source 1..22: mol_type = other DNA
aggatctttgcccatggtcttc

SEQ ID NO: 84884 - DNA, 22 bp, synthetic construct
  misc_feature 1..22: note = chemically synthesized
  source 1..22: mol_type = other DNA
tgcccatggtcttctctgtgct

SEQ ID NO: 84885 - DNA, 22 bp, synthetic construct
  misc_feature 1..22: note = chemically synthesized
  source 1..22: mol_type = other DNA
gcccatggtcttctctgtgctc

SEQ ID NO: 84886 - DNA, 22 bp, synthetic construct
  misc_feature 1..22: note = chemically synthesized
  source 1..22: mol_type = other DNA
cccatggtcttctctgtgctcc

SEQ ID NO: 84887 - DNA, 22 bp, synthetic construct
  misc_feature 1..22: note = chemically synthesized
  source 1..22: mol_type = other DNA
ctctgtgctccgaattatctac

SEQ ID NO: 84888 - DNA, 22 bp, synthetic construct
  misc_feature 1..22: note = chemically synthesized
  source 1..22: mol_type = other DNA
tctgtgctccgaattatctacc

SEQ ID NO: 84889 - DNA, 22 bp, synthetic construct
  misc_feature 1..22: note = chemically synthesized
  source 1..22: mol_type = other DNA
tgtgctccgaattatctacccc

SEQ ID NO: 84890 - DNA, 22 bp, synthetic construct
  misc_feature 1..22: note = chemically synthesized
  source 1..22: mol_type = other DNA
tgctccgaattatctaccccaa

SEQ ID NO: 84891 - DNA, 22 bp, synthetic construct
  misc_feature 1..22: note = chemically synthesized
  source 1..22: mol_type = other DNA
cgaattatctaccccaagtatt

SEQ ID NO: 84892 - DNA, 22 bp, synthetic construct
  misc_feature 1..22: note = chemically synthesized
  source 1..22: mol_type = other DNA
tctaccccaagtatttgcacag

SEQ ID NO: 84893 - DNA, 22 bp, synthetic construct
  misc_feature 1..22: note = chemically synthesized
  source 1..22: mol_type = other DNA
ccccaagtatttgcacagcaat

SEQ ID NO: 84894 - DNA, 22 bp, synthetic construct
  misc_feature 1..22: note = chemically synthesized
  source 1..22: mol_type = other DNA
gcacagcaattcctttcaccat

SEQ ID NO: 84895 - DNA, 22 bp, synthetic construct
  misc_feature 1..22: note = chemically synthesized
  source 1..22: mol_type = other DNA
cacagcaattcctttcaccatt

SEQ ID NO: 84896 - DNA, 22 bp, synthetic construct
  misc_feature 1..22: note = chemically synthesized
  source 1..22: mol_type = other DNA
ctttcaccattaacttttgagt

SEQ ID NO: 84897 - DNA, 22 bp, synthetic construct
  misc_feature 1..22: note = chemically synthesized
  source 1..22: mol_type = other DNA
tcaccattaacttttgagttaa

SEQ ID NO: 84898 - DNA, 22 bp, synthetic construct
  misc_feature 1..22: note = chemically synthesized
  source 1..22: mol_type = other DNA
caccattaacttttgagttaaa

SEQ ID NO: 84899 - DNA, 22 bp, synthetic construct
  misc_feature 1..22: note = chemically synthesized
  source 1..22: mol_type = other DNA
accattaacttttgagttaaaa

SEQ ID NO: 84900 - DNA, 22 bp, synthetic construct
  misc_feature 1..22: note = chemically synthesized
  source 1..22: mol_type = other DNA
acttttgagttaaaatgattac

SEQ ID NO: 84901 - DNA, 22 bp, synthetic construct
  misc_feature 1..22: note = chemically synthesized
  source 1..22: mol_type = other DNA
ttgagttaaaatgattacttcc

SEQ ID NO: 84902 - DNA, 22 bp, synthetic construct
  misc_feature 1..22: note = chemically synthesized
  source 1..22: mol_type = other DNA
tgagttaaaatgattacttcct

SEQ ID NO: 84903 - DNA, 22 bp, synthetic construct
  misc_feature 1..22: note = chemically synthesized
  source 1..22: mol_type = other DNA
gagttaaaatgattacttcctc

SEQ ID NO: 84904 - DNA, 22 bp, synthetic construct
  misc_feature 1..22: note = chemically synthesized
  source 1..22: mol_type = other DNA
agttaaaatgattacttcctca

SEQ ID NO: 84905 - DNA, 22 bp, synthetic construct
  misc_feature 1..22: note = chemically synthesized
  source 1..22: mol_type = other DNA
aaatgattacttcctcaggggg

SEQ ID NO: 84906 - DNA, 22 bp, synthetic construct
  misc_feature 1..22: note = chemically synthesized
  source 1..22: mol_type = other DNA
cttcctcagggggatttttcta

SEQ ID NO: 84907 - DNA, 22 bp, synthetic construct
  misc_feature 1..22: note = chemically synthesized
  source 1..22: mol_type = other DNA
cctcagggggatttttctaata

SEQ ID NO: 84908 - DNA, 22 bp, synthetic construct
  misc_feature 1..22: note = chemically synthesized
  source 1..22: mol_type = other DNA
ctcagggggatttttctaatac

SEQ ID NO: 84909 - DNA, 22 bp, synthetic construct
  misc_feature 1..22: note = chemically synthesized
  source 1..22: mol_type = other DNA
agggggatttttctaatactgc

SEQ ID NO: 84910 - DNA, 22 bp, synthetic construct
  misc_feature 1..22: note = chemically synthesized
  source 1..22: mol_type = other DNA
ttctaatactgctccccaccta

SEQ ID NO: 84911 - DNA, 22 bp, synthetic construct
  misc_feature 1..22: note = chemically synthesized
  source 1..22: mol_type = other DNA
tctaatactgctccccacctag

SEQ ID NO: 84912 - DNA, 22 bp, synthetic construct
  misc_feature 1..22: note = chemically synthesized
  source 1..22: mol_type = other DNA
ctaatactgctccccacctaga

SEQ ID NO: 84913 - DNA, 22 bp, synthetic construct
  misc_feature 1..22: note = chemically synthesized
  source 1..22: mol_type = other DNA
taatactgctccccacctagat

SEQ ID NO: 84914 - DNA, 22 bp, synthetic construct
  misc_feature 1..22: note = chemically synthesized
  source 1..22: mol_type = other DNA
atactgctccccacctagatta

SEQ ID NO: 84915 - DNA, 22 bp, synthetic construct
  misc_feature 1..22: note = chemically synthesized
  source 1..22: mol_type = other DNA
ctccccacctagattatctcat

SEQ ID NO: 84916 - DNA, 22 bp, synthetic construct
  misc_feature 1..22: note = chemically synthesized
  source 1..22: mol_type = other DNA
cccacctagattatctcatttc

SEQ ID NO: 84917 - DNA, 22 bp, synthetic construct
  misc_feature 1..22: note = chemically synthesized
  source 1..22: mol_type = other DNA
gattatctcatttcttcaaccc

SEQ ID NO: 84918 - DNA, 22 bp, synthetic construct
  misc_feature 1..22: note = chemically synthesized
  source 1..22: mol_type = other DNA
tctcatttcttcaaccccctta

SEQ ID NO: 84919 - DNA, 22 bp, synthetic construct
  misc_feature 1..22: note = chemically synthesized
  source 1..22: mol_type = other DNA
atttcttcaacccccttaacta

SEQ ID NO: 84920 - DNA, 22 bp, synthetic construct
  misc_feature 1..22: note = chemically synthesized
  source 1..22: mol_type = other DNA
cttcaacccccttaactaactt

SEQ ID NO: 84921 - DNA, 22 bp, synthetic construct
  misc_feature 1..22: note = chemically synthesized
  source 1..22: mol_type = other DNA
ttcaacccccttaactaactta

SEQ ID NO: 84922 - DNA, 22 bp, synthetic construct
  misc_feature 1..22: note = chemically synthesized
  source 1..22: mol_type = other DNA
caacccccttaactaacttact

SEQ ID NO: 84923 - DNA, 22 bp, synthetic construct
  misc_feature 1..22: note = chemically synthesized
  source 1..22: mol_type = other DNA
aacccccttaactaacttactc

SEQ ID NO: 84924 - DNA, 22 bp, synthetic construct
  misc_feature 1..22: note = chemically synthesized
  source 1..22: mol_type = other DNA
aactaacttactctcatcacag

SEQ ID NO: 84925 - DNA, 22 bp, synthetic construct
  misc_feature 1..22: note = chemically synthesized
  source 1..22: mol_type = other DNA
actaacttactctcatcacagt

SEQ ID NO: 84926 - DNA, 22 bp, synthetic construct
  misc_feature 1..22: note = chemically synthesized
  source 1..22: mol_type = other DNA
acttactctcatcacagtatac

SEQ ID NO: 84927 - DNA, 22 bp, synthetic construct
  misc_feature 1..22: note = chemically synthesized
  source 1..22: mol_type = other DNA
actctcatcacagtatactagt

SEQ ID NO: 84928 - DNA, 22 bp, synthetic construct
  misc_feature 1..22: note = chemically synthesized
  source 1..22: mol_type = other DNA
ctctcatcacagtatactagtt

SEQ ID NO: 84929 - DNA, 22 bp, synthetic construct
  misc_feature 1..22: note = chemically synthesized
  source 1..22: mol_type = other DNA
tcatcacagtatactagtttat

SEQ ID NO: 84930 - DNA, 22 bp, synthetic construct
  misc_feature 1..22: note = chemically synthesized
  source 1..22: mol_type = other DNA
atcacagtatactagtttatat

SEQ ID NO: 84931 - DNA, 22 bp, synthetic construct
  misc_feature 1..22: note = chemically synthesized
  source 1..22: mol_type = other DNA
gtttatatttataccacttatt

SEQ ID NO: 84932 - DNA, 22 bp, synthetic construct
  misc_feature 1..22: note = chemically synthesized
  source 1..22: mol_type = other DNA
atatttataccacttattatac

SEQ ID NO: 84933 - DNA, 22 bp, synthetic construct
  misc_feature 1..22: note = chemically synthesized
  source 1..22: mol_type = other DNA
tatttataccacttattataca

SEQ ID NO: 84934 - DNA, 22 bp, synthetic construct
  misc_feature 1..22: note = chemically synthesized
  source 1..22: mol_type = other DNA
ataccacttattatacactgaa

SEQ ID NO: 84935 - DNA, 22 bp, synthetic construct
  misc_feature 1..22: note = chemically synthesized
  source 1..22: mol_type = other DNA
taccacttattatacactgaat

SEQ ID NO: 84936 - DNA, 22 bp, synthetic construct
  misc_feature 1..22: note = chemically synthesized
  source 1..22: mol_type = other DNA
attatacactgaatttccatta

SEQ ID NO: 84937 - DNA, 22 bp, synthetic construct
  misc_feature 1..22: note = chemically synthesized
  source 1..22: mol_type = other DNA
ttatacactgaatttccattag

SEQ ID NO: 84938 - DNA, 22 bp, synthetic construct
  misc_feature 1..22: note = chemically synthesized
  source 1..22: mol_type = other DNA
tacactgaatttccattagatt

SEQ ID NO: 84939 - DNA, 22 bp, synthetic construct
  misc_feature 1..22: note = chemically synthesized
  source 1..22: mol_type = other DNA
aatttccattagattcattaga

SEQ ID NO: 84940 - DNA, 22 bp, synthetic construct
  misc_feature 1..22: note = chemically synthesized
  source 1..22: mol_type = other DNA
ccattagattcattagaggctg

SEQ ID NO: 84941 - DNA, 22 bp, synthetic construct
  misc_feature 1..22: note = chemically synthesized
  source 1..22: mol_type = other DNA
cattagattcattagaggctgt

SEQ ID NO: 84942 - DNA, 22 bp, synthetic construct
  misc_feature 1..22: note = chemically synthesized
  source 1..22: mol_type = other DNA
gattcattagaggctgtagaag

SEQ ID NO: 84943 - DNA, 22 bp, synthetic construct
  misc_feature 1..22: note = chemically synthesized
  source 1..22: mol_type = other DNA
attagaggctgtagaagattag

SEQ ID NO: 84944 - DNA, 22 bp, synthetic construct
  misc_feature 1..22: note = chemically synthesized
  source 1..22: mol_type = other DNA
gaggctgtagaagattaggaac

SEQ ID NO: 84945 - DNA, 22 bp, synthetic construct
  misc_feature 1..22: note = chemically synthesized
  source 1..22: mol_type = other DNA
tagaagattaggaaccatatct

SEQ ID NO: 84946 - DNA, 22 bp, synthetic construct
  misc_feature 1..22: note = chemically synthesized
  source 1..22: mol_type = other DNA
ggaaccatatctgttttttgct

SEQ ID NO: 84947 - DNA, 22 bp, synthetic construct
  misc_feature 1..22: note = chemically synthesized
  source 1..22: mol_type = other DNA
ttttttgctcaagaatatgaaa

SEQ ID NO: 84948 - DNA, 22 bp, synthetic construct
  misc_feature 1..22: note = chemically synthesized
  source 1..22: mol_type = other DNA
tttgctcaagaatatgaaaaat

SEQ ID NO: 84949 - DNA, 22 bp, synthetic construct
  misc_feature 1..22: note = chemically synthesized
  source 1..22: mol_type = other DNA
ttgctcaagaatatgaaaaata

SEQ ID NO: 84950 - DNA, 22 bp, synthetic construct
  misc_feature 1..22: note = chemically synthesized
  source 1..22: mol_type = other DNA
tgctcaagaatatgaaaaataa

SEQ ID NO: 84951 - DNA, 22 bp, synthetic construct
  misc_feature 1..22: note = chemically synthesized
  source 1..22: mol_type = other DNA
gctcaagaatatgaaaaataag

SEQ ID NO: 84952 - DNA, 22 bp, synthetic construct
  misc_feature 1..22: note = chemically synthesized
  source 1..22: mol_type = other DNA
ctcaagaatatgaaaaataagg

SEQ ID NO: 84953 - DNA, 22 bp, synthetic construct
  misc_feature 1..22: note = chemically synthesized
  source 1..22: mol_type = other DNA
aagaatatgaaaaataagggtt

SEQ ID NO: 84954 - DNA, 22 bp, synthetic construct
  misc_feature 1..22: note = chemically synthesized
  source 1..22: mol_type = other DNA
gcatagaatgggcacttatcaa

SEQ ID NO: 84955 - DNA, 22 bp, synthetic construct
  misc_feature 1..22: note = chemically synthesized
  source 1..22: mol_type = other DNA
atcaaataatttttaattaatt

SEQ ID NO: 84956 - DNA, 22 bp, synthetic construct
  misc_feature 1..22: note = chemically synthesized
  source 1..22: mol_type = other DNA
tcaaataatttttaattaatta

SEQ ID NO: 84957 - DNA, 22 bp, synthetic construct
  misc_feature 1..22: note = chemically synthesized
  source 1..22: mol_type = other DNA
ttaattaattattctatgaaat

SEQ ID NO: 84958 - DNA, 22 bp, synthetic construct
  misc_feature 1..22: note = chemically synthesized
  source 1..22: mol_type = other DNA
taattaattattctatgaaata

SEQ ID NO: 84959 - DNA, 22 bp, synthetic construct
  misc_feature 1..22: note = chemically synthesized
  source 1..22: mol_type = other DNA
aattaattattctatgaaataa

SEQ ID NO: 84960 - DNA, 22 bp, synthetic construct
  misc_feature 1..22: note = chemically synthesized
  source 1..22: mol_type = other DNA
attaattattctatgaaataag

SEQ ID NO: 84961 - DNA, 22 bp, synthetic construct
  misc_feature 1..22: note = chemically synthesized
  source 1..22: mol_type = other DNA
attattctatgaaataagagct

SEQ ID NO: 84962 - DNA, 22 bp, synthetic construct
  misc_feature 1..22: note = chemically synthesized
  source 1..22: mol_type = other DNA
ttctatgaaataagagctagac

SEQ ID NO: 84963 - DNA, 22 bp, synthetic construct
  misc_feature 1..22: note = chemically synthesized
  source 1..22: mol_type = other DNA
tatgaaataagagctagacaat

SEQ ID NO: 84964 - DNA, 22 bp, synthetic construct
  misc_feature 1..22: note = chemically synthesized
  source 1..22: mol_type = other DNA
tgaaataagagctagacaatca

SEQ ID NO: 84965 - DNA, 22 bp, synthetic construct
  misc_feature 1..22: note = chemically synthesized
  source 1..22: mol_type = other DNA
gacaatcacagagatataaaga

SEQ ID NO: 84966 - DNA, 22 bp, synthetic construct
  misc_feature 1..22: note = chemically synthesized
  source 1..22: mol_type = other DNA
ctatcaaagtgtgtgtaaaatc

SEQ ID NO: 84967 - DNA, 22 bp, synthetic construct
  misc_feature 1..22: note = chemically synthesized
  source 1..22: mol_type = other DNA
tcaaagtgtgtgtaaaatcatc

SEQ ID NO: 84968 - DNA, 22 bp, synthetic construct
  misc_feature 1..22: note = chemically synthesized
  source 1..22: mol_type = other DNA
tgtacacttagtcttttctgac

SEQ ID NO: 84969 - DNA, 22 bp, synthetic construct
  misc_feature 1..22: note = chemically synthesized
  source 1..22: mol_type = other DNA
agtcttttctgacctttggcca

SEQ ID NO: 84970 - DNA, 22 bp, synthetic construct
  misc_feature 1..22: note = chemically synthesized
  source 1..22: mol_type = other DNA
gtcttttctgacctttggccac

SEQ ID NO: 84971 - DNA, 22 bp, synthetic construct
  misc_feature 1..22: note = chemically synthesized
  source 1..22: mol_type = other DNA
ttctgacctttggccaccaatt

SEQ ID NO: 84972 - DNA, 22 bp, synthetic construct
  misc_feature 1..22: note = chemically synthesized
  source 1..22: mol_type = other DNA
tctgacctttggccaccaattg

SEQ ID NO: 84973 - DNA, 22 bp, synthetic construct
  misc_feature 1..22: note = chemically synthesized
  source 1..22: mol_type = other DNA
ctgacctttggccaccaattga

SEQ ID NO: 84974 - DNA, 22 bp, synthetic construct
  misc_feature 1..22: note = chemically synthesized
  source 1..22: mol_type = other DNA
tgacctttggccaccaattgag

SEQ ID NO: 84975 - DNA, 22 bp, synthetic construct
  misc_feature 1..22: note = chemically synthesized
  source 1..22: mol_type = other DNA
acctttggccaccaattgagtc

SEQ ID NO: 84976 - DNA, 22 bp, synthetic construct
  misc_feature 1..22: note = chemically synthesized
  source 1..22: mol_type = other DNA
tggccaccaattgagtcatcat

SEQ ID NO: 84977 - DNA, 22 bp, synthetic construct
  misc_feature 1..22: note = chemically synthesized
  source 1..22: mol_type = other DNA
ggccaccaattgagtcatcata

SEQ ID NO: 84978 - DNA, 22 bp, synthetic construct
  misc_feature 1..22: note = chemically synthesized
  source 1..22: mol_type = other DNA
gccaccaattgagtcatcatat

SEQ ID NO: 84979 - DNA, 22 bp, synthetic construct
  misc_feature 1..22: note = chemically synthesized
  source 1..22: mol_type = other DNA
agtcatcatataccaagtttga

SEQ ID NO: 84980 - DNA, 22 bp, synthetic construct
  misc_feature 1..22: note = chemically synthesized
  source 1..22: mol_type = other DNA
gaatggtttataaaacagatgc

SEQ ID NO: 84981 - DNA, 22 bp, synthetic construct
  misc_feature 1..22: note = chemically synthesized
  source 1..22: mol_type = other DNA
aatggtttataaaacagatgct

SEQ ID NO: 84982 - DNA, 22 bp, synthetic construct
  misc_feature 1..22: note = chemically synthesized
  source 1..22: mol_type = other DNA
ataaaacagatgctgctccagg

SEQ ID NO: 84983 - DNA, 22 bp, synthetic construct
  misc_feature 1..22: note = chemically synthesized
  source 1..22: mol_type = other DNA
taaaacagatgctgctccaggg

SEQ ID NO: 84984 - DNA, 22 bp, synthetic construct
  misc_feature 1..22: note = chemically synthesized
  source 1..22: mol_type = other DNA
ctccagggatcttgctgacctt

SEQ ID NO: 84985 - DNA, 22 bp, synthetic construct
  misc_feature 1..22: note = chemically synthesized
  source 1..22: mol_type = other DNA
cagggatcttgctgaccttgaa

SEQ ID NO: 84986 - DNA, 22 bp, synthetic construct
  misc_feature 1..22: note = chemically synthesized
  source 1..22: mol_type = other DNA
gctgaccttgaatacaacactc

SEQ ID NO: 84987 - DNA, 22 bp, synthetic construct
  misc_feature 1..22: note = chemically synthesized
  source 1..22: mol_type = other DNA
ctgaccttgaatacaacactcc

SEQ ID NO: 84988 - DNA, 22 bp, synthetic construct
  misc_feature 1..22: note = chemically synthesized
  source 1..22: mol_type = other DNA
accttgaatacaacactccaat

SEQ ID NO: 84989 - DNA, 22 bp, synthetic construct
  misc_feature 1..22: note = chemically synthesized
  source 1..22: mol_type = other DNA
gaatacaacactccaatttcaa

SEQ ID NO: 84990 - DNA, 22 bp, synthetic construct
  misc_feature 1..22: note = chemically synthesized
  source 1..22: mol_type = other DNA
aatacaacactccaatttcaaa

SEQ ID NO: 84991 - DNA, 22 bp, synthetic construct
  misc_feature 1..22: note = chemically synthesized
  source 1..22: mol_type = other DNA
caatttcaaacatgatttctct

SEQ ID NO: 84992 - DNA, 22 bp, synthetic construct
  misc_feature 1..22: note = chemically synthesized
  source 1..22: mol_type = other DNA
caaacatgatttctctcatttc

SEQ ID NO: 84993 - DNA, 22 bp, synthetic construct
  misc_feature 1..22: note = chemically synthesized
  source 1..22: mol_type = other DNA
aaacatgatttctctcatttcc

SEQ ID NO: 84994 - DNA, 22 bp, synthetic construct
  misc_feature 1..22: note = chemically synthesized
  source 1..22: mol_type = other DNA
ctctcatttccagcctgactca

SEQ ID NO: 84995 - DNA, 22 bp, synthetic construct
  misc_feature 1..22: note = chemically synthesized
  source 1..22: mol_type = other DNA
tctcatttccagcctgactcag

SEQ ID NO: 84996 - DNA, 22 bp, synthetic construct
  misc_feature 1..22: note = chemically synthesized
  source 1..22: mol_type = other DNA
tcatttccagcctgactcagac

SEQ ID NO: 84997 - DNA, 22 bp, synthetic construct
  misc_feature 1..22: note = chemically synthesized
  source 1..22: mol_type = other DNA
atttccagcctgactcagacat

SEQ ID NO: 84998 - DNA, 22 bp, synthetic construct
  misc_feature 1..22: note = chemically synthesized
  source 1..22: mol_type = other DNA
ccagcctgactcagacatatcg

SEQ ID NO: 84999 - DNA, 22 bp, synthetic construct
  misc_feature 1..22: note = chemically synthesized
  source 1..22: mol_type = other DNA
cagcctgactcagacatatcgt

SEQ ID NO: 85000 - DNA, 22 bp, synthetic construct
  misc_feature 1..22: note = chemically synthesized
  source 1..22: mol_type = other DNA
actcagacatatcgtcaaggat

SEQ ID NO: 85001 - DNA, 22 bp, synthetic construct
  misc_feature 1..22: note = chemically synthesized
  source 1..22: mol_type = other DNA
agacatatcgtcaaggatctgg

SEQ ID NO: 85002 - DNA, 22 bp, synthetic construct
  misc_feature 1..22: note = chemically synthesized
  source 1..22: mol_type = other DNA
ggattgatcacaaaagatttaa

SEQ ID NO: 85003 - DNA, 22 bp, synthetic construct
  misc_feature 1..22: note = chemically synthesized
  source 1..22: mol_type = other DNA
atcacaaaagatttaatattct

SEQ ID NO: 85004 - DNA, 22 bp, synthetic construct
  misc_feature 1..22: note = chemically synthesized
  source 1..22: mol_type = other DNA
aatattctgtgaatgtaggtat

SEQ ID NO: 85005 - DNA, 22 bp, synthetic construct
  misc_feature 1..22: note = chemically synthesized
  source 1..22: mol_type = other DNA
atattctgtgaatgtaggtatg

SEQ ID NO: 85006 - DNA, 22 bp, synthetic construct
  misc_feature 1..22: note = chemically synthesized
  source 1..22: mol_type = other DNA
tgtgaatgtaggtatgtgttaa

SEQ ID NO: 85007 - DNA, 22 bp, synthetic construct
  misc_feature 1..22: note = chemically synthesized
  source 1..22: mol_type = other DNA
tgaatgtaggtatgtgttaaaa

SEQ ID NO: 85008 - DNA, 22 bp, synthetic construct
  misc_feature 1..22: note = chemically synthesized
  source 1..22: mol_type = other DNA
aaagtatctactttcagccagg

SEQ ID NO: 85009 - DNA, 22 bp, synthetic construct
  misc_feature 1..22: note = chemically synthesized
  source 1..22: mol_type = other DNA
ctttcagccaggcttggtggct

SEQ ID NO: 85010 - DNA, 22 bp, synthetic construct
  misc_feature 1..22: note = chemically synthesized
  source 1..22: mol_type = other DNA
tcagccaggcttggtggctcac

SEQ ID NO: 85011 - DNA, 22 bp, synthetic construct
  misc_feature 1..22: note = chemically synthesized
  source 1..22: mol_type = other DNA
cagccaggcttggtggctcacg

SEQ ID NO: 85012 - DNA, 22 bp, synthetic construct
  misc_feature 1..22: note = chemically synthesized
  source 1..22: mol_type = other DNA
agccaggcttggtggctcacgc

SEQ ID NO: 85013 - DNA, 22 bp, synthetic construct
  misc_feature 1..22: note = chemically synthesized
  source 1..22: mol_type = other DNA
ggtggctcacgcctgtaatcct

SEQ ID NO: 85014 - DNA, 22 bp, synthetic construct
  misc_feature 1..22: note = chemically synthesized
  source 1..22: mol_type = other DNA
gtggctcacgcctgtaatccta

SEQ ID NO: 85015 - DNA, 22 bp, synthetic construct
  misc_feature 1..22: note = chemically synthesized
  source 1..22: mol_type = other DNA
acgcctgtaatcctagcacttt

SEQ ID NO: 85016 - DNA, 22 bp, synthetic construct
  misc_feature 1..22: note = chemically synthesized
  source 1..22: mol_type = other DNA
taatcctagcactttgggaggc

SEQ ID NO: 85017 - DNA, 22 bp, synthetic construct
  misc_feature 1..22: note = chemically synthesized
  source 1..22: mol_type = other DNA
gcactttgggaggccgaggcag

SEQ ID NO: 85018 - DNA, 22 bp, synthetic construct
  misc_feature 1..22: note = chemically synthesized
  source 1..22: mol_type = other DNA
tgggaggccgaggcaggtggat

SEQ ID NO: 85019 - DNA, 22 bp, synthetic construct
  misc_feature 1..22: note = chemically synthesized
  source 1..22: mol_type = other DNA
gggaggccgaggcaggtggatt

SEQ ID NO: 85020 - DNA, 22 bp, synthetic construct
  misc_feature 1..22: note = chemically synthesized
  source 1..22: mol_type = other DNA
ggaggccgaggcaggtggattg

SEQ ID NO: 85021 - DNA, 22 bp, synthetic construct
  misc_feature 1..22: note = chemically synthesized
  source 1..22: mol_type = other DNA
gctgagctcaggagttggagac

SEQ ID NO: 85022 - DNA, 22 bp, synthetic construct
  misc_feature 1..22: note = chemically synthesized
  source 1..22: mol_type = other DNA
agctcaggagttggagaccaac

SEQ ID NO: 85023 - DNA, 22 bp, synthetic construct
  misc_feature 1..22: note = chemically synthesized
  source 1..22: mol_type = other DNA
aggagttggagaccaacctggg

SEQ ID NO: 85024 - DNA, 22 bp, synthetic construct
  misc_feature 1..22: note = chemically synthesized
  source 1..22: mol_type = other DNA
gagaccaacctgggcaaaatgg

SEQ ID NO: 85025 - DNA, 22 bp, synthetic construct
  misc_feature 1..22: note = chemically synthesized
  source 1..22: mol_type = other DNA
ggcaaaatggtgaaaccctgtc

SEQ ID NO: 85026 - DNA, 22 bp, synthetic construct
  misc_feature 1..22: note = chemically synthesized
  source 1..22: mol_type = other DNA
tctctactaaaacacaaaaata

SEQ ID NO: 85027 - DNA, 22 bp, synthetic construct
  misc_feature 1..22: note = chemically synthesized
  source 1..22: mol_type = other DNA
tactaaaacacaaaaataatta

SEQ ID NO: 85028 - DNA, 22 bp, synthetic construct
  misc_feature 1..22: note = chemically synthesized
  source 1..22: mol_type = other DNA
ctaaaacacaaaaataattagc

SEQ ID NO: 85029 - DNA, 22 bp, synthetic construct
  misc_feature 1..22: note = chemically synthesized
  source 1..22: mol_type = other DNA
aaacacaaaaataattagctgg

SEQ ID NO: 85030 - DNA, 22 bp, synthetic construct
  misc_feature 1..22: note = chemically synthesized
  source 1..22: mol_type = other DNA
gctgggcatggcagtgtgctcc

SEQ ID NO: 85031 - DNA, 22 bp, synthetic construct
  misc_feature 1..22: note = chemically synthesized
  source 1..22: mol_type = other DNA
ggcatggcagtgtgctcctgta

SEQ ID NO: 85032 - DNA, 22 bp, synthetic construct
  misc_feature 1..22: note = chemically synthesized
  source 1..22: mol_type = other DNA
ctgtaatcccagttacttggga

SEQ ID NO: 85033 - DNA, 22 bp, synthetic construct
  misc_feature 1..22: note = chemically synthesized
  source 1..22: mol_type = other DNA
taatcccagttacttgggagac

SEQ ID NO: 85034 - DNA, 22 bp, synthetic construct
  misc_feature 1..22: note = chemically synthesized
  source 1..22: mol_type = other DNA
cttgggagactgaggcaggaga

SEQ ID NO: 85035 - DNA, 22 bp, synthetic construct
  misc_feature 1..22: note = chemically synthesized
  source 1..22: mol_type = other DNA
gggagactgaggcaggagaatt

SEQ ID NO: 85036 - DNA, 22 bp, synthetic construct
  misc_feature 1..22: note = chemically synthesized
  source 1..22: mol_type = other DNA
ggagactgaggcaggagaattg

SEQ ID NO: 85037 - DNA, 22 bp, synthetic construct
  misc_feature 1..22: note = chemically synthesized
  source 1..22: mol_type = other DNA
aggcaggagaattgcttgatcc

SEQ ID NO: 85038 - DNA, 22 bp, synthetic construct
  misc_feature 1..22: note = chemically synthesized
  source 1..22: mol_type = other DNA
cttgatcctgggaggtggaagt

SEQ ID NO: 85039 - DNA, 22 bp, synthetic construct
  misc_feature 1..22: note = chemically synthesized
  source 1..22: mol_type = other DNA
gatcctgggaggtggaagttgc

SEQ ID NO: 85040 - DNA, 22 bp, synthetic construct
  misc_feature 1..22: note = chemically synthesized
  source 1..22: mol_type = other DNA
atcctgggaggtggaagttgca

SEQ ID NO: 85041 - DNA, 22 bp, synthetic construct
  misc_feature 1..22: note = chemically synthesized
  source 1..22: mol_type = other DNA
ggaggtggaagttgcagtgagc

SEQ ID NO: 85042 - DNA, 22 bp, synthetic construct
  misc_feature 1..22: note = chemically synthesized
  source 1..22: mol_type = other DNA
cagtgagccgagatcgcgccat

SEQ ID NO: 85043 - DNA, 22 bp, synthetic construct
  misc_feature 1..22: note = chemically synthesized
  source 1..22: mol_type = other DNA
cactccagtctgggcgacagag

SEQ ID NO: 85044 - DNA, 22 bp, synthetic construct
  misc_feature 1..22: note = chemically synthesized
  source 1..22: mol_type = other DNA
cagtctgggcgacagagcaaga

SEQ ID NO: 85045 - DNA, 22 bp, synthetic construct
  misc_feature 1..22: note = chemically synthesized
  source 1..22: mol_type = other DNA
ggcgacagagcaagactctgtc

SEQ ID NO: 85046 - DNA, 22 bp, synthetic construct
  misc_feature 1..22: note = chemically synthesized
  source 1..22: mol_type = other DNA
tgtcccaaaggaaaaaaaaaat

SEQ ID NO: 85047 - DNA, 22 bp, synthetic construct
  misc_feature 1..22: note = chemically synthesized
  source 1..22: mol_type = other DNA
tcccaaaggaaaaaaaaaatct

SEQ ID NO: 85048 - DNA, 22 bp, synthetic construct
  misc_feature 1..22: note = chemically synthesized
  source 1..22: mol_type = other DNA
ttttcatgcaggtttcttcaga

SEQ ID NO: 85049 - DNA, 22 bp, synthetic construct
  misc_feature 1..22: note = chemically synthesized
  source 1..22: mol_type = other DNA
tcatgcaggtttcttcagactg

SEQ ID NO: 85050 - DNA, 22 bp, synthetic construct
  misc_feature 1..22: note = chemically synthesized
  source 1..22: mol_type = other DNA
catgcaggtttcttcagactga

SEQ ID NO: 85051 - DNA, 22 bp, synthetic construct
  misc_feature 1..22: note = chemically synthesized
  source 1..22: mol_type = other DNA
atgcaggtttcttcagactgac

SEQ ID NO: 85052 - DNA, 22 bp, synthetic construct
  misc_feature 1..22: note = chemically synthesized
  source 1..22: mol_type = other DNA
cttcagactgactacaaaggct

SEQ ID NO: 85053 - DNA, 22 bp, synthetic construct
  misc_feature 1..22: note = chemically synthesized
  source 1..22: mol_type = other DNA
ttcagactgactacaaaggctt

SEQ ID NO: 85054 - DNA, 22 bp, synthetic construct
  misc_feature 1..22: note = chemically synthesized
  source 1..22: mol_type = other DNA
cagactgactacaaaggcttca

SEQ ID NO: 85055 - DNA, 22 bp, synthetic construct
  misc_feature 1..22: note = chemically synthesized
  source 1..22: mol_type = other DNA
agactgactacaaaggcttcag

SEQ ID NO: 85056 - DNA, 22 bp, synthetic construct
  misc_feature 1..22: note = chemically synthesized
  source 1..22: mol_type = other DNA
actacaaaggcttcagactagc

SEQ ID NO: 85057 - DNA, 22 bp, synthetic construct
  misc_feature 1..22: note = chemically synthesized
  source 1..22: mol_type = other DNA
caaaggcttcagactagctaca

SEQ ID NO: 85058 - DNA, 22 bp, synthetic construct
  misc_feature 1..22: note = chemically synthesized
  source 1..22: mol_type = other DNA
cagactagctacaaagcttaaa

SEQ ID NO: 85059 - DNA, 22 bp, synthetic construct
  misc_feature 1..22: note = chemically synthesized
  source 1..22: mol_type = other DNA
agactagctacaaagcttaaaa

SEQ ID NO: 85060 - DNA, 22 bp, synthetic construct
  misc_feature 1..22: note = chemically synthesized
  source 1..22: mol_type = other DNA
gctacaaagcttaaaaatctac

SEQ ID NO: 85061 - DNA, 22 bp, synthetic construct
  misc_feature 1..22: note = chemically synthesized
  source 1..22: mol_type = other DNA
caaagcttaaaaatctactttc

SEQ ID NO: 85062 - DNA, 22 bp, synthetic construct
  misc_feature 1..22: note = chemically synthesized
  source 1..22: mol_type = other DNA
aaaaatctactttcattcaggc

SEQ ID NO: 85063 - DNA, 22 bp, synthetic construct
  misc_feature 1..22: note = chemically synthesized
  source 1..22: mol_type = other DNA
aaaatctactttcattcaggct

SEQ ID NO: 85064 - DNA, 22 bp, synthetic construct
  misc_feature 1..22: note = chemically synthesized
  source 1..22: mol_type = other DNA
ctttcattcaggcttcttcaga

SEQ ID NO: 85065 - DNA, 22 bp, synthetic construct
  misc_feature 1..22: note = chemically synthesized
  source 1..22: mol_type = other DNA
tcattcaggcttcttcagacta

SEQ ID NO: 85066 - DNA, 22 bp, synthetic construct
  misc_feature 1..22: note = chemically synthesized
  source 1..22: mol_type = other DNA
cattcaggcttcttcagactag

SEQ ID NO: 85067 - DNA, 22 bp, synthetic construct
  misc_feature 1..22: note = chemically synthesized
  source 1..22: mol_type = other DNA
attcaggcttcttcagactaga

SEQ ID NO: 85068 - DNA, 22 bp, synthetic construct
  misc_feature 1..22: note = chemically synthesized
  source 1..22: mol_type = other DNA
aggcttcttcagactagataca

SEQ ID NO: 85069 - DNA, 22 bp, synthetic construct
  misc_feature 1..22: note = chemically synthesized
  source 1..22: mol_type = other DNA
cttcagactagatacagaagaa

SEQ ID NO: 85070 - DNA, 22 bp, synthetic construct
  misc_feature 1..22: note = chemically synthesized
  source 1..22: mol_type = other DNA
ttcagactagatacagaagaaa

SEQ ID NO: 85071 - DNA, 22 bp, synthetic construct
  misc_feature 1..22: note = chemically synthesized
  source 1..22: mol_type = other DNA
cagactagatacagaagaaatg

SEQ ID NO: 85072 - DNA, 22 bp, synthetic construct
  misc_feature 1..22: note = chemically synthesized
  source 1..22: mol_type = other DNA
agactagatacagaagaaatga

SEQ ID NO: 85073 - DNA, 22 bp, synthetic construct
  misc_feature 1..22: note = chemically synthesized
  source 1..22: mol_type = other DNA
gatacagaagaaatgagaccat

SEQ ID NO: 85074 - DNA, 22 bp, synthetic construct
  misc_feature 1..22: note = chemically synthesized
  source 1..22: mol_type = other DNA
gatggggaacagtattatccat

SEQ ID NO: 85075 - DNA, 22 bp, synthetic construct
  misc_feature 1..22: note = chemically synthesized
  source 1..22: mol_type = other DNA
tccatgttgccaccatagagac

SEQ ID NO: 85076 - DNA, 22 bp, synthetic construct
  misc_feature 1..22: note = chemically synthesized
  source 1..22: mol_type = other DNA
ccaccatagagactatcagcct

SEQ ID NO: 85077 - DNA, 22 bp, synthetic construct
  misc_feature 1..22: note = chemically synthesized
  source 1..22: mol_type = other DNA
tcagccttttgggattaccaga

SEQ ID NO: 85078 - DNA, 22 bp, synthetic construct
  misc_feature 1..22: note = chemically synthesized
  source 1..22: mol_type = other DNA
ttgggattaccagagcaaaata

SEQ ID NO: 85079 - DNA, 22 bp, synthetic construct
  misc_feature 1..22: note = chemically synthesized
  source 1..22: mol_type = other DNA
tgggattaccagagcaaaatac

SEQ ID NO: 85080 - DNA, 22 bp, synthetic construct
  misc_feature 1..22: note = chemically synthesized
  source 1..22: mol_type = other DNA
gggattaccagagcaaaataca

SEQ ID NO: 85081 - DNA, 22 bp, synthetic construct
  misc_feature 1..22: note = chemically synthesized
  source 1..22: mol_type = other DNA
ggattaccagagcaaaatacat

SEQ ID NO: 85082 - DNA, 22 bp, synthetic construct
  misc_feature 1..22: note = chemically synthesized
  source 1..22: mol_type = other DNA
ccagagcaaaatacatgttgga

SEQ ID NO: 85083 - DNA, 22 bp, synthetic construct
  misc_feature 1..22: note = chemically synthesized
  source 1..22: mol_type = other DNA
gaggattttttaaaatatgttt

SEQ ID NO: 85084 - DNA, 22 bp, synthetic construct
  misc_feature 1..22: note = chemically synthesized
  source 1..22: mol_type = other DNA
tttaaaatatgttttgaaaggt

SEQ ID NO: 85085 - DNA, 22 bp, synthetic construct
  misc_feature 1..22: note = chemically synthesized
  source 1..22: mol_type = other DNA
ttaaaatatgttttgaaaggta

SEQ ID NO: 85086 - DNA, 22 bp, synthetic construct
  misc_feature 1..22: note = chemically synthesized
  source 1..22: mol_type = other DNA
taaaatatgttttgaaaggtag

SEQ ID NO: 85087 - DNA, 22 bp, synthetic construct
  misc_feature 1..22: note = chemically synthesized
  source 1..22: mol_type = other DNA
aaaatatgttttgaaaggtagg

SEQ ID NO: 85088 - DNA, 22 bp, synthetic construct
  misc_feature 1..22: note = chemically synthesized
  source 1..22: mol_type = other DNA
aaatatgttttgaaaggtagga

SEQ ID NO: 85089 - DNA, 22 bp, synthetic construct
  misc_feature 1..22: note = chemically synthesized
  source 1..22: mol_type = other DNA
tgaaaggtaggatgaaagagca

SEQ ID NO: 85090 - DNA, 22 bp, synthetic construct
  misc_feature 1..22: note = chemically synthesized
  source 1..22: mol_type = other DNA
gaaaggtaggatgaaagagcat

SEQ ID NO: 85091 - DNA, 22 bp, synthetic construct
  misc_feature 1..22: note = chemically synthesized
  source 1..22: mol_type = other DNA
aaaggtaggatgaaagagcata

SEQ ID NO: 85092 - DNA, 22 bp, synthetic construct
  misc_feature 1..22: note = chemically synthesized
  source 1..22: mol_type = other DNA
tgataaggtaaataaatgaaga

SEQ ID NO: 85093 - DNA, 22 bp, synthetic construct
  misc_feature 1..22: note = chemically synthesized
  source 1..22: mol_type = other DNA
gataaggtaaataaatgaagat

SEQ ID NO: 85094 - DNA, 22 bp, synthetic construct
  misc_feature 1..22: note = chemically synthesized
  source 1..22: mol_type = other DNA
ataaggtaaataaatgaagatt

SEQ ID NO: 85095 - DNA, 22 bp, synthetic construct
  misc_feature 1..22: note = chemically synthesized
  source 1..22: mol_type = other DNA
aaagaaaaacaagatcaatatg

SEQ ID NO: 85096 - DNA, 22 bp, synthetic construct
  misc_feature 1..22: note = chemically synthesized
  source 1..22: mol_type = other DNA
aagaaaaacaagatcaatatgt

SEQ ID NO: 85097 - DNA, 22 bp, synthetic construct
  misc_feature 1..22: note = chemically synthesized
  source 1..22: mol_type = other DNA
cacctgtatttaaaaaacaaaa

SEQ ID NO: 85098 - DNA, 22 bp, synthetic construct
  misc_feature 1..22: note = chemically synthesized
  source 1..22: mol_type = other DNA
tatttaaaaaacaaaaagattt

SEQ ID NO: 85099 - DNA, 22 bp, synthetic construct
  misc_feature 1..22: note = chemically synthesized
  source 1..22: mol_type = other DNA
aaaaaacaaaaagatttacagt

SEQ ID NO: 85100 - DNA, 22 bp, synthetic construct
  misc_feature 1..22: note = chemically synthesized
  source 1..22: mol_type = other DNA
aaaaacaaaaagatttacagtt

SEQ ID NO: 85101 - DNA, 22 bp, synthetic construct
  misc_feature 1..22: note = chemically synthesized
  source 1..22: mol_type = other DNA
acagttttccaagacatcatgt

SEQ ID NO: 85102 - DNA, 22 bp, synthetic construct
  misc_feature 1..22: note = chemically synthesized
  source 1..22: mol_type = other DNA
cagttttccaagacatcatgtt

SEQ ID NO: 85103 - DNA, 22 bp, synthetic construct
  misc_feature 1..22: note = chemically synthesized
  source 1..22: mol_type = other DNA
tccaagacatcatgttgtgtta

SEQ ID NO: 85104 - DNA, 22 bp, synthetic construct
  misc_feature 1..22: note = chemically synthesized
  source 1..22: mol_type = other DNA
ccaagacatcatgttgtgttat

SEQ ID NO: 85105 - DNA, 22 bp, synthetic construct
  misc_feature 1..22: note = chemically synthesized
  source 1..22: mol_type = other DNA
caagacatcatgttgtgttatg

SEQ ID NO: 85106 - DNA, 22 bp, synthetic construct
  misc_feature 1..22: note = chemically synthesized
  source 1..22: mol_type = other DNA
tgttatgctatctgagagtcag

SEQ ID NO: 85107 - DNA, 22 bp, synthetic construct
  misc_feature 1..22: note = chemically synthesized
  source 1..22: mol_type = other DNA
tgctatctgagagtcagtgtat

SEQ ID NO: 85108 - DNA, 22 bp, synthetic construct
  misc_feature 1..22: note = chemically synthesized
  source 1..22: mol_type = other DNA
tctgagagtcagtgtatggtat

SEQ ID NO: 85109 - DNA, 22 bp, synthetic construct
  misc_feature 1..22: note = chemically synthesized
  source 1..22: mol_type = other DNA
agagtcagtgtatggtatctca

SEQ ID NO: 85110 - DNA, 22 bp, synthetic construct
  misc_feature 1..22: note = chemically synthesized
  source 1..22: mol_type = other DNA
agtctgagttcccagcaaccag

SEQ ID NO: 85111 - DNA, 22 bp, synthetic construct
  misc_feature 1..22: note = chemically synthesized
  source 1..22: mol_type = other DNA
agttcccagcaaccagaacaat

SEQ ID NO: 85112 - DNA, 22 bp, synthetic construct
  misc_feature 1..22: note = chemically synthesized
  source 1..22: mol_type = other DNA
ccagcaaccagaacaatgccta

SEQ ID NO: 85113 - DNA, 22 bp, synthetic construct
  misc_feature 1..22: note = chemically synthesized
  source 1..22: mol_type = other DNA
taataaaataaatagagaagac

SEQ ID NO: 85114 - DNA, 22 bp, synthetic construct
  misc_feature 1..22: note = chemically synthesized
  source 1..22: mol_type = other DNA
gagtctggagaaataaaagggt

SEQ ID NO: 85115 - DNA, 22 bp, synthetic construct
  misc_feature 1..22: note = chemically synthesized
  source 1..22: mol_type = other DNA
agtctggagaaataaaagggtt

SEQ ID NO: 85116 - DNA, 22 bp, synthetic construct
  misc_feature 1..22: note = chemically synthesized
  source 1..22: mol_type = other DNA
gagaaataaaagggttttcgta

SEQ ID NO: 85117 - DNA, 22 bp, synthetic construct
  misc_feature 1..22: note = chemically synthesized
  source 1..22: mol_type = other DNA
tcgtatcccctctgagcactgt

SEQ ID NO: 85118 - DNA, 22 bp, synthetic construct
  misc_feature 1..22: note = chemically synthesized
  source 1..22: mol_type = other DNA
cgtatcccctctgagcactgtc

SEQ ID NO: 85119 - DNA, 22 bp, synthetic construct
  misc_feature 1..22: note = chemically synthesized
  source 1..22: mol_type = other DNA
gtatcccctctgagcactgtct

SEQ ID NO: 85120 - DNA, 22 bp, synthetic construct
  misc_feature 1..22: note = chemically synthesized
  source 1..22: mol_type = other DNA
tgagcactgtctggaatgttga

SEQ ID NO: 85121 - DNA, 22 bp, synthetic construct
  misc_feature 1..22: note = chemically synthesized
  source 1..22: mol_type = other DNA
agcactgtctggaatgttgact

SEQ ID NO: 85122 - DNA, 22 bp, synthetic construct
  misc_feature 1..22: note = chemically synthesized
  source 1..22: mol_type = other DNA
tctggaatgttgacttggaaag

SEQ ID NO: 85123 - DNA, 22 bp, synthetic construct
  misc_feature 1..22: note = chemically synthesized
  source 1..22: mol_type = other DNA
gaatgttgacttggaaagcaaa

SEQ ID NO: 85124 - DNA, 22 bp, synthetic construct
  misc_feature 1..22: note = chemically synthesized
  source 1..22: mol_type = other DNA
acttggaaagcaaatctgtgat

SEQ ID NO: 85125 - DNA, 22 bp, synthetic construct
  misc_feature 1..22: note = chemically synthesized
  source 1..22: mol_type = other DNA
ggaaagcaaatctgtgattata

SEQ ID NO: 85126 - DNA, 22 bp, synthetic construct
  misc_feature 1..22: note = chemically synthesized
  source 1..22: mol_type = other DNA
gaaagcaaatctgtgattataa

SEQ ID NO: 85127 - DNA, 22 bp, synthetic construct
  misc_feature 1..22: note = chemically synthesized
  source 1..22: mol_type = other DNA
tgattataataaccaggtcatt

SEQ ID NO: 85128 - DNA, 22 bp, synthetic construct
  misc_feature 1..22: note = chemically synthesized
  source 1..22: mol_type = other DNA
taataaccaggtcattctttca

SEQ ID NO: 85129 - DNA, 22 bp, synthetic construct
  misc_feature 1..22: note = chemically synthesized
  source 1..22: mol_type = other DNA
tttcaggagtcttttctgatgc

SEQ ID NO: 85130 - DNA, 22 bp, synthetic construct
  misc_feature 1..22: note = chemically synthesized
  source 1..22: mol_type = other DNA
tcaggagtcttttctgatgccc

SEQ ID NO: 85131 - DNA, 22 bp, synthetic construct
  misc_feature 1..22: note = chemically synthesized
  source 1..22: mol_type = other DNA
caggagtcttttctgatgccct

SEQ ID NO: 85132 - DNA, 22 bp, synthetic construct
  misc_feature 1..22: note = chemically synthesized
  source 1..22: mol_type = other DNA
aggagtcttttctgatgccctc

SEQ ID NO: 85133 - DNA, 22 bp, synthetic construct
  misc_feature 1..22: note = chemically synthesized
  source 1..22: mol_type = other DNA
ttctgatgccctctgattaaaa

SEQ ID NO: 85134 - DNA, 22 bp, synthetic construct
  misc_feature 1..22: note = chemically synthesized
  source 1..22: mol_type = other DNA
tctgatgccctctgattaaaac

SEQ ID NO: 85135 - DNA, 22 bp, synthetic construct
  misc_feature 1..22: note = chemically synthesized
  source 1..22: mol_type = other DNA
ctgatgccctctgattaaaact

SEQ ID NO: 85136 - DNA, 22 bp, synthetic construct
  misc_feature 1..22: note = chemically synthesized
  source 1..22: mol_type = other DNA
tgatgccctctgattaaaactg

SEQ ID NO: 85137 - DNA, 22 bp, synthetic construct
  misc_feature 1..22: note = chemically synthesized
  source 1..22: mol_type = other DNA
atgccctctgattaaaactgac

SEQ ID NO: 85138 - DNA, 22 bp, synthetic construct
  misc_feature 1..22: note = chemically synthesized
  source 1..22: mol_type = other DNA
tgattaaaactgacctacatat

SEQ ID NO: 85139 - DNA, 22 bp, synthetic construct
  misc_feature 1..22: note = chemically synthesized
  source 1..22: mol_type = other DNA
attaaaactgacctacatatgc

SEQ ID NO: 85140 - DNA, 22 bp, synthetic construct
  misc_feature 1..22: note = chemically synthesized
  source 1..22: mol_type = other DNA
aaactgacctacatatgcagaa

SEQ ID NO: 85141 - DNA, 22 bp, synthetic construct
  misc_feature 1..22: note = chemically synthesized
  source 1..22: mol_type = other DNA
acctacatatgcagaaatctct

SEQ ID NO: 85142 - DNA, 22 bp, synthetic construct
  misc_feature 1..22: note = chemically synthesized
  source 1..22: mol_type = other DNA
catatgcagaaatctcttggtt

SEQ ID NO: 85143 - DNA, 22 bp, synthetic construct
  misc_feature 1..22: note = chemically synthesized
  source 1..22: mol_type = other DNA
ttggttttttttttttttctgt

SEQ ID NO: 85144 - DNA, 22 bp, synthetic construct
  misc_feature 1..22: note = chemically synthesized
  source 1..22: mol_type = other DNA
ggttttttttttttttctgtct

SEQ ID NO: 85145 - DNA, 22 bp, synthetic construct
  misc_feature 1..22: note = chemically synthesized
  source 1..22: mol_type = other DNA
gttttttttttttttctgtctt

SEQ ID NO: 85146 - DNA, 22 bp, synthetic construct
  misc_feature 1..22: note = chemically synthesized
  source 1..22: mol_type = other DNA
tttttttttttctgtcttttca

SEQ ID NO: 85147 - DNA, 22 bp, synthetic construct
  misc_feature 1..22: note = chemically synthesized
  source 1..22: mol_type = other DNA
ttttttttttctgtcttttcag

SEQ ID NO: 85148 - DNA, 22 bp, synthetic construct
  misc_feature 1..22: note = chemically synthesized
  source 1..22: mol_type = other DNA
tttttttttctgtcttttcaga

SEQ ID NO: 85149 - DNA, 22 bp, synthetic construct
  misc_feature 1..22: note = chemically synthesized
  source 1..22: mol_type = other DNA
ttttttttctgtcttttcagaa

SEQ ID NO: 85150 - DNA, 22 bp, synthetic construct
  misc_feature 1..22: note = chemically synthesized
  source 1..22: mol_type = other DNA
tttttttctgtcttttcagaat

SEQ ID NO: 85151 - DNA, 22 bp, synthetic construct
  misc_feature 1..22: note = chemically synthesized
  source 1..22: mol_type = other DNA
ttttttctgtcttttcagaata

SEQ ID NO: 85152 - DNA, 22 bp, synthetic construct
  misc_feature 1..22: note = chemically synthesized
  source 1..22: mol_type = other DNA
tttttctgtcttttcagaataa

SEQ ID NO: 85153 - DNA, 22 bp, synthetic construct
  misc_feature 1..22: note = chemically synthesized
  source 1..22: mol_type = other DNA
ttttctgtcttttcagaataat

SEQ ID NO: 85154 - DNA, 22 bp, synthetic construct
  misc_feature 1..22: note = chemically synthesized
  source 1..22: mol_type = other DNA
tttctgtcttttcagaataatt

SEQ ID NO: 85155 - DNA, 22 bp, synthetic construct
  misc_feature 1..22: note = chemically synthesized
  source 1..22: mol_type = other DNA
ttctgtcttttcagaataattc

SEQ ID NO: 85156 - DNA, 22 bp, synthetic construct
  misc_feature 1..22: note = chemically synthesized
  source 1..22: mol_type = other DNA
tctgtcttttcagaataattcc

SEQ ID NO: 85157 - DNA, 22 bp, synthetic construct
  misc_feature 1..22: note = chemically synthesized
  source 1..22: mol_type = other DNA
ctgtcttttcagaataattccc

SEQ ID NO: 85158 - DNA, 22 bp, synthetic construct
  misc_feature 1..22: note = chemically synthesized
  source 1..22: mol_type = other DNA
tgtcttttcagaataattccct

SEQ ID NO: 85159 - DNA, 22 bp, synthetic construct
  misc_feature 1..22: note = chemically synthesized
  source 1..22: mol_type = other DNA
tcttttcagaataattccctgt

SEQ ID NO: 85160 - DNA, 22 bp, synthetic construct
  misc_feature 1..22: note = chemically synthesized
  source 1..22: mol_type = other DNA
ttcagaataattccctgtgtga

SEQ ID NO: 85161 - DNA, 22 bp, synthetic construct
  misc_feature 1..22: note = chemically synthesized
  source 1..22: mol_type = other DNA
tcagaataattccctgtgtgat

SEQ ID NO: 85162 - DNA, 22 bp, synthetic construct
  misc_feature 1..22: note = chemically synthesized
  source 1..22: mol_type = other DNA
cagaataattccctgtgtgatt

SEQ ID NO: 85163 - DNA, 22 bp, synthetic construct
  misc_feature 1..22: note = chemically synthesized
  source 1..22: mol_type = other DNA
agaataattccctgtgtgatta

SEQ ID NO: 85164 - DNA, 22 bp, synthetic construct
  misc_feature 1..22: note = chemically synthesized
  source 1..22: mol_type = other DNA
cctgtgtgattacttgcttact

SEQ ID NO: 85165 - DNA, 22 bp, synthetic construct
  misc_feature 1..22: note = chemically synthesized
  source 1..22: mol_type = other DNA
tgtgattacttgcttactttaa

SEQ ID NO: 85166 - DNA, 22 bp, synthetic construct
  misc_feature 1..22: note = chemically synthesized
  source 1..22: mol_type = other DNA
cttgcttactttaaaatagggt

SEQ ID NO: 85167 - DNA, 22 bp, synthetic construct
  misc_feature 1..22: note = chemically synthesized
  source 1..22: mol_type = other DNA
gcttactttaaaatagggtaat

SEQ ID NO: 85168 - DNA, 22 bp, synthetic construct
  misc_feature 1..22: note = chemically synthesized
  source 1..22: mol_type = other DNA
cttactttaaaatagggtaatg

SEQ ID NO: 85169 - DNA, 22 bp, synthetic construct
  misc_feature 1..22: note = chemically synthesized
  source 1..22: mol_type = other DNA
actttaaaatagggtaatgacc

SEQ ID NO: 85170 - DNA, 22 bp, synthetic construct
  misc_feature 1..22: note = chemically synthesized
  source 1..22: mol_type = other DNA
ctttaaaatagggtaatgacca

SEQ ID NO: 85171 - DNA, 22 bp, synthetic construct
  misc_feature 1..22: note = chemically synthesized
  source 1..22: mol_type = other DNA
taaaatagggtaatgaccaata

SEQ ID NO: 85172 - DNA, 22 bp, synthetic construct
  misc_feature 1..22: note = chemically synthesized
  source 1..22: mol_type = other DNA
aaaatagggtaatgaccaatag

SEQ ID NO: 85173 - DNA, 22 bp, synthetic construct
  misc_feature 1..22: note = chemically synthesized
  source 1..22: mol_type = other DNA
aaatagggtaatgaccaatagt

SEQ ID NO: 85174 - DNA, 22 bp, synthetic construct
  misc_feature 1..22: note = chemically synthesized
  source 1..22: mol_type = other DNA
ttccaaagacatagagaaagta

SEQ ID NO: 85175 - DNA, 22 bp, synthetic construct
  misc_feature 1..22: note = chemically synthesized
  source 1..22: mol_type = other DNA
caaagacatagagaaagtatat

SEQ ID NO: 85176 - DNA, 22 bp, synthetic construct
  misc_feature 1..22: note = chemically synthesized
  source 1..22: mol_type = other DNA
tgtttaaaagacagcttcttta

SEQ ID NO: 85177 - DNA, 22 bp, synthetic construct
  misc_feature 1..22: note = chemically synthesized
  source 1..22: mol_type = other DNA
aaaagacagcttctttataatt

SEQ ID NO: 85178 - DNA, 22 bp, synthetic construct
  misc_feature 1..22: note = chemically synthesized
  source 1..22: mol_type = other DNA
aaagacagcttctttataattc

SEQ ID NO: 85179 - DNA, 22 bp, synthetic construct
  misc_feature 1..22: note = chemically synthesized
  source 1..22: mol_type = other DNA
ctttataattctatagaactaa

SEQ ID NO: 85180 - DNA, 22 bp, synthetic construct
  misc_feature 1..22: note = chemically synthesized
  source 1..22: mol_type = other DNA
tttataattctatagaactaaa

SEQ ID NO: 85181 - DNA, 22 bp, synthetic construct
  misc_feature 1..22: note = chemically synthesized
  source 1..22: mol_type = other DNA
tataattctatagaactaaaac

SEQ ID NO: 85182 - DNA, 22 bp, synthetic construct
  misc_feature 1..22: note = chemically synthesized
  source 1..22: mol_type = other DNA
ataattctatagaactaaaaca

SEQ ID NO: 85183 - DNA, 22 bp, synthetic construct
  misc_feature 1..22: note = chemically synthesized
  source 1..22: mol_type = other DNA
taattctatagaactaaaacat

SEQ ID NO: 85184 - DNA, 22 bp, synthetic construct
  misc_feature 1..22: note = chemically synthesized
  source 1..22: mol_type = other DNA
tatagaactaaaacattcctat

SEQ ID NO: 85185 - DNA, 22 bp, synthetic construct
  misc_feature 1..22: note = chemically synthesized
  source 1..22: mol_type = other DNA
tagaactaaaacattcctattt

SEQ ID NO: 85186 - DNA, 22 bp, synthetic construct
  misc_feature 1..22: note = chemically synthesized
  source 1..22: mol_type = other DNA
aaacattcctatttgccaaggc

SEQ ID NO: 85187 - DNA, 22 bp, synthetic construct
  misc_feature 1..22: note = chemically synthesized
  source 1..22: mol_type = other DNA
ctatttgccaaggcagtggagt

SEQ ID NO: 85188 - DNA, 22 bp, synthetic construct
  misc_feature 1..22: note = chemically synthesized
  source 1..22: mol_type = other DNA
tttgccaaggcagtggagtttt

SEQ ID NO: 85189 - DNA, 22 bp, synthetic construct
  misc_feature 1..22: note = chemically synthesized
  source 1..22: mol_type = other DNA
gccaaggcagtggagtttttgc

SEQ ID NO: 85190 - DNA, 22 bp, synthetic construct
  misc_feature 1..22: note = chemically synthesized
  source 1..22: mol_type = other DNA
ccaaggcagtggagtttttgct

SEQ ID NO: 85191 - DNA, 22 bp, synthetic construct
  misc_feature 1..22: note = chemically synthesized
  source 1..22: mol_type = other DNA
ttgctgttcttagaacataatt

SEQ ID NO: 85192 - DNA, 22 bp, synthetic construct
  misc_feature 1..22: note = chemically synthesized
  source 1..22: mol_type = other DNA
tgctgttcttagaacataatta

SEQ ID NO: 85193 - DNA, 22 bp, synthetic construct
  misc_feature 1..22: note = chemically synthesized
  source 1..22: mol_type = other DNA
gctgttcttagaacataattac

SEQ ID NO: 85194 - DNA, 22 bp, synthetic construct
  misc_feature 1..22: note = chemically synthesized
  source 1..22: mol_type = other DNA
ctgttcttagaacataattact

SEQ ID NO: 85195 - DNA, 22 bp, synthetic construct
  misc_feature 1..22: note = chemically synthesized
  source 1..22: mol_type = other DNA
ttcttagaacataattactgaa

SEQ ID NO: 85196 - DNA, 22 bp, synthetic construct
  misc_feature 1..22: note = chemically synthesized
  source 1..22: mol_type = other DNA
ttagaacataattactgaaaga

SEQ ID NO: 85197 - DNA, 22 bp, synthetic construct
  misc_feature 1..22: note = chemically synthesized
  source 1..22: mol_type = other DNA
agaacataattactgaaagaca

SEQ ID NO: 85198 - DNA, 22 bp, synthetic construct
  misc_feature 1..22: note = chemically synthesized
  source 1..22: mol_type = other DNA
gaacataattactgaaagacac

SEQ ID NO: 85199 - DNA, 22 bp, synthetic construct
  misc_feature 1..22: note = chemically synthesized
  source 1..22: mol_type = other DNA
ctgaaagacacccacacatgtc

SEQ ID NO: 85200 - DNA, 22 bp, synthetic construct
  misc_feature 1..22: note = chemically synthesized
  source 1..22: mol_type = other DNA
aaagacacccacacatgtcctg

SEQ ID NO: 85201 - DNA, 22 bp, synthetic construct
  misc_feature 1..22: note = chemically synthesized
  source 1..22: mol_type = other DNA
ccttggacaaaaaattgtatgt

SEQ ID NO: 85202 - DNA, 22 bp, synthetic construct
  misc_feature 1..22: note = chemically synthesized
  source 1..22: mol_type = other DNA
ggacaaaaaattgtatgtccat

SEQ ID NO: 85203 - DNA, 22 bp, synthetic construct
  misc_feature 1..22: note = chemically synthesized
  source 1..22: mol_type = other DNA
gacaaaaaattgtatgtccatc

SEQ ID NO: 85204 - DNA, 22 bp, synthetic construct
  misc_feature 1..22: note = chemically synthesized
  source 1..22: mol_type = other DNA
tatgtccatcctttaaaggtca

SEQ ID NO: 85205 - DNA, 22 bp, synthetic construct
  misc_feature 1..22: note = chemically synthesized
  source 1..22: mol_type = other DNA
taaaggtcattcctttaatggt

SEQ ID NO: 85206 - DNA, 22 bp, synthetic construct
  misc_feature 1..22: note = chemically synthesized
  source 1..22: mol_type = other DNA
aaaggtcattcctttaatggtc

SEQ ID NO: 85207 - DNA, 22 bp, synthetic construct
  misc_feature 1..22: note = chemically synthesized
  source 1..22: mol_type = other DNA
aaggtcattcctttaatggtct

SEQ ID NO: 85208 - DNA, 22 bp, synthetic construct
  misc_feature 1..22: note = chemically synthesized
  source 1..22: mol_type = other DNA
ctttaatggtcttttctggaca

SEQ ID NO: 85209 - DNA, 22 bp, synthetic construct
  misc_feature 1..22: note = chemically synthesized
  source 1..22: mol_type = other DNA
taatggtcttttctggacacca

SEQ ID NO: 85210 - DNA, 22 bp, synthetic construct
  misc_feature 1..22: note = chemically synthesized
  source 1..22: mol_type = other DNA
aatggtcttttctggacaccac

SEQ ID NO: 85211 - DNA, 22 bp, synthetic construct
  misc_feature 1..22: note = chemically synthesized
  source 1..22: mol_type = other DNA
atggtcttttctggacaccact

SEQ ID NO: 85212 - DNA, 22 bp, synthetic construct
  misc_feature 1..22: note = chemically synthesized
  source 1..22: mol_type = other DNA
ttctggacaccactaggggtca

SEQ ID NO: 85213 - DNA, 22 bp, synthetic construct
  misc_feature 1..22: note = chemically synthesized
  source 1..22: mol_type = other DNA
tctggacaccactaggggtcag

SEQ ID NO: 85214 - DNA, 22 bp, synthetic construct
  misc_feature 1..22: note = chemically synthesized
  source 1..22: mol_type = other DNA
ctggacaccactaggggtcaga

SEQ ID NO: 85215 - DNA, 22 bp, synthetic construct
  misc_feature 1..22: note = chemically synthesized
  source 1..22: mol_type = other DNA
tggacaccactaggggtcagaa

SEQ ID NO: 85216 - DNA, 22 bp, synthetic construct
  misc_feature 1..22: note = chemically synthesized
  source 1..22: mol_type = other DNA
gacaccactaggggtcagaagt

SEQ ID NO: 85217 - DNA, 22 bp, synthetic construct
  misc_feature 1..22: note = chemically synthesized
  source 1..22: mol_type = other DNA
ggggtcagaagtagttcatcaa

SEQ ID NO: 85218 - DNA, 22 bp, synthetic construct
  misc_feature 1..22: note = chemically synthesized
  source 1..22: mol_type = other DNA
atcaaactttcttccctcccta

SEQ ID NO: 85219 - DNA, 22 bp, synthetic construct
  misc_feature 1..22: note = chemically synthesized
  source 1..22: mol_type = other DNA
tcttccctccctacttcagtga

SEQ ID NO: 85220 - DNA, 22 bp, synthetic construct
  misc_feature 1..22: note = chemically synthesized
  source 1..22: mol_type = other DNA
cttccctccctacttcagtgat

SEQ ID NO: 85221 - DNA, 22 bp, synthetic construct
  misc_feature 1..22: note = chemically synthesized
  source 1..22: mol_type = other DNA
ttccctccctacttcagtgatg

SEQ ID NO: 85222 - DNA, 22 bp, synthetic construct
  misc_feature 1..22: note = chemically synthesized
  source 1..22: mol_type = other DNA
ccctccctacttcagtgatgca

SEQ ID NO: 85223 - DNA, 22 bp, synthetic construct
  misc_feature 1..22: note = chemically synthesized
  source 1..22: mol_type = other DNA
cctccctacttcagtgatgcat

SEQ ID NO: 85224 - DNA, 22 bp, synthetic construct
  misc_feature 1..22: note = chemically synthesized
  source 1..22: mol_type = other DNA
cctacttcagtgatgcataagg

SEQ ID NO: 85225 - DNA, 22 bp, synthetic construct
  misc_feature 1..22: note = chemically synthesized
  source 1..22: mol_type = other DNA
cttcagtgatgcataaggcaga

SEQ ID NO: 85226 - DNA, 22 bp, synthetic construct
  misc_feature 1..22: note = chemically synthesized
  source 1..22: mol_type = other DNA
cagtgatgcataaggcagatct

SEQ ID NO: 85227 - DNA, 22 bp, synthetic construct
  misc_feature 1..22: note = chemically synthesized
  source 1..22: mol_type = other DNA
agtgatgcataaggcagatctg

SEQ ID NO: 85228 - DNA, 22 bp, synthetic construct
  misc_feature 1..22: note = chemically synthesized
  source 1..22: mol_type = other DNA
ctttagtgtaagcgaggtcagg

SEQ ID NO: 85229 - DNA, 22 bp, synthetic construct
  misc_feature 1..22: note = chemically synthesized
  source 1..22: mol_type = other DNA
tagtgtaagcgaggtcaggccc

SEQ ID NO: 85230 - DNA, 22 bp, synthetic construct
  misc_feature 1..22: note = chemically synthesized
  source 1..22: mol_type = other DNA
agtgtaagcgaggtcaggccct

SEQ ID NO: 85231 - DNA, 22 bp, synthetic construct
  misc_feature 1..22: note = chemically synthesized
  source 1..22: mol_type = other DNA
gtgtaagcgaggtcaggccctc

SEQ ID NO: 85232 - DNA, 22 bp, synthetic construct
  misc_feature 1..22: note = chemically synthesized
  source 1..22: mol_type = other DNA
aagagtcttgggatggctgaag

SEQ ID NO: 85233 - DNA, 22 bp, synthetic construct
  misc_feature 1..22: note = chemically synthesized
  source 1..22: mol_type = other DNA
gggatggctgaagaggtaagaa

SEQ ID NO: 85234 - DNA, 22 bp, synthetic construct
  misc_feature 1..22: note = chemically synthesized
  source 1..22: mol_type = other DNA
ggatggctgaagaggtaagaac

SEQ ID NO: 85235 - DNA, 22 bp, synthetic construct
  misc_feature 1..22: note = chemically synthesized
  source 1..22: mol_type = other DNA
aagaggtaagaacattctataa

SEQ ID NO: 85236 - DNA, 22 bp, synthetic construct
  misc_feature 1..22: note = chemically synthesized
  source 1..22: mol_type = other DNA
tataagacttgtccaaagaact

SEQ ID NO: 85237 - DNA, 22 bp, synthetic construct
  misc_feature 1..22: note = chemically synthesized
  source 1..22: mol_type = other DNA
taagacttgtccaaagaactga

SEQ ID NO: 85238 - DNA, 22 bp, synthetic construct
  misc_feature 1..22: note = chemically synthesized
  source 1..22: mol_type = other DNA
gtccaaagaactgactgtttaa

SEQ ID NO: 85239 - DNA, 22 bp, synthetic construct
  misc_feature 1..22: note = chemically synthesized
  source 1..22: mol_type = other DNA
tccaaagaactgactgtttaat

SEQ ID NO: 85240 - DNA, 22 bp, synthetic construct
  misc_feature 1..22: note = chemically synthesized
  source 1..22: mol_type = other DNA
actgtttaatgattctgaatat

SEQ ID NO: 85241 - DNA, 22 bp, synthetic construct
  misc_feature 1..22: note = chemically synthesized
  source 1..22: mol_type = other DNA
tttaatgattctgaatatgcta

SEQ ID NO: 85242 - DNA, 22 bp, synthetic construct
  misc_feature 1..22: note = chemically synthesized
  source 1..22: mol_type = other DNA
aatgattctgaatatgctagtt

SEQ ID NO: 85243 - DNA, 22 bp, synthetic construct
  misc_feature 1..22: note = chemically synthesized
  source 1..22: mol_type = other DNA
atgattctgaatatgctagttc

SEQ ID NO: 85244 - DNA, 22 bp, synthetic construct
  misc_feature 1..22: note = chemically synthesized
  source 1..22: mol_type = other DNA
tgaatatgctagttcagagaga

SEQ ID NO: 85245 - DNA, 22 bp, synthetic construct
  misc_feature 1..22: note = chemically synthesized
  source 1..22: mol_type = other DNA
aatatgctagttcagagagaat

SEQ ID NO: 85246 - DNA, 22 bp, synthetic construct
  misc_feature 1..22: note = chemically synthesized
  source 1..22: mol_type = other DNA
gttcagagagaatctatttacc

SEQ ID NO: 85247 - DNA, 22 bp, synthetic construct
  misc_feature 1..22: note = chemically synthesized
  source 1..22: mol_type = other DNA
agagagaatctatttaccacaa

SEQ ID NO: 85248 - DNA, 22 bp, synthetic construct
  misc_feature 1..22: note = chemically synthesized
  source 1..22: mol_type = other DNA
tttaccacaaacctgaagtagg

SEQ ID NO: 85249 - DNA, 22 bp, synthetic construct
  misc_feature 1..22: note = chemically synthesized
  source 1..22: mol_type = other DNA
accacaaacctgaagtaggctt

SEQ ID NO: 85250 - DNA, 22 bp, synthetic construct
  misc_feature 1..22: note = chemically synthesized
  source 1..22: mol_type = other DNA
ccacaaacctgaagtaggctta

SEQ ID NO: 85251 - DNA, 22 bp, synthetic construct
  misc_feature 1..22: note = chemically synthesized
  source 1..22: mol_type = other DNA
aagtaggcttaaatttccagtt

SEQ ID NO: 85252 - DNA, 22 bp, synthetic construct
  misc_feature 1..22: note = chemically synthesized
  source 1..22: mol_type = other DNA
aaatttccagtttacctgaatg

SEQ ID NO: 85253 - DNA, 22 bp, synthetic construct
  misc_feature 1..22: note = chemically synthesized
  source 1..22: mol_type = other DNA
aatttccagtttacctgaatgg

SEQ ID NO: 85254 - DNA, 22 bp, synthetic construct
  misc_feature 1..22: note = chemically synthesized
  source 1..22: mol_type = other DNA
ccagtttacctgaatggttatg

SEQ ID NO: 85255 - DNA, 22 bp, synthetic construct
  misc_feature 1..22: note = chemically synthesized
  source 1..22: mol_type = other DNA
cagtttacctgaatggttatga

SEQ ID NO: 85256 - DNA, 22 bp, synthetic construct
  misc_feature 1..22: note = chemically synthesized
  source 1..22: mol_type = other DNA
acctgaatggttatgacctaat

SEQ ID NO: 85257 - DNA, 22 bp, synthetic construct
  misc_feature 1..22: note = chemically synthesized
  source 1..22: mol_type = other DNA
cctgaatggttatgacctaatt

SEQ ID NO: 85258 - DNA, 22 bp, synthetic construct
  misc_feature 1..22: note = chemically synthesized
  source 1..22: mol_type = other DNA
aatggttatgacctaattagag

SEQ ID NO: 85259 - DNA, 22 bp, synthetic construct
  misc_feature 1..22: note = chemically synthesized
  source 1..22: mol_type = other DNA
tgacctaattagaggaatgact

SEQ ID NO: 85260 - DNA, 22 bp, synthetic construct
  misc_feature 1..22: note = chemically synthesized
  source 1..22: mol_type = other DNA
attagaggaatgactttataaa

SEQ ID NO: 85261 - DNA, 22 bp, synthetic construct
  misc_feature 1..22: note = chemically synthesized
  source 1..22: mol_type = other DNA
gaggaatgactttataaacata

SEQ ID NO: 85262 - DNA, 22 bp, synthetic construct
  misc_feature 1..22: note = chemically synthesized
  source 1..22: mol_type = other DNA
tataaacatatatagatacaaa

SEQ ID NO: 85263 - DNA, 22 bp, synthetic construct
  misc_feature 1..22: note = chemically synthesized
  source 1..22: mol_type = other DNA
ataaacatatatagatacaaat

SEQ ID NO: 85264 - DNA, 22 bp, synthetic construct
  misc_feature 1..22: note = chemically synthesized
  source 1..22: mol_type = other DNA
taaacatatatagatacaaata

SEQ ID NO: 85265 - DNA, 22 bp, synthetic construct
  misc_feature 1..22: note = chemically synthesized
  source 1..22: mol_type = other DNA
attatatactatatatttatta

SEQ ID NO: 85266 - DNA, 22 bp, synthetic construct
  misc_feature 1..22: note = chemically synthesized
  source 1..22: mol_type = other DNA
ttatatactatatatttattat

SEQ ID NO: 85267 - DNA, 22 bp, synthetic construct
  misc_feature 1..22: note = chemically synthesized
  source 1..22: mol_type = other DNA
tatactatatatttattatata

SEQ ID NO: 85268 - DNA, 22 bp, synthetic construct
  misc_feature 1..22: note = chemically synthesized
  source 1..22: mol_type = other DNA
tatatttattatatattatata

SEQ ID NO: 85269 - DNA, 22 bp, synthetic construct
  misc_feature 1..22: note = chemically synthesized
  source 1..22: mol_type = other DNA
attatatattatataagcataa

SEQ ID NO: 85270 - DNA, 22 bp, synthetic construct
  misc_feature 1..22: note = chemically synthesized
  source 1..22: mol_type = other DNA
ttatatattatataagcataaa

SEQ ID NO: 85271 - DNA, 22 bp, synthetic construct
  misc_feature 1..22: note = chemically synthesized
  source 1..22: mol_type = other DNA
tatattatataagcataaaatg

SEQ ID NO: 85272 - DNA, 22 bp, synthetic construct
  misc_feature 1..22: note = chemically synthesized
  source 1..22: mol_type = other DNA
tataagcataaaatgtaataga

SEQ ID NO: 85273 - DNA, 22 bp, synthetic construct
  misc_feature 1..22: note = chemically synthesized
  source 1..22: mol_type = other DNA
ttgtatatatttaataacatat

SEQ ID NO: 85274 - DNA, 22 bp, synthetic construct
  misc_feature 1..22: note = chemically synthesized
  source 1..22: mol_type = other DNA
tatatatttaataacatattat

SEQ ID NO: 85275 - DNA, 22 bp, synthetic construct
  misc_feature 1..22: note = chemically synthesized
  source 1..22: mol_type = other DNA
aataacatattattacatattt

SEQ ID NO: 85276 - DNA, 22 bp, synthetic construct
  misc_feature 1..22: note = chemically synthesized
  source 1..22: mol_type = other DNA
ataacatattattacatatttt

SEQ ID NO: 85277 - DNA, 22 bp, synthetic construct
  misc_feature 1..22: note = chemically synthesized
  source 1..22: mol_type = other DNA
ttacatattttaatatataata

SEQ ID NO: 85278 - DNA, 22 bp, synthetic construct
  misc_feature 1..22: note = chemically synthesized
  source 1..22: mol_type = other DNA
catattttaatatataatatat

SEQ ID NO: 85279 - DNA, 22 bp, synthetic construct
  misc_feature 1..22: note = chemically synthesized
  source 1..22: mol_type = other DNA
taatatataatatataaaatgt

SEQ ID NO: 85280 - DNA, 22 bp, synthetic construct
  misc_feature 1..22: note = chemically synthesized
  source 1..22: mol_type = other DNA
aatatataatatataaaatgta

SEQ ID NO: 85281 - DNA, 22 bp, synthetic construct
  misc_feature 1..22: note = chemically synthesized
  source 1..22: mol_type = other DNA
atatataatatataaaatgtat

SEQ ID NO: 85282 - DNA, 22 bp, synthetic construct
  misc_feature 1..22: note = chemically synthesized
  source 1..22: mol_type = other DNA
tatttaatatataatgcatgta

SEQ ID NO: 85283 - DNA, 22 bp, synthetic construct
  misc_feature 1..22: note = chemically synthesized
  source 1..22: mol_type = other DNA
aatatataatgcatgtaatata

SEQ ID NO: 85284 - DNA, 22 bp, synthetic construct
  misc_feature 1..22: note = chemically synthesized
  source 1..22: mol_type = other DNA
atatataatgcatgtaatatat

SEQ ID NO: 85285 - DNA, 22 bp, synthetic construct
  misc_feature 1..22: note = chemically synthesized
  source 1..22: mol_type = other DNA
tatattatatattatgtaataa

SEQ ID NO: 85286 - DNA, 22 bp, synthetic construct
  misc_feature 1..22: note = chemically synthesized
  source 1..22: mol_type = other DNA
tatattatgtaataaatatata

SEQ ID NO: 85287 - DNA, 22 bp, synthetic construct
  misc_feature 1..22: note = chemically synthesized
  source 1..22: mol_type = other DNA
tgtaataaatatatattatgta

SEQ ID NO: 85288 - DNA, 22 bp, synthetic construct
  misc_feature 1..22: note = chemically synthesized
  source 1..22: mol_type = other DNA
tgtatatacacatttatctaga

SEQ ID NO: 85289 - DNA, 22 bp, synthetic construct
  misc_feature 1..22: note = chemically synthesized
  source 1..22: mol_type = other DNA
atctagactttattacatattt

SEQ ID NO: 85290 - DNA, 22 bp, synthetic construct
  misc_feature 1..22: note = chemically synthesized
  source 1..22: mol_type = other DNA
tctagactttattacatatttc

SEQ ID NO: 85291 - DNA, 22 bp, synthetic construct
  misc_feature 1..22: note = chemically synthesized
  source 1..22: mol_type = other DNA
gactttattacatatttcatta

SEQ ID NO: 85292 - DNA, 22 bp, synthetic construct
  misc_feature 1..22: note = chemically synthesized
  source 1..22: mol_type = other DNA
tattacatatttcattatatat

SEQ ID NO: 85293 - DNA, 22 bp, synthetic construct
  misc_feature 1..22: note = chemically synthesized
  source 1..22: mol_type = other DNA
attacatatttcattatatatt

SEQ ID NO: 85294 - DNA, 22 bp, synthetic construct
  misc_feature 1..22: note = chemically synthesized
  source 1..22: mol_type = other DNA
ttacatatttcattatatattt

SEQ ID NO: 85295 - DNA, 22 bp, synthetic construct
  misc_feature 1..22: note = chemically synthesized
  source 1..22: mol_type = other DNA
catatttcattatatattttat

SEQ ID NO: 85296 - DNA, 22 bp, synthetic construct
  misc_feature 1..22: note = chemically synthesized
  source 1..22: mol_type = other DNA
cattatatattttataagattt

SEQ ID NO: 85297 - DNA, 22 bp, synthetic construct
  misc_feature 1..22: note = chemically synthesized
  source 1..22: mol_type = other DNA
attatatattttataagatttc

SEQ ID NO: 85298 - DNA, 22 bp, synthetic construct
  misc_feature 1..22: note = chemically synthesized
  source 1..22: mol_type = other DNA
tatattttataagatttctata

SEQ ID NO: 85299 - DNA, 22 bp, synthetic construct
  misc_feature 1..22: note = chemically synthesized
  source 1..22: mol_type = other DNA
tataagatttctataaataata

SEQ ID NO: 85300 - DNA, 22 bp, synthetic construct
  misc_feature 1..22: note = chemically synthesized
  source 1..22: mol_type = other DNA
ataagatttctataaataatat

SEQ ID NO: 85301 - DNA, 22 bp, synthetic construct
  misc_feature 1..22: note = chemically synthesized
  source 1..22: mol_type = other DNA
taagatttctataaataatatt

SEQ ID NO: 85302 - DNA, 22 bp, synthetic construct
  misc_feature 1..22: note = chemically synthesized
  source 1..22: mol_type = other DNA
ctataaataatattcccatcat

SEQ ID NO: 85303 - DNA, 22 bp, synthetic construct
  misc_feature 1..22: note = chemically synthesized
  source 1..22: mol_type = other DNA
tataaataatattcccatcatt

SEQ ID NO: 85304 - DNA, 22 bp, synthetic construct
  misc_feature 1..22: note = chemically synthesized
  source 1..22: mol_type = other DNA
taaataatattcccatcattac

SEQ ID NO: 85305 - DNA, 22 bp, synthetic construct
  misc_feature 1..22: note = chemically synthesized
  source 1..22: mol_type = other DNA
ccatcattactaaaatattttt

SEQ ID NO: 85306 - DNA, 22 bp, synthetic construct
  misc_feature 1..22: note = chemically synthesized
  source 1..22: mol_type = other DNA
ctaaaatattttttaaaaatta

SEQ ID NO: 85307 - DNA, 22 bp, synthetic construct
  misc_feature 1..22: note = chemically synthesized
  source 1..22: mol_type = other DNA
aaatattttttaaaaattagcc

SEQ ID NO: 85308 - DNA, 22 bp, synthetic construct
  misc_feature 1..22: note = chemically synthesized
  source 1..22: mol_type = other DNA
tttaaaaattagccatacctta

SEQ ID NO: 85309 - DNA, 22 bp, synthetic construct
  misc_feature 1..22: note = chemically synthesized
  source 1..22: mol_type = other DNA
ttaaaaattagccataccttag

SEQ ID NO: 85310 - DNA, 22 bp, synthetic construct
  misc_feature 1..22: note = chemically synthesized
  source 1..22: mol_type = other DNA
taaaaattagccataccttaga

SEQ ID NO: 85311 - DNA, 22 bp, synthetic construct
  misc_feature 1..22: note = chemically synthesized
  source 1..22: mol_type = other DNA
aaaaattagccataccttagaa

SEQ ID NO: 85312 - DNA, 22 bp, synthetic construct
  misc_feature 1..22: note = chemically synthesized
  source 1..22: mol_type = other DNA
aaaattagccataccttagaag

SEQ ID NO: 85313 - DNA, 22 bp, synthetic construct
  misc_feature 1..22: note = chemically synthesized
  source 1..22: mol_type = other DNA
gccataccttagaagcattata

SEQ ID NO: 85314 - DNA, 22 bp, synthetic construct
  misc_feature 1..22: note = chemically synthesized
  source 1..22: mol_type = other DNA
agaagcattataaaaaatatat

SEQ ID NO: 85315 - DNA, 22 bp, synthetic construct
  misc_feature 1..22: note = chemically synthesized
  source 1..22: mol_type = other DNA
gaagcattataaaaaatatatg

SEQ ID NO: 85316 - DNA, 22 bp, synthetic construct
  misc_feature 1..22: note = chemically synthesized
  source 1..22: mol_type = other DNA
taaaaaatatatgacatggtcc

SEQ ID NO: 85317 - DNA, 22 bp, synthetic construct
  misc_feature 1..22: note = chemically synthesized
  source 1..22: mol_type = other DNA
ttcaactgtagccatctaacca

SEQ ID NO: 85318 - DNA, 22 bp, synthetic construct
  misc_feature 1..22: note = chemically synthesized
  source 1..22: mol_type = other DNA
aactgtagccatctaaccattt

SEQ ID NO: 85319 - DNA, 22 bp, synthetic construct
  misc_feature 1..22: note = chemically synthesized
  source 1..22: mol_type = other DNA
tagccatctaaccatttgagaa

SEQ ID NO: 85320 - DNA, 22 bp, synthetic construct
  misc_feature 1..22: note = chemically synthesized
  source 1..22: mol_type = other DNA
accatttgagaagtttttataa

SEQ ID NO: 85321 - DNA, 22 bp, synthetic construct
  misc_feature 1..22: note = chemically synthesized
  source 1..22: mol_type = other DNA
gagaagtttttataagatttat

SEQ ID NO: 85322 - DNA, 22 bp, synthetic construct
  misc_feature 1..22: note = chemically synthesized
  source 1..22: mol_type = other DNA
agaagtttttataagatttata

SEQ ID NO: 85323 - DNA, 22 bp, synthetic construct
  misc_feature 1..22: note = chemically synthesized
  source 1..22: mol_type = other DNA
ttataagatttatagcatttga

SEQ ID NO: 85324 - DNA, 22 bp, synthetic construct
  misc_feature 1..22: note = chemically synthesized
  source 1..22: mol_type = other DNA
tataagatttatagcatttgat

SEQ ID NO: 85325 - DNA, 22 bp, synthetic construct
  misc_feature 1..22: note = chemically synthesized
  source 1..22: mol_type = other DNA
ataagatttatagcatttgatt

SEQ ID NO: 85326 - DNA, 22 bp, synthetic construct
  misc_feature 1..22: note = chemically synthesized
  source 1..22: mol_type = other DNA
taagatttatagcatttgattg

SEQ ID NO: 85327 - DNA, 22 bp, synthetic construct
  misc_feature 1..22: note = chemically synthesized
  source 1..22: mol_type = other DNA
atagcatttgattgtaccatga

SEQ ID NO: 85328 - DNA, 22 bp, synthetic construct
  misc_feature 1..22: note = chemically synthesized
  source 1..22: mol_type = other DNA
tagcatttgattgtaccatgac

SEQ ID NO: 85329 - DNA, 22 bp, synthetic construct
  misc_feature 1..22: note = chemically synthesized
  source 1..22: mol_type = other DNA
gattgtaccatgacataaatca

SEQ ID NO: 85330 - DNA, 22 bp, synthetic construct
  misc_feature 1..22: note = chemically synthesized
  source 1..22: mol_type = other DNA
attgtaccatgacataaatcat

SEQ ID NO: 85331 - DNA, 22 bp, synthetic construct
  misc_feature 1..22: note = chemically synthesized
  source 1..22: mol_type = other DNA
taccatgacataaatcatctca

SEQ ID NO: 85332 - DNA, 22 bp, synthetic construct
  misc_feature 1..22: note = chemically synthesized
  source 1..22: mol_type = other DNA
atgcaagatagtgtatttgttt

SEQ ID NO: 85333 - DNA, 22 bp, synthetic construct
  misc_feature 1..22: note = chemically synthesized
  source 1..22: mol_type = other DNA
gttttgttggctttaatatgtt

SEQ ID NO: 85334 - DNA, 22 bp, synthetic construct
  misc_feature 1..22: note = chemically synthesized
  source 1..22: mol_type = other DNA
ttttgttggctttaatatgttc

SEQ ID NO: 85335 - DNA, 22 bp, synthetic construct
  misc_feature 1..22: note = chemically synthesized
  source 1..22: mol_type = other DNA
tgttggctttaatatgttccct

SEQ ID NO: 85336 - DNA, 22 bp, synthetic construct
  misc_feature 1..22: note = chemically synthesized
  source 1..22: mol_type = other DNA
gttggctttaatatgttccctt

SEQ ID NO: 85337 - DNA, 22 bp, synthetic construct
  misc_feature 1..22: note = chemically synthesized
  source 1..22: mol_type = other DNA
ttggctttaatatgttcccttt

SEQ ID NO: 85338 - DNA, 22 bp, synthetic construct
  misc_feature 1..22: note = chemically synthesized
  source 1..22: mol_type = other DNA
gctttaatatgttcccttttct

SEQ ID NO: 85339 - DNA, 22 bp, synthetic construct
  misc_feature 1..22: note = chemically synthesized
  source 1..22: mol_type = other DNA
taatatgttcccttttcttcag

SEQ ID NO: 85340 - DNA, 22 bp, synthetic construct
  misc_feature 1..22: note = chemically synthesized
  source 1..22: mol_type = other DNA
aatatgttcccttttcttcaga

SEQ ID NO: 85341 - DNA, 22 bp, synthetic construct
  misc_feature 1..22: note = chemically synthesized
  source 1..22: mol_type = other DNA
atatgttcccttttcttcagaa

SEQ ID NO: 85342 - DNA, 22 bp, synthetic construct
  misc_feature 1..22: note = chemically synthesized
  source 1..22: mol_type = other DNA
ccttttcttcagaaaatgtgag

SEQ ID NO: 85343 - DNA, 22 bp, synthetic construct
  misc_feature 1..22: note = chemically synthesized
  source 1..22: mol_type = other DNA
ttcttcagaaaatgtgagacag

SEQ ID NO: 85344 - DNA, 22 bp, synthetic construct
  misc_feature 1..22: note = chemically synthesized
  source 1..22: mol_type = other DNA
tcttcagaaaatgtgagacagc

SEQ ID NO: 85345 - DNA, 22 bp, synthetic construct
  misc_feature 1..22: note = chemically synthesized
  source 1..22: mol_type = other DNA
cttcagaaaatgtgagacagct

SEQ ID NO: 85346 - DNA, 22 bp, synthetic construct
  misc_feature 1..22: note = chemically synthesized
  source 1..22: mol_type = other DNA
ttcagaaaatgtgagacagctt

SEQ ID NO: 85347 - DNA, 22 bp, synthetic construct
  misc_feature 1..22: note = chemically synthesized
  source 1..22: mol_type = other DNA
cagaaaatgtgagacagcttaa

SEQ ID NO: 85348 - DNA, 22 bp, synthetic construct
  misc_feature 1..22: note = chemically synthesized
  source 1..22: mol_type = other DNA
agaaaatgtgagacagcttaaa

SEQ ID NO: 85349 - DNA, 22 bp, synthetic construct
  misc_feature 1..22: note = chemically synthesized
  source 1..22: mol_type = other DNA
aaaataaaattaactataagaa

SEQ ID NO: 85350 - DNA, 22 bp, synthetic construct
  misc_feature 1..22: note = chemically synthesized
  source 1..22: mol_type = other DNA
aaataaaattaactataagaaa

SEQ ID NO: 85351 - DNA, 22 bp, synthetic construct
  misc_feature 1..22: note = chemically synthesized
  source 1..22: mol_type = other DNA
actataagaaactggtaaacac

SEQ ID NO: 85352 - DNA, 22 bp, synthetic construct
  misc_feature 1..22: note = chemically synthesized
  source 1..22: mol_type = other DNA
taagaaactggtaaacactgaa

SEQ ID NO: 85353 - DNA, 22 bp, synthetic construct
  misc_feature 1..22: note = chemically synthesized
  source 1..22: mol_type = other DNA
gtaaacactgaatgaaagaaga

SEQ ID NO: 85354 - DNA, 22 bp, synthetic construct
  misc_feature 1..22: note = chemically synthesized
  source 1..22: mol_type = other DNA
aatgaaagaagaaaaccaagca

SEQ ID NO: 85355 - DNA, 22 bp, synthetic construct
  misc_feature 1..22: note = chemically synthesized
  source 1..22: mol_type = other DNA
caaataaatttatattttaaaa

SEQ ID NO: 85356 - DNA, 22 bp, synthetic construct
  misc_feature 1..22: note = chemically synthesized
  source 1..22: mol_type = other DNA
atattttaaaaacattttttat

SEQ ID NO: 85357 - DNA, 22 bp, synthetic construct
  misc_feature 1..22: note = chemically synthesized
  source 1..22: mol_type = other DNA
tattttaaaaacattttttatt

SEQ ID NO: 85358 - DNA, 22 bp, synthetic construct
  misc_feature 1..22: note = chemically synthesized
  source 1..22: mol_type = other DNA
taaaaacattttttatttgcct

SEQ ID NO: 85359 - DNA, 22 bp, synthetic construct
  misc_feature 1..22: note = chemically synthesized
  source 1..22: mol_type = other DNA
aaaaacattttttatttgcctg

SEQ ID NO: 85360 - DNA, 22 bp, synthetic construct
  misc_feature 1..22: note = chemically synthesized
  source 1..22: mol_type = other DNA
aaaacattttttatttgcctgg

SEQ ID NO: 85361 - DNA, 22 bp, synthetic construct
  misc_feature 1..22: note = chemically synthesized
  source 1..22: mol_type = other DNA
tttatttgcctggcaaataata

SEQ ID NO: 85362 - DNA, 22 bp, synthetic construct
  misc_feature 1..22: note = chemically synthesized
  source 1..22: mol_type = other DNA
ttatttgcctggcaaataataa

SEQ ID NO: 85363 - DNA, 22 bp, synthetic construct
  misc_feature 1..22: note = chemically synthesized
  source 1..22: mol_type = other DNA
tatttgcctggcaaataataag

SEQ ID NO: 85364 - DNA, 22 bp, synthetic construct
  misc_feature 1..22: note = chemically synthesized
  source 1..22: mol_type = other DNA
atttgcctggcaaataataagt

SEQ ID NO: 85365 - DNA, 22 bp, synthetic construct
  misc_feature 1..22: note = chemically synthesized
  source 1..22: mol_type = other DNA
tttgcctggcaaataataagtg

SEQ ID NO: 85366 - DNA, 22 bp, synthetic construct
  misc_feature 1..22: note = chemically synthesized
  source 1..22: mol_type = other DNA
gcctggcaaataataagtgcat

SEQ ID NO: 85367 - DNA, 22 bp, synthetic construct
  misc_feature 1..22: note = chemically synthesized
  source 1..22: mol_type = other DNA
cctggcaaataataagtgcata

SEQ ID NO: 85368 - DNA, 22 bp, synthetic construct
  misc_feature 1..22: note = chemically synthesized
  source 1..22: mol_type = other DNA
gcaaataataagtgcatatatt

SEQ ID NO: 85369 - DNA, 22 bp, synthetic construct
  misc_feature 1..22: note = chemically synthesized
  source 1..22: mol_type = other DNA
atggatacaataataatatata

SEQ ID NO: 85370 - DNA, 22 bp, synthetic construct
  misc_feature 1..22: note = chemically synthesized
  source 1..22: mol_type = other DNA
tgggatacaatgtgatgtttga

SEQ ID NO: 85371 - DNA, 22 bp, synthetic construct
  misc_feature 1..22: note = chemically synthesized
  source 1..22: mol_type = other DNA
gatctatatatacattgtagag

SEQ ID NO: 85372 - DNA, 22 bp, synthetic construct
  misc_feature 1..22: note = chemically synthesized
  source 1..22: mol_type = other DNA
atctatatatacattgtagaga

SEQ ID NO: 85373 - DNA, 22 bp, synthetic construct
  misc_feature 1..22: note = chemically synthesized
  source 1..22: mol_type = other DNA
tatatacattgtagagagagtc

SEQ ID NO: 85374 - DNA, 22 bp, synthetic construct
  misc_feature 1..22: note = chemically synthesized
  source 1..22: mol_type = other DNA
tagagagagtctatcaagctaa

SEQ ID NO: 85375 - DNA, 22 bp, synthetic construct
  misc_feature 1..22: note = chemically synthesized
  source 1..22: mol_type = other DNA
tcaagctaattagcatatgaat

SEQ ID NO: 85376 - DNA, 22 bp, synthetic construct
  misc_feature 1..22: note = chemically synthesized
  source 1..22: mol_type = other DNA
attagcatatgaatcaccttcc

SEQ ID NO: 85377 - DNA, 22 bp, synthetic construct
  misc_feature 1..22: note = chemically synthesized
  source 1..22: mol_type = other DNA
gcatatgaatcaccttccaact

SEQ ID NO: 85378 - DNA, 22 bp, synthetic construct
  misc_feature 1..22: note = chemically synthesized
  source 1..22: mol_type = other DNA
ccaactttttttgtggtgagaa

SEQ ID NO: 85379 - DNA, 22 bp, synthetic construct
  misc_feature 1..22: note = chemically synthesized
  source 1..22: mol_type = other DNA
caactttttttgtggtgagaac

SEQ ID NO: 85380 - DNA, 22 bp, synthetic construct
  misc_feature 1..22: note = chemically synthesized
  source 1..22: mol_type = other DNA
tttttgtggtgagaacataaaa

SEQ ID NO: 85381 - DNA, 22 bp, synthetic construct
  misc_feature 1..22: note = chemically synthesized
  source 1..22: mol_type = other DNA
ttttgtggtgagaacataaaat

SEQ ID NO: 85382 - DNA, 22 bp, synthetic construct
  misc_feature 1..22: note = chemically synthesized
  source 1..22: mol_type = other DNA
tttgtggtgagaacataaaata

SEQ ID NO: 85383 - DNA, 22 bp, synthetic construct
  misc_feature 1..22: note = chemically synthesized
  source 1..22: mol_type = other DNA
ttgtggtgagaacataaaatat

SEQ ID NO: 85384 - DNA, 22 bp, synthetic construct
  misc_feature 1..22: note = chemically synthesized
  source 1..22: mol_type = other DNA
tgtggtgagaacataaaatatt

SEQ ID NO: 85385 - DNA, 22 bp, synthetic construct
  misc_feature 1..22: note = chemically synthesized
  source 1..22: mol_type = other DNA
gtggtgagaacataaaatattt

SEQ ID NO: 85386 - DNA, 22 bp, synthetic construct
  misc_feature 1..22: note = chemically synthesized
  source 1..22: mol_type = other DNA
tggtgagaacataaaatattta

SEQ ID NO: 85387 - DNA, 22 bp, synthetic construct
  misc_feature 1..22: note = chemically synthesized
  source 1..22: mol_type = other DNA
attttttagcaatttttaattt

SEQ ID NO: 85388 - DNA, 22 bp, synthetic construct
  misc_feature 1..22: note = chemically synthesized
  source 1..22: mol_type = other DNA
ttttttagcaatttttaattta

SEQ ID NO: 85389 - DNA, 22 bp, synthetic construct
  misc_feature 1..22: note = chemically synthesized
  source 1..22: mol_type = other DNA
tttagcaatttttaatttaaat

SEQ ID NO: 85390 - DNA, 22 bp, synthetic construct
  misc_feature 1..22: note = chemically synthesized
  source 1..22: mol_type = other DNA
ttagcaatttttaatttaaata

SEQ ID NO: 85391 - DNA, 22 bp, synthetic construct
  misc_feature 1..22: note = chemically synthesized
  source 1..22: mol_type = other DNA
tagcaatttttaatttaaatac

SEQ ID NO: 85392 - DNA, 22 bp, synthetic construct
  misc_feature 1..22: note = chemically synthesized
  source 1..22: mol_type = other DNA
agcaatttttaatttaaataca

SEQ ID NO: 85393 - DNA, 22 bp, synthetic construct
  misc_feature 1..22: note = chemically synthesized
  source 1..22: mol_type = other DNA
gcaatttttaatttaaatacat

SEQ ID NO: 85394 - DNA, 22 bp, synthetic construct
  misc_feature 1..22: note = chemically synthesized
  source 1..22: mol_type = other DNA
ttaatttaaatacataatatat

SEQ ID NO: 85395 - DNA, 22 bp, synthetic construct
  misc_feature 1..22: note = chemically synthesized
  source 1..22: mol_type = other DNA
taatttaaatacataatatatt

SEQ ID NO: 85396 - DNA, 22 bp, synthetic construct
  misc_feature 1..22: note = chemically synthesized
  source 1..22: mol_type = other DNA
aatttaaatacataatatatta

SEQ ID NO: 85397 - DNA, 22 bp, synthetic construct
  misc_feature 1..22: note = chemically synthesized
  source 1..22: mol_type = other DNA
atttaaatacataatatattat

SEQ ID NO: 85398 - DNA, 22 bp, synthetic construct
  misc_feature 1..22: note = chemically synthesized
  source 1..22: mol_type = other DNA
aaatacataatatattattaac

SEQ ID NO: 85399 - DNA, 22 bp, synthetic construct
  misc_feature 1..22: note = chemically synthesized
  source 1..22: mol_type = other DNA
aatacataatatattattaact

SEQ ID NO: 85400 - DNA, 22 bp, synthetic construct
  misc_feature 1..22: note = chemically synthesized
  source 1..22: mol_type = other DNA
ttaactgtgttcactatgcagt

SEQ ID NO: 85401 - DNA, 22 bp, synthetic construct
  misc_feature 1..22: note = chemically synthesized
  source 1..22: mol_type = other DNA
actgtgttcactatgcagtgtg

SEQ ID NO: 85402 - DNA, 22 bp, synthetic construct
  misc_feature 1..22: note = chemically synthesized
  source 1..22: mol_type = other DNA
tgttcactatgcagtgtgagag

SEQ ID NO: 85403 - DNA, 22 bp, synthetic construct
  misc_feature 1..22: note = chemically synthesized
  source 1..22: mol_type = other DNA
actatgcagtgtgagagatcac

SEQ ID NO: 85404 - DNA, 22 bp, synthetic construct
  misc_feature 1..22: note = chemically synthesized
  source 1..22: mol_type = other DNA
tgcagtgtgagagatcactaaa

SEQ ID NO: 85405 - DNA, 22 bp, synthetic construct
  misc_feature 1..22: note = chemically synthesized
  source 1..22: mol_type = other DNA
aaacttattcctctagtctaac

SEQ ID NO: 85406 - DNA, 22 bp, synthetic construct
  misc_feature 1..22: note = chemically synthesized
  source 1..22: mol_type = other DNA
attcctctagtctaactgaaga

SEQ ID NO: 85407 - DNA, 22 bp, synthetic construct
  misc_feature 1..22: note = chemically synthesized
  source 1..22: mol_type = other DNA
ttcctctagtctaactgaagat

SEQ ID NO: 85408 - DNA, 22 bp, synthetic construct
  misc_feature 1..22: note = chemically synthesized
  source 1..22: mol_type = other DNA
ctctagtctaactgaagatcaa

SEQ ID NO: 85409 - DNA, 22 bp, synthetic construct
  misc_feature 1..22: note = chemically synthesized
  source 1..22: mol_type = other DNA
tagtctaactgaagatcaactt

SEQ ID NO: 85410 - DNA, 22 bp, synthetic construct
  misc_feature 1..22: note = chemically synthesized
  source 1..22: mol_type = other DNA
gtctaactgaagatcaacttct

SEQ ID NO: 85411 - DNA, 22 bp, synthetic construct
  misc_feature 1..22: note = chemically synthesized
  source 1..22: mol_type = other DNA
actgaagatcaacttctttccc

SEQ ID NO: 85412 - DNA, 22 bp, synthetic construct
  misc_feature 1..22: note = chemically synthesized
  source 1..22: mol_type = other DNA
aagatcaacttctttcccttcc

SEQ ID NO: 85413 - DNA, 22 bp, synthetic construct
  misc_feature 1..22: note = chemically synthesized
  source 1..22: mol_type = other DNA
ctttcccttcccatccctcctc

SEQ ID NO: 85414 - DNA, 22 bp, synthetic construct
  misc_feature 1..22: note = chemically synthesized
  source 1..22: mol_type = other DNA
tttcccttcccatccctcctct

SEQ ID NO: 85415 - DNA, 22 bp, synthetic construct
  misc_feature 1..22: note = chemically synthesized
  source 1..22: mol_type = other DNA
tcccttcccatccctcctctac

SEQ ID NO: 85416 - DNA, 22 bp, synthetic construct
  misc_feature 1..22: note = chemically synthesized
  source 1..22: mol_type = other DNA
cccttcccatccctcctctaca

SEQ ID NO: 85417 - DNA, 22 bp, synthetic construct
  misc_feature 1..22: note = chemically synthesized
  source 1..22: mol_type = other DNA
ccttcccatccctcctctacac

SEQ ID NO: 85418 - DNA, 22 bp, synthetic construct
  misc_feature 1..22: note = chemically synthesized
  source 1..22: mol_type = other DNA
cccatccctcctctacactctc

SEQ ID NO: 85419 - DNA, 22 bp, synthetic construct
  misc_feature 1..22: note = chemically synthesized
  source 1..22: mol_type = other DNA
ccatccctcctctacactctca

SEQ ID NO: 85420 - DNA, 22 bp, synthetic construct
  misc_feature 1..22: note = chemically synthesized
  source 1..22: mol_type = other DNA
ctctacactctcagtcagccta

SEQ ID NO: 85421 - DNA, 22 bp, synthetic construct
  misc_feature 1..22: note = chemically synthesized
  source 1..22: mol_type = other DNA
tacactctcagtcagcctatgg

SEQ ID NO: 85422 - DNA, 22 bp, synthetic construct
  misc_feature 1..22: note = chemically synthesized
  source 1..22: mol_type = other DNA
cactctcagtcagcctatggaa

SEQ ID NO: 85423 - DNA, 22 bp, synthetic construct
  misc_feature 1..22: note = chemically synthesized
  source 1..22: mol_type = other DNA
tcagtcagcctatggaaccatc

SEQ ID NO: 85424 - DNA, 22 bp, synthetic construct
  misc_feature 1..22: note = chemically synthesized
  source 1..22: mol_type = other DNA
agtcagcctatggaaccatctt

SEQ ID NO: 85425 - DNA, 22 bp, synthetic construct
  misc_feature 1..22: note = chemically synthesized
  source 1..22: mol_type = other DNA
tggaaccatctttctattcccg

SEQ ID NO: 85426 - DNA, 22 bp, synthetic construct
  misc_feature 1..22: note = chemically synthesized
  source 1..22: mol_type = other DNA
tctattcccgtttttatgaaat

SEQ ID NO: 85427 - DNA, 22 bp, synthetic construct
  misc_feature 1..22: note = chemically synthesized
  source 1..22: mol_type = other DNA
ctattcccgtttttatgaaatc

SEQ ID NO: 85428 - DNA, 22 bp, synthetic construct
  misc_feature 1..22: note = chemically synthesized
  source 1..22: mol_type = other DNA
tattcccgtttttatgaaatca

SEQ ID NO: 85429 - DNA, 22 bp, synthetic construct
  misc_feature 1..22: note = chemically synthesized
  source 1..22: mol_type = other DNA
ttcccgtttttatgaaatcaac

SEQ ID NO: 85430 - DNA, 22 bp, synthetic construct
  misc_feature 1..22: note = chemically synthesized
  source 1..22: mol_type = other DNA
ccgtttttatgaaatcaacttt

SEQ ID NO: 85431 - DNA, 22 bp, synthetic construct
  misc_feature 1..22: note = chemically synthesized
  source 1..22: mol_type = other DNA
ttatgaaatcaactttttaaaa

SEQ ID NO: 85432 - DNA, 22 bp, synthetic construct
  misc_feature 1..22: note = chemically synthesized
  source 1..22: mol_type = other DNA
tatgaaatcaactttttaaaaa

SEQ ID NO: 85433 - DNA, 22 bp, synthetic construct
  misc_feature 1..22: note = chemically synthesized
  source 1..22: mol_type = other DNA
atgaaatcaactttttaaaaaa

SEQ ID NO: 85434 - DNA, 22 bp, synthetic construct
  misc_feature 1..22: note = chemically synthesized
  source 1..22: mol_type = other DNA
tgaaatcaactttttaaaaaat

SEQ ID NO: 85435 - DNA, 22 bp, synthetic construct
  misc_feature 1..22: note = chemically synthesized
  source 1..22: mol_type = other DNA
tttaaaaaattcatccttaaat

SEQ ID NO: 85436 - DNA, 22 bp, synthetic construct
  misc_feature 1..22: note = chemically synthesized
  source 1..22: mol_type = other DNA
ttaaaaaattcatccttaaata

SEQ ID NO: 85437 - DNA, 22 bp, synthetic construct
  misc_feature 1..22: note = chemically synthesized
  source 1..22: mol_type = other DNA
taaaaaattcatccttaaatat

SEQ ID NO: 85438 - DNA, 22 bp, synthetic construct
  misc_feature 1..22: note = chemically synthesized
  source 1..22: mol_type = other DNA
aaaaaattcatccttaaatata

SEQ ID NO: 85439 - DNA, 22 bp, synthetic construct
  misc_feature 1..22: note = chemically synthesized
  source 1..22: mol_type = other DNA
aaaaattcatccttaaatatat

SEQ ID NO: 85440 - DNA, 22 bp, synthetic construct
  misc_feature 1..22: note = chemically synthesized
  source 1..22: mol_type = other DNA
atccttaaatatattaaaatga

SEQ ID NO: 85441 - DNA, 22 bp, synthetic construct
  misc_feature 1..22: note = chemically synthesized
  source 1..22: mol_type = other DNA
aaatatattaaaatgaacagtt

SEQ ID NO: 85442 - DNA, 22 bp, synthetic construct
  misc_feature 1..22: note = chemically synthesized
  source 1..22: mol_type = other DNA
aatatattaaaatgaacagtta

SEQ ID NO: 85443 - DNA, 22 bp, synthetic construct
  misc_feature 1..22: note = chemically synthesized
  source 1..22: mol_type = other DNA
aaatgaacagttaaatttatga

SEQ ID NO: 85444 - DNA, 22 bp, synthetic construct
  misc_feature 1..22: note = chemically synthesized
  source 1..22: mol_type = other DNA
aatttatgaggataaataatta

SEQ ID NO: 85445 - DNA, 22 bp, synthetic construct
  misc_feature 1..22: note = chemically synthesized
  source 1..22: mol_type = other DNA
atgaggataaataattaaaact

SEQ ID NO: 85446 - DNA, 22 bp, synthetic construct
  misc_feature 1..22: note = chemically synthesized
  source 1..22: mol_type = other DNA
tgaggataaataattaaaacta

SEQ ID NO: 85447 - DNA, 22 bp, synthetic construct
  misc_feature 1..22: note = chemically synthesized
  source 1..22: mol_type = other DNA
aaactattacacatattttaag

SEQ ID NO: 85448 - DNA, 22 bp, synthetic construct
  misc_feature 1..22: note = chemically synthesized
  source 1..22: mol_type = other DNA
ttacacatattttaagttgtcc

SEQ ID NO: 85449 - DNA, 22 bp, synthetic construct
  misc_feature 1..22: note = chemically synthesized
  source 1..22: mol_type = other DNA
cacatattttaagttgtcctct

SEQ ID NO: 85450 - DNA, 22 bp, synthetic construct
  misc_feature 1..22: note = chemically synthesized
  source 1..22: mol_type = other DNA
taagttgtcctctgaaaattct

SEQ ID NO: 85451 - DNA, 22 bp, synthetic construct
  misc_feature 1..22: note = chemically synthesized
  source 1..22: mol_type = other DNA
aagttgtcctctgaaaattcta

SEQ ID NO: 85452 - DNA, 22 bp, synthetic construct
  misc_feature 1..22: note = chemically synthesized
  source 1..22: mol_type = other DNA
agttgtcctctgaaaattctag

SEQ ID NO: 85453 - DNA, 22 bp, synthetic construct
  misc_feature 1..22: note = chemically synthesized
  source 1..22: mol_type = other DNA
tcctctgaaaattctagaattc

SEQ ID NO: 85454 - DNA, 22 bp, synthetic construct
  misc_feature 1..22: note = chemically synthesized
  source 1..22: mol_type = other DNA
tgaaaattctagaattctactt

SEQ ID NO: 85455 - DNA, 22 bp, synthetic construct
  misc_feature 1..22: note = chemically synthesized
  source 1..22: mol_type = other DNA
aaaattctagaattctacttca

SEQ ID NO: 85456 - DNA, 22 bp, synthetic construct
  misc_feature 1..22: note = chemically synthesized
  source 1..22: mol_type = other DNA
tagaattctacttcaataccct

SEQ ID NO: 85457 - DNA, 22 bp, synthetic construct
  misc_feature 1..22: note = chemically synthesized
  source 1..22: mol_type = other DNA
gaattctacttcaataccctta

SEQ ID NO: 85458 - DNA, 22 bp, synthetic construct
  misc_feature 1..22: note = chemically synthesized
  source 1..22: mol_type = other DNA
tacttcaatacccttattttta

SEQ ID NO: 85459 - DNA, 22 bp, synthetic construct
  misc_feature 1..22: note = chemically synthesized
  source 1..22: mol_type = other DNA
cttcaatacccttatttttaag

SEQ ID NO: 85460 - DNA, 22 bp, synthetic construct
  misc_feature 1..22: note = chemically synthesized
  source 1..22: mol_type = other DNA
caatacccttatttttaagata

SEQ ID NO: 85461 - DNA, 22 bp, synthetic construct
  misc_feature 1..22: note = chemically synthesized
  source 1..22: mol_type = other DNA
aatacccttatttttaagataa

SEQ ID NO: 85462 - DNA, 22 bp, synthetic construct
  misc_feature 1..22: note = chemically synthesized
  source 1..22: mol_type = other DNA
atttttaagataaaggaaattg

SEQ ID NO: 85463 - DNA, 22 bp, synthetic construct
  misc_feature 1..22: note = chemically synthesized
  source 1..22: mol_type = other DNA
tttttaagataaaggaaattgt

SEQ ID NO: 85464 - DNA, 22 bp, synthetic construct
  misc_feature 1..22: note = chemically synthesized
  source 1..22: mol_type = other DNA
ttaagataaaggaaattgtaaa

SEQ ID NO: 85465 - DNA, 22 bp, synthetic construct
  misc_feature 1..22: note = chemically synthesized
  source 1..22: mol_type = other DNA
taagataaaggaaattgtaaag

SEQ ID NO: 85466 - DNA, 22 bp, synthetic construct
  misc_feature 1..22: note = chemically synthesized
  source 1..22: mol_type = other DNA
aagataaaggaaattgtaaagg

SEQ ID NO: 85467 - DNA, 22 bp, synthetic construct
  misc_feature 1..22: note = chemically synthesized
  source 1..22: mol_type = other DNA
agataaaggaaattgtaaaggc

SEQ ID NO: 85468 - DNA, 22 bp, synthetic construct
  misc_feature 1..22: note = chemically synthesized
  source 1..22: mol_type = other DNA
taaaggctttctaagaaatcga

SEQ ID NO: 85469 - DNA, 22 bp, synthetic construct
  misc_feature 1..22: note = chemically synthesized
  source 1..22: mol_type = other DNA
tctaagaaatcgagtacccata

SEQ ID NO: 85470 - DNA, 22 bp, synthetic construct
  misc_feature 1..22: note = chemically synthesized
  source 1..22: mol_type = other DNA
ctaagaaatcgagtacccatac

SEQ ID NO: 85471 - DNA, 22 bp, synthetic construct
  misc_feature 1..22: note = chemically synthesized
  source 1..22: mol_type = other DNA
taagaaatcgagtacccatacc

SEQ ID NO: 85472 - DNA, 22 bp, synthetic construct
  misc_feature 1..22: note = chemically synthesized
  source 1..22: mol_type = other DNA
agaaatcgagtacccataccta

SEQ ID NO: 85473 - DNA, 22 bp, synthetic construct
  misc_feature 1..22: note = chemically synthesized
  source 1..22: mol_type = other DNA
ggctgctagactccaggtccaa

SEQ ID NO: 85474 - DNA, 22 bp, synthetic construct
  misc_feature 1..22: note = chemically synthesized
  source 1..22: mol_type = other DNA
ctagactccaggtccaattttt

SEQ ID NO: 85475 - DNA, 22 bp, synthetic construct
  misc_feature 1..22: note = chemically synthesized
  source 1..22: mol_type = other DNA
gactccaggtccaatttttctc

SEQ ID NO: 85476 - DNA, 22 bp, synthetic construct
  misc_feature 1..22: note = chemically synthesized
  source 1..22: mol_type = other DNA
caggtccaatttttctccaggg

SEQ ID NO: 85477 - DNA, 22 bp, synthetic construct
  misc_feature 1..22: note = chemically synthesized
  source 1..22: mol_type = other DNA
ttctccagggggttactatggc

SEQ ID NO: 85478 - DNA, 22 bp, synthetic construct
  misc_feature 1..22: note = chemically synthesized
  source 1..22: mol_type = other DNA
tctccagggggttactatggct

SEQ ID NO: 85479 - DNA, 22 bp, synthetic construct
  misc_feature 1..22: note = chemically synthesized
  source 1..22: mol_type = other DNA
ctccagggggttactatggctt

SEQ ID NO: 85480 - DNA, 22 bp, synthetic construct
  misc_feature 1..22: note = chemically synthesized
  source 1..22: mol_type = other DNA
tccagggggttactatggcttc

SEQ ID NO: 85481 - DNA, 22 bp, synthetic construct
  misc_feature 1..22: note = chemically synthesized
  source 1..22: mol_type = other DNA
cagggggttactatggcttcag

SEQ ID NO: 85482 - DNA, 22 bp, synthetic construct
  misc_feature 1..22: note = chemically synthesized
  source 1..22: mol_type = other DNA
ctatggcttcagggaagctatc

SEQ ID NO: 85483 - DNA, 22 bp, synthetic construct
  misc_feature 1..22: note = chemically synthesized
  source 1..22: mol_type = other DNA
tggcttcagggaagctatctat

SEQ ID NO: 85484 - DNA, 22 bp, synthetic construct
  misc_feature 1..22: note = chemically synthesized
  source 1..22: mol_type = other DNA
cagggaagctatctataatcac

SEQ ID NO: 85485 - DNA, 22 bp, synthetic construct
  misc_feature 1..22: note = chemically synthesized
  source 1..22: mol_type = other DNA
agggaagctatctataatcacc

SEQ ID NO: 85486 - DNA, 22 bp, synthetic construct
  misc_feature 1..22: note = chemically synthesized
  source 1..22: mol_type = other DNA
tctataatcaccatctccagaa

SEQ ID NO: 85487 - DNA, 22 bp, synthetic construct
  misc_feature 1..22: note = chemically synthesized
  source 1..22: mol_type = other DNA
taatcaccatctccagaacatc

SEQ ID NO: 85488 - DNA, 22 bp, synthetic construct
  misc_feature 1..22: note = chemically synthesized
  source 1..22: mol_type = other DNA
cagaacatctctcactttctca

SEQ ID NO: 85489 - DNA, 22 bp, synthetic construct
  misc_feature 1..22: note = chemically synthesized
  source 1..22: mol_type = other DNA
tcactttctcatcaccacacag

SEQ ID NO: 85490 - DNA, 22 bp, synthetic construct
  misc_feature 1..22: note = chemically synthesized
  source 1..22: mol_type = other DNA
actttctcatcaccacacagtg

SEQ ID NO: 85491 - DNA, 22 bp, synthetic construct
  misc_feature 1..22: note = chemically synthesized
  source 1..22: mol_type = other DNA
tctcatcaccacacagtggaat

SEQ ID NO: 85492 - DNA, 22 bp, synthetic construct
  misc_feature 1..22: note = chemically synthesized
  source 1..22: mol_type = other DNA
ctcatcaccacacagtggaata

SEQ ID NO: 85493 - DNA, 22 bp, synthetic construct
  misc_feature 1..22: note = chemically synthesized
  source 1..22: mol_type = other DNA
tcatcaccacacagtggaataa

SEQ ID NO: 85494 - DNA, 22 bp, synthetic construct
  misc_feature 1..22: note = chemically synthesized
  source 1..22: mol_type = other DNA
atcaccacacagtggaataaga

SEQ ID NO: 85495 - DNA, 22 bp, synthetic construct
  misc_feature 1..22: note = chemically synthesized
  source 1..22: mol_type = other DNA
tggcagcaataaaaaagtaatg

SEQ ID NO: 85496 - DNA, 22 bp, synthetic construct
  misc_feature 1..22: note = chemically synthesized
  source 1..22: mol_type = other DNA
ggcagcaataaaaaagtaatgc

SEQ ID NO: 85497 - DNA, 22 bp, synthetic construct
  misc_feature 1..22: note = chemically synthesized
  source 1..22: mol_type = other DNA
gcagcaataaaaaagtaatgcc

SEQ ID NO: 85498 - DNA, 22 bp, synthetic construct
  misc_feature 1..22: note = chemically synthesized
  source 1..22: mol_type = other DNA
gtaaagccttcagaaaaagtat

SEQ ID NO: 85499 - DNA, 22 bp, synthetic construct
  misc_feature 1..22: note = chemically synthesized
  source 1..22: mol_type = other DNA
cagaaaaagtatgaatattaca

SEQ ID NO: 85500 - DNA, 22 bp, synthetic construct
  misc_feature 1..22: note = chemically synthesized
  source 1..22: mol_type = other DNA
agaaaaagtatgaatattacac

SEQ ID NO: 85501 - DNA, 22 bp, synthetic construct
  misc_feature 1..22: note = chemically synthesized
  source 1..22: mol_type = other DNA
cacagttacacttatattagaa

SEQ ID NO: 85502 - DNA, 22 bp, synthetic construct
  misc_feature 1..22: note = chemically synthesized
  source 1..22: mol_type = other DNA
cacttatattagaactaaaatt

SEQ ID NO: 85503 - DNA, 22 bp, synthetic construct
  misc_feature 1..22: note = chemically synthesized
  source 1..22: mol_type = other DNA
atattagaactaaaatttattt

SEQ ID NO: 85504 - DNA, 22 bp, synthetic construct
  misc_feature 1..22: note = chemically synthesized
  source 1..22: mol_type = other DNA
tattagaactaaaatttattta

SEQ ID NO: 85505 - DNA, 22 bp, synthetic construct
  misc_feature 1..22: note = chemically synthesized
  source 1..22: mol_type = other DNA
gaactaaaatttatttattgaa

SEQ ID NO: 85506 - DNA, 22 bp, synthetic construct
  misc_feature 1..22: note = chemically synthesized
  source 1..22: mol_type = other DNA
aaatttatttattgaaattcac

SEQ ID NO: 85507 - DNA, 22 bp, synthetic construct
  misc_feature 1..22: note = chemically synthesized
  source 1..22: mol_type = other DNA
atttattgaaattcacattacc

SEQ ID NO: 85508 - DNA, 22 bp, synthetic construct
  misc_feature 1..22: note = chemically synthesized
  source 1..22: mol_type = other DNA
tttattgaaattcacattacca

SEQ ID NO: 85509 - DNA, 22 bp, synthetic construct
  misc_feature 1..22: note = chemically synthesized
  source 1..22: mol_type = other DNA
attgaaattcacattaccataa

SEQ ID NO: 85510 - DNA, 22 bp, synthetic construct
  misc_feature 1..22: note = chemically synthesized
  source 1..22: mol_type = other DNA
ttgaaattcacattaccataat

SEQ ID NO: 85511 - DNA, 22 bp, synthetic construct
  misc_feature 1..22: note = chemically synthesized
  source 1..22: mol_type = other DNA
aaattcacattaccataattat

SEQ ID NO: 85512 - DNA, 22 bp, synthetic construct
  misc_feature 1..22: note = chemically synthesized
  source 1..22: mol_type = other DNA
acattaccataattatttatgt

SEQ ID NO: 85513 - DNA, 22 bp, synthetic construct
  misc_feature 1..22: note = chemically synthesized
  source 1..22: mol_type = other DNA
ccataattatttatgtctgatt

SEQ ID NO: 85514 - DNA, 22 bp, synthetic construct
  misc_feature 1..22: note = chemically synthesized
  source 1..22: mol_type = other DNA
tttatgtctgattaaatgttat

SEQ ID NO: 85515 - DNA, 22 bp, synthetic construct
  misc_feature 1..22: note = chemically synthesized
  source 1..22: mol_type = other DNA
atgtctgattaaatgttattaa

SEQ ID NO: 85516 - DNA, 22 bp, synthetic construct
  misc_feature 1..22: note = chemically synthesized
  source 1..22: mol_type = other DNA
tgtctgattaaatgttattaaa

SEQ ID NO: 85517 - DNA, 22 bp, synthetic construct
  misc_feature 1..22: note = chemically synthesized
  source 1..22: mol_type = other DNA
attaaatgttattaaagctaaa

SEQ ID NO: 85518 - DNA, 22 bp, synthetic construct
  misc_feature 1..22: note = chemically synthesized
  source 1..22: mol_type = other DNA
aatgttattaaagctaaaattt

SEQ ID NO: 85519 - DNA, 22 bp, synthetic construct
  misc_feature 1..22: note = chemically synthesized
  source 1..22: mol_type = other DNA
ttaaagctaaaattttgaattt

SEQ ID NO: 85520 - DNA, 22 bp, synthetic construct
  misc_feature 1..22: note = chemically synthesized
  source 1..22: mol_type = other DNA
aagctaaaattttgaatttata

SEQ ID NO: 85521 - DNA, 22 bp, synthetic construct
  misc_feature 1..22: note = chemically synthesized
  source 1..22: mol_type = other DNA
aaattttgaatttatatactac

SEQ ID NO: 85522 - DNA, 22 bp, synthetic construct
  misc_feature 1..22: note = chemically synthesized
  source 1..22: mol_type = other DNA
tgaatttatatactactattaa

SEQ ID NO: 85523 - DNA, 22 bp, synthetic construct
  misc_feature 1..22: note = chemically synthesized
  source 1..22: mol_type = other DNA
gaatttatatactactattaat

SEQ ID NO: 85524 - DNA, 22 bp, synthetic construct
  misc_feature 1..22: note = chemically synthesized
  source 1..22: mol_type = other DNA
aatttatatactactattaatt

SEQ ID NO: 85525 - DNA, 22 bp, synthetic construct
  misc_feature 1..22: note = chemically synthesized
  source 1..22: mol_type = other DNA
atatactactattaatttccag

SEQ ID NO: 85526 - DNA, 22 bp, synthetic construct
  misc_feature 1..22: note = chemically synthesized
  source 1..22: mol_type = other DNA
tatactactattaatttccagt

SEQ ID NO: 85527 - DNA, 22 bp, synthetic construct
  misc_feature 1..22: note = chemically synthesized
  source 1..22: mol_type = other DNA
ctattaatttccagttctatct

SEQ ID NO: 85528 - DNA, 22 bp, synthetic construct
  misc_feature 1..22: note = chemically synthesized
  source 1..22: mol_type = other DNA
ttaatttccagttctatctttc

SEQ ID NO: 85529 - DNA, 22 bp, synthetic construct
  misc_feature 1..22: note = chemically synthesized
  source 1..22: mol_type = other DNA
atttccagttctatctttctgt

SEQ ID NO: 85530 - DNA, 22 bp, synthetic construct
  misc_feature 1..22: note = chemically synthesized
  source 1..22: mol_type = other DNA
ccagttctatctttctgttcaa

SEQ ID NO: 85531 - DNA, 22 bp, synthetic construct
  misc_feature 1..22: note = chemically synthesized
  source 1..22: mol_type = other DNA
cagttctatctttctgttcaag

SEQ ID NO: 85532 - DNA, 22 bp, synthetic construct
  misc_feature 1..22: note = chemically synthesized
  source 1..22: mol_type = other DNA
tatctttctgttcaagaaaaga

SEQ ID NO: 85533 - DNA, 22 bp, synthetic construct
  misc_feature 1..22: note = chemically synthesized
  source 1..22: mol_type = other DNA
tctttctgttcaagaaaagaat

SEQ ID NO: 85534 - DNA, 22 bp, synthetic construct
  misc_feature 1..22: note = chemically synthesized
  source 1..22: mol_type = other DNA
tctgttcaagaaaagaatgtga

SEQ ID NO: 85535 - DNA, 22 bp, synthetic construct
  misc_feature 1..22: note = chemically synthesized
  source 1..22: mol_type = other DNA
ctgttcaagaaaagaatgtgag

SEQ ID NO: 85536 - DNA, 22 bp, synthetic construct
  misc_feature 1..22: note = chemically synthesized
  source 1..22: mol_type = other DNA
tgttcaagaaaagaatgtgaga

SEQ ID NO: 85537 - DNA, 22 bp, synthetic construct
  misc_feature 1..22: note = chemically synthesized
  source 1..22: mol_type = other DNA
ttcaagaaaagaatgtgagaag

SEQ ID NO: 85538 - DNA, 22 bp, synthetic construct
  misc_feature 1..22: note = chemically synthesized
  source 1..22: mol_type = other DNA
aagaaaagaatgtgagaagtaa

SEQ ID NO: 85539 - DNA, 22 bp, synthetic construct
  misc_feature 1..22: note = chemically synthesized
  source 1..22: mol_type = other DNA
gtgcctcaaatttgcctacttc

SEQ ID NO: 85540 - DNA, 22 bp, synthetic construct
  misc_feature 1..22: note = chemically synthesized
  source 1..22: mol_type = other DNA
aaatttgcctacttcatcccca

SEQ ID NO: 85541 - DNA, 22 bp, synthetic construct
  misc_feature 1..22: note = chemically synthesized
  source 1..22: mol_type = other DNA
gcctacttcatccccaacagag

SEQ ID NO: 85542 - DNA, 22 bp, synthetic construct
  misc_feature 1..22: note = chemically synthesized
  source 1..22: mol_type = other DNA
cctacttcatccccaacagagg

SEQ ID NO: 85543 - DNA, 22 bp, synthetic construct
  misc_feature 1..22: note = chemically synthesized
  source 1..22: mol_type = other DNA
cttcatccccaacagaggagat

SEQ ID NO: 85544 - DNA, 22 bp, synthetic construct
  misc_feature 1..22: note = chemically synthesized
  source 1..22: mol_type = other DNA
catccccaacagaggagatcat

SEQ ID NO: 85545 - DNA, 22 bp, synthetic construct
  misc_feature 1..22: note = chemically synthesized
  source 1..22: mol_type = other DNA
atccccaacagaggagatcatg

SEQ ID NO: 85546 - DNA, 22 bp, synthetic construct
  misc_feature 1..22: note = chemically synthesized
  source 1..22: mol_type = other DNA
tatcaataatggagcctgggcc

SEQ ID NO: 85547 - DNA, 22 bp, synthetic construct
  misc_feature 1..22: note = chemically synthesized
  source 1..22: mol_type = other DNA
ggcccagacaactggttaagag

SEQ ID NO: 85548 - DNA, 22 bp, synthetic construct
  misc_feature 1..22: note = chemically synthesized
  source 1..22: mol_type = other DNA
gttaagagagaggtcattctga

SEQ ID NO: 85549 - DNA, 22 bp, synthetic construct
  misc_feature 1..22: note = chemically synthesized
  source 1..22: mol_type = other DNA
agagagaggtcattctgacctc

SEQ ID NO: 85550 - DNA, 22 bp, synthetic construct
  misc_feature 1..22: note = chemically synthesized
  source 1..22: mol_type = other DNA
tgacctcagaacataggagaga

SEQ ID NO: 85551 - DNA, 22 bp, synthetic construct
  misc_feature 1..22: note = chemically synthesized
  source 1..22: mol_type = other DNA
acctcagaacataggagagatg

SEQ ID NO: 85552 - DNA, 22 bp, synthetic construct
  misc_feature 1..22: note = chemically synthesized
  source 1..22: mol_type = other DNA
agaacataggagagatggatat

SEQ ID NO: 85553 - DNA, 22 bp, synthetic construct
  misc_feature 1..22: note = chemically synthesized
  source 1..22: mol_type = other DNA
tacaccacagagtccaggatga

SEQ ID NO: 85554 - DNA, 22 bp, synthetic construct
  misc_feature 1..22: note = chemically synthesized
  source 1..22: mol_type = other DNA
gcagtgaaggattcaaatgcct

SEQ ID NO: 85555 - DNA, 22 bp, synthetic construct
  misc_feature 1..22: note = chemically synthesized
  source 1..22: mol_type = other DNA
aaatgcctggcgaaatctccta

SEQ ID NO: 85556 - DNA, 22 bp, synthetic construct
  misc_feature 1..22: note = chemically synthesized
  source 1..22: mol_type = other DNA
gcgaaatctcctatacaaccgg

SEQ ID NO: 85557 - DNA, 22 bp, synthetic construct
  misc_feature 1..22: note = chemically synthesized
  source 1..22: mol_type = other DNA
ctatacaaccggagagacccaa

SEQ ID NO: 85558 - DNA, 22 bp, synthetic construct
  misc_feature 1..22: note = chemically synthesized
  source 1..22: mol_type = other DNA
tacaaccggagagacccaagtc

SEQ ID NO: 85559 - DNA, 22 bp, synthetic construct
  misc_feature 1..22: note = chemically synthesized
  source 1..22: mol_type = other DNA
tgcatgacatgacttgcctatg

SEQ ID NO: 85560 - DNA, 22 bp, synthetic construct
  misc_feature 1..22: note = chemically synthesized
  source 1..22: mol_type = other DNA
catgacatgacttgcctatgag

SEQ ID NO: 85561 - DNA, 22 bp, synthetic construct
  misc_feature 1..22: note = chemically synthesized
  source 1..22: mol_type = other DNA
gcctatgagccctcccattgct

SEQ ID NO: 85562 - DNA, 22 bp, synthetic construct
  misc_feature 1..22: note = chemically synthesized
  source 1..22: mol_type = other DNA
cctatgagccctcccattgcta

SEQ ID NO: 85563 - DNA, 22 bp, synthetic construct
  misc_feature 1..22: note = chemically synthesized
  source 1..22: mol_type = other DNA
tgagccctcccattgctataag

SEQ ID NO: 85564 - DNA, 22 bp, synthetic construct
  misc_feature 1..22: note = chemically synthesized
  source 1..22: mol_type = other DNA
ccattgctataaggatggggat

SEQ ID NO: 85565 - DNA, 22 bp, synthetic construct
  misc_feature 1..22: note = chemically synthesized
  source 1..22: mol_type = other DNA
ctataaggatggggatcttagc

SEQ ID NO: 85566 - DNA, 22 bp, synthetic construct
  misc_feature 1..22: note = chemically synthesized
  source 1..22: mol_type = other DNA
taaggatggggatcttagcaca

SEQ ID NO: 85567 - DNA, 22 bp, synthetic construct
  misc_feature 1..22: note = chemically synthesized
  source 1..22: mol_type = other DNA
agcacagtgccttgtgtgaaca

SEQ ID NO: 85568 - DNA, 22 bp, synthetic construct
  misc_feature 1..22: note = chemically synthesized
  source 1..22: mol_type = other DNA
gcacagtgccttgtgtgaacag

SEQ ID NO: 85569 - DNA, 22 bp, synthetic construct
  misc_feature 1..22: note = chemically synthesized
  source 1..22: mol_type = other DNA
gtgtgaacagtaatgctagcct

SEQ ID NO: 85570 - DNA, 22 bp, synthetic construct
  misc_feature 1..22: note = chemically synthesized
  source 1..22: mol_type = other DNA
tgtgaacagtaatgctagcctt

SEQ ID NO: 85571 - DNA, 22 bp, synthetic construct
  misc_feature 1..22: note = chemically synthesized
  source 1..22: mol_type = other DNA
gccttgattttaccatggcaag

SEQ ID NO: 85572 - DNA, 22 bp, synthetic construct
  misc_feature 1..22: note = chemically synthesized
  source 1..22: mol_type = other DNA
gattttaccatggcaagtttgt

SEQ ID NO: 85573 - DNA, 22 bp, synthetic construct
  misc_feature 1..22: note = chemically synthesized
  source 1..22: mol_type = other DNA
attttaccatggcaagtttgtt

SEQ ID NO: 85574 - DNA, 22 bp, synthetic construct
  misc_feature 1..22: note = chemically synthesized
  source 1..22: mol_type = other DNA
taccatggcaagtttgtttagg

SEQ ID NO: 85575 - DNA, 22 bp, synthetic construct
  misc_feature 1..22: note = chemically synthesized
  source 1..22: mol_type = other DNA
accatggcaagtttgtttaggg

SEQ ID NO: 85576 - DNA, 22 bp, synthetic construct
  misc_feature 1..22: note = chemically synthesized
  source 1..22: mol_type = other DNA
ccatggcaagtttgtttaggga

SEQ ID NO: 85577 - DNA, 22 bp, synthetic construct
  misc_feature 1..22: note = chemically synthesized
  source 1..22: mol_type = other DNA
gtttagggaaaaattcaaccca

SEQ ID NO: 85578 - DNA, 22 bp, synthetic construct
  misc_feature 1..22: note = chemically synthesized
  source 1..22: mol_type = other DNA
tttagggaaaaattcaacccac

SEQ ID NO: 85579 - DNA, 22 bp, synthetic construct
  misc_feature 1..22: note = chemically synthesized
  source 1..22: mol_type = other DNA
agggaaaaattcaacccaccca

SEQ ID NO: 85580 - DNA, 22 bp, synthetic construct
  misc_feature 1..22: note = chemically synthesized
  source 1..22: mol_type = other DNA
gggaaaaattcaacccacccat

SEQ ID NO: 85581 - DNA, 22 bp, synthetic construct
  misc_feature 1..22: note = chemically synthesized
  source 1..22: mol_type = other DNA
aacccacccattgaaattccaa

SEQ ID NO: 85582 - DNA, 22 bp, synthetic construct
  misc_feature 1..22: note = chemically synthesized
  source 1..22: mol_type = other DNA
aaattccaacctcaaccaaatg

SEQ ID NO: 85583 - DNA, 22 bp, synthetic construct
  misc_feature 1..22: note = chemically synthesized
  source 1..22: mol_type = other DNA
caacctcaaccaaatgagggat

SEQ ID NO: 85584 - DNA, 22 bp, synthetic construct
  misc_feature 1..22: note = chemically synthesized
  source 1..22: mol_type = other DNA
aaccaaatgagggatggctggg

SEQ ID NO: 85585 - DNA, 22 bp, synthetic construct
  misc_feature 1..22: note = chemically synthesized
  source 1..22: mol_type = other DNA
gggatgcaaccacaaagatact

SEQ ID NO: 85586 - DNA, 22 bp, synthetic construct
  misc_feature 1..22: note = chemically synthesized
  source 1..22: mol_type = other DNA
tatcttaggaggggagtttttt

SEQ ID NO: 85587 - DNA, 22 bp, synthetic construct
  misc_feature 1..22: note = chemically synthesized
  source 1..22: mol_type = other DNA
aggaggggagtttttttttttt

SEQ ID NO: 85588 - DNA, 22 bp, synthetic construct
  misc_feature 1..22: note = chemically synthesized
  source 1..22: mol_type = other DNA
ggaggggagtttttttttttta

SEQ ID NO: 85589 - DNA, 22 bp, synthetic construct
  misc_feature 1..22: note = chemically synthesized
  source 1..22: mol_type = other DNA
tttttttttatagaaactcgtc

SEQ ID NO: 85590 - DNA, 22 bp, synthetic construct
  misc_feature 1..22: note = chemically synthesized
  source 1..22: mol_type = other DNA
ttttttttatagaaactcgtca

SEQ ID NO: 85591 - DNA, 22 bp, synthetic construct
  misc_feature 1..22: note = chemically synthesized
  source 1..22: mol_type = other DNA
tttttttatagaaactcgtcag

SEQ ID NO: 85592 - DNA, 22 bp, synthetic construct
  misc_feature 1..22: note = chemically synthesized
  source 1..22: mol_type = other DNA
ttttttatagaaactcgtcagg

SEQ ID NO: 85593 - DNA, 22 bp, synthetic construct
  misc_feature 1..22: note = chemically synthesized
  source 1..22: mol_type = other DNA
tttttatagaaactcgtcagga

SEQ ID NO: 85594 - DNA, 22 bp, synthetic construct
  misc_feature 1..22: note = chemically synthesized
  source 1..22: mol_type = other DNA
ttttatagaaactcgtcaggat

SEQ ID NO: 85595 - DNA, 22 bp, synthetic construct
  misc_feature 1..22: note = chemically synthesized
  source 1..22: mol_type = other DNA
tttatagaaactcgtcaggata

SEQ ID NO: 85596 - DNA, 22 bp, synthetic construct
  misc_feature 1..22: note = chemically synthesized
  source 1..22: mol_type = other DNA
ttatagaaactcgtcaggatat

SEQ ID NO: 85597 - DNA, 22 bp, synthetic construct
  misc_feature 1..22: note = chemically synthesized
  source 1..22: mol_type = other DNA
tatagaaactcgtcaggatatt

SEQ ID NO: 85598 - DNA, 22 bp, synthetic construct
  misc_feature 1..22: note = chemically synthesized
  source 1..22: mol_type = other DNA
atagaaactcgtcaggatatta

SEQ ID NO: 85599 - DNA, 22 bp, synthetic construct
  misc_feature 1..22: note = chemically synthesized
  source 1..22: mol_type = other DNA
tagaaactcgtcaggatattat

SEQ ID NO: 85600 - DNA, 22 bp, synthetic construct
  misc_feature 1..22: note = chemically synthesized
  source 1..22: mol_type = other DNA
gtcaggatattattgctaggat

SEQ ID NO: 85601 - DNA, 22 bp, synthetic construct
  misc_feature 1..22: note = chemically synthesized
  source 1..22: mol_type = other DNA
ttgctaggatgtgttgttactg

SEQ ID NO: 85602 - DNA, 22 bp, synthetic construct
  misc_feature 1..22: note = chemically synthesized
  source 1..22: mol_type = other DNA
ctaggatgtgttgttactggga

SEQ ID NO: 85603 - DNA, 22 bp, synthetic construct
  misc_feature 1..22: note = chemically synthesized
  source 1..22: mol_type = other DNA
ggatgtgttgttactgggaaaa

SEQ ID NO: 85604 - DNA, 22 bp, synthetic construct
  misc_feature 1..22: note = chemically synthesized
  source 1..22: mol_type = other DNA
ttactgggaaaaaagctgatgg

SEQ ID NO: 85605 - DNA, 22 bp, synthetic construct
  misc_feature 1..22: note = chemically synthesized
  source 1..22: mol_type = other DNA
ctgggaaaaaagctgatggaat

SEQ ID NO: 85606 - DNA, 22 bp, synthetic construct
  misc_feature 1..22: note = chemically synthesized
  source 1..22: mol_type = other DNA
ggaaaaaagctgatggaataca

SEQ ID NO: 85607 - DNA, 22 bp, synthetic construct
  misc_feature 1..22: note = chemically synthesized
  source 1..22: mol_type = other DNA
atggaatacaaaagagtagaca

SEQ ID NO: 85608 - DNA, 22 bp, synthetic construct
  misc_feature 1..22: note = chemically synthesized
  source 1..22: mol_type = other DNA
tttgaggcaatcagtgactaac

SEQ ID NO: 85609 - DNA, 22 bp, synthetic construct
  misc_feature 1..22: note = chemically synthesized
  source 1..22: mol_type = other DNA
gaggcaatcagtgactaacatg

SEQ ID NO: 85610 - DNA, 22 bp, synthetic construct
  misc_feature 1..22: note = chemically synthesized
  source 1..22: mol_type = other DNA
aggcaatcagtgactaacatga

SEQ ID NO: 85611 - DNA, 22 bp, synthetic construct
  misc_feature 1..22: note = chemically synthesized
  source 1..22: mol_type = other DNA
acatgaccactttgctttctct

SEQ ID NO: 85612 - DNA, 22 bp, synthetic construct
  misc_feature 1..22: note = chemically synthesized
  source 1..22: mol_type = other DNA
tgctttctctatgcaggtgtca

SEQ ID NO: 85613 - DNA, 22 bp, synthetic construct
  misc_feature 1..22: note = chemically synthesized
  source 1..22: mol_type = other DNA
gctttctctatgcaggtgtcat

SEQ ID NO: 85614 - DNA, 22 bp, synthetic construct
  misc_feature 1..22: note = chemically synthesized
  source 1..22: mol_type = other DNA
ctttctctatgcaggtgtcatc

SEQ ID NO: 85615 - DNA, 22 bp, synthetic construct
  misc_feature 1..22: note = chemically synthesized
  source 1..22: mol_type = other DNA
tctctatgcaggtgtcatctat

SEQ ID NO: 85616 - DNA, 22 bp, synthetic construct
  misc_feature 1..22: note = chemically synthesized
  source 1..22: mol_type = other DNA
ctctatgcaggtgtcatctatt

SEQ ID NO: 85617 - DNA, 22 bp, synthetic construct
  misc_feature 1..22: note = chemically synthesized
  source 1..22: mol_type = other DNA
tctatgcaggtgtcatctattg

SEQ ID NO: 85618 - DNA, 22 bp, synthetic construct
  misc_feature 1..22: note = chemically synthesized
  source 1..22: mol_type = other DNA
tatgcaggtgtcatctattgtg

SEQ ID NO: 85619 - DNA, 22 bp, synthetic construct
  misc_feature 1..22: note = chemically synthesized
  source 1..22: mol_type = other DNA
tgcaggtgtcatctattgtgat

SEQ ID NO: 85620 - DNA, 22 bp, synthetic construct
  misc_feature 1..22: note = chemically synthesized
  source 1..22: mol_type = other DNA
ttgtgatatagtgccaggaggt

SEQ ID NO: 85621 - DNA, 22 bp, synthetic construct
  misc_feature 1..22: note = chemically synthesized
  source 1..22: mol_type = other DNA
tgatatagtgccaggaggttgc

SEQ ID NO: 85622 - DNA, 22 bp, synthetic construct
  misc_feature 1..22: note = chemically synthesized
  source 1..22: mol_type = other DNA
cctttgctgtggctttcgaccc

SEQ ID NO: 85623 - DNA, 22 bp, synthetic construct
  misc_feature 1..22: note = chemically synthesized
  source 1..22: mol_type = other DNA
tgctgtggctttcgaccctaga

SEQ ID NO: 85624 - DNA, 22 bp, synthetic construct
  misc_feature 1..22: note = chemically synthesized
  source 1..22: mol_type = other DNA
gctgtggctttcgaccctagat

SEQ ID NO: 85625 - DNA, 22 bp, synthetic construct
  misc_feature 1..22: note = chemically synthesized
  source 1..22: mol_type = other DNA
ctgtggctttcgaccctagatt

SEQ ID NO: 85626 - DNA, 22 bp, synthetic construct
  misc_feature 1..22: note = chemically synthesized
  source 1..22: mol_type = other DNA
tggctttcgaccctagattttt

SEQ ID NO: 85627 - DNA, 22 bp, synthetic construct
  misc_feature 1..22: note = chemically synthesized
  source 1..22: mol_type = other DNA
tcgaccctagatttttaaattg

SEQ ID NO: 85628 - DNA, 22 bp, synthetic construct
  misc_feature 1..22: note = chemically synthesized
  source 1..22: mol_type = other DNA
cgaccctagatttttaaattgt

SEQ ID NO: 85629 - DNA, 22 bp, synthetic construct
  misc_feature 1..22: note = chemically synthesized
  source 1..22: mol_type = other DNA
gaccctagatttttaaattgtg

SEQ ID NO: 85630 - DNA, 22 bp, synthetic construct
  misc_feature 1..22: note = chemically synthesized
  source 1..22: mol_type = other DNA
gatttttaaattgtgtgacaaa

SEQ ID NO: 85631 - DNA, 22 bp, synthetic construct
  misc_feature 1..22: note = chemically synthesized
  source 1..22: mol_type = other DNA
ttaaattgtgtgacaaacccat

SEQ ID NO: 85632 - DNA, 22 bp, synthetic construct
  misc_feature 1..22: note = chemically synthesized
  source 1..22: mol_type = other DNA
taaattgtgtgacaaacccatc

SEQ ID NO: 85633 - DNA, 22 bp, synthetic construct
  misc_feature 1..22: note = chemically synthesized
  source 1..22: mol_type = other DNA
aaattgtgtgacaaacccatct

SEQ ID NO: 85634 - DNA, 22 bp, synthetic construct
  misc_feature 1..22: note = chemically synthesized
  source 1..22: mol_type = other DNA
aattgtgtgacaaacccatctt

SEQ ID NO: 85635 - DNA, 22 bp, synthetic construct
  misc_feature 1..22: note = chemically synthesized
  source 1..22: mol_type = other DNA
tgtgacaaacccatcttttatt

SEQ ID NO: 85636 - DNA, 22 bp, synthetic construct
  misc_feature 1..22: note = chemically synthesized
  source 1..22: mol_type = other DNA
ttatttatgtaaataaaatgtc

SEQ ID NO: 85637 - DNA, 22 bp, synthetic construct
  misc_feature 1..22: note = chemically synthesized
  source 1..22: mol_type = other DNA
tatttatgtaaataaaatgtcc

SEQ ID NO: 85638 - DNA, 22 bp, synthetic construct
  misc_feature 1..22: note = chemically synthesized
  source 1..22: mol_type = other DNA
atttatgtaaataaaatgtccg

SEQ ID NO: 85639 - DNA, 22 bp, synthetic construct
  misc_feature 1..22: note = chemically synthesized
  source 1..22: mol_type = other DNA
tttatgtaaataaaatgtccgt

SEQ ID NO: 85640 - DNA, 22 bp, synthetic construct
  misc_feature 1..22: note = chemically synthesized
  source 1..22: mol_type = other DNA
atgtaaataaaatgtccgtgtt

SEQ ID NO: 85641 - DNA, 22 bp, synthetic construct
  misc_feature 1..22: note = chemically synthesized
  source 1..22: mol_type = other DNA
tgtaaataaaatgtccgtgttt

SEQ ID NO: 85642 - DNA, 22 bp, synthetic construct
  misc_feature 1..22: note = chemically synthesized
  source 1..22: mol_type = other DNA
attggttattgttatattgtga

SEQ ID NO: 85643 - DNA, 22 bp, synthetic construct
  misc_feature 1..22: note = chemically synthesized
  source 1..22: mol_type = other DNA
ttggttattgttatattgtgaa

SEQ ID NO: 85644 - DNA, 22 bp, synthetic construct
  misc_feature 1..22: note = chemically synthesized
  source 1..22: mol_type = other DNA
gttattgttatattgtgaaatt

SEQ ID NO: 85645 - DNA, 22 bp, synthetic construct
  misc_feature 1..22: note = chemically synthesized
  source 1..22: mol_type = other DNA
ttgttatattgtgaaattgtag

SEQ ID NO: 85646 - DNA, 22 bp, synthetic construct
  misc_feature 1..22: note = chemically synthesized
  source 1..22: mol_type = other DNA
ttatattgtgaaattgtagtag

SEQ ID NO: 85647 - DNA, 22 bp, synthetic construct
  misc_feature 1..22: note = chemically synthesized
  source 1..22: mol_type = other DNA
tattgtgaaattgtagtagatc

SEQ ID NO: 85648 - DNA, 22 bp, synthetic construct
  misc_feature 1..22: note = chemically synthesized
  source 1..22: mol_type = other DNA
tgaaattgtagtagatctaaaa

SEQ ID NO: 85649 - DNA, 22 bp, synthetic construct
  misc_feature 1..22: note = chemically synthesized
  source 1..22: mol_type = other DNA
tagtagatctaaaattgtaatt

SEQ ID NO: 85650 - DNA, 22 bp, synthetic construct
  misc_feature 1..22: note = chemically synthesized
  source 1..22: mol_type = other DNA
aaattgtaatttcttggattcc

SEQ ID NO: 85651 - DNA, 22 bp, synthetic construct
  misc_feature 1..22: note = chemically synthesized
  source 1..22: mol_type = other DNA
taatttcttggattcctagaat

SEQ ID NO: 85652 - DNA, 22 bp, synthetic construct
  misc_feature 1..22: note = chemically synthesized
  source 1..22: mol_type = other DNA
cttggattcctagaatttctaa

SEQ ID NO: 85653 - DNA, 22 bp, synthetic construct
  misc_feature 1..22: note = chemically synthesized
  source 1..22: mol_type = other DNA
ttggattcctagaatttctaaa

SEQ ID NO: 85654 - DNA, 22 bp, synthetic construct
  misc_feature 1..22: note = chemically synthesized
  source 1..22: mol_type = other DNA
ggattcctagaatttctaaatc

SEQ ID NO: 85655 - DNA, 22 bp, synthetic construct
  misc_feature 1..22: note = chemically synthesized
  source 1..22: mol_type = other DNA
gattcctagaatttctaaatct

SEQ ID NO: 85656 - DNA, 22 bp, synthetic construct
  misc_feature 1..22: note = chemically synthesized
  source 1..22: mol_type = other DNA
ctagaatttctaaatctgtgga

SEQ ID NO: 85657 - DNA, 22 bp, synthetic construct
  misc_feature 1..22: note = chemically synthesized
  source 1..22: mol_type = other DNA
gaatttctaaatctgtggattt

SEQ ID NO: 85658 - DNA, 22 bp, synthetic construct
  misc_feature 1..22: note = chemically synthesized
  source 1..22: mol_type = other DNA
ctaaatctgtggatttttagaa

SEQ ID NO: 85659 - DNA, 22 bp, synthetic construct
  misc_feature 1..22: note = chemically synthesized
  source 1..22: mol_type = other DNA
taaatctgtggatttttagaat

SEQ ID NO: 85660 - DNA, 22 bp, synthetic construct
  misc_feature 1..22: note = chemically synthesized
  source 1..22: mol_type = other DNA
aatctgtggatttttagaattc

SEQ ID NO: 85661 - DNA, 22 bp, synthetic construct
  misc_feature 1..22: note = chemically synthesized
  source 1..22: mol_type = other DNA
tggatttttagaattctctaga

SEQ ID NO: 85662 - DNA, 22 bp, synthetic construct
  misc_feature 1..22: note = chemically synthesized
  source 1..22: mol_type = other DNA
ttagaattctctagaggtgaca

SEQ ID NO: 85663 - DNA, 22 bp, synthetic construct
  misc_feature 1..22: note = chemically synthesized
  source 1..22: mol_type = other DNA
tagaattctctagaggtgacaa

SEQ ID NO: 85664 - DNA, 22 bp, synthetic construct
  misc_feature 1..22: note = chemically synthesized
  source 1..22: mol_type = other DNA
agaattctctagaggtgacaaa

SEQ ID NO: 85665 - DNA, 22 bp, synthetic construct
  misc_feature 1..22: note = chemically synthesized
  source 1..22: mol_type = other DNA
gaattctctagaggtgacaaag

SEQ ID NO: 85666 - DNA, 22 bp, synthetic construct
  misc_feature 1..22: note = chemically synthesized
  source 1..22: mol_type = other DNA
tctagaggtgacaaaggtttat

SEQ ID NO: 85667 - DNA, 22 bp, synthetic construct
  misc_feature 1..22: note = chemically synthesized
  source 1..22: mol_type = other DNA
tagaggtgacaaaggtttatta

SEQ ID NO: 85668 - DNA, 22 bp, synthetic construct
  misc_feature 1..22: note = chemically synthesized
  source 1..22: mol_type = other DNA
gaggtgacaaaggtttattatc

SEQ ID NO: 85669 - DNA, 22 bp, synthetic construct
  misc_feature 1..22: note = chemically synthesized
  source 1..22: mol_type = other DNA
attatctaagctaccggagcta

SEQ ID NO: 85670 - DNA, 22 bp, synthetic construct
  misc_feature 1..22: note = chemically synthesized
  source 1..22: mol_type = other DNA
ttatctaagctaccggagctat

SEQ ID NO: 85671 - DNA, 22 bp, synthetic construct
  misc_feature 1..22: note = chemically synthesized
  source 1..22: mol_type = other DNA
tctaagctaccggagctatgta

SEQ ID NO: 85672 - DNA, 22 bp, synthetic construct
  misc_feature 1..22: note = chemically synthesized
  source 1..22: mol_type = other DNA
agctaccggagctatgtacttt

SEQ ID NO: 85673 - DNA, 22 bp, synthetic construct
  misc_feature 1..22: note = chemically synthesized
  source 1..22: mol_type = other DNA
ccggagctatgtacttttggat

SEQ ID NO: 85674 - DNA, 22 bp, synthetic construct
  misc_feature 1..22: note = chemically synthesized
  source 1..22: mol_type = other DNA
tgtacttttggatataagagtg

SEQ ID NO: 85675 - DNA, 22 bp, synthetic construct
  misc_feature 1..22: note = chemically synthesized
  source 1..22: mol_type = other DNA
ttggatataagagtgtctccat

SEQ ID NO: 85676 - DNA, 22 bp, synthetic construct
  misc_feature 1..22: note = chemically synthesized
  source 1..22: mol_type = other DNA
tggatataagagtgtctccatc

SEQ ID NO: 85677 - DNA, 22 bp, synthetic construct
  misc_feature 1..22: note = chemically synthesized
  source 1..22: mol_type = other DNA
ggatataagagtgtctccatct

SEQ ID NO: 85678 - DNA, 22 bp, synthetic construct
  misc_feature 1..22: note = chemically synthesized
  source 1..22: mol_type = other DNA
gatataagagtgtctccatctc

SEQ ID NO: 85679 - DNA, 22 bp, synthetic construct
  misc_feature 1..22: note = chemically synthesized
  source 1..22: mol_type = other DNA
catctccattgccttacaaatc

SEQ ID NO: 85680 - DNA, 22 bp, synthetic construct
  misc_feature 1..22: note = chemically synthesized
  source 1..22: mol_type = other DNA
cattgccttacaaatcaggtgt

SEQ ID NO: 85681 - DNA, 22 bp, synthetic construct
  misc_feature 1..22: note = chemically synthesized
  source 1..22: mol_type = other DNA
ccttacaaatcaggtgtgagcc

SEQ ID NO: 85682 - DNA, 22 bp, synthetic construct
  misc_feature 1..22: note = chemically synthesized
  source 1..22: mol_type = other DNA
acaaatcaggtgtgagccaggc

SEQ ID NO: 85683 - DNA, 22 bp, synthetic construct
  misc_feature 1..22: note = chemically synthesized
  source 1..22: mol_type = other DNA
caaatcaggtgtgagccaggca

SEQ ID NO: 85684 - DNA, 22 bp, synthetic construct
  misc_feature 1..22: note = chemically synthesized
  source 1..22: mol_type = other DNA
tcagactggaaaaggtaactaa

SEQ ID NO: 85685 - DNA, 22 bp, synthetic construct
  misc_feature 1..22: note = chemically synthesized
  source 1..22: mol_type = other DNA
agactggaaaaggtaactaatc

SEQ ID NO: 85686 - DNA, 22 bp, synthetic construct
  misc_feature 1..22: note = chemically synthesized
  source 1..22: mol_type = other DNA
gaaaaggtaactaatcagaagg

SEQ ID NO: 85687 - DNA, 22 bp, synthetic construct
  misc_feature 1..22: note = chemically synthesized
  source 1..22: mol_type = other DNA
atcagaaggaaccattgtccta

SEQ ID NO: 85688 - DNA, 22 bp, synthetic construct
  misc_feature 1..22: note = chemically synthesized
  source 1..22: mol_type = other DNA
tcctagaatggggcaagtgtac

SEQ ID NO: 85689 - DNA, 22 bp, synthetic construct
  misc_feature 1..22: note = chemically synthesized
  source 1..22: mol_type = other DNA
gaatggggcaagtgtacaatac

SEQ ID NO: 85690 - DNA, 22 bp, synthetic construct
  misc_feature 1..22: note = chemically synthesized
  source 1..22: mol_type = other DNA
gtgccgtagcatataacatatt

SEQ ID NO: 85691 - DNA, 22 bp, synthetic construct
  misc_feature 1..22: note = chemically synthesized
  source 1..22: mol_type = other DNA
actcaatccttcataccctttg

SEQ ID NO: 85692 - DNA, 22 bp, synthetic construct
  misc_feature 1..22: note = chemically synthesized
  source 1..22: mol_type = other DNA
aatccttcataccctttgtatc

SEQ ID NO: 85693 - DNA, 22 bp, synthetic construct
  misc_feature 1..22: note = chemically synthesized
  source 1..22: mol_type = other DNA
cataccctttgtatcgtttttt

SEQ ID NO: 85694 - DNA, 22 bp, synthetic construct
  misc_feature 1..22: note = chemically synthesized
  source 1..22: mol_type = other DNA
ataccctttgtatcgttttttt

SEQ ID NO: 85695 - DNA, 22 bp, synthetic construct
  misc_feature 1..22: note = chemically synthesized
  source 1..22: mol_type = other DNA
tgtatcgttttttttctgtttt

SEQ ID NO: 85696 - DNA, 22 bp, synthetic construct
  misc_feature 1..22: note = chemically synthesized
  source 1..22: mol_type = other DNA
gtatcgttttttttctgtttta

SEQ ID NO: 85697 - DNA, 22 bp, synthetic construct
  misc_feature 1..22: note = chemically synthesized
  source 1..22: mol_type = other DNA
tatcgttttttttctgttttat

SEQ ID NO: 85698 - DNA, 22 bp, synthetic construct
  misc_feature 1..22: note = chemically synthesized
  source 1..22: mol_type = other DNA
tttttctgttttatttatttta

SEQ ID NO: 85699 - DNA, 22 bp, synthetic construct
  misc_feature 1..22: note = chemically synthesized
  source 1..22: mol_type = other DNA
ttttctgttttatttattttat

SEQ ID NO: 85700 - DNA, 22 bp, synthetic construct
  misc_feature 1..22: note = chemically synthesized
  source 1..22: mol_type = other DNA
tttctgttttatttattttatt

SEQ ID NO: 85701 - DNA, 22 bp, synthetic construct
  misc_feature 1..22: note = chemically synthesized
  source 1..22: mol_type = other DNA
ttctgttttatttattttattt

SEQ ID NO: 85702 - DNA, 22 bp, synthetic construct
  misc_feature 1..22: note = chemically synthesized
  source 1..22: mol_type = other DNA
tctgttttatttattttattta

SEQ ID NO: 85703 - DNA, 22 bp, synthetic construct
  misc_feature 1..22: note = chemically synthesized
  source 1..22: mol_type = other DNA
ctgttttatttattttatttat

SEQ ID NO: 85704 - DNA, 22 bp, synthetic construct
  misc_feature 1..22: note = chemically synthesized
  source 1..22: mol_type = other DNA
tgttttatttattttatttatt

SEQ ID NO: 85705 - DNA, 22 bp, synthetic construct
  misc_feature 1..22: note = chemically synthesized
  source 1..22: mol_type = other DNA
ttttatttattttatttattta

SEQ ID NO: 85706 - DNA, 22 bp, synthetic construct
  misc_feature 1..22: note = chemically synthesized
  source 1..22: mol_type = other DNA
tatttattttatttatttatta

SEQ ID NO: 85707 - DNA, 22 bp, synthetic construct
  misc_feature 1..22: note = chemically synthesized
  source 1..22: mol_type = other DNA
atttattttatttatttattag

SEQ ID NO: 85708 - DNA, 22 bp, synthetic construct
  misc_feature 1..22: note = chemically synthesized
  source 1..22: mol_type = other DNA
tttattttatttatttattaga

SEQ ID NO: 85709 - DNA, 22 bp, synthetic construct
  misc_feature 1..22: note = chemically synthesized
  source 1..22: mol_type = other DNA
attttatttatttattagagat

SEQ ID NO: 85710 - DNA, 22 bp, synthetic construct
  misc_feature 1..22: note = chemically synthesized
  source 1..22: mol_type = other DNA
ttttatttatttattagagatc

SEQ ID NO: 85711 - DNA, 22 bp, synthetic construct
  misc_feature 1..22: note = chemically synthesized
  source 1..22: mol_type = other DNA
tatttatttattagagatcata

SEQ ID NO: 85712 - DNA, 22 bp, synthetic construct
  misc_feature 1..22: note = chemically synthesized
  source 1..22: mol_type = other DNA
atttatttattagagatcatag

SEQ ID NO: 85713 - DNA, 22 bp, synthetic construct
  misc_feature 1..22: note = chemically synthesized
  source 1..22: mol_type = other DNA
tttatttattagagatcatagt

SEQ ID NO: 85714 - DNA, 22 bp, synthetic construct
  misc_feature 1..22: note = chemically synthesized
  source 1..22: mol_type = other DNA
atttattagagatcatagtgtg

SEQ ID NO: 85715 - DNA, 22 bp, synthetic construct
  misc_feature 1..22: note = chemically synthesized
  source 1..22: mol_type = other DNA
tttattagagatcatagtgtgt

SEQ ID NO: 85716 - DNA, 22 bp, synthetic construct
  misc_feature 1..22: note = chemically synthesized
  source 1..22: mol_type = other DNA
attagagatcatagtgtgtgca

SEQ ID NO: 85717 - DNA, 22 bp, synthetic construct
  misc_feature 1..22: note = chemically synthesized
  source 1..22: mol_type = other DNA
ttagagatcatagtgtgtgcaa

SEQ ID NO: 85718 - DNA, 22 bp, synthetic construct
  misc_feature 1..22: note = chemically synthesized
  source 1..22: mol_type = other DNA
gagatcatagtgtgtgcaacac

SEQ ID NO: 85719 - DNA, 22 bp, synthetic construct
  misc_feature 1..22: note = chemically synthesized
  source 1..22: mol_type = other DNA
tgtccaggttctgtggtaaacg

SEQ ID NO: 85720 - DNA, 22 bp, synthetic construct
  misc_feature 1..22: note = chemically synthesized
  source 1..22: mol_type = other DNA
tgtggtaaacgtcagcgtggag

SEQ ID NO: 85721 - DNA, 22 bp, synthetic construct
  misc_feature 1..22: note = chemically synthesized
  source 1..22: mol_type = other DNA
tggtaaacgtcagcgtggagaa

SEQ ID NO: 85722 - DNA, 22 bp, synthetic construct
  misc_feature 1..22: note = chemically synthesized
  source 1..22: mol_type = other DNA
gtagctattagatcataaaaag

SEQ ID NO: 85723 - DNA, 22 bp, synthetic construct
  misc_feature 1..22: note = chemically synthesized
  source 1..22: mol_type = other DNA
ttagatcataaaaaggtgaggc

SEQ ID NO: 85724 - DNA, 22 bp, synthetic construct
  misc_feature 1..22: note = chemically synthesized
  source 1..22: mol_type = other DNA
gatcataaaaaggtgaggcata

SEQ ID NO: 85725 - DNA, 22 bp, synthetic construct
  misc_feature 1..22: note = chemically synthesized
  source 1..22: mol_type = other DNA
gtctttgagaagctgactgtgg

SEQ ID NO: 85726 - DNA, 22 bp, synthetic construct
  misc_feature 1..22: note = chemically synthesized
  source 1..22: mol_type = other DNA
tctttgagaagctgactgtggc

SEQ ID NO: 85727 - DNA, 22 bp, synthetic construct
  misc_feature 1..22: note = chemically synthesized
  source 1..22: mol_type = other DNA
tgagaagctgactgtggctata

SEQ ID NO: 85728 - DNA, 22 bp, synthetic construct
  misc_feature 1..22: note = chemically synthesized
  source 1..22: mol_type = other DNA
gagaagctgactgtggctatag

SEQ ID NO: 85729 - DNA, 22 bp, synthetic construct
  misc_feature 1..22: note = chemically synthesized
  source 1..22: mol_type = other DNA
agaagctgactgtggctatagg

SEQ ID NO: 85730 - DNA, 22 bp, synthetic construct
  misc_feature 1..22: note = chemically synthesized
  source 1..22: mol_type = other DNA
actgtggctataggtgaagaaa

SEQ ID NO: 85731 - DNA, 22 bp, synthetic construct
  misc_feature 1..22: note = chemically synthesized
  source 1..22: mol_type = other DNA
tggctataggtgaagaaaaaaa

SEQ ID NO: 85732 - DNA, 22 bp, synthetic construct
  misc_feature 1..22: note = chemically synthesized
  source 1..22: mol_type = other DNA
taggtgaagaaaaaaattataa

SEQ ID NO: 85733 - DNA, 22 bp, synthetic construct
  misc_feature 1..22: note = chemically synthesized
  source 1..22: mol_type = other DNA
taattttagttttattattaat

SEQ ID NO: 85734 - DNA, 22 bp, synthetic construct
  misc_feature 1..22: note = chemically synthesized
  source 1..22: mol_type = other DNA
tagttttattattaatatcacc

SEQ ID NO: 85735 - DNA, 22 bp, synthetic construct
  misc_feature 1..22: note = chemically synthesized
  source 1..22: mol_type = other DNA
agttttattattaatatcacca

SEQ ID NO: 85736 - DNA, 22 bp, synthetic construct
  misc_feature 1..22: note = chemically synthesized
  source 1..22: mol_type = other DNA
gttttattattaatatcaccat

SEQ ID NO: 85737 - DNA, 22 bp, synthetic construct
  misc_feature 1..22: note = chemically synthesized
  source 1..22: mol_type = other DNA
tattattaatatcaccatgatc

SEQ ID NO: 85738 - DNA, 22 bp, synthetic construct
  misc_feature 1..22: note = chemically synthesized
  source 1..22: mol_type = other DNA
attattaatatcaccatgatca

SEQ ID NO: 85739 - DNA, 22 bp, synthetic construct
  misc_feature 1..22: note = chemically synthesized
  source 1..22: mol_type = other DNA
ttattaatatcaccatgatcat

SEQ ID NO: 85740 - DNA, 22 bp, synthetic construct
  misc_feature 1..22: note = chemically synthesized
  source 1..22: mol_type = other DNA
ttaatatcaccatgatcatcat

SEQ ID NO: 85741 - DNA, 22 bp, synthetic construct
  misc_feature 1..22: note = chemically synthesized
  source 1..22: mol_type = other DNA
atatcaccatgatcatcatgat

SEQ ID NO: 85742 - DNA, 22 bp, synthetic construct
  misc_feature 1..22: note = chemically synthesized
  source 1..22: mol_type = other DNA
atatttactgggaacttatttg

SEQ ID NO: 85743 - DNA, 22 bp, synthetic construct
  misc_feature 1..22: note = chemically synthesized
  source 1..22: mol_type = other DNA
actgggaacttatttggtttgt

SEQ ID NO: 85744 - DNA, 22 bp, synthetic construct
  misc_feature 1..22: note = chemically synthesized
  source 1..22: mol_type = other DNA
ctgggaacttatttggtttgtc

SEQ ID NO: 85745 - DNA, 22 bp, synthetic construct
  misc_feature 1..22: note = chemically synthesized
  source 1..22: mol_type = other DNA
ggaacttatttggtttgtcatt

SEQ ID NO: 85746 - DNA, 22 bp, synthetic construct
  misc_feature 1..22: note = chemically synthesized
  source 1..22: mol_type = other DNA
atttggtttgtcatttttcgaa

SEQ ID NO: 85747 - DNA, 22 bp, synthetic construct
  misc_feature 1..22: note = chemically synthesized
  source 1..22: mol_type = other DNA
tttggtttgtcatttttcgaag

SEQ ID NO: 85748 - DNA, 22 bp, synthetic construct
  misc_feature 1..22: note = chemically synthesized
  source 1..22: mol_type = other DNA
ggtttgtcatttttcgaaggaa

SEQ ID NO: 85749 - DNA, 22 bp, synthetic construct
  misc_feature 1..22: note = chemically synthesized
  source 1..22: mol_type = other DNA
gtttgtcatttttcgaaggaat

SEQ ID NO: 85750 - DNA, 22 bp, synthetic construct
  misc_feature 1..22: note = chemically synthesized
  source 1..22: mol_type = other DNA
gtcatttttcgaaggaatttat

SEQ ID NO: 85751 - DNA, 22 bp, synthetic construct
  misc_feature 1..22: note = chemically synthesized
  source 1..22: mol_type = other DNA
tcatttttcgaaggaatttatg

SEQ ID NO: 85752 - DNA, 22 bp, synthetic construct
  misc_feature 1..22: note = chemically synthesized
  source 1..22: mol_type = other DNA
ttcgaaggaatttatgttaatt

SEQ ID NO: 85753 - DNA, 22 bp, synthetic construct
  misc_feature 1..22: note = chemically synthesized
  source 1..22: mol_type = other DNA
tcgaaggaatttatgttaattt

SEQ ID NO: 85754 - DNA, 22 bp, synthetic construct
  misc_feature 1..22: note = chemically synthesized
  source 1..22: mol_type = other DNA
cgaaggaatttatgttaattta

SEQ ID NO: 85755 - DNA, 22 bp, synthetic construct
  misc_feature 1..22: note = chemically synthesized
  source 1..22: mol_type = other DNA
gaaggaatttatgttaatttac

SEQ ID NO: 85756 - DNA, 22 bp, synthetic construct
  misc_feature 1..22: note = chemically synthesized
  source 1..22: mol_type = other DNA
atgttaatttactcactataag

SEQ ID NO: 85757 - DNA, 22 bp, synthetic construct
  misc_feature 1..22: note = chemically synthesized
  source 1..22: mol_type = other DNA
tgttaatttactcactataaga

SEQ ID NO: 85758 - DNA, 22 bp, synthetic construct
  misc_feature 1..22: note = chemically synthesized
  source 1..22: mol_type = other DNA
atttactcactataagaaattt

SEQ ID NO: 85759 - DNA, 22 bp, synthetic construct
  misc_feature 1..22: note = chemically synthesized
  source 1..22: mol_type = other DNA
actcactataagaaatttataa

SEQ ID NO: 85760 - DNA, 22 bp, synthetic construct
  misc_feature 1..22: note = chemically synthesized
  source 1..22: mol_type = other DNA
ctcactataagaaatttataaa

SEQ ID NO: 85761 - DNA, 22 bp, synthetic construct
  misc_feature 1..22: note = chemically synthesized
  source 1..22: mol_type = other DNA
actataagaaatttataaagta

SEQ ID NO: 85762 - DNA, 22 bp, synthetic construct
  misc_feature 1..22: note = chemically synthesized
  source 1..22: mol_type = other DNA
taagaaatttataaagtagatt

SEQ ID NO: 85763 - DNA, 22 bp, synthetic construct
  misc_feature 1..22: note = chemically synthesized
  source 1..22: mol_type = other DNA
ataaagtagattccattatagc

SEQ ID NO: 85764 - DNA, 22 bp, synthetic construct
  misc_feature 1..22: note = chemically synthesized
  source 1..22: mol_type = other DNA
taaagtagattccattatagct

SEQ ID NO: 85765 - DNA, 22 bp, synthetic construct
  misc_feature 1..22: note = chemically synthesized
  source 1..22: mol_type = other DNA
cattatagctcttaatttatta

SEQ ID NO: 85766 - DNA, 22 bp, synthetic construct
  misc_feature 1..22: note = chemically synthesized
  source 1..22: mol_type = other DNA
tagctcttaatttattattgag

SEQ ID NO: 85767 - DNA, 22 bp, synthetic construct
  misc_feature 1..22: note = chemically synthesized
  source 1..22: mol_type = other DNA
ttaatttattattgaggaatgt

SEQ ID NO: 85768 - DNA, 22 bp, synthetic construct
  misc_feature 1..22: note = chemically synthesized
  source 1..22: mol_type = other DNA
aatttattattgaggaatgtaa

SEQ ID NO: 85769 - DNA, 22 bp, synthetic construct
  misc_feature 1..22: note = chemically synthesized
  source 1..22: mol_type = other DNA
atttattattgaggaatgtaag

SEQ ID NO: 85770 - DNA, 22 bp, synthetic construct
  misc_feature 1..22: note = chemically synthesized
  source 1..22: mol_type = other DNA
attattgaggaatgtaaggcat

SEQ ID NO: 85771 - DNA, 22 bp, synthetic construct
  misc_feature 1..22: note = chemically synthesized
  source 1..22: mol_type = other DNA
ttattgaggaatgtaaggcata

SEQ ID NO: 85772 - DNA, 22 bp, synthetic construct
  misc_feature 1..22: note = chemically synthesized
  source 1..22: mol_type = other DNA
ttgaggaatgtaaggcatagag

SEQ ID NO: 85773 - DNA, 22 bp, synthetic construct
  misc_feature 1..22: note = chemically synthesized
  source 1..22: mol_type = other DNA
aggaatgtaaggcatagagaag

SEQ ID NO: 85774 - DNA, 22 bp, synthetic construct
  misc_feature 1..22: note = chemically synthesized
  source 1..22: mol_type = other DNA
atcctcaaaacaaagctattaa

SEQ ID NO: 85775 - DNA, 22 bp, synthetic construct
  misc_feature 1..22: note = chemically synthesized
  source 1..22: mol_type = other DNA
tcctcaaaacaaagctattaac

SEQ ID NO: 85776 - DNA, 22 bp, synthetic construct
  misc_feature 1..22: note = chemically synthesized
  source 1..22: mol_type = other DNA
aaaacaaagctattaacttatg

SEQ ID NO: 85777 - DNA, 22 bp, synthetic construct
  misc_feature 1..22: note = chemically synthesized
  source 1..22: mol_type = other DNA
ttaacttatggacctgagagta

SEQ ID NO: 85778 - DNA, 22 bp, synthetic construct
  misc_feature 1..22: note = chemically synthesized
  source 1..22: mol_type = other DNA
acttatggacctgagagtagag

SEQ ID NO: 85779 - DNA, 22 bp, synthetic construct
  misc_feature 1..22: note = chemically synthesized
  source 1..22: mol_type = other DNA
atggacctgagagtagagcccg

SEQ ID NO: 85780 - DNA, 22 bp, synthetic construct
  misc_feature 1..22: note = chemically synthesized
  source 1..22: mol_type = other DNA
tggacctgagagtagagcccgg

SEQ ID NO: 85781 - DNA, 22 bp, synthetic construct
  misc_feature 1..22: note = chemically synthesized
  source 1..22: mol_type = other DNA
agagtagagcccgggctgtctc

SEQ ID NO: 85782 - DNA, 22 bp, synthetic construct
  misc_feature 1..22: note = chemically synthesized
  source 1..22: mol_type = other DNA
tctcatgccagaacctattatc

SEQ ID NO: 85783 - DNA, 22 bp, synthetic construct
  misc_feature 1..22: note = chemically synthesized
  source 1..22: mol_type = other DNA
atgccagaacctattatcccat

SEQ ID NO: 85784 - DNA, 22 bp, synthetic construct
  misc_feature 1..22: note = chemically synthesized
  source 1..22: mol_type = other DNA
ttatcccatgttgcaagacaca

SEQ ID NO: 85785 - DNA, 22 bp, synthetic construct
  misc_feature 1..22: note = chemically synthesized
  source 1..22: mol_type = other DNA
tcccatgttgcaagacacaaat

SEQ ID NO: 85786 - DNA, 22 bp, synthetic construct
  misc_feature 1..22: note = chemically synthesized
  source 1..22: mol_type = other DNA
caagacacaaataggaaaatag

SEQ ID NO: 85787 - DNA, 22 bp, synthetic construct
  misc_feature 1..22: note = chemically synthesized
  source 1..22: mol_type = other DNA
gaagttattgaagggcatgaaa

SEQ ID NO: 85788 - DNA, 22 bp, synthetic construct
  misc_feature 1..22: note = chemically synthesized
  source 1..22: mol_type = other DNA
ttgaagggcatgaaataatagt

SEQ ID NO: 85789 - DNA, 22 bp, synthetic construct
  misc_feature 1..22: note = chemically synthesized
  source 1..22: mol_type = other DNA
aagggcatgaaataatagtggt

SEQ ID NO: 85790 - DNA, 22 bp, synthetic construct
  misc_feature 1..22: note = chemically synthesized
  source 1..22: mol_type = other DNA
gaaatttgagtagagtaggacc

SEQ ID NO: 85791 - DNA, 22 bp, synthetic construct
  misc_feature 1..22: note = chemically synthesized
  source 1..22: mol_type = other DNA
aaatttgagtagagtaggacca

SEQ ID NO: 85792 - DNA, 22 bp, synthetic construct
  misc_feature 1..22: note = chemically synthesized
  source 1..22: mol_type = other DNA
gagtagagtaggaccaagaaaa

SEQ ID NO: 85793 - DNA, 22 bp, synthetic construct
  misc_feature 1..22: note = chemically synthesized
  source 1..22: mol_type = other DNA
agtagagtaggaccaagaaaat

SEQ ID NO: 85794 - DNA, 22 bp, synthetic construct
  misc_feature 1..22: note = chemically synthesized
  source 1..22: mol_type = other DNA
cagggaatacctgagaggaaaa

SEQ ID NO: 85795 - DNA, 22 bp, synthetic construct
  misc_feature 1..22: note = chemically synthesized
  source 1..22: mol_type = other DNA
agggaatacctgagaggaaaaa

SEQ ID NO: 85796 - DNA, 22 bp, synthetic construct
  misc_feature 1..22: note = chemically synthesized
  source 1..22: mol_type = other DNA
agaggaaaaaaaaaaactatga

SEQ ID NO: 85797 - DNA, 22 bp, synthetic construct
  misc_feature 1..22: note = chemically synthesized
  source 1..22: mol_type = other DNA
tgaaggaacgcagtaattagct

SEQ ID NO: 85798 - DNA, 22 bp, synthetic construct
  misc_feature 1..22: note = chemically synthesized
  source 1..22: mol_type = other DNA
gctccttagctgaaagaatgat

SEQ ID NO: 85799 - DNA, 22 bp, synthetic construct
  misc_feature 1..22: note = chemically synthesized
  source 1..22: mol_type = other DNA
cttagctgaaagaatgatcttc

SEQ ID NO: 85800 - DNA, 22 bp, synthetic construct
  misc_feature 1..22: note = chemically synthesized
  source 1..22: mol_type = other DNA
agctgaaagaatgatcttctgg

SEQ ID NO: 85801 - DNA, 22 bp, synthetic construct
  misc_feature 1..22: note = chemically synthesized
  source 1..22: mol_type = other DNA
gctgaaagaatgatcttctggt

SEQ ID NO: 85802 - DNA, 22 bp, synthetic construct
  misc_feature 1..22: note = chemically synthesized
  source 1..22: mol_type = other DNA
aaagaatgatcttctggtcagt

SEQ ID NO: 85803 - DNA, 22 bp, synthetic construct
  misc_feature 1..22: note = chemically synthesized
  source 1..22: mol_type = other DNA
ctggtcagtgagaactggtttc

SEQ ID NO: 85804 - DNA, 22 bp, synthetic construct
  misc_feature 1..22: note = chemically synthesized
  source 1..22: mol_type = other DNA
tggtcagtgagaactggtttca

SEQ ID NO: 85805 - DNA, 22 bp, synthetic construct
  misc_feature 1..22: note = chemically synthesized
  source 1..22: mol_type = other DNA
gtcagtgagaactggtttcaaa

SEQ ID NO: 85806 - DNA, 22 bp, synthetic construct
  misc_feature 1..22: note = chemically synthesized
  source 1..22: mol_type = other DNA
gtttcaaatcttggttttgtca

SEQ ID NO: 85807 - DNA, 22 bp, synthetic construct
  misc_feature 1..22: note = chemically synthesized
  source 1..22: mol_type = other DNA
caaatcttggttttgtcatttc

SEQ ID NO: 85808 - DNA, 22 bp, synthetic construct
  misc_feature 1..22: note = chemically synthesized
  source 1..22: mol_type = other DNA
aaatcttggttttgtcatttct

SEQ ID NO: 85809 - DNA, 22 bp, synthetic construct
  misc_feature 1..22: note = chemically synthesized
  source 1..22: mol_type = other DNA
ggttttgtcatttcttaggtat

SEQ ID NO: 85810 - DNA, 22 bp, synthetic construct
  misc_feature 1..22: note = chemically synthesized
  source 1..22: mol_type = other DNA
gttttgtcatttcttaggtata

SEQ ID NO: 85811 - DNA, 22 bp, synthetic construct
  misc_feature 1..22: note = chemically synthesized
  source 1..22: mol_type = other DNA
tgtcatttcttaggtatataat

SEQ ID NO: 85812 - DNA, 22 bp, synthetic construct
  misc_feature 1..22: note = chemically synthesized
  source 1..22: mol_type = other DNA
gtcatttcttaggtatataatt

SEQ ID NO: 85813 - DNA, 22 bp, synthetic construct
  misc_feature 1..22: note = chemically synthesized
  source 1..22: mol_type = other DNA
tcatttcttaggtatataattt

SEQ ID NO: 85814 - DNA, 22 bp, synthetic construct
  misc_feature 1..22: note = chemically synthesized
  source 1..22: mol_type = other DNA
cttaggtatataatttttagct

SEQ ID NO: 85815 - DNA, 22 bp, synthetic construct
  misc_feature 1..22: note = chemically synthesized
  source 1..22: mol_type = other DNA
ttaggtatataatttttagctc

SEQ ID NO: 85816 - DNA, 22 bp, synthetic construct
  misc_feature 1..22: note = chemically synthesized
  source 1..22: mol_type = other DNA
aggtatataatttttagctcaa

SEQ ID NO: 85817 - DNA, 22 bp, synthetic construct
  misc_feature 1..22: note = chemically synthesized
  source 1..22: mol_type = other DNA
ggtatataatttttagctcaac

SEQ ID NO: 85818 - DNA, 22 bp, synthetic construct
  misc_feature 1..22: note = chemically synthesized
  source 1..22: mol_type = other DNA
ttagctcaacacttagctgcac

SEQ ID NO: 85819 - DNA, 22 bp, synthetic construct
  misc_feature 1..22: note = chemically synthesized
  source 1..22: mol_type = other DNA
tagctcaacacttagctgcaca

SEQ ID NO: 85820 - DNA, 22 bp, synthetic construct
  misc_feature 1..22: note = chemically synthesized
  source 1..22: mol_type = other DNA
agctcaacacttagctgcacaa

SEQ ID NO: 85821 - DNA, 22 bp, synthetic construct
  misc_feature 1..22: note = chemically synthesized
  source 1..22: mol_type = other DNA
gctcaacacttagctgcacaat

SEQ ID NO: 85822 - DNA, 22 bp, synthetic construct
  misc_feature 1..22: note = chemically synthesized
  source 1..22: mol_type = other DNA
aacacttagctgcacaattttt

SEQ ID NO: 85823 - DNA, 22 bp, synthetic construct
  misc_feature 1..22: note = chemically synthesized
  source 1..22: mol_type = other DNA
agctgcacaatttttaaaaata

SEQ ID NO: 85824 - DNA, 22 bp, synthetic construct
  misc_feature 1..22: note = chemically synthesized
  source 1..22: mol_type = other DNA
gctgcacaatttttaaaaatat

SEQ ID NO: 85825 - DNA, 22 bp, synthetic construct
  misc_feature 1..22: note = chemically synthesized
  source 1..22: mol_type = other DNA
cacaatttttaaaaatattgtt

SEQ ID NO: 85826 - DNA, 22 bp, synthetic construct
  misc_feature 1..22: note = chemically synthesized
  source 1..22: mol_type = other DNA
ttaaaaatattgttggtatgat

SEQ ID NO: 85827 - DNA, 22 bp, synthetic construct
  misc_feature 1..22: note = chemically synthesized
  source 1..22: mol_type = other DNA
taaaaatattgttggtatgatg

SEQ ID NO: 85828 - DNA, 22 bp, synthetic construct
  misc_feature 1..22: note = chemically synthesized
  source 1..22: mol_type = other DNA
aaaaatattgttggtatgatga

SEQ ID NO: 85829 - DNA, 22 bp, synthetic construct
  misc_feature 1..22: note = chemically synthesized
  source 1..22: mol_type = other DNA
aaaatattgttggtatgatgat

SEQ ID NO: 85830 - DNA, 22 bp, synthetic construct
  misc_feature 1..22: note = chemically synthesized
  source 1..22: mol_type = other DNA
ttggtatgatgataatatataa

SEQ ID NO: 85831 - DNA, 22 bp, synthetic construct
  misc_feature 1..22: note = chemically synthesized
  source 1..22: mol_type = other DNA
gtatgatgataatatataaaaa

SEQ ID NO: 85832 - DNA, 22 bp, synthetic construct
  misc_feature 1..22: note = chemically synthesized
  source 1..22: mol_type = other DNA
attatctgccactcaaaagcta

SEQ ID NO: 85833 - DNA, 22 bp, synthetic construct
  misc_feature 1..22: note = chemically synthesized
  source 1..22: mol_type = other DNA
tctgccactcaaaagctatcag

SEQ ID NO: 85834 - DNA, 22 bp, synthetic construct
  misc_feature 1..22: note = chemically synthesized
  source 1..22: mol_type = other DNA
ccactcaaaagctatcagtatt

SEQ ID NO: 85835 - DNA, 22 bp, synthetic construct
  misc_feature 1..22: note = chemically synthesized
  source 1..22: mol_type = other DNA
aaaagctatcagtatttatgat

SEQ ID NO: 85836 - DNA, 22 bp, synthetic construct
  misc_feature 1..22: note = chemically synthesized
  source 1..22: mol_type = other DNA
tcagtatttatgataataattc

SEQ ID NO: 85837 - DNA, 22 bp, synthetic construct
  misc_feature 1..22: note = chemically synthesized
  source 1..22: mol_type = other DNA
atgataataattctagttgtga

SEQ ID NO: 85838 - DNA, 22 bp, synthetic construct
  misc_feature 1..22: note = chemically synthesized
  source 1..22: mol_type = other DNA
tgataataattctagttgtgag

SEQ ID NO: 85839 - DNA, 22 bp, synthetic construct
  misc_feature 1..22: note = chemically synthesized
  source 1..22: mol_type = other DNA
tagttgtgagaaattgattatt

SEQ ID NO: 85840 - DNA, 22 bp, synthetic construct
  misc_feature 1..22: note = chemically synthesized
  source 1..22: mol_type = other DNA
gttgtgagaaattgattattaa

SEQ ID NO: 85841 - DNA, 22 bp, synthetic construct
  misc_feature 1..22: note = chemically synthesized
  source 1..22: mol_type = other DNA
tgagaaattgattattaaatat

SEQ ID NO: 85842 - DNA, 22 bp, synthetic construct
  misc_feature 1..22: note = chemically synthesized
  source 1..22: mol_type = other DNA
attattaaatatatataaggga

SEQ ID NO: 85843 - DNA, 22 bp, synthetic construct
  misc_feature 1..22: note = chemically synthesized
  source 1..22: mol_type = other DNA
ttaaatatatataagggataga

SEQ ID NO: 85844 - DNA, 22 bp, synthetic construct
  misc_feature 1..22: note = chemically synthesized
  source 1..22: mol_type = other DNA
aatatatataagggatagaaga

SEQ ID NO: 85845 - DNA, 22 bp, synthetic construct
  misc_feature 1..22: note = chemically synthesized
  source 1..22: mol_type = other DNA
acaaaattttgtcttggaaatc

SEQ ID NO: 85846 - DNA, 22 bp, synthetic construct
  misc_feature 1..22: note = chemically synthesized
  source 1..22: mol_type = other DNA
tgtcttggaaatctgagtgaac

SEQ ID NO: 85847 - DNA, 22 bp, synthetic construct
  misc_feature 1..22: note = chemically synthesized
  source 1..22: mol_type = other DNA
gtcttggaaatctgagtgaacc

SEQ ID NO: 85848 - DNA, 22 bp, synthetic construct
  misc_feature 1..22: note = chemically synthesized
  source 1..22: mol_type = other DNA
tcttggaaatctgagtgaacca

SEQ ID NO: 85849 - DNA, 22 bp, synthetic construct
  misc_feature 1..22: note = chemically synthesized
  source 1..22: mol_type = other DNA
ggaaatctgagtgaaccattca

SEQ ID NO: 85850 - DNA, 22 bp, synthetic construct
  misc_feature 1..22: note = chemically synthesized
  source 1..22: mol_type = other DNA
gaaatctgagtgaaccattcat

SEQ ID NO: 85851 - DNA, 22 bp, synthetic construct
  misc_feature 1..22: note = chemically synthesized
  source 1..22: mol_type = other DNA
agtgaaccattcatcaagtttg

SEQ ID NO: 85852 - DNA, 22 bp, synthetic construct
  misc_feature 1..22: note = chemically synthesized
  source 1..22: mol_type = other DNA
atcaagtttggaagcattagag

SEQ ID NO: 85853 - DNA, 22 bp, synthetic construct
  misc_feature 1..22: note = chemically synthesized
  source 1..22: mol_type = other DNA
ggaagcattagaggaaactgaa

SEQ ID NO: 85854 - DNA, 22 bp, synthetic construct
  misc_feature 1..22: note = chemically synthesized
  source 1..22: mol_type = other DNA
gaagcattagaggaaactgaaa

SEQ ID NO: 85855 - DNA, 22 bp, synthetic construct
  misc_feature 1..22: note = chemically synthesized
  source 1..22: mol_type = other DNA
gaggaaactgaaagaagtggag

SEQ ID NO: 85856 - DNA, 22 bp, synthetic construct
  misc_feature 1..22: note = chemically synthesized
  source 1..22: mol_type = other DNA
aaagaagtggaggataatttac

SEQ ID NO: 85857 - DNA, 22 bp, synthetic construct
  misc_feature 1..22: note = chemically synthesized
  source 1..22: mol_type = other DNA
actatcttttcaactcgctgag

SEQ ID NO: 85858 - DNA, 22 bp, synthetic construct
  misc_feature 1..22: note = chemically synthesized
  source 1..22: mol_type = other DNA
ctatcttttcaactcgctgagt

SEQ ID NO: 85859 - DNA, 22 bp, synthetic construct
  misc_feature 1..22: note = chemically synthesized
  source 1..22: mol_type = other DNA
tcttttcaactcgctgagttta

SEQ ID NO: 85860 - DNA, 22 bp, synthetic construct
  misc_feature 1..22: note = chemically synthesized
  source 1..22: mol_type = other DNA
ttcaactcgctgagtttaagag

SEQ ID NO: 85861 - DNA, 22 bp, synthetic construct
  misc_feature 1..22: note = chemically synthesized
  source 1..22: mol_type = other DNA
tcaactcgctgagtttaagagg

SEQ ID NO: 85862 - DNA, 22 bp, synthetic construct
  misc_feature 1..22: note = chemically synthesized
  source 1..22: mol_type = other DNA
caactcgctgagtttaagaggt

SEQ ID NO: 85863 - DNA, 22 bp, synthetic construct
  misc_feature 1..22: note = chemically synthesized
  source 1..22: mol_type = other DNA
aactcgctgagtttaagaggtc

SEQ ID NO: 85864 - DNA, 22 bp, synthetic construct
  misc_feature 1..22: note = chemically synthesized
  source 1..22: mol_type = other DNA
gctgagtttaagaggtccatag

SEQ ID NO: 85865 - DNA, 22 bp, synthetic construct
  misc_feature 1..22: note = chemically synthesized
  source 1..22: mol_type = other DNA
agtttaagaggtccataggtca

SEQ ID NO: 85866 - DNA, 22 bp, synthetic construct
  misc_feature 1..22: note = chemically synthesized
  source 1..22: mol_type = other DNA
aagaggtccataggtcatataa

SEQ ID NO: 85867 - DNA, 22 bp, synthetic construct
  misc_feature 1..22: note = chemically synthesized
  source 1..22: mol_type = other DNA
agaggtccataggtcatataag

SEQ ID NO: 85868 - DNA, 22 bp, synthetic construct
  misc_feature 1..22: note = chemically synthesized
  source 1..22: mol_type = other DNA
taagctattgtaacattttttt

SEQ ID NO: 85869 - DNA, 22 bp, synthetic construct
  misc_feature 1..22: note = chemically synthesized
  source 1..22: mol_type = other DNA
ttgtaacatttttttttcatgt

SEQ ID NO: 85870 - DNA, 22 bp, synthetic construct
  misc_feature 1..22: note = chemically synthesized
  source 1..22: mol_type = other DNA
taacatttttttttcatgtccc

SEQ ID NO: 85871 - DNA, 22 bp, synthetic construct
  misc_feature 1..22: note = chemically synthesized
  source 1..22: mol_type = other DNA
ttttttcatgtcccaaaatgtt

SEQ ID NO: 85872 - DNA, 22 bp, synthetic construct
  misc_feature 1..22: note = chemically synthesized
  source 1..22: mol_type = other DNA
tttttcatgtcccaaaatgtta

SEQ ID NO: 85873 - DNA, 22 bp, synthetic construct
  misc_feature 1..22: note = chemically synthesized
  source 1..22: mol_type = other DNA
ttttcatgtcccaaaatgttaa

SEQ ID NO: 85874 - DNA, 22 bp, synthetic construct
  misc_feature 1..22: note = chemically synthesized
  source 1..22: mol_type = other DNA
tttcatgtcccaaaatgttaat

SEQ ID NO: 85875 - DNA, 22 bp, synthetic construct
  misc_feature 1..22: note = chemically synthesized
  source 1..22: mol_type = other DNA
ttcatgtcccaaaatgttaatg

SEQ ID NO: 85876 - DNA, 22 bp, synthetic construct
  misc_feature 1..22: note = chemically synthesized
  source 1..22: mol_type = other DNA
tcatgtcccaaaatgttaatgt

SEQ ID NO: 85877 - DNA, 22 bp, synthetic construct
  misc_feature 1..22: note = chemically synthesized
  source 1..22: mol_type = other DNA
catgtcccaaaatgttaatgta

SEQ ID NO: 85878 - DNA, 22 bp, synthetic construct
  misc_feature 1..22: note = chemically synthesized
  source 1..22: mol_type = other DNA
atgtcccaaaatgttaatgtat

SEQ ID NO: 85879 - DNA, 22 bp, synthetic construct
  misc_feature 1..22: note = chemically synthesized
  source 1..22: mol_type = other DNA
atgtatccctaacagagagcaa

SEQ ID NO: 85880 - DNA, 22 bp, synthetic construct
  misc_feature 1..22: note = chemically synthesized
  source 1..22: mol_type = other DNA
acagagagcaatgaagttcttt

SEQ ID NO: 85881 - DNA, 22 bp, synthetic construct
  misc_feature 1..22: note = chemically synthesized
  source 1..22: mol_type = other DNA
tttttagtggagtttctctttc

SEQ ID NO: 85882 - DNA, 22 bp, synthetic construct
  misc_feature 1..22: note = chemically synthesized
  source 1..22: mol_type = other DNA
tttagtggagtttctctttctt

SEQ ID NO: 85883 - DNA, 22 bp, synthetic construct
  misc_feature 1..22: note = chemically synthesized
  source 1..22: mol_type = other DNA
ttagtggagtttctctttcttg

SEQ ID NO: 85884 - DNA, 22 bp, synthetic construct
  misc_feature 1..22: note = chemically synthesized
  source 1..22: mol_type = other DNA
tagtggagtttctctttcttga

SEQ ID NO: 85885 - DNA, 22 bp, synthetic construct
  misc_feature 1..22: note = chemically synthesized
  source 1..22: mol_type = other DNA
agtggagtttctctttcttgac

SEQ ID NO: 85886 - DNA, 22 bp, synthetic construct
  misc_feature 1..22: note = chemically synthesized
  source 1..22: mol_type = other DNA
gtggagtttctctttcttgaca

SEQ ID NO: 85887 - DNA, 22 bp, synthetic construct
  misc_feature 1..22: note = chemically synthesized
  source 1..22: mol_type = other DNA
ctctttcttgacatagtaccat

SEQ ID NO: 85888 - DNA, 22 bp, synthetic construct
  misc_feature 1..22: note = chemically synthesized
  source 1..22: mol_type = other DNA
tctttcttgacatagtaccatg

SEQ ID NO: 85889 - DNA, 22 bp, synthetic construct
  misc_feature 1..22: note = chemically synthesized
  source 1..22: mol_type = other DNA
tttcttgacatagtaccatgta

SEQ ID NO: 85890 - DNA, 22 bp, synthetic construct
  misc_feature 1..22: note = chemically synthesized
  source 1..22: mol_type = other DNA
tcttgacatagtaccatgtagt

SEQ ID NO: 85891 - DNA, 22 bp, synthetic construct
  misc_feature 1..22: note = chemically synthesized
  source 1..22: mol_type = other DNA
cttgacatagtaccatgtagtg

SEQ ID NO: 85892 - DNA, 22 bp, synthetic construct
  misc_feature 1..22: note = chemically synthesized
  source 1..22: mol_type = other DNA
ttgacatagtaccatgtagtga

SEQ ID NO: 85893 - DNA, 22 bp, synthetic construct
  misc_feature 1..22: note = chemically synthesized
  source 1..22: mol_type = other DNA
gacatagtaccatgtagtgaag

SEQ ID NO: 85894 - DNA, 22 bp, synthetic construct
  misc_feature 1..22: note = chemically synthesized
  source 1..22: mol_type = other DNA
acatagtaccatgtagtgaaga

SEQ ID NO: 85895 - DNA, 22 bp, synthetic construct
  misc_feature 1..22: note = chemically synthesized
  source 1..22: mol_type = other DNA
ctgactttggaattgaaagaat

SEQ ID NO: 85896 - DNA, 22 bp, synthetic construct
  misc_feature 1..22: note = chemically synthesized
  source 1..22: mol_type = other DNA
actttggaattgaaagaatctt

SEQ ID NO: 85897 - DNA, 22 bp, synthetic construct
  misc_feature 1..22: note = chemically synthesized
  source 1..22: mol_type = other DNA
tggaattgaaagaatcttagct

SEQ ID NO: 85898 - DNA, 22 bp, synthetic construct
  misc_feature 1..22: note = chemically synthesized
  source 1..22: mol_type = other DNA
ggaattgaaagaatcttagctc

SEQ ID NO: 85899 - DNA, 22 bp, synthetic construct
  misc_feature 1..22: note = chemically synthesized
  source 1..22: mol_type = other DNA
gaattgaaagaatcttagctca

SEQ ID NO: 85900 - DNA, 22 bp, synthetic construct
  misc_feature 1..22: note = chemically synthesized
  source 1..22: mol_type = other DNA
aaagaatcttagctcagctact

SEQ ID NO: 85901 - DNA, 22 bp, synthetic construct
  misc_feature 1..22: note = chemically synthesized
  source 1..22: mol_type = other DNA
agctcagctacttactagctga

SEQ ID NO: 85902 - DNA, 22 bp, synthetic construct
  misc_feature 1..22: note = chemically synthesized
  source 1..22: mol_type = other DNA
gctcagctacttactagctgag

SEQ ID NO: 85903 - DNA, 22 bp, synthetic construct
  misc_feature 1..22: note = chemically synthesized
  source 1..22: mol_type = other DNA
agctacttactagctgagtagc

SEQ ID NO: 85904 - DNA, 22 bp, synthetic construct
  misc_feature 1..22: note = chemically synthesized
  source 1..22: mol_type = other DNA
cttactagctgagtagctacaa

SEQ ID NO: 85905 - DNA, 22 bp, synthetic construct
  misc_feature 1..22: note = chemically synthesized
  source 1..22: mol_type = other DNA
actagctgagtagctacaacac

SEQ ID NO: 85906 - DNA, 22 bp, synthetic construct
  misc_feature 1..22: note = chemically synthesized
  source 1..22: mol_type = other DNA
ctagctgagtagctacaacacc

SEQ ID NO: 85907 - DNA, 22 bp, synthetic construct
  misc_feature 1..22: note = chemically synthesized
  source 1..22: mol_type = other DNA
gctgagtagctacaacacctta

SEQ ID NO: 85908 - DNA, 22 bp, synthetic construct
  misc_feature 1..22: note = chemically synthesized
  source 1..22: mol_type = other DNA
agtagctacaacaccttaatgc

SEQ ID NO: 85909 - DNA, 22 bp, synthetic construct
  misc_feature 1..22: note = chemically synthesized
  source 1..22: mol_type = other DNA
caacaccttaatgcccatccca

SEQ ID NO: 85910 - DNA, 22 bp, synthetic construct
  misc_feature 1..22: note = chemically synthesized
  source 1..22: mol_type = other DNA
aatgcccatcccaagacagtgt

SEQ ID NO: 85911 - DNA, 22 bp, synthetic construct
  misc_feature 1..22: note = chemically synthesized
  source 1..22: mol_type = other DNA
atgcccatcccaagacagtgtg

SEQ ID NO: 85912 - DNA, 22 bp, synthetic construct
  misc_feature 1..22: note = chemically synthesized
  source 1..22: mol_type = other DNA
aggaagcacaggatgtaccaga

SEQ ID NO: 85913 - DNA, 22 bp, synthetic construct
  misc_feature 1..22: note = chemically synthesized
  source 1..22: mol_type = other DNA
ttcatgttgctttcctaggctt

SEQ ID NO: 85914 - DNA, 22 bp, synthetic construct
  misc_feature 1..22: note = chemically synthesized
  source 1..22: mol_type = other DNA
tcatgttgctttcctaggcttt

SEQ ID NO: 85915 - DNA, 22 bp, synthetic construct
  misc_feature 1..22: note = chemically synthesized
  source 1..22: mol_type = other DNA
catgttgctttcctaggctttt

SEQ ID NO: 85916 - DNA, 22 bp, synthetic construct
  misc_feature 1..22: note = chemically synthesized
  source 1..22: mol_type = other DNA
atgttgctttcctaggcttttt

SEQ ID NO: 85917 - DNA, 22 bp, synthetic construct
  misc_feature 1..22: note = chemically synthesized
  source 1..22: mol_type = other DNA
ctttcctaggctttttatttcc

SEQ ID NO: 85918 - DNA, 22 bp, synthetic construct
  misc_feature 1..22: note = chemically synthesized
  source 1..22: mol_type = other DNA
tcctaggctttttatttccctc

SEQ ID NO: 85919 - DNA, 22 bp, synthetic construct
  misc_feature 1..22: note = chemically synthesized
  source 1..22: mol_type = other DNA
cctaggctttttatttccctcc

SEQ ID NO: 85920 - DNA, 22 bp, synthetic construct
  misc_feature 1..22: note = chemically synthesized
  source 1..22: mol_type = other DNA
ctaggctttttatttccctcct

SEQ ID NO: 85921 - DNA, 22 bp, synthetic construct
  misc_feature 1..22: note = chemically synthesized
  source 1..22: mol_type = other DNA
ggctttttatttccctcctcta

SEQ ID NO: 85922 - DNA, 22 bp, synthetic construct
  misc_feature 1..22: note = chemically synthesized
  source 1..22: mol_type = other DNA
tttatttccctcctctaggtat

SEQ ID NO: 85923 - DNA, 22 bp, synthetic construct
  misc_feature 1..22: note = chemically synthesized
  source 1..22: mol_type = other DNA
ttatttccctcctctaggtatt

SEQ ID NO: 85924 - DNA, 22 bp, synthetic construct
  misc_feature 1..22: note = chemically synthesized
  source 1..22: mol_type = other DNA
tatttccctcctctaggtattt

SEQ ID NO: 85925 - DNA, 22 bp, synthetic construct
  misc_feature 1..22: note = chemically synthesized
  source 1..22: mol_type = other DNA
atttccctcctctaggtatttc

SEQ ID NO: 85926 - DNA, 22 bp, synthetic construct
  misc_feature 1..22: note = chemically synthesized
  source 1..22: mol_type = other DNA
tttccctcctctaggtatttct

SEQ ID NO: 85927 - DNA, 22 bp, synthetic construct
  misc_feature 1..22: note = chemically synthesized
  source 1..22: mol_type = other DNA
ccctcctctaggtatttctgtt

SEQ ID NO: 85928 - DNA, 22 bp, synthetic construct
  misc_feature 1..22: note = chemically synthesized
  source 1..22: mol_type = other DNA
cctcctctaggtatttctgtta

SEQ ID NO: 85929 - DNA, 22 bp, synthetic construct
  misc_feature 1..22: note = chemically synthesized
  source 1..22: mol_type = other DNA
ctctaggtatttctgttatttt

SEQ ID NO: 85930 - DNA, 22 bp, synthetic construct
  misc_feature 1..22: note = chemically synthesized
  source 1..22: mol_type = other DNA
taggtatttctgttattttcct

SEQ ID NO: 85931 - DNA, 22 bp, synthetic construct
  misc_feature 1..22: note = chemically synthesized
  source 1..22: mol_type = other DNA
ggtatttctgttattttccttt

SEQ ID NO: 85932 - DNA, 22 bp, synthetic construct
  misc_feature 1..22: note = chemically synthesized
  source 1..22: mol_type = other DNA
ctgttattttccttttttcatt

SEQ ID NO: 85933 - DNA, 22 bp, synthetic construct
  misc_feature 1..22: note = chemically synthesized
  source 1..22: mol_type = other DNA
tgttattttccttttttcatta

SEQ ID NO: 85934 - DNA, 22 bp, synthetic construct
  misc_feature 1..22: note = chemically synthesized
  source 1..22: mol_type = other DNA
ttattttccttttttcattatt

SEQ ID NO: 85935 - DNA, 22 bp, synthetic construct
  misc_feature 1..22: note = chemically synthesized
  source 1..22: mol_type = other DNA
ttttccttttttcattatttct

SEQ ID NO: 85936 - DNA, 22 bp, synthetic construct
  misc_feature 1..22: note = chemically synthesized
  source 1..22: mol_type = other DNA
tccttttttcattatttcttcc

SEQ ID NO: 85937 - DNA, 22 bp, synthetic construct
  misc_feature 1..22: note = chemically synthesized
  source 1..22: mol_type = other DNA
ccttttttcattatttcttccc

SEQ ID NO: 85938 - DNA, 22 bp, synthetic construct
  misc_feature 1..22: note = chemically synthesized
  source 1..22: mol_type = other DNA
cttttttcattatttcttccct

SEQ ID NO: 85939 - DNA, 22 bp, synthetic construct
  misc_feature 1..22: note = chemically synthesized
  source 1..22: mol_type = other DNA
ttttcattatttcttccctctt

SEQ ID NO: 85940 - DNA, 22 bp, synthetic construct
  misc_feature 1..22: note = chemically synthesized
  source 1..22: mol_type = other DNA
tttcattatttcttccctcttc

SEQ ID NO: 85941 - DNA, 22 bp, synthetic construct
  misc_feature 1..22: note = chemically synthesized
  source 1..22: mol_type = other DNA
ttcattatttcttccctcttct

SEQ ID NO: 85942 - DNA, 22 bp, synthetic construct
  misc_feature 1..22: note = chemically synthesized
  source 1..22: mol_type = other DNA
tcattatttcttccctcttctt

SEQ ID NO: 85943 - DNA, 22 bp, synthetic construct
  misc_feature 1..22: note = chemically synthesized
  source 1..22: mol_type = other DNA
cattatttcttccctcttcttc

SEQ ID NO: 85944 - DNA, 22 bp, synthetic construct
  misc_feature 1..22: note = chemically synthesized
  source 1..22: mol_type = other DNA
attatttcttccctcttcttca

SEQ ID NO: 85945 - DNA, 22 bp, synthetic construct
  misc_feature 1..22: note = chemically synthesized
  source 1..22: mol_type = other DNA
tttcttccctcttcttcaggaa

SEQ ID NO: 85946 - DNA, 22 bp, synthetic construct
  misc_feature 1..22: note = chemically synthesized
  source 1..22: mol_type = other DNA
cttccctcttcttcaggaagtt

SEQ ID NO: 85947 - DNA, 22 bp, synthetic construct
  misc_feature 1..22: note = chemically synthesized
  source 1..22: mol_type = other DNA
ttccctcttcttcaggaagtta

SEQ ID NO: 85948 - DNA, 22 bp, synthetic construct
  misc_feature 1..22: note = chemically synthesized
  source 1..22: mol_type = other DNA
ccctcttcttcaggaagttaag

SEQ ID NO: 85949 - DNA, 22 bp, synthetic construct
  misc_feature 1..22: note = chemically synthesized
  source 1..22: mol_type = other DNA
cctcttcttcaggaagttaaga

SEQ ID NO: 85950 - DNA, 22 bp, synthetic construct
  misc_feature 1..22: note = chemically synthesized
  source 1..22: mol_type = other DNA
ttcttcaggaagttaagacagt

SEQ ID NO: 85951 - DNA, 22 bp, synthetic construct
  misc_feature 1..22: note = chemically synthesized
  source 1..22: mol_type = other DNA
cttcaggaagttaagacagtct

SEQ ID NO: 85952 - DNA, 22 bp, synthetic construct
  misc_feature 1..22: note = chemically synthesized
  source 1..22: mol_type = other DNA
ttcaggaagttaagacagtcta

SEQ ID NO: 85953 - DNA, 22 bp, synthetic construct
  misc_feature 1..22: note = chemically synthesized
  source 1..22: mol_type = other DNA
caggaagttaagacagtctacc

SEQ ID NO: 85954 - DNA, 22 bp, synthetic construct
  misc_feature 1..22: note = chemically synthesized
  source 1..22: mol_type = other DNA
aggaagttaagacagtctacct

SEQ ID NO: 85955 - DNA, 22 bp, synthetic construct
  misc_feature 1..22: note = chemically synthesized
  source 1..22: mol_type = other DNA
agacagtctacctagatttaga

SEQ ID NO: 85956 - DNA, 22 bp, synthetic construct
  misc_feature 1..22: note = chemically synthesized
  source 1..22: mol_type = other DNA
cctagatttagaagcaaatgtt

SEQ ID NO: 85957 - DNA, 22 bp, synthetic construct
  misc_feature 1..22: note = chemically synthesized
  source 1..22: mol_type = other DNA
gatttagaagcaaatgtttata

SEQ ID NO: 85958 - DNA, 22 bp, synthetic construct
  misc_feature 1..22: note = chemically synthesized
  source 1..22: mol_type = other DNA
agaagcaaatgtttatatagtg

SEQ ID NO: 85959 - DNA, 22 bp, synthetic construct
  misc_feature 1..22: note = chemically synthesized
  source 1..22: mol_type = other DNA
gaagcaaatgtttatatagtgg

SEQ ID NO: 85960 - DNA, 22 bp, synthetic construct
  misc_feature 1..22: note = chemically synthesized
  source 1..22: mol_type = other DNA
atatagtggtgaaatttaaagc

SEQ ID NO: 85961 - DNA, 22 bp, synthetic construct
  misc_feature 1..22: note = chemically synthesized
  source 1..22: mol_type = other DNA
tatagtggtgaaatttaaagcc

SEQ ID NO: 85962 - DNA, 22 bp, synthetic construct
  misc_feature 1..22: note = chemically synthesized
  source 1..22: mol_type = other DNA
aaagcctaattgactaaagcca

SEQ ID NO: 85963 - DNA, 22 bp, synthetic construct
  misc_feature 1..22: note = chemically synthesized
  source 1..22: mol_type = other DNA
aagcctaattgactaaagccat

SEQ ID NO: 85964 - DNA, 22 bp, synthetic construct
  misc_feature 1..22: note = chemically synthesized
  source 1..22: mol_type = other DNA
attgactaaagccatttaagaa

SEQ ID NO: 85965 - DNA, 22 bp, synthetic construct
  misc_feature 1..22: note = chemically synthesized
  source 1..22: mol_type = other DNA
actaaagccatttaagaatgta

SEQ ID NO: 85966 - DNA, 22 bp, synthetic construct
  misc_feature 1..22: note = chemically synthesized
  source 1..22: mol_type = other DNA
aagccatttaagaatgtaatat

SEQ ID NO: 85967 - DNA, 22 bp, synthetic construct
  misc_feature 1..22: note = chemically synthesized
  source 1..22: mol_type = other DNA
aagaatgtaatatctcagttag

SEQ ID NO: 85968 - DNA, 22 bp, synthetic construct
  misc_feature 1..22: note = chemically synthesized
  source 1..22: mol_type = other DNA
agaatgtaatatctcagttagt

SEQ ID NO: 85969 - DNA, 22 bp, synthetic construct
  misc_feature 1..22: note = chemically synthesized
  source 1..22: mol_type = other DNA
agttagtatgcacttcttgaaa

SEQ ID NO: 85970 - DNA, 22 bp, synthetic construct
  misc_feature 1..22: note = chemically synthesized
  source 1..22: mol_type = other DNA
gtatgcacttcttgaaatgcaa

SEQ ID NO: 85971 - DNA, 22 bp, synthetic construct
  misc_feature 1..22: note = chemically synthesized
  source 1..22: mol_type = other DNA
cttgaaatgcaaagaaatggtc

SEQ ID NO: 85972 - DNA, 22 bp, synthetic construct
  misc_feature 1..22: note = chemically synthesized
  source 1..22: mol_type = other DNA
ttgaaatgcaaagaaatggtct

SEQ ID NO: 85973 - DNA, 22 bp, synthetic construct
  misc_feature 1..22: note = chemically synthesized
  source 1..22: mol_type = other DNA
gaaatgcaaagaaatggtctga

SEQ ID NO: 85974 - DNA, 22 bp, synthetic construct
  misc_feature 1..22: note = chemically synthesized
  source 1..22: mol_type = other DNA
aaatgcaaagaaatggtctgac

SEQ ID NO: 85975 - DNA, 22 bp, synthetic construct
  misc_feature 1..22: note = chemically synthesized
  source 1..22: mol_type = other DNA
acttttttccattgtttagttt

SEQ ID NO: 85976 - DNA, 22 bp, synthetic construct
  misc_feature 1..22: note = chemically synthesized
  source 1..22: mol_type = other DNA
ttttccattgtttagtttctaa

SEQ ID NO: 85977 - DNA, 22 bp, synthetic construct
  misc_feature 1..22: note = chemically synthesized
  source 1..22: mol_type = other DNA
tttccattgtttagtttctaaa

SEQ ID NO: 85978 - DNA, 22 bp, synthetic construct
  misc_feature 1..22: note = chemically synthesized
  source 1..22: mol_type = other DNA
ttccattgtttagtttctaaat

SEQ ID NO: 85979 - DNA, 22 bp, synthetic construct
  misc_feature 1..22: note = chemically synthesized
  source 1..22: mol_type = other DNA
tccattgtttagtttctaaatt

SEQ ID NO: 85980 - DNA, 22 bp, synthetic construct
  misc_feature 1..22: note = chemically synthesized
  source 1..22: mol_type = other DNA
ccattgtttagtttctaaattt

SEQ ID NO: 85981 - DNA, 22 bp, synthetic construct
  misc_feature 1..22: note = chemically synthesized
  source 1..22: mol_type = other DNA
cattgtttagtttctaaattta

SEQ ID NO: 85982 - DNA, 22 bp, synthetic construct
  misc_feature 1..22: note = chemically synthesized
  source 1..22: mol_type = other DNA
tttagtttctaaatttagtttt

SEQ ID NO: 85983 - DNA, 22 bp, synthetic construct
  misc_feature 1..22: note = chemically synthesized
  source 1..22: mol_type = other DNA
agtttctaaatttagtttttat

SEQ ID NO: 85984 - DNA, 22 bp, synthetic construct
  misc_feature 1..22: note = chemically synthesized
  source 1..22: mol_type = other DNA
gtttctaaatttagtttttatt

SEQ ID NO: 85985 - DNA, 22 bp, synthetic construct
  misc_feature 1..22: note = chemically synthesized
  source 1..22: mol_type = other DNA
ctaaatttagtttttattttaa

SEQ ID NO: 85986 - DNA, 22 bp, synthetic construct
  misc_feature 1..22: note = chemically synthesized
  source 1..22: mol_type = other DNA
taaatttagtttttattttaat

SEQ ID NO: 85987 - DNA, 22 bp, synthetic construct
  misc_feature 1..22: note = chemically synthesized
  source 1..22: mol_type = other DNA
aatttagtttttattttaatat

SEQ ID NO: 85988 - DNA, 22 bp, synthetic construct
  misc_feature 1..22: note = chemically synthesized
  source 1..22: mol_type = other DNA
agtttttattttaatattttaa

SEQ ID NO: 85989 - DNA, 22 bp, synthetic construct
  misc_feature 1..22: note = chemically synthesized
  source 1..22: mol_type = other DNA
gtttttattttaatattttaag

SEQ ID NO: 85990 - DNA, 22 bp, synthetic construct
  misc_feature 1..22: note = chemically synthesized
  source 1..22: mol_type = other DNA
ttattttaatattttaagtaca

SEQ ID NO: 85991 - DNA, 22 bp, synthetic construct
  misc_feature 1..22: note = chemically synthesized
  source 1..22: mol_type = other DNA
tattttaatattttaagtacag

SEQ ID NO: 85992 - DNA, 22 bp, synthetic construct
  misc_feature 1..22: note = chemically synthesized
  source 1..22: mol_type = other DNA
attttaatattttaagtacagc

SEQ ID NO: 85993 - DNA, 22 bp, synthetic construct
  misc_feature 1..22: note = chemically synthesized
  source 1..22: mol_type = other DNA
ttttaatattttaagtacagca

SEQ ID NO: 85994 - DNA, 22 bp, synthetic construct
  misc_feature 1..22: note = chemically synthesized
  source 1..22: mol_type = other DNA
taatattttaagtacagcatgc

SEQ ID NO: 85995 - DNA, 22 bp, synthetic construct
  misc_feature 1..22: note = chemically synthesized
  source 1..22: mol_type = other DNA
aatattttaagtacagcatgca

SEQ ID NO: 85996 - DNA, 22 bp, synthetic construct
  misc_feature 1..22: note = chemically synthesized
  source 1..22: mol_type = other DNA
atattttaagtacagcatgcat

SEQ ID NO: 85997 - DNA, 22 bp, synthetic construct
  misc_feature 1..22: note = chemically synthesized
  source 1..22: mol_type = other DNA
taagtacagcatgcatatataa

SEQ ID NO: 85998 - DNA, 22 bp, synthetic construct
  misc_feature 1..22: note = chemically synthesized
  source 1..22: mol_type = other DNA
aagtacagcatgcatatataaa

SEQ ID NO: 85999 - DNA, 22 bp, synthetic construct
  misc_feature 1..22: note = chemically synthesized
  source 1..22: mol_type = other DNA
agtacagcatgcatatataaaa

SEQ ID NO: 86000 - DNA, 22 bp, synthetic construct
  misc_feature 1..22: note = chemically synthesized
  source 1..22: mol_type = other DNA
tacatgcacagctgaattaact

SEQ ID NO: 86001 - DNA, 22 bp, synthetic construct
  misc_feature 1..22: note = chemically synthesized
  source 1..22: mol_type = other DNA
aattaacttttggaaggtgaac

SEQ ID NO: 86002 - DNA, 22 bp, synthetic construct
  misc_feature 1..22: note = chemically synthesized
  source 1..22: mol_type = other DNA
acttttggaaggtgaacacacc

SEQ ID NO: 86003 - DNA, 22 bp, synthetic construct
  misc_feature 1..22: note = chemically synthesized
  source 1..22: mol_type = other DNA
ttggaaggtgaacacacccatg

SEQ ID NO: 86004 - DNA, 22 bp, synthetic construct
  misc_feature 1..22: note = chemically synthesized
  source 1..22: mol_type = other DNA
tggaaggtgaacacacccatgt

SEQ ID NO: 86005 - DNA, 22 bp, synthetic construct
  misc_feature 1..22: note = chemically synthesized
  source 1..22: mol_type = other DNA
ggaaggtgaacacacccatgta

SEQ ID NO: 86006 - DNA, 22 bp, synthetic construct
  misc_feature 1..22: note = chemically synthesized
  source 1..22: mol_type = other DNA
gaaggtgaacacacccatgtaa

SEQ ID NO: 86007 - DNA, 22 bp, synthetic construct
  misc_feature 1..22: note = chemically synthesized
  source 1..22: mol_type = other DNA
ataagataggaaattaaagagt

SEQ ID NO: 86008 - DNA, 22 bp, synthetic construct
  misc_feature 1..22: note = chemically synthesized
  source 1..22: mol_type = other DNA
aagagtaaacatatgctcactc

SEQ ID NO: 86009 - DNA, 22 bp, synthetic construct
  misc_feature 1..22: note = chemically synthesized
  source 1..22: mol_type = other DNA
actctttatcattccactaatt

SEQ ID NO: 86010 - DNA, 22 bp, synthetic construct
  misc_feature 1..22: note = chemically synthesized
  source 1..22: mol_type = other DNA
tttatcattccactaattgtct

SEQ ID NO: 86011 - DNA, 22 bp, synthetic construct
  misc_feature 1..22: note = chemically synthesized
  source 1..22: mol_type = other DNA
tatcattccactaattgtctcc

SEQ ID NO: 86012 - DNA, 22 bp, synthetic construct
  misc_feature 1..22: note = chemically synthesized
  source 1..22: mol_type = other DNA
atcattccactaattgtctcca

SEQ ID NO: 86013 - DNA, 22 bp, synthetic construct
  misc_feature 1..22: note = chemically synthesized
  source 1..22: mol_type = other DNA
tcattccactaattgtctccaa

SEQ ID NO: 86014 - DNA, 22 bp, synthetic construct
  misc_feature 1..22: note = chemically synthesized
  source 1..22: mol_type = other DNA
cactaattgtctccaaagttaa

SEQ ID NO: 86015 - DNA, 22 bp, synthetic construct
  misc_feature 1..22: note = chemically synthesized
  source 1..22: mol_type = other DNA
attgtctccaaagttaataatt

SEQ ID NO: 86016 - DNA, 22 bp, synthetic construct
  misc_feature 1..22: note = chemically synthesized
  source 1..22: mol_type = other DNA
tctccaaagttaataattatcc

SEQ ID NO: 86017 - DNA, 22 bp, synthetic construct
  misc_feature 1..22: note = chemically synthesized
  source 1..22: mol_type = other DNA
caaagttaataattatcctgat

SEQ ID NO: 86018 - DNA, 22 bp, synthetic construct
  misc_feature 1..22: note = chemically synthesized
  source 1..22: mol_type = other DNA
ataattatcctgatataattca

SEQ ID NO: 86019 - DNA, 22 bp, synthetic construct
  misc_feature 1..22: note = chemically synthesized
  source 1..22: mol_type = other DNA
tcctgatataattcatttttat

SEQ ID NO: 86020 - DNA, 22 bp, synthetic construct
  misc_feature 1..22: note = chemically synthesized
  source 1..22: mol_type = other DNA
atataattcatttttatcacga

SEQ ID NO: 86021 - DNA, 22 bp, synthetic construct
  misc_feature 1..22: note = chemically synthesized
  source 1..22: mol_type = other DNA
atttttatcacgattgactcat

SEQ ID NO: 86022 - DNA, 22 bp, synthetic construct
  misc_feature 1..22: note = chemically synthesized
  source 1..22: mol_type = other DNA
ttatcacgattgactcatgtcc

SEQ ID NO: 86023 - DNA, 22 bp, synthetic construct
  misc_feature 1..22: note = chemically synthesized
  source 1..22: mol_type = other DNA
tatcacgattgactcatgtccc

SEQ ID NO: 86024 - DNA, 22 bp, synthetic construct
  misc_feature 1..22: note = chemically synthesized
  source 1..22: mol_type = other DNA
atcacgattgactcatgtccct

SEQ ID NO: 86025 - DNA, 22 bp, synthetic construct
  misc_feature 1..22: note = chemically synthesized
  source 1..22: mol_type = other DNA
tcacgattgactcatgtccctt

SEQ ID NO: 86026 - DNA, 22 bp, synthetic construct
  misc_feature 1..22: note = chemically synthesized
  source 1..22: mol_type = other DNA
actcatgtccctttttttaaaa

SEQ ID NO: 86027 - DNA, 22 bp, synthetic construct
  misc_feature 1..22: note = chemically synthesized
  source 1..22: mol_type = other DNA
atgtccctttttttaaaagtgt

SEQ ID NO: 86028 - DNA, 22 bp, synthetic construct
  misc_feature 1..22: note = chemically synthesized
  source 1..22: mol_type = other DNA
tttttaaaagtgtgtatacatt

SEQ ID NO: 86029 - DNA, 22 bp, synthetic construct
  misc_feature 1..22: note = chemically synthesized
  source 1..22: mol_type = other DNA
ttttaaaagtgtgtatacattg

SEQ ID NO: 86030 - DNA, 22 bp, synthetic construct
  misc_feature 1..22: note = chemically synthesized
  source 1..22: mol_type = other DNA
tttaaaagtgtgtatacattga

SEQ ID NO: 86031 - DNA, 22 bp, synthetic construct
  misc_feature 1..22: note = chemically synthesized
  source 1..22: mol_type = other DNA
ttaaaagtgtgtatacattgaa

SEQ ID NO: 86032 - DNA, 22 bp, synthetic construct
  misc_feature 1..22: note = chemically synthesized
  source 1..22: mol_type = other DNA
taaaagtgtgtatacattgaat

SEQ ID NO: 86033 - DNA, 22 bp, synthetic construct
  misc_feature 1..22: note = chemically synthesized
  source 1..22: mol_type = other DNA
aaaagtgtgtatacattgaatt

SEQ ID NO: 86034 - DNA, 22 bp, synthetic construct
  misc_feature 1..22: note = chemically synthesized
  source 1..22: mol_type = other DNA
aaagtgtgtatacattgaatta

SEQ ID NO: 86035 - DNA, 22 bp, synthetic construct
  misc_feature 1..22: note = chemically synthesized
  source 1..22: mol_type = other DNA
aattatactgtgttgcttatgt

SEQ ID NO: 86036 - DNA, 22 bp, synthetic construct
  misc_feature 1..22: note = chemically synthesized
  source 1..22: mol_type = other DNA
tactgtgttgcttatgtctgac

SEQ ID NO: 86037 - DNA, 22 bp, synthetic construct
  misc_feature 1..22: note = chemically synthesized
  source 1..22: mol_type = other DNA
tgttgcttatgtctgactttat

SEQ ID NO: 86038 - DNA, 22 bp, synthetic construct
  misc_feature 1..22: note = chemically synthesized
  source 1..22: mol_type = other DNA
cttatgtctgactttattcaat

SEQ ID NO: 86039 - DNA, 22 bp, synthetic construct
  misc_feature 1..22: note = chemically synthesized
  source 1..22: mol_type = other DNA
atgtctgactttattcaatatt

SEQ ID NO: 86040 - DNA, 22 bp, synthetic construct
  misc_feature 1..22: note = chemically synthesized
  source 1..22: mol_type = other DNA
tgtctgactttattcaatatta

SEQ ID NO: 86041 - DNA, 22 bp, synthetic construct
  misc_feature 1..22: note = chemically synthesized
  source 1..22: mol_type = other DNA
actttattcaatattatgtttg

SEQ ID NO: 86042 - DNA, 22 bp, synthetic construct
  misc_feature 1..22: note = chemically synthesized
  source 1..22: mol_type = other DNA
tattcaatattatgtttgtgaa

SEQ ID NO: 86043 - DNA, 22 bp, synthetic construct
  misc_feature 1..22: note = chemically synthesized
  source 1..22: mol_type = other DNA
attcaatattatgtttgtgaat

SEQ ID NO: 86044 - DNA, 22 bp, synthetic construct
  misc_feature 1..22: note = chemically synthesized
  source 1..22: mol_type = other DNA
ttcaatattatgtttgtgaatt

SEQ ID NO: 86045 - DNA, 22 bp, synthetic construct
  misc_feature 1..22: note = chemically synthesized
  source 1..22: mol_type = other DNA
aatattatgtttgtgaattgca

SEQ ID NO: 86046 - DNA, 22 bp, synthetic construct
  misc_feature 1..22: note = chemically synthesized
  source 1..22: mol_type = other DNA
tgtttgtgaattgcattcatac

SEQ ID NO: 86047 - DNA, 22 bp, synthetic construct
  misc_feature 1..22: note = chemically synthesized
  source 1..22: mol_type = other DNA
gtgaattgcattcatactagtg

SEQ ID NO: 86048 - DNA, 22 bp, synthetic construct
  misc_feature 1..22: note = chemically synthesized
  source 1..22: mol_type = other DNA
tgaattgcattcatactagtgt

SEQ ID NO: 86049 - DNA, 22 bp, synthetic construct
  misc_feature 1..22: note = chemically synthesized
  source 1..22: mol_type = other DNA
cattcatactagtgtatgactg

SEQ ID NO: 86050 - DNA, 22 bp, synthetic construct
  misc_feature 1..22: note = chemically synthesized
  source 1..22: mol_type = other DNA
atactagtgtatgactgtagtt

SEQ ID NO: 86051 - DNA, 22 bp, synthetic construct
  misc_feature 1..22: note = chemically synthesized
  source 1..22: mol_type = other DNA
gtgtatgactgtagttgatttt

SEQ ID NO: 86052 - DNA, 22 bp, synthetic construct
  misc_feature 1..22: note = chemically synthesized
  source 1..22: mol_type = other DNA
tagttgatttttcatttctgaa

SEQ ID NO: 86053 - DNA, 22 bp, synthetic construct
  misc_feature 1..22: note = chemically synthesized
  source 1..22: mol_type = other DNA
atttttcatttctgaatgtcat

SEQ ID NO: 86054 - DNA, 22 bp, synthetic construct
  misc_feature 1..22: note = chemically synthesized
  source 1..22: mol_type = other DNA
ttcatttctgaatgtcattcta

SEQ ID NO: 86055 - DNA, 22 bp, synthetic construct
  misc_feature 1..22: note = chemically synthesized
  source 1..22: mol_type = other DNA
tcatttctgaatgtcattctat

SEQ ID NO: 86056 - DNA, 22 bp, synthetic construct
  misc_feature 1..22: note = chemically synthesized
  source 1..22: mol_type = other DNA
catttctgaatgtcattctatt

SEQ ID NO: 86057 - DNA, 22 bp, synthetic construct
  misc_feature 1..22: note = chemically synthesized
  source 1..22: mol_type = other DNA
atttctgaatgtcattctattt

SEQ ID NO: 86058 - DNA, 22 bp, synthetic construct
  misc_feature 1..22: note = chemically synthesized
  source 1..22: mol_type = other DNA
ctgaatgtcattctattttatg

SEQ ID NO: 86059 - DNA, 22 bp, synthetic construct
  misc_feature 1..22: note = chemically synthesized
  source 1..22: mol_type = other DNA
tgaatgtcattctattttatgt

SEQ ID NO: 86060 - DNA, 22 bp, synthetic construct
  misc_feature 1..22: note = chemically synthesized
  source 1..22: mol_type = other DNA
aatgtcattctattttatgtat

SEQ ID NO: 86061 - DNA, 22 bp, synthetic construct
  misc_feature 1..22: note = chemically synthesized
  source 1..22: mol_type = other DNA
tattttatgtatataccacaat

SEQ ID NO: 86062 - DNA, 22 bp, synthetic construct
  misc_feature 1..22: note = chemically synthesized
  source 1..22: mol_type = other DNA
ttttatgtatataccacaatat

SEQ ID NO: 86063 - DNA, 22 bp, synthetic construct
  misc_feature 1..22: note = chemically synthesized
  source 1..22: mol_type = other DNA
tatgtatataccacaatatatt

SEQ ID NO: 86064 - DNA, 22 bp, synthetic construct
  misc_feature 1..22: note = chemically synthesized
  source 1..22: mol_type = other DNA
atgtatataccacaatatattt

SEQ ID NO: 86065 - DNA, 22 bp, synthetic construct
  misc_feature 1..22: note = chemically synthesized
  source 1..22: mol_type = other DNA
tgtatataccacaatatattta

SEQ ID NO: 86066 - DNA, 22 bp, synthetic construct
  misc_feature 1..22: note = chemically synthesized
  source 1..22: mol_type = other DNA
attgactccacagttgatagat

SEQ ID NO: 86067 - DNA, 22 bp, synthetic construct
  misc_feature 1..22: note = chemically synthesized
  source 1..22: mol_type = other DNA
ttgactccacagttgatagata

SEQ ID NO: 86068 - DNA, 22 bp, synthetic construct
  misc_feature 1..22: note = chemically synthesized
  source 1..22: mol_type = other DNA
actccacagttgatagatattt

SEQ ID NO: 86069 - DNA, 22 bp, synthetic construct
  misc_feature 1..22: note = chemically synthesized
  source 1..22: mol_type = other DNA
cacagttgatagatatttgagt

SEQ ID NO: 86070 - DNA, 22 bp, synthetic construct
  misc_feature 1..22: note = chemically synthesized
  source 1..22: mol_type = other DNA
atagatatttgagtaccttcta

SEQ ID NO: 86071 - DNA, 22 bp, synthetic construct
  misc_feature 1..22: note = chemically synthesized
  source 1..22: mol_type = other DNA
gagtaccttctagcttttggct

SEQ ID NO: 86072 - DNA, 22 bp, synthetic construct
  misc_feature 1..22: note = chemically synthesized
  source 1..22: mol_type = other DNA
agtaccttctagcttttggcta

SEQ ID NO: 86073 - DNA, 22 bp, synthetic construct
  misc_feature 1..22: note = chemically synthesized
  source 1..22: mol_type = other DNA
ctagcttttggctataatataa

SEQ ID NO: 86074 - DNA, 22 bp, synthetic construct
  misc_feature 1..22: note = chemically synthesized
  source 1..22: mol_type = other DNA
tagcttttggctataatataaa

SEQ ID NO: 86075 - DNA, 22 bp, synthetic construct
  misc_feature 1..22: note = chemically synthesized
  source 1..22: mol_type = other DNA
gcttttggctataatataaatt

SEQ ID NO: 86076 - DNA, 22 bp, synthetic construct
  misc_feature 1..22: note = chemically synthesized
  source 1..22: mol_type = other DNA
ttggctataatataaattgctg

SEQ ID NO: 86077 - DNA, 22 bp, synthetic construct
  misc_feature 1..22: note = chemically synthesized
  source 1..22: mol_type = other DNA
tggctataatataaattgctgc

SEQ ID NO: 86078 - DNA, 22 bp, synthetic construct
  misc_feature 1..22: note = chemically synthesized
  source 1..22: mol_type = other DNA
ggctataatataaattgctgct

SEQ ID NO: 86079 - DNA, 22 bp, synthetic construct
  misc_feature 1..22: note = chemically synthesized
  source 1..22: mol_type = other DNA
gctataatataaattgctgcta

SEQ ID NO: 86080 - DNA, 22 bp, synthetic construct
  misc_feature 1..22: note = chemically synthesized
  source 1..22: mol_type = other DNA
taatataaattgctgctatgaa

SEQ ID NO: 86081 - DNA, 22 bp, synthetic construct
  misc_feature 1..22: note = chemically synthesized
  source 1..22: mol_type = other DNA
ctgctatgaagattcttatata

SEQ ID NO: 86082 - DNA, 22 bp, synthetic construct
  misc_feature 1..22: note = chemically synthesized
  source 1..22: mol_type = other DNA
ctatgaagattcttatatattt

SEQ ID NO: 86083 - DNA, 22 bp, synthetic construct
  misc_feature 1..22: note = chemically synthesized
  source 1..22: mol_type = other DNA
tgaagattcttatatatttttg

SEQ ID NO: 86084 - DNA, 22 bp, synthetic construct
  misc_feature 1..22: note = chemically synthesized
  source 1..22: mol_type = other DNA
ttatatatttttgtatatatat

SEQ ID NO: 86085 - DNA, 22 bp, synthetic construct
  misc_feature 1..22: note = chemically synthesized
  source 1..22: mol_type = other DNA
atatatttttgtatatatattc

SEQ ID NO: 86086 - DNA, 22 bp, synthetic construct
  misc_feature 1..22: note = chemically synthesized
  source 1..22: mol_type = other DNA
tatatttttgtatatatattct

SEQ ID NO: 86087 - DNA, 22 bp, synthetic construct
  misc_feature 1..22: note = chemically synthesized
  source 1..22: mol_type = other DNA
ttgtatatatattctgtaaatt

SEQ ID NO: 86088 - DNA, 22 bp, synthetic construct
  misc_feature 1..22: note = chemically synthesized
  source 1..22: mol_type = other DNA
tgtatatatattctgtaaattg

SEQ ID NO: 86089 - DNA, 22 bp, synthetic construct
  misc_feature 1..22: note = chemically synthesized
  source 1..22: mol_type = other DNA
gtatatatattctgtaaattgc

SEQ ID NO: 86090 - DNA, 22 bp, synthetic construct
  misc_feature 1..22: note = chemically synthesized
  source 1..22: mol_type = other DNA
tatatatattctgtaaattgct

SEQ ID NO: 86091 - DNA, 22 bp, synthetic construct
  misc_feature 1..22: note = chemically synthesized
  source 1..22: mol_type = other DNA
tgtaaattgctaggtcataaaa

SEQ ID NO: 86092 - DNA, 22 bp, synthetic construct
  misc_feature 1..22: note = chemically synthesized
  source 1..22: mol_type = other DNA
taaattgctaggtcataaaata

SEQ ID NO: 86093 - DNA, 22 bp, synthetic construct
  misc_feature 1..22: note = chemically synthesized
  source 1..22: mol_type = other DNA
ctaggtcataaaatatgcatat

SEQ ID NO: 86094 - DNA, 22 bp, synthetic construct
  misc_feature 1..22: note = chemically synthesized
  source 1..22: mol_type = other DNA
ggtcataaaatatgcatatgtt

SEQ ID NO: 86095 - DNA, 22 bp, synthetic construct
  misc_feature 1..22: note = chemically synthesized
  source 1..22: mol_type = other DNA
aactttaaaatacactgccaac

SEQ ID NO: 86096 - DNA, 22 bp, synthetic construct
  misc_feature 1..22: note = chemically synthesized
  source 1..22: mol_type = other DNA
taaaatacactgccaacctgtt

SEQ ID NO: 86097 - DNA, 22 bp, synthetic construct
  misc_feature 1..22: note = chemically synthesized
  source 1..22: mol_type = other DNA
aaaatacactgccaacctgttt

SEQ ID NO: 86098 - DNA, 22 bp, synthetic construct
  misc_feature 1..22: note = chemically synthesized
  source 1..22: mol_type = other DNA
aaatacactgccaacctgttta

SEQ ID NO: 86099 - DNA, 22 bp, synthetic construct
  misc_feature 1..22: note = chemically synthesized
  source 1..22: mol_type = other DNA
ccaacctgtttacctccccact

SEQ ID NO: 86100 - DNA, 22 bp, synthetic construct
  misc_feature 1..22: note = chemically synthesized
  source 1..22: mol_type = other DNA
tttacctccccactataattta

SEQ ID NO: 86101 - DNA, 22 bp, synthetic construct
  misc_feature 1..22: note = chemically synthesized
  source 1..22: mol_type = other DNA
acctccccactataatttaatg

SEQ ID NO: 86102 - DNA, 22 bp, synthetic construct
  misc_feature 1..22: note = chemically synthesized
  source 1..22: mol_type = other DNA
cctccccactataatttaatgt

SEQ ID NO: 86103 - DNA, 22 bp, synthetic construct
  misc_feature 1..22: note = chemically synthesized
  source 1..22: mol_type = other DNA
cccactataatttaatgtcatt

SEQ ID NO: 86104 - DNA, 22 bp, synthetic construct
  misc_feature 1..22: note = chemically synthesized
  source 1..22: mol_type = other DNA
taatttaatgtcatttggtcaa

SEQ ID NO: 86105 - DNA, 22 bp, synthetic construct
  misc_feature 1..22: note = chemically synthesized
  source 1..22: mol_type = other DNA
aatgtcatttggtcaacctata

SEQ ID NO: 86106 - DNA, 22 bp, synthetic construct
  misc_feature 1..22: note = chemically synthesized
  source 1..22: mol_type = other DNA
atgtcatttggtcaacctataa

SEQ ID NO: 86107 - DNA, 22 bp, synthetic construct
  misc_feature 1..22: note = chemically synthesized
  source 1..22: mol_type = other DNA
ggtcaacctataatatcataga

SEQ ID NO: 86108 - DNA, 22 bp, synthetic construct
  misc_feature 1..22: note = chemically synthesized
  source 1..22: mol_type = other DNA
gtcaacctataatatcatagat

SEQ ID NO: 86109 - DNA, 22 bp, synthetic construct
  misc_feature 1..22: note = chemically synthesized
  source 1..22: mol_type = other DNA
taatatcatagatgttttctct

SEQ ID NO: 86110 - DNA, 22 bp, synthetic construct
  misc_feature 1..22: note = chemically synthesized
  source 1..22: mol_type = other DNA
tctcttatagcagcctgcatgt

SEQ ID NO: 86111 - DNA, 22 bp, synthetic construct
  misc_feature 1..22: note = chemically synthesized
  source 1..22: mol_type = other DNA
ctcttatagcagcctgcatgtg

SEQ ID NO: 86112 - DNA, 22 bp, synthetic construct
  misc_feature 1..22: note = chemically synthesized
  source 1..22: mol_type = other DNA
tcttatagcagcctgcatgtgc

SEQ ID NO: 86113 - DNA, 22 bp, synthetic construct
  misc_feature 1..22: note = chemically synthesized
  source 1..22: mol_type = other DNA
ttatagcagcctgcatgtgccc

SEQ ID NO: 86114 - DNA, 22 bp, synthetic construct
  misc_feature 1..22: note = chemically synthesized
  source 1..22: mol_type = other DNA
atagcagcctgcatgtgcccag

SEQ ID NO: 86115 - DNA, 22 bp, synthetic construct
  misc_feature 1..22: note = chemically synthesized
  source 1..22: mol_type = other DNA
tagcagcctgcatgtgcccaga

SEQ ID NO: 86116 - DNA, 22 bp, synthetic construct
  misc_feature 1..22: note = chemically synthesized
  source 1..22: mol_type = other DNA
catgtgcccagattttgaattt

SEQ ID NO: 86117 - DNA, 22 bp, synthetic construct
  misc_feature 1..22: note = chemically synthesized
  source 1..22: mol_type = other DNA
tgaatttatcctttgtatattt

SEQ ID NO: 86118 - DNA, 22 bp, synthetic construct
  misc_feature 1..22: note = chemically synthesized
  source 1..22: mol_type = other DNA
gaatttatcctttgtatattta

SEQ ID NO: 86119 - DNA, 22 bp, synthetic construct
  misc_feature 1..22: note = chemically synthesized
  source 1..22: mol_type = other DNA
aatttatcctttgtatatttac

SEQ ID NO: 86120 - DNA, 22 bp, synthetic construct
  misc_feature 1..22: note = chemically synthesized
  source 1..22: mol_type = other DNA
atcctttgtatatttacattta

SEQ ID NO: 86121 - DNA, 22 bp, synthetic construct
  misc_feature 1..22: note = chemically synthesized
  source 1..22: mol_type = other DNA
tcctttgtatatttacatttag

SEQ ID NO: 86122 - DNA, 22 bp, synthetic construct
  misc_feature 1..22: note = chemically synthesized
  source 1..22: mol_type = other DNA
tgtatatttacatttagttctg

SEQ ID NO: 86123 - DNA, 22 bp, synthetic construct
  misc_feature 1..22: note = chemically synthesized
  source 1..22: mol_type = other DNA
gtatatttacatttagttctgt

SEQ ID NO: 86124 - DNA, 22 bp, synthetic construct
  misc_feature 1..22: note = chemically synthesized
  source 1..22: mol_type = other DNA
tatatttacatttagttctgta

SEQ ID NO: 86125 - DNA, 22 bp, synthetic construct
  misc_feature 1..22: note = chemically synthesized
  source 1..22: mol_type = other DNA
acatttagttctgtattattac

SEQ ID NO: 86126 - DNA, 22 bp, synthetic construct
  misc_feature 1..22: note = chemically synthesized
  source 1..22: mol_type = other DNA
catttagttctgtattattaca

SEQ ID NO: 86127 - DNA, 22 bp, synthetic construct
  misc_feature 1..22: note = chemically synthesized
  source 1..22: mol_type = other DNA
agttctgtattattacaattag

SEQ ID NO: 86128 - DNA, 22 bp, synthetic construct
  misc_feature 1..22: note = chemically synthesized
  source 1..22: mol_type = other DNA
gttctgtattattacaattagt

SEQ ID NO: 86129 - DNA, 22 bp, synthetic construct
  misc_feature 1..22: note = chemically synthesized
  source 1..22: mol_type = other DNA
tgtattattacaattagttcgt

SEQ ID NO: 86130 - DNA, 22 bp, synthetic construct
  misc_feature 1..22: note = chemically synthesized
  source 1..22: mol_type = other DNA
tattattacaattagttcgtag

SEQ ID NO: 86131 - DNA, 22 bp, synthetic construct
  misc_feature 1..22: note = chemically synthesized
  source 1..22: mol_type = other DNA
ttacaattagttcgtagacctg

SEQ ID NO: 86132 - DNA, 22 bp, synthetic construct
  misc_feature 1..22: note = chemically synthesized
  source 1..22: mol_type = other DNA
caattagttcgtagacctgtta

SEQ ID NO: 86133 - DNA, 22 bp, synthetic construct
  misc_feature 1..22: note = chemically synthesized
  source 1..22: mol_type = other DNA
gttcgtagacctgttattatta

SEQ ID NO: 86134 - DNA, 22 bp, synthetic construct
  misc_feature 1..22: note = chemically synthesized
  source 1..22: mol_type = other DNA
gtagacctgttattattattct

SEQ ID NO: 86135 - DNA, 22 bp, synthetic construct
  misc_feature 1..22: note = chemically synthesized
  source 1..22: mol_type = other DNA
ttattattattctcatttgtag

SEQ ID NO: 86136 - DNA, 22 bp, synthetic construct
  misc_feature 1..22: note = chemically synthesized
  source 1..22: mol_type = other DNA
ttattattctcatttgtagttg

SEQ ID NO: 86137 - DNA, 22 bp, synthetic construct
  misc_feature 1..22: note = chemically synthesized
  source 1..22: mol_type = other DNA
ttattctcatttgtagttgaag

SEQ ID NO: 86138 - DNA, 22 bp, synthetic construct
  misc_feature 1..22: note = chemically synthesized
  source 1..22: mol_type = other DNA
ttctcatttgtagttgaagaaa

SEQ ID NO: 86139 - DNA, 22 bp, synthetic construct
  misc_feature 1..22: note = chemically synthesized
  source 1..22: mol_type = other DNA
tcatttgtagttgaagaaattg

SEQ ID NO: 86140 - DNA, 22 bp, synthetic construct
  misc_feature 1..22: note = chemically synthesized
  source 1..22: mol_type = other DNA
atttgtagttgaagaaattgca

SEQ ID NO: 86141 - DNA, 22 bp, synthetic construct
  misc_feature 1..22: note = chemically synthesized
  source 1..22: mol_type = other DNA
gtagttgaagaaattgcactcc

SEQ ID NO: 86142 - DNA, 22 bp, synthetic construct
  misc_feature 1..22: note = chemically synthesized
  source 1..22: mol_type = other DNA
tagttgaagaaattgcactcca

SEQ ID NO: 86143 - DNA, 22 bp, synthetic construct
  misc_feature 1..22: note = chemically synthesized
  source 1..22: mol_type = other DNA
aagaaattgcactccagcaagt

SEQ ID NO: 86144 - DNA, 22 bp, synthetic construct
  misc_feature 1..22: note = chemically synthesized
  source 1..22: mol_type = other DNA
cactccagcaagtttaaattgc

SEQ ID NO: 86145 - DNA, 22 bp, synthetic construct
  misc_feature 1..22: note = chemically synthesized
  source 1..22: mol_type = other DNA
cagcaagtttaaattgctcctg

SEQ ID NO: 86146 - DNA, 22 bp, synthetic construct
  misc_feature 1..22: note = chemically synthesized
  source 1..22: mol_type = other DNA
aaattgctcctggctacatccc

SEQ ID NO: 86147 - DNA, 22 bp, synthetic construct
  misc_feature 1..22: note = chemically synthesized
  source 1..22: mol_type = other DNA
aattgctcctggctacatccca

SEQ ID NO: 86148 - DNA, 22 bp, synthetic construct
  misc_feature 1..22: note = chemically synthesized
  source 1..22: mol_type = other DNA
ctcctggctacatcccagaaaa

SEQ ID NO: 86149 - DNA, 22 bp, synthetic construct
  misc_feature 1..22: note = chemically synthesized
  source 1..22: mol_type = other DNA
ctggctacatcccagaaaaaca

SEQ ID NO: 86150 - DNA, 22 bp, synthetic construct
  misc_feature 1..22: note = chemically synthesized
  source 1..22: mol_type = other DNA
gctacatcccagaaaaacaata

SEQ ID NO: 86151 - DNA, 22 bp, synthetic construct
  misc_feature 1..22: note = chemically synthesized
  source 1..22: mol_type = other DNA
catcccagaaaaacaataataa

SEQ ID NO: 86152 - DNA, 22 bp, synthetic construct
  misc_feature 1..22: note = chemically synthesized
  source 1..22: mol_type = other DNA
tttgcccctacttgactaggaa

SEQ ID NO: 86153 - DNA, 22 bp, synthetic construct
  misc_feature 1..22: note = chemically synthesized
  source 1..22: mol_type = other DNA
ttgcccctacttgactaggaat

SEQ ID NO: 86154 - DNA, 22 bp, synthetic construct
  misc_feature 1..22: note = chemically synthesized
  source 1..22: mol_type = other DNA
tgcccctacttgactaggaatt

SEQ ID NO: 86155 - DNA, 22 bp, synthetic construct
  misc_feature 1..22: note = chemically synthesized
  source 1..22: mol_type = other DNA
gcccctacttgactaggaattg

SEQ ID NO: 86156 - DNA, 22 bp, synthetic construct
  misc_feature 1..22: note = chemically synthesized
  source 1..22: mol_type = other DNA
cccctacttgactaggaattgt

SEQ ID NO: 86157 - DNA, 22 bp, synthetic construct
  misc_feature 1..22: note = chemically synthesized
  source 1..22: mol_type = other DNA
cttgactaggaattgtataaag

SEQ ID NO: 86158 - DNA, 22 bp, synthetic construct
  misc_feature 1..22: note = chemically synthesized
  source 1..22: mol_type = other DNA
gactaggaattgtataaagaga

SEQ ID NO: 86159 - DNA, 22 bp, synthetic construct
  misc_feature 1..22: note = chemically synthesized
  source 1..22: mol_type = other DNA
actaggaattgtataaagagaa

SEQ ID NO: 86160 - DNA, 22 bp, synthetic construct
  misc_feature 1..22: note = chemically synthesized
  source 1..22: mol_type = other DNA
ggaattgtataaagagaacagt

SEQ ID NO: 86161 - DNA, 22 bp, synthetic construct
  misc_feature 1..22: note = chemically synthesized
  source 1..22: mol_type = other DNA
tataaagagaacagttattctt

SEQ ID NO: 86162 - DNA, 22 bp, synthetic construct
  misc_feature 1..22: note = chemically synthesized
  source 1..22: mol_type = other DNA
ttcttctagtgggaagcaagct

SEQ ID NO: 86163 - DNA, 22 bp, synthetic construct
  misc_feature 1..22: note = chemically synthesized
  source 1..22: mol_type = other DNA
ttctagtgggaagcaagctggc

SEQ ID NO: 86164 - DNA, 22 bp, synthetic construct
  misc_feature 1..22: note = chemically synthesized
  source 1..22: mol_type = other DNA
ctagtgggaagcaagctggcct

SEQ ID NO: 86165 - DNA, 22 bp, synthetic construct
  misc_feature 1..22: note = chemically synthesized
  source 1..22: mol_type = other DNA
tagtgggaagcaagctggcctc

SEQ ID NO: 86166 - DNA, 22 bp, synthetic construct
  misc_feature 1..22: note = chemically synthesized
  source 1..22: mol_type = other DNA
gtgggaagcaagctggcctcaa

SEQ ID NO: 86167 - DNA, 22 bp, synthetic construct
  misc_feature 1..22: note = chemically synthesized
  source 1..22: mol_type = other DNA
gcctcaactggaacagaatgag

SEQ ID NO: 86168 - DNA, 22 bp, synthetic construct
  misc_feature 1..22: note = chemically synthesized
  source 1..22: mol_type = other DNA
aactggaacagaatgagagaaa

SEQ ID NO: 86169 - DNA, 22 bp, synthetic construct
  misc_feature 1..22: note = chemically synthesized
  source 1..22: mol_type = other DNA
gaacagaatgagagaaatgcaa

SEQ ID NO: 86170 - DNA, 22 bp, synthetic construct
  misc_feature 1..22: note = chemically synthesized
  source 1..22: mol_type = other DNA
ataatccaacagtcccacaccc

SEQ ID NO: 86171 - DNA, 22 bp, synthetic construct
  misc_feature 1..22: note = chemically synthesized
  source 1..22: mol_type = other DNA
aatgtactttttccttttcccc

SEQ ID NO: 86172 - DNA, 22 bp, synthetic construct
  misc_feature 1..22: note = chemically synthesized
  source 1..22: mol_type = other DNA
tttccttttccccatggagtca

SEQ ID NO: 86173 - DNA, 22 bp, synthetic construct
  misc_feature 1..22: note = chemically synthesized
  source 1..22: mol_type = other DNA
ttccttttccccatggagtcaa

SEQ ID NO: 86174 - DNA, 22 bp, synthetic construct
  misc_feature 1..22: note = chemically synthesized
  source 1..22: mol_type = other DNA
tccttttccccatggagtcaag

SEQ ID NO: 86175 - DNA, 22 bp, synthetic construct
  misc_feature 1..22: note = chemically synthesized
  source 1..22: mol_type = other DNA
ccttttccccatggagtcaagg

SEQ ID NO: 86176 - DNA, 22 bp, synthetic construct
  misc_feature 1..22: note = chemically synthesized
  source 1..22: mol_type = other DNA
cttttccccatggagtcaaggc

SEQ ID NO: 86177 - DNA, 22 bp, synthetic construct
  misc_feature 1..22: note = chemically synthesized
  source 1..22: mol_type = other DNA
ttccccatggagtcaaggctat

SEQ ID NO: 86178 - DNA, 22 bp, synthetic construct
  misc_feature 1..22: note = chemically synthesized
  source 1..22: mol_type = other DNA
tccccatggagtcaaggctatc

SEQ ID NO: 86179 - DNA, 22 bp, synthetic construct
  misc_feature 1..22: note = chemically synthesized
  source 1..22: mol_type = other DNA
ccccatggagtcaaggctatct

SEQ ID NO: 86180 - DNA, 22 bp, synthetic construct
  misc_feature 1..22: note = chemically synthesized
  source 1..22: mol_type = other DNA
cccatggagtcaaggctatcta

SEQ ID NO: 86181 - DNA, 22 bp, synthetic construct
  misc_feature 1..22: note = chemically synthesized
  source 1..22: mol_type = other DNA
tctaaacttcctttaagtgcac

SEQ ID NO: 86182 - DNA, 22 bp, synthetic construct
  misc_feature 1..22: note = chemically synthesized
  source 1..22: mol_type = other DNA
aacttcctttaagtgcacaagc

SEQ ID NO: 86183 - DNA, 22 bp, synthetic construct
  misc_feature 1..22: note = chemically synthesized
  source 1..22: mol_type = other DNA
cctttaagtgcacaagctaata

SEQ ID NO: 86184 - DNA, 22 bp, synthetic construct
  misc_feature 1..22: note = chemically synthesized
  source 1..22: mol_type = other DNA
ctttaagtgcacaagctaatat

SEQ ID NO: 86185 - DNA, 22 bp, synthetic construct
  misc_feature 1..22: note = chemically synthesized
  source 1..22: mol_type = other DNA
taagtgcacaagctaatatggt

SEQ ID NO: 86186 - DNA, 22 bp, synthetic construct
  misc_feature 1..22: note = chemically synthesized
  source 1..22: mol_type = other DNA
aagtgcacaagctaatatggta

SEQ ID NO: 86187 - DNA, 22 bp, synthetic construct
  misc_feature 1..22: note = chemically synthesized
  source 1..22: mol_type = other DNA
agtgcacaagctaatatggtag

SEQ ID NO: 86188 - DNA, 22 bp, synthetic construct
  misc_feature 1..22: note = chemically synthesized
  source 1..22: mol_type = other DNA
atatggtagggaaatataaagc

SEQ ID NO: 86189 - DNA, 22 bp, synthetic construct
  misc_feature 1..22: note = chemically synthesized
  source 1..22: mol_type = other DNA
atcctgccatccagaatgagca

SEQ ID NO: 86190 - DNA, 22 bp, synthetic construct
  misc_feature 1..22: note = chemically synthesized
  source 1..22: mol_type = other DNA
ccatccagaatgagcaagtgga

SEQ ID NO: 86191 - DNA, 22 bp, synthetic construct
  misc_feature 1..22: note = chemically synthesized
  source 1..22: mol_type = other DNA
ccaagtctgacctaatgccctc

SEQ ID NO: 86192 - DNA, 22 bp, synthetic construct
  misc_feature 1..22: note = chemically synthesized
  source 1..22: mol_type = other DNA
acctaatgccctctgtttctcc

SEQ ID NO: 86193 - DNA, 22 bp, synthetic construct
  misc_feature 1..22: note = chemically synthesized
  source 1..22: mol_type = other DNA
atgccctctgtttctcccactt

SEQ ID NO: 86194 - DNA, 22 bp, synthetic construct
  misc_feature 1..22: note = chemically synthesized
  source 1..22: mol_type = other DNA
tgtttctcccacttgctctgca

SEQ ID NO: 86195 - DNA, 22 bp, synthetic construct
  misc_feature 1..22: note = chemically synthesized
  source 1..22: mol_type = other DNA
tttctcccacttgctctgcagg

SEQ ID NO: 86196 - DNA, 22 bp, synthetic construct
  misc_feature 1..22: note = chemically synthesized
  source 1..22: mol_type = other DNA
ctcccacttgctctgcaggatg

SEQ ID NO: 86197 - DNA, 22 bp, synthetic construct
  misc_feature 1..22: note = chemically synthesized
  source 1..22: mol_type = other DNA
tcccacttgctctgcaggatgg

SEQ ID NO: 86198 - DNA, 22 bp, synthetic construct
  misc_feature 1..22: note = chemically synthesized
  source 1..22: mol_type = other DNA
ccacttgctctgcaggatggct

SEQ ID NO: 86199 - DNA, 22 bp, synthetic construct
  misc_feature 1..22: note = chemically synthesized
  source 1..22: mol_type = other DNA
gctctgcaggatggcttagcag

SEQ ID NO: 86200 - DNA, 22 bp, synthetic construct
  misc_feature 1..22: note = chemically synthesized
  source 1..22: mol_type = other DNA
ctctgcaggatggcttagcagc

SEQ ID NO: 86201 - DNA, 22 bp, synthetic construct
  misc_feature 1..22: note = chemically synthesized
  source 1..22: mol_type = other DNA
tgcaggatggcttagcagctcc

SEQ ID NO: 86202 - DNA, 22 bp, synthetic construct
  misc_feature 1..22: note = chemically synthesized
  source 1..22: mol_type = other DNA
caggatggcttagcagctccca

SEQ ID NO: 86203 - DNA, 22 bp, synthetic construct
  misc_feature 1..22: note = chemically synthesized
  source 1..22: mol_type = other DNA
agcagctcccagctcagggcct

SEQ ID NO: 86204 - DNA, 22 bp, synthetic construct
  misc_feature 1..22: note = chemically synthesized
  source 1..22: mol_type = other DNA
gcagctcccagctcagggccta

SEQ ID NO: 86205 - DNA, 22 bp, synthetic construct
  misc_feature 1..22: note = chemically synthesized
  source 1..22: mol_type = other DNA
ccagctcagggcctatcagagg

SEQ ID NO: 86206 - DNA, 22 bp, synthetic construct
  misc_feature 1..22: note = chemically synthesized
  source 1..22: mol_type = other DNA
agggcctatcagaggctgagaa

SEQ ID NO: 86207 - DNA, 22 bp, synthetic construct
  misc_feature 1..22: note = chemically synthesized
  source 1..22: mol_type = other DNA
tcagaggctgagaaggtcggcc

SEQ ID NO: 86208 - DNA, 22 bp, synthetic construct
  misc_feature 1..22: note = chemically synthesized
  source 1..22: mol_type = other DNA
agaaggtcggccctctgatgca

SEQ ID NO: 86209 - DNA, 22 bp, synthetic construct
  misc_feature 1..22: note = chemically synthesized
  source 1..22: mol_type = other DNA
tgatgcattttattccttcact

SEQ ID NO: 86210 - DNA, 22 bp, synthetic construct
  misc_feature 1..22: note = chemically synthesized
  source 1..22: mol_type = other DNA
atgcattttattccttcactaa

SEQ ID NO: 86211 - DNA, 22 bp, synthetic construct
  misc_feature 1..22: note = chemically synthesized
  source 1..22: mol_type = other DNA
tattccttcactaacaaagcaa

SEQ ID NO: 86212 - DNA, 22 bp, synthetic construct
  misc_feature 1..22: note = chemically synthesized
  source 1..22: mol_type = other DNA
attccttcactaacaaagcaaa

SEQ ID NO: 86213 - DNA, 22 bp, synthetic construct
  misc_feature 1..22: note = chemically synthesized
  source 1..22: mol_type = other DNA
ttccttcactaacaaagcaaac

SEQ ID NO: 86214 - DNA, 22 bp, synthetic construct
  misc_feature 1..22: note = chemically synthesized
  source 1..22: mol_type = other DNA
cttcactaacaaagcaaaccca

SEQ ID NO: 86215 - DNA, 22 bp, synthetic construct
  misc_feature 1..22: note = chemically synthesized
  source 1..22: mol_type = other DNA
cactaacaaagcaaacccagct

SEQ ID NO: 86216 - DNA, 22 bp, synthetic construct
  misc_feature 1..22: note = chemically synthesized
  source 1..22: mol_type = other DNA
actaacaaagcaaacccagctt

SEQ ID NO: 86217 - DNA, 22 bp, synthetic construct
  misc_feature 1..22: note = chemically synthesized
  source 1..22: mol_type = other DNA
acaaagcaaacccagctttact

SEQ ID NO: 86218 - DNA, 22 bp, synthetic construct
  misc_feature 1..22: note = chemically synthesized
  source 1..22: mol_type = other DNA
tacttctaccctctcctctatg

SEQ ID NO: 86219 - DNA, 22 bp, synthetic construct
  misc_feature 1..22: note = chemically synthesized
  source 1..22: mol_type = other DNA
acttctaccctctcctctatgc

SEQ ID NO: 86220 - DNA, 22 bp, synthetic construct
  misc_feature 1..22: note = chemically synthesized
  source 1..22: mol_type = other DNA
cttctaccctctcctctatgca

SEQ ID NO: 86221 - DNA, 22 bp, synthetic construct
  misc_feature 1..22: note = chemically synthesized
  source 1..22: mol_type = other DNA
ctaccctctcctctatgcactc

SEQ ID NO: 86222 - DNA, 22 bp, synthetic construct
  misc_feature 1..22: note = chemically synthesized
  source 1..22: mol_type = other DNA
taccctctcctctatgcactct

SEQ ID NO: 86223 - DNA, 22 bp, synthetic construct
  misc_feature 1..22: note = chemically synthesized
  source 1..22: mol_type = other DNA
ccctctcctctatgcactctct

SEQ ID NO: 86224 - DNA, 22 bp, synthetic construct
  misc_feature 1..22: note = chemically synthesized
  source 1..22: mol_type = other DNA
tcctctatgcactctctcgggg

SEQ ID NO: 86225 - DNA, 22 bp, synthetic construct
  misc_feature 1..22: note = chemically synthesized
  source 1..22: mol_type = other DNA
ctctatgcactctctcggggca

SEQ ID NO: 86226 - DNA, 22 bp, synthetic construct
  misc_feature 1..22: note = chemically synthesized
  source 1..22: mol_type = other DNA
tatgcactctctcggggcactt

SEQ ID NO: 86227 - DNA, 22 bp, synthetic construct
  misc_feature 1..22: note = chemically synthesized
  source 1..22: mol_type = other DNA
tgcactctctcggggcacttcc

SEQ ID NO: 86228 - DNA, 22 bp, synthetic construct
  misc_feature 1..22: note = chemically synthesized
  source 1..22: mol_type = other DNA
tctcggggcacttcctaatctc

SEQ ID NO: 86229 - DNA, 22 bp, synthetic construct
  misc_feature 1..22: note = chemically synthesized
  source 1..22: mol_type = other DNA
tcggggcacttcctaatctcgt

SEQ ID NO: 86230 - DNA, 22 bp, synthetic construct
  misc_feature 1..22: note = chemically synthesized
  source 1..22: mol_type = other DNA
ggggcacttcctaatctcgtta

SEQ ID NO: 86231 - DNA, 22 bp, synthetic construct
  misc_feature 1..22: note = chemically synthesized
  source 1..22: mol_type = other DNA
cctaatctcgttagtacctttt

SEQ ID NO: 86232 - DNA, 22 bp, synthetic construct
  misc_feature 1..22: note = chemically synthesized
  source 1..22: mol_type = other DNA
ctaatctcgttagtaccttttg

SEQ ID NO: 86233 - DNA, 22 bp, synthetic construct
  misc_feature 1..22: note = chemically synthesized
  source 1..22: mol_type = other DNA
atctcgttagtaccttttgaat

SEQ ID NO: 86234 - DNA, 22 bp, synthetic construct
  misc_feature 1..22: note = chemically synthesized
  source 1..22: mol_type = other DNA
gttagtaccttttgaattagtt

SEQ ID NO: 86235 - DNA, 22 bp, synthetic construct
  misc_feature 1..22: note = chemically synthesized
  source 1..22: mol_type = other DNA
gtaccttttgaattagttttca

SEQ ID NO: 86236 - DNA, 22 bp, synthetic construct
  misc_feature 1..22: note = chemically synthesized
  source 1..22: mol_type = other DNA
ttgaattagttttcaagatagg

SEQ ID NO: 86237 - DNA, 22 bp, synthetic construct
  misc_feature 1..22: note = chemically synthesized
  source 1..22: mol_type = other DNA
tgaattagttttcaagatagga

SEQ ID NO: 86238 - DNA, 22 bp, synthetic construct
  misc_feature 1..22: note = chemically synthesized
  source 1..22: mol_type = other DNA
gaattagttttcaagataggac

SEQ ID NO: 86239 - DNA, 22 bp, synthetic construct
  misc_feature 1..22: note = chemically synthesized
  source 1..22: mol_type = other DNA
aattagttttcaagataggact

SEQ ID NO: 86240 - DNA, 22 bp, synthetic construct
  misc_feature 1..22: note = chemically synthesized
  source 1..22: mol_type = other DNA
gttttcaagataggacttgagt

SEQ ID NO: 86241 - DNA, 22 bp, synthetic construct
  misc_feature 1..22: note = chemically synthesized
  source 1..22: mol_type = other DNA
tcaagataggacttgagttcct

SEQ ID NO: 86242 - DNA, 22 bp, synthetic construct
  misc_feature 1..22: note = chemically synthesized
  source 1..22: mol_type = other DNA
caagataggacttgagttcctc

SEQ ID NO: 86243 - DNA, 22 bp, synthetic construct
  misc_feature 1..22: note = chemically synthesized
  source 1..22: mol_type = other DNA
aagataggacttgagttcctcg

SEQ ID NO: 86244 - DNA, 22 bp, synthetic construct
  misc_feature 1..22: note = chemically synthesized
  source 1..22: mol_type = other DNA
gagttcctcgaaggattagaaa

SEQ ID NO: 86245 - DNA, 22 bp, synthetic construct
  misc_feature 1..22: note = chemically synthesized
  source 1..22: mol_type = other DNA
agttcctcgaaggattagaaaa

SEQ ID NO: 86246 - DNA, 22 bp, synthetic construct
  misc_feature 1..22: note = chemically synthesized
  source 1..22: mol_type = other DNA
ctcgaaggattagaaaataaca

SEQ ID NO: 86247 - DNA, 22 bp, synthetic construct
  misc_feature 1..22: note = chemically synthesized
  source 1..22: mol_type = other DNA
gaaggattagaaaataacagta

SEQ ID NO: 86248 - DNA, 22 bp, synthetic construct
  misc_feature 1..22: note = chemically synthesized
  source 1..22: mol_type = other DNA
gaaaataacagtaacagttcat

SEQ ID NO: 86249 - DNA, 22 bp, synthetic construct
  misc_feature 1..22: note = chemically synthesized
  source 1..22: mol_type = other DNA
atgttgtctgggccaagcacag

SEQ ID NO: 86250 - DNA, 22 bp, synthetic construct
  misc_feature 1..22: note = chemically synthesized
  source 1..22: mol_type = other DNA
tctgggccaagcacagtggctc

SEQ ID NO: 86251 - DNA, 22 bp, synthetic construct
  misc_feature 1..22: note = chemically synthesized
  source 1..22: mol_type = other DNA
ggccaagcacagtggctcacac

SEQ ID NO: 86252 - DNA, 22 bp, synthetic construct
  misc_feature 1..22: note = chemically synthesized
  source 1..22: mol_type = other DNA
acacctgtaatcacagccgagg

SEQ ID NO: 86253 - DNA, 22 bp, synthetic construct
  misc_feature 1..22: note = chemically synthesized
  source 1..22: mol_type = other DNA
taatcacagccgaggccggagg

SEQ ID NO: 86254 - DNA, 22 bp, synthetic construct
  misc_feature 1..22: note = chemically synthesized
  source 1..22: mol_type = other DNA
gagctcaggagttggagaccag

SEQ ID NO: 86255 - DNA, 22 bp, synthetic construct
  misc_feature 1..22: note = chemically synthesized
  source 1..22: mol_type = other DNA
agctcaggagttggagaccagc

SEQ ID NO: 86256 - DNA, 22 bp, synthetic construct
  misc_feature 1..22: note = chemically synthesized
  source 1..22: mol_type = other DNA
aggagttggagaccagcttggg

SEQ ID NO: 86257 - DNA, 22 bp, synthetic construct
  misc_feature 1..22: note = chemically synthesized
  source 1..22: mol_type = other DNA
gagaccagcttgggcaacatgg

SEQ ID NO: 86258 - DNA, 22 bp, synthetic construct
  misc_feature 1..22: note = chemically synthesized
  source 1..22: mol_type = other DNA
gggcaacatggagaaacccctc

SEQ ID NO: 86259 - DNA, 22 bp, synthetic construct
  misc_feature 1..22: note = chemically synthesized
  source 1..22: mol_type = other DNA
ggcaacatggagaaacccctct

SEQ ID NO: 86260 - DNA, 22 bp, synthetic construct
  misc_feature 1..22: note = chemically synthesized
  source 1..22: mol_type = other DNA
tctacaaaaaattttaaaaagt

SEQ ID NO: 86261 - DNA, 22 bp, synthetic construct
  misc_feature 1..22: note = chemically synthesized
  source 1..22: mol_type = other DNA
tacaaaaaattttaaaaagtag

SEQ ID NO: 86262 - DNA, 22 bp, synthetic construct
  misc_feature 1..22: note = chemically synthesized
  source 1..22: mol_type = other DNA
caaaaaattttaaaaagtagcc

SEQ ID NO: 86263 - DNA, 22 bp, synthetic construct
  misc_feature 1..22: note = chemically synthesized
  source 1..22: mol_type = other DNA
taaaaagtagccgaatatggtg

SEQ ID NO: 86264 - DNA, 22 bp, synthetic construct
  misc_feature 1..22: note = chemically synthesized
  source 1..22: mol_type = other DNA
aaaaagtagccgaatatggtgt

SEQ ID NO: 86265 - DNA, 22 bp, synthetic construct
  misc_feature 1..22: note = chemically synthesized
  source 1..22: mol_type = other DNA
aaaagtagccgaatatggtgtt

SEQ ID NO: 86266 - DNA, 22 bp, synthetic construct
  misc_feature 1..22: note = chemically synthesized
  source 1..22: mol_type = other DNA
cgtgcctgtagtcccagctact

SEQ ID NO: 86267 - DNA, 22 bp, synthetic construct
  misc_feature 1..22: note = chemically synthesized
  source 1..22: mol_type = other DNA
tagtcccagctacttgggaggc

SEQ ID NO: 86268 - DNA, 22 bp, synthetic construct
  misc_feature 1..22: note = chemically synthesized
  source 1..22: mol_type = other DNA
cttgggaggctgaggtggaagg

SEQ ID NO: 86269 - DNA, 22 bp, synthetic construct
  misc_feature 1..22: note = chemically synthesized
  source 1..22: mol_type = other DNA
gggaggctgaggtggaaggata

SEQ ID NO: 86270 - DNA, 22 bp, synthetic construct
  misc_feature 1..22: note = chemically synthesized
  source 1..22: mol_type = other DNA
ggaggctgaggtggaaggatat

SEQ ID NO: 86271 - DNA, 22 bp, synthetic construct
  misc_feature 1..22: note = chemically synthesized
  source 1..22: mol_type = other DNA
aggtggaaggatatcttgagcc

SEQ ID NO: 86272 - DNA, 22 bp, synthetic construct
  misc_feature 1..22: note = chemically synthesized
  source 1..22: mol_type = other DNA
gagccaaggagggggagattgc

SEQ ID NO: 86273 - DNA, 22 bp, synthetic construct
  misc_feature 1..22: note = chemically synthesized
  source 1..22: mol_type = other DNA
agccaaggagggggagattgca

SEQ ID NO: 86274 - DNA, 22 bp, synthetic construct
  misc_feature 1..22: note = chemically synthesized
  source 1..22: mol_type = other DNA
cagtgagcaaagattgtaccac

SEQ ID NO: 86275 - DNA, 22 bp, synthetic construct
  misc_feature 1..22: note = chemically synthesized
  source 1..22: mol_type = other DNA
taccactgcactccaacctggg

SEQ ID NO: 86276 - DNA, 22 bp, synthetic construct
  misc_feature 1..22: note = chemically synthesized
  source 1..22: mol_type = other DNA
cactccaacctgggcaacacag

SEQ ID NO: 86277 - DNA, 22 bp, synthetic construct
  misc_feature 1..22: note = chemically synthesized
  source 1..22: mol_type = other DNA
caacctgggcaacacagcgaga

SEQ ID NO: 86278 - DNA, 22 bp, synthetic construct
  misc_feature 1..22: note = chemically synthesized
  source 1..22: mol_type = other DNA
ggcaacacagcgagaccctgtc

SEQ ID NO: 86279 - DNA, 22 bp, synthetic construct
  misc_feature 1..22: note = chemically synthesized
  source 1..22: mol_type = other DNA
tcaaaaaaaaaaaaaagagagc

SEQ ID NO: 86280 - DNA, 22 bp, synthetic construct
  misc_feature 1..22: note = chemically synthesized
  source 1..22: mol_type = other DNA
gaaagaaagaaattaacaattc

SEQ ID NO: 86281 - DNA, 22 bp, synthetic construct
  misc_feature 1..22: note = chemically synthesized
  source 1..22: mol_type = other DNA
acaattcaggttgtcagaagta

SEQ ID NO: 86282 - DNA, 22 bp, synthetic construct
  misc_feature 1..22: note = chemically synthesized
  source 1..22: mol_type = other DNA
aggttgtcagaagtaactgaat

SEQ ID NO: 86283 - DNA, 22 bp, synthetic construct
  misc_feature 1..22: note = chemically synthesized
  source 1..22: mol_type = other DNA
tcagaagtaactgaatgtcttt

SEQ ID NO: 86284 - DNA, 22 bp, synthetic construct
  misc_feature 1..22: note = chemically synthesized
  source 1..22: mol_type = other DNA
aatgtctttaacaaataggagc

SEQ ID NO: 86285 - DNA, 22 bp, synthetic construct
  misc_feature 1..22: note = chemically synthesized
  source 1..22: mol_type = other DNA
taacaaataggagccataggac

SEQ ID NO: 86286 - DNA, 22 bp, synthetic construct
  misc_feature 1..22: note = chemically synthesized
  source 1..22: mol_type = other DNA
aacaaataggagccataggact

SEQ ID NO: 86287 - DNA, 22 bp, synthetic construct
  misc_feature 1..22: note = chemically synthesized
  source 1..22: mol_type = other DNA
acaaataggagccataggacta

SEQ ID NO: 86288 - DNA, 22 bp, synthetic construct
  misc_feature 1..22: note = chemically synthesized
  source 1..22: mol_type = other DNA
aattgctcacattattttgagg

SEQ ID NO: 86289 - DNA, 22 bp, synthetic construct
  misc_feature 1..22: note = chemically synthesized
  source 1..22: mol_type = other DNA
ctcacattattttgagggcaaa

SEQ ID NO: 86290 - DNA, 22 bp, synthetic construct
  misc_feature 1..22: note = chemically synthesized
  source 1..22: mol_type = other DNA
acattattttgagggcaaaaat

SEQ ID NO: 86291 - DNA, 22 bp, synthetic construct
  misc_feature 1..22: note = chemically synthesized
  source 1..22: mol_type = other DNA
ttttgagggcaaaaattacatt

SEQ ID NO: 86292 - DNA, 22 bp, synthetic construct
  misc_feature 1..22: note = chemically synthesized
  source 1..22: mol_type = other DNA
tgagggcaaaaattacattgtc

SEQ ID NO: 86293 - DNA, 22 bp, synthetic construct
  misc_feature 1..22: note = chemically synthesized
  source 1..22: mol_type = other DNA
gagggcaaaaattacattgtca

SEQ ID NO: 86294 - DNA, 22 bp, synthetic construct
  misc_feature 1..22: note = chemically synthesized
  source 1..22: mol_type = other DNA
agggcaaaaattacattgtcat

SEQ ID NO: 86295 - DNA, 22 bp, synthetic construct
  misc_feature 1..22: note = chemically synthesized
  source 1..22: mol_type = other DNA
cattgtcattattttttacctc

SEQ ID NO: 86296 - DNA, 22 bp, synthetic construct
  misc_feature 1..22: note = chemically synthesized
  source 1..22: mol_type = other DNA
tcattattttttacctccaaca

SEQ ID NO: 86297 - DNA, 22 bp, synthetic construct
  misc_feature 1..22: note = chemically synthesized
  source 1..22: mol_type = other DNA
ttttttacctccaacatatata

SEQ ID NO: 86298 - DNA, 22 bp, synthetic construct
  misc_feature 1..22: note = chemically synthesized
  source 1..22: mol_type = other DNA
tttacctccaacatatatacag

SEQ ID NO: 86299 - DNA, 22 bp, synthetic construct
  misc_feature 1..22: note = chemically synthesized
  source 1..22: mol_type = other DNA
ttacctccaacatatatacagt

SEQ ID NO: 86300 - DNA, 22 bp, synthetic construct
  misc_feature 1..22: note = chemically synthesized
  source 1..22: mol_type = other DNA
tacctccaacatatatacagtt

SEQ ID NO: 86301 - DNA, 22 bp, synthetic construct
  misc_feature 1..22: note = chemically synthesized
  source 1..22: mol_type = other DNA
acctccaacatatatacagttt

SEQ ID NO: 86302 - DNA, 22 bp, synthetic construct
  misc_feature 1..22: note = chemically synthesized
  source 1..22: mol_type = other DNA
cctccaacatatatacagtttt

SEQ ID NO: 86303 - DNA, 22 bp, synthetic construct
  misc_feature 1..22: note = chemically synthesized
  source 1..22: mol_type = other DNA
caacatatatacagtttttata

SEQ ID NO: 86304 - DNA, 22 bp, synthetic construct
  misc_feature 1..22: note = chemically synthesized
  source 1..22: mol_type = other DNA
ttatatttactatataggaaca

SEQ ID NO: 86305 - DNA, 22 bp, synthetic construct
  misc_feature 1..22: note = chemically synthesized
  source 1..22: mol_type = other DNA
tatatttactatataggaacac

SEQ ID NO: 86306 - DNA, 22 bp, synthetic construct
  misc_feature 1..22: note = chemically synthesized
  source 1..22: mol_type = other DNA
atatttactatataggaacaca

SEQ ID NO: 86307 - DNA, 22 bp, synthetic construct
  misc_feature 1..22: note = chemically synthesized
  source 1..22: mol_type = other DNA
tatttactatataggaacacaa

SEQ ID NO: 86308 - DNA, 22 bp, synthetic construct
  misc_feature 1..22: note = chemically synthesized
  source 1..22: mol_type = other DNA
actatataggaacacaataaat

SEQ ID NO: 86309 - DNA, 22 bp, synthetic construct
  misc_feature 1..22: note = chemically synthesized
  source 1..22: mol_type = other DNA
ctatataggaacacaataaatg

SEQ ID NO: 86310 - DNA, 22 bp, synthetic construct
  misc_feature 1..22: note = chemically synthesized
  source 1..22: mol_type = other DNA
tataggaacacaataaatgctt

SEQ ID NO: 86311 - DNA, 22 bp, synthetic construct
  misc_feature 1..22: note = chemically synthesized
  source 1..22: mol_type = other DNA
gttgcataaaatcaaattacaa

SEQ ID NO: 86312 - DNA, 22 bp, synthetic construct
  misc_feature 1..22: note = chemically synthesized
  source 1..22: mol_type = other DNA
ttgcataaaatcaaattacaaa

SEQ ID NO: 86313 - DNA, 22 bp, synthetic construct
  misc_feature 1..22: note = chemically synthesized
  source 1..22: mol_type = other DNA
cataaaatcaaattacaaagaa

SEQ ID NO: 86314 - DNA, 22 bp, synthetic construct
  misc_feature 1..22: note = chemically synthesized
  source 1..22: mol_type = other DNA
caaagaaggacagagaatcatt

SEQ ID NO: 86315 - DNA, 22 bp, synthetic construct
  misc_feature 1..22: note = chemically synthesized
  source 1..22: mol_type = other DNA
aattactttcataatgcgcata

SEQ ID NO: 86316 - DNA, 22 bp, synthetic construct
  misc_feature 1..22: note = chemically synthesized
  source 1..22: mol_type = other DNA
ctttcataatgcgcataaaaca

SEQ ID NO: 86317 - DNA, 22 bp, synthetic construct
  misc_feature 1..22: note = chemically synthesized
  source 1..22: mol_type = other DNA
tcataatgcgcataaaacaaca

SEQ ID NO: 86318 - DNA, 22 bp, synthetic construct
  misc_feature 1..22: note = chemically synthesized
  source 1..22: mol_type = other DNA
cataatgcgcataaaacaacat

SEQ ID NO: 86319 - DNA, 22 bp, synthetic construct
  misc_feature 1..22: note = chemically synthesized
  source 1..22: mol_type = other DNA
ataatgcgcataaaacaacatt

SEQ ID NO: 86320 - DNA, 22 bp, synthetic construct
  misc_feature 1..22: note = chemically synthesized
  source 1..22: mol_type = other DNA
tgttagacttaaaaacaagctg

SEQ ID NO: 86321 - DNA, 22 bp, synthetic construct
  misc_feature 1..22: note = chemically synthesized
  source 1..22: mol_type = other DNA
gttagacttaaaaacaagctga

SEQ ID NO: 86322 - DNA, 22 bp, synthetic construct
  misc_feature 1..22: note = chemically synthesized
  source 1..22: mol_type = other DNA
ttagacttaaaaacaagctgat

SEQ ID NO: 86323 - DNA, 22 bp, synthetic construct
  misc_feature 1..22: note = chemically synthesized
  source 1..22: mol_type = other DNA
gacttaaaaacaagctgattat

SEQ ID NO: 86324 - DNA, 22 bp, synthetic construct
  misc_feature 1..22: note = chemically synthesized
  source 1..22: mol_type = other DNA
aaaaacaagctgattataacta

SEQ ID NO: 86325 - DNA, 22 bp, synthetic construct
  misc_feature 1..22: note = chemically synthesized
  source 1..22: mol_type = other DNA
aaaacaagctgattataactat

SEQ ID NO: 86326 - DNA, 22 bp, synthetic construct
  misc_feature 1..22: note = chemically synthesized
  source 1..22: mol_type = other DNA
attataactataaaaagatatg

SEQ ID NO: 86327 - DNA, 22 bp, synthetic construct
  misc_feature 1..22: note = chemically synthesized
  source 1..22: mol_type = other DNA
taactataaaaagatatgtgac

SEQ ID NO: 86328 - DNA, 22 bp, synthetic construct
  misc_feature 1..22: note = chemically synthesized
  source 1..22: mol_type = other DNA
taaaaagatatgtgactaatag

SEQ ID NO: 86329 - DNA, 22 bp, synthetic construct
  misc_feature 1..22: note = chemically synthesized
  source 1..22: mol_type = other DNA
ataggtggaaagaggagcaagg

SEQ ID NO: 86330 - DNA, 22 bp, synthetic construct
  misc_feature 1..22: note = chemically synthesized
  source 1..22: mol_type = other DNA
ctaaagactcacgatggtttgt

SEQ ID NO: 86331 - DNA, 22 bp, synthetic construct
  misc_feature 1..22: note = chemically synthesized
  source 1..22: mol_type = other DNA
aagactcacgatggtttgttac

SEQ ID NO: 86332 - DNA, 22 bp, synthetic construct
  misc_feature 1..22: note = chemically synthesized
  source 1..22: mol_type = other DNA
acgatggtttgttacatagcta

SEQ ID NO: 86333 - DNA, 22 bp, synthetic construct
  misc_feature 1..22: note = chemically synthesized
  source 1..22: mol_type = other DNA
gttacatagctaaacacatgtc

SEQ ID NO: 86334 - DNA, 22 bp, synthetic construct
  misc_feature 1..22: note = chemically synthesized
  source 1..22: mol_type = other DNA
ttacatagctaaacacatgtca

SEQ ID NO: 86335 - DNA, 22 bp, synthetic construct
  misc_feature 1..22: note = chemically synthesized
  source 1..22: mol_type = other DNA
catagctaaacacatgtcatgg

SEQ ID NO: 86336 - DNA, 22 bp, synthetic construct
  misc_feature 1..22: note = chemically synthesized
  source 1..22: mol_type = other DNA
aacacatgtcatgggtttgtcg

SEQ ID NO: 86337 - DNA, 22 bp, synthetic construct
  misc_feature 1..22: note = chemically synthesized
  source 1..22: mol_type = other DNA
gtcgtacagattatttcatctc

SEQ ID NO: 86338 - DNA, 22 bp, synthetic construct
  misc_feature 1..22: note = chemically synthesized
  source 1..22: mol_type = other DNA
tcgtacagattatttcatctcc

SEQ ID NO: 86339 - DNA, 22 bp, synthetic construct
  misc_feature 1..22: note = chemically synthesized
  source 1..22: mol_type = other DNA
tttcatctcccagtactcaata

SEQ ID NO: 86340 - DNA, 22 bp, synthetic construct
  misc_feature 1..22: note = chemically synthesized
  source 1..22: mol_type = other DNA
catctcccagtactcaatagtt

SEQ ID NO: 86341 - DNA, 22 bp, synthetic construct
  misc_feature 1..22: note = chemically synthesized
  source 1..22: mol_type = other DNA
atctcccagtactcaatagtta

SEQ ID NO: 86342 - DNA, 22 bp, synthetic construct
  misc_feature 1..22: note = chemically synthesized
  source 1..22: mol_type = other DNA
ccagtactcaatagttactttt

SEQ ID NO: 86343 - DNA, 22 bp, synthetic construct
  misc_feature 1..22: note = chemically synthesized
  source 1..22: mol_type = other DNA
aatagttactttttctgctctt

SEQ ID NO: 86344 - DNA, 22 bp, synthetic construct
  misc_feature 1..22: note = chemically synthesized
  source 1..22: mol_type = other DNA
ctttttctgctcttctccccgt

SEQ ID NO: 86345 - DNA, 22 bp, synthetic construct
  misc_feature 1..22: note = chemically synthesized
  source 1..22: mol_type = other DNA
tttctgctcttctccccgttcc

SEQ ID NO: 86346 - DNA, 22 bp, synthetic construct
  misc_feature 1..22: note = chemically synthesized
  source 1..22: mol_type = other DNA
ttctgctcttctccccgttccc

SEQ ID NO: 86347 - DNA, 22 bp, synthetic construct
  misc_feature 1..22: note = chemically synthesized
  source 1..22: mol_type = other DNA
tctgctcttctccccgttccca

SEQ ID NO: 86348 - DNA, 22 bp, synthetic construct
  misc_feature 1..22: note = chemically synthesized
  source 1..22: mol_type = other DNA
ctgctcttctccccgttcccac

SEQ ID NO: 86349 - DNA, 22 bp, synthetic construct
  misc_feature 1..22: note = chemically synthesized
  source 1..22: mol_type = other DNA
tgctcttctccccgttcccacc

SEQ ID NO: 86350 - DNA, 22 bp, synthetic construct
  misc_feature 1..22: note = chemically synthesized
  source 1..22: mol_type = other DNA
ctcttctccccgttcccaccct

SEQ ID NO: 86351 - DNA, 22 bp, synthetic construct
  misc_feature 1..22: note = chemically synthesized
  source 1..22: mol_type = other DNA
ttctccccgttcccaccctcca

SEQ ID NO: 86352 - DNA, 22 bp, synthetic construct
  misc_feature 1..22: note = chemically synthesized
  source 1..22: mol_type = other DNA
ctccccgttcccaccctccaaa

SEQ ID NO: 86353 - DNA, 22 bp, synthetic construct
  misc_feature 1..22: note = chemically synthesized
  source 1..22: mol_type = other DNA
tccccgttcccaccctccaaac

SEQ ID NO: 86354 - DNA, 22 bp, synthetic construct
  misc_feature 1..22: note = chemically synthesized
  source 1..22: mol_type = other DNA
cccgttcccaccctccaaactc

SEQ ID NO: 86355 - DNA, 22 bp, synthetic construct
  misc_feature 1..22: note = chemically synthesized
  source 1..22: mol_type = other DNA
ccaccctccaaactcaattagg

SEQ ID NO: 86356 - DNA, 22 bp, synthetic construct
  misc_feature 1..22: note = chemically synthesized
  source 1..22: mol_type = other DNA
caaactcaattaggctgcagtg

SEQ ID NO: 86357 - DNA, 22 bp, synthetic construct
  misc_feature 1..22: note = chemically synthesized
  source 1..22: mol_type = other DNA
aattaggctgcagtgtcttttg

SEQ ID NO: 86358 - DNA, 22 bp, synthetic construct
  misc_feature 1..22: note = chemically synthesized
  source 1..22: mol_type = other DNA
ggctgcagtgtcttttgttccc

SEQ ID NO: 86359 - DNA, 22 bp, synthetic construct
  misc_feature 1..22: note = chemically synthesized
  source 1..22: mol_type = other DNA
cagtgtcttttgttcccgttat

SEQ ID NO: 86360 - DNA, 22 bp, synthetic construct
  misc_feature 1..22: note = chemically synthesized
  source 1..22: mol_type = other DNA
ttgttcccgttatgtgtgcatg

SEQ ID NO: 86361 - DNA, 22 bp, synthetic construct
  misc_feature 1..22: note = chemically synthesized
  source 1..22: mol_type = other DNA
tgttcccgttatgtgtgcatgt

SEQ ID NO: 86362 - DNA, 22 bp, synthetic construct
  misc_feature 1..22: note = chemically synthesized
  source 1..22: mol_type = other DNA
gttcccgttatgtgtgcatgtt

SEQ ID NO: 86363 - DNA, 22 bp, synthetic construct
  misc_feature 1..22: note = chemically synthesized
  source 1..22: mol_type = other DNA
ttcccgttatgtgtgcatgttt

SEQ ID NO: 86364 - DNA, 22 bp, synthetic construct
  misc_feature 1..22: note = chemically synthesized
  source 1..22: mol_type = other DNA
ccgttatgtgtgcatgttttct

SEQ ID NO: 86365 - DNA, 22 bp, synthetic construct
  misc_feature 1..22: note = chemically synthesized
  source 1..22: mol_type = other DNA
tgtgtgcatgttttctcatcat

SEQ ID NO: 86366 - DNA, 22 bp, synthetic construct
  misc_feature 1..22: note = chemically synthesized
  source 1..22: mol_type = other DNA
tctcatcatttagttcctactt

SEQ ID NO: 86367 - DNA, 22 bp, synthetic construct
  misc_feature 1..22: note = chemically synthesized
  source 1..22: mol_type = other DNA
ctcatcatttagttcctacttg

SEQ ID NO: 86368 - DNA, 22 bp, synthetic construct
  misc_feature 1..22: note = chemically synthesized
  source 1..22: mol_type = other DNA
tcatcatttagttcctacttgt

SEQ ID NO: 86369 - DNA, 22 bp, synthetic construct
  misc_feature 1..22: note = chemically synthesized
  source 1..22: mol_type = other DNA
atcatttagttcctacttgtaa

SEQ ID NO: 86370 - DNA, 22 bp, synthetic construct
  misc_feature 1..22: note = chemically synthesized
  source 1..22: mol_type = other DNA
agttcctacttgtaagtgataa

SEQ ID NO: 86371 - DNA, 22 bp, synthetic construct
  misc_feature 1..22: note = chemically synthesized
  source 1..22: mol_type = other DNA
gttcctacttgtaagtgataat

SEQ ID NO: 86372 - DNA, 22 bp, synthetic construct
  misc_feature 1..22: note = chemically synthesized
  source 1..22: mol_type = other DNA
ctacttgtaagtgataatatgt

SEQ ID NO: 86373 - DNA, 22 bp, synthetic construct
  misc_feature 1..22: note = chemically synthesized
  source 1..22: mol_type = other DNA
cttgtaagtgataatatgtagt

SEQ ID NO: 86374 - DNA, 22 bp, synthetic construct
  misc_feature 1..22: note = chemically synthesized
  source 1..22: mol_type = other DNA
gtaagtgataatatgtagtatt

SEQ ID NO: 86375 - DNA, 22 bp, synthetic construct
  misc_feature 1..22: note = chemically synthesized
  source 1..22: mol_type = other DNA
taagtgataatatgtagtattt

SEQ ID NO: 86376 - DNA, 22 bp, synthetic construct
  misc_feature 1..22: note = chemically synthesized
  source 1..22: mol_type = other DNA
ggttttctgttcttacattagt

SEQ ID NO: 86377 - DNA, 22 bp, synthetic construct
  misc_feature 1..22: note = chemically synthesized
  source 1..22: mol_type = other DNA
gttttctgttcttacattagtt

SEQ ID NO: 86378 - DNA, 22 bp, synthetic construct
  misc_feature 1..22: note = chemically synthesized
  source 1..22: mol_type = other DNA
tctgttcttacattagtttgtt

SEQ ID NO: 86379 - DNA, 22 bp, synthetic construct
  misc_feature 1..22: note = chemically synthesized
  source 1..22: mol_type = other DNA
ctgttcttacattagtttgtta

SEQ ID NO: 86380 - DNA, 22 bp, synthetic construct
  misc_feature 1..22: note = chemically synthesized
  source 1..22: mol_type = other DNA
tgttcttacattagtttgttaa

SEQ ID NO: 86381 - DNA, 22 bp, synthetic construct
  misc_feature 1..22: note = chemically synthesized
  source 1..22: mol_type = other DNA
ttcttacattagtttgttaagg

SEQ ID NO: 86382 - DNA, 22 bp, synthetic construct
  misc_feature 1..22: note = chemically synthesized
  source 1..22: mol_type = other DNA
ttacattagtttgttaaggata

SEQ ID NO: 86383 - DNA, 22 bp, synthetic construct
  misc_feature 1..22: note = chemically synthesized
  source 1..22: mol_type = other DNA
acattagtttgttaaggataat

SEQ ID NO: 86384 - DNA, 22 bp, synthetic construct
  misc_feature 1..22: note = chemically synthesized
  source 1..22: mol_type = other DNA
cattagtttgttaaggataatg

SEQ ID NO: 86385 - DNA, 22 bp, synthetic construct
  misc_feature 1..22: note = chemically synthesized
  source 1..22: mol_type = other DNA
gtttgttaaggataatggtgtc

SEQ ID NO: 86386 - DNA, 22 bp, synthetic construct
  misc_feature 1..22: note = chemically synthesized
  source 1..22: mol_type = other DNA
gttaaggataatggtgtccggc

SEQ ID NO: 86387 - DNA, 22 bp, synthetic construct
  misc_feature 1..22: note = chemically synthesized
  source 1..22: mol_type = other DNA
ttaaggataatggtgtccggct

SEQ ID NO: 86388 - DNA, 22 bp, synthetic construct
  misc_feature 1..22: note = chemically synthesized
  source 1..22: mol_type = other DNA
aggataatggtgtccggctcca

SEQ ID NO: 86389 - DNA, 22 bp, synthetic construct
  misc_feature 1..22: note = chemically synthesized
  source 1..22: mol_type = other DNA
catccatgttcctgcaaaggac

SEQ ID NO: 86390 - DNA, 22 bp, synthetic construct
  misc_feature 1..22: note = chemically synthesized
  source 1..22: mol_type = other DNA
ctgcaaaggacatgatctcatt

SEQ ID NO: 86391 - DNA, 22 bp, synthetic construct
  misc_feature 1..22: note = chemically synthesized
  source 1..22: mol_type = other DNA
caaaggacatgatctcattctt

SEQ ID NO: 86392 - DNA, 22 bp, synthetic construct
  misc_feature 1..22: note = chemically synthesized
  source 1..22: mol_type = other DNA
attcttttttatggccacatag

SEQ ID NO: 86393 - DNA, 22 bp, synthetic construct
  misc_feature 1..22: note = chemically synthesized
  source 1..22: mol_type = other DNA
ttttttatggccacatagtatt

SEQ ID NO: 86394 - DNA, 22 bp, synthetic construct
  misc_feature 1..22: note = chemically synthesized
  source 1..22: mol_type = other DNA
ttttatggccacatagtattcc

SEQ ID NO: 86395 - DNA, 22 bp, synthetic construct
  misc_feature 1..22: note = chemically synthesized
  source 1..22: mol_type = other DNA
tttatggccacatagtattcca

SEQ ID NO: 86396 - DNA, 22 bp, synthetic construct
  misc_feature 1..22: note = chemically synthesized
  source 1..22: mol_type = other DNA
ttatggccacatagtattccat

SEQ ID NO: 86397 - DNA, 22 bp, synthetic construct
  misc_feature 1..22: note = chemically synthesized
  source 1..22: mol_type = other DNA
tatggccacatagtattccatg

SEQ ID NO: 86398 - DNA, 22 bp, synthetic construct
  misc_feature 1..22: note = chemically synthesized
  source 1..22: mol_type = other DNA
atggccacatagtattccatgg

SEQ ID NO: 86399 - DNA, 22 bp, synthetic construct
  misc_feature 1..22: note = chemically synthesized
  source 1..22: mol_type = other DNA
tggccacatagtattccatggt

SEQ ID NO: 86400 - DNA, 22 bp, synthetic construct
  misc_feature 1..22: note = chemically synthesized
  source 1..22: mol_type = other DNA
catggtgtatatgtacatgttc

SEQ ID NO: 86401 - DNA, 22 bp, synthetic construct
  misc_feature 1..22: note = chemically synthesized
  source 1..22: mol_type = other DNA
tttatcggtataccactaatgg

SEQ ID NO: 86402 - DNA, 22 bp, synthetic construct
  misc_feature 1..22: note = chemically synthesized
  source 1..22: mol_type = other DNA
tatcggtataccactaatgggc

SEQ ID NO: 86403 - DNA, 22 bp, synthetic construct
  misc_feature 1..22: note = chemically synthesized
  source 1..22: mol_type = other DNA
atcggtataccactaatgggcc

SEQ ID NO: 86404 - DNA, 22 bp, synthetic construct
  misc_feature 1..22: note = chemically synthesized
  source 1..22: mol_type = other DNA
tcggtataccactaatgggcct

SEQ ID NO: 86405 - DNA, 22 bp, synthetic construct
  misc_feature 1..22: note = chemically synthesized
  source 1..22: mol_type = other DNA
atgggccttcaggttgattcta

SEQ ID NO: 86406 - DNA, 22 bp, synthetic construct
  misc_feature 1..22: note = chemically synthesized
  source 1..22: mol_type = other DNA
caggttgattctatgtctttgc

SEQ ID NO: 86407 - DNA, 22 bp, synthetic construct
  misc_feature 1..22: note = chemically synthesized
  source 1..22: mol_type = other DNA
aggttgattctatgtctttgct

SEQ ID NO: 86408 - DNA, 22 bp, synthetic construct
  misc_feature 1..22: note = chemically synthesized
  source 1..22: mol_type = other DNA
attctatgtctttgctattgtg

SEQ ID NO: 86409 - DNA, 22 bp, synthetic construct
  misc_feature 1..22: note = chemically synthesized
  source 1..22: mol_type = other DNA
tatgtctttgctattgtgatta

SEQ ID NO: 86410 - DNA, 22 bp, synthetic construct
  misc_feature 1..22: note = chemically synthesized
  source 1..22: mol_type = other DNA
tgtctttgctattgtgattatg

SEQ ID NO: 86411 - DNA, 22 bp, synthetic construct
  misc_feature 1..22: note = chemically synthesized
  source 1..22: mol_type = other DNA
tgctattgtgattatgctgcaa

SEQ ID NO: 86412 - DNA, 22 bp, synthetic construct
  misc_feature 1..22: note = chemically synthesized
  source 1..22: mol_type = other DNA
gctattgtgattatgctgcaat

SEQ ID NO: 86413 - DNA, 22 bp, synthetic construct
  misc_feature 1..22: note = chemically synthesized
  source 1..22: mol_type = other DNA
ctattgtgattatgctgcaatg

SEQ ID NO: 86414 - DNA, 22 bp, synthetic construct
  misc_feature 1..22: note = chemically synthesized
  source 1..22: mol_type = other DNA
ttgtgattatgctgcaatggac

SEQ ID NO: 86415 - DNA, 22 bp, synthetic construct
  misc_feature 1..22: note = chemically synthesized
  source 1..22: mol_type = other DNA
tgattatgctgcaatggacaca

SEQ ID NO: 86416 - DNA, 22 bp, synthetic construct
  misc_feature 1..22: note = chemically synthesized
  source 1..22: mol_type = other DNA
tgctgcaatggacacaggtgtg

SEQ ID NO: 86417 - DNA, 22 bp, synthetic construct
  misc_feature 1..22: note = chemically synthesized
  source 1..22: mol_type = other DNA
caatggacacaggtgtgcatgt

SEQ ID NO: 86418 - DNA, 22 bp, synthetic construct
  misc_feature 1..22: note = chemically synthesized
  source 1..22: mol_type = other DNA
tgtgatagaatggtttattttc

SEQ ID NO: 86419 - DNA, 22 bp, synthetic construct
  misc_feature 1..22: note = chemically synthesized
  source 1..22: mol_type = other DNA
gtgatagaatggtttattttcc

SEQ ID NO: 86420 - DNA, 22 bp, synthetic construct
  misc_feature 1..22: note = chemically synthesized
  source 1..22: mol_type = other DNA
tgatagaatggtttattttcct

SEQ ID NO: 86421 - DNA, 22 bp, synthetic construct
  misc_feature 1..22: note = chemically synthesized
  source 1..22: mol_type = other DNA
attttcctttaggtatatactc

SEQ ID NO: 86422 - DNA, 22 bp, synthetic construct
  misc_feature 1..22: note = chemically synthesized
  source 1..22: mol_type = other DNA
ttttcctttaggtatatactca

SEQ ID NO: 86423 - DNA, 22 bp, synthetic construct
  misc_feature 1..22: note = chemically synthesized
  source 1..22: mol_type = other DNA
tcctttaggtatatactcaata

SEQ ID NO: 86424 - DNA, 22 bp, synthetic construct
  misc_feature 1..22: note = chemically synthesized
  source 1..22: mol_type = other DNA
cctttaggtatatactcaataa

SEQ ID NO: 86425 - DNA, 22 bp, synthetic construct
  misc_feature 1..22: note = chemically synthesized
  source 1..22: mol_type = other DNA
ctttaggtatatactcaataat

SEQ ID NO: 86426 - DNA, 22 bp, synthetic construct
  misc_feature 1..22: note = chemically synthesized
  source 1..22: mol_type = other DNA
taggtatatactcaataatagg

SEQ ID NO: 86427 - DNA, 22 bp, synthetic construct
  misc_feature 1..22: note = chemically synthesized
  source 1..22: mol_type = other DNA
aggtatatactcaataatagga

SEQ ID NO: 86428 - DNA, 22 bp, synthetic construct
  misc_feature 1..22: note = chemically synthesized
  source 1..22: mol_type = other DNA
ggtatatactcaataataggat

SEQ ID NO: 86429 - DNA, 22 bp, synthetic construct
  misc_feature 1..22: note = chemically synthesized
  source 1..22: mol_type = other DNA
aataataggattgttgggttaa

SEQ ID NO: 86430 - DNA, 22 bp, synthetic construct
  misc_feature 1..22: note = chemically synthesized
  source 1..22: mol_type = other DNA
ttgggttaaatggtatttctgt

SEQ ID NO: 86431 - DNA, 22 bp, synthetic construct
  misc_feature 1..22: note = chemically synthesized
  source 1..22: mol_type = other DNA
ggttaaatggtatttctgtttt

SEQ ID NO: 86432 - DNA, 22 bp, synthetic construct
  misc_feature 1..22: note = chemically synthesized
  source 1..22: mol_type = other DNA
aatggtatttctgtttttaggt

SEQ ID NO: 86433 - DNA, 22 bp, synthetic construct
  misc_feature 1..22: note = chemically synthesized
  source 1..22: mol_type = other DNA
ctgtttttaggtctttagggaa

SEQ ID NO: 86434 - DNA, 22 bp, synthetic construct
  misc_feature 1..22: note = chemically synthesized
  source 1..22: mol_type = other DNA
tgtttttaggtctttagggaat

SEQ ID NO: 86435 - DNA, 22 bp, synthetic construct
  misc_feature 1..22: note = chemically synthesized
  source 1..22: mol_type = other DNA
tttttaggtctttagggaattg

SEQ ID NO: 86436 - DNA, 22 bp, synthetic construct
  misc_feature 1..22: note = chemically synthesized
  source 1..22: mol_type = other DNA
ttaggtctttagggaattgcca

SEQ ID NO: 86437 - DNA, 22 bp, synthetic construct
  misc_feature 1..22: note = chemically synthesized
  source 1..22: mol_type = other DNA
taggtctttagggaattgccac

SEQ ID NO: 86438 - DNA, 22 bp, synthetic construct
  misc_feature 1..22: note = chemically synthesized
  source 1..22: mol_type = other DNA
aggtctttagggaattgccaca

SEQ ID NO: 86439 - DNA, 22 bp, synthetic construct
  misc_feature 1..22: note = chemically synthesized
  source 1..22: mol_type = other DNA
ggtctttagggaattgccacac

SEQ ID NO: 86440 - DNA, 22 bp, synthetic construct
  misc_feature 1..22: note = chemically synthesized
  source 1..22: mol_type = other DNA
tagggaattgccacactgctgt

SEQ ID NO: 86441 - DNA, 22 bp, synthetic construct
  misc_feature 1..22: note = chemically synthesized
  source 1..22: mol_type = other DNA
agggaattgccacactgctgtc

SEQ ID NO: 86442 - DNA, 22 bp, synthetic construct
  misc_feature 1..22: note = chemically synthesized
  source 1..22: mol_type = other DNA
gggaattgccacactgctgtct

SEQ ID NO: 86443 - DNA, 22 bp, synthetic construct
  misc_feature 1..22: note = chemically synthesized
  source 1..22: mol_type = other DNA
ccacactgctgtctacaatggt

SEQ ID NO: 86444 - DNA, 22 bp, synthetic construct
  misc_feature 1..22: note = chemically synthesized
  source 1..22: mol_type = other DNA
ctgtctacaatggtcgaactaa

SEQ ID NO: 86445 - DNA, 22 bp, synthetic construct
  misc_feature 1..22: note = chemically synthesized
  source 1..22: mol_type = other DNA
tctacaatggtcgaactaattt

SEQ ID NO: 86446 - DNA, 22 bp, synthetic construct
  misc_feature 1..22: note = chemically synthesized
  source 1..22: mol_type = other DNA
caatggtcgaactaatttatat

SEQ ID NO: 86447 - DNA, 22 bp, synthetic construct
  misc_feature 1..22: note = chemically synthesized
  source 1..22: mol_type = other DNA
atttatattgccaccaatggtg

SEQ ID NO: 86448 - DNA, 22 bp, synthetic construct
  misc_feature 1..22: note = chemically synthesized
  source 1..22: mol_type = other DNA
atattgccaccaatggtgtata

SEQ ID NO: 86449 - DNA, 22 bp, synthetic construct
  misc_feature 1..22: note = chemically synthesized
  source 1..22: mol_type = other DNA
tattgccaccaatggtgtataa

SEQ ID NO: 86450 - DNA, 22 bp, synthetic construct
  misc_feature 1..22: note = chemically synthesized
  source 1..22: mol_type = other DNA
ccaccaatggtgtataaacatt

SEQ ID NO: 86451 - DNA, 22 bp, synthetic construct
  misc_feature 1..22: note = chemically synthesized
  source 1..22: mol_type = other DNA
ccttttctccacaaccttaccc

SEQ ID NO: 86452 - DNA, 22 bp, synthetic construct
  misc_feature 1..22: note = chemically synthesized
  source 1..22: mol_type = other DNA
ttctccacaaccttacccacat

SEQ ID NO: 86453 - DNA, 22 bp, synthetic construct
  misc_feature 1..22: note = chemically synthesized
  source 1..22: mol_type = other DNA
tctccacaaccttacccacatc

SEQ ID NO: 86454 - DNA, 22 bp, synthetic construct
  misc_feature 1..22: note = chemically synthesized
  source 1..22: mol_type = other DNA
ctccacaaccttacccacatct

SEQ ID NO: 86455 - DNA, 22 bp, synthetic construct
  misc_feature 1..22: note = chemically synthesized
  source 1..22: mol_type = other DNA
tccacaaccttacccacatctg

SEQ ID NO: 86456 - DNA, 22 bp, synthetic construct
  misc_feature 1..22: note = chemically synthesized
  source 1..22: mol_type = other DNA
cacaaccttacccacatctgtt

SEQ ID NO: 86457 - DNA, 22 bp, synthetic construct
  misc_feature 1..22: note = chemically synthesized
  source 1..22: mol_type = other DNA
acccacatctgttattttttga

SEQ ID NO: 86458 - DNA, 22 bp, synthetic construct
  misc_feature 1..22: note = chemically synthesized
  source 1..22: mol_type = other DNA
cccacatctgttattttttgac

SEQ ID NO: 86459 - DNA, 22 bp, synthetic construct
  misc_feature 1..22: note = chemically synthesized
  source 1..22: mol_type = other DNA
ttattttttgactatttaatta

SEQ ID NO: 86460 - DNA, 22 bp, synthetic construct
  misc_feature 1..22: note = chemically synthesized
  source 1..22: mol_type = other DNA
ttttttgactatttaattatag

SEQ ID NO: 86461 - DNA, 22 bp, synthetic construct
  misc_feature 1..22: note = chemically synthesized
  source 1..22: mol_type = other DNA
tttgactatttaattatagata

SEQ ID NO: 86462 - DNA, 22 bp, synthetic construct
  misc_feature 1..22: note = chemically synthesized
  source 1..22: mol_type = other DNA
ttgactatttaattatagatat

SEQ ID NO: 86463 - DNA, 22 bp, synthetic construct
  misc_feature 1..22: note = chemically synthesized
  source 1..22: mol_type = other DNA
tgactatttaattatagatatt

SEQ ID NO: 86464 - DNA, 22 bp, synthetic construct
  misc_feature 1..22: note = chemically synthesized
  source 1..22: mol_type = other DNA
gactatttaattatagatattt

SEQ ID NO: 86465 - DNA, 22 bp, synthetic construct
  misc_feature 1..22: note = chemically synthesized
  source 1..22: mol_type = other DNA
actatttaattatagatatttt

SEQ ID NO: 86466 - DNA, 22 bp, synthetic construct
  misc_feature 1..22: note = chemically synthesized
  source 1..22: mol_type = other DNA
tttaattatagatattttaagt

SEQ ID NO: 86467 - DNA, 22 bp, synthetic construct
  misc_feature 1..22: note = chemically synthesized
  source 1..22: mol_type = other DNA
aattatagatattttaagtgat

SEQ ID NO: 86468 - DNA, 22 bp, synthetic construct
  misc_feature 1..22: note = chemically synthesized
  source 1..22: mol_type = other DNA
attatagatattttaagtgatg

SEQ ID NO: 86469 - DNA, 22 bp, synthetic construct
  misc_feature 1..22: note = chemically synthesized
  source 1..22: mol_type = other DNA
tagatattttaagtgatgtgag

SEQ ID NO: 86470 - DNA, 22 bp, synthetic construct
  misc_feature 1..22: note = chemically synthesized
  source 1..22: mol_type = other DNA
taagtgatgtgagatagtatct

SEQ ID NO: 86471 - DNA, 22 bp, synthetic construct
  misc_feature 1..22: note = chemically synthesized
  source 1..22: mol_type = other DNA
aagtgatgtgagatagtatctc

SEQ ID NO: 86472 - DNA, 22 bp, synthetic construct
  misc_feature 1..22: note = chemically synthesized
  source 1..22: mol_type = other DNA
agtgatgtgagatagtatctca

SEQ ID NO: 86473 - DNA, 22 bp, synthetic construct
  misc_feature 1..22: note = chemically synthesized
  source 1..22: mol_type = other DNA
attttgggtttgattggcattt

SEQ ID NO: 86474 - DNA, 22 bp, synthetic construct
  misc_feature 1..22: note = chemically synthesized
  source 1..22: mol_type = other DNA
tgggtttgattggcatttctct

SEQ ID NO: 86475 - DNA, 22 bp, synthetic construct
  misc_feature 1..22: note = chemically synthesized
  source 1..22: mol_type = other DNA
gggtttgattggcatttctcta

SEQ ID NO: 86476 - DNA, 22 bp, synthetic construct
  misc_feature 1..22: note = chemically synthesized
  source 1..22: mol_type = other DNA
ggtttgattggcatttctctaa

SEQ ID NO: 86477 - DNA, 22 bp, synthetic construct
  misc_feature 1..22: note = chemically synthesized
  source 1..22: mol_type = other DNA
gattggcatttctctaatgatc

SEQ ID NO: 86478 - DNA, 22 bp, synthetic construct
  misc_feature 1..22: note = chemically synthesized
  source 1..22: mol_type = other DNA
attggcatttctctaatgatca

SEQ ID NO: 86479 - DNA, 22 bp, synthetic construct
  misc_feature 1..22: note = chemically synthesized
  source 1..22: mol_type = other DNA
gcatttctctaatgatcagtga

SEQ ID NO: 86480 - DNA, 22 bp, synthetic construct
  misc_feature 1..22: note = chemically synthesized
  source 1..22: mol_type = other DNA
ctctaatgatcagtgacactga

SEQ ID NO: 86481 - DNA, 22 bp, synthetic construct
  misc_feature 1..22: note = chemically synthesized
  source 1..22: mol_type = other DNA
tctaatgatcagtgacactgag

SEQ ID NO: 86482 - DNA, 22 bp, synthetic construct
  misc_feature 1..22: note = chemically synthesized
  source 1..22: mol_type = other DNA
taatgatcagtgacactgagct

SEQ ID NO: 86483 - DNA, 22 bp, synthetic construct
  misc_feature 1..22: note = chemically synthesized
  source 1..22: mol_type = other DNA
atgatcagtgacactgagcttt

SEQ ID NO: 86484 - DNA, 22 bp, synthetic construct
  misc_feature 1..22: note = chemically synthesized
  source 1..22: mol_type = other DNA
agcttttttcatatgcttggtg

SEQ ID NO: 86485 - DNA, 22 bp, synthetic construct
  misc_feature 1..22: note = chemically synthesized
  source 1..22: mol_type = other DNA
ttttcatatgcttggtggccac

SEQ ID NO: 86486 - DNA, 22 bp, synthetic construct
  misc_feature 1..22: note = chemically synthesized
  source 1..22: mol_type = other DNA
tttcatatgcttggtggccaca

SEQ ID NO: 86487 - DNA, 22 bp, synthetic construct
  misc_feature 1..22: note = chemically synthesized
  source 1..22: mol_type = other DNA
ttcatatgcttggtggccacat

SEQ ID NO: 86488 - DNA, 22 bp, synthetic construct
  misc_feature 1..22: note = chemically synthesized
  source 1..22: mol_type = other DNA
tcatatgcttggtggccacatg

SEQ ID NO: 86489 - DNA, 22 bp, synthetic construct
  misc_feature 1..22: note = chemically synthesized
  source 1..22: mol_type = other DNA
catatgcttggtggccacatgt

SEQ ID NO: 86490 - DNA, 22 bp, synthetic construct
  misc_feature 1..22: note = chemically synthesized
  source 1..22: mol_type = other DNA
atatgcttggtggccacatgta

SEQ ID NO: 86491 - DNA, 22 bp, synthetic construct
  misc_feature 1..22: note = chemically synthesized
  source 1..22: mol_type = other DNA
ggtggccacatgtatgtcttct

SEQ ID NO: 86492 - DNA, 22 bp, synthetic construct
  misc_feature 1..22: note = chemically synthesized
  source 1..22: mol_type = other DNA
gtggccacatgtatgtcttctt

SEQ ID NO: 86493 - DNA, 22 bp, synthetic construct
  misc_feature 1..22: note = chemically synthesized
  source 1..22: mol_type = other DNA
cttttgaatactgtctgttcat

SEQ ID NO: 86494 - DNA, 22 bp, synthetic construct
  misc_feature 1..22: note = chemically synthesized
  source 1..22: mol_type = other DNA
ttttgaatactgtctgttcatg

SEQ ID NO: 86495 - DNA, 22 bp, synthetic construct
  misc_feature 1..22: note = chemically synthesized
  source 1..22: mol_type = other DNA
ttgaatactgtctgttcatgtc

SEQ ID NO: 86496 - DNA, 22 bp, synthetic construct
  misc_feature 1..22: note = chemically synthesized
  source 1..22: mol_type = other DNA
tgaatactgtctgttcatgtcc

SEQ ID NO: 86497 - DNA, 22 bp, synthetic construct
  misc_feature 1..22: note = chemically synthesized
  source 1..22: mol_type = other DNA
gaatactgtctgttcatgtcct

SEQ ID NO: 86498 - DNA, 22 bp, synthetic construct
  misc_feature 1..22: note = chemically synthesized
  source 1..22: mol_type = other DNA
aatactgtctgttcatgtcctt

SEQ ID NO: 86499 - DNA, 22 bp, synthetic construct
  misc_feature 1..22: note = chemically synthesized
  source 1..22: mol_type = other DNA
tctgttcatgtcctttacccat

SEQ ID NO: 86500 - DNA, 22 bp, synthetic construct
  misc_feature 1..22: note = chemically synthesized
  source 1..22: mol_type = other DNA
ttcatgtcctttacccattttt

SEQ ID NO: 86501 - DNA, 22 bp, synthetic construct
  misc_feature 1..22: note = chemically synthesized
  source 1..22: mol_type = other DNA
atgtcctttacccattttttgt

SEQ ID NO: 86502 - DNA, 22 bp, synthetic construct
  misc_feature 1..22: note = chemically synthesized
  source 1..22: mol_type = other DNA
tacccattttttgtggcattgt

SEQ ID NO: 86503 - DNA, 22 bp, synthetic construct
  misc_feature 1..22: note = chemically synthesized
  source 1..22: mol_type = other DNA
acccattttttgtggcattgtt

SEQ ID NO: 86504 - DNA, 22 bp, synthetic construct
  misc_feature 1..22: note = chemically synthesized
  source 1..22: mol_type = other DNA
cccattttttgtggcattgttt

SEQ ID NO: 86505 - DNA, 22 bp, synthetic construct
  misc_feature 1..22: note = chemically synthesized
  source 1..22: mol_type = other DNA
tttgtggcattgtttgttttgt

SEQ ID NO: 86506 - DNA, 22 bp, synthetic construct
  misc_feature 1..22: note = chemically synthesized
  source 1..22: mol_type = other DNA
ttgtggcattgtttgttttgtt

SEQ ID NO: 86507 - DNA, 22 bp, synthetic construct
  misc_feature 1..22: note = chemically synthesized
  source 1..22: mol_type = other DNA
tgtggcattgtttgttttgttc

SEQ ID NO: 86508 - DNA, 22 bp, synthetic construct
  misc_feature 1..22: note = chemically synthesized
  source 1..22: mol_type = other DNA
gtggcattgtttgttttgttct

SEQ ID NO: 86509 - DNA, 22 bp, synthetic construct
  misc_feature 1..22: note = chemically synthesized
  source 1..22: mol_type = other DNA
tggcattgtttgttttgttctt

SEQ ID NO: 86510 - DNA, 22 bp, synthetic construct
  misc_feature 1..22: note = chemically synthesized
  source 1..22: mol_type = other DNA
tttgttttgttcttgtagattc

SEQ ID NO: 86511 - DNA, 22 bp, synthetic construct
  misc_feature 1..22: note = chemically synthesized
  source 1..22: mol_type = other DNA
gttttgttcttgtagattcatt

SEQ ID NO: 86512 - DNA, 22 bp, synthetic construct
  misc_feature 1..22: note = chemically synthesized
  source 1..22: mol_type = other DNA
ttttgttcttgtagattcattt

SEQ ID NO: 86513 - DNA, 22 bp, synthetic construct
  misc_feature 1..22: note = chemically synthesized
  source 1..22: mol_type = other DNA
tgttcttgtagattcatttaag

SEQ ID NO: 86514 - DNA, 22 bp, synthetic construct
  misc_feature 1..22: note = chemically synthesized
  source 1..22: mol_type = other DNA
gttcttgtagattcatttaagt

SEQ ID NO: 86515 - DNA, 22 bp, synthetic construct
  misc_feature 1..22: note = chemically synthesized
  source 1..22: mol_type = other DNA
ttcttgtagattcatttaagtt

SEQ ID NO: 86516 - DNA, 22 bp, synthetic construct
  misc_feature 1..22: note = chemically synthesized
  source 1..22: mol_type = other DNA
ttgtagattcatttaagttcct

SEQ ID NO: 86517 - DNA, 22 bp, synthetic construct
  misc_feature 1..22: note = chemically synthesized
  source 1..22: mol_type = other DNA
gtagattcatttaagttcctta

SEQ ID NO: 86518 - DNA, 22 bp, synthetic construct
  misc_feature 1..22: note = chemically synthesized
  source 1..22: mol_type = other DNA
tagattcatttaagttccttat

SEQ ID NO: 86519 - DNA, 22 bp, synthetic construct
  misc_feature 1..22: note = chemically synthesized
  source 1..22: mol_type = other DNA
atttaagttccttatagattct

SEQ ID NO: 86520 - DNA, 22 bp, synthetic construct
  misc_feature 1..22: note = chemically synthesized
  source 1..22: mol_type = other DNA
aagttccttatagattctgaat

SEQ ID NO: 86521 - DNA, 22 bp, synthetic construct
  misc_feature 1..22: note = chemically synthesized
  source 1..22: mol_type = other DNA
agttccttatagattctgaata

SEQ ID NO: 86522 - DNA, 22 bp, synthetic construct
  misc_feature 1..22: note = chemically synthesized
  source 1..22: mol_type = other DNA
cttatagattctgaatattagg

SEQ ID NO: 86523 - DNA, 22 bp, synthetic construct
  misc_feature 1..22: note = chemically synthesized
  source 1..22: mol_type = other DNA
atagattctgaatattaggcct

SEQ ID NO: 86524 - DNA, 22 bp, synthetic construct
  misc_feature 1..22: note = chemically synthesized
  source 1..22: mol_type = other DNA
tagattctgaatattaggcctt

SEQ ID NO: 86525 - DNA, 22 bp, synthetic construct
  misc_feature 1..22: note = chemically synthesized
  source 1..22: mol_type = other DNA
tgaatattaggcctttgttgga

SEQ ID NO: 86526 - DNA, 22 bp, synthetic construct
  misc_feature 1..22: note = chemically synthesized
  source 1..22: mol_type = other DNA
aatattaggcctttgttggatg

SEQ ID NO: 86527 - DNA, 22 bp, synthetic construct
  misc_feature 1..22: note = chemically synthesized
  source 1..22: mol_type = other DNA
ggcctttgttggatgcatagtt

SEQ ID NO: 86528 - DNA, 22 bp, synthetic construct
  misc_feature 1..22: note = chemically synthesized
  source 1..22: mol_type = other DNA
tgttggatgcatagtttgcaaa

SEQ ID NO: 86529 - DNA, 22 bp, synthetic construct
  misc_feature 1..22: note = chemically synthesized
  source 1..22: mol_type = other DNA
gttggatgcatagtttgcaaaa

SEQ ID NO: 86530 - DNA, 22 bp, synthetic construct
  misc_feature 1..22: note = chemically synthesized
  source 1..22: mol_type = other DNA
ttggatgcatagtttgcaaaaa

SEQ ID NO: 86531 - DNA, 22 bp, synthetic construct
  misc_feature 1..22: note = chemically synthesized
  source 1..22: mol_type = other DNA
gatgcatagtttgcaaaaattt

SEQ ID NO: 86532 - DNA, 22 bp, synthetic construct
  misc_feature 1..22: note = chemically synthesized
  source 1..22: mol_type = other DNA
gcaaaaattttctcccattcta

SEQ ID NO: 86533 - DNA, 22 bp, synthetic construct
  misc_feature 1..22: note = chemically synthesized
  source 1..22: mol_type = other DNA
caaaaattttctcccattctat

SEQ ID NO: 86534 - DNA, 22 bp, synthetic construct
  misc_feature 1..22: note = chemically synthesized
  source 1..22: mol_type = other DNA
tctcccattctataggttgttt

SEQ ID NO: 86535 - DNA, 22 bp, synthetic construct
  misc_feature 1..22: note = chemically synthesized
  source 1..22: mol_type = other DNA
ctcccattctataggttgttta

SEQ ID NO: 86536 - DNA, 22 bp, synthetic construct
  misc_feature 1..22: note = chemically synthesized
  source 1..22: mol_type = other DNA
tcccattctataggttgtttac

SEQ ID NO: 86537 - DNA, 22 bp, synthetic construct
  misc_feature 1..22: note = chemically synthesized
  source 1..22: mol_type = other DNA
ccattctataggttgtttactc

SEQ ID NO: 86538 - DNA, 22 bp, synthetic construct
  misc_feature 1..22: note = chemically synthesized
  source 1..22: mol_type = other DNA
tataggttgtttactcagttga

SEQ ID NO: 86539 - DNA, 22 bp, synthetic construct
  misc_feature 1..22: note = chemically synthesized
  source 1..22: mol_type = other DNA
taggttgtttactcagttgata

SEQ ID NO: 86540 - DNA, 22 bp, synthetic construct
  misc_feature 1..22: note = chemically synthesized
  source 1..22: mol_type = other DNA
tttactcagttgatagtttctt

SEQ ID NO: 86541 - DNA, 22 bp, synthetic construct
  misc_feature 1..22: note = chemically synthesized
  source 1..22: mol_type = other DNA
actcagttgatagtttcttttg

SEQ ID NO: 86542 - DNA, 22 bp, synthetic construct
  misc_feature 1..22: note = chemically synthesized
  source 1..22: mol_type = other DNA
ctcagttgatagtttcttttgc

SEQ ID NO: 86543 - DNA, 22 bp, synthetic construct
  misc_feature 1..22: note = chemically synthesized
  source 1..22: mol_type = other DNA
agttgatagtttcttttgctgt

SEQ ID NO: 86544 - DNA, 22 bp, synthetic construct
  misc_feature 1..22: note = chemically synthesized
  source 1..22: mol_type = other DNA
atagtttcttttgctgtgcaga

SEQ ID NO: 86545 - DNA, 22 bp, synthetic construct
  misc_feature 1..22: note = chemically synthesized
  source 1..22: mol_type = other DNA
cttttgctgtgcagaaacttta

SEQ ID NO: 86546 - DNA, 22 bp, synthetic construct
  misc_feature 1..22: note = chemically synthesized
  source 1..22: mol_type = other DNA
ttttgctgtgcagaaactttat

SEQ ID NO: 86547 - DNA, 22 bp, synthetic construct
  misc_feature 1..22: note = chemically synthesized
  source 1..22: mol_type = other DNA
ttgctgtgcagaaactttattt

SEQ ID NO: 86548 - DNA, 22 bp, synthetic construct
  misc_feature 1..22: note = chemically synthesized
  source 1..22: mol_type = other DNA
tgctgtgcagaaactttatttt

SEQ ID NO: 86549 - DNA, 22 bp, synthetic construct
  misc_feature 1..22: note = chemically synthesized
  source 1..22: mol_type = other DNA
gctgtgcagaaactttatttta

SEQ ID NO: 86550 - DNA, 22 bp, synthetic construct
  misc_feature 1..22: note = chemically synthesized
  source 1..22: mol_type = other DNA
ctgtgcagaaactttattttaa

SEQ ID NO: 86551 - DNA, 22 bp, synthetic construct
  misc_feature 1..22: note = chemically synthesized
  source 1..22: mol_type = other DNA
tgcagaaactttattttaatta

SEQ ID NO: 86552 - DNA, 22 bp, synthetic construct
  misc_feature 1..22: note = chemically synthesized
  source 1..22: mol_type = other DNA
tattttaattagatcctatttg

SEQ ID NO: 86553 - DNA, 22 bp, synthetic construct
  misc_feature 1..22: note = chemically synthesized
  source 1..22: mol_type = other DNA
attttaattagatcctatttgt

SEQ ID NO: 86554 - DNA, 22 bp, synthetic construct
  misc_feature 1..22: note = chemically synthesized
  source 1..22: mol_type = other DNA
ttttaattagatcctatttgtc

SEQ ID NO: 86555 - DNA, 22 bp, synthetic construct
  misc_feature 1..22: note = chemically synthesized
  source 1..22: mol_type = other DNA
taattagatcctatttgtcaat

SEQ ID NO: 86556 - DNA, 22 bp, synthetic construct
  misc_feature 1..22: note = chemically synthesized
  source 1..22: mol_type = other DNA
aattagatcctatttgtcaatt

SEQ ID NO: 86557 - DNA, 22 bp, synthetic construct
  misc_feature 1..22: note = chemically synthesized
  source 1..22: mol_type = other DNA
attagatcctatttgtcaattt

SEQ ID NO: 86558 - DNA, 22 bp, synthetic construct
  misc_feature 1..22: note = chemically synthesized
  source 1..22: mol_type = other DNA
gatcctatttgtcaatttttgc

SEQ ID NO: 86559 - DNA, 22 bp, synthetic construct
  misc_feature 1..22: note = chemically synthesized
  source 1..22: mol_type = other DNA
tttgtcaatttttgcttttgct

SEQ ID NO: 86560 - DNA, 22 bp, synthetic construct
  misc_feature 1..22: note = chemically synthesized
  source 1..22: mol_type = other DNA
gtcaatttttgcttttgctgca

SEQ ID NO: 86561 - DNA, 22 bp, synthetic construct
  misc_feature 1..22: note = chemically synthesized
  source 1..22: mol_type = other DNA
tcaatttttgcttttgctgcaa

SEQ ID NO: 86562 - DNA, 22 bp, synthetic construct
  misc_feature 1..22: note = chemically synthesized
  source 1..22: mol_type = other DNA
ttgcttttgctgcaatgactgt

SEQ ID NO: 86563 - DNA, 22 bp, synthetic construct
  misc_feature 1..22: note = chemically synthesized
  source 1..22: mol_type = other DNA
tgcttttgctgcaatgactgtt

SEQ ID NO: 86564 - DNA, 22 bp, synthetic construct
  misc_feature 1..22: note = chemically synthesized
  source 1..22: mol_type = other DNA
gcttttgctgcaatgactgttg

SEQ ID NO: 86565 - DNA, 22 bp, synthetic construct
  misc_feature 1..22: note = chemically synthesized
  source 1..22: mol_type = other DNA
cttttgctgcaatgactgttgg

SEQ ID NO: 86566 - DNA, 22 bp, synthetic construct
  misc_feature 1..22: note = chemically synthesized
  source 1..22: mol_type = other DNA
ttgctgcaatgactgttggcat

SEQ ID NO: 86567 - DNA, 22 bp, synthetic construct
  misc_feature 1..22: note = chemically synthesized
  source 1..22: mol_type = other DNA
tgctgcaatgactgttggcatc

SEQ ID NO: 86568 - DNA, 22 bp, synthetic construct
  misc_feature 1..22: note = chemically synthesized
  source 1..22: mol_type = other DNA
gctgcaatgactgttggcatct

SEQ ID NO: 86569 - DNA, 22 bp, synthetic construct
  misc_feature 1..22: note = chemically synthesized
  source 1..22: mol_type = other DNA
ctgcaatgactgttggcatctt

SEQ ID NO: 86570 - DNA, 22 bp, synthetic construct
  misc_feature 1..22: note = chemically synthesized
  source 1..22: mol_type = other DNA
caatgactgttggcatctttgt

SEQ ID NO: 86571 - DNA, 22 bp, synthetic construct
  misc_feature 1..22: note = chemically synthesized
  source 1..22: mol_type = other DNA
ttggcatctttgtcatgaaatc

SEQ ID NO: 86572 - DNA, 22 bp, synthetic construct
  misc_feature 1..22: note = chemically synthesized
  source 1..22: mol_type = other DNA
gcatctttgtcatgaaatcttt

SEQ ID NO: 86573 - DNA, 22 bp, synthetic construct
  misc_feature 1..22: note = chemically synthesized
  source 1..22: mol_type = other DNA
tgtcatgaaatctttgcccctg

SEQ ID NO: 86574 - DNA, 22 bp, synthetic construct
  misc_feature 1..22: note = chemically synthesized
  source 1..22: mol_type = other DNA
gtcatgaaatctttgcccctgc

SEQ ID NO: 86575 - DNA, 22 bp, synthetic construct
  misc_feature 1..22: note = chemically synthesized
  source 1..22: mol_type = other DNA
tcatgaaatctttgcccctgct

SEQ ID NO: 86576 - DNA, 22 bp, synthetic construct
  misc_feature 1..22: note = chemically synthesized
  source 1..22: mol_type = other DNA
tgcccctgcttatgtccggaat

SEQ ID NO: 86577 - DNA, 22 bp, synthetic construct
  misc_feature 1..22: note = chemically synthesized
  source 1..22: mol_type = other DNA
gcccctgcttatgtccggaatg

SEQ ID NO: 86578 - DNA, 22 bp, synthetic construct
  misc_feature 1..22: note = chemically synthesized
  source 1..22: mol_type = other DNA
cccctgcttatgtccggaatgg

SEQ ID NO: 86579 - DNA, 22 bp, synthetic construct
  misc_feature 1..22: note = chemically synthesized
  source 1..22: mol_type = other DNA
cttatgtccggaatggtattgc

SEQ ID NO: 86580 - DNA, 22 bp, synthetic construct
  misc_feature 1..22: note = chemically synthesized
  source 1..22: mol_type = other DNA
atgtccggaatggtattgccta

SEQ ID NO: 86581 - DNA, 22 bp, synthetic construct
  misc_feature 1..22: note = chemically synthesized
  source 1..22: mol_type = other DNA
tgtccggaatggtattgcctag

SEQ ID NO: 86582 - DNA, 22 bp, synthetic construct
  misc_feature 1..22: note = chemically synthesized
  source 1..22: mol_type = other DNA
cctaggttgctttcaagcattt

SEQ ID NO: 86583 - DNA, 22 bp, synthetic construct
  misc_feature 1..22: note = chemically synthesized
  source 1..22: mol_type = other DNA
ggttgctttcaagcatttttat

SEQ ID NO: 86584 - DNA, 22 bp, synthetic construct
  misc_feature 1..22: note = chemically synthesized
  source 1..22: mol_type = other DNA
ctttcaagcatttttatagttt

SEQ ID NO: 86585 - DNA, 22 bp, synthetic construct
  misc_feature 1..22: note = chemically synthesized
  source 1..22: mol_type = other DNA
tcaagcatttttatagtttggg

SEQ ID NO: 86586 - DNA, 22 bp, synthetic construct
  misc_feature 1..22: note = chemically synthesized
  source 1..22: mol_type = other DNA
caagcatttttatagtttgggt

SEQ ID NO: 86587 - DNA, 22 bp, synthetic construct
  misc_feature 1..22: note = chemically synthesized
  source 1..22: mol_type = other DNA
aagcatttttatagtttgggtt

SEQ ID NO: 86588 - DNA, 22 bp, synthetic construct
  misc_feature 1..22: note = chemically synthesized
  source 1..22: mol_type = other DNA
ttatagtttgggttttgcattt

SEQ ID NO: 86589 - DNA, 22 bp, synthetic construct
  misc_feature 1..22: note = chemically synthesized
  source 1..22: mol_type = other DNA
tatagtttgggttttgcattta

SEQ ID NO: 86590 - DNA, 22 bp, synthetic construct
  misc_feature 1..22: note = chemically synthesized
  source 1..22: mol_type = other DNA
atagtttgggttttgcatttaa

SEQ ID NO: 86591 - DNA, 22 bp, synthetic construct
  misc_feature 1..22: note = chemically synthesized
  source 1..22: mol_type = other DNA
tagtttgggttttgcatttaag

SEQ ID NO: 86592 - DNA, 22 bp, synthetic construct
  misc_feature 1..22: note = chemically synthesized
  source 1..22: mol_type = other DNA
gggttttgcatttaagtctcta

SEQ ID NO: 86593 - DNA, 22 bp, synthetic construct
  misc_feature 1..22: note = chemically synthesized
  source 1..22: mol_type = other DNA
ggttttgcatttaagtctctaa

SEQ ID NO: 86594 - DNA, 22 bp, synthetic construct
  misc_feature 1..22: note = chemically synthesized
  source 1..22: mol_type = other DNA
tgcatttaagtctctaatccat

SEQ ID NO: 86595 - DNA, 22 bp, synthetic construct
  misc_feature 1..22: note = chemically synthesized
  source 1..22: mol_type = other DNA
gcatttaagtctctaatccatc

SEQ ID NO: 86596 - DNA, 22 bp, synthetic construct
  misc_feature 1..22: note = chemically synthesized
  source 1..22: mol_type = other DNA
catttaagtctctaatccatct

SEQ ID NO: 86597 - DNA, 22 bp, synthetic construct
  misc_feature 1..22: note = chemically synthesized
  source 1..22: mol_type = other DNA
aagtctctaatccatcttgagt

SEQ ID NO: 86598 - DNA, 22 bp, synthetic construct
  misc_feature 1..22: note = chemically synthesized
  source 1..22: mol_type = other DNA
agtctctaatccatcttgagtt

SEQ ID NO: 86599 - DNA, 22 bp, synthetic construct
  misc_feature 1..22: note = chemically synthesized
  source 1..22: mol_type = other DNA
taatccatcttgagtttatttg

SEQ ID NO: 86600 - DNA, 22 bp, synthetic construct
  misc_feature 1..22: note = chemically synthesized
  source 1..22: mol_type = other DNA
atccatcttgagtttatttgtg

SEQ ID NO: 86601 - DNA, 22 bp, synthetic construct
  misc_feature 1..22: note = chemically synthesized
  source 1..22: mol_type = other DNA
gagtttatttgtgtatatgata

SEQ ID NO: 86602 - DNA, 22 bp, synthetic construct
  misc_feature 1..22: note = chemically synthesized
  source 1..22: mol_type = other DNA
agtttatttgtgtatatgatat

SEQ ID NO: 86603 - DNA, 22 bp, synthetic construct
  misc_feature 1..22: note = chemically synthesized
  source 1..22: mol_type = other DNA
atttgtgtatatgatatagaac

SEQ ID NO: 86604 - DNA, 22 bp, synthetic construct
  misc_feature 1..22: note = chemically synthesized
  source 1..22: mol_type = other DNA
tttgtgtatatgatatagaacg

SEQ ID NO: 86605 - DNA, 22 bp, synthetic construct
  misc_feature 1..22: note = chemically synthesized
  source 1..22: mol_type = other DNA
gtgtatatgatatagaacgggg

SEQ ID NO: 86606 - DNA, 22 bp, synthetic construct
  misc_feature 1..22: note = chemically synthesized
  source 1..22: mol_type = other DNA
tgtatatgatatagaacggggt

SEQ ID NO: 86607 - DNA, 22 bp, synthetic construct
  misc_feature 1..22: note = chemically synthesized
  source 1..22: mol_type = other DNA
gtttcaatcttctacatacggt

SEQ ID NO: 86608 - DNA, 22 bp, synthetic construct
  misc_feature 1..22: note = chemically synthesized
  source 1..22: mol_type = other DNA
caatcttctacatacggttagt

SEQ ID NO: 86609 - DNA, 22 bp, synthetic construct
  misc_feature 1..22: note = chemically synthesized
  source 1..22: mol_type = other DNA
aatcttctacatacggttagtc

SEQ ID NO: 86610 - DNA, 22 bp, synthetic construct
  misc_feature 1..22: note = chemically synthesized
  source 1..22: mol_type = other DNA
ctacatacggttagtcagttat

SEQ ID NO: 86611 - DNA, 22 bp, synthetic construct
  misc_feature 1..22: note = chemically synthesized
  source 1..22: mol_type = other DNA
tacatacggttagtcagttatc

SEQ ID NO: 86612 - DNA, 22 bp, synthetic construct
  misc_feature 1..22: note = chemically synthesized
  source 1..22: mol_type = other DNA
catacggttagtcagttatccc

SEQ ID NO: 86613 - DNA, 22 bp, synthetic construct
  misc_feature 1..22: note = chemically synthesized
  source 1..22: mol_type = other DNA
gtcagttatcccaacaccactt

SEQ ID NO: 86614 - DNA, 22 bp, synthetic construct
  misc_feature 1..22: note = chemically synthesized
  source 1..22: mol_type = other DNA
tcccaacaccacttgttgaata

SEQ ID NO: 86615 - DNA, 22 bp, synthetic construct
  misc_feature 1..22: note = chemically synthesized
  source 1..22: mol_type = other DNA
gttgaatagggtgtcttttcct

SEQ ID NO: 86616 - DNA, 22 bp, synthetic construct
  misc_feature 1..22: note = chemically synthesized
  source 1..22: mol_type = other DNA
ttgaatagggtgtcttttcctc

SEQ ID NO: 86617 - DNA, 22 bp, synthetic construct
  misc_feature 1..22: note = chemically synthesized
  source 1..22: mol_type = other DNA
aatagggtgtcttttcctcatt

SEQ ID NO: 86618 - DNA, 22 bp, synthetic construct
  misc_feature 1..22: note = chemically synthesized
  source 1..22: mol_type = other DNA
ttcctcattgcttgtttttatc

SEQ ID NO: 86619 - DNA, 22 bp, synthetic construct
  misc_feature 1..22: note = chemically synthesized
  source 1..22: mol_type = other DNA
tcctcattgcttgtttttatca

SEQ ID NO: 86620 - DNA, 22 bp, synthetic construct
  misc_feature 1..22: note = chemically synthesized
  source 1..22: mol_type = other DNA
cctcattgcttgtttttatcag

SEQ ID NO: 86621 - DNA, 22 bp, synthetic construct
  misc_feature 1..22: note = chemically synthesized
  source 1..22: mol_type = other DNA
ctcattgcttgtttttatcagc

SEQ ID NO: 86622 - DNA, 22 bp, synthetic construct
  misc_feature 1..22: note = chemically synthesized
  source 1..22: mol_type = other DNA
attgcttgtttttatcagcttt

SEQ ID NO: 86623 - DNA, 22 bp, synthetic construct
  misc_feature 1..22: note = chemically synthesized
  source 1..22: mol_type = other DNA
cttgtttttatcagctttgtca

SEQ ID NO: 86624 - DNA, 22 bp, synthetic construct
  misc_feature 1..22: note = chemically synthesized
  source 1..22: mol_type = other DNA
gtttttatcagctttgtcaaag

SEQ ID NO: 86625 - DNA, 22 bp, synthetic construct
  misc_feature 1..22: note = chemically synthesized
  source 1..22: mol_type = other DNA
tttttatcagctttgtcaaaga

SEQ ID NO: 86626 - DNA, 22 bp, synthetic construct
  misc_feature 1..22: note = chemically synthesized
  source 1..22: mol_type = other DNA
ttatcagctttgtcaaagatca

SEQ ID NO: 86627 - DNA, 22 bp, synthetic construct
  misc_feature 1..22: note = chemically synthesized
  source 1..22: mol_type = other DNA
tatcagctttgtcaaagatcag

SEQ ID NO: 86628 - DNA, 22 bp, synthetic construct
  misc_feature 1..22: note = chemically synthesized
  source 1..22: mol_type = other DNA
atcagctttgtcaaagatcaga

SEQ ID NO: 86629 - DNA, 22 bp, synthetic construct
  misc_feature 1..22: note = chemically synthesized
  source 1..22: mol_type = other DNA
tcagctttgtcaaagatcagat

SEQ ID NO: 86630 - DNA, 22 bp, synthetic construct
  misc_feature 1..22: note = chemically synthesized
  source 1..22: mol_type = other DNA
tgtcaaagatcagatggttgta

SEQ ID NO: 86631 - DNA, 22 bp, synthetic construct
  misc_feature 1..22: note = chemically synthesized
  source 1..22: mol_type = other DNA
gtcaaagatcagatggttgtag

SEQ ID NO: 86632 - DNA, 22 bp, synthetic construct
  misc_feature 1..22: note = chemically synthesized
  source 1..22: mol_type = other DNA
tcaaagatcagatggttgtagg

SEQ ID NO: 86633 - DNA, 22 bp, synthetic construct
  misc_feature 1..22: note = chemically synthesized
  source 1..22: mol_type = other DNA
taggcatgtggtcttatttctg

SEQ ID NO: 86634 - DNA, 22 bp, synthetic construct
  misc_feature 1..22: note = chemically synthesized
  source 1..22: mol_type = other DNA
atttctgggctctctattctgt

SEQ ID NO: 86635 - DNA, 22 bp, synthetic construct
  misc_feature 1..22: note = chemically synthesized
  source 1..22: mol_type = other DNA
tttctgggctctctattctgtt

SEQ ID NO: 86636 - DNA, 22 bp, synthetic construct
  misc_feature 1..22: note = chemically synthesized
  source 1..22: mol_type = other DNA
ctgggctctctattctgttcca

SEQ ID NO: 86637 - DNA, 22 bp, synthetic construct
  misc_feature 1..22: note = chemically synthesized
  source 1..22: mol_type = other DNA
tgggctctctattctgttccat

SEQ ID NO: 86638 - DNA, 22 bp, synthetic construct
  misc_feature 1..22: note = chemically synthesized
  source 1..22: mol_type = other DNA
ggctctctattctgttccattt

SEQ ID NO: 86639 - DNA, 22 bp, synthetic construct
  misc_feature 1..22: note = chemically synthesized
  source 1..22: mol_type = other DNA
tctattctgttccatttgtctg

SEQ ID NO: 86640 - DNA, 22 bp, synthetic construct
  misc_feature 1..22: note = chemically synthesized
  source 1..22: mol_type = other DNA
tattctgttccatttgtctgtg

SEQ ID NO: 86641 - DNA, 22 bp, synthetic construct
  misc_feature 1..22: note = chemically synthesized
  source 1..22: mol_type = other DNA
ttctgttccatttgtctgtgtg

SEQ ID NO: 86642 - DNA, 22 bp, synthetic construct
  misc_feature 1..22: note = chemically synthesized
  source 1..22: mol_type = other DNA
tgttccatttgtctgtgtgtct

SEQ ID NO: 86643 - DNA, 22 bp, synthetic construct
  misc_feature 1..22: note = chemically synthesized
  source 1..22: mol_type = other DNA
ttccatttgtctgtgtgtcttt

SEQ ID NO: 86644 - DNA, 22 bp, synthetic construct
  misc_feature 1..22: note = chemically synthesized
  source 1..22: mol_type = other DNA
catttgtctgtgtgtcttttct

SEQ ID NO: 86645 - DNA, 22 bp, synthetic construct
  misc_feature 1..22: note = chemically synthesized
  source 1..22: mol_type = other DNA
gtctgtgtgtcttttctgtaac

SEQ ID NO: 86646 - DNA, 22 bp, synthetic construct
  misc_feature 1..22: note = chemically synthesized
  source 1..22: mol_type = other DNA
tctgtgtgtcttttctgtaaca

SEQ ID NO: 86647 - DNA, 22 bp, synthetic construct
  misc_feature 1..22: note = chemically synthesized
  source 1..22: mol_type = other DNA
tgtgtcttttctgtaacagtac

SEQ ID NO: 86648 - DNA, 22 bp, synthetic construct
  misc_feature 1..22: note = chemically synthesized
  source 1..22: mol_type = other DNA
ttctgtaacagtaccacactgt

SEQ ID NO: 86649 - DNA, 22 bp, synthetic construct
  misc_feature 1..22: note = chemically synthesized
  source 1..22: mol_type = other DNA
tctgtaacagtaccacactgtt

SEQ ID NO: 86650 - DNA, 22 bp, synthetic construct
  misc_feature 1..22: note = chemically synthesized
  source 1..22: mol_type = other DNA
ctgtaacagtaccacactgttt

SEQ ID NO: 86651 - DNA, 22 bp, synthetic construct
  misc_feature 1..22: note = chemically synthesized
  source 1..22: mol_type = other DNA
tgtaacagtaccacactgtttt

SEQ ID NO: 86652 - DNA, 22 bp, synthetic construct
  misc_feature 1..22: note = chemically synthesized
  source 1..22: mol_type = other DNA
taacagtaccacactgttttgg

SEQ ID NO: 86653 - DNA, 22 bp, synthetic construct
  misc_feature 1..22: note = chemically synthesized
  source 1..22: mol_type = other DNA
ttttggttactgtagccctgtg

SEQ ID NO: 86654 - DNA, 22 bp, synthetic construct
  misc_feature 1..22: note = chemically synthesized
  source 1..22: mol_type = other DNA
tggttactgtagccctgtggta

SEQ ID NO: 86655 - DNA, 22 bp, synthetic construct
  misc_feature 1..22: note = chemically synthesized
  source 1..22: mol_type = other DNA
ggttactgtagccctgtggtat

SEQ ID NO: 86656 - DNA, 22 bp, synthetic construct
  misc_feature 1..22: note = chemically synthesized
  source 1..22: mol_type = other DNA
gttactgtagccctgtggtatg

SEQ ID NO: 86657 - DNA, 22 bp, synthetic construct
  misc_feature 1..22: note = chemically synthesized
  source 1..22: mol_type = other DNA
ctgtagccctgtggtatggttt

SEQ ID NO: 86658 - DNA, 22 bp, synthetic construct
  misc_feature 1..22: note = chemically synthesized
  source 1..22: mol_type = other DNA
tagccctgtggtatggtttgaa

SEQ ID NO: 86659 - DNA, 22 bp, synthetic construct
  misc_feature 1..22: note = chemically synthesized
  source 1..22: mol_type = other DNA
tggtatggtttgaagttaggca

SEQ ID NO: 86660 - DNA, 22 bp, synthetic construct
  misc_feature 1..22: note = chemically synthesized
  source 1..22: mol_type = other DNA
gaagttaggcaatgtattatct

SEQ ID NO: 86661 - DNA, 22 bp, synthetic construct
  misc_feature 1..22: note = chemically synthesized
  source 1..22: mol_type = other DNA
aagttaggcaatgtattatctc

SEQ ID NO: 86662 - DNA, 22 bp, synthetic construct
  misc_feature 1..22: note = chemically synthesized
  source 1..22: mol_type = other DNA
ggcaatgtattatctccagctt

SEQ ID NO: 86663 - DNA, 22 bp, synthetic construct
  misc_feature 1..22: note = chemically synthesized
  source 1..22: mol_type = other DNA
tctccagcttttttctttttct

SEQ ID NO: 86664 - DNA, 22 bp, synthetic construct
  misc_feature 1..22: note = chemically synthesized
  source 1..22: mol_type = other DNA
cagcttttttctttttctcttt

SEQ ID NO: 86665 - DNA, 22 bp, synthetic construct
  misc_feature 1..22: note = chemically synthesized
  source 1..22: mol_type = other DNA
ttttctttttctcttttttttt

SEQ ID NO: 86666 - DNA, 22 bp, synthetic construct
  misc_feature 1..22: note = chemically synthesized
  source 1..22: mol_type = other DNA
tttctttttctctttttttttt

SEQ ID NO: 86667 - DNA, 22 bp, synthetic construct
  misc_feature 1..22: note = chemically synthesized
  source 1..22: mol_type = other DNA
ttctttttctcttttttttttt

SEQ ID NO: 86668 - DNA, 22 bp, synthetic construct
  misc_feature 1..22: note = chemically synthesized
  source 1..22: mol_type = other DNA
tctttttctctttttttttttt

SEQ ID NO: 86669 - DNA, 22 bp, synthetic construct
  misc_feature 1..22: note = chemically synthesized
  source 1..22: mol_type = other DNA
ctttttctcttttttttttttt

SEQ ID NO: 86670 - DNA, 22 bp, synthetic construct
  misc_feature 1..22: note = chemically synthesized
  source 1..22: mol_type = other DNA
tttttctctttttttttttttg

SEQ ID NO: 86671 - DNA, 22 bp, synthetic construct
  misc_feature 1..22: note = chemically synthesized
  source 1..22: mol_type = other DNA
tttctctttttttttttttgta

SEQ ID NO: 86672 - DNA, 22 bp, synthetic construct
  misc_feature 1..22: note = chemically synthesized
  source 1..22: mol_type = other DNA
ttctctttttttttttttgtac

SEQ ID NO: 86673 - DNA, 22 bp, synthetic construct
  misc_feature 1..22: note = chemically synthesized
  source 1..22: mol_type = other DNA
tctctttttttttttttgtact

SEQ ID NO: 86674 - DNA, 22 bp, synthetic construct
  misc_feature 1..22: note = chemically synthesized
  source 1..22: mol_type = other DNA
ctctttttttttttttgtactc

SEQ ID NO: 86675 - DNA, 22 bp, synthetic construct
  misc_feature 1..22: note = chemically synthesized
  source 1..22: mol_type = other DNA
tctttttttttttttgtactct

SEQ ID NO: 86676 - DNA, 22 bp, synthetic construct
  misc_feature 1..22: note = chemically synthesized
  source 1..22: mol_type = other DNA
tttttttttttttgtactctaa

SEQ ID NO: 86677 - DNA, 22 bp, synthetic construct
  misc_feature 1..22: note = chemically synthesized
  source 1..22: mol_type = other DNA
tttttttttttgtactctaagt

SEQ ID NO: 86678 - DNA, 22 bp, synthetic construct
  misc_feature 1..22: note = chemically synthesized
  source 1..22: mol_type = other DNA
ttttttttttgtactctaagtt

SEQ ID NO: 86679 - DNA, 22 bp, synthetic construct
  misc_feature 1..22: note = chemically synthesized
  source 1..22: mol_type = other DNA
tttttttttgtactctaagttc

SEQ ID NO: 86680 - DNA, 22 bp, synthetic construct
  misc_feature 1..22: note = chemically synthesized
  source 1..22: mol_type = other DNA
ttttttttgtactctaagttct

SEQ ID NO: 86681 - DNA, 22 bp, synthetic construct
  misc_feature 1..22: note = chemically synthesized
  source 1..22: mol_type = other DNA
tttttttgtactctaagttcta

SEQ ID NO: 86682 - DNA, 22 bp, synthetic construct
  misc_feature 1..22: note = chemically synthesized
  source 1..22: mol_type = other DNA
ttttttgtactctaagttctac

SEQ ID NO: 86683 - DNA, 22 bp, synthetic construct
  misc_feature 1..22: note = chemically synthesized
  source 1..22: mol_type = other DNA
tttttgtactctaagttctacg

SEQ ID NO: 86684 - DNA, 22 bp, synthetic construct
  misc_feature 1..22: note = chemically synthesized
  source 1..22: mol_type = other DNA
ttttgtactctaagttctacgg

SEQ ID NO: 86685 - DNA, 22 bp, synthetic construct
  misc_feature 1..22: note = chemically synthesized
  source 1..22: mol_type = other DNA
tttgtactctaagttctacggt

SEQ ID NO: 86686 - DNA, 22 bp, synthetic construct
  misc_feature 1..22: note = chemically synthesized
  source 1..22: mol_type = other DNA
ttgtactctaagttctacggta

SEQ ID NO: 86687 - DNA, 22 bp, synthetic construct
  misc_feature 1..22: note = chemically synthesized
  source 1..22: mol_type = other DNA
tgtactctaagttctacggtac

SEQ ID NO: 86688 - DNA, 22 bp, synthetic construct
  misc_feature 1..22: note = chemically synthesized
  source 1..22: mol_type = other DNA
gtactctaagttctacggtacc

SEQ ID NO: 86689 - DNA, 22 bp, synthetic construct
  misc_feature 1..22: note = chemically synthesized
  source 1..22: mol_type = other DNA
tactctaagttctacggtacct

SEQ ID NO: 86690 - DNA, 22 bp, synthetic construct
  misc_feature 1..22: note = chemically synthesized
  source 1..22: mol_type = other DNA
taagttctacggtacctgtgca

SEQ ID NO: 86691 - DNA, 22 bp, synthetic construct
  misc_feature 1..22: note = chemically synthesized
  source 1..22: mol_type = other DNA
agttctacggtacctgtgcagt

SEQ ID NO: 86692 - DNA, 22 bp, synthetic construct
  misc_feature 1..22: note = chemically synthesized
  source 1..22: mol_type = other DNA
tacggtacctgtgcagtttgtt

SEQ ID NO: 86693 - DNA, 22 bp, synthetic construct
  misc_feature 1..22: note = chemically synthesized
  source 1..22: mol_type = other DNA
cggtacctgtgcagtttgttac

SEQ ID NO: 86694 - DNA, 22 bp, synthetic construct
  misc_feature 1..22: note = chemically synthesized
  source 1..22: mol_type = other DNA
tgcagtttgttacatatgtata

SEQ ID NO: 86695 - DNA, 22 bp, synthetic construct
  misc_feature 1..22: note = chemically synthesized
  source 1..22: mol_type = other DNA
gttacatatgtatacgtgtgcc

SEQ ID NO: 86696 - DNA, 22 bp, synthetic construct
  misc_feature 1..22: note = chemically synthesized
  source 1..22: mol_type = other DNA
ttacatatgtatacgtgtgcca

SEQ ID NO: 86697 - DNA, 22 bp, synthetic construct
  misc_feature 1..22: note = chemically synthesized
  source 1..22: mol_type = other DNA
catatgtatacgtgtgccatat

SEQ ID NO: 86698 - DNA, 22 bp, synthetic construct
  misc_feature 1..22: note = chemically synthesized
  source 1..22: mol_type = other DNA
gtgtgctgcacccgttaactcg

SEQ ID NO: 86699 - DNA, 22 bp, synthetic construct
  misc_feature 1..22: note = chemically synthesized
  source 1..22: mol_type = other DNA
cacccgttaactcgtcatttac

SEQ ID NO: 86700 - DNA, 22 bp, synthetic construct
  misc_feature 1..22: note = chemically synthesized
  source 1..22: mol_type = other DNA
actcgtcatttacattagatat

SEQ ID NO: 86701 - DNA, 22 bp, synthetic construct
  misc_feature 1..22: note = chemically synthesized
  source 1..22: mol_type = other DNA
gtcatttacattagatatatct

SEQ ID NO: 86702 - DNA, 22 bp, synthetic construct
  misc_feature 1..22: note = chemically synthesized
  source 1..22: mol_type = other DNA
acattagatatatctcctaatg

SEQ ID NO: 86703 - DNA, 22 bp, synthetic construct
  misc_feature 1..22: note = chemically synthesized
  source 1..22: mol_type = other DNA
cattagatatatctcctaatgt

SEQ ID NO: 86704 - DNA, 22 bp, synthetic construct
  misc_feature 1..22: note = chemically synthesized
  source 1..22: mol_type = other DNA
gatatatctcctaatgttatcc

SEQ ID NO: 86705 - DNA, 22 bp, synthetic construct
  misc_feature 1..22: note = chemically synthesized
  source 1..22: mol_type = other DNA
ctaatgttatccctcctctctc

SEQ ID NO: 86706 - DNA, 22 bp, synthetic construct
  misc_feature 1..22: note = chemically synthesized
  source 1..22: mol_type = other DNA
atgttatccctcctctctccta

SEQ ID NO: 86707 - DNA, 22 bp, synthetic construct
  misc_feature 1..22: note = chemically synthesized
  source 1..22: mol_type = other DNA
tccctcctctctcctaccaccc

SEQ ID NO: 86708 - DNA, 22 bp, synthetic construct
  misc_feature 1..22: note = chemically synthesized
  source 1..22: mol_type = other DNA
ctctctcctaccaccccacgac

SEQ ID NO: 86709 - DNA, 22 bp, synthetic construct
  misc_feature 1..22: note = chemically synthesized
  source 1..22: mol_type = other DNA
tctcctaccaccccacgacagg

SEQ ID NO: 86710 - DNA, 22 bp, synthetic construct
  misc_feature 1..22: note = chemically synthesized
  source 1..22: mol_type = other DNA
tcctaccaccccacgacaggcc

SEQ ID NO: 86711 - DNA, 22 bp, synthetic construct
  misc_feature 1..22: note = chemically synthesized
  source 1..22: mol_type = other DNA
ctaccaccccacgacaggcccc

SEQ ID NO: 86712 - DNA, 22 bp, synthetic construct
  misc_feature 1..22: note = chemically synthesized
  source 1..22: mol_type = other DNA
ccaccccacgacaggccccggt

SEQ ID NO: 86713 - DNA, 22 bp, synthetic construct
  misc_feature 1..22: note = chemically synthesized
  source 1..22: mol_type = other DNA
cccaccctgtgtccaagtgttc

SEQ ID NO: 86714 - DNA, 22 bp, synthetic construct
  misc_feature 1..22: note = chemically synthesized
  source 1..22: mol_type = other DNA
tgtccaagtgttctcatttttc

SEQ ID NO: 86715 - DNA, 22 bp, synthetic construct
  misc_feature 1..22: note = chemically synthesized
  source 1..22: mol_type = other DNA
tcatttttcaattcccacctgt

SEQ ID NO: 86716 - DNA, 22 bp, synthetic construct
  misc_feature 1..22: note = chemically synthesized
  source 1..22: mol_type = other DNA
atttttcaattcccacctgtga

SEQ ID NO: 86717 - DNA, 22 bp, synthetic construct
  misc_feature 1..22: note = chemically synthesized
  source 1..22: mol_type = other DNA
ttcaattcccacctgtgagtat

SEQ ID NO: 86718 - DNA, 22 bp, synthetic construct
  misc_feature 1..22: note = chemically synthesized
  source 1..22: mol_type = other DNA
tcaattcccacctgtgagtatt

SEQ ID NO: 86719 - DNA, 22 bp, synthetic construct
  misc_feature 1..22: note = chemically synthesized
  source 1..22: mol_type = other DNA
caattcccacctgtgagtatta

SEQ ID NO: 86720 - DNA, 22 bp, synthetic construct
  misc_feature 1..22: note = chemically synthesized
  source 1..22: mol_type = other DNA
aattcccacctgtgagtattag

SEQ ID NO: 86721 - DNA, 22 bp, synthetic construct
  misc_feature 1..22: note = chemically synthesized
  source 1..22: mol_type = other DNA
ccacctgtgagtattaggattt

SEQ ID NO: 86722 - DNA, 22 bp, synthetic construct
  misc_feature 1..22: note = chemically synthesized
  source 1..22: mol_type = other DNA
tgagtattaggatttcctaggc

SEQ ID NO: 86723 - DNA, 22 bp, synthetic construct
  misc_feature 1..22: note = chemically synthesized
  source 1..22: mol_type = other DNA
ggatttcctaggctatttggac

SEQ ID NO: 86724 - DNA, 22 bp, synthetic construct
  misc_feature 1..22: note = chemically synthesized
  source 1..22: mol_type = other DNA
cctaggctatttggactttttt

SEQ ID NO: 86725 - DNA, 22 bp, synthetic construct
  misc_feature 1..22: note = chemically synthesized
  source 1..22: mol_type = other DNA
ctaggctatttggacttttttt

SEQ ID NO: 86726 - DNA, 22 bp, synthetic construct
  misc_feature 1..22: note = chemically synthesized
  source 1..22: mol_type = other DNA
ggctatttggactttttttgtt

SEQ ID NO: 86727 - DNA, 22 bp, synthetic construct
  misc_feature 1..22: note = chemically synthesized
  source 1..22: mol_type = other DNA
tttggactttttttgttgttgt

SEQ ID NO: 86728 - DNA, 22 bp, synthetic construct
  misc_feature 1..22: note = chemically synthesized
  source 1..22: mol_type = other DNA
ggactttttttgttgttgttcc

SEQ ID NO: 86729 - DNA, 22 bp, synthetic construct
  misc_feature 1..22: note = chemically synthesized
  source 1..22: mol_type = other DNA
gactttttttgttgttgttcca

SEQ ID NO: 86730 - DNA, 22 bp, synthetic construct
  misc_feature 1..22: note = chemically synthesized
  source 1..22: mol_type = other DNA
tttttgttgttgttccatatga

SEQ ID NO: 86731 - DNA, 22 bp, synthetic construct
  misc_feature 1..22: note = chemically synthesized
  source 1..22: mol_type = other DNA
ttttgttgttgttccatatgaa

SEQ ID NO: 86732 - DNA, 22 bp, synthetic construct
  misc_feature 1..22: note = chemically synthesized
  source 1..22: mol_type = other DNA
tttgttgttgttccatatgaac

SEQ ID NO: 86733 - DNA, 22 bp, synthetic construct
  misc_feature 1..22: note = chemically synthesized
  source 1..22: mol_type = other DNA
ttgttgttgttccatatgaact

SEQ ID NO: 86734 - DNA, 22 bp, synthetic construct
  misc_feature 1..22: note = chemically synthesized
  source 1..22: mol_type = other DNA
tgttgttgttccatatgaactt

SEQ ID NO: 86735 - DNA, 22 bp, synthetic construct
  misc_feature 1..22: note = chemically synthesized
  source 1..22: mol_type = other DNA
gttgttgttccatatgaacttt

SEQ ID NO: 86736 - DNA, 22 bp, synthetic construct
  misc_feature 1..22: note = chemically synthesized
  source 1..22: mol_type = other DNA
ttgttgttccatatgaacttta

SEQ ID NO: 86737 - DNA, 22 bp, synthetic construct
  misc_feature 1..22: note = chemically synthesized
  source 1..22: mol_type = other DNA
ttgttccatatgaactttaaag

SEQ ID NO: 86738 - DNA, 22 bp, synthetic construct
  misc_feature 1..22: note = chemically synthesized
  source 1..22: mol_type = other DNA
ttccatatgaactttaaagtgt

SEQ ID NO: 86739 - DNA, 22 bp, synthetic construct
  misc_feature 1..22: note = chemically synthesized
  source 1..22: mol_type = other DNA
catatgaactttaaagtgtatt

SEQ ID NO: 86740 - DNA, 22 bp, synthetic construct
  misc_feature 1..22: note = chemically synthesized
  source 1..22: mol_type = other DNA
taaagtgtatttttctagttct

SEQ ID NO: 86741 - DNA, 22 bp, synthetic construct
  misc_feature 1..22: note = chemically synthesized
  source 1..22: mol_type = other DNA
aaagtgtatttttctagttctg

SEQ ID NO: 86742 - DNA, 22 bp, synthetic construct
  misc_feature 1..22: note = chemically synthesized
  source 1..22: mol_type = other DNA
aagtgtatttttctagttctgt

SEQ ID NO: 86743 - DNA, 22 bp, synthetic construct
  misc_feature 1..22: note = chemically synthesized
  source 1..22: mol_type = other DNA
ttctagttctgtgaagaatgtc

SEQ ID NO: 86744 - DNA, 22 bp, synthetic construct
  misc_feature 1..22: note = chemically synthesized
  source 1..22: mol_type = other DNA
tctagttctgtgaagaatgtca

SEQ ID NO: 86745 - DNA, 22 bp, synthetic construct
  misc_feature 1..22: note = chemically synthesized
  source 1..22: mol_type = other DNA
ctagttctgtgaagaatgtcat

SEQ ID NO: 86746 - DNA, 22 bp, synthetic construct
  misc_feature 1..22: note = chemically synthesized
  source 1..22: mol_type = other DNA
tagttctgtgaagaatgtcatt

SEQ ID NO: 86747 - DNA, 22 bp, synthetic construct
  misc_feature 1..22: note = chemically synthesized
  source 1..22: mol_type = other DNA
gttctgtgaagaatgtcattgg

SEQ ID NO: 86748 - DNA, 22 bp, synthetic construct
  misc_feature 1..22: note = chemically synthesized
  source 1..22: mol_type = other DNA
tgtgaagaatgtcattggtagt

SEQ ID NO: 86749 - DNA, 22 bp, synthetic construct
  misc_feature 1..22: note = chemically synthesized
  source 1..22: mol_type = other DNA
tgaagaatgtcattggtagttt

SEQ ID NO: 86750 - DNA, 22 bp, synthetic construct
  misc_feature 1..22: note = chemically synthesized
  source 1..22: mol_type = other DNA
gtagtttgataggaatagcttt

SEQ ID NO: 86751 - DNA, 22 bp, synthetic construct
  misc_feature 1..22: note = chemically synthesized
  source 1..22: mol_type = other DNA
gataggaatagctttgaaactg

SEQ ID NO: 86752 - DNA, 22 bp, synthetic construct
  misc_feature 1..22: note = chemically synthesized
  source 1..22: mol_type = other DNA
ataggaatagctttgaaactgt

SEQ ID NO: 86753 - DNA, 22 bp, synthetic construct
  misc_feature 1..22: note = chemically synthesized
  source 1..22: mol_type = other DNA
tgaaactgtaaattgctctagg

SEQ ID NO: 86754 - DNA, 22 bp, synthetic construct
  misc_feature 1..22: note = chemically synthesized
  source 1..22: mol_type = other DNA
gaaactgtaaattgctctaggc

SEQ ID NO: 86755 - DNA, 22 bp, synthetic construct
  misc_feature 1..22: note = chemically synthesized
  source 1..22: mol_type = other DNA
aaactgtaaattgctctaggca

SEQ ID NO: 86756 - DNA, 22 bp, synthetic construct
  misc_feature 1..22: note = chemically synthesized
  source 1..22: mol_type = other DNA
taaattgctctaggcagtatgg

SEQ ID NO: 86757 - DNA, 22 bp, synthetic construct
  misc_feature 1..22: note = chemically synthesized
  source 1..22: mol_type = other DNA
ctctaggcagtatggacatttt

SEQ ID NO: 86758 - DNA, 22 bp, synthetic construct
  misc_feature 1..22: note = chemically synthesized
  source 1..22: mol_type = other DNA
taggcagtatggacattttaac

SEQ ID NO: 86759 - DNA, 22 bp, synthetic construct
  misc_feature 1..22: note = chemically synthesized
  source 1..22: mol_type = other DNA
ggcagtatggacattttaacaa

SEQ ID NO: 86760 - DNA, 22 bp, synthetic construct
  misc_feature 1..22: note = chemically synthesized
  source 1..22: mol_type = other DNA
taacaatattgattctttttat

SEQ ID NO: 86761 - DNA, 22 bp, synthetic construct
  misc_feature 1..22: note = chemically synthesized
  source 1..22: mol_type = other DNA
aacaatattgattctttttatc

SEQ ID NO: 86762 - DNA, 22 bp, synthetic construct
  misc_feature 1..22: note = chemically synthesized
  source 1..22: mol_type = other DNA
acaatattgattctttttatcc

SEQ ID NO: 86763 - DNA, 22 bp, synthetic construct
  misc_feature 1..22: note = chemically synthesized
  source 1..22: mol_type = other DNA
attctttttatccatgagcatg

SEQ ID NO: 86764 - DNA, 22 bp, synthetic construct
  misc_feature 1..22: note = chemically synthesized
  source 1..22: mol_type = other DNA
tttttatccatgagcatggaaa

SEQ ID NO: 86765 - DNA, 22 bp, synthetic construct
  misc_feature 1..22: note = chemically synthesized
  source 1..22: mol_type = other DNA
tttatccatgagcatggaaagt

SEQ ID NO: 86766 - DNA, 22 bp, synthetic construct
  misc_feature 1..22: note = chemically synthesized
  source 1..22: mol_type = other DNA
ttatccatgagcatggaaagtt

SEQ ID NO: 86767 - DNA, 22 bp, synthetic construct
  misc_feature 1..22: note = chemically synthesized
  source 1..22: mol_type = other DNA
tatccatgagcatggaaagttt

SEQ ID NO: 86768 - DNA, 22 bp, synthetic construct
  misc_feature 1..22: note = chemically synthesized
  source 1..22: mol_type = other DNA
atccatgagcatggaaagtttt

SEQ ID NO: 86769 - DNA, 22 bp, synthetic construct
  misc_feature 1..22: note = chemically synthesized
  source 1..22: mol_type = other DNA
tccatgagcatggaaagttttt

SEQ ID NO: 86770 - DNA, 22 bp, synthetic construct
  misc_feature 1..22: note = chemically synthesized
  source 1..22: mol_type = other DNA
ttccatttgtttctatcagctc

SEQ ID NO: 86771 - DNA, 22 bp, synthetic construct
  misc_feature 1..22: note = chemically synthesized
  source 1..22: mol_type = other DNA
tccatttgtttctatcagctct

SEQ ID NO: 86772 - DNA, 22 bp, synthetic construct
  misc_feature 1..22: note = chemically synthesized
  source 1..22: mol_type = other DNA
ccatttgtttctatcagctctg

SEQ ID NO: 86773 - DNA, 22 bp, synthetic construct
  misc_feature 1..22: note = chemically synthesized
  source 1..22: mol_type = other DNA
catttgtttctatcagctctga

SEQ ID NO: 86774 - DNA, 22 bp, synthetic construct
  misc_feature 1..22: note = chemically synthesized
  source 1..22: mol_type = other DNA
gtttctatcagctctgatttct

SEQ ID NO: 86775 - DNA, 22 bp, synthetic construct
  misc_feature 1..22: note = chemically synthesized
  source 1..22: mol_type = other DNA
tttctatcagctctgatttctt

SEQ ID NO: 86776 - DNA, 22 bp, synthetic construct
  misc_feature 1..22: note = chemically synthesized
  source 1..22: mol_type = other DNA
ctatcagctctgatttctttga

SEQ ID NO: 86777 - DNA, 22 bp, synthetic construct
  misc_feature 1..22: note = chemically synthesized
  source 1..22: mol_type = other DNA
tatcagctctgatttctttgag

SEQ ID NO: 86778 - DNA, 22 bp, synthetic construct
  misc_feature 1..22: note = chemically synthesized
  source 1..22: mol_type = other DNA
tcagctctgatttctttgagca

SEQ ID NO: 86779 - DNA, 22 bp, synthetic construct
  misc_feature 1..22: note = chemically synthesized
  source 1..22: mol_type = other DNA
tgatttctttgagcagtgtttt

SEQ ID NO: 86780 - DNA, 22 bp, synthetic construct
  misc_feature 1..22: note = chemically synthesized
  source 1..22: mol_type = other DNA
atttctttgagcagtgttttgt

SEQ ID NO: 86781 - DNA, 22 bp, synthetic construct
  misc_feature 1..22: note = chemically synthesized
  source 1..22: mol_type = other DNA
ctttgagcagtgttttgtaaat

SEQ ID NO: 86782 - DNA, 22 bp, synthetic construct
  misc_feature 1..22: note = chemically synthesized
  source 1..22: mol_type = other DNA
tttgagcagtgttttgtaaatc

SEQ ID NO: 86783 - DNA, 22 bp, synthetic construct
  misc_feature 1..22: note = chemically synthesized
  source 1..22: mol_type = other DNA
tgagcagtgttttgtaaatctc

SEQ ID NO: 86784 - DNA, 22 bp, synthetic construct
  misc_feature 1..22: note = chemically synthesized
  source 1..22: mol_type = other DNA
gagcagtgttttgtaaatctca

SEQ ID NO: 86785 - DNA, 22 bp, synthetic construct
  misc_feature 1..22: note = chemically synthesized
  source 1..22: mol_type = other DNA
agcagtgttttgtaaatctcat

SEQ ID NO: 86786 - DNA, 22 bp, synthetic construct
  misc_feature 1..22: note = chemically synthesized
  source 1..22: mol_type = other DNA
tgtaaatctcattgtagagatc

SEQ ID NO: 86787 - DNA, 22 bp, synthetic construct
  misc_feature 1..22: note = chemically synthesized
  source 1..22: mol_type = other DNA
gtaaatctcattgtagagatct

SEQ ID NO: 86788 - DNA, 22 bp, synthetic construct
  misc_feature 1..22: note = chemically synthesized
  source 1..22: mol_type = other DNA
taaatctcattgtagagatctt

SEQ ID NO: 86789 - DNA, 22 bp, synthetic construct
  misc_feature 1..22: note = chemically synthesized
  source 1..22: mol_type = other DNA
attgtagagatctttcaactgc

SEQ ID NO: 86790 - DNA, 22 bp, synthetic construct
  misc_feature 1..22: note = chemically synthesized
  source 1..22: mol_type = other DNA
tagagatctttcaactgcttgg

SEQ ID NO: 86791 - DNA, 22 bp, synthetic construct
  misc_feature 1..22: note = chemically synthesized
  source 1..22: mol_type = other DNA
tcaactgcttggttagatatat

SEQ ID NO: 86792 - DNA, 22 bp, synthetic construct
  misc_feature 1..22: note = chemically synthesized
  source 1..22: mol_type = other DNA
caactgcttggttagatatatc

SEQ ID NO: 86793 - DNA, 22 bp, synthetic construct
  misc_feature 1..22: note = chemically synthesized
  source 1..22: mol_type = other DNA
aactgcttggttagatatatcc

SEQ ID NO: 86794 - DNA, 22 bp, synthetic construct
  misc_feature 1..22: note = chemically synthesized
  source 1..22: mol_type = other DNA
cttggttagatatatccttagg

SEQ ID NO: 86795 - DNA, 22 bp, synthetic construct
  misc_feature 1..22: note = chemically synthesized
  source 1..22: mol_type = other DNA
ggttagatatatccttaggtat

SEQ ID NO: 86796 - DNA, 22 bp, synthetic construct
  misc_feature 1..22: note = chemically synthesized
  source 1..22: mol_type = other DNA
gttagatatatccttaggtatt

SEQ ID NO: 86797 - DNA, 22 bp, synthetic construct
  misc_feature 1..22: note = chemically synthesized
  source 1..22: mol_type = other DNA
gatatatccttaggtattttat

SEQ ID NO: 86798 - DNA, 22 bp, synthetic construct
  misc_feature 1..22: note = chemically synthesized
  source 1..22: mol_type = other DNA
aggtattttattctttttgtgg

SEQ ID NO: 86799 - DNA, 22 bp, synthetic construct
  misc_feature 1..22: note = chemically synthesized
  source 1..22: mol_type = other DNA
ggtattttattctttttgtggc

SEQ ID NO: 86800 - DNA, 22 bp, synthetic construct
  misc_feature 1..22: note = chemically synthesized
  source 1..22: mol_type = other DNA
tattctttttgtggcaacggta

SEQ ID NO: 86801 - DNA, 22 bp, synthetic construct
  misc_feature 1..22: note = chemically synthesized
  source 1..22: mol_type = other DNA
attctttttgtggcaacggtaa

SEQ ID NO: 86802 - DNA, 22 bp, synthetic construct
  misc_feature 1..22: note = chemically synthesized
  source 1..22: mol_type = other DNA
ttctttttgtggcaacggtaaa

SEQ ID NO: 86803 - DNA, 22 bp, synthetic construct
  misc_feature 1..22: note = chemically synthesized
  source 1..22: mol_type = other DNA
tttttgtggcaacggtaaatgg

SEQ ID NO: 86804 - DNA, 22 bp, synthetic construct
  misc_feature 1..22: note = chemically synthesized
  source 1..22: mol_type = other DNA
tttgtggcaacggtaaatggga

SEQ ID NO: 86805 - DNA, 22 bp, synthetic construct
  misc_feature 1..22: note = chemically synthesized
  source 1..22: mol_type = other DNA
ttgtggcaacggtaaatgggat

SEQ ID NO: 86806 - DNA, 22 bp, synthetic construct
  misc_feature 1..22: note = chemically synthesized
  source 1..22: mol_type = other DNA
tgtggcaacggtaaatgggatt

SEQ ID NO: 86807 - DNA, 22 bp, synthetic construct
  misc_feature 1..22: note = chemically synthesized
  source 1..22: mol_type = other DNA
gtggcaacggtaaatgggattg

SEQ ID NO: 86808 - DNA, 22 bp, synthetic construct
  misc_feature 1..22: note = chemically synthesized
  source 1..22: mol_type = other DNA
tggcaacggtaaatgggattga

SEQ ID NO: 86809 - DNA, 22 bp, synthetic construct
  misc_feature 1..22: note = chemically synthesized
  source 1..22: mol_type = other DNA
acttcctgatttggctctaggc

SEQ ID NO: 86810 - DNA, 22 bp, synthetic construct
  misc_feature 1..22: note = chemically synthesized
  source 1..22: mol_type = other DNA
cctgatttggctctaggcttgg

SEQ ID NO: 86811 - DNA, 22 bp, synthetic construct
  misc_feature 1..22: note = chemically synthesized
  source 1..22: mol_type = other DNA
ctgatttggctctaggcttggc

SEQ ID NO: 86812 - DNA, 22 bp, synthetic construct
  misc_feature 1..22: note = chemically synthesized
  source 1..22: mol_type = other DNA
atttggctctaggcttggctat

SEQ ID NO: 86813 - DNA, 22 bp, synthetic construct
  misc_feature 1..22: note = chemically synthesized
  source 1..22: mol_type = other DNA
ggctctaggcttggctattgtt

SEQ ID NO: 86814 - DNA, 22 bp, synthetic construct
  misc_feature 1..22: note = chemically synthesized
  source 1..22: mol_type = other DNA
gctctaggcttggctattgttg

SEQ ID NO: 86815 - DNA, 22 bp, synthetic construct
  misc_feature 1..22: note = chemically synthesized
  source 1..22: mol_type = other DNA
taggcttggctattgttgatgt

SEQ ID NO: 86816 - DNA, 22 bp, synthetic construct
  misc_feature 1..22: note = chemically synthesized
  source 1..22: mol_type = other DNA
ggcttggctattgttgatgtat

SEQ ID NO: 86817 - DNA, 22 bp, synthetic construct
  misc_feature 1..22: note = chemically synthesized
  source 1..22: mol_type = other DNA
ggctattgttgatgtatgggaa

SEQ ID NO: 86818 - DNA, 22 bp, synthetic construct
  misc_feature 1..22: note = chemically synthesized
  source 1..22: mol_type = other DNA
gctattgttgatgtatgggaat

SEQ ID NO: 86819 - DNA, 22 bp, synthetic construct
  misc_feature 1..22: note = chemically synthesized
  source 1..22: mol_type = other DNA
ttgttgatgtatgggaatgcta

SEQ ID NO: 86820 - DNA, 22 bp, synthetic construct
  misc_feature 1..22: note = chemically synthesized
  source 1..22: mol_type = other DNA
ttgatgtatgggaatgctagtg

SEQ ID NO: 86821 - DNA, 22 bp, synthetic construct
  misc_feature 1..22: note = chemically synthesized
  source 1..22: mol_type = other DNA
atgtatgggaatgctagtgatt

SEQ ID NO: 86822 - DNA, 22 bp, synthetic construct
  misc_feature 1..22: note = chemically synthesized
  source 1..22: mol_type = other DNA
gtgatttttgtacattgatttt

SEQ ID NO: 86823 - DNA, 22 bp, synthetic construct
  misc_feature 1..22: note = chemically synthesized
  source 1..22: mol_type = other DNA
ttgtacattgattttatatcct

SEQ ID NO: 86824 - DNA, 22 bp, synthetic construct
  misc_feature 1..22: note = chemically synthesized
  source 1..22: mol_type = other DNA
tgtacattgattttatatcctg

SEQ ID NO: 86825 - DNA, 22 bp, synthetic construct
  misc_feature 1..22: note = chemically synthesized
  source 1..22: mol_type = other DNA
gtacattgattttatatcctga

SEQ ID NO: 86826 - DNA, 22 bp, synthetic construct
  misc_feature 1..22: note = chemically synthesized
  source 1..22: mol_type = other DNA
tacattgattttatatcctgaa

SEQ ID NO: 86827 - DNA, 22 bp, synthetic construct
  misc_feature 1..22: note = chemically synthesized
  source 1..22: mol_type = other DNA
attttatatcctgaaactttgc

SEQ ID NO: 86828 - DNA, 22 bp, synthetic construct
  misc_feature 1..22: note = chemically synthesized
  source 1..22: mol_type = other DNA
tatatcctgaaactttgctgaa

SEQ ID NO: 86829 - DNA, 22 bp, synthetic construct
  misc_feature 1..22: note = chemically synthesized
  source 1..22: mol_type = other DNA
atatcctgaaactttgctgaag

SEQ ID NO: 86830 - DNA, 22 bp, synthetic construct
  misc_feature 1..22: note = chemically synthesized
  source 1..22: mol_type = other DNA
tatcctgaaactttgctgaagt

SEQ ID NO: 86831 - DNA, 22 bp, synthetic construct
  misc_feature 1..22: note = chemically synthesized
  source 1..22: mol_type = other DNA
aaactttgctgaagttatcagc

SEQ ID NO: 86832 - DNA, 22 bp, synthetic construct
  misc_feature 1..22: note = chemically synthesized
  source 1..22: mol_type = other DNA
tgctgaagttatcagctgaagg

SEQ ID NO: 86833 - DNA, 22 bp, synthetic construct
  misc_feature 1..22: note = chemically synthesized
  source 1..22: mol_type = other DNA
gctgaagttatcagctgaagga

SEQ ID NO: 86834 - DNA, 22 bp, synthetic construct
  misc_feature 1..22: note = chemically synthesized
  source 1..22: mol_type = other DNA
ctgaagttatcagctgaaggag

SEQ ID NO: 86835 - DNA, 22 bp, synthetic construct
  misc_feature 1..22: note = chemically synthesized
  source 1..22: mol_type = other DNA
aagttatcagctgaaggagctt

SEQ ID NO: 86836 - DNA, 22 bp, synthetic construct
  misc_feature 1..22: note = chemically synthesized
  source 1..22: mol_type = other DNA
tcagctgaaggagcttttgggc

SEQ ID NO: 86837 - DNA, 22 bp, synthetic construct
  misc_feature 1..22: note = chemically synthesized
  source 1..22: mol_type = other DNA
aaggagcttttgggccttgact

SEQ ID NO: 86838 - DNA, 22 bp, synthetic construct
  misc_feature 1..22: note = chemically synthesized
  source 1..22: mol_type = other DNA
ttgggccttgactatggtgttt

SEQ ID NO: 86839 - DNA, 22 bp, synthetic construct
  misc_feature 1..22: note = chemically synthesized
  source 1..22: mol_type = other DNA
tgggccttgactatggtgtttt

SEQ ID NO: 86840 - DNA, 22 bp, synthetic construct
  misc_feature 1..22: note = chemically synthesized
  source 1..22: mol_type = other DNA
gggccttgactatggtgttttc

SEQ ID NO: 86841 - DNA, 22 bp, synthetic construct
  misc_feature 1..22: note = chemically synthesized
  source 1..22: mol_type = other DNA
ggccttgactatggtgttttct

SEQ ID NO: 86842 - DNA, 22 bp, synthetic construct
  misc_feature 1..22: note = chemically synthesized
  source 1..22: mol_type = other DNA
gactatggtgttttctagatac

SEQ ID NO: 86843 - DNA, 22 bp, synthetic construct
  misc_feature 1..22: note = chemically synthesized
  source 1..22: mol_type = other DNA
actatggtgttttctagataca

SEQ ID NO: 86844 - DNA, 22 bp, synthetic construct
  misc_feature 1..22: note = chemically synthesized
  source 1..22: mol_type = other DNA
tggtgttttctagatacagaaa

SEQ ID NO: 86845 - DNA, 22 bp, synthetic construct
  misc_feature 1..22: note = chemically synthesized
  source 1..22: mol_type = other DNA
tctagatacagaaaacagggat

SEQ ID NO: 86846 - DNA, 22 bp, synthetic construct
  misc_feature 1..22: note = chemically synthesized
  source 1..22: mol_type = other DNA
ctagatacagaaaacagggata

SEQ ID NO: 86847 - DNA, 22 bp, synthetic construct
  misc_feature 1..22: note = chemically synthesized
  source 1..22: mol_type = other DNA
tagatacagaaaacagggatac

SEQ ID NO: 86848 - DNA, 22 bp, synthetic construct
  misc_feature 1..22: note = chemically synthesized
  source 1..22: mol_type = other DNA
gatacagaaaacagggatactt

SEQ ID NO: 86849 - DNA, 22 bp, synthetic construct
  misc_feature 1..22: note = chemically synthesized
  source 1..22: mol_type = other DNA
tgactttctctcttcctatttg

SEQ ID NO: 86850 - DNA, 22 bp, synthetic construct
  misc_feature 1..22: note = chemically synthesized
  source 1..22: mol_type = other DNA
gactttctctcttcctatttgg

SEQ ID NO: 86851 - DNA, 22 bp, synthetic construct
  misc_feature 1..22: note = chemically synthesized
  source 1..22: mol_type = other DNA
actttctctcttcctatttgga

SEQ ID NO: 86852 - DNA, 22 bp, synthetic construct
  misc_feature 1..22: note = chemically synthesized
  source 1..22: mol_type = other DNA
tctctcttcctatttggatgcc

SEQ ID NO: 86853 - DNA, 22 bp, synthetic construct
  misc_feature 1..22: note = chemically synthesized
  source 1..22: mol_type = other DNA
ctctcttcctatttggatgccc

SEQ ID NO: 86854 - DNA, 22 bp, synthetic construct
  misc_feature 1..22: note = chemically synthesized
  source 1..22: mol_type = other DNA
tctcttcctatttggatgccct

SEQ ID NO: 86855 - DNA, 22 bp, synthetic construct
  misc_feature 1..22: note = chemically synthesized
  source 1..22: mol_type = other DNA
tcttcctatttggatgcccttt

SEQ ID NO: 86856 - DNA, 22 bp, synthetic construct
  misc_feature 1..22: note = chemically synthesized
  source 1..22: mol_type = other DNA
ttcctatttggatgccctttat

SEQ ID NO: 86857 - DNA, 22 bp, synthetic construct
  misc_feature 1..22: note = chemically synthesized
  source 1..22: mol_type = other DNA
cctatttggatgccctttattc

SEQ ID NO: 86858 - DNA, 22 bp, synthetic construct
  misc_feature 1..22: note = chemically synthesized
  source 1..22: mol_type = other DNA
ctatttggatgccctttattcc

SEQ ID NO: 86859 - DNA, 22 bp, synthetic construct
  misc_feature 1..22: note = chemically synthesized
  source 1..22: mol_type = other DNA
tttggatgccctttattccctt

SEQ ID NO: 86860 - DNA, 22 bp, synthetic construct
  misc_feature 1..22: note = chemically synthesized
  source 1..22: mol_type = other DNA
ggatgccctttattcccttctc

SEQ ID NO: 86861 - DNA, 22 bp, synthetic construct
  misc_feature 1..22: note = chemically synthesized
  source 1..22: mol_type = other DNA
gatgccctttattcccttctct

SEQ ID NO: 86862 - DNA, 22 bp, synthetic construct
  misc_feature 1..22: note = chemically synthesized
  source 1..22: mol_type = other DNA
tattcccttctcttgcctgatt

SEQ ID NO: 86863 - DNA, 22 bp, synthetic construct
  misc_feature 1..22: note = chemically synthesized
  source 1..22: mol_type = other DNA
attcccttctcttgcctgattg

SEQ ID NO: 86864 - DNA, 22 bp, synthetic construct
  misc_feature 1..22: note = chemically synthesized
  source 1..22: mol_type = other DNA
ttcccttctcttgcctgattgc

SEQ ID NO: 86865 - DNA, 22 bp, synthetic construct
  misc_feature 1..22: note = chemically synthesized
  source 1..22: mol_type = other DNA
ccttctcttgcctgattgctct

SEQ ID NO: 86866 - DNA, 22 bp, synthetic construct
  misc_feature 1..22: note = chemically synthesized
  source 1..22: mol_type = other DNA
ctcttgcctgattgctctggcc

SEQ ID NO: 86867 - DNA, 22 bp, synthetic construct
  misc_feature 1..22: note = chemically synthesized
  source 1..22: mol_type = other DNA
tcttgcctgattgctctggcca

SEQ ID NO: 86868 - DNA, 22 bp, synthetic construct
  misc_feature 1..22: note = chemically synthesized
  source 1..22: mol_type = other DNA
ttgcctgattgctctggccagg

SEQ ID NO: 86869 - DNA, 22 bp, synthetic construct
  misc_feature 1..22: note = chemically synthesized
  source 1..22: mol_type = other DNA
gcctgattgctctggccaggac

SEQ ID NO: 86870 - DNA, 22 bp, synthetic construct
  misc_feature 1..22: note = chemically synthesized
  source 1..22: mol_type = other DNA
cctgattgctctggccaggact

SEQ ID NO: 86871 - DNA, 22 bp, synthetic construct
  misc_feature 1..22: note = chemically synthesized
  source 1..22: mol_type = other DNA
attgctctggccaggactgcca

SEQ ID NO: 86872 - DNA, 22 bp, synthetic construct
  misc_feature 1..22: note = chemically synthesized
  source 1..22: mol_type = other DNA
ctctggccaggactgccagtac

SEQ ID NO: 86873 - DNA, 22 bp, synthetic construct
  misc_feature 1..22: note = chemically synthesized
  source 1..22: mol_type = other DNA
tggccaggactgccagtactat

SEQ ID NO: 86874 - DNA, 22 bp, synthetic construct
  misc_feature 1..22: note = chemically synthesized
  source 1..22: mol_type = other DNA
gccaggactgccagtactatac

SEQ ID NO: 86875 - DNA, 22 bp, synthetic construct
  misc_feature 1..22: note = chemically synthesized
  source 1..22: mol_type = other DNA
ccagtactatactgaatagcag

SEQ ID NO: 86876 - DNA, 22 bp, synthetic construct
  misc_feature 1..22: note = chemically synthesized
  source 1..22: mol_type = other DNA
tactgaatagcagtggtgagag

SEQ ID NO: 86877 - DNA, 22 bp, synthetic construct
  misc_feature 1..22: note = chemically synthesized
  source 1..22: mol_type = other DNA
aatagcagtggtgagagagggc

SEQ ID NO: 86878 - DNA, 22 bp, synthetic construct
  misc_feature 1..22: note = chemically synthesized
  source 1..22: mol_type = other DNA
gtcttgtgccagttttcaagaa

SEQ ID NO: 86879 - DNA, 22 bp, synthetic construct
  misc_feature 1..22: note = chemically synthesized
  source 1..22: mol_type = other DNA
tcttgtgccagttttcaagaag

SEQ ID NO: 86880 - DNA, 22 bp, synthetic construct
  misc_feature 1..22: note = chemically synthesized
  source 1..22: mol_type = other DNA
gtgccagttttcaagaagaatg

SEQ ID NO: 86881 - DNA, 22 bp, synthetic construct
  misc_feature 1..22: note = chemically synthesized
  source 1..22: mol_type = other DNA
tgccagttttcaagaagaatgc

SEQ ID NO: 86882 - DNA, 22 bp, synthetic construct
  misc_feature 1..22: note = chemically synthesized
  source 1..22: mol_type = other DNA
tcaagaagaatgcttccaggtt

SEQ ID NO: 86883 - DNA, 22 bp, synthetic construct
  misc_feature 1..22: note = chemically synthesized
  source 1..22: mol_type = other DNA
caagaagaatgcttccaggttt

SEQ ID NO: 86884 - DNA, 22 bp, synthetic construct
  misc_feature 1..22: note = chemically synthesized
  source 1..22: mol_type = other DNA
aagaagaatgcttccaggtttt

SEQ ID NO: 86885 - DNA, 22 bp, synthetic construct
  misc_feature 1..22: note = chemically synthesized
  source 1..22: mol_type = other DNA
ccaggttttgcccattctgtat

SEQ ID NO: 86886 - DNA, 22 bp, synthetic construct
  misc_feature 1..22: note = chemically synthesized
  source 1..22: mol_type = other DNA
caggttttgcccattctgtatg

SEQ ID NO: 86887 - DNA, 22 bp, synthetic construct
  misc_feature 1..22: note = chemically synthesized
  source 1..22: mol_type = other DNA
tgcccattctgtatgatgttgg

SEQ ID NO: 86888 - DNA, 22 bp, synthetic construct
  misc_feature 1..22: note = chemically synthesized
  source 1..22: mol_type = other DNA
gcccattctgtatgatgttggc

SEQ ID NO: 86889 - DNA, 22 bp, synthetic construct
  misc_feature 1..22: note = chemically synthesized
  source 1..22: mol_type = other DNA
cccattctgtatgatgttggct

SEQ ID NO: 86890 - DNA, 22 bp, synthetic construct
  misc_feature 1..22: note = chemically synthesized
  source 1..22: mol_type = other DNA
tgtatgatgttggctgtgggtt

SEQ ID NO: 86891 - DNA, 22 bp, synthetic construct
  misc_feature 1..22: note = chemically synthesized
  source 1..22: mol_type = other DNA
tatgatgttggctgtgggtttg

SEQ ID NO: 86892 - DNA, 22 bp, synthetic construct
  misc_feature 1..22: note = chemically synthesized
  source 1..22: mol_type = other DNA
gctgtgggtttgtcatagatgg

SEQ ID NO: 86893 - DNA, 22 bp, synthetic construct
  misc_feature 1..22: note = chemically synthesized
  source 1..22: mol_type = other DNA
tgggtttgtcatagatggctca

SEQ ID NO: 86894 - DNA, 22 bp, synthetic construct
  misc_feature 1..22: note = chemically synthesized
  source 1..22: mol_type = other DNA
gtcatagatggctcatattatt

SEQ ID NO: 86895 - DNA, 22 bp, synthetic construct
  misc_feature 1..22: note = chemically synthesized
  source 1..22: mol_type = other DNA
tcatagatggctcatattattt

SEQ ID NO: 86896 - DNA, 22 bp, synthetic construct
  misc_feature 1..22: note = chemically synthesized
  source 1..22: mol_type = other DNA
atattattttgaggtcatgtcc

SEQ ID NO: 86897 - DNA, 22 bp, synthetic construct
  misc_feature 1..22: note = chemically synthesized
  source 1..22: mol_type = other DNA
ttttgaggtcatgtccttaaat

SEQ ID NO: 86898 - DNA, 22 bp, synthetic construct
  misc_feature 1..22: note = chemically synthesized
  source 1..22: mol_type = other DNA
tgaggtcatgtccttaaatagc

SEQ ID NO: 86899 - DNA, 22 bp, synthetic construct
  misc_feature 1..22: note = chemically synthesized
  source 1..22: mol_type = other DNA
gaggtcatgtccttaaatagct

SEQ ID NO: 86900 - DNA, 22 bp, synthetic construct
  misc_feature 1..22: note = chemically synthesized
  source 1..22: mol_type = other DNA
aggtcatgtccttaaatagcta

SEQ ID NO: 86901 - DNA, 22 bp, synthetic construct
  misc_feature 1..22: note = chemically synthesized
  source 1..22: mol_type = other DNA
aaatagctagtttgttgagagg

SEQ ID NO: 86902 - DNA, 22 bp, synthetic construct
  misc_feature 1..22: note = chemically synthesized
  source 1..22: mol_type = other DNA
aatagctagtttgttgagaggt

SEQ ID NO: 86903 - DNA, 22 bp, synthetic construct
  misc_feature 1..22: note = chemically synthesized
  source 1..22: mol_type = other DNA
gtttgttgagaggttttaacat

SEQ ID NO: 86904 - DNA, 22 bp, synthetic construct
  misc_feature 1..22: note = chemically synthesized
  source 1..22: mol_type = other DNA
gttgagaggttttaacatgaag

SEQ ID NO: 86905 - DNA, 22 bp, synthetic construct
  misc_feature 1..22: note = chemically synthesized
  source 1..22: mol_type = other DNA
ttgagaggttttaacatgaagt

SEQ ID NO: 86906 - DNA, 22 bp, synthetic construct
  misc_feature 1..22: note = chemically synthesized
  source 1..22: mol_type = other DNA
agaggttttaacatgaagtgaa

SEQ ID NO: 86907 - DNA, 22 bp, synthetic construct
  misc_feature 1..22: note = chemically synthesized
  source 1..22: mol_type = other DNA
taacatgaagtgaagttgaatt

SEQ ID NO: 86908 - DNA, 22 bp, synthetic construct
  misc_feature 1..22: note = chemically synthesized
  source 1..22: mol_type = other DNA
aacatgaagtgaagttgaattt

SEQ ID NO: 86909 - DNA, 22 bp, synthetic construct
  misc_feature 1..22: note = chemically synthesized
  source 1..22: mol_type = other DNA
acatgaagtgaagttgaatttt

SEQ ID NO: 86910 - DNA, 22 bp, synthetic construct
  misc_feature 1..22: note = chemically synthesized
  source 1..22: mol_type = other DNA
aattttatcaaaatcttttttt

SEQ ID NO: 86911 - DNA, 22 bp, synthetic construct
  misc_feature 1..22: note = chemically synthesized
  source 1..22: mol_type = other DNA
tatcaaaatctttttttgcaca

SEQ ID NO: 86912 - DNA, 22 bp, synthetic construct
  misc_feature 1..22: note = chemically synthesized
  source 1..22: mol_type = other DNA
atcaaaatctttttttgcacat

SEQ ID NO: 86913 - DNA, 22 bp, synthetic construct
  misc_feature 1..22: note = chemically synthesized
  source 1..22: mol_type = other DNA
tcaaaatctttttttgcacata

SEQ ID NO: 86914 - DNA, 22 bp, synthetic construct
  misc_feature 1..22: note = chemically synthesized
  source 1..22: mol_type = other DNA
tttttgcacatattgaaatgat

SEQ ID NO: 86915 - DNA, 22 bp, synthetic construct
  misc_feature 1..22: note = chemically synthesized
  source 1..22: mol_type = other DNA
ttttgcacatattgaaatgatc

SEQ ID NO: 86916 - DNA, 22 bp, synthetic construct
  misc_feature 1..22: note = chemically synthesized
  source 1..22: mol_type = other DNA
tttgcacatattgaaatgatca

SEQ ID NO: 86917 - DNA, 22 bp, synthetic construct
  misc_feature 1..22: note = chemically synthesized
  source 1..22: mol_type = other DNA
ttgcacatattgaaatgatcat

SEQ ID NO: 86918 - DNA, 22 bp, synthetic construct
  misc_feature 1..22: note = chemically synthesized
  source 1..22: mol_type = other DNA
tgcacatattgaaatgatcatg

SEQ ID NO: 86919 - DNA, 22 bp, synthetic construct
  misc_feature 1..22: note = chemically synthesized
  source 1..22: mol_type = other DNA
gcacatattgaaatgatcatgt

SEQ ID NO: 86920 - DNA, 22 bp, synthetic construct
  misc_feature 1..22: note = chemically synthesized
  source 1..22: mol_type = other DNA
cacatattgaaatgatcatgtg

SEQ ID NO: 86921 - DNA, 22 bp, synthetic construct
  misc_feature 1..22: note = chemically synthesized
  source 1..22: mol_type = other DNA
aaatgatcatgtggtttctgtt

SEQ ID NO: 86922 - DNA, 22 bp, synthetic construct
  misc_feature 1..22: note = chemically synthesized
  source 1..22: mol_type = other DNA
ctgtttttagtgctgtatatat

SEQ ID NO: 86923 - DNA, 22 bp, synthetic construct
  misc_feature 1..22: note = chemically synthesized
  source 1..22: mol_type = other DNA
tgtttttagtgctgtatatatg

SEQ ID NO: 86924 - DNA, 22 bp, synthetic construct
  misc_feature 1..22: note = chemically synthesized
  source 1..22: mol_type = other DNA
tttttagtgctgtatatatgat

SEQ ID NO: 86925 - DNA, 22 bp, synthetic construct
  misc_feature 1..22: note = chemically synthesized
  source 1..22: mol_type = other DNA
ttagtgctgtatatatgatgaa

SEQ ID NO: 86926 - DNA, 22 bp, synthetic construct
  misc_feature 1..22: note = chemically synthesized
  source 1..22: mol_type = other DNA
tagtgctgtatatatgatgaat

SEQ ID NO: 86927 - DNA, 22 bp, synthetic construct
  misc_feature 1..22: note = chemically synthesized
  source 1..22: mol_type = other DNA
agtgctgtatatatgatgaatc

SEQ ID NO: 86928 - DNA, 22 bp, synthetic construct
  misc_feature 1..22: note = chemically synthesized
  source 1..22: mol_type = other DNA
gtgctgtatatatgatgaatca

SEQ ID NO: 86929 - DNA, 22 bp, synthetic construct
  misc_feature 1..22: note = chemically synthesized
  source 1..22: mol_type = other DNA
tatatatgatgaatcacattta

SEQ ID NO: 86930 - DNA, 22 bp, synthetic construct
  misc_feature 1..22: note = chemically synthesized
  source 1..22: mol_type = other DNA
atcaatttgtatatgctgaacc

SEQ ID NO: 86931 - DNA, 22 bp, synthetic construct
  misc_feature 1..22: note = chemically synthesized
  source 1..22: mol_type = other DNA
tcaatttgtatatgctgaacca

SEQ ID NO: 86932 - DNA, 22 bp, synthetic construct
  misc_feature 1..22: note = chemically synthesized
  source 1..22: mol_type = other DNA
gtatatgctgaaccaatcttgc

SEQ ID NO: 86933 - DNA, 22 bp, synthetic construct
  misc_feature 1..22: note = chemically synthesized
  source 1..22: mol_type = other DNA
tatatgctgaaccaatcttgct

SEQ ID NO: 86934 - DNA, 22 bp, synthetic construct
  misc_feature 1..22: note = chemically synthesized
  source 1..22: mol_type = other DNA
aaccaatcttgcttctcaggga

SEQ ID NO: 86935 - DNA, 22 bp, synthetic construct
  misc_feature 1..22: note = chemically synthesized
  source 1..22: mol_type = other DNA
gcttctcagggataaagcctac

SEQ ID NO: 86936 - DNA, 22 bp, synthetic construct
  misc_feature 1..22: note = chemically synthesized
  source 1..22: mol_type = other DNA
cttctcagggataaagcctact

SEQ ID NO: 86937 - DNA, 22 bp, synthetic construct
  misc_feature 1..22: note = chemically synthesized
  source 1..22: mol_type = other DNA
ctcagggataaagcctacttga

SEQ ID NO: 86938 - DNA, 22 bp, synthetic construct
  misc_feature 1..22: note = chemically synthesized
  source 1..22: mol_type = other DNA
tcagggataaagcctacttgat

SEQ ID NO: 86939 - DNA, 22 bp, synthetic construct
  misc_feature 1..22: note = chemically synthesized
  source 1..22: mol_type = other DNA
agggataaagcctacttgattg

SEQ ID NO: 86940 - DNA, 22 bp, synthetic construct
  misc_feature 1..22: note = chemically synthesized
  source 1..22: mol_type = other DNA
cttgattgaggtggattagctt

SEQ ID NO: 86941 - DNA, 22 bp, synthetic construct
  misc_feature 1..22: note = chemically synthesized
  source 1..22: mol_type = other DNA
gattgaggtggattagctttgt

SEQ ID NO: 86942 - DNA, 22 bp, synthetic construct
  misc_feature 1..22: note = chemically synthesized
  source 1..22: mol_type = other DNA
attgaggtggattagctttgtg

SEQ ID NO: 86943 - DNA, 22 bp, synthetic construct
  misc_feature 1..22: note = chemically synthesized
  source 1..22: mol_type = other DNA
aggtggattagctttgtgatgt

SEQ ID NO: 86944 - DNA, 22 bp, synthetic construct
  misc_feature 1..22: note = chemically synthesized
  source 1..22: mol_type = other DNA
gctttgtgatgtgttgctggat

SEQ ID NO: 86945 - DNA, 22 bp, synthetic construct
  misc_feature 1..22: note = chemically synthesized
  source 1..22: mol_type = other DNA
tgtgatgtgttgctggatttgg

SEQ ID NO: 86946 - DNA, 22 bp, synthetic construct
  misc_feature 1..22: note = chemically synthesized
  source 1..22: mol_type = other DNA
gtgatgtgttgctggatttggc

SEQ ID NO: 86947 - DNA, 22 bp, synthetic construct
  misc_feature 1..22: note = chemically synthesized
  source 1..22: mol_type = other DNA
tgatgtgttgctggatttggct

SEQ ID NO: 86948 - DNA, 22 bp, synthetic construct
  misc_feature 1..22: note = chemically synthesized
  source 1..22: mol_type = other DNA
ctggatttggcttgctagtatt

SEQ ID NO: 86949 - DNA, 22 bp, synthetic construct
  misc_feature 1..22: note = chemically synthesized
  source 1..22: mol_type = other DNA
gatttggcttgctagtattttt

SEQ ID NO: 86950 - DNA, 22 bp, synthetic construct
  misc_feature 1..22: note = chemically synthesized
  source 1..22: mol_type = other DNA
ggcttgctagtatttttgcatc

SEQ ID NO: 86951 - DNA, 22 bp, synthetic construct
  misc_feature 1..22: note = chemically synthesized
  source 1..22: mol_type = other DNA
gcttgctagtatttttgcatca

SEQ ID NO: 86952 - DNA, 22 bp, synthetic construct
  misc_feature 1..22: note = chemically synthesized
  source 1..22: mol_type = other DNA
gctagtatttttgcatcaatgt

SEQ ID NO: 86953 - DNA, 22 bp, synthetic construct
  misc_feature 1..22: note = chemically synthesized
  source 1..22: mol_type = other DNA
ctagtatttttgcatcaatgtt

SEQ ID NO: 86954 - DNA, 22 bp, synthetic construct
  misc_feature 1..22: note = chemically synthesized
  source 1..22: mol_type = other DNA
gtatttttgcatcaatgttcaa

SEQ ID NO: 86955 - DNA, 22 bp, synthetic construct
  misc_feature 1..22: note = chemically synthesized
  source 1..22: mol_type = other DNA
ttgcatcaatgttcaaggatat

SEQ ID NO: 86956 - DNA, 22 bp, synthetic construct
  misc_feature 1..22: note = chemically synthesized
  source 1..22: mol_type = other DNA
tgcatcaatgttcaaggatatt

SEQ ID NO: 86957 - DNA, 22 bp, synthetic construct
  misc_feature 1..22: note = chemically synthesized
  source 1..22: mol_type = other DNA
gcatcaatgttcaaggatattg

SEQ ID NO: 86958 - DNA, 22 bp, synthetic construct
  misc_feature 1..22: note = chemically synthesized
  source 1..22: mol_type = other DNA
catcaatgttcaaggatattgg

SEQ ID NO: 86959 - DNA, 22 bp, synthetic construct
  misc_feature 1..22: note = chemically synthesized
  source 1..22: mol_type = other DNA
aaggatattggcctgaagtttt

SEQ ID NO: 86960 - DNA, 22 bp, synthetic construct
  misc_feature 1..22: note = chemically synthesized
  source 1..22: mol_type = other DNA
gcctgaagttttctttttttgt

SEQ ID NO: 86961 - DNA, 22 bp, synthetic construct
  misc_feature 1..22: note = chemically synthesized
  source 1..22: mol_type = other DNA
aagttttctttttttgttgttg

SEQ ID NO: 86962 - DNA, 22 bp, synthetic construct
  misc_feature 1..22: note = chemically synthesized
  source 1..22: mol_type = other DNA
tctttttttgttgttgtgtgtc

SEQ ID NO: 86963 - DNA, 22 bp, synthetic construct
  misc_feature 1..22: note = chemically synthesized
  source 1..22: mol_type = other DNA
ctttttttgttgttgtgtgtct

SEQ ID NO: 86964 - DNA, 22 bp, synthetic construct
  misc_feature 1..22: note = chemically synthesized
  source 1..22: mol_type = other DNA
tttttttgttgttgtgtgtcta

SEQ ID NO: 86965 - DNA, 22 bp, synthetic construct
  misc_feature 1..22: note = chemically synthesized
  source 1..22: mol_type = other DNA
tttttgttgttgtgtgtctatc

SEQ ID NO: 86966 - DNA, 22 bp, synthetic construct
  misc_feature 1..22: note = chemically synthesized
  source 1..22: mol_type = other DNA
ttttgttgttgtgtgtctatca

SEQ ID NO: 86967 - DNA, 22 bp, synthetic construct
  misc_feature 1..22: note = chemically synthesized
  source 1..22: mol_type = other DNA
tttgttgttgtgtgtctatcag

SEQ ID NO: 86968 - DNA, 22 bp, synthetic construct
  misc_feature 1..22: note = chemically synthesized
  source 1..22: mol_type = other DNA
ttgttgttgtgtgtctatcagg

SEQ ID NO: 86969 - DNA, 22 bp, synthetic construct
  misc_feature 1..22: note = chemically synthesized
  source 1..22: mol_type = other DNA
tgttgttgtgtgtctatcaggt

SEQ ID NO: 86970 - DNA, 22 bp, synthetic construct
  misc_feature 1..22: note = chemically synthesized
  source 1..22: mol_type = other DNA
gttgttgtgtgtctatcaggtt

SEQ ID NO: 86971 - DNA, 22 bp, synthetic construct
  misc_feature 1..22: note = chemically synthesized
  source 1..22: mol_type = other DNA
ttgttgtgtgtctatcaggttt

SEQ ID NO: 86972 - DNA, 22 bp, synthetic construct
  misc_feature 1..22: note = chemically synthesized
  source 1..22: mol_type = other DNA
ttgtgtgtctatcaggttttgg

SEQ ID NO: 86973 - DNA, 22 bp, synthetic construct
  misc_feature 1..22: note = chemically synthesized
  source 1..22: mol_type = other DNA
tgtgtctatcaggttttggtat

SEQ ID NO: 86974 - DNA, 22 bp, synthetic construct
  misc_feature 1..22: note = chemically synthesized
  source 1..22: mol_type = other DNA
tcaggttttggtatcaggatga

SEQ ID NO: 86975 - DNA, 22 bp, synthetic construct
  misc_feature 1..22: note = chemically synthesized
  source 1..22: mol_type = other DNA
tggtatcaggatgatgctggcc

SEQ ID NO: 86976 - DNA, 22 bp, synthetic construct
  misc_feature 1..22: note = chemically synthesized
  source 1..22: mol_type = other DNA
ggtatcaggatgatgctggcct

SEQ ID NO: 86977 - DNA, 22 bp, synthetic construct
  misc_feature 1..22: note = chemically synthesized
  source 1..22: mol_type = other DNA
gtatcaggatgatgctggcctc

SEQ ID NO: 86978 - DNA, 22 bp, synthetic construct
  misc_feature 1..22: note = chemically synthesized
  source 1..22: mol_type = other DNA
gcctcataaaatgagctgaggt

SEQ ID NO: 86979 - DNA, 22 bp, synthetic construct
  misc_feature 1..22: note = chemically synthesized
  source 1..22: mol_type = other DNA
ataaaatgagctgaggttgaat

SEQ ID NO: 86980 - DNA, 22 bp, synthetic construct
  misc_feature 1..22: note = chemically synthesized
  source 1..22: mol_type = other DNA
aggttgaatccctccccctcaa

SEQ ID NO: 86981 - DNA, 22 bp, synthetic construct
  misc_feature 1..22: note = chemically synthesized
  source 1..22: mol_type = other DNA
aatccctccccctcaatttttt

SEQ ID NO: 86982 - DNA, 22 bp, synthetic construct
  misc_feature 1..22: note = chemically synthesized
  source 1..22: mol_type = other DNA
cccctcaattttttggagtagc

SEQ ID NO: 86983 - DNA, 22 bp, synthetic construct
  misc_feature 1..22: note = chemically synthesized
  source 1..22: mol_type = other DNA
aattttttggagtagcttcagt

SEQ ID NO: 86984 - DNA, 22 bp, synthetic construct
  misc_feature 1..22: note = chemically synthesized
  source 1..22: mol_type = other DNA
tttggagtagcttcagtaggaa

SEQ ID NO: 86985 - DNA, 22 bp, synthetic construct
  misc_feature 1..22: note = chemically synthesized
  source 1..22: mol_type = other DNA
ttggagtagcttcagtaggaat

SEQ ID NO: 86986 - DNA, 22 bp, synthetic construct
  misc_feature 1..22: note = chemically synthesized
  source 1..22: mol_type = other DNA
tggagtagcttcagtaggaatt

SEQ ID NO: 86987 - DNA, 22 bp, synthetic construct
  misc_feature 1..22: note = chemically synthesized
  source 1..22: mol_type = other DNA
ggagtagcttcagtaggaattt

SEQ ID NO: 86988 - DNA, 22 bp, synthetic construct
  misc_feature 1..22: note = chemically synthesized
  source 1..22: mol_type = other DNA
gagtagcttcagtaggaatttt

SEQ ID NO: 86989 - DNA, 22 bp, synthetic construct
  misc_feature 1..22: note = chemically synthesized
  source 1..22: mol_type = other DNA
cagtaggaatttttccaactct

SEQ ID NO: 86990 - DNA, 22 bp, synthetic construct
  misc_feature 1..22: note = chemically synthesized
  source 1..22: mol_type = other DNA
agtaggaatttttccaactctt

SEQ ID NO: 86991 - DNA, 22 bp, synthetic construct
  misc_feature 1..22: note = chemically synthesized
  source 1..22: mol_type = other DNA
ttccaactcttctttgtgcatc

SEQ ID NO: 86992 - DNA, 22 bp, synthetic construct
  misc_feature 1..22: note = chemically synthesized
  source 1..22: mol_type = other DNA
tccaactcttctttgtgcatct

SEQ ID NO: 86993 - DNA, 22 bp, synthetic construct
  misc_feature 1..22: note = chemically synthesized
  source 1..22: mol_type = other DNA
ccaactcttctttgtgcatctg

SEQ ID NO: 86994 - DNA, 22 bp, synthetic construct
  misc_feature 1..22: note = chemically synthesized
  source 1..22: mol_type = other DNA
caactcttctttgtgcatctga

SEQ ID NO: 86995 - DNA, 22 bp, synthetic construct
  misc_feature 1..22: note = chemically synthesized
  source 1..22: mol_type = other DNA
ttctttgtgcatctgatagaat

SEQ ID NO: 86996 - DNA, 22 bp, synthetic construct
  misc_feature 1..22: note = chemically synthesized
  source 1..22: mol_type = other DNA
ctttgtgcatctgatagaattt

SEQ ID NO: 86997 - DNA, 22 bp, synthetic construct
  misc_feature 1..22: note = chemically synthesized
  source 1..22: mol_type = other DNA
tttgtgcatctgatagaatttg

SEQ ID NO: 86998 - DNA, 22 bp, synthetic construct
  misc_feature 1..22: note = chemically synthesized
  source 1..22: mol_type = other DNA
tgtgcatctgatagaatttggt

SEQ ID NO: 86999 - DNA, 22 bp, synthetic construct
  misc_feature 1..22: note = chemically synthesized
  source 1..22: mol_type = other DNA
gtgcatctgatagaatttggtt

SEQ ID NO: 87000 - DNA, 22 bp, synthetic construct
  misc_feature 1..22: note = chemically synthesized
  source 1..22: mol_type = other DNA
tgcatctgatagaatttggttg

SEQ ID NO: 87001 - DNA, 22 bp, synthetic construct
  misc_feature 1..22: note = chemically synthesized
  source 1..22: mol_type = other DNA
atagaatttggttgtgaatcat

SEQ ID NO: 87002 - DNA, 22 bp, synthetic construct
  misc_feature 1..22: note = chemically synthesized
  source 1..22: mol_type = other DNA
ggttgtgaatcatattgtccag

SEQ ID NO: 87003 - DNA, 22 bp, synthetic construct
  misc_feature 1..22: note = chemically synthesized
  source 1..22: mol_type = other DNA
gttgtgaatcatattgtccagg

SEQ ID NO: 87004 - DNA, 22 bp, synthetic construct
  misc_feature 1..22: note = chemically synthesized
  source 1..22: mol_type = other DNA
tgaatcatattgtccagggctt

SEQ ID NO: 87005 - DNA, 22 bp, synthetic construct
  misc_feature 1..22: note = chemically synthesized
  source 1..22: mol_type = other DNA
tccagggctttttttgtttgat

SEQ ID NO: 87006 - DNA, 22 bp, synthetic construct
  misc_feature 1..22: note = chemically synthesized
  source 1..22: mol_type = other DNA
tttttgtttgataggctattta

SEQ ID NO: 87007 - DNA, 22 bp, synthetic construct
  misc_feature 1..22: note = chemically synthesized
  source 1..22: mol_type = other DNA
ttttgtttgataggctatttat

SEQ ID NO: 87008 - DNA, 22 bp, synthetic construct
  misc_feature 1..22: note = chemically synthesized
  source 1..22: mol_type = other DNA
tttgtttgataggctatttatt

SEQ ID NO: 87009 - DNA, 22 bp, synthetic construct
  misc_feature 1..22: note = chemically synthesized
  source 1..22: mol_type = other DNA
ttgtttgataggctatttatta

SEQ ID NO: 87010 - DNA, 22 bp, synthetic construct
  misc_feature 1..22: note = chemically synthesized
  source 1..22: mol_type = other DNA
tgtttgataggctatttattac

SEQ ID NO: 87011 - DNA, 22 bp, synthetic construct
  misc_feature 1..22: note = chemically synthesized
  source 1..22: mol_type = other DNA
gtttgataggctatttattact

SEQ ID NO: 87012 - DNA, 22 bp, synthetic construct
  misc_feature 1..22: note = chemically synthesized
  source 1..22: mol_type = other DNA
tttgataggctatttattactg

SEQ ID NO: 87013 - DNA, 22 bp, synthetic construct
  misc_feature 1..22: note = chemically synthesized
  source 1..22: mol_type = other DNA
gataggctatttattactgaat

SEQ ID NO: 87014 - DNA, 22 bp, synthetic construct
  misc_feature 1..22: note = chemically synthesized
  source 1..22: mol_type = other DNA
ataggctatttattactgaatc

SEQ ID NO: 87015 - DNA, 22 bp, synthetic construct
  misc_feature 1..22: note = chemically synthesized
  source 1..22: mol_type = other DNA
tttattactgaatcattttcag

SEQ ID NO: 87016 - DNA, 22 bp, synthetic construct
  misc_feature 1..22: note = chemically synthesized
  source 1..22: mol_type = other DNA
attactgaatcattttcagagc

SEQ ID NO: 87017 - DNA, 22 bp, synthetic construct
  misc_feature 1..22: note = chemically synthesized
  source 1..22: mol_type = other DNA
ttactgaatcattttcagagct

SEQ ID NO: 87018 - DNA, 22 bp, synthetic construct
  misc_feature 1..22: note = chemically synthesized
  source 1..22: mol_type = other DNA
ctgaatcattttcagagctcat

SEQ ID NO: 87019 - DNA, 22 bp, synthetic construct
  misc_feature 1..22: note = chemically synthesized
  source 1..22: mol_type = other DNA
aatcattttcagagctcatcat

SEQ ID NO: 87020 - DNA, 22 bp, synthetic construct
  misc_feature 1..22: note = chemically synthesized
  source 1..22: mol_type = other DNA
tcagagctcatcatggatctct

SEQ ID NO: 87021 - DNA, 22 bp, synthetic construct
  misc_feature 1..22: note = chemically synthesized
  source 1..22: mol_type = other DNA
cagagctcatcatggatctctt

SEQ ID NO: 87022 - DNA, 22 bp, synthetic construct
  misc_feature 1..22: note = chemically synthesized
  source 1..22: mol_type = other DNA
agagctcatcatggatctcttc

SEQ ID NO: 87023 - DNA, 22 bp, synthetic construct
  misc_feature 1..22: note = chemically synthesized
  source 1..22: mol_type = other DNA
atcatggatctcttcaggaaat

SEQ ID NO: 87024 - DNA, 22 bp, synthetic construct
  misc_feature 1..22: note = chemically synthesized
  source 1..22: mol_type = other DNA
ttcaggaaattgatttcttcct

SEQ ID NO: 87025 - DNA, 22 bp, synthetic construct
  misc_feature 1..22: note = chemically synthesized
  source 1..22: mol_type = other DNA
caggaaattgatttcttcctgg

SEQ ID NO: 87026 - DNA, 22 bp, synthetic construct
  misc_feature 1..22: note = chemically synthesized
  source 1..22: mol_type = other DNA
aggaaattgatttcttcctggt

SEQ ID NO: 87027 - DNA, 22 bp, synthetic construct
  misc_feature 1..22: note = chemically synthesized
  source 1..22: mol_type = other DNA
atttcttcctggttcagccttg

SEQ ID NO: 87028 - DNA, 22 bp, synthetic construct
  misc_feature 1..22: note = chemically synthesized
  source 1..22: mol_type = other DNA
cttcctggttcagccttgggag

SEQ ID NO: 87029 - DNA, 22 bp, synthetic construct
  misc_feature 1..22: note = chemically synthesized
  source 1..22: mol_type = other DNA
ttcctggttcagccttgggagg

SEQ ID NO: 87030 - DNA, 22 bp, synthetic construct
  misc_feature 1..22: note = chemically synthesized
  source 1..22: mol_type = other DNA
cctggttcagccttgggaggac

SEQ ID NO: 87031 - DNA, 22 bp, synthetic construct
  misc_feature 1..22: note = chemically synthesized
  source 1..22: mol_type = other DNA
ctggttcagccttgggaggacc

SEQ ID NO: 87032 - DNA, 22 bp, synthetic construct
  misc_feature 1..22: note = chemically synthesized
  source 1..22: mol_type = other DNA
gttcagccttgggaggacctaa

SEQ ID NO: 87033 - DNA, 22 bp, synthetic construct
  misc_feature 1..22: note = chemically synthesized
  source 1..22: mol_type = other DNA
agccttgggaggacctaaaaca

SEQ ID NO: 87034 - DNA, 22 bp, synthetic construct
  misc_feature 1..22: note = chemically synthesized
  source 1..22: mol_type = other DNA
gggaggacctaaaacaatcctc

SEQ ID NO: 87035 - DNA, 22 bp, synthetic construct
  misc_feature 1..22: note = chemically synthesized
  source 1..22: mol_type = other DNA
ggaggacctaaaacaatcctca

SEQ ID NO: 87036 - DNA, 22 bp, synthetic construct
  misc_feature 1..22: note = chemically synthesized
  source 1..22: mol_type = other DNA
aaacaatcctcagcaaatgcaa

SEQ ID NO: 87037 - DNA, 22 bp, synthetic construct
  misc_feature 1..22: note = chemically synthesized
  source 1..22: mol_type = other DNA
agcaaatgcaaaaaaaaaatca

SEQ ID NO: 87038 - DNA, 22 bp, synthetic construct
  misc_feature 1..22: note = chemically synthesized
  source 1..22: mol_type = other DNA
tcagaccacagaggaataaaaa

SEQ ID NO: 87039 - DNA, 22 bp, synthetic construct
  misc_feature 1..22: note = chemically synthesized
  source 1..22: mol_type = other DNA
agaccacagaggaataaaaata

SEQ ID NO: 87040 - DNA, 22 bp, synthetic construct
  misc_feature 1..22: note = chemically synthesized
  source 1..22: mol_type = other DNA
caagactaatgaatagctgaaa

SEQ ID NO: 87041 - DNA, 22 bp, synthetic construct
  misc_feature 1..22: note = chemically synthesized
  source 1..22: mol_type = other DNA
aagactaatgaatagctgaaaa

SEQ ID NO: 87042 - DNA, 22 bp, synthetic construct
  misc_feature 1..22: note = chemically synthesized
  source 1..22: mol_type = other DNA
atgaatagctgaaaactatgca

SEQ ID NO: 87043 - DNA, 22 bp, synthetic construct
  misc_feature 1..22: note = chemically synthesized
  source 1..22: mol_type = other DNA
aaaactatgcaattacatggaa

SEQ ID NO: 87044 - DNA, 22 bp, synthetic construct
  misc_feature 1..22: note = chemically synthesized
  source 1..22: mol_type = other DNA
tgcaattacatggaaattaaac

SEQ ID NO: 87045 - DNA, 22 bp, synthetic construct
  misc_feature 1..22: note = chemically synthesized
  source 1..22: mol_type = other DNA
catggaaattaaacaacctgct

SEQ ID NO: 87046 - DNA, 22 bp, synthetic construct
  misc_feature 1..22: note = chemically synthesized
  source 1..22: mol_type = other DNA
aacaacctgctcctgaatgaat

SEQ ID NO: 87047 - DNA, 22 bp, synthetic construct
  misc_feature 1..22: note = chemically synthesized
  source 1..22: mol_type = other DNA
ctcctgaatgaattttgggtaa

SEQ ID NO: 87048 - DNA, 22 bp, synthetic construct
  misc_feature 1..22: note = chemically synthesized
  source 1..22: mol_type = other DNA
ctgaatgaattttgggtaaata

SEQ ID NO: 87049 - DNA, 22 bp, synthetic construct
  misc_feature 1..22: note = chemically synthesized
  source 1..22: mol_type = other DNA
aatgaattttgggtaaataatg

SEQ ID NO: 87050 - DNA, 22 bp, synthetic construct
  misc_feature 1..22: note = chemically synthesized
  source 1..22: mol_type = other DNA
tgggtaaataatgaaaactaag

SEQ ID NO: 87051 - DNA, 22 bp, synthetic construct
  misc_feature 1..22: note = chemically synthesized
  source 1..22: mol_type = other DNA
gggtaaataatgaaaactaagg

SEQ ID NO: 87052 - DNA, 22 bp, synthetic construct
  misc_feature 1..22: note = chemically synthesized
  source 1..22: mol_type = other DNA
ggtaaataatgaaaactaaggc

SEQ ID NO: 87053 - DNA, 22 bp, synthetic construct
  misc_feature 1..22: note = chemically synthesized
  source 1..22: mol_type = other DNA
aggcaaaaataaaatagttctt

SEQ ID NO: 87054 - DNA, 22 bp, synthetic construct
  misc_feature 1..22: note = chemically synthesized
  source 1..22: mol_type = other DNA
tttgaaactaatgagaacaaag

SEQ ID NO: 87055 - DNA, 22 bp, synthetic construct
  misc_feature 1..22: note = chemically synthesized
  source 1..22: mol_type = other DNA
tgaaactaatgagaacaaagat

SEQ ID NO: 87056 - DNA, 22 bp, synthetic construct
  misc_feature 1..22: note = chemically synthesized
  source 1..22: mol_type = other DNA
gaaactaatgagaacaaagata

SEQ ID NO: 87057 - DNA, 22 bp, synthetic construct
  misc_feature 1..22: note = chemically synthesized
  source 1..22: mol_type = other DNA
aaactaatgagaacaaagatac

SEQ ID NO: 87058 - DNA, 22 bp, synthetic construct
  misc_feature 1..22: note = chemically synthesized
  source 1..22: mol_type = other DNA
atgagaacaaagatacaatata

SEQ ID NO: 87059 - DNA, 22 bp, synthetic construct
  misc_feature 1..22: note = chemically synthesized
  source 1..22: mol_type = other DNA
tgggacacagcttagacagtgt

SEQ ID NO: 87060 - DNA, 22 bp, synthetic construct
  misc_feature 1..22: note = chemically synthesized
  source 1..22: mol_type = other DNA
ggacacagcttagacagtgtta

SEQ ID NO: 87061 - DNA, 22 bp, synthetic construct
  misc_feature 1..22: note = chemically synthesized
  source 1..22: mol_type = other DNA
agacagtgttaagagagaaatt

SEQ ID NO: 87062 - DNA, 22 bp, synthetic construct
  misc_feature 1..22: note = chemically synthesized
  source 1..22: mol_type = other DNA
gacagtgttaagagagaaattt

SEQ ID NO: 87063 - DNA, 22 bp, synthetic construct
  misc_feature 1..22: note = chemically synthesized
  source 1..22: mol_type = other DNA
agagagaaatttatacactaaa

SEQ ID NO: 87064 - DNA, 22 bp, synthetic construct
  misc_feature 1..22: note = chemically synthesized
  source 1..22: mol_type = other DNA
atacactaaatgcccacatcaa

SEQ ID NO: 87065 - DNA, 22 bp, synthetic construct
  misc_feature 1..22: note = chemically synthesized
  source 1..22: mol_type = other DNA
tacactaaatgcccacatcaaa

SEQ ID NO: 87066 - DNA, 22 bp, synthetic construct
  misc_feature 1..22: note = chemically synthesized
  source 1..22: mol_type = other DNA
aatgcccacatcaaaaagtctt

SEQ ID NO: 87067 - DNA, 22 bp, synthetic construct
  misc_feature 1..22: note = chemically synthesized
  source 1..22: mol_type = other DNA
aaagccctcaaattaacaacct

SEQ ID NO: 87068 - DNA, 22 bp, synthetic construct
  misc_feature 1..22: note = chemically synthesized
  source 1..22: mol_type = other DNA
aagccctcaaattaacaaccta

SEQ ID NO: 87069 - DNA, 22 bp, synthetic construct
  misc_feature 1..22: note = chemically synthesized
  source 1..22: mol_type = other DNA
aaattaacaacctaatgtcaca

SEQ ID NO: 87070 - DNA, 22 bp, synthetic construct
  misc_feature 1..22: note = chemically synthesized
  source 1..22: mol_type = other DNA
acaacctaatgtcacaactaaa

SEQ ID NO: 87071 - DNA, 22 bp, synthetic construct
  misc_feature 1..22: note = chemically synthesized
  source 1..22: mol_type = other DNA
atgtcacaactaaaagaaccag

SEQ ID NO: 87072 - DNA, 22 bp, synthetic construct
  misc_feature 1..22: note = chemically synthesized
  source 1..22: mol_type = other DNA
aaagaaccagagaaccaagagc

SEQ ID NO: 87073 - DNA, 22 bp, synthetic construct
  misc_feature 1..22: note = chemically synthesized
  source 1..22: mol_type = other DNA
aatctagcagaagacaagaaat

SEQ ID NO: 87074 - DNA, 22 bp, synthetic construct
  misc_feature 1..22: note = chemically synthesized
  source 1..22: mol_type = other DNA
gcagaagacaagaaataaacaa

SEQ ID NO: 87075 - DNA, 22 bp, synthetic construct
  misc_feature 1..22: note = chemically synthesized
  source 1..22: mol_type = other DNA
actgaaggatattaaaacacaa

SEQ ID NO: 87076 - DNA, 22 bp, synthetic construct
  misc_feature 1..22: note = chemically synthesized
  source 1..22: mol_type = other DNA
aaggatattaaaacacaaaata

SEQ ID NO: 87077 - DNA, 22 bp, synthetic construct
  misc_feature 1..22: note = chemically synthesized
  source 1..22: mol_type = other DNA
aaacacaaaataccattcaaaa

SEQ ID NO: 87078 - DNA, 22 bp, synthetic construct
  misc_feature 1..22: note = chemically synthesized
  source 1..22: mol_type = other DNA
aaaagattaatgagtccaagag

SEQ ID NO: 87079 - DNA, 22 bp, synthetic construct
  misc_feature 1..22: note = chemically synthesized
  source 1..22: mol_type = other DNA
atgagtccaagagctggttttg

SEQ ID NO: 87080 - DNA, 22 bp, synthetic construct
  misc_feature 1..22: note = chemically synthesized
  source 1..22: mol_type = other DNA
gttttgtgaaaaaattaataag

SEQ ID NO: 87081 - DNA, 22 bp, synthetic construct
  misc_feature 1..22: note = chemically synthesized
  source 1..22: mol_type = other DNA
tgtgaaaaaattaataaggtag

SEQ ID NO: 87082 - DNA, 22 bp, synthetic construct
  misc_feature 1..22: note = chemically synthesized
  source 1..22: mol_type = other DNA
gtgaaaaaattaataaggtaga

SEQ ID NO: 87083 - DNA, 22 bp, synthetic construct
  misc_feature 1..22: note = chemically synthesized
  source 1..22: mol_type = other DNA
tgaaaaaattaataaggtagat

SEQ ID NO: 87084 - DNA, 22 bp, synthetic construct
  misc_feature 1..22: note = chemically synthesized
  source 1..22: mol_type = other DNA
ataaggtagatcactagctaga

SEQ ID NO: 87085 - DNA, 22 bp, synthetic construct
  misc_feature 1..22: note = chemically synthesized
  source 1..22: mol_type = other DNA
gctagactaataaagaagacaa

SEQ ID NO: 87086 - DNA, 22 bp, synthetic construct
  misc_feature 1..22: note = chemically synthesized
  source 1..22: mol_type = other DNA
gactaataaagaagacaagaga

SEQ ID NO: 87087 - DNA, 22 bp, synthetic construct
  misc_feature 1..22: note = chemically synthesized
  source 1..22: mol_type = other DNA
ataaagaagacaagagagaaga

SEQ ID NO: 87088 - DNA, 22 bp, synthetic construct
  misc_feature 1..22: note = chemically synthesized
  source 1..22: mol_type = other DNA
gaaatgaaaaagggaatattat

SEQ ID NO: 87089 - DNA, 22 bp, synthetic construct
  misc_feature 1..22: note = chemically synthesized
  source 1..22: mol_type = other DNA
tcactcaccccacagaaataca

SEQ ID NO: 87090 - DNA, 22 bp, synthetic construct
  misc_feature 1..22: note = chemically synthesized
  source 1..22: mol_type = other DNA
accccacagaaatacaaataat

SEQ ID NO: 87091 - DNA, 22 bp, synthetic construct
  misc_feature 1..22: note = chemically synthesized
  source 1..22: mol_type = other DNA
ctatgaacatctctatgtacat

SEQ ID NO: 87092 - DNA, 22 bp, synthetic construct
  misc_feature 1..22: note = chemically synthesized
  source 1..22: mol_type = other DNA
tgaacatctctatgtacataaa

SEQ ID NO: 87093 - DNA, 22 bp, synthetic construct
  misc_feature 1..22: note = chemically synthesized
  source 1..22: mol_type = other DNA
tatgtacataaactagaaaatc

SEQ ID NO: 87094 - DNA, 22 bp, synthetic construct
  misc_feature 1..22: note = chemically synthesized
  source 1..22: mol_type = other DNA
tgtacataaactagaaaatcta

SEQ ID NO: 87095 - DNA, 22 bp, synthetic construct
  misc_feature 1..22: note = chemically synthesized
  source 1..22: mol_type = other DNA
gaaaatctaaaagaaatggata

SEQ ID NO: 87096 - DNA, 22 bp, synthetic construct
  misc_feature 1..22: note = chemically synthesized
  source 1..22: mol_type = other DNA
aaagaaatggataacttcctgg

SEQ ID NO: 87097 - DNA, 22 bp, synthetic construct
  misc_feature 1..22: note = chemically synthesized
  source 1..22: mol_type = other DNA
cctggactgctcattgtcttag

SEQ ID NO: 87098 - DNA, 22 bp, synthetic construct
  misc_feature 1..22: note = chemically synthesized
  source 1..22: mol_type = other DNA
ctggactgctcattgtcttagg

SEQ ID NO: 87099 - DNA, 22 bp, synthetic construct
  misc_feature 1..22: note = chemically synthesized
  source 1..22: mol_type = other DNA
gactgctcattgtcttaggcaa

SEQ ID NO: 87100 - DNA, 22 bp, synthetic construct
  misc_feature 1..22: note = chemically synthesized
  source 1..22: mol_type = other DNA
ctcattgtcttaggcaaagaag

SEQ ID NO: 87101 - DNA, 22 bp, synthetic construct
  misc_feature 1..22: note = chemically synthesized
  source 1..22: mol_type = other DNA
attgtcttaggcaaagaagact

SEQ ID NO: 87102 - DNA, 22 bp, synthetic construct
  misc_feature 1..22: note = chemically synthesized
  source 1..22: mol_type = other DNA
tcttaggcaaagaagactagcc

SEQ ID NO: 87103 - DNA, 22 bp, synthetic construct
  misc_feature 1..22: note = chemically synthesized
  source 1..22: mol_type = other DNA
aggcaaagaagactagccgtac

SEQ ID NO: 87104 - DNA, 22 bp, synthetic construct
  misc_feature 1..22: note = chemically synthesized
  source 1..22: mol_type = other DNA
ggcaaagaagactagccgtact

SEQ ID NO: 87105 - DNA, 22 bp, synthetic construct
  misc_feature 1..22: note = chemically synthesized
  source 1..22: mol_type = other DNA
gccgtactttatttgagggctc

SEQ ID NO: 87106 - DNA, 22 bp, synthetic construct
  misc_feature 1..22: note = chemically synthesized
  source 1..22: mol_type = other DNA
tatttgagggctctttgagtag

SEQ ID NO: 87107 - DNA, 22 bp, synthetic construct
  misc_feature 1..22: note = chemically synthesized
  source 1..22: mol_type = other DNA
atttgagggctctttgagtaga

SEQ ID NO: 87108 - DNA, 22 bp, synthetic construct
  misc_feature 1..22: note = chemically synthesized
  source 1..22: mol_type = other DNA
tttgagggctctttgagtagag

SEQ ID NO: 87109 - DNA, 22 bp, synthetic construct
  misc_feature 1..22: note = chemically synthesized
  source 1..22: mol_type = other DNA
gagggctctttgagtagagtcc

SEQ ID NO: 87110 - DNA, 22 bp, synthetic construct
  misc_feature 1..22: note = chemically synthesized
  source 1..22: mol_type = other DNA
agggctctttgagtagagtcct

SEQ ID NO: 87111 - DNA, 22 bp, synthetic construct
  misc_feature 1..22: note = chemically synthesized
  source 1..22: mol_type = other DNA
tttgagtagagtcctataaatt

SEQ ID NO: 87112 - DNA, 22 bp, synthetic construct
  misc_feature 1..22: note = chemically synthesized
  source 1..22: mol_type = other DNA
tgagtagagtcctataaattcc

SEQ ID NO: 87113 - DNA, 22 bp, synthetic construct
  misc_feature 1..22: note = chemically synthesized
  source 1..22: mol_type = other DNA
gagtagagtcctataaattcct

SEQ ID NO: 87114 - DNA, 22 bp, synthetic construct
  misc_feature 1..22: note = chemically synthesized
  source 1..22: mol_type = other DNA
agtagagtcctataaattcctg

SEQ ID NO: 87115 - DNA, 22 bp, synthetic construct
  misc_feature 1..22: note = chemically synthesized
  source 1..22: mol_type = other DNA
taaattcctgtatttctctcaa

SEQ ID NO: 87116 - DNA, 22 bp, synthetic construct
  misc_feature 1..22: note = chemically synthesized
  source 1..22: mol_type = other DNA
ctgtatttctctcaactctatg

SEQ ID NO: 87117 - DNA, 22 bp, synthetic construct
  misc_feature 1..22: note = chemically synthesized
  source 1..22: mol_type = other DNA
tatttctctcaactctatgtcc

SEQ ID NO: 87118 - DNA, 22 bp, synthetic construct
  misc_feature 1..22: note = chemically synthesized
  source 1..22: mol_type = other DNA
ctctcaactctatgtccccctc

SEQ ID NO: 87119 - DNA, 22 bp, synthetic construct
  misc_feature 1..22: note = chemically synthesized
  source 1..22: mol_type = other DNA
tctcaactctatgtccccctcc

SEQ ID NO: 87120 - DNA, 22 bp, synthetic construct
  misc_feature 1..22: note = chemically synthesized
  source 1..22: mol_type = other DNA
tcaactctatgtccccctcccc

SEQ ID NO: 87121 - DNA, 22 bp, synthetic construct
  misc_feature 1..22: note = chemically synthesized
  source 1..22: mol_type = other DNA
aactctatgtccccctccccag

SEQ ID NO: 87122 - DNA, 22 bp, synthetic construct
  misc_feature 1..22: note = chemically synthesized
  source 1..22: mol_type = other DNA
tatgtccccctccccagaatac

SEQ ID NO: 87123 - DNA, 22 bp, synthetic construct
  misc_feature 1..22: note = chemically synthesized
  source 1..22: mol_type = other DNA
tgtccccctccccagaatacaa

SEQ ID NO: 87124 - DNA, 22 bp, synthetic construct
  misc_feature 1..22: note = chemically synthesized
  source 1..22: mol_type = other DNA
cccagaatacaaagccccttct

SEQ ID NO: 87125 - DNA, 22 bp, synthetic construct
  misc_feature 1..22: note = chemically synthesized
  source 1..22: mol_type = other DNA
ctgtgatgcctcctttgcttct

SEQ ID NO: 87126 - DNA, 22 bp, synthetic construct
  misc_feature 1..22: note = chemically synthesized
  source 1..22: mol_type = other DNA
tgtgatgcctcctttgcttctt

SEQ ID NO: 87127 - DNA, 22 bp, synthetic construct
  misc_feature 1..22: note = chemically synthesized
  source 1..22: mol_type = other DNA
tgatgcctcctttgcttctttt

SEQ ID NO: 87128 - DNA, 22 bp, synthetic construct
  misc_feature 1..22: note = chemically synthesized
  source 1..22: mol_type = other DNA
ctttgcttcttttggttatatc

SEQ ID NO: 87129 - DNA, 22 bp, synthetic construct
  misc_feature 1..22: note = chemically synthesized
  source 1..22: mol_type = other DNA
tgcttcttttggttatatctgt

SEQ ID NO: 87130 - DNA, 22 bp, synthetic construct
  misc_feature 1..22: note = chemically synthesized
  source 1..22: mol_type = other DNA
gcttcttttggttatatctgtg

SEQ ID NO: 87131 - DNA, 22 bp, synthetic construct
  misc_feature 1..22: note = chemically synthesized
  source 1..22: mol_type = other DNA
cttcttttggttatatctgtgt

SEQ ID NO: 87132 - DNA, 22 bp, synthetic construct
  misc_feature 1..22: note = chemically synthesized
  source 1..22: mol_type = other DNA
cttttggttatatctgtgttat

SEQ ID NO: 87133 - DNA, 22 bp, synthetic construct
  misc_feature 1..22: note = chemically synthesized
  source 1..22: mol_type = other DNA
ttttggttatatctgtgttata

SEQ ID NO: 87134 - DNA, 22 bp, synthetic construct
  misc_feature 1..22: note = chemically synthesized
  source 1..22: mol_type = other DNA
ttggttatatctgtgttatatc

SEQ ID NO: 87135 - DNA, 22 bp, synthetic construct
  misc_feature 1..22: note = chemically synthesized
  source 1..22: mol_type = other DNA
tggttatatctgtgttatatct

SEQ ID NO: 87136 - DNA, 22 bp, synthetic construct
  misc_feature 1..22: note = chemically synthesized
  source 1..22: mol_type = other DNA
ggttatatctgtgttatatctg

SEQ ID NO: 87137 - DNA, 22 bp, synthetic construct
  misc_feature 1..22: note = chemically synthesized
  source 1..22: mol_type = other DNA
gttatatctgtgttatatctga

SEQ ID NO: 87138 - DNA, 22 bp, synthetic construct
  misc_feature 1..22: note = chemically synthesized
  source 1..22: mol_type = other DNA
tatctgtgttatatctgaatat

SEQ ID NO: 87139 - DNA, 22 bp, synthetic construct
  misc_feature 1..22: note = chemically synthesized
  source 1..22: mol_type = other DNA
tgttatatctgaatatatggct

SEQ ID NO: 87140 - DNA, 22 bp, synthetic construct
  misc_feature 1..22: note = chemically synthesized
  source 1..22: mol_type = other DNA
tatctgaatatatggctctaga

SEQ ID NO: 87141 - DNA, 22 bp, synthetic construct
  misc_feature 1..22: note = chemically synthesized
  source 1..22: mol_type = other DNA
aatatatggctctagagaatcc

SEQ ID NO: 87142 - DNA, 22 bp, synthetic construct
  misc_feature 1..22: note = chemically synthesized
  source 1..22: mol_type = other DNA
tagagaatcccaagaaatagaa

SEQ ID NO: 87143 - DNA, 22 bp, synthetic construct
  misc_feature 1..22: note = chemically synthesized
  source 1..22: mol_type = other DNA
gagaatcccaagaaatagaaaa

SEQ ID NO: 87144 - DNA, 22 bp, synthetic construct
  misc_feature 1..22: note = chemically synthesized
  source 1..22: mol_type = other DNA
gtccaaaatccaagctctgaat

SEQ ID NO: 87145 - DNA, 22 bp, synthetic construct
  misc_feature 1..22: note = chemically synthesized
  source 1..22: mol_type = other DNA
tgaataagacaggtgagacctt

SEQ ID NO: 87146 - DNA, 22 bp, synthetic construct
  misc_feature 1..22: note = chemically synthesized
  source 1..22: mol_type = other DNA
aataagacaggtgagacctttg

SEQ ID NO: 87147 - DNA, 22 bp, synthetic construct
  misc_feature 1..22: note = chemically synthesized
  source 1..22: mol_type = other DNA
tggatgaatatcttttcacaaa

SEQ ID NO: 87148 - DNA, 22 bp, synthetic construct
  misc_feature 1..22: note = chemically synthesized
  source 1..22: mol_type = other DNA
ggatgaatatcttttcacaaag

SEQ ID NO: 87149 - DNA, 22 bp, synthetic construct
  misc_feature 1..22: note = chemically synthesized
  source 1..22: mol_type = other DNA
gatgaatatcttttcacaaagt

SEQ ID NO: 87150 - DNA, 22 bp, synthetic construct
  misc_feature 1..22: note = chemically synthesized
  source 1..22: mol_type = other DNA
ttcacaaagttgagaagatgtg

SEQ ID NO: 87151 - DNA, 22 bp, synthetic construct
  misc_feature 1..22: note = chemically synthesized
  source 1..22: mol_type = other DNA
tcacaaagttgagaagatgtga

SEQ ID NO: 87152 - DNA, 22 bp, synthetic construct
  misc_feature 1..22: note = chemically synthesized
  source 1..22: mol_type = other DNA
cacaaagttgagaagatgtgaa

SEQ ID NO: 87153 - DNA, 22 bp, synthetic construct
  misc_feature 1..22: note = chemically synthesized
  source 1..22: mol_type = other DNA
acaaagttgagaagatgtgaag

SEQ ID NO: 87154 - DNA, 22 bp, synthetic construct
  misc_feature 1..22: note = chemically synthesized
  source 1..22: mol_type = other DNA
agaagatgtgaagaacccaaga

SEQ ID NO: 87155 - DNA, 22 bp, synthetic construct
  misc_feature 1..22: note = chemically synthesized
  source 1..22: mol_type = other DNA
gagaaacagccccgaggcactg

SEQ ID NO: 87156 - DNA, 22 bp, synthetic construct
  misc_feature 1..22: note = chemically synthesized
  source 1..22: mol_type = other DNA
caaggggttcagacctgtgttg

SEQ ID NO: 87157 - DNA, 22 bp, synthetic construct
  misc_feature 1..22: note = chemically synthesized
  source 1..22: mol_type = other DNA
agacctgtgttggagaatatca

SEQ ID NO: 87158 - DNA, 22 bp, synthetic construct
  misc_feature 1..22: note = chemically synthesized
  source 1..22: mol_type = other DNA
tgttggagaatatcatcaccgt

SEQ ID NO: 87159 - DNA, 22 bp, synthetic construct
  misc_feature 1..22: note = chemically synthesized
  source 1..22: mol_type = other DNA
gagaatatcatcaccgtaacaa

SEQ ID NO: 87160 - DNA, 22 bp, synthetic construct
  misc_feature 1..22: note = chemically synthesized
  source 1..22: mol_type = other DNA
ctatgttcttaatatctgtgtg

SEQ ID NO: 87161 - DNA, 22 bp, synthetic construct
  misc_feature 1..22: note = chemically synthesized
  source 1..22: mol_type = other DNA
tatgttcttaatatctgtgtgt

SEQ ID NO: 87162 - DNA, 22 bp, synthetic construct
  misc_feature 1..22: note = chemically synthesized
  source 1..22: mol_type = other DNA
tgttcttaatatctgtgtgttt

SEQ ID NO: 87163 - DNA, 22 bp, synthetic construct
  misc_feature 1..22: note = chemically synthesized
  source 1..22: mol_type = other DNA
ttaatatctgtgtgtttgtttg

SEQ ID NO: 87164 - DNA, 22 bp, synthetic construct
  misc_feature 1..22: note = chemically synthesized
  source 1..22: mol_type = other DNA
aatatctgtgtgtttgtttgtt

SEQ ID NO: 87165 - DNA, 22 bp, synthetic construct
  misc_feature 1..22: note = chemically synthesized
  source 1..22: mol_type = other DNA
atatctgtgtgtttgtttgttt

SEQ ID NO: 87166 - DNA, 22 bp, synthetic construct
  misc_feature 1..22: note = chemically synthesized
  source 1..22: mol_type = other DNA
tgtgtttgtttgtttgtttttt

SEQ ID NO: 87167 - DNA, 22 bp, synthetic construct
  misc_feature 1..22: note = chemically synthesized
  source 1..22: mol_type = other DNA
gtttgtttgttttttgcttgtt

SEQ ID NO: 87168 - DNA, 22 bp, synthetic construct
  misc_feature 1..22: note = chemically synthesized
  source 1..22: mol_type = other DNA
tttgtttgttttttgcttgttt

SEQ ID NO: 87169 - DNA, 22 bp, synthetic construct
  misc_feature 1..22: note = chemically synthesized
  source 1..22: mol_type = other DNA
gtttgttttttgcttgtttgtt

SEQ ID NO: 87170 - DNA, 22 bp, synthetic construct
  misc_feature 1..22: note = chemically synthesized
  source 1..22: mol_type = other DNA
tttgttttttgcttgtttgttt

SEQ ID NO: 87171 - DNA, 22 bp, synthetic construct
  misc_feature 1..22: note = chemically synthesized
  source 1..22: mol_type = other DNA
gttttttgcttgtttgtttgtt

SEQ ID NO: 87172 - DNA, 22 bp, synthetic construct
  misc_feature 1..22: note = chemically synthesized
  source 1..22: mol_type = other DNA
ttttttgcttgtttgtttgttt

SEQ ID NO: 87173 - DNA, 22 bp, synthetic construct
  misc_feature 1..22: note = chemically synthesized
  source 1..22: mol_type = other DNA
tttgcttgtttgtttgtttttc

SEQ ID NO: 87174 - DNA, 22 bp, synthetic construct
  misc_feature 1..22: note = chemically synthesized
  source 1..22: mol_type = other DNA
ttgcttgtttgtttgtttttcc

SEQ ID NO: 87175 - DNA, 22 bp, synthetic construct
  misc_feature 1..22: note = chemically synthesized
  source 1..22: mol_type = other DNA
tgcttgtttgtttgtttttcct

SEQ ID NO: 87176 - DNA, 22 bp, synthetic construct
  misc_feature 1..22: note = chemically synthesized
  source 1..22: mol_type = other DNA
gcttgtttgtttgtttttcctc

SEQ ID NO: 87177 - DNA, 22 bp, synthetic construct
  misc_feature 1..22: note = chemically synthesized
  source 1..22: mol_type = other DNA
cttgtttgtttgtttttcctca

SEQ ID NO: 87178 - DNA, 22 bp, synthetic construct
  misc_feature 1..22: note = chemically synthesized
  source 1..22: mol_type = other DNA
gtttgtttgtttttcctcagag

SEQ ID NO: 87179 - DNA, 22 bp, synthetic construct
  misc_feature 1..22: note = chemically synthesized
  source 1..22: mol_type = other DNA
tttgtttgtttttcctcagaga

SEQ ID NO: 87180 - DNA, 22 bp, synthetic construct
  misc_feature 1..22: note = chemically synthesized
  source 1..22: mol_type = other DNA
gtttgtttttcctcagagacag

SEQ ID NO: 87181 - DNA, 22 bp, synthetic construct
  misc_feature 1..22: note = chemically synthesized
  source 1..22: mol_type = other DNA
tttgtttttcctcagagacagg

SEQ ID NO: 87182 - DNA, 22 bp, synthetic construct
  misc_feature 1..22: note = chemically synthesized
  source 1..22: mol_type = other DNA
gtttttcctcagagacaggatc

SEQ ID NO: 87183 - DNA, 22 bp, synthetic construct
  misc_feature 1..22: note = chemically synthesized
  source 1..22: mol_type = other DNA
tttttcctcagagacaggatct

SEQ ID NO: 87184 - DNA, 22 bp, synthetic construct
  misc_feature 1..22: note = chemically synthesized
  source 1..22: mol_type = other DNA
ttcctcagagacaggatctcag

SEQ ID NO: 87185 - DNA, 22 bp, synthetic construct
  misc_feature 1..22: note = chemically synthesized
  source 1..22: mol_type = other DNA
tcctcagagacaggatctcagt

SEQ ID NO: 87186 - DNA, 22 bp, synthetic construct
  misc_feature 1..22: note = chemically synthesized
  source 1..22: mol_type = other DNA
cctcagagacaggatctcagtc

SEQ ID NO: 87187 - DNA, 22 bp, synthetic construct
  misc_feature 1..22: note = chemically synthesized
  source 1..22: mol_type = other DNA
ctcagagacaggatctcagtca

SEQ ID NO: 87188 - DNA, 22 bp, synthetic construct
  misc_feature 1..22: note = chemically synthesized
  source 1..22: mol_type = other DNA
agagacaggatctcagtcacca

SEQ ID NO: 87189 - DNA, 22 bp, synthetic construct
  misc_feature 1..22: note = chemically synthesized
  source 1..22: mol_type = other DNA
agtcaccaaggctagagagcag

SEQ ID NO: 87190 - DNA, 22 bp, synthetic construct
  misc_feature 1..22: note = chemically synthesized
  source 1..22: mol_type = other DNA
gagagcagtggtgtcattattg

SEQ ID NO: 87191 - DNA, 22 bp, synthetic construct
  misc_feature 1..22: note = chemically synthesized
  source 1..22: mol_type = other DNA
ttgctcactgcaaccctgaaat

SEQ ID NO: 87192 - DNA, 22 bp, synthetic construct
  misc_feature 1..22: note = chemically synthesized
  source 1..22: mol_type = other DNA
ctcactgcaaccctgaaatcct

SEQ ID NO: 87193 - DNA, 22 bp, synthetic construct
  misc_feature 1..22: note = chemically synthesized
  source 1..22: mol_type = other DNA
actgcaaccctgaaatcctggg

SEQ ID NO: 87194 - DNA, 22 bp, synthetic construct
  misc_feature 1..22: note = chemically synthesized
  source 1..22: mol_type = other DNA
caaccctgaaatcctgggctca

SEQ ID NO: 87195 - DNA, 22 bp, synthetic construct
  misc_feature 1..22: note = chemically synthesized
  source 1..22: mol_type = other DNA
aaatcctgggctcaagtgatcc

SEQ ID NO: 87196 - DNA, 22 bp, synthetic construct
  misc_feature 1..22: note = chemically synthesized
  source 1..22: mol_type = other DNA
ggctcaagtgatcctatcactt

SEQ ID NO: 87197 - DNA, 22 bp, synthetic construct
  misc_feature 1..22: note = chemically synthesized
  source 1..22: mol_type = other DNA
aagtgatcctatcacttcagcc

SEQ ID NO: 87198 - DNA, 22 bp, synthetic construct
  misc_feature 1..22: note = chemically synthesized
  source 1..22: mol_type = other DNA
tcacttcagcctcctgggttac

SEQ ID NO: 87199 - DNA, 22 bp, synthetic construct
  misc_feature 1..22: note = chemically synthesized
  source 1..22: mol_type = other DNA
cagcctcctgggttactgggac

SEQ ID NO: 87200 - DNA, 22 bp, synthetic construct
  misc_feature 1..22: note = chemically synthesized
  source 1..22: mol_type = other DNA
agcctcctgggttactgggact

SEQ ID NO: 87201 - DNA, 22 bp, synthetic construct
  misc_feature 1..22: note = chemically synthesized
  source 1..22: mol_type = other DNA
ctgggttactgggactacagat

SEQ ID NO: 87202 - DNA, 22 bp, synthetic construct
  misc_feature 1..22: note = chemically synthesized
  source 1..22: mol_type = other DNA
ggttactgggactacagatgca

SEQ ID NO: 87203 - DNA, 22 bp, synthetic construct
  misc_feature 1..22: note = chemically synthesized
  source 1..22: mol_type = other DNA
ctgggactacagatgcaagcca

SEQ ID NO: 87204 - DNA, 22 bp, synthetic construct
  misc_feature 1..22: note = chemically synthesized
  source 1..22: mol_type = other DNA
ggactacagatgcaagccactg

SEQ ID NO: 87205 - DNA, 22 bp, synthetic construct
  misc_feature 1..22: note = chemically synthesized
  source 1..22: mol_type = other DNA
cagatgcaagccactgtgccca

SEQ ID NO: 87206 - DNA, 22 bp, synthetic construct
  misc_feature 1..22: note = chemically synthesized
  source 1..22: mol_type = other DNA
tgcccagcttggctctttcttt

SEQ ID NO: 87207 - DNA, 22 bp, synthetic construct
  misc_feature 1..22: note = chemically synthesized
  source 1..22: mol_type = other DNA
ggctctttctttttattttaat

SEQ ID NO: 87208 - DNA, 22 bp, synthetic construct
  misc_feature 1..22: note = chemically synthesized
  source 1..22: mol_type = other DNA
gctctttctttttattttaatt

SEQ ID NO: 87209 - DNA, 22 bp, synthetic construct
  misc_feature 1..22: note = chemically synthesized
  source 1..22: mol_type = other DNA
tttctttttattttaattggtc

SEQ ID NO: 87210 - DNA, 22 bp, synthetic construct
  misc_feature 1..22: note = chemically synthesized
  source 1..22: mol_type = other DNA
tctttttattttaattggtcac

SEQ ID NO: 87211 - DNA, 22 bp, synthetic construct
  misc_feature 1..22: note = chemically synthesized
  source 1..22: mol_type = other DNA
ctttttattttaattggtcact

SEQ ID NO: 87212 - DNA, 22 bp, synthetic construct
  misc_feature 1..22: note = chemically synthesized
  source 1..22: mol_type = other DNA
tttttattttaattggtcactt

SEQ ID NO: 87213 - DNA, 22 bp, synthetic construct
  misc_feature 1..22: note = chemically synthesized
  source 1..22: mol_type = other DNA
tttattttaattggtcactttg

SEQ ID NO: 87214 - DNA, 22 bp, synthetic construct
  misc_feature 1..22: note = chemically synthesized
  source 1..22: mol_type = other DNA
ttattttaattggtcactttgt

SEQ ID NO: 87215 - DNA, 22 bp, synthetic construct
  misc_feature 1..22: note = chemically synthesized
  source 1..22: mol_type = other DNA
tattttaattggtcactttgtt

SEQ ID NO: 87216 - DNA, 22 bp, synthetic construct
  misc_feature 1..22: note = chemically synthesized
  source 1..22: mol_type = other DNA
attttaattggtcactttgttt

SEQ ID NO: 87217 - DNA, 22 bp, synthetic construct
  misc_feature 1..22: note = chemically synthesized
  source 1..22: mol_type = other DNA
ttttaattggtcactttgtttt

SEQ ID NO: 87218 - DNA, 22 bp, synthetic construct
  misc_feature 1..22: note = chemically synthesized
  source 1..22: mol_type = other DNA
taattggtcactttgttttcag

SEQ ID NO: 87219 - DNA, 22 bp, synthetic construct
  misc_feature 1..22: note = chemically synthesized
  source 1..22: mol_type = other DNA
aattggtcactttgttttcaga

SEQ ID NO: 87220 - DNA, 22 bp, synthetic construct
  misc_feature 1..22: note = chemically synthesized
  source 1..22: mol_type = other DNA
attggtcactttgttttcagac

SEQ ID NO: 87221 - DNA, 22 bp, synthetic construct
  misc_feature 1..22: note = chemically synthesized
  source 1..22: mol_type = other DNA
gtcactttgttttcagacctct

SEQ ID NO: 87222 - DNA, 22 bp, synthetic construct
  misc_feature 1..22: note = chemically synthesized
  source 1..22: mol_type = other DNA
tgttttcagacctcttgttatc

SEQ ID NO: 87223 - DNA, 22 bp, synthetic construct
  misc_feature 1..22: note = chemically synthesized
  source 1..22: mol_type = other DNA
gttttcagacctcttgttatct

SEQ ID NO: 87224 - DNA, 22 bp, synthetic construct
  misc_feature 1..22: note = chemically synthesized
  source 1..22: mol_type = other DNA
ttttcagacctcttgttatctt

SEQ ID NO: 87225 - DNA, 22 bp, synthetic construct
  misc_feature 1..22: note = chemically synthesized
  source 1..22: mol_type = other DNA
tcagacctcttgttatctttaa

SEQ ID NO: 87226 - DNA, 22 bp, synthetic construct
  misc_feature 1..22: note = chemically synthesized
  source 1..22: mol_type = other DNA
cagacctcttgttatctttaat

SEQ ID NO: 87227 - DNA, 22 bp, synthetic construct
  misc_feature 1..22: note = chemically synthesized
  source 1..22: mol_type = other DNA
agacctcttgttatctttaatc

SEQ ID NO: 87228 - DNA, 22 bp, synthetic construct
  misc_feature 1..22: note = chemically synthesized
  source 1..22: mol_type = other DNA
ttgttatctttaatcatttttc

SEQ ID NO: 87229 - DNA, 22 bp, synthetic construct
  misc_feature 1..22: note = chemically synthesized
  source 1..22: mol_type = other DNA
gttatctttaatcatttttcac

SEQ ID NO: 87230 - DNA, 22 bp, synthetic construct
  misc_feature 1..22: note = chemically synthesized
  source 1..22: mol_type = other DNA
ttatctttaatcatttttcacc

SEQ ID NO: 87231 - DNA, 22 bp, synthetic construct
  misc_feature 1..22: note = chemically synthesized
  source 1..22: mol_type = other DNA
tctttaatcatttttcacctct

SEQ ID NO: 87232 - DNA, 22 bp, synthetic construct
  misc_feature 1..22: note = chemically synthesized
  source 1..22: mol_type = other DNA
taatcatttttcacctctgact

SEQ ID NO: 87233 - DNA, 22 bp, synthetic construct
  misc_feature 1..22: note = chemically synthesized
  source 1..22: mol_type = other DNA
aatcatttttcacctctgactt

SEQ ID NO: 87234 - DNA, 22 bp, synthetic construct
  misc_feature 1..22: note = chemically synthesized
  source 1..22: mol_type = other DNA
atcatttttcacctctgacttg

SEQ ID NO: 87235 - DNA, 22 bp, synthetic construct
  misc_feature 1..22: note = chemically synthesized
  source 1..22: mol_type = other DNA
ttcacctctgacttgacctccc

SEQ ID NO: 87236 - DNA, 22 bp, synthetic construct
  misc_feature 1..22: note = chemically synthesized
  source 1..22: mol_type = other DNA
tcacctctgacttgacctccca

SEQ ID NO: 87237 - DNA, 22 bp, synthetic construct
  misc_feature 1..22: note = chemically synthesized
  source 1..22: mol_type = other DNA
cacctctgacttgacctcccag

SEQ ID NO: 87238 - DNA, 22 bp, synthetic construct
  misc_feature 1..22: note = chemically synthesized
  source 1..22: mol_type = other DNA
acctctgacttgacctcccagt

SEQ ID NO: 87239 - DNA, 22 bp, synthetic construct
  misc_feature 1..22: note = chemically synthesized
  source 1..22: mol_type = other DNA
tgacttgacctcccagttgtca

SEQ ID NO: 87240 - DNA, 22 bp, synthetic construct
  misc_feature 1..22: note = chemically synthesized
  source 1..22: mol_type = other DNA
acttgacctcccagttgtcaaa

SEQ ID NO: 87241 - DNA, 22 bp, synthetic construct
  misc_feature 1..22: note = chemically synthesized
  source 1..22: mol_type = other DNA
gacctcccagttgtcaaatatt

SEQ ID NO: 87242 - DNA, 22 bp, synthetic construct
  misc_feature 1..22: note = chemically synthesized
  source 1..22: mol_type = other DNA
acctcccagttgtcaaatattt

SEQ ID NO: 87243 - DNA, 22 bp, synthetic construct
  misc_feature 1..22: note = chemically synthesized
  source 1..22: mol_type = other DNA
ccagttgtcaaatatttgactt

SEQ ID NO: 87244 - DNA, 22 bp, synthetic construct
  misc_feature 1..22: note = chemically synthesized
  source 1..22: mol_type = other DNA
tcaaatatttgacttaatggga

SEQ ID NO: 87245 - DNA, 22 bp, synthetic construct
  misc_feature 1..22: note = chemically synthesized
  source 1..22: mol_type = other DNA
gacttaatgggagactttcccc

SEQ ID NO: 87246 - DNA, 22 bp, synthetic construct
  misc_feature 1..22: note = chemically synthesized
  source 1..22: mol_type = other DNA
acttaatgggagactttcccct

SEQ ID NO: 87247 - DNA, 22 bp, synthetic construct
  misc_feature 1..22: note = chemically synthesized
  source 1..22: mol_type = other DNA
aatgggagactttcccctagct

SEQ ID NO: 87248 - DNA, 22 bp, synthetic construct
  misc_feature 1..22: note = chemically synthesized
  source 1..22: mol_type = other DNA
atgggagactttcccctagctt

SEQ ID NO: 87249 - DNA, 22 bp, synthetic construct
  misc_feature 1..22: note = chemically synthesized
  source 1..22: mol_type = other DNA
tcccctagcttgttgattccag

SEQ ID NO: 87250 - DNA, 22 bp, synthetic construct
  misc_feature 1..22: note = chemically synthesized
  source 1..22: mol_type = other DNA
cccctagcttgttgattccaga

SEQ ID NO: 87251 - DNA, 22 bp, synthetic construct
  misc_feature 1..22: note = chemically synthesized
  source 1..22: mol_type = other DNA
ccctagcttgttgattccagaa

SEQ ID NO: 87252 - DNA, 22 bp, synthetic construct
  misc_feature 1..22: note = chemically synthesized
  source 1..22: mol_type = other DNA
gcttgttgattccagaaattca

SEQ ID NO: 87253 - DNA, 22 bp, synthetic construct
  misc_feature 1..22: note = chemically synthesized
  source 1..22: mol_type = other DNA
gttgattccagaaattcaactt

SEQ ID NO: 87254 - DNA, 22 bp, synthetic construct
  misc_feature 1..22: note = chemically synthesized
  source 1..22: mol_type = other DNA
ttgattccagaaattcaacttt

SEQ ID NO: 87255 - DNA, 22 bp, synthetic construct
  misc_feature 1..22: note = chemically synthesized
  source 1..22: mol_type = other DNA
attccagaaattcaactttatt

SEQ ID NO: 87256 - DNA, 22 bp, synthetic construct
  misc_feature 1..22: note = chemically synthesized
  source 1..22: mol_type = other DNA
cagaaattcaactttattctag

SEQ ID NO: 87257 - DNA, 22 bp, synthetic construct
  misc_feature 1..22: note = chemically synthesized
  source 1..22: mol_type = other DNA
aactttattctaggcttggctc

SEQ ID NO: 87258 - DNA, 22 bp, synthetic construct
  misc_feature 1..22: note = chemically synthesized
  source 1..22: mol_type = other DNA
tattctaggcttggctcctgtt

SEQ ID NO: 87259 - DNA, 22 bp, synthetic construct
  misc_feature 1..22: note = chemically synthesized
  source 1..22: mol_type = other DNA
attctaggcttggctcctgttt

SEQ ID NO: 87260 - DNA, 22 bp, synthetic construct
  misc_feature 1..22: note = chemically synthesized
  source 1..22: mol_type = other DNA
ttctaggcttggctcctgttta

SEQ ID NO: 87261 - DNA, 22 bp, synthetic construct
  misc_feature 1..22: note = chemically synthesized
  source 1..22: mol_type = other DNA
taggcttggctcctgtttagta

SEQ ID NO: 87262 - DNA, 22 bp, synthetic construct
  misc_feature 1..22: note = chemically synthesized
  source 1..22: mol_type = other DNA
ggcttggctcctgtttagtatt

SEQ ID NO: 87263 - DNA, 22 bp, synthetic construct
  misc_feature 1..22: note = chemically synthesized
  source 1..22: mol_type = other DNA
ggctcctgtttagtattgctgc

SEQ ID NO: 87264 - DNA, 22 bp, synthetic construct
  misc_feature 1..22: note = chemically synthesized
  source 1..22: mol_type = other DNA
gctcctgtttagtattgctgct

SEQ ID NO: 87265 - DNA, 22 bp, synthetic construct
  misc_feature 1..22: note = chemically synthesized
  source 1..22: mol_type = other DNA
ctgtttagtattgctgctttga

SEQ ID NO: 87266 - DNA, 22 bp, synthetic construct
  misc_feature 1..22: note = chemically synthesized
  source 1..22: mol_type = other DNA
tttagtattgctgctttgagat

SEQ ID NO: 87267 - DNA, 22 bp, synthetic construct
  misc_feature 1..22: note = chemically synthesized
  source 1..22: mol_type = other DNA
agtattgctgctttgagattgt

SEQ ID NO: 87268 - DNA, 22 bp, synthetic construct
  misc_feature 1..22: note = chemically synthesized
  source 1..22: mol_type = other DNA
gtattgctgctttgagattgtt

SEQ ID NO: 87269 - DNA, 22 bp, synthetic construct
  misc_feature 1..22: note = chemically synthesized
  source 1..22: mol_type = other DNA
ctgctttgagattgttctggtt

SEQ ID NO: 87270 - DNA, 22 bp, synthetic construct
  misc_feature 1..22: note = chemically synthesized
  source 1..22: mol_type = other DNA
ctttgagattgttctggttcat

SEQ ID NO: 87271 - DNA, 22 bp, synthetic construct
  misc_feature 1..22: note = chemically synthesized
  source 1..22: mol_type = other DNA
tgagattgttctggttcatgaa

SEQ ID NO: 87272 - DNA, 22 bp, synthetic construct
  misc_feature 1..22: note = chemically synthesized
  source 1..22: mol_type = other DNA
gagattgttctggttcatgaaa

SEQ ID NO: 87273 - DNA, 22 bp, synthetic construct
  misc_feature 1..22: note = chemically synthesized
  source 1..22: mol_type = other DNA
agattgttctggttcatgaaaa

SEQ ID NO: 87274 - DNA, 22 bp, synthetic construct
  misc_feature 1..22: note = chemically synthesized
  source 1..22: mol_type = other DNA
ttctggttcatgaaaaacaagt

SEQ ID NO: 87275 - DNA, 22 bp, synthetic construct
  misc_feature 1..22: note = chemically synthesized
  source 1..22: mol_type = other DNA
tggttcatgaaaaacaagtctc

SEQ ID NO: 87276 - DNA, 22 bp, synthetic construct
  misc_feature 1..22: note = chemically synthesized
  source 1..22: mol_type = other DNA
gttcatgaaaaacaagtctcca

SEQ ID NO: 87277 - DNA, 22 bp, synthetic construct
  misc_feature 1..22: note = chemically synthesized
  source 1..22: mol_type = other DNA
atgaaaaacaagtctccaaaat

SEQ ID NO: 87278 - DNA, 22 bp, synthetic construct
  misc_feature 1..22: note = chemically synthesized
  source 1..22: mol_type = other DNA
caaaattttctacttctcaata

SEQ ID NO: 87279 - DNA, 22 bp, synthetic construct
  misc_feature 1..22: note = chemically synthesized
  source 1..22: mol_type = other DNA
tctacttctcaatattgccatt

SEQ ID NO: 87280 - DNA, 22 bp, synthetic construct
  misc_feature 1..22: note = chemically synthesized
  source 1..22: mol_type = other DNA
ctacttctcaatattgccattt

SEQ ID NO: 87281 - DNA, 22 bp, synthetic construct
  misc_feature 1..22: note = chemically synthesized
  source 1..22: mol_type = other DNA
tacttctcaatattgccattta

SEQ ID NO: 87282 - DNA, 22 bp, synthetic construct
  misc_feature 1..22: note = chemically synthesized
  source 1..22: mol_type = other DNA
cttctcaatattgccatttact

SEQ ID NO: 87283 - DNA, 22 bp, synthetic construct
  misc_feature 1..22: note = chemically synthesized
  source 1..22: mol_type = other DNA
ctcaatattgccatttactaaa

SEQ ID NO: 87284 - DNA, 22 bp, synthetic construct
  misc_feature 1..22: note = chemically synthesized
  source 1..22: mol_type = other DNA
tcaatattgccatttactaaat

SEQ ID NO: 87285 - DNA, 22 bp, synthetic construct
  misc_feature 1..22: note = chemically synthesized
  source 1..22: mol_type = other DNA
aatattgccatttactaaattc

SEQ ID NO: 87286 - DNA, 22 bp, synthetic construct
  misc_feature 1..22: note = chemically synthesized
  source 1..22: mol_type = other DNA
ccatttactaaattcttataaa

SEQ ID NO: 87287 - DNA, 22 bp, synthetic construct
  misc_feature 1..22: note = chemically synthesized
  source 1..22: mol_type = other DNA
actaaattcttataaacaaata

SEQ ID NO: 87288 - DNA, 22 bp, synthetic construct
  misc_feature 1..22: note = chemically synthesized
  source 1..22: mol_type = other DNA
ctaaattcttataaacaaataa

SEQ ID NO: 87289 - DNA, 22 bp, synthetic construct
  misc_feature 1..22: note = chemically synthesized
  source 1..22: mol_type = other DNA
aattcttataaacaaataagaa

SEQ ID NO: 87290 - DNA, 22 bp, synthetic construct
  misc_feature 1..22: note = chemically synthesized
  source 1..22: mol_type = other DNA
ttataaacaaataagaaggaag

SEQ ID NO: 87291 - DNA, 22 bp, synthetic construct
  misc_feature 1..22: note = chemically synthesized
  source 1..22: mol_type = other DNA
ataaacaaataagaaggaagac

SEQ ID NO: 87292 - DNA, 22 bp, synthetic construct
  misc_feature 1..22: note = chemically synthesized
  source 1..22: mol_type = other DNA
taaacaaataagaaggaagact

SEQ ID NO: 87293 - DNA, 22 bp, synthetic construct
  misc_feature 1..22: note = chemically synthesized
  source 1..22: mol_type = other DNA
tcagaaatatatggagagactg

SEQ ID NO: 87294 - DNA, 22 bp, synthetic construct
  misc_feature 1..22: note = chemically synthesized
  source 1..22: mol_type = other DNA
agaaatatatggagagactgag

SEQ ID NO: 87295 - DNA, 22 bp, synthetic construct
  misc_feature 1..22: note = chemically synthesized
  source 1..22: mol_type = other DNA
aggttagagttgagcaaggcct

SEQ ID NO: 87296 - DNA, 22 bp, synthetic construct
  misc_feature 1..22: note = chemically synthesized
  source 1..22: mol_type = other DNA
gagttgagcaaggcctgaaatt

SEQ ID NO: 87297 - DNA, 22 bp, synthetic construct
  misc_feature 1..22: note = chemically synthesized
  source 1..22: mol_type = other DNA
agcaaggcctgaaattttgtca

SEQ ID NO: 87298 - DNA, 22 bp, synthetic construct
  misc_feature 1..22: note = chemically synthesized
  source 1..22: mol_type = other DNA
aaattttgtcacaactaatcta

SEQ ID NO: 87299 - DNA, 22 bp, synthetic construct
  misc_feature 1..22: note = chemically synthesized
  source 1..22: mol_type = other DNA
tgtcacaactaatctagttgaa

SEQ ID NO: 87300 - DNA, 22 bp, synthetic construct
  misc_feature 1..22: note = chemically synthesized
  source 1..22: mol_type = other DNA
gtcacaactaatctagttgaag

SEQ ID NO: 87301 - DNA, 22 bp, synthetic construct
  misc_feature 1..22: note = chemically synthesized
  source 1..22: mol_type = other DNA
tcacaactaatctagttgaagg

SEQ ID NO: 87302 - DNA, 22 bp, synthetic construct
  misc_feature 1..22: note = chemically synthesized
  source 1..22: mol_type = other DNA
atctagttgaaggaatgttaac

SEQ ID NO: 87303 - DNA, 22 bp, synthetic construct
  misc_feature 1..22: note = chemically synthesized
  source 1..22: mol_type = other DNA
gttgaaggaatgttaactgact

SEQ ID NO: 87304 - DNA, 22 bp, synthetic construct
  misc_feature 1..22: note = chemically synthesized
  source 1..22: mol_type = other DNA
aaggaatgttaactgactgaga

SEQ ID NO: 87305 - DNA, 22 bp, synthetic construct
  misc_feature 1..22: note = chemically synthesized
  source 1..22: mol_type = other DNA
actgactgagaaaacactaaat

SEQ ID NO: 87306 - DNA, 22 bp, synthetic construct
  misc_feature 1..22: note = chemically synthesized
  source 1..22: mol_type = other DNA
actgagaaaacactaaatttct

SEQ ID NO: 87307 - DNA, 22 bp, synthetic construct
  misc_feature 1..22: note = chemically synthesized
  source 1..22: mol_type = other DNA
agaaaacactaaatttctgtct

SEQ ID NO: 87308 - DNA, 22 bp, synthetic construct
  misc_feature 1..22: note = chemically synthesized
  source 1..22: mol_type = other DNA
aatttctgtctatttcaaagag

SEQ ID NO: 87309 - DNA, 22 bp, synthetic construct
  misc_feature 1..22: note = chemically synthesized
  source 1..22: mol_type = other DNA
ctgtctatttcaaagagaaaga

SEQ ID NO: 87310 - DNA, 22 bp, synthetic construct
  misc_feature 1..22: note = chemically synthesized
  source 1..22: mol_type = other DNA
tgtctatttcaaagagaaagac

SEQ ID NO: 87311 - DNA, 22 bp, synthetic construct
  misc_feature 1..22: note = chemically synthesized
  source 1..22: mol_type = other DNA
tctatttcaaagagaaagactt

SEQ ID NO: 87312 - DNA, 22 bp, synthetic construct
  misc_feature 1..22: note = chemically synthesized
  source 1..22: mol_type = other DNA
tttcaaagagaaagacttgata

SEQ ID NO: 87313 - DNA, 22 bp, synthetic construct
  misc_feature 1..22: note = chemically synthesized
  source 1..22: mol_type = other DNA
caaagagaaagacttgataatg

SEQ ID NO: 87314 - DNA, 22 bp, synthetic construct
  misc_feature 1..22: note = chemically synthesized
  source 1..22: mol_type = other DNA
aaagagaaagacttgataatgg

SEQ ID NO: 87315 - DNA, 22 bp, synthetic construct
  misc_feature 1..22: note = chemically synthesized
  source 1..22: mol_type = other DNA
gataatggctctacggatgtgt

SEQ ID NO: 87316 - DNA, 22 bp, synthetic construct
  misc_feature 1..22: note = chemically synthesized
  source 1..22: mol_type = other DNA
ataatggctctacggatgtgtg

SEQ ID NO: 87317 - DNA, 22 bp, synthetic construct
  misc_feature 1..22: note = chemically synthesized
  source 1..22: mol_type = other DNA
tacggatgtgtgagatcagttt

SEQ ID NO: 87318 - DNA, 22 bp, synthetic construct
  misc_feature 1..22: note = chemically synthesized
  source 1..22: mol_type = other DNA
cggatgtgtgagatcagtttta

SEQ ID NO: 87319 - DNA, 22 bp, synthetic construct
  misc_feature 1..22: note = chemically synthesized
  source 1..22: mol_type = other DNA
taataggataacttttttttat

SEQ ID NO: 87320 - DNA, 22 bp, synthetic construct
  misc_feature 1..22: note = chemically synthesized
  source 1..22: mol_type = other DNA
aataggataacttttttttatt

SEQ ID NO: 87321 - DNA, 22 bp, synthetic construct
  misc_feature 1..22: note = chemically synthesized
  source 1..22: mol_type = other DNA
ataggataacttttttttatta

SEQ ID NO: 87322 - DNA, 22 bp, synthetic construct
  misc_feature 1..22: note = chemically synthesized
  source 1..22: mol_type = other DNA
ttttttattattatacttcaag

SEQ ID NO: 87323 - DNA, 22 bp, synthetic construct
  misc_feature 1..22: note = chemically synthesized
  source 1..22: mol_type = other DNA
tttttattattatacttcaagt

SEQ ID NO: 87324 - DNA, 22 bp, synthetic construct
  misc_feature 1..22: note = chemically synthesized
  source 1..22: mol_type = other DNA
ttttattattatacttcaagtt

SEQ ID NO: 87325 - DNA, 22 bp, synthetic construct
  misc_feature 1..22: note = chemically synthesized
  source 1..22: mol_type = other DNA
tttattattatacttcaagttt

SEQ ID NO: 87326 - DNA, 22 bp, synthetic construct
  misc_feature 1..22: note = chemically synthesized
  source 1..22: mol_type = other DNA
ttattattatacttcaagtttt

SEQ ID NO: 87327 - DNA, 22 bp, synthetic construct
  misc_feature 1..22: note = chemically synthesized
  source 1..22: mol_type = other DNA
tattattatacttcaagtttta

SEQ ID NO: 87328 - DNA, 22 bp, synthetic construct
  misc_feature 1..22: note = chemically synthesized
  source 1..22: mol_type = other DNA
attattatacttcaagttttag

SEQ ID NO: 87329 - DNA, 22 bp, synthetic construct
  misc_feature 1..22: note = chemically synthesized
  source 1..22: mol_type = other DNA
ttattatacttcaagttttagg

SEQ ID NO: 87330 - DNA, 22 bp, synthetic construct
  misc_feature 1..22: note = chemically synthesized
  source 1..22: mol_type = other DNA
ttatacttcaagttttagggta

SEQ ID NO: 87331 - DNA, 22 bp, synthetic construct
  misc_feature 1..22: note = chemically synthesized
  source 1..22: mol_type = other DNA
tacttcaagttttagggtacat

SEQ ID NO: 87332 - DNA, 22 bp, synthetic construct
  misc_feature 1..22: note = chemically synthesized
  source 1..22: mol_type = other DNA
caagttttagggtacatgtgca

SEQ ID NO: 87333 - DNA, 22 bp, synthetic construct
  misc_feature 1..22: note = chemically synthesized
  source 1..22: mol_type = other DNA
aagttttagggtacatgtgcac

SEQ ID NO: 87334 - DNA, 22 bp, synthetic construct
  misc_feature 1..22: note = chemically synthesized
  source 1..22: mol_type = other DNA
tagggtacatgtgcacaacatg

SEQ ID NO: 87335 - DNA, 22 bp, synthetic construct
  misc_feature 1..22: note = chemically synthesized
  source 1..22: mol_type = other DNA
agggtacatgtgcacaacatgc

SEQ ID NO: 87336 - DNA, 22 bp, synthetic construct
  misc_feature 1..22: note = chemically synthesized
  source 1..22: mol_type = other DNA
gggtacatgtgcacaacatgca

SEQ ID NO: 87337 - DNA, 22 bp, synthetic construct
  misc_feature 1..22: note = chemically synthesized
  source 1..22: mol_type = other DNA
gttatatatgtatacatgtgcc

SEQ ID NO: 87338 - DNA, 22 bp, synthetic construct
  misc_feature 1..22: note = chemically synthesized
  source 1..22: mol_type = other DNA
ttatatatgtatacatgtgcca

SEQ ID NO: 87339 - DNA, 22 bp, synthetic construct
  misc_feature 1..22: note = chemically synthesized
  source 1..22: mol_type = other DNA
tatatgtatacatgtgccatgt

SEQ ID NO: 87340 - DNA, 22 bp, synthetic construct
  misc_feature 1..22: note = chemically synthesized
  source 1..22: mol_type = other DNA
gtgtgctgcacccattaactcg

SEQ ID NO: 87341 - DNA, 22 bp, synthetic construct
  misc_feature 1..22: note = chemically synthesized
  source 1..22: mol_type = other DNA
cacccattaactcgtcatttag

SEQ ID NO: 87342 - DNA, 22 bp, synthetic construct
  misc_feature 1..22: note = chemically synthesized
  source 1..22: mol_type = other DNA
actcgtcatttagcattaggta

SEQ ID NO: 87343 - DNA, 22 bp, synthetic construct
  misc_feature 1..22: note = chemically synthesized
  source 1..22: mol_type = other DNA
gtcatttagcattaggtatatc

SEQ ID NO: 87344 - DNA, 22 bp, synthetic construct
  misc_feature 1..22: note = chemically synthesized
  source 1..22: mol_type = other DNA
agcattaggtatatctcctagt

SEQ ID NO: 87345 - DNA, 22 bp, synthetic construct
  misc_feature 1..22: note = chemically synthesized
  source 1..22: mol_type = other DNA
gcattaggtatatctcctagtg

SEQ ID NO: 87346 - DNA, 22 bp, synthetic construct
  misc_feature 1..22: note = chemically synthesized
  source 1..22: mol_type = other DNA
ggtatatctcctagtgctatcc

SEQ ID NO: 87347 - DNA, 22 bp, synthetic construct
  misc_feature 1..22: note = chemically synthesized
  source 1..22: mol_type = other DNA
ctagtgctatccctgcccctgc

SEQ ID NO: 87348 - DNA, 22 bp, synthetic construct
  misc_feature 1..22: note = chemically synthesized
  source 1..22: mol_type = other DNA
gtgctatccctgcccctgcccc

SEQ ID NO: 87349 - DNA, 22 bp, synthetic construct
  misc_feature 1..22: note = chemically synthesized
  source 1..22: mol_type = other DNA
tccctgcccctgccccccaccc

SEQ ID NO: 87350 - DNA, 22 bp, synthetic construct
  misc_feature 1..22: note = chemically synthesized
  source 1..22: mol_type = other DNA
cccctgccccccaccccataac

SEQ ID NO: 87351 - DNA, 22 bp, synthetic construct
  misc_feature 1..22: note = chemically synthesized
  source 1..22: mol_type = other DNA
ccccccaccccataacagtccc

SEQ ID NO: 87352 - DNA, 22 bp, synthetic construct
  misc_feature 1..22: note = chemically synthesized
  source 1..22: mol_type = other DNA
ctcttcatgtgtccatgtgttc

SEQ ID NO: 87353 - DNA, 22 bp, synthetic construct
  misc_feature 1..22: note = chemically synthesized
  source 1..22: mol_type = other DNA
ttcatgtgtccatgtgttctca

SEQ ID NO: 87354 - DNA, 22 bp, synthetic construct
  misc_feature 1..22: note = chemically synthesized
  source 1..22: mol_type = other DNA
catgtgtccatgtgttctcatt

SEQ ID NO: 87355 - DNA, 22 bp, synthetic construct
  misc_feature 1..22: note = chemically synthesized
  source 1..22: mol_type = other DNA
atgtgtccatgtgttctcattg

SEQ ID NO: 87356 - DNA, 22 bp, synthetic construct
  misc_feature 1..22: note = chemically synthesized
  source 1..22: mol_type = other DNA
tcattgttcaattcccacctat

SEQ ID NO: 87357 - DNA, 22 bp, synthetic construct
  misc_feature 1..22: note = chemically synthesized
  source 1..22: mol_type = other DNA
attgttcaattcccacctatga

SEQ ID NO: 87358 - DNA, 22 bp, synthetic construct
  misc_feature 1..22: note = chemically synthesized
  source 1..22: mol_type = other DNA
ttcaattcccacctatgagtga

SEQ ID NO: 87359 - DNA, 22 bp, synthetic construct
  misc_feature 1..22: note = chemically synthesized
  source 1..22: mol_type = other DNA
aattcccacctatgagtgagaa

SEQ ID NO: 87360 - DNA, 22 bp, synthetic construct
  misc_feature 1..22: note = chemically synthesized
  source 1..22: mol_type = other DNA
ccacctatgagtgagaacatgc

SEQ ID NO: 87361 - DNA, 22 bp, synthetic construct
  misc_feature 1..22: note = chemically synthesized
  source 1..22: mol_type = other DNA
tgagtgagaacatgcggtgttt

SEQ ID NO: 87362 - DNA, 22 bp, synthetic construct
  misc_feature 1..22: note = chemically synthesized
  source 1..22: mol_type = other DNA
ggtttattctccttgtgatagt

SEQ ID NO: 87363 - DNA, 22 bp, synthetic construct
  misc_feature 1..22: note = chemically synthesized
  source 1..22: mol_type = other DNA
gtttattctccttgtgatagtt

SEQ ID NO: 87364 - DNA, 22 bp, synthetic construct
  misc_feature 1..22: note = chemically synthesized
  source 1..22: mol_type = other DNA
attctccttgtgatagtttgct

SEQ ID NO: 87365 - DNA, 22 bp, synthetic construct
  misc_feature 1..22: note = chemically synthesized
  source 1..22: mol_type = other DNA
ttctccttgtgatagtttgctg

SEQ ID NO: 87366 - DNA, 22 bp, synthetic construct
  misc_feature 1..22: note = chemically synthesized
  source 1..22: mol_type = other DNA
tccttgtgatagtttgctgaga

SEQ ID NO: 87367 - DNA, 22 bp, synthetic construct
  misc_feature 1..22: note = chemically synthesized
  source 1..22: mol_type = other DNA
cttgtgatagtttgctgagaat

SEQ ID NO: 87368 - DNA, 22 bp, synthetic construct
  misc_feature 1..22: note = chemically synthesized
  source 1..22: mol_type = other DNA
gtgatagtttgctgagaatgat

SEQ ID NO: 87369 - DNA, 22 bp, synthetic construct
  misc_feature 1..22: note = chemically synthesized
  source 1..22: mol_type = other DNA
tgatagtttgctgagaatgata

SEQ ID NO: 87370 - DNA, 22 bp, synthetic construct
  misc_feature 1..22: note = chemically synthesized
  source 1..22: mol_type = other DNA
gctgagaatgatagtttccagc

SEQ ID NO: 87371 - DNA, 22 bp, synthetic construct
  misc_feature 1..22: note = chemically synthesized
  source 1..22: mol_type = other DNA
ctgagaatgatagtttccagct

SEQ ID NO: 87372 - DNA, 22 bp, synthetic construct
  misc_feature 1..22: note = chemically synthesized
  source 1..22: mol_type = other DNA
agaatgatagtttccagcttca

SEQ ID NO: 87373 - DNA, 22 bp, synthetic construct
  misc_feature 1..22: note = chemically synthesized
  source 1..22: mol_type = other DNA
ccagcttcatccatgtccctac

SEQ ID NO: 87374 - DNA, 22 bp, synthetic construct
  misc_feature 1..22: note = chemically synthesized
  source 1..22: mol_type = other DNA
cagcttcatccatgtccctaca

SEQ ID NO: 87375 - DNA, 22 bp, synthetic construct
  misc_feature 1..22: note = chemically synthesized
  source 1..22: mol_type = other DNA
catccatgtccctacaaaggac

SEQ ID NO: 87376 - DNA, 22 bp, synthetic construct
  misc_feature 1..22: note = chemically synthesized
  source 1..22: mol_type = other DNA
atccatgtccctacaaaggaca

SEQ ID NO: 87377 - DNA, 22 bp, synthetic construct
  misc_feature 1..22: note = chemically synthesized
  source 1..22: mol_type = other DNA
caaaggacatgaactcatcatt

SEQ ID NO: 87378 - DNA, 22 bp, synthetic construct
  misc_feature 1..22: note = chemically synthesized
  source 1..22: mol_type = other DNA
atcattttttatggctgcatag

SEQ ID NO: 87379 - DNA, 22 bp, synthetic construct
  misc_feature 1..22: note = chemically synthesized
  source 1..22: mol_type = other DNA
tttatggctgcatagtattcca

SEQ ID NO: 87380 - DNA, 22 bp, synthetic construct
  misc_feature 1..22: note = chemically synthesized
  source 1..22: mol_type = other DNA
ttatggctgcatagtattccat

SEQ ID NO: 87381 - DNA, 22 bp, synthetic construct
  misc_feature 1..22: note = chemically synthesized
  source 1..22: mol_type = other DNA
tatggctgcatagtattccatg

SEQ ID NO: 87382 - DNA, 22 bp, synthetic construct
  misc_feature 1..22: note = chemically synthesized
  source 1..22: mol_type = other DNA
atggctgcatagtattccatgg

SEQ ID NO: 87383 - DNA, 22 bp, synthetic construct
  misc_feature 1..22: note = chemically synthesized
  source 1..22: mol_type = other DNA
tggctgcatagtattccatggt

SEQ ID NO: 87384 - DNA, 22 bp, synthetic construct
  misc_feature 1..22: note = chemically synthesized
  source 1..22: mol_type = other DNA
catagtattccatggtgtatat

SEQ ID NO: 87385 - DNA, 22 bp, synthetic construct
  misc_feature 1..22: note = chemically synthesized
  source 1..22: mol_type = other DNA
catggtgtatatgtgccacatt

SEQ ID NO: 87386 - DNA, 22 bp, synthetic construct
  misc_feature 1..22: note = chemically synthesized
  source 1..22: mol_type = other DNA
tcttaatccagtctatcgttgt

SEQ ID NO: 87387 - DNA, 22 bp, synthetic construct
  misc_feature 1..22: note = chemically synthesized
  source 1..22: mol_type = other DNA
cttaatccagtctatcgttgtt

SEQ ID NO: 87388 - DNA, 22 bp, synthetic construct
  misc_feature 1..22: note = chemically synthesized
  source 1..22: mol_type = other DNA
ttaatccagtctatcgttgttg

SEQ ID NO: 87389 - DNA, 22 bp, synthetic construct
  misc_feature 1..22: note = chemically synthesized
  source 1..22: mol_type = other DNA
aatccagtctatcgttgttgga

SEQ ID NO: 87390 - DNA, 22 bp, synthetic construct
  misc_feature 1..22: note = chemically synthesized
  source 1..22: mol_type = other DNA
atccagtctatcgttgttggac

SEQ ID NO: 87391 - DNA, 22 bp, synthetic construct
  misc_feature 1..22: note = chemically synthesized
  source 1..22: mol_type = other DNA
tcgttgttggacatttgggttg

SEQ ID NO: 87392 - DNA, 22 bp, synthetic construct
  misc_feature 1..22: note = chemically synthesized
  source 1..22: mol_type = other DNA
ttggacatttgggttggttcca

SEQ ID NO: 87393 - DNA, 22 bp, synthetic construct
  misc_feature 1..22: note = chemically synthesized
  source 1..22: mol_type = other DNA
gacatttgggttggttccaagt

SEQ ID NO: 87394 - DNA, 22 bp, synthetic construct
  misc_feature 1..22: note = chemically synthesized
  source 1..22: mol_type = other DNA
gggttggttccaagtctttgct

SEQ ID NO: 87395 - DNA, 22 bp, synthetic construct
  misc_feature 1..22: note = chemically synthesized
  source 1..22: mol_type = other DNA
ggttggttccaagtctttgcta

SEQ ID NO: 87396 - DNA, 22 bp, synthetic construct
  misc_feature 1..22: note = chemically synthesized
  source 1..22: mol_type = other DNA
gttccaagtctttgctattgtg

SEQ ID NO: 87397 - DNA, 22 bp, synthetic construct
  misc_feature 1..22: note = chemically synthesized
  source 1..22: mol_type = other DNA
caagtctttgctattgtgaata

SEQ ID NO: 87398 - DNA, 22 bp, synthetic construct
  misc_feature 1..22: note = chemically synthesized
  source 1..22: mol_type = other DNA
tgctattgtgaatagtgctgca

SEQ ID NO: 87399 - DNA, 22 bp, synthetic construct
  misc_feature 1..22: note = chemically synthesized
  source 1..22: mol_type = other DNA
gctattgtgaatagtgctgcaa

SEQ ID NO: 87400 - DNA, 22 bp, synthetic construct
  misc_feature 1..22: note = chemically synthesized
  source 1..22: mol_type = other DNA
ctattgtgaatagtgctgcaat

SEQ ID NO: 87401 - DNA, 22 bp, synthetic construct
  misc_feature 1..22: note = chemically synthesized
  source 1..22: mol_type = other DNA
ttgtgaatagtgctgcaataaa

SEQ ID NO: 87402 - DNA, 22 bp, synthetic construct
  misc_feature 1..22: note = chemically synthesized
  source 1..22: mol_type = other DNA
tgaatagtgctgcaataaacat

SEQ ID NO: 87403 - DNA, 22 bp, synthetic construct
  misc_feature 1..22: note = chemically synthesized
  source 1..22: mol_type = other DNA
caataaacatacgtgtgcatgt

SEQ ID NO: 87404 - DNA, 22 bp, synthetic construct
  misc_feature 1..22: note = chemically synthesized
  source 1..22: mol_type = other DNA
tatagcagcatgatttataatc

SEQ ID NO: 87405 - DNA, 22 bp, synthetic construct
  misc_feature 1..22: note = chemically synthesized
  source 1..22: mol_type = other DNA
atagcagcatgatttataatcc

SEQ ID NO: 87406 - DNA, 22 bp, synthetic construct
  misc_feature 1..22: note = chemically synthesized
  source 1..22: mol_type = other DNA
tagcagcatgatttataatcct

SEQ ID NO: 87407 - DNA, 22 bp, synthetic construct
  misc_feature 1..22: note = chemically synthesized
  source 1..22: mol_type = other DNA
ataatcctttgggtatgtaccc

SEQ ID NO: 87408 - DNA, 22 bp, synthetic construct
  misc_feature 1..22: note = chemically synthesized
  source 1..22: mol_type = other DNA
taatcctttgggtatgtaccca

SEQ ID NO: 87409 - DNA, 22 bp, synthetic construct
  misc_feature 1..22: note = chemically synthesized
  source 1..22: mol_type = other DNA
tgggtatgtacccagtaatggg

SEQ ID NO: 87410 - DNA, 22 bp, synthetic construct
  misc_feature 1..22: note = chemically synthesized
  source 1..22: mol_type = other DNA
gggtatgtacccagtaatggga

SEQ ID NO: 87411 - DNA, 22 bp, synthetic construct
  misc_feature 1..22: note = chemically synthesized
  source 1..22: mol_type = other DNA
ggtatgtacccagtaatgggat

SEQ ID NO: 87412 - DNA, 22 bp, synthetic construct
  misc_feature 1..22: note = chemically synthesized
  source 1..22: mol_type = other DNA
ggtcaaatggtatttctagttc

SEQ ID NO: 87413 - DNA, 22 bp, synthetic construct
  misc_feature 1..22: note = chemically synthesized
  source 1..22: mol_type = other DNA
ctagttctagattcctgaggaa

SEQ ID NO: 87414 - DNA, 22 bp, synthetic construct
  misc_feature 1..22: note = chemically synthesized
  source 1..22: mol_type = other DNA
tagttctagattcctgaggaat

SEQ ID NO: 87415 - DNA, 22 bp, synthetic construct
  misc_feature 1..22: note = chemically synthesized
  source 1..22: mol_type = other DNA
gttctagattcctgaggaattg

SEQ ID NO: 87416 - DNA, 22 bp, synthetic construct
  misc_feature 1..22: note = chemically synthesized
  source 1..22: mol_type = other DNA
tagattcctgaggaattgccac

SEQ ID NO: 87417 - DNA, 22 bp, synthetic construct
  misc_feature 1..22: note = chemically synthesized
  source 1..22: mol_type = other DNA
gattcctgaggaattgccacac

SEQ ID NO: 87418 - DNA, 22 bp, synthetic construct
  misc_feature 1..22: note = chemically synthesized
  source 1..22: mol_type = other DNA
ctgaggaattgccacactgact

SEQ ID NO: 87419 - DNA, 22 bp, synthetic construct
  misc_feature 1..22: note = chemically synthesized
  source 1..22: mol_type = other DNA
aggaattgccacactgacttcc

SEQ ID NO: 87420 - DNA, 22 bp, synthetic construct
  misc_feature 1..22: note = chemically synthesized
  source 1..22: mol_type = other DNA
ccacactgacttccgcaatggt

SEQ ID NO: 87421 - DNA, 22 bp, synthetic construct
  misc_feature 1..22: note = chemically synthesized
  source 1..22: mol_type = other DNA
acttccgcaatggttgaactag

SEQ ID NO: 87422 - DNA, 22 bp, synthetic construct
  misc_feature 1..22: note = chemically synthesized
  source 1..22: mol_type = other DNA
ccgcaatggttgaactagttta

SEQ ID NO: 87423 - DNA, 22 bp, synthetic construct
  misc_feature 1..22: note = chemically synthesized
  source 1..22: mol_type = other DNA
cgcaatggttgaactagtttac

SEQ ID NO: 87424 - DNA, 22 bp, synthetic construct
  misc_feature 1..22: note = chemically synthesized
  source 1..22: mol_type = other DNA
aactagtttacagtcccaccaa

SEQ ID NO: 87425 - DNA, 22 bp, synthetic construct
  misc_feature 1..22: note = chemically synthesized
  source 1..22: mol_type = other DNA
gtttacagtcccaccaacagtg

SEQ ID NO: 87426 - DNA, 22 bp, synthetic construct
  misc_feature 1..22: note = chemically synthesized
  source 1..22: mol_type = other DNA
acagtcccaccaacagtgtaaa

SEQ ID NO: 87427 - DNA, 22 bp, synthetic construct
  misc_feature 1..22: note = chemically synthesized
  source 1..22: mol_type = other DNA
cagtcccaccaacagtgtaaaa

SEQ ID NO: 87428 - DNA, 22 bp, synthetic construct
  misc_feature 1..22: note = chemically synthesized
  source 1..22: mol_type = other DNA
ttcctgtttctccacatcctct

SEQ ID NO: 87429 - DNA, 22 bp, synthetic construct
  misc_feature 1..22: note = chemically synthesized
  source 1..22: mol_type = other DNA
ctgtttctccacatcctctcca

SEQ ID NO: 87430 - DNA, 22 bp, synthetic construct
  misc_feature 1..22: note = chemically synthesized
  source 1..22: mol_type = other DNA
tttctccacatcctctccagca

SEQ ID NO: 87431 - DNA, 22 bp, synthetic construct
  misc_feature 1..22: note = chemically synthesized
  source 1..22: mol_type = other DNA
ctccacatcctctccagcacct

SEQ ID NO: 87432 - DNA, 22 bp, synthetic construct
  misc_feature 1..22: note = chemically synthesized
  source 1..22: mol_type = other DNA
tccacatcctctccagcacctg

SEQ ID NO: 87433 - DNA, 22 bp, synthetic construct
  misc_feature 1..22: note = chemically synthesized
  source 1..22: mol_type = other DNA
cacatcctctccagcacctgtt

SEQ ID NO: 87434 - DNA, 22 bp, synthetic construct
  misc_feature 1..22: note = chemically synthesized
  source 1..22: mol_type = other DNA
tccagcacctgttgtttcctga

SEQ ID NO: 87435 - DNA, 22 bp, synthetic construct
  misc_feature 1..22: note = chemically synthesized
  source 1..22: mol_type = other DNA
cagcacctgttgtttcctgact

SEQ ID NO: 87436 - DNA, 22 bp, synthetic construct
  misc_feature 1..22: note = chemically synthesized
  source 1..22: mol_type = other DNA
ttgtttcctgactttttaatga

SEQ ID NO: 87437 - DNA, 22 bp, synthetic construct
  misc_feature 1..22: note = chemically synthesized
  source 1..22: mol_type = other DNA
tttcctgactttttaatgatcg

SEQ ID NO: 87438 - DNA, 22 bp, synthetic construct
  misc_feature 1..22: note = chemically synthesized
  source 1..22: mol_type = other DNA
cctgactttttaatgatcgcca

SEQ ID NO: 87439 - DNA, 22 bp, synthetic construct
  misc_feature 1..22: note = chemically synthesized
  source 1..22: mol_type = other DNA
ctgactttttaatgatcgccat

SEQ ID NO: 87440 - DNA, 22 bp, synthetic construct
  misc_feature 1..22: note = chemically synthesized
  source 1..22: mol_type = other DNA
actttttaatgatcgccattct

SEQ ID NO: 87441 - DNA, 22 bp, synthetic construct
  misc_feature 1..22: note = chemically synthesized
  source 1..22: mol_type = other DNA
tttaatgatcgccattctaact

SEQ ID NO: 87442 - DNA, 22 bp, synthetic construct
  misc_feature 1..22: note = chemically synthesized
  source 1..22: mol_type = other DNA
ttaatgatcgccattctaactg

SEQ ID NO: 87443 - DNA, 22 bp, synthetic construct
  misc_feature 1..22: note = chemically synthesized
  source 1..22: mol_type = other DNA
taatgatcgccattctaactgg

SEQ ID NO: 87444 - DNA, 22 bp, synthetic construct
  misc_feature 1..22: note = chemically synthesized
  source 1..22: mol_type = other DNA
aatgatcgccattctaactggt

SEQ ID NO: 87445 - DNA, 22 bp, synthetic construct
  misc_feature 1..22: note = chemically synthesized
  source 1..22: mol_type = other DNA
atgatcgccattctaactggtg

SEQ ID NO: 87446 - DNA, 22 bp, synthetic construct
  misc_feature 1..22: note = chemically synthesized
  source 1..22: mol_type = other DNA
taactggtgtgagatggtatct

SEQ ID NO: 87447 - DNA, 22 bp, synthetic construct
  misc_feature 1..22: note = chemically synthesized
  source 1..22: mol_type = other DNA
actggtgtgagatggtatctca

SEQ ID NO: 87448 - DNA, 22 bp, synthetic construct
  misc_feature 1..22: note = chemically synthesized
  source 1..22: mol_type = other DNA
gtgtgagatggtatctcattgt

SEQ ID NO: 87449 - DNA, 22 bp, synthetic construct
  misc_feature 1..22: note = chemically synthesized
  source 1..22: mol_type = other DNA
attgtggttttgatttgcattt

SEQ ID NO: 87450 - DNA, 22 bp, synthetic construct
  misc_feature 1..22: note = chemically synthesized
  source 1..22: mol_type = other DNA
tggttttgatttgcatttctct

SEQ ID NO: 87451 - DNA, 22 bp, synthetic construct
  misc_feature 1..22: note = chemically synthesized
  source 1..22: mol_type = other DNA
tgatttgcatttctctgatggc

SEQ ID NO: 87452 - DNA, 22 bp, synthetic construct
  misc_feature 1..22: note = chemically synthesized
  source 1..22: mol_type = other DNA
gatttgcatttctctgatggct

SEQ ID NO: 87453 - DNA, 22 bp, synthetic construct
  misc_feature 1..22: note = chemically synthesized
  source 1..22: mol_type = other DNA
atttgcatttctctgatggcta

SEQ ID NO: 87454 - DNA, 22 bp, synthetic construct
  misc_feature 1..22: note = chemically synthesized
  source 1..22: mol_type = other DNA
gcatttctctgatggctagtga

SEQ ID NO: 87455 - DNA, 22 bp, synthetic construct
  misc_feature 1..22: note = chemically synthesized
  source 1..22: mol_type = other DNA
catttctctgatggctagtgat

SEQ ID NO: 87456 - DNA, 22 bp, synthetic construct
  misc_feature 1..22: note = chemically synthesized
  source 1..22: mol_type = other DNA
ctctgatggctagtgatgatga

SEQ ID NO: 87457 - DNA, 22 bp, synthetic construct
  misc_feature 1..22: note = chemically synthesized
  source 1..22: mol_type = other DNA
tctgatggctagtgatgatgag

SEQ ID NO: 87458 - DNA, 22 bp, synthetic construct
  misc_feature 1..22: note = chemically synthesized
  source 1..22: mol_type = other DNA
tgatggctagtgatgatgagca

SEQ ID NO: 87459 - DNA, 22 bp, synthetic construct
  misc_feature 1..22: note = chemically synthesized
  source 1..22: mol_type = other DNA
atggctagtgatgatgagcatt

SEQ ID NO: 87460 - DNA, 22 bp, synthetic construct
  misc_feature 1..22: note = chemically synthesized
  source 1..22: mol_type = other DNA
gtgatgatgagcattttttcat

SEQ ID NO: 87461 - DNA, 22 bp, synthetic construct
  misc_feature 1..22: note = chemically synthesized
  source 1..22: mol_type = other DNA
tttcatgtgttttttgattaca

SEQ ID NO: 87462 - DNA, 22 bp, synthetic construct
  misc_feature 1..22: note = chemically synthesized
  source 1..22: mol_type = other DNA
ttcatgtgttttttgattacat

SEQ ID NO: 87463 - DNA, 22 bp, synthetic construct
  misc_feature 1..22: note = chemically synthesized
  source 1..22: mol_type = other DNA
tcatgtgttttttgattacata

SEQ ID NO: 87464 - DNA, 22 bp, synthetic construct
  misc_feature 1..22: note = chemically synthesized
  source 1..22: mol_type = other DNA
catgtgttttttgattacataa

SEQ ID NO: 87465 - DNA, 22 bp, synthetic construct
  misc_feature 1..22: note = chemically synthesized
  source 1..22: mol_type = other DNA
atgtgttttttgattacataaa

SEQ ID NO: 87466 - DNA, 22 bp, synthetic construct
  misc_feature 1..22: note = chemically synthesized
  source 1..22: mol_type = other DNA
tttgattacataaatgtcttct

SEQ ID NO: 87467 - DNA, 22 bp, synthetic construct
  misc_feature 1..22: note = chemically synthesized
  source 1..22: mol_type = other DNA
ttgattacataaatgtcttctt

SEQ ID NO: 87468 - DNA, 22 bp, synthetic construct
  misc_feature 1..22: note = chemically synthesized
  source 1..22: mol_type = other DNA
tgattacataaatgtcttcttt

SEQ ID NO: 87469 - DNA, 22 bp, synthetic construct
  misc_feature 1..22: note = chemically synthesized
  source 1..22: mol_type = other DNA
gattacataaatgtcttctttt

SEQ ID NO: 87470 - DNA, 22 bp, synthetic construct
  misc_feature 1..22: note = chemically synthesized
  source 1..22: mol_type = other DNA
attacataaatgtcttcttttg

SEQ ID NO: 87471 - DNA, 22 bp, synthetic construct
  misc_feature 1..22: note = chemically synthesized
  source 1..22: mol_type = other DNA
cataaatgtcttcttttgcgaa

SEQ ID NO: 87472 - DNA, 22 bp, synthetic construct
  misc_feature 1..22: note = chemically synthesized
  source 1..22: mol_type = other DNA
cttttgcgaagtgtctgttcat

SEQ ID NO: 87473 - DNA, 22 bp, synthetic construct
  misc_feature 1..22: note = chemically synthesized
  source 1..22: mol_type = other DNA
ttttgcgaagtgtctgttcata

SEQ ID NO: 87474 - DNA, 22 bp, synthetic construct
  misc_feature 1..22: note = chemically synthesized
  source 1..22: mol_type = other DNA
ttgcgaagtgtctgttcatatc

SEQ ID NO: 87475 - DNA, 22 bp, synthetic construct
  misc_feature 1..22: note = chemically synthesized
  source 1..22: mol_type = other DNA
tgcgaagtgtctgttcatatcc

SEQ ID NO: 87476 - DNA, 22 bp, synthetic construct
  misc_feature 1..22: note = chemically synthesized
  source 1..22: mol_type = other DNA
gcgaagtgtctgttcatatcct

SEQ ID NO: 87477 - DNA, 22 bp, synthetic construct
  misc_feature 1..22: note = chemically synthesized
  source 1..22: mol_type = other DNA
cgaagtgtctgttcatatcctt

SEQ ID NO: 87478 - DNA, 22 bp, synthetic construct
  misc_feature 1..22: note = chemically synthesized
  source 1..22: mol_type = other DNA
ttcatatcctttgcccactttt

SEQ ID NO: 87479 - DNA, 22 bp, synthetic construct
  misc_feature 1..22: note = chemically synthesized
  source 1..22: mol_type = other DNA
atatcctttgcccactttttga

SEQ ID NO: 87480 - DNA, 22 bp, synthetic construct
  misc_feature 1..22: note = chemically synthesized
  source 1..22: mol_type = other DNA
tgcccactttttgatggggttg

SEQ ID NO: 87481 - DNA, 22 bp, synthetic construct
  misc_feature 1..22: note = chemically synthesized
  source 1..22: mol_type = other DNA
gcccactttttgatggggttgt

SEQ ID NO: 87482 - DNA, 22 bp, synthetic construct
  misc_feature 1..22: note = chemically synthesized
  source 1..22: mol_type = other DNA
cccactttttgatggggttgtt

SEQ ID NO: 87483 - DNA, 22 bp, synthetic construct
  misc_feature 1..22: note = chemically synthesized
  source 1..22: mol_type = other DNA
tttgatggggttgtttgttttt

SEQ ID NO: 87484 - DNA, 22 bp, synthetic construct
  misc_feature 1..22: note = chemically synthesized
  source 1..22: mol_type = other DNA
ttgatggggttgtttgtttttt

SEQ ID NO: 87485 - DNA, 22 bp, synthetic construct
  misc_feature 1..22: note = chemically synthesized
  source 1..22: mol_type = other DNA
tgatggggttgtttgttttttc

SEQ ID NO: 87486 - DNA, 22 bp, synthetic construct
  misc_feature 1..22: note = chemically synthesized
  source 1..22: mol_type = other DNA
gatggggttgtttgttttttct

SEQ ID NO: 87487 - DNA, 22 bp, synthetic construct
  misc_feature 1..22: note = chemically synthesized
  source 1..22: mol_type = other DNA
atggggttgtttgttttttctt

SEQ ID NO: 87488 - DNA, 22 bp, synthetic construct
  misc_feature 1..22: note = chemically synthesized
  source 1..22: mol_type = other DNA
tttgttttttcttgtaaatttg

SEQ ID NO: 87489 - DNA, 22 bp, synthetic construct
  misc_feature 1..22: note = chemically synthesized
  source 1..22: mol_type = other DNA
gttttttcttgtaaatttgttt

SEQ ID NO: 87490 - DNA, 22 bp, synthetic construct
  misc_feature 1..22: note = chemically synthesized
  source 1..22: mol_type = other DNA
ttttttcttgtaaatttgtttg

SEQ ID NO: 87491 - DNA, 22 bp, synthetic construct
  misc_feature 1..22: note = chemically synthesized
  source 1..22: mol_type = other DNA
tttcttgtaaatttgtttgagt

SEQ ID NO: 87492 - DNA, 22 bp, synthetic construct
  misc_feature 1..22: note = chemically synthesized
  source 1..22: mol_type = other DNA
ttcttgtaaatttgtttgagtt

SEQ ID NO: 87493 - DNA, 22 bp, synthetic construct
  misc_feature 1..22: note = chemically synthesized
  source 1..22: mol_type = other DNA
tcttgtaaatttgtttgagttc

SEQ ID NO: 87494 - DNA, 22 bp, synthetic construct
  misc_feature 1..22: note = chemically synthesized
  source 1..22: mol_type = other DNA
cttgtaaatttgtttgagttca

SEQ ID NO: 87495 - DNA, 22 bp, synthetic construct
  misc_feature 1..22: note = chemically synthesized
  source 1..22: mol_type = other DNA
ttgtaaatttgtttgagttcat

SEQ ID NO: 87496 - DNA, 22 bp, synthetic construct
  misc_feature 1..22: note = chemically synthesized
  source 1..22: mol_type = other DNA
gtaaatttgtttgagttcattg

SEQ ID NO: 87497 - DNA, 22 bp, synthetic construct
  misc_feature 1..22: note = chemically synthesized
  source 1..22: mol_type = other DNA
taaatttgtttgagttcattgt

SEQ ID NO: 87498 - DNA, 22 bp, synthetic construct
  misc_feature 1..22: note = chemically synthesized
  source 1..22: mol_type = other DNA
gtttgagttcattgtagattct

SEQ ID NO: 87499 - DNA, 22 bp, synthetic construct
  misc_feature 1..22: note = chemically synthesized
  source 1..22: mol_type = other DNA
tttgagttcattgtagattctg

SEQ ID NO: 87500 - DNA, 22 bp, synthetic construct
  misc_feature 1..22: note = chemically synthesized
  source 1..22: mol_type = other DNA
gagttcattgtagattctggat

SEQ ID NO: 87501 - DNA, 22 bp, synthetic construct
  misc_feature 1..22: note = chemically synthesized
  source 1..22: mol_type = other DNA
agttcattgtagattctggata

SEQ ID NO: 87502 - DNA, 22 bp, synthetic construct
  misc_feature 1..22: note = chemically synthesized
  source 1..22: mol_type = other DNA
attgtagattctggatattagc

SEQ ID NO: 87503 - DNA, 22 bp, synthetic construct
  misc_feature 1..22: note = chemically synthesized
  source 1..22: mol_type = other DNA
tagattctggatattagccctt

SEQ ID NO: 87504 - DNA, 22 bp, synthetic construct
  misc_feature 1..22: note = chemically synthesized
  source 1..22: mol_type = other DNA
tggatattagccctttgtcaga

SEQ ID NO: 87505 - DNA, 22 bp, synthetic construct
  misc_feature 1..22: note = chemically synthesized
  source 1..22: mol_type = other DNA
gatattagccctttgtcagatg

SEQ ID NO: 87506 - DNA, 22 bp, synthetic construct
  misc_feature 1..22: note = chemically synthesized
  source 1..22: mol_type = other DNA
gccctttgtcagatgagtagat

SEQ ID NO: 87507 - DNA, 22 bp, synthetic construct
  misc_feature 1..22: note = chemically synthesized
  source 1..22: mol_type = other DNA
tgtcagatgagtagattgcaaa

SEQ ID NO: 87508 - DNA, 22 bp, synthetic construct
  misc_feature 1..22: note = chemically synthesized
  source 1..22: mol_type = other DNA
gtcagatgagtagattgcaaaa

SEQ ID NO: 87509 - DNA, 22 bp, synthetic construct
  misc_feature 1..22: note = chemically synthesized
  source 1..22: mol_type = other DNA
tcagatgagtagattgcaaaaa

SEQ ID NO: 87510 - DNA, 22 bp, synthetic construct
  misc_feature 1..22: note = chemically synthesized
  source 1..22: mol_type = other DNA
caaaaattttctcccattttgt

SEQ ID NO: 87511 - DNA, 22 bp, synthetic construct
  misc_feature 1..22: note = chemically synthesized
  source 1..22: mol_type = other DNA
tctcccattttgtaggttgcct

SEQ ID NO: 87512 - DNA, 22 bp, synthetic construct
  misc_feature 1..22: note = chemically synthesized
  source 1..22: mol_type = other DNA
ctcccattttgtaggttgcctg

SEQ ID NO: 87513 - DNA, 22 bp, synthetic construct
  misc_feature 1..22: note = chemically synthesized
  source 1..22: mol_type = other DNA
tcccattttgtaggttgcctgt

SEQ ID NO: 87514 - DNA, 22 bp, synthetic construct
  misc_feature 1..22: note = chemically synthesized
  source 1..22: mol_type = other DNA
ccattttgtaggttgcctgttc

SEQ ID NO: 87515 - DNA, 22 bp, synthetic construct
  misc_feature 1..22: note = chemically synthesized
  source 1..22: mol_type = other DNA
tgtaggttgcctgttcactctg

SEQ ID NO: 87516 - DNA, 22 bp, synthetic construct
  misc_feature 1..22: note = chemically synthesized
  source 1..22: mol_type = other DNA
gtaggttgcctgttcactctga

SEQ ID NO: 87517 - DNA, 22 bp, synthetic construct
  misc_feature 1..22: note = chemically synthesized
  source 1..22: mol_type = other DNA
taggttgcctgttcactctgat

SEQ ID NO: 87518 - DNA, 22 bp, synthetic construct
  misc_feature 1..22: note = chemically synthesized
  source 1..22: mol_type = other DNA
cctgttcactctgatggtagtt

SEQ ID NO: 87519 - DNA, 22 bp, synthetic construct
  misc_feature 1..22: note = chemically synthesized
  source 1..22: mol_type = other DNA
ttcactctgatggtagtttctt

SEQ ID NO: 87520 - DNA, 22 bp, synthetic construct
  misc_feature 1..22: note = chemically synthesized
  source 1..22: mol_type = other DNA
actctgatggtagtttctttag

SEQ ID NO: 87521 - DNA, 22 bp, synthetic construct
  misc_feature 1..22: note = chemically synthesized
  source 1..22: mol_type = other DNA
tgatggtagtttctttagctgt

SEQ ID NO: 87522 - DNA, 22 bp, synthetic construct
  misc_feature 1..22: note = chemically synthesized
  source 1..22: mol_type = other DNA
atggtagtttctttagctgtgc

SEQ ID NO: 87523 - DNA, 22 bp, synthetic construct
  misc_feature 1..22: note = chemically synthesized
  source 1..22: mol_type = other DNA
ctttagctgtgcagaagctctt

SEQ ID NO: 87524 - DNA, 22 bp, synthetic construct
  misc_feature 1..22: note = chemically synthesized
  source 1..22: mol_type = other DNA
tttagctgtgcagaagctcttt

SEQ ID NO: 87525 - DNA, 22 bp, synthetic construct
  misc_feature 1..22: note = chemically synthesized
  source 1..22: mol_type = other DNA
tagctgtgcagaagctctttag

SEQ ID NO: 87526 - DNA, 22 bp, synthetic construct
  misc_feature 1..22: note = chemically synthesized
  source 1..22: mol_type = other DNA
agctgtgcagaagctctttagt

SEQ ID NO: 87527 - DNA, 22 bp, synthetic construct
  misc_feature 1..22: note = chemically synthesized
  source 1..22: mol_type = other DNA
gctgtgcagaagctctttagtt

SEQ ID NO: 87528 - DNA, 22 bp, synthetic construct
  misc_feature 1..22: note = chemically synthesized
  source 1..22: mol_type = other DNA
tgcagaagctctttagtttaat

SEQ ID NO: 87529 - DNA, 22 bp, synthetic construct
  misc_feature 1..22: note = chemically synthesized
  source 1..22: mol_type = other DNA
tttagtttaattagatcccgtt

SEQ ID NO: 87530 - DNA, 22 bp, synthetic construct
  misc_feature 1..22: note = chemically synthesized
  source 1..22: mol_type = other DNA
tagtttaattagatcccgtttg

SEQ ID NO: 87531 - DNA, 22 bp, synthetic construct
  misc_feature 1..22: note = chemically synthesized
  source 1..22: mol_type = other DNA
agtttaattagatcccgtttgt

SEQ ID NO: 87532 - DNA, 22 bp, synthetic construct
  misc_feature 1..22: note = chemically synthesized
  source 1..22: mol_type = other DNA
gtttaattagatcccgtttgtc

SEQ ID NO: 87533 - DNA, 22 bp, synthetic construct
  misc_feature 1..22: note = chemically synthesized
  source 1..22: mol_type = other DNA
aattagatcccgtttgtccatt

SEQ ID NO: 87534 - DNA, 22 bp, synthetic construct
  misc_feature 1..22: note = chemically synthesized
  source 1..22: mol_type = other DNA
attagatcccgtttgtccattt

SEQ ID NO: 87535 - DNA, 22 bp, synthetic construct
  misc_feature 1..22: note = chemically synthesized
  source 1..22: mol_type = other DNA
gatcccgtttgtccattttgtc

SEQ ID NO: 87536 - DNA, 22 bp, synthetic construct
  misc_feature 1..22: note = chemically synthesized
  source 1..22: mol_type = other DNA
gtccattttgtcttttgttgcc

SEQ ID NO: 87537 - DNA, 22 bp, synthetic construct
  misc_feature 1..22: note = chemically synthesized
  source 1..22: mol_type = other DNA
tccattttgtcttttgttgcca

SEQ ID NO: 87538 - DNA, 22 bp, synthetic construct
  misc_feature 1..22: note = chemically synthesized
  source 1..22: mol_type = other DNA
tgtcttttgttgccattgcttt

SEQ ID NO: 87539 - DNA, 22 bp, synthetic construct
  misc_feature 1..22: note = chemically synthesized
  source 1..22: mol_type = other DNA
gtcttttgttgccattgctttt

SEQ ID NO: 87540 - DNA, 22 bp, synthetic construct
  misc_feature 1..22: note = chemically synthesized
  source 1..22: mol_type = other DNA
tcttttgttgccattgcttttg

SEQ ID NO: 87541 - DNA, 22 bp, synthetic construct
  misc_feature 1..22: note = chemically synthesized
  source 1..22: mol_type = other DNA
ttgttgccattgcttttggtgt

SEQ ID NO: 87542 - DNA, 22 bp, synthetic construct
  misc_feature 1..22: note = chemically synthesized
  source 1..22: mol_type = other DNA
tgttgccattgcttttggtgtt

SEQ ID NO: 87543 - DNA, 22 bp, synthetic construct
  misc_feature 1..22: note = chemically synthesized
  source 1..22: mol_type = other DNA
gttgccattgcttttggtgttt

SEQ ID NO: 87544 - DNA, 22 bp, synthetic construct
  misc_feature 1..22: note = chemically synthesized
  source 1..22: mol_type = other DNA
ttgccattgcttttggtgtttt

SEQ ID NO: 87545 - DNA, 22 bp, synthetic construct
  misc_feature 1..22: note = chemically synthesized
  source 1..22: mol_type = other DNA
ccattgcttttggtgttttaga

SEQ ID NO: 87546 - DNA, 22 bp, synthetic construct
  misc_feature 1..22: note = chemically synthesized
  source 1..22: mol_type = other DNA
cttttggtgttttagacatgaa

SEQ ID NO: 87547 - DNA, 22 bp, synthetic construct
  misc_feature 1..22: note = chemically synthesized
  source 1..22: mol_type = other DNA
ttggtgttttagacatgaagtc

SEQ ID NO: 87548 - DNA, 22 bp, synthetic construct
  misc_feature 1..22: note = chemically synthesized
  source 1..22: mol_type = other DNA
tggtgttttagacatgaagtcc

SEQ ID NO: 87549 - DNA, 22 bp, synthetic construct
  misc_feature 1..22: note = chemically synthesized
  source 1..22: mol_type = other DNA
ggtgttttagacatgaagtcct

SEQ ID NO: 87550 - DNA, 22 bp, synthetic construct
  misc_feature 1..22: note = chemically synthesized
  source 1..22: mol_type = other DNA
gtgttttagacatgaagtcctt

SEQ ID NO: 87551 - DNA, 22 bp, synthetic construct
  misc_feature 1..22: note = chemically synthesized
  source 1..22: mol_type = other DNA
tagacatgaagtccttgcccat

SEQ ID NO: 87552 - DNA, 22 bp, synthetic construct
  misc_feature 1..22: note = chemically synthesized
  source 1..22: mol_type = other DNA
agacatgaagtccttgcccatg

SEQ ID NO: 87553 - DNA, 22 bp, synthetic construct
  misc_feature 1..22: note = chemically synthesized
  source 1..22: mol_type = other DNA
gacatgaagtccttgcccatgc

SEQ ID NO: 87554 - DNA, 22 bp, synthetic construct
  misc_feature 1..22: note = chemically synthesized
  source 1..22: mol_type = other DNA
gcccatgcctatgtcctgaatg

SEQ ID NO: 87555 - DNA, 22 bp, synthetic construct
  misc_feature 1..22: note = chemically synthesized
  source 1..22: mol_type = other DNA
cccatgcctatgtcctgaatgg

SEQ ID NO: 87556 - DNA, 22 bp, synthetic construct
  misc_feature 1..22: note = chemically synthesized
  source 1..22: mol_type = other DNA
tgtcctgaatggtattgcctag

SEQ ID NO: 87557 - DNA, 22 bp, synthetic construct
  misc_feature 1..22: note = chemically synthesized
  source 1..22: mol_type = other DNA
aatggtattgcctaggtttttt

SEQ ID NO: 87558 - DNA, 22 bp, synthetic construct
  misc_feature 1..22: note = chemically synthesized
  source 1..22: mol_type = other DNA
cctaggtttttttctagggttt

SEQ ID NO: 87559 - DNA, 22 bp, synthetic construct
  misc_feature 1..22: note = chemically synthesized
  source 1..22: mol_type = other DNA
ggtttttttctagggtttttat

SEQ ID NO: 87560 - DNA, 22 bp, synthetic construct
  misc_feature 1..22: note = chemically synthesized
  source 1..22: mol_type = other DNA
ttttctagggtttttatggttt

SEQ ID NO: 87561 - DNA, 22 bp, synthetic construct
  misc_feature 1..22: note = chemically synthesized
  source 1..22: mol_type = other DNA
tttctagggtttttatggtttt

SEQ ID NO: 87562 - DNA, 22 bp, synthetic construct
  misc_feature 1..22: note = chemically synthesized
  source 1..22: mol_type = other DNA
ttctagggtttttatggtttta

SEQ ID NO: 87563 - DNA, 22 bp, synthetic construct
  misc_feature 1..22: note = chemically synthesized
  source 1..22: mol_type = other DNA
tctagggtttttatggttttag

SEQ ID NO: 87564 - DNA, 22 bp, synthetic construct
  misc_feature 1..22: note = chemically synthesized
  source 1..22: mol_type = other DNA
ctagggtttttatggttttagg

SEQ ID NO: 87565 - DNA, 22 bp, synthetic construct
  misc_feature 1..22: note = chemically synthesized
  source 1..22: mol_type = other DNA
tagggtttttatggttttaggt

SEQ ID NO: 87566 - DNA, 22 bp, synthetic construct
  misc_feature 1..22: note = chemically synthesized
  source 1..22: mol_type = other DNA
gggtttttatggttttaggtct

SEQ ID NO: 87567 - DNA, 22 bp, synthetic construct
  misc_feature 1..22: note = chemically synthesized
  source 1..22: mol_type = other DNA
ttatggttttaggtctaacatg

SEQ ID NO: 87568 - DNA, 22 bp, synthetic construct
  misc_feature 1..22: note = chemically synthesized
  source 1..22: mol_type = other DNA
tatggttttaggtctaacatgt

SEQ ID NO: 87569 - DNA, 22 bp, synthetic construct
  misc_feature 1..22: note = chemically synthesized
  source 1..22: mol_type = other DNA
atggttttaggtctaacatgta

SEQ ID NO: 87570 - DNA, 22 bp, synthetic construct
  misc_feature 1..22: note = chemically synthesized
  source 1..22: mol_type = other DNA
tggttttaggtctaacatgtaa

SEQ ID NO: 87571 - DNA, 22 bp, synthetic construct
  misc_feature 1..22: note = chemically synthesized
  source 1..22: mol_type = other DNA
taggtctaacatgtaagtcttt

SEQ ID NO: 87572 - DNA, 22 bp, synthetic construct
  misc_feature 1..22: note = chemically synthesized
  source 1..22: mol_type = other DNA
aggtctaacatgtaagtcttta

SEQ ID NO: 87573 - DNA, 22 bp, synthetic construct
  misc_feature 1..22: note = chemically synthesized
  source 1..22: mol_type = other DNA
ggtctaacatgtaagtctttaa

SEQ ID NO: 87574 - DNA, 22 bp, synthetic construct
  misc_feature 1..22: note = chemically synthesized
  source 1..22: mol_type = other DNA
acatgtaagtctttaatccatc

SEQ ID NO: 87575 - DNA, 22 bp, synthetic construct
  misc_feature 1..22: note = chemically synthesized
  source 1..22: mol_type = other DNA
taatccatcttgaattaatttt

SEQ ID NO: 87576 - DNA, 22 bp, synthetic construct
  misc_feature 1..22: note = chemically synthesized
  source 1..22: mol_type = other DNA
aatccatcttgaattaattttt

SEQ ID NO: 87577 - DNA, 22 bp, synthetic construct
  misc_feature 1..22: note = chemically synthesized
  source 1..22: mol_type = other DNA
atccatcttgaattaatttttg

SEQ ID NO: 87578 - DNA, 22 bp, synthetic construct
  misc_feature 1..22: note = chemically synthesized
  source 1..22: mol_type = other DNA
gaattaatttttgtataaggtg

SEQ ID NO: 87579 - DNA, 22 bp, synthetic construct
  misc_feature 1..22: note = chemically synthesized
  source 1..22: mol_type = other DNA
aattaatttttgtataaggtgt

SEQ ID NO: 87580 - DNA, 22 bp, synthetic construct
  misc_feature 1..22: note = chemically synthesized
  source 1..22: mol_type = other DNA
atttttgtataaggtgtaagga

SEQ ID NO: 87581 - DNA, 22 bp, synthetic construct
  misc_feature 1..22: note = chemically synthesized
  source 1..22: mol_type = other DNA
ttgtataaggtgtaaggaaggg

SEQ ID NO: 87582 - DNA, 22 bp, synthetic construct
  misc_feature 1..22: note = chemically synthesized
  source 1..22: mol_type = other DNA
tgtataaggtgtaaggaaggga

SEQ ID NO: 87583 - DNA, 22 bp, synthetic construct
  misc_feature 1..22: note = chemically synthesized
  source 1..22: mol_type = other DNA
gtataaggtgtaaggaagggat

SEQ ID NO: 87584 - DNA, 22 bp, synthetic construct
  misc_feature 1..22: note = chemically synthesized
  source 1..22: mol_type = other DNA
tataaggtgtaaggaagggatc

SEQ ID NO: 87585 - DNA, 22 bp, synthetic construct
  misc_feature 1..22: note = chemically synthesized
  source 1..22: mol_type = other DNA
cagctttctacatatggctagc

SEQ ID NO: 87586 - DNA, 22 bp, synthetic construct
  misc_feature 1..22: note = chemically synthesized
  source 1..22: mol_type = other DNA
agctttctacatatggctagcc

SEQ ID NO: 87587 - DNA, 22 bp, synthetic construct
  misc_feature 1..22: note = chemically synthesized
  source 1..22: mol_type = other DNA
tctacatatggctagccagttt

SEQ ID NO: 87588 - DNA, 22 bp, synthetic construct
  misc_feature 1..22: note = chemically synthesized
  source 1..22: mol_type = other DNA
ctacatatggctagccagtttt

SEQ ID NO: 87589 - DNA, 22 bp, synthetic construct
  misc_feature 1..22: note = chemically synthesized
  source 1..22: mol_type = other DNA
tacatatggctagccagttttc

SEQ ID NO: 87590 - DNA, 22 bp, synthetic construct
  misc_feature 1..22: note = chemically synthesized
  source 1..22: mol_type = other DNA
catatggctagccagttttccc

SEQ ID NO: 87591 - DNA, 22 bp, synthetic construct
  misc_feature 1..22: note = chemically synthesized
  source 1..22: mol_type = other DNA
gccagttttcccagcaccattt

SEQ ID NO: 87592 - DNA, 22 bp, synthetic construct
  misc_feature 1..22: note = chemically synthesized
  source 1..22: mol_type = other DNA
tcccagcaccatttattaaata

SEQ ID NO: 87593 - DNA, 22 bp, synthetic construct
  misc_feature 1..22: note = chemically synthesized
  source 1..22: mol_type = other DNA
cccagcaccatttattaaatag

SEQ ID NO: 87594 - DNA, 22 bp, synthetic construct
  misc_feature 1..22: note = chemically synthesized
  source 1..22: mol_type = other DNA
ccagcaccatttattaaatagg

SEQ ID NO: 87595 - DNA, 22 bp, synthetic construct
  misc_feature 1..22: note = chemically synthesized
  source 1..22: mol_type = other DNA
attaaatagggaatcctttccc

SEQ ID NO: 87596 - DNA, 22 bp, synthetic construct
  misc_feature 1..22: note = chemically synthesized
  source 1..22: mol_type = other DNA
ttaaatagggaatcctttcccc

SEQ ID NO: 87597 - DNA, 22 bp, synthetic construct
  misc_feature 1..22: note = chemically synthesized
  source 1..22: mol_type = other DNA
aatagggaatcctttccccatt

SEQ ID NO: 87598 - DNA, 22 bp, synthetic construct
  misc_feature 1..22: note = chemically synthesized
  source 1..22: mol_type = other DNA
tccccattgcttgtttctctca

SEQ ID NO: 87599 - DNA, 22 bp, synthetic construct
  misc_feature 1..22: note = chemically synthesized
  source 1..22: mol_type = other DNA
ccccattgcttgtttctctcag

SEQ ID NO: 87600 - DNA, 22 bp, synthetic construct
  misc_feature 1..22: note = chemically synthesized
  source 1..22: mol_type = other DNA
cccattgcttgtttctctcagg

SEQ ID NO: 87601 - DNA, 22 bp, synthetic construct
  misc_feature 1..22: note = chemically synthesized
  source 1..22: mol_type = other DNA
cttgtttctctcaggtttgtca

SEQ ID NO: 87602 - DNA, 22 bp, synthetic construct
  misc_feature 1..22: note = chemically synthesized
  source 1..22: mol_type = other DNA
gtttctctcaggtttgtcaaag

SEQ ID NO: 87603 - DNA, 22 bp, synthetic construct
  misc_feature 1..22: note = chemically synthesized
  source 1..22: mol_type = other DNA
tttctctcaggtttgtcaaaga

SEQ ID NO: 87604 - DNA, 22 bp, synthetic construct
  misc_feature 1..22: note = chemically synthesized
  source 1..22: mol_type = other DNA
ctctcaggtttgtcaaagatca

SEQ ID NO: 87605 - DNA, 22 bp, synthetic construct
  misc_feature 1..22: note = chemically synthesized
  source 1..22: mol_type = other DNA
tctcaggtttgtcaaagatcag

SEQ ID NO: 87606 - DNA, 22 bp, synthetic construct
  misc_feature 1..22: note = chemically synthesized
  source 1..22: mol_type = other DNA
tcaggtttgtcaaagatcagat

SEQ ID NO: 87607 - DNA, 22 bp, synthetic construct
  misc_feature 1..22: note = chemically synthesized
  source 1..22: mol_type = other DNA
aggtttgtcaaagatcagatag

SEQ ID NO: 87608 - DNA, 22 bp, synthetic construct
  misc_feature 1..22: note = chemically synthesized
  source 1..22: mol_type = other DNA
gtcaaagatcagatagttgtag

SEQ ID NO: 87609 - DNA, 22 bp, synthetic construct
  misc_feature 1..22: note = chemically synthesized
  source 1..22: mol_type = other DNA
tcaaagatcagatagttgtaga

SEQ ID NO: 87610 - DNA, 22 bp, synthetic construct
  misc_feature 1..22: note = chemically synthesized
  source 1..22: mol_type = other DNA
tagatatgcggcattatttctg

SEQ ID NO: 87611 - DNA, 22 bp, synthetic construct
  misc_feature 1..22: note = chemically synthesized
  source 1..22: mol_type = other DNA
tttctgagggctctgttctgtt

SEQ ID NO: 87612 - DNA, 22 bp, synthetic construct
  misc_feature 1..22: note = chemically synthesized
  source 1..22: mol_type = other DNA
ctgagggctctgttctgttcca

SEQ ID NO: 87613 - DNA, 22 bp, synthetic construct
  misc_feature 1..22: note = chemically synthesized
  source 1..22: mol_type = other DNA
tgagggctctgttctgttccat

SEQ ID NO: 87614 - DNA, 22 bp, synthetic construct
  misc_feature 1..22: note = chemically synthesized
  source 1..22: mol_type = other DNA
agggctctgttctgttccattg

SEQ ID NO: 87615 - DNA, 22 bp, synthetic construct
  misc_feature 1..22: note = chemically synthesized
  source 1..22: mol_type = other DNA
tgttctgttccattggtctaga

SEQ ID NO: 87616 - DNA, 22 bp, synthetic construct
  misc_feature 1..22: note = chemically synthesized
  source 1..22: mol_type = other DNA
ttctgttccattggtctagatc

SEQ ID NO: 87617 - DNA, 22 bp, synthetic construct
  misc_feature 1..22: note = chemically synthesized
  source 1..22: mol_type = other DNA
tgttccattggtctagatctct

SEQ ID NO: 87618 - DNA, 22 bp, synthetic construct
  misc_feature 1..22: note = chemically synthesized
  source 1..22: mol_type = other DNA
ttccattggtctagatctctgt

SEQ ID NO: 87619 - DNA, 22 bp, synthetic construct
  misc_feature 1..22: note = chemically synthesized
  source 1..22: mol_type = other DNA
cattggtctagatctctgtttt

SEQ ID NO: 87620 - DNA, 22 bp, synthetic construct
  misc_feature 1..22: note = chemically synthesized
  source 1..22: mol_type = other DNA
gtctagatctctgttttggtac

SEQ ID NO: 87621 - DNA, 22 bp, synthetic construct
  misc_feature 1..22: note = chemically synthesized
  source 1..22: mol_type = other DNA
gatctctgttttggtaccagta

SEQ ID NO: 87622 - DNA, 22 bp, synthetic construct
  misc_feature 1..22: note = chemically synthesized
  source 1..22: mol_type = other DNA
tgttttggtaccagtaccatgc

SEQ ID NO: 87623 - DNA, 22 bp, synthetic construct
  misc_feature 1..22: note = chemically synthesized
  source 1..22: mol_type = other DNA
ttttggtaccagtaccatgctg

SEQ ID NO: 87624 - DNA, 22 bp, synthetic construct
  misc_feature 1..22: note = chemically synthesized
  source 1..22: mol_type = other DNA
tggtaccagtaccatgctgttt

SEQ ID NO: 87625 - DNA, 22 bp, synthetic construct
  misc_feature 1..22: note = chemically synthesized
  source 1..22: mol_type = other DNA
ggtaccagtaccatgctgtttt

SEQ ID NO: 87626 - DNA, 22 bp, synthetic construct
  misc_feature 1..22: note = chemically synthesized
  source 1..22: mol_type = other DNA
gtaccagtaccatgctgttttg

SEQ ID NO: 87627 - DNA, 22 bp, synthetic construct
  misc_feature 1..22: note = chemically synthesized
  source 1..22: mol_type = other DNA
ttttggttaccgtagcattgta

SEQ ID NO: 87628 - DNA, 22 bp, synthetic construct
  misc_feature 1..22: note = chemically synthesized
  source 1..22: mol_type = other DNA
tggttaccgtagcattgtagta

SEQ ID NO: 87629 - DNA, 22 bp, synthetic construct
  misc_feature 1..22: note = chemically synthesized
  source 1..22: mol_type = other DNA
ggttaccgtagcattgtagtat

SEQ ID NO: 87630 - DNA, 22 bp, synthetic construct
  misc_feature 1..22: note = chemically synthesized
  source 1..22: mol_type = other DNA
gttaccgtagcattgtagtata

SEQ ID NO: 87631 - DNA, 22 bp, synthetic construct
  misc_feature 1..22: note = chemically synthesized
  source 1..22: mol_type = other DNA
ccgtagcattgtagtatagttt

SEQ ID NO: 87632 - DNA, 22 bp, synthetic construct
  misc_feature 1..22: note = chemically synthesized
  source 1..22: mol_type = other DNA
tagtatagtttgaagtcaggta

SEQ ID NO: 87633 - DNA, 22 bp, synthetic construct
  misc_feature 1..22: note = chemically synthesized
  source 1..22: mol_type = other DNA
gaagtcaggtagcgtgatgcct

SEQ ID NO: 87634 - DNA, 22 bp, synthetic construct
  misc_feature 1..22: note = chemically synthesized
  source 1..22: mol_type = other DNA
aagtcaggtagcgtgatgcctc

SEQ ID NO: 87635 - DNA, 22 bp, synthetic construct
  misc_feature 1..22: note = chemically synthesized
  source 1..22: mol_type = other DNA
cagctttgttcttttggcttag

SEQ ID NO: 87636 - DNA, 22 bp, synthetic construct
  misc_feature 1..22: note = chemically synthesized
  source 1..22: mol_type = other DNA
tgttcttttggcttaggattgc

SEQ ID NO: 87637 - DNA, 22 bp, synthetic construct
  misc_feature 1..22: note = chemically synthesized
  source 1..22: mol_type = other DNA
gttcttttggcttaggattgcc

SEQ ID NO: 87638 - DNA, 22 bp, synthetic construct
  misc_feature 1..22: note = chemically synthesized
  source 1..22: mol_type = other DNA
ttcttttggcttaggattgcct

SEQ ID NO: 87639 - DNA, 22 bp, synthetic construct
  misc_feature 1..22: note = chemically synthesized
  source 1..22: mol_type = other DNA
ttttggcttaggattgccttgg

SEQ ID NO: 87640 - DNA, 22 bp, synthetic construct
  misc_feature 1..22: note = chemically synthesized
  source 1..22: mol_type = other DNA
ttggcttaggattgccttggtg

SEQ ID NO: 87641 - DNA, 22 bp, synthetic construct
  misc_feature 1..22: note = chemically synthesized
  source 1..22: mol_type = other DNA
tggcttaggattgccttggtga

SEQ ID NO: 87642 - DNA, 22 bp, synthetic construct
  misc_feature 1..22: note = chemically synthesized
  source 1..22: mol_type = other DNA
ggcttaggattgccttggtgat

SEQ ID NO: 87643 - DNA, 22 bp, synthetic construct
  misc_feature 1..22: note = chemically synthesized
  source 1..22: mol_type = other DNA
gcttaggattgccttggtgatg

SEQ ID NO: 87644 - DNA, 22 bp, synthetic construct
  misc_feature 1..22: note = chemically synthesized
  source 1..22: mol_type = other DNA
aggattgccttggtgatgtggg

SEQ ID NO: 87645 - DNA, 22 bp, synthetic construct
  misc_feature 1..22: note = chemically synthesized
  source 1..22: mol_type = other DNA
ggattgccttggtgatgtgggc

SEQ ID NO: 87646 - DNA, 22 bp, synthetic construct
  misc_feature 1..22: note = chemically synthesized
  source 1..22: mol_type = other DNA
ccttggtgatgtgggctctttt

SEQ ID NO: 87647 - DNA, 22 bp, synthetic construct
  misc_feature 1..22: note = chemically synthesized
  source 1..22: mol_type = other DNA
ggtgatgtgggctcttttttgg

SEQ ID NO: 87648 - DNA, 22 bp, synthetic construct
  misc_feature 1..22: note = chemically synthesized
  source 1..22: mol_type = other DNA
gtgatgtgggctcttttttggt

SEQ ID NO: 87649 - DNA, 22 bp, synthetic construct
  misc_feature 1..22: note = chemically synthesized
  source 1..22: mol_type = other DNA
ttttttggttccatatgaactt

SEQ ID NO: 87650 - DNA, 22 bp, synthetic construct
  misc_feature 1..22: note = chemically synthesized
  source 1..22: mol_type = other DNA
ttttggttccatatgaacttta

SEQ ID NO: 87651 - DNA, 22 bp, synthetic construct
  misc_feature 1..22: note = chemically synthesized
  source 1..22: mol_type = other DNA
tttggttccatatgaactttaa

SEQ ID NO: 87652 - DNA, 22 bp, synthetic construct
  misc_feature 1..22: note = chemically synthesized
  source 1..22: mol_type = other DNA
ttggttccatatgaactttaaa

SEQ ID NO: 87653 - DNA, 22 bp, synthetic construct
  misc_feature 1..22: note = chemically synthesized
  source 1..22: mol_type = other DNA
tggttccatatgaactttaaag

SEQ ID NO: 87654 - DNA, 22 bp, synthetic construct
  misc_feature 1..22: note = chemically synthesized
  source 1..22: mol_type = other DNA
ggttccatatgaactttaaagt

SEQ ID NO: 87655 - DNA, 22 bp, synthetic construct
  misc_feature 1..22: note = chemically synthesized
  source 1..22: mol_type = other DNA
gttccatatgaactttaaagta

SEQ ID NO: 87656 - DNA, 22 bp, synthetic construct
  misc_feature 1..22: note = chemically synthesized
  source 1..22: mol_type = other DNA
catatgaactttaaagtagttt

SEQ ID NO: 87657 - DNA, 22 bp, synthetic construct
  misc_feature 1..22: note = chemically synthesized
  source 1..22: mol_type = other DNA
taaagtagttttttccagttct

SEQ ID NO: 87658 - DNA, 22 bp, synthetic construct
  misc_feature 1..22: note = chemically synthesized
  source 1..22: mol_type = other DNA
aaagtagttttttccagttctg

SEQ ID NO: 87659 - DNA, 22 bp, synthetic construct
  misc_feature 1..22: note = chemically synthesized
  source 1..22: mol_type = other DNA
aagtagttttttccagttctgt

SEQ ID NO: 87660 - DNA, 22 bp, synthetic construct
  misc_feature 1..22: note = chemically synthesized
  source 1..22: mol_type = other DNA
tttccagttctgtgaagaaagt

SEQ ID NO: 87661 - DNA, 22 bp, synthetic construct
  misc_feature 1..22: note = chemically synthesized
  source 1..22: mol_type = other DNA
ttccagttctgtgaagaaagtc

SEQ ID NO: 87662 - DNA, 22 bp, synthetic construct
  misc_feature 1..22: note = chemically synthesized
  source 1..22: mol_type = other DNA
tccagttctgtgaagaaagtca

SEQ ID NO: 87663 - DNA, 22 bp, synthetic construct
  misc_feature 1..22: note = chemically synthesized
  source 1..22: mol_type = other DNA
ccagttctgtgaagaaagtcat

SEQ ID NO: 87664 - DNA, 22 bp, synthetic construct
  misc_feature 1..22: note = chemically synthesized
  source 1..22: mol_type = other DNA
cagttctgtgaagaaagtcatt

SEQ ID NO: 87665 - DNA, 22 bp, synthetic construct
  misc_feature 1..22: note = chemically synthesized
  source 1..22: mol_type = other DNA
tgtgaagaaagtcattggtagc

SEQ ID NO: 87666 - DNA, 22 bp, synthetic construct
  misc_feature 1..22: note = chemically synthesized
  source 1..22: mol_type = other DNA
tgaagaaagtcattggtagctt

SEQ ID NO: 87667 - DNA, 22 bp, synthetic construct
  misc_feature 1..22: note = chemically synthesized
  source 1..22: mol_type = other DNA
gtagcttgatggggatggcatt

SEQ ID NO: 87668 - DNA, 22 bp, synthetic construct
  misc_feature 1..22: note = chemically synthesized
  source 1..22: mol_type = other DNA
gatggggatggcattgaatcta

SEQ ID NO: 87669 - DNA, 22 bp, synthetic construct
  misc_feature 1..22: note = chemically synthesized
  source 1..22: mol_type = other DNA
atggggatggcattgaatctat

SEQ ID NO: 87670 - DNA, 22 bp, synthetic construct
  misc_feature 1..22: note = chemically synthesized
  source 1..22: mol_type = other DNA
aatctataaattaccttgggca

SEQ ID NO: 87671 - DNA, 22 bp, synthetic construct
  misc_feature 1..22: note = chemically synthesized
  source 1..22: mol_type = other DNA
taaattaccttgggcagtatga

SEQ ID NO: 87672 - DNA, 22 bp, synthetic construct
  misc_feature 1..22: note = chemically synthesized
  source 1..22: mol_type = other DNA
ccttgggcagtatgaccatttt

SEQ ID NO: 87673 - DNA, 22 bp, synthetic construct
  misc_feature 1..22: note = chemically synthesized
  source 1..22: mol_type = other DNA
gggcagtatgaccattttcacg

SEQ ID NO: 87674 - DNA, 22 bp, synthetic construct
  misc_feature 1..22: note = chemically synthesized
  source 1..22: mol_type = other DNA
ggcagtatgaccattttcacga

SEQ ID NO: 87675 - DNA, 22 bp, synthetic construct
  misc_feature 1..22: note = chemically synthesized
  source 1..22: mol_type = other DNA
tcacgatattgattcttcctac

SEQ ID NO: 87676 - DNA, 22 bp, synthetic construct
  misc_feature 1..22: note = chemically synthesized
  source 1..22: mol_type = other DNA
cacgatattgattcttcctacc

SEQ ID NO: 87677 - DNA, 22 bp, synthetic construct
  misc_feature 1..22: note = chemically synthesized
  source 1..22: mol_type = other DNA
acgatattgattcttcctaccc

SEQ ID NO: 87678 - DNA, 22 bp, synthetic construct
  misc_feature 1..22: note = chemically synthesized
  source 1..22: mol_type = other DNA
attcttcctacccatgagcatg

SEQ ID NO: 87679 - DNA, 22 bp, synthetic construct
  misc_feature 1..22: note = chemically synthesized
  source 1..22: mol_type = other DNA
ttcctacccatgagcatggaat

SEQ ID NO: 87680 - DNA, 22 bp, synthetic construct
  misc_feature 1..22: note = chemically synthesized
  source 1..22: mol_type = other DNA
cctacccatgagcatggaatgt

SEQ ID NO: 87681 - DNA, 22 bp, synthetic construct
  misc_feature 1..22: note = chemically synthesized
  source 1..22: mol_type = other DNA
ctacccatgagcatggaatgtt

SEQ ID NO: 87682 - DNA, 22 bp, synthetic construct
  misc_feature 1..22: note = chemically synthesized
  source 1..22: mol_type = other DNA
cccatgagcatggaatgttctt

SEQ ID NO: 87683 - DNA, 22 bp, synthetic construct
  misc_feature 1..22: note = chemically synthesized
  source 1..22: mol_type = other DNA
ttccatttgtttgtatcctctt

SEQ ID NO: 87684 - DNA, 22 bp, synthetic construct
  misc_feature 1..22: note = chemically synthesized
  source 1..22: mol_type = other DNA
ccatttgtttgtatcctctttt

SEQ ID NO: 87685 - DNA, 22 bp, synthetic construct
  misc_feature 1..22: note = chemically synthesized
  source 1..22: mol_type = other DNA
catttgtttgtatcctctttta

SEQ ID NO: 87686 - DNA, 22 bp, synthetic construct
  misc_feature 1..22: note = chemically synthesized
  source 1..22: mol_type = other DNA
gtttgtatcctcttttatttca

SEQ ID NO: 87687 - DNA, 22 bp, synthetic construct
  misc_feature 1..22: note = chemically synthesized
  source 1..22: mol_type = other DNA
tttgtatcctcttttatttcat

SEQ ID NO: 87688 - DNA, 22 bp, synthetic construct
  misc_feature 1..22: note = chemically synthesized
  source 1..22: mol_type = other DNA
gtatcctcttttatttcattga

SEQ ID NO: 87689 - DNA, 22 bp, synthetic construct
  misc_feature 1..22: note = chemically synthesized
  source 1..22: mol_type = other DNA
tatcctcttttatttcattgag

SEQ ID NO: 87690 - DNA, 22 bp, synthetic construct
  misc_feature 1..22: note = chemically synthesized
  source 1..22: mol_type = other DNA
ttttatttcattgagcagtggt

SEQ ID NO: 87691 - DNA, 22 bp, synthetic construct
  misc_feature 1..22: note = chemically synthesized
  source 1..22: mol_type = other DNA
ttatttcattgagcagtggttt

SEQ ID NO: 87692 - DNA, 22 bp, synthetic construct
  misc_feature 1..22: note = chemically synthesized
  source 1..22: mol_type = other DNA
tatttcattgagcagtggtttg

SEQ ID NO: 87693 - DNA, 22 bp, synthetic construct
  misc_feature 1..22: note = chemically synthesized
  source 1..22: mol_type = other DNA
atttcattgagcagtggtttgt

SEQ ID NO: 87694 - DNA, 22 bp, synthetic construct
  misc_feature 1..22: note = chemically synthesized
  source 1..22: mol_type = other DNA
tttcattgagcagtggtttgta

SEQ ID NO: 87695 - DNA, 22 bp, synthetic construct
  misc_feature 1..22: note = chemically synthesized
  source 1..22: mol_type = other DNA
cattgagcagtggtttgtagtt

SEQ ID NO: 87696 - DNA, 22 bp, synthetic construct
  misc_feature 1..22: note = chemically synthesized
  source 1..22: mol_type = other DNA
attgagcagtggtttgtagttc

SEQ ID NO: 87697 - DNA, 22 bp, synthetic construct
  misc_feature 1..22: note = chemically synthesized
  source 1..22: mol_type = other DNA
agcagtggtttgtagttctcct

SEQ ID NO: 87698 - DNA, 22 bp, synthetic construct
  misc_feature 1..22: note = chemically synthesized
  source 1..22: mol_type = other DNA
gtagttctccttgaagaggtcc

SEQ ID NO: 87699 - DNA, 22 bp, synthetic construct
  misc_feature 1..22: note = chemically synthesized
  source 1..22: mol_type = other DNA
tagttctccttgaagaggtcct

SEQ ID NO: 87700 - DNA, 22 bp, synthetic construct
  misc_feature 1..22: note = chemically synthesized
  source 1..22: mol_type = other DNA
tccttgaagaggtccttcacat

SEQ ID NO: 87701 - DNA, 22 bp, synthetic construct
  misc_feature 1..22: note = chemically synthesized
  source 1..22: mol_type = other DNA
cttgaagaggtccttcacatcc

SEQ ID NO: 87702 - DNA, 22 bp, synthetic construct
  misc_feature 1..22: note = chemically synthesized
  source 1..22: mol_type = other DNA
gaagaggtccttcacatccctt

SEQ ID NO: 87703 - DNA, 22 bp, synthetic construct
  misc_feature 1..22: note = chemically synthesized
  source 1..22: mol_type = other DNA
aagaggtccttcacatcccttg

SEQ ID NO: 87704 - DNA, 22 bp, synthetic construct
  misc_feature 1..22: note = chemically synthesized
  source 1..22: mol_type = other DNA
cacatcccttgtaagttggatt

SEQ ID NO: 87705 - DNA, 22 bp, synthetic construct
  misc_feature 1..22: note = chemically synthesized
  source 1..22: mol_type = other DNA
acatcccttgtaagttggattc

SEQ ID NO: 87706 - DNA, 22 bp, synthetic construct
  misc_feature 1..22: note = chemically synthesized
  source 1..22: mol_type = other DNA
gtaagttggattcctaggtatt

SEQ ID NO: 87707 - DNA, 22 bp, synthetic construct
  misc_feature 1..22: note = chemically synthesized
  source 1..22: mol_type = other DNA
taagttggattcctaggtattt

SEQ ID NO: 87708 - DNA, 22 bp, synthetic construct
  misc_feature 1..22: note = chemically synthesized
  source 1..22: mol_type = other DNA
gattcctaggtattttattctc

SEQ ID NO: 87709 - DNA, 22 bp, synthetic construct
  misc_feature 1..22: note = chemically synthesized
  source 1..22: mol_type = other DNA
ctaggtattttattctctttga

SEQ ID NO: 87710 - DNA, 22 bp, synthetic construct
  misc_feature 1..22: note = chemically synthesized
  source 1..22: mol_type = other DNA
ggtattttattctctttgaagc

SEQ ID NO: 87711 - DNA, 22 bp, synthetic construct
  misc_feature 1..22: note = chemically synthesized
  source 1..22: mol_type = other DNA
tattctctttgaagcaattgtg

SEQ ID NO: 87712 - DNA, 22 bp, synthetic construct
  misc_feature 1..22: note = chemically synthesized
  source 1..22: mol_type = other DNA
attctctttgaagcaattgtga

SEQ ID NO: 87713 - DNA, 22 bp, synthetic construct
  misc_feature 1..22: note = chemically synthesized
  source 1..22: mol_type = other DNA
ttctctttgaagcaattgtgaa

SEQ ID NO: 87714 - DNA, 22 bp, synthetic construct
  misc_feature 1..22: note = chemically synthesized
  source 1..22: mol_type = other DNA
tctttgaagcaattgtgaatgg

SEQ ID NO: 87715 - DNA, 22 bp, synthetic construct
  misc_feature 1..22: note = chemically synthesized
  source 1..22: mol_type = other DNA
tttgaagcaattgtgaatggga

SEQ ID NO: 87716 - DNA, 22 bp, synthetic construct
  misc_feature 1..22: note = chemically synthesized
  source 1..22: mol_type = other DNA
tgaagcaattgtgaatgggagt

SEQ ID NO: 87717 - DNA, 22 bp, synthetic construct
  misc_feature 1..22: note = chemically synthesized
  source 1..22: mol_type = other DNA
gaagcaattgtgaatgggagtt

SEQ ID NO: 87718 - DNA, 22 bp, synthetic construct
  misc_feature 1..22: note = chemically synthesized
  source 1..22: mol_type = other DNA
aagcaattgtgaatgggagttc

SEQ ID NO: 87719 - DNA, 22 bp, synthetic construct
  misc_feature 1..22: note = chemically synthesized
  source 1..22: mol_type = other DNA
tgaatgggagttcactcatgat

SEQ ID NO: 87720 - DNA, 22 bp, synthetic construct
  misc_feature 1..22: note = chemically synthesized
  source 1..22: mol_type = other DNA
actcatgatttggctctctgtt

SEQ ID NO: 87721 - DNA, 22 bp, synthetic construct
  misc_feature 1..22: note = chemically synthesized
  source 1..22: mol_type = other DNA
atgatttggctctctgtttgtc

SEQ ID NO: 87722 - DNA, 22 bp, synthetic construct
  misc_feature 1..22: note = chemically synthesized
  source 1..22: mol_type = other DNA
ggctctctgtttgtctgttatt

SEQ ID NO: 87723 - DNA, 22 bp, synthetic construct
  misc_feature 1..22: note = chemically synthesized
  source 1..22: mol_type = other DNA
gctctctgtttgtctgttattg

SEQ ID NO: 87724 - DNA, 22 bp, synthetic construct
  misc_feature 1..22: note = chemically synthesized
  source 1..22: mol_type = other DNA
tctgtttgtctgttattggtgc

SEQ ID NO: 87725 - DNA, 22 bp, synthetic construct
  misc_feature 1..22: note = chemically synthesized
  source 1..22: mol_type = other DNA
tgtttgtctgttattggtgcat

SEQ ID NO: 87726 - DNA, 22 bp, synthetic construct
  misc_feature 1..22: note = chemically synthesized
  source 1..22: mol_type = other DNA
tttgtctgttattggtgcatag

SEQ ID NO: 87727 - DNA, 22 bp, synthetic construct
  misc_feature 1..22: note = chemically synthesized
  source 1..22: mol_type = other DNA
gtctgttattggtgcataggaa

SEQ ID NO: 87728 - DNA, 22 bp, synthetic construct
  misc_feature 1..22: note = chemically synthesized
  source 1..22: mol_type = other DNA
tctgttattggtgcataggaat

SEQ ID NO: 87729 - DNA, 22 bp, synthetic construct
  misc_feature 1..22: note = chemically synthesized
  source 1..22: mol_type = other DNA
ttattggtgcataggaatactt

SEQ ID NO: 87730 - DNA, 22 bp, synthetic construct
  misc_feature 1..22: note = chemically synthesized
  source 1..22: mol_type = other DNA
ttggtgcataggaatacttgtg

SEQ ID NO: 87731 - DNA, 22 bp, synthetic construct
  misc_feature 1..22: note = chemically synthesized
  source 1..22: mol_type = other DNA
gtgcataggaatacttgtgatt

SEQ ID NO: 87732 - DNA, 22 bp, synthetic construct
  misc_feature 1..22: note = chemically synthesized
  source 1..22: mol_type = other DNA
gtgatttttgcacactgatttt

SEQ ID NO: 87733 - DNA, 22 bp, synthetic construct
  misc_feature 1..22: note = chemically synthesized
  source 1..22: mol_type = other DNA
tgatttttgcacactgatttta

SEQ ID NO: 87734 - DNA, 22 bp, synthetic construct
  misc_feature 1..22: note = chemically synthesized
  source 1..22: mol_type = other DNA
ttgcacactgattttatatcct

SEQ ID NO: 87735 - DNA, 22 bp, synthetic construct
  misc_feature 1..22: note = chemically synthesized
  source 1..22: mol_type = other DNA
tgcacactgattttatatcctg

SEQ ID NO: 87736 - DNA, 22 bp, synthetic construct
  misc_feature 1..22: note = chemically synthesized
  source 1..22: mol_type = other DNA
gcacactgattttatatcctga

SEQ ID NO: 87737 - DNA, 22 bp, synthetic construct
  misc_feature 1..22: note = chemically synthesized
  source 1..22: mol_type = other DNA
cacactgattttatatcctgag

SEQ ID NO: 87738 - DNA, 22 bp, synthetic construct
  misc_feature 1..22: note = chemically synthesized
  source 1..22: mol_type = other DNA
attttatatcctgagactttgc

SEQ ID NO: 87739 - DNA, 22 bp, synthetic construct
  misc_feature 1..22: note = chemically synthesized
  source 1..22: mol_type = other DNA
tatatcctgagactttgctgaa

SEQ ID NO: 87740 - DNA, 22 bp, synthetic construct
  misc_feature 1..22: note = chemically synthesized
  source 1..22: mol_type = other DNA
atatcctgagactttgctgaag

SEQ ID NO: 87741 - DNA, 22 bp, synthetic construct
  misc_feature 1..22: note = chemically synthesized
  source 1..22: mol_type = other DNA
tatcctgagactttgctgaagt

SEQ ID NO: 87742 - DNA, 22 bp, synthetic construct
  misc_feature 1..22: note = chemically synthesized
  source 1..22: mol_type = other DNA
agactttgctgaagttgcttat

SEQ ID NO: 87743 - DNA, 22 bp, synthetic construct
  misc_feature 1..22: note = chemically synthesized
  source 1..22: mol_type = other DNA
tgctgaagttgcttatcagctt

SEQ ID NO: 87744 - DNA, 22 bp, synthetic construct
  misc_feature 1..22: note = chemically synthesized
  source 1..22: mol_type = other DNA
gctgaagttgcttatcagctta

SEQ ID NO: 87745 - DNA, 22 bp, synthetic construct
  misc_feature 1..22: note = chemically synthesized
  source 1..22: mol_type = other DNA
ctgaagttgcttatcagcttaa

SEQ ID NO: 87746 - DNA, 22 bp, synthetic construct
  misc_feature 1..22: note = chemically synthesized
  source 1..22: mol_type = other DNA
aagttgcttatcagcttaagga

SEQ ID NO: 87747 - DNA, 22 bp, synthetic construct
  misc_feature 1..22: note = chemically synthesized
  source 1..22: mol_type = other DNA
cttatcagcttaaggagatttt

SEQ ID NO: 87748 - DNA, 22 bp, synthetic construct
  misc_feature 1..22: note = chemically synthesized
  source 1..22: mol_type = other DNA
atcagcttaaggagattttggg

SEQ ID NO: 87749 - DNA, 22 bp, synthetic construct
  misc_feature 1..22: note = chemically synthesized
  source 1..22: mol_type = other DNA
tcagcttaaggagattttgggc

SEQ ID NO: 87750 - DNA, 22 bp, synthetic construct
  misc_feature 1..22: note = chemically synthesized
  source 1..22: mol_type = other DNA
aaggagattttgggctgagaca

SEQ ID NO: 87751 - DNA, 22 bp, synthetic construct
  misc_feature 1..22: note = chemically synthesized
  source 1..22: mol_type = other DNA
aggagattttgggctgagacaa

SEQ ID NO: 87752 - DNA, 22 bp, synthetic construct
  misc_feature 1..22: note = chemically synthesized
  source 1..22: mol_type = other DNA
tgggctgagacaatggggtttt

SEQ ID NO: 87753 - DNA, 22 bp, synthetic construct
  misc_feature 1..22: note = chemically synthesized
  source 1..22: mol_type = other DNA
gggctgagacaatggggttttc

SEQ ID NO: 87754 - DNA, 22 bp, synthetic construct
  misc_feature 1..22: note = chemically synthesized
  source 1..22: mol_type = other DNA
ggctgagacaatggggttttct

SEQ ID NO: 87755 - DNA, 22 bp, synthetic construct
  misc_feature 1..22: note = chemically synthesized
  source 1..22: mol_type = other DNA
agacaatggggttttctagata

SEQ ID NO: 87756 - DNA, 22 bp, synthetic construct
  misc_feature 1..22: note = chemically synthesized
  source 1..22: mol_type = other DNA
tctagatatacaatcatgtcat

SEQ ID NO: 87757 - DNA, 22 bp, synthetic construct
  misc_feature 1..22: note = chemically synthesized
  source 1..22: mol_type = other DNA
ctagatatacaatcatgtcatc

SEQ ID NO: 87758 - DNA, 22 bp, synthetic construct
  misc_feature 1..22: note = chemically synthesized
  source 1..22: mol_type = other DNA
tagatatacaatcatgtcatct

SEQ ID NO: 87759 - DNA, 22 bp, synthetic construct
  misc_feature 1..22: note = chemically synthesized
  source 1..22: mol_type = other DNA
gatatacaatcatgtcatctgc

SEQ ID NO: 87760 - DNA, 22 bp, synthetic construct
  misc_feature 1..22: note = chemically synthesized
  source 1..22: mol_type = other DNA
caaacagggacaatttcacttc

SEQ ID NO: 87761 - DNA, 22 bp, synthetic construct
  misc_feature 1..22: note = chemically synthesized
  source 1..22: mol_type = other DNA
cacttcctcttttcctaattga

SEQ ID NO: 87762 - DNA, 22 bp, synthetic construct
  misc_feature 1..22: note = chemically synthesized
  source 1..22: mol_type = other DNA
acttcctcttttcctaattgaa

SEQ ID NO: 87763 - DNA, 22 bp, synthetic construct
  misc_feature 1..22: note = chemically synthesized
  source 1..22: mol_type = other DNA
cctcttttcctaattgaatgcc

SEQ ID NO: 87764 - DNA, 22 bp, synthetic construct
  misc_feature 1..22: note = chemically synthesized
  source 1..22: mol_type = other DNA
ctcttttcctaattgaatgccc

SEQ ID NO: 87765 - DNA, 22 bp, synthetic construct
  misc_feature 1..22: note = chemically synthesized
  source 1..22: mol_type = other DNA
ttttcctaattgaatgcccttt

SEQ ID NO: 87766 - DNA, 22 bp, synthetic construct
  misc_feature 1..22: note = chemically synthesized
  source 1..22: mol_type = other DNA
ttcctaattgaatgccctttat

SEQ ID NO: 87767 - DNA, 22 bp, synthetic construct
  misc_feature 1..22: note = chemically synthesized
  source 1..22: mol_type = other DNA
tcctaattgaatgccctttatt

SEQ ID NO: 87768 - DNA, 22 bp, synthetic construct
  misc_feature 1..22: note = chemically synthesized
  source 1..22: mol_type = other DNA
cctaattgaatgccctttattt

SEQ ID NO: 87769 - DNA, 22 bp, synthetic construct
  misc_feature 1..22: note = chemically synthesized
  source 1..22: mol_type = other DNA
ctaattgaatgccctttatttc

SEQ ID NO: 87770 - DNA, 22 bp, synthetic construct
  misc_feature 1..22: note = chemically synthesized
  source 1..22: mol_type = other DNA
attgaatgccctttatttcctt

SEQ ID NO: 87771 - DNA, 22 bp, synthetic construct
  misc_feature 1..22: note = chemically synthesized
  source 1..22: mol_type = other DNA
aatgccctttatttccttctcc

SEQ ID NO: 87772 - DNA, 22 bp, synthetic construct
  misc_feature 1..22: note = chemically synthesized
  source 1..22: mol_type = other DNA
tatttccttctcctgcctgatt

SEQ ID NO: 87773 - DNA, 22 bp, synthetic construct
  misc_feature 1..22: note = chemically synthesized
  source 1..22: mol_type = other DNA
atttccttctcctgcctgattg

SEQ ID NO: 87774 - DNA, 22 bp, synthetic construct
  misc_feature 1..22: note = chemically synthesized
  source 1..22: mol_type = other DNA
tttccttctcctgcctgattgc

SEQ ID NO: 87775 - DNA, 22 bp, synthetic construct
  misc_feature 1..22: note = chemically synthesized
  source 1..22: mol_type = other DNA
ccttctcctgcctgattgccct

SEQ ID NO: 87776 - DNA, 22 bp, synthetic construct
  misc_feature 1..22: note = chemically synthesized
  source 1..22: mol_type = other DNA
cttctcctgcctgattgccctg

SEQ ID NO: 87777 - DNA, 22 bp, synthetic construct
  misc_feature 1..22: note = chemically synthesized
  source 1..22: mol_type = other DNA
ctcctgcctgattgccctggcc

SEQ ID NO: 87778 - DNA, 22 bp, synthetic construct
  misc_feature 1..22: note = chemically synthesized
  source 1..22: mol_type = other DNA
tcctgcctgattgccctggcca

SEQ ID NO: 87779 - DNA, 22 bp, synthetic construct
  misc_feature 1..22: note = chemically synthesized
  source 1..22: mol_type = other DNA
ctgcctgattgccctggccaga

SEQ ID NO: 87780 - DNA, 22 bp, synthetic construct
  misc_feature 1..22: note = chemically synthesized
  source 1..22: mol_type = other DNA
cctgattgccctggccagaact

SEQ ID NO: 87781 - DNA, 22 bp, synthetic construct
  misc_feature 1..22: note = chemically synthesized
  source 1..22: mol_type = other DNA
attgccctggccagaacttaca

SEQ ID NO: 87782 - DNA, 22 bp, synthetic construct
  misc_feature 1..22: note = chemically synthesized
  source 1..22: mol_type = other DNA
ccctggccagaacttacaacac

SEQ ID NO: 87783 - DNA, 22 bp, synthetic construct
  misc_feature 1..22: note = chemically synthesized
  source 1..22: mol_type = other DNA
gccagaacttacaacactatgt

SEQ ID NO: 87784 - DNA, 22 bp, synthetic construct
  misc_feature 1..22: note = chemically synthesized
  source 1..22: mol_type = other DNA
acaacactatgttgaataggag

SEQ ID NO: 87785 - DNA, 22 bp, synthetic construct
  misc_feature 1..22: note = chemically synthesized
  source 1..22: mol_type = other DNA
caacactatgttgaataggagt

SEQ ID NO: 87786 - DNA, 22 bp, synthetic construct
  misc_feature 1..22: note = chemically synthesized
  source 1..22: mol_type = other DNA
tgttgaataggagtggtgagag

SEQ ID NO: 87787 - DNA, 22 bp, synthetic construct
  misc_feature 1..22: note = chemically synthesized
  source 1..22: mol_type = other DNA
aataggagtggtgagagagggc

SEQ ID NO: 87788 - DNA, 22 bp, synthetic construct
  misc_feature 1..22: note = chemically synthesized
  source 1..22: mol_type = other DNA
ccttgtgccagttttcaaaggg

SEQ ID NO: 87789 - DNA, 22 bp, synthetic construct
  misc_feature 1..22: note = chemically synthesized
  source 1..22: mol_type = other DNA
gtgccagttttcaaagggaatg

SEQ ID NO: 87790 - DNA, 22 bp, synthetic construct
  misc_feature 1..22: note = chemically synthesized
  source 1..22: mol_type = other DNA
tgccagttttcaaagggaatgc

SEQ ID NO: 87791 - DNA, 22 bp, synthetic construct
  misc_feature 1..22: note = chemically synthesized
  source 1..22: mol_type = other DNA
tcaaagggaatgcttccagttt

SEQ ID NO: 87792 - DNA, 22 bp, synthetic construct
  misc_feature 1..22: note = chemically synthesized
  source 1..22: mol_type = other DNA
caaagggaatgcttccagtttt

SEQ ID NO: 87793 - DNA, 22 bp, synthetic construct
  misc_feature 1..22: note = chemically synthesized
  source 1..22: mol_type = other DNA
aaagggaatgcttccagttttt

SEQ ID NO: 87794 - DNA, 22 bp, synthetic construct
  misc_feature 1..22: note = chemically synthesized
  source 1..22: mol_type = other DNA
ccagtttttgtccactcagtat

SEQ ID NO: 87795 - DNA, 22 bp, synthetic construct
  misc_feature 1..22: note = chemically synthesized
  source 1..22: mol_type = other DNA
cagtttttgtccactcagtatg

SEQ ID NO: 87796 - DNA, 22 bp, synthetic construct
  misc_feature 1..22: note = chemically synthesized
  source 1..22: mol_type = other DNA
ttgtccactcagtatgatattg

SEQ ID NO: 87797 - DNA, 22 bp, synthetic construct
  misc_feature 1..22: note = chemically synthesized
  source 1..22: mol_type = other DNA
tgtccactcagtatgatattgg

SEQ ID NO: 87798 - DNA, 22 bp, synthetic construct
  misc_feature 1..22: note = chemically synthesized
  source 1..22: mol_type = other DNA
gtccactcagtatgatattggc

SEQ ID NO: 87799 - DNA, 22 bp, synthetic construct
  misc_feature 1..22: note = chemically synthesized
  source 1..22: mol_type = other DNA
tccactcagtatgatattggct

SEQ ID NO: 87800 - DNA, 22 bp, synthetic construct
  misc_feature 1..22: note = chemically synthesized
  source 1..22: mol_type = other DNA
agtatgatattggctgtgggtt

SEQ ID NO: 87801 - DNA, 22 bp, synthetic construct
  misc_feature 1..22: note = chemically synthesized
  source 1..22: mol_type = other DNA
gctgtgggtttgtcatagatag

SEQ ID NO: 87802 - DNA, 22 bp, synthetic construct
  misc_feature 1..22: note = chemically synthesized
  source 1..22: mol_type = other DNA
tgggtttgtcatagatagctct

SEQ ID NO: 87803 - DNA, 22 bp, synthetic construct
  misc_feature 1..22: note = chemically synthesized
  source 1..22: mol_type = other DNA
gtcatagatagctcttattatt

SEQ ID NO: 87804 - DNA, 22 bp, synthetic construct
  misc_feature 1..22: note = chemically synthesized
  source 1..22: mol_type = other DNA
tcatagatagctcttattattt

SEQ ID NO: 87805 - DNA, 22 bp, synthetic construct
  misc_feature 1..22: note = chemically synthesized
  source 1..22: mol_type = other DNA
ttattattttgagatatgtccc

SEQ ID NO: 87806 - DNA, 22 bp, synthetic construct
  misc_feature 1..22: note = chemically synthesized
  source 1..22: mol_type = other DNA
attattttgagatatgtcccat

SEQ ID NO: 87807 - DNA, 22 bp, synthetic construct
  misc_feature 1..22: note = chemically synthesized
  source 1..22: mol_type = other DNA
ttattttgagatatgtcccatc

SEQ ID NO: 87808 - DNA, 22 bp, synthetic construct
  misc_feature 1..22: note = chemically synthesized
  source 1..22: mol_type = other DNA
ttttgagatatgtcccatcaat

SEQ ID NO: 87809 - DNA, 22 bp, synthetic construct
  misc_feature 1..22: note = chemically synthesized
  source 1..22: mol_type = other DNA
tgagatatgtcccatcaatacc

SEQ ID NO: 87810 - DNA, 22 bp, synthetic construct
  misc_feature 1..22: note = chemically synthesized
  source 1..22: mol_type = other DNA
gagatatgtcccatcaatacct

SEQ ID NO: 87811 - DNA, 22 bp, synthetic construct
  misc_feature 1..22: note = chemically synthesized
  source 1..22: mol_type = other DNA
agatatgtcccatcaataccta

SEQ ID NO: 87812 - DNA, 22 bp, synthetic construct
  misc_feature 1..22: note = chemically synthesized
  source 1..22: mol_type = other DNA
atttattgagagtttttagcat

SEQ ID NO: 87813 - DNA, 22 bp, synthetic construct
  misc_feature 1..22: note = chemically synthesized
  source 1..22: mol_type = other DNA
attgagagtttttagcatgaag

SEQ ID NO: 87814 - DNA, 22 bp, synthetic construct
  misc_feature 1..22: note = chemically synthesized
  source 1..22: mol_type = other DNA
ttgagagtttttagcatgaagc

SEQ ID NO: 87815 - DNA, 22 bp, synthetic construct
  misc_feature 1..22: note = chemically synthesized
  source 1..22: mol_type = other DNA
agagtttttagcatgaagcgtt

SEQ ID NO: 87816 - DNA, 22 bp, synthetic construct
  misc_feature 1..22: note = chemically synthesized
  source 1..22: mol_type = other DNA
ttagcatgaagcgttgttgaat

SEQ ID NO: 87817 - DNA, 22 bp, synthetic construct
  misc_feature 1..22: note = chemically synthesized
  source 1..22: mol_type = other DNA
tagcatgaagcgttgttgaatt

SEQ ID NO: 87818 - DNA, 22 bp, synthetic construct
  misc_feature 1..22: note = chemically synthesized
  source 1..22: mol_type = other DNA
agcatgaagcgttgttgaattt

SEQ ID NO: 87819 - DNA, 22 bp, synthetic construct
  misc_feature 1..22: note = chemically synthesized
  source 1..22: mol_type = other DNA
gcatgaagcgttgttgaatttt

SEQ ID NO: 87820 - DNA, 22 bp, synthetic construct
  misc_feature 1..22: note = chemically synthesized
  source 1..22: mol_type = other DNA
ttgaattttgtcaaaggccttt

SEQ ID NO: 87821 - DNA, 22 bp, synthetic construct
  misc_feature 1..22: note = chemically synthesized
  source 1..22: mol_type = other DNA
aattttgtcaaaggccttttct

SEQ ID NO: 87822 - DNA, 22 bp, synthetic construct
  misc_feature 1..22: note = chemically synthesized
  source 1..22: mol_type = other DNA
tgtcaaaggccttttctgcatc

SEQ ID NO: 87823 - DNA, 22 bp, synthetic construct
  misc_feature 1..22: note = chemically synthesized
  source 1..22: mol_type = other DNA
gtcaaaggccttttctgcatct

SEQ ID NO: 87824 - DNA, 22 bp, synthetic construct
  misc_feature 1..22: note = chemically synthesized
  source 1..22: mol_type = other DNA
tcaaaggccttttctgcatcta

SEQ ID NO: 87825 - DNA, 22 bp, synthetic construct
  misc_feature 1..22: note = chemically synthesized
  source 1..22: mol_type = other DNA
ttctgcatctattgagataatc

SEQ ID NO: 87826 - DNA, 22 bp, synthetic construct
  misc_feature 1..22: note = chemically synthesized
  source 1..22: mol_type = other DNA
tctgcatctattgagataatca

SEQ ID NO: 87827 - DNA, 22 bp, synthetic construct
  misc_feature 1..22: note = chemically synthesized
  source 1..22: mol_type = other DNA
ctgcatctattgagataatcat

SEQ ID NO: 87828 - DNA, 22 bp, synthetic construct
  misc_feature 1..22: note = chemically synthesized
  source 1..22: mol_type = other DNA
tgcatctattgagataatcata

SEQ ID NO: 87829 - DNA, 22 bp, synthetic construct
  misc_feature 1..22: note = chemically synthesized
  source 1..22: mol_type = other DNA
catctattgagataatcatatg

SEQ ID NO: 87830 - DNA, 22 bp, synthetic construct
  misc_feature 1..22: note = chemically synthesized
  source 1..22: mol_type = other DNA
ttgagataatcatatggtttgt

SEQ ID NO: 87831 - DNA, 22 bp, synthetic construct
  misc_feature 1..22: note = chemically synthesized
  source 1..22: mol_type = other DNA
agataatcatatggtttgtgtc

SEQ ID NO: 87832 - DNA, 22 bp, synthetic construct
  misc_feature 1..22: note = chemically synthesized
  source 1..22: mol_type = other DNA
gtgtctttggttctgtttatat

SEQ ID NO: 87833 - DNA, 22 bp, synthetic construct
  misc_feature 1..22: note = chemically synthesized
  source 1..22: mol_type = other DNA
tgtctttggttctgtttatatg

SEQ ID NO: 87834 - DNA, 22 bp, synthetic construct
  misc_feature 1..22: note = chemically synthesized
  source 1..22: mol_type = other DNA
tggttctgtttatatgctggat

SEQ ID NO: 87835 - DNA, 22 bp, synthetic construct
  misc_feature 1..22: note = chemically synthesized
  source 1..22: mol_type = other DNA
ggttctgtttatatgctggatt

SEQ ID NO: 87836 - DNA, 22 bp, synthetic construct
  misc_feature 1..22: note = chemically synthesized
  source 1..22: mol_type = other DNA
gttctgtttatatgctggatta

SEQ ID NO: 87837 - DNA, 22 bp, synthetic construct
  misc_feature 1..22: note = chemically synthesized
  source 1..22: mol_type = other DNA
tgtttatatgctggattatgtt

SEQ ID NO: 87838 - DNA, 22 bp, synthetic construct
  misc_feature 1..22: note = chemically synthesized
  source 1..22: mol_type = other DNA
tttatatgctggattatgttta

SEQ ID NO: 87839 - DNA, 22 bp, synthetic construct
  misc_feature 1..22: note = chemically synthesized
  source 1..22: mol_type = other DNA
atatgctggattatgtttattg

SEQ ID NO: 87840 - DNA, 22 bp, synthetic construct
  misc_feature 1..22: note = chemically synthesized
  source 1..22: mol_type = other DNA
tatgctggattatgtttattga

SEQ ID NO: 87841 - DNA, 22 bp, synthetic construct
  misc_feature 1..22: note = chemically synthesized
  source 1..22: mol_type = other DNA
gattatgtttattgattttcgt

SEQ ID NO: 87842 - DNA, 22 bp, synthetic construct
  misc_feature 1..22: note = chemically synthesized
  source 1..22: mol_type = other DNA
tgtttattgattttcgtatgtt

SEQ ID NO: 87843 - DNA, 22 bp, synthetic construct
  misc_feature 1..22: note = chemically synthesized
  source 1..22: mol_type = other DNA
attgattttcgtatgttgaacc

SEQ ID NO: 87844 - DNA, 22 bp, synthetic construct
  misc_feature 1..22: note = chemically synthesized
  source 1..22: mol_type = other DNA
ttgattttcgtatgttgaacca

SEQ ID NO: 87845 - DNA, 22 bp, synthetic construct
  misc_feature 1..22: note = chemically synthesized
  source 1..22: mol_type = other DNA
attttcgtatgttgaaccagcc

SEQ ID NO: 87846 - DNA, 22 bp, synthetic construct
  misc_feature 1..22: note = chemically synthesized
  source 1..22: mol_type = other DNA
tcgtatgttgaaccagccttgc

SEQ ID NO: 87847 - DNA, 22 bp, synthetic construct
  misc_feature 1..22: note = chemically synthesized
  source 1..22: mol_type = other DNA
cgtatgttgaaccagccttgca

SEQ ID NO: 87848 - DNA, 22 bp, synthetic construct
  misc_feature 1..22: note = chemically synthesized
  source 1..22: mol_type = other DNA
gtatgttgaaccagccttgcat

SEQ ID NO: 87849 - DNA, 22 bp, synthetic construct
  misc_feature 1..22: note = chemically synthesized
  source 1..22: mol_type = other DNA
aaccagccttgcatggcaggga

SEQ ID NO: 87850 - DNA, 22 bp, synthetic construct
  misc_feature 1..22: note = chemically synthesized
  source 1..22: mol_type = other DNA
gcatggcagggatgaagcccac

SEQ ID NO: 87851 - DNA, 22 bp, synthetic construct
  misc_feature 1..22: note = chemically synthesized
  source 1..22: mol_type = other DNA
catggcagggatgaagcccact

SEQ ID NO: 87852 - DNA, 22 bp, synthetic construct
  misc_feature 1..22: note = chemically synthesized
  source 1..22: mol_type = other DNA
gatcatggtggatcagtttgcc

SEQ ID NO: 87853 - DNA, 22 bp, synthetic construct
  misc_feature 1..22: note = chemically synthesized
  source 1..22: mol_type = other DNA
atcatggtggatcagtttgcca

SEQ ID NO: 87854 - DNA, 22 bp, synthetic construct
  misc_feature 1..22: note = chemically synthesized
  source 1..22: mol_type = other DNA
gccagtattttattgaggattt

SEQ ID NO: 87855 - DNA, 22 bp, synthetic construct
  misc_feature 1..22: note = chemically synthesized
  source 1..22: mol_type = other DNA
ccagtattttattgaggatttt

SEQ ID NO: 87856 - DNA, 22 bp, synthetic construct
  misc_feature 1..22: note = chemically synthesized
  source 1..22: mol_type = other DNA
tattgaggatttttgcatcaat

SEQ ID NO: 87857 - DNA, 22 bp, synthetic construct
  misc_feature 1..22: note = chemically synthesized
  source 1..22: mol_type = other DNA
attgaggatttttgcatcaatg

SEQ ID NO: 87858 - DNA, 22 bp, synthetic construct
  misc_feature 1..22: note = chemically synthesized
  source 1..22: mol_type = other DNA
ttgaggatttttgcatcaatgt

SEQ ID NO: 87859 - DNA, 22 bp, synthetic construct
  misc_feature 1..22: note = chemically synthesized
  source 1..22: mol_type = other DNA
aggatttttgcatcaatgttca

SEQ ID NO: 87860 - DNA, 22 bp, synthetic construct
  misc_feature 1..22: note = chemically synthesized
  source 1..22: mol_type = other DNA
ttgcatcaatgttcatcaagga

SEQ ID NO: 87861 - DNA, 22 bp, synthetic construct
  misc_feature 1..22: note = chemically synthesized
  source 1..22: mol_type = other DNA
tgcatcaatgttcatcaaggat

SEQ ID NO: 87862 - DNA, 22 bp, synthetic construct
  misc_feature 1..22: note = chemically synthesized
  source 1..22: mol_type = other DNA
gcatcaatgttcatcaaggata

SEQ ID NO: 87863 - DNA, 22 bp, synthetic construct
  misc_feature 1..22: note = chemically synthesized
  source 1..22: mol_type = other DNA
catcaatgttcatcaaggatat

SEQ ID NO: 87864 - DNA, 22 bp, synthetic construct
  misc_feature 1..22: note = chemically synthesized
  source 1..22: mol_type = other DNA
atcaaggatattggtgtaacat

SEQ ID NO: 87865 - DNA, 22 bp, synthetic construct
  misc_feature 1..22: note = chemically synthesized
  source 1..22: mol_type = other DNA
gtgtaacattctctttttttgt

SEQ ID NO: 87866 - DNA, 22 bp, synthetic construct
  misc_feature 1..22: note = chemically synthesized
  source 1..22: mol_type = other DNA
tctttttttgttgtgtctctgt

SEQ ID NO: 87867 - DNA, 22 bp, synthetic construct
  misc_feature 1..22: note = chemically synthesized
  source 1..22: mol_type = other DNA
tttttttgttgtgtctctgtca

SEQ ID NO: 87868 - DNA, 22 bp, synthetic construct
  misc_feature 1..22: note = chemically synthesized
  source 1..22: mol_type = other DNA
tttttgttgtgtctctgtcagg

SEQ ID NO: 87869 - DNA, 22 bp, synthetic construct
  misc_feature 1..22: note = chemically synthesized
  source 1..22: mol_type = other DNA
ttttgttgtgtctctgtcaggc

SEQ ID NO: 87870 - DNA, 22 bp, synthetic construct
  misc_feature 1..22: note = chemically synthesized
  source 1..22: mol_type = other DNA
tttgttgtgtctctgtcaggct

SEQ ID NO: 87871 - DNA, 22 bp, synthetic construct
  misc_feature 1..22: note = chemically synthesized
  source 1..22: mol_type = other DNA
ttgttgtgtctctgtcaggctt

SEQ ID NO: 87872 - DNA, 22 bp, synthetic construct
  misc_feature 1..22: note = chemically synthesized
  source 1..22: mol_type = other DNA
tgttgtgtctctgtcaggcttt

SEQ ID NO: 87873 - DNA, 22 bp, synthetic construct
  misc_feature 1..22: note = chemically synthesized
  source 1..22: mol_type = other DNA
gttgtgtctctgtcaggctttg

SEQ ID NO: 87874 - DNA, 22 bp, synthetic construct
  misc_feature 1..22: note = chemically synthesized
  source 1..22: mol_type = other DNA
ttgtgtctctgtcaggctttgg

SEQ ID NO: 87875 - DNA, 22 bp, synthetic construct
  misc_feature 1..22: note = chemically synthesized
  source 1..22: mol_type = other DNA
tgtctctgtcaggctttggtat

SEQ ID NO: 87876 - DNA, 22 bp, synthetic construct
  misc_feature 1..22: note = chemically synthesized
  source 1..22: mol_type = other DNA
tgtcaggctttggtatcaggat

SEQ ID NO: 87877 - DNA, 22 bp, synthetic construct
  misc_feature 1..22: note = chemically synthesized
  source 1..22: mol_type = other DNA
tcaggctttggtatcaggatga

SEQ ID NO: 87878 - DNA, 22 bp, synthetic construct
  misc_feature 1..22: note = chemically synthesized
  source 1..22: mol_type = other DNA
tggtatcaggatgatgctggcc

SEQ ID NO: 87879 - DNA, 22 bp, synthetic construct
  misc_feature 1..22: note = chemically synthesized
  source 1..22: mol_type = other DNA
ggtatcaggatgatgctggcct

SEQ ID NO: 87880 - DNA, 22 bp, synthetic construct
  misc_feature 1..22: note = chemically synthesized
  source 1..22: mol_type = other DNA
gtatcaggatgatgctggcctc

SEQ ID NO: 87881 - DNA, 22 bp, synthetic construct
  misc_feature 1..22: note = chemically synthesized
  source 1..22: mol_type = other DNA
gcctcataaaatgagttaggga

SEQ ID NO: 87882 - DNA, 22 bp, synthetic construct
  misc_feature 1..22: note = chemically synthesized
  source 1..22: mol_type = other DNA
ataaaatgagttagggaggatt

SEQ ID NO: 87883 - DNA, 22 bp, synthetic construct
  misc_feature 1..22: note = chemically synthesized
  source 1..22: mol_type = other DNA
gggaggattccctctttttcta

SEQ ID NO: 87884 - DNA, 22 bp, synthetic construct
  misc_feature 1..22: note = chemically synthesized
  source 1..22: mol_type = other DNA
cctctttttctattgattggaa

SEQ ID NO: 87885 - DNA, 22 bp, synthetic construct
  misc_feature 1..22: note = chemically synthesized
  source 1..22: mol_type = other DNA
tttttctattgattggaatagt

SEQ ID NO: 87886 - DNA, 22 bp, synthetic construct
  misc_feature 1..22: note = chemically synthesized
  source 1..22: mol_type = other DNA
tttctattgattggaatagttt

SEQ ID NO: 87887 - DNA, 22 bp, synthetic construct
  misc_feature 1..22: note = chemically synthesized
  source 1..22: mol_type = other DNA
ttctattgattggaatagtttc

SEQ ID NO: 87888 - DNA, 22 bp, synthetic construct
  misc_feature 1..22: note = chemically synthesized
  source 1..22: mol_type = other DNA
tctattgattggaatagtttca

SEQ ID NO: 87889 - DNA, 22 bp, synthetic construct
  misc_feature 1..22: note = chemically synthesized
  source 1..22: mol_type = other DNA
ctattgattggaatagtttcag

SEQ ID NO: 87890 - DNA, 22 bp, synthetic construct
  misc_feature 1..22: note = chemically synthesized
  source 1..22: mol_type = other DNA
tattgattggaatagtttcaga

SEQ ID NO: 87891 - DNA, 22 bp, synthetic construct
  misc_feature 1..22: note = chemically synthesized
  source 1..22: mol_type = other DNA
ttgattggaatagtttcagaag

SEQ ID NO: 87892 - DNA, 22 bp, synthetic construct
  misc_feature 1..22: note = chemically synthesized
  source 1..22: mol_type = other DNA
attggaatagtttcagaaggaa

SEQ ID NO: 87893 - DNA, 22 bp, synthetic construct
  misc_feature 1..22: note = chemically synthesized
  source 1..22: mol_type = other DNA
gaatagtttcagaaggaatggt

SEQ ID NO: 87894 - DNA, 22 bp, synthetic construct
  misc_feature 1..22: note = chemically synthesized
  source 1..22: mol_type = other DNA
cagaaggaatggtaccagctcc

SEQ ID NO: 87895 - DNA, 22 bp, synthetic construct
  misc_feature 1..22: note = chemically synthesized
  source 1..22: mol_type = other DNA
agaaggaatggtaccagctcct

SEQ ID NO: 87896 - DNA, 22 bp, synthetic construct
  misc_feature 1..22: note = chemically synthesized
  source 1..22: mol_type = other DNA
ctccttgtacctctggtagaat

SEQ ID NO: 87897 - DNA, 22 bp, synthetic construct
  misc_feature 1..22: note = chemically synthesized
  source 1..22: mol_type = other DNA
cttgtacctctggtagaattcg

SEQ ID NO: 87898 - DNA, 22 bp, synthetic construct
  misc_feature 1..22: note = chemically synthesized
  source 1..22: mol_type = other DNA
gtacctctggtagaattcggct

SEQ ID NO: 87899 - DNA, 22 bp, synthetic construct
  misc_feature 1..22: note = chemically synthesized
  source 1..22: mol_type = other DNA
tacctctggtagaattcggcta

SEQ ID NO: 87900 - DNA, 22 bp, synthetic construct
  misc_feature 1..22: note = chemically synthesized
  source 1..22: mol_type = other DNA
tggtagaattcggctatgaatc

SEQ ID NO: 87901 - DNA, 22 bp, synthetic construct
  misc_feature 1..22: note = chemically synthesized
  source 1..22: mol_type = other DNA
gtagaattcggctatgaatcct

SEQ ID NO: 87902 - DNA, 22 bp, synthetic construct
  misc_feature 1..22: note = chemically synthesized
  source 1..22: mol_type = other DNA
ggctatgaatcctactggtccc

SEQ ID NO: 87903 - DNA, 22 bp, synthetic construct
  misc_feature 1..22: note = chemically synthesized
  source 1..22: mol_type = other DNA
tgaatcctactggtcccggact

SEQ ID NO: 87904 - DNA, 22 bp, synthetic construct
  misc_feature 1..22: note = chemically synthesized
  source 1..22: mol_type = other DNA
ctggtcccggactttttttggt

SEQ ID NO: 87905 - DNA, 22 bp, synthetic construct
  misc_feature 1..22: note = chemically synthesized
  source 1..22: mol_type = other DNA
gtcccggactttttttggttga

SEQ ID NO: 87906 - DNA, 22 bp, synthetic construct
  misc_feature 1..22: note = chemically synthesized
  source 1..22: mol_type = other DNA
tttttggttgataagctattaa

SEQ ID NO: 87907 - DNA, 22 bp, synthetic construct
  misc_feature 1..22: note = chemically synthesized
  source 1..22: mol_type = other DNA
ttttggttgataagctattaat

SEQ ID NO: 87908 - DNA, 22 bp, synthetic construct
  misc_feature 1..22: note = chemically synthesized
  source 1..22: mol_type = other DNA
tttggttgataagctattaatt

SEQ ID NO: 87909 - DNA, 22 bp, synthetic construct
  misc_feature 1..22: note = chemically synthesized
  source 1..22: mol_type = other DNA
ttggttgataagctattaatta

SEQ ID NO: 87910 - DNA, 22 bp, synthetic construct
  misc_feature 1..22: note = chemically synthesized
  source 1..22: mol_type = other DNA
tggttgataagctattaattat

SEQ ID NO: 87911 - DNA, 22 bp, synthetic construct
  misc_feature 1..22: note = chemically synthesized
  source 1..22: mol_type = other DNA
ggttgataagctattaattatt

SEQ ID NO: 87912 - DNA, 22 bp, synthetic construct
  misc_feature 1..22: note = chemically synthesized
  source 1..22: mol_type = other DNA
gttgataagctattaattattg

SEQ ID NO: 87913 - DNA, 22 bp, synthetic construct
  misc_feature 1..22: note = chemically synthesized
  source 1..22: mol_type = other DNA
ataagctattaattattgcctc

SEQ ID NO: 87914 - DNA, 22 bp, synthetic construct
  misc_feature 1..22: note = chemically synthesized
  source 1..22: mol_type = other DNA
ttaattattgcctcaatttcag

SEQ ID NO: 87915 - DNA, 22 bp, synthetic construct
  misc_feature 1..22: note = chemically synthesized
  source 1..22: mol_type = other DNA
attattgcctcaatttcagagc

SEQ ID NO: 87916 - DNA, 22 bp, synthetic construct
  misc_feature 1..22: note = chemically synthesized
  source 1..22: mol_type = other DNA
ttgcctcaatttcagagcctgt

SEQ ID NO: 87917 - DNA, 22 bp, synthetic construct
  misc_feature 1..22: note = chemically synthesized
  source 1..22: mol_type = other DNA
cctcaatttcagagcctgttat

SEQ ID NO: 87918 - DNA, 22 bp, synthetic construct
  misc_feature 1..22: note = chemically synthesized
  source 1..22: mol_type = other DNA
aatttcagagcctgttattggt

SEQ ID NO: 87919 - DNA, 22 bp, synthetic construct
  misc_feature 1..22: note = chemically synthesized
  source 1..22: mol_type = other DNA
cagagcctgttattggtctatt

SEQ ID NO: 87920 - DNA, 22 bp, synthetic construct
  misc_feature 1..22: note = chemically synthesized
  source 1..22: mol_type = other DNA
agagcctgttattggtctattc

SEQ ID NO: 87921 - DNA, 22 bp, synthetic construct
  misc_feature 1..22: note = chemically synthesized
  source 1..22: mol_type = other DNA
ttattggtctattcagagatac

SEQ ID NO: 87922 - DNA, 22 bp, synthetic construct
  misc_feature 1..22: note = chemically synthesized
  source 1..22: mol_type = other DNA
ttggtctattcagagatacaac

SEQ ID NO: 87923 - DNA, 22 bp, synthetic construct
  misc_feature 1..22: note = chemically synthesized
  source 1..22: mol_type = other DNA
gtctattcagagatacaacttc

SEQ ID NO: 87924 - DNA, 22 bp, synthetic construct
  misc_feature 1..22: note = chemically synthesized
  source 1..22: mol_type = other DNA
ttcagagatacaacttcttcct

SEQ ID NO: 87925 - DNA, 22 bp, synthetic construct
  misc_feature 1..22: note = chemically synthesized
  source 1..22: mol_type = other DNA
agagatacaacttcttcctggt

SEQ ID NO: 87926 - DNA, 22 bp, synthetic construct
  misc_feature 1..22: note = chemically synthesized
  source 1..22: mol_type = other DNA
cttcctggtttagtcttggcag

SEQ ID NO: 87927 - DNA, 22 bp, synthetic construct
  misc_feature 1..22: note = chemically synthesized
  source 1..22: mol_type = other DNA
ttcctggtttagtcttggcaga

SEQ ID NO: 87928 - DNA, 22 bp, synthetic construct
  misc_feature 1..22: note = chemically synthesized
  source 1..22: mol_type = other DNA
cctggtttagtcttggcagagt

SEQ ID NO: 87929 - DNA, 22 bp, synthetic construct
  misc_feature 1..22: note = chemically synthesized
  source 1..22: mol_type = other DNA
ctggtttagtcttggcagagtg

SEQ ID NO: 87930 - DNA, 22 bp, synthetic construct
  misc_feature 1..22: note = chemically synthesized
  source 1..22: mol_type = other DNA
gtttagtcttggcagagtgtat

SEQ ID NO: 87931 - DNA, 22 bp, synthetic construct
  misc_feature 1..22: note = chemically synthesized
  source 1..22: mol_type = other DNA
agtcttggcagagtgtatgtgt

SEQ ID NO: 87932 - DNA, 22 bp, synthetic construct
  misc_feature 1..22: note = chemically synthesized
  source 1..22: mol_type = other DNA
gtcttggcagagtgtatgtgtc

SEQ ID NO: 87933 - DNA, 22 bp, synthetic construct
  misc_feature 1..22: note = chemically synthesized
  source 1..22: mol_type = other DNA
ggcagagtgtatgtgtcgagga

SEQ ID NO: 87934 - DNA, 22 bp, synthetic construct
  misc_feature 1..22: note = chemically synthesized
  source 1..22: mol_type = other DNA
gcagagtgtatgtgtcgaggaa

SEQ ID NO: 87935 - DNA, 22 bp, synthetic construct
  misc_feature 1..22: note = chemically synthesized
  source 1..22: mol_type = other DNA
atccatttcttctagattttct

SEQ ID NO: 87936 - DNA, 22 bp, synthetic construct
  misc_feature 1..22: note = chemically synthesized
  source 1..22: mol_type = other DNA
tccatttcttctagattttcta

SEQ ID NO: 87937 - DNA, 22 bp, synthetic construct
  misc_feature 1..22: note = chemically synthesized
  source 1..22: mol_type = other DNA
cttctagattttctagtttatt

SEQ ID NO: 87938 - DNA, 22 bp, synthetic construct
  misc_feature 1..22: note = chemically synthesized
  source 1..22: mol_type = other DNA
ttctagattttctagtttattt

SEQ ID NO: 87939 - DNA, 22 bp, synthetic construct
  misc_feature 1..22: note = chemically synthesized
  source 1..22: mol_type = other DNA
ctagattttctagtttatttgc

SEQ ID NO: 87940 - DNA, 22 bp, synthetic construct
  misc_feature 1..22: note = chemically synthesized
  source 1..22: mol_type = other DNA
tagattttctagtttatttgcg

SEQ ID NO: 87941 - DNA, 22 bp, synthetic construct
  misc_feature 1..22: note = chemically synthesized
  source 1..22: mol_type = other DNA
gattttctagtttatttgcgta

SEQ ID NO: 87942 - DNA, 22 bp, synthetic construct
  misc_feature 1..22: note = chemically synthesized
  source 1..22: mol_type = other DNA
tctagtttatttgcgtagaggt

SEQ ID NO: 87943 - DNA, 22 bp, synthetic construct
  misc_feature 1..22: note = chemically synthesized
  source 1..22: mol_type = other DNA
ctagtttatttgcgtagaggtg

SEQ ID NO: 87944 - DNA, 22 bp, synthetic construct
  misc_feature 1..22: note = chemically synthesized
  source 1..22: mol_type = other DNA
tagtttatttgcgtagaggtgt

SEQ ID NO: 87945 - DNA, 22 bp, synthetic construct
  misc_feature 1..22: note = chemically synthesized
  source 1..22: mol_type = other DNA
gtttatttgcgtagaggtgttt

SEQ ID NO: 87946 - DNA, 22 bp, synthetic construct
  misc_feature 1..22: note = chemically synthesized
  source 1..22: mol_type = other DNA
atttgcgtagaggtgtttatag

SEQ ID NO: 87947 - DNA, 22 bp, synthetic construct
  misc_feature 1..22: note = chemically synthesized
  source 1..22: mol_type = other DNA
tttgcgtagaggtgtttatagt

SEQ ID NO: 87948 - DNA, 22 bp, synthetic construct
  misc_feature 1..22: note = chemically synthesized
  source 1..22: mol_type = other DNA
gcgtagaggtgtttatagtatt

SEQ ID NO: 87949 - DNA, 22 bp, synthetic construct
  misc_feature 1..22: note = chemically synthesized
  source 1..22: mol_type = other DNA
cgtagaggtgtttatagtattc

SEQ ID NO: 87950 - DNA, 22 bp, synthetic construct
  misc_feature 1..22: note = chemically synthesized
  source 1..22: mol_type = other DNA
atagtattctctgacggtagtt

SEQ ID NO: 87951 - DNA, 22 bp, synthetic construct
  misc_feature 1..22: note = chemically synthesized
  source 1..22: mol_type = other DNA
tagtattctctgacggtagttt

SEQ ID NO: 87952 - DNA, 22 bp, synthetic construct
  misc_feature 1..22: note = chemically synthesized
  source 1..22: mol_type = other DNA
tctgacggtagtttgtatttct

SEQ ID NO: 87953 - DNA, 22 bp, synthetic construct
  misc_feature 1..22: note = chemically synthesized
  source 1..22: mol_type = other DNA
tgacggtagtttgtatttctgt

SEQ ID NO: 87954 - DNA, 22 bp, synthetic construct
  misc_feature 1..22: note = chemically synthesized
  source 1..22: mol_type = other DNA
acggtagtttgtatttctgtgg

SEQ ID NO: 87955 - DNA, 22 bp, synthetic construct
  misc_feature 1..22: note = chemically synthesized
  source 1..22: mol_type = other DNA
gtatttctgtgggatcagtggt

SEQ ID NO: 87956 - DNA, 22 bp, synthetic construct
  misc_feature 1..22: note = chemically synthesized
  source 1..22: mol_type = other DNA
tatttctgtgggatcagtggtg

SEQ ID NO: 87957 - DNA, 22 bp, synthetic construct
  misc_feature 1..22: note = chemically synthesized
  source 1..22: mol_type = other DNA
ctgtgggatcagtggtgatacc

SEQ ID NO: 87958 - DNA, 22 bp, synthetic construct
  misc_feature 1..22: note = chemically synthesized
  source 1..22: mol_type = other DNA
tgtgggatcagtggtgataccc

SEQ ID NO: 87959 - DNA, 22 bp, synthetic construct
  misc_feature 1..22: note = chemically synthesized
  source 1..22: mol_type = other DNA
tgggatcagtggtgataccccg

SEQ ID NO: 87960 - DNA, 22 bp, synthetic construct
  misc_feature 1..22: note = chemically synthesized
  source 1..22: mol_type = other DNA
tttattgcgtctatttgattct

SEQ ID NO: 87961 - DNA, 22 bp, synthetic construct
  misc_feature 1..22: note = chemically synthesized
  source 1..22: mol_type = other DNA
ttattgcgtctatttgattctt

SEQ ID NO: 87962 - DNA, 22 bp, synthetic construct
  misc_feature 1..22: note = chemically synthesized
  source 1..22: mol_type = other DNA
tattgcgtctatttgattcttc

SEQ ID NO: 87963 - DNA, 22 bp, synthetic construct
  misc_feature 1..22: note = chemically synthesized
  source 1..22: mol_type = other DNA
attgcgtctatttgattcttct

SEQ ID NO: 87964 - DNA, 22 bp, synthetic construct
  misc_feature 1..22: note = chemically synthesized
  source 1..22: mol_type = other DNA
ttgcgtctatttgattcttctc

SEQ ID NO: 87965 - DNA, 22 bp, synthetic construct
  misc_feature 1..22: note = chemically synthesized
  source 1..22: mol_type = other DNA
cgtctatttgattcttctctct

SEQ ID NO: 87966 - DNA, 22 bp, synthetic construct
  misc_feature 1..22: note = chemically synthesized
  source 1..22: mol_type = other DNA
tttgattcttctctcttttctt

SEQ ID NO: 87967 - DNA, 22 bp, synthetic construct
  misc_feature 1..22: note = chemically synthesized
  source 1..22: mol_type = other DNA
gattcttctctcttttcttctt

SEQ ID NO: 87968 - DNA, 22 bp, synthetic construct
  misc_feature 1..22: note = chemically synthesized
  source 1..22: mol_type = other DNA
attcttctctcttttcttcttt

SEQ ID NO: 87969 - DNA, 22 bp, synthetic construct
  misc_feature 1..22: note = chemically synthesized
  source 1..22: mol_type = other DNA
ttctctcttttcttctttatta

SEQ ID NO: 87970 - DNA, 22 bp, synthetic construct
  misc_feature 1..22: note = chemically synthesized
  source 1..22: mol_type = other DNA
ctctcttttcttctttattagt

SEQ ID NO: 87971 - DNA, 22 bp, synthetic construct
  misc_feature 1..22: note = chemically synthesized
  source 1..22: mol_type = other DNA
tctcttttcttctttattagtc

SEQ ID NO: 87972 - DNA, 22 bp, synthetic construct
  misc_feature 1..22: note = chemically synthesized
  source 1..22: mol_type = other DNA
tcttttcttctttattagtctt

SEQ ID NO: 87973 - DNA, 22 bp, synthetic construct
  misc_feature 1..22: note = chemically synthesized
  source 1..22: mol_type = other DNA
ttttcttctttattagtcttgc

SEQ ID NO: 87974 - DNA, 22 bp, synthetic construct
  misc_feature 1..22: note = chemically synthesized
  source 1..22: mol_type = other DNA
ttcttctttattagtcttgcta

SEQ ID NO: 87975 - DNA, 22 bp, synthetic construct
  misc_feature 1..22: note = chemically synthesized
  source 1..22: mol_type = other DNA
tcttctttattagtcttgctag

SEQ ID NO: 87976 - DNA, 22 bp, synthetic construct
  misc_feature 1..22: note = chemically synthesized
  source 1..22: mol_type = other DNA
cttctttattagtcttgctagc

SEQ ID NO: 87977 - DNA, 22 bp, synthetic construct
  misc_feature 1..22: note = chemically synthesized
  source 1..22: mol_type = other DNA
ttctttattagtcttgctagca

SEQ ID NO: 87978 - DNA, 22 bp, synthetic construct
  misc_feature 1..22: note = chemically synthesized
  source 1..22: mol_type = other DNA
ctttattagtcttgctagcagt

SEQ ID NO: 87979 - DNA, 22 bp, synthetic construct
  misc_feature 1..22: note = chemically synthesized
  source 1..22: mol_type = other DNA
tttattagtcttgctagcagtc

SEQ ID NO: 87980 - DNA, 22 bp, synthetic construct
  misc_feature 1..22: note = chemically synthesized
  source 1..22: mol_type = other DNA
tattagtcttgctagcagtcta

SEQ ID NO: 87981 - DNA, 22 bp, synthetic construct
  misc_feature 1..22: note = chemically synthesized
  source 1..22: mol_type = other DNA
attagtcttgctagcagtctat

SEQ ID NO: 87982 - DNA, 22 bp, synthetic construct
  misc_feature 1..22: note = chemically synthesized
  source 1..22: mol_type = other DNA
ttagtcttgctagcagtctatc

SEQ ID NO: 87983 - DNA, 22 bp, synthetic construct
  misc_feature 1..22: note = chemically synthesized
  source 1..22: mol_type = other DNA
gtcttgctagcagtctatcaat

SEQ ID NO: 87984 - DNA, 22 bp, synthetic construct
  misc_feature 1..22: note = chemically synthesized
  source 1..22: mol_type = other DNA
gctagcagtctatcaattttgt

SEQ ID NO: 87985 - DNA, 22 bp, synthetic construct
  misc_feature 1..22: note = chemically synthesized
  source 1..22: mol_type = other DNA
ctagcagtctatcaattttgtt

SEQ ID NO: 87986 - DNA, 22 bp, synthetic construct
  misc_feature 1..22: note = chemically synthesized
  source 1..22: mol_type = other DNA
gcagtctatcaattttgttgat

SEQ ID NO: 87987 - DNA, 22 bp, synthetic construct
  misc_feature 1..22: note = chemically synthesized
  source 1..22: mol_type = other DNA
tcaattttgttgatcttttcaa

SEQ ID NO: 87988 - DNA, 22 bp, synthetic construct
  misc_feature 1..22: note = chemically synthesized
  source 1..22: mol_type = other DNA
tgttgatcttttcaaaaaaaca

SEQ ID NO: 87989 - DNA, 22 bp, synthetic construct
  misc_feature 1..22: note = chemically synthesized
  source 1..22: mol_type = other DNA
gttgatcttttcaaaaaaacag

SEQ ID NO: 87990 - DNA, 22 bp, synthetic construct
  misc_feature 1..22: note = chemically synthesized
  source 1..22: mol_type = other DNA
ttgatcttttcaaaaaaacagc

SEQ ID NO: 87991 - DNA, 22 bp, synthetic construct
  misc_feature 1..22: note = chemically synthesized
  source 1..22: mol_type = other DNA
atcttttcaaaaaaacagcttc

SEQ ID NO: 87992 - DNA, 22 bp, synthetic construct
  misc_feature 1..22: note = chemically synthesized
  source 1..22: mol_type = other DNA
ttcaaaaaaacagcttctggat

SEQ ID NO: 87993 - DNA, 22 bp, synthetic construct
  misc_feature 1..22: note = chemically synthesized
  source 1..22: mol_type = other DNA
tcaaaaaaacagcttctggatt

SEQ ID NO: 87994 - DNA, 22 bp, synthetic construct
  misc_feature 1..22: note = chemically synthesized
  source 1..22: mol_type = other DNA
caaaaaaacagcttctggattc

SEQ ID NO: 87995 - DNA, 22 bp, synthetic construct
  misc_feature 1..22: note = chemically synthesized
  source 1..22: mol_type = other DNA
aaaaaaacagcttctggattca

SEQ ID NO: 87996 - DNA, 22 bp, synthetic construct
  misc_feature 1..22: note = chemically synthesized
  source 1..22: mol_type = other DNA
ctggattcattgatttttttga

SEQ ID NO: 87997 - DNA, 22 bp, synthetic construct
  misc_feature 1..22: note = chemically synthesized
  source 1..22: mol_type = other DNA
tggattcattgatttttttgaa

SEQ ID NO: 87998 - DNA, 22 bp, synthetic construct
  misc_feature 1..22: note = chemically synthesized
  source 1..22: mol_type = other DNA
gattcattgatttttttgaagg

SEQ ID NO: 87999 - DNA, 22 bp, synthetic construct
  misc_feature 1..22: note = chemically synthesized
  source 1..22: mol_type = other DNA
attgatttttttgaagggtttt

SEQ ID NO: 88000 - DNA, 22 bp, synthetic construct
  misc_feature 1..22: note = chemically synthesized
  source 1..22: mol_type = other DNA
atttttttgaagggtttttttg

SEQ ID NO: 88001 - DNA, 22 bp, synthetic construct
  misc_feature 1..22: note = chemically synthesized
  source 1..22: mol_type = other DNA
ttttgaagggtttttttgtgtc

SEQ ID NO: 88002 - DNA, 22 bp, synthetic construct
  misc_feature 1..22: note = chemically synthesized
  source 1..22: mol_type = other DNA
tttgaagggtttttttgtgtct

SEQ ID NO: 88003 - DNA, 22 bp, synthetic construct
  misc_feature 1..22: note = chemically synthesized
  source 1..22: mol_type = other DNA
ttgaagggtttttttgtgtctc

SEQ ID NO: 88004 - DNA, 22 bp, synthetic construct
  misc_feature 1..22: note = chemically synthesized
  source 1..22: mol_type = other DNA
tgaagggtttttttgtgtctct

SEQ ID NO: 88005 - DNA, 22 bp, synthetic construct
  misc_feature 1..22: note = chemically synthesized
  source 1..22: mol_type = other DNA
gaagggtttttttgtgtctcta

SEQ ID NO: 88006 - DNA, 22 bp, synthetic construct
  misc_feature 1..22: note = chemically synthesized
  source 1..22: mol_type = other DNA
aagggtttttttgtgtctctat

SEQ ID NO: 88007 - DNA, 22 bp, synthetic construct
  misc_feature 1..22: note = chemically synthesized
  source 1..22: mol_type = other DNA
ttttgtgtctctatgtccttca

SEQ ID NO: 88008 - DNA, 22 bp, synthetic construct
  misc_feature 1..22: note = chemically synthesized
  source 1..22: mol_type = other DNA
tttgtgtctctatgtccttcac

SEQ ID NO: 88009 - DNA, 22 bp, synthetic construct
  misc_feature 1..22: note = chemically synthesized
  source 1..22: mol_type = other DNA
ttgtgtctctatgtccttcact

SEQ ID NO: 88010 - DNA, 22 bp, synthetic construct
  misc_feature 1..22: note = chemically synthesized
  source 1..22: mol_type = other DNA
tgtgtctctatgtccttcactt

SEQ ID NO: 88011 - DNA, 22 bp, synthetic construct
  misc_feature 1..22: note = chemically synthesized
  source 1..22: mol_type = other DNA
gtgtctctatgtccttcacttc

SEQ ID NO: 88012 - DNA, 22 bp, synthetic construct
  misc_feature 1..22: note = chemically synthesized
  source 1..22: mol_type = other DNA
tgtctctatgtccttcacttct

SEQ ID NO: 88013 - DNA, 22 bp, synthetic construct
  misc_feature 1..22: note = chemically synthesized
  source 1..22: mol_type = other DNA
tatgtccttcacttctgctctg

SEQ ID NO: 88014 - DNA, 22 bp, synthetic construct
  misc_feature 1..22: note = chemically synthesized
  source 1..22: mol_type = other DNA
tgtccttcacttctgctctgat

SEQ ID NO: 88015 - DNA, 22 bp, synthetic construct
  misc_feature 1..22: note = chemically synthesized
  source 1..22: mol_type = other DNA
cacttctgctctgatcttagtt

SEQ ID NO: 88016 - DNA, 22 bp, synthetic construct
  misc_feature 1..22: note = chemically synthesized
  source 1..22: mol_type = other DNA
acttctgctctgatcttagtta

SEQ ID NO: 88017 - DNA, 22 bp, synthetic construct
  misc_feature 1..22: note = chemically synthesized
  source 1..22: mol_type = other DNA
ctgctctgatcttagttatttc

SEQ ID NO: 88018 - DNA, 22 bp, synthetic construct
  misc_feature 1..22: note = chemically synthesized
  source 1..22: mol_type = other DNA
tgctctgatcttagttatttct

SEQ ID NO: 88019 - DNA, 22 bp, synthetic construct
  misc_feature 1..22: note = chemically synthesized
  source 1..22: mol_type = other DNA
ctctgatcttagttatttcttg

SEQ ID NO: 88020 - DNA, 22 bp, synthetic construct
  misc_feature 1..22: note = chemically synthesized
  source 1..22: mol_type = other DNA
tgatcttagttatttcttgtct

SEQ ID NO: 88021 - DNA, 22 bp, synthetic construct
  misc_feature 1..22: note = chemically synthesized
  source 1..22: mol_type = other DNA
atcttagttatttcttgtcttc

SEQ ID NO: 88022 - DNA, 22 bp, synthetic construct
  misc_feature 1..22: note = chemically synthesized
  source 1..22: mol_type = other DNA
agttatttcttgtcttctgtta

SEQ ID NO: 88023 - DNA, 22 bp, synthetic construct
  misc_feature 1..22: note = chemically synthesized
  source 1..22: mol_type = other DNA
gttatttcttgtcttctgttag

SEQ ID NO: 88024 - DNA, 22 bp, synthetic construct
  misc_feature 1..22: note = chemically synthesized
  source 1..22: mol_type = other DNA
tttcttgtcttctgttagcttt

SEQ ID NO: 88025 - DNA, 22 bp, synthetic construct
  misc_feature 1..22: note = chemically synthesized
  source 1..22: mol_type = other DNA
cttgtcttctgttagcttttga

SEQ ID NO: 88026 - DNA, 22 bp, synthetic construct
  misc_feature 1..22: note = chemically synthesized
  source 1..22: mol_type = other DNA
ttgtcttctgttagcttttgaa

SEQ ID NO: 88027 - DNA, 22 bp, synthetic construct
  misc_feature 1..22: note = chemically synthesized
  source 1..22: mol_type = other DNA
gtcttctgttagcttttgaatg

SEQ ID NO: 88028 - DNA, 22 bp, synthetic construct
  misc_feature 1..22: note = chemically synthesized
  source 1..22: mol_type = other DNA
tcttctgttagcttttgaatgt

SEQ ID NO: 88029 - DNA, 22 bp, synthetic construct
  misc_feature 1..22: note = chemically synthesized
  source 1..22: mol_type = other DNA
ctgttagcttttgaatgtgttt

SEQ ID NO: 88030 - DNA, 22 bp, synthetic construct
  misc_feature 1..22: note = chemically synthesized
  source 1..22: mol_type = other DNA
tgttagcttttgaatgtgtttg

SEQ ID NO: 88031 - DNA, 22 bp, synthetic construct
  misc_feature 1..22: note = chemically synthesized
  source 1..22: mol_type = other DNA
ttagcttttgaatgtgtttgct

SEQ ID NO: 88032 - DNA, 22 bp, synthetic construct
  misc_feature 1..22: note = chemically synthesized
  source 1..22: mol_type = other DNA
gcttttgaatgtgtttgctcct

SEQ ID NO: 88033 - DNA, 22 bp, synthetic construct
  misc_feature 1..22: note = chemically synthesized
  source 1..22: mol_type = other DNA
ttgaatgtgtttgctcctgctt

SEQ ID NO: 88034 - DNA, 22 bp, synthetic construct
  misc_feature 1..22: note = chemically synthesized
  source 1..22: mol_type = other DNA
tgaatgtgtttgctcctgcttc

SEQ ID NO: 88035 - DNA, 22 bp, synthetic construct
  misc_feature 1..22: note = chemically synthesized
  source 1..22: mol_type = other DNA
gaatgtgtttgctcctgcttct

SEQ ID NO: 88036 - DNA, 22 bp, synthetic construct
  misc_feature 1..22: note = chemically synthesized
  source 1..22: mol_type = other DNA
aatgtgtttgctcctgcttctc

SEQ ID NO: 88037 - DNA, 22 bp, synthetic construct
  misc_feature 1..22: note = chemically synthesized
  source 1..22: mol_type = other DNA
gctcctgcttctctagtttttt

SEQ ID NO: 88038 - DNA, 22 bp, synthetic construct
  misc_feature 1..22: note = chemically synthesized
  source 1..22: mol_type = other DNA
ctcctgcttctctagtttttta

SEQ ID NO: 88039 - DNA, 22 bp, synthetic construct
  misc_feature 1..22: note = chemically synthesized
  source 1..22: mol_type = other DNA
ctgcttctctagttttttaatt

SEQ ID NO: 88040 - DNA, 22 bp, synthetic construct
  misc_feature 1..22: note = chemically synthesized
  source 1..22: mol_type = other DNA
cttctctagttttttaattgtg

SEQ ID NO: 88041 - DNA, 22 bp, synthetic construct
  misc_feature 1..22: note = chemically synthesized
  source 1..22: mol_type = other DNA
ctctagttttttaattgtgatg

SEQ ID NO: 88042 - DNA, 22 bp, synthetic construct
  misc_feature 1..22: note = chemically synthesized
  source 1..22: mol_type = other DNA
tctagttttttaattgtgatgt

SEQ ID NO: 88043 - DNA, 22 bp, synthetic construct
  misc_feature 1..22: note = chemically synthesized
  source 1..22: mol_type = other DNA
tagttttttaattgtgatgtta

SEQ ID NO: 88044 - DNA, 22 bp, synthetic construct
  misc_feature 1..22: note = chemically synthesized
  source 1..22: mol_type = other DNA
gttttttaattgtgatgttagg

SEQ ID NO: 88045 - DNA, 22 bp, synthetic construct
  misc_feature 1..22: note = chemically synthesized
  source 1..22: mol_type = other DNA
tttaattgtgatgttagggtgt

SEQ ID NO: 88046 - DNA, 22 bp, synthetic construct
  misc_feature 1..22: note = chemically synthesized
  source 1..22: mol_type = other DNA
ttaattgtgatgttagggtgtc

SEQ ID NO: 88047 - DNA, 22 bp, synthetic construct
  misc_feature 1..22: note = chemically synthesized
  source 1..22: mol_type = other DNA
taattgtgatgttagggtgtca

SEQ ID NO: 88048 - DNA, 22 bp, synthetic construct
  misc_feature 1..22: note = chemically synthesized
  source 1..22: mol_type = other DNA
aattgtgatgttagggtgtcaa

SEQ ID NO: 88049 - DNA, 22 bp, synthetic construct
  misc_feature 1..22: note = chemically synthesized
  source 1..22: mol_type = other DNA
attgtgatgttagggtgtcaat

SEQ ID NO: 88050 - DNA, 22 bp, synthetic construct
  misc_feature 1..22: note = chemically synthesized
  source 1..22: mol_type = other DNA
tgatgttagggtgtcaatttta

SEQ ID NO: 88051 - DNA, 22 bp, synthetic construct
  misc_feature 1..22: note = chemically synthesized
  source 1..22: mol_type = other DNA
gggtgtcaattttagatctttc

SEQ ID NO: 88052 - DNA, 22 bp, synthetic construct
  misc_feature 1..22: note = chemically synthesized
  source 1..22: mol_type = other DNA
tagatctttcctgctttccctt

SEQ ID NO: 88053 - DNA, 22 bp, synthetic construct
  misc_feature 1..22: note = chemically synthesized
  source 1..22: mol_type = other DNA
agatctttcctgctttcccttg

SEQ ID NO: 88054 - DNA, 22 bp, synthetic construct
  misc_feature 1..22: note = chemically synthesized
  source 1..22: mol_type = other DNA
gatctttcctgctttcccttgt

SEQ ID NO: 88055 - DNA, 22 bp, synthetic construct
  misc_feature 1..22: note = chemically synthesized
  source 1..22: mol_type = other DNA
tcctgctttcccttgtgggcat

SEQ ID NO: 88056 - DNA, 22 bp, synthetic construct
  misc_feature 1..22: note = chemically synthesized
  source 1..22: mol_type = other DNA
cctgctttcccttgtgggcatt

SEQ ID NO: 88057 - DNA, 22 bp, synthetic construct
  misc_feature 1..22: note = chemically synthesized
  source 1..22: mol_type = other DNA
ctgctttcccttgtgggcattt

SEQ ID NO: 88058 - DNA, 22 bp, synthetic construct
  misc_feature 1..22: note = chemically synthesized
  source 1..22: mol_type = other DNA
ctttcccttgtgggcatttagt

SEQ ID NO: 88059 - DNA, 22 bp, synthetic construct
  misc_feature 1..22: note = chemically synthesized
  source 1..22: mol_type = other DNA
tcccttgtgggcatttagtgct

SEQ ID NO: 88060 - DNA, 22 bp, synthetic construct
  misc_feature 1..22: note = chemically synthesized
  source 1..22: mol_type = other DNA
cccttgtgggcatttagtgcta

SEQ ID NO: 88061 - DNA, 22 bp, synthetic construct
  misc_feature 1..22: note = chemically synthesized
  source 1..22: mol_type = other DNA
ccttgtgggcatttagtgctat

SEQ ID NO: 88062 - DNA, 22 bp, synthetic construct
  misc_feature 1..22: note = chemically synthesized
  source 1..22: mol_type = other DNA
gtgggcatttagtgctataaat

SEQ ID NO: 88063 - DNA, 22 bp, synthetic construct
  misc_feature 1..22: note = chemically synthesized
  source 1..22: mol_type = other DNA
tgggcatttagtgctataaatt

SEQ ID NO: 88064 - DNA, 22 bp, synthetic construct
  misc_feature 1..22: note = chemically synthesized
  source 1..22: mol_type = other DNA
agtgctataaatttccctctac

SEQ ID NO: 88065 - DNA, 22 bp, synthetic construct
  misc_feature 1..22: note = chemically synthesized
  source 1..22: mol_type = other DNA
gtgctataaatttccctctaca

SEQ ID NO: 88066 - DNA, 22 bp, synthetic construct
  misc_feature 1..22: note = chemically synthesized
  source 1..22: mol_type = other DNA
taaatttccctctacacactgc

SEQ ID NO: 88067 - DNA, 22 bp, synthetic construct
  misc_feature 1..22: note = chemically synthesized
  source 1..22: mol_type = other DNA
ccctctacacactgctttgaat

SEQ ID NO: 88068 - DNA, 22 bp, synthetic construct
  misc_feature 1..22: note = chemically synthesized
  source 1..22: mol_type = other DNA
cctctacacactgctttgaatg

SEQ ID NO: 88069 - DNA, 22 bp, synthetic construct
  misc_feature 1..22: note = chemically synthesized
  source 1..22: mol_type = other DNA
tacacactgctttgaatgtgtc

SEQ ID NO: 88070 - DNA, 22 bp, synthetic construct
  misc_feature 1..22: note = chemically synthesized
  source 1..22: mol_type = other DNA
cacactgctttgaatgtgtctc

SEQ ID NO: 88071 - DNA, 22 bp, synthetic construct
  misc_feature 1..22: note = chemically synthesized
  source 1..22: mol_type = other DNA
ctttgaatgtgtctcagagatt

SEQ ID NO: 88072 - DNA, 22 bp, synthetic construct
  misc_feature 1..22: note = chemically synthesized
  source 1..22: mol_type = other DNA
tgaatgtgtctcagagattctg

SEQ ID NO: 88073 - DNA, 22 bp, synthetic construct
  misc_feature 1..22: note = chemically synthesized
  source 1..22: mol_type = other DNA
gaatgtgtctcagagattctgg

SEQ ID NO: 88074 - DNA, 22 bp, synthetic construct
  misc_feature 1..22: note = chemically synthesized
  source 1..22: mol_type = other DNA
aatgtgtctcagagattctggt

SEQ ID NO: 88075 - DNA, 22 bp, synthetic construct
  misc_feature 1..22: note = chemically synthesized
  source 1..22: mol_type = other DNA
agagattctggtgtgttgtgtc

SEQ ID NO: 88076 - DNA, 22 bp, synthetic construct
  misc_feature 1..22: note = chemically synthesized
  source 1..22: mol_type = other DNA
tggtgtgttgtgtctttgttct

SEQ ID NO: 88077 - DNA, 22 bp, synthetic construct
  misc_feature 1..22: note = chemically synthesized
  source 1..22: mol_type = other DNA
gtgtgttgtgtctttgttctcg

SEQ ID NO: 88078 - DNA, 22 bp, synthetic construct
  misc_feature 1..22: note = chemically synthesized
  source 1..22: mol_type = other DNA
tgtctttgttctcgttggtttc

SEQ ID NO: 88079 - DNA, 22 bp, synthetic construct
  misc_feature 1..22: note = chemically synthesized
  source 1..22: mol_type = other DNA
tgttctcgttggtttcaaagaa

SEQ ID NO: 88080 - DNA, 22 bp, synthetic construct
  misc_feature 1..22: note = chemically synthesized
  source 1..22: mol_type = other DNA
gttctcgttggtttcaaagaac

SEQ ID NO: 88081 - DNA, 22 bp, synthetic construct
  misc_feature 1..22: note = chemically synthesized
  source 1..22: mol_type = other DNA
ttctcgttggtttcaaagaaca

SEQ ID NO: 88082 - DNA, 22 bp, synthetic construct
  misc_feature 1..22: note = chemically synthesized
  source 1..22: mol_type = other DNA
tcgttggtttcaaagaacatct

SEQ ID NO: 88083 - DNA, 22 bp, synthetic construct
  misc_feature 1..22: note = chemically synthesized
  source 1..22: mol_type = other DNA
gttggtttcaaagaacatcttt

SEQ ID NO: 88084 - DNA, 22 bp, synthetic construct
  misc_feature 1..22: note = chemically synthesized
  source 1..22: mol_type = other DNA
gtttcaaagaacatctttattt

SEQ ID NO: 88085 - DNA, 22 bp, synthetic construct
  misc_feature 1..22: note = chemically synthesized
  source 1..22: mol_type = other DNA
caaagaacatctttatttctgc

SEQ ID NO: 88086 - DNA, 22 bp, synthetic construct
  misc_feature 1..22: note = chemically synthesized
  source 1..22: mol_type = other DNA
aaagaacatctttatttctgcc

SEQ ID NO: 88087 - DNA, 22 bp, synthetic construct
  misc_feature 1..22: note = chemically synthesized
  source 1..22: mol_type = other DNA
tatttctgccttcattttgtta

SEQ ID NO: 88088 - DNA, 22 bp, synthetic construct
  misc_feature 1..22: note = chemically synthesized
  source 1..22: mol_type = other DNA
atttctgccttcattttgttat

SEQ ID NO: 88089 - DNA, 22 bp, synthetic construct
  misc_feature 1..22: note = chemically synthesized
  source 1..22: mol_type = other DNA
tttctgccttcattttgttatg

SEQ ID NO: 88090 - DNA, 22 bp, synthetic construct
  misc_feature 1..22: note = chemically synthesized
  source 1..22: mol_type = other DNA
ctgccttcattttgttatgtac

SEQ ID NO: 88091 - DNA, 22 bp, synthetic construct
  misc_feature 1..22: note = chemically synthesized
  source 1..22: mol_type = other DNA
tgccttcattttgttatgtacc

SEQ ID NO: 88092 - DNA, 22 bp, synthetic construct
  misc_feature 1..22: note = chemically synthesized
  source 1..22: mol_type = other DNA
ccttcattttgttatgtaccca

SEQ ID NO: 88093 - DNA, 22 bp, synthetic construct
  misc_feature 1..22: note = chemically synthesized
  source 1..22: mol_type = other DNA
cattttgttatgtacccagtag

SEQ ID NO: 88094 - DNA, 22 bp, synthetic construct
  misc_feature 1..22: note = chemically synthesized
  source 1..22: mol_type = other DNA
attttgttatgtacccagtagt

SEQ ID NO: 88095 - DNA, 22 bp, synthetic construct
  misc_feature 1..22: note = chemically synthesized
  source 1..22: mol_type = other DNA
tgttatgtacccagtagtcatt

SEQ ID NO: 88096 - DNA, 22 bp, synthetic construct
  misc_feature 1..22: note = chemically synthesized
  source 1..22: mol_type = other DNA
gttatgtacccagtagtcattc

SEQ ID NO: 88097 - DNA, 22 bp, synthetic construct
  misc_feature 1..22: note = chemically synthesized
  source 1..22: mol_type = other DNA
ttatgtacccagtagtcattca

SEQ ID NO: 88098 - DNA, 22 bp, synthetic construct
  misc_feature 1..22: note = chemically synthesized
  source 1..22: mol_type = other DNA
tgtacccagtagtcattcagga

SEQ ID NO: 88099 - DNA, 22 bp, synthetic construct
  misc_feature 1..22: note = chemically synthesized
  source 1..22: mol_type = other DNA
aggagcaggctgttcagtttcc

SEQ ID NO: 88100 - DNA, 22 bp, synthetic construct
  misc_feature 1..22: note = chemically synthesized
  source 1..22: mol_type = other DNA
ttcagtttccatgtagctgagt

SEQ ID NO: 88101 - DNA, 22 bp, synthetic construct
  misc_feature 1..22: note = chemically synthesized
  source 1..22: mol_type = other DNA
agtttccatgtagctgagtggt

SEQ ID NO: 88102 - DNA, 22 bp, synthetic construct
  misc_feature 1..22: note = chemically synthesized
  source 1..22: mol_type = other DNA
ccatgtagctgagtggttttga

SEQ ID NO: 88103 - DNA, 22 bp, synthetic construct
  misc_feature 1..22: note = chemically synthesized
  source 1..22: mol_type = other DNA
catgtagctgagtggttttgag

SEQ ID NO: 88104 - DNA, 22 bp, synthetic construct
  misc_feature 1..22: note = chemically synthesized
  source 1..22: mol_type = other DNA
agtggttttgagtgagtttctt

SEQ ID NO: 88105 - DNA, 22 bp, synthetic construct
  misc_feature 1..22: note = chemically synthesized
  source 1..22: mol_type = other DNA
tgagtgagtttcttaatcctga

SEQ ID NO: 88106 - DNA, 22 bp, synthetic construct
  misc_feature 1..22: note = chemically synthesized
  source 1..22: mol_type = other DNA
gagtgagtttcttaatcctgag

SEQ ID NO: 88107 - DNA, 22 bp, synthetic construct
  misc_feature 1..22: note = chemically synthesized
  source 1..22: mol_type = other DNA
agtgagtttcttaatcctgagt

SEQ ID NO: 88108 - DNA, 22 bp, synthetic construct
  misc_feature 1..22: note = chemically synthesized
  source 1..22: mol_type = other DNA
cttaatcctgagttctagtttg

SEQ ID NO: 88109 - DNA, 22 bp, synthetic construct
  misc_feature 1..22: note = chemically synthesized
  source 1..22: mol_type = other DNA
ttaatcctgagttctagtttga

SEQ ID NO: 88110 - DNA, 22 bp, synthetic construct
  misc_feature 1..22: note = chemically synthesized
  source 1..22: mol_type = other DNA
aatcctgagttctagtttgatt

SEQ ID NO: 88111 - DNA, 22 bp, synthetic construct
  misc_feature 1..22: note = chemically synthesized
  source 1..22: mol_type = other DNA
atcctgagttctagtttgattg

SEQ ID NO: 88112 - DNA, 22 bp, synthetic construct
  misc_feature 1..22: note = chemically synthesized
  source 1..22: mol_type = other DNA
agttctagtttgattgcactgt

SEQ ID NO: 88113 - DNA, 22 bp, synthetic construct
  misc_feature 1..22: note = chemically synthesized
  source 1..22: mol_type = other DNA
tagtttgattgcactgtggtct

SEQ ID NO: 88114 - DNA, 22 bp, synthetic construct
  misc_feature 1..22: note = chemically synthesized
  source 1..22: mol_type = other DNA
gtttgattgcactgtggtctga

SEQ ID NO: 88115 - DNA, 22 bp, synthetic construct
  misc_feature 1..22: note = chemically synthesized
  source 1..22: mol_type = other DNA
gattgcactgtggtctgagaga

SEQ ID NO: 88116 - DNA, 22 bp, synthetic construct
  misc_feature 1..22: note = chemically synthesized
  source 1..22: mol_type = other DNA
attgcactgtggtctgagagac

SEQ ID NO: 88117 - DNA, 22 bp, synthetic construct
  misc_feature 1..22: note = chemically synthesized
  source 1..22: mol_type = other DNA
cactgtggtctgagagacagtt

SEQ ID NO: 88118 - DNA, 22 bp, synthetic construct
  misc_feature 1..22: note = chemically synthesized
  source 1..22: mol_type = other DNA
tggtctgagagacagtttgtta

SEQ ID NO: 88119 - DNA, 22 bp, synthetic construct
  misc_feature 1..22: note = chemically synthesized
  source 1..22: mol_type = other DNA
agagacagtttgttatagtttc

SEQ ID NO: 88120 - DNA, 22 bp, synthetic construct
  misc_feature 1..22: note = chemically synthesized
  source 1..22: mol_type = other DNA
gttatagtttctgttcttttac

SEQ ID NO: 88121 - DNA, 22 bp, synthetic construct
  misc_feature 1..22: note = chemically synthesized
  source 1..22: mol_type = other DNA
ttatagtttctgttcttttaca

SEQ ID NO: 88122 - DNA, 22 bp, synthetic construct
  misc_feature 1..22: note = chemically synthesized
  source 1..22: mol_type = other DNA
tagtttctgttcttttacattt

SEQ ID NO: 88123 - DNA, 22 bp, synthetic construct
  misc_feature 1..22: note = chemically synthesized
  source 1..22: mol_type = other DNA
ctgttcttttacatttgctgag

SEQ ID NO: 88124 - DNA, 22 bp, synthetic construct
  misc_feature 1..22: note = chemically synthesized
  source 1..22: mol_type = other DNA
tgttcttttacatttgctgagg

SEQ ID NO: 88125 - DNA, 22 bp, synthetic construct
  misc_feature 1..22: note = chemically synthesized
  source 1..22: mol_type = other DNA
ttcttttacatttgctgaggag

SEQ ID NO: 88126 - DNA, 22 bp, synthetic construct
  misc_feature 1..22: note = chemically synthesized
  source 1..22: mol_type = other DNA
ttttacatttgctgaggagagc

SEQ ID NO: 88127 - DNA, 22 bp, synthetic construct
  misc_feature 1..22: note = chemically synthesized
  source 1..22: mol_type = other DNA
ttacatttgctgaggagagctt

SEQ ID NO: 88128 - DNA, 22 bp, synthetic construct
  misc_feature 1..22: note = chemically synthesized
  source 1..22: mol_type = other DNA
tacatttgctgaggagagcttt

SEQ ID NO: 88129 - DNA, 22 bp, synthetic construct
  misc_feature 1..22: note = chemically synthesized
  source 1..22: mol_type = other DNA
acatttgctgaggagagcttta

SEQ ID NO: 88130 - DNA, 22 bp, synthetic construct
  misc_feature 1..22: note = chemically synthesized
  source 1..22: mol_type = other DNA
catttgctgaggagagctttac

SEQ ID NO: 88131 - DNA, 22 bp, synthetic construct
  misc_feature 1..22: note = chemically synthesized
  source 1..22: mol_type = other DNA
gctgaggagagctttacttcca

SEQ ID NO: 88132 - DNA, 22 bp, synthetic construct
  misc_feature 1..22: note = chemically synthesized
  source 1..22: mol_type = other DNA
ctgaggagagctttacttccaa

SEQ ID NO: 88133 - DNA, 22 bp, synthetic construct
  misc_feature 1..22: note = chemically synthesized
  source 1..22: mol_type = other DNA
aggagagctttacttccaacta

SEQ ID NO: 88134 - DNA, 22 bp, synthetic construct
  misc_feature 1..22: note = chemically synthesized
  source 1..22: mol_type = other DNA
tacttccaactatgtggtcagt

SEQ ID NO: 88135 - DNA, 22 bp, synthetic construct
  misc_feature 1..22: note = chemically synthesized
  source 1..22: mol_type = other DNA
acttccaactatgtggtcagtt

SEQ ID NO: 88136 - DNA, 22 bp, synthetic construct
  misc_feature 1..22: note = chemically synthesized
  source 1..22: mol_type = other DNA
cttccaactatgtggtcagttt

SEQ ID NO: 88137 - DNA, 22 bp, synthetic construct
  misc_feature 1..22: note = chemically synthesized
  source 1..22: mol_type = other DNA
ccaactatgtggtcagttttgg

SEQ ID NO: 88138 - DNA, 22 bp, synthetic construct
  misc_feature 1..22: note = chemically synthesized
  source 1..22: mol_type = other DNA
caactatgtggtcagttttgga

SEQ ID NO: 88139 - DNA, 22 bp, synthetic construct
  misc_feature 1..22: note = chemically synthesized
  source 1..22: mol_type = other DNA
tgtggtcagttttggaataggt

SEQ ID NO: 88140 - DNA, 22 bp, synthetic construct
  misc_feature 1..22: note = chemically synthesized
  source 1..22: mol_type = other DNA
tggaataggtgtggtgtggtgc

SEQ ID NO: 88141 - DNA, 22 bp, synthetic construct
  misc_feature 1..22: note = chemically synthesized
  source 1..22: mol_type = other DNA
ggaataggtgtggtgtggtgct

SEQ ID NO: 88142 - DNA, 22 bp, synthetic construct
  misc_feature 1..22: note = chemically synthesized
  source 1..22: mol_type = other DNA
gaataggtgtggtgtggtgctg

SEQ ID NO: 88143 - DNA, 22 bp, synthetic construct
  misc_feature 1..22: note = chemically synthesized
  source 1..22: mol_type = other DNA
aaaagaatgtatattctgttga

SEQ ID NO: 88144 - DNA, 22 bp, synthetic construct
  misc_feature 1..22: note = chemically synthesized
  source 1..22: mol_type = other DNA
tgttgatttggggtggagagtt

SEQ ID NO: 88145 - DNA, 22 bp, synthetic construct
  misc_feature 1..22: note = chemically synthesized
  source 1..22: mol_type = other DNA
ttgatttggggtggagagttct

SEQ ID NO: 88146 - DNA, 22 bp, synthetic construct
  misc_feature 1..22: note = chemically synthesized
  source 1..22: mol_type = other DNA
atttggggtggagagttctgta

SEQ ID NO: 88147 - DNA, 22 bp, synthetic construct
  misc_feature 1..22: note = chemically synthesized
  source 1..22: mol_type = other DNA
ggggtggagagttctgtagatg

SEQ ID NO: 88148 - DNA, 22 bp, synthetic construct
  misc_feature 1..22: note = chemically synthesized
  source 1..22: mol_type = other DNA
gggtggagagttctgtagatgt

SEQ ID NO: 88149 - DNA, 22 bp, synthetic construct
  misc_feature 1..22: note = chemically synthesized
  source 1..22: mol_type = other DNA
tgtagatgtctattaggtctgc

SEQ ID NO: 88150 - DNA, 22 bp, synthetic construct
  misc_feature 1..22: note = chemically synthesized
  source 1..22: mol_type = other DNA
tagatgtctattaggtctgctt

SEQ ID NO: 88151 - DNA, 22 bp, synthetic construct
  misc_feature 1..22: note = chemically synthesized
  source 1..22: mol_type = other DNA
ttaggtctgcttggtgcagagc

SEQ ID NO: 88152 - DNA, 22 bp, synthetic construct
  misc_feature 1..22: note = chemically synthesized
  source 1..22: mol_type = other DNA
ggtctgcttggtgcagagctga

SEQ ID NO: 88153 - DNA, 22 bp, synthetic construct
  misc_feature 1..22: note = chemically synthesized
  source 1..22: mol_type = other DNA
cttggtgcagagctgagtccaa

SEQ ID NO: 88154 - DNA, 22 bp, synthetic construct
  misc_feature 1..22: note = chemically synthesized
  source 1..22: mol_type = other DNA
ggtgcagagctgagtccaattc

SEQ ID NO: 88155 - DNA, 22 bp, synthetic construct
  misc_feature 1..22: note = chemically synthesized
  source 1..22: mol_type = other DNA
gtgcagagctgagtccaattcc

SEQ ID NO: 88156 - DNA, 22 bp, synthetic construct
  misc_feature 1..22: note = chemically synthesized
  source 1..22: mol_type = other DNA
agtccaattcctggatatcctt

SEQ ID NO: 88157 - DNA, 22 bp, synthetic construct
  misc_feature 1..22: note = chemically synthesized
  source 1..22: mol_type = other DNA
ctggatatccttgttaactttc

SEQ ID NO: 88158 - DNA, 22 bp, synthetic construct
  misc_feature 1..22: note = chemically synthesized
  source 1..22: mol_type = other DNA
gatatccttgttaactttctgt

SEQ ID NO: 88159 - DNA, 22 bp, synthetic construct
  misc_feature 1..22: note = chemically synthesized
  source 1..22: mol_type = other DNA
gttaactttctgtctcgttgat

SEQ ID NO: 88160 - DNA, 22 bp, synthetic construct
  misc_feature 1..22: note = chemically synthesized
  source 1..22: mol_type = other DNA
ttaactttctgtctcgttgatc

SEQ ID NO: 88161 - DNA, 22 bp, synthetic construct
  misc_feature 1..22: note = chemically synthesized
  source 1..22: mol_type = other DNA
actttctgtctcgttgatctgt

SEQ ID NO: 88162 - DNA, 22 bp, synthetic construct
  misc_feature 1..22: note = chemically synthesized
  source 1..22: mol_type = other DNA
tctgtctcgttgatctgtctaa

SEQ ID NO: 88163 - DNA, 22 bp, synthetic construct
  misc_feature 1..22: note = chemically synthesized
  source 1..22: mol_type = other DNA
ctgtctcgttgatctgtctaat

SEQ ID NO: 88164 - DNA, 22 bp, synthetic construct
  misc_feature 1..22: note = chemically synthesized
  source 1..22: mol_type = other DNA
tgtctcgttgatctgtctaatg

SEQ ID NO: 88165 - DNA, 22 bp, synthetic construct
  misc_feature 1..22: note = chemically synthesized
  source 1..22: mol_type = other DNA
tctcgttgatctgtctaatgtt

SEQ ID NO: 88166 - DNA, 22 bp, synthetic construct
  misc_feature 1..22: note = chemically synthesized
  source 1..22: mol_type = other DNA
gttgatctgtctaatgttgaca

SEQ ID NO: 88167 - DNA, 22 bp, synthetic construct
  misc_feature 1..22: note = chemically synthesized
  source 1..22: mol_type = other DNA
atctgtctaatgttgacagtgg

SEQ ID NO: 88168 - DNA, 22 bp, synthetic construct
  misc_feature 1..22: note = chemically synthesized
  source 1..22: mol_type = other DNA
tctaatgttgacagtggggtgt

SEQ ID NO: 88169 - DNA, 22 bp, synthetic construct
  misc_feature 1..22: note = chemically synthesized
  source 1..22: mol_type = other DNA
atgttgacagtggggtgttaaa

SEQ ID NO: 88170 - DNA, 22 bp, synthetic construct
  misc_feature 1..22: note = chemically synthesized
  source 1..22: mol_type = other DNA
acagtggggtgttaaagtctcc

SEQ ID NO: 88171 - DNA, 22 bp, synthetic construct
  misc_feature 1..22: note = chemically synthesized
  source 1..22: mol_type = other DNA
aagtctcccattattattgtgt

SEQ ID NO: 88172 - DNA, 22 bp, synthetic construct
  misc_feature 1..22: note = chemically synthesized
  source 1..22: mol_type = other DNA
ccattattattgtgtgggcatc

SEQ ID NO: 88173 - DNA, 22 bp, synthetic construct
  misc_feature 1..22: note = chemically synthesized
  source 1..22: mol_type = other DNA
ttattgtgtgggcatctaagtc

SEQ ID NO: 88174 - DNA, 22 bp, synthetic construct
  misc_feature 1..22: note = chemically synthesized
  source 1..22: mol_type = other DNA
ttgtgtgggcatctaagtctct

SEQ ID NO: 88175 - DNA, 22 bp, synthetic construct
  misc_feature 1..22: note = chemically synthesized
  source 1..22: mol_type = other DNA
tgtgggcatctaagtctctttg

SEQ ID NO: 88176 - DNA, 22 bp, synthetic construct
  misc_feature 1..22: note = chemically synthesized
  source 1..22: mol_type = other DNA
agtctctttgtaggtcactcag

SEQ ID NO: 88177 - DNA, 22 bp, synthetic construct
  misc_feature 1..22: note = chemically synthesized
  source 1..22: mol_type = other DNA
tttgtaggtcactcaggacttg

SEQ ID NO: 88178 - DNA, 22 bp, synthetic construct
  misc_feature 1..22: note = chemically synthesized
  source 1..22: mol_type = other DNA
tgtaggtcactcaggacttgtt

SEQ ID NO: 88179 - DNA, 22 bp, synthetic construct
  misc_feature 1..22: note = chemically synthesized
  source 1..22: mol_type = other DNA
gtaggtcactcaggacttgttt

SEQ ID NO: 88180 - DNA, 22 bp, synthetic construct
  misc_feature 1..22: note = chemically synthesized
  source 1..22: mol_type = other DNA
taggtcactcaggacttgtttt

SEQ ID NO: 88181 - DNA, 22 bp, synthetic construct
  misc_feature 1..22: note = chemically synthesized
  source 1..22: mol_type = other DNA
aggacttgttttatgaatctgg

SEQ ID NO: 88182 - DNA, 22 bp, synthetic construct
  misc_feature 1..22: note = chemically synthesized
  source 1..22: mol_type = other DNA
gttttatgaatctgggtgctcc

SEQ ID NO: 88183 - DNA, 22 bp, synthetic construct
  misc_feature 1..22: note = chemically synthesized
  source 1..22: mol_type = other DNA
ttttatgaatctgggtgctcct

SEQ ID NO: 88184 - DNA, 22 bp, synthetic construct
  misc_feature 1..22: note = chemically synthesized
  source 1..22: mol_type = other DNA
tatgaatctgggtgctcctgta

SEQ ID NO: 88185 - DNA, 22 bp, synthetic construct
  misc_feature 1..22: note = chemically synthesized
  source 1..22: mol_type = other DNA
atgaatctgggtgctcctgtat

SEQ ID NO: 88186 - DNA, 22 bp, synthetic construct
  misc_feature 1..22: note = chemically synthesized
  source 1..22: mol_type = other DNA
tgaatctgggtgctcctgtatt

SEQ ID NO: 88187 - DNA, 22 bp, synthetic construct
  misc_feature 1..22: note = chemically synthesized
  source 1..22: mol_type = other DNA
ggtgctcctgtattgggtgcat

SEQ ID NO: 88188 - DNA, 22 bp, synthetic construct
  misc_feature 1..22: note = chemically synthesized
  source 1..22: mol_type = other DNA
ctgtattgggtgcatatatatt

SEQ ID NO: 88189 - DNA, 22 bp, synthetic construct
  misc_feature 1..22: note = chemically synthesized
  source 1..22: mol_type = other DNA
tattgggtgcatatatatttag

SEQ ID NO: 88190 - DNA, 22 bp, synthetic construct
  misc_feature 1..22: note = chemically synthesized
  source 1..22: mol_type = other DNA
ggtgcatatatatttagtatag

SEQ ID NO: 88191 - DNA, 22 bp, synthetic construct
  misc_feature 1..22: note = chemically synthesized
  source 1..22: mol_type = other DNA
agtatagttagttcttcttctt

SEQ ID NO: 88192 - DNA, 22 bp, synthetic construct
  misc_feature 1..22: note = chemically synthesized
  source 1..22: mol_type = other DNA
gtatagttagttcttcttcttg

SEQ ID NO: 88193 - DNA, 22 bp, synthetic construct
  misc_feature 1..22: note = chemically synthesized
  source 1..22: mol_type = other DNA
gttcttcttcttgaatagatcc

SEQ ID NO: 88194 - DNA, 22 bp, synthetic construct
  misc_feature 1..22: note = chemically synthesized
  source 1..22: mol_type = other DNA
ttcttcttgaatagatcccttt

SEQ ID NO: 88195 - DNA, 22 bp, synthetic construct
  misc_feature 1..22: note = chemically synthesized
  source 1..22: mol_type = other DNA
cttcttgaatagatccctttgc

SEQ ID NO: 88196 - DNA, 22 bp, synthetic construct
  misc_feature 1..22: note = chemically synthesized
  source 1..22: mol_type = other DNA
ttcttgaatagatccctttgcc

SEQ ID NO: 88197 - DNA, 22 bp, synthetic construct
  misc_feature 1..22: note = chemically synthesized
  source 1..22: mol_type = other DNA
cttgaatagatccctttgccat

SEQ ID NO: 88198 - DNA, 22 bp, synthetic construct
  misc_feature 1..22: note = chemically synthesized
  source 1..22: mol_type = other DNA
ttgaatagatccctttgccatt

SEQ ID NO: 88199 - DNA, 22 bp, synthetic construct
  misc_feature 1..22: note = chemically synthesized
  source 1..22: mol_type = other DNA
gaatagatccctttgccattat

SEQ ID NO: 88200 - DNA, 22 bp, synthetic construct
  misc_feature 1..22: note = chemically synthesized
  source 1..22: mol_type = other DNA
aatagatccctttgccattatg

SEQ ID NO: 88201 - DNA, 22 bp, synthetic construct
  misc_feature 1..22: note = chemically synthesized
  source 1..22: mol_type = other DNA
tgccattatgtaatggccttct

SEQ ID NO: 88202 - DNA, 22 bp, synthetic construct
  misc_feature 1..22: note = chemically synthesized
  source 1..22: mol_type = other DNA
gccattatgtaatggccttctt

SEQ ID NO: 88203 - DNA, 22 bp, synthetic construct
  misc_feature 1..22: note = chemically synthesized
  source 1..22: mol_type = other DNA
ccattatgtaatggccttcttt

SEQ ID NO: 88204 - DNA, 22 bp, synthetic construct
  misc_feature 1..22: note = chemically synthesized
  source 1..22: mol_type = other DNA
tgtaatggccttctttgtctct

SEQ ID NO: 88205 - DNA, 22 bp, synthetic construct
  misc_feature 1..22: note = chemically synthesized
  source 1..22: mol_type = other DNA
ctttgtctcttttgatctttgt

SEQ ID NO: 88206 - DNA, 22 bp, synthetic construct
  misc_feature 1..22: note = chemically synthesized
  source 1..22: mol_type = other DNA
tttgtctcttttgatctttgtt

SEQ ID NO: 88207 - DNA, 22 bp, synthetic construct
  misc_feature 1..22: note = chemically synthesized
  source 1..22: mol_type = other DNA
tgtctcttttgatctttgttgg

SEQ ID NO: 88208 - DNA, 22 bp, synthetic construct
  misc_feature 1..22: note = chemically synthesized
  source 1..22: mol_type = other DNA
gtctcttttgatctttgttggt

SEQ ID NO: 88209 - DNA, 22 bp, synthetic construct
  misc_feature 1..22: note = chemically synthesized
  source 1..22: mol_type = other DNA
tctcttttgatctttgttggtt

SEQ ID NO: 88210 - DNA, 22 bp, synthetic construct
  misc_feature 1..22: note = chemically synthesized
  source 1..22: mol_type = other DNA
ttttgatctttgttggtttaaa

SEQ ID NO: 88211 - DNA, 22 bp, synthetic construct
  misc_feature 1..22: note = chemically synthesized
  source 1..22: mol_type = other DNA
ttgatctttgttggtttaaaat

SEQ ID NO: 88212 - DNA, 22 bp, synthetic construct
  misc_feature 1..22: note = chemically synthesized
  source 1..22: mol_type = other DNA
tgatctttgttggtttaaaatc

SEQ ID NO: 88213 - DNA, 22 bp, synthetic construct
  misc_feature 1..22: note = chemically synthesized
  source 1..22: mol_type = other DNA
gatctttgttggtttaaaatct

SEQ ID NO: 88214 - DNA, 22 bp, synthetic construct
  misc_feature 1..22: note = chemically synthesized
  source 1..22: mol_type = other DNA
atctttgttggtttaaaatctg

SEQ ID NO: 88215 - DNA, 22 bp, synthetic construct
  misc_feature 1..22: note = chemically synthesized
  source 1..22: mol_type = other DNA
tgttggtttaaaatctgtttta

SEQ ID NO: 88216 - DNA, 22 bp, synthetic construct
  misc_feature 1..22: note = chemically synthesized
  source 1..22: mol_type = other DNA
gttggtttaaaatctgttttat

SEQ ID NO: 88217 - DNA, 22 bp, synthetic construct
  misc_feature 1..22: note = chemically synthesized
  source 1..22: mol_type = other DNA
ttggtttaaaatctgttttatc

SEQ ID NO: 88218 - DNA, 22 bp, synthetic construct
  misc_feature 1..22: note = chemically synthesized
  source 1..22: mol_type = other DNA
gtttaaaatctgttttatcaga

SEQ ID NO: 88219 - DNA, 22 bp, synthetic construct
  misc_feature 1..22: note = chemically synthesized
  source 1..22: mol_type = other DNA
aaaatctgttttatcagagact

SEQ ID NO: 88220 - DNA, 22 bp, synthetic construct
  misc_feature 1..22: note = chemically synthesized
  source 1..22: mol_type = other DNA
aaatctgttttatcagagacta

SEQ ID NO: 88221 - DNA, 22 bp, synthetic construct
  misc_feature 1..22: note = chemically synthesized
  source 1..22: mol_type = other DNA
ttttatcagagactaggattgc

SEQ ID NO: 88222 - DNA, 22 bp, synthetic construct
  misc_feature 1..22: note = chemically synthesized
  source 1..22: mol_type = other DNA
tatcagagactaggattgcaac

SEQ ID NO: 88223 - DNA, 22 bp, synthetic construct
  misc_feature 1..22: note = chemically synthesized
  source 1..22: mol_type = other DNA
atcagagactaggattgcaacc

SEQ ID NO: 88224 - DNA, 22 bp, synthetic construct
  misc_feature 1..22: note = chemically synthesized
  source 1..22: mol_type = other DNA
tcagagactaggattgcaaccc

SEQ ID NO: 88225 - DNA, 22 bp, synthetic construct
  misc_feature 1..22: note = chemically synthesized
  source 1..22: mol_type = other DNA
ggattgcaacccctgccttttt

SEQ ID NO: 88226 - DNA, 22 bp, synthetic construct
  misc_feature 1..22: note = chemically synthesized
  source 1..22: mol_type = other DNA
caacccctgcctttttttgttt

SEQ ID NO: 88227 - DNA, 22 bp, synthetic construct
  misc_feature 1..22: note = chemically synthesized
  source 1..22: mol_type = other DNA
cctttttttgttttccatttgc

SEQ ID NO: 88228 - DNA, 22 bp, synthetic construct
  misc_feature 1..22: note = chemically synthesized
  source 1..22: mol_type = other DNA
tttttgttttccatttgcttgg

SEQ ID NO: 88229 - DNA, 22 bp, synthetic construct
  misc_feature 1..22: note = chemically synthesized
  source 1..22: mol_type = other DNA
ttttgttttccatttgcttggt

SEQ ID NO: 88230 - DNA, 22 bp, synthetic construct
  misc_feature 1..22: note = chemically synthesized
  source 1..22: mol_type = other DNA
tttgttttccatttgcttggta

SEQ ID NO: 88231 - DNA, 22 bp, synthetic construct
  misc_feature 1..22: note = chemically synthesized
  source 1..22: mol_type = other DNA
ttgttttccatttgcttggtag

SEQ ID NO: 88232 - DNA, 22 bp, synthetic construct
  misc_feature 1..22: note = chemically synthesized
  source 1..22: mol_type = other DNA
tgttttccatttgcttggtaga

SEQ ID NO: 88233 - DNA, 22 bp, synthetic construct
  misc_feature 1..22: note = chemically synthesized
  source 1..22: mol_type = other DNA
gttttccatttgcttggtagat

SEQ ID NO: 88234 - DNA, 22 bp, synthetic construct
  misc_feature 1..22: note = chemically synthesized
  source 1..22: mol_type = other DNA
ttttccatttgcttggtagata

SEQ ID NO: 88235 - DNA, 22 bp, synthetic construct
  misc_feature 1..22: note = chemically synthesized
  source 1..22: mol_type = other DNA
tccatttgcttggtagatattc

SEQ ID NO: 88236 - DNA, 22 bp, synthetic construct
  misc_feature 1..22: note = chemically synthesized
  source 1..22: mol_type = other DNA
ccatttgcttggtagatattcc

SEQ ID NO: 88237 - DNA, 22 bp, synthetic construct
  misc_feature 1..22: note = chemically synthesized
  source 1..22: mol_type = other DNA
catttgcttggtagatattcct

SEQ ID NO: 88238 - DNA, 22 bp, synthetic construct
  misc_feature 1..22: note = chemically synthesized
  source 1..22: mol_type = other DNA
gcttggtagatattcctccatc

SEQ ID NO: 88239 - DNA, 22 bp, synthetic construct
  misc_feature 1..22: note = chemically synthesized
  source 1..22: mol_type = other DNA
cttggtagatattcctccatcc

SEQ ID NO: 88240 - DNA, 22 bp, synthetic construct
  misc_feature 1..22: note = chemically synthesized
  source 1..22: mol_type = other DNA
ggtagatattcctccatccttt

SEQ ID NO: 88241 - DNA, 22 bp, synthetic construct
  misc_feature 1..22: note = chemically synthesized
  source 1..22: mol_type = other DNA
gtagatattcctccatcctttt

SEQ ID NO: 88242 - DNA, 22 bp, synthetic construct
  misc_feature 1..22: note = chemically synthesized
  source 1..22: mol_type = other DNA
ctccatccttttatttcgagcc

SEQ ID NO: 88243 - DNA, 22 bp, synthetic construct
  misc_feature 1..22: note = chemically synthesized
  source 1..22: mol_type = other DNA
catccttttatttcgagcctat

SEQ ID NO: 88244 - DNA, 22 bp, synthetic construct
  misc_feature 1..22: note = chemically synthesized
  source 1..22: mol_type = other DNA
ttatttcgagcctatgtgtgtc

SEQ ID NO: 88245 - DNA, 22 bp, synthetic construct
  misc_feature 1..22: note = chemically synthesized
  source 1..22: mol_type = other DNA
tatttcgagcctatgtgtgtct

SEQ ID NO: 88246 - DNA, 22 bp, synthetic construct
  misc_feature 1..22: note = chemically synthesized
  source 1..22: mol_type = other DNA
atttcgagcctatgtgtgtctc

SEQ ID NO: 88247 - DNA, 22 bp, synthetic construct
  misc_feature 1..22: note = chemically synthesized
  source 1..22: mol_type = other DNA
tttcgagcctatgtgtgtctct

SEQ ID NO: 88248 - DNA, 22 bp, synthetic construct
  misc_feature 1..22: note = chemically synthesized
  source 1..22: mol_type = other DNA
cgagcctatgtgtgtctctgca

SEQ ID NO: 88249 - DNA, 22 bp, synthetic construct
  misc_feature 1..22: note = chemically synthesized
  source 1..22: mol_type = other DNA
gagcctatgtgtgtctctgcac

SEQ ID NO: 88250 - DNA, 22 bp, synthetic construct
  misc_feature 1..22: note = chemically synthesized
  source 1..22: mol_type = other DNA
tgtgtgtctctgcacgtgagat

SEQ ID NO: 88251 - DNA, 22 bp, synthetic construct
  misc_feature 1..22: note = chemically synthesized
  source 1..22: mol_type = other DNA
tgcacgtgagatgggtttcctg

SEQ ID NO: 88252 - DNA, 22 bp, synthetic construct
  misc_feature 1..22: note = chemically synthesized
  source 1..22: mol_type = other DNA
cacgtgagatgggtttcctgaa

SEQ ID NO: 88253 - DNA, 22 bp, synthetic construct
  misc_feature 1..22: note = chemically synthesized
  source 1..22: mol_type = other DNA
cctgaatacagaacacagatgg

SEQ ID NO: 88254 - DNA, 22 bp, synthetic construct
  misc_feature 1..22: note = chemically synthesized
  source 1..22: mol_type = other DNA
ctgaatacagaacacagatggg

SEQ ID NO: 88255 - DNA, 22 bp, synthetic construct
  misc_feature 1..22: note = chemically synthesized
  source 1..22: mol_type = other DNA
aatacagaacacagatgggtct

SEQ ID NO: 88256 - DNA, 22 bp, synthetic construct
  misc_feature 1..22: note = chemically synthesized
  source 1..22: mol_type = other DNA
gactccttatccaatttgccag

SEQ ID NO: 88257 - DNA, 22 bp, synthetic construct
  misc_feature 1..22: note = chemically synthesized
  source 1..22: mol_type = other DNA
actccttatccaatttgccagt

SEQ ID NO: 88258 - DNA, 22 bp, synthetic construct
  misc_feature 1..22: note = chemically synthesized
  source 1..22: mol_type = other DNA
cttatccaatttgccagtctgt

SEQ ID NO: 88259 - DNA, 22 bp, synthetic construct
  misc_feature 1..22: note = chemically synthesized
  source 1..22: mol_type = other DNA
atccaatttgccagtctgtgtc

SEQ ID NO: 88260 - DNA, 22 bp, synthetic construct
  misc_feature 1..22: note = chemically synthesized
  source 1..22: mol_type = other DNA
tccaatttgccagtctgtgtct

SEQ ID NO: 88261 - DNA, 22 bp, synthetic construct
  misc_feature 1..22: note = chemically synthesized
  source 1..22: mol_type = other DNA
gccagtctgtgtcttttaattg

SEQ ID NO: 88262 - DNA, 22 bp, synthetic construct
  misc_feature 1..22: note = chemically synthesized
  source 1..22: mol_type = other DNA
ccagtctgtgtcttttaattgg

SEQ ID NO: 88263 - DNA, 22 bp, synthetic construct
  misc_feature 1..22: note = chemically synthesized
  source 1..22: mol_type = other DNA
tgtcttttaattggagcattta

SEQ ID NO: 88264 - DNA, 22 bp, synthetic construct
  misc_feature 1..22: note = chemically synthesized
  source 1..22: mol_type = other DNA
ttaattggagcatttagcctat

SEQ ID NO: 88265 - DNA, 22 bp, synthetic construct
  misc_feature 1..22: note = chemically synthesized
  source 1..22: mol_type = other DNA
taattggagcatttagcctatt

SEQ ID NO: 88266 - DNA, 22 bp, synthetic construct
  misc_feature 1..22: note = chemically synthesized
  source 1..22: mol_type = other DNA
aattggagcatttagcctattt

SEQ ID NO: 88267 - DNA, 22 bp, synthetic construct
  misc_feature 1..22: note = chemically synthesized
  source 1..22: mol_type = other DNA
attggagcatttagcctattta

SEQ ID NO: 88268 - DNA, 22 bp, synthetic construct
  misc_feature 1..22: note = chemically synthesized
  source 1..22: mol_type = other DNA
gagcatttagcctatttacatt

SEQ ID NO: 88269 - DNA, 22 bp, synthetic construct
  misc_feature 1..22: note = chemically synthesized
  source 1..22: mol_type = other DNA
agcctatttacatttaaggtga

SEQ ID NO: 88270 - DNA, 22 bp, synthetic construct
  misc_feature 1..22: note = chemically synthesized
  source 1..22: mol_type = other DNA
gcctatttacatttaaggtgag

SEQ ID NO: 88271 - DNA, 22 bp, synthetic construct
  misc_feature 1..22: note = chemically synthesized
  source 1..22: mol_type = other DNA
tttacatttaaggtgagtattg

SEQ ID NO: 88272 - DNA, 22 bp, synthetic construct
  misc_feature 1..22: note = chemically synthesized
  source 1..22: mol_type = other DNA
acatttaaggtgagtattgtta

SEQ ID NO: 88273 - DNA, 22 bp, synthetic construct
  misc_feature 1..22: note = chemically synthesized
  source 1..22: mol_type = other DNA
catttaaggtgagtattgttat

SEQ ID NO: 88274 - DNA, 22 bp, synthetic construct
  misc_feature 1..22: note = chemically synthesized
  source 1..22: mol_type = other DNA
aaggtgagtattgttatgtatg

SEQ ID NO: 88275 - DNA, 22 bp, synthetic construct
  misc_feature 1..22: note = chemically synthesized
  source 1..22: mol_type = other DNA
aggtgagtattgttatgtatga

SEQ ID NO: 88276 - DNA, 22 bp, synthetic construct
  misc_feature 1..22: note = chemically synthesized
  source 1..22: mol_type = other DNA
ttatgtatgaatttgatcctgt

SEQ ID NO: 88277 - DNA, 22 bp, synthetic construct
  misc_feature 1..22: note = chemically synthesized
  source 1..22: mol_type = other DNA
tgtatgaatttgatcctgtcat

SEQ ID NO: 88278 - DNA, 22 bp, synthetic construct
  misc_feature 1..22: note = chemically synthesized
  source 1..22: mol_type = other DNA
gatcctgtcattatgatgttag

SEQ ID NO: 88279 - DNA, 22 bp, synthetic construct
  misc_feature 1..22: note = chemically synthesized
  source 1..22: mol_type = other DNA
atcctgtcattatgatgttagc

SEQ ID NO: 88280 - DNA, 22 bp, synthetic construct
  misc_feature 1..22: note = chemically synthesized
  source 1..22: mol_type = other DNA
tcattatgatgttagctggtta

SEQ ID NO: 88281 - DNA, 22 bp, synthetic construct
  misc_feature 1..22: note = chemically synthesized
  source 1..22: mol_type = other DNA
tgatgttagctggttattttgc

SEQ ID NO: 88282 - DNA, 22 bp, synthetic construct
  misc_feature 1..22: note = chemically synthesized
  source 1..22: mol_type = other DNA
gctggttattttgctcgttgat

SEQ ID NO: 88283 - DNA, 22 bp, synthetic construct
  misc_feature 1..22: note = chemically synthesized
  source 1..22: mol_type = other DNA
gttattttgctcgttgatgcag

SEQ ID NO: 88284 - DNA, 22 bp, synthetic construct
  misc_feature 1..22: note = chemically synthesized
  source 1..22: mol_type = other DNA
ttttgctcgttgatgcagtttc

SEQ ID NO: 88285 - DNA, 22 bp, synthetic construct
  misc_feature 1..22: note = chemically synthesized
  source 1..22: mol_type = other DNA
tgctcgttgatgcagtttcttc

SEQ ID NO: 88286 - DNA, 22 bp, synthetic construct
  misc_feature 1..22: note = chemically synthesized
  source 1..22: mol_type = other DNA
gctcgttgatgcagtttcttcc

SEQ ID NO: 88287 - DNA, 22 bp, synthetic construct
  misc_feature 1..22: note = chemically synthesized
  source 1..22: mol_type = other DNA
ctcgttgatgcagtttcttcct

SEQ ID NO: 88288 - DNA, 22 bp, synthetic construct
  misc_feature 1..22: note = chemically synthesized
  source 1..22: mol_type = other DNA
gttgatgcagtttcttcctagc

SEQ ID NO: 88289 - DNA, 22 bp, synthetic construct
  misc_feature 1..22: note = chemically synthesized
  source 1..22: mol_type = other DNA
atgcagtttcttcctagccttg

SEQ ID NO: 88290 - DNA, 22 bp, synthetic construct
  misc_feature 1..22: note = chemically synthesized
  source 1..22: mol_type = other DNA
cttcctagccttgatggtcttt

SEQ ID NO: 88291 - DNA, 22 bp, synthetic construct
  misc_feature 1..22: note = chemically synthesized
  source 1..22: mol_type = other DNA
ttcctagccttgatggtcttta

SEQ ID NO: 88292 - DNA, 22 bp, synthetic construct
  misc_feature 1..22: note = chemically synthesized
  source 1..22: mol_type = other DNA
cctagccttgatggtctttaca

SEQ ID NO: 88293 - DNA, 22 bp, synthetic construct
  misc_feature 1..22: note = chemically synthesized
  source 1..22: mol_type = other DNA
ctagccttgatggtctttacaa

SEQ ID NO: 88294 - DNA, 22 bp, synthetic construct
  misc_feature 1..22: note = chemically synthesized
  source 1..22: mol_type = other DNA
gccttgatggtctttacaattt

SEQ ID NO: 88295 - DNA, 22 bp, synthetic construct
  misc_feature 1..22: note = chemically synthesized
  source 1..22: mol_type = other DNA
gatggtctttacaatttggcat

SEQ ID NO: 88296 - DNA, 22 bp, synthetic construct
  misc_feature 1..22: note = chemically synthesized
  source 1..22: mol_type = other DNA
atggtctttacaatttggcatg

SEQ ID NO: 88297 - DNA, 22 bp, synthetic construct
  misc_feature 1..22: note = chemically synthesized
  source 1..22: mol_type = other DNA
tacaatttggcatgtttttgca

SEQ ID NO: 88298 - DNA, 22 bp, synthetic construct
  misc_feature 1..22: note = chemically synthesized
  source 1..22: mol_type = other DNA
acaatttggcatgtttttgcag

SEQ ID NO: 88299 - DNA, 22 bp, synthetic construct
  misc_feature 1..22: note = chemically synthesized
  source 1..22: mol_type = other DNA
caatttggcatgtttttgcagt

SEQ ID NO: 88300 - DNA, 22 bp, synthetic construct
  misc_feature 1..22: note = chemically synthesized
  source 1..22: mol_type = other DNA
ggcatgtttttgcagtggctga

SEQ ID NO: 88301 - DNA, 22 bp, synthetic construct
  misc_feature 1..22: note = chemically synthesized
  source 1..22: mol_type = other DNA
gcatgtttttgcagtggctgat

SEQ ID NO: 88302 - DNA, 22 bp, synthetic construct
  misc_feature 1..22: note = chemically synthesized
  source 1..22: mol_type = other DNA
ttgcagtggctgatactagttg

SEQ ID NO: 88303 - DNA, 22 bp, synthetic construct
  misc_feature 1..22: note = chemically synthesized
  source 1..22: mol_type = other DNA
tgcagtggctgatactagttgt

SEQ ID NO: 88304 - DNA, 22 bp, synthetic construct
  misc_feature 1..22: note = chemically synthesized
  source 1..22: mol_type = other DNA
gcagtggctgatactagttgtt

SEQ ID NO: 88305 - DNA, 22 bp, synthetic construct
  misc_feature 1..22: note = chemically synthesized
  source 1..22: mol_type = other DNA
cagtggctgatactagttgttc

SEQ ID NO: 88306 - DNA, 22 bp, synthetic construct
  misc_feature 1..22: note = chemically synthesized
  source 1..22: mol_type = other DNA
atactagttgttcctttccatg

SEQ ID NO: 88307 - DNA, 22 bp, synthetic construct
  misc_feature 1..22: note = chemically synthesized
  source 1..22: mol_type = other DNA
gttgttcctttccatgtttagt

SEQ ID NO: 88308 - DNA, 22 bp, synthetic construct
  misc_feature 1..22: note = chemically synthesized
  source 1..22: mol_type = other DNA
ttcctttccatgtttagtgctt

SEQ ID NO: 88309 - DNA, 22 bp, synthetic construct
  misc_feature 1..22: note = chemically synthesized
  source 1..22: mol_type = other DNA
ctttccatgtttagtgcttcct

SEQ ID NO: 88310 - DNA, 22 bp, synthetic construct
  misc_feature 1..22: note = chemically synthesized
  source 1..22: mol_type = other DNA
tccatgtttagtgcttccttca

SEQ ID NO: 88311 - DNA, 22 bp, synthetic construct
  misc_feature 1..22: note = chemically synthesized
  source 1..22: mol_type = other DNA
ccatgtttagtgcttccttcag

SEQ ID NO: 88312 - DNA, 22 bp, synthetic construct
  misc_feature 1..22: note = chemically synthesized
  source 1..22: mol_type = other DNA
catgtttagtgcttccttcagg

SEQ ID NO: 88313 - DNA, 22 bp, synthetic construct
  misc_feature 1..22: note = chemically synthesized
  source 1..22: mol_type = other DNA
agtgcttccttcaggagctctt

SEQ ID NO: 88314 - DNA, 22 bp, synthetic construct
  misc_feature 1..22: note = chemically synthesized
  source 1..22: mol_type = other DNA
gtgcttccttcaggagctcttg

SEQ ID NO: 88315 - DNA, 22 bp, synthetic construct
  misc_feature 1..22: note = chemically synthesized
  source 1..22: mol_type = other DNA
ccttcaggagctcttgtagggc

SEQ ID NO: 88316 - DNA, 22 bp, synthetic construct
  misc_feature 1..22: note = chemically synthesized
  source 1..22: mol_type = other DNA
cttcaggagctcttgtagggca

SEQ ID NO: 88317 - DNA, 22 bp, synthetic construct
  misc_feature 1..22: note = chemically synthesized
  source 1..22: mol_type = other DNA
caggagctcttgtagggcaggc

SEQ ID NO: 88318 - DNA, 22 bp, synthetic construct
  misc_feature 1..22: note = chemically synthesized
  source 1..22: mol_type = other DNA
aggagctcttgtagggcaggcc

SEQ ID NO: 88319 - DNA, 22 bp, synthetic construct
  misc_feature 1..22: note = chemically synthesized
  source 1..22: mol_type = other DNA
ttgtagggcaggcctggtggtg

SEQ ID NO: 88320 - DNA, 22 bp, synthetic construct
  misc_feature 1..22: note = chemically synthesized
  source 1..22: mol_type = other DNA
gtagggcaggcctggtggtgac

SEQ ID NO: 88321 - DNA, 22 bp, synthetic construct
  misc_feature 1..22: note = chemically synthesized
  source 1..22: mol_type = other DNA
tagggcaggcctggtggtgaca

SEQ ID NO: 88322 - DNA, 22 bp, synthetic construct
  misc_feature 1..22: note = chemically synthesized
  source 1..22: mol_type = other DNA
gtggtgacaaaatctctcagca

SEQ ID NO: 88323 - DNA, 22 bp, synthetic construct
  misc_feature 1..22: note = chemically synthesized
  source 1..22: mol_type = other DNA
tcagcatttgcttgtctgtaaa

SEQ ID NO: 88324 - DNA, 22 bp, synthetic construct
  misc_feature 1..22: note = chemically synthesized
  source 1..22: mol_type = other DNA
agcatttgcttgtctgtaaagg

SEQ ID NO: 88325 - DNA, 22 bp, synthetic construct
  misc_feature 1..22: note = chemically synthesized
  source 1..22: mol_type = other DNA
gcttgtctgtaaaggattttat

SEQ ID NO: 88326 - DNA, 22 bp, synthetic construct
  misc_feature 1..22: note = chemically synthesized
  source 1..22: mol_type = other DNA
cttgtctgtaaaggattttatt

SEQ ID NO: 88327 - DNA, 22 bp, synthetic construct
  misc_feature 1..22: note = chemically synthesized
  source 1..22: mol_type = other DNA
gtctgtaaaggattttatttct

SEQ ID NO: 88328 - DNA, 22 bp, synthetic construct
  misc_feature 1..22: note = chemically synthesized
  source 1..22: mol_type = other DNA
tctgtaaaggattttatttctc

SEQ ID NO: 88329 - DNA, 22 bp, synthetic construct
  misc_feature 1..22: note = chemically synthesized
  source 1..22: mol_type = other DNA
taaaggattttatttctccttc

SEQ ID NO: 88330 - DNA, 22 bp, synthetic construct
  misc_feature 1..22: note = chemically synthesized
  source 1..22: mol_type = other DNA
tatttctccttcacttatgaag

SEQ ID NO: 88331 - DNA, 22 bp, synthetic construct
  misc_feature 1..22: note = chemically synthesized
  source 1..22: mol_type = other DNA
atttctccttcacttatgaagc

SEQ ID NO: 88332 - DNA, 22 bp, synthetic construct
  misc_feature 1..22: note = chemically synthesized
  source 1..22: mol_type = other DNA
tttctccttcacttatgaagct

SEQ ID NO: 88333 - DNA, 22 bp, synthetic construct
  misc_feature 1..22: note = chemically synthesized
  source 1..22: mol_type = other DNA
ctccttcacttatgaagcttag

SEQ ID NO: 88334 - DNA, 22 bp, synthetic construct
  misc_feature 1..22: note = chemically synthesized
  source 1..22: mol_type = other DNA
tccttcacttatgaagcttagt

SEQ ID NO: 88335 - DNA, 22 bp, synthetic construct
  misc_feature 1..22: note = chemically synthesized
  source 1..22: mol_type = other DNA
cttcacttatgaagcttagttt

SEQ ID NO: 88336 - DNA, 22 bp, synthetic construct
  misc_feature 1..22: note = chemically synthesized
  source 1..22: mol_type = other DNA
cacttatgaagcttagtttggc

SEQ ID NO: 88337 - DNA, 22 bp, synthetic construct
  misc_feature 1..22: note = chemically synthesized
  source 1..22: mol_type = other DNA
acttatgaagcttagtttggct

SEQ ID NO: 88338 - DNA, 22 bp, synthetic construct
  misc_feature 1..22: note = chemically synthesized
  source 1..22: mol_type = other DNA
atgaagcttagtttggctggat

SEQ ID NO: 88339 - DNA, 22 bp, synthetic construct
  misc_feature 1..22: note = chemically synthesized
  source 1..22: mol_type = other DNA
tgaagcttagtttggctggata

SEQ ID NO: 88340 - DNA, 22 bp, synthetic construct
  misc_feature 1..22: note = chemically synthesized
  source 1..22: mol_type = other DNA
agtttggctggatatgaaattc

SEQ ID NO: 88341 - DNA, 22 bp, synthetic construct
  misc_feature 1..22: note = chemically synthesized
  source 1..22: mol_type = other DNA
gtttggctggatatgaaattct

SEQ ID NO: 88342 - DNA, 22 bp, synthetic construct
  misc_feature 1..22: note = chemically synthesized
  source 1..22: mol_type = other DNA
ggctggatatgaaattctgggt

SEQ ID NO: 88343 - DNA, 22 bp, synthetic construct
  misc_feature 1..22: note = chemically synthesized
  source 1..22: mol_type = other DNA
gctggatatgaaattctgggtt

SEQ ID NO: 88344 - DNA, 22 bp, synthetic construct
  misc_feature 1..22: note = chemically synthesized
  source 1..22: mol_type = other DNA
gatatgaaattctgggttgaaa

SEQ ID NO: 88345 - DNA, 22 bp, synthetic construct
  misc_feature 1..22: note = chemically synthesized
  source 1..22: mol_type = other DNA
tgggttgaaaattcttttcttt

SEQ ID NO: 88346 - DNA, 22 bp, synthetic construct
  misc_feature 1..22: note = chemically synthesized
  source 1..22: mol_type = other DNA
ggttgaaaattcttttctttaa

SEQ ID NO: 88347 - DNA, 22 bp, synthetic construct
  misc_feature 1..22: note = chemically synthesized
  source 1..22: mol_type = other DNA
aaaattcttttctttaacaatg

SEQ ID NO: 88348 - DNA, 22 bp, synthetic construct
  misc_feature 1..22: note = chemically synthesized
  source 1..22: mol_type = other DNA
ttttctttaacaatgttgaata

SEQ ID NO: 88349 - DNA, 22 bp, synthetic construct
  misc_feature 1..22: note = chemically synthesized
  source 1..22: mol_type = other DNA
ttctttaacaatgttgaatatt

SEQ ID NO: 88350 - DNA, 22 bp, synthetic construct
  misc_feature 1..22: note = chemically synthesized
  source 1..22: mol_type = other DNA
tctttaacaatgttgaatattg

SEQ ID NO: 88351 - DNA, 22 bp, synthetic construct
  misc_feature 1..22: note = chemically synthesized
  source 1..22: mol_type = other DNA
ctttaacaatgttgaatattgg

SEQ ID NO: 88352 - DNA, 22 bp, synthetic construct
  misc_feature 1..22: note = chemically synthesized
  source 1..22: mol_type = other DNA
tttaacaatgttgaatattggc

SEQ ID NO: 88353 - DNA, 22 bp, synthetic construct
  misc_feature 1..22: note = chemically synthesized
  source 1..22: mol_type = other DNA
taacaatgttgaatattggccc

SEQ ID NO: 88354 - DNA, 22 bp, synthetic construct
  misc_feature 1..22: note = chemically synthesized
  source 1..22: mol_type = other DNA
aacaatgttgaatattggcccc

SEQ ID NO: 88355 - DNA, 22 bp, synthetic construct
  misc_feature 1..22: note = chemically synthesized
  source 1..22: mol_type = other DNA
acaatgttgaatattggccccc

SEQ ID NO: 88356 - DNA, 22 bp, synthetic construct
  misc_feature 1..22: note = chemically synthesized
  source 1..22: mol_type = other DNA
aatattggcccccactttcttc

SEQ ID NO: 88357 - DNA, 22 bp, synthetic construct
  misc_feature 1..22: note = chemically synthesized
  source 1..22: mol_type = other DNA
gcccccactttcttctggcttg

SEQ ID NO: 88358 - DNA, 22 bp, synthetic construct
  misc_feature 1..22: note = chemically synthesized
  source 1..22: mol_type = other DNA
tcttctggcttgtagagtttct

SEQ ID NO: 88359 - DNA, 22 bp, synthetic construct
  misc_feature 1..22: note = chemically synthesized
  source 1..22: mol_type = other DNA
cttctggcttgtagagtttctg

SEQ ID NO: 88360 - DNA, 22 bp, synthetic construct
  misc_feature 1..22: note = chemically synthesized
  source 1..22: mol_type = other DNA
ttctggcttgtagagtttctgc

SEQ ID NO: 88361 - DNA, 22 bp, synthetic construct
  misc_feature 1..22: note = chemically synthesized
  source 1..22: mol_type = other DNA
ctggcttgtagagtttctgccg

SEQ ID NO: 88362 - DNA, 22 bp, synthetic construct
  misc_feature 1..22: note = chemically synthesized
  source 1..22: mol_type = other DNA
tggcttgtagagtttctgccga

SEQ ID NO: 88363 - DNA, 22 bp, synthetic construct
  misc_feature 1..22: note = chemically synthesized
  source 1..22: mol_type = other DNA
gcttgtagagtttctgccgata

SEQ ID NO: 88364 - DNA, 22 bp, synthetic construct
  misc_feature 1..22: note = chemically synthesized
  source 1..22: mol_type = other DNA
gtagagtttctgccgatagatc

SEQ ID NO: 88365 - DNA, 22 bp, synthetic construct
  misc_feature 1..22: note = chemically synthesized
  source 1..22: mol_type = other DNA
tagagtttctgccgatagatca

SEQ ID NO: 88366 - DNA, 22 bp, synthetic construct
  misc_feature 1..22: note = chemically synthesized
  source 1..22: mol_type = other DNA
ctgccgatagatcagctgttag

SEQ ID NO: 88367 - DNA, 22 bp, synthetic construct
  misc_feature 1..22: note = chemically synthesized
  source 1..22: mol_type = other DNA
tgccgatagatcagctgttagt

SEQ ID NO: 88368 - DNA, 22 bp, synthetic construct
  misc_feature 1..22: note = chemically synthesized
  source 1..22: mol_type = other DNA
ccgatagatcagctgttagtct

SEQ ID NO: 88369 - DNA, 22 bp, synthetic construct
  misc_feature 1..22: note = chemically synthesized
  source 1..22: mol_type = other DNA
ttagtctgatgggcttcccttt

SEQ ID NO: 88370 - DNA, 22 bp, synthetic construct
  misc_feature 1..22: note = chemically synthesized
  source 1..22: mol_type = other DNA
gtctgatgggcttccctttgtg

SEQ ID NO: 88371 - DNA, 22 bp, synthetic construct
  misc_feature 1..22: note = chemically synthesized
  source 1..22: mol_type = other DNA
atgggcttccctttgtgggtaa

SEQ ID NO: 88372 - DNA, 22 bp, synthetic construct
  misc_feature 1..22: note = chemically synthesized
  source 1..22: mol_type = other DNA
ccctttgtgggtaacccgacct

SEQ ID NO: 88373 - DNA, 22 bp, synthetic construct
  misc_feature 1..22: note = chemically synthesized
  source 1..22: mol_type = other DNA
cctttgtgggtaacccgacctt

SEQ ID NO: 88374 - DNA, 22 bp, synthetic construct
  misc_feature 1..22: note = chemically synthesized
  source 1..22: mol_type = other DNA
tgtgggtaacccgacctttctc

SEQ ID NO: 88375 - DNA, 22 bp, synthetic construct
  misc_feature 1..22: note = chemically synthesized
  source 1..22: mol_type = other DNA
gtgggtaacccgacctttctct

SEQ ID NO: 88376 - DNA, 22 bp, synthetic construct
  misc_feature 1..22: note = chemically synthesized
  source 1..22: mol_type = other DNA
tgggtaacccgacctttctctc

SEQ ID NO: 88377 - DNA, 22 bp, synthetic construct
  misc_feature 1..22: note = chemically synthesized
  source 1..22: mol_type = other DNA
tctctctggctgcccttaacat

SEQ ID NO: 88378 - DNA, 22 bp, synthetic construct
  misc_feature 1..22: note = chemically synthesized
  source 1..22: mol_type = other DNA
ctctctggctgcccttaacatt

SEQ ID NO: 88379 - DNA, 22 bp, synthetic construct
  misc_feature 1..22: note = chemically synthesized
  source 1..22: mol_type = other DNA
tctctggctgcccttaacattt

SEQ ID NO: 88380 - DNA, 22 bp, synthetic construct
  misc_feature 1..22: note = chemically synthesized
  source 1..22: mol_type = other DNA
tctggctgcccttaacattttt

SEQ ID NO: 88381 - DNA, 22 bp, synthetic construct
  misc_feature 1..22: note = chemically synthesized
  source 1..22: mol_type = other DNA
tggctgcccttaacattttttc

SEQ ID NO: 88382 - DNA, 22 bp, synthetic construct
  misc_feature 1..22: note = chemically synthesized
  source 1..22: mol_type = other DNA
gctgcccttaacattttttcct

SEQ ID NO: 88383 - DNA, 22 bp, synthetic construct
  misc_feature 1..22: note = chemically synthesized
  source 1..22: mol_type = other DNA
cccttaacattttttccttcat

SEQ ID NO: 88384 - DNA, 22 bp, synthetic construct
  misc_feature 1..22: note = chemically synthesized
  source 1..22: mol_type = other DNA
aacattttttccttcatttcaa

SEQ ID NO: 88385 - DNA, 22 bp, synthetic construct
  misc_feature 1..22: note = chemically synthesized
  source 1..22: mol_type = other DNA
acattttttccttcatttcaac

SEQ ID NO: 88386 - DNA, 22 bp, synthetic construct
  misc_feature 1..22: note = chemically synthesized
  source 1..22: mol_type = other DNA
tttccttcatttcaactttggt

SEQ ID NO: 88387 - DNA, 22 bp, synthetic construct
  misc_feature 1..22: note = chemically synthesized
  source 1..22: mol_type = other DNA
ttccttcatttcaactttggtg

SEQ ID NO: 88388 - DNA, 22 bp, synthetic construct
  misc_feature 1..22: note = chemically synthesized
  source 1..22: mol_type = other DNA
tccttcatttcaactttggtga

SEQ ID NO: 88389 - DNA, 22 bp, synthetic construct
  misc_feature 1..22: note = chemically synthesized
  source 1..22: mol_type = other DNA
ccttcatttcaactttggtgaa

SEQ ID NO: 88390 - DNA, 22 bp, synthetic construct
  misc_feature 1..22: note = chemically synthesized
  source 1..22: mol_type = other DNA
cttcatttcaactttggtgaat

SEQ ID NO: 88391 - DNA, 22 bp, synthetic construct
  misc_feature 1..22: note = chemically synthesized
  source 1..22: mol_type = other DNA
catttcaactttggtgaatctg

SEQ ID NO: 88392 - DNA, 22 bp, synthetic construct
  misc_feature 1..22: note = chemically synthesized
  source 1..22: mol_type = other DNA
atttcaactttggtgaatctga

SEQ ID NO: 88393 - DNA, 22 bp, synthetic construct
  misc_feature 1..22: note = chemically synthesized
  source 1..22: mol_type = other DNA
caactttggtgaatctgacagt

SEQ ID NO: 88394 - DNA, 22 bp, synthetic construct
  misc_feature 1..22: note = chemically synthesized
  source 1..22: mol_type = other DNA
aactttggtgaatctgacagtt

SEQ ID NO: 88395 - DNA, 22 bp, synthetic construct
  misc_feature 1..22: note = chemically synthesized
  source 1..22: mol_type = other DNA
tggtgaatctgacagttatgtg

SEQ ID NO: 88396 - DNA, 22 bp, synthetic construct
  misc_feature 1..22: note = chemically synthesized
  source 1..22: mol_type = other DNA
ggtgaatctgacagttatgtgt

SEQ ID NO: 88397 - DNA, 22 bp, synthetic construct
  misc_feature 1..22: note = chemically synthesized
  source 1..22: mol_type = other DNA
gtgaatctgacagttatgtgtc

SEQ ID NO: 88398 - DNA, 22 bp, synthetic construct
  misc_feature 1..22: note = chemically synthesized
  source 1..22: mol_type = other DNA
acagttatgtgtcttggagttg

SEQ ID NO: 88399 - DNA, 22 bp, synthetic construct
  misc_feature 1..22: note = chemically synthesized
  source 1..22: mol_type = other DNA
tgtgtcttggagttgcttttct

SEQ ID NO: 88400 - DNA, 22 bp, synthetic construct
  misc_feature 1..22: note = chemically synthesized
  source 1..22: mol_type = other DNA
ggagttgcttttctctaggagt

SEQ ID NO: 88401 - DNA, 22 bp, synthetic construct
  misc_feature 1..22: note = chemically synthesized
  source 1..22: mol_type = other DNA
gagttgcttttctctaggagta

SEQ ID NO: 88402 - DNA, 22 bp, synthetic construct
  misc_feature 1..22: note = chemically synthesized
  source 1..22: mol_type = other DNA
cttttctctaggagtatctttg

SEQ ID NO: 88403 - DNA, 22 bp, synthetic construct
  misc_feature 1..22: note = chemically synthesized
  source 1..22: mol_type = other DNA
ttctctaggagtatctttgtgg

SEQ ID NO: 88404 - DNA, 22 bp, synthetic construct
  misc_feature 1..22: note = chemically synthesized
  source 1..22: mol_type = other DNA
tctctaggagtatctttgtggc

SEQ ID NO: 88405 - DNA, 22 bp, synthetic construct
  misc_feature 1..22: note = chemically synthesized
  source 1..22: mol_type = other DNA
ctctaggagtatctttgtggcg

SEQ ID NO: 88406 - DNA, 22 bp, synthetic construct
  misc_feature 1..22: note = chemically synthesized
  source 1..22: mol_type = other DNA
tctaggagtatctttgtggcgt

SEQ ID NO: 88407 - DNA, 22 bp, synthetic construct
  misc_feature 1..22: note = chemically synthesized
  source 1..22: mol_type = other DNA
taggagtatctttgtggcgttc

SEQ ID NO: 88408 - DNA, 22 bp, synthetic construct
  misc_feature 1..22: note = chemically synthesized
  source 1..22: mol_type = other DNA
ggagtatctttgtggcgttctc

SEQ ID NO: 88409 - DNA, 22 bp, synthetic construct
  misc_feature 1..22: note = chemically synthesized
  source 1..22: mol_type = other DNA
tgtggcgttctctgtatttcct

SEQ ID NO: 88410 - DNA, 22 bp, synthetic construct
  misc_feature 1..22: note = chemically synthesized
  source 1..22: mol_type = other DNA
gtggcgttctctgtatttcctg

SEQ ID NO: 88411 - DNA, 22 bp, synthetic construct
  misc_feature 1..22: note = chemically synthesized
  source 1..22: mol_type = other DNA
tggcgttctctgtatttcctga

SEQ ID NO: 88412 - DNA, 22 bp, synthetic construct
  misc_feature 1..22: note = chemically synthesized
  source 1..22: mol_type = other DNA
tctgtatttcctgaatgtgaat

SEQ ID NO: 88413 - DNA, 22 bp, synthetic construct
  misc_feature 1..22: note = chemically synthesized
  source 1..22: mol_type = other DNA
tgtatttcctgaatgtgaattt

SEQ ID NO: 88414 - DNA, 22 bp, synthetic construct
  misc_feature 1..22: note = chemically synthesized
  source 1..22: mol_type = other DNA
tatttcctgaatgtgaatttgg

SEQ ID NO: 88415 - DNA, 22 bp, synthetic construct
  misc_feature 1..22: note = chemically synthesized
  source 1..22: mol_type = other DNA
cctgaatgtgaatttgggcttg

SEQ ID NO: 88416 - DNA, 22 bp, synthetic construct
  misc_feature 1..22: note = chemically synthesized
  source 1..22: mol_type = other DNA
ctgaatgtgaatttgggcttgc

SEQ ID NO: 88417 - DNA, 22 bp, synthetic construct
  misc_feature 1..22: note = chemically synthesized
  source 1..22: mol_type = other DNA
aatgtgaatttgggcttgcctt

SEQ ID NO: 88418 - DNA, 22 bp, synthetic construct
  misc_feature 1..22: note = chemically synthesized
  source 1..22: mol_type = other DNA
gggcttgccttgctagattggg

SEQ ID NO: 88419 - DNA, 22 bp, synthetic construct
  misc_feature 1..22: note = chemically synthesized
  source 1..22: mol_type = other DNA
ggcttgccttgctagattgggg

SEQ ID NO: 88420 - DNA, 22 bp, synthetic construct
  misc_feature 1..22: note = chemically synthesized
  source 1..22: mol_type = other DNA
gccttgctagattggggaagtt

SEQ ID NO: 88421 - DNA, 22 bp, synthetic construct
  misc_feature 1..22: note = chemically synthesized
  source 1..22: mol_type = other DNA
ccttgctagattggggaagttc

SEQ ID NO: 88422 - DNA, 22 bp, synthetic construct
  misc_feature 1..22: note = chemically synthesized
  source 1..22: mol_type = other DNA
gctagattggggaagttctcct

SEQ ID NO: 88423 - DNA, 22 bp, synthetic construct
  misc_feature 1..22: note = chemically synthesized
  source 1..22: mol_type = other DNA
ctagattggggaagttctcctg

SEQ ID NO: 88424 - DNA, 22 bp, synthetic construct
  misc_feature 1..22: note = chemically synthesized
  source 1..22: mol_type = other DNA
gattggggaagttctcctggat

SEQ ID NO: 88425 - DNA, 22 bp, synthetic construct
  misc_feature 1..22: note = chemically synthesized
  source 1..22: mol_type = other DNA
gggaagttctcctggataatat

SEQ ID NO: 88426 - DNA, 22 bp, synthetic construct
  misc_feature 1..22: note = chemically synthesized
  source 1..22: mol_type = other DNA
tcctggataatatcctgcagag

SEQ ID NO: 88427 - DNA, 22 bp, synthetic construct
  misc_feature 1..22: note = chemically synthesized
  source 1..22: mol_type = other DNA
ctggataatatcctgcagagtg

SEQ ID NO: 88428 - DNA, 22 bp, synthetic construct
  misc_feature 1..22: note = chemically synthesized
  source 1..22: mol_type = other DNA
gataatatcctgcagagtgttt

SEQ ID NO: 88429 - DNA, 22 bp, synthetic construct
  misc_feature 1..22: note = chemically synthesized
  source 1..22: mol_type = other DNA
cagagtgttttccaacttggtt

SEQ ID NO: 88430 - DNA, 22 bp, synthetic construct
  misc_feature 1..22: note = chemically synthesized
  source 1..22: mol_type = other DNA
tccaacttggttccattctccc

SEQ ID NO: 88431 - DNA, 22 bp, synthetic construct
  misc_feature 1..22: note = chemically synthesized
  source 1..22: mol_type = other DNA
ccaacttggttccattctcccc

SEQ ID NO: 88432 - DNA, 22 bp, synthetic construct
  misc_feature 1..22: note = chemically synthesized
  source 1..22: mol_type = other DNA
caacttggttccattctcccca

SEQ ID NO: 88433 - DNA, 22 bp, synthetic construct
  misc_feature 1..22: note = chemically synthesized
  source 1..22: mol_type = other DNA
ggttccattctccccatcactt

SEQ ID NO: 88434 - DNA, 22 bp, synthetic construct
  misc_feature 1..22: note = chemically synthesized
  source 1..22: mol_type = other DNA
gttccattctccccatcacttt

SEQ ID NO: 88435 - DNA, 22 bp, synthetic construct
  misc_feature 1..22: note = chemically synthesized
  source 1..22: mol_type = other DNA
cattctccccatcactttcagc

SEQ ID NO: 88436 - DNA, 22 bp, synthetic construct
  misc_feature 1..22: note = chemically synthesized
  source 1..22: mol_type = other DNA
tccccatcactttcagctacac

SEQ ID NO: 88437 - DNA, 22 bp, synthetic construct
  misc_feature 1..22: note = chemically synthesized
  source 1..22: mol_type = other DNA
cccatcactttcagctacacca

SEQ ID NO: 88438 - DNA, 22 bp, synthetic construct
  misc_feature 1..22: note = chemically synthesized
  source 1..22: mol_type = other DNA
tcagctacaccaattagatgta

SEQ ID NO: 88439 - DNA, 22 bp, synthetic construct
  misc_feature 1..22: note = chemically synthesized
  source 1..22: mol_type = other DNA
cagctacaccaattagatgtag

SEQ ID NO: 88440 - DNA, 22 bp, synthetic construct
  misc_feature 1..22: note = chemically synthesized
  source 1..22: mol_type = other DNA
agctacaccaattagatgtaga

SEQ ID NO: 88441 - DNA, 22 bp, synthetic construct
  misc_feature 1..22: note = chemically synthesized
  source 1..22: mol_type = other DNA
caccaattagatgtagatttgg

SEQ ID NO: 88442 - DNA, 22 bp, synthetic construct
  misc_feature 1..22: note = chemically synthesized
  source 1..22: mol_type = other DNA
gatgtagatttggtcttttcac

SEQ ID NO: 88443 - DNA, 22 bp, synthetic construct
  misc_feature 1..22: note = chemically synthesized
  source 1..22: mol_type = other DNA
ggtcttttcacatagtcccata

SEQ ID NO: 88444 - DNA, 22 bp, synthetic construct
  misc_feature 1..22: note = chemically synthesized
  source 1..22: mol_type = other DNA
gtcttttcacatagtcccatat

SEQ ID NO: 88445 - DNA, 22 bp, synthetic construct
  misc_feature 1..22: note = chemically synthesized
  source 1..22: mol_type = other DNA
ttcacatagtcccatatttctt

SEQ ID NO: 88446 - DNA, 22 bp, synthetic construct
  misc_feature 1..22: note = chemically synthesized
  source 1..22: mol_type = other DNA
tcacatagtcccatatttcttg

SEQ ID NO: 88447 - DNA, 22 bp, synthetic construct
  misc_feature 1..22: note = chemically synthesized
  source 1..22: mol_type = other DNA
cacatagtcccatatttcttgg

SEQ ID NO: 88448 - DNA, 22 bp, synthetic construct
  misc_feature 1..22: note = chemically synthesized
  source 1..22: mol_type = other DNA
acatagtcccatatttcttgga

SEQ ID NO: 88449 - DNA, 22 bp, synthetic construct
  misc_feature 1..22: note = chemically synthesized
  source 1..22: mol_type = other DNA
cttggaggctttgttcgtttct

SEQ ID NO: 88450 - DNA, 22 bp, synthetic construct
  misc_feature 1..22: note = chemically synthesized
  source 1..22: mol_type = other DNA
ttggaggctttgttcgtttctt

SEQ ID NO: 88451 - DNA, 22 bp, synthetic construct
  misc_feature 1..22: note = chemically synthesized
  source 1..22: mol_type = other DNA
ggaggctttgttcgtttctttt

SEQ ID NO: 88452 - DNA, 22 bp, synthetic construct
  misc_feature 1..22: note = chemically synthesized
  source 1..22: mol_type = other DNA
gaggctttgttcgtttcttttt

SEQ ID NO: 88453 - DNA, 22 bp, synthetic construct
  misc_feature 1..22: note = chemically synthesized
  source 1..22: mol_type = other DNA
tgttcgtttctttttattcttt

SEQ ID NO: 88454 - DNA, 22 bp, synthetic construct
  misc_feature 1..22: note = chemically synthesized
  source 1..22: mol_type = other DNA
gttcgtttctttttattctttt

SEQ ID NO: 88455 - DNA, 22 bp, synthetic construct
  misc_feature 1..22: note = chemically synthesized
  source 1..22: mol_type = other DNA
ttcgtttctttttattcttttt

SEQ ID NO: 88456 - DNA, 22 bp, synthetic construct
  misc_feature 1..22: note = chemically synthesized
  source 1..22: mol_type = other DNA
gtttctttttattcttttttct

SEQ ID NO: 88457 - DNA, 22 bp, synthetic construct
  misc_feature 1..22: note = chemically synthesized
  source 1..22: mol_type = other DNA
ctttttattcttttttctctaa

SEQ ID NO: 88458 - DNA, 22 bp, synthetic construct
  misc_feature 1..22: note = chemically synthesized
  source 1..22: mol_type = other DNA
tttttattcttttttctctaaa

SEQ ID NO: 88459 - DNA, 22 bp, synthetic construct
  misc_feature 1..22: note = chemically synthesized
  source 1..22: mol_type = other DNA
tttattcttttttctctaaact

SEQ ID NO: 88460 - DNA, 22 bp, synthetic construct
  misc_feature 1..22: note = chemically synthesized
  source 1..22: mol_type = other DNA
ttattcttttttctctaaactt

SEQ ID NO: 88461 - DNA, 22 bp, synthetic construct
  misc_feature 1..22: note = chemically synthesized
  source 1..22: mol_type = other DNA
tattcttttttctctaaacttc

SEQ ID NO: 88462 - DNA, 22 bp, synthetic construct
  misc_feature 1..22: note = chemically synthesized
  source 1..22: mol_type = other DNA
attcttttttctctaaacttct

SEQ ID NO: 88463 - DNA, 22 bp, synthetic construct
  misc_feature 1..22: note = chemically synthesized
  source 1..22: mol_type = other DNA
ttcttttttctctaaacttctc

SEQ ID NO: 88464 - DNA, 22 bp, synthetic construct
  misc_feature 1..22: note = chemically synthesized
  source 1..22: mol_type = other DNA
ttttttctctaaacttctcttc

SEQ ID NO: 88465 - DNA, 22 bp, synthetic construct
  misc_feature 1..22: note = chemically synthesized
  source 1..22: mol_type = other DNA
ttttctctaaacttctcttcat

SEQ ID NO: 88466 - DNA, 22 bp, synthetic construct
  misc_feature 1..22: note = chemically synthesized
  source 1..22: mol_type = other DNA
tttctctaaacttctcttcatg

SEQ ID NO: 88467 - DNA, 22 bp, synthetic construct
  misc_feature 1..22: note = chemically synthesized
  source 1..22: mol_type = other DNA
ttctctaaacttctcttcatgc

SEQ ID NO: 88468 - DNA, 22 bp, synthetic construct
  misc_feature 1..22: note = chemically synthesized
  source 1..22: mol_type = other DNA
tctctaaacttctcttcatgct

SEQ ID NO: 88469 - DNA, 22 bp, synthetic construct
  misc_feature 1..22: note = chemically synthesized
  source 1..22: mol_type = other DNA
ctctaaacttctcttcatgctt

SEQ ID NO: 88470 - DNA, 22 bp, synthetic construct
  misc_feature 1..22: note = chemically synthesized
  source 1..22: mol_type = other DNA
tctaaacttctcttcatgcttc

SEQ ID NO: 88471 - DNA, 22 bp, synthetic construct
  misc_feature 1..22: note = chemically synthesized
  source 1..22: mol_type = other DNA
taaacttctcttcatgcttcat

SEQ ID NO: 88472 - DNA, 22 bp, synthetic construct
  misc_feature 1..22: note = chemically synthesized
  source 1..22: mol_type = other DNA
aacttctcttcatgcttcattt

SEQ ID NO: 88473 - DNA, 22 bp, synthetic construct
  misc_feature 1..22: note = chemically synthesized
  source 1..22: mol_type = other DNA
ctcttcatgcttcatttcattc

SEQ ID NO: 88474 - DNA, 22 bp, synthetic construct
  misc_feature 1..22: note = chemically synthesized
  source 1..22: mol_type = other DNA
tcttcatgcttcatttcattca

SEQ ID NO: 88475 - DNA, 22 bp, synthetic construct
  misc_feature 1..22: note = chemically synthesized
  source 1..22: mol_type = other DNA
ttcatgcttcatttcattcatt

SEQ ID NO: 88476 - DNA, 22 bp, synthetic construct
  misc_feature 1..22: note = chemically synthesized
  source 1..22: mol_type = other DNA
catgcttcatttcattcatttc

SEQ ID NO: 88477 - DNA, 22 bp, synthetic construct
  misc_feature 1..22: note = chemically synthesized
  source 1..22: mol_type = other DNA
atgcttcatttcattcatttca

SEQ ID NO: 88478 - DNA, 22 bp, synthetic construct
  misc_feature 1..22: note = chemically synthesized
  source 1..22: mol_type = other DNA
catttcattcatttcatctttc

SEQ ID NO: 88479 - DNA, 22 bp, synthetic construct
  misc_feature 1..22: note = chemically synthesized
  source 1..22: mol_type = other DNA
atttcattcatttcatctttcg

SEQ ID NO: 88480 - DNA, 22 bp, synthetic construct
  misc_feature 1..22: note = chemically synthesized
  source 1..22: mol_type = other DNA
cattcatttcatctttcgtcat

SEQ ID NO: 88481 - DNA, 22 bp, synthetic construct
  misc_feature 1..22: note = chemically synthesized
  source 1..22: mol_type = other DNA
attcatttcatctttcgtcatt

SEQ ID NO: 88482 - DNA, 22 bp, synthetic construct
  misc_feature 1..22: note = chemically synthesized
  source 1..22: mol_type = other DNA
atttcatctttcgtcattgata

SEQ ID NO: 88483 - DNA, 22 bp, synthetic construct
  misc_feature 1..22: note = chemically synthesized
  source 1..22: mol_type = other DNA
catctttcgtcattgataccct

SEQ ID NO: 88484 - DNA, 22 bp, synthetic construct
  misc_feature 1..22: note = chemically synthesized
  source 1..22: mol_type = other DNA
atctttcgtcattgataccctt

SEQ ID NO: 88485 - DNA, 22 bp, synthetic construct
  misc_feature 1..22: note = chemically synthesized
  source 1..22: mol_type = other DNA
tcgtcattgataccctttcttc

SEQ ID NO: 88486 - DNA, 22 bp, synthetic construct
  misc_feature 1..22: note = chemically synthesized
  source 1..22: mol_type = other DNA
cgtcattgataccctttcttcc

SEQ ID NO: 88487 - DNA, 22 bp, synthetic construct
  misc_feature 1..22: note = chemically synthesized
  source 1..22: mol_type = other DNA
gtcattgataccctttcttcca

SEQ ID NO: 88488 - DNA, 22 bp, synthetic construct
  misc_feature 1..22: note = chemically synthesized
  source 1..22: mol_type = other DNA
ataccctttcttccagttgatc

SEQ ID NO: 88489 - DNA, 22 bp, synthetic construct
  misc_feature 1..22: note = chemically synthesized
  source 1..22: mol_type = other DNA
tcttccagttgatctcatcggt

SEQ ID NO: 88490 - DNA, 22 bp, synthetic construct
  misc_feature 1..22: note = chemically synthesized
  source 1..22: mol_type = other DNA
cttccagttgatctcatcggtt

SEQ ID NO: 88491 - DNA, 22 bp, synthetic construct
  misc_feature 1..22: note = chemically synthesized
  source 1..22: mol_type = other DNA
ttccagttgatctcatcggtta

SEQ ID NO: 88492 - DNA, 22 bp, synthetic construct
  misc_feature 1..22: note = chemically synthesized
  source 1..22: mol_type = other DNA
ccagttgatctcatcggttact

SEQ ID NO: 88493 - DNA, 22 bp, synthetic construct
  misc_feature 1..22: note = chemically synthesized
  source 1..22: mol_type = other DNA
cagttgatctcatcggttactg

SEQ ID NO: 88494 - DNA, 22 bp, synthetic construct
  misc_feature 1..22: note = chemically synthesized
  source 1..22: mol_type = other DNA
atctcatcggttactgaggctt

SEQ ID NO: 88495 - DNA, 22 bp, synthetic construct
  misc_feature 1..22: note = chemically synthesized
  source 1..22: mol_type = other DNA
atcggttactgaggcttgtgta

SEQ ID NO: 88496 - DNA, 22 bp, synthetic construct
  misc_feature 1..22: note = chemically synthesized
  source 1..22: mol_type = other DNA
ctgaggcttgtgtatttgtcac

SEQ ID NO: 88497 - DNA, 22 bp, synthetic construct
  misc_feature 1..22: note = chemically synthesized
  source 1..22: mol_type = other DNA
aggcttgtgtatttgtcacgta

SEQ ID NO: 88498 - DNA, 22 bp, synthetic construct
  misc_feature 1..22: note = chemically synthesized
  source 1..22: mol_type = other DNA
gtgtatttgtcacgtagttctc

SEQ ID NO: 88499 - DNA, 22 bp, synthetic construct
  misc_feature 1..22: note = chemically synthesized
  source 1..22: mol_type = other DNA
tgtatttgtcacgtagttctcc

SEQ ID NO: 88500 - DNA, 22 bp, synthetic construct
  misc_feature 1..22: note = chemically synthesized
  source 1..22: mol_type = other DNA
gtcacgtagttctcctgccttg

SEQ ID NO: 88501 - DNA, 22 bp, synthetic construct
  misc_feature 1..22: note = chemically synthesized
  source 1..22: mol_type = other DNA
tcacgtagttctcctgccttgg

SEQ ID NO: 88502 - DNA, 22 bp, synthetic construct
  misc_feature 1..22: note = chemically synthesized
  source 1..22: mol_type = other DNA
tcctgccttggttttcagctcc

SEQ ID NO: 88503 - DNA, 22 bp, synthetic construct
  misc_feature 1..22: note = chemically synthesized
  source 1..22: mol_type = other DNA
ctgccttggttttcagctccat

SEQ ID NO: 88504 - DNA, 22 bp, synthetic construct
  misc_feature 1..22: note = chemically synthesized
  source 1..22: mol_type = other DNA
ccttggttttcagctccatcag

SEQ ID NO: 88505 - DNA, 22 bp, synthetic construct
  misc_feature 1..22: note = chemically synthesized
  source 1..22: mol_type = other DNA
ggttttcagctccatcaggtcc

SEQ ID NO: 88506 - DNA, 22 bp, synthetic construct
  misc_feature 1..22: note = chemically synthesized
  source 1..22: mol_type = other DNA
gttttcagctccatcaggtcct

SEQ ID NO: 88507 - DNA, 22 bp, synthetic construct
  misc_feature 1..22: note = chemically synthesized
  source 1..22: mol_type = other DNA
tcagctccatcaggtcctttaa

SEQ ID NO: 88508 - DNA, 22 bp, synthetic construct
  misc_feature 1..22: note = chemically synthesized
  source 1..22: mol_type = other DNA
cagctccatcaggtcctttaag

SEQ ID NO: 88509 - DNA, 22 bp, synthetic construct
  misc_feature 1..22: note = chemically synthesized
  source 1..22: mol_type = other DNA
agctccatcaggtcctttaagg

SEQ ID NO: 88510 - DNA, 22 bp, synthetic construct
  misc_feature 1..22: note = chemically synthesized
  source 1..22: mol_type = other DNA
catcaggtcctttaaggacttc

SEQ ID NO: 88511 - DNA, 22 bp, synthetic construct
  misc_feature 1..22: note = chemically synthesized
  source 1..22: mol_type = other DNA
taaggacttctgtgcattggtt

SEQ ID NO: 88512 - DNA, 22 bp, synthetic construct
  misc_feature 1..22: note = chemically synthesized
  source 1..22: mol_type = other DNA
aaggacttctgtgcattggtta

SEQ ID NO: 88513 - DNA, 22 bp, synthetic construct
  misc_feature 1..22: note = chemically synthesized
  source 1..22: mol_type = other DNA
aggacttctgtgcattggttat

SEQ ID NO: 88514 - DNA, 22 bp, synthetic construct
  misc_feature 1..22: note = chemically synthesized
  source 1..22: mol_type = other DNA
ctgtgcattggttattctagtt

SEQ ID NO: 88515 - DNA, 22 bp, synthetic construct
  misc_feature 1..22: note = chemically synthesized
  source 1..22: mol_type = other DNA
tgtgcattggttattctagtta

SEQ ID NO: 88516 - DNA, 22 bp, synthetic construct
  misc_feature 1..22: note = chemically synthesized
  source 1..22: mol_type = other DNA
tgcattggttattctagttatc

SEQ ID NO: 88517 - DNA, 22 bp, synthetic construct
  misc_feature 1..22: note = chemically synthesized
  source 1..22: mol_type = other DNA
gttattctagttatccattcat

SEQ ID NO: 88518 - DNA, 22 bp, synthetic construct
  misc_feature 1..22: note = chemically synthesized
  source 1..22: mol_type = other DNA
ttctagttatccattcatctaa

SEQ ID NO: 88519 - DNA, 22 bp, synthetic construct
  misc_feature 1..22: note = chemically synthesized
  source 1..22: mol_type = other DNA
tagttatccattcatctaattt

SEQ ID NO: 88520 - DNA, 22 bp, synthetic construct
  misc_feature 1..22: note = chemically synthesized
  source 1..22: mol_type = other DNA
gttatccattcatctaattttt

SEQ ID NO: 88521 - DNA, 22 bp, synthetic construct
  misc_feature 1..22: note = chemically synthesized
  source 1..22: mol_type = other DNA
tccattcatctaattttttttc

SEQ ID NO: 88522 - DNA, 22 bp, synthetic construct
  misc_feature 1..22: note = chemically synthesized
  source 1..22: mol_type = other DNA
atctaattttttttcaaagttt

SEQ ID NO: 88523 - DNA, 22 bp, synthetic construct
  misc_feature 1..22: note = chemically synthesized
  source 1..22: mol_type = other DNA
attttttttcaaagttttttac

SEQ ID NO: 88524 - DNA, 22 bp, synthetic construct
  misc_feature 1..22: note = chemically synthesized
  source 1..22: mol_type = other DNA
tttttcaaagttttttacttct

SEQ ID NO: 88525 - DNA, 22 bp, synthetic construct
  misc_feature 1..22: note = chemically synthesized
  source 1..22: mol_type = other DNA
ttttcaaagttttttacttctt

SEQ ID NO: 88526 - DNA, 22 bp, synthetic construct
  misc_feature 1..22: note = chemically synthesized
  source 1..22: mol_type = other DNA
tttcaaagttttttacttcttt

SEQ ID NO: 88527 - DNA, 22 bp, synthetic construct
  misc_feature 1..22: note = chemically synthesized
  source 1..22: mol_type = other DNA
ttcaaagttttttacttctttg

SEQ ID NO: 88528 - DNA, 22 bp, synthetic construct
  misc_feature 1..22: note = chemically synthesized
  source 1..22: mol_type = other DNA
tcaaagttttttacttctttgc

SEQ ID NO: 88529 - DNA, 22 bp, synthetic construct
  misc_feature 1..22: note = chemically synthesized
  source 1..22: mol_type = other DNA
caaagttttttacttctttgcc

SEQ ID NO: 88530 - DNA, 22 bp, synthetic construct
  misc_feature 1..22: note = chemically synthesized
  source 1..22: mol_type = other DNA
aaagttttttacttctttgccg

SEQ ID NO: 88531 - DNA, 22 bp, synthetic construct
  misc_feature 1..22: note = chemically synthesized
  source 1..22: mol_type = other DNA
tttacttctttgccgtttgttc

SEQ ID NO: 88532 - DNA, 22 bp, synthetic construct
  misc_feature 1..22: note = chemically synthesized
  source 1..22: mol_type = other DNA
ttacttctttgccgtttgttcg

SEQ ID NO: 88533 - DNA, 22 bp, synthetic construct
  misc_feature 1..22: note = chemically synthesized
  source 1..22: mol_type = other DNA
tacttctttgccgtttgttcga

SEQ ID NO: 88534 - DNA, 22 bp, synthetic construct
  misc_feature 1..22: note = chemically synthesized
  source 1..22: mol_type = other DNA
acttctttgccgtttgttcgaa

SEQ ID NO: 88535 - DNA, 22 bp, synthetic construct
  misc_feature 1..22: note = chemically synthesized
  source 1..22: mol_type = other DNA
cttctttgccgtttgttcgaac

SEQ ID NO: 88536 - DNA, 22 bp, synthetic construct
  misc_feature 1..22: note = chemically synthesized
  source 1..22: mol_type = other DNA
ctttgccgtttgttcgaacttc

SEQ ID NO: 88537 - DNA, 22 bp, synthetic construct
  misc_feature 1..22: note = chemically synthesized
  source 1..22: mol_type = other DNA
tttgccgtttgttcgaacttcc

SEQ ID NO: 88538 - DNA, 22 bp, synthetic construct
  misc_feature 1..22: note = chemically synthesized
  source 1..22: mol_type = other DNA
tgccgtttgttcgaacttcctc

SEQ ID NO: 88539 - DNA, 22 bp, synthetic construct
  misc_feature 1..22: note = chemically synthesized
  source 1..22: mol_type = other DNA
gccgtttgttcgaacttcctcc

SEQ ID NO: 88540 - DNA, 22 bp, synthetic construct
  misc_feature 1..22: note = chemically synthesized
  source 1..22: mol_type = other DNA
ccgtttgttcgaacttcctcct

SEQ ID NO: 88541 - DNA, 22 bp, synthetic construct
  misc_feature 1..22: note = chemically synthesized
  source 1..22: mol_type = other DNA
gttcgaacttcctcctttagct

SEQ ID NO: 88542 - DNA, 22 bp, synthetic construct
  misc_feature 1..22: note = chemically synthesized
  source 1..22: mol_type = other DNA
ttcgaacttcctcctttagctt

SEQ ID NO: 88543 - DNA, 22 bp, synthetic construct
  misc_feature 1..22: note = chemically synthesized
  source 1..22: mol_type = other DNA
gaacttcctcctttagcttgga

SEQ ID NO: 88544 - DNA, 22 bp, synthetic construct
  misc_feature 1..22: note = chemically synthesized
  source 1..22: mol_type = other DNA
cctcctttagcttggagtagtt

SEQ ID NO: 88545 - DNA, 22 bp, synthetic construct
  misc_feature 1..22: note = chemically synthesized
  source 1..22: mol_type = other DNA
ctcctttagcttggagtagttt

SEQ ID NO: 88546 - DNA, 22 bp, synthetic construct
  misc_feature 1..22: note = chemically synthesized
  source 1..22: mol_type = other DNA
ctttagcttggagtagtttgat

SEQ ID NO: 88547 - DNA, 22 bp, synthetic construct
  misc_feature 1..22: note = chemically synthesized
  source 1..22: mol_type = other DNA
tagcttggagtagtttgatctt

SEQ ID NO: 88548 - DNA, 22 bp, synthetic construct
  misc_feature 1..22: note = chemically synthesized
  source 1..22: mol_type = other DNA
agcttggagtagtttgatcttc

SEQ ID NO: 88549 - DNA, 22 bp, synthetic construct
  misc_feature 1..22: note = chemically synthesized
  source 1..22: mol_type = other DNA
gcttggagtagtttgatcttct

SEQ ID NO: 88550 - DNA, 22 bp, synthetic construct
  misc_feature 1..22: note = chemically synthesized
  source 1..22: mol_type = other DNA
ggagtagtttgatcttctgaag

SEQ ID NO: 88551 - DNA, 22 bp, synthetic construct
  misc_feature 1..22: note = chemically synthesized
  source 1..22: mol_type = other DNA
gagtagtttgatcttctgaagc

SEQ ID NO: 88552 - DNA, 22 bp, synthetic construct
  misc_feature 1..22: note = chemically synthesized
  source 1..22: mol_type = other DNA
gatcttctgaagccttcctctc

SEQ ID NO: 88553 - DNA, 22 bp, synthetic construct
  misc_feature 1..22: note = chemically synthesized
  source 1..22: mol_type = other DNA
atcttctgaagccttcctctct

SEQ ID NO: 88554 - DNA, 22 bp, synthetic construct
  misc_feature 1..22: note = chemically synthesized
  source 1..22: mol_type = other DNA
ctgaagccttcctctctcaact

SEQ ID NO: 88555 - DNA, 22 bp, synthetic construct
  misc_feature 1..22: note = chemically synthesized
  source 1..22: mol_type = other DNA
tgaagccttcctctctcaactc

SEQ ID NO: 88556 - DNA, 22 bp, synthetic construct
  misc_feature 1..22: note = chemically synthesized
  source 1..22: mol_type = other DNA
aagccttcctctctcaactcgt

SEQ ID NO: 88557 - DNA, 22 bp, synthetic construct
  misc_feature 1..22: note = chemically synthesized
  source 1..22: mol_type = other DNA
cctctctcaactcgtcaaagtc

SEQ ID NO: 88558 - DNA, 22 bp, synthetic construct
  misc_feature 1..22: note = chemically synthesized
  source 1..22: mol_type = other DNA
ctctctcaactcgtcaaagtca

SEQ ID NO: 88559 - DNA, 22 bp, synthetic construct
  misc_feature 1..22: note = chemically synthesized
  source 1..22: mol_type = other DNA
tctcaactcgtcaaagtcattc

SEQ ID NO: 88560 - DNA, 22 bp, synthetic construct
  misc_feature 1..22: note = chemically synthesized
  source 1..22: mol_type = other DNA
tcaactcgtcaaagtcattctc

SEQ ID NO: 88561 - DNA, 22 bp, synthetic construct
  misc_feature 1..22: note = chemically synthesized
  source 1..22: mol_type = other DNA
aactcgtcaaagtcattctctg

SEQ ID NO: 88562 - DNA, 22 bp, synthetic construct
  misc_feature 1..22: note = chemically synthesized
  source 1..22: mol_type = other DNA
gtcaaagtcattctctgcccag

SEQ ID NO: 88563 - DNA, 22 bp, synthetic construct
  misc_feature 1..22: note = chemically synthesized
  source 1..22: mol_type = other DNA
tctgcccagctttgttccattg

SEQ ID NO: 88564 - DNA, 22 bp, synthetic construct
  misc_feature 1..22: note = chemically synthesized
  source 1..22: mol_type = other DNA
tgcccagctttgttccattgct

SEQ ID NO: 88565 - DNA, 22 bp, synthetic construct
  misc_feature 1..22: note = chemically synthesized
  source 1..22: mol_type = other DNA
cccagctttgttccattgctgg

SEQ ID NO: 88566 - DNA, 22 bp, synthetic construct
  misc_feature 1..22: note = chemically synthesized
  source 1..22: mol_type = other DNA
tgttccattgctggtgaggagc

SEQ ID NO: 88567 - DNA, 22 bp, synthetic construct
  misc_feature 1..22: note = chemically synthesized
  source 1..22: mol_type = other DNA
gttccattgctggtgaggagct

SEQ ID NO: 88568 - DNA, 22 bp, synthetic construct
  misc_feature 1..22: note = chemically synthesized
  source 1..22: mol_type = other DNA
ttccattgctggtgaggagctg

SEQ ID NO: 88569 - DNA, 22 bp, synthetic construct
  misc_feature 1..22: note = chemically synthesized
  source 1..22: mol_type = other DNA
cattgctggtgaggagctgcgt

SEQ ID NO: 88570 - DNA, 22 bp, synthetic construct
  misc_feature 1..22: note = chemically synthesized
  source 1..22: mol_type = other DNA
ctggtgaggagctgcgttactt

SEQ ID NO: 88571 - DNA, 22 bp, synthetic construct
  misc_feature 1..22: note = chemically synthesized
  source 1..22: mol_type = other DNA
gtgaggagctgcgttactttgg

SEQ ID NO: 88572 - DNA, 22 bp, synthetic construct
  misc_feature 1..22: note = chemically synthesized
  source 1..22: mol_type = other DNA
cgttactttggaggaggagagg

SEQ ID NO: 88573 - DNA, 22 bp, synthetic construct
  misc_feature 1..22: note = chemically synthesized
  source 1..22: mol_type = other DNA
ctttggaggaggagaggcactc

SEQ ID NO: 88574 - DNA, 22 bp, synthetic construct
  misc_feature 1..22: note = chemically synthesized
  source 1..22: mol_type = other DNA
tggaggaggagaggcactctca

SEQ ID NO: 88575 - DNA, 22 bp, synthetic construct
  misc_feature 1..22: note = chemically synthesized
  source 1..22: mol_type = other DNA
ggaggaggagaggcactctcat

SEQ ID NO: 88576 - DNA, 22 bp, synthetic construct
  misc_feature 1..22: note = chemically synthesized
  source 1..22: mol_type = other DNA
gaggaggagaggcactctcatt

SEQ ID NO: 88577 - DNA, 22 bp, synthetic construct
  misc_feature 1..22: note = chemically synthesized
  source 1..22: mol_type = other DNA
tcatttttagagtgtccagttt

SEQ ID NO: 88578 - DNA, 22 bp, synthetic construct
  misc_feature 1..22: note = chemically synthesized
  source 1..22: mol_type = other DNA
atttttagagtgtccagttttt

SEQ ID NO: 88579 - DNA, 22 bp, synthetic construct
  misc_feature 1..22: note = chemically synthesized
  source 1..22: mol_type = other DNA
ttagagtgtccagtttttctgc

SEQ ID NO: 88580 - DNA, 22 bp, synthetic construct
  misc_feature 1..22: note = chemically synthesized
  source 1..22: mol_type = other DNA
tagagtgtccagtttttctgct

SEQ ID NO: 88581 - DNA, 22 bp, synthetic construct
  misc_feature 1..22: note = chemically synthesized
  source 1..22: mol_type = other DNA
agagtgtccagtttttctgctc

SEQ ID NO: 88582 - DNA, 22 bp, synthetic construct
  misc_feature 1..22: note = chemically synthesized
  source 1..22: mol_type = other DNA
gagtgtccagtttttctgctct

SEQ ID NO: 88583 - DNA, 22 bp, synthetic construct
  misc_feature 1..22: note = chemically synthesized
  source 1..22: mol_type = other DNA
ttctgctctgctttttccccat

SEQ ID NO: 88584 - DNA, 22 bp, synthetic construct
  misc_feature 1..22: note = chemically synthesized
  source 1..22: mol_type = other DNA
tctgctctgctttttccccatc

SEQ ID NO: 88585 - DNA, 22 bp, synthetic construct
  misc_feature 1..22: note = chemically synthesized
  source 1..22: mol_type = other DNA
ctgctctgctttttccccatct

SEQ ID NO: 88586 - DNA, 22 bp, synthetic construct
  misc_feature 1..22: note = chemically synthesized
  source 1..22: mol_type = other DNA
tgctctgctttttccccatctt

SEQ ID NO: 88587 - DNA, 22 bp, synthetic construct
  misc_feature 1..22: note = chemically synthesized
  source 1..22: mol_type = other DNA
ctctgctttttccccatcttta

SEQ ID NO: 88588 - DNA, 22 bp, synthetic construct
  misc_feature 1..22: note = chemically synthesized
  source 1..22: mol_type = other DNA
tgctttttccccatctttatgg

SEQ ID NO: 88589 - DNA, 22 bp, synthetic construct
  misc_feature 1..22: note = chemically synthesized
  source 1..22: mol_type = other DNA
ctttttccccatctttatggtt

SEQ ID NO: 88590 - DNA, 22 bp, synthetic construct
  misc_feature 1..22: note = chemically synthesized
  source 1..22: mol_type = other DNA
tttccccatctttatggtttta

SEQ ID NO: 88591 - DNA, 22 bp, synthetic construct
  misc_feature 1..22: note = chemically synthesized
  source 1..22: mol_type = other DNA
ttccccatctttatggttttat

SEQ ID NO: 88592 - DNA, 22 bp, synthetic construct
  misc_feature 1..22: note = chemically synthesized
  source 1..22: mol_type = other DNA
tccccatctttatggttttatc

SEQ ID NO: 88593 - DNA, 22 bp, synthetic construct
  misc_feature 1..22: note = chemically synthesized
  source 1..22: mol_type = other DNA
ccccatctttatggttttatct

SEQ ID NO: 88594 - DNA, 22 bp, synthetic construct
  misc_feature 1..22: note = chemically synthesized
  source 1..22: mol_type = other DNA
cccatctttatggttttatcta

SEQ ID NO: 88595 - DNA, 22 bp, synthetic construct
  misc_feature 1..22: note = chemically synthesized
  source 1..22: mol_type = other DNA
tatggttttatctacctttggt

SEQ ID NO: 88596 - DNA, 22 bp, synthetic construct
  misc_feature 1..22: note = chemically synthesized
  source 1..22: mol_type = other DNA
atggttttatctacctttggtc

SEQ ID NO: 88597 - DNA, 22 bp, synthetic construct
  misc_feature 1..22: note = chemically synthesized
  source 1..22: mol_type = other DNA
tggttttatctacctttggtct

SEQ ID NO: 88598 - DNA, 22 bp, synthetic construct
  misc_feature 1..22: note = chemically synthesized
  source 1..22: mol_type = other DNA
tatctacctttggtctttgatg

SEQ ID NO: 88599 - DNA, 22 bp, synthetic construct
  misc_feature 1..22: note = chemically synthesized
  source 1..22: mol_type = other DNA
atctacctttggtctttgatga

SEQ ID NO: 88600 - DNA, 22 bp, synthetic construct
  misc_feature 1..22: note = chemically synthesized
  source 1..22: mol_type = other DNA
tctacctttggtctttgatgat

SEQ ID NO: 88601 - DNA, 22 bp, synthetic construct
  misc_feature 1..22: note = chemically synthesized
  source 1..22: mol_type = other DNA
cctttggtctttgatgatggcg

SEQ ID NO: 88602 - DNA, 22 bp, synthetic construct
  misc_feature 1..22: note = chemically synthesized
  source 1..22: mol_type = other DNA
tggtctttgatgatggcgatgt

SEQ ID NO: 88603 - DNA, 22 bp, synthetic construct
  misc_feature 1..22: note = chemically synthesized
  source 1..22: mol_type = other DNA
ggtctttgatgatggcgatgta

SEQ ID NO: 88604 - DNA, 22 bp, synthetic construct
  misc_feature 1..22: note = chemically synthesized
  source 1..22: mol_type = other DNA
gtctttgatgatggcgatgtac

SEQ ID NO: 88605 - DNA, 22 bp, synthetic construct
  misc_feature 1..22: note = chemically synthesized
  source 1..22: mol_type = other DNA
tgatgatggcgatgtacagatg

SEQ ID NO: 88606 - DNA, 22 bp, synthetic construct
  misc_feature 1..22: note = chemically synthesized
  source 1..22: mol_type = other DNA
gatgatggcgatgtacagatgg

SEQ ID NO: 88607 - DNA, 22 bp, synthetic construct
  misc_feature 1..22: note = chemically synthesized
  source 1..22: mol_type = other DNA
atgatggcgatgtacagatggg

SEQ ID NO: 88608 - DNA, 22 bp, synthetic construct
  misc_feature 1..22: note = chemically synthesized
  source 1..22: mol_type = other DNA
ttggtgtggatgtcctttctgt

SEQ ID NO: 88609 - DNA, 22 bp, synthetic construct
  misc_feature 1..22: note = chemically synthesized
  source 1..22: mol_type = other DNA
tggtgtggatgtcctttctgtt

SEQ ID NO: 88610 - DNA, 22 bp, synthetic construct
  misc_feature 1..22: note = chemically synthesized
  source 1..22: mol_type = other DNA
ggtgtggatgtcctttctgttt

SEQ ID NO: 88611 - DNA, 22 bp, synthetic construct
  misc_feature 1..22: note = chemically synthesized
  source 1..22: mol_type = other DNA
gtgtggatgtcctttctgtttg

SEQ ID NO: 88612 - DNA, 22 bp, synthetic construct
  misc_feature 1..22: note = chemically synthesized
  source 1..22: mol_type = other DNA
tctgtttgttagttttccttct

SEQ ID NO: 88613 - DNA, 22 bp, synthetic construct
  misc_feature 1..22: note = chemically synthesized
  source 1..22: mol_type = other DNA
ctgtttgttagttttccttcta

SEQ ID NO: 88614 - DNA, 22 bp, synthetic construct
  misc_feature 1..22: note = chemically synthesized
  source 1..22: mol_type = other DNA
tgtttgttagttttccttctaa

SEQ ID NO: 88615 - DNA, 22 bp, synthetic construct
  misc_feature 1..22: note = chemically synthesized
  source 1..22: mol_type = other DNA
tttgttagttttccttctaaca

SEQ ID NO: 88616 - DNA, 22 bp, synthetic construct
  misc_feature 1..22: note = chemically synthesized
  source 1..22: mol_type = other DNA
gttagttttccttctaacagtc

SEQ ID NO: 88617 - DNA, 22 bp, synthetic construct
  misc_feature 1..22: note = chemically synthesized
  source 1..22: mol_type = other DNA
ttagttttccttctaacagtca

SEQ ID NO: 88618 - DNA, 22 bp, synthetic construct
  misc_feature 1..22: note = chemically synthesized
  source 1..22: mol_type = other DNA
gttttccttctaacagtcagga

SEQ ID NO: 88619 - DNA, 22 bp, synthetic construct
  misc_feature 1..22: note = chemically synthesized
  source 1..22: mol_type = other DNA
tccttctaacagtcaggaccct

SEQ ID NO: 88620 - DNA, 22 bp, synthetic construct
  misc_feature 1..22: note = chemically synthesized
  source 1..22: mol_type = other DNA
ccttctaacagtcaggaccctc

SEQ ID NO: 88621 - DNA, 22 bp, synthetic construct
  misc_feature 1..22: note = chemically synthesized
  source 1..22: mol_type = other DNA
cttctaacagtcaggaccctca

SEQ ID NO: 88622 - DNA, 22 bp, synthetic construct
  misc_feature 1..22: note = chemically synthesized
  source 1..22: mol_type = other DNA
ctaacagtcaggaccctcagct

SEQ ID NO: 88623 - DNA, 22 bp, synthetic construct
  misc_feature 1..22: note = chemically synthesized
  source 1..22: mol_type = other DNA
taacagtcaggaccctcagctg

SEQ ID NO: 88624 - DNA, 22 bp, synthetic construct
  misc_feature 1..22: note = chemically synthesized
  source 1..22: mol_type = other DNA
acagtcaggaccctcagctgca

SEQ ID NO: 88625 - DNA, 22 bp, synthetic construct
  misc_feature 1..22: note = chemically synthesized
  source 1..22: mol_type = other DNA
agctgcaggtctgttggagttt

SEQ ID NO: 88626 - DNA, 22 bp, synthetic construct
  misc_feature 1..22: note = chemically synthesized
  source 1..22: mol_type = other DNA
caggtctgttggagtttactgg

SEQ ID NO: 88627 - DNA, 22 bp, synthetic construct
  misc_feature 1..22: note = chemically synthesized
  source 1..22: mol_type = other DNA
ttggagtttactggaggtccac

SEQ ID NO: 88628 - DNA, 22 bp, synthetic construct
  misc_feature 1..22: note = chemically synthesized
  source 1..22: mol_type = other DNA
gagtttactggaggtccactcc

SEQ ID NO: 88629 - DNA, 22 bp, synthetic construct
  misc_feature 1..22: note = chemically synthesized
  source 1..22: mol_type = other DNA
actggaggtccactccagaagc

SEQ ID NO: 88630 - DNA, 22 bp, synthetic construct
  misc_feature 1..22: note = chemically synthesized
  source 1..22: mol_type = other DNA
ctggaggtccactccagaagct

SEQ ID NO: 88631 - DNA, 22 bp, synthetic construct
  misc_feature 1..22: note = chemically synthesized
  source 1..22: mol_type = other DNA
gaggtccactccagaagctgtt

SEQ ID NO: 88632 - DNA, 22 bp, synthetic construct
  misc_feature 1..22: note = chemically synthesized
  source 1..22: mol_type = other DNA
cagaagctgttttcctgggtat

SEQ ID NO: 88633 - DNA, 22 bp, synthetic construct
  misc_feature 1..22: note = chemically synthesized
  source 1..22: mol_type = other DNA
ttttcctgggtatcaacagcgg

SEQ ID NO: 88634 - DNA, 22 bp, synthetic construct
  misc_feature 1..22: note = chemically synthesized
  source 1..22: mol_type = other DNA
tcctgggtatcaacagcggtgg

SEQ ID NO: 88635 - DNA, 22 bp, synthetic construct
  misc_feature 1..22: note = chemically synthesized
  source 1..22: mol_type = other DNA
cctgggtatcaacagcggtggc

SEQ ID NO: 88636 - DNA, 22 bp, synthetic construct
  misc_feature 1..22: note = chemically synthesized
  source 1..22: mol_type = other DNA
ctgggtatcaacagcggtggct

SEQ ID NO: 88637 - DNA, 22 bp, synthetic construct
  misc_feature 1..22: note = chemically synthesized
  source 1..22: mol_type = other DNA
ggtatcaacagcggtggctgca

SEQ ID NO: 88638 - DNA, 22 bp, synthetic construct
  misc_feature 1..22: note = chemically synthesized
  source 1..22: mol_type = other DNA
cagaacagtggatattggtgaa

SEQ ID NO: 88639 - DNA, 22 bp, synthetic construct
  misc_feature 1..22: note = chemically synthesized
  source 1..22: mol_type = other DNA
gtgaaccgcaaatgctgctgcc

SEQ ID NO: 88640 - DNA, 22 bp, synthetic construct
  misc_feature 1..22: note = chemically synthesized
  source 1..22: mol_type = other DNA
ctgcctgatcattcctctggaa

SEQ ID NO: 88641 - DNA, 22 bp, synthetic construct
  misc_feature 1..22: note = chemically synthesized
  source 1..22: mol_type = other DNA
cctgatcattcctctggaagtt

SEQ ID NO: 88642 - DNA, 22 bp, synthetic construct
  misc_feature 1..22: note = chemically synthesized
  source 1..22: mol_type = other DNA
atcattcctctggaagttttgt

SEQ ID NO: 88643 - DNA, 22 bp, synthetic construct
  misc_feature 1..22: note = chemically synthesized
  source 1..22: mol_type = other DNA
ctctggaagttttgtcttagag

SEQ ID NO: 88644 - DNA, 22 bp, synthetic construct
  misc_feature 1..22: note = chemically synthesized
  source 1..22: mol_type = other DNA
tggaagttttgtcttagaggag

SEQ ID NO: 88645 - DNA, 22 bp, synthetic construct
  misc_feature 1..22: note = chemically synthesized
  source 1..22: mol_type = other DNA
gaagttttgtcttagaggagta

SEQ ID NO: 88646 - DNA, 22 bp, synthetic construct
  misc_feature 1..22: note = chemically synthesized
  source 1..22: mol_type = other DNA
tgtcttagaggagtaccagcca

SEQ ID NO: 88647 - DNA, 22 bp, synthetic construct
  misc_feature 1..22: note = chemically synthesized
  source 1..22: mol_type = other DNA
gtcttagaggagtaccagccat

SEQ ID NO: 88648 - DNA, 22 bp, synthetic construct
  misc_feature 1..22: note = chemically synthesized
  source 1..22: mol_type = other DNA
tcttagaggagtaccagccatg

SEQ ID NO: 88649 - DNA, 22 bp, synthetic construct
  misc_feature 1..22: note = chemically synthesized
  source 1..22: mol_type = other DNA
agaggagtaccagccatgtgag

SEQ ID NO: 88650 - DNA, 22 bp, synthetic construct
  misc_feature 1..22: note = chemically synthesized
  source 1..22: mol_type = other DNA
gaggagtaccagccatgtgagg

SEQ ID NO: 88651 - DNA, 22 bp, synthetic construct
  misc_feature 1..22: note = chemically synthesized
  source 1..22: mol_type = other DNA
cccctactgggggatgcctccc

SEQ ID NO: 88652 - DNA, 22 bp, synthetic construct
  misc_feature 1..22: note = chemically synthesized
  source 1..22: mol_type = other DNA
ctgggggatgcctcccagttag

SEQ ID NO: 88653 - DNA, 22 bp, synthetic construct
  misc_feature 1..22: note = chemically synthesized
  source 1..22: mol_type = other DNA
ggggatgcctcccagttaggct

SEQ ID NO: 88654 - DNA, 22 bp, synthetic construct
  misc_feature 1..22: note = chemically synthesized
  source 1..22: mol_type = other DNA
ccagttaggctactcgggggtc

SEQ ID NO: 88655 - DNA, 22 bp, synthetic construct
  misc_feature 1..22: note = chemically synthesized
  source 1..22: mol_type = other DNA
ggctactcgggggtcagggacc

SEQ ID NO: 88656 - DNA, 22 bp, synthetic construct
  misc_feature 1..22: note = chemically synthesized
  source 1..22: mol_type = other DNA
ctcgggggtcagggacccactt

SEQ ID NO: 88657 - DNA, 22 bp, synthetic construct
  misc_feature 1..22: note = chemically synthesized
  source 1..22: mol_type = other DNA
gggggtcagggacccacttgag

SEQ ID NO: 88658 - DNA, 22 bp, synthetic construct
  misc_feature 1..22: note = chemically synthesized
  source 1..22: mol_type = other DNA
gaggaggcagtctgcctgttct

SEQ ID NO: 88659 - DNA, 22 bp, synthetic construct
  misc_feature 1..22: note = chemically synthesized
  source 1..22: mol_type = other DNA
aggaggcagtctgcctgttctc

SEQ ID NO: 88660 - DNA, 22 bp, synthetic construct
  misc_feature 1..22: note = chemically synthesized
  source 1..22: mol_type = other DNA
cctgttctcagatctgaagcta

SEQ ID NO: 88661 - DNA, 22 bp, synthetic construct
  misc_feature 1..22: note = chemically synthesized
  source 1..22: mol_type = other DNA
ttctcagatctgaagctatgtg

SEQ ID NO: 88662 - DNA, 22 bp, synthetic construct
  misc_feature 1..22: note = chemically synthesized
  source 1..22: mol_type = other DNA
tcagatctgaagctatgtgctg

SEQ ID NO: 88663 - DNA, 22 bp, synthetic construct
  misc_feature 1..22: note = chemically synthesized
  source 1..22: mol_type = other DNA
agatctgaagctatgtgctggg

SEQ ID NO: 88664 - DNA, 22 bp, synthetic construct
  misc_feature 1..22: note = chemically synthesized
  source 1..22: mol_type = other DNA
aagctatgtgctgggagaacca

SEQ ID NO: 88665 - DNA, 22 bp, synthetic construct
  misc_feature 1..22: note = chemically synthesized
  source 1..22: mol_type = other DNA
tgtgctgggagaaccactactc

SEQ ID NO: 88666 - DNA, 22 bp, synthetic construct
  misc_feature 1..22: note = chemically synthesized
  source 1..22: mol_type = other DNA
ggagaaccactactctcttcaa

SEQ ID NO: 88667 - DNA, 22 bp, synthetic construct
  misc_feature 1..22: note = chemically synthesized
  source 1..22: mol_type = other DNA
ctctcttcaaagctgtcagaca

SEQ ID NO: 88668 - DNA, 22 bp, synthetic construct
  misc_feature 1..22: note = chemically synthesized
  source 1..22: mol_type = other DNA
tcttcaaagctgtcagacaggg

SEQ ID NO: 88669 - DNA, 22 bp, synthetic construct
  misc_feature 1..22: note = chemically synthesized
  source 1..22: mol_type = other DNA
ttcaaagctgtcagacagggac

SEQ ID NO: 88670 - DNA, 22 bp, synthetic construct
  misc_feature 1..22: note = chemically synthesized
  source 1..22: mol_type = other DNA
caaagctgtcagacagggacat

SEQ ID NO: 88671 - DNA, 22 bp, synthetic construct
  misc_feature 1..22: note = chemically synthesized
  source 1..22: mol_type = other DNA
aaagctgtcagacagggacatt

SEQ ID NO: 88672 - DNA, 22 bp, synthetic construct
  misc_feature 1..22: note = chemically synthesized
  source 1..22: mol_type = other DNA
tcagacagggacatttaagtct

SEQ ID NO: 88673 - DNA, 22 bp, synthetic construct
  misc_feature 1..22: note = chemically synthesized
  source 1..22: mol_type = other DNA
aagtctgcagaggttcttgttg

SEQ ID NO: 88674 - DNA, 22 bp, synthetic construct
  misc_feature 1..22: note = chemically synthesized
  source 1..22: mol_type = other DNA
agtctgcagaggttcttgttgt

SEQ ID NO: 88675 - DNA, 22 bp, synthetic construct
  misc_feature 1..22: note = chemically synthesized
  source 1..22: mol_type = other DNA
cagaggttcttgttgtcttttg

SEQ ID NO: 88676 - DNA, 22 bp, synthetic construct
  misc_feature 1..22: note = chemically synthesized
  source 1..22: mol_type = other DNA
ttgttgtcttttgtttgtctgt

SEQ ID NO: 88677 - DNA, 22 bp, synthetic construct
  misc_feature 1..22: note = chemically synthesized
  source 1..22: mol_type = other DNA
gttgtcttttgtttgtctgtgc

SEQ ID NO: 88678 - DNA, 22 bp, synthetic construct
  misc_feature 1..22: note = chemically synthesized
  source 1..22: mol_type = other DNA
ttgtcttttgtttgtctgtgcc

SEQ ID NO: 88679 - DNA, 22 bp, synthetic construct
  misc_feature 1..22: note = chemically synthesized
  source 1..22: mol_type = other DNA
tcttttgtttgtctgtgccctg

SEQ ID NO: 88680 - DNA, 22 bp, synthetic construct
  misc_feature 1..22: note = chemically synthesized
  source 1..22: mol_type = other DNA
ttgtttgtctgtgccctgcccc

SEQ ID NO: 88681 - DNA, 22 bp, synthetic construct
  misc_feature 1..22: note = chemically synthesized
  source 1..22: mol_type = other DNA
tgtttgtctgtgccctgcccct

SEQ ID NO: 88682 - DNA, 22 bp, synthetic construct
  misc_feature 1..22: note = chemically synthesized
  source 1..22: mol_type = other DNA
gtttgtctgtgccctgccccta

SEQ ID NO: 88683 - DNA, 22 bp, synthetic construct
  misc_feature 1..22: note = chemically synthesized
  source 1..22: mol_type = other DNA
tttgtctgtgccctgcccctag

SEQ ID NO: 88684 - DNA, 22 bp, synthetic construct
  misc_feature 1..22: note = chemically synthesized
  source 1..22: mol_type = other DNA
gtctgtgccctgcccctagagg

SEQ ID NO: 88685 - DNA, 22 bp, synthetic construct
  misc_feature 1..22: note = chemically synthesized
  source 1..22: mol_type = other DNA
tctgtgccctgcccctagaggt

SEQ ID NO: 88686 - DNA, 22 bp, synthetic construct
  misc_feature 1..22: note = chemically synthesized
  source 1..22: mol_type = other DNA
tgccctgcccctagaggtggag

SEQ ID NO: 88687 - DNA, 22 bp, synthetic construct
  misc_feature 1..22: note = chemically synthesized
  source 1..22: mol_type = other DNA
cccctagaggtggagcctacag

SEQ ID NO: 88688 - DNA, 22 bp, synthetic construct
  misc_feature 1..22: note = chemically synthesized
  source 1..22: mol_type = other DNA
gaggtggagcctacagaggcag

SEQ ID NO: 88689 - DNA, 22 bp, synthetic construct
  misc_feature 1..22: note = chemically synthesized
  source 1..22: mol_type = other DNA
cagaggcaggcaggcctccttg

SEQ ID NO: 88690 - DNA, 22 bp, synthetic construct
  misc_feature 1..22: note = chemically synthesized
  source 1..22: mol_type = other DNA
cttgagctgtggtgggctccac

SEQ ID NO: 88691 - DNA, 22 bp, synthetic construct
  misc_feature 1..22: note = chemically synthesized
  source 1..22: mol_type = other DNA
gagctgtggtgggctccaccca

SEQ ID NO: 88692 - DNA, 22 bp, synthetic construct
  misc_feature 1..22: note = chemically synthesized
  source 1..22: mol_type = other DNA
agctgtggtgggctccacccag

SEQ ID NO: 88693 - DNA, 22 bp, synthetic construct
  misc_feature 1..22: note = chemically synthesized
  source 1..22: mol_type = other DNA
tggtgggctccacccagttcga

SEQ ID NO: 88694 - DNA, 22 bp, synthetic construct
  misc_feature 1..22: note = chemically synthesized
  source 1..22: mol_type = other DNA
cacccagttcgagcttccaggc

SEQ ID NO: 88695 - DNA, 22 bp, synthetic construct
  misc_feature 1..22: note = chemically synthesized
  source 1..22: mol_type = other DNA
gagcttccaggcggctttgttt

SEQ ID NO: 88696 - DNA, 22 bp, synthetic construct
  misc_feature 1..22: note = chemically synthesized
  source 1..22: mol_type = other DNA
ccaggcggctttgtttacctgc

SEQ ID NO: 88697 - DNA, 22 bp, synthetic construct
  misc_feature 1..22: note = chemically synthesized
  source 1..22: mol_type = other DNA
caggcggctttgtttacctgct

SEQ ID NO: 88698 - DNA, 22 bp, synthetic construct
  misc_feature 1..22: note = chemically synthesized
  source 1..22: mol_type = other DNA
tgtttacctgctcaagcctgga

SEQ ID NO: 88699 - DNA, 22 bp, synthetic construct
  misc_feature 1..22: note = chemically synthesized
  source 1..22: mol_type = other DNA
gtttacctgctcaagcctggac

SEQ ID NO: 88700 - DNA, 22 bp, synthetic construct
  misc_feature 1..22: note = chemically synthesized
  source 1..22: mol_type = other DNA
tttacctgctcaagcctggaca

SEQ ID NO: 88701 - DNA, 22 bp, synthetic construct
  misc_feature 1..22: note = chemically synthesized
  source 1..22: mol_type = other DNA
acctgctcaagcctggacaatg

SEQ ID NO: 88702 - DNA, 22 bp, synthetic construct
  misc_feature 1..22: note = chemically synthesized
  source 1..22: mol_type = other DNA
cctgctcaagcctggacaatgg

SEQ ID NO: 88703 - DNA, 22 bp, synthetic construct
  misc_feature 1..22: note = chemically synthesized
  source 1..22: mol_type = other DNA
ctcaagcctggacaatggtggg

SEQ ID NO: 88704 - DNA, 22 bp, synthetic construct
  misc_feature 1..22: note = chemically synthesized
  source 1..22: mol_type = other DNA
aagcctggacaatggtgggcac

SEQ ID NO: 88705 - DNA, 22 bp, synthetic construct
  misc_feature 1..22: note = chemically synthesized
  source 1..22: mol_type = other DNA
gacaatggtgggcacccctccc

SEQ ID NO: 88706 - DNA, 22 bp, synthetic construct
  misc_feature 1..22: note = chemically synthesized
  source 1..22: mol_type = other DNA
ccccagcctcactgccaccttg

SEQ ID NO: 88707 - DNA, 22 bp, synthetic construct
  misc_feature 1..22: note = chemically synthesized
  source 1..22: mol_type = other DNA
actgccaccttgcagtttgacc

SEQ ID NO: 88708 - DNA, 22 bp, synthetic construct
  misc_feature 1..22: note = chemically synthesized
  source 1..22: mol_type = other DNA
ccaccttgcagtttgacctcag

SEQ ID NO: 88709 - DNA, 22 bp, synthetic construct
  misc_feature 1..22: note = chemically synthesized
  source 1..22: mol_type = other DNA
gcagtttgacctcagactgctg

SEQ ID NO: 88710 - DNA, 22 bp, synthetic construct
  misc_feature 1..22: note = chemically synthesized
  source 1..22: mol_type = other DNA
cagtttgacctcagactgctgt

SEQ ID NO: 88711 - DNA, 22 bp, synthetic construct
  misc_feature 1..22: note = chemically synthesized
  source 1..22: mol_type = other DNA
gacctcagactgctgtgctagc

SEQ ID NO: 88712 - DNA, 22 bp, synthetic construct
  misc_feature 1..22: note = chemically synthesized
  source 1..22: mol_type = other DNA
acctcagactgctgtgctagca

SEQ ID NO: 88713 - DNA, 22 bp, synthetic construct
  misc_feature 1..22: note = chemically synthesized
  source 1..22: mol_type = other DNA
agactgctgtgctagcaatgag

SEQ ID NO: 88714 - DNA, 22 bp, synthetic construct
  misc_feature 1..22: note = chemically synthesized
  source 1..22: mol_type = other DNA
ctgtgctagcaatgagcgaggc

SEQ ID NO: 88715 - DNA, 22 bp, synthetic construct
  misc_feature 1..22: note = chemically synthesized
  source 1..22: mol_type = other DNA
tgctagcaatgagcgaggctcc

SEQ ID NO: 88716 - DNA, 22 bp, synthetic construct
  misc_feature 1..22: note = chemically synthesized
  source 1..22: mol_type = other DNA
gcaatgagcgaggctccatggg

SEQ ID NO: 88717 - DNA, 22 bp, synthetic construct
  misc_feature 1..22: note = chemically synthesized
  source 1..22: mol_type = other DNA
catgggcgtaggaccctctgag

SEQ ID NO: 88718 - DNA, 22 bp, synthetic construct
  misc_feature 1..22: note = chemically synthesized
  source 1..22: mol_type = other DNA
tgagccaggcatgggatataat

SEQ ID NO: 88719 - DNA, 22 bp, synthetic construct
  misc_feature 1..22: note = chemically synthesized
  source 1..22: mol_type = other DNA
agccaggcatgggatataatct

SEQ ID NO: 88720 - DNA, 22 bp, synthetic construct
  misc_feature 1..22: note = chemically synthesized
  source 1..22: mol_type = other DNA
ctggtgtgccatttgttaagct

SEQ ID NO: 88721 - DNA, 22 bp, synthetic construct
  misc_feature 1..22: note = chemically synthesized
  source 1..22: mol_type = other DNA
gtgtgccatttgttaagcttgt

SEQ ID NO: 88722 - DNA, 22 bp, synthetic construct
  misc_feature 1..22: note = chemically synthesized
  source 1..22: mol_type = other DNA
gttaagcttgttggaagagcgc

SEQ ID NO: 88723 - DNA, 22 bp, synthetic construct
  misc_feature 1..22: note = chemically synthesized
  source 1..22: mol_type = other DNA
ttaagcttgttggaagagcgca

SEQ ID NO: 88724 - DNA, 22 bp, synthetic construct
  misc_feature 1..22: note = chemically synthesized
  source 1..22: mol_type = other DNA
agcttgttggaagagcgcagta

SEQ ID NO: 88725 - DNA, 22 bp, synthetic construct
  misc_feature 1..22: note = chemically synthesized
  source 1..22: mol_type = other DNA
gttggaagagcgcagtattagg

SEQ ID NO: 88726 - DNA, 22 bp, synthetic construct
  misc_feature 1..22: note = chemically synthesized
  source 1..22: mol_type = other DNA
ttggaagagcgcagtattaggg

SEQ ID NO: 88727 - DNA, 22 bp, synthetic construct
  misc_feature 1..22: note = chemically synthesized
  source 1..22: mol_type = other DNA
gaagagcgcagtattagggcgg

SEQ ID NO: 88728 - DNA, 22 bp, synthetic construct
  misc_feature 1..22: note = chemically synthesized
  source 1..22: mol_type = other DNA
gggcgggagtgacccgattttc

SEQ ID NO: 88729 - DNA, 22 bp, synthetic construct
  misc_feature 1..22: note = chemically synthesized
  source 1..22: mol_type = other DNA
tccaggtgccatctgtcaccct

SEQ ID NO: 88730 - DNA, 22 bp, synthetic construct
  misc_feature 1..22: note = chemically synthesized
  source 1..22: mol_type = other DNA
ccaggtgccatctgtcaccctt

SEQ ID NO: 88731 - DNA, 22 bp, synthetic construct
  misc_feature 1..22: note = chemically synthesized
  source 1..22: mol_type = other DNA
caggtgccatctgtcacccttt

SEQ ID NO: 88732 - DNA, 22 bp, synthetic construct
  misc_feature 1..22: note = chemically synthesized
  source 1..22: mol_type = other DNA
tcacccttttctttgactagga

SEQ ID NO: 88733 - DNA, 22 bp, synthetic construct
  misc_feature 1..22: note = chemically synthesized
  source 1..22: mol_type = other DNA
ttctttgactaggaaagggaat

SEQ ID NO: 88734 - DNA, 22 bp, synthetic construct
  misc_feature 1..22: note = chemically synthesized
  source 1..22: mol_type = other DNA
tctttgactaggaaagggaatt

SEQ ID NO: 88735 - DNA, 22 bp, synthetic construct
  misc_feature 1..22: note = chemically synthesized
  source 1..22: mol_type = other DNA
ctttgactaggaaagggaattc

SEQ ID NO: 88736 - DNA, 22 bp, synthetic construct
  misc_feature 1..22: note = chemically synthesized
  source 1..22: mol_type = other DNA
tttgactaggaaagggaattcc

SEQ ID NO: 88737 - DNA, 22 bp, synthetic construct
  misc_feature 1..22: note = chemically synthesized
  source 1..22: mol_type = other DNA
tgactaggaaagggaattccct

SEQ ID NO: 88738 - DNA, 22 bp, synthetic construct
  misc_feature 1..22: note = chemically synthesized
  source 1..22: mol_type = other DNA
gactaggaaagggaattccctg

SEQ ID NO: 88739 - DNA, 22 bp, synthetic construct
  misc_feature 1..22: note = chemically synthesized
  source 1..22: mol_type = other DNA
actaggaaagggaattccctga

SEQ ID NO: 88740 - DNA, 22 bp, synthetic construct
  misc_feature 1..22: note = chemically synthesized
  source 1..22: mol_type = other DNA
ggaaagggaattccctgacccc

SEQ ID NO: 88741 - DNA, 22 bp, synthetic construct
  misc_feature 1..22: note = chemically synthesized
  source 1..22: mol_type = other DNA
cctgaccccttgtgcttcccgg

SEQ ID NO: 88742 - DNA, 22 bp, synthetic construct
  misc_feature 1..22: note = chemically synthesized
  source 1..22: mol_type = other DNA
accccttgtgcttcccgggtga

SEQ ID NO: 88743 - DNA, 22 bp, synthetic construct
  misc_feature 1..22: note = chemically synthesized
  source 1..22: mol_type = other DNA
gtgcttcccgggtgaggtgatg

SEQ ID NO: 88744 - DNA, 22 bp, synthetic construct
  misc_feature 1..22: note = chemically synthesized
  source 1..22: mol_type = other DNA
tgcttcccgggtgaggtgatgc

SEQ ID NO: 88745 - DNA, 22 bp, synthetic construct
  misc_feature 1..22: note = chemically synthesized
  source 1..22: mol_type = other DNA
cccgggtgaggtgatgcctcgc

SEQ ID NO: 88746 - DNA, 22 bp, synthetic construct
  misc_feature 1..22: note = chemically synthesized
  source 1..22: mol_type = other DNA
ccgggtgaggtgatgcctcgcc

SEQ ID NO: 88747 - DNA, 22 bp, synthetic construct
  misc_feature 1..22: note = chemically synthesized
  source 1..22: mol_type = other DNA
gccctgctttggctcatgcaca

SEQ ID NO: 88748 - DNA, 22 bp, synthetic construct
  misc_feature 1..22: note = chemically synthesized
  source 1..22: mol_type = other DNA
ctttggctcatgcacagtgcac

SEQ ID NO: 88749 - DNA, 22 bp, synthetic construct
  misc_feature 1..22: note = chemically synthesized
  source 1..22: mol_type = other DNA
tggctcatgcacagtgcactgc

SEQ ID NO: 88750 - DNA, 22 bp, synthetic construct
  misc_feature 1..22: note = chemically synthesized
  source 1..22: mol_type = other DNA
ggctcatgcacagtgcactgca

SEQ ID NO: 88751 - DNA, 22 bp, synthetic construct
  misc_feature 1..22: note = chemically synthesized
  source 1..22: mol_type = other DNA
gctcatgcacagtgcactgcac

SEQ ID NO: 88752 - DNA, 22 bp, synthetic construct
  misc_feature 1..22: note = chemically synthesized
  source 1..22: mol_type = other DNA
atgcacagtgcactgcacctac

SEQ ID NO: 88753 - DNA, 22 bp, synthetic construct
  misc_feature 1..22: note = chemically synthesized
  source 1..22: mol_type = other DNA
cacctactgtcctgcacccact

SEQ ID NO: 88754 - DNA, 22 bp, synthetic construct
  misc_feature 1..22: note = chemically synthesized
  source 1..22: mol_type = other DNA
ctgtcctgcacccactgcctgg

SEQ ID NO: 88755 - DNA, 22 bp, synthetic construct
  misc_feature 1..22: note = chemically synthesized
  source 1..22: mol_type = other DNA
tcctgcacccactgcctggcac

SEQ ID NO: 88756 - DNA, 22 bp, synthetic construct
  misc_feature 1..22: note = chemically synthesized
  source 1..22: mol_type = other DNA
cacccactgcctggcacttccc

SEQ ID NO: 88757 - DNA, 22 bp, synthetic construct
  misc_feature 1..22: note = chemically synthesized
  source 1..22: mol_type = other DNA
cctggcacttccctgtgagatg

SEQ ID NO: 88758 - DNA, 22 bp, synthetic construct
  misc_feature 1..22: note = chemically synthesized
  source 1..22: mol_type = other DNA
gcacttccctgtgagatgaacc

SEQ ID NO: 88759 - DNA, 22 bp, synthetic construct
  misc_feature 1..22: note = chemically synthesized
  source 1..22: mol_type = other DNA
ccctgtgagatgaacctggtac

SEQ ID NO: 88760 - DNA, 22 bp, synthetic construct
  misc_feature 1..22: note = chemically synthesized
  source 1..22: mol_type = other DNA
cctgtgagatgaacctggtacc

SEQ ID NO: 88761 - DNA, 22 bp, synthetic construct
  misc_feature 1..22: note = chemically synthesized
  source 1..22: mol_type = other DNA
tgagatgaacctggtacctcag

SEQ ID NO: 88762 - DNA, 22 bp, synthetic construct
  misc_feature 1..22: note = chemically synthesized
  source 1..22: mol_type = other DNA
gtacctcagttggaaatgcaga

SEQ ID NO: 88763 - DNA, 22 bp, synthetic construct
  misc_feature 1..22: note = chemically synthesized
  source 1..22: mol_type = other DNA
agttggaaatgcagaaatcacc

SEQ ID NO: 88764 - DNA, 22 bp, synthetic construct
  misc_feature 1..22: note = chemically synthesized
  source 1..22: mol_type = other DNA
gaaatgcagaaatcacccgtct

SEQ ID NO: 88765 - DNA, 22 bp, synthetic construct
  misc_feature 1..22: note = chemically synthesized
  source 1..22: mol_type = other DNA
ctgcgtcactcacgatgggagc

SEQ ID NO: 88766 - DNA, 22 bp, synthetic construct
  misc_feature 1..22: note = chemically synthesized
  source 1..22: mol_type = other DNA
tgcgtcactcacgatgggagct

SEQ ID NO: 88767 - DNA, 22 bp, synthetic construct
  misc_feature 1..22: note = chemically synthesized
  source 1..22: mol_type = other DNA
cgtcactcacgatgggagctat

SEQ ID NO: 88768 - DNA, 22 bp, synthetic construct
  misc_feature 1..22: note = chemically synthesized
  source 1..22: mol_type = other DNA
acgatgggagctatagactgga

SEQ ID NO: 88769 - DNA, 22 bp, synthetic construct
  misc_feature 1..22: note = chemically synthesized
  source 1..22: mol_type = other DNA
tagactggagctgttcctattc

SEQ ID NO: 88770 - DNA, 22 bp, synthetic construct
  misc_feature 1..22: note = chemically synthesized
  source 1..22: mol_type = other DNA
gagctgttcctattcggtcatc

SEQ ID NO: 88771 - DNA, 22 bp, synthetic construct
  misc_feature 1..22: note = chemically synthesized
  source 1..22: mol_type = other DNA
ttcctattcggtcatcttggct

SEQ ID NO: 88772 - DNA, 22 bp, synthetic construct
  misc_feature 1..22: note = chemically synthesized
  source 1..22: mol_type = other DNA
ctattcggtcatcttggctcca

SEQ ID NO: 88773 - DNA, 22 bp, synthetic construct
  misc_feature 1..22: note = chemically synthesized
  source 1..22: mol_type = other DNA
ttcggtcatcttggctccaccg

SEQ ID NO: 88774 - DNA, 22 bp, synthetic construct
  misc_feature 1..22: note = chemically synthesized
  source 1..22: mol_type = other DNA
ggtcatcttggctccaccgctc

SEQ ID NO: 88775 - DNA, 22 bp, synthetic construct
  misc_feature 1..22: note = chemically synthesized
  source 1..22: mol_type = other DNA
ggctccaccgctcccccccccc

SEQ ID NO: 88776 - DNA, 22 bp, synthetic construct
  misc_feature 1..22: note = chemically synthesized
  source 1..22: mol_type = other DNA
gctccaccgctcccccccccct

SEQ ID NO: 88777 - DNA, 22 bp, synthetic construct
  misc_feature 1..22: note = chemically synthesized
  source 1..22: mol_type = other DNA
caccgctccccccccccttttt

SEQ ID NO: 88778 - DNA, 22 bp, synthetic construct
  misc_feature 1..22: note = chemically synthesized
  source 1..22: mol_type = other DNA
cccccccccttttttttttctt

SEQ ID NO: 88779 - DNA, 22 bp, synthetic construct
  misc_feature 1..22: note = chemically synthesized
  source 1..22: mol_type = other DNA
ttttttttcttttttttttgtg

SEQ ID NO: 88780 - DNA, 22 bp, synthetic construct
  misc_feature 1..22: note = chemically synthesized
  source 1..22: mol_type = other DNA
tttttttcttttttttttgtga

SEQ ID NO: 88781 - DNA, 22 bp, synthetic construct
  misc_feature 1..22: note = chemically synthesized
  source 1..22: mol_type = other DNA
ttttttcttttttttttgtgac

SEQ ID NO: 88782 - DNA, 22 bp, synthetic construct
  misc_feature 1..22: note = chemically synthesized
  source 1..22: mol_type = other DNA
tttttcttttttttttgtgacg

SEQ ID NO: 88783 - DNA, 22 bp, synthetic construct
  misc_feature 1..22: note = chemically synthesized
  source 1..22: mol_type = other DNA
ttttcttttttttttgtgacgg

SEQ ID NO: 88784 - DNA, 22 bp, synthetic construct
  misc_feature 1..22: note = chemically synthesized
  source 1..22: mol_type = other DNA
tttcttttttttttgtgacgga

SEQ ID NO: 88785 - DNA, 22 bp, synthetic construct
  misc_feature 1..22: note = chemically synthesized
  source 1..22: mol_type = other DNA
ttcttttttttttgtgacggag

SEQ ID NO: 88786 - DNA, 22 bp, synthetic construct
  misc_feature 1..22: note = chemically synthesized
  source 1..22: mol_type = other DNA
tcttttttttttgtgacggagt

SEQ ID NO: 88787 - DNA, 22 bp, synthetic construct
  misc_feature 1..22: note = chemically synthesized
  source 1..22: mol_type = other DNA
cttttttttttgtgacggagtc

SEQ ID NO: 88788 - DNA, 22 bp, synthetic construct
  misc_feature 1..22: note = chemically synthesized
  source 1..22: mol_type = other DNA
ttttttttttgtgacggagtct

SEQ ID NO: 88789 - DNA, 22 bp, synthetic construct
  misc_feature 1..22: note = chemically synthesized
  source 1..22: mol_type = other DNA
ttttttttgtgacggagtctca

SEQ ID NO: 88790 - DNA, 22 bp, synthetic construct
  misc_feature 1..22: note = chemically synthesized
  source 1..22: mol_type = other DNA
tttttttgtgacggagtctcat

SEQ ID NO: 88791 - DNA, 22 bp, synthetic construct
  misc_feature 1..22: note = chemically synthesized
  source 1..22: mol_type = other DNA
ttttttgtgacggagtctcatg

SEQ ID NO: 88792 - DNA, 22 bp, synthetic construct
  misc_feature 1..22: note = chemically synthesized
  source 1..22: mol_type = other DNA
tttttgtgacggagtctcatgc

SEQ ID NO: 88793 - DNA, 22 bp, synthetic construct
  misc_feature 1..22: note = chemically synthesized
  source 1..22: mol_type = other DNA
ttttgtgacggagtctcatgct

SEQ ID NO: 88794 - DNA, 22 bp, synthetic construct
  misc_feature 1..22: note = chemically synthesized
  source 1..22: mol_type = other DNA
tttgtgacggagtctcatgctg

SEQ ID NO: 88795 - DNA, 22 bp, synthetic construct
  misc_feature 1..22: note = chemically synthesized
  source 1..22: mol_type = other DNA
ttgtgacggagtctcatgctgt

SEQ ID NO: 88796 - DNA, 22 bp, synthetic construct
  misc_feature 1..22: note = chemically synthesized
  source 1..22: mol_type = other DNA
tgtgacggagtctcatgctgtc

SEQ ID NO: 88797 - DNA, 22 bp, synthetic construct
  misc_feature 1..22: note = chemically synthesized
  source 1..22: mol_type = other DNA
gtgacggagtctcatgctgtca

SEQ ID NO: 88798 - DNA, 22 bp, synthetic construct
  misc_feature 1..22: note = chemically synthesized
  source 1..22: mol_type = other DNA
tgacggagtctcatgctgtcac

SEQ ID NO: 88799 - DNA, 22 bp, synthetic construct
  misc_feature 1..22: note = chemically synthesized
  source 1..22: mol_type = other DNA
atgctgtcacctgggctggaat

SEQ ID NO: 88800 - DNA, 22 bp, synthetic construct
  misc_feature 1..22: note = chemically synthesized
  source 1..22: mol_type = other DNA
tcacctgggctggaatgcagtg

SEQ ID NO: 88801 - DNA, 22 bp, synthetic construct
  misc_feature 1..22: note = chemically synthesized
  source 1..22: mol_type = other DNA
ggctggaatgcagtggcacaat

SEQ ID NO: 88802 - DNA, 22 bp, synthetic construct
  misc_feature 1..22: note = chemically synthesized
  source 1..22: mol_type = other DNA
gaatgcagtggcacaatcttgg

SEQ ID NO: 88803 - DNA, 22 bp, synthetic construct
  misc_feature 1..22: note = chemically synthesized
  source 1..22: mol_type = other DNA
ggctcactgcaacctctgcctc

SEQ ID NO: 88804 - DNA, 22 bp, synthetic construct
  misc_feature 1..22: note = chemically synthesized
  source 1..22: mol_type = other DNA
gctcactgcaacctctgcctcc

SEQ ID NO: 88805 - DNA, 22 bp, synthetic construct
  misc_feature 1..22: note = chemically synthesized
  source 1..22: mol_type = other DNA
actgcaacctctgcctcccagg

SEQ ID NO: 88806 - DNA, 22 bp, synthetic construct
  misc_feature 1..22: note = chemically synthesized
  source 1..22: mol_type = other DNA
caacctctgcctcccaggatca

SEQ ID NO: 88807 - DNA, 22 bp, synthetic construct
  misc_feature 1..22: note = chemically synthesized
  source 1..22: mol_type = other DNA
tgcctcccaggatcaagcgatt

SEQ ID NO: 88808 - DNA, 22 bp, synthetic construct
  misc_feature 1..22: note = chemically synthesized
  source 1..22: mol_type = other DNA
cctcccaggatcaagcgattct

SEQ ID NO: 88809 - DNA, 22 bp, synthetic construct
  misc_feature 1..22: note = chemically synthesized
  source 1..22: mol_type = other DNA
ccaggatcaagcgattctcctg

SEQ ID NO: 88810 - DNA, 22 bp, synthetic construct
  misc_feature 1..22: note = chemically synthesized
  source 1..22: mol_type = other DNA
tcctgcctcagcctcccaaatt

SEQ ID NO: 88811 - DNA, 22 bp, synthetic construct
  misc_feature 1..22: note = chemically synthesized
  source 1..22: mol_type = other DNA
ctgcctcagcctcccaaattgc

SEQ ID NO: 88812 - DNA, 22 bp, synthetic construct
  misc_feature 1..22: note = chemically synthesized
  source 1..22: mol_type = other DNA
cctcagcctcccaaattgctgg

SEQ ID NO: 88813 - DNA, 22 bp, synthetic construct
  misc_feature 1..22: note = chemically synthesized
  source 1..22: mol_type = other DNA
agcctcccaaattgctgggatt

SEQ ID NO: 88814 - DNA, 22 bp, synthetic construct
  misc_feature 1..22: note = chemically synthesized
  source 1..22: mol_type = other DNA
ccaaattgctgggattacacat

SEQ ID NO: 88815 - DNA, 22 bp, synthetic construct
  misc_feature 1..22: note = chemically synthesized
  source 1..22: mol_type = other DNA
ctgggattacacatgcctgcca

SEQ ID NO: 88816 - DNA, 22 bp, synthetic construct
  misc_feature 1..22: note = chemically synthesized
  source 1..22: mol_type = other DNA
ggattacacatgcctgccacca

SEQ ID NO: 88817 - DNA, 22 bp, synthetic construct
  misc_feature 1..22: note = chemically synthesized
  source 1..22: mol_type = other DNA
cacatgcctgccaccacgccag

SEQ ID NO: 88818 - DNA, 22 bp, synthetic construct
  misc_feature 1..22: note = chemically synthesized
  source 1..22: mol_type = other DNA
ccaccacgccaggctaagtttt

SEQ ID NO: 88819 - DNA, 22 bp, synthetic construct
  misc_feature 1..22: note = chemically synthesized
  source 1..22: mol_type = other DNA
agtttttatatttttagtagcg

SEQ ID NO: 88820 - DNA, 22 bp, synthetic construct
  misc_feature 1..22: note = chemically synthesized
  source 1..22: mol_type = other DNA
ttatatttttagtagcgatgag

SEQ ID NO: 88821 - DNA, 22 bp, synthetic construct
  misc_feature 1..22: note = chemically synthesized
  source 1..22: mol_type = other DNA
tatatttttagtagcgatgagg

SEQ ID NO: 88822 - DNA, 22 bp, synthetic construct
  misc_feature 1..22: note = chemically synthesized
  source 1..22: mol_type = other DNA
atatttttagtagcgatgaggt

SEQ ID NO: 88823 - DNA, 22 bp, synthetic construct
  misc_feature 1..22: note = chemically synthesized
  source 1..22: mol_type = other DNA
tatttttagtagcgatgaggtt

SEQ ID NO: 88824 - DNA, 22 bp, synthetic construct
  misc_feature 1..22: note = chemically synthesized
  source 1..22: mol_type = other DNA
ttagtagcgatgaggtttcact

SEQ ID NO: 88825 - DNA, 22 bp, synthetic construct
  misc_feature 1..22: note = chemically synthesized
  source 1..22: mol_type = other DNA
tagtagcgatgaggtttcacta

SEQ ID NO: 88826 - DNA, 22 bp, synthetic construct
  misc_feature 1..22: note = chemically synthesized
  source 1..22: mol_type = other DNA
agtagcgatgaggtttcactat

SEQ ID NO: 88827 - DNA, 22 bp, synthetic construct
  misc_feature 1..22: note = chemically synthesized
  source 1..22: mol_type = other DNA
gtagcgatgaggtttcactatg

SEQ ID NO: 88828 - DNA, 22 bp, synthetic construct
  misc_feature 1..22: note = chemically synthesized
  source 1..22: mol_type = other DNA
cactatgttggccaggctgatc

SEQ ID NO: 88829 - DNA, 22 bp, synthetic construct
  misc_feature 1..22: note = chemically synthesized
  source 1..22: mol_type = other DNA
actatgttggccaggctgatct

SEQ ID NO: 88830 - DNA, 22 bp, synthetic construct
  misc_feature 1..22: note = chemically synthesized
  source 1..22: mol_type = other DNA
tgttggccaggctgatcttgaa

SEQ ID NO: 88831 - DNA, 22 bp, synthetic construct
  misc_feature 1..22: note = chemically synthesized
  source 1..22: mol_type = other DNA
gccaggctgatcttgaactcct

SEQ ID NO: 88832 - DNA, 22 bp, synthetic construct
  misc_feature 1..22: note = chemically synthesized
  source 1..22: mol_type = other DNA
atcttgaactcctgacgtcgtg

SEQ ID NO: 88833 - DNA, 22 bp, synthetic construct
  misc_feature 1..22: note = chemically synthesized
  source 1..22: mol_type = other DNA
gaactcctgacgtcgtgatccg

SEQ ID NO: 88834 - DNA, 22 bp, synthetic construct
  misc_feature 1..22: note = chemically synthesized
  source 1..22: mol_type = other DNA
aactcctgacgtcgtgatccgc

SEQ ID NO: 88835 - DNA, 22 bp, synthetic construct
  misc_feature 1..22: note = chemically synthesized
  source 1..22: mol_type = other DNA
ctgacgtcgtgatccgcctgtc

SEQ ID NO: 88836 - DNA, 22 bp, synthetic construct
  misc_feature 1..22: note = chemically synthesized
  source 1..22: mol_type = other DNA
acgtcgtgatccgcctgtctag

SEQ ID NO: 88837 - DNA, 22 bp, synthetic construct
  misc_feature 1..22: note = chemically synthesized
  source 1..22: mol_type = other DNA
tctaggcctcccaaagtgctgc

SEQ ID NO: 88838 - DNA, 22 bp, synthetic construct
  misc_feature 1..22: note = chemically synthesized
  source 1..22: mol_type = other DNA
ggcctcccaaagtgctgcaatt

SEQ ID NO: 88839 - DNA, 22 bp, synthetic construct
  misc_feature 1..22: note = chemically synthesized
  source 1..22: mol_type = other DNA
ccaaagtgctgcaattgcaggt

SEQ ID NO: 88840 - DNA, 22 bp, synthetic construct
  misc_feature 1..22: note = chemically synthesized
  source 1..22: mol_type = other DNA
caattgcaggtgtgagccaccg

SEQ ID NO: 88841 - DNA, 22 bp, synthetic construct
  misc_feature 1..22: note = chemically synthesized
  source 1..22: mol_type = other DNA
caggtgtgagccaccgctccca

SEQ ID NO: 88842 - DNA, 22 bp, synthetic construct
  misc_feature 1..22: note = chemically synthesized
  source 1..22: mol_type = other DNA
ccagcctagaataacttcttaa

SEQ ID NO: 88843 - DNA, 22 bp, synthetic construct
  misc_feature 1..22: note = chemically synthesized
  source 1..22: mol_type = other DNA
gaataacttcttaaatgctttt

SEQ ID NO: 88844 - DNA, 22 bp, synthetic construct
  misc_feature 1..22: note = chemically synthesized
  source 1..22: mol_type = other DNA
cttaaatgcttttattgttgac

SEQ ID NO: 88845 - DNA, 22 bp, synthetic construct
  misc_feature 1..22: note = chemically synthesized
  source 1..22: mol_type = other DNA
ttaaatgcttttattgttgact

SEQ ID NO: 88846 - DNA, 22 bp, synthetic construct
  misc_feature 1..22: note = chemically synthesized
  source 1..22: mol_type = other DNA
aaatgcttttattgttgactga

SEQ ID NO: 88847 - DNA, 22 bp, synthetic construct
  misc_feature 1..22: note = chemically synthesized
  source 1..22: mol_type = other DNA
aatgcttttattgttgactgaa

SEQ ID NO: 88848 - DNA, 22 bp, synthetic construct
  misc_feature 1..22: note = chemically synthesized
  source 1..22: mol_type = other DNA
ttattgttgactgaatttattt

SEQ ID NO: 88849 - DNA, 22 bp, synthetic construct
  misc_feature 1..22: note = chemically synthesized
  source 1..22: mol_type = other DNA
tattgttgactgaatttatttc

SEQ ID NO: 88850 - DNA, 22 bp, synthetic construct
  misc_feature 1..22: note = chemically synthesized
  source 1..22: mol_type = other DNA
attgttgactgaatttatttct

SEQ ID NO: 88851 - DNA, 22 bp, synthetic construct
  misc_feature 1..22: note = chemically synthesized
  source 1..22: mol_type = other DNA
ttgttgactgaatttatttctc

SEQ ID NO: 88852 - DNA, 22 bp, synthetic construct
  misc_feature 1..22: note = chemically synthesized
  source 1..22: mol_type = other DNA
ttgactgaatttatttctccct

SEQ ID NO: 88853 - DNA, 22 bp, synthetic construct
  misc_feature 1..22: note = chemically synthesized
  source 1..22: mol_type = other DNA
actgaatttatttctcccttga

SEQ ID NO: 88854 - DNA, 22 bp, synthetic construct
  misc_feature 1..22: note = chemically synthesized
  source 1..22: mol_type = other DNA
aatttatttctcccttgatagt

SEQ ID NO: 88855 - DNA, 22 bp, synthetic construct
  misc_feature 1..22: note = chemically synthesized
  source 1..22: mol_type = other DNA
atttctcccttgatagtttcta

SEQ ID NO: 88856 - DNA, 22 bp, synthetic construct
  misc_feature 1..22: note = chemically synthesized
  source 1..22: mol_type = other DNA
tttctcccttgatagtttctac

SEQ ID NO: 88857 - DNA, 22 bp, synthetic construct
  misc_feature 1..22: note = chemically synthesized
  source 1..22: mol_type = other DNA
ctcccttgatagtttctacttt

SEQ ID NO: 88858 - DNA, 22 bp, synthetic construct
  misc_feature 1..22: note = chemically synthesized
  source 1..22: mol_type = other DNA
tcccttgatagtttctactttg

SEQ ID NO: 88859 - DNA, 22 bp, synthetic construct
  misc_feature 1..22: note = chemically synthesized
  source 1..22: mol_type = other DNA
ccttgatagtttctactttggg

SEQ ID NO: 88860 - DNA, 22 bp, synthetic construct
  misc_feature 1..22: note = chemically synthesized
  source 1..22: mol_type = other DNA
gatagtttctactttgggttga

SEQ ID NO: 88861 - DNA, 22 bp, synthetic construct
  misc_feature 1..22: note = chemically synthesized
  source 1..22: mol_type = other DNA
atagtttctactttgggttgat

SEQ ID NO: 88862 - DNA, 22 bp, synthetic construct
  misc_feature 1..22: note = chemically synthesized
  source 1..22: mol_type = other DNA
ctactttgggttgataattaaa

SEQ ID NO: 88863 - DNA, 22 bp, synthetic construct
  misc_feature 1..22: note = chemically synthesized
  source 1..22: mol_type = other DNA
tactttgggttgataattaaat

SEQ ID NO: 88864 - DNA, 22 bp, synthetic construct
  misc_feature 1..22: note = chemically synthesized
  source 1..22: mol_type = other DNA
ctttgggttgataattaaataa

SEQ ID NO: 88865 - DNA, 22 bp, synthetic construct
  misc_feature 1..22: note = chemically synthesized
  source 1..22: mol_type = other DNA
tgggttgataattaaataacag

SEQ ID NO: 88866 - DNA, 22 bp, synthetic construct
  misc_feature 1..22: note = chemically synthesized
  source 1..22: mol_type = other DNA
gggttgataattaaataacagt

SEQ ID NO: 88867 - DNA, 22 bp, synthetic construct
  misc_feature 1..22: note = chemically synthesized
  source 1..22: mol_type = other DNA
ggttgataattaaataacagtg

SEQ ID NO: 88868 - DNA, 22 bp, synthetic construct
  misc_feature 1..22: note = chemically synthesized
  source 1..22: mol_type = other DNA
ataattaaataacagtgttatc

SEQ ID NO: 88869 - DNA, 22 bp, synthetic construct
  misc_feature 1..22: note = chemically synthesized
  source 1..22: mol_type = other DNA
aataacagtgttatctctaaga

SEQ ID NO: 88870 - DNA, 22 bp, synthetic construct
  misc_feature 1..22: note = chemically synthesized
  source 1..22: mol_type = other DNA
tctctaagattatatacatgtc

SEQ ID NO: 88871 - DNA, 22 bp, synthetic construct
  misc_feature 1..22: note = chemically synthesized
  source 1..22: mol_type = other DNA
taagattatatacatgtcttcc

SEQ ID NO: 88872 - DNA, 22 bp, synthetic construct
  misc_feature 1..22: note = chemically synthesized
  source 1..22: mol_type = other DNA
agattatatacatgtcttccca

SEQ ID NO: 88873 - DNA, 22 bp, synthetic construct
  misc_feature 1..22: note = chemically synthesized
  source 1..22: mol_type = other DNA
tatacatgtcttcccatatttt

SEQ ID NO: 88874 - DNA, 22 bp, synthetic construct
  misc_feature 1..22: note = chemically synthesized
  source 1..22: mol_type = other DNA
cccatatttttattctagtttt

SEQ ID NO: 88875 - DNA, 22 bp, synthetic construct
  misc_feature 1..22: note = chemically synthesized
  source 1..22: mol_type = other DNA
ccatatttttattctagttttt

SEQ ID NO: 88876 - DNA, 22 bp, synthetic construct
  misc_feature 1..22: note = chemically synthesized
  source 1..22: mol_type = other DNA
ttattctagttttttcgtgact

SEQ ID NO: 88877 - DNA, 22 bp, synthetic construct
  misc_feature 1..22: note = chemically synthesized
  source 1..22: mol_type = other DNA
tattctagttttttcgtgactg

SEQ ID NO: 88878 - DNA, 22 bp, synthetic construct
  misc_feature 1..22: note = chemically synthesized
  source 1..22: mol_type = other DNA
attctagttttttcgtgactga

SEQ ID NO: 88879 - DNA, 22 bp, synthetic construct
  misc_feature 1..22: note = chemically synthesized
  source 1..22: mol_type = other DNA
ttctagttttttcgtgactgaa

SEQ ID NO: 88880 - DNA, 22 bp, synthetic construct
  misc_feature 1..22: note = chemically synthesized
  source 1..22: mol_type = other DNA
tagttttttcgtgactgaattt

SEQ ID NO: 88881 - DNA, 22 bp, synthetic construct
  misc_feature 1..22: note = chemically synthesized
  source 1..22: mol_type = other DNA
gttttttcgtgactgaatttta

SEQ ID NO: 88882 - DNA, 22 bp, synthetic construct
  misc_feature 1..22: note = chemically synthesized
  source 1..22: mol_type = other DNA
tttcgtgactgaattttacctt

SEQ ID NO: 88883 - DNA, 22 bp, synthetic construct
  misc_feature 1..22: note = chemically synthesized
  source 1..22: mol_type = other DNA
ttcgtgactgaattttaccttc

SEQ ID NO: 88884 - DNA, 22 bp, synthetic construct
  misc_feature 1..22: note = chemically synthesized
  source 1..22: mol_type = other DNA
tcgtgactgaattttaccttca

SEQ ID NO: 88885 - DNA, 22 bp, synthetic construct
  misc_feature 1..22: note = chemically synthesized
  source 1..22: mol_type = other DNA
cgtgactgaattttaccttcac

SEQ ID NO: 88886 - DNA, 22 bp, synthetic construct
  misc_feature 1..22: note = chemically synthesized
  source 1..22: mol_type = other DNA
gtgactgaattttaccttcaca

SEQ ID NO: 88887 - DNA, 22 bp, synthetic construct
  misc_feature 1..22: note = chemically synthesized
  source 1..22: mol_type = other DNA
aattttaccttcacacctaatt

SEQ ID NO: 88888 - DNA, 22 bp, synthetic construct
  misc_feature 1..22: note = chemically synthesized
  source 1..22: mol_type = other DNA
taccttcacacctaattgtgta

SEQ ID NO: 88889 - DNA, 22 bp, synthetic construct
  misc_feature 1..22: note = chemically synthesized
  source 1..22: mol_type = other DNA
accttcacacctaattgtgtaa

SEQ ID NO: 88890 - DNA, 22 bp, synthetic construct
  misc_feature 1..22: note = chemically synthesized
  source 1..22: mol_type = other DNA
ccttcacacctaattgtgtaat

SEQ ID NO: 88891 - DNA, 22 bp, synthetic construct
  misc_feature 1..22: note = chemically synthesized
  source 1..22: mol_type = other DNA
cacacctaattgtgtaatcgat

SEQ ID NO: 88892 - DNA, 22 bp, synthetic construct
  misc_feature 1..22: note = chemically synthesized
  source 1..22: mol_type = other DNA
acacctaattgtgtaatcgatt

SEQ ID NO: 88893 - DNA, 22 bp, synthetic construct
  misc_feature 1..22: note = chemically synthesized
  source 1..22: mol_type = other DNA
attgtgtaatcgattgtggtat

SEQ ID NO: 88894 - DNA, 22 bp, synthetic construct
  misc_feature 1..22: note = chemically synthesized
  source 1..22: mol_type = other DNA
tgtaatcgattgtggtatatgc

SEQ ID NO: 88895 - DNA, 22 bp, synthetic construct
  misc_feature 1..22: note = chemically synthesized
  source 1..22: mol_type = other DNA
tggtatatgcagttaagcattt

SEQ ID NO: 88896 - DNA, 22 bp, synthetic construct
  misc_feature 1..22: note = chemically synthesized
  source 1..22: mol_type = other DNA
agcatttcactttactcttttc

SEQ ID NO: 88897 - DNA, 22 bp, synthetic construct
  misc_feature 1..22: note = chemically synthesized
  source 1..22: mol_type = other DNA
cactttactcttttcaaaaagt

SEQ ID NO: 88898 - DNA, 22 bp, synthetic construct
  misc_feature 1..22: note = chemically synthesized
  source 1..22: mol_type = other DNA
actttactcttttcaaaaagta

SEQ ID NO: 88899 - DNA, 22 bp, synthetic construct
  misc_feature 1..22: note = chemically synthesized
  source 1..22: mol_type = other DNA
tactcttttcaaaaagtatagt

SEQ ID NO: 88900 - DNA, 22 bp, synthetic construct
  misc_feature 1..22: note = chemically synthesized
  source 1..22: mol_type = other DNA
actcttttcaaaaagtatagtt

SEQ ID NO: 88901 - DNA, 22 bp, synthetic construct
  misc_feature 1..22: note = chemically synthesized
  source 1..22: mol_type = other DNA
ctcttttcaaaaagtatagttg

SEQ ID NO: 88902 - DNA, 22 bp, synthetic construct
  misc_feature 1..22: note = chemically synthesized
  source 1..22: mol_type = other DNA
ttttcaaaaagtatagttgttc

SEQ ID NO: 88903 - DNA, 22 bp, synthetic construct
  misc_feature 1..22: note = chemically synthesized
  source 1..22: mol_type = other DNA
ttcaaaaagtatagttgttcaa

SEQ ID NO: 88904 - DNA, 22 bp, synthetic construct
  misc_feature 1..22: note = chemically synthesized
  source 1..22: mol_type = other DNA
tcaaaaagtatagttgttcaat

SEQ ID NO: 88905 - DNA, 22 bp, synthetic construct
  misc_feature 1..22: note = chemically synthesized
  source 1..22: mol_type = other DNA
caaaaagtatagttgttcaatt

SEQ ID NO: 88906 - DNA, 22 bp, synthetic construct
  misc_feature 1..22: note = chemically synthesized
  source 1..22: mol_type = other DNA
aaaaagtatagttgttcaatta

SEQ ID NO: 88907 - DNA, 22 bp, synthetic construct
  misc_feature 1..22: note = chemically synthesized
  source 1..22: mol_type = other DNA
ttcaattactgtttgtttttta

SEQ ID NO: 88908 - DNA, 22 bp, synthetic construct
  misc_feature 1..22: note = chemically synthesized
  source 1..22: mol_type = other DNA
aattactgtttgttttttattt

SEQ ID NO: 88909 - DNA, 22 bp, synthetic construct
  misc_feature 1..22: note = chemically synthesized
  source 1..22: mol_type = other DNA
ctgtttgttttttatttccaag

SEQ ID NO: 88910 - DNA, 22 bp, synthetic construct
  misc_feature 1..22: note = chemically synthesized
  source 1..22: mol_type = other DNA
tttgttttttatttccaagcta

SEQ ID NO: 88911 - DNA, 22 bp, synthetic construct
  misc_feature 1..22: note = chemically synthesized
  source 1..22: mol_type = other DNA
gttttttatttccaagctaaat

SEQ ID NO: 88912 - DNA, 22 bp, synthetic construct
  misc_feature 1..22: note = chemically synthesized
  source 1..22: mol_type = other DNA
ttttttatttccaagctaaatt

SEQ ID NO: 88913 - DNA, 22 bp, synthetic construct
  misc_feature 1..22: note = chemically synthesized
  source 1..22: mol_type = other DNA
tttatttccaagctaaatttaa

SEQ ID NO: 88914 - DNA, 22 bp, synthetic construct
  misc_feature 1..22: note = chemically synthesized
  source 1..22: mol_type = other DNA
ttatttccaagctaaatttaaa

SEQ ID NO: 88915 - DNA, 22 bp, synthetic construct
  misc_feature 1..22: note = chemically synthesized
  source 1..22: mol_type = other DNA
tatttccaagctaaatttaaaa

SEQ ID NO: 88916 - DNA, 22 bp, synthetic construct
  misc_feature 1..22: note = chemically synthesized
  source 1..22: mol_type = other DNA
atttccaagctaaatttaaaag

SEQ ID NO: 88917 - DNA, 22 bp, synthetic construct
  misc_feature 1..22: note = chemically synthesized
  source 1..22: mol_type = other DNA
tttccaagctaaatttaaaagc

SEQ ID NO: 88918 - DNA, 22 bp, synthetic construct
  misc_feature 1..22: note = chemically synthesized
  source 1..22: mol_type = other DNA
ccaagctaaatttaaaagctat

SEQ ID NO: 88919 - DNA, 22 bp, synthetic construct
  misc_feature 1..22: note = chemically synthesized
  source 1..22: mol_type = other DNA
caagctaaatttaaaagctata

SEQ ID NO: 88920 - DNA, 22 bp, synthetic construct
  misc_feature 1..22: note = chemically synthesized
  source 1..22: mol_type = other DNA
aatttaaaagctatatttttat

SEQ ID NO: 88921 - DNA, 22 bp, synthetic construct
  misc_feature 1..22: note = chemically synthesized
  source 1..22: mol_type = other DNA
aaaagctatatttttatatatc

SEQ ID NO: 88922 - DNA, 22 bp, synthetic construct
  misc_feature 1..22: note = chemically synthesized
  source 1..22: mol_type = other DNA
aaagctatatttttatatatca

SEQ ID NO: 88923 - DNA, 22 bp, synthetic construct
  misc_feature 1..22: note = chemically synthesized
  source 1..22: mol_type = other DNA
tatttttatatatcacattatt

SEQ ID NO: 88924 - DNA, 22 bp, synthetic construct
  misc_feature 1..22: note = chemically synthesized
  source 1..22: mol_type = other DNA
ttatatatcacattattatatt

SEQ ID NO: 88925 - DNA, 22 bp, synthetic construct
  misc_feature 1..22: note = chemically synthesized
  source 1..22: mol_type = other DNA
tatatatcacattattatattt

SEQ ID NO: 88926 - DNA, 22 bp, synthetic construct
  misc_feature 1..22: note = chemically synthesized
  source 1..22: mol_type = other DNA
atatatcacattattatatttt

SEQ ID NO: 88927 - DNA, 22 bp, synthetic construct
  misc_feature 1..22: note = chemically synthesized
  source 1..22: mol_type = other DNA
tatatcacattattatatttta

SEQ ID NO: 88928 - DNA, 22 bp, synthetic construct
  misc_feature 1..22: note = chemically synthesized
  source 1..22: mol_type = other DNA
ttatattttagtgagatttagt

SEQ ID NO: 88929 - DNA, 22 bp, synthetic construct
  misc_feature 1..22: note = chemically synthesized
  source 1..22: mol_type = other DNA
tattttagtgagatttagtttt

SEQ ID NO: 88930 - DNA, 22 bp, synthetic construct
  misc_feature 1..22: note = chemically synthesized
  source 1..22: mol_type = other DNA
tagtgagatttagtttttggat

SEQ ID NO: 88931 - DNA, 22 bp, synthetic construct
  misc_feature 1..22: note = chemically synthesized
  source 1..22: mol_type = other DNA
agtgagatttagtttttggatt

SEQ ID NO: 88932 - DNA, 22 bp, synthetic construct
  misc_feature 1..22: note = chemically synthesized
  source 1..22: mol_type = other DNA
gtgagatttagtttttggattt

SEQ ID NO: 88933 - DNA, 22 bp, synthetic construct
  misc_feature 1..22: note = chemically synthesized
  source 1..22: mol_type = other DNA
agtttttggatttctatttatt

SEQ ID NO: 88934 - DNA, 22 bp, synthetic construct
  misc_feature 1..22: note = chemically synthesized
  source 1..22: mol_type = other DNA
gtttttggatttctatttattc

SEQ ID NO: 88935 - DNA, 22 bp, synthetic construct
  misc_feature 1..22: note = chemically synthesized
  source 1..22: mol_type = other DNA
ttggatttctatttattccact

SEQ ID NO: 88936 - DNA, 22 bp, synthetic construct
  misc_feature 1..22: note = chemically synthesized
  source 1..22: mol_type = other DNA
tggatttctatttattccacta

SEQ ID NO: 88937 - DNA, 22 bp, synthetic construct
  misc_feature 1..22: note = chemically synthesized
  source 1..22: mol_type = other DNA
ggatttctatttattccactat

SEQ ID NO: 88938 - DNA, 22 bp, synthetic construct
  misc_feature 1..22: note = chemically synthesized
  source 1..22: mol_type = other DNA
gatttctatttattccactatc

SEQ ID NO: 88939 - DNA, 22 bp, synthetic construct
  misc_feature 1..22: note = chemically synthesized
  source 1..22: mol_type = other DNA
ctatttattccactatcttact

SEQ ID NO: 88940 - DNA, 22 bp, synthetic construct
  misc_feature 1..22: note = chemically synthesized
  source 1..22: mol_type = other DNA
tatttattccactatcttactt

SEQ ID NO: 88941 - DNA, 22 bp, synthetic construct
  misc_feature 1..22: note = chemically synthesized
  source 1..22: mol_type = other DNA
tttattccactatcttacttac

SEQ ID NO: 88942 - DNA, 22 bp, synthetic construct
  misc_feature 1..22: note = chemically synthesized
  source 1..22: mol_type = other DNA
attccactatcttacttacaca

SEQ ID NO: 88943 - DNA, 22 bp, synthetic construct
  misc_feature 1..22: note = chemically synthesized
  source 1..22: mol_type = other DNA
ttccactatcttacttacacat

SEQ ID NO: 88944 - DNA, 22 bp, synthetic construct
  misc_feature 1..22: note = chemically synthesized
  source 1..22: mol_type = other DNA
cactatcttacttacacatgag

SEQ ID NO: 88945 - DNA, 22 bp, synthetic construct
  misc_feature 1..22: note = chemically synthesized
  source 1..22: mol_type = other DNA
tcttacttacacatgagtggta

SEQ ID NO: 88946 - DNA, 22 bp, synthetic construct
  misc_feature 1..22: note = chemically synthesized
  source 1..22: mol_type = other DNA
acttacacatgagtggtattaa

SEQ ID NO: 88947 - DNA, 22 bp, synthetic construct
  misc_feature 1..22: note = chemically synthesized
  source 1..22: mol_type = other DNA
cttacacatgagtggtattaat

SEQ ID NO: 88948 - DNA, 22 bp, synthetic construct
  misc_feature 1..22: note = chemically synthesized
  source 1..22: mol_type = other DNA
acacatgagtggtattaattta

SEQ ID NO: 88949 - DNA, 22 bp, synthetic construct
  misc_feature 1..22: note = chemically synthesized
  source 1..22: mol_type = other DNA
cacatgagtggtattaatttaa

SEQ ID NO: 88950 - DNA, 22 bp, synthetic construct
  misc_feature 1..22: note = chemically synthesized
  source 1..22: mol_type = other DNA
atttaacatgattttagaatga

SEQ ID NO: 88951 - DNA, 22 bp, synthetic construct
  misc_feature 1..22: note = chemically synthesized
  source 1..22: mol_type = other DNA
aacatgattttagaatgaagaa

SEQ ID NO: 88952 - DNA, 22 bp, synthetic construct
  misc_feature 1..22: note = chemically synthesized
  source 1..22: mol_type = other DNA
acatgattttagaatgaagaaa

SEQ ID NO: 88953 - DNA, 22 bp, synthetic construct
  misc_feature 1..22: note = chemically synthesized
  source 1..22: mol_type = other DNA
tagaatgaagaaaatgaagcca

SEQ ID NO: 88954 - DNA, 22 bp, synthetic construct
  misc_feature 1..22: note = chemically synthesized
  source 1..22: mol_type = other DNA
agaatgaagaaaatgaagccat

SEQ ID NO: 88955 - DNA, 22 bp, synthetic construct
  misc_feature 1..22: note = chemically synthesized
  source 1..22: mol_type = other DNA
gaatgaagaaaatgaagccatt

SEQ ID NO: 88956 - DNA, 22 bp, synthetic construct
  misc_feature 1..22: note = chemically synthesized
  source 1..22: mol_type = other DNA
ttagataaaccaaaagtaacaa

SEQ ID NO: 88957 - DNA, 22 bp, synthetic construct
  misc_feature 1..22: note = chemically synthesized
  source 1..22: mol_type = other DNA
tagataaaccaaaagtaacaat

SEQ ID NO: 88958 - DNA, 22 bp, synthetic construct
  misc_feature 1..22: note = chemically synthesized
  source 1..22: mol_type = other DNA
agataaaccaaaagtaacaatg

SEQ ID NO: 88959 - DNA, 22 bp, synthetic construct
  misc_feature 1..22: note = chemically synthesized
  source 1..22: mol_type = other DNA
gataaaccaaaagtaacaatgt

SEQ ID NO: 88960 - DNA, 22 bp, synthetic construct
  misc_feature 1..22: note = chemically synthesized
  source 1..22: mol_type = other DNA
ccagcagaaagagataatatta

SEQ ID NO: 88961 - DNA, 22 bp, synthetic construct
  misc_feature 1..22: note = chemically synthesized
  source 1..22: mol_type = other DNA
cagcagaaagagataatattaa

SEQ ID NO: 88962 - DNA, 22 bp, synthetic construct
  misc_feature 1..22: note = chemically synthesized
  source 1..22: mol_type = other DNA
aggataatcagaaaaaaataga

SEQ ID NO: 88963 - DNA, 22 bp, synthetic construct
  misc_feature 1..22: note = chemically synthesized
  source 1..22: mol_type = other DNA
agagagaatgttagaaatgaag

SEQ ID NO: 88964 - DNA, 22 bp, synthetic construct
  misc_feature 1..22: note = chemically synthesized
  source 1..22: mol_type = other DNA
gagagaatgttagaaatgaaga

SEQ ID NO: 88965 - DNA, 22 bp, synthetic construct
  misc_feature 1..22: note = chemically synthesized
  source 1..22: mol_type = other DNA
gaaatgaagaaaagcatgcaaa

SEQ ID NO: 88966 - DNA, 22 bp, synthetic construct
  misc_feature 1..22: note = chemically synthesized
  source 1..22: mol_type = other DNA
tgtacataagtgtaaacatttc

SEQ ID NO: 88967 - DNA, 22 bp, synthetic construct
  misc_feature 1..22: note = chemically synthesized
  source 1..22: mol_type = other DNA
gtacataagtgtaaacatttct

SEQ ID NO: 88968 - DNA, 22 bp, synthetic construct
  misc_feature 1..22: note = chemically synthesized
  source 1..22: mol_type = other DNA
tacataagtgtaaacatttctt

SEQ ID NO: 88969 - DNA, 22 bp, synthetic construct
  misc_feature 1..22: note = chemically synthesized
  source 1..22: mol_type = other DNA
cttcactatttaataataacac

SEQ ID NO: 88970 - DNA, 22 bp, synthetic construct
  misc_feature 1..22: note = chemically synthesized
  source 1..22: mol_type = other DNA
ttcactatttaataataacact

SEQ ID NO: 88971 - DNA, 22 bp, synthetic construct
  misc_feature 1..22: note = chemically synthesized
  source 1..22: mol_type = other DNA
cactatttaataataacactag

SEQ ID NO: 88972 - DNA, 22 bp, synthetic construct
  misc_feature 1..22: note = chemically synthesized
  source 1..22: mol_type = other DNA
actatttaataataacactaga

SEQ ID NO: 88973 - DNA, 22 bp, synthetic construct
  misc_feature 1..22: note = chemically synthesized
  source 1..22: mol_type = other DNA
tttaataataacactagaaaat

SEQ ID NO: 88974 - DNA, 22 bp, synthetic construct
  misc_feature 1..22: note = chemically synthesized
  source 1..22: mol_type = other DNA
aataataacactagaaaatcta

SEQ ID NO: 88975 - DNA, 22 bp, synthetic construct
  misc_feature 1..22: note = chemically synthesized
  source 1..22: mol_type = other DNA
ataataacactagaaaatctag

SEQ ID NO: 88976 - DNA, 22 bp, synthetic construct
  misc_feature 1..22: note = chemically synthesized
  source 1..22: mol_type = other DNA
gaaaatctagggagtaaaacta

SEQ ID NO: 88977 - DNA, 22 bp, synthetic construct
  misc_feature 1..22: note = chemically synthesized
  source 1..22: mol_type = other DNA
gggagtaaaactatacaaaata

SEQ ID NO: 88978 - DNA, 22 bp, synthetic construct
  misc_feature 1..22: note = chemically synthesized
  source 1..22: mol_type = other DNA
tacaaaatatctaaaatatata

SEQ ID NO: 88979 - DNA, 22 bp, synthetic construct
  misc_feature 1..22: note = chemically synthesized
  source 1..22: mol_type = other DNA
aaatatatatatatataattat

SEQ ID NO: 88980 - DNA, 22 bp, synthetic construct
  misc_feature 1..22: note = chemically synthesized
  source 1..22: mol_type = other DNA
tagattgggaaggggaaaatga

SEQ ID NO: 88981 - DNA, 22 bp, synthetic construct
  misc_feature 1..22: note = chemically synthesized
  source 1..22: mol_type = other DNA
ggaaggggaaaatgaagataaa

SEQ ID NO: 88982 - DNA, 22 bp, synthetic construct
  misc_feature 1..22: note = chemically synthesized
  source 1..22: mol_type = other DNA
aaatttattgtattgttttgga

SEQ ID NO: 88983 - DNA, 22 bp, synthetic construct
  misc_feature 1..22: note = chemically synthesized
  source 1..22: mol_type = other DNA
attgtattgttttggaaaagag

SEQ ID NO: 88984 - DNA, 22 bp, synthetic construct
  misc_feature 1..22: note = chemically synthesized
  source 1..22: mol_type = other DNA
ttgtattgttttggaaaagagt

SEQ ID NO: 88985 - DNA, 22 bp, synthetic construct
  misc_feature 1..22: note = chemically synthesized
  source 1..22: mol_type = other DNA
tattgttttggaaaagagtaaa

SEQ ID NO: 88986 - DNA, 22 bp, synthetic construct
  misc_feature 1..22: note = chemically synthesized
  source 1..22: mol_type = other DNA
ttttggaaaagagtaaacagtc

SEQ ID NO: 88987 - DNA, 22 bp, synthetic construct
  misc_feature 1..22: note = chemically synthesized
  source 1..22: mol_type = other DNA
tggaaaagagtaaacagtcaaa

SEQ ID NO: 88988 - DNA, 22 bp, synthetic construct
  misc_feature 1..22: note = chemically synthesized
  source 1..22: mol_type = other DNA
ggaaaagagtaaacagtcaaat

SEQ ID NO: 88989 - DNA, 22 bp, synthetic construct
  misc_feature 1..22: note = chemically synthesized
  source 1..22: mol_type = other DNA
gaaaagagtaaacagtcaaatg

SEQ ID NO: 88990 - DNA, 22 bp, synthetic construct
  misc_feature 1..22: note = chemically synthesized
  source 1..22: mol_type = other DNA
gtatctgaaaaatcaagaatgc

SEQ ID NO: 88991 - DNA, 22 bp, synthetic construct
  misc_feature 1..22: note = chemically synthesized
  source 1..22: mol_type = other DNA
tatctgaaaaatcaagaatgca

SEQ ID NO: 88992 - DNA, 22 bp, synthetic construct
  misc_feature 1..22: note = chemically synthesized
  source 1..22: mol_type = other DNA
aaaaatcaagaatgcaattcta

SEQ ID NO: 88993 - DNA, 22 bp, synthetic construct
  misc_feature 1..22: note = chemically synthesized
  source 1..22: mol_type = other DNA
taatcatcaagatgcatttttt

SEQ ID NO: 88994 - DNA, 22 bp, synthetic construct
  misc_feature 1..22: note = chemically synthesized
  source 1..22: mol_type = other DNA
atcatcaagatgcattttttta

SEQ ID NO: 88995 - DNA, 22 bp, synthetic construct
  misc_feature 1..22: note = chemically synthesized
  source 1..22: mol_type = other DNA
ttttattttttagttttttaat

SEQ ID NO: 88996 - DNA, 22 bp, synthetic construct
  misc_feature 1..22: note = chemically synthesized
  source 1..22: mol_type = other DNA
tttattttttagttttttaatt

SEQ ID NO: 88997 - DNA, 22 bp, synthetic construct
  misc_feature 1..22: note = chemically synthesized
  source 1..22: mol_type = other DNA
ttattttttagttttttaattc

SEQ ID NO: 88998 - DNA, 22 bp, synthetic construct
  misc_feature 1..22: note = chemically synthesized
  source 1..22: mol_type = other DNA
tattttttagttttttaattca

SEQ ID NO: 88999 - DNA, 22 bp, synthetic construct
  misc_feature 1..22: note = chemically synthesized
  source 1..22: mol_type = other DNA
attttttagttttttaattcat

SEQ ID NO: 89000 - DNA, 22 bp, synthetic construct
  misc_feature 1..22: note = chemically synthesized
  source 1..22: mol_type = other DNA
ttttttagttttttaattcatg

SEQ ID NO: 89001 - DNA, 22 bp, synthetic construct
  misc_feature 1..22: note = chemically synthesized
  source 1..22: mol_type = other DNA
tttagttttttaattcatgtga

SEQ ID NO: 89002 - DNA, 22 bp, synthetic construct
  misc_feature 1..22: note = chemically synthesized
  source 1..22: mol_type = other DNA
ttagttttttaattcatgtgat

SEQ ID NO: 89003 - DNA, 22 bp, synthetic construct
  misc_feature 1..22: note = chemically synthesized
  source 1..22: mol_type = other DNA
tagttttttaattcatgtgatg

SEQ ID NO: 89004 - DNA, 22 bp, synthetic construct
  misc_feature 1..22: note = chemically synthesized
  source 1..22: mol_type = other DNA
agttttttaattcatgtgatgt

SEQ ID NO: 89005 - DNA, 22 bp, synthetic construct
  misc_feature 1..22: note = chemically synthesized
  source 1..22: mol_type = other DNA
gttttttaattcatgtgatgtc

SEQ ID NO: 89006 - DNA, 22 bp, synthetic construct
  misc_feature 1..22: note = chemically synthesized
  source 1..22: mol_type = other DNA
tttaattcatgtgatgtctatt

SEQ ID NO: 89007 - DNA, 22 bp, synthetic construct
  misc_feature 1..22: note = chemically synthesized
  source 1..22: mol_type = other DNA
ttaattcatgtgatgtctattc

SEQ ID NO: 89008 - DNA, 22 bp, synthetic construct
  misc_feature 1..22: note = chemically synthesized
  source 1..22: mol_type = other DNA
taattcatgtgatgtctattct

SEQ ID NO: 89009 - DNA, 22 bp, synthetic construct
  misc_feature 1..22: note = chemically synthesized
  source 1..22: mol_type = other DNA
aattcatgtgatgtctattctt

SEQ ID NO: 89010 - DNA, 22 bp, synthetic construct
  misc_feature 1..22: note = chemically synthesized
  source 1..22: mol_type = other DNA
attcatgtgatgtctattcttt

SEQ ID NO: 89011 - DNA, 22 bp, synthetic construct
  misc_feature 1..22: note = chemically synthesized
  source 1..22: mol_type = other DNA
atgtgatgtctattctttttta

SEQ ID NO: 89012 - DNA, 22 bp, synthetic construct
  misc_feature 1..22: note = chemically synthesized
  source 1..22: mol_type = other DNA
ttcttttttattattcttcaac

SEQ ID NO: 89013 - DNA, 22 bp, synthetic construct
  misc_feature 1..22: note = chemically synthesized
  source 1..22: mol_type = other DNA
ttttttattattcttcaacttt

SEQ ID NO: 89014 - DNA, 22 bp, synthetic construct
  misc_feature 1..22: note = chemically synthesized
  source 1..22: mol_type = other DNA
ttttattattcttcaactttat

SEQ ID NO: 89015 - DNA, 22 bp, synthetic construct
  misc_feature 1..22: note = chemically synthesized
  source 1..22: mol_type = other DNA
tttattattcttcaactttatt

SEQ ID NO: 89016 - DNA, 22 bp, synthetic construct
  misc_feature 1..22: note = chemically synthesized
  source 1..22: mol_type = other DNA
ttattattcttcaactttattg

SEQ ID NO: 89017 - DNA, 22 bp, synthetic construct
  misc_feature 1..22: note = chemically synthesized
  source 1..22: mol_type = other DNA
tattattcttcaactttattga

SEQ ID NO: 89018 - DNA, 22 bp, synthetic construct
  misc_feature 1..22: note = chemically synthesized
  source 1..22: mol_type = other DNA
attattcttcaactttattgag

SEQ ID NO: 89019 - DNA, 22 bp, synthetic construct
  misc_feature 1..22: note = chemically synthesized
  source 1..22: mol_type = other DNA
ttattcttcaactttattgagg

SEQ ID NO: 89020 - DNA, 22 bp, synthetic construct
  misc_feature 1..22: note = chemically synthesized
  source 1..22: mol_type = other DNA
ttcttcaactttattgaggtat

SEQ ID NO: 89021 - DNA, 22 bp, synthetic construct
  misc_feature 1..22: note = chemically synthesized
  source 1..22: mol_type = other DNA
ttcaactttattgaggtatcat

SEQ ID NO: 89022 - DNA, 22 bp, synthetic construct
  misc_feature 1..22: note = chemically synthesized
  source 1..22: mol_type = other DNA
caactttattgaggtatcattc

SEQ ID NO: 89023 - DNA, 22 bp, synthetic construct
  misc_feature 1..22: note = chemically synthesized
  source 1..22: mol_type = other DNA
aactttattgaggtatcattca

SEQ ID NO: 89024 - DNA, 22 bp, synthetic construct
  misc_feature 1..22: note = chemically synthesized
  source 1..22: mol_type = other DNA
tattgaggtatcattcacaaat

SEQ ID NO: 89025 - DNA, 22 bp, synthetic construct
  misc_feature 1..22: note = chemically synthesized
  source 1..22: mol_type = other DNA
attgaggtatcattcacaaata

SEQ ID NO: 89026 - DNA, 22 bp, synthetic construct
  misc_feature 1..22: note = chemically synthesized
  source 1..22: mol_type = other DNA
ttgaggtatcattcacaaataa

SEQ ID NO: 89027 - DNA, 22 bp, synthetic construct
  misc_feature 1..22: note = chemically synthesized
  source 1..22: mol_type = other DNA
aggtatcattcacaaataaaaa

SEQ ID NO: 89028 - DNA, 22 bp, synthetic construct
  misc_feature 1..22: note = chemically synthesized
  source 1..22: mol_type = other DNA
acaaataaaaattgtatatatt

SEQ ID NO: 89029 - DNA, 22 bp, synthetic construct
  misc_feature 1..22: note = chemically synthesized
  source 1..22: mol_type = other DNA
tatatatttaaggtgtacaaca

SEQ ID NO: 89030 - DNA, 22 bp, synthetic construct
  misc_feature 1..22: note = chemically synthesized
  source 1..22: mol_type = other DNA
aaggtgtacaacatgatgtttt

SEQ ID NO: 89031 - DNA, 22 bp, synthetic construct
  misc_feature 1..22: note = chemically synthesized
  source 1..22: mol_type = other DNA
aggtgtacaacatgatgtttta

SEQ ID NO: 89032 - DNA, 22 bp, synthetic construct
  misc_feature 1..22: note = chemically synthesized
  source 1..22: mol_type = other DNA
taatatatgtataccttgtgaa

SEQ ID NO: 89033 - DNA, 22 bp, synthetic construct
  misc_feature 1..22: note = chemically synthesized
  source 1..22: mol_type = other DNA
aatatatgtataccttgtgaaa

SEQ ID NO: 89034 - DNA, 22 bp, synthetic construct
  misc_feature 1..22: note = chemically synthesized
  source 1..22: mol_type = other DNA
atatatgtataccttgtgaaat

SEQ ID NO: 89035 - DNA, 22 bp, synthetic construct
  misc_feature 1..22: note = chemically synthesized
  source 1..22: mol_type = other DNA
gtgaaatgattaccacaatcaa

SEQ ID NO: 89036 - DNA, 22 bp, synthetic construct
  misc_feature 1..22: note = chemically synthesized
  source 1..22: mol_type = other DNA
tgaaatgattaccacaatcaag

SEQ ID NO: 89037 - DNA, 22 bp, synthetic construct
  misc_feature 1..22: note = chemically synthesized
  source 1..22: mol_type = other DNA
ccacaatcaagctaattaacat

SEQ ID NO: 89038 - DNA, 22 bp, synthetic construct
  misc_feature 1..22: note = chemically synthesized
  source 1..22: mol_type = other DNA
attaacatacccattatctcac

SEQ ID NO: 89039 - DNA, 22 bp, synthetic construct
  misc_feature 1..22: note = chemically synthesized
  source 1..22: mol_type = other DNA
acatacccattatctcacatag

SEQ ID NO: 89040 - DNA, 22 bp, synthetic construct
  misc_feature 1..22: note = chemically synthesized
  source 1..22: mol_type = other DNA
tctcacatagttacctttttct

SEQ ID NO: 89041 - DNA, 22 bp, synthetic construct
  misc_feature 1..22: note = chemically synthesized
  source 1..22: mol_type = other DNA
acatagttacctttttcttgtg

SEQ ID NO: 89042 - DNA, 22 bp, synthetic construct
  misc_feature 1..22: note = chemically synthesized
  source 1..22: mol_type = other DNA
cctttttcttgtggtaaatgct

SEQ ID NO: 89043 - DNA, 22 bp, synthetic construct
  misc_feature 1..22: note = chemically synthesized
  source 1..22: mol_type = other DNA
tttcttgtggtaaatgctttta

SEQ ID NO: 89044 - DNA, 22 bp, synthetic construct
  misc_feature 1..22: note = chemically synthesized
  source 1..22: mol_type = other DNA
ttcttgtggtaaatgcttttaa

SEQ ID NO: 89045 - DNA, 22 bp, synthetic construct
  misc_feature 1..22: note = chemically synthesized
  source 1..22: mol_type = other DNA
tcttgtggtaaatgcttttaag

SEQ ID NO: 89046 - DNA, 22 bp, synthetic construct
  misc_feature 1..22: note = chemically synthesized
  source 1..22: mol_type = other DNA
cttgtggtaaatgcttttaaga

SEQ ID NO: 89047 - DNA, 22 bp, synthetic construct
  misc_feature 1..22: note = chemically synthesized
  source 1..22: mol_type = other DNA
ttgtggtaaatgcttttaagat

SEQ ID NO: 89048 - DNA, 22 bp, synthetic construct
  misc_feature 1..22: note = chemically synthesized
  source 1..22: mol_type = other DNA
gtggtaaatgcttttaagatct

SEQ ID NO: 89049 - DNA, 22 bp, synthetic construct
  misc_feature 1..22: note = chemically synthesized
  source 1..22: mol_type = other DNA
tggtaaatgcttttaagatcta

SEQ ID NO: 89050 - DNA, 22 bp, synthetic construct
  misc_feature 1..22: note = chemically synthesized
  source 1..22: mol_type = other DNA
ttaagatctactctcggccagg

SEQ ID NO: 89051 - DNA, 22 bp, synthetic construct
  misc_feature 1..22: note = chemically synthesized
  source 1..22: mol_type = other DNA
taagatctactctcggccaggc

SEQ ID NO: 89052 - DNA, 22 bp, synthetic construct
  misc_feature 1..22: note = chemically synthesized
  source 1..22: mol_type = other DNA
aagatctactctcggccaggcc

SEQ ID NO: 89053 - DNA, 22 bp, synthetic construct
  misc_feature 1..22: note = chemically synthesized
  source 1..22: mol_type = other DNA
agatctactctcggccaggccc

SEQ ID NO: 89054 - DNA, 22 bp, synthetic construct
  misc_feature 1..22: note = chemically synthesized
  source 1..22: mol_type = other DNA
ctctcggccaggcccggtggct

SEQ ID NO: 89055 - DNA, 22 bp, synthetic construct
  misc_feature 1..22: note = chemically synthesized
  source 1..22: mol_type = other DNA
tcggccaggcccggtggctcac

SEQ ID NO: 89056 - DNA, 22 bp, synthetic construct
  misc_feature 1..22: note = chemically synthesized
  source 1..22: mol_type = other DNA
ggccaggcccggtggctcacgc

SEQ ID NO: 89057 - DNA, 22 bp, synthetic construct
  misc_feature 1..22: note = chemically synthesized
  source 1..22: mol_type = other DNA
acgcctgtaatcccagcccttt

SEQ ID NO: 89058 - DNA, 22 bp, synthetic construct
  misc_feature 1..22: note = chemically synthesized
  source 1..22: mol_type = other DNA
taatcccagccctttgggtggc

SEQ ID NO: 89059 - DNA, 22 bp, synthetic construct
  misc_feature 1..22: note = chemically synthesized
  source 1..22: mol_type = other DNA
tgggtggccgaggcaggcggat

SEQ ID NO: 89060 - DNA, 22 bp, synthetic construct
  misc_feature 1..22: note = chemically synthesized
  source 1..22: mol_type = other DNA
gggtggccgaggcaggcggatc

SEQ ID NO: 89061 - DNA, 22 bp, synthetic construct
  misc_feature 1..22: note = chemically synthesized
  source 1..22: mol_type = other DNA
ggtggccgaggcaggcggatca

SEQ ID NO: 89062 - DNA, 22 bp, synthetic construct
  misc_feature 1..22: note = chemically synthesized
  source 1..22: mol_type = other DNA
accaacatggagaaaccccgtc

SEQ ID NO: 89063 - DNA, 22 bp, synthetic construct
  misc_feature 1..22: note = chemically synthesized
  source 1..22: mol_type = other DNA
tactaaaaatacaaaattagct

SEQ ID NO: 89064 - DNA, 22 bp, synthetic construct
  misc_feature 1..22: note = chemically synthesized
  source 1..22: mol_type = other DNA
ctaaaaatacaaaattagctgg

SEQ ID NO: 89065 - DNA, 22 bp, synthetic construct
  misc_feature 1..22: note = chemically synthesized
  source 1..22: mol_type = other DNA
aaaatacaaaattagctgggca

SEQ ID NO: 89066 - DNA, 22 bp, synthetic construct
  misc_feature 1..22: note = chemically synthesized
  source 1..22: mol_type = other DNA
gctgggcatggtgtcgcatgcc

SEQ ID NO: 89067 - DNA, 22 bp, synthetic construct
  misc_feature 1..22: note = chemically synthesized
  source 1..22: mol_type = other DNA
ggcatggtgtcgcatgcctgta

SEQ ID NO: 89068 - DNA, 22 bp, synthetic construct
  misc_feature 1..22: note = chemically synthesized
  source 1..22: mol_type = other DNA
taatcccagctactcgggaggc

SEQ ID NO: 89069 - DNA, 22 bp, synthetic construct
  misc_feature 1..22: note = chemically synthesized
  source 1..22: mol_type = other DNA
ctcgggaggctgaggcaggaga

SEQ ID NO: 89070 - DNA, 22 bp, synthetic construct
  misc_feature 1..22: note = chemically synthesized
  source 1..22: mol_type = other DNA
gggaggctgaggcaggagattt

SEQ ID NO: 89071 - DNA, 22 bp, synthetic construct
  misc_feature 1..22: note = chemically synthesized
  source 1..22: mol_type = other DNA
aggcaggagatttgcttgaacc

SEQ ID NO: 89072 - DNA, 22 bp, synthetic construct
  misc_feature 1..22: note = chemically synthesized
  source 1..22: mol_type = other DNA
gcttgaacccaggaggcggagg

SEQ ID NO: 89073 - DNA, 22 bp, synthetic construct
  misc_feature 1..22: note = chemically synthesized
  source 1..22: mol_type = other DNA
cttgaacccaggaggcggaggt

SEQ ID NO: 89074 - DNA, 22 bp, synthetic construct
  misc_feature 1..22: note = chemically synthesized
  source 1..22: mol_type = other DNA
gaacccaggaggcggaggttgc

SEQ ID NO: 89075 - DNA, 22 bp, synthetic construct
  misc_feature 1..22: note = chemically synthesized
  source 1..22: mol_type = other DNA
aacccaggaggcggaggttgca

SEQ ID NO: 89076 - DNA, 22 bp, synthetic construct
  misc_feature 1..22: note = chemically synthesized
  source 1..22: mol_type = other DNA
cagtgagccaagatcttgccat

SEQ ID NO: 89077 - DNA, 22 bp, synthetic construct
  misc_feature 1..22: note = chemically synthesized
  source 1..22: mol_type = other DNA
gccattgcactccagcctggac

SEQ ID NO: 89078 - DNA, 22 bp, synthetic construct
  misc_feature 1..22: note = chemically synthesized
  source 1..22: mol_type = other DNA
ccattgcactccagcctggaca

SEQ ID NO: 89079 - DNA, 22 bp, synthetic construct
  misc_feature 1..22: note = chemically synthesized
  source 1..22: mol_type = other DNA
cactccagcctggacaacaaga

SEQ ID NO: 89080 - DNA, 22 bp, synthetic construct
  misc_feature 1..22: note = chemically synthesized
  source 1..22: mol_type = other DNA
cagcctggacaacaagagcaaa

SEQ ID NO: 89081 - DNA, 22 bp, synthetic construct
  misc_feature 1..22: note = chemically synthesized
  source 1..22: mol_type = other DNA
gacaacaagagcaaaactccat

SEQ ID NO: 89082 - DNA, 22 bp, synthetic construct
  misc_feature 1..22: note = chemically synthesized
  source 1..22: mol_type = other DNA
catctaaaaaaaaaaaaaaatc

SEQ ID NO: 89083 - DNA, 22 bp, synthetic construct
  misc_feature 1..22: note = chemically synthesized
  source 1..22: mol_type = other DNA
aaaaaaaaaaaaaatctactct

SEQ ID NO: 89084 - DNA, 22 bp, synthetic construct
  misc_feature 1..22: note = chemically synthesized
  source 1..22: mol_type = other DNA
ctctctttgcaaattttaaata

SEQ ID NO: 89085 - DNA, 22 bp, synthetic construct
  misc_feature 1..22: note = chemically synthesized
  source 1..22: mol_type = other DNA
tctttgcaaattttaaatatac

SEQ ID NO: 89086 - DNA, 22 bp, synthetic construct
  misc_feature 1..22: note = chemically synthesized
  source 1..22: mol_type = other DNA
tttgcaaattttaaatatactt

SEQ ID NO: 89087 - DNA, 22 bp, synthetic construct
  misc_feature 1..22: note = chemically synthesized
  source 1..22: mol_type = other DNA
tgcaaattttaaatatacttac

SEQ ID NO: 89088 - DNA, 22 bp, synthetic construct
  misc_feature 1..22: note = chemically synthesized
  source 1..22: mol_type = other DNA
gcaaattttaaatatacttaca

SEQ ID NO: 89089 - DNA, 22 bp, synthetic construct
  misc_feature 1..22: note = chemically synthesized
  source 1..22: mol_type = other DNA
caaattttaaatatacttacag

SEQ ID NO: 89090 - DNA, 22 bp, synthetic construct
  misc_feature 1..22: note = chemically synthesized
  source 1..22: mol_type = other DNA
taaatatacttacagtacaatt

SEQ ID NO: 89091 - DNA, 22 bp, synthetic construct
  misc_feature 1..22: note = chemically synthesized
  source 1..22: mol_type = other DNA
aaatatacttacagtacaatta

SEQ ID NO: 89092 - DNA, 22 bp, synthetic construct
  misc_feature 1..22: note = chemically synthesized
  source 1..22: mol_type = other DNA
aatatacttacagtacaattaa

SEQ ID NO: 89093 - DNA, 22 bp, synthetic construct
  misc_feature 1..22: note = chemically synthesized
  source 1..22: mol_type = other DNA
acagtacaattaactacagtca

SEQ ID NO: 89094 - DNA, 22 bp, synthetic construct
  misc_feature 1..22: note = chemically synthesized
  source 1..22: mol_type = other DNA
cagtacaattaactacagtcac

SEQ ID NO: 89095 - DNA, 22 bp, synthetic construct
  misc_feature 1..22: note = chemically synthesized
  source 1..22: mol_type = other DNA
actacagtcacgatgctgtaca

SEQ ID NO: 89096 - DNA, 22 bp, synthetic construct
  misc_feature 1..22: note = chemically synthesized
  source 1..22: mol_type = other DNA
cagtcacgatgctgtacattag

SEQ ID NO: 89097 - DNA, 22 bp, synthetic construct
  misc_feature 1..22: note = chemically synthesized
  source 1..22: mol_type = other DNA
tacattagatatctagaattta

SEQ ID NO: 89098 - DNA, 22 bp, synthetic construct
  misc_feature 1..22: note = chemically synthesized
  source 1..22: mol_type = other DNA
gatatctagaatttattcatcc

SEQ ID NO: 89099 - DNA, 22 bp, synthetic construct
  misc_feature 1..22: note = chemically synthesized
  source 1..22: mol_type = other DNA
gaatttattcatcccacataac

SEQ ID NO: 89100 - DNA, 22 bp, synthetic construct
  misc_feature 1..22: note = chemically synthesized
  source 1..22: mol_type = other DNA
attcatcccacataactgaaat

SEQ ID NO: 89101 - DNA, 22 bp, synthetic construct
  misc_feature 1..22: note = chemically synthesized
  source 1..22: mol_type = other DNA
ttcatcccacataactgaaatt

SEQ ID NO: 89102 - DNA, 22 bp, synthetic construct
  misc_feature 1..22: note = chemically synthesized
  source 1..22: mol_type = other DNA
atcccacataactgaaatttta

SEQ ID NO: 89103 - DNA, 22 bp, synthetic construct
  misc_feature 1..22: note = chemically synthesized
  source 1..22: mol_type = other DNA
aaattttataccctttgagtaa

SEQ ID NO: 89104 - DNA, 22 bp, synthetic construct
  misc_feature 1..22: note = chemically synthesized
  source 1..22: mol_type = other DNA
tataccctttgagtaatagttt

SEQ ID NO: 89105 - DNA, 22 bp, synthetic construct
  misc_feature 1..22: note = chemically synthesized
  source 1..22: mol_type = other DNA
ataccctttgagtaatagtttc

SEQ ID NO: 89106 - DNA, 22 bp, synthetic construct
  misc_feature 1..22: note = chemically synthesized
  source 1..22: mol_type = other DNA
taccctttgagtaatagtttcc

SEQ ID NO: 89107 - DNA, 22 bp, synthetic construct
  misc_feature 1..22: note = chemically synthesized
  source 1..22: mol_type = other DNA
tgagtaatagtttcctgattct

SEQ ID NO: 89108 - DNA, 22 bp, synthetic construct
  misc_feature 1..22: note = chemically synthesized
  source 1..22: mol_type = other DNA
gagtaatagtttcctgattctc

SEQ ID NO: 89109 - DNA, 22 bp, synthetic construct
  misc_feature 1..22: note = chemically synthesized
  source 1..22: mol_type = other DNA
agtaatagtttcctgattctcc

SEQ ID NO: 89110 - DNA, 22 bp, synthetic construct
  misc_feature 1..22: note = chemically synthesized
  source 1..22: mol_type = other DNA
cctgattctcccacccccaacc

SEQ ID NO: 89111 - DNA, 22 bp, synthetic construct
  misc_feature 1..22: note = chemically synthesized
  source 1..22: mol_type = other DNA
ctgattctcccacccccaaccc

SEQ ID NO: 89112 - DNA, 22 bp, synthetic construct
  misc_feature 1..22: note = chemically synthesized
  source 1..22: mol_type = other DNA
attctcccacccccaacccctg

SEQ ID NO: 89113 - DNA, 22 bp, synthetic construct
  misc_feature 1..22: note = chemically synthesized
  source 1..22: mol_type = other DNA
tcccacccccaacccctggaaa

SEQ ID NO: 89114 - DNA, 22 bp, synthetic construct
  misc_feature 1..22: note = chemically synthesized
  source 1..22: mol_type = other DNA
ccacccccaacccctggaaacc

SEQ ID NO: 89115 - DNA, 22 bp, synthetic construct
  misc_feature 1..22: note = chemically synthesized
  source 1..22: mol_type = other DNA
gaaaccatacctctactgtctg

SEQ ID NO: 89116 - DNA, 22 bp, synthetic construct
  misc_feature 1..22: note = chemically synthesized
  source 1..22: mol_type = other DNA
tactgtctgtttccatgagagt

SEQ ID NO: 89117 - DNA, 22 bp, synthetic construct
  misc_feature 1..22: note = chemically synthesized
  source 1..22: mol_type = other DNA
ctgtctgtttccatgagagtga

SEQ ID NO: 89118 - DNA, 22 bp, synthetic construct
  misc_feature 1..22: note = chemically synthesized
  source 1..22: mol_type = other DNA
tctgtttccatgagagtgactt

SEQ ID NO: 89119 - DNA, 22 bp, synthetic construct
  misc_feature 1..22: note = chemically synthesized
  source 1..22: mol_type = other DNA
tttccatgagagtgactttttt

SEQ ID NO: 89120 - DNA, 22 bp, synthetic construct
  misc_feature 1..22: note = chemically synthesized
  source 1..22: mol_type = other DNA
ccatgagagtgacttttttatg

SEQ ID NO: 89121 - DNA, 22 bp, synthetic construct
  misc_feature 1..22: note = chemically synthesized
  source 1..22: mol_type = other DNA
catgagagtgacttttttatgt

SEQ ID NO: 89122 - DNA, 22 bp, synthetic construct
  misc_feature 1..22: note = chemically synthesized
  source 1..22: mol_type = other DNA
ttttatgtttcacatatgagca

SEQ ID NO: 89123 - DNA, 22 bp, synthetic construct
  misc_feature 1..22: note = chemically synthesized
  source 1..22: mol_type = other DNA
tttatgtttcacatatgagcaa

SEQ ID NO: 89124 - DNA, 22 bp, synthetic construct
  misc_feature 1..22: note = chemically synthesized
  source 1..22: mol_type = other DNA
ttatgtttcacatatgagcaag

SEQ ID NO: 89125 - DNA, 22 bp, synthetic construct
  misc_feature 1..22: note = chemically synthesized
  source 1..22: mol_type = other DNA
tatgtttcacatatgagcaagg

SEQ ID NO: 89126 - DNA, 22 bp, synthetic construct
  misc_feature 1..22: note = chemically synthesized
  source 1..22: mol_type = other DNA
atgtttcacatatgagcaaggt

SEQ ID NO: 89127 - DNA, 22 bp, synthetic construct
  misc_feature 1..22: note = chemically synthesized
  source 1..22: mol_type = other DNA
tgtttcacatatgagcaaggtt

SEQ ID NO: 89128 - DNA, 22 bp, synthetic construct
  misc_feature 1..22: note = chemically synthesized
  source 1..22: mol_type = other DNA
cacatatgagcaaggttgtgta

SEQ ID NO: 89129 - DNA, 22 bp, synthetic construct
  misc_feature 1..22: note = chemically synthesized
  source 1..22: mol_type = other DNA
acatatgagcaaggttgtgtag

SEQ ID NO: 89130 - DNA, 22 bp, synthetic construct
  misc_feature 1..22: note = chemically synthesized
  source 1..22: mol_type = other DNA
tgtagtatttgtctttttgtgt

SEQ ID NO: 89131 - DNA, 22 bp, synthetic construct
  misc_feature 1..22: note = chemically synthesized
  source 1..22: mol_type = other DNA
gtctttttgtgtcaggcttatt

SEQ ID NO: 89132 - DNA, 22 bp, synthetic construct
  misc_feature 1..22: note = chemically synthesized
  source 1..22: mol_type = other DNA
tctttttgtgtcaggcttattt

SEQ ID NO: 89133 - DNA, 22 bp, synthetic construct
  misc_feature 1..22: note = chemically synthesized
  source 1..22: mol_type = other DNA
tttgtgtcaggcttatttttct

SEQ ID NO: 89134 - DNA, 22 bp, synthetic construct
  misc_feature 1..22: note = chemically synthesized
  source 1..22: mol_type = other DNA
ttgtgtcaggcttatttttctt

SEQ ID NO: 89135 - DNA, 22 bp, synthetic construct
  misc_feature 1..22: note = chemically synthesized
  source 1..22: mol_type = other DNA
tgtgtcaggcttatttttctta

SEQ ID NO: 89136 - DNA, 22 bp, synthetic construct
  misc_feature 1..22: note = chemically synthesized
  source 1..22: mol_type = other DNA
gtgtcaggcttatttttcttag

SEQ ID NO: 89137 - DNA, 22 bp, synthetic construct
  misc_feature 1..22: note = chemically synthesized
  source 1..22: mol_type = other DNA
tgtcaggcttatttttcttagt

SEQ ID NO: 89138 - DNA, 22 bp, synthetic construct
  misc_feature 1..22: note = chemically synthesized
  source 1..22: mol_type = other DNA
atttttcttagttttacatcct

SEQ ID NO: 89139 - DNA, 22 bp, synthetic construct
  misc_feature 1..22: note = chemically synthesized
  source 1..22: mol_type = other DNA
tttttcttagttttacatcctc

SEQ ID NO: 89140 - DNA, 22 bp, synthetic construct
  misc_feature 1..22: note = chemically synthesized
  source 1..22: mol_type = other DNA
ttcttagttttacatcctccag

SEQ ID NO: 89141 - DNA, 22 bp, synthetic construct
  misc_feature 1..22: note = chemically synthesized
  source 1..22: mol_type = other DNA
tcttagttttacatcctccagg

SEQ ID NO: 89142 - DNA, 22 bp, synthetic construct
  misc_feature 1..22: note = chemically synthesized
  source 1..22: mol_type = other DNA
cttagttttacatcctccaggt

SEQ ID NO: 89143 - DNA, 22 bp, synthetic construct
  misc_feature 1..22: note = chemically synthesized
  source 1..22: mol_type = other DNA
ttagttttacatcctccaggtt

SEQ ID NO: 89144 - DNA, 22 bp, synthetic construct
  misc_feature 1..22: note = chemically synthesized
  source 1..22: mol_type = other DNA
agttttacatcctccaggttca

SEQ ID NO: 89145 - DNA, 22 bp, synthetic construct
  misc_feature 1..22: note = chemically synthesized
  source 1..22: mol_type = other DNA
gttttacatcctccaggttcat

SEQ ID NO: 89146 - DNA, 22 bp, synthetic construct
  misc_feature 1..22: note = chemically synthesized
  source 1..22: mol_type = other DNA
tacatcctccaggttcatcaat

SEQ ID NO: 89147 - DNA, 22 bp, synthetic construct
  misc_feature 1..22: note = chemically synthesized
  source 1..22: mol_type = other DNA
acatcctccaggttcatcaatt

SEQ ID NO: 89148 - DNA, 22 bp, synthetic construct
  misc_feature 1..22: note = chemically synthesized
  source 1..22: mol_type = other DNA
catcctccaggttcatcaattc

SEQ ID NO: 89149 - DNA, 22 bp, synthetic construct
  misc_feature 1..22: note = chemically synthesized
  source 1..22: mol_type = other DNA
caggttcatcaattctgccata

SEQ ID NO: 89150 - DNA, 22 bp, synthetic construct
  misc_feature 1..22: note = chemically synthesized
  source 1..22: mol_type = other DNA
atcaattctgccataaatggca

SEQ ID NO: 89151 - DNA, 22 bp, synthetic construct
  misc_feature 1..22: note = chemically synthesized
  source 1..22: mol_type = other DNA
tgccataaatggcaggattttc

SEQ ID NO: 89152 - DNA, 22 bp, synthetic construct
  misc_feature 1..22: note = chemically synthesized
  source 1..22: mol_type = other DNA
ccataaatggcaggattttctt

SEQ ID NO: 89153 - DNA, 22 bp, synthetic construct
  misc_feature 1..22: note = chemically synthesized
  source 1..22: mol_type = other DNA
tcttctttttaatttttttatt

SEQ ID NO: 89154 - DNA, 22 bp, synthetic construct
  misc_feature 1..22: note = chemically synthesized
  source 1..22: mol_type = other DNA
cttctttttaatttttttattt

SEQ ID NO: 89155 - DNA, 22 bp, synthetic construct
  misc_feature 1..22: note = chemically synthesized
  source 1..22: mol_type = other DNA
ttctttttaatttttttatttt

SEQ ID NO: 89156 - DNA, 22 bp, synthetic construct
  misc_feature 1..22: note = chemically synthesized
  source 1..22: mol_type = other DNA
ctttttaatttttttattttcc

SEQ ID NO: 89157 - DNA, 22 bp, synthetic construct
  misc_feature 1..22: note = chemically synthesized
  source 1..22: mol_type = other DNA
tttttaatttttttattttcct

SEQ ID NO: 89158 - DNA, 22 bp, synthetic construct
  misc_feature 1..22: note = chemically synthesized
  source 1..22: mol_type = other DNA
tttaatttttttattttcctat

SEQ ID NO: 89159 - DNA, 22 bp, synthetic construct
  misc_feature 1..22: note = chemically synthesized
  source 1..22: mol_type = other DNA
ttaatttttttattttcctatt

SEQ ID NO: 89160 - DNA, 22 bp, synthetic construct
  misc_feature 1..22: note = chemically synthesized
  source 1..22: mol_type = other DNA
taatttttttattttcctattt

SEQ ID NO: 89161 - DNA, 22 bp, synthetic construct
  misc_feature 1..22: note = chemically synthesized
  source 1..22: mol_type = other DNA
aatttttttattttcctatttt

SEQ ID NO: 89162 - DNA, 22 bp, synthetic construct
  misc_feature 1..22: note = chemically synthesized
  source 1..22: mol_type = other DNA
atttttttattttcctattttt

SEQ ID NO: 89163 - DNA, 22 bp, synthetic construct
  misc_feature 1..22: note = chemically synthesized
  source 1..22: mol_type = other DNA
ttttattttcctatttttaatt

SEQ ID NO: 89164 - DNA, 22 bp, synthetic construct
  misc_feature 1..22: note = chemically synthesized
  source 1..22: mol_type = other DNA
tttattttcctatttttaattt

SEQ ID NO: 89165 - DNA, 22 bp, synthetic construct
  misc_feature 1..22: note = chemically synthesized
  source 1..22: mol_type = other DNA
ttattttcctatttttaatttt

SEQ ID NO: 89166 - DNA, 22 bp, synthetic construct
  misc_feature 1..22: note = chemically synthesized
  source 1..22: mol_type = other DNA
tattttcctatttttaattttt

SEQ ID NO: 89167 - DNA, 22 bp, synthetic construct
  misc_feature 1..22: note = chemically synthesized
  source 1..22: mol_type = other DNA
attttcctatttttaatttttt

SEQ ID NO: 89168 - DNA, 22 bp, synthetic construct
  misc_feature 1..22: note = chemically synthesized
  source 1..22: mol_type = other DNA
ttttcctatttttaattttttg

SEQ ID NO: 89169 - DNA, 22 bp, synthetic construct
  misc_feature 1..22: note = chemically synthesized
  source 1..22: mol_type = other DNA
tcctatttttaattttttgttt

SEQ ID NO: 89170 - DNA, 22 bp, synthetic construct
  misc_feature 1..22: note = chemically synthesized
  source 1..22: mol_type = other DNA
cctatttttaattttttgtttg

SEQ ID NO: 89171 - DNA, 22 bp, synthetic construct
  misc_feature 1..22: note = chemically synthesized
  source 1..22: mol_type = other DNA
ctatttttaattttttgtttgt

SEQ ID NO: 89172 - DNA, 22 bp, synthetic construct
  misc_feature 1..22: note = chemically synthesized
  source 1..22: mol_type = other DNA
tttttaattttttgtttgttat

SEQ ID NO: 89173 - DNA, 22 bp, synthetic construct
  misc_feature 1..22: note = chemically synthesized
  source 1..22: mol_type = other DNA
ttaattttttgtttgttattga

SEQ ID NO: 89174 - DNA, 22 bp, synthetic construct
  misc_feature 1..22: note = chemically synthesized
  source 1..22: mol_type = other DNA
taattttttgtttgttattgaa

SEQ ID NO: 89175 - DNA, 22 bp, synthetic construct
  misc_feature 1..22: note = chemically synthesized
  source 1..22: mol_type = other DNA
aattttttgtttgttattgaat

SEQ ID NO: 89176 - DNA, 22 bp, synthetic construct
  misc_feature 1..22: note = chemically synthesized
  source 1..22: mol_type = other DNA
attttttgtttgttattgaatc

SEQ ID NO: 89177 - DNA, 22 bp, synthetic construct
  misc_feature 1..22: note = chemically synthesized
  source 1..22: mol_type = other DNA
tttgtttgttattgaatcatct

SEQ ID NO: 89178 - DNA, 22 bp, synthetic construct
  misc_feature 1..22: note = chemically synthesized
  source 1..22: mol_type = other DNA
ttgtttgttattgaatcatctg

SEQ ID NO: 89179 - DNA, 22 bp, synthetic construct
  misc_feature 1..22: note = chemically synthesized
  source 1..22: mol_type = other DNA
tgtttgttattgaatcatctgt

SEQ ID NO: 89180 - DNA, 22 bp, synthetic construct
  misc_feature 1..22: note = chemically synthesized
  source 1..22: mol_type = other DNA
gtttgttattgaatcatctgtg

SEQ ID NO: 89181 - DNA, 22 bp, synthetic construct
  misc_feature 1..22: note = chemically synthesized
  source 1..22: mol_type = other DNA
tttgttattgaatcatctgtgt

SEQ ID NO: 89182 - DNA, 22 bp, synthetic construct
  misc_feature 1..22: note = chemically synthesized
  source 1..22: mol_type = other DNA
gttattgaatcatctgtgtttc

SEQ ID NO: 89183 - DNA, 22 bp, synthetic construct
  misc_feature 1..22: note = chemically synthesized
  source 1..22: mol_type = other DNA
ttattgaatcatctgtgtttct

SEQ ID NO: 89184 - DNA, 22 bp, synthetic construct
  misc_feature 1..22: note = chemically synthesized
  source 1..22: mol_type = other DNA
ttgaatcatctgtgtttcttat

SEQ ID NO: 89185 - DNA, 22 bp, synthetic construct
  misc_feature 1..22: note = chemically synthesized
  source 1..22: mol_type = other DNA
aatcatctgtgtttcttatata

SEQ ID NO: 89186 - DNA, 22 bp, synthetic construct
  misc_feature 1..22: note = chemically synthesized
  source 1..22: mol_type = other DNA
tgtttcttatatattttggata

SEQ ID NO: 89187 - DNA, 22 bp, synthetic construct
  misc_feature 1..22: note = chemically synthesized
  source 1..22: mol_type = other DNA
cttatatattttggatattaac

SEQ ID NO: 89188 - DNA, 22 bp, synthetic construct
  misc_feature 1..22: note = chemically synthesized
  source 1..22: mol_type = other DNA
ttatatattttggatattaacc

SEQ ID NO: 89189 - DNA, 22 bp, synthetic construct
  misc_feature 1..22: note = chemically synthesized
  source 1..22: mol_type = other DNA
atatattttggatattaaccaa

SEQ ID NO: 89190 - DNA, 22 bp, synthetic construct
  misc_feature 1..22: note = chemically synthesized
  source 1..22: mol_type = other DNA
tatattttggatattaaccaaa

SEQ ID NO: 89191 - DNA, 22 bp, synthetic construct
  misc_feature 1..22: note = chemically synthesized
  source 1..22: mol_type = other DNA
tggatattaaccaaaatattta

SEQ ID NO: 89192 - DNA, 22 bp, synthetic construct
  misc_feature 1..22: note = chemically synthesized
  source 1..22: mol_type = other DNA
ggatattaaccaaaatatttaa

SEQ ID NO: 89193 - DNA, 22 bp, synthetic construct
  misc_feature 1..22: note = chemically synthesized
  source 1..22: mol_type = other DNA
gatattaaccaaaatatttaag

SEQ ID NO: 89194 - DNA, 22 bp, synthetic construct
  misc_feature 1..22: note = chemically synthesized
  source 1..22: mol_type = other DNA
accaaaatatttaagaaatatt

SEQ ID NO: 89195 - DNA, 22 bp, synthetic construct
  misc_feature 1..22: note = chemically synthesized
  source 1..22: mol_type = other DNA
aagaaatatttggtttgcaaat

SEQ ID NO: 89196 - DNA, 22 bp, synthetic construct
  misc_feature 1..22: note = chemically synthesized
  source 1..22: mol_type = other DNA
agaaatatttggtttgcaaata

SEQ ID NO: 89197 - DNA, 22 bp, synthetic construct
  misc_feature 1..22: note = chemically synthesized
  source 1..22: mol_type = other DNA
ggtttgcaaatatgccatttca

SEQ ID NO: 89198 - DNA, 22 bp, synthetic construct
  misc_feature 1..22: note = chemically synthesized
  source 1..22: mol_type = other DNA
gtttgcaaatatgccatttcat

SEQ ID NO: 89199 - DNA, 22 bp, synthetic construct
  misc_feature 1..22: note = chemically synthesized
  source 1..22: mol_type = other DNA
gcaaatatgccatttcatggtt

SEQ ID NO: 89200 - DNA, 22 bp, synthetic construct
  misc_feature 1..22: note = chemically synthesized
  source 1..22: mol_type = other DNA
caaatatgccatttcatggttc

SEQ ID NO: 89201 - DNA, 22 bp, synthetic construct
  misc_feature 1..22: note = chemically synthesized
  source 1..22: mol_type = other DNA
catggttcacctttcatttgtt

SEQ ID NO: 89202 - DNA, 22 bp, synthetic construct
  misc_feature 1..22: note = chemically synthesized
  source 1..22: mol_type = other DNA
atggttcacctttcatttgttc

SEQ ID NO: 89203 - DNA, 22 bp, synthetic construct
  misc_feature 1..22: note = chemically synthesized
  source 1..22: mol_type = other DNA
acctttcatttgttcattgttt

SEQ ID NO: 89204 - DNA, 22 bp, synthetic construct
  misc_feature 1..22: note = chemically synthesized
  source 1..22: mol_type = other DNA
tcatttgttcattgttttgttt

SEQ ID NO: 89205 - DNA, 22 bp, synthetic construct
  misc_feature 1..22: note = chemically synthesized
  source 1..22: mol_type = other DNA
catttgttcattgttttgtttt

SEQ ID NO: 89206 - DNA, 22 bp, synthetic construct
  misc_feature 1..22: note = chemically synthesized
  source 1..22: mol_type = other DNA
atttgttcattgttttgttttt

SEQ ID NO: 89207 - DNA, 22 bp, synthetic construct
  misc_feature 1..22: note = chemically synthesized
  source 1..22: mol_type = other DNA
gttcattgttttgttttttgtg

SEQ ID NO: 89208 - DNA, 22 bp, synthetic construct
  misc_feature 1..22: note = chemically synthesized
  source 1..22: mol_type = other DNA
ttcattgttttgttttttgtgt

SEQ ID NO: 89209 - DNA, 22 bp, synthetic construct
  misc_feature 1..22: note = chemically synthesized
  source 1..22: mol_type = other DNA
attgttttgttttttgtgtgga

SEQ ID NO: 89210 - DNA, 22 bp, synthetic construct
  misc_feature 1..22: note = chemically synthesized
  source 1..22: mol_type = other DNA
ttttgttttttgtgtggaaatt

SEQ ID NO: 89211 - DNA, 22 bp, synthetic construct
  misc_feature 1..22: note = chemically synthesized
  source 1..22: mol_type = other DNA
tgttttttgtgtggaaattttt

SEQ ID NO: 89212 - DNA, 22 bp, synthetic construct
  misc_feature 1..22: note = chemically synthesized
  source 1..22: mol_type = other DNA
gttttttgtgtggaaatttttt

SEQ ID NO: 89213 - DNA, 22 bp, synthetic construct
  misc_feature 1..22: note = chemically synthesized
  source 1..22: mol_type = other DNA
ttttttgtgtggaaatttttta

SEQ ID NO: 89214 - DNA, 22 bp, synthetic construct
  misc_feature 1..22: note = chemically synthesized
  source 1..22: mol_type = other DNA
tttgtgtggaaattttttagtt

SEQ ID NO: 89215 - DNA, 22 bp, synthetic construct
  misc_feature 1..22: note = chemically synthesized
  source 1..22: mol_type = other DNA
ttgtgtggaaattttttagttt

SEQ ID NO: 89216 - DNA, 22 bp, synthetic construct
  misc_feature 1..22: note = chemically synthesized
  source 1..22: mol_type = other DNA
tgtgtggaaattttttagtttg

SEQ ID NO: 89217 - DNA, 22 bp, synthetic construct
  misc_feature 1..22: note = chemically synthesized
  source 1..22: mol_type = other DNA
gtgtggaaattttttagtttga

SEQ ID NO: 89218 - DNA, 22 bp, synthetic construct
  misc_feature 1..22: note = chemically synthesized
  source 1..22: mol_type = other DNA
tgtggaaattttttagtttgat

SEQ ID NO: 89219 - DNA, 22 bp, synthetic construct
  misc_feature 1..22: note = chemically synthesized
  source 1..22: mol_type = other DNA
tttagtttgatgtagcctcact

SEQ ID NO: 89220 - DNA, 22 bp, synthetic construct
  misc_feature 1..22: note = chemically synthesized
  source 1..22: mol_type = other DNA
ttagtttgatgtagcctcactt

SEQ ID NO: 89221 - DNA, 22 bp, synthetic construct
  misc_feature 1..22: note = chemically synthesized
  source 1..22: mol_type = other DNA
tagtttgatgtagcctcacttc

SEQ ID NO: 89222 - DNA, 22 bp, synthetic construct
  misc_feature 1..22: note = chemically synthesized
  source 1..22: mol_type = other DNA
agtttgatgtagcctcacttct

SEQ ID NO: 89223 - DNA, 22 bp, synthetic construct
  misc_feature 1..22: note = chemically synthesized
  source 1..22: mol_type = other DNA
gtttgatgtagcctcacttctt

SEQ ID NO: 89224 - DNA, 22 bp, synthetic construct
  misc_feature 1..22: note = chemically synthesized
  source 1..22: mol_type = other DNA
gatgtagcctcacttctttatt

SEQ ID NO: 89225 - DNA, 22 bp, synthetic construct
  misc_feature 1..22: note = chemically synthesized
  source 1..22: mol_type = other DNA
atgtagcctcacttctttattt

SEQ ID NO: 89226 - DNA, 22 bp, synthetic construct
  misc_feature 1..22: note = chemically synthesized
  source 1..22: mol_type = other DNA
acttctttatttttccttttgt

SEQ ID NO: 89227 - DNA, 22 bp, synthetic construct
  misc_feature 1..22: note = chemically synthesized
  source 1..22: mol_type = other DNA
ctttatttttccttttgttgcc

SEQ ID NO: 89228 - DNA, 22 bp, synthetic construct
  misc_feature 1..22: note = chemically synthesized
  source 1..22: mol_type = other DNA
tttatttttccttttgttgcct

SEQ ID NO: 89229 - DNA, 22 bp, synthetic construct
  misc_feature 1..22: note = chemically synthesized
  source 1..22: mol_type = other DNA
tatttttccttttgttgccttt

SEQ ID NO: 89230 - DNA, 22 bp, synthetic construct
  misc_feature 1..22: note = chemically synthesized
  source 1..22: mol_type = other DNA
atttttccttttgttgcctttg

SEQ ID NO: 89231 - DNA, 22 bp, synthetic construct
  misc_feature 1..22: note = chemically synthesized
  source 1..22: mol_type = other DNA
tttttccttttgttgcctttgc

SEQ ID NO: 89232 - DNA, 22 bp, synthetic construct
  misc_feature 1..22: note = chemically synthesized
  source 1..22: mol_type = other DNA
ttccttttgttgcctttgcttc

SEQ ID NO: 89233 - DNA, 22 bp, synthetic construct
  misc_feature 1..22: note = chemically synthesized
  source 1..22: mol_type = other DNA
tccttttgttgcctttgcttct

SEQ ID NO: 89234 - DNA, 22 bp, synthetic construct
  misc_feature 1..22: note = chemically synthesized
  source 1..22: mol_type = other DNA
ccttttgttgcctttgcttctc

SEQ ID NO: 89235 - DNA, 22 bp, synthetic construct
  misc_feature 1..22: note = chemically synthesized
  source 1..22: mol_type = other DNA
cttttgttgcctttgcttctca

SEQ ID NO: 89236 - DNA, 22 bp, synthetic construct
  misc_feature 1..22: note = chemically synthesized
  source 1..22: mol_type = other DNA
ttgttgcctttgcttctcatat

SEQ ID NO: 89237 - DNA, 22 bp, synthetic construct
  misc_feature 1..22: note = chemically synthesized
  source 1..22: mol_type = other DNA
tgttgcctttgcttctcatatc

SEQ ID NO: 89238 - DNA, 22 bp, synthetic construct
  misc_feature 1..22: note = chemically synthesized
  source 1..22: mol_type = other DNA
gttgcctttgcttctcatatca

SEQ ID NO: 89239 - DNA, 22 bp, synthetic construct
  misc_feature 1..22: note = chemically synthesized
  source 1..22: mol_type = other DNA
ttgcctttgcttctcatatcaa

SEQ ID NO: 89240 - DNA, 22 bp, synthetic construct
  misc_feature 1..22: note = chemically synthesized
  source 1..22: mol_type = other DNA
cctttgcttctcatatcaaatt

SEQ ID NO: 89241 - DNA, 22 bp, synthetic construct
  misc_feature 1..22: note = chemically synthesized
  source 1..22: mol_type = other DNA
tgcttctcatatcaaattcaaa

SEQ ID NO: 89242 - DNA, 22 bp, synthetic construct
  misc_feature 1..22: note = chemically synthesized
  source 1..22: mol_type = other DNA
gcttctcatatcaaattcaaaa

SEQ ID NO: 89243 - DNA, 22 bp, synthetic construct
  misc_feature 1..22: note = chemically synthesized
  source 1..22: mol_type = other DNA
cttctcatatcaaattcaaaaa

SEQ ID NO: 89244 - DNA, 22 bp, synthetic construct
  misc_feature 1..22: note = chemically synthesized
  source 1..22: mol_type = other DNA
ctcatatcaaattcaaaaaacg

SEQ ID NO: 89245 - DNA, 22 bp, synthetic construct
  misc_feature 1..22: note = chemically synthesized
  source 1..22: mol_type = other DNA
tcatatcaaattcaaaaaacgg

SEQ ID NO: 89246 - DNA, 22 bp, synthetic construct
  misc_feature 1..22: note = chemically synthesized
  source 1..22: mol_type = other DNA
atatcaaattcaaaaaacggct

SEQ ID NO: 89247 - DNA, 22 bp, synthetic construct
  misc_feature 1..22: note = chemically synthesized
  source 1..22: mol_type = other DNA
aaaaaacggctgcaacgtgaat

SEQ ID NO: 89248 - DNA, 22 bp, synthetic construct
  misc_feature 1..22: note = chemically synthesized
  source 1..22: mol_type = other DNA
caacgtgaatattagaattttc

SEQ ID NO: 89249 - DNA, 22 bp, synthetic construct
  misc_feature 1..22: note = chemically synthesized
  source 1..22: mol_type = other DNA
gaattttcttcttttgatttct

SEQ ID NO: 89250 - DNA, 22 bp, synthetic construct
  misc_feature 1..22: note = chemically synthesized
  source 1..22: mol_type = other DNA
tcttcttttgatttctttaaaa

SEQ ID NO: 89251 - DNA, 22 bp, synthetic construct
  misc_feature 1..22: note = chemically synthesized
  source 1..22: mol_type = other DNA
cttcttttgatttctttaaaaa

SEQ ID NO: 89252 - DNA, 22 bp, synthetic construct
  misc_feature 1..22: note = chemically synthesized
  source 1..22: mol_type = other DNA
ttcttttgatttctttaaaaat

SEQ ID NO: 89253 - DNA, 22 bp, synthetic construct
  misc_feature 1..22: note = chemically synthesized
  source 1..22: mol_type = other DNA
cttttgatttctttaaaaattt

SEQ ID NO: 89254 - DNA, 22 bp, synthetic construct
  misc_feature 1..22: note = chemically synthesized
  source 1..22: mol_type = other DNA
ttttgatttctttaaaaatttt

SEQ ID NO: 89255 - DNA, 22 bp, synthetic construct
  misc_feature 1..22: note = chemically synthesized
  source 1..22: mol_type = other DNA
ttgatttctttaaaaattttta

SEQ ID NO: 89256 - DNA, 22 bp, synthetic construct
  misc_feature 1..22: note = chemically synthesized
  source 1..22: mol_type = other DNA
tgatttctttaaaaatttttat

SEQ ID NO: 89257 - DNA, 22 bp, synthetic construct
  misc_feature 1..22: note = chemically synthesized
  source 1..22: mol_type = other DNA
gatttctttaaaaatttttatg

SEQ ID NO: 89258 - DNA, 22 bp, synthetic construct
  misc_feature 1..22: note = chemically synthesized
  source 1..22: mol_type = other DNA
atttctttaaaaatttttatgg

SEQ ID NO: 89259 - DNA, 22 bp, synthetic construct
  misc_feature 1..22: note = chemically synthesized
  source 1..22: mol_type = other DNA
ctttaaaaatttttatggtttt

SEQ ID NO: 89260 - DNA, 22 bp, synthetic construct
  misc_feature 1..22: note = chemically synthesized
  source 1..22: mol_type = other DNA
tttaaaaatttttatggtttta

SEQ ID NO: 89261 - DNA, 22 bp, synthetic construct
  misc_feature 1..22: note = chemically synthesized
  source 1..22: mol_type = other DNA
taaaaatttttatggttttagg

SEQ ID NO: 89262 - DNA, 22 bp, synthetic construct
  misc_feature 1..22: note = chemically synthesized
  source 1..22: mol_type = other DNA
aaaaatttttatggttttaggt

SEQ ID NO: 89263 - DNA, 22 bp, synthetic construct
  misc_feature 1..22: note = chemically synthesized
  source 1..22: mol_type = other DNA
aaaatttttatggttttaggtc

SEQ ID NO: 89264 - DNA, 22 bp, synthetic construct
  misc_feature 1..22: note = chemically synthesized
  source 1..22: mol_type = other DNA
ttatggttttaggtcttagttt

SEQ ID NO: 89265 - DNA, 22 bp, synthetic construct
  misc_feature 1..22: note = chemically synthesized
  source 1..22: mol_type = other DNA
tatggttttaggtcttagttta

SEQ ID NO: 89266 - DNA, 22 bp, synthetic construct
  misc_feature 1..22: note = chemically synthesized
  source 1..22: mol_type = other DNA
atggttttaggtcttagtttaa

SEQ ID NO: 89267 - DNA, 22 bp, synthetic construct
  misc_feature 1..22: note = chemically synthesized
  source 1..22: mol_type = other DNA
tggttttaggtcttagtttaat

SEQ ID NO: 89268 - DNA, 22 bp, synthetic construct
  misc_feature 1..22: note = chemically synthesized
  source 1..22: mol_type = other DNA
taggtcttagtttaattcttta

SEQ ID NO: 89269 - DNA, 22 bp, synthetic construct
  misc_feature 1..22: note = chemically synthesized
  source 1..22: mol_type = other DNA
aggtcttagtttaattctttaa

SEQ ID NO: 89270 - DNA, 22 bp, synthetic construct
  misc_feature 1..22: note = chemically synthesized
  source 1..22: mol_type = other DNA
ggtcttagtttaattctttaac

SEQ ID NO: 89271 - DNA, 22 bp, synthetic construct
  misc_feature 1..22: note = chemically synthesized
  source 1..22: mol_type = other DNA
agtttaattctttaacccattc

SEQ ID NO: 89272 - DNA, 22 bp, synthetic construct
  misc_feature 1..22: note = chemically synthesized
  source 1..22: mol_type = other DNA
gtttaattctttaacccattca

SEQ ID NO: 89273 - DNA, 22 bp, synthetic construct
  misc_feature 1..22: note = chemically synthesized
  source 1..22: mol_type = other DNA
aattctttaacccattcaaatt

SEQ ID NO: 89274 - DNA, 22 bp, synthetic construct
  misc_feature 1..22: note = chemically synthesized
  source 1..22: mol_type = other DNA
attctttaacccattcaaattt

SEQ ID NO: 89275 - DNA, 22 bp, synthetic construct
  misc_feature 1..22: note = chemically synthesized
  source 1..22: mol_type = other DNA
tttaacccattcaaatttattt

SEQ ID NO: 89276 - DNA, 22 bp, synthetic construct
  misc_feature 1..22: note = chemically synthesized
  source 1..22: mol_type = other DNA
taacccattcaaatttattttt

SEQ ID NO: 89277 - DNA, 22 bp, synthetic construct
  misc_feature 1..22: note = chemically synthesized
  source 1..22: mol_type = other DNA
aacccattcaaatttatttttg

SEQ ID NO: 89278 - DNA, 22 bp, synthetic construct
  misc_feature 1..22: note = chemically synthesized
  source 1..22: mol_type = other DNA
acccattcaaatttatttttgt

SEQ ID NO: 89279 - DNA, 22 bp, synthetic construct
  misc_feature 1..22: note = chemically synthesized
  source 1..22: mol_type = other DNA
aaatttatttttgtttatggtg

SEQ ID NO: 89280 - DNA, 22 bp, synthetic construct
  misc_feature 1..22: note = chemically synthesized
  source 1..22: mol_type = other DNA
atttttgtttatggtgtaagac

SEQ ID NO: 89281 - DNA, 22 bp, synthetic construct
  misc_feature 1..22: note = chemically synthesized
  source 1..22: mol_type = other DNA
tttttgtttatggtgtaagaca

SEQ ID NO: 89282 - DNA, 22 bp, synthetic construct
  misc_feature 1..22: note = chemically synthesized
  source 1..22: mol_type = other DNA
ttgtttatggtgtaagacaagg

SEQ ID NO: 89283 - DNA, 22 bp, synthetic construct
  misc_feature 1..22: note = chemically synthesized
  source 1..22: mol_type = other DNA
tgtttatggtgtaagacaaggg

SEQ ID NO: 89284 - DNA, 22 bp, synthetic construct
  misc_feature 1..22: note = chemically synthesized
  source 1..22: mol_type = other DNA
gtttatggtgtaagacaagggt

SEQ ID NO: 89285 - DNA, 22 bp, synthetic construct
  misc_feature 1..22: note = chemically synthesized
  source 1..22: mol_type = other DNA
tttatggtgtaagacaagggtc

SEQ ID NO: 89286 - DNA, 22 bp, synthetic construct
  misc_feature 1..22: note = chemically synthesized
  source 1..22: mol_type = other DNA
atggtgtaagacaagggtctga

SEQ ID NO: 89287 - DNA, 22 bp, synthetic construct
  misc_feature 1..22: note = chemically synthesized
  source 1..22: mol_type = other DNA
tggtgtaagacaagggtctgat

SEQ ID NO: 89288 - DNA, 22 bp, synthetic construct
  misc_feature 1..22: note = chemically synthesized
  source 1..22: mol_type = other DNA
atttcatttcattttgagggtt

SEQ ID NO: 89289 - DNA, 22 bp, synthetic construct
  misc_feature 1..22: note = chemically synthesized
  source 1..22: mol_type = other DNA
catttcattttgagggtttcac

SEQ ID NO: 89290 - DNA, 22 bp, synthetic construct
  misc_feature 1..22: note = chemically synthesized
  source 1..22: mol_type = other DNA
atttcattttgagggtttcacc

SEQ ID NO: 89291 - DNA, 22 bp, synthetic construct
  misc_feature 1..22: note = chemically synthesized
  source 1..22: mol_type = other DNA
cattttgagggtttcaccctct

SEQ ID NO: 89292 - DNA, 22 bp, synthetic construct
  misc_feature 1..22: note = chemically synthesized
  source 1..22: mol_type = other DNA
attttgagggtttcaccctctc

SEQ ID NO: 89293 - DNA, 22 bp, synthetic construct
  misc_feature 1..22: note = chemically synthesized
  source 1..22: mol_type = other DNA
tgagggtttcaccctctcatat

SEQ ID NO: 89294 - DNA, 22 bp, synthetic construct
  misc_feature 1..22: note = chemically synthesized
  source 1..22: mol_type = other DNA
gagggtttcaccctctcatata

SEQ ID NO: 89295 - DNA, 22 bp, synthetic construct
  misc_feature 1..22: note = chemically synthesized
  source 1..22: mol_type = other DNA
agggtttcaccctctcatataa

SEQ ID NO: 89296 - DNA, 22 bp, synthetic construct
  misc_feature 1..22: note = chemically synthesized
  source 1..22: mol_type = other DNA
caccctctcatataataaaatt

SEQ ID NO: 89297 - DNA, 22 bp, synthetic construct
  misc_feature 1..22: note = chemically synthesized
  source 1..22: mol_type = other DNA
accctctcatataataaaattc

SEQ ID NO: 89298 - DNA, 22 bp, synthetic construct
  misc_feature 1..22: note = chemically synthesized
  source 1..22: mol_type = other DNA
tcatataataaaattcttctat

SEQ ID NO: 89299 - DNA, 22 bp, synthetic construct
  misc_feature 1..22: note = chemically synthesized
  source 1..22: mol_type = other DNA
atataataaaattcttctatat

SEQ ID NO: 89300 - DNA, 22 bp, synthetic construct
  misc_feature 1..22: note = chemically synthesized
  source 1..22: mol_type = other DNA
ttctatatacccttctatcatc

SEQ ID NO: 89301 - DNA, 22 bp, synthetic construct
  misc_feature 1..22: note = chemically synthesized
  source 1..22: mol_type = other DNA
ctatatacccttctatcatcac

SEQ ID NO: 89302 - DNA, 22 bp, synthetic construct
  misc_feature 1..22: note = chemically synthesized
  source 1..22: mol_type = other DNA
tatatacccttctatcatcact

SEQ ID NO: 89303 - DNA, 22 bp, synthetic construct
  misc_feature 1..22: note = chemically synthesized
  source 1..22: mol_type = other DNA
tatacccttctatcatcactta

SEQ ID NO: 89304 - DNA, 22 bp, synthetic construct
  misc_feature 1..22: note = chemically synthesized
  source 1..22: mol_type = other DNA
ctatcatcacttattactgatt

SEQ ID NO: 89305 - DNA, 22 bp, synthetic construct
  misc_feature 1..22: note = chemically synthesized
  source 1..22: mol_type = other DNA
tatcatcacttattactgatta

SEQ ID NO: 89306 - DNA, 22 bp, synthetic construct
  misc_feature 1..22: note = chemically synthesized
  source 1..22: mol_type = other DNA
tcatcacttattactgattata

SEQ ID NO: 89307 - DNA, 22 bp, synthetic construct
  misc_feature 1..22: note = chemically synthesized
  source 1..22: mol_type = other DNA
attactgattatatgccttgat

SEQ ID NO: 89308 - DNA, 22 bp, synthetic construct
  misc_feature 1..22: note = chemically synthesized
  source 1..22: mol_type = other DNA
ttactgattatatgccttgatt

SEQ ID NO: 89309 - DNA, 22 bp, synthetic construct
  misc_feature 1..22: note = chemically synthesized
  source 1..22: mol_type = other DNA
ctgattatatgccttgatttca

SEQ ID NO: 89310 - DNA, 22 bp, synthetic construct
  misc_feature 1..22: note = chemically synthesized
  source 1..22: mol_type = other DNA
attatatgccttgatttcagaa

SEQ ID NO: 89311 - DNA, 22 bp, synthetic construct
  misc_feature 1..22: note = chemically synthesized
  source 1..22: mol_type = other DNA
tatgccttgatttcagaatctt

SEQ ID NO: 89312 - DNA, 22 bp, synthetic construct
  misc_feature 1..22: note = chemically synthesized
  source 1..22: mol_type = other DNA
gatttcagaatcttgccaacta

SEQ ID NO: 89313 - DNA, 22 bp, synthetic construct
  misc_feature 1..22: note = chemically synthesized
  source 1..22: mol_type = other DNA
atttcagaatcttgccaactag

SEQ ID NO: 89314 - DNA, 22 bp, synthetic construct
  misc_feature 1..22: note = chemically synthesized
  source 1..22: mol_type = other DNA
cagaatcttgccaactagattc

SEQ ID NO: 89315 - DNA, 22 bp, synthetic construct
  misc_feature 1..22: note = chemically synthesized
  source 1..22: mol_type = other DNA
agaatcttgccaactagattca

SEQ ID NO: 89316 - DNA, 22 bp, synthetic construct
  misc_feature 1..22: note = chemically synthesized
  source 1..22: mol_type = other DNA
gccaactagattcagaatttga

SEQ ID NO: 89317 - DNA, 22 bp, synthetic construct
  misc_feature 1..22: note = chemically synthesized
  source 1..22: mol_type = other DNA
ccaactagattcagaatttgac

SEQ ID NO: 89318 - DNA, 22 bp, synthetic construct
  misc_feature 1..22: note = chemically synthesized
  source 1..22: mol_type = other DNA
gattcagaatttgactgggaga

SEQ ID NO: 89319 - DNA, 22 bp, synthetic construct
  misc_feature 1..22: note = chemically synthesized
  source 1..22: mol_type = other DNA
agaatttgactgggagagagga

SEQ ID NO: 89320 - DNA, 22 bp, synthetic construct
  misc_feature 1..22: note = chemically synthesized
  source 1..22: mol_type = other DNA
gactgggagagaggacaaggac

SEQ ID NO: 89321 - DNA, 22 bp, synthetic construct
  misc_feature 1..22: note = chemically synthesized
  source 1..22: mol_type = other DNA
actgggagagaggacaaggacc

SEQ ID NO: 89322 - DNA, 22 bp, synthetic construct
  misc_feature 1..22: note = chemically synthesized
  source 1..22: mol_type = other DNA
ggagagaggacaaggaccactt

SEQ ID NO: 89323 - DNA, 22 bp, synthetic construct
  misc_feature 1..22: note = chemically synthesized
  source 1..22: mol_type = other DNA
gagactcatattttatttccag

SEQ ID NO: 89324 - DNA, 22 bp, synthetic construct
  misc_feature 1..22: note = chemically synthesized
  source 1..22: mol_type = other DNA
agactcatattttatttccaga

SEQ ID NO: 89325 - DNA, 22 bp, synthetic construct
  misc_feature 1..22: note = chemically synthesized
  source 1..22: mol_type = other DNA
atattttatttccagaatctag

SEQ ID NO: 89326 - DNA, 22 bp, synthetic construct
  misc_feature 1..22: note = chemically synthesized
  source 1..22: mol_type = other DNA
tatttccagaatctagcatcta

SEQ ID NO: 89327 - DNA, 22 bp, synthetic construct
  misc_feature 1..22: note = chemically synthesized
  source 1..22: mol_type = other DNA
atttccagaatctagcatctac

SEQ ID NO: 89328 - DNA, 22 bp, synthetic construct
  misc_feature 1..22: note = chemically synthesized
  source 1..22: mol_type = other DNA
tttccagaatctagcatctacc

SEQ ID NO: 89329 - DNA, 22 bp, synthetic construct
  misc_feature 1..22: note = chemically synthesized
  source 1..22: mol_type = other DNA
ccagaatctagcatctacctac

SEQ ID NO: 89330 - DNA, 22 bp, synthetic construct
  misc_feature 1..22: note = chemically synthesized
  source 1..22: mol_type = other DNA
cagaatctagcatctacctacc

SEQ ID NO: 89331 - DNA, 22 bp, synthetic construct
  misc_feature 1..22: note = chemically synthesized
  source 1..22: mol_type = other DNA
gcatctacctacctaggtattg

SEQ ID NO: 89332 - DNA, 22 bp, synthetic construct
  misc_feature 1..22: note = chemically synthesized
  source 1..22: mol_type = other DNA
cctacctaggtattgaataaga

SEQ ID NO: 89333 - DNA, 22 bp, synthetic construct
  misc_feature 1..22: note = chemically synthesized
  source 1..22: mol_type = other DNA
cctaggtattgaataagaaaaa

SEQ ID NO: 89334 - DNA, 22 bp, synthetic construct
  misc_feature 1..22: note = chemically synthesized
  source 1..22: mol_type = other DNA
ggtattgaataagaaaaatgaa

SEQ ID NO: 89335 - DNA, 22 bp, synthetic construct
  misc_feature 1..22: note = chemically synthesized
  source 1..22: mol_type = other DNA
aataagaaaaatgaagttaagg

SEQ ID NO: 89336 - DNA, 22 bp, synthetic construct
  misc_feature 1..22: note = chemically synthesized
  source 1..22: mol_type = other DNA
aggtggttgatggtaacactat

SEQ ID NO: 89337 - DNA, 22 bp, synthetic construct
  misc_feature 1..22: note = chemically synthesized
  source 1..22: mol_type = other DNA
atggtaacactatgctaataac

SEQ ID NO: 89338 - DNA, 22 bp, synthetic construct
  misc_feature 1..22: note = chemically synthesized
  source 1..22: mol_type = other DNA
tgctaataactgcagagccaga

SEQ ID NO: 89339 - DNA, 22 bp, synthetic construct
  misc_feature 1..22: note = chemically synthesized
  source 1..22: mol_type = other DNA
ataactgcagagccagaagcac

SEQ ID NO: 89340 - DNA, 22 bp, synthetic construct
  misc_feature 1..22: note = chemically synthesized
  source 1..22: mol_type = other DNA
cagagccagaagcaccataagg

SEQ ID NO: 89341 - DNA, 22 bp, synthetic construct
  misc_feature 1..22: note = chemically synthesized
  source 1..22: mol_type = other DNA
tgatctcttcctgaatgctaat

SEQ ID NO: 89342 - DNA, 22 bp, synthetic construct
  misc_feature 1..22: note = chemically synthesized
  source 1..22: mol_type = other DNA
atctcttcctgaatgctaatct

SEQ ID NO: 89343 - DNA, 22 bp, synthetic construct
  misc_feature 1..22: note = chemically synthesized
  source 1..22: mol_type = other DNA
ttcctgaatgctaatcttaaac

SEQ ID NO: 89344 - DNA, 22 bp, synthetic construct
  misc_feature 1..22: note = chemically synthesized
  source 1..22: mol_type = other DNA
cctgaatgctaatcttaaacat

SEQ ID NO: 89345 - DNA, 22 bp, synthetic construct
  misc_feature 1..22: note = chemically synthesized
  source 1..22: mol_type = other DNA
ctgaatgctaatcttaaacatc

SEQ ID NO: 89346 - DNA, 22 bp, synthetic construct
  misc_feature 1..22: note = chemically synthesized
  source 1..22: mol_type = other DNA
aatgctaatcttaaacatcctg

SEQ ID NO: 89347 - DNA, 22 bp, synthetic construct
  misc_feature 1..22: note = chemically synthesized
  source 1..22: mol_type = other DNA
atcttaaacatcctgaggaaga

SEQ ID NO: 89348 - DNA, 22 bp, synthetic construct
  misc_feature 1..22: note = chemically synthesized
  source 1..22: mol_type = other DNA
aaacatcctgaggaagaatggg

SEQ ID NO: 89349 - DNA, 22 bp, synthetic construct
  misc_feature 1..22: note = chemically synthesized
  source 1..22: mol_type = other DNA
aacatcctgaggaagaatggga

SEQ ID NO: 89350 - DNA, 22 bp, synthetic construct
  misc_feature 1..22: note = chemically synthesized
  source 1..22: mol_type = other DNA
aggaagaatgggacttccattt

SEQ ID NO: 89351 - DNA, 22 bp, synthetic construct
  misc_feature 1..22: note = chemically synthesized
  source 1..22: mol_type = other DNA
ccatttggggtgggcctatgac

SEQ ID NO: 89352 - DNA, 22 bp, synthetic construct
  misc_feature 1..22: note = chemically synthesized
  source 1..22: mol_type = other DNA
catttggggtgggcctatgaca

SEQ ID NO: 89353 - DNA, 22 bp, synthetic construct
  misc_feature 1..22: note = chemically synthesized
  source 1..22: mol_type = other DNA
ggggtgggcctatgacagggta

SEQ ID NO: 89354 - DNA, 22 bp, synthetic construct
  misc_feature 1..22: note = chemically synthesized
  source 1..22: mol_type = other DNA
gggtgggcctatgacagggtaa

SEQ ID NO: 89355 - DNA, 22 bp, synthetic construct
  misc_feature 1..22: note = chemically synthesized
  source 1..22: mol_type = other DNA
tgacagggtaataagacagtag

SEQ ID NO: 89356 - DNA, 22 bp, synthetic construct
  misc_feature 1..22: note = chemically synthesized
  source 1..22: mol_type = other DNA
caaaaagccgcctttcaaattc

SEQ ID NO: 89357 - DNA, 22 bp, synthetic construct
  misc_feature 1..22: note = chemically synthesized
  source 1..22: mol_type = other DNA
tcaaattcttctcagtcctaac

SEQ ID NO: 89358 - DNA, 22 bp, synthetic construct
  misc_feature 1..22: note = chemically synthesized
  source 1..22: mol_type = other DNA
caaattcttctcagtcctaact

SEQ ID NO: 89359 - DNA, 22 bp, synthetic construct
  misc_feature 1..22: note = chemically synthesized
  source 1..22: mol_type = other DNA
aaattcttctcagtcctaactt

SEQ ID NO: 89360 - DNA, 22 bp, synthetic construct
  misc_feature 1..22: note = chemically synthesized
  source 1..22: mol_type = other DNA
ttctcagtcctaacttttcata

SEQ ID NO: 89361 - DNA, 22 bp, synthetic construct
  misc_feature 1..22: note = chemically synthesized
  source 1..22: mol_type = other DNA
ctcagtcctaacttttcatact

SEQ ID NO: 89362 - DNA, 22 bp, synthetic construct
  misc_feature 1..22: note = chemically synthesized
  source 1..22: mol_type = other DNA
tcagtcctaacttttcatacta

SEQ ID NO: 89363 - DNA, 22 bp, synthetic construct
  misc_feature 1..22: note = chemically synthesized
  source 1..22: mol_type = other DNA
agtcctaacttttcatactaag

SEQ ID NO: 89364 - DNA, 22 bp, synthetic construct
  misc_feature 1..22: note = chemically synthesized
  source 1..22: mol_type = other DNA
acttttcatactaagcccagtc

SEQ ID NO: 89365 - DNA, 22 bp, synthetic construct
  misc_feature 1..22: note = chemically synthesized
  source 1..22: mol_type = other DNA
ttcatactaagcccagtccttc

SEQ ID NO: 89366 - DNA, 22 bp, synthetic construct
  misc_feature 1..22: note = chemically synthesized
  source 1..22: mol_type = other DNA
tcatactaagcccagtccttcc

SEQ ID NO: 89367 - DNA, 22 bp, synthetic construct
  misc_feature 1..22: note = chemically synthesized
  source 1..22: mol_type = other DNA
catactaagcccagtccttcca

SEQ ID NO: 89368 - DNA, 22 bp, synthetic construct
  misc_feature 1..22: note = chemically synthesized
  source 1..22: mol_type = other DNA
atactaagcccagtccttccaa

SEQ ID NO: 89369 - DNA, 22 bp, synthetic construct
  misc_feature 1..22: note = chemically synthesized
  source 1..22: mol_type = other DNA
agcccagtccttccaaagcaga

SEQ ID NO: 89370 - DNA, 22 bp, synthetic construct
  misc_feature 1..22: note = chemically synthesized
  source 1..22: mol_type = other DNA
ccaaagcagactgtgaaagagt

SEQ ID NO: 89371 - DNA, 22 bp, synthetic construct
  misc_feature 1..22: note = chemically synthesized
  source 1..22: mol_type = other DNA
caaagcagactgtgaaagagtg

SEQ ID NO: 89372 - DNA, 22 bp, synthetic construct
  misc_feature 1..22: note = chemically synthesized
  source 1..22: mol_type = other DNA
tgaaagagtgatagttccggga

SEQ ID NO: 89373 - DNA, 22 bp, synthetic construct
  misc_feature 1..22: note = chemically synthesized
  source 1..22: mol_type = other DNA
cgggagactagcactgcagatt

SEQ ID NO: 89374 - DNA, 22 bp, synthetic construct
  misc_feature 1..22: note = chemically synthesized
  source 1..22: mol_type = other DNA
gcactgcagattccgggtcact

SEQ ID NO: 89375 - DNA, 22 bp, synthetic construct
  misc_feature 1..22: note = chemically synthesized
  source 1..22: mol_type = other DNA
cagattccgggtcactgtgagt

SEQ ID NO: 89376 - DNA, 22 bp, synthetic construct
  misc_feature 1..22: note = chemically synthesized
  source 1..22: mol_type = other DNA
cgggtcactgtgagtgggggag

SEQ ID NO: 89377 - DNA, 22 bp, synthetic construct
  misc_feature 1..22: note = chemically synthesized
  source 1..22: mol_type = other DNA
tgagtgggggaggcagggaaga

SEQ ID NO: 89378 - DNA, 22 bp, synthetic construct
  misc_feature 1..22: note = chemically synthesized
  source 1..22: mol_type = other DNA
acaggacagtcaaaccatgacc

SEQ ID NO: 89379 - DNA, 22 bp, synthetic construct
  misc_feature 1..22: note = chemically synthesized
  source 1..22: mol_type = other DNA
tttttccttcttcaagtagacc

SEQ ID NO: 89380 - DNA, 22 bp, synthetic construct
  misc_feature 1..22: note = chemically synthesized
  source 1..22: mol_type = other DNA
ttccttcttcaagtagacctct

SEQ ID NO: 89381 - DNA, 22 bp, synthetic construct
  misc_feature 1..22: note = chemically synthesized
  source 1..22: mol_type = other DNA
tccttcttcaagtagacctcta

SEQ ID NO: 89382 - DNA, 22 bp, synthetic construct
  misc_feature 1..22: note = chemically synthesized
  source 1..22: mol_type = other DNA
ccttcttcaagtagacctctat

SEQ ID NO: 89383 - DNA, 22 bp, synthetic construct
  misc_feature 1..22: note = chemically synthesized
  source 1..22: mol_type = other DNA
cttcttcaagtagacctctata

SEQ ID NO: 89384 - DNA, 22 bp, synthetic construct
  misc_feature 1..22: note = chemically synthesized
  source 1..22: mol_type = other DNA
cttcaagtagacctctataaga

SEQ ID NO: 89385 - DNA, 22 bp, synthetic construct
  misc_feature 1..22: note = chemically synthesized
  source 1..22: mol_type = other DNA
ttcaagtagacctctataagac

SEQ ID NO: 89386 - DNA, 22 bp, synthetic construct
  misc_feature 1..22: note = chemically synthesized
  source 1..22: mol_type = other DNA
caagtagacctctataagacaa

SEQ ID NO: 89387 - DNA, 22 bp, synthetic construct
  misc_feature 1..22: note = chemically synthesized
  source 1..22: mol_type = other DNA
aagtagacctctataagacaac

SEQ ID NO: 89388 - DNA, 22 bp, synthetic construct
  misc_feature 1..22: note = chemically synthesized
  source 1..22: mol_type = other DNA
tataagacaacagagacaacta

SEQ ID NO: 89389 - DNA, 22 bp, synthetic construct
  misc_feature 1..22: note = chemically synthesized
  source 1..22: mol_type = other DNA
taagacaacagagacaactaag

SEQ ID NO: 89390 - DNA, 22 bp, synthetic construct
  misc_feature 1..22: note = chemically synthesized
  source 1..22: mol_type = other DNA
aggctgagtggccaggcgagga

SEQ ID NO: 89391 - DNA, 22 bp, synthetic construct
  misc_feature 1..22: note = chemically synthesized
  source 1..22: mol_type = other DNA
agtggccaggcgaggagaaacc

SEQ ID NO: 89392 - DNA, 22 bp, synthetic construct
  misc_feature 1..22: note = chemically synthesized
  source 1..22: mol_type = other DNA
gccgtaaaacatggaaggaaca

SEQ ID NO: 89393 - DNA, 22 bp, synthetic construct
  misc_feature 1..22: note = chemically synthesized
  source 1..22: mol_type = other DNA
caggggaaaggtggtatctcta

SEQ ID NO: 89394 - DNA, 22 bp, synthetic construct
  misc_feature 1..22: note = chemically synthesized
  source 1..22: mol_type = other DNA
aggggaaaggtggtatctctaa

SEQ ID NO: 89395 - DNA, 22 bp, synthetic construct
  misc_feature 1..22: note = chemically synthesized
  source 1..22: mol_type = other DNA
taagcaagagaactgagtggag

SEQ ID NO: 89396 - DNA, 22 bp, synthetic construct
  misc_feature 1..22: note = chemically synthesized
  source 1..22: mol_type = other DNA
agcaagagaactgagtggagtc

SEQ ID NO: 89397 - DNA, 22 bp, synthetic construct
  misc_feature 1..22: note = chemically synthesized
  source 1..22: mol_type = other DNA
agtggagtcaaggctgagagat

SEQ ID NO: 89398 - DNA, 22 bp, synthetic construct
  misc_feature 1..22: note = chemically synthesized
  source 1..22: mol_type = other DNA
agagatgcaggataagcaaatg

SEQ ID NO: 89399 - DNA, 22 bp, synthetic construct
  misc_feature 1..22: note = chemically synthesized
  source 1..22: mol_type = other DNA
atgaggacagctaaaacaataa

SEQ ID NO: 89400 - DNA, 22 bp, synthetic construct
  misc_feature 1..22: note = chemically synthesized
  source 1..22: mol_type = other DNA
aaacaataagtaatgtaaaata

SEQ ID NO: 89401 - DNA, 22 bp, synthetic construct
  misc_feature 1..22: note = chemically synthesized
  source 1..22: mol_type = other DNA
taacctccaaatcaagcctcta

SEQ ID NO: 89402 - DNA, 22 bp, synthetic construct
  misc_feature 1..22: note = chemically synthesized
  source 1..22: mol_type = other DNA
aacctccaaatcaagcctctac

SEQ ID NO: 89403 - DNA, 22 bp, synthetic construct
  misc_feature 1..22: note = chemically synthesized
  source 1..22: mol_type = other DNA
acctccaaatcaagcctctact

SEQ ID NO: 89404 - DNA, 22 bp, synthetic construct
  misc_feature 1..22: note = chemically synthesized
  source 1..22: mol_type = other DNA
caaatcaagcctctacttgaat

SEQ ID NO: 89405 - DNA, 22 bp, synthetic construct
  misc_feature 1..22: note = chemically synthesized
  source 1..22: mol_type = other DNA
tacttgaatccttttctgaggg

SEQ ID NO: 89406 - DNA, 22 bp, synthetic construct
  misc_feature 1..22: note = chemically synthesized
  source 1..22: mol_type = other DNA
cttgaatccttttctgagggat

SEQ ID NO: 89407 - DNA, 22 bp, synthetic construct
  misc_feature 1..22: note = chemically synthesized
  source 1..22: mol_type = other DNA
gaatccttttctgagggatgaa

SEQ ID NO: 89408 - DNA, 22 bp, synthetic construct
  misc_feature 1..22: note = chemically synthesized
  source 1..22: mol_type = other DNA
aatccttttctgagggatgaat

SEQ ID NO: 89409 - DNA, 22 bp, synthetic construct
  misc_feature 1..22: note = chemically synthesized
  source 1..22: mol_type = other DNA
ttctgagggatgaataaggcat

SEQ ID NO: 89410 - DNA, 22 bp, synthetic construct
  misc_feature 1..22: note = chemically synthesized
  source 1..22: mol_type = other DNA
tctgagggatgaataaggcata

SEQ ID NO: 89411 - DNA, 22 bp, synthetic construct
  misc_feature 1..22: note = chemically synthesized
  source 1..22: mol_type = other DNA
ctgagggatgaataaggcatat

SEQ ID NO: 89412 - DNA, 22 bp, synthetic construct
  misc_feature 1..22: note = chemically synthesized
  source 1..22: mol_type = other DNA
tgagggatgaataaggcatatg

SEQ ID NO: 89413 - DNA, 22 bp, synthetic construct
  misc_feature 1..22: note = chemically synthesized
  source 1..22: mol_type = other DNA
agggatgaataaggcatatgca

SEQ ID NO: 89414 - DNA, 22 bp, synthetic construct
  misc_feature 1..22: note = chemically synthesized
  source 1..22: mol_type = other DNA
ttgccaatgtgcattagctgtt

SEQ ID NO: 89415 - DNA, 22 bp, synthetic construct
  misc_feature 1..22: note = chemically synthesized
  source 1..22: mol_type = other DNA
ccaatgtgcattagctgtttgc

SEQ ID NO: 89416 - DNA, 22 bp, synthetic construct
  misc_feature 1..22: note = chemically synthesized
  source 1..22: mol_type = other DNA
gctgtttgcagcctcaccttct

SEQ ID NO: 89417 - DNA, 22 bp, synthetic construct
  misc_feature 1..22: note = chemically synthesized
  source 1..22: mol_type = other DNA
tttgcagcctcaccttctttca

SEQ ID NO: 89418 - DNA, 22 bp, synthetic construct
  misc_feature 1..22: note = chemically synthesized
  source 1..22: mol_type = other DNA
gcagcctcaccttctttcatgg

SEQ ID NO: 89419 - DNA, 22 bp, synthetic construct
  misc_feature 1..22: note = chemically synthesized
  source 1..22: mol_type = other DNA
cagcctcaccttctttcatgga

SEQ ID NO: 89420 - DNA, 22 bp, synthetic construct
  misc_feature 1..22: note = chemically synthesized
  source 1..22: mol_type = other DNA
accttctttcatggagtttaag

SEQ ID NO: 89421 - DNA, 22 bp, synthetic construct
  misc_feature 1..22: note = chemically synthesized
  source 1..22: mol_type = other DNA
ctttcatggagtttaagatata

SEQ ID NO: 89422 - DNA, 22 bp, synthetic construct
  misc_feature 1..22: note = chemically synthesized
  source 1..22: mol_type = other DNA
tttcatggagtttaagatatag

SEQ ID NO: 89423 - DNA, 22 bp, synthetic construct
  misc_feature 1..22: note = chemically synthesized
  source 1..22: mol_type = other DNA
tcatggagtttaagatatagtg

SEQ ID NO: 89424 - DNA, 22 bp, synthetic construct
  misc_feature 1..22: note = chemically synthesized
  source 1..22: mol_type = other DNA
catggagtttaagatatagtgt

SEQ ID NO: 89425 - DNA, 22 bp, synthetic construct
  misc_feature 1..22: note = chemically synthesized
  source 1..22: mol_type = other DNA
atggagtttaagatatagtgta

SEQ ID NO: 89426 - DNA, 22 bp, synthetic construct
  misc_feature 1..22: note = chemically synthesized
  source 1..22: mol_type = other DNA
aagatatagtgtattttcccaa

SEQ ID NO: 89427 - DNA, 22 bp, synthetic construct
  misc_feature 1..22: note = chemically synthesized
  source 1..22: mol_type = other DNA
agatatagtgtattttcccaag

SEQ ID NO: 89428 - DNA, 22 bp, synthetic construct
  misc_feature 1..22: note = chemically synthesized
  source 1..22: mol_type = other DNA
tcccaaggtttgaactagctct

SEQ ID NO: 89429 - DNA, 22 bp, synthetic construct
  misc_feature 1..22: note = chemically synthesized
  source 1..22: mol_type = other DNA
cccaaggtttgaactagctctt

SEQ ID NO: 89430 - DNA, 22 bp, synthetic construct
  misc_feature 1..22: note = chemically synthesized
  source 1..22: mol_type = other DNA
ccaaggtttgaactagctcttc

SEQ ID NO: 89431 - DNA, 22 bp, synthetic construct
  misc_feature 1..22: note = chemically synthesized
  source 1..22: mol_type = other DNA
gaactagctcttcatttcttta

SEQ ID NO: 89432 - DNA, 22 bp, synthetic construct
  misc_feature 1..22: note = chemically synthesized
  source 1..22: mol_type = other DNA
aactagctcttcatttctttat

SEQ ID NO: 89433 - DNA, 22 bp, synthetic construct
  misc_feature 1..22: note = chemically synthesized
  source 1..22: mol_type = other DNA
gctcttcatttctttatgtttt

SEQ ID NO: 89434 - DNA, 22 bp, synthetic construct
  misc_feature 1..22: note = chemically synthesized
  source 1..22: mol_type = other DNA
ttcatttctttatgttttaaat

SEQ ID NO: 89435 - DNA, 22 bp, synthetic construct
  misc_feature 1..22: note = chemically synthesized
  source 1..22: mol_type = other DNA
catttctttatgttttaaatgc

SEQ ID NO: 89436 - DNA, 22 bp, synthetic construct
  misc_feature 1..22: note = chemically synthesized
  source 1..22: mol_type = other DNA
atttctttatgttttaaatgca

SEQ ID NO: 89437 - DNA, 22 bp, synthetic construct
  misc_feature 1..22: note = chemically synthesized
  source 1..22: mol_type = other DNA
ctttatgttttaaatgcactga

SEQ ID NO: 89438 - DNA, 22 bp, synthetic construct
  misc_feature 1..22: note = chemically synthesized
  source 1..22: mol_type = other DNA
tttatgttttaaatgcactgac

SEQ ID NO: 89439 - DNA, 22 bp, synthetic construct
  misc_feature 1..22: note = chemically synthesized
  source 1..22: mol_type = other DNA
tatgttttaaatgcactgacct

SEQ ID NO: 89440 - DNA, 22 bp, synthetic construct
  misc_feature 1..22: note = chemically synthesized
  source 1..22: mol_type = other DNA
atgttttaaatgcactgacctc

SEQ ID NO: 89441 - DNA, 22 bp, synthetic construct
  misc_feature 1..22: note = chemically synthesized
  source 1..22: mol_type = other DNA
tgttttaaatgcactgacctcc

SEQ ID NO: 89442 - DNA, 22 bp, synthetic construct
  misc_feature 1..22: note = chemically synthesized
  source 1..22: mol_type = other DNA
taaatgcactgacctcccacat

SEQ ID NO: 89443 - DNA, 22 bp, synthetic construct
  misc_feature 1..22: note = chemically synthesized
  source 1..22: mol_type = other DNA
aaatgcactgacctcccacatt

SEQ ID NO: 89444 - DNA, 22 bp, synthetic construct
  misc_feature 1..22: note = chemically synthesized
  source 1..22: mol_type = other DNA
aatgcactgacctcccacattc

SEQ ID NO: 89445 - DNA, 22 bp, synthetic construct
  misc_feature 1..22: note = chemically synthesized
  source 1..22: mol_type = other DNA
acctcccacattccctttttag

SEQ ID NO: 89446 - DNA, 22 bp, synthetic construct
  misc_feature 1..22: note = chemically synthesized
  source 1..22: mol_type = other DNA
ccacattccctttttagtaaaa

SEQ ID NO: 89447 - DNA, 22 bp, synthetic construct
  misc_feature 1..22: note = chemically synthesized
  source 1..22: mol_type = other DNA
cctttttagtaaaatattcaga

SEQ ID NO: 89448 - DNA, 22 bp, synthetic construct
  misc_feature 1..22: note = chemically synthesized
  source 1..22: mol_type = other DNA
tttagtaaaatattcagaaata

SEQ ID NO: 89449 - DNA, 22 bp, synthetic construct
  misc_feature 1..22: note = chemically synthesized
  source 1..22: mol_type = other DNA
ttagtaaaatattcagaaataa

SEQ ID NO: 89450 - DNA, 22 bp, synthetic construct
  misc_feature 1..22: note = chemically synthesized
  source 1..22: mol_type = other DNA
tagtaaaatattcagaaataat

SEQ ID NO: 89451 - DNA, 22 bp, synthetic construct
  misc_feature 1..22: note = chemically synthesized
  source 1..22: mol_type = other DNA
agtaaaatattcagaaataatt

SEQ ID NO: 89452 - DNA, 22 bp, synthetic construct
  misc_feature 1..22: note = chemically synthesized
  source 1..22: mol_type = other DNA
gtaaaatattcagaaataattt

SEQ ID NO: 89453 - DNA, 22 bp, synthetic construct
  misc_feature 1..22: note = chemically synthesized
  source 1..22: mol_type = other DNA
agaaataatttaaatacatcat

SEQ ID NO: 89454 - DNA, 22 bp, synthetic construct
  misc_feature 1..22: note = chemically synthesized
  source 1..22: mol_type = other DNA
aaatacatcattgcaatgaaaa

SEQ ID NO: 89455 - DNA, 22 bp, synthetic construct
  misc_feature 1..22: note = chemically synthesized
  source 1..22: mol_type = other DNA
aatacatcattgcaatgaaaat

SEQ ID NO: 89456 - DNA, 22 bp, synthetic construct
  misc_feature 1..22: note = chemically synthesized
  source 1..22: mol_type = other DNA
caatgaaaataaatgtttttta

SEQ ID NO: 89457 - DNA, 22 bp, synthetic construct
  misc_feature 1..22: note = chemically synthesized
  source 1..22: mol_type = other DNA
tttattaggcagaatccagatg

SEQ ID NO: 89458 - DNA, 22 bp, synthetic construct
  misc_feature 1..22: note = chemically synthesized
  source 1..22: mol_type = other DNA
ttattaggcagaatccagatgc

SEQ ID NO: 89459 - DNA, 22 bp, synthetic construct
  misc_feature 1..22: note = chemically synthesized
  source 1..22: mol_type = other DNA
tattaggcagaatccagatgct

SEQ ID NO: 89460 - DNA, 22 bp, synthetic construct
  misc_feature 1..22: note = chemically synthesized
  source 1..22: mol_type = other DNA
attaggcagaatccagatgctc

SEQ ID NO: 89461 - DNA, 22 bp, synthetic construct
  misc_feature 1..22: note = chemically synthesized
  source 1..22: mol_type = other DNA
ttaggcagaatccagatgctca

SEQ ID NO: 89462 - DNA, 22 bp, synthetic construct
  misc_feature 1..22: note = chemically synthesized
  source 1..22: mol_type = other DNA
ggcagaatccagatgctcaagg

SEQ ID NO: 89463 - DNA, 22 bp, synthetic construct
  misc_feature 1..22: note = chemically synthesized
  source 1..22: mol_type = other DNA
aaggcccttcataatatccccc

SEQ ID NO: 89464 - DNA, 22 bp, synthetic construct
  misc_feature 1..22: note = chemically synthesized
  source 1..22: mol_type = other DNA
cataatatcccccagtttagta

SEQ ID NO: 89465 - DNA, 22 bp, synthetic construct
  misc_feature 1..22: note = chemically synthesized
  source 1..22: mol_type = other DNA
ataatatcccccagtttagtag

SEQ ID NO: 89466 - DNA, 22 bp, synthetic construct
  misc_feature 1..22: note = chemically synthesized
  source 1..22: mol_type = other DNA
agtagttggacttagggaacaa

SEQ ID NO: 89467 - DNA, 22 bp, synthetic construct
  misc_feature 1..22: note = chemically synthesized
  source 1..22: mol_type = other DNA
gtagttggacttagggaacaaa

SEQ ID NO: 89468 - DNA, 22 bp, synthetic construct
  misc_feature 1..22: note = chemically synthesized
  source 1..22: mol_type = other DNA
gacttagggaacaaaggaacct

SEQ ID NO: 89469 - DNA, 22 bp, synthetic construct
  misc_feature 1..22: note = chemically synthesized
  source 1..22: mol_type = other DNA
agggaacaaaggaacctttaat

SEQ ID NO: 89470 - DNA, 22 bp, synthetic construct
  misc_feature 1..22: note = chemically synthesized
  source 1..22: mol_type = other DNA
gggaacaaaggaacctttaata

SEQ ID NO: 89471 - DNA, 22 bp, synthetic construct
  misc_feature 1..22: note = chemically synthesized
  source 1..22: mol_type = other DNA
taatagaaattggacagcaaga

SEQ ID NO: 89472 - DNA, 22 bp, synthetic construct
  misc_feature 1..22: note = chemically synthesized
  source 1..22: mol_type = other DNA
aatagaaattggacagcaagaa

SEQ ID NO: 89473 - DNA, 22 bp, synthetic construct
  misc_feature 1..22: note = chemically synthesized
  source 1..22: mol_type = other DNA
atagaaattggacagcaagaaa

SEQ ID NO: 89474 - DNA, 22 bp, synthetic construct
  misc_feature 1..22: note = chemically synthesized
  source 1..22: mol_type = other DNA
gacagcaagaaagcgagcttag

SEQ ID NO: 89475 - DNA, 22 bp, synthetic construct
  misc_feature 1..22: note = chemically synthesized
  source 1..22: mol_type = other DNA
agtgatacttgtgggccagggc

SEQ ID NO: 89476 - DNA, 22 bp, synthetic construct
  misc_feature 1..22: note = chemically synthesized
  source 1..22: mol_type = other DNA
gtgatacttgtgggccagggca

SEQ ID NO: 89477 - DNA, 22 bp, synthetic construct
  misc_feature 1..22: note = chemically synthesized
  source 1..22: mol_type = other DNA
gtgggccagggcattagccaca

SEQ ID NO: 89478 - DNA, 22 bp, synthetic construct
  misc_feature 1..22: note = chemically synthesized
  source 1..22: mol_type = other DNA
tgggccagggcattagccacac

SEQ ID NO: 89479 - DNA, 22 bp, synthetic construct
  misc_feature 1..22: note = chemically synthesized
  source 1..22: mol_type = other DNA
gccacaccagccaccactttct

SEQ ID NO: 89480 - DNA, 22 bp, synthetic construct
  misc_feature 1..22: note = chemically synthesized
  source 1..22: mol_type = other DNA
tctgataggcagcctgcactgg

SEQ ID NO: 89481 - DNA, 22 bp, synthetic construct
  misc_feature 1..22: note = chemically synthesized
  source 1..22: mol_type = other DNA
ctgataggcagcctgcactggt

SEQ ID NO: 89482 - DNA, 22 bp, synthetic construct
  misc_feature 1..22: note = chemically synthesized
  source 1..22: mol_type = other DNA
tgataggcagcctgcactggtg

SEQ ID NO: 89483 - DNA, 22 bp, synthetic construct
  misc_feature 1..22: note = chemically synthesized
  source 1..22: mol_type = other DNA
ataggcagcctgcactggtggg

SEQ ID NO: 89484 - DNA, 22 bp, synthetic construct
  misc_feature 1..22: note = chemically synthesized
  source 1..22: mol_type = other DNA
cactggtggggtgaattctttg

SEQ ID NO: 89485 - DNA, 22 bp, synthetic construct
  misc_feature 1..22: note = chemically synthesized
  source 1..22: mol_type = other DNA
gtggggtgaattctttgccaaa

SEQ ID NO: 89486 - DNA, 22 bp, synthetic construct
  misc_feature 1..22: note = chemically synthesized
  source 1..22: mol_type = other DNA
tttgccaaagtgatgggccagc

SEQ ID NO: 89487 - DNA, 22 bp, synthetic construct
  misc_feature 1..22: note = chemically synthesized
  source 1..22: mol_type = other DNA
tgccaaagtgatgggccagcac

SEQ ID NO: 89488 - DNA, 22 bp, synthetic construct
  misc_feature 1..22: note = chemically synthesized
  source 1..22: mol_type = other DNA
gccaaagtgatgggccagcaca

SEQ ID NO: 89489 - DNA, 22 bp, synthetic construct
  misc_feature 1..22: note = chemically synthesized
  source 1..22: mol_type = other DNA
ccaaagtgatgggccagcacac

SEQ ID NO: 89490 - DNA, 22 bp, synthetic construct
  misc_feature 1..22: note = chemically synthesized
  source 1..22: mol_type = other DNA
cccaggagctgtgggaggaaga

SEQ ID NO: 89491 - DNA, 22 bp, synthetic construct
  misc_feature 1..22: note = chemically synthesized
  source 1..22: mol_type = other DNA
tgggaggaagataagaggtatg

SEQ ID NO: 89492 - DNA, 22 bp, synthetic construct
  misc_feature 1..22: note = chemically synthesized
  source 1..22: mol_type = other DNA
gcaaaagggcctagcttggact

SEQ ID NO: 89493 - DNA, 22 bp, synthetic construct
  misc_feature 1..22: note = chemically synthesized
  source 1..22: mol_type = other DNA
gcttggactcagaataatccag

SEQ ID NO: 89494 - DNA, 22 bp, synthetic construct
  misc_feature 1..22: note = chemically synthesized
  source 1..22: mol_type = other DNA
ggactcagaataatccagcctt

SEQ ID NO: 89495 - DNA, 22 bp, synthetic construct
  misc_feature 1..22: note = chemically synthesized
  source 1..22: mol_type = other DNA
gactcagaataatccagcctta

SEQ ID NO: 89496 - DNA, 22 bp, synthetic construct
  misc_feature 1..22: note = chemically synthesized
  source 1..22: mol_type = other DNA
agaataatccagccttatccca

SEQ ID NO: 89497 - DNA, 22 bp, synthetic construct
  misc_feature 1..22: note = chemically synthesized
  source 1..22: mol_type = other DNA
atcccaaccataaaataaaagc

SEQ ID NO: 89498 - DNA, 22 bp, synthetic construct
  misc_feature 1..22: note = chemically synthesized
  source 1..22: mol_type = other DNA
tcccaaccataaaataaaagca

SEQ ID NO: 89499 - DNA, 22 bp, synthetic construct
  misc_feature 1..22: note = chemically synthesized
  source 1..22: mol_type = other DNA
gattgtagctgctattagcaat

SEQ ID NO: 89500 - DNA, 22 bp, synthetic construct
  misc_feature 1..22: note = chemically synthesized
  source 1..22: mol_type = other DNA
tagctgctattagcaatatgaa

SEQ ID NO: 89501 - DNA, 22 bp, synthetic construct
  misc_feature 1..22: note = chemically synthesized
  source 1..22: mol_type = other DNA
ctattagcaatatgaaacctct

SEQ ID NO: 89502 - DNA, 22 bp, synthetic construct
  misc_feature 1..22: note = chemically synthesized
  source 1..22: mol_type = other DNA
ttagcaatatgaaacctcttac

SEQ ID NO: 89503 - DNA, 22 bp, synthetic construct
  misc_feature 1..22: note = chemically synthesized
  source 1..22: mol_type = other DNA
gcaatatgaaacctcttacatc

SEQ ID NO: 89504 - DNA, 22 bp, synthetic construct
  misc_feature 1..22: note = chemically synthesized
  source 1..22: mol_type = other DNA
ttacatcagttacaatttatat

SEQ ID NO: 89505 - DNA, 22 bp, synthetic construct
  misc_feature 1..22: note = chemically synthesized
  source 1..22: mol_type = other DNA
acatcagttacaatttatatgc

SEQ ID NO: 89506 - DNA, 22 bp, synthetic construct
  misc_feature 1..22: note = chemically synthesized
  source 1..22: mol_type = other DNA
catcagttacaatttatatgca

SEQ ID NO: 89507 - DNA, 22 bp, synthetic construct
  misc_feature 1..22: note = chemically synthesized
  source 1..22: mol_type = other DNA
caatttatatgcagaaatattt

SEQ ID NO: 89508 - DNA, 22 bp, synthetic construct
  misc_feature 1..22: note = chemically synthesized
  source 1..22: mol_type = other DNA
atatgcagaaatatttatatgc

SEQ ID NO: 89509 - DNA, 22 bp, synthetic construct
  misc_feature 1..22: note = chemically synthesized
  source 1..22: mol_type = other DNA
tatgcagaaatatttatatgca

SEQ ID NO: 89510 - DNA, 22 bp, synthetic construct
  misc_feature 1..22: note = chemically synthesized
  source 1..22: mol_type = other DNA
atatgcagagatattgctattg

SEQ ID NO: 89511 - DNA, 22 bp, synthetic construct
  misc_feature 1..22: note = chemically synthesized
  source 1..22: mol_type = other DNA
tatgcagagatattgctattgc

SEQ ID NO: 89512 - DNA, 22 bp, synthetic construct
  misc_feature 1..22: note = chemically synthesized
  source 1..22: mol_type = other DNA
ctattgccttaacccagaaatt

SEQ ID NO: 89513 - DNA, 22 bp, synthetic construct
  misc_feature 1..22: note = chemically synthesized
  source 1..22: mol_type = other DNA
ttgccttaacccagaaattatc

SEQ ID NO: 89514 - DNA, 22 bp, synthetic construct
  misc_feature 1..22: note = chemically synthesized
  source 1..22: mol_type = other DNA
ccttaacccagaaattatcact

SEQ ID NO: 89515 - DNA, 22 bp, synthetic construct
  misc_feature 1..22: note = chemically synthesized
  source 1..22: mol_type = other DNA
aacccagaaattatcactgtta

SEQ ID NO: 89516 - DNA, 22 bp, synthetic construct
  misc_feature 1..22: note = chemically synthesized
  source 1..22: mol_type = other DNA
acccagaaattatcactgttat

SEQ ID NO: 89517 - DNA, 22 bp, synthetic construct
  misc_feature 1..22: note = chemically synthesized
  source 1..22: mol_type = other DNA
tcactgttattctttagaatgg

SEQ ID NO: 89518 - DNA, 22 bp, synthetic construct
  misc_feature 1..22: note = chemically synthesized
  source 1..22: mol_type = other DNA
ttattctttagaatggtgcaaa

SEQ ID NO: 89519 - DNA, 22 bp, synthetic construct
  misc_feature 1..22: note = chemically synthesized
  source 1..22: mol_type = other DNA
ttctttagaatggtgcaaagag

SEQ ID NO: 89520 - DNA, 22 bp, synthetic construct
  misc_feature 1..22: note = chemically synthesized
  source 1..22: mol_type = other DNA
tttagaatggtgcaaagaggca

SEQ ID NO: 89521 - DNA, 22 bp, synthetic construct
  misc_feature 1..22: note = chemically synthesized
  source 1..22: mol_type = other DNA
tagaatggtgcaaagaggcatg

SEQ ID NO: 89522 - DNA, 22 bp, synthetic construct
  misc_feature 1..22: note = chemically synthesized
  source 1..22: mol_type = other DNA
agaatggtgcaaagaggcatga

SEQ ID NO: 89523 - DNA, 22 bp, synthetic construct
  misc_feature 1..22: note = chemically synthesized
  source 1..22: mol_type = other DNA
gaatggtgcaaagaggcatgat

SEQ ID NO: 89524 - DNA, 22 bp, synthetic construct
  misc_feature 1..22: note = chemically synthesized
  source 1..22: mol_type = other DNA
tatcattattgccctgaaagaa

SEQ ID NO: 89525 - DNA, 22 bp, synthetic construct
  misc_feature 1..22: note = chemically synthesized
  source 1..22: mol_type = other DNA
ttgccctgaaagaaagagatta

SEQ ID NO: 89526 - DNA, 22 bp, synthetic construct
  misc_feature 1..22: note = chemically synthesized
  source 1..22: mol_type = other DNA
ccctgaaagaaagagattaggg

SEQ ID NO: 89527 - DNA, 22 bp, synthetic construct
  misc_feature 1..22: note = chemically synthesized
  source 1..22: mol_type = other DNA
aaagaaagagattagggaaagt

SEQ ID NO: 89528 - DNA, 22 bp, synthetic construct
  misc_feature 1..22: note = chemically synthesized
  source 1..22: mol_type = other DNA
gggaaagtattagaaataagat

SEQ ID NO: 89529 - DNA, 22 bp, synthetic construct
  misc_feature 1..22: note = chemically synthesized
  source 1..22: mol_type = other DNA
gaaataagataaacaaaaaagt

SEQ ID NO: 89530 - DNA, 22 bp, synthetic construct
  misc_feature 1..22: note = chemically synthesized
  source 1..22: mol_type = other DNA
aaagaagaaagcattttttaaa

SEQ ID NO: 89531 - DNA, 22 bp, synthetic construct
  misc_feature 1..22: note = chemically synthesized
  source 1..22: mol_type = other DNA
tttaaaattacaaatgcaaaat

SEQ ID NO: 89532 - DNA, 22 bp, synthetic construct
  misc_feature 1..22: note = chemically synthesized
  source 1..22: mol_type = other DNA
ttaaaattacaaatgcaaaatt

SEQ ID NO: 89533 - DNA, 22 bp, synthetic construct
  misc_feature 1..22: note = chemically synthesized
  source 1..22: mol_type = other DNA
taaaattacaaatgcaaaatta

SEQ ID NO: 89534 - DNA, 22 bp, synthetic construct
  misc_feature 1..22: note = chemically synthesized
  source 1..22: mol_type = other DNA
aaaattacaaatgcaaaattac

SEQ ID NO: 89535 - DNA, 22 bp, synthetic construct
  misc_feature 1..22: note = chemically synthesized
  source 1..22: mol_type = other DNA
aaattacaaatgcaaaattacc

SEQ ID NO: 89536 - DNA, 22 bp, synthetic construct
  misc_feature 1..22: note = chemically synthesized
  source 1..22: mol_type = other DNA
caaatgcaaaattaccctgatt

SEQ ID NO: 89537 - DNA, 22 bp, synthetic construct
  misc_feature 1..22: note = chemically synthesized
  source 1..22: mol_type = other DNA
ccctgatttggtcaatatgtgt

SEQ ID NO: 89538 - DNA, 22 bp, synthetic construct
  misc_feature 1..22: note = chemically synthesized
  source 1..22: mol_type = other DNA
atttggtcaatatgtgtacaca

SEQ ID NO: 89539 - DNA, 22 bp, synthetic construct
  misc_feature 1..22: note = chemically synthesized
  source 1..22: mol_type = other DNA
ggtcaatatgtgtacacatatt

SEQ ID NO: 89540 - DNA, 22 bp, synthetic construct
  misc_feature 1..22: note = chemically synthesized
  source 1..22: mol_type = other DNA
gtcaatatgtgtacacatatta

SEQ ID NO: 89541 - DNA, 22 bp, synthetic construct
  misc_feature 1..22: note = chemically synthesized
  source 1..22: mol_type = other DNA
aaacattacactttaacccata

SEQ ID NO: 89542 - DNA, 22 bp, synthetic construct
  misc_feature 1..22: note = chemically synthesized
  source 1..22: mol_type = other DNA
cactttaacccataaatatgta

SEQ ID NO: 89543 - DNA, 22 bp, synthetic construct
  misc_feature 1..22: note = chemically synthesized
  source 1..22: mol_type = other DNA
taacccataaatatgtataatg

SEQ ID NO: 89544 - DNA, 22 bp, synthetic construct
  misc_feature 1..22: note = chemically synthesized
  source 1..22: mol_type = other DNA
aacccataaatatgtataatga

SEQ ID NO: 89545 - DNA, 22 bp, synthetic construct
  misc_feature 1..22: note = chemically synthesized
  source 1..22: mol_type = other DNA
acccataaatatgtataatgat

SEQ ID NO: 89546 - DNA, 22 bp, synthetic construct
  misc_feature 1..22: note = chemically synthesized
  source 1..22: mol_type = other DNA
tgtatcaattaaaaataaaaga

SEQ ID NO: 89547 - DNA, 22 bp, synthetic construct
  misc_feature 1..22: note = chemically synthesized
  source 1..22: mol_type = other DNA
aaaataaaagaaaataaagtag

SEQ ID NO: 89548 - DNA, 22 bp, synthetic construct
  misc_feature 1..22: note = chemically synthesized
  source 1..22: mol_type = other DNA
tgaatatgcaaataagcacaca

SEQ ID NO: 89549 - DNA, 22 bp, synthetic construct
  misc_feature 1..22: note = chemically synthesized
  source 1..22: mol_type = other DNA
caaatagtaatgtactaggcag

SEQ ID NO: 89550 - DNA, 22 bp, synthetic construct
  misc_feature 1..22: note = chemically synthesized
  source 1..22: mol_type = other DNA
ggcagactgtgtaaagtttttt

SEQ ID NO: 89551 - DNA, 22 bp, synthetic construct
  misc_feature 1..22: note = chemically synthesized
  source 1..22: mol_type = other DNA
tgtaaagtttttttttaagtta

SEQ ID NO: 89552 - DNA, 22 bp, synthetic construct
  misc_feature 1..22: note = chemically synthesized
  source 1..22: mol_type = other DNA
ttttttaagttacttaatgtat

SEQ ID NO: 89553 - DNA, 22 bp, synthetic construct
  misc_feature 1..22: note = chemically synthesized
  source 1..22: mol_type = other DNA
tttttaagttacttaatgtatc

SEQ ID NO: 89554 - DNA, 22 bp, synthetic construct
  misc_feature 1..22: note = chemically synthesized
  source 1..22: mol_type = other DNA
ttttaagttacttaatgtatct

SEQ ID NO: 89555 - DNA, 22 bp, synthetic construct
  misc_feature 1..22: note = chemically synthesized
  source 1..22: mol_type = other DNA
tttaagttacttaatgtatctc

SEQ ID NO: 89556 - DNA, 22 bp, synthetic construct
  misc_feature 1..22: note = chemically synthesized
  source 1..22: mol_type = other DNA
ttaagttacttaatgtatctca

SEQ ID NO: 89557 - DNA, 22 bp, synthetic construct
  misc_feature 1..22: note = chemically synthesized
  source 1..22: mol_type = other DNA
taagttacttaatgtatctcag

SEQ ID NO: 89558 - DNA, 22 bp, synthetic construct
  misc_feature 1..22: note = chemically synthesized
  source 1..22: mol_type = other DNA
aagttacttaatgtatctcaga

SEQ ID NO: 89559 - DNA, 22 bp, synthetic construct
  misc_feature 1..22: note = chemically synthesized
  source 1..22: mol_type = other DNA
agttacttaatgtatctcagag

SEQ ID NO: 89560 - DNA, 22 bp, synthetic construct
  misc_feature 1..22: note = chemically synthesized
  source 1..22: mol_type = other DNA
cttaatgtatctcagagatatt

SEQ ID NO: 89561 - DNA, 22 bp, synthetic construct
  misc_feature 1..22: note = chemically synthesized
  source 1..22: mol_type = other DNA
aatgtatctcagagatatttcc

SEQ ID NO: 89562 - DNA, 22 bp, synthetic construct
  misc_feature 1..22: note = chemically synthesized
  source 1..22: mol_type = other DNA
atgtatctcagagatatttcct

SEQ ID NO: 89563 - DNA, 22 bp, synthetic construct
  misc_feature 1..22: note = chemically synthesized
  source 1..22: mol_type = other DNA
agagatatttccttttgttata

SEQ ID NO: 89564 - DNA, 22 bp, synthetic construct
  misc_feature 1..22: note = chemically synthesized
  source 1..22: mol_type = other DNA
ccttttgttatacacaatgtta

SEQ ID NO: 89565 - DNA, 22 bp, synthetic construct
  misc_feature 1..22: note = chemically synthesized
  source 1..22: mol_type = other DNA
cttttgttatacacaatgttaa

SEQ ID NO: 89566 - DNA, 22 bp, synthetic construct
  misc_feature 1..22: note = chemically synthesized
  source 1..22: mol_type = other DNA
ttgttatacacaatgttaaggc

SEQ ID NO: 89567 - DNA, 22 bp, synthetic construct
  misc_feature 1..22: note = chemically synthesized
  source 1..22: mol_type = other DNA
tgttatacacaatgttaaggca

SEQ ID NO: 89568 - DNA, 22 bp, synthetic construct
  misc_feature 1..22: note = chemically synthesized
  source 1..22: mol_type = other DNA
gttatacacaatgttaaggcat

SEQ ID NO: 89569 - DNA, 22 bp, synthetic construct
  misc_feature 1..22: note = chemically synthesized
  source 1..22: mol_type = other DNA
ttatacacaatgttaaggcatt

SEQ ID NO: 89570 - DNA, 22 bp, synthetic construct
  misc_feature 1..22: note = chemically synthesized
  source 1..22: mol_type = other DNA
tacacaatgttaaggcattaag

SEQ ID NO: 89571 - DNA, 22 bp, synthetic construct
  misc_feature 1..22: note = chemically synthesized
  source 1..22: mol_type = other DNA
aggcattaagtataatagtaaa

SEQ ID NO: 89572 - DNA, 22 bp, synthetic construct
  misc_feature 1..22: note = chemically synthesized
  source 1..22: mol_type = other DNA
agtataatagtaaaaattgcgg

SEQ ID NO: 89573 - DNA, 22 bp, synthetic construct
  misc_feature 1..22: note = chemically synthesized
  source 1..22: mol_type = other DNA
cggagaagaaaaaaaaagaaag

SEQ ID NO: 89574 - DNA, 22 bp, synthetic construct
  misc_feature 1..22: note = chemically synthesized
  source 1..22: mol_type = other DNA
aacaaaagaaaacaattgttat

SEQ ID NO: 89575 - DNA, 22 bp, synthetic construct
  misc_feature 1..22: note = chemically synthesized
  source 1..22: mol_type = other DNA
ttatgaacagcaaataaaagaa

SEQ ID NO: 89576 - DNA, 22 bp, synthetic construct
  misc_feature 1..22: note = chemically synthesized
  source 1..22: mol_type = other DNA
tgaacagcaaataaaagaaact

SEQ ID NO: 89577 - DNA, 22 bp, synthetic construct
  misc_feature 1..22: note = chemically synthesized
  source 1..22: mol_type = other DNA
aaacgatcctgagacttccaca

SEQ ID NO: 89578 - DNA, 22 bp, synthetic construct
  misc_feature 1..22: note = chemically synthesized
  source 1..22: mol_type = other DNA
agacttccacactgatgcaatc

SEQ ID NO: 89579 - DNA, 22 bp, synthetic construct
  misc_feature 1..22: note = chemically synthesized
  source 1..22: mol_type = other DNA
ccacactgatgcaatcattcgt

SEQ ID NO: 89580 - DNA, 22 bp, synthetic construct
  misc_feature 1..22: note = chemically synthesized
  source 1..22: mol_type = other DNA
cacactgatgcaatcattcgtc

SEQ ID NO: 89581 - DNA, 22 bp, synthetic construct
  misc_feature 1..22: note = chemically synthesized
  source 1..22: mol_type = other DNA
atgcaatcattcgtctgtttcc

SEQ ID NO: 89582 - DNA, 22 bp, synthetic construct
  misc_feature 1..22: note = chemically synthesized
  source 1..22: mol_type = other DNA
gtctgtttcccattctaaactg

SEQ ID NO: 89583 - DNA, 22 bp, synthetic construct
  misc_feature 1..22: note = chemically synthesized
  source 1..22: mol_type = other DNA
tttcccattctaaactgtaccc

SEQ ID NO: 89584 - DNA, 22 bp, synthetic construct
  misc_feature 1..22: note = chemically synthesized
  source 1..22: mol_type = other DNA
cccattctaaactgtaccctgt

SEQ ID NO: 89585 - DNA, 22 bp, synthetic construct
  misc_feature 1..22: note = chemically synthesized
  source 1..22: mol_type = other DNA
ccattctaaactgtaccctgtt

SEQ ID NO: 89586 - DNA, 22 bp, synthetic construct
  misc_feature 1..22: note = chemically synthesized
  source 1..22: mol_type = other DNA
taaactgtaccctgttacttat

SEQ ID NO: 89587 - DNA, 22 bp, synthetic construct
  misc_feature 1..22: note = chemically synthesized
  source 1..22: mol_type = other DNA
aactgtaccctgttacttatcc

SEQ ID NO: 89588 - DNA, 22 bp, synthetic construct
  misc_feature 1..22: note = chemically synthesized
  source 1..22: mol_type = other DNA
taccctgttacttatccccttc

SEQ ID NO: 89589 - DNA, 22 bp, synthetic construct
  misc_feature 1..22: note = chemically synthesized
  source 1..22: mol_type = other DNA
ttacttatccccttcctatgac

SEQ ID NO: 89590 - DNA, 22 bp, synthetic construct
  misc_feature 1..22: note = chemically synthesized
  source 1..22: mol_type = other DNA
cttatccccttcctatgacatg

SEQ ID NO: 89591 - DNA, 22 bp, synthetic construct
  misc_feature 1..22: note = chemically synthesized
  source 1..22: mol_type = other DNA
atccccttcctatgacatgaac

SEQ ID NO: 89592 - DNA, 22 bp, synthetic construct
  misc_feature 1..22: note = chemically synthesized
  source 1..22: mol_type = other DNA
tccccttcctatgacatgaact

SEQ ID NO: 89593 - DNA, 22 bp, synthetic construct
  misc_feature 1..22: note = chemically synthesized
  source 1..22: mol_type = other DNA
cctatgacatgaacttaaccat

SEQ ID NO: 89594 - DNA, 22 bp, synthetic construct
  misc_feature 1..22: note = chemically synthesized
  source 1..22: mol_type = other DNA
ctatgacatgaacttaaccata

SEQ ID NO: 89595 - DNA, 22 bp, synthetic construct
  misc_feature 1..22: note = chemically synthesized
  source 1..22: mol_type = other DNA
tgacatgaacttaaccatagaa

SEQ ID NO: 89596 - DNA, 22 bp, synthetic construct
  misc_feature 1..22: note = chemically synthesized
  source 1..22: mol_type = other DNA
aaccatagaaaagaaggggaaa

SEQ ID NO: 89597 - DNA, 22 bp, synthetic construct
  misc_feature 1..22: note = chemically synthesized
  source 1..22: mol_type = other DNA
accatagaaaagaaggggaaag

SEQ ID NO: 89598 - DNA, 22 bp, synthetic construct
  misc_feature 1..22: note = chemically synthesized
  source 1..22: mol_type = other DNA
accctgaagttctcaggatcca

SEQ ID NO: 89599 - DNA, 22 bp, synthetic construct
  misc_feature 1..22: note = chemically synthesized
  source 1..22: mol_type = other DNA
aagttctcaggatccacgtgca

SEQ ID NO: 89600 - DNA, 22 bp, synthetic construct
  misc_feature 1..22: note = chemically synthesized
  source 1..22: mol_type = other DNA
tcaggatccacgtgcagcttgt

SEQ ID NO: 89601 - DNA, 22 bp, synthetic construct
  misc_feature 1..22: note = chemically synthesized
  source 1..22: mol_type = other DNA
aggatccacgtgcagcttgtca

SEQ ID NO: 89602 - DNA, 22 bp, synthetic construct
  misc_feature 1..22: note = chemically synthesized
  source 1..22: mol_type = other DNA
gtcacagtgcagctcactcagt

SEQ ID NO: 89603 - DNA, 22 bp, synthetic construct
  misc_feature 1..22: note = chemically synthesized
  source 1..22: mol_type = other DNA
tcacagtgcagctcactcagtg

SEQ ID NO: 89604 - DNA, 22 bp, synthetic construct
  misc_feature 1..22: note = chemically synthesized
  source 1..22: mol_type = other DNA
actcagtgtggcaaaggtgccc

SEQ ID NO: 89605 - DNA, 22 bp, synthetic construct
  misc_feature 1..22: note = chemically synthesized
  source 1..22: mol_type = other DNA
agtgtggcaaaggtgcccttga

SEQ ID NO: 89606 - DNA, 22 bp, synthetic construct
  misc_feature 1..22: note = chemically synthesized
  source 1..22: mol_type = other DNA
gaggttgtccaggtgagccagg

SEQ ID NO: 89607 - DNA, 22 bp, synthetic construct
  misc_feature 1..22: note = chemically synthesized
  source 1..22: mol_type = other DNA
aggttgtccaggtgagccaggc

SEQ ID NO: 89608 - DNA, 22 bp, synthetic construct
  misc_feature 1..22: note = chemically synthesized
  source 1..22: mol_type = other DNA
tccaggtgagccaggccatcac

SEQ ID NO: 89609 - DNA, 22 bp, synthetic construct
  misc_feature 1..22: note = chemically synthesized
  source 1..22: mol_type = other DNA
aaggcaccgagcactttcttgc

SEQ ID NO: 89610 - DNA, 22 bp, synthetic construct
  misc_feature 1..22: note = chemically synthesized
  source 1..22: mol_type = other DNA
tcttgccatgagccttcacctt

SEQ ID NO: 89611 - DNA, 22 bp, synthetic construct
  misc_feature 1..22: note = chemically synthesized
  source 1..22: mol_type = other DNA
cttgccatgagccttcacctta

SEQ ID NO: 89612 - DNA, 22 bp, synthetic construct
  misc_feature 1..22: note = chemically synthesized
  source 1..22: mol_type = other DNA
ttgccatgagccttcaccttag

SEQ ID NO: 89613 - DNA, 22 bp, synthetic construct
  misc_feature 1..22: note = chemically synthesized
  source 1..22: mol_type = other DNA
gccatgagccttcaccttaggg

SEQ ID NO: 89614 - DNA, 22 bp, synthetic construct
  misc_feature 1..22: note = chemically synthesized
  source 1..22: mol_type = other DNA
ccatgagccttcaccttagggt

SEQ ID NO: 89615 - DNA, 22 bp, synthetic construct
  misc_feature 1..22: note = chemically synthesized
  source 1..22: mol_type = other DNA
caccttagggttgcccataaca

SEQ ID NO: 89616 - DNA, 22 bp, synthetic construct
  misc_feature 1..22: note = chemically synthesized
  source 1..22: mol_type = other DNA
accttagggttgcccataacag

SEQ ID NO: 89617 - DNA, 22 bp, synthetic construct
  misc_feature 1..22: note = chemically synthesized
  source 1..22: mol_type = other DNA
agggttgcccataacagcatca

SEQ ID NO: 89618 - DNA, 22 bp, synthetic construct
  misc_feature 1..22: note = chemically synthesized
  source 1..22: mol_type = other DNA
gggttgcccataacagcatcag

SEQ ID NO: 89619 - DNA, 22 bp, synthetic construct
  misc_feature 1..22: note = chemically synthesized
  source 1..22: mol_type = other DNA
cccataacagcatcaggagtgg

SEQ ID NO: 89620 - DNA, 22 bp, synthetic construct
  misc_feature 1..22: note = chemically synthesized
  source 1..22: mol_type = other DNA
aaagaacctctgggtccaaggg

SEQ ID NO: 89621 - DNA, 22 bp, synthetic construct
  misc_feature 1..22: note = chemically synthesized
  source 1..22: mol_type = other DNA
tgggtccaagggtagaccacca

SEQ ID NO: 89622 - DNA, 22 bp, synthetic construct
  misc_feature 1..22: note = chemically synthesized
  source 1..22: mol_type = other DNA
ggtccaagggtagaccaccagc

SEQ ID NO: 89623 - DNA, 22 bp, synthetic construct
  misc_feature 1..22: note = chemically synthesized
  source 1..22: mol_type = other DNA
agggtgggaaaatagaccaata

SEQ ID NO: 89624 - DNA, 22 bp, synthetic construct
  misc_feature 1..22: note = chemically synthesized
  source 1..22: mol_type = other DNA
tcagaaacccaagagtcttctc

SEQ ID NO: 89625 - DNA, 22 bp, synthetic construct
  misc_feature 1..22: note = chemically synthesized
  source 1..22: mol_type = other DNA
ctctgtctccacatgcccagtt

SEQ ID NO: 89626 - DNA, 22 bp, synthetic construct
  misc_feature 1..22: note = chemically synthesized
  source 1..22: mol_type = other DNA
tctgtctccacatgcccagttt

SEQ ID NO: 89627 - DNA, 22 bp, synthetic construct
  misc_feature 1..22: note = chemically synthesized
  source 1..22: mol_type = other DNA
tgtctccacatgcccagtttct

SEQ ID NO: 89628 - DNA, 22 bp, synthetic construct
  misc_feature 1..22: note = chemically synthesized
  source 1..22: mol_type = other DNA
tctccacatgcccagtttctat

SEQ ID NO: 89629 - DNA, 22 bp, synthetic construct
  misc_feature 1..22: note = chemically synthesized
  source 1..22: mol_type = other DNA
cacatgcccagtttctattggt

SEQ ID NO: 89630 - DNA, 22 bp, synthetic construct
  misc_feature 1..22: note = chemically synthesized
  source 1..22: mol_type = other DNA
ctattggtctccttaaacctgt

SEQ ID NO: 89631 - DNA, 22 bp, synthetic construct
  misc_feature 1..22: note = chemically synthesized
  source 1..22: mol_type = other DNA
tattggtctccttaaacctgtc

SEQ ID NO: 89632 - DNA, 22 bp, synthetic construct
  misc_feature 1..22: note = chemically synthesized
  source 1..22: mol_type = other DNA
ttggtctccttaaacctgtctt

SEQ ID NO: 89633 - DNA, 22 bp, synthetic construct
  misc_feature 1..22: note = chemically synthesized
  source 1..22: mol_type = other DNA
gtctccttaaacctgtcttgta

SEQ ID NO: 89634 - DNA, 22 bp, synthetic construct
  misc_feature 1..22: note = chemically synthesized
  source 1..22: mol_type = other DNA
cttaaacctgtcttgtaacctt

SEQ ID NO: 89635 - DNA, 22 bp, synthetic construct
  misc_feature 1..22: note = chemically synthesized
  source 1..22: mol_type = other DNA
aaacctgtcttgtaaccttgat

SEQ ID NO: 89636 - DNA, 22 bp, synthetic construct
  misc_feature 1..22: note = chemically synthesized
  source 1..22: mol_type = other DNA
aacctgtcttgtaaccttgata

SEQ ID NO: 89637 - DNA, 22 bp, synthetic construct
  misc_feature 1..22: note = chemically synthesized
  source 1..22: mol_type = other DNA
tcttgtaaccttgataccaacc

SEQ ID NO: 89638 - DNA, 22 bp, synthetic construct
  misc_feature 1..22: note = chemically synthesized
  source 1..22: mol_type = other DNA
gtaaccttgataccaacctgcc

SEQ ID NO: 89639 - DNA, 22 bp, synthetic construct
  misc_feature 1..22: note = chemically synthesized
  source 1..22: mol_type = other DNA
taaccttgataccaacctgccc

SEQ ID NO: 89640 - DNA, 22 bp, synthetic construct
  misc_feature 1..22: note = chemically synthesized
  source 1..22: mol_type = other DNA
gataccaacctgcccagggcct

SEQ ID NO: 89641 - DNA, 22 bp, synthetic construct
  misc_feature 1..22: note = chemically synthesized
  source 1..22: mol_type = other DNA
ataccaacctgcccagggcctc

SEQ ID NO: 89642 - DNA, 22 bp, synthetic construct
  misc_feature 1..22: note = chemically synthesized
  source 1..22: mol_type = other DNA
cccagggcctcaccaccaactt

SEQ ID NO: 89643 - DNA, 22 bp, synthetic construct
  misc_feature 1..22: note = chemically synthesized
  source 1..22: mol_type = other DNA
accaccaacttcatccacgttc

SEQ ID NO: 89644 - DNA, 22 bp, synthetic construct
  misc_feature 1..22: note = chemically synthesized
  source 1..22: mol_type = other DNA
catccacgttcaccttgcccca

SEQ ID NO: 89645 - DNA, 22 bp, synthetic construct
  misc_feature 1..22: note = chemically synthesized
  source 1..22: mol_type = other DNA
atccacgttcaccttgccccac

SEQ ID NO: 89646 - DNA, 22 bp, synthetic construct
  misc_feature 1..22: note = chemically synthesized
  source 1..22: mol_type = other DNA
accttgccccacagggcagtaa

SEQ ID NO: 89647 - DNA, 22 bp, synthetic construct
  misc_feature 1..22: note = chemically synthesized
  source 1..22: mol_type = other DNA
gccccacagggcagtaacggca

SEQ ID NO: 89648 - DNA, 22 bp, synthetic construct
  misc_feature 1..22: note = chemically synthesized
  source 1..22: mol_type = other DNA
ccccacagggcagtaacggcag

SEQ ID NO: 89649 - DNA, 22 bp, synthetic construct
  misc_feature 1..22: note = chemically synthesized
  source 1..22: mol_type = other DNA
ctcctcaggagtcagatgcacc

SEQ ID NO: 89650 - DNA, 22 bp, synthetic construct
  misc_feature 1..22: note = chemically synthesized
  source 1..22: mol_type = other DNA
tcctcaggagtcagatgcacca

SEQ ID NO: 89651 - DNA, 22 bp, synthetic construct
  misc_feature 1..22: note = chemically synthesized
  source 1..22: mol_type = other DNA
ctcaggagtcagatgcaccatg

SEQ ID NO: 89652 - DNA, 22 bp, synthetic construct
  misc_feature 1..22: note = chemically synthesized
  source 1..22: mol_type = other DNA
aggagtcagatgcaccatggtg

SEQ ID NO: 89653 - DNA, 22 bp, synthetic construct
  misc_feature 1..22: note = chemically synthesized
  source 1..22: mol_type = other DNA
tttgaggttgctagtgaacaca

SEQ ID NO: 89654 - DNA, 22 bp, synthetic construct
  misc_feature 1..22: note = chemically synthesized
  source 1..22: mol_type = other DNA
gaggttgctagtgaacacagtt

SEQ ID NO: 89655 - DNA, 22 bp, synthetic construct
  misc_feature 1..22: note = chemically synthesized
  source 1..22: mol_type = other DNA
aggttgctagtgaacacagttg

SEQ ID NO: 89656 - DNA, 22 bp, synthetic construct
  misc_feature 1..22: note = chemically synthesized
  source 1..22: mol_type = other DNA
ctagtgaacacagttgtgtcag

SEQ ID NO: 89657 - DNA, 22 bp, synthetic construct
  misc_feature 1..22: note = chemically synthesized
  source 1..22: mol_type = other DNA
gtgaacacagttgtgtcagaag

SEQ ID NO: 89658 - DNA, 22 bp, synthetic construct
  misc_feature 1..22: note = chemically synthesized
  source 1..22: mol_type = other DNA
tgtcagaagcaaatgtaagcaa

SEQ ID NO: 89659 - DNA, 22 bp, synthetic construct
  misc_feature 1..22: note = chemically synthesized
  source 1..22: mol_type = other DNA
tgccctgacttttatgcccagc

SEQ ID NO: 89660 - DNA, 22 bp, synthetic construct
  misc_feature 1..22: note = chemically synthesized
  source 1..22: mol_type = other DNA
ccctgacttttatgcccagccc

SEQ ID NO: 89661 - DNA, 22 bp, synthetic construct
  misc_feature 1..22: note = chemically synthesized
  source 1..22: mol_type = other DNA
acttttatgcccagccctggct

SEQ ID NO: 89662 - DNA, 22 bp, synthetic construct
  misc_feature 1..22: note = chemically synthesized
  source 1..22: mol_type = other DNA
ttatgcccagccctggctcctg

SEQ ID NO: 89663 - DNA, 22 bp, synthetic construct
  misc_feature 1..22: note = chemically synthesized
  source 1..22: mol_type = other DNA
tatgcccagccctggctcctgc

SEQ ID NO: 89664 - DNA, 22 bp, synthetic construct
  misc_feature 1..22: note = chemically synthesized
  source 1..22: mol_type = other DNA
atgcccagccctggctcctgcc

SEQ ID NO: 89665 - DNA, 22 bp, synthetic construct
  misc_feature 1..22: note = chemically synthesized
  source 1..22: mol_type = other DNA
tgcccagccctggctcctgccc

SEQ ID NO: 89666 - DNA, 22 bp, synthetic construct
  misc_feature 1..22: note = chemically synthesized
  source 1..22: mol_type = other DNA
gctcctgccctccctgctcctg

SEQ ID NO: 89667 - DNA, 22 bp, synthetic construct
  misc_feature 1..22: note = chemically synthesized
  source 1..22: mol_type = other DNA
ctgccctccctgctcctgggag

SEQ ID NO: 89668 - DNA, 22 bp, synthetic construct
  misc_feature 1..22: note = chemically synthesized
  source 1..22: mol_type = other DNA
ccctccctgctcctgggagtag

SEQ ID NO: 89669 - DNA, 22 bp, synthetic construct
  misc_feature 1..22: note = chemically synthesized
  source 1..22: mol_type = other DNA
cctgctcctgggagtagattgg

SEQ ID NO: 89670 - DNA, 22 bp, synthetic construct
  misc_feature 1..22: note = chemically synthesized
  source 1..22: mol_type = other DNA
ctcctgggagtagattggccaa

SEQ ID NO: 89671 - DNA, 22 bp, synthetic construct
  misc_feature 1..22: note = chemically synthesized
  source 1..22: mol_type = other DNA
ctgggagtagattggccaaccc

SEQ ID NO: 89672 - DNA, 22 bp, synthetic construct
  misc_feature 1..22: note = chemically synthesized
  source 1..22: mol_type = other DNA
ggagtagattggccaaccctag

SEQ ID NO: 89673 - DNA, 22 bp, synthetic construct
  misc_feature 1..22: note = chemically synthesized
  source 1..22: mol_type = other DNA
gccaaccctagggtgtggctcc

SEQ ID NO: 89674 - DNA, 22 bp, synthetic construct
  misc_feature 1..22: note = chemically synthesized
  source 1..22: mol_type = other DNA
gggtgtggctccacagggtgag

SEQ ID NO: 89675 - DNA, 22 bp, synthetic construct
  misc_feature 1..22: note = chemically synthesized
  source 1..22: mol_type = other DNA
cacagggtgaggtctaagtgat

SEQ ID NO: 89676 - DNA, 22 bp, synthetic construct
  misc_feature 1..22: note = chemically synthesized
  source 1..22: mol_type = other DNA
agtgatgacagccgtacctgtc

SEQ ID NO: 89677 - DNA, 22 bp, synthetic construct
  misc_feature 1..22: note = chemically synthesized
  source 1..22: mol_type = other DNA
tccttggctcttctggcactgg

SEQ ID NO: 89678 - DNA, 22 bp, synthetic construct
  misc_feature 1..22: note = chemically synthesized
  source 1..22: mol_type = other DNA
ggctcttctggcactggcttag

SEQ ID NO: 89679 - DNA, 22 bp, synthetic construct
  misc_feature 1..22: note = chemically synthesized
  source 1..22: mol_type = other DNA
gctcttctggcactggcttagg

SEQ ID NO: 89680 - DNA, 22 bp, synthetic construct
  misc_feature 1..22: note = chemically synthesized
  source 1..22: mol_type = other DNA
ttctggcactggcttaggagtt

SEQ ID NO: 89681 - DNA, 22 bp, synthetic construct
  misc_feature 1..22: note = chemically synthesized
  source 1..22: mol_type = other DNA
ctggcactggcttaggagttgg

SEQ ID NO: 89682 - DNA, 22 bp, synthetic construct
  misc_feature 1..22: note = chemically synthesized
  source 1..22: mol_type = other DNA
tggcactggcttaggagttgga

SEQ ID NO: 89683 - DNA, 22 bp, synthetic construct
  misc_feature 1..22: note = chemically synthesized
  source 1..22: mol_type = other DNA
gcactggcttaggagttggact

SEQ ID NO: 89684 - DNA, 22 bp, synthetic construct
  misc_feature 1..22: note = chemically synthesized
  source 1..22: mol_type = other DNA
gcttaggagttggacttcaaac

SEQ ID NO: 89685 - DNA, 22 bp, synthetic construct
  misc_feature 1..22: note = chemically synthesized
  source 1..22: mol_type = other DNA
aggagttggacttcaaaccctc

SEQ ID NO: 89686 - DNA, 22 bp, synthetic construct
  misc_feature 1..22: note = chemically synthesized
  source 1..22: mol_type = other DNA
ggagttggacttcaaaccctca

SEQ ID NO: 89687 - DNA, 22 bp, synthetic construct
  misc_feature 1..22: note = chemically synthesized
  source 1..22: mol_type = other DNA
gacttcaaaccctcagccctcc

SEQ ID NO: 89688 - DNA, 22 bp, synthetic construct
  misc_feature 1..22: note = chemically synthesized
  source 1..22: mol_type = other DNA
caaaccctcagccctccctcta

SEQ ID NO: 89689 - DNA, 22 bp, synthetic construct
  misc_feature 1..22: note = chemically synthesized
  source 1..22: mol_type = other DNA
aaaccctcagccctccctctaa

SEQ ID NO: 89690 - DNA, 22 bp, synthetic construct
  misc_feature 1..22: note = chemically synthesized
  source 1..22: mol_type = other DNA
agccctccctctaagatatatc

SEQ ID NO: 89691 - DNA, 22 bp, synthetic construct
  misc_feature 1..22: note = chemically synthesized
  source 1..22: mol_type = other DNA
cctctaagatatatctcttggc

SEQ ID NO: 89692 - DNA, 22 bp, synthetic construct
  misc_feature 1..22: note = chemically synthesized
  source 1..22: mol_type = other DNA
taagatatatctcttggcccca

SEQ ID NO: 89693 - DNA, 22 bp, synthetic construct
  misc_feature 1..22: note = chemically synthesized
  source 1..22: mol_type = other DNA
agatatatctcttggccccata

SEQ ID NO: 89694 - DNA, 22 bp, synthetic construct
  misc_feature 1..22: note = chemically synthesized
  source 1..22: mol_type = other DNA
ttggccccataccatcagtaca

SEQ ID NO: 89695 - DNA, 22 bp, synthetic construct
  misc_feature 1..22: note = chemically synthesized
  source 1..22: mol_type = other DNA
ggccccataccatcagtacaaa

SEQ ID NO: 89696 - DNA, 22 bp, synthetic construct
  misc_feature 1..22: note = chemically synthesized
  source 1..22: mol_type = other DNA
gccccataccatcagtacaaat

SEQ ID NO: 89697 - DNA, 22 bp, synthetic construct
  misc_feature 1..22: note = chemically synthesized
  source 1..22: mol_type = other DNA
ctactaaaaacatcctcctttg

SEQ ID NO: 89698 - DNA, 22 bp, synthetic construct
  misc_feature 1..22: note = chemically synthesized
  source 1..22: mol_type = other DNA
ctaaaaacatcctcctttgcaa

SEQ ID NO: 89699 - DNA, 22 bp, synthetic construct
  misc_feature 1..22: note = chemically synthesized
  source 1..22: mol_type = other DNA
aaaacatcctcctttgcaagtg

SEQ ID NO: 89700 - DNA, 22 bp, synthetic construct
  misc_feature 1..22: note = chemically synthesized
  source 1..22: mol_type = other DNA
ctttgcaagtgtatttacgtaa

SEQ ID NO: 89701 - DNA, 22 bp, synthetic construct
  misc_feature 1..22: note = chemically synthesized
  source 1..22: mol_type = other DNA
tgcaagtgtatttacgtaatat

SEQ ID NO: 89702 - DNA, 22 bp, synthetic construct
  misc_feature 1..22: note = chemically synthesized
  source 1..22: mol_type = other DNA
gcaagtgtatttacgtaatatt

SEQ ID NO: 89703 - DNA, 22 bp, synthetic construct
  misc_feature 1..22: note = chemically synthesized
  source 1..22: mol_type = other DNA
caagtgtatttacgtaatattt

SEQ ID NO: 89704 - DNA, 22 bp, synthetic construct
  misc_feature 1..22: note = chemically synthesized
  source 1..22: mol_type = other DNA
acgtaatatttggaatcacagc

SEQ ID NO: 89705 - DNA, 22 bp, synthetic construct
  misc_feature 1..22: note = chemically synthesized
  source 1..22: mol_type = other DNA
cgtaatatttggaatcacagct

SEQ ID NO: 89706 - DNA, 22 bp, synthetic construct
  misc_feature 1..22: note = chemically synthesized
  source 1..22: mol_type = other DNA
ggaatcacagcttggtaagcat

SEQ ID NO: 89707 - DNA, 22 bp, synthetic construct
  misc_feature 1..22: note = chemically synthesized
  source 1..22: mol_type = other DNA
gaatcacagcttggtaagcata

SEQ ID NO: 89708 - DNA, 22 bp, synthetic construct
  misc_feature 1..22: note = chemically synthesized
  source 1..22: mol_type = other DNA
ggtaagcatattgaagatcgtt

SEQ ID NO: 89709 - DNA, 22 bp, synthetic construct
  misc_feature 1..22: note = chemically synthesized
  source 1..22: mol_type = other DNA
gtaagcatattgaagatcgttt

SEQ ID NO: 89710 - DNA, 22 bp, synthetic construct
  misc_feature 1..22: note = chemically synthesized
  source 1..22: mol_type = other DNA
aagatcgttttcccaattttct

SEQ ID NO: 89711 - DNA, 22 bp, synthetic construct
  misc_feature 1..22: note = chemically synthesized
  source 1..22: mol_type = other DNA
tcccaattttcttattacacaa

SEQ ID NO: 89712 - DNA, 22 bp, synthetic construct
  misc_feature 1..22: note = chemically synthesized
  source 1..22: mol_type = other DNA
cccaattttcttattacacaaa

SEQ ID NO: 89713 - DNA, 22 bp, synthetic construct
  misc_feature 1..22: note = chemically synthesized
  source 1..22: mol_type = other DNA
ccaattttcttattacacaaat

SEQ ID NO: 89714 - DNA, 22 bp, synthetic construct
  misc_feature 1..22: note = chemically synthesized
  source 1..22: mol_type = other DNA
tcttattacacaaataagaagt

SEQ ID NO: 89715 - DNA, 22 bp, synthetic construct
  misc_feature 1..22: note = chemically synthesized
  source 1..22: mol_type = other DNA
cttattacacaaataagaagtt

SEQ ID NO: 89716 - DNA, 22 bp, synthetic construct
  misc_feature 1..22: note = chemically synthesized
  source 1..22: mol_type = other DNA
ttattacacaaataagaagttg

SEQ ID NO: 89717 - DNA, 22 bp, synthetic construct
  misc_feature 1..22: note = chemically synthesized
  source 1..22: mol_type = other DNA
attacacaaataagaagttgat

SEQ ID NO: 89718 - DNA, 22 bp, synthetic construct
  misc_feature 1..22: note = chemically synthesized
  source 1..22: mol_type = other DNA
ttacacaaataagaagttgatg

SEQ ID NO: 89719 - DNA, 22 bp, synthetic construct
  misc_feature 1..22: note = chemically synthesized
  source 1..22: mol_type = other DNA
cacaaataagaagttgatgcac

SEQ ID NO: 89720 - DNA, 22 bp, synthetic construct
  misc_feature 1..22: note = chemically synthesized
  source 1..22: mol_type = other DNA
atgcactaaaagtggaagagtt

SEQ ID NO: 89721 - DNA, 22 bp, synthetic construct
  misc_feature 1..22: note = chemically synthesized
  source 1..22: mol_type = other DNA
aaagtggaagagttttgtctac

SEQ ID NO: 89722 - DNA, 22 bp, synthetic construct
  misc_feature 1..22: note = chemically synthesized
  source 1..22: mol_type = other DNA
tgtctaccataattcagctttg

SEQ ID NO: 89723 - DNA, 22 bp, synthetic construct
  misc_feature 1..22: note = chemically synthesized
  source 1..22: mol_type = other DNA
gtctaccataattcagctttgg

SEQ ID NO: 89724 - DNA, 22 bp, synthetic construct
  misc_feature 1..22: note = chemically synthesized
  source 1..22: mol_type = other DNA
tctaccataattcagctttggg

SEQ ID NO: 89725 - DNA, 22 bp, synthetic construct
  misc_feature 1..22: note = chemically synthesized
  source 1..22: mol_type = other DNA
ccataattcagctttgggatat

SEQ ID NO: 89726 - DNA, 22 bp, synthetic construct
  misc_feature 1..22: note = chemically synthesized
  source 1..22: mol_type = other DNA
agctttgggatatgtagatgga

SEQ ID NO: 89727 - DNA, 22 bp, synthetic construct
  misc_feature 1..22: note = chemically synthesized
  source 1..22: mol_type = other DNA
tgggatatgtagatggatctct

SEQ ID NO: 89728 - DNA, 22 bp, synthetic construct
  misc_feature 1..22: note = chemically synthesized
  source 1..22: mol_type = other DNA
gggatatgtagatggatctctt

SEQ ID NO: 89729 - DNA, 22 bp, synthetic construct
  misc_feature 1..22: note = chemically synthesized
  source 1..22: mol_type = other DNA
ggatatgtagatggatctcttc

SEQ ID NO: 89730 - DNA, 22 bp, synthetic construct
  misc_feature 1..22: note = chemically synthesized
  source 1..22: mol_type = other DNA
ttcctgcgtctccagaatatgc

SEQ ID NO: 89731 - DNA, 22 bp, synthetic construct
  misc_feature 1..22: note = chemically synthesized
  source 1..22: mol_type = other DNA
cctgcgtctccagaatatgcaa

SEQ ID NO: 89732 - DNA, 22 bp, synthetic construct
  misc_feature 1..22: note = chemically synthesized
  source 1..22: mol_type = other DNA
ctgcgtctccagaatatgcaaa

SEQ ID NO: 89733 - DNA, 22 bp, synthetic construct
  misc_feature 1..22: note = chemically synthesized
  source 1..22: mol_type = other DNA
cgtctccagaatatgcaaaata

SEQ ID NO: 89734 - DNA, 22 bp, synthetic construct
  misc_feature 1..22: note = chemically synthesized
  source 1..22: mol_type = other DNA
cagaatatgcaaaatacttaca

SEQ ID NO: 89735 - DNA, 22 bp, synthetic construct
  misc_feature 1..22: note = chemically synthesized
  source 1..22: mol_type = other DNA
acaggacagaatggatgaaaac

SEQ ID NO: 89736 - DNA, 22 bp, synthetic construct
  misc_feature 1..22: note = chemically synthesized
  source 1..22: mol_type = other DNA
caggacagaatggatgaaaact

SEQ ID NO: 89737 - DNA, 22 bp, synthetic construct
  misc_feature 1..22: note = chemically synthesized
  source 1..22: mol_type = other DNA
tacctcggttctaagcatatct

SEQ ID NO: 89738 - DNA, 22 bp, synthetic construct
  misc_feature 1..22: note = chemically synthesized
  source 1..22: mol_type = other DNA
cctcggttctaagcatatcttc

SEQ ID NO: 89739 - DNA, 22 bp, synthetic construct
  misc_feature 1..22: note = chemically synthesized
  source 1..22: mol_type = other DNA
ggttctaagcatatcttctcct

SEQ ID NO: 89740 - DNA, 22 bp, synthetic construct
  misc_feature 1..22: note = chemically synthesized
  source 1..22: mol_type = other DNA
taagcatatcttctccttattt

SEQ ID NO: 89741 - DNA, 22 bp, synthetic construct
  misc_feature 1..22: note = chemically synthesized
  source 1..22: mol_type = other DNA
agcatatcttctccttatttgg

SEQ ID NO: 89742 - DNA, 22 bp, synthetic construct
  misc_feature 1..22: note = chemically synthesized
  source 1..22: mol_type = other DNA
ctccttatttggattaaaacct

SEQ ID NO: 89743 - DNA, 22 bp, synthetic construct
  misc_feature 1..22: note = chemically synthesized
  source 1..22: mol_type = other DNA
tccttatttggattaaaacctt

SEQ ID NO: 89744 - DNA, 22 bp, synthetic construct
  misc_feature 1..22: note = chemically synthesized
  source 1..22: mol_type = other DNA
cttatttggattaaaaccttct

SEQ ID NO: 89745 - DNA, 22 bp, synthetic construct
  misc_feature 1..22: note = chemically synthesized
  source 1..22: mol_type = other DNA
atttggattaaaaccttctggt

SEQ ID NO: 89746 - DNA, 22 bp, synthetic construct
  misc_feature 1..22: note = chemically synthesized
  source 1..22: mol_type = other DNA
tttggattaaaaccttctggta

SEQ ID NO: 89747 - DNA, 22 bp, synthetic construct
  misc_feature 1..22: note = chemically synthesized
  source 1..22: mol_type = other DNA
ggattaaaaccttctggtaaga

SEQ ID NO: 89748 - DNA, 22 bp, synthetic construct
  misc_feature 1..22: note = chemically synthesized
  source 1..22: mol_type = other DNA
gattaaaaccttctggtaagaa

SEQ ID NO: 89749 - DNA, 22 bp, synthetic construct
  misc_feature 1..22: note = chemically synthesized
  source 1..22: mol_type = other DNA
aaaccttctggtaagaaaagaa

SEQ ID NO: 89750 - DNA, 22 bp, synthetic construct
  misc_feature 1..22: note = chemically synthesized
  source 1..22: mol_type = other DNA
ctggtaagaaaagaaaaaatat

SEQ ID NO: 89751 - DNA, 22 bp, synthetic construct
  misc_feature 1..22: note = chemically synthesized
  source 1..22: mol_type = other DNA
tggtaagaaaagaaaaaatata

SEQ ID NO: 89752 - DNA, 22 bp, synthetic construct
  misc_feature 1..22: note = chemically synthesized
  source 1..22: mol_type = other DNA
gtaagaaaagaaaaaatatata

SEQ ID NO: 89753 - DNA, 22 bp, synthetic construct
  misc_feature 1..22: note = chemically synthesized
  source 1..22: mol_type = other DNA
atttgttgttgtttttcttaat

SEQ ID NO: 89754 - DNA, 22 bp, synthetic construct
  misc_feature 1..22: note = chemically synthesized
  source 1..22: mol_type = other DNA
gttgttgtttttcttaatttgc

SEQ ID NO: 89755 - DNA, 22 bp, synthetic construct
  misc_feature 1..22: note = chemically synthesized
  source 1..22: mol_type = other DNA
ttgttgtttttcttaatttgct

SEQ ID NO: 89756 - DNA, 22 bp, synthetic construct
  misc_feature 1..22: note = chemically synthesized
  source 1..22: mol_type = other DNA
ttgtttttcttaatttgctcat

SEQ ID NO: 89757 - DNA, 22 bp, synthetic construct
  misc_feature 1..22: note = chemically synthesized
  source 1..22: mol_type = other DNA
tttttcttaatttgctcatgca

SEQ ID NO: 89758 - DNA, 22 bp, synthetic construct
  misc_feature 1..22: note = chemically synthesized
  source 1..22: mol_type = other DNA
ttcttaatttgctcatgcatgc

SEQ ID NO: 89759 - DNA, 22 bp, synthetic construct
  misc_feature 1..22: note = chemically synthesized
  source 1..22: mol_type = other DNA
tcttaatttgctcatgcatgct

SEQ ID NO: 89760 - DNA, 22 bp, synthetic construct
  misc_feature 1..22: note = chemically synthesized
  source 1..22: mol_type = other DNA
cttaatttgctcatgcatgcta

SEQ ID NO: 89761 - DNA, 22 bp, synthetic construct
  misc_feature 1..22: note = chemically synthesized
  source 1..22: mol_type = other DNA
ttaatttgctcatgcatgctaa

SEQ ID NO: 89762 - DNA, 22 bp, synthetic construct
  misc_feature 1..22: note = chemically synthesized
  source 1..22: mol_type = other DNA
aatttgctcatgcatgctaata

SEQ ID NO: 89763 - DNA, 22 bp, synthetic construct
  misc_feature 1..22: note = chemically synthesized
  source 1..22: mol_type = other DNA
atttgctcatgcatgctaataa

SEQ ID NO: 89764 - DNA, 22 bp, synthetic construct
  misc_feature 1..22: note = chemically synthesized
  source 1..22: mol_type = other DNA
gctcatgcatgctaataaatta

SEQ ID NO: 89765 - DNA, 22 bp, synthetic construct
  misc_feature 1..22: note = chemically synthesized
  source 1..22: mol_type = other DNA
ctcatgcatgctaataaattat

SEQ ID NO: 89766 - DNA, 22 bp, synthetic construct
  misc_feature 1..22: note = chemically synthesized
  source 1..22: mol_type = other DNA
atgcatgctaataaattatgtc

SEQ ID NO: 89767 - DNA, 22 bp, synthetic construct
  misc_feature 1..22: note = chemically synthesized
  source 1..22: mol_type = other DNA
ataaattatgtctaaaaataga

SEQ ID NO: 89768 - DNA, 22 bp, synthetic construct
  misc_feature 1..22: note = chemically synthesized
  source 1..22: mol_type = other DNA
tgtctaaaaatagaataaatac

SEQ ID NO: 89769 - DNA, 22 bp, synthetic construct
  misc_feature 1..22: note = chemically synthesized
  source 1..22: mol_type = other DNA
aaaatagaataaatacaaatca

SEQ ID NO: 89770 - DNA, 22 bp, synthetic construct
  misc_feature 1..22: note = chemically synthesized
  source 1..22: mol_type = other DNA
tgtgcattagttacttattagg

SEQ ID NO: 89771 - DNA, 22 bp, synthetic construct
  misc_feature 1..22: note = chemically synthesized
  source 1..22: mol_type = other DNA
tgcattagttacttattaggtt

SEQ ID NO: 89772 - DNA, 22 bp, synthetic construct
  misc_feature 1..22: note = chemically synthesized
  source 1..22: mol_type = other DNA
gttacttattaggttttgggaa

SEQ ID NO: 89773 - DNA, 22 bp, synthetic construct
  misc_feature 1..22: note = chemically synthesized
  source 1..22: mol_type = other DNA
cttattaggttttgggaaacaa

SEQ ID NO: 89774 - DNA, 22 bp, synthetic construct
  misc_feature 1..22: note = chemically synthesized
  source 1..22: mol_type = other DNA
attaggttttgggaaacaagag

SEQ ID NO: 89775 - DNA, 22 bp, synthetic construct
  misc_feature 1..22: note = chemically synthesized
  source 1..22: mol_type = other DNA
ttaggttttgggaaacaagaga

SEQ ID NO: 89776 - DNA, 22 bp, synthetic construct
  misc_feature 1..22: note = chemically synthesized
  source 1..22: mol_type = other DNA
ggttttgggaaacaagagataa

SEQ ID NO: 89777 - DNA, 22 bp, synthetic construct
  misc_feature 1..22: note = chemically synthesized
  source 1..22: mol_type = other DNA
tgggaaacaagagataaaaaac

SEQ ID NO: 89778 - DNA, 22 bp, synthetic construct
  misc_feature 1..22: note = chemically synthesized
  source 1..22: mol_type = other DNA
gggaaacaagagataaaaaact

SEQ ID NO: 89779 - DNA, 22 bp, synthetic construct
  misc_feature 1..22: note = chemically synthesized
  source 1..22: mol_type = other DNA
ggaaacaagagataaaaaacta

SEQ ID NO: 89780 - DNA, 22 bp, synthetic construct
  misc_feature 1..22: note = chemically synthesized
  source 1..22: mol_type = other DNA
gagacctcttaatgcagtcaaa

SEQ ID NO: 89781 - DNA, 22 bp, synthetic construct
  misc_feature 1..22: note = chemically synthesized
  source 1..22: mol_type = other DNA
ttaatgcagtcaaaaatacaaa

SEQ ID NO: 89782 - DNA, 22 bp, synthetic construct
  misc_feature 1..22: note = chemically synthesized
  source 1..22: mol_type = other DNA
aatgcagtcaaaaatacaaata

SEQ ID NO: 89783 - DNA, 22 bp, synthetic construct
  misc_feature 1..22: note = chemically synthesized
  source 1..22: mol_type = other DNA
atgcagtcaaaaatacaaataa

SEQ ID NO: 89784 - DNA, 22 bp, synthetic construct
  misc_feature 1..22: note = chemically synthesized
  source 1..22: mol_type = other DNA
acaacccaaagtgtgactatca

SEQ ID NO: 89785 - DNA, 22 bp, synthetic construct
  misc_feature 1..22: note = chemically synthesized
  source 1..22: mol_type = other DNA
caacccaaagtgtgactatcaa

SEQ ID NO: 89786 - DNA, 22 bp, synthetic construct
  misc_feature 1..22: note = chemically synthesized
  source 1..22: mol_type = other DNA
tcaatggggtaatcagtggtgt

SEQ ID NO: 89787 - DNA, 22 bp, synthetic construct
  misc_feature 1..22: note = chemically synthesized
  source 1..22: mol_type = other DNA
actggggacatctaactgtttc

SEQ ID NO: 89788 - DNA, 22 bp, synthetic construct
  misc_feature 1..22: note = chemically synthesized
  source 1..22: mol_type = other DNA
gggacatctaactgtttctgcc

SEQ ID NO: 89789 - DNA, 22 bp, synthetic construct
  misc_feature 1..22: note = chemically synthesized
  source 1..22: mol_type = other DNA
actgtttctgcctggactaatc

SEQ ID NO: 89790 - DNA, 22 bp, synthetic construct
  misc_feature 1..22: note = chemically synthesized
  source 1..22: mol_type = other DNA
tttctgcctggactaatctgca

SEQ ID NO: 89791 - DNA, 22 bp, synthetic construct
  misc_feature 1..22: note = chemically synthesized
  source 1..22: mol_type = other DNA
ctgcctggactaatctgcaaga

SEQ ID NO: 89792 - DNA, 22 bp, synthetic construct
  misc_feature 1..22: note = chemically synthesized
  source 1..22: mol_type = other DNA
tgcctggactaatctgcaagag

SEQ ID NO: 89793 - DNA, 22 bp, synthetic construct
  misc_feature 1..22: note = chemically synthesized
  source 1..22: mol_type = other DNA
cctggactaatctgcaagagtg

SEQ ID NO: 89794 - DNA, 22 bp, synthetic construct
  misc_feature 1..22: note = chemically synthesized
  source 1..22: mol_type = other DNA
gactaatctgcaagagtgtctg

SEQ ID NO: 89795 - DNA, 22 bp, synthetic construct
  misc_feature 1..22: note = chemically synthesized
  source 1..22: mol_type = other DNA
atctgcaagagtgtctggggga

SEQ ID NO: 89796 - DNA, 22 bp, synthetic construct
  misc_feature 1..22: note = chemically synthesized
  source 1..22: mol_type = other DNA
caagagtgtctgggggaacaaa

SEQ ID NO: 89797 - DNA, 22 bp, synthetic construct
  misc_feature 1..22: note = chemically synthesized
  source 1..22: mol_type = other DNA
ggggaacaaaaagcctctgtga

SEQ ID NO: 89798 - DNA, 22 bp, synthetic construct
  misc_feature 1..22: note = chemically synthesized
  source 1..22: mol_type = other DNA
tgtgacttagaaagtaggggta

SEQ ID NO: 89799 - DNA, 22 bp, synthetic construct
  misc_feature 1..22: note = chemically synthesized
  source 1..22: mol_type = other DNA
tgacttagaaagtaggggtagg

SEQ ID NO: 89800 - DNA, 22 bp, synthetic construct
  misc_feature 1..22: note = chemically synthesized
  source 1..22: mol_type = other DNA
agaaagtaggggtaggagggga

SEQ ID NO: 89801 - DNA, 22 bp, synthetic construct
  misc_feature 1..22: note = chemically synthesized
  source 1..22: mol_type = other DNA
gaaagtaggggtaggaggggaa

SEQ ID NO: 89802 - DNA, 22 bp, synthetic construct
  misc_feature 1..22: note = chemically synthesized
  source 1..22: mol_type = other DNA
ctacttggctcagattattttt

SEQ ID NO: 89803 - DNA, 22 bp, synthetic construct
  misc_feature 1..22: note = chemically synthesized
  source 1..22: mol_type = other DNA
tacttggctcagattatttttt

SEQ ID NO: 89804 - DNA, 22 bp, synthetic construct
  misc_feature 1..22: note = chemically synthesized
  source 1..22: mol_type = other DNA
cttggctcagattatttttttc

SEQ ID NO: 89805 - DNA, 22 bp, synthetic construct
  misc_feature 1..22: note = chemically synthesized
  source 1..22: mol_type = other DNA
ggctcagattatttttttcctc

SEQ ID NO: 89806 - DNA, 22 bp, synthetic construct
  misc_feature 1..22: note = chemically synthesized
  source 1..22: mol_type = other DNA
gctcagattatttttttcctct

SEQ ID NO: 89807 - DNA, 22 bp, synthetic construct
  misc_feature 1..22: note = chemically synthesized
  source 1..22: mol_type = other DNA
agattatttttttcctctagtc

SEQ ID NO: 89808 - DNA, 22 bp, synthetic construct
  misc_feature 1..22: note = chemically synthesized
  source 1..22: mol_type = other DNA
tttttttcctctagtccactaa

SEQ ID NO: 89809 - DNA, 22 bp, synthetic construct
  misc_feature 1..22: note = chemically synthesized
  source 1..22: mol_type = other DNA
ttttcctctagtccactaagaa

SEQ ID NO: 89810 - DNA, 22 bp, synthetic construct
  misc_feature 1..22: note = chemically synthesized
  source 1..22: mol_type = other DNA
tttcctctagtccactaagaat

SEQ ID NO: 89811 - DNA, 22 bp, synthetic construct
  misc_feature 1..22: note = chemically synthesized
  source 1..22: mol_type = other DNA
ttcctctagtccactaagaata

SEQ ID NO: 89812 - DNA, 22 bp, synthetic construct
  misc_feature 1..22: note = chemically synthesized
  source 1..22: mol_type = other DNA
tcctctagtccactaagaatac

SEQ ID NO: 89813 - DNA, 22 bp, synthetic construct
  misc_feature 1..22: note = chemically synthesized
  source 1..22: mol_type = other DNA
cctctagtccactaagaatact

SEQ ID NO: 89814 - DNA, 22 bp, synthetic construct
  misc_feature 1..22: note = chemically synthesized
  source 1..22: mol_type = other DNA
ctctagtccactaagaatactg

SEQ ID NO: 89815 - DNA, 22 bp, synthetic construct
  misc_feature 1..22: note = chemically synthesized
  source 1..22: mol_type = other DNA
tagtccactaagaatactgcgt

SEQ ID NO: 89816 - DNA, 22 bp, synthetic construct
  misc_feature 1..22: note = chemically synthesized
  source 1..22: mol_type = other DNA
gtccactaagaatactgcgttt

SEQ ID NO: 89817 - DNA, 22 bp, synthetic construct
  misc_feature 1..22: note = chemically synthesized
  source 1..22: mol_type = other DNA
agaatactgcgttttaaaatca

SEQ ID NO: 89818 - DNA, 22 bp, synthetic construct
  misc_feature 1..22: note = chemically synthesized
  source 1..22: mol_type = other DNA
cgttttaaaatcatttccttga

SEQ ID NO: 89819 - DNA, 22 bp, synthetic construct
  misc_feature 1..22: note = chemically synthesized
  source 1..22: mol_type = other DNA
taaaatcatttccttgattcaa

SEQ ID NO: 89820 - DNA, 22 bp, synthetic construct
  misc_feature 1..22: note = chemically synthesized
  source 1..22: mol_type = other DNA
aaaatcatttccttgattcaag

SEQ ID NO: 89821 - DNA, 22 bp, synthetic construct
  misc_feature 1..22: note = chemically synthesized
  source 1..22: mol_type = other DNA
aaatcatttccttgattcaagt

SEQ ID NO: 89822 - DNA, 22 bp, synthetic construct
  misc_feature 1..22: note = chemically synthesized
  source 1..22: mol_type = other DNA
ccttgattcaagttcctatttc

SEQ ID NO: 89823 - DNA, 22 bp, synthetic construct
  misc_feature 1..22: note = chemically synthesized
  source 1..22: mol_type = other DNA
cttgattcaagttcctatttct

SEQ ID NO: 89824 - DNA, 22 bp, synthetic construct
  misc_feature 1..22: note = chemically synthesized
  source 1..22: mol_type = other DNA
gattcaagttcctatttctctt

SEQ ID NO: 89825 - DNA, 22 bp, synthetic construct
  misc_feature 1..22: note = chemically synthesized
  source 1..22: mol_type = other DNA
attcaagttcctatttctcttt

SEQ ID NO: 89826 - DNA, 22 bp, synthetic construct
  misc_feature 1..22: note = chemically synthesized
  source 1..22: mol_type = other DNA
aagttcctatttctctttatat

SEQ ID NO: 89827 - DNA, 22 bp, synthetic construct
  misc_feature 1..22: note = chemically synthesized
  source 1..22: mol_type = other DNA
ctatttctctttatattttgtt

SEQ ID NO: 89828 - DNA, 22 bp, synthetic construct
  misc_feature 1..22: note = chemically synthesized
  source 1..22: mol_type = other DNA
tttctctttatattttgtttgt

SEQ ID NO: 89829 - DNA, 22 bp, synthetic construct
  misc_feature 1..22: note = chemically synthesized
  source 1..22: mol_type = other DNA
ctctttatattttgtttgttta

SEQ ID NO: 89830 - DNA, 22 bp, synthetic construct
  misc_feature 1..22: note = chemically synthesized
  source 1..22: mol_type = other DNA
tctttatattttgtttgtttaa

SEQ ID NO: 89831 - DNA, 22 bp, synthetic construct
  misc_feature 1..22: note = chemically synthesized
  source 1..22: mol_type = other DNA
tttatattttgtttgtttaaac

SEQ ID NO: 89832 - DNA, 22 bp, synthetic construct
  misc_feature 1..22: note = chemically synthesized
  source 1..22: mol_type = other DNA
tatattttgtttgtttaaacct

SEQ ID NO: 89833 - DNA, 22 bp, synthetic construct
  misc_feature 1..22: note = chemically synthesized
  source 1..22: mol_type = other DNA
atattttgtttgtttaaacctc

SEQ ID NO: 89834 - DNA, 22 bp, synthetic construct
  misc_feature 1..22: note = chemically synthesized
  source 1..22: mol_type = other DNA
tattttgtttgtttaaacctcc

SEQ ID NO: 89835 - DNA, 22 bp, synthetic construct
  misc_feature 1..22: note = chemically synthesized
  source 1..22: mol_type = other DNA
tgtttgtttaaacctcctttac

SEQ ID NO: 89836 - DNA, 22 bp, synthetic construct
  misc_feature 1..22: note = chemically synthesized
  source 1..22: mol_type = other DNA
gtttgtttaaacctcctttact

SEQ ID NO: 89837 - DNA, 22 bp, synthetic construct
  misc_feature 1..22: note = chemically synthesized
  source 1..22: mol_type = other DNA
tttgtttaaacctcctttacta

SEQ ID NO: 89838 - DNA, 22 bp, synthetic construct
  misc_feature 1..22: note = chemically synthesized
  source 1..22: mol_type = other DNA
gtttaaacctcctttactaaaa

SEQ ID NO: 89839 - DNA, 22 bp, synthetic construct
  misc_feature 1..22: note = chemically synthesized
  source 1..22: mol_type = other DNA
tttaaacctcctttactaaaat

SEQ ID NO: 89840 - DNA, 22 bp, synthetic construct
  misc_feature 1..22: note = chemically synthesized
  source 1..22: mol_type = other DNA
aaacctcctttactaaaattta

SEQ ID NO: 89841 - DNA, 22 bp, synthetic construct
  misc_feature 1..22: note = chemically synthesized
  source 1..22: mol_type = other DNA
aacctcctttactaaaatttac

SEQ ID NO: 89842 - DNA, 22 bp, synthetic construct
  misc_feature 1..22: note = chemically synthesized
  source 1..22: mol_type = other DNA
ctttactaaaatttactcttct

SEQ ID NO: 89843 - DNA, 22 bp, synthetic construct
  misc_feature 1..22: note = chemically synthesized
  source 1..22: mol_type = other DNA
tactaaaatttactcttctttc

SEQ ID NO: 89844 - DNA, 22 bp, synthetic construct
  misc_feature 1..22: note = chemically synthesized
  source 1..22: mol_type = other DNA
actaaaatttactcttctttct

SEQ ID NO: 89845 - DNA, 22 bp, synthetic construct
  misc_feature 1..22: note = chemically synthesized
  source 1..22: mol_type = other DNA
ctaaaatttactcttctttctc

SEQ ID NO: 89846 - DNA, 22 bp, synthetic construct
  misc_feature 1..22: note = chemically synthesized
  source 1..22: mol_type = other DNA
aaatttactcttctttctctat

SEQ ID NO: 89847 - DNA, 22 bp, synthetic construct
  misc_feature 1..22: note = chemically synthesized
  source 1..22: mol_type = other DNA
actcttctttctctatagcttc

SEQ ID NO: 89848 - DNA, 22 bp, synthetic construct
  misc_feature 1..22: note = chemically synthesized
  source 1..22: mol_type = other DNA
ctcttctttctctatagcttcc

SEQ ID NO: 89849 - DNA, 22 bp, synthetic construct
  misc_feature 1..22: note = chemically synthesized
  source 1..22: mol_type = other DNA
ttctttctctatagcttcccaa

SEQ ID NO: 89850 - DNA, 22 bp, synthetic construct
  misc_feature 1..22: note = chemically synthesized
  source 1..22: mol_type = other DNA
ctttctctatagcttcccaacg

SEQ ID NO: 89851 - DNA, 22 bp, synthetic construct
  misc_feature 1..22: note = chemically synthesized
  source 1..22: mol_type = other DNA
tttctctatagcttcccaacgt

SEQ ID NO: 89852 - DNA, 22 bp, synthetic construct
  misc_feature 1..22: note = chemically synthesized
  source 1..22: mol_type = other DNA
tctctatagcttcccaacgtga

SEQ ID NO: 89853 - DNA, 22 bp, synthetic construct
  misc_feature 1..22: note = chemically synthesized
  source 1..22: mol_type = other DNA
ctctatagcttcccaacgtgat

SEQ ID NO: 89854 - DNA, 22 bp, synthetic construct
  misc_feature 1..22: note = chemically synthesized
  source 1..22: mol_type = other DNA
tctatagcttcccaacgtgatc

SEQ ID NO: 89855 - DNA, 22 bp, synthetic construct
  misc_feature 1..22: note = chemically synthesized
  source 1..22: mol_type = other DNA
tatagcttcccaacgtgatcgc

SEQ ID NO: 89856 - DNA, 22 bp, synthetic construct
  misc_feature 1..22: note = chemically synthesized
  source 1..22: mol_type = other DNA
tagcttcccaacgtgatcgcct

SEQ ID NO: 89857 - DNA, 22 bp, synthetic construct
  misc_feature 1..22: note = chemically synthesized
  source 1..22: mol_type = other DNA
cccaacgtgatcgcctttctcc

SEQ ID NO: 89858 - DNA, 22 bp, synthetic construct
  misc_feature 1..22: note = chemically synthesized
  source 1..22: mol_type = other DNA
ccaacgtgatcgcctttctccc

SEQ ID NO: 89859 - DNA, 22 bp, synthetic construct
  misc_feature 1..22: note = chemically synthesized
  source 1..22: mol_type = other DNA
tctcccatccccctgtactttt

SEQ ID NO: 89860 - DNA, 22 bp, synthetic construct
  misc_feature 1..22: note = chemically synthesized
  source 1..22: mol_type = other DNA
ctcccatccccctgtacttttt

SEQ ID NO: 89861 - DNA, 22 bp, synthetic construct
  misc_feature 1..22: note = chemically synthesized
  source 1..22: mol_type = other DNA
tcccatccccctgtactttttc

SEQ ID NO: 89862 - DNA, 22 bp, synthetic construct
  misc_feature 1..22: note = chemically synthesized
  source 1..22: mol_type = other DNA
ccatccccctgtactttttccc

SEQ ID NO: 89863 - DNA, 22 bp, synthetic construct
  misc_feature 1..22: note = chemically synthesized
  source 1..22: mol_type = other DNA
tactttttccccttgtactaaa

SEQ ID NO: 89864 - DNA, 22 bp, synthetic construct
  misc_feature 1..22: note = chemically synthesized
  source 1..22: mol_type = other DNA
tttccccttgtactaaattaac

SEQ ID NO: 89865 - DNA, 22 bp, synthetic construct
  misc_feature 1..22: note = chemically synthesized
  source 1..22: mol_type = other DNA
ttccccttgtactaaattaact

SEQ ID NO: 89866 - DNA, 22 bp, synthetic construct
  misc_feature 1..22: note = chemically synthesized
  source 1..22: mol_type = other DNA
tccccttgtactaaattaactc

SEQ ID NO: 89867 - DNA, 22 bp, synthetic construct
  misc_feature 1..22: note = chemically synthesized
  source 1..22: mol_type = other DNA
ccccttgtactaaattaactcc

SEQ ID NO: 89868 - DNA, 22 bp, synthetic construct
  misc_feature 1..22: note = chemically synthesized
  source 1..22: mol_type = other DNA
cccttgtactaaattaactcct

SEQ ID NO: 89869 - DNA, 22 bp, synthetic construct
  misc_feature 1..22: note = chemically synthesized
  source 1..22: mol_type = other DNA
gtactaaattaactcctcaggt

SEQ ID NO: 89870 - DNA, 22 bp, synthetic construct
  misc_feature 1..22: note = chemically synthesized
  source 1..22: mol_type = other DNA
tactaaattaactcctcaggtg

SEQ ID NO: 89871 - DNA, 22 bp, synthetic construct
  misc_feature 1..22: note = chemically synthesized
  source 1..22: mol_type = other DNA
aattaactcctcaggtgaggaa

SEQ ID NO: 89872 - DNA, 22 bp, synthetic construct
  misc_feature 1..22: note = chemically synthesized
  source 1..22: mol_type = other DNA
actcctcaggtgaggaaaaact

SEQ ID NO: 89873 - DNA, 22 bp, synthetic construct
  misc_feature 1..22: note = chemically synthesized
  source 1..22: mol_type = other DNA
ctcaggtgaggaaaaacttttg

SEQ ID NO: 89874 - DNA, 22 bp, synthetic construct
  misc_feature 1..22: note = chemically synthesized
  source 1..22: mol_type = other DNA
aggtgaggaaaaacttttgaag

SEQ ID NO: 89875 - DNA, 22 bp, synthetic construct
  misc_feature 1..22: note = chemically synthesized
  source 1..22: mol_type = other DNA
ttgaagtgcagagttctgcttc

SEQ ID NO: 89876 - DNA, 22 bp, synthetic construct
  misc_feature 1..22: note = chemically synthesized
  source 1..22: mol_type = other DNA
tgaagtgcagagttctgcttcc

SEQ ID NO: 89877 - DNA, 22 bp, synthetic construct
  misc_feature 1..22: note = chemically synthesized
  source 1..22: mol_type = other DNA
gaagtgcagagttctgcttcct

SEQ ID NO: 89878 - DNA, 22 bp, synthetic construct
  misc_feature 1..22: note = chemically synthesized
  source 1..22: mol_type = other DNA
aagtgcagagttctgcttcctg

SEQ ID NO: 89879 - DNA, 22 bp, synthetic construct
  misc_feature 1..22: note = chemically synthesized
  source 1..22: mol_type = other DNA
tgcttcctgctattaaaagatg

SEQ ID NO: 89880 - DNA, 22 bp, synthetic construct
  misc_feature 1..22: note = chemically synthesized
  source 1..22: mol_type = other DNA
cttcctgctattaaaagatgta

SEQ ID NO: 89881 - DNA, 22 bp, synthetic construct
  misc_feature 1..22: note = chemically synthesized
  source 1..22: mol_type = other DNA
cctgctattaaaagatgtaatt

SEQ ID NO: 89882 - DNA, 22 bp, synthetic construct
  misc_feature 1..22: note = chemically synthesized
  source 1..22: mol_type = other DNA
ctgctattaaaagatgtaatta

SEQ ID NO: 89883 - DNA, 22 bp, synthetic construct
  misc_feature 1..22: note = chemically synthesized
  source 1..22: mol_type = other DNA
ctattaaaagatgtaattaaaa

SEQ ID NO: 89884 - DNA, 22 bp, synthetic construct
  misc_feature 1..22: note = chemically synthesized
  source 1..22: mol_type = other DNA
ttaaaagatgtaattaaaacag

SEQ ID NO: 89885 - DNA, 22 bp, synthetic construct
  misc_feature 1..22: note = chemically synthesized
  source 1..22: mol_type = other DNA
aaagatgtaattaaaacagcaa

SEQ ID NO: 89886 - DNA, 22 bp, synthetic construct
  misc_feature 1..22: note = chemically synthesized
  source 1..22: mol_type = other DNA
aaacagcaaaggtagcaagcat

SEQ ID NO: 89887 - DNA, 22 bp, synthetic construct
  misc_feature 1..22: note = chemically synthesized
  source 1..22: mol_type = other DNA
atgaggtcagcgtagggtctca

SEQ ID NO: 89888 - DNA, 22 bp, synthetic construct
  misc_feature 1..22: note = chemically synthesized
  source 1..22: mol_type = other DNA
tgaggtcagcgtagggtctcag

SEQ ID NO: 89889 - DNA, 22 bp, synthetic construct
  misc_feature 1..22: note = chemically synthesized
  source 1..22: mol_type = other DNA
agtgttccctaagggccctgtc

SEQ ID NO: 89890 - DNA, 22 bp, synthetic construct
  misc_feature 1..22: note = chemically synthesized
  source 1..22: mol_type = other DNA
cctaagggccctgtcagtcatc

SEQ ID NO: 89891 - DNA, 22 bp, synthetic construct
  misc_feature 1..22: note = chemically synthesized
  source 1..22: mol_type = other DNA
agggccctgtcagtcatcctga

SEQ ID NO: 89892 - DNA, 22 bp, synthetic construct
  misc_feature 1..22: note = chemically synthesized
  source 1..22: mol_type = other DNA
tcagtcatcctgaatcctgccc

SEQ ID NO: 89893 - DNA, 22 bp, synthetic construct
  misc_feature 1..22: note = chemically synthesized
  source 1..22: mol_type = other DNA
aatcctgcccctacctggaaac

SEQ ID NO: 89894 - DNA, 22 bp, synthetic construct
  misc_feature 1..22: note = chemically synthesized
  source 1..22: mol_type = other DNA
cccctacctggaaacccatgtc

SEQ ID NO: 89895 - DNA, 22 bp, synthetic construct
  misc_feature 1..22: note = chemically synthesized
  source 1..22: mol_type = other DNA
cctggaaacccatgtcggttta

SEQ ID NO: 89896 - DNA, 22 bp, synthetic construct
  misc_feature 1..22: note = chemically synthesized
  source 1..22: mol_type = other DNA
gaaacccatgtcggtttagtaa

SEQ ID NO: 89897 - DNA, 22 bp, synthetic construct
  misc_feature 1..22: note = chemically synthesized
  source 1..22: mol_type = other DNA
agtaaggaaagtgttatacttt

SEQ ID NO: 89898 - DNA, 22 bp, synthetic construct
  misc_feature 1..22: note = chemically synthesized
  source 1..22: mol_type = other DNA
gtaaggaaagtgttatactttt

SEQ ID NO: 89899 - DNA, 22 bp, synthetic construct
  misc_feature 1..22: note = chemically synthesized
  source 1..22: mol_type = other DNA
tacttttactttgcatgtttct

SEQ ID NO: 89900 - DNA, 22 bp, synthetic construct
  misc_feature 1..22: note = chemically synthesized
  source 1..22: mol_type = other DNA
ttactttgcatgtttctcctac

SEQ ID NO: 89901 - DNA, 22 bp, synthetic construct
  misc_feature 1..22: note = chemically synthesized
  source 1..22: mol_type = other DNA
tactttgcatgtttctcctact

SEQ ID NO: 89902 - DNA, 22 bp, synthetic construct
  misc_feature 1..22: note = chemically synthesized
  source 1..22: mol_type = other DNA
actttgcatgtttctcctactt

SEQ ID NO: 89903 - DNA, 22 bp, synthetic construct
  misc_feature 1..22: note = chemically synthesized
  source 1..22: mol_type = other DNA
ctttgcatgtttctcctacttc

SEQ ID NO: 89904 - DNA, 22 bp, synthetic construct
  misc_feature 1..22: note = chemically synthesized
  source 1..22: mol_type = other DNA
tgcatgtttctcctacttcttc

SEQ ID NO: 89905 - DNA, 22 bp, synthetic construct
  misc_feature 1..22: note = chemically synthesized
  source 1..22: mol_type = other DNA
gcatgtttctcctacttcttcc

SEQ ID NO: 89906 - DNA, 22 bp, synthetic construct
  misc_feature 1..22: note = chemically synthesized
  source 1..22: mol_type = other DNA
catgtttctcctacttcttcct

SEQ ID NO: 89907 - DNA, 22 bp, synthetic construct
  misc_feature 1..22: note = chemically synthesized
  source 1..22: mol_type = other DNA
ctcctacttcttcctttcagct

SEQ ID NO: 89908 - DNA, 22 bp, synthetic construct
  misc_feature 1..22: note = chemically synthesized
  source 1..22: mol_type = other DNA
tcctacttcttcctttcagctc

SEQ ID NO: 89909 - DNA, 22 bp, synthetic construct
  misc_feature 1..22: note = chemically synthesized
  source 1..22: mol_type = other DNA
ctacttcttcctttcagctcta

SEQ ID NO: 89910 - DNA, 22 bp, synthetic construct
  misc_feature 1..22: note = chemically synthesized
  source 1..22: mol_type = other DNA
cttcttcctttcagctctaaca

SEQ ID NO: 89911 - DNA, 22 bp, synthetic construct
  misc_feature 1..22: note = chemically synthesized
  source 1..22: mol_type = other DNA
cttcctttcagctctaacactc

SEQ ID NO: 89912 - DNA, 22 bp, synthetic construct
  misc_feature 1..22: note = chemically synthesized
  source 1..22: mol_type = other DNA
ttcctttcagctctaacactct

SEQ ID NO: 89913 - DNA, 22 bp, synthetic construct
  misc_feature 1..22: note = chemically synthesized
  source 1..22: mol_type = other DNA
cctttcagctctaacactctga

SEQ ID NO: 89914 - DNA, 22 bp, synthetic construct
  misc_feature 1..22: note = chemically synthesized
  source 1..22: mol_type = other DNA
ctttcagctctaacactctgaa

SEQ ID NO: 89915 - DNA, 22 bp, synthetic construct
  misc_feature 1..22: note = chemically synthesized
  source 1..22: mol_type = other DNA
tcagctctaacactctgaaact

SEQ ID NO: 89916 - DNA, 22 bp, synthetic construct
  misc_feature 1..22: note = chemically synthesized
  source 1..22: mol_type = other DNA
cagctctaacactctgaaacta

SEQ ID NO: 89917 - DNA, 22 bp, synthetic construct
  misc_feature 1..22: note = chemically synthesized
  source 1..22: mol_type = other DNA
agctctaacactctgaaactac

SEQ ID NO: 89918 - DNA, 22 bp, synthetic construct
  misc_feature 1..22: note = chemically synthesized
  source 1..22: mol_type = other DNA
taacactctgaaactacgatta

SEQ ID NO: 89919 - DNA, 22 bp, synthetic construct
  misc_feature 1..22: note = chemically synthesized
  source 1..22: mol_type = other DNA
acactctgaaactacgattaca

SEQ ID NO: 89920 - DNA, 22 bp, synthetic construct
  misc_feature 1..22: note = chemically synthesized
  source 1..22: mol_type = other DNA
tgaaactacgattacacaaaat

SEQ ID NO: 89921 - DNA, 22 bp, synthetic construct
  misc_feature 1..22: note = chemically synthesized
  source 1..22: mol_type = other DNA
aaactacgattacacaaaataa

SEQ ID NO: 89922 - DNA, 22 bp, synthetic construct
  misc_feature 1..22: note = chemically synthesized
  source 1..22: mol_type = other DNA
cgattacacaaaataaaataaa

SEQ ID NO: 89923 - DNA, 22 bp, synthetic construct
  misc_feature 1..22: note = chemically synthesized
  source 1..22: mol_type = other DNA
cacaaaataaaataaaataaaa

SEQ ID NO: 89924 - DNA, 22 bp, synthetic construct
  misc_feature 1..22: note = chemically synthesized
  source 1..22: mol_type = other DNA
aggttaaccaaaagaaactgga

SEQ ID NO: 89925 - DNA, 22 bp, synthetic construct
  misc_feature 1..22: note = chemically synthesized
  source 1..22: mol_type = other DNA
ggttaaccaaaagaaactggat

SEQ ID NO: 89926 - DNA, 22 bp, synthetic construct
  misc_feature 1..22: note = chemically synthesized
  source 1..22: mol_type = other DNA
accaaaagaaactggatcctct

SEQ ID NO: 89927 - DNA, 22 bp, synthetic construct
  misc_feature 1..22: note = chemically synthesized
  source 1..22: mol_type = other DNA
gatcctctatttctagttatca

SEQ ID NO: 89928 - DNA, 22 bp, synthetic construct
  misc_feature 1..22: note = chemically synthesized
  source 1..22: mol_type = other DNA
tatttctagttatcagaaggaa

SEQ ID NO: 89929 - DNA, 22 bp, synthetic construct
  misc_feature 1..22: note = chemically synthesized
  source 1..22: mol_type = other DNA
tttctagttatcagaaggaaat

SEQ ID NO: 89930 - DNA, 22 bp, synthetic construct
  misc_feature 1..22: note = chemically synthesized
  source 1..22: mol_type = other DNA
ctagttatcagaaggaaattta

SEQ ID NO: 89931 - DNA, 22 bp, synthetic construct
  misc_feature 1..22: note = chemically synthesized
  source 1..22: mol_type = other DNA
tagttatcagaaggaaatttac

SEQ ID NO: 89932 - DNA, 22 bp, synthetic construct
  misc_feature 1..22: note = chemically synthesized
  source 1..22: mol_type = other DNA
gttatcagaaggaaatttacaa

SEQ ID NO: 89933 - DNA, 22 bp, synthetic construct
  misc_feature 1..22: note = chemically synthesized
  source 1..22: mol_type = other DNA
tcagaaggaaatttacaaattt

SEQ ID NO: 89934 - DNA, 22 bp, synthetic construct
  misc_feature 1..22: note = chemically synthesized
  source 1..22: mol_type = other DNA
acaaatttcttatttccattgc

SEQ ID NO: 89935 - DNA, 22 bp, synthetic construct
  misc_feature 1..22: note = chemically synthesized
  source 1..22: mol_type = other DNA
caaatttcttatttccattgct

SEQ ID NO: 89936 - DNA, 22 bp, synthetic construct
  misc_feature 1..22: note = chemically synthesized
  source 1..22: mol_type = other DNA
cttatttccattgctttattct

SEQ ID NO: 89937 - DNA, 22 bp, synthetic construct
  misc_feature 1..22: note = chemically synthesized
  source 1..22: mol_type = other DNA
ttatttccattgctttattctc

SEQ ID NO: 89938 - DNA, 22 bp, synthetic construct
  misc_feature 1..22: note = chemically synthesized
  source 1..22: mol_type = other DNA
atttccattgctttattctctt

SEQ ID NO: 89939 - DNA, 22 bp, synthetic construct
  misc_feature 1..22: note = chemically synthesized
  source 1..22: mol_type = other DNA
tttccattgctttattctctta

SEQ ID NO: 89940 - DNA, 22 bp, synthetic construct
  misc_feature 1..22: note = chemically synthesized
  source 1..22: mol_type = other DNA
ccattgctttattctcttaaat

SEQ ID NO: 89941 - DNA, 22 bp, synthetic construct
  misc_feature 1..22: note = chemically synthesized
  source 1..22: mol_type = other DNA
cattgctttattctcttaaatg

SEQ ID NO: 89942 - DNA, 22 bp, synthetic construct
  misc_feature 1..22: note = chemically synthesized
  source 1..22: mol_type = other DNA
ctttattctcttaaatgctttc

SEQ ID NO: 89943 - DNA, 22 bp, synthetic construct
  misc_feature 1..22: note = chemically synthesized
  source 1..22: mol_type = other DNA
tattctcttaaatgctttctct

SEQ ID NO: 89944 - DNA, 22 bp, synthetic construct
  misc_feature 1..22: note = chemically synthesized
  source 1..22: mol_type = other DNA
attctcttaaatgctttctcta

SEQ ID NO: 89945 - DNA, 22 bp, synthetic construct
  misc_feature 1..22: note = chemically synthesized
  source 1..22: mol_type = other DNA
ttctcttaaatgctttctctat

SEQ ID NO: 89946 - DNA, 22 bp, synthetic construct
  misc_feature 1..22: note = chemically synthesized
  source 1..22: mol_type = other DNA
tcttaaatgctttctctattat

SEQ ID NO: 89947 - DNA, 22 bp, synthetic construct
  misc_feature 1..22: note = chemically synthesized
  source 1..22: mol_type = other DNA
ttaaatgctttctctattattg

SEQ ID NO: 89948 - DNA, 22 bp, synthetic construct
  misc_feature 1..22: note = chemically synthesized
  source 1..22: mol_type = other DNA
aaatgctttctctattattgct

SEQ ID NO: 89949 - DNA, 22 bp, synthetic construct
  misc_feature 1..22: note = chemically synthesized
  source 1..22: mol_type = other DNA
aatgctttctctattattgcta

SEQ ID NO: 89950 - DNA, 22 bp, synthetic construct
  misc_feature 1..22: note = chemically synthesized
  source 1..22: mol_type = other DNA
tctctattattgctaaataaat

SEQ ID NO: 89951 - DNA, 22 bp, synthetic construct
  misc_feature 1..22: note = chemically synthesized
  source 1..22: mol_type = other DNA
ctctattattgctaaataaata

SEQ ID NO: 89952 - DNA, 22 bp, synthetic construct
  misc_feature 1..22: note = chemically synthesized
  source 1..22: mol_type = other DNA
tctattattgctaaataaatag

SEQ ID NO: 89953 - DNA, 22 bp, synthetic construct
  misc_feature 1..22: note = chemically synthesized
  source 1..22: mol_type = other DNA
tattattgctaaataaatagag

SEQ ID NO: 89954 - DNA, 22 bp, synthetic construct
  misc_feature 1..22: note = chemically synthesized
  source 1..22: mol_type = other DNA
ttattgctaaataaatagagat

SEQ ID NO: 89955 - DNA, 22 bp, synthetic construct
  misc_feature 1..22: note = chemically synthesized
  source 1..22: mol_type = other DNA
ttgctaaataaatagagatctc

SEQ ID NO: 89956 - DNA, 22 bp, synthetic construct
  misc_feature 1..22: note = chemically synthesized
  source 1..22: mol_type = other DNA
ctaaataaatagagatctctca

SEQ ID NO: 89957 - DNA, 22 bp, synthetic construct
  misc_feature 1..22: note = chemically synthesized
  source 1..22: mol_type = other DNA
aataaatagagatctctcactt

SEQ ID NO: 89958 - DNA, 22 bp, synthetic construct
  misc_feature 1..22: note = chemically synthesized
  source 1..22: mol_type = other DNA
tcactttttctacctgtctcaa

SEQ ID NO: 89959 - DNA, 22 bp, synthetic construct
  misc_feature 1..22: note = chemically synthesized
  source 1..22: mol_type = other DNA
actttttctacctgtctcaacc

SEQ ID NO: 89960 - DNA, 22 bp, synthetic construct
  misc_feature 1..22: note = chemically synthesized
  source 1..22: mol_type = other DNA
tttctacctgtctcaaccctca

SEQ ID NO: 89961 - DNA, 22 bp, synthetic construct
  misc_feature 1..22: note = chemically synthesized
  source 1..22: mol_type = other DNA
ttctacctgtctcaaccctcat

SEQ ID NO: 89962 - DNA, 22 bp, synthetic construct
  misc_feature 1..22: note = chemically synthesized
  source 1..22: mol_type = other DNA
tctacctgtctcaaccctcatc

SEQ ID NO: 89963 - DNA, 22 bp, synthetic construct
  misc_feature 1..22: note = chemically synthesized
  source 1..22: mol_type = other DNA
ctacctgtctcaaccctcatca

SEQ ID NO: 89964 - DNA, 22 bp, synthetic construct
  misc_feature 1..22: note = chemically synthesized
  source 1..22: mol_type = other DNA
tacctgtctcaaccctcatcag

SEQ ID NO: 89965 - DNA, 22 bp, synthetic construct
  misc_feature 1..22: note = chemically synthesized
  source 1..22: mol_type = other DNA
cctgtctcaaccctcatcaggt

SEQ ID NO: 89966 - DNA, 22 bp, synthetic construct
  misc_feature 1..22: note = chemically synthesized
  source 1..22: mol_type = other DNA
tctcaaccctcatcaggtactt

SEQ ID NO: 89967 - DNA, 22 bp, synthetic construct
  misc_feature 1..22: note = chemically synthesized
  source 1..22: mol_type = other DNA
aaccctcatcaggtacttgtga

SEQ ID NO: 89968 - DNA, 22 bp, synthetic construct
  misc_feature 1..22: note = chemically synthesized
  source 1..22: mol_type = other DNA
atcaggtacttgtgaaaaaatc

SEQ ID NO: 89969 - DNA, 22 bp, synthetic construct
  misc_feature 1..22: note = chemically synthesized
  source 1..22: mol_type = other DNA
gtgaaaaaatctcactctgatt

SEQ ID NO: 89970 - DNA, 22 bp, synthetic construct
  misc_feature 1..22: note = chemically synthesized
  source 1..22: mol_type = other DNA
tgaaaaaatctcactctgatta

SEQ ID NO: 89971 - DNA, 22 bp, synthetic construct
  misc_feature 1..22: note = chemically synthesized
  source 1..22: mol_type = other DNA
actctgattattctcacacacg

SEQ ID NO: 89972 - DNA, 22 bp, synthetic construct
  misc_feature 1..22: note = chemically synthesized
  source 1..22: mol_type = other DNA
tgattattctcacacacgcaga

SEQ ID NO: 89973 - DNA, 22 bp, synthetic construct
  misc_feature 1..22: note = chemically synthesized
  source 1..22: mol_type = other DNA
attattctcacacacgcagaaa

SEQ ID NO: 89974 - DNA, 22 bp, synthetic construct
  misc_feature 1..22: note = chemically synthesized
  source 1..22: mol_type = other DNA
ttctcacacacgcagaaagtgt

SEQ ID NO: 89975 - DNA, 22 bp, synthetic construct
  misc_feature 1..22: note = chemically synthesized
  source 1..22: mol_type = other DNA
tcacacacgcagaaagtgtttg

SEQ ID NO: 89976 - DNA, 22 bp, synthetic construct
  misc_feature 1..22: note = chemically synthesized
  source 1..22: mol_type = other DNA
acacacgcagaaagtgtttggt

SEQ ID NO: 89977 - DNA, 22 bp, synthetic construct
  misc_feature 1..22: note = chemically synthesized
  source 1..22: mol_type = other DNA
ggttcttctatggctatctgga

SEQ ID NO: 89978 - DNA, 22 bp, synthetic construct
  misc_feature 1..22: note = chemically synthesized
  source 1..22: mol_type = other DNA
gttcttctatggctatctggag

SEQ ID NO: 89979 - DNA, 22 bp, synthetic construct
  misc_feature 1..22: note = chemically synthesized
  source 1..22: mol_type = other DNA
ttctatggctatctggagccta

SEQ ID NO: 89980 - DNA, 22 bp, synthetic construct
  misc_feature 1..22: note = chemically synthesized
  source 1..22: mol_type = other DNA
ctatggctatctggagcctagg

SEQ ID NO: 89981 - DNA, 22 bp, synthetic construct
  misc_feature 1..22: note = chemically synthesized
  source 1..22: mol_type = other DNA
tatggctatctggagcctaggt

SEQ ID NO: 89982 - DNA, 22 bp, synthetic construct
  misc_feature 1..22: note = chemically synthesized
  source 1..22: mol_type = other DNA
tggctatctggagcctaggtta

SEQ ID NO: 89983 - DNA, 22 bp, synthetic construct
  misc_feature 1..22: note = chemically synthesized
  source 1..22: mol_type = other DNA
tctggagcctaggttaaaaaat

SEQ ID NO: 89984 - DNA, 22 bp, synthetic construct
  misc_feature 1..22: note = chemically synthesized
  source 1..22: mol_type = other DNA
gagcctaggttaaaaaattatg

SEQ ID NO: 89985 - DNA, 22 bp, synthetic construct
  misc_feature 1..22: note = chemically synthesized
  source 1..22: mol_type = other DNA
ggttaaaaaattatgcctatgt

SEQ ID NO: 89986 - DNA, 22 bp, synthetic construct
  misc_feature 1..22: note = chemically synthesized
  source 1..22: mol_type = other DNA
aaaaattatgcctatgtatgat

SEQ ID NO: 89987 - DNA, 22 bp, synthetic construct
  misc_feature 1..22: note = chemically synthesized
  source 1..22: mol_type = other DNA
tgcctatgtatgattatagagg

SEQ ID NO: 89988 - DNA, 22 bp, synthetic construct
  misc_feature 1..22: note = chemically synthesized
  source 1..22: mol_type = other DNA
tgtatgattatagaggtaagag

SEQ ID NO: 89989 - DNA, 22 bp, synthetic construct
  misc_feature 1..22: note = chemically synthesized
  source 1..22: mol_type = other DNA
tagaggtaagagggataaaatt

SEQ ID NO: 89990 - DNA, 22 bp, synthetic construct
  misc_feature 1..22: note = chemically synthesized
  source 1..22: mol_type = other DNA
aagtattttctttttatattca

SEQ ID NO: 89991 - DNA, 22 bp, synthetic construct
  misc_feature 1..22: note = chemically synthesized
  source 1..22: mol_type = other DNA
agtattttctttttatattcat

SEQ ID NO: 89992 - DNA, 22 bp, synthetic construct
  misc_feature 1..22: note = chemically synthesized
  source 1..22: mol_type = other DNA
tctttttatattcattcctctg

SEQ ID NO: 89993 - DNA, 22 bp, synthetic construct
  misc_feature 1..22: note = chemically synthesized
  source 1..22: mol_type = other DNA
ctttttatattcattcctctgt

SEQ ID NO: 89994 - DNA, 22 bp, synthetic construct
  misc_feature 1..22: note = chemically synthesized
  source 1..22: mol_type = other DNA
tttttatattcattcctctgta

SEQ ID NO: 89995 - DNA, 22 bp, synthetic construct
  misc_feature 1..22: note = chemically synthesized
  source 1..22: mol_type = other DNA
tttatattcattcctctgtaaa

SEQ ID NO: 89996 - DNA, 22 bp, synthetic construct
  misc_feature 1..22: note = chemically synthesized
  source 1..22: mol_type = other DNA
ttatattcattcctctgtaaaa

SEQ ID NO: 89997 - DNA, 22 bp, synthetic construct
  misc_feature 1..22: note = chemically synthesized
  source 1..22: mol_type = other DNA
tatattcattcctctgtaaaaa

SEQ ID NO: 89998 - DNA, 22 bp, synthetic construct
  misc_feature 1..22: note = chemically synthesized
  source 1..22: mol_type = other DNA
atattcattcctctgtaaaaaa

SEQ ID NO: 89999 - DNA, 22 bp, synthetic construct
  misc_feature 1..22: note = chemically synthesized
  source 1..22: mol_type = other DNA
tattcattcctctgtaaaaaac

SEQ ID NO: 90000 - DNA, 22 bp, synthetic construct
  misc_feature 1..22: note = chemically synthesized
  source 1..22: mol_type = other DNA
attcctctgtaaaaaactaaag

SEQ ID NO: 90001 - DNA, 22 bp, synthetic construct
  misc_feature 1..22: note = chemically synthesized
  source 1..22: mol_type = other DNA
ctctgtaaaaaactaaagcaat

SEQ ID NO: 90002 - DNA, 22 bp, synthetic construct
  misc_feature 1..22: note = chemically synthesized
  source 1..22: mol_type = other DNA
tgtaaaaaactaaagcaatgag

SEQ ID NO: 90003 - DNA, 22 bp, synthetic construct
  misc_feature 1..22: note = chemically synthesized
  source 1..22: mol_type = other DNA
taaaaaactaaagcaatgagga

SEQ ID NO: 90004 - DNA, 22 bp, synthetic construct
  misc_feature 1..22: note = chemically synthesized
  source 1..22: mol_type = other DNA
aagcaatgaggatctaggcaca

SEQ ID NO: 90005 - DNA, 22 bp, synthetic construct
  misc_feature 1..22: note = chemically synthesized
  source 1..22: mol_type = other DNA
ggcacacgtgtatccctgagaa

SEQ ID NO: 90006 - DNA, 22 bp, synthetic construct
  misc_feature 1..22: note = chemically synthesized
  source 1..22: mol_type = other DNA
agaaaagatttcacatgttgaa

SEQ ID NO: 90007 - DNA, 22 bp, synthetic construct
  misc_feature 1..22: note = chemically synthesized
  source 1..22: mol_type = other DNA
cacatgttgaatcctgggaaaa

SEQ ID NO: 90008 - DNA, 22 bp, synthetic construct
  misc_feature 1..22: note = chemically synthesized
  source 1..22: mol_type = other DNA
acatgttgaatcctgggaaaag

SEQ ID NO: 90009 - DNA, 22 bp, synthetic construct
  misc_feature 1..22: note = chemically synthesized
  source 1..22: mol_type = other DNA
aatcctgggaaaagacgtcttt

SEQ ID NO: 90010 - DNA, 22 bp, synthetic construct
  misc_feature 1..22: note = chemically synthesized
  source 1..22: mol_type = other DNA
ggaaaagacgtctttaaaatat

SEQ ID NO: 90011 - DNA, 22 bp, synthetic construct
  misc_feature 1..22: note = chemically synthesized
  source 1..22: mol_type = other DNA
taaaatattttaaatgttaaaa

SEQ ID NO: 90012 - DNA, 22 bp, synthetic construct
  misc_feature 1..22: note = chemically synthesized
  source 1..22: mol_type = other DNA
aaaatattttaaatgttaaaac

SEQ ID NO: 90013 - DNA, 22 bp, synthetic construct
  misc_feature 1..22: note = chemically synthesized
  source 1..22: mol_type = other DNA
aaatattttaaatgttaaaaca

SEQ ID NO: 90014 - DNA, 22 bp, synthetic construct
  misc_feature 1..22: note = chemically synthesized
  source 1..22: mol_type = other DNA
taaatgttaaaacatgcagatt

SEQ ID NO: 90015 - DNA, 22 bp, synthetic construct
  misc_feature 1..22: note = chemically synthesized
  source 1..22: mol_type = other DNA
aaatgttaaaacatgcagattt

SEQ ID NO: 90016 - DNA, 22 bp, synthetic construct
  misc_feature 1..22: note = chemically synthesized
  source 1..22: mol_type = other DNA
aatgttaaaacatgcagatttg

SEQ ID NO: 90017 - DNA, 22 bp, synthetic construct
  misc_feature 1..22: note = chemically synthesized
  source 1..22: mol_type = other DNA
aaacatgcagatttgacttggc

SEQ ID NO: 90018 - DNA, 22 bp, synthetic construct
  misc_feature 1..22: note = chemically synthesized
  source 1..22: mol_type = other DNA
gacttggctgttagattttgga

SEQ ID NO: 90019 - DNA, 22 bp, synthetic construct
  misc_feature 1..22: note = chemically synthesized
  source 1..22: mol_type = other DNA
acttggctgttagattttggat

SEQ ID NO: 90020 - DNA, 22 bp, synthetic construct
  misc_feature 1..22: note = chemically synthesized
  source 1..22: mol_type = other DNA
ggctgttagattttggatttta

SEQ ID NO: 90021 - DNA, 22 bp, synthetic construct
  misc_feature 1..22: note = chemically synthesized
  source 1..22: mol_type = other DNA
gctgttagattttggattttat

SEQ ID NO: 90022 - DNA, 22 bp, synthetic construct
  misc_feature 1..22: note = chemically synthesized
  source 1..22: mol_type = other DNA
ttagattttggattttatttta

SEQ ID NO: 90023 - DNA, 22 bp, synthetic construct
  misc_feature 1..22: note = chemically synthesized
  source 1..22: mol_type = other DNA
gattttggattttattttatta

SEQ ID NO: 90024 - DNA, 22 bp, synthetic construct
  misc_feature 1..22: note = chemically synthesized
  source 1..22: mol_type = other DNA
tggattttattttattaaattt

SEQ ID NO: 90025 - DNA, 22 bp, synthetic construct
  misc_feature 1..22: note = chemically synthesized
  source 1..22: mol_type = other DNA
ggattttattttattaaattta

SEQ ID NO: 90026 - DNA, 22 bp, synthetic construct
  misc_feature 1..22: note = chemically synthesized
  source 1..22: mol_type = other DNA
gattttattttattaaatttaa

SEQ ID NO: 90027 - DNA, 22 bp, synthetic construct
  misc_feature 1..22: note = chemically synthesized
  source 1..22: mol_type = other DNA
tattttattaaatttaaacctg

SEQ ID NO: 90028 - DNA, 22 bp, synthetic construct
  misc_feature 1..22: note = chemically synthesized
  source 1..22: mol_type = other DNA
attttattaaatttaaacctgc

SEQ ID NO: 90029 - DNA, 22 bp, synthetic construct
  misc_feature 1..22: note = chemically synthesized
  source 1..22: mol_type = other DNA
ttttattaaatttaaacctgca

SEQ ID NO: 90030 - DNA, 22 bp, synthetic construct
  misc_feature 1..22: note = chemically synthesized
  source 1..22: mol_type = other DNA
tattaaatttaaacctgcatta

SEQ ID NO: 90031 - DNA, 22 bp, synthetic construct
  misc_feature 1..22: note = chemically synthesized
  source 1..22: mol_type = other DNA
attaaatttaaacctgcattag

SEQ ID NO: 90032 - DNA, 22 bp, synthetic construct
  misc_feature 1..22: note = chemically synthesized
  source 1..22: mol_type = other DNA
ttaaatttaaacctgcattagc

SEQ ID NO: 90033 - DNA, 22 bp, synthetic construct
  misc_feature 1..22: note = chemically synthesized
  source 1..22: mol_type = other DNA
aatttaaacctgcattagcatt

SEQ ID NO: 90034 - DNA, 22 bp, synthetic construct
  misc_feature 1..22: note = chemically synthesized
  source 1..22: mol_type = other DNA
aaacctgcattagcattgtttt

SEQ ID NO: 90035 - DNA, 22 bp, synthetic construct
  misc_feature 1..22: note = chemically synthesized
  source 1..22: mol_type = other DNA
aacctgcattagcattgtttta

SEQ ID NO: 90036 - DNA, 22 bp, synthetic construct
  misc_feature 1..22: note = chemically synthesized
  source 1..22: mol_type = other DNA
cattagcattgttttagattta

SEQ ID NO: 90037 - DNA, 22 bp, synthetic construct
  misc_feature 1..22: note = chemically synthesized
  source 1..22: mol_type = other DNA
gcattgttttagatttagacag

SEQ ID NO: 90038 - DNA, 22 bp, synthetic construct
  misc_feature 1..22: note = chemically synthesized
  source 1..22: mol_type = other DNA
ttttagatttagacagttttca

SEQ ID NO: 90039 - DNA, 22 bp, synthetic construct
  misc_feature 1..22: note = chemically synthesized
  source 1..22: mol_type = other DNA
tagatttagacagttttcaaga

SEQ ID NO: 90040 - DNA, 22 bp, synthetic construct
  misc_feature 1..22: note = chemically synthesized
  source 1..22: mol_type = other DNA
agatttagacagttttcaagac

SEQ ID NO: 90041 - DNA, 22 bp, synthetic construct
  misc_feature 1..22: note = chemically synthesized
  source 1..22: mol_type = other DNA
gatttagacagttttcaagacc

SEQ ID NO: 90042 - DNA, 22 bp, synthetic construct
  misc_feature 1..22: note = chemically synthesized
  source 1..22: mol_type = other DNA
agacagttttcaagaccctgtt

SEQ ID NO: 90043 - DNA, 22 bp, synthetic construct
  misc_feature 1..22: note = chemically synthesized
  source 1..22: mol_type = other DNA
gacagttttcaagaccctgttt

SEQ ID NO: 90044 - DNA, 22 bp, synthetic construct
  misc_feature 1..22: note = chemically synthesized
  source 1..22: mol_type = other DNA
tcaagaccctgtttcacatccc

SEQ ID NO: 90045 - DNA, 22 bp, synthetic construct
  misc_feature 1..22: note = chemically synthesized
  source 1..22: mol_type = other DNA
caagaccctgtttcacatccct

SEQ ID NO: 90046 - DNA, 22 bp, synthetic construct
  misc_feature 1..22: note = chemically synthesized
  source 1..22: mol_type = other DNA
aagaccctgtttcacatccctg

SEQ ID NO: 90047 - DNA, 22 bp, synthetic construct
  misc_feature 1..22: note = chemically synthesized
  source 1..22: mol_type = other DNA
tttcacatccctgatataagag

SEQ ID NO: 90048 - DNA, 22 bp, synthetic construct
  misc_feature 1..22: note = chemically synthesized
  source 1..22: mol_type = other DNA
cacatccctgatataagaggca

SEQ ID NO: 90049 - DNA, 22 bp, synthetic construct
  misc_feature 1..22: note = chemically synthesized
  source 1..22: mol_type = other DNA
acatccctgatataagaggcat

SEQ ID NO: 90050 - DNA, 22 bp, synthetic construct
  misc_feature 1..22: note = chemically synthesized
  source 1..22: mol_type = other DNA
atataagaggcatgtatatgtg

SEQ ID NO: 90051 - DNA, 22 bp, synthetic construct
  misc_feature 1..22: note = chemically synthesized
  source 1..22: mol_type = other DNA
tgcggaagtttgaatatgtctt

SEQ ID NO: 90052 - DNA, 22 bp, synthetic construct
  misc_feature 1..22: note = chemically synthesized
  source 1..22: mol_type = other DNA
cggaagtttgaatatgtctttt

SEQ ID NO: 90053 - DNA, 22 bp, synthetic construct
  misc_feature 1..22: note = chemically synthesized
  source 1..22: mol_type = other DNA
gaatatgtcttttgcaaatatc

SEQ ID NO: 90054 - DNA, 22 bp, synthetic construct
  misc_feature 1..22: note = chemically synthesized
  source 1..22: mol_type = other DNA
aatatgtcttttgcaaatatcc

SEQ ID NO: 90055 - DNA, 22 bp, synthetic construct
  misc_feature 1..22: note = chemically synthesized
  source 1..22: mol_type = other DNA
ttgcaaatatcctgggtcaaag

SEQ ID NO: 90056 - DNA, 22 bp, synthetic construct
  misc_feature 1..22: note = chemically synthesized
  source 1..22: mol_type = other DNA
tgcaaatatcctgggtcaaaga

SEQ ID NO: 90057 - DNA, 22 bp, synthetic construct
  misc_feature 1..22: note = chemically synthesized
  source 1..22: mol_type = other DNA
gcaaatatcctgggtcaaagaa

SEQ ID NO: 90058 - DNA, 22 bp, synthetic construct
  misc_feature 1..22: note = chemically synthesized
  source 1..22: mol_type = other DNA
caaatatcctgggtcaaagaaa

SEQ ID NO: 90059 - DNA, 22 bp, synthetic construct
  misc_feature 1..22: note = chemically synthesized
  source 1..22: mol_type = other DNA
ggtcaaagaaaatgcacagact

SEQ ID NO: 90060 - DNA, 22 bp, synthetic construct
  misc_feature 1..22: note = chemically synthesized
  source 1..22: mol_type = other DNA
tatgaaattataatataggtta

SEQ ID NO: 90061 - DNA, 22 bp, synthetic construct
  misc_feature 1..22: note = chemically synthesized
  source 1..22: mol_type = other DNA
atgaaattataatataggttat

SEQ ID NO: 90062 - DNA, 22 bp, synthetic construct
  misc_feature 1..22: note = chemically synthesized
  source 1..22: mol_type = other DNA
tgaaattataatataggttata

SEQ ID NO: 90063 - DNA, 22 bp, synthetic construct
  misc_feature 1..22: note = chemically synthesized
  source 1..22: mol_type = other DNA
taatataggttatatttatagt

SEQ ID NO: 90064 - DNA, 22 bp, synthetic construct
  misc_feature 1..22: note = chemically synthesized
  source 1..22: mol_type = other DNA
tatttatagtattctgaaagac

SEQ ID NO: 90065 - DNA, 22 bp, synthetic construct
  misc_feature 1..22: note = chemically synthesized
  source 1..22: mol_type = other DNA
atagtattctgaaagaccaaaa

SEQ ID NO: 90066 - DNA, 22 bp, synthetic construct
  misc_feature 1..22: note = chemically synthesized
  source 1..22: mol_type = other DNA
tagtattctgaaagaccaaaat

SEQ ID NO: 90067 - DNA, 22 bp, synthetic construct
  misc_feature 1..22: note = chemically synthesized
  source 1..22: mol_type = other DNA
tgaaagaccaaaattgtcaaag

SEQ ID NO: 90068 - DNA, 22 bp, synthetic construct
  misc_feature 1..22: note = chemically synthesized
  source 1..22: mol_type = other DNA
aaagaccaaaattgtcaaagca

SEQ ID NO: 90069 - DNA, 22 bp, synthetic construct
  misc_feature 1..22: note = chemically synthesized
  source 1..22: mol_type = other DNA
tcaaagcaagagctttgaaatc

SEQ ID NO: 90070 - DNA, 22 bp, synthetic construct
  misc_feature 1..22: note = chemically synthesized
  source 1..22: mol_type = other DNA
tgaaatcctgattggcagaaat

SEQ ID NO: 90071 - DNA, 22 bp, synthetic construct
  misc_feature 1..22: note = chemically synthesized
  source 1..22: mol_type = other DNA
gaaatcctgattggcagaaatt

SEQ ID NO: 90072 - DNA, 22 bp, synthetic construct
  misc_feature 1..22: note = chemically synthesized
  source 1..22: mol_type = other DNA
aaatcctgattggcagaaattg

SEQ ID NO: 90073 - DNA, 22 bp, synthetic construct
  misc_feature 1..22: note = chemically synthesized
  source 1..22: mol_type = other DNA
attggcagaaattgtcaccttc

SEQ ID NO: 90074 - DNA, 22 bp, synthetic construct
  misc_feature 1..22: note = chemically synthesized
  source 1..22: mol_type = other DNA
gcagaaattgtcaccttcttaa

SEQ ID NO: 90075 - DNA, 22 bp, synthetic construct
  misc_feature 1..22: note = chemically synthesized
  source 1..22: mol_type = other DNA
tcaccttcttaaagacttaccc

SEQ ID NO: 90076 - DNA, 22 bp, synthetic construct
  misc_feature 1..22: note = chemically synthesized
  source 1..22: mol_type = other DNA
cttaaagacttaccctacaact

SEQ ID NO: 90077 - DNA, 22 bp, synthetic construct
  misc_feature 1..22: note = chemically synthesized
  source 1..22: mol_type = other DNA
ttaaagacttaccctacaactt

SEQ ID NO: 90078 - DNA, 22 bp, synthetic construct
  misc_feature 1..22: note = chemically synthesized
  source 1..22: mol_type = other DNA
aaagacttaccctacaacttct

SEQ ID NO: 90079 - DNA, 22 bp, synthetic construct
  misc_feature 1..22: note = chemically synthesized
  source 1..22: mol_type = other DNA
aagacttaccctacaacttctt

SEQ ID NO: 90080 - DNA, 22 bp, synthetic construct
  misc_feature 1..22: note = chemically synthesized
  source 1..22: mol_type = other DNA
accctacaacttcttatgctca

SEQ ID NO: 90081 - DNA, 22 bp, synthetic construct
  misc_feature 1..22: note = chemically synthesized
  source 1..22: mol_type = other DNA
ccctacaacttcttatgctcag

SEQ ID NO: 90082 - DNA, 22 bp, synthetic construct
  misc_feature 1..22: note = chemically synthesized
  source 1..22: mol_type = other DNA
caacttcttatgctcagaaata

SEQ ID NO: 90083 - DNA, 22 bp, synthetic construct
  misc_feature 1..22: note = chemically synthesized
  source 1..22: mol_type = other DNA
cttatgctcagaaatagttttc

SEQ ID NO: 90084 - DNA, 22 bp, synthetic construct
  misc_feature 1..22: note = chemically synthesized
  source 1..22: mol_type = other DNA
ttatgctcagaaatagttttcc

SEQ ID NO: 90085 - DNA, 22 bp, synthetic construct
  misc_feature 1..22: note = chemically synthesized
  source 1..22: mol_type = other DNA
atgctcagaaatagttttcctt

SEQ ID NO: 90086 - DNA, 22 bp, synthetic construct
  misc_feature 1..22: note = chemically synthesized
  source 1..22: mol_type = other DNA
tgctcagaaatagttttccttt

SEQ ID NO: 90087 - DNA, 22 bp, synthetic construct
  misc_feature 1..22: note = chemically synthesized
  source 1..22: mol_type = other DNA
agaaatagttttcctttttcta

SEQ ID NO: 90088 - DNA, 22 bp, synthetic construct
  misc_feature 1..22: note = chemically synthesized
  source 1..22: mol_type = other DNA
tcctttttctattttgttttct

SEQ ID NO: 90089 - DNA, 22 bp, synthetic construct
  misc_feature 1..22: note = chemically synthesized
  source 1..22: mol_type = other DNA
cctttttctattttgttttctt

SEQ ID NO: 90090 - DNA, 22 bp, synthetic construct
  misc_feature 1..22: note = chemically synthesized
  source 1..22: mol_type = other DNA
ctttttctattttgttttcttt

SEQ ID NO: 90091 - DNA, 22 bp, synthetic construct
  misc_feature 1..22: note = chemically synthesized
  source 1..22: mol_type = other DNA
tttctattttgttttctttttt

SEQ ID NO: 90092 - DNA, 22 bp, synthetic construct
  misc_feature 1..22: note = chemically synthesized
  source 1..22: mol_type = other DNA
ttctattttgttttctttttta

SEQ ID NO: 90093 - DNA, 22 bp, synthetic construct
  misc_feature 1..22: note = chemically synthesized
  source 1..22: mol_type = other DNA
tctattttgttttcttttttaa

SEQ ID NO: 90094 - DNA, 22 bp, synthetic construct
  misc_feature 1..22: note = chemically synthesized
  source 1..22: mol_type = other DNA
ctattttgttttcttttttaaa

SEQ ID NO: 90095 - DNA, 22 bp, synthetic construct
  misc_feature 1..22: note = chemically synthesized
  source 1..22: mol_type = other DNA
tattttgttttcttttttaaat

SEQ ID NO: 90096 - DNA, 22 bp, synthetic construct
  misc_feature 1..22: note = chemically synthesized
  source 1..22: mol_type = other DNA
ttttgttttcttttttaaatga

SEQ ID NO: 90097 - DNA, 22 bp, synthetic construct
  misc_feature 1..22: note = chemically synthesized
  source 1..22: mol_type = other DNA
tgttttcttttttaaatgatga

SEQ ID NO: 90098 - DNA, 22 bp, synthetic construct
  misc_feature 1..22: note = chemically synthesized
  source 1..22: mol_type = other DNA
gttttcttttttaaatgatgaa

SEQ ID NO: 90099 - DNA, 22 bp, synthetic construct
  misc_feature 1..22: note = chemically synthesized
  source 1..22: mol_type = other DNA
ttttcttttttaaatgatgaac

SEQ ID NO: 90100 - DNA, 22 bp, synthetic construct
  misc_feature 1..22: note = chemically synthesized
  source 1..22: mol_type = other DNA
tcttttttaaatgatgaactat

SEQ ID NO: 90101 - DNA, 22 bp, synthetic construct
  misc_feature 1..22: note = chemically synthesized
  source 1..22: mol_type = other DNA
cttttttaaatgatgaactatg

SEQ ID NO: 90102 - DNA, 22 bp, synthetic construct
  misc_feature 1..22: note = chemically synthesized
  source 1..22: mol_type = other DNA
ttttttaaatgatgaactatgg

SEQ ID NO: 90103 - DNA, 22 bp, synthetic construct
  misc_feature 1..22: note = chemically synthesized
  source 1..22: mol_type = other DNA
ttttaaatgatgaactatggat

SEQ ID NO: 90104 - DNA, 22 bp, synthetic construct
  misc_feature 1..22: note = chemically synthesized
  source 1..22: mol_type = other DNA
tttaaatgatgaactatggatc

SEQ ID NO: 90105 - DNA, 22 bp, synthetic construct
  misc_feature 1..22: note = chemically synthesized
  source 1..22: mol_type = other DNA
ttaaatgatgaactatggatcc

SEQ ID NO: 90106 - DNA, 22 bp, synthetic construct
  misc_feature 1..22: note = chemically synthesized
  source 1..22: mol_type = other DNA
taaatgatgaactatggatcct

SEQ ID NO: 90107 - DNA, 22 bp, synthetic construct
  misc_feature 1..22: note = chemically synthesized
  source 1..22: mol_type = other DNA
aaatgatgaactatggatcctt

SEQ ID NO: 90108 - DNA, 22 bp, synthetic construct
  misc_feature 1..22: note = chemically synthesized
  source 1..22: mol_type = other DNA
aatgatgaactatggatccttc

SEQ ID NO: 90109 - DNA, 22 bp, synthetic construct
  misc_feature 1..22: note = chemically synthesized
  source 1..22: mol_type = other DNA
tggatccttctcttgtgttggc

SEQ ID NO: 90110 - DNA, 22 bp, synthetic construct
  misc_feature 1..22: note = chemically synthesized
  source 1..22: mol_type = other DNA
ctcttgtgttggcaactgctgc

SEQ ID NO: 90111 - DNA, 22 bp, synthetic construct
  misc_feature 1..22: note = chemically synthesized
  source 1..22: mol_type = other DNA
tcttgtgttggcaactgctgca

SEQ ID NO: 90112 - DNA, 22 bp, synthetic construct
  misc_feature 1..22: note = chemically synthesized
  source 1..22: mol_type = other DNA
ttgtgttggcaactgctgcaga

SEQ ID NO: 90113 - DNA, 22 bp, synthetic construct
  misc_feature 1..22: note = chemically synthesized
  source 1..22: mol_type = other DNA
gtgttggcaactgctgcagata

SEQ ID NO: 90114 - DNA, 22 bp, synthetic construct
  misc_feature 1..22: note = chemically synthesized
  source 1..22: mol_type = other DNA
tgttggcaactgctgcagatac

SEQ ID NO: 90115 - DNA, 22 bp, synthetic construct
  misc_feature 1..22: note = chemically synthesized
  source 1..22: mol_type = other DNA
gcaactgctgcagataccatca

SEQ ID NO: 90116 - DNA, 22 bp, synthetic construct
  misc_feature 1..22: note = chemically synthesized
  source 1..22: mol_type = other DNA
ctgcagataccatcatcctggc

SEQ ID NO: 90117 - DNA, 22 bp, synthetic construct
  misc_feature 1..22: note = chemically synthesized
  source 1..22: mol_type = other DNA
cagataccatcatcctggcttc

SEQ ID NO: 90118 - DNA, 22 bp, synthetic construct
  misc_feature 1..22: note = chemically synthesized
  source 1..22: mol_type = other DNA
gcttcaaggcaggggttgcttt

SEQ ID NO: 90119 - DNA, 22 bp, synthetic construct
  misc_feature 1..22: note = chemically synthesized
  source 1..22: mol_type = other DNA
caaggcaggggttgcttttcca

SEQ ID NO: 90120 - DNA, 22 bp, synthetic construct
  misc_feature 1..22: note = chemically synthesized
  source 1..22: mol_type = other DNA
aaggcaggggttgcttttccaa

SEQ ID NO: 90121 - DNA, 22 bp, synthetic construct
  misc_feature 1..22: note = chemically synthesized
  source 1..22: mol_type = other DNA
cttttccaatggtagttactta

SEQ ID NO: 90122 - DNA, 22 bp, synthetic construct
  misc_feature 1..22: note = chemically synthesized
  source 1..22: mol_type = other DNA
ttccaatggtagttacttagtg

SEQ ID NO: 90123 - DNA, 22 bp, synthetic construct
  misc_feature 1..22: note = chemically synthesized
  source 1..22: mol_type = other DNA
tccaatggtagttacttagtgt

SEQ ID NO: 90124 - DNA, 22 bp, synthetic construct
  misc_feature 1..22: note = chemically synthesized
  source 1..22: mol_type = other DNA
ccaatggtagttacttagtgtg

SEQ ID NO: 90125 - DNA, 22 bp, synthetic construct
  misc_feature 1..22: note = chemically synthesized
  source 1..22: mol_type = other DNA
caatggtagttacttagtgtga

SEQ ID NO: 90126 - DNA, 22 bp, synthetic construct
  misc_feature 1..22: note = chemically synthesized
  source 1..22: mol_type = other DNA
cttagtgtgactagagtgtaac

SEQ ID NO: 90127 - DNA, 22 bp, synthetic construct
  misc_feature 1..22: note = chemically synthesized
  source 1..22: mol_type = other DNA
agtgtgactagagtgtaacgca

SEQ ID NO: 90128 - DNA, 22 bp, synthetic construct
  misc_feature 1..22: note = chemically synthesized
  source 1..22: mol_type = other DNA
gtgtgactagagtgtaacgcag

SEQ ID NO: 90129 - DNA, 22 bp, synthetic construct
  misc_feature 1..22: note = chemically synthesized
  source 1..22: mol_type = other DNA
gagtgtaacgcagacttttctt

SEQ ID NO: 90130 - DNA, 22 bp, synthetic construct
  misc_feature 1..22: note = chemically synthesized
  source 1..22: mol_type = other DNA
ttctttctattacccataatac

SEQ ID NO: 90131 - DNA, 22 bp, synthetic construct
  misc_feature 1..22: note = chemically synthesized
  source 1..22: mol_type = other DNA
tctttctattacccataatacc

SEQ ID NO: 90132 - DNA, 22 bp, synthetic construct
  misc_feature 1..22: note = chemically synthesized
  source 1..22: mol_type = other DNA
ctttctattacccataataccc

SEQ ID NO: 90133 - DNA, 22 bp, synthetic construct
  misc_feature 1..22: note = chemically synthesized
  source 1..22: mol_type = other DNA
tttctattacccataataccct

SEQ ID NO: 90134 - DNA, 22 bp, synthetic construct
  misc_feature 1..22: note = chemically synthesized
  source 1..22: mol_type = other DNA
tctattacccataataccctgc

SEQ ID NO: 90135 - DNA, 22 bp, synthetic construct
  misc_feature 1..22: note = chemically synthesized
  source 1..22: mol_type = other DNA
ctattacccataataccctgca

SEQ ID NO: 90136 - DNA, 22 bp, synthetic construct
  misc_feature 1..22: note = chemically synthesized
  source 1..22: mol_type = other DNA
tattacccataataccctgcag

SEQ ID NO: 90137 - DNA, 22 bp, synthetic construct
  misc_feature 1..22: note = chemically synthesized
  source 1..22: mol_type = other DNA
ttacccataataccctgcaggg

SEQ ID NO: 90138 - DNA, 22 bp, synthetic construct
  misc_feature 1..22: note = chemically synthesized
  source 1..22: mol_type = other DNA
cccataataccctgcagggaca

SEQ ID NO: 90139 - DNA, 22 bp, synthetic construct
  misc_feature 1..22: note = chemically synthesized
  source 1..22: mol_type = other DNA
cagggacaaggctgcaagctat

SEQ ID NO: 90140 - DNA, 22 bp, synthetic construct
  misc_feature 1..22: note = chemically synthesized
  source 1..22: mol_type = other DNA
caagctatactaagaccatcaa

SEQ ID NO: 90141 - DNA, 22 bp, synthetic construct
  misc_feature 1..22: note = chemically synthesized
  source 1..22: mol_type = other DNA
tactaagaccatcaaaagccca

SEQ ID NO: 90142 - DNA, 22 bp, synthetic construct
  misc_feature 1..22: note = chemically synthesized
  source 1..22: mol_type = other DNA
agaccatcaaaagcccaggcat

SEQ ID NO: 90143 - DNA, 22 bp, synthetic construct
  misc_feature 1..22: note = chemically synthesized
  source 1..22: mol_type = other DNA
caagaagcaataaatagtgcaa

SEQ ID NO: 90144 - DNA, 22 bp, synthetic construct
  misc_feature 1..22: note = chemically synthesized
  source 1..22: mol_type = other DNA
aagaagcaataaatagtgcaaa

SEQ ID NO: 90145 - DNA, 22 bp, synthetic construct
  misc_feature 1..22: note = chemically synthesized
  source 1..22: mol_type = other DNA
ggttatggtcagagcctcagtt

SEQ ID NO: 90146 - DNA, 22 bp, synthetic construct
  misc_feature 1..22: note = chemically synthesized
  source 1..22: mol_type = other DNA
gttatggtcagagcctcagttt

SEQ ID NO: 90147 - DNA, 22 bp, synthetic construct
  misc_feature 1..22: note = chemically synthesized
  source 1..22: mol_type = other DNA
tggtcagagcctcagtttcaaa

SEQ ID NO: 90148 - DNA, 22 bp, synthetic construct
  misc_feature 1..22: note = chemically synthesized
  source 1..22: mol_type = other DNA
agtttcaaatctaaatcagcat

SEQ ID NO: 90149 - DNA, 22 bp, synthetic construct
  misc_feature 1..22: note = chemically synthesized
  source 1..22: mol_type = other DNA
caaatctaaatcagcattcaaa

SEQ ID NO: 90150 - DNA, 22 bp, synthetic construct
  misc_feature 1..22: note = chemically synthesized
  source 1..22: mol_type = other DNA
aaatctaaatcagcattcaaag

SEQ ID NO: 90151 - DNA, 22 bp, synthetic construct
  misc_feature 1..22: note = chemically synthesized
  source 1..22: mol_type = other DNA
aatcagcattcaaagttcctga

SEQ ID NO: 90152 - DNA, 22 bp, synthetic construct
  misc_feature 1..22: note = chemically synthesized
  source 1..22: mol_type = other DNA
aaagttcctgaaaaactattca

SEQ ID NO: 90153 - DNA, 22 bp, synthetic construct
  misc_feature 1..22: note = chemically synthesized
  source 1..22: mol_type = other DNA
ctgaaaaactattcaagcttac

SEQ ID NO: 90154 - DNA, 22 bp, synthetic construct
  misc_feature 1..22: note = chemically synthesized
  source 1..22: mol_type = other DNA
aaaaactattcaagcttactga

SEQ ID NO: 90155 - DNA, 22 bp, synthetic construct
  misc_feature 1..22: note = chemically synthesized
  source 1..22: mol_type = other DNA
ttcaagcttactgacatcttca

SEQ ID NO: 90156 - DNA, 22 bp, synthetic construct
  misc_feature 1..22: note = chemically synthesized
  source 1..22: mol_type = other DNA
aagcttactgacatcttcacta

SEQ ID NO: 90157 - DNA, 22 bp, synthetic construct
  misc_feature 1..22: note = chemically synthesized
  source 1..22: mol_type = other DNA
actgacatcttcactattgtga

SEQ ID NO: 90158 - DNA, 22 bp, synthetic construct
  misc_feature 1..22: note = chemically synthesized
  source 1..22: mol_type = other DNA
ctgacatcttcactattgtgag

SEQ ID NO: 90159 - DNA, 22 bp, synthetic construct
  misc_feature 1..22: note = chemically synthesized
  source 1..22: mol_type = other DNA
acatcttcactattgtgagctt

SEQ ID NO: 90160 - DNA, 22 bp, synthetic construct
  misc_feature 1..22: note = chemically synthesized
  source 1..22: mol_type = other DNA
cactattgtgagcttgcttcta

SEQ ID NO: 90161 - DNA, 22 bp, synthetic construct
  misc_feature 1..22: note = chemically synthesized
  source 1..22: mol_type = other DNA
actattgtgagcttgcttctac

SEQ ID NO: 90162 - DNA, 22 bp, synthetic construct
  misc_feature 1..22: note = chemically synthesized
  source 1..22: mol_type = other DNA
ttgtgagcttgcttctactctg

SEQ ID NO: 90163 - DNA, 22 bp, synthetic construct
  misc_feature 1..22: note = chemically synthesized
  source 1..22: mol_type = other DNA
tgagcttgcttctactctgtga

SEQ ID NO: 90164 - DNA, 22 bp, synthetic construct
  misc_feature 1..22: note = chemically synthesized
  source 1..22: mol_type = other DNA
gcttctactctgtgaatggatg

SEQ ID NO: 90165 - DNA, 22 bp, synthetic construct
  misc_feature 1..22: note = chemically synthesized
  source 1..22: mol_type = other DNA
cttctactctgtgaatggatgc

SEQ ID NO: 90166 - DNA, 22 bp, synthetic construct
  misc_feature 1..22: note = chemically synthesized
  source 1..22: mol_type = other DNA
ctactctgtgaatggatgccac

SEQ ID NO: 90167 - DNA, 22 bp, synthetic construct
  misc_feature 1..22: note = chemically synthesized
  source 1..22: mol_type = other DNA
tactctgtgaatggatgccaca

SEQ ID NO: 90168 - DNA, 22 bp, synthetic construct
  misc_feature 1..22: note = chemically synthesized
  source 1..22: mol_type = other DNA
ctctgtgaatggatgccacagc

SEQ ID NO: 90169 - DNA, 22 bp, synthetic construct
  misc_feature 1..22: note = chemically synthesized
  source 1..22: mol_type = other DNA
tgtgaatggatgccacagcagg

SEQ ID NO: 90170 - DNA, 22 bp, synthetic construct
  misc_feature 1..22: note = chemically synthesized
  source 1..22: mol_type = other DNA
tgaatggatgccacagcaggtg

SEQ ID NO: 90171 - DNA, 22 bp, synthetic construct
  misc_feature 1..22: note = chemically synthesized
  source 1..22: mol_type = other DNA
ttctacttttattccagcccca

SEQ ID NO: 90172 - DNA, 22 bp, synthetic construct
  misc_feature 1..22: note = chemically synthesized
  source 1..22: mol_type = other DNA
tacttttattccagccccactg

SEQ ID NO: 90173 - DNA, 22 bp, synthetic construct
  misc_feature 1..22: note = chemically synthesized
  source 1..22: mol_type = other DNA
cttttattccagccccactgac

SEQ ID NO: 90174 - DNA, 22 bp, synthetic construct
  misc_feature 1..22: note = chemically synthesized
  source 1..22: mol_type = other DNA
ttattccagccccactgaccac

SEQ ID NO: 90175 - DNA, 22 bp, synthetic construct
  misc_feature 1..22: note = chemically synthesized
  source 1..22: mol_type = other DNA
tattccagccccactgaccaca

SEQ ID NO: 90176 - DNA, 22 bp, synthetic construct
  misc_feature 1..22: note = chemically synthesized
  source 1..22: mol_type = other DNA
attccagccccactgaccacaa

SEQ ID NO: 90177 - DNA, 22 bp, synthetic construct
  misc_feature 1..22: note = chemically synthesized
  source 1..22: mol_type = other DNA
ttccagccccactgaccacaac

SEQ ID NO: 90178 - DNA, 22 bp, synthetic construct
  misc_feature 1..22: note = chemically synthesized
  source 1..22: mol_type = other DNA
cagccccactgaccacaacaca

SEQ ID NO: 90179 - DNA, 22 bp, synthetic construct
  misc_feature 1..22: note = chemically synthesized
  source 1..22: mol_type = other DNA
accacaacacacacacacacac

SEQ ID NO: 90180 - DNA, 22 bp, synthetic construct
  misc_feature 1..22: note = chemically synthesized
  source 1..22: mol_type = other DNA
aaaaaagagacagcgagagaga

SEQ ID NO: 90181 - DNA, 22 bp, synthetic construct
  misc_feature 1..22: note = chemically synthesized
  source 1..22: mol_type = other DNA
cctttactccagtctattaatc

SEQ ID NO: 90182 - DNA, 22 bp, synthetic construct
  misc_feature 1..22: note = chemically synthesized
  source 1..22: mol_type = other DNA
ctttactccagtctattaatct

SEQ ID NO: 90183 - DNA, 22 bp, synthetic construct
  misc_feature 1..22: note = chemically synthesized
  source 1..22: mol_type = other DNA
tactccagtctattaatctttc

SEQ ID NO: 90184 - DNA, 22 bp, synthetic construct
  misc_feature 1..22: note = chemically synthesized
  source 1..22: mol_type = other DNA
actccagtctattaatctttct

SEQ ID NO: 90185 - DNA, 22 bp, synthetic construct
  misc_feature 1..22: note = chemically synthesized
  source 1..22: mol_type = other DNA
ctccagtctattaatctttctt

SEQ ID NO: 90186 - DNA, 22 bp, synthetic construct
  misc_feature 1..22: note = chemically synthesized
  source 1..22: mol_type = other DNA
cagtctattaatctttcttaag

SEQ ID NO: 90187 - DNA, 22 bp, synthetic construct
  misc_feature 1..22: note = chemically synthesized
  source 1..22: mol_type = other DNA
ttaatctttcttaagtcctaat

SEQ ID NO: 90188 - DNA, 22 bp, synthetic construct
  misc_feature 1..22: note = chemically synthesized
  source 1..22: mol_type = other DNA
atctttcttaagtcctaatgtt

SEQ ID NO: 90189 - DNA, 22 bp, synthetic construct
  misc_feature 1..22: note = chemically synthesized
  source 1..22: mol_type = other DNA
tcttaagtcctaatgttttata

SEQ ID NO: 90190 - DNA, 22 bp, synthetic construct
  misc_feature 1..22: note = chemically synthesized
  source 1..22: mol_type = other DNA
cttaagtcctaatgttttatat

SEQ ID NO: 90191 - DNA, 22 bp, synthetic construct
  misc_feature 1..22: note = chemically synthesized
  source 1..22: mol_type = other DNA
ttaagtcctaatgttttatatc

SEQ ID NO: 90192 - DNA, 22 bp, synthetic construct
  misc_feature 1..22: note = chemically synthesized
  source 1..22: mol_type = other DNA
aagtcctaatgttttatatcag

SEQ ID NO: 90193 - DNA, 22 bp, synthetic construct
  misc_feature 1..22: note = chemically synthesized
  source 1..22: mol_type = other DNA
agtcctaatgttttatatcaga

SEQ ID NO: 90194 - DNA, 22 bp, synthetic construct
  misc_feature 1..22: note = chemically synthesized
  source 1..22: mol_type = other DNA
atgttttatatcagaatggccc

SEQ ID NO: 90195 - DNA, 22 bp, synthetic construct
  misc_feature 1..22: note = chemically synthesized
  source 1..22: mol_type = other DNA
tatatcagaatggccctagtct

SEQ ID NO: 90196 - DNA, 22 bp, synthetic construct
  misc_feature 1..22: note = chemically synthesized
  source 1..22: mol_type = other DNA
atatcagaatggccctagtctg

SEQ ID NO: 90197 - DNA, 22 bp, synthetic construct
  misc_feature 1..22: note = chemically synthesized
  source 1..22: mol_type = other DNA
tatcagaatggccctagtctgg

SEQ ID NO: 90198 - DNA, 22 bp, synthetic construct
  misc_feature 1..22: note = chemically synthesized
  source 1..22: mol_type = other DNA
gtctgggtatacttagaggatg

SEQ ID NO: 90199 - DNA, 22 bp, synthetic construct
  misc_feature 1..22: note = chemically synthesized
  source 1..22: mol_type = other DNA
ggtatacttagaggatgaatat

SEQ ID NO: 90200 - DNA, 22 bp, synthetic construct
  misc_feature 1..22: note = chemically synthesized
  source 1..22: mol_type = other DNA
agaggatgaatattaacttcct

SEQ ID NO: 90201 - DNA, 22 bp, synthetic construct
  misc_feature 1..22: note = chemically synthesized
  source 1..22: mol_type = other DNA
gaggatgaatattaacttcctc

SEQ ID NO: 90202 - DNA, 22 bp, synthetic construct
  misc_feature 1..22: note = chemically synthesized
  source 1..22: mol_type = other DNA
acttcctccatgaaaatcatga

SEQ ID NO: 90203 - DNA, 22 bp, synthetic construct
  misc_feature 1..22: note = chemically synthesized
  source 1..22: mol_type = other DNA
cctccatgaaaatcatgacact

SEQ ID NO: 90204 - DNA, 22 bp, synthetic construct
  misc_feature 1..22: note = chemically synthesized
  source 1..22: mol_type = other DNA
ctccatgaaaatcatgacactc

SEQ ID NO: 90205 - DNA, 22 bp, synthetic construct
  misc_feature 1..22: note = chemically synthesized
  source 1..22: mol_type = other DNA
catgaaaatcatgacactcatc

SEQ ID NO: 90206 - DNA, 22 bp, synthetic construct
  misc_feature 1..22: note = chemically synthesized
  source 1..22: mol_type = other DNA
atctatgggagtgtggttttat

SEQ ID NO: 90207 - DNA, 22 bp, synthetic construct
  misc_feature 1..22: note = chemically synthesized
  source 1..22: mol_type = other DNA
tgggagtgtggttttatcattt

SEQ ID NO: 90208 - DNA, 22 bp, synthetic construct
  misc_feature 1..22: note = chemically synthesized
  source 1..22: mol_type = other DNA
tatcatttgtttcaaaagcagc

SEQ ID NO: 90209 - DNA, 22 bp, synthetic construct
  misc_feature 1..22: note = chemically synthesized
  source 1..22: mol_type = other DNA
atcatttgtttcaaaagcagca

SEQ ID NO: 90210 - DNA, 22 bp, synthetic construct
  misc_feature 1..22: note = chemically synthesized
  source 1..22: mol_type = other DNA
tcatttgtttcaaaagcagcac

SEQ ID NO: 90211 - DNA, 22 bp, synthetic construct
  misc_feature 1..22: note = chemically synthesized
  source 1..22: mol_type = other DNA
gtttcaaaagcagcacttgact

SEQ ID NO: 90212 - DNA, 22 bp, synthetic construct
  misc_feature 1..22: note = chemically synthesized
  source 1..22: mol_type = other DNA
tttcaaaagcagcacttgacta

SEQ ID NO: 90213 - DNA, 22 bp, synthetic construct
  misc_feature 1..22: note = chemically synthesized
  source 1..22: mol_type = other DNA
caaaagcagcacttgactagag

SEQ ID NO: 90214 - DNA, 22 bp, synthetic construct
  misc_feature 1..22: note = chemically synthesized
  source 1..22: mol_type = other DNA
aaaagcagcacttgactagagt

SEQ ID NO: 90215 - DNA, 22 bp, synthetic construct
  misc_feature 1..22: note = chemically synthesized
  source 1..22: mol_type = other DNA
gactagagtatttttatacatg

SEQ ID NO: 90216 - DNA, 22 bp, synthetic construct
  misc_feature 1..22: note = chemically synthesized
  source 1..22: mol_type = other DNA
actagagtatttttatacatgc

SEQ ID NO: 90217 - DNA, 22 bp, synthetic construct
  misc_feature 1..22: note = chemically synthesized
  source 1..22: mol_type = other DNA
gagtatttttatacatgctcta

SEQ ID NO: 90218 - DNA, 22 bp, synthetic construct
  misc_feature 1..22: note = chemically synthesized
  source 1..22: mol_type = other DNA
ttatacatgctctactgtttag

SEQ ID NO: 90219 - DNA, 22 bp, synthetic construct
  misc_feature 1..22: note = chemically synthesized
  source 1..22: mol_type = other DNA
tatacatgctctactgtttagt

SEQ ID NO: 90220 - DNA, 22 bp, synthetic construct
  misc_feature 1..22: note = chemically synthesized
  source 1..22: mol_type = other DNA
atacatgctctactgtttagtc

SEQ ID NO: 90221 - DNA, 22 bp, synthetic construct
  misc_feature 1..22: note = chemically synthesized
  source 1..22: mol_type = other DNA
tacatgctctactgtttagtct

SEQ ID NO: 90222 - DNA, 22 bp, synthetic construct
  misc_feature 1..22: note = chemically synthesized
  source 1..22: mol_type = other DNA
tactgtttagtctaaaattccc

SEQ ID NO: 90223 - DNA, 22 bp, synthetic construct
  misc_feature 1..22: note = chemically synthesized
  source 1..22: mol_type = other DNA
ctgtttagtctaaaattcccca

SEQ ID NO: 90224 - DNA, 22 bp, synthetic construct
  misc_feature 1..22: note = chemically synthesized
  source 1..22: mol_type = other DNA
tttagtctaaaattccccaagt

SEQ ID NO: 90225 - DNA, 22 bp, synthetic construct
  misc_feature 1..22: note = chemically synthesized
  source 1..22: mol_type = other DNA
agtctaaaattccccaagtgag

SEQ ID NO: 90226 - DNA, 22 bp, synthetic construct
  misc_feature 1..22: note = chemically synthesized
  source 1..22: mol_type = other DNA
gtctaaaattccccaagtgaga

SEQ ID NO: 90227 - DNA, 22 bp, synthetic construct
  misc_feature 1..22: note = chemically synthesized
  source 1..22: mol_type = other DNA
aaattccccaagtgagacattt

SEQ ID NO: 90228 - DNA, 22 bp, synthetic construct
  misc_feature 1..22: note = chemically synthesized
  source 1..22: mol_type = other DNA
cccaagtgagacattttagcaa

SEQ ID NO: 90229 - DNA, 22 bp, synthetic construct
  misc_feature 1..22: note = chemically synthesized
  source 1..22: mol_type = other DNA
tagcaatctactgtatatgttc

SEQ ID NO: 90230 - DNA, 22 bp, synthetic construct
  misc_feature 1..22: note = chemically synthesized
  source 1..22: mol_type = other DNA
agcaatctactgtatatgttcc

SEQ ID NO: 90231 - DNA, 22 bp, synthetic construct
  misc_feature 1..22: note = chemically synthesized
  source 1..22: mol_type = other DNA
gcaatctactgtatatgttcct

SEQ ID NO: 90232 - DNA, 22 bp, synthetic construct
  misc_feature 1..22: note = chemically synthesized
  source 1..22: mol_type = other DNA
ctgtatatgttcctaggtcaag

SEQ ID NO: 90233 - DNA, 22 bp, synthetic construct
  misc_feature 1..22: note = chemically synthesized
  source 1..22: mol_type = other DNA
tatatgttcctaggtcaagcac

SEQ ID NO: 90234 - DNA, 22 bp, synthetic construct
  misc_feature 1..22: note = chemically synthesized
  source 1..22: mol_type = other DNA
ctaggtcaagcacagtctagct

SEQ ID NO: 90235 - DNA, 22 bp, synthetic construct
  misc_feature 1..22: note = chemically synthesized
  source 1..22: mol_type = other DNA
ggtcaagcacagtctagctact

SEQ ID NO: 90236 - DNA, 22 bp, synthetic construct
  misc_feature 1..22: note = chemically synthesized
  source 1..22: mol_type = other DNA
gctacttgctacagacttctct

SEQ ID NO: 90237 - DNA, 22 bp, synthetic construct
  misc_feature 1..22: note = chemically synthesized
  source 1..22: mol_type = other DNA
cttgctacagacttctctcgca

SEQ ID NO: 90238 - DNA, 22 bp, synthetic construct
  misc_feature 1..22: note = chemically synthesized
  source 1..22: mol_type = other DNA
gctacagacttctctcgcagat

SEQ ID NO: 90239 - DNA, 22 bp, synthetic construct
  misc_feature 1..22: note = chemically synthesized
  source 1..22: mol_type = other DNA
ctacagacttctctcgcagata

SEQ ID NO: 90240 - DNA, 22 bp, synthetic construct
  misc_feature 1..22: note = chemically synthesized
  source 1..22: mol_type = other DNA
cagacttctctcgcagatacac

SEQ ID NO: 90241 - DNA, 22 bp, synthetic construct
  misc_feature 1..22: note = chemically synthesized
  source 1..22: mol_type = other DNA
ctctcgcagatacacaatctct

SEQ ID NO: 90242 - DNA, 22 bp, synthetic construct
  misc_feature 1..22: note = chemically synthesized
  source 1..22: mol_type = other DNA
tctcgcagatacacaatctctc

SEQ ID NO: 90243 - DNA, 22 bp, synthetic construct
  misc_feature 1..22: note = chemically synthesized
  source 1..22: mol_type = other DNA
tcgcagatacacaatctctcag

SEQ ID NO: 90244 - DNA, 22 bp, synthetic construct
  misc_feature 1..22: note = chemically synthesized
  source 1..22: mol_type = other DNA
gcagatacacaatctctcagta

SEQ ID NO: 90245 - DNA, 22 bp, synthetic construct
  misc_feature 1..22: note = chemically synthesized
  source 1..22: mol_type = other DNA
tcagtaaacacaactcagcagc

SEQ ID NO: 90246 - DNA, 22 bp, synthetic construct
  misc_feature 1..22: note = chemically synthesized
  source 1..22: mol_type = other DNA
agtaaacacaactcagcagctc

SEQ ID NO: 90247 - DNA, 22 bp, synthetic construct
  misc_feature 1..22: note = chemically synthesized
  source 1..22: mol_type = other DNA
agcagctctcagaattaattaa

SEQ ID NO: 90248 - DNA, 22 bp, synthetic construct
  misc_feature 1..22: note = chemically synthesized
  source 1..22: mol_type = other DNA
tcagaattaattaattaaaatg

SEQ ID NO: 90249 - DNA, 22 bp, synthetic construct
  misc_feature 1..22: note = chemically synthesized
  source 1..22: mol_type = other DNA
agaattaattaattaaaatgaa

SEQ ID NO: 90250 - DNA, 22 bp, synthetic construct
  misc_feature 1..22: note = chemically synthesized
  source 1..22: mol_type = other DNA
attaattaaaatgaaataaaaa

SEQ ID NO: 90251 - DNA, 22 bp, synthetic construct
  misc_feature 1..22: note = chemically synthesized
  source 1..22: mol_type = other DNA
attaaaatgaaataaaaatgct

SEQ ID NO: 90252 - DNA, 22 bp, synthetic construct
  misc_feature 1..22: note = chemically synthesized
  source 1..22: mol_type = other DNA
aaatgaaataaaaatgctccaa

SEQ ID NO: 90253 - DNA, 22 bp, synthetic construct
  misc_feature 1..22: note = chemically synthesized
  source 1..22: mol_type = other DNA
caagaaaaccagaacccataga

SEQ ID NO: 90254 - DNA, 22 bp, synthetic construct
  misc_feature 1..22: note = chemically synthesized
  source 1..22: mol_type = other DNA
ggaaataggatagtttagttca

SEQ ID NO: 90255 - DNA, 22 bp, synthetic construct
  misc_feature 1..22: note = chemically synthesized
  source 1..22: mol_type = other DNA
gaaataggatagtttagttcac

SEQ ID NO: 90256 - DNA, 22 bp, synthetic construct
  misc_feature 1..22: note = chemically synthesized
  source 1..22: mol_type = other DNA
agttcactttaaaaagttgtat

SEQ ID NO: 90257 - DNA, 22 bp, synthetic construct
  misc_feature 1..22: note = chemically synthesized
  source 1..22: mol_type = other DNA
gttcactttaaaaagttgtatt

SEQ ID NO: 90258 - DNA, 22 bp, synthetic construct
  misc_feature 1..22: note = chemically synthesized
  source 1..22: mol_type = other DNA
actttaaaaagttgtatttctt

SEQ ID NO: 90259 - DNA, 22 bp, synthetic construct
  misc_feature 1..22: note = chemically synthesized
  source 1..22: mol_type = other DNA
taaaaagttgtatttcttacca

SEQ ID NO: 90260 - DNA, 22 bp, synthetic construct
  misc_feature 1..22: note = chemically synthesized
  source 1..22: mol_type = other DNA
aaaaagttgtatttcttaccaa

SEQ ID NO: 90261 - DNA, 22 bp, synthetic construct
  misc_feature 1..22: note = chemically synthesized
  source 1..22: mol_type = other DNA
aaaagttgtatttcttaccaaa

SEQ ID NO: 90262 - DNA, 22 bp, synthetic construct
  misc_feature 1..22: note = chemically synthesized
  source 1..22: mol_type = other DNA
tatttcttaccaaaaagcaata

SEQ ID NO: 90263 - DNA, 22 bp, synthetic construct
  misc_feature 1..22: note = chemically synthesized
  source 1..22: mol_type = other DNA
cttaccaaaaagcaataaagtc

SEQ ID NO: 90264 - DNA, 22 bp, synthetic construct
  misc_feature 1..22: note = chemically synthesized
  source 1..22: mol_type = other DNA
ttaccaaaaagcaataaagtca

SEQ ID NO: 90265 - DNA, 22 bp, synthetic construct
  misc_feature 1..22: note = chemically synthesized
  source 1..22: mol_type = other DNA
accaaaaagcaataaagtcaac

SEQ ID NO: 90266 - DNA, 22 bp, synthetic construct
  misc_feature 1..22: note = chemically synthesized
  source 1..22: mol_type = other DNA
ccaaaaagcaataaagtcaaca

SEQ ID NO: 90267 - DNA, 22 bp, synthetic construct
  misc_feature 1..22: note = chemically synthesized
  source 1..22: mol_type = other DNA
tgctaaagtatatgcataatta

SEQ ID NO: 90268 - DNA, 22 bp, synthetic construct
  misc_feature 1..22: note = chemically synthesized
  source 1..22: mol_type = other DNA
gctaaagtatatgcataattat

SEQ ID NO: 90269 - DNA, 22 bp, synthetic construct
  misc_feature 1..22: note = chemically synthesized
  source 1..22: mol_type = other DNA
ctaaagtatatgcataattatt

SEQ ID NO: 90270 - DNA, 22 bp, synthetic construct
  misc_feature 1..22: note = chemically synthesized
  source 1..22: mol_type = other DNA
aagtatatgcataattattaca

SEQ ID NO: 90271 - DNA, 22 bp, synthetic construct
  misc_feature 1..22: note = chemically synthesized
  source 1..22: mol_type = other DNA
ttacagaaaaatttatatttca

SEQ ID NO: 90272 - DNA, 22 bp, synthetic construct
  misc_feature 1..22: note = chemically synthesized
  source 1..22: mol_type = other DNA
cagaaaaatttatatttcagtc

SEQ ID NO: 90273 - DNA, 22 bp, synthetic construct
  misc_feature 1..22: note = chemically synthesized
  source 1..22: mol_type = other DNA
atatttcagtctgcaccttgtt

SEQ ID NO: 90274 - DNA, 22 bp, synthetic construct
  misc_feature 1..22: note = chemically synthesized
  source 1..22: mol_type = other DNA
tatttcagtctgcaccttgttc

SEQ ID NO: 90275 - DNA, 22 bp, synthetic construct
  misc_feature 1..22: note = chemically synthesized
  source 1..22: mol_type = other DNA
cagtctgcaccttgttcattaa

SEQ ID NO: 90276 - DNA, 22 bp, synthetic construct
  misc_feature 1..22: note = chemically synthesized
  source 1..22: mol_type = other DNA
agtctgcaccttgttcattaat

SEQ ID NO: 90277 - DNA, 22 bp, synthetic construct
  misc_feature 1..22: note = chemically synthesized
  source 1..22: mol_type = other DNA
caccttgttcattaatatttcc

SEQ ID NO: 90278 - DNA, 22 bp, synthetic construct
  misc_feature 1..22: note = chemically synthesized
  source 1..22: mol_type = other DNA
gttcattaatatttcctccact

SEQ ID NO: 90279 - DNA, 22 bp, synthetic construct
  misc_feature 1..22: note = chemically synthesized
  source 1..22: mol_type = other DNA
ttcattaatatttcctccactg

SEQ ID NO: 90280 - DNA, 22 bp, synthetic construct
  misc_feature 1..22: note = chemically synthesized
  source 1..22: mol_type = other DNA
attaatatttcctccactgggc

SEQ ID NO: 90281 - DNA, 22 bp, synthetic construct
  misc_feature 1..22: note = chemically synthesized
  source 1..22: mol_type = other DNA
atatttcctccactgggctcag

SEQ ID NO: 90282 - DNA, 22 bp, synthetic construct
  misc_feature 1..22: note = chemically synthesized
  source 1..22: mol_type = other DNA
cctccactgggctcagattttc

SEQ ID NO: 90283 - DNA, 22 bp, synthetic construct
  misc_feature 1..22: note = chemically synthesized
  source 1..22: mol_type = other DNA
ctccactgggctcagattttca

SEQ ID NO: 90284 - DNA, 22 bp, synthetic construct
  misc_feature 1..22: note = chemically synthesized
  source 1..22: mol_type = other DNA
cactgggctcagattttcattc

SEQ ID NO: 90285 - DNA, 22 bp, synthetic construct
  misc_feature 1..22: note = chemically synthesized
  source 1..22: mol_type = other DNA
ggctcagattttcattcagaat

SEQ ID NO: 90286 - DNA, 22 bp, synthetic construct
  misc_feature 1..22: note = chemically synthesized
  source 1..22: mol_type = other DNA
agattttcattcagaattagct

SEQ ID NO: 90287 - DNA, 22 bp, synthetic construct
  misc_feature 1..22: note = chemically synthesized
  source 1..22: mol_type = other DNA
tcattcagaattagcttttttt

SEQ ID NO: 90288 - DNA, 22 bp, synthetic construct
  misc_feature 1..22: note = chemically synthesized
  source 1..22: mol_type = other DNA
cattcagaattagctttttttt

SEQ ID NO: 90289 - DNA, 22 bp, synthetic construct
  misc_feature 1..22: note = chemically synthesized
  source 1..22: mol_type = other DNA
attcagaattagctttttttta

SEQ ID NO: 90290 - DNA, 22 bp, synthetic construct
  misc_feature 1..22: note = chemically synthesized
  source 1..22: mol_type = other DNA
agaattagcttttttttaacct

SEQ ID NO: 90291 - DNA, 22 bp, synthetic construct
  misc_feature 1..22: note = chemically synthesized
  source 1..22: mol_type = other DNA
gcttttttttaacctcattaag

SEQ ID NO: 90292 - DNA, 22 bp, synthetic construct
  misc_feature 1..22: note = chemically synthesized
  source 1..22: mol_type = other DNA
ttttttaacctcattaagtggg

SEQ ID NO: 90293 - DNA, 22 bp, synthetic construct
  misc_feature 1..22: note = chemically synthesized
  source 1..22: mol_type = other DNA
tttttaacctcattaagtgggc

SEQ ID NO: 90294 - DNA, 22 bp, synthetic construct
  misc_feature 1..22: note = chemically synthesized
  source 1..22: mol_type = other DNA
ttttaacctcattaagtgggcc

SEQ ID NO: 90295 - DNA, 22 bp, synthetic construct
  misc_feature 1..22: note = chemically synthesized
  source 1..22: mol_type = other DNA
tttaacctcattaagtgggcca

SEQ ID NO: 90296 - DNA, 22 bp, synthetic construct
  misc_feature 1..22: note = chemically synthesized
  source 1..22: mol_type = other DNA
ttaacctcattaagtgggccat

SEQ ID NO: 90297 - DNA, 22 bp, synthetic construct
  misc_feature 1..22: note = chemically synthesized
  source 1..22: mol_type = other DNA
taacctcattaagtgggccatg

SEQ ID NO: 90298 - DNA, 22 bp, synthetic construct
  misc_feature 1..22: note = chemically synthesized
  source 1..22: mol_type = other DNA
aacctcattaagtgggccatgg

SEQ ID NO: 90299 - DNA, 22 bp, synthetic construct
  misc_feature 1..22: note = chemically synthesized
  source 1..22: mol_type = other DNA
acctcattaagtgggccatggt

SEQ ID NO: 90300 - DNA, 22 bp, synthetic construct
  misc_feature 1..22: note = chemically synthesized
  source 1..22: mol_type = other DNA
attaagtgggccatggtgtcaa

SEQ ID NO: 90301 - DNA, 22 bp, synthetic construct
  misc_feature 1..22: note = chemically synthesized
  source 1..22: mol_type = other DNA
agtgggccatggtgtcaattta

SEQ ID NO: 90302 - DNA, 22 bp, synthetic construct
  misc_feature 1..22: note = chemically synthesized
  source 1..22: mol_type = other DNA
atggagagcagaggtacagtct

SEQ ID NO: 90303 - DNA, 22 bp, synthetic construct
  misc_feature 1..22: note = chemically synthesized
  source 1..22: mol_type = other DNA
tggagagcagaggtacagtctt

SEQ ID NO: 90304 - DNA, 22 bp, synthetic construct
  misc_feature 1..22: note = chemically synthesized
  source 1..22: mol_type = other DNA
cagataaatttgagattgcatc

SEQ ID NO: 90305 - DNA, 22 bp, synthetic construct
  misc_feature 1..22: note = chemically synthesized
  source 1..22: mol_type = other DNA
agataaatttgagattgcatct

SEQ ID NO: 90306 - DNA, 22 bp, synthetic construct
  misc_feature 1..22: note = chemically synthesized
  source 1..22: mol_type = other DNA
gagattgcatctctttagaggt

SEQ ID NO: 90307 - DNA, 22 bp, synthetic construct
  misc_feature 1..22: note = chemically synthesized
  source 1..22: mol_type = other DNA
agattgcatctctttagaggta

SEQ ID NO: 90308 - DNA, 22 bp, synthetic construct
  misc_feature 1..22: note = chemically synthesized
  source 1..22: mol_type = other DNA
catctctttagaggtagaatct

SEQ ID NO: 90309 - DNA, 22 bp, synthetic construct
  misc_feature 1..22: note = chemically synthesized
  source 1..22: mol_type = other DNA
tttagaggtagaatcttggctt

SEQ ID NO: 90310 - DNA, 22 bp, synthetic construct
  misc_feature 1..22: note = chemically synthesized
  source 1..22: mol_type = other DNA
tagaggtagaatcttggcttca

SEQ ID NO: 90311 - DNA, 22 bp, synthetic construct
  misc_feature 1..22: note = chemically synthesized
  source 1..22: mol_type = other DNA
agaggtagaatcttggcttcag

SEQ ID NO: 90312 - DNA, 22 bp, synthetic construct
  misc_feature 1..22: note = chemically synthesized
  source 1..22: mol_type = other DNA
gaggtagaatcttggcttcagt

SEQ ID NO: 90313 - DNA, 22 bp, synthetic construct
  misc_feature 1..22: note = chemically synthesized
  source 1..22: mol_type = other DNA
ggcttcagtctgaacacccttt

SEQ ID NO: 90314 - DNA, 22 bp, synthetic construct
  misc_feature 1..22: note = chemically synthesized
  source 1..22: mol_type = other DNA
gcttcagtctgaacacccttta

SEQ ID NO: 90315 - DNA, 22 bp, synthetic construct
  misc_feature 1..22: note = chemically synthesized
  source 1..22: mol_type = other DNA
cagtctgaacaccctttacaaa

SEQ ID NO: 90316 - DNA, 22 bp, synthetic construct
  misc_feature 1..22: note = chemically synthesized
  source 1..22: mol_type = other DNA
agtctgaacaccctttacaaac

SEQ ID NO: 90317 - DNA, 22 bp, synthetic construct
  misc_feature 1..22: note = chemically synthesized
  source 1..22: mol_type = other DNA
aacaccctttacaaacatgtag

SEQ ID NO: 90318 - DNA, 22 bp, synthetic construct
  misc_feature 1..22: note = chemically synthesized
  source 1..22: mol_type = other DNA
tacaaacatgtaggcattaatt

SEQ ID NO: 90319 - DNA, 22 bp, synthetic construct
  misc_feature 1..22: note = chemically synthesized
  source 1..22: mol_type = other DNA
acaaacatgtaggcattaattc

SEQ ID NO: 90320 - DNA, 22 bp, synthetic construct
  misc_feature 1..22: note = chemically synthesized
  source 1..22: mol_type = other DNA
caaacatgtaggcattaattca

SEQ ID NO: 90321 - DNA, 22 bp, synthetic construct
  misc_feature 1..22: note = chemically synthesized
  source 1..22: mol_type = other DNA
attcagaggactgctctgaagc

SEQ ID NO: 90322 - DNA, 22 bp, synthetic construct
  misc_feature 1..22: note = chemically synthesized
  source 1..22: mol_type = other DNA
agaggactgctctgaagctcaa

SEQ ID NO: 90323 - DNA, 22 bp, synthetic construct
  misc_feature 1..22: note = chemically synthesized
  source 1..22: mol_type = other DNA
ctctgaagctcaagagatggat

SEQ ID NO: 90324 - DNA, 22 bp, synthetic construct
  misc_feature 1..22: note = chemically synthesized
  source 1..22: mol_type = other DNA
tgaagctcaagagatggatgat

SEQ ID NO: 90325 - DNA, 22 bp, synthetic construct
  misc_feature 1..22: note = chemically synthesized
  source 1..22: mol_type = other DNA
aagctcaagagatggatgattt

SEQ ID NO: 90326 - DNA, 22 bp, synthetic construct
  misc_feature 1..22: note = chemically synthesized
  source 1..22: mol_type = other DNA
aagagatggatgatttaggaga

SEQ ID NO: 90327 - DNA, 22 bp, synthetic construct
  misc_feature 1..22: note = chemically synthesized
  source 1..22: mol_type = other DNA
aggagactattaggcttaattc

SEQ ID NO: 90328 - DNA, 22 bp, synthetic construct
  misc_feature 1..22: note = chemically synthesized
  source 1..22: mol_type = other DNA
ggagactattaggcttaattct

SEQ ID NO: 90329 - DNA, 22 bp, synthetic construct
  misc_feature 1..22: note = chemically synthesized
  source 1..22: mol_type = other DNA
ttaggcttaattctcctgacat

SEQ ID NO: 90330 - DNA, 22 bp, synthetic construct
  misc_feature 1..22: note = chemically synthesized
  source 1..22: mol_type = other DNA
ggcttaattctcctgacattaa

SEQ ID NO: 90331 - DNA, 22 bp, synthetic construct
  misc_feature 1..22: note = chemically synthesized
  source 1..22: mol_type = other DNA
aattctcctgacattaaattat

SEQ ID NO: 90332 - DNA, 22 bp, synthetic construct
  misc_feature 1..22: note = chemically synthesized
  source 1..22: mol_type = other DNA
attctcctgacattaaattatt

SEQ ID NO: 90333 - DNA, 22 bp, synthetic construct
  misc_feature 1..22: note = chemically synthesized
  source 1..22: mol_type = other DNA
tcctgacattaaattattttat

SEQ ID NO: 90334 - DNA, 22 bp, synthetic construct
  misc_feature 1..22: note = chemically synthesized
  source 1..22: mol_type = other DNA
ctgacattaaattattttattg

SEQ ID NO: 90335 - DNA, 22 bp, synthetic construct
  misc_feature 1..22: note = chemically synthesized
  source 1..22: mol_type = other DNA
acattaaattattttattgaaa

SEQ ID NO: 90336 - DNA, 22 bp, synthetic construct
  misc_feature 1..22: note = chemically synthesized
  source 1..22: mol_type = other DNA
aattattttattgaaaaatttt

SEQ ID NO: 90337 - DNA, 22 bp, synthetic construct
  misc_feature 1..22: note = chemically synthesized
  source 1..22: mol_type = other DNA
ttttattgaaaaattttcatga

SEQ ID NO: 90338 - DNA, 22 bp, synthetic construct
  misc_feature 1..22: note = chemically synthesized
  source 1..22: mol_type = other DNA
tattgaaaaattttcatgaact

SEQ ID NO: 90339 - DNA, 22 bp, synthetic construct
  misc_feature 1..22: note = chemically synthesized
  source 1..22: mol_type = other DNA
attgaaaaattttcatgaactc

SEQ ID NO: 90340 - DNA, 22 bp, synthetic construct
  misc_feature 1..22: note = chemically synthesized
  source 1..22: mol_type = other DNA
ttgaaaaattttcatgaactca

SEQ ID NO: 90341 - DNA, 22 bp, synthetic construct
  misc_feature 1..22: note = chemically synthesized
  source 1..22: mol_type = other DNA
aaaaattttcatgaactcaaat

SEQ ID NO: 90342 - DNA, 22 bp, synthetic construct
  misc_feature 1..22: note = chemically synthesized
  source 1..22: mol_type = other DNA
tcatgaactcaaattcacatta

SEQ ID NO: 90343 - DNA, 22 bp, synthetic construct
  misc_feature 1..22: note = chemically synthesized
  source 1..22: mol_type = other DNA
catgaactcaaattcacattat

SEQ ID NO: 90344 - DNA, 22 bp, synthetic construct
  misc_feature 1..22: note = chemically synthesized
  source 1..22: mol_type = other DNA
atgaactcaaattcacattatt

SEQ ID NO: 90345 - DNA, 22 bp, synthetic construct
  misc_feature 1..22: note = chemically synthesized
  source 1..22: mol_type = other DNA
aaattcacattattacgtcctc

SEQ ID NO: 90346 - DNA, 22 bp, synthetic construct
  misc_feature 1..22: note = chemically synthesized
  source 1..22: mol_type = other DNA
acattattacgtcctctcttcc

SEQ ID NO: 90347 - DNA, 22 bp, synthetic construct
  misc_feature 1..22: note = chemically synthesized
  source 1..22: mol_type = other DNA
ttacgtcctctcttcccttcct

SEQ ID NO: 90348 - DNA, 22 bp, synthetic construct
  misc_feature 1..22: note = chemically synthesized
  source 1..22: mol_type = other DNA
cgtcctctcttcccttcctctc

SEQ ID NO: 90349 - DNA, 22 bp, synthetic construct
  misc_feature 1..22: note = chemically synthesized
  source 1..22: mol_type = other DNA
tcttcccttcctctctccctct

SEQ ID NO: 90350 - DNA, 22 bp, synthetic construct
  misc_feature 1..22: note = chemically synthesized
  source 1..22: mol_type = other DNA
ttcccttcctctctccctctct

SEQ ID NO: 90351 - DNA, 22 bp, synthetic construct
  misc_feature 1..22: note = chemically synthesized
  source 1..22: mol_type = other DNA
cccttcctctctccctctcttt

SEQ ID NO: 90352 - DNA, 22 bp, synthetic construct
  misc_feature 1..22: note = chemically synthesized
  source 1..22: mol_type = other DNA
ccttcctctctccctctctttc

SEQ ID NO: 90353 - DNA, 22 bp, synthetic construct
  misc_feature 1..22: note = chemically synthesized
  source 1..22: mol_type = other DNA
cctctctccctctctttcacac

SEQ ID NO: 90354 - DNA, 22 bp, synthetic construct
  misc_feature 1..22: note = chemically synthesized
  source 1..22: mol_type = other DNA
ctctctccctctctttcacaca

SEQ ID NO: 90355 - DNA, 22 bp, synthetic construct
  misc_feature 1..22: note = chemically synthesized
  source 1..22: mol_type = other DNA
tctccctctctttcacacacac

SEQ ID NO: 90356 - DNA, 22 bp, synthetic construct
  misc_feature 1..22: note = chemically synthesized
  source 1..22: mol_type = other DNA
tccctctctttcacacacacac

SEQ ID NO: 90357 - DNA, 22 bp, synthetic construct
  misc_feature 1..22: note = chemically synthesized
  source 1..22: mol_type = other DNA
cctctctttcacacacacacac

SEQ ID NO: 90358 - DNA, 22 bp, synthetic construct
  misc_feature 1..22: note = chemically synthesized
  source 1..22: mol_type = other DNA
tctttcacacacacacacaccc

SEQ ID NO: 90359 - DNA, 22 bp, synthetic construct
  misc_feature 1..22: note = chemically synthesized
  source 1..22: mol_type = other DNA
tttcacacacacacacaccctt

SEQ ID NO: 90360 - DNA, 22 bp, synthetic construct
  misc_feature 1..22: note = chemically synthesized
  source 1..22: mol_type = other DNA
tcacacacacacacaccctttc

SEQ ID NO: 90361 - DNA, 22 bp, synthetic construct
  misc_feature 1..22: note = chemically synthesized
  source 1..22: mol_type = other DNA
cacacacacacacaccctttca

SEQ ID NO: 90362 - DNA, 22 bp, synthetic construct
  misc_feature 1..22: note = chemically synthesized
  source 1..22: mol_type = other DNA
acacacacacacaccctttcat

SEQ ID NO: 90363 - DNA, 22 bp, synthetic construct
  misc_feature 1..22: note = chemically synthesized
  source 1..22: mol_type = other DNA
tcattcagacatactgaacata

SEQ ID NO: 90364 - DNA, 22 bp, synthetic construct
  misc_feature 1..22: note = chemically synthesized
  source 1..22: mol_type = other DNA
cattcagacatactgaacatag

SEQ ID NO: 90365 - DNA, 22 bp, synthetic construct
  misc_feature 1..22: note = chemically synthesized
  source 1..22: mol_type = other DNA
attcagacatactgaacatagt

SEQ ID NO: 90366 - DNA, 22 bp, synthetic construct
  misc_feature 1..22: note = chemically synthesized
  source 1..22: mol_type = other DNA
agacatactgaacatagtttat

SEQ ID NO: 90367 - DNA, 22 bp, synthetic construct
  misc_feature 1..22: note = chemically synthesized
  source 1..22: mol_type = other DNA
aacatagtttataaagcaacgc

SEQ ID NO: 90368 - DNA, 22 bp, synthetic construct
  misc_feature 1..22: note = chemically synthesized
  source 1..22: mol_type = other DNA
ataaagcaacgccatagtgaga

SEQ ID NO: 90369 - DNA, 22 bp, synthetic construct
  misc_feature 1..22: note = chemically synthesized
  source 1..22: mol_type = other DNA
taaagcaacgccatagtgagaa

SEQ ID NO: 90370 - DNA, 22 bp, synthetic construct
  misc_feature 1..22: note = chemically synthesized
  source 1..22: mol_type = other DNA
gataaattatcaaataaaatta

SEQ ID NO: 90371 - DNA, 22 bp, synthetic construct
  misc_feature 1..22: note = chemically synthesized
  source 1..22: mol_type = other DNA
ataaattatcaaataaaattaa

SEQ ID NO: 90372 - DNA, 22 bp, synthetic construct
  misc_feature 1..22: note = chemically synthesized
  source 1..22: mol_type = other DNA
tcaaataaaattaaagccaaat

SEQ ID NO: 90373 - DNA, 22 bp, synthetic construct
  misc_feature 1..22: note = chemically synthesized
  source 1..22: mol_type = other DNA
aagccaaatcttgaggaattaa

SEQ ID NO: 90374 - DNA, 22 bp, synthetic construct
  misc_feature 1..22: note = chemically synthesized
  source 1..22: mol_type = other DNA
gaggaattaattccattcctat

SEQ ID NO: 90375 - DNA, 22 bp, synthetic construct
  misc_feature 1..22: note = chemically synthesized
  source 1..22: mol_type = other DNA
aggaattaattccattcctata

SEQ ID NO: 90376 - DNA, 22 bp, synthetic construct
  misc_feature 1..22: note = chemically synthesized
  source 1..22: mol_type = other DNA
attccattcctatactttgttt

SEQ ID NO: 90377 - DNA, 22 bp, synthetic construct
  misc_feature 1..22: note = chemically synthesized
  source 1..22: mol_type = other DNA
cattcctatactttgttttaac

SEQ ID NO: 90378 - DNA, 22 bp, synthetic construct
  misc_feature 1..22: note = chemically synthesized
  source 1..22: mol_type = other DNA
ctatactttgttttaactttca

SEQ ID NO: 90379 - DNA, 22 bp, synthetic construct
  misc_feature 1..22: note = chemically synthesized
  source 1..22: mol_type = other DNA
tactttgttttaactttcattt

SEQ ID NO: 90380 - DNA, 22 bp, synthetic construct
  misc_feature 1..22: note = chemically synthesized
  source 1..22: mol_type = other DNA
tgttttaactttcattttaaat

SEQ ID NO: 90381 - DNA, 22 bp, synthetic construct
  misc_feature 1..22: note = chemically synthesized
  source 1..22: mol_type = other DNA
gttttaactttcattttaaatt

SEQ ID NO: 90382 - DNA, 22 bp, synthetic construct
  misc_feature 1..22: note = chemically synthesized
  source 1..22: mol_type = other DNA
ttttaactttcattttaaattt

SEQ ID NO: 90383 - DNA, 22 bp, synthetic construct
  misc_feature 1..22: note = chemically synthesized
  source 1..22: mol_type = other DNA
taactttcattttaaatttggg

SEQ ID NO: 90384 - DNA, 22 bp, synthetic construct
  misc_feature 1..22: note = chemically synthesized
  source 1..22: mol_type = other DNA
aactttcattttaaatttgggg

SEQ ID NO: 90385 - DNA, 22 bp, synthetic construct
  misc_feature 1..22: note = chemically synthesized
  source 1..22: mol_type = other DNA
actttcattttaaatttggggg

SEQ ID NO: 90386 - DNA, 22 bp, synthetic construct
  misc_feature 1..22: note = chemically synthesized
  source 1..22: mol_type = other DNA
tcattttaaatttgggggtaca

SEQ ID NO: 90387 - DNA, 22 bp, synthetic construct
  misc_feature 1..22: note = chemically synthesized
  source 1..22: mol_type = other DNA
cattttaaatttgggggtacat

SEQ ID NO: 90388 - DNA, 22 bp, synthetic construct
  misc_feature 1..22: note = chemically synthesized
  source 1..22: mol_type = other DNA
attttaaatttgggggtacatg

SEQ ID NO: 90389 - DNA, 22 bp, synthetic construct
  misc_feature 1..22: note = chemically synthesized
  source 1..22: mol_type = other DNA
taaatttgggggtacatgtaca

SEQ ID NO: 90390 - DNA, 22 bp, synthetic construct
  misc_feature 1..22: note = chemically synthesized
  source 1..22: mol_type = other DNA
aaatttgggggtacatgtacaa

SEQ ID NO: 90391 - DNA, 22 bp, synthetic construct
  misc_feature 1..22: note = chemically synthesized
  source 1..22: mol_type = other DNA
aatttgggggtacatgtacaag

SEQ ID NO: 90392 - DNA, 22 bp, synthetic construct
  misc_feature 1..22: note = chemically synthesized
  source 1..22: mol_type = other DNA
gggggtacatgtacaagttata

SEQ ID NO: 90393 - DNA, 22 bp, synthetic construct
  misc_feature 1..22: note = chemically synthesized
  source 1..22: mol_type = other DNA
ggggtacatgtacaagttatat

SEQ ID NO: 90394 - DNA, 22 bp, synthetic construct
  misc_feature 1..22: note = chemically synthesized
  source 1..22: mol_type = other DNA
tataggtaaattgcatatcact

SEQ ID NO: 90395 - DNA, 22 bp, synthetic construct
  misc_feature 1..22: note = chemically synthesized
  source 1..22: mol_type = other DNA
catatcactgggtcttgatgta

SEQ ID NO: 90396 - DNA, 22 bp, synthetic construct
  misc_feature 1..22: note = chemically synthesized
  source 1..22: mol_type = other DNA
ggtcttgatgtacagattattt

SEQ ID NO: 90397 - DNA, 22 bp, synthetic construct
  misc_feature 1..22: note = chemically synthesized
  source 1..22: mol_type = other DNA
gatgtacagattatttcatcac

SEQ ID NO: 90398 - DNA, 22 bp, synthetic construct
  misc_feature 1..22: note = chemically synthesized
  source 1..22: mol_type = other DNA
atgtacagattatttcatcact

SEQ ID NO: 90399 - DNA, 22 bp, synthetic construct
  misc_feature 1..22: note = chemically synthesized
  source 1..22: mol_type = other DNA
tttcatcactcagtgatgaact

SEQ ID NO: 90400 - DNA, 22 bp, synthetic construct
  misc_feature 1..22: note = chemically synthesized
  source 1..22: mol_type = other DNA
catcactcagtgatgaacttaa

SEQ ID NO: 90401 - DNA, 22 bp, synthetic construct
  misc_feature 1..22: note = chemically synthesized
  source 1..22: mol_type = other DNA
atcactcagtgatgaacttaat

SEQ ID NO: 90402 - DNA, 22 bp, synthetic construct
  misc_feature 1..22: note = chemically synthesized
  source 1..22: mol_type = other DNA
agtgatgaacttaatacccaat

SEQ ID NO: 90403 - DNA, 22 bp, synthetic construct
  misc_feature 1..22: note = chemically synthesized
  source 1..22: mol_type = other DNA
aatacccaataggttctttttc

SEQ ID NO: 90404 - DNA, 22 bp, synthetic construct
  misc_feature 1..22: note = chemically synthesized
  source 1..22: mol_type = other DNA
atacccaataggttctttttca

SEQ ID NO: 90405 - DNA, 22 bp, synthetic construct
  misc_feature 1..22: note = chemically synthesized
  source 1..22: mol_type = other DNA
tttttcatcgtctccctcttcc

SEQ ID NO: 90406 - DNA, 22 bp, synthetic construct
  misc_feature 1..22: note = chemically synthesized
  source 1..22: mol_type = other DNA
tttcatcgtctccctcttccca

SEQ ID NO: 90407 - DNA, 22 bp, synthetic construct
  misc_feature 1..22: note = chemically synthesized
  source 1..22: mol_type = other DNA
ttcatcgtctccctcttcccac

SEQ ID NO: 90408 - DNA, 22 bp, synthetic construct
  misc_feature 1..22: note = chemically synthesized
  source 1..22: mol_type = other DNA
tcatcgtctccctcttcccacc

SEQ ID NO: 90409 - DNA, 22 bp, synthetic construct
  misc_feature 1..22: note = chemically synthesized
  source 1..22: mol_type = other DNA
catcgtctccctcttcccaccc

SEQ ID NO: 90410 - DNA, 22 bp, synthetic construct
  misc_feature 1..22: note = chemically synthesized
  source 1..22: mol_type = other DNA
atcgtctccctcttcccaccct

SEQ ID NO: 90411 - DNA, 22 bp, synthetic construct
  misc_feature 1..22: note = chemically synthesized
  source 1..22: mol_type = other DNA
cctcttcccaccctcaaccctc

SEQ ID NO: 90412 - DNA, 22 bp, synthetic construct
  misc_feature 1..22: note = chemically synthesized
  source 1..22: mol_type = other DNA
ttcccaccctcaaccctcaagt

SEQ ID NO: 90413 - DNA, 22 bp, synthetic construct
  misc_feature 1..22: note = chemically synthesized
  source 1..22: mol_type = other DNA
cccaccctcaaccctcaagtag

SEQ ID NO: 90414 - DNA, 22 bp, synthetic construct
  misc_feature 1..22: note = chemically synthesized
  source 1..22: mol_type = other DNA
ccaccctcaaccctcaagtagg

SEQ ID NO: 90415 - DNA, 22 bp, synthetic construct
  misc_feature 1..22: note = chemically synthesized
  source 1..22: mol_type = other DNA
aaccctcaagtaggcctgggtg

SEQ ID NO: 90416 - DNA, 22 bp, synthetic construct
  misc_feature 1..22: note = chemically synthesized
  source 1..22: mol_type = other DNA
aagtaggcctgggtgtctgttg

SEQ ID NO: 90417 - DNA, 22 bp, synthetic construct
  misc_feature 1..22: note = chemically synthesized
  source 1..22: mol_type = other DNA
ggtgtctgttgatctatttttt

SEQ ID NO: 90418 - DNA, 22 bp, synthetic construct
  misc_feature 1..22: note = chemically synthesized
  source 1..22: mol_type = other DNA
ttgatctattttttgtgtccat

SEQ ID NO: 90419 - DNA, 22 bp, synthetic construct
  misc_feature 1..22: note = chemically synthesized
  source 1..22: mol_type = other DNA
atctattttttgtgtccatgtg

SEQ ID NO: 90420 - DNA, 22 bp, synthetic construct
  misc_feature 1..22: note = chemically synthesized
  source 1..22: mol_type = other DNA
ttttttgtgtccatgtgtatca

SEQ ID NO: 90421 - DNA, 22 bp, synthetic construct
  misc_feature 1..22: note = chemically synthesized
  source 1..22: mol_type = other DNA
tttgtgtccatgtgtatcatca

SEQ ID NO: 90422 - DNA, 22 bp, synthetic construct
  misc_feature 1..22: note = chemically synthesized
  source 1..22: mol_type = other DNA
ttgtgtccatgtgtatcatcat

SEQ ID NO: 90423 - DNA, 22 bp, synthetic construct
  misc_feature 1..22: note = chemically synthesized
  source 1..22: mol_type = other DNA
tgtgtccatgtgtatcatcatt

SEQ ID NO: 90424 - DNA, 22 bp, synthetic construct
  misc_feature 1..22: note = chemically synthesized
  source 1..22: mol_type = other DNA
gtgtccatgtgtatcatcattt

SEQ ID NO: 90425 - DNA, 22 bp, synthetic construct
  misc_feature 1..22: note = chemically synthesized
  source 1..22: mol_type = other DNA
tgtccatgtgtatcatcattta

SEQ ID NO: 90426 - DNA, 22 bp, synthetic construct
  misc_feature 1..22: note = chemically synthesized
  source 1..22: mol_type = other DNA
agctcccacactcctagactct

SEQ ID NO: 90427 - DNA, 22 bp, synthetic construct
  misc_feature 1..22: note = chemically synthesized
  source 1..22: mol_type = other DNA
gctcccacactcctagactctt

SEQ ID NO: 90428 - DNA, 22 bp, synthetic construct
  misc_feature 1..22: note = chemically synthesized
  source 1..22: mol_type = other DNA
ccacactcctagactcttacaa

SEQ ID NO: 90429 - DNA, 22 bp, synthetic construct
  misc_feature 1..22: note = chemically synthesized
  source 1..22: mol_type = other DNA
ctagactcttacaaaagctcta

SEQ ID NO: 90430 - DNA, 22 bp, synthetic construct
  misc_feature 1..22: note = chemically synthesized
  source 1..22: mol_type = other DNA
gactcttacaaaagctctactc

SEQ ID NO: 90431 - DNA, 22 bp, synthetic construct
  misc_feature 1..22: note = chemically synthesized
  source 1..22: mol_type = other DNA
ttacaaaagctctactctaaca

SEQ ID NO: 90432 - DNA, 22 bp, synthetic construct
  misc_feature 1..22: note = chemically synthesized
  source 1..22: mol_type = other DNA
acaaaagctctactctaacaaa

SEQ ID NO: 90433 - DNA, 22 bp, synthetic construct
  misc_feature 1..22: note = chemically synthesized
  source 1..22: mol_type = other DNA
caaaagctctactctaacaaat

SEQ ID NO: 90434 - DNA, 22 bp, synthetic construct
  misc_feature 1..22: note = chemically synthesized
  source 1..22: mol_type = other DNA
tactctaacaaataattttaat

SEQ ID NO: 90435 - DNA, 22 bp, synthetic construct
  misc_feature 1..22: note = chemically synthesized
  source 1..22: mol_type = other DNA
ctctaacaaataattttaatat

SEQ ID NO: 90436 - DNA, 22 bp, synthetic construct
  misc_feature 1..22: note = chemically synthesized
  source 1..22: mol_type = other DNA
taacaaataattttaatataac

SEQ ID NO: 90437 - DNA, 22 bp, synthetic construct
  misc_feature 1..22: note = chemically synthesized
  source 1..22: mol_type = other DNA
acaaataattttaatataacaa

SEQ ID NO: 90438 - DNA, 22 bp, synthetic construct
  misc_feature 1..22: note = chemically synthesized
  source 1..22: mol_type = other DNA
taatataacaacaaggtgccaa

SEQ ID NO: 90439 - DNA, 22 bp, synthetic construct
  misc_feature 1..22: note = chemically synthesized
  source 1..22: mol_type = other DNA
aatataacaacaaggtgccaag

SEQ ID NO: 90440 - DNA, 22 bp, synthetic construct
  misc_feature 1..22: note = chemically synthesized
  source 1..22: mol_type = other DNA
atataacaacaaggtgccaagt

SEQ ID NO: 90441 - DNA, 22 bp, synthetic construct
  misc_feature 1..22: note = chemically synthesized
  source 1..22: mol_type = other DNA
ttttcatctcttgacctcctca

SEQ ID NO: 90442 - DNA, 22 bp, synthetic construct
  misc_feature 1..22: note = chemically synthesized
  source 1..22: mol_type = other DNA
tttcatctcttgacctcctcat

SEQ ID NO: 90443 - DNA, 22 bp, synthetic construct
  misc_feature 1..22: note = chemically synthesized
  source 1..22: mol_type = other DNA
ttcatctcttgacctcctcatc

SEQ ID NO: 90444 - DNA, 22 bp, synthetic construct
  misc_feature 1..22: note = chemically synthesized
  source 1..22: mol_type = other DNA
tcatctcttgacctcctcatct

SEQ ID NO: 90445 - DNA, 22 bp, synthetic construct
  misc_feature 1..22: note = chemically synthesized
  source 1..22: mol_type = other DNA
catctcttgacctcctcatctt

SEQ ID NO: 90446 - DNA, 22 bp, synthetic construct
  misc_feature 1..22: note = chemically synthesized
  source 1..22: mol_type = other DNA
atctcttgacctcctcatcttc

SEQ ID NO: 90447 - DNA, 22 bp, synthetic construct
  misc_feature 1..22: note = chemically synthesized
  source 1..22: mol_type = other DNA
ttgacctcctcatcttcaatat

SEQ ID NO: 90448 - DNA, 22 bp, synthetic construct
  misc_feature 1..22: note = chemically synthesized
  source 1..22: mol_type = other DNA
gacctcctcatcttcaatatga

SEQ ID NO: 90449 - DNA, 22 bp, synthetic construct
  misc_feature 1..22: note = chemically synthesized
  source 1..22: mol_type = other DNA
acctcctcatcttcaatatgaa

SEQ ID NO: 90450 - DNA, 22 bp, synthetic construct
  misc_feature 1..22: note = chemically synthesized
  source 1..22: mol_type = other DNA
ctcatcttcaatatgaagatag

SEQ ID NO: 90451 - DNA, 22 bp, synthetic construct
  misc_feature 1..22: note = chemically synthesized
  source 1..22: mol_type = other DNA
atcttcaatatgaagatagcaa

SEQ ID NO: 90452 - DNA, 22 bp, synthetic construct
  misc_feature 1..22: note = chemically synthesized
  source 1..22: mol_type = other DNA
caatatgaagatagcaatgcct

SEQ ID NO: 90453 - DNA, 22 bp, synthetic construct
  misc_feature 1..22: note = chemically synthesized
  source 1..22: mol_type = other DNA
aatatgaagatagcaatgccta

SEQ ID NO: 90454 - DNA, 22 bp, synthetic construct
  misc_feature 1..22: note = chemically synthesized
  source 1..22: mol_type = other DNA
gcatatagtaattgtgtgtgct

SEQ ID NO: 90455 - DNA, 22 bp, synthetic construct
  misc_feature 1..22: note = chemically synthesized
  source 1..22: mol_type = other DNA
tgtgtgctcggcacatgtccca

SEQ ID NO: 90456 - DNA, 22 bp, synthetic construct
  misc_feature 1..22: note = chemically synthesized
  source 1..22: mol_type = other DNA
ggcacatgtcccatccaggtga

SEQ ID NO: 90457 - DNA, 22 bp, synthetic construct
  misc_feature 1..22: note = chemically synthesized
  source 1..22: mol_type = other DNA
tcatgaattctctggtatttgg

SEQ ID NO: 90458 - DNA, 22 bp, synthetic construct
  misc_feature 1..22: note = chemically synthesized
  source 1..22: mol_type = other DNA
atgaattctctggtatttggat

SEQ ID NO: 90459 - DNA, 22 bp, synthetic construct
  misc_feature 1..22: note = chemically synthesized
  source 1..22: mol_type = other DNA
tctggtatttggatttttaggg

SEQ ID NO: 90460 - DNA, 22 bp, synthetic construct
  misc_feature 1..22: note = chemically synthesized
  source 1..22: mol_type = other DNA
tggtatttggatttttagggcc

SEQ ID NO: 90461 - DNA, 22 bp, synthetic construct
  misc_feature 1..22: note = chemically synthesized
  source 1..22: mol_type = other DNA
gtatttggatttttagggccaa

SEQ ID NO: 90462 - DNA, 22 bp, synthetic construct
  misc_feature 1..22: note = chemically synthesized
  source 1..22: mol_type = other DNA
ggatttttagggccaacatctt

SEQ ID NO: 90463 - DNA, 22 bp, synthetic construct
  misc_feature 1..22: note = chemically synthesized
  source 1..22: mol_type = other DNA
gatttttagggccaacatcttg

SEQ ID NO: 90464 - DNA, 22 bp, synthetic construct
  misc_feature 1..22: note = chemically synthesized
  source 1..22: mol_type = other DNA
ttagggccaacatcttgcctag

SEQ ID NO: 90465 - DNA, 22 bp, synthetic construct
  misc_feature 1..22: note = chemically synthesized
  source 1..22: mol_type = other DNA
tagggccaacatcttgcctaga

SEQ ID NO: 90466 - DNA, 22 bp, synthetic construct
  misc_feature 1..22: note = chemically synthesized
  source 1..22: mol_type = other DNA
agggccaacatcttgcctagac

SEQ ID NO: 90467 - DNA, 22 bp, synthetic construct
  misc_feature 1..22: note = chemically synthesized
  source 1..22: mol_type = other DNA
gggccaacatcttgcctagact

SEQ ID NO: 90468 - DNA, 22 bp, synthetic construct
  misc_feature 1..22: note = chemically synthesized
  source 1..22: mol_type = other DNA
gcctagactcactgactacttc

SEQ ID NO: 90469 - DNA, 22 bp, synthetic construct
  misc_feature 1..22: note = chemically synthesized
  source 1..22: mol_type = other DNA
cctagactcactgactacttct

SEQ ID NO: 90470 - DNA, 22 bp, synthetic construct
  misc_feature 1..22: note = chemically synthesized
  source 1..22: mol_type = other DNA
gactcactgactacttctaatg

SEQ ID NO: 90471 - DNA, 22 bp, synthetic construct
  misc_feature 1..22: note = chemically synthesized
  source 1..22: mol_type = other DNA
actgactacttctaatggtgta

SEQ ID NO: 90472 - DNA, 22 bp, synthetic construct
  misc_feature 1..22: note = chemically synthesized
  source 1..22: mol_type = other DNA
actacttctaatggtgtaggaa

SEQ ID NO: 90473 - DNA, 22 bp, synthetic construct
  misc_feature 1..22: note = chemically synthesized
  source 1..22: mol_type = other DNA
cttctaatggtgtaggaataga

SEQ ID NO: 90474 - DNA, 22 bp, synthetic construct
  misc_feature 1..22: note = chemically synthesized
  source 1..22: mol_type = other DNA
ctaatggtgtaggaatagaagg

SEQ ID NO: 90475 - DNA, 22 bp, synthetic construct
  misc_feature 1..22: note = chemically synthesized
  source 1..22: mol_type = other DNA
taatggtgtaggaatagaaggt

SEQ ID NO: 90476 - DNA, 22 bp, synthetic construct
  misc_feature 1..22: note = chemically synthesized
  source 1..22: mol_type = other DNA
atggtgtaggaatagaaggtat

SEQ ID NO: 90477 - DNA, 22 bp, synthetic construct
  misc_feature 1..22: note = chemically synthesized
  source 1..22: mol_type = other DNA
tatttgctctttttttttgact

SEQ ID NO: 90478 - DNA, 22 bp, synthetic construct
  misc_feature 1..22: note = chemically synthesized
  source 1..22: mol_type = other DNA
gctctttttttttgacttttgg

SEQ ID NO: 90479 - DNA, 22 bp, synthetic construct
  misc_feature 1..22: note = chemically synthesized
  source 1..22: mol_type = other DNA
ctctttttttttgacttttgga

SEQ ID NO: 90480 - DNA, 22 bp, synthetic construct
  misc_feature 1..22: note = chemically synthesized
  source 1..22: mol_type = other DNA
tttttttttgacttttggagaa

SEQ ID NO: 90481 - DNA, 22 bp, synthetic construct
  misc_feature 1..22: note = chemically synthesized
  source 1..22: mol_type = other DNA
tttttttgacttttggagaaag

SEQ ID NO: 90482 - DNA, 22 bp, synthetic construct
  misc_feature 1..22: note = chemically synthesized
  source 1..22: mol_type = other DNA
ttttttgacttttggagaaagg

SEQ ID NO: 90483 - DNA, 22 bp, synthetic construct
  misc_feature 1..22: note = chemically synthesized
  source 1..22: mol_type = other DNA
tttttgacttttggagaaagga

SEQ ID NO: 90484 - DNA, 22 bp, synthetic construct
  misc_feature 1..22: note = chemically synthesized
  source 1..22: mol_type = other DNA
ttttgacttttggagaaaggaa

SEQ ID NO: 90485 - DNA, 22 bp, synthetic construct
  misc_feature 1..22: note = chemically synthesized
  source 1..22: mol_type = other DNA
tttgacttttggagaaaggaat

SEQ ID NO: 90486 - DNA, 22 bp, synthetic construct
  misc_feature 1..22: note = chemically synthesized
  source 1..22: mol_type = other DNA
ttgacttttggagaaaggaatg

SEQ ID NO: 90487 - DNA, 22 bp, synthetic construct
  misc_feature 1..22: note = chemically synthesized
  source 1..22: mol_type = other DNA
tgacttttggagaaaggaatgt

SEQ ID NO: 90488 - DNA, 22 bp, synthetic construct
  misc_feature 1..22: note = chemically synthesized
  source 1..22: mol_type = other DNA
gacttttggagaaaggaatgta

SEQ ID NO: 90489 - DNA, 22 bp, synthetic construct
  misc_feature 1..22: note = chemically synthesized
  source 1..22: mol_type = other DNA
acttttggagaaaggaatgtag

SEQ ID NO: 90490 - DNA, 22 bp, synthetic construct
  misc_feature 1..22: note = chemically synthesized
  source 1..22: mol_type = other DNA
ttggagaaaggaatgtagtttg

SEQ ID NO: 90491 - DNA, 22 bp, synthetic construct
  misc_feature 1..22: note = chemically synthesized
  source 1..22: mol_type = other DNA
tggagaaaggaatgtagtttgt

SEQ ID NO: 90492 - DNA, 22 bp, synthetic construct
  misc_feature 1..22: note = chemically synthesized
  source 1..22: mol_type = other DNA
ggagaaaggaatgtagtttgtt

SEQ ID NO: 90493 - DNA, 22 bp, synthetic construct
  misc_feature 1..22: note = chemically synthesized
  source 1..22: mol_type = other DNA
gagaaaggaatgtagtttgttt

SEQ ID NO: 90494 - DNA, 22 bp, synthetic construct
  misc_feature 1..22: note = chemically synthesized
  source 1..22: mol_type = other DNA
gttttccctatcaagatcataa

SEQ ID NO: 90495 - DNA, 22 bp, synthetic construct
  misc_feature 1..22: note = chemically synthesized
  source 1..22: mol_type = other DNA
ttttccctatcaagatcataag

SEQ ID NO: 90496 - DNA, 22 bp, synthetic construct
  misc_feature 1..22: note = chemically synthesized
  source 1..22: mol_type = other DNA
tccctatcaagatcataaggtc

SEQ ID NO: 90497 - DNA, 22 bp, synthetic construct
  misc_feature 1..22: note = chemically synthesized
  source 1..22: mol_type = other DNA
ccctatcaagatcataaggtct

SEQ ID NO: 90498 - DNA, 22 bp, synthetic construct
  misc_feature 1..22: note = chemically synthesized
  source 1..22: mol_type = other DNA
cctatcaagatcataaggtcta

SEQ ID NO: 90499 - DNA, 22 bp, synthetic construct
  misc_feature 1..22: note = chemically synthesized
  source 1..22: mol_type = other DNA
tcaagatcataaggtctacaat

SEQ ID NO: 90500 - DNA, 22 bp, synthetic construct
  misc_feature 1..22: note = chemically synthesized
  source 1..22: mol_type = other DNA
caatctctcttactgtctttcg

SEQ ID NO: 90501 - DNA, 22 bp, synthetic construct
  misc_feature 1..22: note = chemically synthesized
  source 1..22: mol_type = other DNA
tcttactgtctttcgaatacca

SEQ ID NO: 90502 - DNA, 22 bp, synthetic construct
  misc_feature 1..22: note = chemically synthesized
  source 1..22: mol_type = other DNA
ttactgtctttcgaataccaca

SEQ ID NO: 90503 - DNA, 22 bp, synthetic construct
  misc_feature 1..22: note = chemically synthesized
  source 1..22: mol_type = other DNA
actgtctttcgaataccacaca

SEQ ID NO: 90504 - DNA, 22 bp, synthetic construct
  misc_feature 1..22: note = chemically synthesized
  source 1..22: mol_type = other DNA
ctgtctttcgaataccacacaa

SEQ ID NO: 90505 - DNA, 22 bp, synthetic construct
  misc_feature 1..22: note = chemically synthesized
  source 1..22: mol_type = other DNA
tctttcgaataccacacaagta

SEQ ID NO: 90506 - DNA, 22 bp, synthetic construct
  misc_feature 1..22: note = chemically synthesized
  source 1..22: mol_type = other DNA
tcgaataccacacaagtatctc

SEQ ID NO: 90507 - DNA, 22 bp, synthetic construct
  misc_feature 1..22: note = chemically synthesized
  source 1..22: mol_type = other DNA
cgaataccacacaagtatctcc

SEQ ID NO: 90508 - DNA, 22 bp, synthetic construct
  misc_feature 1..22: note = chemically synthesized
  source 1..22: mol_type = other DNA
gaataccacacaagtatctcct

SEQ ID NO: 90509 - DNA, 22 bp, synthetic construct
  misc_feature 1..22: note = chemically synthesized
  source 1..22: mol_type = other DNA
cttttaatatcttactcttatg

SEQ ID NO: 90510 - DNA, 22 bp, synthetic construct
  misc_feature 1..22: note = chemically synthesized
  source 1..22: mol_type = other DNA
ttaatatcttactcttatgaga

SEQ ID NO: 90511 - DNA, 22 bp, synthetic construct
  misc_feature 1..22: note = chemically synthesized
  source 1..22: mol_type = other DNA
taatatcttactcttatgagaa

SEQ ID NO: 90512 - DNA, 22 bp, synthetic construct
  misc_feature 1..22: note = chemically synthesized
  source 1..22: mol_type = other DNA
aatatcttactcttatgagaac

SEQ ID NO: 90513 - DNA, 22 bp, synthetic construct
  misc_feature 1..22: note = chemically synthesized
  source 1..22: mol_type = other DNA
atatcttactcttatgagaact

SEQ ID NO: 90514 - DNA, 22 bp, synthetic construct
  misc_feature 1..22: note = chemically synthesized
  source 1..22: mol_type = other DNA
actcttatgagaacttccctat

SEQ ID NO: 90515 - DNA, 22 bp, synthetic construct
  misc_feature 1..22: note = chemically synthesized
  source 1..22: mol_type = other DNA
ctcttatgagaacttccctatg

SEQ ID NO: 90516 - DNA, 22 bp, synthetic construct
  misc_feature 1..22: note = chemically synthesized
  source 1..22: mol_type = other DNA
ttatgagaacttccctatgctc

SEQ ID NO: 90517 - DNA, 22 bp, synthetic construct
  misc_feature 1..22: note = chemically synthesized
  source 1..22: mol_type = other DNA
atgagaacttccctatgctcag

SEQ ID NO: 90518 - DNA, 22 bp, synthetic construct
  misc_feature 1..22: note = chemically synthesized
  source 1..22: mol_type = other DNA
tgagaacttccctatgctcagg

SEQ ID NO: 90519 - DNA, 22 bp, synthetic construct
  misc_feature 1..22: note = chemically synthesized
  source 1..22: mol_type = other DNA
ccctatgctcaggaatgtgaaa

SEQ ID NO: 90520 - DNA, 22 bp, synthetic construct
  misc_feature 1..22: note = chemically synthesized
  source 1..22: mol_type = other DNA
cctatgctcaggaatgtgaaag

SEQ ID NO: 90521 - DNA, 22 bp, synthetic construct
  misc_feature 1..22: note = chemically synthesized
  source 1..22: mol_type = other DNA
tgctcaggaatgtgaaagtgat

SEQ ID NO: 90522 - DNA, 22 bp, synthetic construct
  misc_feature 1..22: note = chemically synthesized
  source 1..22: mol_type = other DNA
aggaatgtgaaagtgatcttcc

SEQ ID NO: 90523 - DNA, 22 bp, synthetic construct
  misc_feature 1..22: note = chemically synthesized
  source 1..22: mol_type = other DNA
ccccaaaatgccctgagtagct

SEQ ID NO: 90524 - DNA, 22 bp, synthetic construct
  misc_feature 1..22: note = chemically synthesized
  source 1..22: mol_type = other DNA
cccaaaatgccctgagtagctc

SEQ ID NO: 90525 - DNA, 22 bp, synthetic construct
  misc_feature 1..22: note = chemically synthesized
  source 1..22: mol_type = other DNA
agtagctctgcttctgatatgt

SEQ ID NO: 90526 - DNA, 22 bp, synthetic construct
  misc_feature 1..22: note = chemically synthesized
  source 1..22: mol_type = other DNA
tgcttctgatatgtaaaccagt

SEQ ID NO: 90527 - DNA, 22 bp, synthetic construct
  misc_feature 1..22: note = chemically synthesized
  source 1..22: mol_type = other DNA
cttctgatatgtaaaccagtgg

SEQ ID NO: 90528 - DNA, 22 bp, synthetic construct
  misc_feature 1..22: note = chemically synthesized
  source 1..22: mol_type = other DNA
ctgatatgtaaaccagtggttc

SEQ ID NO: 90529 - DNA, 22 bp, synthetic construct
  misc_feature 1..22: note = chemically synthesized
  source 1..22: mol_type = other DNA
tgatatgtaaaccagtggttcc

SEQ ID NO: 90530 - DNA, 22 bp, synthetic construct
  misc_feature 1..22: note = chemically synthesized
  source 1..22: mol_type = other DNA
atatgtaaaccagtggttccta

SEQ ID NO: 90531 - DNA, 22 bp, synthetic construct
  misc_feature 1..22: note = chemically synthesized
  source 1..22: mol_type = other DNA
ctaaatatcttattcagatata

SEQ ID NO: 90532 - DNA, 22 bp, synthetic construct
  misc_feature 1..22: note = chemically synthesized
  source 1..22: mol_type = other DNA
aatatcttattcagatataaag

SEQ ID NO: 90533 - DNA, 22 bp, synthetic construct
  misc_feature 1..22: note = chemically synthesized
  source 1..22: mol_type = other DNA
attcagatataaagagttctca

SEQ ID NO: 90534 - DNA, 22 bp, synthetic construct
  misc_feature 1..22: note = chemically synthesized
  source 1..22: mol_type = other DNA
ttcagatataaagagttctcag

SEQ ID NO: 90535 - DNA, 22 bp, synthetic construct
  misc_feature 1..22: note = chemically synthesized
  source 1..22: mol_type = other DNA
agatataaagagttctcagtgc

SEQ ID NO: 90536 - DNA, 22 bp, synthetic construct
  misc_feature 1..22: note = chemically synthesized
  source 1..22: mol_type = other DNA
tcagtgcctactatgtataatg

SEQ ID NO: 90537 - DNA, 22 bp, synthetic construct
  misc_feature 1..22: note = chemically synthesized
  source 1..22: mol_type = other DNA
agtgcctactatgtataatgac

SEQ ID NO: 90538 - DNA, 22 bp, synthetic construct
  misc_feature 1..22: note = chemically synthesized
  source 1..22: mol_type = other DNA
ctatgtataatgacttaaggaa

SEQ ID NO: 90539 - DNA, 22 bp, synthetic construct
  misc_feature 1..22: note = chemically synthesized
  source 1..22: mol_type = other DNA
tgtataatgacttaaggaaaac

SEQ ID NO: 90540 - DNA, 22 bp, synthetic construct
  misc_feature 1..22: note = chemically synthesized
  source 1..22: mol_type = other DNA
aaggaaaacacatggatataaa

SEQ ID NO: 90541 - DNA, 22 bp, synthetic construct
  misc_feature 1..22: note = chemically synthesized
  source 1..22: mol_type = other DNA
aggaaaacacatggatataaaa

SEQ ID NO: 90542 - DNA, 22 bp, synthetic construct
  misc_feature 1..22: note = chemically synthesized
  source 1..22: mol_type = other DNA
ctgctgccagtcaattcaaaat

SEQ ID NO: 90543 - DNA, 22 bp, synthetic construct
  misc_feature 1..22: note = chemically synthesized
  source 1..22: mol_type = other DNA
tgctgccagtcaattcaaaatg

SEQ ID NO: 90544 - DNA, 22 bp, synthetic construct
  misc_feature 1..22: note = chemically synthesized
  source 1..22: mol_type = other DNA
ctgccagtcaattcaaaatgtt

SEQ ID NO: 90545 - DNA, 22 bp, synthetic construct
  misc_feature 1..22: note = chemically synthesized
  source 1..22: mol_type = other DNA
ccagtcaattcaaaatgttgtg

SEQ ID NO: 90546 - DNA, 22 bp, synthetic construct
  misc_feature 1..22: note = chemically synthesized
  source 1..22: mol_type = other DNA
aaaatgttgtgatcaaaacagt

SEQ ID NO: 90547 - DNA, 22 bp, synthetic construct
  misc_feature 1..22: note = chemically synthesized
  source 1..22: mol_type = other DNA
tgatcaaaacagttaactataa

SEQ ID NO: 90548 - DNA, 22 bp, synthetic construct
  misc_feature 1..22: note = chemically synthesized
  source 1..22: mol_type = other DNA
actataacacattgtcagtata

SEQ ID NO: 90549 - DNA, 22 bp, synthetic construct
  misc_feature 1..22: note = chemically synthesized
  source 1..22: mol_type = other DNA
taacacattgtcagtatattct

SEQ ID NO: 90550 - DNA, 22 bp, synthetic construct
  misc_feature 1..22: note = chemically synthesized
  source 1..22: mol_type = other DNA
tcagtatattctggcagtacag

SEQ ID NO: 90551 - DNA, 22 bp, synthetic construct
  misc_feature 1..22: note = chemically synthesized
  source 1..22: mol_type = other DNA
tggcagtacagacagagttact

SEQ ID NO: 90552 - DNA, 22 bp, synthetic construct
  misc_feature 1..22: note = chemically synthesized
  source 1..22: mol_type = other DNA
gcagtacagacagagttactgt

SEQ ID NO: 90553 - DNA, 22 bp, synthetic construct
  misc_feature 1..22: note = chemically synthesized
  source 1..22: mol_type = other DNA
ctgtgaaagcactttcaaacac

SEQ ID NO: 90554 - DNA, 22 bp, synthetic construct
  misc_feature 1..22: note = chemically synthesized
  source 1..22: mol_type = other DNA
tgaaagcactttcaaacacaag

SEQ ID NO: 90555 - DNA, 22 bp, synthetic construct
  misc_feature 1..22: note = chemically synthesized
  source 1..22: mol_type = other DNA
tcaaacacaaggaaacaacaga

SEQ ID NO: 90556 - DNA, 22 bp, synthetic construct
  misc_feature 1..22: note = chemically synthesized
  source 1..22: mol_type = other DNA
caaacacaaggaaacaacagat

SEQ ID NO: 90557 - DNA, 22 bp, synthetic construct
  misc_feature 1..22: note = chemically synthesized
  source 1..22: mol_type = other DNA
aaacacaaggaaacaacagatt

SEQ ID NO: 90558 - DNA, 22 bp, synthetic construct
  misc_feature 1..22: note = chemically synthesized
  source 1..22: mol_type = other DNA
tgtttaggtattcaagtaagtt

SEQ ID NO: 90559 - DNA, 22 bp, synthetic construct
  misc_feature 1..22: note = chemically synthesized
  source 1..22: mol_type = other DNA
tttaggtattcaagtaagttta

SEQ ID NO: 90560 - DNA, 22 bp, synthetic construct
  misc_feature 1..22: note = chemically synthesized
  source 1..22: mol_type = other DNA
aggtattcaagtaagtttaaaa

SEQ ID NO: 90561 - DNA, 22 bp, synthetic construct
  misc_feature 1..22: note = chemically synthesized
  source 1..22: mol_type = other DNA
ggtattcaagtaagtttaaaat

SEQ ID NO: 90562 - DNA, 22 bp, synthetic construct
  misc_feature 1..22: note = chemically synthesized
  source 1..22: mol_type = other DNA
aagtaagtttaaaattaatcaa

SEQ ID NO: 90563 - DNA, 22 bp, synthetic construct
  misc_feature 1..22: note = chemically synthesized
  source 1..22: mol_type = other DNA
aaaattaatcaacatgcatata

SEQ ID NO: 90564 - DNA, 22 bp, synthetic construct
  misc_feature 1..22: note = chemically synthesized
  source 1..22: mol_type = other DNA
aaattaatcaacatgcatataa

SEQ ID NO: 90565 - DNA, 22 bp, synthetic construct
  misc_feature 1..22: note = chemically synthesized
  source 1..22: mol_type = other DNA
atcaacatgcatataatacaga

SEQ ID NO: 90566 - DNA, 22 bp, synthetic construct
  misc_feature 1..22: note = chemically synthesized
  source 1..22: mol_type = other DNA
ttaaaaatgtatacaactgaga

SEQ ID NO: 90567 - DNA, 22 bp, synthetic construct
  misc_feature 1..22: note = chemically synthesized
  source 1..22: mol_type = other DNA
taaaaatgtatacaactgagaa

SEQ ID NO: 90568 - DNA, 22 bp, synthetic construct
  misc_feature 1..22: note = chemically synthesized
  source 1..22: mol_type = other DNA
aaaaatgtatacaactgagaaa

SEQ ID NO: 90569 - DNA, 22 bp, synthetic construct
  misc_feature 1..22: note = chemically synthesized
  source 1..22: mol_type = other DNA
aaaatgtatacaactgagaaag

SEQ ID NO: 90570 - DNA, 22 bp, synthetic construct
  misc_feature 1..22: note = chemically synthesized
  source 1..22: mol_type = other DNA
agaaagttctaaaaatccttct

SEQ ID NO: 90571 - DNA, 22 bp, synthetic construct
  misc_feature 1..22: note = chemically synthesized
  source 1..22: mol_type = other DNA
taaaaatccttctaattttacc

SEQ ID NO: 90572 - DNA, 22 bp, synthetic construct
  misc_feature 1..22: note = chemically synthesized
  source 1..22: mol_type = other DNA
aaaatccttctaattttaccta

SEQ ID NO: 90573 - DNA, 22 bp, synthetic construct
  misc_feature 1..22: note = chemically synthesized
  source 1..22: mol_type = other DNA
ctaattttacctatggcaaaaa

SEQ ID NO: 90574 - DNA, 22 bp, synthetic construct
  misc_feature 1..22: note = chemically synthesized
  source 1..22: mol_type = other DNA
taattttacctatggcaaaaat

SEQ ID NO: 90575 - DNA, 22 bp, synthetic construct
  misc_feature 1..22: note = chemically synthesized
  source 1..22: mol_type = other DNA
attttacctatggcaaaaatgg

SEQ ID NO: 90576 - DNA, 22 bp, synthetic construct
  misc_feature 1..22: note = chemically synthesized
  source 1..22: mol_type = other DNA
tacctatggcaaaaatggtgct

SEQ ID NO: 90577 - DNA, 22 bp, synthetic construct
  misc_feature 1..22: note = chemically synthesized
  source 1..22: mol_type = other DNA
acctatggcaaaaatggtgctc

SEQ ID NO: 90578 - DNA, 22 bp, synthetic construct
  misc_feature 1..22: note = chemically synthesized
  source 1..22: mol_type = other DNA
cctatggcaaaaatggtgctca

SEQ ID NO: 90579 - DNA, 22 bp, synthetic construct
  misc_feature 1..22: note = chemically synthesized
  source 1..22: mol_type = other DNA
tggcaaaaatggtgctcaagga

SEQ ID NO: 90580 - DNA, 22 bp, synthetic construct
  misc_feature 1..22: note = chemically synthesized
  source 1..22: mol_type = other DNA
aaggaaaaaaatattactccta

SEQ ID NO: 90581 - DNA, 22 bp, synthetic construct
  misc_feature 1..22: note = chemically synthesized
  source 1..22: mol_type = other DNA
ctcctatgatcagaaaggaaat

SEQ ID NO: 90582 - DNA, 22 bp, synthetic construct
  misc_feature 1..22: note = chemically synthesized
  source 1..22: mol_type = other DNA
ctatgatcagaaaggaaataac

SEQ ID NO: 90583 - DNA, 22 bp, synthetic construct
  misc_feature 1..22: note = chemically synthesized
  source 1..22: mol_type = other DNA
tgatcagaaaggaaataactgt

SEQ ID NO: 90584 - DNA, 22 bp, synthetic construct
  misc_feature 1..22: note = chemically synthesized
  source 1..22: mol_type = other DNA
ttcggttgtttactgcatgctt

SEQ ID NO: 90585 - DNA, 22 bp, synthetic construct
  misc_feature 1..22: note = chemically synthesized
  source 1..22: mol_type = other DNA
ggttgtttactgcatgcttcct

SEQ ID NO: 90586 - DNA, 22 bp, synthetic construct
  misc_feature 1..22: note = chemically synthesized
  source 1..22: mol_type = other DNA
tttactgcatgcttcctctttg

SEQ ID NO: 90587 - DNA, 22 bp, synthetic construct
  misc_feature 1..22: note = chemically synthesized
  source 1..22: mol_type = other DNA
actgcatgcttcctctttgtat

SEQ ID NO: 90588 - DNA, 22 bp, synthetic construct
  misc_feature 1..22: note = chemically synthesized
  source 1..22: mol_type = other DNA
ctgcatgcttcctctttgtatg

SEQ ID NO: 90589 - DNA, 22 bp, synthetic construct
  misc_feature 1..22: note = chemically synthesized
  source 1..22: mol_type = other DNA
catgcttcctctttgtatgttg

SEQ ID NO: 90590 - DNA, 22 bp, synthetic construct
  misc_feature 1..22: note = chemically synthesized
  source 1..22: mol_type = other DNA
cctctttgtatgttgtagcatt

SEQ ID NO: 90591 - DNA, 22 bp, synthetic construct
  misc_feature 1..22: note = chemically synthesized
  source 1..22: mol_type = other DNA
ctctttgtatgttgtagcatta

SEQ ID NO: 90592 - DNA, 22 bp, synthetic construct
  misc_feature 1..22: note = chemically synthesized
  source 1..22: mol_type = other DNA
tttgtatgttgtagcattaaca

SEQ ID NO: 90593 - DNA, 22 bp, synthetic construct
  misc_feature 1..22: note = chemically synthesized
  source 1..22: mol_type = other DNA
tgtatgttgtagcattaacaac

SEQ ID NO: 90594 - DNA, 22 bp, synthetic construct
  misc_feature 1..22: note = chemically synthesized
  source 1..22: mol_type = other DNA
gtatgttgtagcattaacaaca

SEQ ID NO: 90595 - DNA, 22 bp, synthetic construct
  misc_feature 1..22: note = chemically synthesized
  source 1..22: mol_type = other DNA
tatgttgtagcattaacaacaa

SEQ ID NO: 90596 - DNA, 22 bp, synthetic construct
  misc_feature 1..22: note = chemically synthesized
  source 1..22: mol_type = other DNA
tagcattaacaacaaagaaaca

SEQ ID NO: 90597 - DNA, 22 bp, synthetic construct
  misc_feature 1..22: note = chemically synthesized
  source 1..22: mol_type = other DNA
acaacaaagaaacactgtgcga

SEQ ID NO: 90598 - DNA, 22 bp, synthetic construct
  misc_feature 1..22: note = chemically synthesized
  source 1..22: mol_type = other DNA
tgcgatggtattattaatattg

SEQ ID NO: 90599 - DNA, 22 bp, synthetic construct
  misc_feature 1..22: note = chemically synthesized
  source 1..22: mol_type = other DNA
ttaatattgtcctctaattcca

SEQ ID NO: 90600 - DNA, 22 bp, synthetic construct
  misc_feature 1..22: note = chemically synthesized
  source 1..22: mol_type = other DNA
atattgtcctctaattccagaa

SEQ ID NO: 90601 - DNA, 22 bp, synthetic construct
  misc_feature 1..22: note = chemically synthesized
  source 1..22: mol_type = other DNA
tcctctaattccagaagttcta

SEQ ID NO: 90602 - DNA, 22 bp, synthetic construct
  misc_feature 1..22: note = chemically synthesized
  source 1..22: mol_type = other DNA
taattccagaagttctaaagca

SEQ ID NO: 90603 - DNA, 22 bp, synthetic construct
  misc_feature 1..22: note = chemically synthesized
  source 1..22: mol_type = other DNA
attccagaagttctaaagcaag

SEQ ID NO: 90604 - DNA, 22 bp, synthetic construct
  misc_feature 1..22: note = chemically synthesized
  source 1..22: mol_type = other DNA
cagaagttctaaagcaaggaat

SEQ ID NO: 90605 - DNA, 22 bp, synthetic construct
  misc_feature 1..22: note = chemically synthesized
  source 1..22: mol_type = other DNA
taaagcaaggaataatcattcc

SEQ ID NO: 90606 - DNA, 22 bp, synthetic construct
  misc_feature 1..22: note = chemically synthesized
  source 1..22: mol_type = other DNA
aagcaaggaataatcattcctt

SEQ ID NO: 90607 - DNA, 22 bp, synthetic construct
  misc_feature 1..22: note = chemically synthesized
  source 1..22: mol_type = other DNA
cttcatttactcatttactcat

SEQ ID NO: 90608 - DNA, 22 bp, synthetic construct
  misc_feature 1..22: note = chemically synthesized
  source 1..22: mol_type = other DNA
catttactcatttactcattcg

SEQ ID NO: 90609 - DNA, 22 bp, synthetic construct
  misc_feature 1..22: note = chemically synthesized
  source 1..22: mol_type = other DNA
atttactcatttactcattcgt

SEQ ID NO: 90610 - DNA, 22 bp, synthetic construct
  misc_feature 1..22: note = chemically synthesized
  source 1..22: mol_type = other DNA
actcatttactcattcgttcat

SEQ ID NO: 90611 - DNA, 22 bp, synthetic construct
  misc_feature 1..22: note = chemically synthesized
  source 1..22: mol_type = other DNA
ctcatttactcattcgttcatt

SEQ ID NO: 90612 - DNA, 22 bp, synthetic construct
  misc_feature 1..22: note = chemically synthesized
  source 1..22: mol_type = other DNA
atttactcattcgttcattcat

SEQ ID NO: 90613 - DNA, 22 bp, synthetic construct
  misc_feature 1..22: note = chemically synthesized
  source 1..22: mol_type = other DNA
actcattcgttcattcattcac

SEQ ID NO: 90614 - DNA, 22 bp, synthetic construct
  misc_feature 1..22: note = chemically synthesized
  source 1..22: mol_type = other DNA
ctcattcgttcattcattcact

SEQ ID NO: 90615 - DNA, 22 bp, synthetic construct
  misc_feature 1..22: note = chemically synthesized
  source 1..22: mol_type = other DNA
attcgttcattcattcactgtt

SEQ ID NO: 90616 - DNA, 22 bp, synthetic construct
  misc_feature 1..22: note = chemically synthesized
  source 1..22: mol_type = other DNA
gttcattcattcactgttttct

SEQ ID NO: 90617 - DNA, 22 bp, synthetic construct
  misc_feature 1..22: note = chemically synthesized
  source 1..22: mol_type = other DNA
attcattcactgttttcttgaa

SEQ ID NO: 90618 - DNA, 22 bp, synthetic construct
  misc_feature 1..22: note = chemically synthesized
  source 1..22: mol_type = other DNA
attcactgttttcttgaataaa

SEQ ID NO: 90619 - DNA, 22 bp, synthetic construct
  misc_feature 1..22: note = chemically synthesized
  source 1..22: mol_type = other DNA
actgttttcttgaataaatatt

SEQ ID NO: 90620 - DNA, 22 bp, synthetic construct
  misc_feature 1..22: note = chemically synthesized
  source 1..22: mol_type = other DNA
ttttcttgaataaatattttct

SEQ ID NO: 90621 - DNA, 22 bp, synthetic construct
  misc_feature 1..22: note = chemically synthesized
  source 1..22: mol_type = other DNA
tcttgaataaatattttctttc

SEQ ID NO: 90622 - DNA, 22 bp, synthetic construct
  misc_feature 1..22: note = chemically synthesized
  source 1..22: mol_type = other DNA
cttgaataaatattttctttct

SEQ ID NO: 90623 - DNA, 22 bp, synthetic construct
  misc_feature 1..22: note = chemically synthesized
  source 1..22: mol_type = other DNA
ttgaataaatattttctttctg

SEQ ID NO: 90624 - DNA, 22 bp, synthetic construct
  misc_feature 1..22: note = chemically synthesized
  source 1..22: mol_type = other DNA
gaataaatattttctttctgcc

SEQ ID NO: 90625 - DNA, 22 bp, synthetic construct
  misc_feature 1..22: note = chemically synthesized
  source 1..22: mol_type = other DNA
aataaatattttctttctgccc

SEQ ID NO: 90626 - DNA, 22 bp, synthetic construct
  misc_feature 1..22: note = chemically synthesized
  source 1..22: mol_type = other DNA
tctttctgcccattgatgaatt

SEQ ID NO: 90627 - DNA, 22 bp, synthetic construct
  misc_feature 1..22: note = chemically synthesized
  source 1..22: mol_type = other DNA
ctttctgcccattgatgaattt

SEQ ID NO: 90628 - DNA, 22 bp, synthetic construct
  misc_feature 1..22: note = chemically synthesized
  source 1..22: mol_type = other DNA
tttctgcccattgatgaattta

SEQ ID NO: 90629 - DNA, 22 bp, synthetic construct
  misc_feature 1..22: note = chemically synthesized
  source 1..22: mol_type = other DNA
tctgcccattgatgaatttaat

SEQ ID NO: 90630 - DNA, 22 bp, synthetic construct
  misc_feature 1..22: note = chemically synthesized
  source 1..22: mol_type = other DNA
ctgcccattgatgaatttaata

SEQ ID NO: 90631 - DNA, 22 bp, synthetic construct
  misc_feature 1..22: note = chemically synthesized
  source 1..22: mol_type = other DNA
tgcccattgatgaatttaatat

SEQ ID NO: 90632 - DNA, 22 bp, synthetic construct
  misc_feature 1..22: note = chemically synthesized
  source 1..22: mol_type = other DNA
cccattgatgaatttaatatga

SEQ ID NO: 90633 - DNA, 22 bp, synthetic construct
  misc_feature 1..22: note = chemically synthesized
  source 1..22: mol_type = other DNA
atgaatttaatatgaggcacag

SEQ ID NO: 90634 - DNA, 22 bp, synthetic construct
  misc_feature 1..22: note = chemically synthesized
  source 1..22: mol_type = other DNA
aatatgaggcacagtaggcatg

SEQ ID NO: 90635 - DNA, 22 bp, synthetic construct
  misc_feature 1..22: note = chemically synthesized
  source 1..22: mol_type = other DNA
atatgaggcacagtaggcatgt

SEQ ID NO: 90636 - DNA, 22 bp, synthetic construct
  misc_feature 1..22: note = chemically synthesized
  source 1..22: mol_type = other DNA
cttataaagcacggagtgtgtg

SEQ ID NO: 90637 - DNA, 22 bp, synthetic construct
  misc_feature 1..22: note = chemically synthesized
  source 1..22: mol_type = other DNA
ataaagcacggagtgtgtgtgt

SEQ ID NO: 90638 - DNA, 22 bp, synthetic construct
  misc_feature 1..22: note = chemically synthesized
  source 1..22: mol_type = other DNA
taaagcacggagtgtgtgtgtg

SEQ ID NO: 90639 - DNA, 22 bp, synthetic construct
  misc_feature 1..22: note = chemically synthesized
  source 1..22: mol_type = other DNA
ggaaagattttttgggtagtat

SEQ ID NO: 90640 - DNA, 22 bp, synthetic construct
  misc_feature 1..22: note = chemically synthesized
  source 1..22: mol_type = other DNA
gaaagattttttgggtagtata

SEQ ID NO: 90641 - DNA, 22 bp, synthetic construct
  misc_feature 1..22: note = chemically synthesized
  source 1..22: mol_type = other DNA
tttgggtagtatagagaagttt

SEQ ID NO: 90642 - DNA, 22 bp, synthetic construct
  misc_feature 1..22: note = chemically synthesized
  source 1..22: mol_type = other DNA
ttgggtagtatagagaagttta

SEQ ID NO: 90643 - DNA, 22 bp, synthetic construct
  misc_feature 1..22: note = chemically synthesized
  source 1..22: mol_type = other DNA
tgggtagtatagagaagtttat

SEQ ID NO: 90644 - DNA, 22 bp, synthetic construct
  misc_feature 1..22: note = chemically synthesized
  source 1..22: mol_type = other DNA
gggtagtatagagaagtttatt

SEQ ID NO: 90645 - DNA, 22 bp, synthetic construct
  misc_feature 1..22: note = chemically synthesized
  source 1..22: mol_type = other DNA
ggtagtatagagaagtttattg

SEQ ID NO: 90646 - DNA, 22 bp, synthetic construct
  misc_feature 1..22: note = chemically synthesized
  source 1..22: mol_type = other DNA
attgtggctggggtcaagagag

SEQ ID NO: 90647 - DNA, 22 bp, synthetic construct
  misc_feature 1..22: note = chemically synthesized
  source 1..22: mol_type = other DNA
ttgtggctggggtcaagagagg

SEQ ID NO: 90648 - DNA, 22 bp, synthetic construct
  misc_feature 1..22: note = chemically synthesized
  source 1..22: mol_type = other DNA
tggctggggtcaagagaggtca

SEQ ID NO: 90649 - DNA, 22 bp, synthetic construct
  misc_feature 1..22: note = chemically synthesized
  source 1..22: mol_type = other DNA
gggtcaagagaggtcacaagta

SEQ ID NO: 90650 - DNA, 22 bp, synthetic construct
  misc_feature 1..22: note = chemically synthesized
  source 1..22: mol_type = other DNA
gactgaaatatgggaagataag

SEQ ID NO: 90651 - DNA, 22 bp, synthetic construct
  misc_feature 1..22: note = chemically synthesized
  source 1..22: mol_type = other DNA
actgaaatatgggaagataaga

SEQ ID NO: 90652 - DNA, 22 bp, synthetic construct
  misc_feature 1..22: note = chemically synthesized
  source 1..22: mol_type = other DNA
aaatatgggaagataagaggaa

SEQ ID NO: 90653 - DNA, 22 bp, synthetic construct
  misc_feature 1..22: note = chemically synthesized
  source 1..22: mol_type = other DNA
tttacagagatgttctggggca

SEQ ID NO: 90654 - DNA, 22 bp, synthetic construct
  misc_feature 1..22: note = chemically synthesized
  source 1..22: mol_type = other DNA
tacagagatgttctggggcaag

SEQ ID NO: 90655 - DNA, 22 bp, synthetic construct
  misc_feature 1..22: note = chemically synthesized
  source 1..22: mol_type = other DNA
acagagatgttctggggcaagt

SEQ ID NO: 90656 - DNA, 22 bp, synthetic construct
  misc_feature 1..22: note = chemically synthesized
  source 1..22: mol_type = other DNA
cagagatgttctggggcaagta

SEQ ID NO: 90657 - DNA, 22 bp, synthetic construct
  misc_feature 1..22: note = chemically synthesized
  source 1..22: mol_type = other DNA
tggggcaagtaagaggaggaag

SEQ ID NO: 90658 - DNA, 22 bp, synthetic construct
  misc_feature 1..22: note = chemically synthesized
  source 1..22: mol_type = other DNA
gggcaagtaagaggaggaagct

SEQ ID NO: 90659 - DNA, 22 bp, synthetic construct
  misc_feature 1..22: note = chemically synthesized
  source 1..22: mol_type = other DNA
tttcttggagcaggaacacttg

SEQ ID NO: 90660 - DNA, 22 bp, synthetic construct
  misc_feature 1..22: note = chemically synthesized
  source 1..22: mol_type = other DNA
cttggagcaggaacacttgatg

SEQ ID NO: 90661 - DNA, 22 bp, synthetic construct
  misc_feature 1..22: note = chemically synthesized
  source 1..22: mol_type = other DNA
ttggagcaggaacacttgatgg

SEQ ID NO: 90662 - DNA, 22 bp, synthetic construct
  misc_feature 1..22: note = chemically synthesized
  source 1..22: mol_type = other DNA
ggagcaggaacacttgatgggg

SEQ ID NO: 90663 - DNA, 22 bp, synthetic construct
  misc_feature 1..22: note = chemically synthesized
  source 1..22: mol_type = other DNA
gagcaggaacacttgatggggt

SEQ ID NO: 90664 - DNA, 22 bp, synthetic construct
  misc_feature 1..22: note = chemically synthesized
  source 1..22: mol_type = other DNA
gatggggtatagtattatgggc

SEQ ID NO: 90665 - DNA, 22 bp, synthetic construct
  misc_feature 1..22: note = chemically synthesized
  source 1..22: mol_type = other DNA
atggggtatagtattatgggct

SEQ ID NO: 90666 - DNA, 22 bp, synthetic construct
  misc_feature 1..22: note = chemically synthesized
  source 1..22: mol_type = other DNA
tgggctacaatgtgcaggcaaa

SEQ ID NO: 90667 - DNA, 22 bp, synthetic construct
  misc_feature 1..22: note = chemically synthesized
  source 1..22: mol_type = other DNA
caatgtgcaggcaaaggaagga

SEQ ID NO: 90668 - DNA, 22 bp, synthetic construct
  misc_feature 1..22: note = chemically synthesized
  source 1..22: mol_type = other DNA
tcttgagtaatcattatgcctt

SEQ ID NO: 90669 - DNA, 22 bp, synthetic construct
  misc_feature 1..22: note = chemically synthesized
  source 1..22: mol_type = other DNA
gagtaatcattatgcctttaat

SEQ ID NO: 90670 - DNA, 22 bp, synthetic construct
  misc_feature 1..22: note = chemically synthesized
  source 1..22: mol_type = other DNA
agtaatcattatgcctttaatt

SEQ ID NO: 90671 - DNA, 22 bp, synthetic construct
  misc_feature 1..22: note = chemically synthesized
  source 1..22: mol_type = other DNA
tgcctttaattgagcacattat

SEQ ID NO: 90672 - DNA, 22 bp, synthetic construct
  misc_feature 1..22: note = chemically synthesized
  source 1..22: mol_type = other DNA
taattgagcacattattttctc

SEQ ID NO: 90673 - DNA, 22 bp, synthetic construct
  misc_feature 1..22: note = chemically synthesized
  source 1..22: mol_type = other DNA
aattgagcacattattttctca

SEQ ID NO: 90674 - DNA, 22 bp, synthetic construct
  misc_feature 1..22: note = chemically synthesized
  source 1..22: mol_type = other DNA
attgagcacattattttctcag

SEQ ID NO: 90675 - DNA, 22 bp, synthetic construct
  misc_feature 1..22: note = chemically synthesized
  source 1..22: mol_type = other DNA
agcacattattttctcagtaat

SEQ ID NO: 90676 - DNA, 22 bp, synthetic construct
  misc_feature 1..22: note = chemically synthesized
  source 1..22: mol_type = other DNA
ttttctcagtaattgttggagt

SEQ ID NO: 90677 - DNA, 22 bp, synthetic construct
  misc_feature 1..22: note = chemically synthesized
  source 1..22: mol_type = other DNA
tctcagtaattgttggagttta

SEQ ID NO: 90678 - DNA, 22 bp, synthetic construct
  misc_feature 1..22: note = chemically synthesized
  source 1..22: mol_type = other DNA
ctcagtaattgttggagtttaa

SEQ ID NO: 90679 - DNA, 22 bp, synthetic construct
  misc_feature 1..22: note = chemically synthesized
  source 1..22: mol_type = other DNA
tcagtaattgttggagtttaat

SEQ ID NO: 90680 - DNA, 22 bp, synthetic construct
  misc_feature 1..22: note = chemically synthesized
  source 1..22: mol_type = other DNA
agtaattgttggagtttaatcg

SEQ ID NO: 90681 - DNA, 22 bp, synthetic construct
  misc_feature 1..22: note = chemically synthesized
  source 1..22: mol_type = other DNA
ttggagtttaatcgtagcatta

SEQ ID NO: 90682 - DNA, 22 bp, synthetic construct
  misc_feature 1..22: note = chemically synthesized
  source 1..22: mol_type = other DNA
gagtttaatcgtagcattaccc

SEQ ID NO: 90683 - DNA, 22 bp, synthetic construct
  misc_feature 1..22: note = chemically synthesized
  source 1..22: mol_type = other DNA
aatcgtagcattacccttgagg

SEQ ID NO: 90684 - DNA, 22 bp, synthetic construct
  misc_feature 1..22: note = chemically synthesized
  source 1..22: mol_type = other DNA
atcgtagcattacccttgaggc

SEQ ID NO: 90685 - DNA, 22 bp, synthetic construct
  misc_feature 1..22: note = chemically synthesized
  source 1..22: mol_type = other DNA
cccttgaggctatgtcttaggg

SEQ ID NO: 90686 - DNA, 22 bp, synthetic construct
  misc_feature 1..22: note = chemically synthesized
  source 1..22: mol_type = other DNA
gaggctatgtcttagggttgag

SEQ ID NO: 90687 - DNA, 22 bp, synthetic construct
  misc_feature 1..22: note = chemically synthesized
  source 1..22: mol_type = other DNA
aggctatgtcttagggttgagg

SEQ ID NO: 90688 - DNA, 22 bp, synthetic construct
  misc_feature 1..22: note = chemically synthesized
  source 1..22: mol_type = other DNA
tgtcttagggttgaggtcttcc

SEQ ID NO: 90689 - DNA, 22 bp, synthetic construct
  misc_feature 1..22: note = chemically synthesized
  source 1..22: mol_type = other DNA
agggttgaggtcttccctagaa

SEQ ID NO: 90690 - DNA, 22 bp, synthetic construct
  misc_feature 1..22: note = chemically synthesized
  source 1..22: mol_type = other DNA
gggttgaggtcttccctagaac

SEQ ID NO: 90691 - DNA, 22 bp, synthetic construct
  misc_feature 1..22: note = chemically synthesized
  source 1..22: mol_type = other DNA
aggtcttccctagaacctctgc

SEQ ID NO: 90692 - DNA, 22 bp, synthetic construct
  misc_feature 1..22: note = chemically synthesized
  source 1..22: mol_type = other DNA
ccctagaacctctgcagtgcca

SEQ ID NO: 90693 - DNA, 22 bp, synthetic construct
  misc_feature 1..22: note = chemically synthesized
  source 1..22: mol_type = other DNA
cctagaacctctgcagtgccag

SEQ ID NO: 90694 - DNA, 22 bp, synthetic construct
  misc_feature 1..22: note = chemically synthesized
  source 1..22: mol_type = other DNA
gaacctctgcagtgccagtatt

SEQ ID NO: 90695 - DNA, 22 bp, synthetic construct
  misc_feature 1..22: note = chemically synthesized
  source 1..22: mol_type = other DNA
tgcagtgccagtattatctttg

SEQ ID NO: 90696 - DNA, 22 bp, synthetic construct
  misc_feature 1..22: note = chemically synthesized
  source 1..22: mol_type = other DNA
cagtgccagtattatctttgta

SEQ ID NO: 90697 - DNA, 22 bp, synthetic construct
  misc_feature 1..22: note = chemically synthesized
  source 1..22: mol_type = other DNA
tctttgtatcaagagttcttga

SEQ ID NO: 90698 - DNA, 22 bp, synthetic construct
  misc_feature 1..22: note = chemically synthesized
  source 1..22: mol_type = other DNA
tgtatcaagagttcttgataat

SEQ ID NO: 90699 - DNA, 22 bp, synthetic construct
  misc_feature 1..22: note = chemically synthesized
  source 1..22: mol_type = other DNA
gtatcaagagttcttgataatt

SEQ ID NO: 90700 - DNA, 22 bp, synthetic construct
  misc_feature 1..22: note = chemically synthesized
  source 1..22: mol_type = other DNA
tatcaagagttcttgataattt

SEQ ID NO: 90701 - DNA, 22 bp, synthetic construct
  misc_feature 1..22: note = chemically synthesized
  source 1..22: mol_type = other DNA
ttgataatttctgctctttgga

SEQ ID NO: 90702 - DNA, 22 bp, synthetic construct
  misc_feature 1..22: note = chemically synthesized
  source 1..22: mol_type = other DNA
gataatttctgctctttggagg

SEQ ID NO: 90703 - DNA, 22 bp, synthetic construct
  misc_feature 1..22: note = chemically synthesized
  source 1..22: mol_type = other DNA
ataatttctgctctttggaggt

SEQ ID NO: 90704 - DNA, 22 bp, synthetic construct
  misc_feature 1..22: note = chemically synthesized
  source 1..22: mol_type = other DNA
ctgctctttggaggtagaagtg

SEQ ID NO: 90705 - DNA, 22 bp, synthetic construct
  misc_feature 1..22: note = chemically synthesized
  source 1..22: mol_type = other DNA
tgctctttggaggtagaagtgt

SEQ ID NO: 90706 - DNA, 22 bp, synthetic construct
  misc_feature 1..22: note = chemically synthesized
  source 1..22: mol_type = other DNA
ctctttggaggtagaagtgtca

SEQ ID NO: 90707 - DNA, 22 bp, synthetic construct
  misc_feature 1..22: note = chemically synthesized
  source 1..22: mol_type = other DNA
tttggaggtagaagtgtcaccc

SEQ ID NO: 90708 - DNA, 22 bp, synthetic construct
  misc_feature 1..22: note = chemically synthesized
  source 1..22: mol_type = other DNA
tggaggtagaagtgtcacccat

SEQ ID NO: 90709 - DNA, 22 bp, synthetic construct
  misc_feature 1..22: note = chemically synthesized
  source 1..22: mol_type = other DNA
ggaggtagaagtgtcacccatt

SEQ ID NO: 90710 - DNA, 22 bp, synthetic construct
  misc_feature 1..22: note = chemically synthesized
  source 1..22: mol_type = other DNA
gaggtagaagtgtcacccatta

SEQ ID NO: 90711 - DNA, 22 bp, synthetic construct
  misc_feature 1..22: note = chemically synthesized
  source 1..22: mol_type = other DNA
atgccttgtacggttcccttgc

SEQ ID NO: 90712 - DNA, 22 bp, synthetic construct
  misc_feature 1..22: note = chemically synthesized
  source 1..22: mol_type = other DNA
gtacggttcccttgcttttctc

SEQ ID NO: 90713 - DNA, 22 bp, synthetic construct
  misc_feature 1..22: note = chemically synthesized
  source 1..22: mol_type = other DNA
tacggttcccttgcttttctct

SEQ ID NO: 90714 - DNA, 22 bp, synthetic construct
  misc_feature 1..22: note = chemically synthesized
  source 1..22: mol_type = other DNA
ccttgcttttctcttttcccat

SEQ ID NO: 90715 - DNA, 22 bp, synthetic construct
  misc_feature 1..22: note = chemically synthesized
  source 1..22: mol_type = other DNA
gcttttctcttttcccatgtac

SEQ ID NO: 90716 - DNA, 22 bp, synthetic construct
  misc_feature 1..22: note = chemically synthesized
  source 1..22: mol_type = other DNA
cttttctcttttcccatgtact

SEQ ID NO: 90717 - DNA, 22 bp, synthetic construct
  misc_feature 1..22: note = chemically synthesized
  source 1..22: mol_type = other DNA
ttctcttttcccatgtactctt

SEQ ID NO: 90718 - DNA, 22 bp, synthetic construct
  misc_feature 1..22: note = chemically synthesized
  source 1..22: mol_type = other DNA
tctcttttcccatgtactcttt

SEQ ID NO: 90719 - DNA, 22 bp, synthetic construct
  misc_feature 1..22: note = chemically synthesized
  source 1..22: mol_type = other DNA
ctcttttcccatgtactctttg

SEQ ID NO: 90720 - DNA, 22 bp, synthetic construct
  misc_feature 1..22: note = chemically synthesized
  source 1..22: mol_type = other DNA
tcttttcccatgtactctttgt

SEQ ID NO: 90721 - DNA, 22 bp, synthetic construct
  misc_feature 1..22: note = chemically synthesized
  source 1..22: mol_type = other DNA
ttttcccatgtactctttgtaa

SEQ ID NO: 90722 - DNA, 22 bp, synthetic construct
  misc_feature 1..22: note = chemically synthesized
  source 1..22: mol_type = other DNA
ttcccatgtactctttgtaaaa

SEQ ID NO: 90723 - DNA, 22 bp, synthetic construct
  misc_feature 1..22: note = chemically synthesized
  source 1..22: mol_type = other DNA
tcccatgtactctttgtaaaat

SEQ ID NO: 90724 - DNA, 22 bp, synthetic construct
  misc_feature 1..22: note = chemically synthesized
  source 1..22: mol_type = other DNA
cccatgtactctttgtaaaata

SEQ ID NO: 90725 - DNA, 22 bp, synthetic construct
  misc_feature 1..22: note = chemically synthesized
  source 1..22: mol_type = other DNA
ccatgtactctttgtaaaataa

SEQ ID NO: 90726 - DNA, 22 bp, synthetic construct
  misc_feature 1..22: note = chemically synthesized
  source 1..22: mol_type = other DNA
tttgtaaaataaacaagtgctc

SEQ ID NO: 90727 - DNA, 22 bp, synthetic construct
  misc_feature 1..22: note = chemically synthesized
  source 1..22: mol_type = other DNA
tgtaaaataaacaagtgctccc

SEQ ID NO: 90728 - DNA, 22 bp, synthetic construct
  misc_feature 1..22: note = chemically synthesized
  source 1..22: mol_type = other DNA
gtaaaataaacaagtgctccct

SEQ ID NO: 90729 - DNA, 22 bp, synthetic construct
  misc_feature 1..22: note = chemically synthesized
  source 1..22: mol_type = other DNA
taaaataaacaagtgctcccta

SEQ ID NO: 90730 - DNA, 22 bp, synthetic construct
  misc_feature 1..22: note = chemically synthesized
  source 1..22: mol_type = other DNA
cctatctgtagagcctcaggaa

SEQ ID NO: 90731 - DNA, 22 bp, synthetic construct
  misc_feature 1..22: note = chemically synthesized
  source 1..22: mol_type = other DNA
tctgtagagcctcaggaacctt

SEQ ID NO: 90732 - DNA, 22 bp, synthetic construct
  misc_feature 1..22: note = chemically synthesized
  source 1..22: mol_type = other DNA
tagagcctcaggaaccttctta

SEQ ID NO: 90733 - DNA, 22 bp, synthetic construct
  misc_feature 1..22: note = chemically synthesized
  source 1..22: mol_type = other DNA
aggaaccttcttacacacctgg

SEQ ID NO: 90734 - DNA, 22 bp, synthetic construct
  misc_feature 1..22: note = chemically synthesized
  source 1..22: mol_type = other DNA
cttacacacctggacaaaaaaa

SEQ ID NO: 90735 - DNA, 22 bp, synthetic construct
  misc_feature 1..22: note = chemically synthesized
  source 1..22: mol_type = other DNA
ttacacacctggacaaaaaaat

SEQ ID NO: 90736 - DNA, 22 bp, synthetic construct
  misc_feature 1..22: note = chemically synthesized
  source 1..22: mol_type = other DNA
acacacctggacaaaaaaatga

SEQ ID NO: 90737 - DNA, 22 bp, synthetic construct
  misc_feature 1..22: note = chemically synthesized
  source 1..22: mol_type = other DNA
cacacctggacaaaaaaatgaa

SEQ ID NO: 90738 - DNA, 22 bp, synthetic construct
  misc_feature 1..22: note = chemically synthesized
  source 1..22: mol_type = other DNA
gacaaaaaaatgaaataagtga

SEQ ID NO: 90739 - DNA, 22 bp, synthetic construct
  misc_feature 1..22: note = chemically synthesized
  source 1..22: mol_type = other DNA
atcaggaagttgagctgaacat

SEQ ID NO: 90740 - DNA, 22 bp, synthetic construct
  misc_feature 1..22: note = chemically synthesized
  source 1..22: mol_type = other DNA
agctgaacattctttattaggc

SEQ ID NO: 90741 - DNA, 22 bp, synthetic construct
  misc_feature 1..22: note = chemically synthesized
  source 1..22: mol_type = other DNA
aacattctttattaggcagaag

SEQ ID NO: 90742 - DNA, 22 bp, synthetic construct
  misc_feature 1..22: note = chemically synthesized
  source 1..22: mol_type = other DNA
tttattaggcagaagccatacc

SEQ ID NO: 90743 - DNA, 22 bp, synthetic construct
  misc_feature 1..22: note = chemically synthesized
  source 1..22: mol_type = other DNA
tattaggcagaagccataccct

SEQ ID NO: 90744 - DNA, 22 bp, synthetic construct
  misc_feature 1..22: note = chemically synthesized
  source 1..22: mol_type = other DNA
attaggcagaagccataccctt

SEQ ID NO: 90745 - DNA, 22 bp, synthetic construct
  misc_feature 1..22: note = chemically synthesized
  source 1..22: mol_type = other DNA
ttaggcagaagccatacccttg

SEQ ID NO: 90746 - DNA, 22 bp, synthetic construct
  misc_feature 1..22: note = chemically synthesized
  source 1..22: mol_type = other DNA
ggcagaagccatacccttgaag

SEQ ID NO: 90747 - DNA, 22 bp, synthetic construct
  misc_feature 1..22: note = chemically synthesized
  source 1..22: mol_type = other DNA
gaagtaggcattgtgttcccaa

SEQ ID NO: 90748 - DNA, 22 bp, synthetic construct
  misc_feature 1..22: note = chemically synthesized
  source 1..22: mol_type = other DNA
aagtaggcattgtgttcccaag

SEQ ID NO: 90749 - DNA, 22 bp, synthetic construct
  misc_feature 1..22: note = chemically synthesized
  source 1..22: mol_type = other DNA
tgttcccaagttcagaaaatag

SEQ ID NO: 90750 - DNA, 22 bp, synthetic construct
  misc_feature 1..22: note = chemically synthesized
  source 1..22: mol_type = other DNA
ccaagttcagaaaatagaatct

SEQ ID NO: 90751 - DNA, 22 bp, synthetic construct
  misc_feature 1..22: note = chemically synthesized
  source 1..22: mol_type = other DNA
agaaaatagaatctagggaaat

SEQ ID NO: 90752 - DNA, 22 bp, synthetic construct
  misc_feature 1..22: note = chemically synthesized
  source 1..22: mol_type = other DNA
gggaaatagggtcttcttatgg

SEQ ID NO: 90753 - DNA, 22 bp, synthetic construct
  misc_feature 1..22: note = chemically synthesized
  source 1..22: mol_type = other DNA
cttatggttatcaggaaacagt

SEQ ID NO: 90754 - DNA, 22 bp, synthetic construct
  misc_feature 1..22: note = chemically synthesized
  source 1..22: mol_type = other DNA
ttatggttatcaggaaacagtc

SEQ ID NO: 90755 - DNA, 22 bp, synthetic construct
  misc_feature 1..22: note = chemically synthesized
  source 1..22: mol_type = other DNA
atggttatcaggaaacagtcca

SEQ ID NO: 90756 - DNA, 22 bp, synthetic construct
  misc_feature 1..22: note = chemically synthesized
  source 1..22: mol_type = other DNA
tggttatcaggaaacagtccag

SEQ ID NO: 90757 - DNA, 22 bp, synthetic construct
  misc_feature 1..22: note = chemically synthesized
  source 1..22: mol_type = other DNA
tcaggaaacagtccaggatctc

SEQ ID NO: 90758 - DNA, 22 bp, synthetic construct
  misc_feature 1..22: note = chemically synthesized
  source 1..22: mol_type = other DNA
aatggtacttgtgagccagggc

SEQ ID NO: 90759 - DNA, 22 bp, synthetic construct
  misc_feature 1..22: note = chemically synthesized
  source 1..22: mol_type = other DNA
gtgagccagggcattagccaca

SEQ ID NO: 90760 - DNA, 22 bp, synthetic construct
  misc_feature 1..22: note = chemically synthesized
  source 1..22: mol_type = other DNA
tgagccagggcattagccacac

SEQ ID NO: 90761 - DNA, 22 bp, synthetic construct
  misc_feature 1..22: note = chemically synthesized
  source 1..22: mol_type = other DNA
gccacaccagccaccaccttct

SEQ ID NO: 90762 - DNA, 22 bp, synthetic construct
  misc_feature 1..22: note = chemically synthesized
  source 1..22: mol_type = other DNA
ctgataggcagcctgcatttgt

SEQ ID NO: 90763 - DNA, 22 bp, synthetic construct
  misc_feature 1..22: note = chemically synthesized
  source 1..22: mol_type = other DNA
tgataggcagcctgcatttgtg

SEQ ID NO: 90764 - DNA, 22 bp, synthetic construct
  misc_feature 1..22: note = chemically synthesized
  source 1..22: mol_type = other DNA
ataggcagcctgcatttgtggg

SEQ ID NO: 90765 - DNA, 22 bp, synthetic construct
  misc_feature 1..22: note = chemically synthesized
  source 1..22: mol_type = other DNA
catttgtggggtgaattccttg

SEQ ID NO: 90766 - DNA, 22 bp, synthetic construct
  misc_feature 1..22: note = chemically synthesized
  source 1..22: mol_type = other DNA
gtggggtgaattccttgccaaa

SEQ ID NO: 90767 - DNA, 22 bp, synthetic construct
  misc_feature 1..22: note = chemically synthesized
  source 1..22: mol_type = other DNA
tggggtgaattccttgccaaag

SEQ ID NO: 90768 - DNA, 22 bp, synthetic construct
  misc_feature 1..22: note = chemically synthesized
  source 1..22: mol_type = other DNA
cttgccaaagttgcgggccagc

SEQ ID NO: 90769 - DNA, 22 bp, synthetic construct
  misc_feature 1..22: note = chemically synthesized
  source 1..22: mol_type = other DNA
gccaaagttgcgggccagcaca

SEQ ID NO: 90770 - DNA, 22 bp, synthetic construct
  misc_feature 1..22: note = chemically synthesized
  source 1..22: mol_type = other DNA
ccaaagttgcgggccagcacac

SEQ ID NO: 90771 - DNA, 22 bp, synthetic construct
  misc_feature 1..22: note = chemically synthesized
  source 1..22: mol_type = other DNA
cgggccagcacacacaccagca

SEQ ID NO: 90772 - DNA, 22 bp, synthetic construct
  misc_feature 1..22: note = chemically synthesized
  source 1..22: mol_type = other DNA
cccaagagctgcggagaagagg

SEQ ID NO: 90773 - DNA, 22 bp, synthetic construct
  misc_feature 1..22: note = chemically synthesized
  source 1..22: mol_type = other DNA
cggagaagaggtaggcagatac

SEQ ID NO: 90774 - DNA, 22 bp, synthetic construct
  misc_feature 1..22: note = chemically synthesized
  source 1..22: mol_type = other DNA
acagagaaataaagactggctt

SEQ ID NO: 90775 - DNA, 22 bp, synthetic construct
  misc_feature 1..22: note = chemically synthesized
  source 1..22: mol_type = other DNA
gcttctgagaaactgagccaac

SEQ ID NO: 90776 - DNA, 22 bp, synthetic construct
  misc_feature 1..22: note = chemically synthesized
  source 1..22: mol_type = other DNA
ctgagaaactgagccaacaccc

SEQ ID NO: 90777 - DNA, 22 bp, synthetic construct
  misc_feature 1..22: note = chemically synthesized
  source 1..22: mol_type = other DNA
tgagaaactgagccaacaccca

SEQ ID NO: 90778 - DNA, 22 bp, synthetic construct
  misc_feature 1..22: note = chemically synthesized
  source 1..22: mol_type = other DNA
agaaactgagccaacacccatt

SEQ ID NO: 90779 - DNA, 22 bp, synthetic construct
  misc_feature 1..22: note = chemically synthesized
  source 1..22: mol_type = other DNA
agccaacacccatttttttctg

SEQ ID NO: 90780 - DNA, 22 bp, synthetic construct
  misc_feature 1..22: note = chemically synthesized
  source 1..22: mol_type = other DNA
ttttctgcccaaatcttagaca

SEQ ID NO: 90781 - DNA, 22 bp, synthetic construct
  misc_feature 1..22: note = chemically synthesized
  source 1..22: mol_type = other DNA
tttctgcccaaatcttagacaa

SEQ ID NO: 90782 - DNA, 22 bp, synthetic construct
  misc_feature 1..22: note = chemically synthesized
  source 1..22: mol_type = other DNA
ttctgcccaaatcttagacaaa

SEQ ID NO: 90783 - DNA, 22 bp, synthetic construct
  misc_feature 1..22: note = chemically synthesized
  source 1..22: mol_type = other DNA
tctgcccaaatcttagacaaaa

SEQ ID NO: 90784 - DNA, 22 bp, synthetic construct
  misc_feature 1..22: note = chemically synthesized
  source 1..22: mol_type = other DNA
ctgcccaaatcttagacaaaac

SEQ ID NO: 90785 - DNA, 22 bp, synthetic construct
  misc_feature 1..22: note = chemically synthesized
  source 1..22: mol_type = other DNA
tgcccaaatcttagacaaaact

SEQ ID NO: 90786 - DNA, 22 bp, synthetic construct
  misc_feature 1..22: note = chemically synthesized
  source 1..22: mol_type = other DNA
cccaaatcttagacaaaactga

SEQ ID NO: 90787 - DNA, 22 bp, synthetic construct
  misc_feature 1..22: note = chemically synthesized
  source 1..22: mol_type = other DNA
agacaaaactgatccccaggtt

SEQ ID NO: 90788 - DNA, 22 bp, synthetic construct
  misc_feature 1..22: note = chemically synthesized
  source 1..22: mol_type = other DNA
gacaaaactgatccccaggtta

SEQ ID NO: 90789 - DNA, 22 bp, synthetic construct
  misc_feature 1..22: note = chemically synthesized
  source 1..22: mol_type = other DNA
atccccaggttattcccatcag

SEQ ID NO: 90790 - DNA, 22 bp, synthetic construct
  misc_feature 1..22: note = chemically synthesized
  source 1..22: mol_type = other DNA
ttcccatcagcataaataagta

SEQ ID NO: 90791 - DNA, 22 bp, synthetic construct
  misc_feature 1..22: note = chemically synthesized
  source 1..22: mol_type = other DNA
ccatcagcataaataagtacat

SEQ ID NO: 90792 - DNA, 22 bp, synthetic construct
  misc_feature 1..22: note = chemically synthesized
  source 1..22: mol_type = other DNA
tacacacacatcctctatgtac

SEQ ID NO: 90793 - DNA, 22 bp, synthetic construct
  misc_feature 1..22: note = chemically synthesized
  source 1..22: mol_type = other DNA
tatgtacttaactagcatgtag

SEQ ID NO: 90794 - DNA, 22 bp, synthetic construct
  misc_feature 1..22: note = chemically synthesized
  source 1..22: mol_type = other DNA
tgtacttaactagcatgtagtc

SEQ ID NO: 90795 - DNA, 22 bp, synthetic construct
  misc_feature 1..22: note = chemically synthesized
  source 1..22: mol_type = other DNA
aactagcatgtagtctatatat

SEQ ID NO: 90796 - DNA, 22 bp, synthetic construct
  misc_feature 1..22: note = chemically synthesized
  source 1..22: mol_type = other DNA
actagcatgtagtctatatatg

SEQ ID NO: 90797 - DNA, 22 bp, synthetic construct
  misc_feature 1..22: note = chemically synthesized
  source 1..22: mol_type = other DNA
gcatgtagtctatatatgtaca

SEQ ID NO: 90798 - DNA, 22 bp, synthetic construct
  misc_feature 1..22: note = chemically synthesized
  source 1..22: mol_type = other DNA
tatatgtacatatatgctatat

SEQ ID NO: 90799 - DNA, 22 bp, synthetic construct
  misc_feature 1..22: note = chemically synthesized
  source 1..22: mol_type = other DNA
tatatgctgtataatactatat

SEQ ID NO: 90800 - DNA, 22 bp, synthetic construct
  misc_feature 1..22: note = chemically synthesized
  source 1..22: mol_type = other DNA
tataatactatatacaaattaa

SEQ ID NO: 90801 - DNA, 22 bp, synthetic construct
  misc_feature 1..22: note = chemically synthesized
  source 1..22: mol_type = other DNA
tatacaaattaattccaaatta

SEQ ID NO: 90802 - DNA, 22 bp, synthetic construct
  misc_feature 1..22: note = chemically synthesized
  source 1..22: mol_type = other DNA
attccaaattagttttaatttt

SEQ ID NO: 90803 - DNA, 22 bp, synthetic construct
  misc_feature 1..22: note = chemically synthesized
  source 1..22: mol_type = other DNA
caaattagttttaattttgtat

SEQ ID NO: 90804 - DNA, 22 bp, synthetic construct
  misc_feature 1..22: note = chemically synthesized
  source 1..22: mol_type = other DNA
gttttaattttgtatgtgtata

SEQ ID NO: 90805 - DNA, 22 bp, synthetic construct
  misc_feature 1..22: note = chemically synthesized
  source 1..22: mol_type = other DNA
taattttgtatgtgtatatagc

SEQ ID NO: 90806 - DNA, 22 bp, synthetic construct
  misc_feature 1..22: note = chemically synthesized
  source 1..22: mol_type = other DNA
aattttgtatgtgtatatagca

SEQ ID NO: 90807 - DNA, 22 bp, synthetic construct
  misc_feature 1..22: note = chemically synthesized
  source 1..22: mol_type = other DNA
attttgtatgtgtatatagcat

SEQ ID NO: 90808 - DNA, 22 bp, synthetic construct
  misc_feature 1..22: note = chemically synthesized
  source 1..22: mol_type = other DNA
tgtatgtgtatatagcatatac

SEQ ID NO: 90809 - DNA, 22 bp, synthetic construct
  misc_feature 1..22: note = chemically synthesized
  source 1..22: mol_type = other DNA
gtatgtgtatatagcatataca

SEQ ID NO: 90810 - DNA, 22 bp, synthetic construct
  misc_feature 1..22: note = chemically synthesized
  source 1..22: mol_type = other DNA
tatgtgtatatagcatatacaa

SEQ ID NO: 90811 - DNA, 22 bp, synthetic construct
  misc_feature 1..22: note = chemically synthesized
  source 1..22: mol_type = other DNA
attactataaacagattaatag

SEQ ID NO: 90812 - DNA, 22 bp, synthetic construct
  misc_feature 1..22: note = chemically synthesized
  source 1..22: mol_type = other DNA
ctataaacagattaatagatac

SEQ ID NO: 90813 - DNA, 22 bp, synthetic construct
  misc_feature 1..22: note = chemically synthesized
  source 1..22: mol_type = other DNA
taaacagattaatagatacaaa

SEQ ID NO: 90814 - DNA, 22 bp, synthetic construct
  misc_feature 1..22: note = chemically synthesized
  source 1..22: mol_type = other DNA
atagatacaaattaattgatta

SEQ ID NO: 90815 - DNA, 22 bp, synthetic construct
  misc_feature 1..22: note = chemically synthesized
  source 1..22: mol_type = other DNA
attgattaatcagtgtgatgat

SEQ ID NO: 90816 - DNA, 22 bp, synthetic construct
  misc_feature 1..22: note = chemically synthesized
  source 1..22: mol_type = other DNA
attaatcagtgtgatgatgggc

SEQ ID NO: 90817 - DNA, 22 bp, synthetic construct
  misc_feature 1..22: note = chemically synthesized
  source 1..22: mol_type = other DNA
atcagtgtgatgatgggctgtc

SEQ ID NO: 90818 - DNA, 22 bp, synthetic construct
  misc_feature 1..22: note = chemically synthesized
  source 1..22: mol_type = other DNA
tctcctagcaacgacttctgcc

SEQ ID NO: 90819 - DNA, 22 bp, synthetic construct
  misc_feature 1..22: note = chemically synthesized
  source 1..22: mol_type = other DNA
ctagcaacgacttctgccccac

SEQ ID NO: 90820 - DNA, 22 bp, synthetic construct
  misc_feature 1..22: note = chemically synthesized
  source 1..22: mol_type = other DNA
gcaacgacttctgccccacctc

SEQ ID NO: 90821 - DNA, 22 bp, synthetic construct
  misc_feature 1..22: note = chemically synthesized
  source 1..22: mol_type = other DNA
ctgccccacctccagtgtaact

SEQ ID NO: 90822 - DNA, 22 bp, synthetic construct
  misc_feature 1..22: note = chemically synthesized
  source 1..22: mol_type = other DNA
tgccccacctccagtgtaactg

SEQ ID NO: 90823 - DNA, 22 bp, synthetic construct
  misc_feature 1..22: note = chemically synthesized
  source 1..22: mol_type = other DNA
ccccacctccagtgtaactgcc

SEQ ID NO: 90824 - DNA, 22 bp, synthetic construct
  misc_feature 1..22: note = chemically synthesized
  source 1..22: mol_type = other DNA
cagtgtaactgcctagtctttc

SEQ ID NO: 90825 - DNA, 22 bp, synthetic construct
  misc_feature 1..22: note = chemically synthesized
  source 1..22: mol_type = other DNA
cctagtctttcataatcaaata

SEQ ID NO: 90826 - DNA, 22 bp, synthetic construct
  misc_feature 1..22: note = chemically synthesized
  source 1..22: mol_type = other DNA
gtctttcataatcaaatattca

SEQ ID NO: 90827 - DNA, 22 bp, synthetic construct
  misc_feature 1..22: note = chemically synthesized
  source 1..22: mol_type = other DNA
tcataatcaaatattcactttc

SEQ ID NO: 90828 - DNA, 22 bp, synthetic construct
  misc_feature 1..22: note = chemically synthesized
  source 1..22: mol_type = other DNA
cataatcaaatattcactttcc

SEQ ID NO: 90829 - DNA, 22 bp, synthetic construct
  misc_feature 1..22: note = chemically synthesized
  source 1..22: mol_type = other DNA
ataatcaaatattcactttcct

SEQ ID NO: 90830 - DNA, 22 bp, synthetic construct
  misc_feature 1..22: note = chemically synthesized
  source 1..22: mol_type = other DNA
actttcctttccattccattta

SEQ ID NO: 90831 - DNA, 22 bp, synthetic construct
  misc_feature 1..22: note = chemically synthesized
  source 1..22: mol_type = other DNA
tcctttccattccatttactac

SEQ ID NO: 90832 - DNA, 22 bp, synthetic construct
  misc_feature 1..22: note = chemically synthesized
  source 1..22: mol_type = other DNA
cctttccattccatttactaca

SEQ ID NO: 90833 - DNA, 22 bp, synthetic construct
  misc_feature 1..22: note = chemically synthesized
  source 1..22: mol_type = other DNA
ctttccattccatttactacag

SEQ ID NO: 90834 - DNA, 22 bp, synthetic construct
  misc_feature 1..22: note = chemically synthesized
  source 1..22: mol_type = other DNA
tccattccatttactacagaat

SEQ ID NO: 90835 - DNA, 22 bp, synthetic construct
  misc_feature 1..22: note = chemically synthesized
  source 1..22: mol_type = other DNA
ccattccatttactacagaatt

SEQ ID NO: 90836 - DNA, 22 bp, synthetic construct
  misc_feature 1..22: note = chemically synthesized
  source 1..22: mol_type = other DNA
cattccatttactacagaattt

SEQ ID NO: 90837 - DNA, 22 bp, synthetic construct
  misc_feature 1..22: note = chemically synthesized
  source 1..22: mol_type = other DNA
catttactacagaatttataaa

SEQ ID NO: 90838 - DNA, 22 bp, synthetic construct
  misc_feature 1..22: note = chemically synthesized
  source 1..22: mol_type = other DNA
actacagaatttataaaattcc

SEQ ID NO: 90839 - DNA, 22 bp, synthetic construct
  misc_feature 1..22: note = chemically synthesized
  source 1..22: mol_type = other DNA
ctacagaatttataaaattcca

SEQ ID NO: 90840 - DNA, 22 bp, synthetic construct
  misc_feature 1..22: note = chemically synthesized
  source 1..22: mol_type = other DNA
cagaatttataaaattccaatt

SEQ ID NO: 90841 - DNA, 22 bp, synthetic construct
  misc_feature 1..22: note = chemically synthesized
  source 1..22: mol_type = other DNA
ataaaattccaattattcctta

SEQ ID NO: 90842 - DNA, 22 bp, synthetic construct
  misc_feature 1..22: note = chemically synthesized
  source 1..22: mol_type = other DNA
taaaattccaattattccttat

SEQ ID NO: 90843 - DNA, 22 bp, synthetic construct
  misc_feature 1..22: note = chemically synthesized
  source 1..22: mol_type = other DNA
caattattccttattgtaaaat

SEQ ID NO: 90844 - DNA, 22 bp, synthetic construct
  misc_feature 1..22: note = chemically synthesized
  source 1..22: mol_type = other DNA
ttccttattgtaaaatgattta

SEQ ID NO: 90845 - DNA, 22 bp, synthetic construct
  misc_feature 1..22: note = chemically synthesized
  source 1..22: mol_type = other DNA
cttattgtaaaatgatttatag

SEQ ID NO: 90846 - DNA, 22 bp, synthetic construct
  misc_feature 1..22: note = chemically synthesized
  source 1..22: mol_type = other DNA
attgtaaaatgatttatagcct

SEQ ID NO: 90847 - DNA, 22 bp, synthetic construct
  misc_feature 1..22: note = chemically synthesized
  source 1..22: mol_type = other DNA
ttgtaaaatgatttatagcctc

SEQ ID NO: 90848 - DNA, 22 bp, synthetic construct
  misc_feature 1..22: note = chemically synthesized
  source 1..22: mol_type = other DNA
taaaatgatttatagcctctaa

SEQ ID NO: 90849 - DNA, 22 bp, synthetic construct
  misc_feature 1..22: note = chemically synthesized
  source 1..22: mol_type = other DNA
atagcctctaaaacagtattct

SEQ ID NO: 90850 - DNA, 22 bp, synthetic construct
  misc_feature 1..22: note = chemically synthesized
  source 1..22: mol_type = other DNA
tagcctctaaaacagtattcta

SEQ ID NO: 90851 - DNA, 22 bp, synthetic construct
  misc_feature 1..22: note = chemically synthesized
  source 1..22: mol_type = other DNA
taaaacagtattctatgcctct

SEQ ID NO: 90852 - DNA, 22 bp, synthetic construct
  misc_feature 1..22: note = chemically synthesized
  source 1..22: mol_type = other DNA
aaacagtattctatgcctctca

SEQ ID NO: 90853 - DNA, 22 bp, synthetic construct
  misc_feature 1..22: note = chemically synthesized
  source 1..22: mol_type = other DNA
tatgcctctcatctttgagttg

SEQ ID NO: 90854 - DNA, 22 bp, synthetic construct
  misc_feature 1..22: note = chemically synthesized
  source 1..22: mol_type = other DNA
tgcctctcatctttgagttgga

SEQ ID NO: 90855 - DNA, 22 bp, synthetic construct
  misc_feature 1..22: note = chemically synthesized
  source 1..22: mol_type = other DNA
tcatctttgagttggagcctct

SEQ ID NO: 90856 - DNA, 22 bp, synthetic construct
  misc_feature 1..22: note = chemically synthesized
  source 1..22: mol_type = other DNA
atctttgagttggagcctctcc

SEQ ID NO: 90857 - DNA, 22 bp, synthetic construct
  misc_feature 1..22: note = chemically synthesized
  source 1..22: mol_type = other DNA
tgagttggagcctctcccatac

SEQ ID NO: 90858 - DNA, 22 bp, synthetic construct
  misc_feature 1..22: note = chemically synthesized
  source 1..22: mol_type = other DNA
gagttggagcctctcccatacc

SEQ ID NO: 90859 - DNA, 22 bp, synthetic construct
  misc_feature 1..22: note = chemically synthesized
  source 1..22: mol_type = other DNA
agttggagcctctcccataccc

SEQ ID NO: 90860 - DNA, 22 bp, synthetic construct
  misc_feature 1..22: note = chemically synthesized
  source 1..22: mol_type = other DNA
gagcctctcccatacccatgtg

SEQ ID NO: 90861 - DNA, 22 bp, synthetic construct
  misc_feature 1..22: note = chemically synthesized
  source 1..22: mol_type = other DNA
tcccatacccatgtggagagac

SEQ ID NO: 90862 - DNA, 22 bp, synthetic construct
  misc_feature 1..22: note = chemically synthesized
  source 1..22: mol_type = other DNA
ccatacccatgtggagagacaa

SEQ ID NO: 90863 - DNA, 22 bp, synthetic construct
  misc_feature 1..22: note = chemically synthesized
  source 1..22: mol_type = other DNA
ttctaagtgcagaattagcagg

SEQ ID NO: 90864 - DNA, 22 bp, synthetic construct
  misc_feature 1..22: note = chemically synthesized
  source 1..22: mol_type = other DNA
taagtgcagaattagcaggtga

SEQ ID NO: 90865 - DNA, 22 bp, synthetic construct
  misc_feature 1..22: note = chemically synthesized
  source 1..22: mol_type = other DNA
agtgcagaattagcaggtgaga

SEQ ID NO: 90866 - DNA, 22 bp, synthetic construct
  misc_feature 1..22: note = chemically synthesized
  source 1..22: mol_type = other DNA
gcaggtgagagctggtatgcat

SEQ ID NO: 90867 - DNA, 22 bp, synthetic construct
  misc_feature 1..22: note = chemically synthesized
  source 1..22: mol_type = other DNA
gtatgcataatttgagttgttg

SEQ ID NO: 90868 - DNA, 22 bp, synthetic construct
  misc_feature 1..22: note = chemically synthesized
  source 1..22: mol_type = other DNA
gagttgttgttagagaaggaaa

SEQ ID NO: 90869 - DNA, 22 bp, synthetic construct
  misc_feature 1..22: note = chemically synthesized
  source 1..22: mol_type = other DNA
agttgttgttagagaaggaaaa

SEQ ID NO: 90870 - DNA, 22 bp, synthetic construct
  misc_feature 1..22: note = chemically synthesized
  source 1..22: mol_type = other DNA
ttgttagagaaggaaaaatgaa

SEQ ID NO: 90871 - DNA, 22 bp, synthetic construct
  misc_feature 1..22: note = chemically synthesized
  source 1..22: mol_type = other DNA
ttagagaaggaaaaatgaaggg

SEQ ID NO: 90872 - DNA, 22 bp, synthetic construct
  misc_feature 1..22: note = chemically synthesized
  source 1..22: mol_type = other DNA
gagaaggaaaaatgaagggagg

SEQ ID NO: 90873 - DNA, 22 bp, synthetic construct
  misc_feature 1..22: note = chemically synthesized
  source 1..22: mol_type = other DNA
ggagagaaagacaggatattaa

SEQ ID NO: 90874 - DNA, 22 bp, synthetic construct
  misc_feature 1..22: note = chemically synthesized
  source 1..22: mol_type = other DNA
aataatttaaaatagcaagatt

SEQ ID NO: 90875 - DNA, 22 bp, synthetic construct
  misc_feature 1..22: note = chemically synthesized
  source 1..22: mol_type = other DNA
aaaatagcaagattgtgaggaa

SEQ ID NO: 90876 - DNA, 22 bp, synthetic construct
  misc_feature 1..22: note = chemically synthesized
  source 1..22: mol_type = other DNA
aaatagcaagattgtgaggaag

SEQ ID NO: 90877 - DNA, 22 bp, synthetic construct
  misc_feature 1..22: note = chemically synthesized
  source 1..22: mol_type = other DNA
tgaggaaggaaaaaatgcagaa

SEQ ID NO: 90878 - DNA, 22 bp, synthetic construct
  misc_feature 1..22: note = chemically synthesized
  source 1..22: mol_type = other DNA
aaataaaaaattaacaaaattt

SEQ ID NO: 90879 - DNA, 22 bp, synthetic construct
  misc_feature 1..22: note = chemically synthesized
  source 1..22: mol_type = other DNA
aataaaaaattaacaaaatttt

SEQ ID NO: 90880 - DNA, 22 bp, synthetic construct
  misc_feature 1..22: note = chemically synthesized
  source 1..22: mol_type = other DNA
acaaaattttagaagcattaaa

SEQ ID NO: 90881 - DNA, 22 bp, synthetic construct
  misc_feature 1..22: note = chemically synthesized
  source 1..22: mol_type = other DNA
tagaagcattaaatgataaaat

SEQ ID NO: 90882 - DNA, 22 bp, synthetic construct
  misc_feature 1..22: note = chemically synthesized
  source 1..22: mol_type = other DNA
agaagcattaaatgataaaata

SEQ ID NO: 90883 - DNA, 22 bp, synthetic construct
  misc_feature 1..22: note = chemically synthesized
  source 1..22: mol_type = other DNA
gaagcattaaatgataaaatat

SEQ ID NO: 90884 - DNA, 22 bp, synthetic construct
  misc_feature 1..22: note = chemically synthesized
  source 1..22: mol_type = other DNA
aatgataaaatatagtaaaatg

SEQ ID NO: 90885 - DNA, 22 bp, synthetic construct
  misc_feature 1..22: note = chemically synthesized
  source 1..22: mol_type = other DNA
gaaagtaaaaagagaaaagtga

SEQ ID NO: 90886 - DNA, 22 bp, synthetic construct
  misc_feature 1..22: note = chemically synthesized
  source 1..22: mol_type = other DNA
ctggactcaccctgaagttctc

SEQ ID NO: 90887 - DNA, 22 bp, synthetic construct
  misc_feature 1..22: note = chemically synthesized
  source 1..22: mol_type = other DNA
gactcaccctgaagttctcagg

SEQ ID NO: 90888 - DNA, 22 bp, synthetic construct
  misc_feature 1..22: note = chemically synthesized
  source 1..22: mol_type = other DNA
accctgaagttctcaggatcca

SEQ ID NO: 90889 - DNA, 22 bp, synthetic construct
  misc_feature 1..22: note = chemically synthesized
  source 1..22: mol_type = other DNA
aagttctcaggatccacgtgca

SEQ ID NO: 90890 - DNA, 22 bp, synthetic construct
  misc_feature 1..22: note = chemically synthesized
  source 1..22: mol_type = other DNA
tcaggatccacgtgcagcttgt

SEQ ID NO: 90891 - DNA, 22 bp, synthetic construct
  misc_feature 1..22: note = chemically synthesized
  source 1..22: mol_type = other DNA
aggatccacgtgcagcttgtca

SEQ ID NO: 90892 - DNA, 22 bp, synthetic construct
  misc_feature 1..22: note = chemically synthesized
  source 1..22: mol_type = other DNA
gtcacagtgcagctcactcagc

SEQ ID NO: 90893 - DNA, 22 bp, synthetic construct
  misc_feature 1..22: note = chemically synthesized
  source 1..22: mol_type = other DNA
tcacagtgcagctcactcagct

SEQ ID NO: 90894 - DNA, 22 bp, synthetic construct
  misc_feature 1..22: note = chemically synthesized
  source 1..22: mol_type = other DNA
actcagctgagaaaaagtgccc

SEQ ID NO: 90895 - DNA, 22 bp, synthetic construct
  misc_feature 1..22: note = chemically synthesized
  source 1..22: mol_type = other DNA
agctgagaaaaagtgcccttga

SEQ ID NO: 90896 - DNA, 22 bp, synthetic construct
  misc_feature 1..22: note = chemically synthesized
  source 1..22: mol_type = other DNA
agaaaaagtgcccttgaggttg

SEQ ID NO: 90897 - DNA, 22 bp, synthetic construct
  misc_feature 1..22: note = chemically synthesized
  source 1..22: mol_type = other DNA
gaggttgtccaggtgagccagg

SEQ ID NO: 90898 - DNA, 22 bp, synthetic construct
  misc_feature 1..22: note = chemically synthesized
  source 1..22: mol_type = other DNA
aggttgtccaggtgagccaggc

SEQ ID NO: 90899 - DNA, 22 bp, synthetic construct
  misc_feature 1..22: note = chemically synthesized
  source 1..22: mol_type = other DNA
tccaggtgagccaggccatcac

SEQ ID NO: 90900 - DNA, 22 bp, synthetic construct
  misc_feature 1..22: note = chemically synthesized
  source 1..22: mol_type = other DNA
aaggcacctagcaccttcttgc

SEQ ID NO: 90901 - DNA, 22 bp, synthetic construct
  misc_feature 1..22: note = chemically synthesized
  source 1..22: mol_type = other DNA
gcaccttcttgccatgagcctt

SEQ ID NO: 90902 - DNA, 22 bp, synthetic construct
  misc_feature 1..22: note = chemically synthesized
  source 1..22: mol_type = other DNA
cttgccatgagccttcacctta

SEQ ID NO: 90903 - DNA, 22 bp, synthetic construct
  misc_feature 1..22: note = chemically synthesized
  source 1..22: mol_type = other DNA
ttgccatgagccttcaccttag

SEQ ID NO: 90904 - DNA, 22 bp, synthetic construct
  misc_feature 1..22: note = chemically synthesized
  source 1..22: mol_type = other DNA
gccatgagccttcaccttaggg

SEQ ID NO: 90905 - DNA, 22 bp, synthetic construct
  misc_feature 1..22: note = chemically synthesized
  source 1..22: mol_type = other DNA
ccatgagccttcaccttagggt

SEQ ID NO: 90906 - DNA, 22 bp, synthetic construct
  misc_feature 1..22: note = chemically synthesized
  source 1..22: mol_type = other DNA
caccttagggttgcccataaca

SEQ ID NO: 90907 - DNA, 22 bp, synthetic construct
  misc_feature 1..22: note = chemically synthesized
  source 1..22: mol_type = other DNA
accttagggttgcccataacag

SEQ ID NO: 90908 - DNA, 22 bp, synthetic construct
  misc_feature 1..22: note = chemically synthesized
  source 1..22: mol_type = other DNA
agggttgcccataacagcatca

SEQ ID NO: 90909 - DNA, 22 bp, synthetic construct
  misc_feature 1..22: note = chemically synthesized
  source 1..22: mol_type = other DNA
gggttgcccataacagcatcag

SEQ ID NO: 90910 - DNA, 22 bp, synthetic construct
  misc_feature 1..22: note = chemically synthesized
  source 1..22: mol_type = other DNA
cccataacagcatcaggagagg

SEQ ID NO: 90911 - DNA, 22 bp, synthetic construct
  misc_feature 1..22: note = chemically synthesized
  source 1..22: mol_type = other DNA
aaagaacctctgggtccaaggg

SEQ ID NO: 90912 - DNA, 22 bp, synthetic construct
  misc_feature 1..22: note = chemically synthesized
  source 1..22: mol_type = other DNA
tgggtccaagggtagaccacca

SEQ ID NO: 90913 - DNA, 22 bp, synthetic construct
  misc_feature 1..22: note = chemically synthesized
  source 1..22: mol_type = other DNA
ggtccaagggtagaccaccagt

SEQ ID NO: 90914 - DNA, 22 bp, synthetic construct
  misc_feature 1..22: note = chemically synthesized
  source 1..22: mol_type = other DNA
agggtaggaaaacagcccaagg

SEQ ID NO: 90915 - DNA, 22 bp, synthetic construct
  misc_feature 1..22: note = chemically synthesized
  source 1..22: mol_type = other DNA
tcagaaacccaagagtcttctc

SEQ ID NO: 90916 - DNA, 22 bp, synthetic construct
  misc_feature 1..22: note = chemically synthesized
  source 1..22: mol_type = other DNA
ctctgtctacacatgcccagtt

SEQ ID NO: 90917 - DNA, 22 bp, synthetic construct
  misc_feature 1..22: note = chemically synthesized
  source 1..22: mol_type = other DNA
tctgtctacacatgcccagttt

SEQ ID NO: 90918 - DNA, 22 bp, synthetic construct
  misc_feature 1..22: note = chemically synthesized
  source 1..22: mol_type = other DNA
tgtctacacatgcccagtttcc

SEQ ID NO: 90919 - DNA, 22 bp, synthetic construct
  misc_feature 1..22: note = chemically synthesized
  source 1..22: mol_type = other DNA
tctacacatgcccagtttccat

SEQ ID NO: 90920 - DNA, 22 bp, synthetic construct
  misc_feature 1..22: note = chemically synthesized
  source 1..22: mol_type = other DNA
cacatgcccagtttccatttgc

SEQ ID NO: 90921 - DNA, 22 bp, synthetic construct
  misc_feature 1..22: note = chemically synthesized
  source 1..22: mol_type = other DNA
ccatttgcctccttgagcctct

SEQ ID NO: 90922 - DNA, 22 bp, synthetic construct
  misc_feature 1..22: note = chemically synthesized
  source 1..22: mol_type = other DNA
catttgcctccttgagcctctc

SEQ ID NO: 90923 - DNA, 22 bp, synthetic construct
  misc_feature 1..22: note = chemically synthesized
  source 1..22: mol_type = other DNA
gcctccttgagcctctcttata

SEQ ID NO: 90924 - DNA, 22 bp, synthetic construct
  misc_feature 1..22: note = chemically synthesized
  source 1..22: mol_type = other DNA
cctccttgagcctctcttataa

SEQ ID NO: 90925 - DNA, 22 bp, synthetic construct
  misc_feature 1..22: note = chemically synthesized
  source 1..22: mol_type = other DNA
cttgagcctctcttataacctt

SEQ ID NO: 90926 - DNA, 22 bp, synthetic construct
  misc_feature 1..22: note = chemically synthesized
  source 1..22: mol_type = other DNA
gagcctctcttataaccttgat

SEQ ID NO: 90927 - DNA, 22 bp, synthetic construct
  misc_feature 1..22: note = chemically synthesized
  source 1..22: mol_type = other DNA
agcctctcttataaccttgata

SEQ ID NO: 90928 - DNA, 22 bp, synthetic construct
  misc_feature 1..22: note = chemically synthesized
  source 1..22: mol_type = other DNA
tcttataaccttgataccaacc

SEQ ID NO: 90929 - DNA, 22 bp, synthetic construct
  misc_feature 1..22: note = chemically synthesized
  source 1..22: mol_type = other DNA
ttataaccttgataccaacctg

SEQ ID NO: 90930 - DNA, 22 bp, synthetic construct
  misc_feature 1..22: note = chemically synthesized
  source 1..22: mol_type = other DNA
ataaccttgataccaacctgcc

SEQ ID NO: 90931 - DNA, 22 bp, synthetic construct
  misc_feature 1..22: note = chemically synthesized
  source 1..22: mol_type = other DNA
taaccttgataccaacctgccc

SEQ ID NO: 90932 - DNA, 22 bp, synthetic construct
  misc_feature 1..22: note = chemically synthesized
  source 1..22: mol_type = other DNA
gataccaacctgcccagggcct

SEQ ID NO: 90933 - DNA, 22 bp, synthetic construct
  misc_feature 1..22: note = chemically synthesized
  source 1..22: mol_type = other DNA
ataccaacctgcccagggcctc

SEQ ID NO: 90934 - DNA, 22 bp, synthetic construct
  misc_feature 1..22: note = chemically synthesized
  source 1..22: mol_type = other DNA
cccagggcctcaccaccaactg

SEQ ID NO: 90935 - DNA, 22 bp, synthetic construct
  misc_feature 1..22: note = chemically synthesized
  source 1..22: mol_type = other DNA
accaccaactgcatccacgttc

SEQ ID NO: 90936 - DNA, 22 bp, synthetic construct
  misc_feature 1..22: note = chemically synthesized
  source 1..22: mol_type = other DNA
catccacgttcactttgcccca

SEQ ID NO: 90937 - DNA, 22 bp, synthetic construct
  misc_feature 1..22: note = chemically synthesized
  source 1..22: mol_type = other DNA
actttgccccacagggcattga

SEQ ID NO: 90938 - DNA, 22 bp, synthetic construct
  misc_feature 1..22: note = chemically synthesized
  source 1..22: mol_type = other DNA
tgccccacagggcattgacagc

SEQ ID NO: 90939 - DNA, 22 bp, synthetic construct
  misc_feature 1..22: note = chemically synthesized
  source 1..22: mol_type = other DNA
gccccacagggcattgacagca

SEQ ID NO: 90940 - DNA, 22 bp, synthetic construct
  misc_feature 1..22: note = chemically synthesized
  source 1..22: mol_type = other DNA
ccccacagggcattgacagcag

SEQ ID NO: 90941 - DNA, 22 bp, synthetic construct
  misc_feature 1..22: note = chemically synthesized
  source 1..22: mol_type = other DNA
acagcagtcttctcctcaggag

SEQ ID NO: 90942 - DNA, 22 bp, synthetic construct
  misc_feature 1..22: note = chemically synthesized
  source 1..22: mol_type = other DNA
ctcctcaggagtcagatgcacc

SEQ ID NO: 90943 - DNA, 22 bp, synthetic construct
  misc_feature 1..22: note = chemically synthesized
  source 1..22: mol_type = other DNA
tcctcaggagtcagatgcacca

SEQ ID NO: 90944 - DNA, 22 bp, synthetic construct
  misc_feature 1..22: note = chemically synthesized
  source 1..22: mol_type = other DNA
ctcaggagtcagatgcaccatg

SEQ ID NO: 90945 - DNA, 22 bp, synthetic construct
  misc_feature 1..22: note = chemically synthesized
  source 1..22: mol_type = other DNA
aggagtcagatgcaccatggtg

SEQ ID NO: 90946 - DNA, 22 bp, synthetic construct
  misc_feature 1..22: note = chemically synthesized
  source 1..22: mol_type = other DNA
tttgaggttgctagtgaacact

SEQ ID NO: 90947 - DNA, 22 bp, synthetic construct
  misc_feature 1..22: note = chemically synthesized
  source 1..22: mol_type = other DNA
gaggttgctagtgaacactgtt

SEQ ID NO: 90948 - DNA, 22 bp, synthetic construct
  misc_feature 1..22: note = chemically synthesized
  source 1..22: mol_type = other DNA
aggttgctagtgaacactgtta

SEQ ID NO: 90949 - DNA, 22 bp, synthetic construct
  misc_feature 1..22: note = chemically synthesized
  source 1..22: mol_type = other DNA
ctagtgaacactgttatgtcag

SEQ ID NO: 90950 - DNA, 22 bp, synthetic construct
  misc_feature 1..22: note = chemically synthesized
  source 1..22: mol_type = other DNA
gtgaacactgttatgtcagaag

SEQ ID NO: 90951 - DNA, 22 bp, synthetic construct
  misc_feature 1..22: note = chemically synthesized
  source 1..22: mol_type = other DNA
ttatgtcagaagaaagtgtaag

SEQ ID NO: 90952 - DNA, 22 bp, synthetic construct
  misc_feature 1..22: note = chemically synthesized
  source 1..22: mol_type = other DNA
tgtcagaagaaagtgtaagcaa

SEQ ID NO: 90953 - DNA, 22 bp, synthetic construct
  misc_feature 1..22: note = chemically synthesized
  source 1..22: mol_type = other DNA
tgccctgccttttatgctggtc

SEQ ID NO: 90954 - DNA, 22 bp, synthetic construct
  misc_feature 1..22: note = chemically synthesized
  source 1..22: mol_type = other DNA
ccctgccttttatgctggtcct

SEQ ID NO: 90955 - DNA, 22 bp, synthetic construct
  misc_feature 1..22: note = chemically synthesized
  source 1..22: mol_type = other DNA
ccttttatgctggtcctgtcct

SEQ ID NO: 90956 - DNA, 22 bp, synthetic construct
  misc_feature 1..22: note = chemically synthesized
  source 1..22: mol_type = other DNA
ttatgctggtcctgtcctccct

SEQ ID NO: 90957 - DNA, 22 bp, synthetic construct
  misc_feature 1..22: note = chemically synthesized
  source 1..22: mol_type = other DNA
tatgctggtcctgtcctccctg

SEQ ID NO: 90958 - DNA, 22 bp, synthetic construct
  misc_feature 1..22: note = chemically synthesized
  source 1..22: mol_type = other DNA
atgctggtcctgtcctccctgc

SEQ ID NO: 90959 - DNA, 22 bp, synthetic construct
  misc_feature 1..22: note = chemically synthesized
  source 1..22: mol_type = other DNA
tgctggtcctgtcctccctgct

SEQ ID NO: 90960 - DNA, 22 bp, synthetic construct
  misc_feature 1..22: note = chemically synthesized
  source 1..22: mol_type = other DNA
gtcctgtcctccctgctccagt

SEQ ID NO: 90961 - DNA, 22 bp, synthetic construct
  misc_feature 1..22: note = chemically synthesized
  source 1..22: mol_type = other DNA
tcctccctgctccagtgagcag

SEQ ID NO: 90962 - DNA, 22 bp, synthetic construct
  misc_feature 1..22: note = chemically synthesized
  source 1..22: mol_type = other DNA
cctgctccagtgagcaggttgg

SEQ ID NO: 90963 - DNA, 22 bp, synthetic construct
  misc_feature 1..22: note = chemically synthesized
  source 1..22: mol_type = other DNA
ctccagtgagcaggttggttta

SEQ ID NO: 90964 - DNA, 22 bp, synthetic construct
  misc_feature 1..22: note = chemically synthesized
  source 1..22: mol_type = other DNA
cagtgagcaggttggtttaaga

SEQ ID NO: 90965 - DNA, 22 bp, synthetic construct
  misc_feature 1..22: note = chemically synthesized
  source 1..22: mol_type = other DNA
gtttaagataagcagggtttca

SEQ ID NO: 90966 - DNA, 22 bp, synthetic construct
  misc_feature 1..22: note = chemically synthesized
  source 1..22: mol_type = other DNA
aagataagcagggtttcattag

SEQ ID NO: 90967 - DNA, 22 bp, synthetic construct
  misc_feature 1..22: note = chemically synthesized
  source 1..22: mol_type = other DNA
agataagcagggtttcattagt

SEQ ID NO: 90968 - DNA, 22 bp, synthetic construct
  misc_feature 1..22: note = chemically synthesized
  source 1..22: mol_type = other DNA
cattagtttgtgagaatgaaaa

SEQ ID NO: 90969 - DNA, 22 bp, synthetic construct
  misc_feature 1..22: note = chemically synthesized
  source 1..22: mol_type = other DNA
attagtttgtgagaatgaaaaa

SEQ ID NO: 90970 - DNA, 22 bp, synthetic construct
  misc_feature 1..22: note = chemically synthesized
  source 1..22: mol_type = other DNA
gtttgtgagaatgaaaaatgaa

SEQ ID NO: 90971 - DNA, 22 bp, synthetic construct
  misc_feature 1..22: note = chemically synthesized
  source 1..22: mol_type = other DNA
gtgagaatgaaaaatgaacctt

SEQ ID NO: 90972 - DNA, 22 bp, synthetic construct
  misc_feature 1..22: note = chemically synthesized
  source 1..22: mol_type = other DNA
tgagaatgaaaaatgaaccttc

SEQ ID NO: 90973 - DNA, 22 bp, synthetic construct
  misc_feature 1..22: note = chemically synthesized
  source 1..22: mol_type = other DNA
cattccactattcccttaactt

SEQ ID NO: 90974 - DNA, 22 bp, synthetic construct
  misc_feature 1..22: note = chemically synthesized
  source 1..22: mol_type = other DNA
attccactattcccttaacttg

SEQ ID NO: 90975 - DNA, 22 bp, synthetic construct
  misc_feature 1..22: note = chemically synthesized
  source 1..22: mol_type = other DNA
cactattcccttaacttgccct

SEQ ID NO: 90976 - DNA, 22 bp, synthetic construct
  misc_feature 1..22: note = chemically synthesized
  source 1..22: mol_type = other DNA
ttcccttaacttgccctgagat

SEQ ID NO: 90977 - DNA, 22 bp, synthetic construct
  misc_feature 1..22: note = chemically synthesized
  source 1..22: mol_type = other DNA
ccttaacttgccctgagattgg

SEQ ID NO: 90978 - DNA, 22 bp, synthetic construct
  misc_feature 1..22: note = chemically synthesized
  source 1..22: mol_type = other DNA
aacttgccctgagattggctgt

SEQ ID NO: 90979 - DNA, 22 bp, synthetic construct
  misc_feature 1..22: note = chemically synthesized
  source 1..22: mol_type = other DNA
acttgccctgagattggctgtt

SEQ ID NO: 90980 - DNA, 22 bp, synthetic construct
  misc_feature 1..22: note = chemically synthesized
  source 1..22: mol_type = other DNA
gccctgagattggctgttctgt

SEQ ID NO: 90981 - DNA, 22 bp, synthetic construct
  misc_feature 1..22: note = chemically synthesized
  source 1..22: mol_type = other DNA
ccctgagattggctgttctgtc

SEQ ID NO: 90982 - DNA, 22 bp, synthetic construct
  misc_feature 1..22: note = chemically synthesized
  source 1..22: mol_type = other DNA
agattggctgttctgtcatgtg

SEQ ID NO: 90983 - DNA, 22 bp, synthetic construct
  misc_feature 1..22: note = chemically synthesized
  source 1..22: mol_type = other DNA
gctgttctgtcatgtgtgtctt

SEQ ID NO: 90984 - DNA, 22 bp, synthetic construct
  misc_feature 1..22: note = chemically synthesized
  source 1..22: mol_type = other DNA
ttctgtcatgtgtgtcttgact

SEQ ID NO: 90985 - DNA, 22 bp, synthetic construct
  misc_feature 1..22: note = chemically synthesized
  source 1..22: mol_type = other DNA
tgtcatgtgtgtcttgactcag

SEQ ID NO: 90986 - DNA, 22 bp, synthetic construct
  misc_feature 1..22: note = chemically synthesized
  source 1..22: mol_type = other DNA
tcatgtgtgtcttgactcagaa

SEQ ID NO: 90987 - DNA, 22 bp, synthetic construct
  misc_feature 1..22: note = chemically synthesized
  source 1..22: mol_type = other DNA
gactcagaaaccctgttctcct

SEQ ID NO: 90988 - DNA, 22 bp, synthetic construct
  misc_feature 1..22: note = chemically synthesized
  source 1..22: mol_type = other DNA
actcagaaaccctgttctcctc

SEQ ID NO: 90989 - DNA, 22 bp, synthetic construct
  misc_feature 1..22: note = chemically synthesized
  source 1..22: mol_type = other DNA
agaaaccctgttctcctctaca

SEQ ID NO: 90990 - DNA, 22 bp, synthetic construct
  misc_feature 1..22: note = chemically synthesized
  source 1..22: mol_type = other DNA
ttctcctctacatatctcccca

SEQ ID NO: 90991 - DNA, 22 bp, synthetic construct
  misc_feature 1..22: note = chemically synthesized
  source 1..22: mol_type = other DNA
tcctctacatatctccccaccg

SEQ ID NO: 90992 - DNA, 22 bp, synthetic construct
  misc_feature 1..22: note = chemically synthesized
  source 1..22: mol_type = other DNA
ctctacatatctccccaccgca

SEQ ID NO: 90993 - DNA, 22 bp, synthetic construct
  misc_feature 1..22: note = chemically synthesized
  source 1..22: mol_type = other DNA
tacatatctccccaccgcatct

SEQ ID NO: 90994 - DNA, 22 bp, synthetic construct
  misc_feature 1..22: note = chemically synthesized
  source 1..22: mol_type = other DNA
catatctccccaccgcatctct

SEQ ID NO: 90995 - DNA, 22 bp, synthetic construct
  misc_feature 1..22: note = chemically synthesized
  source 1..22: mol_type = other DNA
cccaccgcatctctttcagcag

SEQ ID NO: 90996 - DNA, 22 bp, synthetic construct
  misc_feature 1..22: note = chemically synthesized
  source 1..22: mol_type = other DNA
tttcagcagttgtttctaaaaa

SEQ ID NO: 90997 - DNA, 22 bp, synthetic construct
  misc_feature 1..22: note = chemically synthesized
  source 1..22: mol_type = other DNA
tcagcagttgtttctaaaaata

SEQ ID NO: 90998 - DNA, 22 bp, synthetic construct
  misc_feature 1..22: note = chemically synthesized
  source 1..22: mol_type = other DNA
cagcagttgtttctaaaaatat

SEQ ID NO: 90999 - DNA, 22 bp, synthetic construct
  misc_feature 1..22: note = chemically synthesized
  source 1..22: mol_type = other DNA
agcagttgtttctaaaaatatc

SEQ ID NO: 91000 - DNA, 22 bp, synthetic construct
  misc_feature 1..22: note = chemically synthesized
  source 1..22: mol_type = other DNA
tttctaaaaatatcctcctagt

SEQ ID NO: 91001 - DNA, 22 bp, synthetic construct
  misc_feature 1..22: note = chemically synthesized
  source 1..22: mol_type = other DNA
ctaaaaatatcctcctagtttc

SEQ ID NO: 91002 - DNA, 22 bp, synthetic construct
  misc_feature 1..22: note = chemically synthesized
  source 1..22: mol_type = other DNA
taaaaatatcctcctagtttca

SEQ ID NO: 91003 - DNA, 22 bp, synthetic construct
  misc_feature 1..22: note = chemically synthesized
  source 1..22: mol_type = other DNA
aaaatatcctcctagtttcatt

SEQ ID NO: 91004 - DNA, 22 bp, synthetic construct
  misc_feature 1..22: note = chemically synthesized
  source 1..22: mol_type = other DNA
ctagtttcatttttgcagaagt

SEQ ID NO: 91005 - DNA, 22 bp, synthetic construct
  misc_feature 1..22: note = chemically synthesized
  source 1..22: mol_type = other DNA
gtttcatttttgcagaagtgtt

SEQ ID NO: 91006 - DNA, 22 bp, synthetic construct
  misc_feature 1..22: note = chemically synthesized
  source 1..22: mol_type = other DNA
catttttgcagaagtgttttag

SEQ ID NO: 91007 - DNA, 22 bp, synthetic construct
  misc_feature 1..22: note = chemically synthesized
  source 1..22: mol_type = other DNA
atttttgcagaagtgttttagg

SEQ ID NO: 91008 - DNA, 22 bp, synthetic construct
  misc_feature 1..22: note = chemically synthesized
  source 1..22: mol_type = other DNA
ttgcagaagtgttttaggctaa

SEQ ID NO: 91009 - DNA, 22 bp, synthetic construct
  misc_feature 1..22: note = chemically synthesized
  source 1..22: mol_type = other DNA
tgcagaagtgttttaggctaat

SEQ ID NO: 91010 - DNA, 22 bp, synthetic construct
  misc_feature 1..22: note = chemically synthesized
  source 1..22: mol_type = other DNA
gcagaagtgttttaggctaata

SEQ ID NO: 91011 - DNA, 22 bp, synthetic construct
  misc_feature 1..22: note = chemically synthesized
  source 1..22: mol_type = other DNA
cagaagtgttttaggctaatat

SEQ ID NO: 91012 - DNA, 22 bp, synthetic construct
  misc_feature 1..22: note = chemically synthesized
  source 1..22: mol_type = other DNA
taggctaatatagtggaatgta

SEQ ID NO: 91013 - DNA, 22 bp, synthetic construct
  misc_feature 1..22: note = chemically synthesized
  source 1..22: mol_type = other DNA
aggctaatatagtggaatgtat

SEQ ID NO: 91014 - DNA, 22 bp, synthetic construct
  misc_feature 1..22: note = chemically synthesized
  source 1..22: mol_type = other DNA
ggctaatatagtggaatgtatc

SEQ ID NO: 91015 - DNA, 22 bp, synthetic construct
  misc_feature 1..22: note = chemically synthesized
  source 1..22: mol_type = other DNA
atatagtggaatgtatcttaga

SEQ ID NO: 91016 - DNA, 22 bp, synthetic construct
  misc_feature 1..22: note = chemically synthesized
  source 1..22: mol_type = other DNA
agagtttaacttatttgtttct

SEQ ID NO: 91017 - DNA, 22 bp, synthetic construct
  misc_feature 1..22: note = chemically synthesized
  source 1..22: mol_type = other DNA
gagtttaacttatttgtttctg

SEQ ID NO: 91018 - DNA, 22 bp, synthetic construct
  misc_feature 1..22: note = chemically synthesized
  source 1..22: mol_type = other DNA
aacttatttgtttctgtcactt

SEQ ID NO: 91019 - DNA, 22 bp, synthetic construct
  misc_feature 1..22: note = chemically synthesized
  source 1..22: mol_type = other DNA
acttatttgtttctgtcacttt

SEQ ID NO: 91020 - DNA, 22 bp, synthetic construct
  misc_feature 1..22: note = chemically synthesized
  source 1..22: mol_type = other DNA
atttgtttctgtcactttatac

SEQ ID NO: 91021 - DNA, 22 bp, synthetic construct
  misc_feature 1..22: note = chemically synthesized
  source 1..22: mol_type = other DNA
tttgtttctgtcactttatact

SEQ ID NO: 91022 - DNA, 22 bp, synthetic construct
  misc_feature 1..22: note = chemically synthesized
  source 1..22: mol_type = other DNA
gtttctgtcactttatactaag

SEQ ID NO: 91023 - DNA, 22 bp, synthetic construct
  misc_feature 1..22: note = chemically synthesized
  source 1..22: mol_type = other DNA
tttctgtcactttatactaaga

SEQ ID NO: 91024 - DNA, 22 bp, synthetic construct
  misc_feature 1..22: note = chemically synthesized
  source 1..22: mol_type = other DNA
ctgtcactttatactaagaaaa

SEQ ID NO: 91025 - DNA, 22 bp, synthetic construct
  misc_feature 1..22: note = chemically synthesized
  source 1..22: mol_type = other DNA
tgtcactttatactaagaaaac

SEQ ID NO: 91026 - DNA, 22 bp, synthetic construct
  misc_feature 1..22: note = chemically synthesized
  source 1..22: mol_type = other DNA
tcactttatactaagaaaactt

SEQ ID NO: 91027 - DNA, 22 bp, synthetic construct
  misc_feature 1..22: note = chemically synthesized
  source 1..22: mol_type = other DNA
tatactaagaaaacttatctaa

SEQ ID NO: 91028 - DNA, 22 bp, synthetic construct
  misc_feature 1..22: note = chemically synthesized
  source 1..22: mol_type = other DNA
atactaagaaaacttatctaaa

SEQ ID NO: 91029 - DNA, 22 bp, synthetic construct
  misc_feature 1..22: note = chemically synthesized
  source 1..22: mol_type = other DNA
tactaagaaaacttatctaaaa

SEQ ID NO: 91030 - DNA, 22 bp, synthetic construct
  misc_feature 1..22: note = chemically synthesized
  source 1..22: mol_type = other DNA
agaaaacttatctaaaagcaga

SEQ ID NO: 91031 - DNA, 22 bp, synthetic construct
  misc_feature 1..22: note = chemically synthesized
  source 1..22: mol_type = other DNA
atctaaaagcagatgttttaac

SEQ ID NO: 91032 - DNA, 22 bp, synthetic construct
  misc_feature 1..22: note = chemically synthesized
  source 1..22: mol_type = other DNA
tctaaaagcagatgttttaaca

SEQ ID NO: 91033 - DNA, 22 bp, synthetic construct
  misc_feature 1..22: note = chemically synthesized
  source 1..22: mol_type = other DNA
aaagcagatgttttaacaagtt

SEQ ID NO: 91034 - DNA, 22 bp, synthetic construct
  misc_feature 1..22: note = chemically synthesized
  source 1..22: mol_type = other DNA
taacaagttgactcaatataaa

SEQ ID NO: 91035 - DNA, 22 bp, synthetic construct
  misc_feature 1..22: note = chemically synthesized
  source 1..22: mol_type = other DNA
aacaagttgactcaatataaag

SEQ ID NO: 91036 - DNA, 22 bp, synthetic construct
  misc_feature 1..22: note = chemically synthesized
  source 1..22: mol_type = other DNA
acaagttgactcaatataaagt

SEQ ID NO: 91037 - DNA, 22 bp, synthetic construct
  misc_feature 1..22: note = chemically synthesized
  source 1..22: mol_type = other DNA
actcaatataaagttcttcttt

SEQ ID NO: 91038 - DNA, 22 bp, synthetic construct
  misc_feature 1..22: note = chemically synthesized
  source 1..22: mol_type = other DNA
aatataaagttcttctttgcct

SEQ ID NO: 91039 - DNA, 22 bp, synthetic construct
  misc_feature 1..22: note = chemically synthesized
  source 1..22: mol_type = other DNA
ttctttgcctctagagattttt

SEQ ID NO: 91040 - DNA, 22 bp, synthetic construct
  misc_feature 1..22: note = chemically synthesized
  source 1..22: mol_type = other DNA
ctttgcctctagagatttttgt

SEQ ID NO: 91041 - DNA, 22 bp, synthetic construct
  misc_feature 1..22: note = chemically synthesized
  source 1..22: mol_type = other DNA
tttgcctctagagatttttgtc

SEQ ID NO: 91042 - DNA, 22 bp, synthetic construct
  misc_feature 1..22: note = chemically synthesized
  source 1..22: mol_type = other DNA
tgcctctagagatttttgtctc

SEQ ID NO: 91043 - DNA, 22 bp, synthetic construct
  misc_feature 1..22: note = chemically synthesized
  source 1..22: mol_type = other DNA
gcctctagagatttttgtctcc

SEQ ID NO: 91044 - DNA, 22 bp, synthetic construct
  misc_feature 1..22: note = chemically synthesized
  source 1..22: mol_type = other DNA
cctctagagatttttgtctcca

SEQ ID NO: 91045 - DNA, 22 bp, synthetic construct
  misc_feature 1..22: note = chemically synthesized
  source 1..22: mol_type = other DNA
tagagatttttgtctccaaggg

SEQ ID NO: 91046 - DNA, 22 bp, synthetic construct
  misc_feature 1..22: note = chemically synthesized
  source 1..22: mol_type = other DNA
gagatttttgtctccaagggaa

SEQ ID NO: 91047 - DNA, 22 bp, synthetic construct
  misc_feature 1..22: note = chemically synthesized
  source 1..22: mol_type = other DNA
ttgtctccaagggaattttgag

SEQ ID NO: 91048 - DNA, 22 bp, synthetic construct
  misc_feature 1..22: note = chemically synthesized
  source 1..22: mol_type = other DNA
tgtctccaagggaattttgaga

SEQ ID NO: 91049 - DNA, 22 bp, synthetic construct
  misc_feature 1..22: note = chemically synthesized
  source 1..22: mol_type = other DNA
gtctccaagggaattttgagag

SEQ ID NO: 91050 - DNA, 22 bp, synthetic construct
  misc_feature 1..22: note = chemically synthesized
  source 1..22: mol_type = other DNA
tctccaagggaattttgagagg

SEQ ID NO: 91051 - DNA, 22 bp, synthetic construct
  misc_feature 1..22: note = chemically synthesized
  source 1..22: mol_type = other DNA
caagggaattttgagaggttgg

SEQ ID NO: 91052 - DNA, 22 bp, synthetic construct
  misc_feature 1..22: note = chemically synthesized
  source 1..22: mol_type = other DNA
tgagaggttggaatggacaaat

SEQ ID NO: 91053 - DNA, 22 bp, synthetic construct
  misc_feature 1..22: note = chemically synthesized
  source 1..22: mol_type = other DNA
gagaggttggaatggacaaatc

SEQ ID NO: 91054 - DNA, 22 bp, synthetic construct
  misc_feature 1..22: note = chemically synthesized
  source 1..22: mol_type = other DNA
agaggttggaatggacaaatct

SEQ ID NO: 91055 - DNA, 22 bp, synthetic construct
  misc_feature 1..22: note = chemically synthesized
  source 1..22: mol_type = other DNA
gaatggacaaatctattgctgc

SEQ ID NO: 91056 - DNA, 22 bp, synthetic construct
  misc_feature 1..22: note = chemically synthesized
  source 1..22: mol_type = other DNA
ttgctgcagtttaaacttgctt

SEQ ID NO: 91057 - DNA, 22 bp, synthetic construct
  misc_feature 1..22: note = chemically synthesized
  source 1..22: mol_type = other DNA
ctgcagtttaaacttgcttgct

SEQ ID NO: 91058 - DNA, 22 bp, synthetic construct
  misc_feature 1..22: note = chemically synthesized
  source 1..22: mol_type = other DNA
cagtttaaacttgcttgcttcc

SEQ ID NO: 91059 - DNA, 22 bp, synthetic construct
  misc_feature 1..22: note = chemically synthesized
  source 1..22: mol_type = other DNA
aaacttgcttgcttcctccttc

SEQ ID NO: 91060 - DNA, 22 bp, synthetic construct
  misc_feature 1..22: note = chemically synthesized
  source 1..22: mol_type = other DNA
aacttgcttgcttcctccttct

SEQ ID NO: 91061 - DNA, 22 bp, synthetic construct
  misc_feature 1..22: note = chemically synthesized
  source 1..22: mol_type = other DNA
gcttgcttcctccttcttttgg

SEQ ID NO: 91062 - DNA, 22 bp, synthetic construct
  misc_feature 1..22: note = chemically synthesized
  source 1..22: mol_type = other DNA
cttgcttcctccttcttttggt

SEQ ID NO: 91063 - DNA, 22 bp, synthetic construct
  misc_feature 1..22: note = chemically synthesized
  source 1..22: mol_type = other DNA
gcttcctccttcttttggtaaa

SEQ ID NO: 91064 - DNA, 22 bp, synthetic construct
  misc_feature 1..22: note = chemically synthesized
  source 1..22: mol_type = other DNA
cttcctccttcttttggtaaat

SEQ ID NO: 91065 - DNA, 22 bp, synthetic construct
  misc_feature 1..22: note = chemically synthesized
  source 1..22: mol_type = other DNA
cctccttcttttggtaaattct

SEQ ID NO: 91066 - DNA, 22 bp, synthetic construct
  misc_feature 1..22: note = chemically synthesized
  source 1..22: mol_type = other DNA
ctccttcttttggtaaattctt

SEQ ID NO: 91067 - DNA, 22 bp, synthetic construct
  misc_feature 1..22: note = chemically synthesized
  source 1..22: mol_type = other DNA
cttcttttggtaaattcttcct

SEQ ID NO: 91068 - DNA, 22 bp, synthetic construct
  misc_feature 1..22: note = chemically synthesized
  source 1..22: mol_type = other DNA
cttttggtaaattcttcctata

SEQ ID NO: 91069 - DNA, 22 bp, synthetic construct
  misc_feature 1..22: note = chemically synthesized
  source 1..22: mol_type = other DNA
ttttggtaaattcttcctataa

SEQ ID NO: 91070 - DNA, 22 bp, synthetic construct
  misc_feature 1..22: note = chemically synthesized
  source 1..22: mol_type = other DNA
ttggtaaattcttcctataata

SEQ ID NO: 91071 - DNA, 22 bp, synthetic construct
  misc_feature 1..22: note = chemically synthesized
  source 1..22: mol_type = other DNA
tggtaaattcttcctataataa

SEQ ID NO: 91072 - DNA, 22 bp, synthetic construct
  misc_feature 1..22: note = chemically synthesized
  source 1..22: mol_type = other DNA
ggtaaattcttcctataataaa

SEQ ID NO: 91073 - DNA, 22 bp, synthetic construct
  misc_feature 1..22: note = chemically synthesized
  source 1..22: mol_type = other DNA
gtaaattcttcctataataaaa

SEQ ID NO: 91074 - DNA, 22 bp, synthetic construct
  misc_feature 1..22: note = chemically synthesized
  source 1..22: mol_type = other DNA
ttcctataataaaactctaatt

SEQ ID NO: 91075 - DNA, 22 bp, synthetic construct
  misc_feature 1..22: note = chemically synthesized
  source 1..22: mol_type = other DNA
cctataataaaactctaatttt

SEQ ID NO: 91076 - DNA, 22 bp, synthetic construct
  misc_feature 1..22: note = chemically synthesized
  source 1..22: mol_type = other DNA
ctataataaaactctaattttt

SEQ ID NO: 91077 - DNA, 22 bp, synthetic construct
  misc_feature 1..22: note = chemically synthesized
  source 1..22: mol_type = other DNA
taataaaactctaattttttat

SEQ ID NO: 91078 - DNA, 22 bp, synthetic construct
  misc_feature 1..22: note = chemically synthesized
  source 1..22: mol_type = other DNA
taattttttattatattgaaat

SEQ ID NO: 91079 - DNA, 22 bp, synthetic construct
  misc_feature 1..22: note = chemically synthesized
  source 1..22: mol_type = other DNA
attttttattatattgaaataa

SEQ ID NO: 91080 - DNA, 22 bp, synthetic construct
  misc_feature 1..22: note = chemically synthesized
  source 1..22: mol_type = other DNA
tttattatattgaaataaatat

SEQ ID NO: 91081 - DNA, 22 bp, synthetic construct
  misc_feature 1..22: note = chemically synthesized
  source 1..22: mol_type = other DNA
ttattatattgaaataaatatc

SEQ ID NO: 91082 - DNA, 22 bp, synthetic construct
  misc_feature 1..22: note = chemically synthesized
  source 1..22: mol_type = other DNA
tattatattgaaataaatatcc

SEQ ID NO: 91083 - DNA, 22 bp, synthetic construct
  misc_feature 1..22: note = chemically synthesized
  source 1..22: mol_type = other DNA
attatattgaaataaatatcca

SEQ ID NO: 91084 - DNA, 22 bp, synthetic construct
  misc_feature 1..22: note = chemically synthesized
  source 1..22: mol_type = other DNA
ttatattgaaataaatatccat

SEQ ID NO: 91085 - DNA, 22 bp, synthetic construct
  misc_feature 1..22: note = chemically synthesized
  source 1..22: mol_type = other DNA
tattgaaataaatatccattaa

SEQ ID NO: 91086 - DNA, 22 bp, synthetic construct
  misc_feature 1..22: note = chemically synthesized
  source 1..22: mol_type = other DNA
aaataaatatccattaaaagaa

SEQ ID NO: 91087 - DNA, 22 bp, synthetic construct
  misc_feature 1..22: note = chemically synthesized
  source 1..22: mol_type = other DNA
aaagaatatttaaaaaatgaat

SEQ ID NO: 91088 - DNA, 22 bp, synthetic construct
  misc_feature 1..22: note = chemically synthesized
  source 1..22: mol_type = other DNA
aaaaaatgaatagtgtttattt

SEQ ID NO: 91089 - DNA, 22 bp, synthetic construct
  misc_feature 1..22: note = chemically synthesized
  source 1..22: mol_type = other DNA
aaaaatgaatagtgtttattta

SEQ ID NO: 91090 - DNA, 22 bp, synthetic construct
  misc_feature 1..22: note = chemically synthesized
  source 1..22: mol_type = other DNA
atttaccagttattgaaatagg

SEQ ID NO: 91091 - DNA, 22 bp, synthetic construct
  misc_feature 1..22: note = chemically synthesized
  source 1..22: mol_type = other DNA
tttaccagttattgaaataggt

SEQ ID NO: 91092 - DNA, 22 bp, synthetic construct
  misc_feature 1..22: note = chemically synthesized
  source 1..22: mol_type = other DNA
accagttattgaaataggttct

SEQ ID NO: 91093 - DNA, 22 bp, synthetic construct
  misc_feature 1..22: note = chemically synthesized
  source 1..22: mol_type = other DNA
ccagttattgaaataggttctg

SEQ ID NO: 91094 - DNA, 22 bp, synthetic construct
  misc_feature 1..22: note = chemically synthesized
  source 1..22: mol_type = other DNA
ttgaaataggttctggaaacat

SEQ ID NO: 91095 - DNA, 22 bp, synthetic construct
  misc_feature 1..22: note = chemically synthesized
  source 1..22: mol_type = other DNA
aaataggttctggaaacatgaa

SEQ ID NO: 91096 - DNA, 22 bp, synthetic construct
  misc_feature 1..22: note = chemically synthesized
  source 1..22: mol_type = other DNA
tggaaacatgaattttaaggtt

SEQ ID NO: 91097 - DNA, 22 bp, synthetic construct
  misc_feature 1..22: note = chemically synthesized
  source 1..22: mol_type = other DNA
gaaacatgaattttaaggttaa

SEQ ID NO: 91098 - DNA, 22 bp, synthetic construct
  misc_feature 1..22: note = chemically synthesized
  source 1..22: mol_type = other DNA
taaggttaacattttaatgaca

SEQ ID NO: 91099 - DNA, 22 bp, synthetic construct
  misc_feature 1..22: note = chemically synthesized
  source 1..22: mol_type = other DNA
aaggttaacattttaatgacag

SEQ ID NO: 91100 - DNA, 22 bp, synthetic construct
  misc_feature 1..22: note = chemically synthesized
  source 1..22: mol_type = other DNA
aggttaacattttaatgacaga

SEQ ID NO: 91101 - DNA, 22 bp, synthetic construct
  misc_feature 1..22: note = chemically synthesized
  source 1..22: mol_type = other DNA
acattttaatgacagataaaat

SEQ ID NO: 91102 - DNA, 22 bp, synthetic construct
  misc_feature 1..22: note = chemically synthesized
  source 1..22: mol_type = other DNA
taatgacagataaaatcaaata

SEQ ID NO: 91103 - DNA, 22 bp, synthetic construct
  misc_feature 1..22: note = chemically synthesized
  source 1..22: mol_type = other DNA
aatgacagataaaatcaaatat

SEQ ID NO: 91104 - DNA, 22 bp, synthetic construct
  misc_feature 1..22: note = chemically synthesized
  source 1..22: mol_type = other DNA
atgacagataaaatcaaatatt

SEQ ID NO: 91105 - DNA, 22 bp, synthetic construct
  misc_feature 1..22: note = chemically synthesized
  source 1..22: mol_type = other DNA
tatacaaatattttgaatgttt

SEQ ID NO: 91106 - DNA, 22 bp, synthetic construct
  misc_feature 1..22: note = chemically synthesized
  source 1..22: mol_type = other DNA
tgaatgtttaaaattatggtat

SEQ ID NO: 91107 - DNA, 22 bp, synthetic construct
  misc_feature 1..22: note = chemically synthesized
  source 1..22: mol_type = other DNA
gaatgtttaaaattatggtatg

SEQ ID NO: 91108 - DNA, 22 bp, synthetic construct
  misc_feature 1..22: note = chemically synthesized
  source 1..22: mol_type = other DNA
aatgtttaaaattatggtatga

SEQ ID NO: 91109 - DNA, 22 bp, synthetic construct
  misc_feature 1..22: note = chemically synthesized
  source 1..22: mol_type = other DNA
aaaattatggtatgactaaaga

SEQ ID NO: 91110 - DNA, 22 bp, synthetic construct
  misc_feature 1..22: note = chemically synthesized
  source 1..22: mol_type = other DNA
aaattatggtatgactaaagaa

SEQ ID NO: 91111 - DNA, 22 bp, synthetic construct
  misc_feature 1..22: note = chemically synthesized
  source 1..22: mol_type = other DNA
tggtatgactaaagaaagaatg

SEQ ID NO: 91112 - DNA, 22 bp, synthetic construct
  misc_feature 1..22: note = chemically synthesized
  source 1..22: mol_type = other DNA
aagaaagaatgcaaagtgaaaa

SEQ ID NO: 91113 - DNA, 22 bp, synthetic construct
  misc_feature 1..22: note = chemically synthesized
  source 1..22: mol_type = other DNA
accatattcagccagattaaat

SEQ ID NO: 91114 - DNA, 22 bp, synthetic construct
  misc_feature 1..22: note = chemically synthesized
  source 1..22: mol_type = other DNA
ccatattcagccagattaaatt

SEQ ID NO: 91115 - DNA, 22 bp, synthetic construct
  misc_feature 1..22: note = chemically synthesized
  source 1..22: mol_type = other DNA
agccagattaaatttaacgaag

SEQ ID NO: 91116 - DNA, 22 bp, synthetic construct
  misc_feature 1..22: note = chemically synthesized
  source 1..22: mol_type = other DNA
aatttaacgaagttcctgggaa

SEQ ID NO: 91117 - DNA, 22 bp, synthetic construct
  misc_feature 1..22: note = chemically synthesized
  source 1..22: mol_type = other DNA
aacgaagttcctgggaatatgc

SEQ ID NO: 91118 - DNA, 22 bp, synthetic construct
  misc_feature 1..22: note = chemically synthesized
  source 1..22: mol_type = other DNA
acgaagttcctgggaatatgct

SEQ ID NO: 91119 - DNA, 22 bp, synthetic construct
  misc_feature 1..22: note = chemically synthesized
  source 1..22: mol_type = other DNA
ctgggaatatgctagtacagaa

SEQ ID NO: 91120 - DNA, 22 bp, synthetic construct
  misc_feature 1..22: note = chemically synthesized
  source 1..22: mol_type = other DNA
ggaatatgctagtacagaacat

SEQ ID NO: 91121 - DNA, 22 bp, synthetic construct
  misc_feature 1..22: note = chemically synthesized
  source 1..22: mol_type = other DNA
gtacagaacatttttacagatg

SEQ ID NO: 91122 - DNA, 22 bp, synthetic construct
  misc_feature 1..22: note = chemically synthesized
  source 1..22: mol_type = other DNA
ttacagatgtgttcttaaaaaa

SEQ ID NO: 91123 - DNA, 22 bp, synthetic construct
  misc_feature 1..22: note = chemically synthesized
  source 1..22: mol_type = other DNA
tacagatgtgttcttaaaaaaa

SEQ ID NO: 91124 - DNA, 22 bp, synthetic construct
  misc_feature 1..22: note = chemically synthesized
  source 1..22: mol_type = other DNA
acagatgtgttcttaaaaaaaa

SEQ ID NO: 91125 - DNA, 22 bp, synthetic construct
  misc_feature 1..22: note = chemically synthesized
  source 1..22: mol_type = other DNA
cagatgtgttcttaaaaaaaaa

SEQ ID NO: 91126 - DNA, 22 bp, synthetic construct
  misc_feature 1..22: note = chemically synthesized
  source 1..22: mol_type = other DNA
ttaaaaaaaaatgtggaattag

SEQ ID NO: 91127 - DNA, 22 bp, synthetic construct
  misc_feature 1..22: note = chemically synthesized
  source 1..22: mol_type = other DNA
aaaaaaaaatgtggaattagac

SEQ ID NO: 91128 - DNA, 22 bp, synthetic construct
  misc_feature 1..22: note = chemically synthesized
  source 1..22: mol_type = other DNA
aaaaaaaatgtggaattagacc

SEQ ID NO: 91129 - DNA, 22 bp, synthetic construct
  misc_feature 1..22: note = chemically synthesized
  source 1..22: mol_type = other DNA
gacccaggaatgaagatcccag

SEQ ID NO: 91130 - DNA, 22 bp, synthetic construct
  misc_feature 1..22: note = chemically synthesized
  source 1..22: mol_type = other DNA
ttcactcttttctgaattcaaa

SEQ ID NO: 91131 - DNA, 22 bp, synthetic construct
  misc_feature 1..22: note = chemically synthesized
  source 1..22: mol_type = other DNA
tcactcttttctgaattcaaat

SEQ ID NO: 91132 - DNA, 22 bp, synthetic construct
  misc_feature 1..22: note = chemically synthesized
  source 1..22: mol_type = other DNA
cactcttttctgaattcaaata

SEQ ID NO: 91133 - DNA, 22 bp, synthetic construct
  misc_feature 1..22: note = chemically synthesized
  source 1..22: mol_type = other DNA
actcttttctgaattcaaataa

SEQ ID NO: 91134 - DNA, 22 bp, synthetic construct
  misc_feature 1..22: note = chemically synthesized
  source 1..22: mol_type = other DNA
ttttctgaattcaaataatgcc

SEQ ID NO: 91135 - DNA, 22 bp, synthetic construct
  misc_feature 1..22: note = chemically synthesized
  source 1..22: mol_type = other DNA
ttctgaattcaaataatgccac

SEQ ID NO: 91136 - DNA, 22 bp, synthetic construct
  misc_feature 1..22: note = chemically synthesized
  source 1..22: mol_type = other DNA
tctgaattcaaataatgccaca

SEQ ID NO: 91137 - DNA, 22 bp, synthetic construct
  misc_feature 1..22: note = chemically synthesized
  source 1..22: mol_type = other DNA
ctgaattcaaataatgccacaa

SEQ ID NO: 91138 - DNA, 22 bp, synthetic construct
  misc_feature 1..22: note = chemically synthesized
  source 1..22: mol_type = other DNA
tgaattcaaataatgccacaat

SEQ ID NO: 91139 - DNA, 22 bp, synthetic construct
  misc_feature 1..22: note = chemically synthesized
  source 1..22: mol_type = other DNA
aattcaaataatgccacaatgg

SEQ ID NO: 91140 - DNA, 22 bp, synthetic construct
  misc_feature 1..22: note = chemically synthesized
  source 1..22: mol_type = other DNA
aaataatgccacaatggcagac

SEQ ID NO: 91141 - DNA, 22 bp, synthetic construct
  misc_feature 1..22: note = chemically synthesized
  source 1..22: mol_type = other DNA
aaggaaagaggaggaagaaatg

SEQ ID NO: 91142 - DNA, 22 bp, synthetic construct
  misc_feature 1..22: note = chemically synthesized
  source 1..22: mol_type = other DNA
acagttcaaattttggtggtga

SEQ ID NO: 91143 - DNA, 22 bp, synthetic construct
  misc_feature 1..22: note = chemically synthesized
  source 1..22: mol_type = other DNA
aaattttggtggtgatatggat

SEQ ID NO: 91144 - DNA, 22 bp, synthetic construct
  misc_feature 1..22: note = chemically synthesized
  source 1..22: mol_type = other DNA
tggtggtgatatggatcaatag

SEQ ID NO: 91145 - DNA, 22 bp, synthetic construct
  misc_feature 1..22: note = chemically synthesized
  source 1..22: mol_type = other DNA
ggtggtgatatggatcaataga

SEQ ID NO: 91146 - DNA, 22 bp, synthetic construct
  misc_feature 1..22: note = chemically synthesized
  source 1..22: mol_type = other DNA
gtggtgatatggatcaatagaa

SEQ ID NO: 91147 - DNA, 22 bp, synthetic construct
  misc_feature 1..22: note = chemically synthesized
  source 1..22: mol_type = other DNA
aaactctgttggtgacactgta

SEQ ID NO: 91148 - DNA, 22 bp, synthetic construct
  misc_feature 1..22: note = chemically synthesized
  source 1..22: mol_type = other DNA
tgttggtgacactgtacaatag

SEQ ID NO: 91149 - DNA, 22 bp, synthetic construct
  misc_feature 1..22: note = chemically synthesized
  source 1..22: mol_type = other DNA
ttggtgacactgtacaatagta

SEQ ID NO: 91150 - DNA, 22 bp, synthetic construct
  misc_feature 1..22: note = chemically synthesized
  source 1..22: mol_type = other DNA
gtgacactgtacaatagtataa

SEQ ID NO: 91151 - DNA, 22 bp, synthetic construct
  misc_feature 1..22: note = chemically synthesized
  source 1..22: mol_type = other DNA
tacaatagtataacccctttgg

SEQ ID NO: 91152 - DNA, 22 bp, synthetic construct
  misc_feature 1..22: note = chemically synthesized
  source 1..22: mol_type = other DNA
tggaaaacctttaatagtatcc

SEQ ID NO: 91153 - DNA, 22 bp, synthetic construct
  misc_feature 1..22: note = chemically synthesized
  source 1..22: mol_type = other DNA
ggaaaacctttaatagtatcca

SEQ ID NO: 91154 - DNA, 22 bp, synthetic construct
  misc_feature 1..22: note = chemically synthesized
  source 1..22: mol_type = other DNA
gaaaacctttaatagtatccac

SEQ ID NO: 91155 - DNA, 22 bp, synthetic construct
  misc_feature 1..22: note = chemically synthesized
  source 1..22: mol_type = other DNA
taatagtatccacaaatgctgg

SEQ ID NO: 91156 - DNA, 22 bp, synthetic construct
  misc_feature 1..22: note = chemically synthesized
  source 1..22: mol_type = other DNA
aatagtatccacaaatgctgga

SEQ ID NO: 91157 - DNA, 22 bp, synthetic construct
  misc_feature 1..22: note = chemically synthesized
  source 1..22: mol_type = other DNA
atagtatccacaaatgctggat

SEQ ID NO: 91158 - DNA, 22 bp, synthetic construct
  misc_feature 1..22: note = chemically synthesized
  source 1..22: mol_type = other DNA
gatgcttgataagtctattacc

SEQ ID NO: 91159 - DNA, 22 bp, synthetic construct
  misc_feature 1..22: note = chemically synthesized
  source 1..22: mol_type = other DNA
gataagtctattacctagcaat

SEQ ID NO: 91160 - DNA, 22 bp, synthetic construct
  misc_feature 1..22: note = chemically synthesized
  source 1..22: mol_type = other DNA
ataagtctattacctagcaatt

SEQ ID NO: 91161 - DNA, 22 bp, synthetic construct
  misc_feature 1..22: note = chemically synthesized
  source 1..22: mol_type = other DNA
ttacctagcaattacattttta

SEQ ID NO: 91162 - DNA, 22 bp, synthetic construct
  misc_feature 1..22: note = chemically synthesized
  source 1..22: mol_type = other DNA
cctagcaattacatttttagat

SEQ ID NO: 91163 - DNA, 22 bp, synthetic construct
  misc_feature 1..22: note = chemically synthesized
  source 1..22: mol_type = other DNA
gcaattacatttttagatattc

SEQ ID NO: 91164 - DNA, 22 bp, synthetic construct
  misc_feature 1..22: note = chemically synthesized
  source 1..22: mol_type = other DNA
catttttagatattcagaaaca

SEQ ID NO: 91165 - DNA, 22 bp, synthetic construct
  misc_feature 1..22: note = chemically synthesized
  source 1..22: mol_type = other DNA
ttagatattcagaaacacatgc

SEQ ID NO: 91166 - DNA, 22 bp, synthetic construct
  misc_feature 1..22: note = chemically synthesized
  source 1..22: mol_type = other DNA
tagatattcagaaacacatgca

SEQ ID NO: 91167 - DNA, 22 bp, synthetic construct
  misc_feature 1..22: note = chemically synthesized
  source 1..22: mol_type = other DNA
agatattcagaaacacatgcat

SEQ ID NO: 91168 - DNA, 22 bp, synthetic construct
  misc_feature 1..22: note = chemically synthesized
  source 1..22: mol_type = other DNA
gatattcagaaacacatgcatg

SEQ ID NO: 91169 - DNA, 22 bp, synthetic construct
  misc_feature 1..22: note = chemically synthesized
  source 1..22: mol_type = other DNA
agaaacacatgcatgtgtgtat

SEQ ID NO: 91170 - DNA, 22 bp, synthetic construct
  misc_feature 1..22: note = chemically synthesized
  source 1..22: mol_type = other DNA
atgacagcaataatcataaaaa

SEQ ID NO: 91171 - DNA, 22 bp, synthetic construct
  misc_feature 1..22: note = chemically synthesized
  source 1..22: mol_type = other DNA
tgacagcaataatcataaaaac

SEQ ID NO: 91172 - DNA, 22 bp, synthetic construct
  misc_feature 1..22: note = chemically synthesized
  source 1..22: mol_type = other DNA
aaaccggtagccacttaaatgc

SEQ ID NO: 91173 - DNA, 22 bp, synthetic construct
  misc_feature 1..22: note = chemically synthesized
  source 1..22: mol_type = other DNA
aaatgcttaccaacagtagaat

SEQ ID NO: 91174 - DNA, 22 bp, synthetic construct
  misc_feature 1..22: note = chemically synthesized
  source 1..22: mol_type = other DNA
aatgcttaccaacagtagaatt

SEQ ID NO: 91175 - DNA, 22 bp, synthetic construct
  misc_feature 1..22: note = chemically synthesized
  source 1..22: mol_type = other DNA
accaacagtagaattgataaat

SEQ ID NO: 91176 - DNA, 22 bp, synthetic construct
  misc_feature 1..22: note = chemically synthesized
  source 1..22: mol_type = other DNA
ccaacagtagaattgataaatt

SEQ ID NO: 91177 - DNA, 22 bp, synthetic construct
  misc_feature 1..22: note = chemically synthesized
  source 1..22: mol_type = other DNA
ataaattacggtatagtcaaag

SEQ ID NO: 91178 - DNA, 22 bp, synthetic construct
  misc_feature 1..22: note = chemically synthesized
  source 1..22: mol_type = other DNA
cggtatagtcaaagaatagaat

SEQ ID NO: 91179 - DNA, 22 bp, synthetic construct
  misc_feature 1..22: note = chemically synthesized
  source 1..22: mol_type = other DNA
cacagaaatgaaaagaatcaac

SEQ ID NO: 91180 - DNA, 22 bp, synthetic construct
  misc_feature 1..22: note = chemically synthesized
  source 1..22: mol_type = other DNA
ctgcttaacacgtagcgataca

SEQ ID NO: 91181 - DNA, 22 bp, synthetic construct
  misc_feature 1..22: note = chemically synthesized
  source 1..22: mol_type = other DNA
cttaacacgtagcgatacaaat

SEQ ID NO: 91182 - DNA, 22 bp, synthetic construct
  misc_feature 1..22: note = chemically synthesized
  source 1..22: mol_type = other DNA
aacacgtagcgatacaaatgca

SEQ ID NO: 91183 - DNA, 22 bp, synthetic construct
  misc_feature 1..22: note = chemically synthesized
  source 1..22: mol_type = other DNA
acacgtagcgatacaaatgcat

SEQ ID NO: 91184 - DNA, 22 bp, synthetic construct
  misc_feature 1..22: note = chemically synthesized
  source 1..22: mol_type = other DNA
tacagcatttggttgattaaaa

SEQ ID NO: 91185 - DNA, 22 bp, synthetic construct
  misc_feature 1..22: note = chemically synthesized
  source 1..22: mol_type = other DNA
acagcatttggttgattaaaag

SEQ ID NO: 91186 - DNA, 22 bp, synthetic construct
  misc_feature 1..22: note = chemically synthesized
  source 1..22: mol_type = other DNA
cagcatttggttgattaaaagt

SEQ ID NO: 91187 - DNA, 22 bp, synthetic construct
  misc_feature 1..22: note = chemically synthesized
  source 1..22: mol_type = other DNA
ggttgattaaaagtaaccagag

SEQ ID NO: 91188 - DNA, 22 bp, synthetic construct
  misc_feature 1..22: note = chemically synthesized
  source 1..22: mol_type = other DNA
gttgattaaaagtaaccagagg

SEQ ID NO: 91189 - DNA, 22 bp, synthetic construct
  misc_feature 1..22: note = chemically synthesized
  source 1..22: mol_type = other DNA
attaaaagtaaccagaggtgag

SEQ ID NO: 91190 - DNA, 22 bp, synthetic construct
  misc_feature 1..22: note = chemically synthesized
  source 1..22: mol_type = other DNA
aaagtaaccagaggtgagttca

SEQ ID NO: 91191 - DNA, 22 bp, synthetic construct
  misc_feature 1..22: note = chemically synthesized
  source 1..22: mol_type = other DNA
aaactatatgactttatttgta

SEQ ID NO: 91192 - DNA, 22 bp, synthetic construct
  misc_feature 1..22: note = chemically synthesized
  source 1..22: mol_type = other DNA
tatgactttatttgtatataga

SEQ ID NO: 91193 - DNA, 22 bp, synthetic construct
  misc_feature 1..22: note = chemically synthesized
  source 1..22: mol_type = other DNA
tatttgtatatagaaagatgga

SEQ ID NO: 91194 - DNA, 22 bp, synthetic construct
  misc_feature 1..22: note = chemically synthesized
  source 1..22: mol_type = other DNA
atttgtatatagaaagatggat

SEQ ID NO: 91195 - DNA, 22 bp, synthetic construct
  misc_feature 1..22: note = chemically synthesized
  source 1..22: mol_type = other DNA
tttgtatatagaaagatggatg

SEQ ID NO: 91196 - DNA, 22 bp, synthetic construct
  misc_feature 1..22: note = chemically synthesized
  source 1..22: mol_type = other DNA
gtatatagaaagatggatgatg

SEQ ID NO: 91197 - DNA, 22 bp, synthetic construct
  misc_feature 1..22: note = chemically synthesized
  source 1..22: mol_type = other DNA
tatatagaaagatggatgatgt

SEQ ID NO: 91198 - DNA, 22 bp, synthetic construct
  misc_feature 1..22: note = chemically synthesized
  source 1..22: mol_type = other DNA
agattctgatcacaaggggaaa

SEQ ID NO: 91199 - DNA, 22 bp, synthetic construct
  misc_feature 1..22: note = chemically synthesized
  source 1..22: mol_type = other DNA
tgatcacaaggggaaatgttat

SEQ ID NO: 91200 - DNA, 22 bp, synthetic construct
  misc_feature 1..22: note = chemically synthesized
  source 1..22: mol_type = other DNA
atcacaaggggaaatgttataa

SEQ ID NO: 91201 - DNA, 22 bp, synthetic construct
  misc_feature 1..22: note = chemically synthesized
  source 1..22: mol_type = other DNA
taaaatagggtagagaggagcc

SEQ ID NO: 91202 - DNA, 22 bp, synthetic construct
  misc_feature 1..22: note = chemically synthesized
  source 1..22: mol_type = other DNA
taaactttgttacaagttattt

SEQ ID NO: 91203 - DNA, 22 bp, synthetic construct
  misc_feature 1..22: note = chemically synthesized
  source 1..22: mol_type = other DNA
aaactttgttacaagttatttt

SEQ ID NO: 91204 - DNA, 22 bp, synthetic construct
  misc_feature 1..22: note = chemically synthesized
  source 1..22: mol_type = other DNA
aactttgttacaagttattttt

SEQ ID NO: 91205 - DNA, 22 bp, synthetic construct
  misc_feature 1..22: note = chemically synthesized
  source 1..22: mol_type = other DNA
tgttacaagttatttttctgta

SEQ ID NO: 91206 - DNA, 22 bp, synthetic construct
  misc_feature 1..22: note = chemically synthesized
  source 1..22: mol_type = other DNA
gttacaagttatttttctgtaa

SEQ ID NO: 91207 - DNA, 22 bp, synthetic construct
  misc_feature 1..22: note = chemically synthesized
  source 1..22: mol_type = other DNA
ttacaagttatttttctgtaac

SEQ ID NO: 91208 - DNA, 22 bp, synthetic construct
  misc_feature 1..22: note = chemically synthesized
  source 1..22: mol_type = other DNA
caagttatttttctgtaacctg

SEQ ID NO: 91209 - DNA, 22 bp, synthetic construct
  misc_feature 1..22: note = chemically synthesized
  source 1..22: mol_type = other DNA
tttttctgtaacctggaagcca

SEQ ID NO: 91210 - DNA, 22 bp, synthetic construct
  misc_feature 1..22: note = chemically synthesized
  source 1..22: mol_type = other DNA
ttctgtaacctggaagccaacg

SEQ ID NO: 91211 - DNA, 22 bp, synthetic construct
  misc_feature 1..22: note = chemically synthesized
  source 1..22: mol_type = other DNA
tctgtaacctggaagccaacga

SEQ ID NO: 91212 - DNA, 22 bp, synthetic construct
  misc_feature 1..22: note = chemically synthesized
  source 1..22: mol_type = other DNA
ctgtaacctggaagccaacgaa

SEQ ID NO: 91213 - DNA, 22 bp, synthetic construct
  misc_feature 1..22: note = chemically synthesized
  source 1..22: mol_type = other DNA
tgtaacctggaagccaacgaaa

SEQ ID NO: 91214 - DNA, 22 bp, synthetic construct
  misc_feature 1..22: note = chemically synthesized
  source 1..22: mol_type = other DNA
taacctggaagccaacgaaaga

SEQ ID NO: 91215 - DNA, 22 bp, synthetic construct
  misc_feature 1..22: note = chemically synthesized
  source 1..22: mol_type = other DNA
gaagccaacgaaagatattgaa

SEQ ID NO: 91216 - DNA, 22 bp, synthetic construct
  misc_feature 1..22: note = chemically synthesized
  source 1..22: mol_type = other DNA
aataattcaagaaaggtggtgg

SEQ ID NO: 91217 - DNA, 22 bp, synthetic construct
  misc_feature 1..22: note = chemically synthesized
  source 1..22: mol_type = other DNA
aagaaaggtggtggcatggttt

SEQ ID NO: 91218 - DNA, 22 bp, synthetic construct
  misc_feature 1..22: note = chemically synthesized
  source 1..22: mol_type = other DNA
gatttgtgtctttaaaagatta

SEQ ID NO: 91219 - DNA, 22 bp, synthetic construct
  misc_feature 1..22: note = chemically synthesized
  source 1..22: mol_type = other DNA
atttgtgtctttaaaagattat

SEQ ID NO: 91220 - DNA, 22 bp, synthetic construct
  misc_feature 1..22: note = chemically synthesized
  source 1..22: mol_type = other DNA
gtgtctttaaaagattattctc

SEQ ID NO: 91221 - DNA, 22 bp, synthetic construct
  misc_feature 1..22: note = chemically synthesized
  source 1..22: mol_type = other DNA
tgtctttaaaagattattctca

SEQ ID NO: 91222 - DNA, 22 bp, synthetic construct
  misc_feature 1..22: note = chemically synthesized
  source 1..22: mol_type = other DNA
taaaagattattctcacttagt

SEQ ID NO: 91223 - DNA, 22 bp, synthetic construct
  misc_feature 1..22: note = chemically synthesized
  source 1..22: mol_type = other DNA
aaaagattattctcacttagtg

SEQ ID NO: 91224 - DNA, 22 bp, synthetic construct
  misc_feature 1..22: note = chemically synthesized
  source 1..22: mol_type = other DNA
aaagattattctcacttagtga

SEQ ID NO: 91225 - DNA, 22 bp, synthetic construct
  misc_feature 1..22: note = chemically synthesized
  source 1..22: mol_type = other DNA
ttctcacttagtgaagaaatgt

SEQ ID NO: 91226 - DNA, 22 bp, synthetic construct
  misc_feature 1..22: note = chemically synthesized
  source 1..22: mol_type = other DNA
tcacttagtgaagaaatgtatt

SEQ ID NO: 91227 - DNA, 22 bp, synthetic construct
  misc_feature 1..22: note = chemically synthesized
  source 1..22: mol_type = other DNA
acttagtgaagaaatgtatttt

SEQ ID NO: 91228 - DNA, 22 bp, synthetic construct
  misc_feature 1..22: note = chemically synthesized
  source 1..22: mol_type = other DNA
agtgaagaaatgtattttagaa

SEQ ID NO: 91229 - DNA, 22 bp, synthetic construct
  misc_feature 1..22: note = chemically synthesized
  source 1..22: mol_type = other DNA
gtgaagaaatgtattttagaag

SEQ ID NO: 91230 - DNA, 22 bp, synthetic construct
  misc_feature 1..22: note = chemically synthesized
  source 1..22: mol_type = other DNA
tagaagtagagaaaatgggaga

SEQ ID NO: 91231 - DNA, 22 bp, synthetic construct
  misc_feature 1..22: note = chemically synthesized
  source 1..22: mol_type = other DNA
agaagtagagaaaatgggagac

SEQ ID NO: 91232 - DNA, 22 bp, synthetic construct
  misc_feature 1..22: note = chemically synthesized
  source 1..22: mol_type = other DNA
gaagtagagaaaatgggagaca

SEQ ID NO: 91233 - DNA, 22 bp, synthetic construct
  misc_feature 1..22: note = chemically synthesized
  source 1..22: mol_type = other DNA
ggcttctgttgcagtagggaag

SEQ ID NO: 91234 - DNA, 22 bp, synthetic construct
  misc_feature 1..22: note = chemically synthesized
  source 1..22: mol_type = other DNA
ctgttgcagtagggaagaaagt

SEQ ID NO: 91235 - DNA, 22 bp, synthetic construct
  misc_feature 1..22: note = chemically synthesized
  source 1..22: mol_type = other DNA
tgttgcagtagggaagaaagtg

SEQ ID NO: 91236 - DNA, 22 bp, synthetic construct
  misc_feature 1..22: note = chemically synthesized
  source 1..22: mol_type = other DNA
ttgcagtagggaagaaagtgac

SEQ ID NO: 91237 - DNA, 22 bp, synthetic construct
  misc_feature 1..22: note = chemically synthesized
  source 1..22: mol_type = other DNA
cagtagggaagaaagtgacaat

SEQ ID NO: 91238 - DNA, 22 bp, synthetic construct
  misc_feature 1..22: note = chemically synthesized
  source 1..22: mol_type = other DNA
ctattatcagacttggaccatg

SEQ ID NO: 91239 - DNA, 22 bp, synthetic construct
  misc_feature 1..22: note = chemically synthesized
  source 1..22: mol_type = other DNA
tattatcagacttggaccatga

SEQ ID NO: 91240 - DNA, 22 bp, synthetic construct
  misc_feature 1..22: note = chemically synthesized
  source 1..22: mol_type = other DNA
ttatcagacttggaccatgacg

SEQ ID NO: 91241 - DNA, 22 bp, synthetic construct
  misc_feature 1..22: note = chemically synthesized
  source 1..22: mol_type = other DNA
tcagacttggaccatgacggtg

SEQ ID NO: 91242 - DNA, 22 bp, synthetic construct
  misc_feature 1..22: note = chemically synthesized
  source 1..22: mol_type = other DNA
ggaccatgacggtgatgtcagt

SEQ ID NO: 91243 - DNA, 22 bp, synthetic construct
  misc_feature 1..22: note = chemically synthesized
  source 1..22: mol_type = other DNA
gaccatgacggtgatgtcagtc

SEQ ID NO: 91244 - DNA, 22 bp, synthetic construct
  misc_feature 1..22: note = chemically synthesized
  source 1..22: mol_type = other DNA
gtgagtttagtggtacgataaa

SEQ ID NO: 91245 - DNA, 22 bp, synthetic construct
  misc_feature 1..22: note = chemically synthesized
  source 1..22: mol_type = other DNA
tgagtttagtggtacgataaaa

SEQ ID NO: 91246 - DNA, 22 bp, synthetic construct
  misc_feature 1..22: note = chemically synthesized
  source 1..22: mol_type = other DNA
agtggtacgataaaatcagaaa

SEQ ID NO: 91247 - DNA, 22 bp, synthetic construct
  misc_feature 1..22: note = chemically synthesized
  source 1..22: mol_type = other DNA
gtggtacgataaaatcagaaat

SEQ ID NO: 91248 - DNA, 22 bp, synthetic construct
  misc_feature 1..22: note = chemically synthesized
  source 1..22: mol_type = other DNA
ggatacattgtattgtatgcac

SEQ ID NO: 91249 - DNA, 22 bp, synthetic construct
  misc_feature 1..22: note = chemically synthesized
  source 1..22: mol_type = other DNA
gatacattgtattgtatgcact

SEQ ID NO: 91250 - DNA, 22 bp, synthetic construct
  misc_feature 1..22: note = chemically synthesized
  source 1..22: mol_type = other DNA
tattgtatgcactcttgtaaaa

SEQ ID NO: 91251 - DNA, 22 bp, synthetic construct
  misc_feature 1..22: note = chemically synthesized
  source 1..22: mol_type = other DNA
tatgcactcttgtaaaatgcaa

SEQ ID NO: 91252 - DNA, 22 bp, synthetic construct
  misc_feature 1..22: note = chemically synthesized
  source 1..22: mol_type = other DNA
ttgtaaaatgcaaaaagatgta

SEQ ID NO: 91253 - DNA, 22 bp, synthetic construct
  misc_feature 1..22: note = chemically synthesized
  source 1..22: mol_type = other DNA
gtaaaatgcaaaaagatgtact

SEQ ID NO: 91254 - DNA, 22 bp, synthetic construct
  misc_feature 1..22: note = chemically synthesized
  source 1..22: mol_type = other DNA
taaaatgcaaaaagatgtactt

SEQ ID NO: 91255 - DNA, 22 bp, synthetic construct
  misc_feature 1..22: note = chemically synthesized
  source 1..22: mol_type = other DNA
agatatgtggatctggagctca

SEQ ID NO: 91256 - DNA, 22 bp, synthetic construct
  misc_feature 1..22: note = chemically synthesized
  source 1..22: mol_type = other DNA
gatatgtggatctggagctcag

SEQ ID NO: 91257 - DNA, 22 bp, synthetic construct
  misc_feature 1..22: note = chemically synthesized
  source 1..22: mol_type = other DNA
gagctcagaaagaatacaacca

SEQ ID NO: 91258 - DNA, 22 bp, synthetic construct
  misc_feature 1..22: note = chemically synthesized
  source 1..22: mol_type = other DNA
agaaagaatacaaccaggtcaa

SEQ ID NO: 91259 - DNA, 22 bp, synthetic construct
  misc_feature 1..22: note = chemically synthesized
  source 1..22: mol_type = other DNA
tgtgaatcactaccactacctg

SEQ ID NO: 91260 - DNA, 22 bp, synthetic construct
  misc_feature 1..22: note = chemically synthesized
  source 1..22: mol_type = other DNA
ccactacctgttaaaaatgaca

SEQ ID NO: 91261 - DNA, 22 bp, synthetic construct
  misc_feature 1..22: note = chemically synthesized
  source 1..22: mol_type = other DNA
cctgttaaaaatgacagatgat

SEQ ID NO: 91262 - DNA, 22 bp, synthetic construct
  misc_feature 1..22: note = chemically synthesized
  source 1..22: mol_type = other DNA
ttaaaaatgacagatgatgtac

SEQ ID NO: 91263 - DNA, 22 bp, synthetic construct
  misc_feature 1..22: note = chemically synthesized
  source 1..22: mol_type = other DNA
aaaatgacagatgatgtacttc

SEQ ID NO: 91264 - DNA, 22 bp, synthetic construct
  misc_feature 1..22: note = chemically synthesized
  source 1..22: mol_type = other DNA
catcaatatctccttaaaatct

SEQ ID NO: 91265 - DNA, 22 bp, synthetic construct
  misc_feature 1..22: note = chemically synthesized
  source 1..22: mol_type = other DNA
atcaatatctccttaaaatctt

SEQ ID NO: 91266 - DNA, 22 bp, synthetic construct
  misc_feature 1..22: note = chemically synthesized
  source 1..22: mol_type = other DNA
cttaaaatcttagaatgtgttt

SEQ ID NO: 91267 - DNA, 22 bp, synthetic construct
  misc_feature 1..22: note = chemically synthesized
  source 1..22: mol_type = other DNA
aaaatcttagaatgtgtttgtg

SEQ ID NO: 91268 - DNA, 22 bp, synthetic construct
  misc_feature 1..22: note = chemically synthesized
  source 1..22: mol_type = other DNA
aaatcttagaatgtgtttgtga

SEQ ID NO: 91269 - DNA, 22 bp, synthetic construct
  misc_feature 1..22: note = chemically synthesized
  source 1..22: mol_type = other DNA
agaatgtgtttgtgagggagga

SEQ ID NO: 91270 - DNA, 22 bp, synthetic construct
  misc_feature 1..22: note = chemically synthesized
  source 1..22: mol_type = other DNA
gaatgtgtttgtgagggaggaa

SEQ ID NO: 91271 - DNA, 22 bp, synthetic construct
  misc_feature 1..22: note = chemically synthesized
  source 1..22: mol_type = other DNA
gtgagggaggaattatgtttcc

SEQ ID NO: 91272 - DNA, 22 bp, synthetic construct
  misc_feature 1..22: note = chemically synthesized
  source 1..22: mol_type = other DNA
tgagggaggaattatgtttcca

SEQ ID NO: 91273 - DNA, 22 bp, synthetic construct
  misc_feature 1..22: note = chemically synthesized
  source 1..22: mol_type = other DNA
tgtttccaattcatatataaga

SEQ ID NO: 91274 - DNA, 22 bp, synthetic construct
  misc_feature 1..22: note = chemically synthesized
  source 1..22: mol_type = other DNA
ccaattcatatataagaaaatt

SEQ ID NO: 91275 - DNA, 22 bp, synthetic construct
  misc_feature 1..22: note = chemically synthesized
  source 1..22: mol_type = other DNA
caattcatatataagaaaattg

SEQ ID NO: 91276 - DNA, 22 bp, synthetic construct
  misc_feature 1..22: note = chemically synthesized
  source 1..22: mol_type = other DNA
atatataagaaaattgattcta

SEQ ID NO: 91277 - DNA, 22 bp, synthetic construct
  misc_feature 1..22: note = chemically synthesized
  source 1..22: mol_type = other DNA
attctaaaaaaaatgttaggta

SEQ ID NO: 91278 - DNA, 22 bp, synthetic construct
  misc_feature 1..22: note = chemically synthesized
  source 1..22: mol_type = other DNA
taaaaaaaatgttaggtaaatt

SEQ ID NO: 91279 - DNA, 22 bp, synthetic construct
  misc_feature 1..22: note = chemically synthesized
  source 1..22: mol_type = other DNA
aaaaaaatgttaggtaaattct

SEQ ID NO: 91280 - DNA, 22 bp, synthetic construct
  misc_feature 1..22: note = chemically synthesized
  source 1..22: mol_type = other DNA
ggtaaattcttaaggccatgag

SEQ ID NO: 91281 - DNA, 22 bp, synthetic construct
  misc_feature 1..22: note = chemically synthesized
  source 1..22: mol_type = other DNA
ttaaggccatgaggactgttat

SEQ ID NO: 91282 - DNA, 22 bp, synthetic construct
  misc_feature 1..22: note = chemically synthesized
  source 1..22: mol_type = other DNA
aaggccatgaggactgttattt

SEQ ID NO: 91283 - DNA, 22 bp, synthetic construct
  misc_feature 1..22: note = chemically synthesized
  source 1..22: mol_type = other DNA
aggccatgaggactgttatttg

SEQ ID NO: 91284 - DNA, 22 bp, synthetic construct
  misc_feature 1..22: note = chemically synthesized
  source 1..22: mol_type = other DNA
ttatttgatctttgtctgttaa

SEQ ID NO: 91285 - DNA, 22 bp, synthetic construct
  misc_feature 1..22: note = chemically synthesized
  source 1..22: mol_type = other DNA
tttgatctttgtctgttaattc

SEQ ID NO: 91286 - DNA, 22 bp, synthetic construct
  misc_feature 1..22: note = chemically synthesized
  source 1..22: mol_type = other DNA
gatctttgtctgttaattccaa

SEQ ID NO: 91287 - DNA, 22 bp, synthetic construct
  misc_feature 1..22: note = chemically synthesized
  source 1..22: mol_type = other DNA
atctttgtctgttaattccaaa

SEQ ID NO: 91288 - DNA, 22 bp, synthetic construct
  misc_feature 1..22: note = chemically synthesized
  source 1..22: mol_type = other DNA
tgtctgttaattccaaagactt

SEQ ID NO: 91289 - DNA, 22 bp, synthetic construct
  misc_feature 1..22: note = chemically synthesized
  source 1..22: mol_type = other DNA
gtctgttaattccaaagacttg

SEQ ID NO: 91290 - DNA, 22 bp, synthetic construct
  misc_feature 1..22: note = chemically synthesized
  source 1..22: mol_type = other DNA
tctgttaattccaaagacttgg

SEQ ID NO: 91291 - DNA, 22 bp, synthetic construct
  misc_feature 1..22: note = chemically synthesized
  source 1..22: mol_type = other DNA
ttaattccaaagacttggcttt

SEQ ID NO: 91292 - DNA, 22 bp, synthetic construct
  misc_feature 1..22: note = chemically synthesized
  source 1..22: mol_type = other DNA
attccaaagacttggcttttca

SEQ ID NO: 91293 - DNA, 22 bp, synthetic construct
  misc_feature 1..22: note = chemically synthesized
  source 1..22: mol_type = other DNA
caaagacttggcttttcacttt

SEQ ID NO: 91294 - DNA, 22 bp, synthetic construct
  misc_feature 1..22: note = chemically synthesized
  source 1..22: mol_type = other DNA
ggcttttcactttaattctgtt

SEQ ID NO: 91295 - DNA, 22 bp, synthetic construct
  misc_feature 1..22: note = chemically synthesized
  source 1..22: mol_type = other DNA
gcttttcactttaattctgttc

SEQ ID NO: 91296 - DNA, 22 bp, synthetic construct
  misc_feature 1..22: note = chemically synthesized
  source 1..22: mol_type = other DNA
ttcactttaattctgttctacc

SEQ ID NO: 91297 - DNA, 22 bp, synthetic construct
  misc_feature 1..22: note = chemically synthesized
  source 1..22: mol_type = other DNA
tcactttaattctgttctacct

SEQ ID NO: 91298 - DNA, 22 bp, synthetic construct
  misc_feature 1..22: note = chemically synthesized
  source 1..22: mol_type = other DNA
cactttaattctgttctacctg

SEQ ID NO: 91299 - DNA, 22 bp, synthetic construct
  misc_feature 1..22: note = chemically synthesized
  source 1..22: mol_type = other DNA
actttaattctgttctacctga

SEQ ID NO: 91300 - DNA, 22 bp, synthetic construct
  misc_feature 1..22: note = chemically synthesized
  source 1..22: mol_type = other DNA
taattctgttctacctgaaatg

SEQ ID NO: 91301 - DNA, 22 bp, synthetic construct
  misc_feature 1..22: note = chemically synthesized
  source 1..22: mol_type = other DNA
aattctgttctacctgaaatga

SEQ ID NO: 91302 - DNA, 22 bp, synthetic construct
  misc_feature 1..22: note = chemically synthesized
  source 1..22: mol_type = other DNA
attctgttctacctgaaatgat

SEQ ID NO: 91303 - DNA, 22 bp, synthetic construct
  misc_feature 1..22: note = chemically synthesized
  source 1..22: mol_type = other DNA
tgttctacctgaaatgatttta

SEQ ID NO: 91304 - DNA, 22 bp, synthetic construct
  misc_feature 1..22: note = chemically synthesized
  source 1..22: mol_type = other DNA
ttctacctgaaatgattttaca

SEQ ID NO: 91305 - DNA, 22 bp, synthetic construct
  misc_feature 1..22: note = chemically synthesized
  source 1..22: mol_type = other DNA
tacctgaaatgattttacacat

SEQ ID NO: 91306 - DNA, 22 bp, synthetic construct
  misc_feature 1..22: note = chemically synthesized
  source 1..22: mol_type = other DNA
cctgaaatgattttacacattg

SEQ ID NO: 91307 - DNA, 22 bp, synthetic construct
  misc_feature 1..22: note = chemically synthesized
  source 1..22: mol_type = other DNA
aaatgattttacacattgggag

SEQ ID NO: 91308 - DNA, 22 bp, synthetic construct
  misc_feature 1..22: note = chemically synthesized
  source 1..22: mol_type = other DNA
tacacattgggagatctggtta

SEQ ID NO: 91309 - DNA, 22 bp, synthetic construct
  misc_feature 1..22: note = chemically synthesized
  source 1..22: mol_type = other DNA
acacattgggagatctggttac

SEQ ID NO: 91310 - DNA, 22 bp, synthetic construct
  misc_feature 1..22: note = chemically synthesized
  source 1..22: mol_type = other DNA
cacattgggagatctggttaca

SEQ ID NO: 91311 - DNA, 22 bp, synthetic construct
  misc_feature 1..22: note = chemically synthesized
  source 1..22: mol_type = other DNA
ggagatctggttacatgtttat

SEQ ID NO: 91312 - DNA, 22 bp, synthetic construct
  misc_feature 1..22: note = chemically synthesized
  source 1..22: mol_type = other DNA
gttacatgtttattctatatgg

SEQ ID NO: 91313 - DNA, 22 bp, synthetic construct
  misc_feature 1..22: note = chemically synthesized
  source 1..22: mol_type = other DNA
catgtttattctatatggattg

SEQ ID NO: 91314 - DNA, 22 bp, synthetic construct
  misc_feature 1..22: note = chemically synthesized
  source 1..22: mol_type = other DNA
attctatatggattgcattgag

SEQ ID NO: 91315 - DNA, 22 bp, synthetic construct
  misc_feature 1..22: note = chemically synthesized
  source 1..22: mol_type = other DNA
ttctatatggattgcattgaga

SEQ ID NO: 91316 - DNA, 22 bp, synthetic construct
  misc_feature 1..22: note = chemically synthesized
  source 1..22: mol_type = other DNA
tatatggattgcattgagagga

SEQ ID NO: 91317 - DNA, 22 bp, synthetic construct
  misc_feature 1..22: note = chemically synthesized
  source 1..22: mol_type = other DNA
tatggattgcattgagaggatt

SEQ ID NO: 91318 - DNA, 22 bp, synthetic construct
  misc_feature 1..22: note = chemically synthesized
  source 1..22: mol_type = other DNA
cattgagaggatttgtataaca

SEQ ID NO: 91319 - DNA, 22 bp, synthetic construct
  misc_feature 1..22: note = chemically synthesized
  source 1..22: mol_type = other DNA
agaggatttgtataacagaata

SEQ ID NO: 91320 - DNA, 22 bp, synthetic construct
  misc_feature 1..22: note = chemically synthesized
  source 1..22: mol_type = other DNA
gtataacagaataaggtctttt

SEQ ID NO: 91321 - DNA, 22 bp, synthetic construct
  misc_feature 1..22: note = chemically synthesized
  source 1..22: mol_type = other DNA
tataacagaataaggtcttttt

SEQ ID NO: 91322 - DNA, 22 bp, synthetic construct
  misc_feature 1..22: note = chemically synthesized
  source 1..22: mol_type = other DNA
tttttcttttctcttctgagat

SEQ ID NO: 91323 - DNA, 22 bp, synthetic construct
  misc_feature 1..22: note = chemically synthesized
  source 1..22: mol_type = other DNA
ttttcttttctcttctgagatg

SEQ ID NO: 91324 - DNA, 22 bp, synthetic construct
  misc_feature 1..22: note = chemically synthesized
  source 1..22: mol_type = other DNA
tttcttttctcttctgagatgg

SEQ ID NO: 91325 - DNA, 22 bp, synthetic construct
  misc_feature 1..22: note = chemically synthesized
  source 1..22: mol_type = other DNA
ttcttttctcttctgagatgga

SEQ ID NO: 91326 - DNA, 22 bp, synthetic construct
  misc_feature 1..22: note = chemically synthesized
  source 1..22: mol_type = other DNA
tcttttctcttctgagatggag

SEQ ID NO: 91327 - DNA, 22 bp, synthetic construct
  misc_feature 1..22: note = chemically synthesized
  source 1..22: mol_type = other DNA
cttttctcttctgagatggagt

SEQ ID NO: 91328 - DNA, 22 bp, synthetic construct
  misc_feature 1..22: note = chemically synthesized
  source 1..22: mol_type = other DNA
ttttctcttctgagatggagtt

SEQ ID NO: 91329 - DNA, 22 bp, synthetic construct
  misc_feature 1..22: note = chemically synthesized
  source 1..22: mol_type = other DNA
ttctcttctgagatggagtttc

SEQ ID NO: 91330 - DNA, 22 bp, synthetic construct
  misc_feature 1..22: note = chemically synthesized
  source 1..22: mol_type = other DNA
tctcttctgagatggagtttca

SEQ ID NO: 91331 - DNA, 22 bp, synthetic construct
  misc_feature 1..22: note = chemically synthesized
  source 1..22: mol_type = other DNA
ctcttctgagatggagtttcat

SEQ ID NO: 91332 - DNA, 22 bp, synthetic construct
  misc_feature 1..22: note = chemically synthesized
  source 1..22: mol_type = other DNA
tcttctgagatggagtttcatc

SEQ ID NO: 91333 - DNA, 22 bp, synthetic construct
  misc_feature 1..22: note = chemically synthesized
  source 1..22: mol_type = other DNA
ttctgagatggagtttcatccc

SEQ ID NO: 91334 - DNA, 22 bp, synthetic construct
  misc_feature 1..22: note = chemically synthesized
  source 1..22: mol_type = other DNA
ctgagatggagtttcatcccta

SEQ ID NO: 91335 - DNA, 22 bp, synthetic construct
  misc_feature 1..22: note = chemically synthesized
  source 1..22: mol_type = other DNA
tgagatggagtttcatccctat

SEQ ID NO: 91336 - DNA, 22 bp, synthetic construct
  misc_feature 1..22: note = chemically synthesized
  source 1..22: mol_type = other DNA
agatggagtttcatccctattg

SEQ ID NO: 91337 - DNA, 22 bp, synthetic construct
  misc_feature 1..22: note = chemically synthesized
  source 1..22: mol_type = other DNA
catccctattgcccaagctaga

SEQ ID NO: 91338 - DNA, 22 bp, synthetic construct
  misc_feature 1..22: note = chemically synthesized
  source 1..22: mol_type = other DNA
atccctattgcccaagctagag

SEQ ID NO: 91339 - DNA, 22 bp, synthetic construct
  misc_feature 1..22: note = chemically synthesized
  source 1..22: mol_type = other DNA
ttgcccaagctagagtgcaatg

SEQ ID NO: 91340 - DNA, 22 bp, synthetic construct
  misc_feature 1..22: note = chemically synthesized
  source 1..22: mol_type = other DNA
cccaagctagagtgcaatggtg

SEQ ID NO: 91341 - DNA, 22 bp, synthetic construct
  misc_feature 1..22: note = chemically synthesized
  source 1..22: mol_type = other DNA
gagtgcaatggtgcaatctagg

SEQ ID NO: 91342 - DNA, 22 bp, synthetic construct
  misc_feature 1..22: note = chemically synthesized
  source 1..22: mol_type = other DNA
ggctcaccgcaacctctgcctc

SEQ ID NO: 91343 - DNA, 22 bp, synthetic construct
  misc_feature 1..22: note = chemically synthesized
  source 1..22: mol_type = other DNA
accgcaacctctgcctcctggg

SEQ ID NO: 91344 - DNA, 22 bp, synthetic construct
  misc_feature 1..22: note = chemically synthesized
  source 1..22: mol_type = other DNA
tgcctcctgggttcaagcaatt

SEQ ID NO: 91345 - DNA, 22 bp, synthetic construct
  misc_feature 1..22: note = chemically synthesized
  source 1..22: mol_type = other DNA
cctcctgggttcaagcaattct

SEQ ID NO: 91346 - DNA, 22 bp, synthetic construct
  misc_feature 1..22: note = chemically synthesized
  source 1..22: mol_type = other DNA
ctgggttcaagcaattctcctg

SEQ ID NO: 91347 - DNA, 22 bp, synthetic construct
  misc_feature 1..22: note = chemically synthesized
  source 1..22: mol_type = other DNA
ggttcaagcaattctcctgcct

SEQ ID NO: 91348 - DNA, 22 bp, synthetic construct
  misc_feature 1..22: note = chemically synthesized
  source 1..22: mol_type = other DNA
aagcaattctcctgcctcagcc

SEQ ID NO: 91349 - DNA, 22 bp, synthetic construct
  misc_feature 1..22: note = chemically synthesized
  source 1..22: mol_type = other DNA
tcctgcctcagccacctgaata

SEQ ID NO: 91350 - DNA, 22 bp, synthetic construct
  misc_feature 1..22: note = chemically synthesized
  source 1..22: mol_type = other DNA
ctgcctcagccacctgaatagc

SEQ ID NO: 91351 - DNA, 22 bp, synthetic construct
  misc_feature 1..22: note = chemically synthesized
  source 1..22: mol_type = other DNA
cctcagccacctgaatagctgg

SEQ ID NO: 91352 - DNA, 22 bp, synthetic construct
  misc_feature 1..22: note = chemically synthesized
  source 1..22: mol_type = other DNA
agccacctgaatagctgggact

SEQ ID NO: 91353 - DNA, 22 bp, synthetic construct
  misc_feature 1..22: note = chemically synthesized
  source 1..22: mol_type = other DNA
aatagctgggactgcaggcatg

SEQ ID NO: 91354 - DNA, 22 bp, synthetic construct
  misc_feature 1..22: note = chemically synthesized
  source 1..22: mol_type = other DNA
ggactgcaggcatgcaccacac

SEQ ID NO: 91355 - DNA, 22 bp, synthetic construct
  misc_feature 1..22: note = chemically synthesized
  source 1..22: mol_type = other DNA
caggcatgcaccacacgcccgg

SEQ ID NO: 91356 - DNA, 22 bp, synthetic construct
  misc_feature 1..22: note = chemically synthesized
  source 1..22: mol_type = other DNA
attttgtatttttagtagagat

SEQ ID NO: 91357 - DNA, 22 bp, synthetic construct
  misc_feature 1..22: note = chemically synthesized
  source 1..22: mol_type = other DNA
tgtatttttagtagagatgggg

SEQ ID NO: 91358 - DNA, 22 bp, synthetic construct
  misc_feature 1..22: note = chemically synthesized
  source 1..22: mol_type = other DNA
gtatttttagtagagatggggt

SEQ ID NO: 91359 - DNA, 22 bp, synthetic construct
  misc_feature 1..22: note = chemically synthesized
  source 1..22: mol_type = other DNA
tatttttagtagagatggggtt

SEQ ID NO: 91360 - DNA, 22 bp, synthetic construct
  misc_feature 1..22: note = chemically synthesized
  source 1..22: mol_type = other DNA
ttagtagagatggggtttcacc

SEQ ID NO: 91361 - DNA, 22 bp, synthetic construct
  misc_feature 1..22: note = chemically synthesized
  source 1..22: mol_type = other DNA
tagtagagatggggtttcacca

SEQ ID NO: 91362 - DNA, 22 bp, synthetic construct
  misc_feature 1..22: note = chemically synthesized
  source 1..22: mol_type = other DNA
agtagagatggggtttcaccat

SEQ ID NO: 91363 - DNA, 22 bp, synthetic construct
  misc_feature 1..22: note = chemically synthesized
  source 1..22: mol_type = other DNA
gtagagatggggtttcaccatg

SEQ ID NO: 91364 - DNA, 22 bp, synthetic construct
  misc_feature 1..22: note = chemically synthesized
  source 1..22: mol_type = other DNA
caccatgttggtcaggctggtc

SEQ ID NO: 91365 - DNA, 22 bp, synthetic construct
  misc_feature 1..22: note = chemically synthesized
  source 1..22: mol_type = other DNA
accatgttggtcaggctggtct

SEQ ID NO: 91366 - DNA, 22 bp, synthetic construct
  misc_feature 1..22: note = chemically synthesized
  source 1..22: mol_type = other DNA
gtcaggctggtcttgaactcct

SEQ ID NO: 91367 - DNA, 22 bp, synthetic construct
  misc_feature 1..22: note = chemically synthesized
  source 1..22: mol_type = other DNA
gtcttgaactcctgacctcaag

SEQ ID NO: 91368 - DNA, 22 bp, synthetic construct
  misc_feature 1..22: note = chemically synthesized
  source 1..22: mol_type = other DNA
gaactcctgacctcaagtgatc

SEQ ID NO: 91369 - DNA, 22 bp, synthetic construct
  misc_feature 1..22: note = chemically synthesized
  source 1..22: mol_type = other DNA
aactcctgacctcaagtgatct

SEQ ID NO: 91370 - DNA, 22 bp, synthetic construct
  misc_feature 1..22: note = chemically synthesized
  source 1..22: mol_type = other DNA
ctgacctcaagtgatctgcctg

SEQ ID NO: 91371 - DNA, 22 bp, synthetic construct
  misc_feature 1..22: note = chemically synthesized
  source 1..22: mol_type = other DNA
acctcaagtgatctgcctgcct

SEQ ID NO: 91372 - DNA, 22 bp, synthetic construct
  misc_feature 1..22: note = chemically synthesized
  source 1..22: mol_type = other DNA
aagtgatctgcctgccttggcc

SEQ ID NO: 91373 - DNA, 22 bp, synthetic construct
  misc_feature 1..22: note = chemically synthesized
  source 1..22: mol_type = other DNA
cctgccttggcctcccaaagtg

SEQ ID NO: 91374 - DNA, 22 bp, synthetic construct
  misc_feature 1..22: note = chemically synthesized
  source 1..22: mol_type = other DNA
ccttggcctcccaaagtgctgg

SEQ ID NO: 91375 - DNA, 22 bp, synthetic construct
  misc_feature 1..22: note = chemically synthesized
  source 1..22: mol_type = other DNA
ggcctcccaaagtgctgggttt

SEQ ID NO: 91376 - DNA, 22 bp, synthetic construct
  misc_feature 1..22: note = chemically synthesized
  source 1..22: mol_type = other DNA
gcctcccaaagtgctgggttta

SEQ ID NO: 91377 - DNA, 22 bp, synthetic construct
  misc_feature 1..22: note = chemically synthesized
  source 1..22: mol_type = other DNA
ccaaagtgctgggtttacaagc

SEQ ID NO: 91378 - DNA, 22 bp, synthetic construct
  misc_feature 1..22: note = chemically synthesized
  source 1..22: mol_type = other DNA
ggtttacaagcctgagccaccg

SEQ ID NO: 91379 - DNA, 22 bp, synthetic construct
  misc_feature 1..22: note = chemically synthesized
  source 1..22: mol_type = other DNA
acaagcctgagccaccgcatcc

SEQ ID NO: 91380 - DNA, 22 bp, synthetic construct
  misc_feature 1..22: note = chemically synthesized
  source 1..22: mol_type = other DNA
caagcctgagccaccgcatcca

SEQ ID NO: 91381 - DNA, 22 bp, synthetic construct
  misc_feature 1..22: note = chemically synthesized
  source 1..22: mol_type = other DNA
agccaccgcatccagccaggat

SEQ ID NO: 91382 - DNA, 22 bp, synthetic construct
  misc_feature 1..22: note = chemically synthesized
  source 1..22: mol_type = other DNA
aaagtggaaagaatagcatcta

SEQ ID NO: 91383 - DNA, 22 bp, synthetic construct
  misc_feature 1..22: note = chemically synthesized
  source 1..22: mol_type = other DNA
ctcttgttcaggaaacaatgag

SEQ ID NO: 91384 - DNA, 22 bp, synthetic construct
  misc_feature 1..22: note = chemically synthesized
  source 1..22: mol_type = other DNA
ttgttcaggaaacaatgaggac

SEQ ID NO: 91385 - DNA, 22 bp, synthetic construct
  misc_feature 1..22: note = chemically synthesized
  source 1..22: mol_type = other DNA
gttcaggaaacaatgaggacct

SEQ ID NO: 91386 - DNA, 22 bp, synthetic construct
  misc_feature 1..22: note = chemically synthesized
  source 1..22: mol_type = other DNA
ttcaggaaacaatgaggacctg

SEQ ID NO: 91387 - DNA, 22 bp, synthetic construct
  misc_feature 1..22: note = chemically synthesized
  source 1..22: mol_type = other DNA
aggaaacaatgaggacctgact

SEQ ID NO: 91388 - DNA, 22 bp, synthetic construct
  misc_feature 1..22: note = chemically synthesized
  source 1..22: mol_type = other DNA
actgggcagtaagagtggtgat

SEQ ID NO: 91389 - DNA, 22 bp, synthetic construct
  misc_feature 1..22: note = chemically synthesized
  source 1..22: mol_type = other DNA
ggcagtaagagtggtgattaat

SEQ ID NO: 91390 - DNA, 22 bp, synthetic construct
  misc_feature 1..22: note = chemically synthesized
  source 1..22: mol_type = other DNA
atagatagggacaaattgaagc

SEQ ID NO: 91391 - DNA, 22 bp, synthetic construct
  misc_feature 1..22: note = chemically synthesized
  source 1..22: mol_type = other DNA
aagcagaatcgaactgttgatt

SEQ ID NO: 91392 - DNA, 22 bp, synthetic construct
  misc_feature 1..22: note = chemically synthesized
  source 1..22: mol_type = other DNA
ttgattagaggtagggaaatga

SEQ ID NO: 91393 - DNA, 22 bp, synthetic construct
  misc_feature 1..22: note = chemically synthesized
  source 1..22: mol_type = other DNA
attagaggtagggaaatgattt

SEQ ID NO: 91394 - DNA, 22 bp, synthetic construct
  misc_feature 1..22: note = chemically synthesized
  source 1..22: mol_type = other DNA
gaggtagggaaatgattttaat

SEQ ID NO: 91395 - DNA, 22 bp, synthetic construct
  misc_feature 1..22: note = chemically synthesized
  source 1..22: mol_type = other DNA
taatctgtgaccttggtgaatg

SEQ ID NO: 91396 - DNA, 22 bp, synthetic construct
  misc_feature 1..22: note = chemically synthesized
  source 1..22: mol_type = other DNA
aatctgtgaccttggtgaatgg

SEQ ID NO: 91397 - DNA, 22 bp, synthetic construct
  misc_feature 1..22: note = chemically synthesized
  source 1..22: mol_type = other DNA
atctgtgaccttggtgaatggg

SEQ ID NO: 91398 - DNA, 22 bp, synthetic construct
  misc_feature 1..22: note = chemically synthesized
  source 1..22: mol_type = other DNA
tgaccttggtgaatgggcaagt

SEQ ID NO: 91399 - DNA, 22 bp, synthetic construct
  misc_feature 1..22: note = chemically synthesized
  source 1..22: mol_type = other DNA
ggtgaatgggcaagtagctatc

SEQ ID NO: 91400 - DNA, 22 bp, synthetic construct
  misc_feature 1..22: note = chemically synthesized
  source 1..22: mol_type = other DNA
gtgaatgggcaagtagctatct

SEQ ID NO: 91401 - DNA, 22 bp, synthetic construct
  misc_feature 1..22: note = chemically synthesized
  source 1..22: mol_type = other DNA
tctaatgactaaaatggaaaac

SEQ ID NO: 91402 - DNA, 22 bp, synthetic construct
  misc_feature 1..22: note = chemically synthesized
  source 1..22: mol_type = other DNA
atgactaaaatggaaaacactg

SEQ ID NO: 91403 - DNA, 22 bp, synthetic construct
  misc_feature 1..22: note = chemically synthesized
  source 1..22: mol_type = other DNA
aaatggaaaacactggaagaga

SEQ ID NO: 91404 - DNA, 22 bp, synthetic construct
  misc_feature 1..22: note = chemically synthesized
  source 1..22: mol_type = other DNA
gaagagaaacagttttagtata

SEQ ID NO: 91405 - DNA, 22 bp, synthetic construct
  misc_feature 1..22: note = chemically synthesized
  source 1..22: mol_type = other DNA
tagtataacaagtgaaataccc

SEQ ID NO: 91406 - DNA, 22 bp, synthetic construct
  misc_feature 1..22: note = chemically synthesized
  source 1..22: mol_type = other DNA
agtataacaagtgaaataccca

SEQ ID NO: 91407 - DNA, 22 bp, synthetic construct
  misc_feature 1..22: note = chemically synthesized
  source 1..22: mol_type = other DNA
gtataacaagtgaaatacccat

SEQ ID NO: 91408 - DNA, 22 bp, synthetic construct
  misc_feature 1..22: note = chemically synthesized
  source 1..22: mol_type = other DNA
agtctgaggtgcctataggaca

SEQ ID NO: 91409 - DNA, 22 bp, synthetic construct
  misc_feature 1..22: note = chemically synthesized
  source 1..22: mol_type = other DNA
aggtgcctataggacatctata

SEQ ID NO: 91410 - DNA, 22 bp, synthetic construct
  misc_feature 1..22: note = chemically synthesized
  source 1..22: mol_type = other DNA
taggacatctatataaataagc

SEQ ID NO: 91411 - DNA, 22 bp, synthetic construct
  misc_feature 1..22: note = chemically synthesized
  source 1..22: mol_type = other DNA
tataaataagcccagtacattg

SEQ ID NO: 91412 - DNA, 22 bp, synthetic construct
  misc_feature 1..22: note = chemically synthesized
  source 1..22: mol_type = other DNA
tttgatatatgggtttggcact

SEQ ID NO: 91413 - DNA, 22 bp, synthetic construct
  misc_feature 1..22: note = chemically synthesized
  source 1..22: mol_type = other DNA
gatatatgggtttggcactgag

SEQ ID NO: 91414 - DNA, 22 bp, synthetic construct
  misc_feature 1..22: note = chemically synthesized
  source 1..22: mol_type = other DNA
atatatgggtttggcactgagg

SEQ ID NO: 91415 - DNA, 22 bp, synthetic construct
  misc_feature 1..22: note = chemically synthesized
  source 1..22: mol_type = other DNA
ggcactgaggttggaggtcaga

SEQ ID NO: 91416 - DNA, 22 bp, synthetic construct
  misc_feature 1..22: note = chemically synthesized
  source 1..22: mol_type = other DNA
gcactgaggttggaggtcagag

SEQ ID NO: 91417 - DNA, 22 bp, synthetic construct
  misc_feature 1..22: note = chemically synthesized
  source 1..22: mol_type = other DNA
aggttggaggtcagaggttaga

SEQ ID NO: 91418 - DNA, 22 bp, synthetic construct
  misc_feature 1..22: note = chemically synthesized
  source 1..22: mol_type = other DNA
gaggtcagaggttagaaatcag

SEQ ID NO: 91419 - DNA, 22 bp, synthetic construct
  misc_feature 1..22: note = chemically synthesized
  source 1..22: mol_type = other DNA
gaaatcagagttgggaattggg

SEQ ID NO: 91420 - DNA, 22 bp, synthetic construct
  misc_feature 1..22: note = chemically synthesized
  source 1..22: mol_type = other DNA
ggaattgggattatacaggctg

SEQ ID NO: 91421 - DNA, 22 bp, synthetic construct
  misc_feature 1..22: note = chemically synthesized
  source 1..22: mol_type = other DNA
ggattatacaggctgtatttaa

SEQ ID NO: 91422 - DNA, 22 bp, synthetic construct
  misc_feature 1..22: note = chemically synthesized
  source 1..22: mol_type = other DNA
tacaggctgtatttaagagttt

SEQ ID NO: 91423 - DNA, 22 bp, synthetic construct
  misc_feature 1..22: note = chemically synthesized
  source 1..22: mol_type = other DNA
tatttaagagtttagatataac

SEQ ID NO: 91424 - DNA, 22 bp, synthetic construct
  misc_feature 1..22: note = chemically synthesized
  source 1..22: mol_type = other DNA
aagagtttagatataactgtga

SEQ ID NO: 91425 - DNA, 22 bp, synthetic construct
  misc_feature 1..22: note = chemically synthesized
  source 1..22: mol_type = other DNA
agagtttagatataactgtgaa

SEQ ID NO: 91426 - DNA, 22 bp, synthetic construct
  misc_feature 1..22: note = chemically synthesized
  source 1..22: mol_type = other DNA
agatataactgtgaatccaaga

SEQ ID NO: 91427 - DNA, 22 bp, synthetic construct
  misc_feature 1..22: note = chemically synthesized
  source 1..22: mol_type = other DNA
gatataactgtgaatccaagag

SEQ ID NO: 91428 - DNA, 22 bp, synthetic construct
  misc_feature 1..22: note = chemically synthesized
  source 1..22: mol_type = other DNA
tgaatccaagagtgtgatgaat

SEQ ID NO: 91429 - DNA, 22 bp, synthetic construct
  misc_feature 1..22: note = chemically synthesized
  source 1..22: mol_type = other DNA
aatgaaggacctttaatgaaca

SEQ ID NO: 91430 - DNA, 22 bp, synthetic construct
  misc_feature 1..22: note = chemically synthesized
  source 1..22: mol_type = other DNA
taatgaacaccaacatttaatg

SEQ ID NO: 91431 - DNA, 22 bp, synthetic construct
  misc_feature 1..22: note = chemically synthesized
  source 1..22: mol_type = other DNA
aatgaacaccaacatttaatgt

SEQ ID NO: 91432 - DNA, 22 bp, synthetic construct
  misc_feature 1..22: note = chemically synthesized
  source 1..22: mol_type = other DNA
atgaacaccaacatttaatgtg

SEQ ID NO: 91433 - DNA, 22 bp, synthetic construct
  misc_feature 1..22: note = chemically synthesized
  source 1..22: mol_type = other DNA
aatgtgaaatctcaaggaagta

SEQ ID NO: 91434 - DNA, 22 bp, synthetic construct
  misc_feature 1..22: note = chemically synthesized
  source 1..22: mol_type = other DNA
atgtgaaatctcaaggaagtat

SEQ ID NO: 91435 - DNA, 22 bp, synthetic construct
  misc_feature 1..22: note = chemically synthesized
  source 1..22: mol_type = other DNA
aaggaagtatgaagtaagacat

SEQ ID NO: 91436 - DNA, 22 bp, synthetic construct
  misc_feature 1..22: note = chemically synthesized
  source 1..22: mol_type = other DNA
tagaactcagtatcgattttaa

SEQ ID NO: 91437 - DNA, 22 bp, synthetic construct
  misc_feature 1..22: note = chemically synthesized
  source 1..22: mol_type = other DNA
agaactcagtatcgattttaat

SEQ ID NO: 91438 - DNA, 22 bp, synthetic construct
  misc_feature 1..22: note = chemically synthesized
  source 1..22: mol_type = other DNA
gaactcagtatcgattttaatt

SEQ ID NO: 91439 - DNA, 22 bp, synthetic construct
  misc_feature 1..22: note = chemically synthesized
  source 1..22: mol_type = other DNA
agtatcgattttaattagtgta

SEQ ID NO: 91440 - DNA, 22 bp, synthetic construct
  misc_feature 1..22: note = chemically synthesized
  source 1..22: mol_type = other DNA
taattagtgtaatgccaatgtg

SEQ ID NO: 91441 - DNA, 22 bp, synthetic construct
  misc_feature 1..22: note = chemically synthesized
  source 1..22: mol_type = other DNA
aattagtgtaatgccaatgtgg

SEQ ID NO: 91442 - DNA, 22 bp, synthetic construct
  misc_feature 1..22: note = chemically synthesized
  source 1..22: mol_type = other DNA
attagtgtaatgccaatgtggg

SEQ ID NO: 91443 - DNA, 22 bp, synthetic construct
  misc_feature 1..22: note = chemically synthesized
  source 1..22: mol_type = other DNA
gtgtaatgccaatgtgggttag

SEQ ID NO: 91444 - DNA, 22 bp, synthetic construct
  misc_feature 1..22: note = chemically synthesized
  source 1..22: mol_type = other DNA
gaatggaagtcaacttgctgtt

SEQ ID NO: 91445 - DNA, 22 bp, synthetic construct
  misc_feature 1..22: note = chemically synthesized
  source 1..22: mol_type = other DNA
gctgttggtttcagagcaggta

SEQ ID NO: 91446 - DNA, 22 bp, synthetic construct
  misc_feature 1..22: note = chemically synthesized
  source 1..22: mol_type = other DNA
ctgttggtttcagagcaggtag

SEQ ID NO: 91447 - DNA, 22 bp, synthetic construct
  misc_feature 1..22: note = chemically synthesized
  source 1..22: mol_type = other DNA
ttggtttcagagcaggtaggag

SEQ ID NO: 91448 - DNA, 22 bp, synthetic construct
  misc_feature 1..22: note = chemically synthesized
  source 1..22: mol_type = other DNA
gtttcagagcaggtaggagata

SEQ ID NO: 91449 - DNA, 22 bp, synthetic construct
  misc_feature 1..22: note = chemically synthesized
  source 1..22: mol_type = other DNA
cagagcaggtaggagataaggt

SEQ ID NO: 91450 - DNA, 22 bp, synthetic construct
  misc_feature 1..22: note = chemically synthesized
  source 1..22: mol_type = other DNA
agagcaggtaggagataaggtt

SEQ ID NO: 91451 - DNA, 22 bp, synthetic construct
  misc_feature 1..22: note = chemically synthesized
  source 1..22: mol_type = other DNA
tagattttgacacagtgaaaag

SEQ ID NO: 91452 - DNA, 22 bp, synthetic construct
  misc_feature 1..22: note = chemically synthesized
  source 1..22: mol_type = other DNA
gattttgacacagtgaaaagct

SEQ ID NO: 91453 - DNA, 22 bp, synthetic construct
  misc_feature 1..22: note = chemically synthesized
  source 1..22: mol_type = other DNA
tgacacagtgaaaagctgaaac

SEQ ID NO: 91454 - DNA, 22 bp, synthetic construct
  misc_feature 1..22: note = chemically synthesized
  source 1..22: mol_type = other DNA
gacacagtgaaaagctgaaaca

SEQ ID NO: 91455 - DNA, 22 bp, synthetic construct
  misc_feature 1..22: note = chemically synthesized
  source 1..22: mol_type = other DNA
acacagtgaaaagctgaaacaa

SEQ ID NO: 91456 - DNA, 22 bp, synthetic construct
  misc_feature 1..22: note = chemically synthesized
  source 1..22: mol_type = other DNA
aaacaaaaaggaaaaggtaggg

SEQ ID NO: 91457 - DNA, 22 bp, synthetic construct
  misc_feature 1..22: note = chemically synthesized
  source 1..22: mol_type = other DNA
aggactctagggtcagagaaat

SEQ ID NO: 91458 - DNA, 22 bp, synthetic construct
  misc_feature 1..22: note = chemically synthesized
  source 1..22: mol_type = other DNA
tagggtcagagaaatatgggtt

SEQ ID NO: 91459 - DNA, 22 bp, synthetic construct
  misc_feature 1..22: note = chemically synthesized
  source 1..22: mol_type = other DNA
gggtcagagaaatatgggttat

SEQ ID NO: 91460 - DNA, 22 bp, synthetic construct
  misc_feature 1..22: note = chemically synthesized
  source 1..22: mol_type = other DNA
tatccttctacaaaattcacat

SEQ ID NO: 91461 - DNA, 22 bp, synthetic construct
  misc_feature 1..22: note = chemically synthesized
  source 1..22: mol_type = other DNA
ctacaaaattcacattcttggc

SEQ ID NO: 91462 - DNA, 22 bp, synthetic construct
  misc_feature 1..22: note = chemically synthesized
  source 1..22: mol_type = other DNA
tacaaaattcacattcttggct

SEQ ID NO: 91463 - DNA, 22 bp, synthetic construct
  misc_feature 1..22: note = chemically synthesized
  source 1..22: mol_type = other DNA
caaaattcacattcttggctgg

SEQ ID NO: 91464 - DNA, 22 bp, synthetic construct
  misc_feature 1..22: note = chemically synthesized
  source 1..22: mol_type = other DNA
acattcttggctgggtgtggtg

SEQ ID NO: 91465 - DNA, 22 bp, synthetic construct
  misc_feature 1..22: note = chemically synthesized
  source 1..22: mol_type = other DNA
ttggctgggtgtggtggctcac

SEQ ID NO: 91466 - DNA, 22 bp, synthetic construct
  misc_feature 1..22: note = chemically synthesized
  source 1..22: mol_type = other DNA
ggctgggtgtggtggctcacgc

SEQ ID NO: 91467 - DNA, 22 bp, synthetic construct
  misc_feature 1..22: note = chemically synthesized
  source 1..22: mol_type = other DNA
gctgggtgtggtggctcacgcc

SEQ ID NO: 91468 - DNA, 22 bp, synthetic construct
  misc_feature 1..22: note = chemically synthesized
  source 1..22: mol_type = other DNA
ggtgtggtggctcacgcctgtg

SEQ ID NO: 91469 - DNA, 22 bp, synthetic construct
  misc_feature 1..22: note = chemically synthesized
  source 1..22: mol_type = other DNA
acgcctgtgatcccagcacttt

SEQ ID NO: 91470 - DNA, 22 bp, synthetic construct
  misc_feature 1..22: note = chemically synthesized
  source 1..22: mol_type = other DNA
tgatcccagcactttcagaggc

SEQ ID NO: 91471 - DNA, 22 bp, synthetic construct
  misc_feature 1..22: note = chemically synthesized
  source 1..22: mol_type = other DNA
tcagaggccgaggagggtggat

SEQ ID NO: 91472 - DNA, 22 bp, synthetic construct
  misc_feature 1..22: note = chemically synthesized
  source 1..22: mol_type = other DNA
cagaggccgaggagggtggatc

SEQ ID NO: 91473 - DNA, 22 bp, synthetic construct
  misc_feature 1..22: note = chemically synthesized
  source 1..22: mol_type = other DNA
agaggccgaggagggtggatca

SEQ ID NO: 91474 - DNA, 22 bp, synthetic construct
  misc_feature 1..22: note = chemically synthesized
  source 1..22: mol_type = other DNA
atgttaggagttcgagatcagc

SEQ ID NO: 91475 - DNA, 22 bp, synthetic construct
  misc_feature 1..22: note = chemically synthesized
  source 1..22: mol_type = other DNA
ggagttcgagatcagcctgacc

SEQ ID NO: 91476 - DNA, 22 bp, synthetic construct
  misc_feature 1..22: note = chemically synthesized
  source 1..22: mol_type = other DNA
gagatcagcctgaccaacatgg

SEQ ID NO: 91477 - DNA, 22 bp, synthetic construct
  misc_feature 1..22: note = chemically synthesized
  source 1..22: mol_type = other DNA
accaacatggtgaaacccccta

SEQ ID NO: 91478 - DNA, 22 bp, synthetic construct
  misc_feature 1..22: note = chemically synthesized
  source 1..22: mol_type = other DNA
tctactaaaaatagaaaattag

SEQ ID NO: 91479 - DNA, 22 bp, synthetic construct
  misc_feature 1..22: note = chemically synthesized
  source 1..22: mol_type = other DNA
ctaaaaatagaaaattagccag

SEQ ID NO: 91480 - DNA, 22 bp, synthetic construct
  misc_feature 1..22: note = chemically synthesized
  source 1..22: mol_type = other DNA
aaaatagaaaattagccaggca

SEQ ID NO: 91481 - DNA, 22 bp, synthetic construct
  misc_feature 1..22: note = chemically synthesized
  source 1..22: mol_type = other DNA
gccaggcatggtggtggcacat

SEQ ID NO: 91482 - DNA, 22 bp, synthetic construct
  misc_feature 1..22: note = chemically synthesized
  source 1..22: mol_type = other DNA
tagtgccagctacttgggaggc

SEQ ID NO: 91483 - DNA, 22 bp, synthetic construct
  misc_feature 1..22: note = chemically synthesized
  source 1..22: mol_type = other DNA
cttgggaggctgaggcaggaga

SEQ ID NO: 91484 - DNA, 22 bp, synthetic construct
  misc_feature 1..22: note = chemically synthesized
  source 1..22: mol_type = other DNA
gggaggctgaggcaggagaatc

SEQ ID NO: 91485 - DNA, 22 bp, synthetic construct
  misc_feature 1..22: note = chemically synthesized
  source 1..22: mol_type = other DNA
ggaggctgaggcaggagaatcg

SEQ ID NO: 91486 - DNA, 22 bp, synthetic construct
  misc_feature 1..22: note = chemically synthesized
  source 1..22: mol_type = other DNA
aggcaggagaatcgcttgaacc

SEQ ID NO: 91487 - DNA, 22 bp, synthetic construct
  misc_feature 1..22: note = chemically synthesized
  source 1..22: mol_type = other DNA
gaacctgggaggcagatgttgc

SEQ ID NO: 91488 - DNA, 22 bp, synthetic construct
  misc_feature 1..22: note = chemically synthesized
  source 1..22: mol_type = other DNA
aacctgggaggcagatgttgca

SEQ ID NO: 91489 - DNA, 22 bp, synthetic construct
  misc_feature 1..22: note = chemically synthesized
  source 1..22: mol_type = other DNA
ggaggcagatgttgcagtgagc

SEQ ID NO: 91490 - DNA, 22 bp, synthetic construct
  misc_feature 1..22: note = chemically synthesized
  source 1..22: mol_type = other DNA
cagtgagcctggatcatgccat

SEQ ID NO: 91491 - DNA, 22 bp, synthetic construct
  misc_feature 1..22: note = chemically synthesized
  source 1..22: mol_type = other DNA
gatcatgccattgcactccagc

SEQ ID NO: 91492 - DNA, 22 bp, synthetic construct
  misc_feature 1..22: note = chemically synthesized
  source 1..22: mol_type = other DNA
cactccagcctgggcaaccata

SEQ ID NO: 91493 - DNA, 22 bp, synthetic construct
  misc_feature 1..22: note = chemically synthesized
  source 1..22: mol_type = other DNA
cagcctgggcaaccatagcaat

SEQ ID NO: 91494 - DNA, 22 bp, synthetic construct
  misc_feature 1..22: note = chemically synthesized
  source 1..22: mol_type = other DNA
ggcaaccatagcaatgctctat

SEQ ID NO: 91495 - DNA, 22 bp, synthetic construct
  misc_feature 1..22: note = chemically synthesized
  source 1..22: mol_type = other DNA
tatctcagaaaaaaaaaaaaaa

SEQ ID NO: 91496 - DNA, 22 bp, synthetic construct
  misc_feature 1..22: note = chemically synthesized
  source 1..22: mol_type = other DNA
tctcagaaaaaaaaaaaaaaag

SEQ ID NO: 91497 - DNA, 22 bp, synthetic construct
  misc_feature 1..22: note = chemically synthesized
  source 1..22: mol_type = other DNA
agaaaaaaaaaaaaaaagttct

SEQ ID NO: 91498 - DNA, 22 bp, synthetic construct
  misc_feature 1..22: note = chemically synthesized
  source 1..22: mol_type = other DNA
ttgctaacctgaaaaaataaat

SEQ ID NO: 91499 - DNA, 22 bp, synthetic construct
  misc_feature 1..22: note = chemically synthesized
  source 1..22: mol_type = other DNA
gctaacctgaaaaaataaatta

SEQ ID NO: 91500 - DNA, 22 bp, synthetic construct
  misc_feature 1..22: note = chemically synthesized
  source 1..22: mol_type = other DNA
ctaacctgaaaaaataaattat

SEQ ID NO: 91501 - DNA, 22 bp, synthetic construct
  misc_feature 1..22: note = chemically synthesized
  source 1..22: mol_type = other DNA
acctgaaaaaataaattatttg

SEQ ID NO: 91502 - DNA, 22 bp, synthetic construct
  misc_feature 1..22: note = chemically synthesized
  source 1..22: mol_type = other DNA
aaaaaataaattatttgagctt

SEQ ID NO: 91503 - DNA, 22 bp, synthetic construct
  misc_feature 1..22: note = chemically synthesized
  source 1..22: mol_type = other DNA
tttgagctttgtacctaattca

SEQ ID NO: 91504 - DNA, 22 bp, synthetic construct
  misc_feature 1..22: note = chemically synthesized
  source 1..22: mol_type = other DNA
gagctttgtacctaattcataa

SEQ ID NO: 91505 - DNA, 22 bp, synthetic construct
  misc_feature 1..22: note = chemically synthesized
  source 1..22: mol_type = other DNA
agctttgtacctaattcataat

SEQ ID NO: 91506 - DNA, 22 bp, synthetic construct
  misc_feature 1..22: note = chemically synthesized
  source 1..22: mol_type = other DNA
tgtacctaattcataattttca

SEQ ID NO: 91507 - DNA, 22 bp, synthetic construct
  misc_feature 1..22: note = chemically synthesized
  source 1..22: mol_type = other DNA
gtacctaattcataattttcag

SEQ ID NO: 91508 - DNA, 22 bp, synthetic construct
  misc_feature 1..22: note = chemically synthesized
  source 1..22: mol_type = other DNA
tacctaattcataattttcaga

SEQ ID NO: 91509 - DNA, 22 bp, synthetic construct
  misc_feature 1..22: note = chemically synthesized
  source 1..22: mol_type = other DNA
attcataattttcagataatga

SEQ ID NO: 91510 - DNA, 22 bp, synthetic construct
  misc_feature 1..22: note = chemically synthesized
  source 1..22: mol_type = other DNA
ataattttcagataatgaatat

SEQ ID NO: 91511 - DNA, 22 bp, synthetic construct
  misc_feature 1..22: note = chemically synthesized
  source 1..22: mol_type = other DNA
tcagataatgaatattgagatg

SEQ ID NO: 91512 - DNA, 22 bp, synthetic construct
  misc_feature 1..22: note = chemically synthesized
  source 1..22: mol_type = other DNA
cagataatgaatattgagatga

SEQ ID NO: 91513 - DNA, 22 bp, synthetic construct
  misc_feature 1..22: note = chemically synthesized
  source 1..22: mol_type = other DNA
agataatgaatattgagatgat

SEQ ID NO: 91514 - DNA, 22 bp, synthetic construct
  misc_feature 1..22: note = chemically synthesized
  source 1..22: mol_type = other DNA
agatgatatatgcacagaacaa

SEQ ID NO: 91515 - DNA, 22 bp, synthetic construct
  misc_feature 1..22: note = chemically synthesized
  source 1..22: mol_type = other DNA
gagacacattctaagtgtgaca

SEQ ID NO: 91516 - DNA, 22 bp, synthetic construct
  misc_feature 1..22: note = chemically synthesized
  source 1..22: mol_type = other DNA
taagtgtgacattcttaaatgc

SEQ ID NO: 91517 - DNA, 22 bp, synthetic construct
  misc_feature 1..22: note = chemically synthesized
  source 1..22: mol_type = other DNA
agtgtgacattcttaaatgcca

SEQ ID NO: 91518 - DNA, 22 bp, synthetic construct
  misc_feature 1..22: note = chemically synthesized
  source 1..22: mol_type = other DNA
ttaaatgccagtgctctccaca

SEQ ID NO: 91519 - DNA, 22 bp, synthetic construct
  misc_feature 1..22: note = chemically synthesized
  source 1..22: mol_type = other DNA
aaatgccagtgctctccacaat

SEQ ID NO: 91520 - DNA, 22 bp, synthetic construct
  misc_feature 1..22: note = chemically synthesized
  source 1..22: mol_type = other DNA
aatgccagtgctctccacaatt

SEQ ID NO: 91521 - DNA, 22 bp, synthetic construct
  misc_feature 1..22: note = chemically synthesized
  source 1..22: mol_type = other DNA
tccacaattctaatctcagttc

SEQ ID NO: 91522 - DNA, 22 bp, synthetic construct
  misc_feature 1..22: note = chemically synthesized
  source 1..22: mol_type = other DNA
cacaattctaatctcagttcac

SEQ ID NO: 91523 - DNA, 22 bp, synthetic construct
  misc_feature 1..22: note = chemically synthesized
  source 1..22: mol_type = other DNA
taatctcagttcactgctgttt

SEQ ID NO: 91524 - DNA, 22 bp, synthetic construct
  misc_feature 1..22: note = chemically synthesized
  source 1..22: mol_type = other DNA
atctcagttcactgctgtttga

SEQ ID NO: 91525 - DNA, 22 bp, synthetic construct
  misc_feature 1..22: note = chemically synthesized
  source 1..22: mol_type = other DNA
agttcactgctgtttgaattct

SEQ ID NO: 91526 - DNA, 22 bp, synthetic construct
  misc_feature 1..22: note = chemically synthesized
  source 1..22: mol_type = other DNA
actgctgtttgaattctgtgtt

SEQ ID NO: 91527 - DNA, 22 bp, synthetic construct
  misc_feature 1..22: note = chemically synthesized
  source 1..22: mol_type = other DNA
ctgtttgaattctgtgttttca

SEQ ID NO: 91528 - DNA, 22 bp, synthetic construct
  misc_feature 1..22: note = chemically synthesized
  source 1..22: mol_type = other DNA
tttgaattctgtgttttcatat

SEQ ID NO: 91529 - DNA, 22 bp, synthetic construct
  misc_feature 1..22: note = chemically synthesized
  source 1..22: mol_type = other DNA
gaattctgtgttttcatattat

SEQ ID NO: 91530 - DNA, 22 bp, synthetic construct
  misc_feature 1..22: note = chemically synthesized
  source 1..22: mol_type = other DNA
aattctgtgttttcatattatc

SEQ ID NO: 91531 - DNA, 22 bp, synthetic construct
  misc_feature 1..22: note = chemically synthesized
  source 1..22: mol_type = other DNA
tgtgttttcatattatcttatc

SEQ ID NO: 91532 - DNA, 22 bp, synthetic construct
  misc_feature 1..22: note = chemically synthesized
  source 1..22: mol_type = other DNA
tgttttcatattatcttatcaa

SEQ ID NO: 91533 - DNA, 22 bp, synthetic construct
  misc_feature 1..22: note = chemically synthesized
  source 1..22: mol_type = other DNA
tcatattatcttatcaatacat

SEQ ID NO: 91534 - DNA, 22 bp, synthetic construct
  misc_feature 1..22: note = chemically synthesized
  source 1..22: mol_type = other DNA
catattatcttatcaatacatt

SEQ ID NO: 91535 - DNA, 22 bp, synthetic construct
  misc_feature 1..22: note = chemically synthesized
  source 1..22: mol_type = other DNA
atattatcttatcaatacatta

SEQ ID NO: 91536 - DNA, 22 bp, synthetic construct
  misc_feature 1..22: note = chemically synthesized
  source 1..22: mol_type = other DNA
tcttatcaatacattaatcatt

SEQ ID NO: 91537 - DNA, 22 bp, synthetic construct
  misc_feature 1..22: note = chemically synthesized
  source 1..22: mol_type = other DNA
atcaatacattaatcattgcaa

SEQ ID NO: 91538 - DNA, 22 bp, synthetic construct
  misc_feature 1..22: note = chemically synthesized
  source 1..22: mol_type = other DNA
tcaatacattaatcattgcaat

SEQ ID NO: 91539 - DNA, 22 bp, synthetic construct
  misc_feature 1..22: note = chemically synthesized
  source 1..22: mol_type = other DNA
atcattgcaataatcactgcac

SEQ ID NO: 91540 - DNA, 22 bp, synthetic construct
  misc_feature 1..22: note = chemically synthesized
  source 1..22: mol_type = other DNA
caataatcactgcacactgtaa

SEQ ID NO: 91541 - DNA, 22 bp, synthetic construct
  misc_feature 1..22: note = chemically synthesized
  source 1..22: mol_type = other DNA
cacactgtaattattcatttac

SEQ ID NO: 91542 - DNA, 22 bp, synthetic construct
  misc_feature 1..22: note = chemically synthesized
  source 1..22: mol_type = other DNA
taattattcatttactggacac

SEQ ID NO: 91543 - DNA, 22 bp, synthetic construct
  misc_feature 1..22: note = chemically synthesized
  source 1..22: mol_type = other DNA
ttcatttactggacacatccta

SEQ ID NO: 91544 - DNA, 22 bp, synthetic construct
  misc_feature 1..22: note = chemically synthesized
  source 1..22: mol_type = other DNA
atttactggacacatcctagtt

SEQ ID NO: 91545 - DNA, 22 bp, synthetic construct
  misc_feature 1..22: note = chemically synthesized
  source 1..22: mol_type = other DNA
actggacacatcctagtttcct

SEQ ID NO: 91546 - DNA, 22 bp, synthetic construct
  misc_feature 1..22: note = chemically synthesized
  source 1..22: mol_type = other DNA
ctggacacatcctagtttcctt

SEQ ID NO: 91547 - DNA, 22 bp, synthetic construct
  misc_feature 1..22: note = chemically synthesized
  source 1..22: mol_type = other DNA
gacacatcctagtttccttctg

SEQ ID NO: 91548 - DNA, 22 bp, synthetic construct
  misc_feature 1..22: note = chemically synthesized
  source 1..22: mol_type = other DNA
gtttccttctgtcaattaccat

SEQ ID NO: 91549 - DNA, 22 bp, synthetic construct
  misc_feature 1..22: note = chemically synthesized
  source 1..22: mol_type = other DNA
ccttctgtcaattaccattcat

SEQ ID NO: 91550 - DNA, 22 bp, synthetic construct
  misc_feature 1..22: note = chemically synthesized
  source 1..22: mol_type = other DNA
cttctgtcaattaccattcatg

SEQ ID NO: 91551 - DNA, 22 bp, synthetic construct
  misc_feature 1..22: note = chemically synthesized
  source 1..22: mol_type = other DNA
ctgtcaattaccattcatgtct

SEQ ID NO: 91552 - DNA, 22 bp, synthetic construct
  misc_feature 1..22: note = chemically synthesized
  source 1..22: mol_type = other DNA
tgtcaattaccattcatgtctg

SEQ ID NO: 91553 - DNA, 22 bp, synthetic construct
  misc_feature 1..22: note = chemically synthesized
  source 1..22: mol_type = other DNA
tcaattaccattcatgtctgct

SEQ ID NO: 91554 - DNA, 22 bp, synthetic construct
  misc_feature 1..22: note = chemically synthesized
  source 1..22: mol_type = other DNA
ccattcatgtctgctttcacat

SEQ ID NO: 91555 - DNA, 22 bp, synthetic construct
  misc_feature 1..22: note = chemically synthesized
  source 1..22: mol_type = other DNA
atgtctgctttcacatttattt

SEQ ID NO: 91556 - DNA, 22 bp, synthetic construct
  misc_feature 1..22: note = chemically synthesized
  source 1..22: mol_type = other DNA
ctttcacatttatttctcatcc

SEQ ID NO: 91557 - DNA, 22 bp, synthetic construct
  misc_feature 1..22: note = chemically synthesized
  source 1..22: mol_type = other DNA
tcacatttatttctcatccttc

SEQ ID NO: 91558 - DNA, 22 bp, synthetic construct
  misc_feature 1..22: note = chemically synthesized
  source 1..22: mol_type = other DNA
cacatttatttctcatccttcc

SEQ ID NO: 91559 - DNA, 22 bp, synthetic construct
  misc_feature 1..22: note = chemically synthesized
  source 1..22: mol_type = other DNA
acatttatttctcatccttccc

SEQ ID NO: 91560 - DNA, 22 bp, synthetic construct
  misc_feature 1..22: note = chemically synthesized
  source 1..22: mol_type = other DNA
atttctcatccttccctcagtg

SEQ ID NO: 91561 - DNA, 22 bp, synthetic construct
  misc_feature 1..22: note = chemically synthesized
  source 1..22: mol_type = other DNA
tttctcatccttccctcagtgt

SEQ ID NO: 91562 - DNA, 22 bp, synthetic construct
  misc_feature 1..22: note = chemically synthesized
  source 1..22: mol_type = other DNA
ctcatccttccctcagtgttct

SEQ ID NO: 91563 - DNA, 22 bp, synthetic construct
  misc_feature 1..22: note = chemically synthesized
  source 1..22: mol_type = other DNA
tcatccttccctcagtgttctc

SEQ ID NO: 91564 - DNA, 22 bp, synthetic construct
  misc_feature 1..22: note = chemically synthesized
  source 1..22: mol_type = other DNA
atccttccctcagtgttctctg

SEQ ID NO: 91565 - DNA, 22 bp, synthetic construct
  misc_feature 1..22: note = chemically synthesized
  source 1..22: mol_type = other DNA
ccctcagtgttctctgtatttg

SEQ ID NO: 91566 - DNA, 22 bp, synthetic construct
  misc_feature 1..22: note = chemically synthesized
  source 1..22: mol_type = other DNA
cctcagtgttctctgtatttga

SEQ ID NO: 91567 - DNA, 22 bp, synthetic construct
  misc_feature 1..22: note = chemically synthesized
  source 1..22: mol_type = other DNA
agtgttctctgtatttgaggaa

SEQ ID NO: 91568 - DNA, 22 bp, synthetic construct
  misc_feature 1..22: note = chemically synthesized
  source 1..22: mol_type = other DNA
tctgtatttgaggaactgacat

SEQ ID NO: 91569 - DNA, 22 bp, synthetic construct
  misc_feature 1..22: note = chemically synthesized
  source 1..22: mol_type = other DNA
tgtatttgaggaactgacattt

SEQ ID NO: 91570 - DNA, 22 bp, synthetic construct
  misc_feature 1..22: note = chemically synthesized
  source 1..22: mol_type = other DNA
tatttgaggaactgacatttcc

SEQ ID NO: 91571 - DNA, 22 bp, synthetic construct
  misc_feature 1..22: note = chemically synthesized
  source 1..22: mol_type = other DNA
gaggaactgacatttcccaggt

SEQ ID NO: 91572 - DNA, 22 bp, synthetic construct
  misc_feature 1..22: note = chemically synthesized
  source 1..22: mol_type = other DNA
aggaactgacatttcccaggtt

SEQ ID NO: 91573 - DNA, 22 bp, synthetic construct
  misc_feature 1..22: note = chemically synthesized
  source 1..22: mol_type = other DNA
acatttcccaggtttcctcacc

SEQ ID NO: 91574 - DNA, 22 bp, synthetic construct
  misc_feature 1..22: note = chemically synthesized
  source 1..22: mol_type = other DNA
cccaggtttcctcaccctttca

SEQ ID NO: 91575 - DNA, 22 bp, synthetic construct
  misc_feature 1..22: note = chemically synthesized
  source 1..22: mol_type = other DNA
ccaggtttcctcaccctttcag

SEQ ID NO: 91576 - DNA, 22 bp, synthetic construct
  misc_feature 1..22: note = chemically synthesized
  source 1..22: mol_type = other DNA
cctcaccctttcagtcgcatgt

SEQ ID NO: 91577 - DNA, 22 bp, synthetic construct
  misc_feature 1..22: note = chemically synthesized
  source 1..22: mol_type = other DNA
ctcaccctttcagtcgcatgta

SEQ ID NO: 91578 - DNA, 22 bp, synthetic construct
  misc_feature 1..22: note = chemically synthesized
  source 1..22: mol_type = other DNA
accctttcagtcgcatgtacat

SEQ ID NO: 91579 - DNA, 22 bp, synthetic construct
  misc_feature 1..22: note = chemically synthesized
  source 1..22: mol_type = other DNA
tcagtcgcatgtacattctgca

SEQ ID NO: 91580 - DNA, 22 bp, synthetic construct
  misc_feature 1..22: note = chemically synthesized
  source 1..22: mol_type = other DNA
cagtcgcatgtacattctgcaa

SEQ ID NO: 91581 - DNA, 22 bp, synthetic construct
  misc_feature 1..22: note = chemically synthesized
  source 1..22: mol_type = other DNA
agtcgcatgtacattctgcaat

SEQ ID NO: 91582 - DNA, 22 bp, synthetic construct
  misc_feature 1..22: note = chemically synthesized
  source 1..22: mol_type = other DNA
tgcaatggtaaacactggctga

SEQ ID NO: 91583 - DNA, 22 bp, synthetic construct
  misc_feature 1..22: note = chemically synthesized
  source 1..22: mol_type = other DNA
caatggtaaacactggctgagg

SEQ ID NO: 91584 - DNA, 22 bp, synthetic construct
  misc_feature 1..22: note = chemically synthesized
  source 1..22: mol_type = other DNA
gctgagggaaagcataagcaag

SEQ ID NO: 91585 - DNA, 22 bp, synthetic construct
  misc_feature 1..22: note = chemically synthesized
  source 1..22: mol_type = other DNA
agggaaagcataagcaagatta

SEQ ID NO: 91586 - DNA, 22 bp, synthetic construct
  misc_feature 1..22: note = chemically synthesized
  source 1..22: mol_type = other DNA
tttctggtctctctctctctct

SEQ ID NO: 91587 - DNA, 22 bp, synthetic construct
  misc_feature 1..22: note = chemically synthesized
  source 1..22: mol_type = other DNA
ctggtctctctctctctctgaa

SEQ ID NO: 91588 - DNA, 22 bp, synthetic construct
  misc_feature 1..22: note = chemically synthesized
  source 1..22: mol_type = other DNA
tggtctctctctctctctgaac

SEQ ID NO: 91589 - DNA, 22 bp, synthetic construct
  misc_feature 1..22: note = chemically synthesized
  source 1..22: mol_type = other DNA
gtctctctctctctctgaacgg

SEQ ID NO: 91590 - DNA, 22 bp, synthetic construct
  misc_feature 1..22: note = chemically synthesized
  source 1..22: mol_type = other DNA
tctctctctctgaacggatctc

SEQ ID NO: 91591 - DNA, 22 bp, synthetic construct
  misc_feature 1..22: note = chemically synthesized
  source 1..22: mol_type = other DNA
tctctctctgaacggatctcct

SEQ ID NO: 91592 - DNA, 22 bp, synthetic construct
  misc_feature 1..22: note = chemically synthesized
  source 1..22: mol_type = other DNA
tctctctgaacggatctcctac

SEQ ID NO: 91593 - DNA, 22 bp, synthetic construct
  misc_feature 1..22: note = chemically synthesized
  source 1..22: mol_type = other DNA
tctctgaacggatctcctacag

SEQ ID NO: 91594 - DNA, 22 bp, synthetic construct
  misc_feature 1..22: note = chemically synthesized
  source 1..22: mol_type = other DNA
tctgaacggatctcctacagca

SEQ ID NO: 91595 - DNA, 22 bp, synthetic construct
  misc_feature 1..22: note = chemically synthesized
  source 1..22: mol_type = other DNA
tgaacggatctcctacagcaga

SEQ ID NO: 91596 - DNA, 22 bp, synthetic construct
  misc_feature 1..22: note = chemically synthesized
  source 1..22: mol_type = other DNA
aacggatctcctacagcagaca

SEQ ID NO: 91597 - DNA, 22 bp, synthetic construct
  misc_feature 1..22: note = chemically synthesized
  source 1..22: mol_type = other DNA
ctacagcagacagtctttttta

SEQ ID NO: 91598 - DNA, 22 bp, synthetic construct
  misc_feature 1..22: note = chemically synthesized
  source 1..22: mol_type = other DNA
cagcagacagtcttttttatgg

SEQ ID NO: 91599 - DNA, 22 bp, synthetic construct
  misc_feature 1..22: note = chemically synthesized
  source 1..22: mol_type = other DNA
ttttatggttttttatggctga

SEQ ID NO: 91600 - DNA, 22 bp, synthetic construct
  misc_feature 1..22: note = chemically synthesized
  source 1..22: mol_type = other DNA
tttatggttttttatggctgat

SEQ ID NO: 91601 - DNA, 22 bp, synthetic construct
  misc_feature 1..22: note = chemically synthesized
  source 1..22: mol_type = other DNA
ttatggttttttatggctgata

SEQ ID NO: 91602 - DNA, 22 bp, synthetic construct
  misc_feature 1..22: note = chemically synthesized
  source 1..22: mol_type = other DNA
tatggttttttatggctgatac

SEQ ID NO: 91603 - DNA, 22 bp, synthetic construct
  misc_feature 1..22: note = chemically synthesized
  source 1..22: mol_type = other DNA
atggttttttatggctgatact

SEQ ID NO: 91604 - DNA, 22 bp, synthetic construct
  misc_feature 1..22: note = chemically synthesized
  source 1..22: mol_type = other DNA
tggttttttatggctgatactt

SEQ ID NO: 91605 - DNA, 22 bp, synthetic construct
  misc_feature 1..22: note = chemically synthesized
  source 1..22: mol_type = other DNA
tttatggctgatactttgatgc

SEQ ID NO: 91606 - DNA, 22 bp, synthetic construct
  misc_feature 1..22: note = chemically synthesized
  source 1..22: mol_type = other DNA
ttatggctgatactttgatgcc

SEQ ID NO: 91607 - DNA, 22 bp, synthetic construct
  misc_feature 1..22: note = chemically synthesized
  source 1..22: mol_type = other DNA
tatggctgatactttgatgccc

SEQ ID NO: 91608 - DNA, 22 bp, synthetic construct
  misc_feature 1..22: note = chemically synthesized
  source 1..22: mol_type = other DNA
atggctgatactttgatgcccc

SEQ ID NO: 91609 - DNA, 22 bp, synthetic construct
  misc_feature 1..22: note = chemically synthesized
  source 1..22: mol_type = other DNA
tggctgatactttgatgccccc

SEQ ID NO: 91610 - DNA, 22 bp, synthetic construct
  misc_feature 1..22: note = chemically synthesized
  source 1..22: mol_type = other DNA
atactttgatgcccccattaga

SEQ ID NO: 91611 - DNA, 22 bp, synthetic construct
  misc_feature 1..22: note = chemically synthesized
  source 1..22: mol_type = other DNA
tgatgcccccattagacagttc

SEQ ID NO: 91612 - DNA, 22 bp, synthetic construct
  misc_feature 1..22: note = chemically synthesized
  source 1..22: mol_type = other DNA
gatgcccccattagacagttct

SEQ ID NO: 91613 - DNA, 22 bp, synthetic construct
  misc_feature 1..22: note = chemically synthesized
  source 1..22: mol_type = other DNA
atgcccccattagacagttctg

SEQ ID NO: 91614 - DNA, 22 bp, synthetic construct
  misc_feature 1..22: note = chemically synthesized
  source 1..22: mol_type = other DNA
gacagttctggctctctccaag

SEQ ID NO: 91615 - DNA, 22 bp, synthetic construct
  misc_feature 1..22: note = chemically synthesized
  source 1..22: mol_type = other DNA
tggctctctccaaggagcaccc

SEQ ID NO: 91616 - DNA, 22 bp, synthetic construct
  misc_feature 1..22: note = chemically synthesized
  source 1..22: mol_type = other DNA
gctctctccaaggagcacccac

SEQ ID NO: 91617 - DNA, 22 bp, synthetic construct
  misc_feature 1..22: note = chemically synthesized
  source 1..22: mol_type = other DNA
tctccaaggagcacccactagc

SEQ ID NO: 91618 - DNA, 22 bp, synthetic construct
  misc_feature 1..22: note = chemically synthesized
  source 1..22: mol_type = other DNA
tccaaggagcacccactagctc

SEQ ID NO: 91619 - DNA, 22 bp, synthetic construct
  misc_feature 1..22: note = chemically synthesized
  source 1..22: mol_type = other DNA
caaggagcacccactagctcac

SEQ ID NO: 91620 - DNA, 22 bp, synthetic construct
  misc_feature 1..22: note = chemically synthesized
  source 1..22: mol_type = other DNA
gctcactgaatccagtggacct

SEQ ID NO: 91621 - DNA, 22 bp, synthetic construct
  misc_feature 1..22: note = chemically synthesized
  source 1..22: mol_type = other DNA
actgaatccagtggacctctgg

SEQ ID NO: 91622 - DNA, 22 bp, synthetic construct
  misc_feature 1..22: note = chemically synthesized
  source 1..22: mol_type = other DNA
aatccagtggacctctggttat

SEQ ID NO: 91623 - DNA, 22 bp, synthetic construct
  misc_feature 1..22: note = chemically synthesized
  source 1..22: mol_type = other DNA
tggttatgggctctggttctgg

SEQ ID NO: 91624 - DNA, 22 bp, synthetic construct
  misc_feature 1..22: note = chemically synthesized
  source 1..22: mol_type = other DNA
gttatgggctctggttctggac

SEQ ID NO: 91625 - DNA, 22 bp, synthetic construct
  misc_feature 1..22: note = chemically synthesized
  source 1..22: mol_type = other DNA
tgggctctggttctggactctg

SEQ ID NO: 91626 - DNA, 22 bp, synthetic construct
  misc_feature 1..22: note = chemically synthesized
  source 1..22: mol_type = other DNA
tggttctggactctggtggtat

SEQ ID NO: 91627 - DNA, 22 bp, synthetic construct
  misc_feature 1..22: note = chemically synthesized
  source 1..22: mol_type = other DNA
gttctggactctggtggtataa

SEQ ID NO: 91628 - DNA, 22 bp, synthetic construct
  misc_feature 1..22: note = chemically synthesized
  source 1..22: mol_type = other DNA
tggactctggtggtataaacat

SEQ ID NO: 91629 - DNA, 22 bp, synthetic construct
  misc_feature 1..22: note = chemically synthesized
  source 1..22: mol_type = other DNA
gactctggtggtataaacattt

SEQ ID NO: 91630 - DNA, 22 bp, synthetic construct
  misc_feature 1..22: note = chemically synthesized
  source 1..22: mol_type = other DNA
tggtggtataaacattttctcc

SEQ ID NO: 91631 - DNA, 22 bp, synthetic construct
  misc_feature 1..22: note = chemically synthesized
  source 1..22: mol_type = other DNA
gtggtataaacattttctcctt

SEQ ID NO: 91632 - DNA, 22 bp, synthetic construct
  misc_feature 1..22: note = chemically synthesized
  source 1..22: mol_type = other DNA
tctccttctgcccttctaggcc

SEQ ID NO: 91633 - DNA, 22 bp, synthetic construct
  misc_feature 1..22: note = chemically synthesized
  source 1..22: mol_type = other DNA
ctccttctgcccttctaggcct

SEQ ID NO: 91634 - DNA, 22 bp, synthetic construct
  misc_feature 1..22: note = chemically synthesized
  source 1..22: mol_type = other DNA
tccttctgcccttctaggccta

SEQ ID NO: 91635 - DNA, 22 bp, synthetic construct
  misc_feature 1..22: note = chemically synthesized
  source 1..22: mol_type = other DNA
cttctgcccttctaggcctaat

SEQ ID NO: 91636 - DNA, 22 bp, synthetic construct
  misc_feature 1..22: note = chemically synthesized
  source 1..22: mol_type = other DNA
ctgcccttctaggcctaatggc

SEQ ID NO: 91637 - DNA, 22 bp, synthetic construct
  misc_feature 1..22: note = chemically synthesized
  source 1..22: mol_type = other DNA
tgcccttctaggcctaatggcg

SEQ ID NO: 91638 - DNA, 22 bp, synthetic construct
  misc_feature 1..22: note = chemically synthesized
  source 1..22: mol_type = other DNA
cccttctaggcctaatggcgga

SEQ ID NO: 91639 - DNA, 22 bp, synthetic construct
  misc_feature 1..22: note = chemically synthesized
  source 1..22: mol_type = other DNA
ctaggcctaatggcggaagagg

SEQ ID NO: 91640 - DNA, 22 bp, synthetic construct
  misc_feature 1..22: note = chemically synthesized
  source 1..22: mol_type = other DNA
taggcctaatggcggaagaggt

SEQ ID NO: 91641 - DNA, 22 bp, synthetic construct
  misc_feature 1..22: note = chemically synthesized
  source 1..22: mol_type = other DNA
ggcctaatggcggaagaggttt

SEQ ID NO: 91642 - DNA, 22 bp, synthetic construct
  misc_feature 1..22: note = chemically synthesized
  source 1..22: mol_type = other DNA
atggcggaagaggttttctgat

SEQ ID NO: 91643 - DNA, 22 bp, synthetic construct
  misc_feature 1..22: note = chemically synthesized
  source 1..22: mol_type = other DNA
tctgatgttactaacatctaga

SEQ ID NO: 91644 - DNA, 22 bp, synthetic construct
  misc_feature 1..22: note = chemically synthesized
  source 1..22: mol_type = other DNA
ctgatgttactaacatctagat

SEQ ID NO: 91645 - DNA, 22 bp, synthetic construct
  misc_feature 1..22: note = chemically synthesized
  source 1..22: mol_type = other DNA
tgatgttactaacatctagatt

SEQ ID NO: 91646 - DNA, 22 bp, synthetic construct
  misc_feature 1..22: note = chemically synthesized
  source 1..22: mol_type = other DNA
atgttactaacatctagatttc

SEQ ID NO: 91647 - DNA, 22 bp, synthetic construct
  misc_feature 1..22: note = chemically synthesized
  source 1..22: mol_type = other DNA
ctaacatctagatttctgcact

SEQ ID NO: 91648 - DNA, 22 bp, synthetic construct
  misc_feature 1..22: note = chemically synthesized
  source 1..22: mol_type = other DNA
acatctagatttctgcactgtc

SEQ ID NO: 91649 - DNA, 22 bp, synthetic construct
  misc_feature 1..22: note = chemically synthesized
  source 1..22: mol_type = other DNA
gatttctgcactgtcctttatt

SEQ ID NO: 91650 - DNA, 22 bp, synthetic construct
  misc_feature 1..22: note = chemically synthesized
  source 1..22: mol_type = other DNA
ctgcactgtcctttatttgata

SEQ ID NO: 91651 - DNA, 22 bp, synthetic construct
  misc_feature 1..22: note = chemically synthesized
  source 1..22: mol_type = other DNA
tgcactgtcctttatttgatat

SEQ ID NO: 91652 - DNA, 22 bp, synthetic construct
  misc_feature 1..22: note = chemically synthesized
  source 1..22: mol_type = other DNA
cactgtcctttatttgatattt

SEQ ID NO: 91653 - DNA, 22 bp, synthetic construct
  misc_feature 1..22: note = chemically synthesized
  source 1..22: mol_type = other DNA
tcctttatttgatattttagct

SEQ ID NO: 91654 - DNA, 22 bp, synthetic construct
  misc_feature 1..22: note = chemically synthesized
  source 1..22: mol_type = other DNA
tatttgatattttagctcttcc

SEQ ID NO: 91655 - DNA, 22 bp, synthetic construct
  misc_feature 1..22: note = chemically synthesized
  source 1..22: mol_type = other DNA
atttgatattttagctcttcca

SEQ ID NO: 91656 - DNA, 22 bp, synthetic construct
  misc_feature 1..22: note = chemically synthesized
  source 1..22: mol_type = other DNA
tttgatattttagctcttccaa

SEQ ID NO: 91657 - DNA, 22 bp, synthetic construct
  misc_feature 1..22: note = chemically synthesized
  source 1..22: mol_type = other DNA
gatattttagctcttccaatac

SEQ ID NO: 91658 - DNA, 22 bp, synthetic construct
  misc_feature 1..22: note = chemically synthesized
  source 1..22: mol_type = other DNA
atattttagctcttccaataca

SEQ ID NO: 91659 - DNA, 22 bp, synthetic construct
  misc_feature 1..22: note = chemically synthesized
  source 1..22: mol_type = other DNA
tagctcttccaatacaaggata

SEQ ID NO: 91660 - DNA, 22 bp, synthetic construct
  misc_feature 1..22: note = chemically synthesized
  source 1..22: mol_type = other DNA
agctcttccaatacaaggataa

SEQ ID NO: 91661 - DNA, 22 bp, synthetic construct
  misc_feature 1..22: note = chemically synthesized
  source 1..22: mol_type = other DNA
gctcttccaatacaaggataat

SEQ ID NO: 91662 - DNA, 22 bp, synthetic construct
  misc_feature 1..22: note = chemically synthesized
  source 1..22: mol_type = other DNA
ttccaatacaaggataattaac

SEQ ID NO: 91663 - DNA, 22 bp, synthetic construct
  misc_feature 1..22: note = chemically synthesized
  source 1..22: mol_type = other DNA
ccaatacaaggataattaacta

SEQ ID NO: 91664 - DNA, 22 bp, synthetic construct
  misc_feature 1..22: note = chemically synthesized
  source 1..22: mol_type = other DNA
caatacaaggataattaactat

SEQ ID NO: 91665 - DNA, 22 bp, synthetic construct
  misc_feature 1..22: note = chemically synthesized
  source 1..22: mol_type = other DNA
actattaagagctgtatttaat

SEQ ID NO: 91666 - DNA, 22 bp, synthetic construct
  misc_feature 1..22: note = chemically synthesized
  source 1..22: mol_type = other DNA
ttaagagctgtatttaattcta

SEQ ID NO: 91667 - DNA, 22 bp, synthetic construct
  misc_feature 1..22: note = chemically synthesized
  source 1..22: mol_type = other DNA
agagctgtatttaattctaggt

SEQ ID NO: 91668 - DNA, 22 bp, synthetic construct
  misc_feature 1..22: note = chemically synthesized
  source 1..22: mol_type = other DNA
tatttaattctaggttgagtaa

SEQ ID NO: 91669 - DNA, 22 bp, synthetic construct
  misc_feature 1..22: note = chemically synthesized
  source 1..22: mol_type = other DNA
aattctaggttgagtaactgat

SEQ ID NO: 91670 - DNA, 22 bp, synthetic construct
  misc_feature 1..22: note = chemically synthesized
  source 1..22: mol_type = other DNA
attctaggttgagtaactgata

SEQ ID NO: 91671 - DNA, 22 bp, synthetic construct
  misc_feature 1..22: note = chemically synthesized
  source 1..22: mol_type = other DNA
taggttgagtaactgataatgg

SEQ ID NO: 91672 - DNA, 22 bp, synthetic construct
  misc_feature 1..22: note = chemically synthesized
  source 1..22: mol_type = other DNA
ggttgagtaactgataatggtt

SEQ ID NO: 91673 - DNA, 22 bp, synthetic construct
  misc_feature 1..22: note = chemically synthesized
  source 1..22: mol_type = other DNA
agtaactgataatggtttgtcc

SEQ ID NO: 91674 - DNA, 22 bp, synthetic construct
  misc_feature 1..22: note = chemically synthesized
  source 1..22: mol_type = other DNA
ataatggtttgtcctttccttg

SEQ ID NO: 91675 - DNA, 22 bp, synthetic construct
  misc_feature 1..22: note = chemically synthesized
  source 1..22: mol_type = other DNA
gtcctttccttgatggacccta

SEQ ID NO: 91676 - DNA, 22 bp, synthetic construct
  misc_feature 1..22: note = chemically synthesized
  source 1..22: mol_type = other DNA
tcctttccttgatggaccctaa

SEQ ID NO: 91677 - DNA, 22 bp, synthetic construct
  misc_feature 1..22: note = chemically synthesized
  source 1..22: mol_type = other DNA
tccttgatggaccctaactgat

SEQ ID NO: 91678 - DNA, 22 bp, synthetic construct
  misc_feature 1..22: note = chemically synthesized
  source 1..22: mol_type = other DNA
ccttgatggaccctaactgata

SEQ ID NO: 91679 - DNA, 22 bp, synthetic construct
  misc_feature 1..22: note = chemically synthesized
  source 1..22: mol_type = other DNA
cttgatggaccctaactgatat

SEQ ID NO: 91680 - DNA, 22 bp, synthetic construct
  misc_feature 1..22: note = chemically synthesized
  source 1..22: mol_type = other DNA
gatggaccctaactgatataac

SEQ ID NO: 91681 - DNA, 22 bp, synthetic construct
  misc_feature 1..22: note = chemically synthesized
  source 1..22: mol_type = other DNA
atggaccctaactgatataact

SEQ ID NO: 91682 - DNA, 22 bp, synthetic construct
  misc_feature 1..22: note = chemically synthesized
  source 1..22: mol_type = other DNA
actgatataactaataaactga

SEQ ID NO: 91683 - DNA, 22 bp, synthetic construct
  misc_feature 1..22: note = chemically synthesized
  source 1..22: mol_type = other DNA
atataactaataaactgacttc

SEQ ID NO: 91684 - DNA, 22 bp, synthetic construct
  misc_feature 1..22: note = chemically synthesized
  source 1..22: mol_type = other DNA
ataaactgacttctgatactat

SEQ ID NO: 91685 - DNA, 22 bp, synthetic construct
  misc_feature 1..22: note = chemically synthesized
  source 1..22: mol_type = other DNA
acttctgatactatgtcttatt

SEQ ID NO: 91686 - DNA, 22 bp, synthetic construct
  misc_feature 1..22: note = chemically synthesized
  source 1..22: mol_type = other DNA
ctgatactatgtcttattagtg

SEQ ID NO: 91687 - DNA, 22 bp, synthetic construct
  misc_feature 1..22: note = chemically synthesized
  source 1..22: mol_type = other DNA
tgatactatgtcttattagtgt

SEQ ID NO: 91688 - DNA, 22 bp, synthetic construct
  misc_feature 1..22: note = chemically synthesized
  source 1..22: mol_type = other DNA
atactatgtcttattagtgtat

SEQ ID NO: 91689 - DNA, 22 bp, synthetic construct
  misc_feature 1..22: note = chemically synthesized
  source 1..22: mol_type = other DNA
tgtcttattagtgtatgaaatt

SEQ ID NO: 91690 - DNA, 22 bp, synthetic construct
  misc_feature 1..22: note = chemically synthesized
  source 1..22: mol_type = other DNA
attagtgtatgaaattctgatg

SEQ ID NO: 91691 - DNA, 22 bp, synthetic construct
  misc_feature 1..22: note = chemically synthesized
  source 1..22: mol_type = other DNA
ttagtgtatgaaattctgatgt

SEQ ID NO: 91692 - DNA, 22 bp, synthetic construct
  misc_feature 1..22: note = chemically synthesized
  source 1..22: mol_type = other DNA
gtgtatgaaattctgatgtgaa

SEQ ID NO: 91693 - DNA, 22 bp, synthetic construct
  misc_feature 1..22: note = chemically synthesized
  source 1..22: mol_type = other DNA
tgatgtgaataaatgcatgaca

SEQ ID NO: 91694 - DNA, 22 bp, synthetic construct
  misc_feature 1..22: note = chemically synthesized
  source 1..22: mol_type = other DNA
atgtgaataaatgcatgacaca

SEQ ID NO: 91695 - DNA, 22 bp, synthetic construct
  misc_feature 1..22: note = chemically synthesized
  source 1..22: mol_type = other DNA
gttgactaatcaaactatagca

SEQ ID NO: 91696 - DNA, 22 bp, synthetic construct
  misc_feature 1..22: note = chemically synthesized
  source 1..22: mol_type = other DNA
ttgactaatcaaactatagcag

SEQ ID NO: 91697 - DNA, 22 bp, synthetic construct
  misc_feature 1..22: note = chemically synthesized
  source 1..22: mol_type = other DNA
actaatcaaactatagcagagg

SEQ ID NO: 91698 - DNA, 22 bp, synthetic construct
  misc_feature 1..22: note = chemically synthesized
  source 1..22: mol_type = other DNA
atcaaactatagcagaggcaga

SEQ ID NO: 91699 - DNA, 22 bp, synthetic construct
  misc_feature 1..22: note = chemically synthesized
  source 1..22: mol_type = other DNA
tagcagaggcagaggaaggaac

SEQ ID NO: 91700 - DNA, 22 bp, synthetic construct
  misc_feature 1..22: note = chemically synthesized
  source 1..22: mol_type = other DNA
atgacctataaatactaagata

SEQ ID NO: 91701 - DNA, 22 bp, synthetic construct
  misc_feature 1..22: note = chemically synthesized
  source 1..22: mol_type = other DNA
taaatactaagatatcacatag

SEQ ID NO: 91702 - DNA, 22 bp, synthetic construct
  misc_feature 1..22: note = chemically synthesized
  source 1..22: mol_type = other DNA
agatatcacatagtcattttag

SEQ ID NO: 91703 - DNA, 22 bp, synthetic construct
  misc_feature 1..22: note = chemically synthesized
  source 1..22: mol_type = other DNA
tagaaccaaaggttcctcagtt

SEQ ID NO: 91704 - DNA, 22 bp, synthetic construct
  misc_feature 1..22: note = chemically synthesized
  source 1..22: mol_type = other DNA
agaaccaaaggttcctcagttt

SEQ ID NO: 91705 - DNA, 22 bp, synthetic construct
  misc_feature 1..22: note = chemically synthesized
  source 1..22: mol_type = other DNA
gaaccaaaggttcctcagttta

SEQ ID NO: 91706 - DNA, 22 bp, synthetic construct
  misc_feature 1..22: note = chemically synthesized
  source 1..22: mol_type = other DNA
ctcagtttaggtctcaaacaaa

SEQ ID NO: 91707 - DNA, 22 bp, synthetic construct
  misc_feature 1..22: note = chemically synthesized
  source 1..22: mol_type = other DNA
agtttaggtctcaaacaaactt

SEQ ID NO: 91708 - DNA, 22 bp, synthetic construct
  misc_feature 1..22: note = chemically synthesized
  source 1..22: mol_type = other DNA
aggtctcaaacaaacttctcta

SEQ ID NO: 91709 - DNA, 22 bp, synthetic construct
  misc_feature 1..22: note = chemically synthesized
  source 1..22: mol_type = other DNA
ggtctcaaacaaacttctctat

SEQ ID NO: 91710 - DNA, 22 bp, synthetic construct
  misc_feature 1..22: note = chemically synthesized
  source 1..22: mol_type = other DNA
aaacaaacttctctatggatag

SEQ ID NO: 91711 - DNA, 22 bp, synthetic construct
  misc_feature 1..22: note = chemically synthesized
  source 1..22: mol_type = other DNA
ctctatggatagtgtaatactc

SEQ ID NO: 91712 - DNA, 22 bp, synthetic construct
  misc_feature 1..22: note = chemically synthesized
  source 1..22: mol_type = other DNA
tctatggatagtgtaatactca

SEQ ID NO: 91713 - DNA, 22 bp, synthetic construct
  misc_feature 1..22: note = chemically synthesized
  source 1..22: mol_type = other DNA
tatggatagtgtaatactcata

SEQ ID NO: 91714 - DNA, 22 bp, synthetic construct
  misc_feature 1..22: note = chemically synthesized
  source 1..22: mol_type = other DNA
tggatagtgtaatactcataat

SEQ ID NO: 91715 - DNA, 22 bp, synthetic construct
  misc_feature 1..22: note = chemically synthesized
  source 1..22: mol_type = other DNA
ataatgtagaaaagagagatct

SEQ ID NO: 91716 - DNA, 22 bp, synthetic construct
  misc_feature 1..22: note = chemically synthesized
  source 1..22: mol_type = other DNA
attttggataatttaatctttt

SEQ ID NO: 91717 - DNA, 22 bp, synthetic construct
  misc_feature 1..22: note = chemically synthesized
  source 1..22: mol_type = other DNA
tggataatttaatctttttttt

SEQ ID NO: 91718 - DNA, 22 bp, synthetic construct
  misc_feature 1..22: note = chemically synthesized
  source 1..22: mol_type = other DNA
ggataatttaatcttttttttc

SEQ ID NO: 91719 - DNA, 22 bp, synthetic construct
  misc_feature 1..22: note = chemically synthesized
  source 1..22: mol_type = other DNA
gataatttaatcttttttttca

SEQ ID NO: 91720 - DNA, 22 bp, synthetic construct
  misc_feature 1..22: note = chemically synthesized
  source 1..22: mol_type = other DNA
aatcttttttttcatctccaaa

SEQ ID NO: 91721 - DNA, 22 bp, synthetic construct
  misc_feature 1..22: note = chemically synthesized
  source 1..22: mol_type = other DNA
atcttttttttcatctccaaat

SEQ ID NO: 91722 - DNA, 22 bp, synthetic construct
  misc_feature 1..22: note = chemically synthesized
  source 1..22: mol_type = other DNA
ttttttcatctccaaatactag

SEQ ID NO: 91723 - DNA, 22 bp, synthetic construct
  misc_feature 1..22: note = chemically synthesized
  source 1..22: mol_type = other DNA
tttttcatctccaaatactagg

SEQ ID NO: 91724 - DNA, 22 bp, synthetic construct
  misc_feature 1..22: note = chemically synthesized
  source 1..22: mol_type = other DNA
ttttcatctccaaatactaggg

SEQ ID NO: 91725 - DNA, 22 bp, synthetic construct
  misc_feature 1..22: note = chemically synthesized
  source 1..22: mol_type = other DNA
tttcatctccaaatactaggga

SEQ ID NO: 91726 - DNA, 22 bp, synthetic construct
  misc_feature 1..22: note = chemically synthesized
  source 1..22: mol_type = other DNA
ttcatctccaaatactagggaa

SEQ ID NO: 91727 - DNA, 22 bp, synthetic construct
  misc_feature 1..22: note = chemically synthesized
  source 1..22: mol_type = other DNA
tcatctccaaatactagggaaa

SEQ ID NO: 91728 - DNA, 22 bp, synthetic construct
  misc_feature 1..22: note = chemically synthesized
  source 1..22: mol_type = other DNA
catctccaaatactagggaaat

SEQ ID NO: 91729 - DNA, 22 bp, synthetic construct
  misc_feature 1..22: note = chemically synthesized
  source 1..22: mol_type = other DNA
atctccaaatactagggaaata

SEQ ID NO: 91730 - DNA, 22 bp, synthetic construct
  misc_feature 1..22: note = chemically synthesized
  source 1..22: mol_type = other DNA
caaatactagggaaataagagt

SEQ ID NO: 91731 - DNA, 22 bp, synthetic construct
  misc_feature 1..22: note = chemically synthesized
  source 1..22: mol_type = other DNA
gggaaataagagtttacaagac

SEQ ID NO: 91732 - DNA, 22 bp, synthetic construct
  misc_feature 1..22: note = chemically synthesized
  source 1..22: mol_type = other DNA
acaagacaatgtctctaccata

SEQ ID NO: 91733 - DNA, 22 bp, synthetic construct
  misc_feature 1..22: note = chemically synthesized
  source 1..22: mol_type = other DNA
caagacaatgtctctaccataa

SEQ ID NO: 91734 - DNA, 22 bp, synthetic construct
  misc_feature 1..22: note = chemically synthesized
  source 1..22: mol_type = other DNA
taccataaaagaggttaaaatt

SEQ ID NO: 91735 - DNA, 22 bp, synthetic construct
  misc_feature 1..22: note = chemically synthesized
  source 1..22: mol_type = other DNA
ccataaaagaggttaaaattta

SEQ ID NO: 91736 - DNA, 22 bp, synthetic construct
  misc_feature 1..22: note = chemically synthesized
  source 1..22: mol_type = other DNA
aaatttagtggtaggaatatac

SEQ ID NO: 91737 - DNA, 22 bp, synthetic construct
  misc_feature 1..22: note = chemically synthesized
  source 1..22: mol_type = other DNA
agtggtaggaatatacaatgag

SEQ ID NO: 91738 - DNA, 22 bp, synthetic construct
  misc_feature 1..22: note = chemically synthesized
  source 1..22: mol_type = other DNA
gtggtaggaatatacaatgagc

SEQ ID NO: 91739 - DNA, 22 bp, synthetic construct
  misc_feature 1..22: note = chemically synthesized
  source 1..22: mol_type = other DNA
agtacattagtaggaaaaacac

SEQ ID NO: 91740 - DNA, 22 bp, synthetic construct
  misc_feature 1..22: note = chemically synthesized
  source 1..22: mol_type = other DNA
gtaggaaaaacactaaatatta

SEQ ID NO: 91741 - DNA, 22 bp, synthetic construct
  misc_feature 1..22: note = chemically synthesized
  source 1..22: mol_type = other DNA
aatattataagaaagagcccat

SEQ ID NO: 91742 - DNA, 22 bp, synthetic construct
  misc_feature 1..22: note = chemically synthesized
  source 1..22: mol_type = other DNA
taagaaagagcccataattgta

SEQ ID NO: 91743 - DNA, 22 bp, synthetic construct
  misc_feature 1..22: note = chemically synthesized
  source 1..22: mol_type = other DNA
tagcagagtttatagacagggc

SEQ ID NO: 91744 - DNA, 22 bp, synthetic construct
  misc_feature 1..22: note = chemically synthesized
  source 1..22: mol_type = other DNA
atagacagggctttaagcccag

SEQ ID NO: 91745 - DNA, 22 bp, synthetic construct
  misc_feature 1..22: note = chemically synthesized
  source 1..22: mol_type = other DNA
tagacagggctttaagcccagt

SEQ ID NO: 91746 - DNA, 22 bp, synthetic construct
  misc_feature 1..22: note = chemically synthesized
  source 1..22: mol_type = other DNA
taagcccagttaaaattaaaaa

SEQ ID NO: 91747 - DNA, 22 bp, synthetic construct
  misc_feature 1..22: note = chemically synthesized
  source 1..22: mol_type = other DNA
aagcccagttaaaattaaaaaa

SEQ ID NO: 91748 - DNA, 22 bp, synthetic construct
  misc_feature 1..22: note = chemically synthesized
  source 1..22: mol_type = other DNA
agcccagttaaaattaaaaaaa

SEQ ID NO: 91749 - DNA, 22 bp, synthetic construct
  misc_feature 1..22: note = chemically synthesized
  source 1..22: mol_type = other DNA
aaattaaaaaaaaatagcttct

SEQ ID NO: 91750 - DNA, 22 bp, synthetic construct
  misc_feature 1..22: note = chemically synthesized
  source 1..22: mol_type = other DNA
aaaaaaaatagcttcttagttg

SEQ ID NO: 91751 - DNA, 22 bp, synthetic construct
  misc_feature 1..22: note = chemically synthesized
  source 1..22: mol_type = other DNA
cttagttgagataacatataag

SEQ ID NO: 91752 - DNA, 22 bp, synthetic construct
  misc_feature 1..22: note = chemically synthesized
  source 1..22: mol_type = other DNA
ttagttgagataacatataagt

SEQ ID NO: 91753 - DNA, 22 bp, synthetic construct
  misc_feature 1..22: note = chemically synthesized
  source 1..22: mol_type = other DNA
agttgagataacatataagtta

SEQ ID NO: 91754 - DNA, 22 bp, synthetic construct
  misc_feature 1..22: note = chemically synthesized
  source 1..22: mol_type = other DNA
gttgagataacatataagttag

SEQ ID NO: 91755 - DNA, 22 bp, synthetic construct
  misc_feature 1..22: note = chemically synthesized
  source 1..22: mol_type = other DNA
agataacatataagttaggact

SEQ ID NO: 91756 - DNA, 22 bp, synthetic construct
  misc_feature 1..22: note = chemically synthesized
  source 1..22: mol_type = other DNA
ggacttaaagtatgagtacaag

SEQ ID NO: 91757 - DNA, 22 bp, synthetic construct
  misc_feature 1..22: note = chemically synthesized
  source 1..22: mol_type = other DNA
aaagtatgagtacaagatagac

SEQ ID NO: 91758 - DNA, 22 bp, synthetic construct
  misc_feature 1..22: note = chemically synthesized
  source 1..22: mol_type = other DNA
aagtatgagtacaagatagaca

SEQ ID NO: 91759 - DNA, 22 bp, synthetic construct
  misc_feature 1..22: note = chemically synthesized
  source 1..22: mol_type = other DNA
acagagtcaaatgcagaaatcc

SEQ ID NO: 91760 - DNA, 22 bp, synthetic construct
  misc_feature 1..22: note = chemically synthesized
  source 1..22: mol_type = other DNA
tctagattgactggggtaattt

SEQ ID NO: 91761 - DNA, 22 bp, synthetic construct
  misc_feature 1..22: note = chemically synthesized
  source 1..22: mol_type = other DNA
tagattgactggggtaattttg

SEQ ID NO: 91762 - DNA, 22 bp, synthetic construct
  misc_feature 1..22: note = chemically synthesized
  source 1..22: mol_type = other DNA
gattgactggggtaattttgtc

SEQ ID NO: 91763 - DNA, 22 bp, synthetic construct
  misc_feature 1..22: note = chemically synthesized
  source 1..22: mol_type = other DNA
actggggtaattttgtcaatgc

SEQ ID NO: 91764 - DNA, 22 bp, synthetic construct
  misc_feature 1..22: note = chemically synthesized
  source 1..22: mol_type = other DNA
gggtaattttgtcaatgcactc

SEQ ID NO: 91765 - DNA, 22 bp, synthetic construct
  misc_feature 1..22: note = chemically synthesized
  source 1..22: mol_type = other DNA
tgtcaatgcactcaagtatgca

SEQ ID NO: 91766 - DNA, 22 bp, synthetic construct
  misc_feature 1..22: note = chemically synthesized
  source 1..22: mol_type = other DNA
gtcaatgcactcaagtatgcat

SEQ ID NO: 91767 - DNA, 22 bp, synthetic construct
  misc_feature 1..22: note = chemically synthesized
  source 1..22: mol_type = other DNA
tcaatgcactcaagtatgcatc

SEQ ID NO: 91768 - DNA, 22 bp, synthetic construct
  misc_feature 1..22: note = chemically synthesized
  source 1..22: mol_type = other DNA
aagtatgcatctgtaacagtgt

SEQ ID NO: 91769 - DNA, 22 bp, synthetic construct
  misc_feature 1..22: note = chemically synthesized
  source 1..22: mol_type = other DNA
taacagtgtgtgttcttatgtg

SEQ ID NO: 91770 - DNA, 22 bp, synthetic construct
  misc_feature 1..22: note = chemically synthesized
  source 1..22: mol_type = other DNA
ttatgtgtgcatggaatgtttg

SEQ ID NO: 91771 - DNA, 22 bp, synthetic construct
  misc_feature 1..22: note = chemically synthesized
  source 1..22: mol_type = other DNA
atgtgtgcatggaatgtttgtt

SEQ ID NO: 91772 - DNA, 22 bp, synthetic construct
  misc_feature 1..22: note = chemically synthesized
  source 1..22: mol_type = other DNA
tgtgtgcatggaatgtttgttc

SEQ ID NO: 91773 - DNA, 22 bp, synthetic construct
  misc_feature 1..22: note = chemically synthesized
  source 1..22: mol_type = other DNA
gttcatggagcataagaaattg

SEQ ID NO: 91774 - DNA, 22 bp, synthetic construct
  misc_feature 1..22: note = chemically synthesized
  source 1..22: mol_type = other DNA
ttcatggagcataagaaattgt

SEQ ID NO: 91775 - DNA, 22 bp, synthetic construct
  misc_feature 1..22: note = chemically synthesized
  source 1..22: mol_type = other DNA
atggagcataagaaattgtgta

SEQ ID NO: 91776 - DNA, 22 bp, synthetic construct
  misc_feature 1..22: note = chemically synthesized
  source 1..22: mol_type = other DNA
tgtagacatatagacacatctg

SEQ ID NO: 91777 - DNA, 22 bp, synthetic construct
  misc_feature 1..22: note = chemically synthesized
  source 1..22: mol_type = other DNA
tatgtgtatatcagagaatgtt

SEQ ID NO: 91778 - DNA, 22 bp, synthetic construct
  misc_feature 1..22: note = chemically synthesized
  source 1..22: mol_type = other DNA
acattgctacaagattttatat

SEQ ID NO: 91779 - DNA, 22 bp, synthetic construct
  misc_feature 1..22: note = chemically synthesized
  source 1..22: mol_type = other DNA
cattgctacaagattttatatg

SEQ ID NO: 91780 - DNA, 22 bp, synthetic construct
  misc_feature 1..22: note = chemically synthesized
  source 1..22: mol_type = other DNA
ctacaagattttatatgactac

SEQ ID NO: 91781 - DNA, 22 bp, synthetic construct
  misc_feature 1..22: note = chemically synthesized
  source 1..22: mol_type = other DNA
caagattttatatgactacatg

SEQ ID NO: 91782 - DNA, 22 bp, synthetic construct
  misc_feature 1..22: note = chemically synthesized
  source 1..22: mol_type = other DNA
tatatgactacatgcacaagca

SEQ ID NO: 91783 - DNA, 22 bp, synthetic construct
  misc_feature 1..22: note = chemically synthesized
  source 1..22: mol_type = other DNA
atatgactacatgcacaagcat

SEQ ID NO: 91784 - DNA, 22 bp, synthetic construct
  misc_feature 1..22: note = chemically synthesized
  source 1..22: mol_type = other DNA
tatgactacatgcacaagcatt

SEQ ID NO: 91785 - DNA, 22 bp, synthetic construct
  misc_feature 1..22: note = chemically synthesized
  source 1..22: mol_type = other DNA
catgcacaagcattcatgctac

SEQ ID NO: 91786 - DNA, 22 bp, synthetic construct
  misc_feature 1..22: note = chemically synthesized
  source 1..22: mol_type = other DNA
atgctacatgtcagtttggtat

SEQ ID NO: 91787 - DNA, 22 bp, synthetic construct
  misc_feature 1..22: note = chemically synthesized
  source 1..22: mol_type = other DNA
catgtcagtttggtatattttt

SEQ ID NO: 91788 - DNA, 22 bp, synthetic construct
  misc_feature 1..22: note = chemically synthesized
  source 1..22: mol_type = other DNA
ggtatatttttcctgtaagatg

SEQ ID NO: 91789 - DNA, 22 bp, synthetic construct
  misc_feature 1..22: note = chemically synthesized
  source 1..22: mol_type = other DNA
gtatatttttcctgtaagatgt

SEQ ID NO: 91790 - DNA, 22 bp, synthetic construct
  misc_feature 1..22: note = chemically synthesized
  source 1..22: mol_type = other DNA
ttcctgtaagatgtgtacttat

SEQ ID NO: 91791 - DNA, 22 bp, synthetic construct
  misc_feature 1..22: note = chemically synthesized
  source 1..22: mol_type = other DNA
tcctgtaagatgtgtacttatg

SEQ ID NO: 91792 - DNA, 22 bp, synthetic construct
  misc_feature 1..22: note = chemically synthesized
  source 1..22: mol_type = other DNA
cctgtaagatgtgtacttatgt

SEQ ID NO: 91793 - DNA, 22 bp, synthetic construct
  misc_feature 1..22: note = chemically synthesized
  source 1..22: mol_type = other DNA
ctgtaagatgtgtacttatgtg

SEQ ID NO: 91794 - DNA, 22 bp, synthetic construct
  misc_feature 1..22: note = chemically synthesized
  source 1..22: mol_type = other DNA
taagatgtgtacttatgtgttt

SEQ ID NO: 91795 - DNA, 22 bp, synthetic construct
  misc_feature 1..22: note = chemically synthesized
  source 1..22: mol_type = other DNA
atgtgttttccactaaaggtga

SEQ ID NO: 91796 - DNA, 22 bp, synthetic construct
  misc_feature 1..22: note = chemically synthesized
  source 1..22: mol_type = other DNA
tgtgttttccactaaaggtgaa

SEQ ID NO: 91797 - DNA, 22 bp, synthetic construct
  misc_feature 1..22: note = chemically synthesized
  source 1..22: mol_type = other DNA
tccactaaaggtgaatgtgaaa

SEQ ID NO: 91798 - DNA, 22 bp, synthetic construct
  misc_feature 1..22: note = chemically synthesized
  source 1..22: mol_type = other DNA
ccactaaaggtgaatgtgaaaa

SEQ ID NO: 91799 - DNA, 22 bp, synthetic construct
  misc_feature 1..22: note = chemically synthesized
  source 1..22: mol_type = other DNA
cactaaaggtgaatgtgaaaac

SEQ ID NO: 91800 - DNA, 22 bp, synthetic construct
  misc_feature 1..22: note = chemically synthesized
  source 1..22: mol_type = other DNA
aaggtgaatgtgaaaactcctc

SEQ ID NO: 91801 - DNA, 22 bp, synthetic construct
  misc_feature 1..22: note = chemically synthesized
  source 1..22: mol_type = other DNA
ctcatcgagaaatgaacaataa

SEQ ID NO: 91802 - DNA, 22 bp, synthetic construct
  misc_feature 1..22: note = chemically synthesized
  source 1..22: mol_type = other DNA
atcgagaaatgaacaataagta

SEQ ID NO: 91803 - DNA, 22 bp, synthetic construct
  misc_feature 1..22: note = chemically synthesized
  source 1..22: mol_type = other DNA
aaccctcatctcttcatttaaa

SEQ ID NO: 91804 - DNA, 22 bp, synthetic construct
  misc_feature 1..22: note = chemically synthesized
  source 1..22: mol_type = other DNA
atctcttcatttaaaatacaga

SEQ ID NO: 91805 - DNA, 22 bp, synthetic construct
  misc_feature 1..22: note = chemically synthesized
  source 1..22: mol_type = other DNA
ttcatttaaaatacagagtgac

SEQ ID NO: 91806 - DNA, 22 bp, synthetic construct
  misc_feature 1..22: note = chemically synthesized
  source 1..22: mol_type = other DNA
catttaaaatacagagtgacat

SEQ ID NO: 91807 - DNA, 22 bp, synthetic construct
  misc_feature 1..22: note = chemically synthesized
  source 1..22: mol_type = other DNA
atttaaaatacagagtgacatt

SEQ ID NO: 91808 - DNA, 22 bp, synthetic construct
  misc_feature 1..22: note = chemically synthesized
  source 1..22: mol_type = other DNA
aaaatacagagtgacattcaga

SEQ ID NO: 91809 - DNA, 22 bp, synthetic construct
  misc_feature 1..22: note = chemically synthesized
  source 1..22: mol_type = other DNA
aaatacagagtgacattcagaa

SEQ ID NO: 91810 - DNA, 22 bp, synthetic construct
  misc_feature 1..22: note = chemically synthesized
  source 1..22: mol_type = other DNA
agaagggcaagggatagcacaa

SEQ ID NO: 91811 - DNA, 22 bp, synthetic construct
  misc_feature 1..22: note = chemically synthesized
  source 1..22: mol_type = other DNA
taaagtgtgattgtttggacac

SEQ ID NO: 91812 - DNA, 22 bp, synthetic construct
  misc_feature 1..22: note = chemically synthesized
  source 1..22: mol_type = other DNA
aaagtgtgattgtttggacaca

SEQ ID NO: 91813 - DNA, 22 bp, synthetic construct
  misc_feature 1..22: note = chemically synthesized
  source 1..22: mol_type = other DNA
aagtgtgattgtttggacacag

SEQ ID NO: 91814 - DNA, 22 bp, synthetic construct
  misc_feature 1..22: note = chemically synthesized
  source 1..22: mol_type = other DNA
tttggacacagtaattattcaa

SEQ ID NO: 91815 - DNA, 22 bp, synthetic construct
  misc_feature 1..22: note = chemically synthesized
  source 1..22: mol_type = other DNA
ggacacagtaattattcaaaga

SEQ ID NO: 91816 - DNA, 22 bp, synthetic construct
  misc_feature 1..22: note = chemically synthesized
  source 1..22: mol_type = other DNA
gacacagtaattattcaaagaa

SEQ ID NO: 91817 - DNA, 22 bp, synthetic construct
  misc_feature 1..22: note = chemically synthesized
  source 1..22: mol_type = other DNA
ttcaaagaatgtgcttaattaa

SEQ ID NO: 91818 - DNA, 22 bp, synthetic construct
  misc_feature 1..22: note = chemically synthesized
  source 1..22: mol_type = other DNA
aaagaatgtgcttaattaatgt

SEQ ID NO: 91819 - DNA, 22 bp, synthetic construct
  misc_feature 1..22: note = chemically synthesized
  source 1..22: mol_type = other DNA
aattaatgtatgctacaagaca

SEQ ID NO: 91820 - DNA, 22 bp, synthetic construct
  misc_feature 1..22: note = chemically synthesized
  source 1..22: mol_type = other DNA
attaatgtatgctacaagacag

SEQ ID NO: 91821 - DNA, 22 bp, synthetic construct
  misc_feature 1..22: note = chemically synthesized
  source 1..22: mol_type = other DNA
atgtatgctacaagacagcagt

SEQ ID NO: 91822 - DNA, 22 bp, synthetic construct
  misc_feature 1..22: note = chemically synthesized
  source 1..22: mol_type = other DNA
caagacagcagttgagtgatta

SEQ ID NO: 91823 - DNA, 22 bp, synthetic construct
  misc_feature 1..22: note = chemically synthesized
  source 1..22: mol_type = other DNA
agtgattattgtacatgagcaa

SEQ ID NO: 91824 - DNA, 22 bp, synthetic construct
  misc_feature 1..22: note = chemically synthesized
  source 1..22: mol_type = other DNA
ttgtacatgagcaactggtatt

SEQ ID NO: 91825 - DNA, 22 bp, synthetic construct
  misc_feature 1..22: note = chemically synthesized
  source 1..22: mol_type = other DNA
tacatgagcaactggtatttat

SEQ ID NO: 91826 - DNA, 22 bp, synthetic construct
  misc_feature 1..22: note = chemically synthesized
  source 1..22: mol_type = other DNA
gtatttattctgctttgtgggt

SEQ ID NO: 91827 - DNA, 22 bp, synthetic construct
  misc_feature 1..22: note = chemically synthesized
  source 1..22: mol_type = other DNA
attctgctttgtgggttattag

SEQ ID NO: 91828 - DNA, 22 bp, synthetic construct
  misc_feature 1..22: note = chemically synthesized
  source 1..22: mol_type = other DNA
ttctgctttgtgggttattagt

SEQ ID NO: 91829 - DNA, 22 bp, synthetic construct
  misc_feature 1..22: note = chemically synthesized
  source 1..22: mol_type = other DNA
tgctttgtgggttattagtggg

SEQ ID NO: 91830 - DNA, 22 bp, synthetic construct
  misc_feature 1..22: note = chemically synthesized
  source 1..22: mol_type = other DNA
ctttgtgggttattagtgggga

SEQ ID NO: 91831 - DNA, 22 bp, synthetic construct
  misc_feature 1..22: note = chemically synthesized
  source 1..22: mol_type = other DNA
tgtgggttattagtggggactc

SEQ ID NO: 91832 - DNA, 22 bp, synthetic construct
  misc_feature 1..22: note = chemically synthesized
  source 1..22: mol_type = other DNA
gtgggttattagtggggactca

SEQ ID NO: 91833 - DNA, 22 bp, synthetic construct
  misc_feature 1..22: note = chemically synthesized
  source 1..22: mol_type = other DNA
tgggttattagtggggactcaa

SEQ ID NO: 91834 - DNA, 22 bp, synthetic construct
  misc_feature 1..22: note = chemically synthesized
  source 1..22: mol_type = other DNA
ttagtggggactcaaaaatatg

SEQ ID NO: 91835 - DNA, 22 bp, synthetic construct
  misc_feature 1..22: note = chemically synthesized
  source 1..22: mol_type = other DNA
gtggggactcaaaaatatgaca

SEQ ID NO: 91836 - DNA, 22 bp, synthetic construct
  misc_feature 1..22: note = chemically synthesized
  source 1..22: mol_type = other DNA
aaaaatatgacaaaggaatttc

SEQ ID NO: 91837 - DNA, 22 bp, synthetic construct
  misc_feature 1..22: note = chemically synthesized
  source 1..22: mol_type = other DNA
cagaagctgttagatggtagca

SEQ ID NO: 91838 - DNA, 22 bp, synthetic construct
  misc_feature 1..22: note = chemically synthesized
  source 1..22: mol_type = other DNA
agaagctgttagatggtagcac

SEQ ID NO: 91839 - DNA, 22 bp, synthetic construct
  misc_feature 1..22: note = chemically synthesized
  source 1..22: mol_type = other DNA
ttagatggtagcaccgcctatc

SEQ ID NO: 91840 - DNA, 22 bp, synthetic construct
  misc_feature 1..22: note = chemically synthesized
  source 1..22: mol_type = other DNA
gatggtagcaccgcctatctat

SEQ ID NO: 91841 - DNA, 22 bp, synthetic construct
  misc_feature 1..22: note = chemically synthesized
  source 1..22: mol_type = other DNA
tctatgtgctcccactcaagag

SEQ ID NO: 91842 - DNA, 22 bp, synthetic construct
  misc_feature 1..22: note = chemically synthesized
  source 1..22: mol_type = other DNA
tgtgctcccactcaagagatat

SEQ ID NO: 91843 - DNA, 22 bp, synthetic construct
  misc_feature 1..22: note = chemically synthesized
  source 1..22: mol_type = other DNA
ccactcaagagatatggtgagg

SEQ ID NO: 91844 - DNA, 22 bp, synthetic construct
  misc_feature 1..22: note = chemically synthesized
  source 1..22: mol_type = other DNA
aagagatatggtgaggtgagct

SEQ ID NO: 91845 - DNA, 22 bp, synthetic construct
  misc_feature 1..22: note = chemically synthesized
  source 1..22: mol_type = other DNA
tttggggtggacacatagagga

SEQ ID NO: 91846 - DNA, 22 bp, synthetic construct
  misc_feature 1..22: note = chemically synthesized
  source 1..22: mol_type = other DNA
tggggtggacacatagaggaaa

SEQ ID NO: 91847 - DNA, 22 bp, synthetic construct
  misc_feature 1..22: note = chemically synthesized
  source 1..22: mol_type = other DNA
ggggtggacacatagaggaaat

SEQ ID NO: 91848 - DNA, 22 bp, synthetic construct
  misc_feature 1..22: note = chemically synthesized
  source 1..22: mol_type = other DNA
gggtggacacatagaggaaata

SEQ ID NO: 91849 - DNA, 22 bp, synthetic construct
  misc_feature 1..22: note = chemically synthesized
  source 1..22: mol_type = other DNA
tgagaaagaggttttgggatta

SEQ ID NO: 91850 - DNA, 22 bp, synthetic construct
  misc_feature 1..22: note = chemically synthesized
  source 1..22: mol_type = other DNA
gagaaagaggttttgggattaa

SEQ ID NO: 91851 - DNA, 22 bp, synthetic construct
  misc_feature 1..22: note = chemically synthesized
  source 1..22: mol_type = other DNA
agaaagaggttttgggattaat

SEQ ID NO: 91852 - DNA, 22 bp, synthetic construct
  misc_feature 1..22: note = chemically synthesized
  source 1..22: mol_type = other DNA
tgggattaatgaaactggagaa

SEQ ID NO: 91853 - DNA, 22 bp, synthetic construct
  misc_feature 1..22: note = chemically synthesized
  source 1..22: mol_type = other DNA
gggattaatgaaactggagaag

SEQ ID NO: 91854 - DNA, 22 bp, synthetic construct
  misc_feature 1..22: note = chemically synthesized
  source 1..22: mol_type = other DNA
ggattaatgaaactggagaaga

SEQ ID NO: 91855 - DNA, 22 bp, synthetic construct
  misc_feature 1..22: note = chemically synthesized
  source 1..22: mol_type = other DNA
atgaaactggagaagaaagggt

SEQ ID NO: 91856 - DNA, 22 bp, synthetic construct
  misc_feature 1..22: note = chemically synthesized
  source 1..22: mol_type = other DNA
gagaagaaagggtattatatct

SEQ ID NO: 91857 - DNA, 22 bp, synthetic construct
  misc_feature 1..22: note = chemically synthesized
  source 1..22: mol_type = other DNA
tatcttctaaaacctctttctt

SEQ ID NO: 91858 - DNA, 22 bp, synthetic construct
  misc_feature 1..22: note = chemically synthesized
  source 1..22: mol_type = other DNA
ctaaaacctctttctttgaggt

SEQ ID NO: 91859 - DNA, 22 bp, synthetic construct
  misc_feature 1..22: note = chemically synthesized
  source 1..22: mol_type = other DNA
taaaacctctttctttgaggtt

SEQ ID NO: 91860 - DNA, 22 bp, synthetic construct
  misc_feature 1..22: note = chemically synthesized
  source 1..22: mol_type = other DNA
aaacctctttctttgaggtttt

SEQ ID NO: 91861 - DNA, 22 bp, synthetic construct
  misc_feature 1..22: note = chemically synthesized
  source 1..22: mol_type = other DNA
tttctttgaggttttaggtttg

SEQ ID NO: 91862 - DNA, 22 bp, synthetic construct
  misc_feature 1..22: note = chemically synthesized
  source 1..22: mol_type = other DNA
tctttgaggttttaggtttgag

SEQ ID NO: 91863 - DNA, 22 bp, synthetic construct
  misc_feature 1..22: note = chemically synthesized
  source 1..22: mol_type = other DNA
ctttgaggttttaggtttgagg

SEQ ID NO: 91864 - DNA, 22 bp, synthetic construct
  misc_feature 1..22: note = chemically synthesized
  source 1..22: mol_type = other DNA
tttgaggttttaggtttgaggg

SEQ ID NO: 91865 - DNA, 22 bp, synthetic construct
  misc_feature 1..22: note = chemically synthesized
  source 1..22: mol_type = other DNA
tgaggttttaggtttgagggtg

SEQ ID NO: 91866 - DNA, 22 bp, synthetic construct
  misc_feature 1..22: note = chemically synthesized
  source 1..22: mol_type = other DNA
gaggttttaggtttgagggtgc

SEQ ID NO: 91867 - DNA, 22 bp, synthetic construct
  misc_feature 1..22: note = chemically synthesized
  source 1..22: mol_type = other DNA
aggttttaggtttgagggtgct

SEQ ID NO: 91868 - DNA, 22 bp, synthetic construct
  misc_feature 1..22: note = chemically synthesized
  source 1..22: mol_type = other DNA
taggtttgagggtgctacatac

SEQ ID NO: 91869 - DNA, 22 bp, synthetic construct
  misc_feature 1..22: note = chemically synthesized
  source 1..22: mol_type = other DNA
aggtttgagggtgctacatact

SEQ ID NO: 91870 - DNA, 22 bp, synthetic construct
  misc_feature 1..22: note = chemically synthesized
  source 1..22: mol_type = other DNA
ggtttgagggtgctacatactt

SEQ ID NO: 91871 - DNA, 22 bp, synthetic construct
  misc_feature 1..22: note = chemically synthesized
  source 1..22: mol_type = other DNA
gagggtgctacatacttcctaa

SEQ ID NO: 91872 - DNA, 22 bp, synthetic construct
  misc_feature 1..22: note = chemically synthesized
  source 1..22: mol_type = other DNA
agggtgctacatacttcctaag

SEQ ID NO: 91873 - DNA, 22 bp, synthetic construct
  misc_feature 1..22: note = chemically synthesized
  source 1..22: mol_type = other DNA
catacttcctaagggtcttggg

SEQ ID NO: 91874 - DNA, 22 bp, synthetic construct
  misc_feature 1..22: note = chemically synthesized
  source 1..22: mol_type = other DNA
cctaagggtcttgggtacagga

SEQ ID NO: 91875 - DNA, 22 bp, synthetic construct
  misc_feature 1..22: note = chemically synthesized
  source 1..22: mol_type = other DNA
ctaagggtcttgggtacaggag

SEQ ID NO: 91876 - DNA, 22 bp, synthetic construct
  misc_feature 1..22: note = chemically synthesized
  source 1..22: mol_type = other DNA
agggtcttgggtacaggagttt

SEQ ID NO: 91877 - DNA, 22 bp, synthetic construct
  misc_feature 1..22: note = chemically synthesized
  source 1..22: mol_type = other DNA
gggtacaggagtttgaagtgat

SEQ ID NO: 91878 - DNA, 22 bp, synthetic construct
  misc_feature 1..22: note = chemically synthesized
  source 1..22: mol_type = other DNA
ggtacaggagtttgaagtgatt

SEQ ID NO: 91879 - DNA, 22 bp, synthetic construct
  misc_feature 1..22: note = chemically synthesized
  source 1..22: mol_type = other DNA
gaagtgattgccacagaatggc

SEQ ID NO: 91880 - DNA, 22 bp, synthetic construct
  misc_feature 1..22: note = chemically synthesized
  source 1..22: mol_type = other DNA
aagtgattgccacagaatggct

SEQ ID NO: 91881 - DNA, 22 bp, synthetic construct
  misc_feature 1..22: note = chemically synthesized
  source 1..22: mol_type = other DNA
ccacagaatggctacgttcatt

SEQ ID NO: 91882 - DNA, 22 bp, synthetic construct
  misc_feature 1..22: note = chemically synthesized
  source 1..22: mol_type = other DNA
cgttcattgccagatccaaaca

SEQ ID NO: 91883 - DNA, 22 bp, synthetic construct
  misc_feature 1..22: note = chemically synthesized
  source 1..22: mol_type = other DNA
attgccagatccaaacaggggg

SEQ ID NO: 91884 - DNA, 22 bp, synthetic construct
  misc_feature 1..22: note = chemically synthesized
  source 1..22: mol_type = other DNA
ccagatccaaacagggggcttg

SEQ ID NO: 91885 - DNA, 22 bp, synthetic construct
  misc_feature 1..22: note = chemically synthesized
  source 1..22: mol_type = other DNA
gtaggcatttgctgttctgtca

SEQ ID NO: 91886 - DNA, 22 bp, synthetic construct
  misc_feature 1..22: note = chemically synthesized
  source 1..22: mol_type = other DNA
taggcatttgctgttctgtcaa
